United States Patent Application Publication US 2018/0305689 A1 - sequence listing, part 126

SEQ ID NO: 1847998 - RNA, 19 nt, Artificial Sequence
  Description of Artificial Sequence: Synthetic oligonucleotide
  Antisense strand to SEQ ID NO: 1847997
acauggaggaaagucuggc

SEQ ID NO: 1847999 - RNA, 19 nt, Artificial Sequence
  Description of Artificial Sequence: Synthetic oligonucleotide
  Sense strand starting at position 262 of SEQ ID NO: 1564004
ucacacgauuucugccaga

SEQ ID NO: 1848000 - RNA, 19 nt, Artificial Sequence
  Description of Artificial Sequence: Synthetic oligonucleotide
  Antisense strand to SEQ ID NO: 1847999
ucuggcagaaaucguguga

SEQ ID NO: 1848001 - RNA, 19 nt, Artificial Sequence
  Description of Artificial Sequence: Synthetic oligonucleotide
  Sense strand starting at position 265 of SEQ ID NO: 1564004
cacgauuucugccagaagc

SEQ ID NO: 1848002 - RNA, 19 nt, Artificial Sequence
  Description of Artificial Sequence: Synthetic oligonucleotide
  Antisense strand to SEQ ID NO: 1848001
gcuucuggcagaaaucgug

SEQ ID NO: 1848003 - RNA, 19 nt, Artificial Sequence
  Description of Artificial Sequence: Synthetic oligonucleotide
  Sense strand starting at position 442 of SEQ ID NO: 1564004
gaagaaauccugugaggug

SEQ ID NO: 1848004 - RNA, 19 nt, Artificial Sequence
  Description of Artificial Sequence: Synthetic oligonucleotide
  Antisense strand to SEQ ID NO: 1848003
caccucacaggauuucuuc

SEQ ID NO: 1848005 - RNA, 19 nt, Artificial Sequence
  Description of Artificial Sequence: Synthetic oligonucleotide
  Sense strand starting at position 753 of SEQ ID NO: 1564004
ggcugagaagauugguuua

SEQ ID NO: 1848006 - RNA, 19 nt, Artificial Sequence
  Description of Artificial Sequence: Synthetic oligonucleotide
  Antisense strand to SEQ ID NO: 1848005
uaaaccaaucuucucagcc

SEQ ID NO: 1848007 - RNA, 19 nt, Artificial Sequence
  Description of Artificial Sequence: Synthetic oligonucleotide
  Sense strand starting at position 847 of SEQ ID NO: 1564004
ugcucacuguguuccaaau

SEQ ID NO: 1848008 - RNA, 19 nt, Artificial Sequence
  Description of Artificial Sequence: Synthetic oligonucleotide
  Antisense strand to SEQ ID NO: 1848007
auuuggaacacagugagca

SEQ ID NO: 1848009 - RNA, 19 nt, Artificial Sequence
  Description of Artificial Sequence: Synthetic oligonucleotide
  Sense strand starting at position 880 of SEQ ID NO: 1564004
aaucuaaugcucuggguac

SEQ ID NO: 1848010 - RNA, 19 nt, Artificial Sequence
  Description of Artificial Sequence: Synthetic oligonucleotide
  Antisense strand to SEQ ID NO: 1848009
guacccagagcauuagauu

SEQ ID NO: 1848011 - RNA, 19 nt, Artificial Sequence
  Description of Artificial Sequence: Synthetic oligonucleotide
  Sense strand starting at position 882 of SEQ ID NO: 1564004
ucuaaugcucuggguacua

SEQ ID NO: 1848012 - RNA, 19 nt, Artificial Sequence
  Description of Artificial Sequence: Synthetic oligonucleotide
  Antisense strand to SEQ ID NO: 1848011
uaguacccagagcauuaga

SEQ ID NO: 1848013 - RNA, 19 nt, Artificial Sequence
  Description of Artificial Sequence: Synthetic oligonucleotide
  Sense strand starting at position 884 of SEQ ID NO: 1564004
uaaugcucuggguacuauu

SEQ ID NO: 1848014 - RNA, 19 nt, Artificial Sequence
  Description of Artificial Sequence: Synthetic oligonucleotide
  Antisense strand to SEQ ID NO: 1848013
aauaguacccagagcauua

SEQ ID NO: 1848015 - RNA, 19 nt, Artificial Sequence
  Description of Artificial Sequence: Synthetic oligonucleotide
  Sense strand starting at position 909 of SEQ ID NO: 1564004
cuuucuaauuuauagacga

SEQ ID NO: 1848016 - RNA, 19 nt, Artificial Sequence
  Description of Artificial Sequence: Synthetic oligonucleotide
  Antisense strand to SEQ ID NO: 1848015
ucgucuauaaauuagaaag

SEQ ID NO: 1848017 - RNA, 19 nt, Artificial Sequence
  Description of Artificial Sequence: Synthetic oligonucleotide
  Sense strand starting at position 1162 of SEQ ID NO: 1564004
gaggcaggacuccguuaaa

SEQ ID NO: 1848018 - RNA, 19 nt, Artificial Sequence
  Description of Artificial Sequence: Synthetic oligonucleotide
  Antisense strand to SEQ ID NO: 1848017
uuuaacggaguccugccuc

SEQ ID NO: 1848019 - RNA, 19 nt, Artificial Sequence
  Description of Artificial Sequence: Synthetic oligonucleotide
  Sense strand starting at position 1454 of SEQ ID NO: 1564004
cuucgaugcguccacugau

SEQ ID NO: 1848020 - RNA, 19 nt, Artificial Sequence
  Description of Artificial Sequence: Synthetic oligonucleotide
  Antisense strand to SEQ ID NO: 1848019
aucaguggacgcaucgaag

SEQ ID NO: 1848021 - RNA, 19 nt, Artificial Sequence
  Description of Artificial Sequence: Synthetic oligonucleotide
  Sense strand starting at position 2183 of SEQ ID NO: 1564004
agcuuagaaccgcgggaau

SEQ ID NO: 1848022 - RNA, 19 nt, Artificial Sequence
  Description of Artificial Sequence: Synthetic oligonucleotide
  Antisense strand to SEQ ID NO: 1848021
auucccgcgguucuaagcu

SEQ ID NO: 1848023 - RNA, 19 nt, Artificial Sequence
  Description of Artificial Sequence: Synthetic oligonucleotide
  Sense strand starting at position 2256 of SEQ ID NO: 1564004
agaguuaaauccgaaagac

SEQ ID NO: 1848024 - RNA, 19 nt, Artificial Sequence
  Description of Artificial Sequence: Synthetic oligonucleotide
  Antisense strand to SEQ ID NO: 1848023
gucuuucggauuuaacucu

SEQ ID NO: 1848025 - RNA, 19 nt, Artificial Sequence
  Description of Artificial Sequence: Synthetic oligonucleotide
  Sense strand starting at position 2281 of SEQ ID NO: 1564004
cccaguauguugccagaau

SEQ ID NO: 1848026 - RNA, 19 nt, Artificial Sequence
  Description of Artificial Sequence: Synthetic oligonucleotide
  Antisense strand to SEQ ID NO: 1848025
auucuggcaacauacuggg

SEQ ID NO: 1848027 - RNA, 19 nt, Artificial Sequence
  Description of Artificial Sequence: Synthetic oligonucleotide
  Sense strand starting at position 2289 of SEQ ID NO: 1564004
guugccagaauucggaaua

SEQ ID NO: 1848028 - RNA, 19 nt, Artificial Sequence
  Description of Artificial Sequence: Synthetic oligonucleotide
  Antisense strand to SEQ ID NO: 1848027
uauuccgaauucuggcaac

SEQ ID NO: 1848029 - RNA, 19 nt, Artificial Sequence
  Description of Artificial Sequence: Synthetic oligonucleotide
  Sense strand starting at position 2356 of SEQ ID NO: 1564004
ggagcugccgcguuacaaa

SEQ ID NO: 1848030 - RNA, 19 nt, Artificial Sequence
  Description of Artificial Sequence: Synthetic oligonucleotide
  Antisense strand to SEQ ID NO: 1848029
uuuguaacgcggcagcucc

SEQ ID NO: 1848031 - RNA, 19 nt, Artificial Sequence
  Description of Artificial Sequence: Synthetic oligonucleotide
  Sense strand starting at position 3404 of SEQ ID NO: 1564004
aauuguuccucguuagauc

SEQ ID NO: 1848032 - RNA, 19 nt, Artificial Sequence
  Description of Artificial Sequence: Synthetic oligonucleotide
  Antisense strand to SEQ ID NO: 1848031
gaucuaacgaggaacaauu

SEQ ID NO: 1848033 - RNA, 19 nt, Artificial Sequence
  Description of Artificial Sequence: Synthetic oligonucleotide
  Sense strand starting at position 3405 of SEQ ID NO: 1564004
auuguuccucguuagauca

SEQ ID NO: 1848034 - RNA, 19 nt, Artificial Sequence
  Description of Artificial Sequence: Synthetic oligonucleotide
  Antisense strand to SEQ ID NO: 1848033
ugaucuaacgaggaacaau

SEQ ID NO: 1848035 - RNA, 19 nt, Artificial Sequence
  Description of Artificial Sequence: Synthetic oligonucleotide
  Sense strand starting at position 3415 of SEQ ID NO: 1564004
guuagaucaggucagguuu

SEQ ID NO: 1848036 - RNA, 19 nt, Artificial Sequence
  Description of Artificial Sequence: Synthetic oligonucleotide
  Antisense strand to SEQ ID NO: 1848035
aaaccugaccugaucuaac

SEQ ID NO: 1848037 - RNA, 19 nt, Artificial Sequence
  Description of Artificial Sequence: Synthetic oligonucleotide
  Sense strand starting at position 3502 of SEQ ID NO: 1564004
gauuguggacaguggaaua

SEQ ID NO: 1848038 - RNA, 19 nt, Artificial Sequence
  Description of Artificial Sequence: Synthetic oligonucleotide
  Antisense strand to SEQ ID NO: 1848037
uauuccacuguccacaauc

SEQ ID NO: 1848039 - RNA, 19 nt, Artificial Sequence
  Description of Artificial Sequence: Synthetic oligonucleotide
  Sense strand starting at position 3515 of SEQ ID NO: 1564004
ggaauaaaccucugagcag

SEQ ID NO: 1848040 - RNA, 19 nt, Artificial Sequence
  Description of Artificial Sequence: Synthetic oligonucleotide
  Antisense strand to SEQ ID NO: 1848039
cugcucagagguuuauucc

SEQ ID NO: 1848041 - RNA, 19 nt, Artificial Sequence
  Description of Artificial Sequence: Synthetic oligonucleotide
  Sense strand starting at position 3539 of SEQ ID NO: 1564004
agaauaagacccugccagu

SEQ ID NO: 1848042 - RNA, 19 nt, Artificial Sequence
  Description of Artificial Sequence: Synthetic oligonucleotide
  Antisense strand to SEQ ID NO: 1848041
acuggcagggucuuauucu

SEQ ID NO: 1848043 - RNA, 19 nt, Artificial Sequence
  Description of Artificial Sequence: Synthetic oligonucleotide
  Sense strand starting at position 3554 of SEQ ID NO: 1564004
caguguaaaggcuguguga

SEQ ID NO: 1848044 - RNA, 19 nt, Artificial Sequence
  Description of Artificial Sequence: Synthetic oligonucleotide
  Antisense strand to SEQ ID NO: 1848043
ucacacagccuuuacacug

SEQ ID NO: 1848045 - RNA, 19 nt, Artificial Sequence
  Description of Artificial Sequence: Synthetic oligonucleotide
  Sense strand starting at position 3556 of SEQ ID NO: 1564004
guguaaaggcugugugaga

SEQ ID NO: 1848046 - RNA, 19 nt, Artificial Sequence
  Description of Artificial Sequence: Synthetic oligonucleotide
  Antisense strand to SEQ ID NO: 1848045
ucucacacagccuuuacac

SEQ ID NO: 1848047 - RNA, 19 nt, Artificial Sequence
  Description of Artificial Sequence: Synthetic oligonucleotide
  Sense strand starting at position 3557 of SEQ ID NO: 1564004
uguaaaggcugugugagaa

SEQ ID NO: 1848048 - RNA, 19 nt, Artificial Sequence
  Description of Artificial Sequence: Synthetic oligonucleotide
  Antisense strand to SEQ ID NO: 1848047
uucucacacagccuuuaca

SEQ ID NO: 1848049 - RNA, 19 nt, Artificial Sequence
  Description of Artificial Sequence: Synthetic oligonucleotide
  Sense strand starting at position 3588 of SEQ ID NO: 1564004
agcauugaguugcucagaa

SEQ ID NO: 1848050 - RNA, 19 nt, Artificial Sequence
  Description of Artificial Sequence: Synthetic oligonucleotide
  Antisense strand to SEQ ID NO: 1848049
uucugagcaacucaaugcu

SEQ ID NO: 1848051 - RNA, 19 nt, Artificial Sequence
  Description of Artificial Sequence: Synthetic oligonucleotide
  Sense strand starting at position 3590 of SEQ ID NO: 1564004
cauugaguugcucagaaau

SEQ ID NO: 1848052 - RNA, 19 nt, Artificial Sequence
  Description of Artificial Sequence: Synthetic oligonucleotide
  Antisense strand to SEQ ID NO: 1848051
auuucugagcaacucaaug

SEQ ID NO: 1848053 - RNA, 19 nt, Artificial Sequence
  Description of Artificial Sequence: Synthetic oligonucleotide
  Sense strand starting at position 3811 of SEQ ID NO: 1564004
cugauucuguguucugcaa

SEQ ID NO: 1848054 - RNA, 19 nt, Artificial Sequence
  Description of Artificial Sequence: Synthetic oligonucleotide
  Antisense strand to SEQ ID NO: 1848053
uugcagaacacagaaucag

SEQ ID NO: 1848055 - RNA, 19 nt, Artificial Sequence
  Description of Artificial Sequence: Synthetic oligonucleotide
  Sense strand starting at position 3838 of SEQ ID NO: 1564004
aaguccuggcccuaaaugu

SEQ ID NO: 1848056 - RNA, 19 nt, Artificial Sequence
  Description of Artificial Sequence: Synthetic oligonucleotide
  Antisense strand to SEQ ID NO: 1848055
acauuuagggccaggacuu

SEQ ID NO: 1848057 - RNA, 19 nt, Artificial Sequence
  Description of Artificial Sequence: Synthetic oligonucleotide
  Sense strand starting at position 3867 of SEQ ID NO: 1564004
uuuccugguucugaagaga

SEQ ID NO: 1848058 - RNA, 19 nt, Artificial Sequence
  Description of Artificial Sequence: Synthetic oligonucleotide
  Antisense strand to SEQ ID NO: 1848057
ucucuucagaaccaggaaa

SEQ ID NO: 1848059 - RNA, 19 nt, Artificial Sequence
  Description of Artificial Sequence: Synthetic oligonucleotide
  Sense strand starting at position 3978 of SEQ ID NO: 1564004
gggugacauuuguagacac

SEQ ID NO: 1848060 - RNA, 19 nt, Artificial Sequence
  Description of Artificial Sequence: Synthetic oligonucleotide
  Antisense strand to SEQ ID NO: 1848059
gugucuacaaaugucaccc

SEQ ID NO: 1848061 - RNA, 19 nt, Artificial Sequence
  Description of Artificial Sequence: Synthetic oligonucleotide
  Sense strand starting at position 131 of SEQ ID NO: 1564005
ugcuauaauugaucauuag

SEQ ID NO: 1848062 - RNA, 19 nt, Artificial Sequence
  Description of Artificial Sequence: Synthetic oligonucleotide
  Antisense strand to SEQ ID NO: 1848061
cuaaugaucaauuauagca

SEQ ID NO: 1848063 - RNA, 19 nt, Artificial Sequence
  Description of Artificial Sequence: Synthetic oligonucleotide
  Sense strand starting at position 138 of SEQ ID NO: 1564005
auugaucauuagcuagauu

SEQ ID NO: 1848064 - RNA, 19 nt, Artificial Sequence
  Description of Artificial Sequence: Synthetic oligonucleotide
  Antisense strand to SEQ ID NO: 1848063
aaucuagcuaaugaucaau

SEQ ID NO: 1848065 - RNA, 19 nt, Artificial Sequence
  Description of Artificial Sequence: Synthetic oligonucleotide
  Sense strand starting at position 225 of SEQ ID NO: 1564005
gcccaauccugugucauuu

SEQ ID NO: 1848066 - RNA, 19 nt, Artificial Sequence
  Description of Artificial Sequence: Synthetic oligonucleotide
  Antisense strand to SEQ ID NO: 1848065
aaaugacacaggauugggc

SEQ ID NO: 1848067 - RNA, 19 nt, Artificial Sequence
  Description of Artificial Sequence: Synthetic oligonucleotide
  Sense strand starting at position 389 of SEQ ID NO: 1564005
ucaauuuggucagauuaaa

SEQ ID NO: 1848068 - RNA, 19 nt, Artificial Sequence
  Description of Artificial Sequence: Synthetic oligonucleotide
  Antisense strand to SEQ ID NO: 1848067
uuuaaucugaccaaauuga

SEQ ID NO: 1848069 - RNA, 19 nt, Artificial Sequence
  Description of Artificial Sequence: Synthetic oligonucleotide
  Sense strand starting at position 667 of SEQ ID NO: 1564005
cugaauaauuuaugggaaa

SEQ ID NO: 1848070 - RNA, 19 nt, Artificial Sequence
  Description of Artificial Sequence: Synthetic oligonucleotide
  Antisense strand to SEQ ID NO: 1848069
uuucccauaaauuauucag

SEQ ID NO: 1848071 - RNA, 19 nt, Artificial Sequence
  Description of Artificial Sequence: Synthetic oligonucleotide
  Sense strand starting at position 767 of SEQ ID NO: 1564005
auauguuugagugaagcca

SEQ ID NO: 1848072 - RNA, 19 nt, Artificial Sequence
  Description of Artificial Sequence: Synthetic oligonucleotide
  Antisense strand to SEQ ID NO: 1848071
uggcuucacucaaacauau

SEQ ID NO: 1848073 - RNA, 19 nt, Artificial Sequence
  Description of Artificial Sequence: Synthetic oligonucleotide
  Sense strand starting at position 891 of SEQ ID NO: 1564005
gcaagaucagacuaguuac

SEQ ID NO: 1848074 - RNA, 19 nt, Artificial Sequence
  Description of Artificial Sequence: Synthetic oligonucleotide
  Antisense strand to SEQ ID NO: 1848073
guaacuagucugaucuugc

SEQ ID NO: 1848075 - RNA, 19 nt, Artificial Sequence
  Description of Artificial Sequence: Synthetic oligonucleotide
  Sense strand starting at position 894 of SEQ ID NO: 1564005
agaucagacuaguuaccau

SEQ ID NO: 1848076 - RNA, 19 nt, Artificial Sequence
  Description of Artificial Sequence: Synthetic oligonucleotide
  Antisense strand to SEQ ID NO: 1848075
augguaacuagucugaucu

SEQ ID NO: 1848077 - RNA, 19 nt, Artificial Sequence
  Description of Artificial Sequence: Synthetic oligonucleotide
  Sense strand starting at position 1013 of SEQ ID NO: 1564005
augccucuugcaguguuau

SEQ ID NO: 1848078 - RNA, 19 nt, Artificial Sequence
  Description of Artificial Sequence: Synthetic oligonucleotide
  Antisense strand to SEQ ID NO: 1848077
auaacacugcaagaggcau

SEQ ID NO: 1848079 - RNA, 19 nt, Artificial Sequence
  Description of Artificial Sequence: Synthetic oligonucleotide
  Sense strand starting at position 1227 of SEQ ID NO: 1564005
auaugacaaccaugugaug

SEQ ID NO: 1848080 - RNA, 19 nt, Artificial Sequence
  Description of Artificial Sequence: Synthetic oligonucleotide
  Antisense strand to SEQ ID NO: 1848079
caucacaugguugucauau

SEQ ID NO: 1848081 - RNA, 19 nt, Artificial Sequence
  Description of Artificial Sequence: Synthetic oligonucleotide
  Sense strand starting at position 1255 of SEQ ID NO: 1564005
aauguaugugagcaccaga

SEQ ID NO: 1848082 - RNA, 19 nt, Artificial Sequence
  Description of Artificial Sequence: Synthetic oligonucleotide
  Antisense strand to SEQ ID NO: 1848081
ucuggugcucacauacauu

SEQ ID NO: 1848083 - RNA, 19 nt, Artificial Sequence
  Description of Artificial Sequence: Synthetic oligonucleotide
  Sense strand starting at position 1258 of SEQ ID NO: 1564005
guaugugagcaccagaaau

SEQ ID NO: 1848084 - RNA, 19 nt, Artificial Sequence
  Description of Artificial Sequence: Synthetic oligonucleotide
  Antisense strand to SEQ ID NO: 1848083
auuucuggugcucacauac

SEQ ID NO: 1848085 - RNA, 19 nt, Artificial Sequence
  Description of Artificial Sequence: Synthetic oligonucleotide
  Sense strand starting at position 1320 of SEQ ID NO: 1564005
accagugauguuuauuauu

SEQ ID NO: 1848086 - RNA, 19 nt, Artificial Sequence
  Description of Artificial Sequence: Synthetic oligonucleotide
  Antisense strand to SEQ ID NO: 1848085
aauaauaaacaucacuggu

SEQ ID NO: 1848087 - RNA, 19 nt, Artificial Sequence
  Description of Artificial Sequence: Synthetic oligonucleotide
  Sense strand starting at position 1358 of SEQ ID NO: 1564005
agacaacuguuugauuuaa

SEQ ID NO: 1848088 - RNA, 19 nt, Artificial Sequence
  Description of Artificial Sequence: Synthetic oligonucleotide
  Antisense strand to SEQ ID NO: 1848087
uuaaaucaaacaguugucu

SEQ ID NO: 1848089 - RNA, 19 nt, Artificial Sequence
  Description of Artificial Sequence: Synthetic oligonucleotide
  Sense strand starting at position 1400 of SEQ ID NO: 1564005
caaucuaaucgugacaugu

SEQ ID NO: 1848090 - RNA, 19 nt, Artificial Sequence
  Description of Artificial Sequence: Synthetic oligonucleotide
  Antisense strand to SEQ ID NO: 1848089
acaugucacgauuagauug

SEQ ID NO: 1848091 - RNA, 19 nt, Artificial Sequence
  Description of Artificial Sequence: Synthetic oligonucleotide
  Sense strand starting at position 1562 of SEQ ID NO: 1564005
uaaauacggcuguauaauu

SEQ ID NO: 1848092 - RNA, 19 nt, Artificial Sequence
  Description of Artificial Sequence: Synthetic oligonucleotide
  Antisense strand to SEQ ID NO: 1848091
aauuauacagccguauuua

SEQ ID NO: 1848093 - RNA, 19 nt, Artificial Sequence
  Description of Artificial Sequence: Synthetic oligonucleotide
  Sense strand starting at position 2249 of SEQ ID NO: 1564005
gaguuugaacaguagccaa

SEQ ID NO: 1848094 - RNA, 19 nt, Artificial Sequence
  Description of Artificial Sequence: Synthetic oligonucleotide
  Antisense strand to SEQ ID NO: 1848093
uuggcuacuguucaaacuc

SEQ ID NO: 1848095 - RNA, 19 nt, Artificial Sequence
  Description of Artificial Sequence: Synthetic oligonucleotide
  Sense strand starting at position 2325 of SEQ ID NO: 1564005
guccauagucaagaacauu

SEQ ID NO: 1848096 - RNA, 19 nt, Artificial Sequence
  Description of Artificial Sequence: Synthetic oligonucleotide
  Antisense strand to SEQ ID NO: 1848095
aauguucuugacuauggac

SEQ ID NO: 1848097 - RNA, 19 nt, Artificial Sequence
  Description of Artificial Sequence: Synthetic oligonucleotide
  Sense strand starting at position 2560 of SEQ ID NO: 1564005
cgaaauaucucaguuagaa

SEQ ID NO: 1848098 - RNA, 19 nt, Artificial Sequence
  Description of Artificial Sequence: Synthetic oligonucleotide
  Antisense strand to SEQ ID NO: 1848097
uucuaacugagauauuucg

SEQ ID NO: 1848099 - RNA, 19 nt, Artificial Sequence
  Description of Artificial Sequence: Synthetic oligonucleotide
  Sense strand starting at position 2589 of SEQ ID NO: 1564005
aacugagagcuguaguaaa

SEQ ID NO: 1848100 - RNA, 19 nt, Artificial Sequence
  Description of Artificial Sequence: Synthetic oligonucleotide
  Antisense strand to SEQ ID NO: 1848099
uuuacuacagcucucaguu

SEQ ID NO: 1848101 - RNA, 19 nt, Artificial Sequence
  Description of Artificial Sequence: Synthetic oligonucleotide
  Sense strand starting at position 2650 of SEQ ID NO: 1564005
uuauuaacugugcaaauug

SEQ ID NO: 1848102 - RNA, 19 nt, Artificial Sequence
  Description of Artificial Sequence: Synthetic oligonucleotide
  Antisense strand to SEQ ID NO: 1848101
caauuugcacaguuaauaa

SEQ ID NO: 1848103 - RNA, 19 nt, Artificial Sequence
  Description of Artificial Sequence: Synthetic oligonucleotide
  Sense strand starting at position 2814 of SEQ ID NO: 1564005
guaaguacuagauacguga

SEQ ID NO: 1848104 - RNA, 19 nt, Artificial Sequence
  Description of Artificial Sequence: Synthetic oligonucleotide
  Antisense strand to SEQ ID NO: 1848103
ucacguaucuaguacuuac

SEQ ID NO: 1848105 - RNA, 19 nt, Artificial Sequence
  Description of Artificial Sequence: Synthetic oligonucleotide
  Sense strand starting at position 2817 of SEQ ID NO: 1564005
aguacuagauacgugauaa

SEQ ID NO: 1848106 - RNA, 19 nt, Artificial Sequence
  Description of Artificial Sequence: Synthetic oligonucleotide
  Antisense strand to SEQ ID NO: 1848105
uuaucacguaucuaguacu

SEQ ID NO: 1848107 - RNA, 19 nt, Artificial Sequence
  Description of Artificial Sequence: Synthetic oligonucleotide
  Sense strand starting at position 2859 of SEQ ID NO: 1564005
cuuuaacuggucuagcaau

SEQ ID NO: 1848108 - RNA, 19 nt, Artificial Sequence
  Description of Artificial Sequence: Synthetic oligonucleotide
  Antisense strand to SEQ ID NO: 1848107
auugcuagaccaguuaaag

SEQ ID NO: 1848109 - RNA, 19 nt, Artificial Sequence
  Description of Artificial Sequence: Synthetic oligonucleotide
  Sense strand starting at position 2936 of SEQ ID NO: 1564005
agaacaaucaguuggagca

SEQ ID NO: 1848110 - RNA, 19 nt, Artificial Sequence
  Description of Artificial Sequence: Synthetic oligonucleotide
  Antisense strand to SEQ ID NO: 1848109
ugcuccaacugauuguucu

SEQ ID NO: 1848111 - RNA, 19 nt, Artificial Sequence
  Description of Artificial Sequence: Synthetic oligonucleotide
  Sense strand starting at position 2973 of SEQ ID NO: 1564005
gccguuucugugcugacau

SEQ ID NO: 1848112 - RNA, 19 nt, Artificial Sequence
  Description of Artificial Sequence: Synthetic oligonucleotide
  Antisense strand to SEQ ID NO: 1848111
augucagcacagaaacggc

SEQ ID NO: 1848113 - RNA, 19 nt, Artificial Sequence
  Description of Artificial Sequence: Synthetic oligonucleotide
  Sense strand starting at position 3041 of SEQ ID NO: 1564005
gucuuaggagucugacaga

SEQ ID NO: 1848114 - RNA, 19 nt, Artificial Sequence
  Description of Artificial Sequence: Synthetic oligonucleotide
  Antisense strand to SEQ ID NO: 1848113
ucugucagacuccuaagac

SEQ ID NO: 1848115 - RNA, 19 nt, Artificial Sequence
  Description of Artificial Sequence: Synthetic oligonucleotide
  Sense strand starting at position 3052 of SEQ ID NO: 1564005
cugacagaccuguaagucu

SEQ ID NO: 1848116 - RNA, 19 nt, Artificial Sequence
  Description of Artificial Sequence: Synthetic oligonucleotide
  Antisense strand to SEQ ID NO: 1848115
agacuuacaggucugucag

SEQ ID NO: 1848117 - RNA, 19 nt, Artificial Sequence
  Description of Artificial Sequence: Synthetic oligonucleotide
  Sense strand starting at position 3069 of SEQ ID NO: 1564005
cugugugacccugaacaaa

SEQ ID NO: 1848118 - RNA, 19 nt, Artificial Sequence
  Description of Artificial Sequence: Synthetic oligonucleotide
  Antisense strand to SEQ ID NO: 1848117
uuuguucagggucacacag

SEQ ID NO: 1848119 - RNA, 19 nt, Artificial Sequence
  Description of Artificial Sequence: Synthetic oligonucleotide
  Sense strand starting at position 3219 of SEQ ID NO: 1564005
caguaaguggcagauauua

SEQ ID NO: 1848120 - RNA, 19 nt, Artificial Sequence
  Description of Artificial Sequence: Synthetic oligonucleotide
  Antisense strand to SEQ ID NO: 1848119
uaauaucugccacuuacug

SEQ ID NO: 1848121 - RNA, 19 nt, Artificial Sequence
  Description of Artificial Sequence: Synthetic oligonucleotide
  Sense strand starting at position 3221 of SEQ ID NO: 1564005
guaaguggcagauauuauu

SEQ ID NO: 1848122 - RNA, 19 nt, Artificial Sequence
  Description of Artificial Sequence: Synthetic oligonucleotide
  Antisense strand to SEQ ID NO: 1848121
aauaauaucugccacuuac

SEQ ID NO: 1848123 - RNA, 19 nt, Artificial Sequence
  Description of Artificial Sequence: Synthetic oligonucleotide
  Sense strand starting at position 3243 of SEQ ID NO: 1564005
uugugucugggauaaagca

SEQ ID NO: 1848124 - RNA, 19 nt, Artificial Sequence
  Description of Artificial Sequence: Synthetic oligonucleotide
  Antisense strand to SEQ ID NO: 1848123
ugcuuuaucccagacacaa

SEQ ID NO: 1848125 - RNA, 19 nt, Artificial Sequence
  Description of Artificial Sequence: Synthetic oligonucleotide
  Sense strand starting at position 3250 of SEQ ID NO: 1564005
ugggauaaagcaugcauaa

SEQ ID NO: 1848126 - RNA, 19 nt, Artificial Sequence
  Description of Artificial Sequence: Synthetic oligonucleotide
  Antisense strand to SEQ ID NO: 1848125
uuaugcaugcuuuauccca

SEQ ID NO: 1848127 - RNA, 19 nt, Artificial Sequence
  Description of Artificial Sequence: Synthetic oligonucleotide
  Sense strand starting at position 3610 of SEQ ID NO: 1564005
gcaggagucauaggacaug

SEQ ID NO: 1848128 - RNA, 19 nt, Artificial Sequence
  Description of Artificial Sequence: Synthetic oligonucleotide
  Antisense strand to SEQ ID NO: 1848127
cauguccuaugacuccugc

SEQ ID NO: 1848129 - RNA, 19 nt, Artificial Sequence
  Description of Artificial Sequence: Synthetic oligonucleotide
  Sense strand starting at position 3613 of SEQ ID NO: 1564005
ggagucauaggacauguuu

SEQ ID NO: 1848130 - RNA, 19 nt, Artificial Sequence
  Description of Artificial Sequence: Synthetic oligonucleotide
  Antisense strand to SEQ ID NO: 1848129
aaacauguccuaugacucc

SEQ ID NO: 1848131 - RNA, 19 nt, Artificial Sequence
  Description of Artificial Sequence: Synthetic oligonucleotide
  Sense strand starting at position 3655 of SEQ ID NO: 1564005
ucacuaugugaaugaaaug

SEQ ID NO: 1848132 - RNA, 19 nt, Artificial Sequence
  Description of Artificial Sequence: Synthetic oligonucleotide
  Antisense strand to SEQ ID NO: 1848131
cauuucauucacauaguga

SEQ ID NO: 1848133 - RNA, 19 nt, Artificial Sequence
  Description of Artificial Sequence: Synthetic oligonucleotide
  Sense strand starting at position 3741 of SEQ ID NO: 1564005
uggccugucagggaauagu

SEQ ID NO: 1848134 - RNA, 19 nt, Artificial Sequence
  Description of Artificial Sequence: Synthetic oligonucleotide
  Antisense strand to SEQ ID NO: 1848133
acuauucccugacaggcca

SEQ ID NO: 1848135 - RNA, 19 nt, Artificial Sequence
  Description of Artificial Sequence: Synthetic oligonucleotide
  Sense strand starting at position 3749 of SEQ ID NO: 1564005
cagggaauaguagguaacu

SEQ ID NO: 1848136 - RNA, 19 nt, Artificial Sequence
  Description of Artificial Sequence: Synthetic oligonucleotide
  Antisense strand to SEQ ID NO: 1848135
aguuaccuacuauucccug

SEQ ID NO: 1848137 - RNA, 19 nt, Artificial Sequence
  Description of Artificial Sequence: Synthetic oligonucleotide
  Sense strand starting at position 3859 of SEQ ID NO: 1564005
aagacaguaucaguuuaga

SEQ ID NO: 1848138 - RNA, 19 nt, Artificial Sequence
  Description of Artificial Sequence: Synthetic oligonucleotide
  Antisense strand to SEQ ID NO: 1848137
ucuaaacugauacugucuu

SEQ ID NO: 1848139 - RNA, 19 nt, Artificial Sequence
  Description of Artificial Sequence: Synthetic oligonucleotide
  Sense strand starting at position 3862 of SEQ ID NO: 1564005
acaguaucaguuuagacca

SEQ ID NO: 1848140 - RNA, 19 nt, Artificial Sequence
  Description of Artificial Sequence: Synthetic oligonucleotide
  Antisense strand to SEQ ID NO: 1848139
uggucuaaacugauacugu

SEQ ID NO: 1848141 - RNA, 19 nt, Artificial Sequence
  Description of Artificial Sequence: Synthetic oligonucleotide
  Sense strand starting at position 80 of SEQ ID NO: 1564006
acgucaugugaccaucaga

SEQ ID NO: 1848142 - RNA, 19 nt, Artificial Sequence
  Description of Artificial Sequence: Synthetic oligonucleotide
  Antisense strand to SEQ ID NO: 1848141
ucugauggucacaugacgu

SEQ ID NO: 1848143 - RNA, 19 nt, Artificial Sequence
  Description of Artificial Sequence: Synthetic oligonucleotide
  Sense strand starting at position 166 of SEQ ID NO: 1564006
acugcaucucgaggaucaa

SEQ ID NO: 1848144 - RNA, 19 nt, Artificial Sequence
  Description of Artificial Sequence: Synthetic oligonucleotide
  Antisense strand to SEQ ID NO: 1848143
uugauccucgagaugcagu

SEQ ID NO: 1848145 - RNA, 19 nt, Artificial Sequence
  Description of Artificial Sequence: Synthetic oligonucleotide
  Sense strand starting at position 881 of SEQ ID NO: 1564006
guccuacuagcccagagau

SEQ ID NO: 1848146 - RNA, 19 nt, Artificial Sequence
  Description of Artificial Sequence: Synthetic oligonucleotide
  Antisense strand to SEQ ID NO: 1848145
aucucugggcuaguaggac

SEQ ID NO: 1848147 - RNA, 19 nt, Artificial Sequence
  Description of Artificial Sequence: Synthetic oligonucleotide
  Sense strand starting at position 883 of SEQ ID NO: 1564006
ccuacuagcccagagaugu

SEQ ID NO: 1848148 - RNA, 19 nt, Artificial Sequence
  Description of Artificial Sequence: Synthetic oligonucleotide
  Antisense strand to SEQ ID NO: 1848147
acaucucugggcuaguagg

SEQ ID NO: 1848149 - RNA, 19 nt, Artificial Sequence
  Description of Artificial Sequence: Synthetic oligonucleotide
  Sense strand starting at position 893 of SEQ ID NO: 1564006
cagagauguucuccuacug

SEQ ID NO: 1848150 - RNA, 19 nt, Artificial Sequence
  Description of Artificial Sequence: Synthetic oligonucleotide
  Antisense strand to SEQ ID NO: 1848149
caguaggagaacaucucug

SEQ ID NO: 1848151 - RNA, 19 nt, Artificial Sequence
  Description of Artificial Sequence: Synthetic oligonucleotide
  Sense strand starting at position 925 of SEQ ID NO: 1564006
ugcuuacucauagggagac

SEQ ID NO: 1848152 - RNA, 19 nt, Artificial Sequence
  Description of Artificial Sequence: Synthetic oligonucleotide
  Antisense strand to SEQ ID NO: 1848151
gucucccuaugaguaagca

SEQ ID NO: 1848153 - RNA, 19 nt, Artificial Sequence
  Description of Artificial Sequence: Synthetic oligonucleotide
  Sense strand starting at position 1194 of SEQ ID NO: 1564006
gaaguugugcgcucccuuu

SEQ ID NO: 1848154 - RNA, 19 nt, Artificial Sequence
  Description of Artificial Sequence: Synthetic oligonucleotide
  Antisense strand to SEQ ID NO: 1848153
aaagggagcgcacaacuuc

SEQ ID NO: 1848155 - RNA, 19 nt, Artificial Sequence
  Description of Artificial Sequence: Synthetic oligonucleotide
  Sense strand starting at position 1317 of SEQ ID NO: 1564006
cacuuaauacagugaagug

SEQ ID NO: 1848156 - RNA, 19 nt, Artificial Sequence
  Description of Artificial Sequence: Synthetic oligonucleotide
  Antisense strand to SEQ ID NO: 1848155
cacuucacuguauuaagug

SEQ ID NO: 1848157 - RNA, 19 nt, Artificial Sequence
  Description of Artificial Sequence: Synthetic oligonucleotide
  Sense strand starting at position 2061 of SEQ ID NO: 1564006
ggguacaguuucucccaga

SEQ ID NO: 1848158 - RNA, 19 nt, Artificial Sequence
  Description of Artificial Sequence: Synthetic oligonucleotide
  Antisense strand to SEQ ID NO: 1848157
ucugggagaaacuguaccc

SEQ ID NO: 1848159 - RNA, 19 nt, Artificial Sequence
  Description of Artificial Sequence: Synthetic oligonucleotide
  Sense strand starting at position 2062 of SEQ ID NO: 1564006
gguacaguuucucccagaa

SEQ ID NO: 1848160 - RNA, 19 nt, Artificial Sequence
  Description of Artificial Sequence: Synthetic oligonucleotide
  Antisense strand to SEQ ID NO: 1848159
uucugggagaaacuguacc

SEQ ID NO: 1848161 - RNA, 19 nt, Artificial Sequence
  Description of Artificial Sequence: Synthetic oligonucleotide
  Sense strand starting at position 2066 of SEQ ID NO: 1564006
caguuucucccagaaucgu

SEQ ID NO: 1848162 - RNA, 19 nt, Artificial Sequence
  Description of Artificial Sequence: Synthetic oligonucleotide
  Antisense strand to SEQ ID NO: 1848161
acgauucugggagaaacug

SEQ ID NO: 1848163 - RNA, 19 nt, Artificial Sequence
  Description of Artificial Sequence: Synthetic oligonucleotide
  Sense strand starting at position 2251 of SEQ ID NO: 1564006
aguaaauuguuagcccaca

SEQ ID NO: 1848164 - RNA, 19 nt, Artificial Sequence
  Description of Artificial Sequence: Synthetic oligonucleotide
  Antisense strand to SEQ ID NO: 1848163
ugugggcuaacaauuuacu

SEQ ID NO: 1848165 - RNA, 19 nt, Artificial Sequence
  Description of Artificial Sequence: Synthetic oligonucleotide
  Sense strand starting at position 2252 of SEQ ID NO: 1564006
guaaauuguuagcccacau

SEQ ID NO: 1848166 - RNA, 19 nt, Artificial Sequence
  Description of Artificial Sequence: Synthetic oligonucleotide
  Antisense strand to SEQ ID NO: 1848165
augugggcuaacaauuuac

SEQ ID NO: 1848167 - RNA, 19 nt, Artificial Sequence
  Description of Artificial Sequence: Synthetic oligonucleotide
  Sense strand starting at position 2483 of SEQ ID NO: 1564006
cauuaauacacguggaggu

SEQ ID NO: 1848168 - RNA, 19 nt, Artificial Sequence
  Description of Artificial Sequence: Synthetic oligonucleotide
  Antisense strand to SEQ ID NO: 1848167
accuccacguguauuaaug

SEQ ID NO: 1848169 - RNA, 19 nt, Artificial Sequence
  Description of Artificial Sequence: Synthetic oligonucleotide
  Sense strand starting at position 2496 of SEQ ID NO: 1564006
ggagguuaucugcauucca

SEQ ID NO: 1848170 - RNA, 19 nt, Artificial Sequence
  Description of Artificial Sequence: Synthetic oligonucleotide
  Antisense strand to SEQ ID NO: 1848169
uggaaugcagauaaccucc

SEQ ID NO: 1848171 - RNA, 19 nt, Artificial Sequence
  Description of Artificial Sequence: Synthetic oligonucleotide
  Sense strand starting at position 2600 of SEQ ID NO: 1564006
gugggauagcuguagaaga

SEQ ID NO: 1848172 - RNA, 19 nt, Artificial Sequence
  Description of Artificial Sequence: Synthetic oligonucleotide
  Antisense strand to SEQ ID NO: 1848171
ucuucuacagcuaucccac

SEQ ID NO: 1848173 - RNA, 19 nt, Artificial Sequence
  Description of Artificial Sequence: Synthetic oligonucleotide
  Sense strand starting at position 2662 of SEQ ID NO: 1564006
gaggaaaugugugcuugga

SEQ ID NO: 1848174 - RNA, 19 nt, Artificial Sequence
  Description of Artificial Sequence: Synthetic oligonucleotide
  Antisense strand to SEQ ID NO: 1848173
uccaagcacacauuuccuc

SEQ ID NO: 1848175 - RNA, 19 nt, Artificial Sequence
  Description of Artificial Sequence: Synthetic oligonucleotide
  Sense strand starting at position 2664 of SEQ ID NO: 1564006
ggaaaugugugcuuggaaa

SEQ ID NO: 1848176 - RNA, 19 nt, Artificial Sequence
  Description of Artificial Sequence: Synthetic oligonucleotide
  Antisense strand to SEQ ID NO: 1848175
uuuccaagcacacauuucc

SEQ ID NO: 1848177 - RNA, 19 nt, Artificial Sequence
  Description of Artificial Sequence: Synthetic oligonucleotide
  Sense strand starting at position 2666 of SEQ ID NO: 1564006
aaaugugugcuuggaaagu

SEQ ID NO: 1848178 - RNA, 19 nt, Artificial Sequence
  Description of Artificial Sequence: Synthetic oligonucleotide
  Antisense strand to SEQ ID NO: 1848177
acuuuccaagcacacauuu

SEQ ID NO: 1848179 - RNA, 19 nt, Artificial Sequence
  Description of Artificial Sequence: Synthetic oligonucleotide
  Sense strand starting at position 2676 of SEQ ID NO: 1564006
uuggaaaguucugucaaca

SEQ ID NO: 1848180 - RNA, 19 nt, Artificial Sequence
  Description of Artificial Sequence: Synthetic oligonucleotide
  Antisense strand to SEQ ID NO: 1848179
uguugacagaacuuuccaa

SEQ ID NO: 1848181 - RNA, 19 nt, Artificial Sequence
  Description of Artificial Sequence: Synthetic oligonucleotide
  Sense strand starting at position 2803 of SEQ ID NO: 1564006
ugaauuuccuuagagaaau

SEQ ID NO: 1848182 - RNA, 19 nt, Artificial Sequence
  Description of Artificial Sequence: Synthetic oligonucleotide
  Antisense strand to SEQ ID NO: 1848181
auuucucuaaggaaauuca

SEQ ID NO: 1848183 - RNA, 19 nt, Artificial Sequence
  Description of Artificial Sequence: Synthetic oligonucleotide
  Sense strand starting at position 2813 of SEQ ID NO: 1564006
uagagaaauuaauccguag

SEQ ID NO: 1848184 - RNA, 19 nt, Artificial Sequence
  Description of Artificial Sequence: Synthetic oligonucleotide
  Antisense strand to SEQ ID NO: 1848183
cuacggauuaauuucucua

SEQ ID NO: 1848185 - RNA, 19 nt, Artificial Sequence
  Description of Artificial Sequence: Synthetic oligonucleotide
  Sense strand starting at position 2817 of SEQ ID NO: 1564006
gaaauuaauccguagugag

SEQ ID NO: 1848186 - RNA, 19 nt, Artificial Sequence
  Description of Artificial Sequence: Synthetic oligonucleotide
  Antisense strand to SEQ ID NO: 1848185
cucacuacggauuaauuuc

SEQ ID NO: 1848187 - RNA, 19 nt, Artificial Sequence
  Description of Artificial Sequence: Synthetic oligonucleotide
  Sense strand starting at position 2901 of SEQ ID NO: 1564006
gaggacuuggcacgaggaa

SEQ ID NO: 1848188 - RNA, 19 nt, Artificial Sequence
  Description of Artificial Sequence: Synthetic oligonucleotide
  Antisense strand to SEQ ID NO: 1848187
uuccucgugccaaguccuc

SEQ ID NO: 1848189 - RNA, 19 nt, Artificial Sequence
  Description of Artificial Sequence: Synthetic oligonucleotide
  Sense strand starting at position 3024 of SEQ ID NO: 1564006
uugaauuucuguuauggga

SEQ ID NO: 1848190 - RNA, 19 nt, Artificial Sequence
  Description of Artificial Sequence: Synthetic oligonucleotide
  Antisense strand to SEQ ID NO: 1848189
ucccauaacagaaauucaa

SEQ ID NO: 1848191 - RNA, 19 nt, Artificial Sequence
  Description of Artificial Sequence: Synthetic oligonucleotide
  Sense strand starting at position 3026 of SEQ ID NO: 1564006
gaauuucuguuaugggaga

SEQ ID NO: 1848192 - RNA, 19 nt, Artificial Sequence
  Description of Artificial Sequence: Synthetic oligonucleotide
  Antisense strand to SEQ ID NO: 1848191
ucucccauaacagaaauuc

SEQ ID NO: 1848193 - RNA, 19 nt, Artificial Sequence
  Description of Artificial Sequence: Synthetic oligonucleotide
  Sense strand starting at position 3027 of SEQ ID NO: 1564006
aauuucuguuaugggagau

SEQ ID NO: 1848194 - RNA, 19 nt, Artificial Sequence
  Description of Artificial Sequence: Synthetic oligonucleotide
  Antisense strand to SEQ ID NO: 1848193
aucucccauaacagaaauu

SEQ ID NO: 1848195 - RNA, 19 nt, Artificial Sequence
  Description of Artificial Sequence: Synthetic oligonucleotide
  Sense strand starting at position 3173 of SEQ ID NO: 1564006
ucaguaauuggccaaaggu

SEQ ID NO: 1848196 - RNA, 19 nt, Artificial Sequence
  Description of Artificial Sequence: Synthetic oligonucleotide
  Antisense strand to SEQ ID NO: 1848195
accuuuggccaauuacuga

SEQ ID NO: 1848197 - RNA, 19 nt, Artificial Sequence
  Description of Artificial Sequence: Synthetic oligonucleotide
  Sense strand starting at position 3447 of SEQ ID NO: 1564006
uuaagaauccuacguauau

SEQ ID NO: 1848198 - RNA, 19 nt, Artificial Sequence
  Description of Artificial Sequence: Synthetic oligonucleotide
  Antisense strand to SEQ ID NO: 1848197
auauacguaggauucuuaa

SEQ ID NO: 1848199 - RNA, 19 nt, Artificial Sequence
  Description of Artificial Sequence: Synthetic oligonucleotide
  Sense strand starting at position 3448 of SEQ ID NO: 1564006
uaagaauccuacguauaug

SEQ ID NO: 1848200 - RNA, 19 nt, Artificial Sequence
  Description of Artificial Sequence: Synthetic oligonucleotide
  Antisense strand to SEQ ID NO: 1848199
cauauacguaggauucuua

SEQ ID NO: 1848201 - RNA, 19 nt, Artificial Sequence
  Description of Artificial Sequence: Synthetic oligonucleotide
  Sense strand starting at position 3451 of SEQ ID NO: 1564006
gaauccuacguauaugcua

SEQ ID NO: 1848202 - RNA, 19 nt, Artificial Sequence
  Description of Artificial Sequence: Synthetic oligonucleotide
  Antisense strand to SEQ ID NO: 1848201
uagcauauacguaggauuc

SEQ ID NO: 1848203 - RNA, 19 nt, Artificial Sequence
  Description of Artificial Sequence: Synthetic oligonucleotide
  Sense strand starting at position 3459 of SEQ ID NO: 1564006
cguauaugcuauuuacagu

SEQ ID NO: 1848204 - RNA, 19 nt, Artificial Sequence
  Description of Artificial Sequence: Synthetic oligonucleotide
  Antisense strand to SEQ ID NO: 1848203
acuguaaauagcauauacg

SEQ ID NO: 1848205 - RNA, 19 nt, Artificial Sequence
  Description of Artificial Sequence: Synthetic oligonucleotide
  Sense strand starting at position 3500 of SEQ ID NO: 1564006
cuuacauugguccgaguag

SEQ ID NO: 1848206 - RNA, 19 nt, Artificial Sequence
  Description of Artificial Sequence: Synthetic oligonucleotide
  Antisense strand to SEQ ID NO: 1848205
cuacucggaccaauguaag

SEQ ID NO: 1848207 - RNA, 19 nt, Artificial Sequence
  Description of Artificial Sequence: Synthetic oligonucleotide
  Sense strand starting at position 3699 of SEQ ID NO: 1564006
uaucacugaggaugucaga

SEQ ID NO: 1848208 - RNA, 19 nt, Artificial Sequence
  Description of Artificial Sequence: Synthetic oligonucleotide
  Antisense strand to SEQ ID NO: 1848207
ucugacauccucagugaua

SEQ ID NO: 1848209 - RNA, 19 nt, Artificial Sequence
  Description of Artificial Sequence: Synthetic oligonucleotide
  Sense strand starting at position 3749 of SEQ ID NO: 1564006
ugcaauaguccauaguuuc

SEQ ID NO: 1848210 - RNA, 19 nt, Artificial Sequence
  Description of Artificial Sequence: Synthetic oligonucleotide
  Antisense strand to SEQ ID NO: 1848209
gaaacuauggacuauugca

SEQ ID NO: 1848211 - RNA, 19 nt, Artificial Sequence
  Description of Artificial Sequence: Synthetic oligonucleotide
  Sense strand starting at position 3860 of SEQ ID NO: 1564006
uuuggaugcuagcugagau

SEQ ID NO: 1848212 - RNA, 19 nt, Artificial Sequence
  Description of Artificial Sequence: Synthetic oligonucleotide
  Antisense strand to SEQ ID NO: 1848211
aucucagcuagcauccaaa

SEQ ID NO: 1848213 - RNA, 19 nt, Artificial Sequence
  Description of Artificial Sequence: Synthetic oligonucleotide
  Sense strand starting at position 3861 of SEQ ID NO: 1564006
uuggaugcuagcugagauu

SEQ ID NO: 1848214 - RNA, 19 nt, Artificial Sequence
  Description of Artificial Sequence: Synthetic oligonucleotide
  Antisense strand to SEQ ID NO: 1848213
aaucucagcuagcauccaa

SEQ ID NO: 1848215 - RNA, 19 nt, Artificial Sequence
  Description of Artificial Sequence: Synthetic oligonucleotide
  Sense strand starting at position 3873 of SEQ ID NO: 1564006
ugagauuccuguuuaacaa

SEQ ID NO: 1848216 - RNA, 19 nt, Artificial Sequence
  Description of Artificial Sequence: Synthetic oligonucleotide
  Antisense strand to SEQ ID NO: 1848215
uuguuaaacaggaaucuca

SEQ ID NO: 1848217 - RNA, 19 nt, Artificial Sequence
  Description of Artificial Sequence: Synthetic oligonucleotide
  Sense strand starting at position 3973 of SEQ ID NO: 1564006
cuuuguguugcccagaauc

SEQ ID NO: 1848218 - RNA, 19 nt, Artificial Sequence
  Description of Artificial Sequence: Synthetic oligonucleotide
  Antisense strand to SEQ ID NO: 1848217
gauucugggcaacacaaag

SEQ ID NO: 1848219 - RNA, 19 nt, Artificial Sequence
  Description of Artificial Sequence: Synthetic oligonucleotide
  Sense strand starting at position 3975 of SEQ ID NO: 1564006
uuguguugcccagaaucua

SEQ ID NO: 1848220 - RNA, 19 nt, Artificial Sequence
  Description of Artificial Sequence: Synthetic oligonucleotide
  Antisense strand to SEQ ID NO: 1848219
uagauucugggcaacacaa

SEQ ID NO: 1848221 - RNA, 19 nt, Artificial Sequence
  Description of Artificial Sequence: Synthetic oligonucleotide
  Sense strand starting at position 1611 of SEQ ID NO: 1564007
agggaaguacagcguugau

SEQ ID NO: 1848222 - RNA, 19 nt, Artificial Sequence
  Description of Artificial Sequence: Synthetic oligonucleotide
  Antisense strand to SEQ ID NO: 1848221
aucaacgcuguacuucccu

SEQ ID NO: 1848223 - RNA, 19 nt, Artificial Sequence
  Description of Artificial Sequence: Synthetic oligonucleotide
  Sense strand starting at position 2800 of SEQ ID NO: 1564007
uguauaugaucucugaaga

SEQ ID NO: 1848224 - RNA, 19 nt, Artificial Sequence
  Description of Artificial Sequence: Synthetic oligonucleotide
  Antisense strand to SEQ ID NO: 1848223
ucuucagagaucauauaca

SEQ ID NO: 1848225 - RNA, 19 nt, Artificial Sequence
  Description of Artificial Sequence: Synthetic oligonucleotide
  Sense strand starting at position 2801 of SEQ ID NO: 1564007
guauaugaucucugaagaa

SEQ ID NO: 1848226 - RNA, 19 nt, Artificial Sequence
  Description of Artificial Sequence: Synthetic oligonucleotide
  Antisense strand to SEQ ID NO: 1848225
uucuucagagaucauauac

SEQ ID NO: 1848227 - RNA, 19 nt, Artificial Sequence
  Description of Artificial Sequence: Synthetic oligonucleotide
  Sense strand starting at position 2899 of SEQ ID NO: 1564007
aguugaggucgcgcucuau

SEQ ID NO: 1848228 - RNA, 19 nt, Artificial Sequence
  Description of Artificial Sequence: Synthetic oligonucleotide
  Antisense strand to SEQ ID NO: 1848227
auagagcgcgaccucaacu

SEQ ID NO: 1848229 - RNA, 19 nt, Artificial Sequence
  Description of Artificial Sequence: Synthetic oligonucleotide
  Sense strand starting at position 3052 of SEQ ID NO: 1564007
uuccuauucuuguagagag

SEQ ID NO: 1848230 - RNA, 19 nt, Artificial Sequence
  Description of Artificial Sequence: Synthetic oligonucleotide
  Antisense strand to SEQ ID NO: 1848229
cucucuacaagaauaggaa

SEQ ID NO: 1848231 - RNA, 19 nt, Artificial Sequence
  Description of Artificial Sequence: Synthetic oligonucleotide
  Sense strand starting at position 3658 of SEQ ID NO: 1564007
ggccgagaaucucuugaac

SEQ ID NO: 1848232 - RNA, 19 nt, Artificial Sequence
  Description of Artificial Sequence: Synthetic oligonucleotide
  Antisense strand to SEQ ID NO: 1848231
guucaagagauucucggcc

SEQ ID NO: 1848233 - RNA, 19 nt, Artificial Sequence
  Description of Artificial Sequence: Synthetic oligonucleotide
  Sense strand starting at position 3660 of SEQ ID NO: 1564007
ccgagaaucucuugaaccu

SEQ ID NO: 1848234 - RNA, 19 nt, Artificial Sequence
  Description of Artificial Sequence: Synthetic oligonucleotide
  Antisense strand to SEQ ID NO: 1848233
agguucaagagauucucgg

SEQ ID NO: 1848235 - RNA, 19 nt, Artificial Sequence
  Description of Artificial Sequence: Synthetic oligonucleotide
  Sense strand starting at position 3885 of SEQ ID NO: 1564007
acccgagguuuccuggaga

SEQ ID NO: 1848236 - RNA, 19 nt, Artificial Sequence
  Description of Artificial Sequence: Synthetic oligonucleotide
  Antisense strand to SEQ ID NO: 1848235
ucuccaggaaaccucgggu

SEQ ID NO: 1848237 - RNA, 19 nt, Artificial Sequence
  Description of Artificial Sequence: Synthetic oligonucleotide
  Sense strand starting at position 3888 of SEQ ID NO: 1564007
cgagguuuccuggagaagc

SEQ ID NO: 1848238 - RNA, 19 nt, Artificial Sequence
  Description of Artificial Sequence: Synthetic oligonucleotide
  Antisense strand to SEQ ID NO: 1848237
gcuucuccaggaaaccucg

SEQ ID NO: 1848239 - RNA, 19 nt, Artificial Sequence
  Description of Artificial Sequence: Synthetic oligonucleotide
  Sense strand starting at position 159 of SEQ ID NO: 1564008
guaggagugucccaggaga

SEQ ID NO: 1848240 - RNA, 19 nt, Artificial Sequence
  Description of Artificial Sequence: Synthetic oligonucleotide
  Antisense strand to SEQ ID NO: 1848239
ucuccugggacacuccuac

SEQ ID NO: 1848241 - RNA, 19 nt, Artificial Sequence
  Description of Artificial Sequence: Synthetic oligonucleotide
  Sense strand starting at position 161 of SEQ ID NO: 1564008
aggagugucccaggagaag

SEQ ID NO: 1848242 - RNA, 19 nt, Artificial Sequence
  Description of Artificial Sequence: Synthetic oligonucleotide
  Antisense strand to SEQ ID NO: 1848241
cuucuccugggacacuccu

SEQ ID NO: 1848243 - RNA, 19 nt, Artificial Sequence
  Description of Artificial Sequence: Synthetic oligonucleotide
  Sense strand starting at position 242 of SEQ ID NO: 1564008
ggagaugguuccugggugu

SEQ ID NO: 1848244 - RNA, 19 nt, Artificial Sequence
  Description of Artificial Sequence: Synthetic oligonucleotide
  Antisense strand to SEQ ID NO: 1848243
acacccaggaaccaucucc

SEQ ID NO: 1848245 - RNA, 19 nt, Artificial Sequence
  Description of Artificial Sequence: Synthetic oligonucleotide
  Sense strand starting at position 434 of SEQ ID NO: 1564008
ccgcuuaucucaggaacac

SEQ ID NO: 1848246 - RNA, 19 nt, Artificial Sequence
  Description of Artificial Sequence: Synthetic oligonucleotide
  Antisense strand to SEQ ID NO: 1848245
guguuccugagauaagcgg

SEQ ID NO: 1848247 - RNA, 19 nt, Artificial Sequence
  Description of Artificial Sequence: Synthetic oligonucleotide
  Sense strand starting at position 435 of SEQ ID NO: 1564008
cgcuuaucucaggaacaca

SEQ ID NO: 1848248 - RNA, 19 nt, Artificial Sequence
  Description of Artificial Sequence: Synthetic oligonucleotide
  Antisense strand to SEQ ID NO: 1848247
uguguuccugagauaagcg

SEQ ID NO: 1848249 - RNA, 19 nt, Artificial Sequence
  Description of Artificial Sequence: Synthetic oligonucleotide
  Sense strand starting at position 501 of SEQ ID NO: 1564008
cagugucugccaugaggga

SEQ ID NO: 1848250 - RNA, 19 nt, Artificial Sequence
  Description of Artificial Sequence: Synthetic oligonucleotide
  Antisense strand to SEQ ID NO: 1848249
ucccucauggcagacacug

SEQ ID NO: 1848251 - RNA, 19 nt, Artificial Sequence
  Description of Artificial Sequence: Synthetic oligonucleotide
  Sense strand starting at position 835 of SEQ ID NO: 1564008
gcuggcagcuuugucaaua

SEQ ID NO: 1848252 - RNA, 19 nt, Artificial Sequence
  Description of Artificial Sequence: Synthetic oligonucleotide
  Antisense strand to SEQ ID NO: 1848251
uauugacaaagcugccagc

SEQ ID NO: 1848253 - RNA, 19 nt, Artificial Sequence
  Description of Artificial Sequence: Synthetic oligonucleotide
  Sense strand starting at position 1310 of SEQ ID NO: 1564008
ggaggaggcugcuugagau

SEQ ID NO: 1848254 - RNA, 19 nt, Artificial Sequence
  Description of Artificial Sequence: Synthetic oligonucleotide
  Antisense strand to SEQ ID NO: 1848253
aucucaagcagccuccucc

SEQ ID NO: 1848255 - RNA, 19 nt, Artificial Sequence
  Description of Artificial Sequence: Synthetic oligonucleotide
  Sense strand starting at position 2333 of SEQ ID NO: 1564008
ucacuuaaccgucaggcua

SEQ ID NO: 1848256 - RNA, 19 nt, Artificial Sequence
  Description of Artificial Sequence: Synthetic oligonucleotide
  Antisense strand to SEQ ID NO: 1848255
uagccugacgguuaaguga

SEQ ID NO: 1848257 - RNA, 19 nt, Artificial Sequence
  Description of Artificial Sequence: Synthetic oligonucleotide
  Sense strand starting at position 2348 of SEQ ID NO: 1564008
gcuacaugaccuugaacca

SEQ ID NO: 1848258 - RNA, 19 nt, Artificial Sequence
  Description of Artificial Sequence: Synthetic oligonucleotide
  Antisense strand to SEQ ID NO: 1848257
ugguucaaggucauguagc

SEQ ID NO: 1848259 - RNA, 19 nt, Artificial Sequence
  Description of Artificial Sequence: Synthetic oligonucleotide
  Sense strand starting at position 2438 of SEQ ID NO: 1564008
ccacguggcguugaggaaa

SEQ ID NO: 1848260 - RNA, 19 nt, Artificial Sequence
  Description of Artificial Sequence: Synthetic oligonucleotide
  Antisense strand to SEQ ID NO: 1848259
uuuccucaacgccacgugg

SEQ ID NO: 1848261 - RNA, 19 nt, Artificial Sequence
  Description of Artificial Sequence: Synthetic oligonucleotide
  Sense strand starting at position 2893 of SEQ ID NO: 1564008
gggugagaagcuuggcuca

SEQ ID NO: 1848262 - RNA, 19 nt, Artificial Sequence
  Description of Artificial Sequence: Synthetic oligonucleotide
  Antisense strand to SEQ ID NO: 1848261
ugagccaagcuucucaccc

SEQ ID NO: 1848263 - RNA, 19 nt, Artificial Sequence
  Description of Artificial Sequence: Synthetic oligonucleotide
  Sense strand starting at position 3012 of SEQ ID NO: 1564008
cugugucauucuuuccaac

SEQ ID NO: 1848264 - RNA, 19 nt, Artificial Sequence
  Description of Artificial Sequence: Synthetic oligonucleotide
  Antisense strand to SEQ ID NO: 1848263
guuggaaagaaugacacag

SEQ ID NO: 1848265 - RNA, 19 nt, Artificial Sequence
  Description of Artificial Sequence: Synthetic oligonucleotide
  Sense strand starting at position 3086 of SEQ ID NO: 1564008
gacgucguuucuucagagu

SEQ ID NO: 1848266 - RNA, 19 nt, Artificial Sequence
  Description of Artificial Sequence: Synthetic oligonucleotide
  Antisense strand to SEQ ID NO: 1848265
acucugaagaaacgacguc

SEQ ID NO: 1848267 - RNA, 19 nt, Artificial Sequence
  Description of Artificial Sequence: Synthetic oligonucleotide
  Sense strand starting at position 3089 of SEQ ID NO: 1564008
gucguuucuucagagugca

SEQ ID NO: 1848268 - RNA, 19 nt, Artificial Sequence
  Description of Artificial Sequence: Synthetic oligonucleotide
  Antisense strand to SEQ ID NO: 1848267
ugcacucugaagaaacgac

SEQ ID NO: 1848269 - RNA, 19 nt, Artificial Sequence
  Description of Artificial Sequence: Synthetic oligonucleotide
  Sense strand starting at position 3101 of SEQ ID NO: 1564008
gagugcauuccacagagau

SEQ ID NO: 1848270 - RNA, 19 nt, Artificial Sequence
  Description of Artificial Sequence: Synthetic oligonucleotide
  Antisense strand to SEQ ID NO: 1848269
aucucuguggaaugcacuc

SEQ ID NO: 1848271 - RNA, 19 nt, Artificial Sequence
  Description of Artificial Sequence: Synthetic oligonucleotide
  Sense strand starting at position 3867 of SEQ ID NO: 1564008
guguauauggccugcauau

SEQ ID NO: 1848272 - RNA, 19 nt, Artificial Sequence
  Description of Artificial Sequence: Synthetic oligonucleotide
  Antisense strand to SEQ ID NO: 1848271
auaugcaggccauauacac

SEQ ID NO: 1848273 - RNA, 19 nt, Artificial Sequence
  Description of Artificial Sequence: Synthetic oligonucleotide
  Sense strand starting at position 3894 of SEQ ID NO: 1564008
uacgcuuucugagcagaua

SEQ ID NO: 1848274 - RNA, 19 nt, Artificial Sequence
  Description of Artificial Sequence: Synthetic oligonucleotide
  Antisense strand to SEQ ID NO: 1848273
uaucugcucagaaagcgua

SEQ ID NO: 1848275 - RNA, 19 nt, Artificial Sequence
  Description of Artificial Sequence: Synthetic oligonucleotide
  Sense strand starting at position 3895 of SEQ ID NO: 1564008
acgcuuucugagcagauaa

SEQ ID NO: 1848276 - RNA, 19 nt, Artificial Sequence
  Description of Artificial Sequence: Synthetic oligonucleotide
  Antisense strand to SEQ ID NO: 1848275
uuaucugcucagaaagcgu

SEQ ID NO: 1848277 - RNA, 19 nt, Artificial Sequence
  Description of Artificial Sequence: Synthetic oligonucleotide
  Sense strand starting at position 3897 of SEQ ID NO: 1564008
gcuuucugagcagauaaga

SEQ ID NO: 1848278 - RNA, 19 nt, Artificial Sequence
  Description of Artificial Sequence: Synthetic oligonucleotide
  Antisense strand to SEQ ID NO: 1848277
ucuuaucugcucagaaagc

SEQ ID NO: 1848279 - RNA, 19 nt, Artificial Sequence
  Description of Artificial Sequence: Synthetic oligonucleotide
  Sense strand starting at position 3908 of SEQ ID NO: 1564008
agauaagaggcguggcuau

SEQ ID NO: 1848280 - RNA, 19 nt, Artificial Sequence
  Description of Artificial Sequence: Synthetic oligonucleotide
  Antisense strand to SEQ ID NO: 1848279
auagccacgccucuuaucu

SEQ ID NO: 1848281 - RNA, 19 nt, Artificial Sequence
  Description of Artificial Sequence: Synthetic oligonucleotide
  Sense strand starting at position 3983 of SEQ ID NO: 1564008
accggaacaucuuauguca

SEQ ID NO: 1848282 - RNA, 19 nt, Artificial Sequence
  Description of Artificial Sequence: Synthetic oligonucleotide
  Antisense strand to SEQ ID NO: 1848281
ugacauaagauguuccggu

SEQ ID NO: 1848283 - RNA, 19 nt, Artificial Sequence
  Description of Artificial Sequence: Synthetic oligonucleotide
  Sense strand starting at position 209 of SEQ ID NO: 1564009
ggagcacugcgaucucguu

SEQ ID NO: 1848284 - RNA, 19 nt, Artificial Sequence
  Description of Artificial Sequence: Synthetic oligonucleotide
  Antisense strand to SEQ ID NO: 1848283
aacgagaucgcagugcucc

SEQ ID NO: 1848285 - RNA, 19 nt, Artificial Sequence
  Description of Artificial Sequence: Synthetic oligonucleotide
  Sense strand starting at position 682 of SEQ ID NO: 1564009
ugauguccuccguguguuu

SEQ ID NO: 1848286 - RNA, 19 nt, Artificial Sequence
  Description of Artificial Sequence: Synthetic oligonucleotide
  Antisense strand to SEQ ID NO: 1848285
aaacacacggaggacauca

SEQ ID NO: 1848287 - RNA, 19 nt, Artificial Sequence
  Description of Artificial Sequence: Synthetic oligonucleotide
  Sense strand starting at position 1975 of SEQ ID NO: 1564009
ugcagcucucuaugucaau

SEQ ID NO: 1848288 - RNA, 19 nt, Artificial Sequence
  Description of Artificial Sequence: Synthetic oligonucleotide
  Antisense strand to SEQ ID NO: 1848287
auugacauagagagcugca

SEQ ID NO: 1848289 - RNA, 19 nt, Artificial Sequence
  Description of Artificial Sequence: Synthetic oligonucleotide
  Sense strand starting at position 1998 of SEQ ID NO: 1564009
gucaaagcaugaguccuua

SEQ ID NO: 1848290 - RNA, 19 nt, Artificial Sequence
  Description of Artificial Sequence: Synthetic oligonucleotide
  Antisense strand to SEQ ID NO: 1848289
uaaggacucaugcuuugac

SEQ ID NO: 1848291 - RNA, 19 nt, Artificial Sequence
  Description of Artificial Sequence: Synthetic oligonucleotide
  Sense strand starting at position 2108 of SEQ ID NO: 1564009
ccuggaauguucuucgauc

SEQ ID NO: 1848292 - RNA, 19 nt, Artificial Sequence
  Description of Artificial Sequence: Synthetic oligonucleotide
  Antisense strand to SEQ ID NO: 1848291
gaucgaagaacauuccagg

SEQ ID NO: 1848293 - RNA, 19 nt, Artificial Sequence
  Description of Artificial Sequence: Synthetic oligonucleotide
  Sense strand starting at position 2109 of SEQ ID NO: 1564009
cuggaauguucuucgauca

SEQ ID NO: 1848294 - RNA, 19 nt, Artificial Sequence
  Description of Artificial Sequence: Synthetic oligonucleotide
  Antisense strand to SEQ ID NO: 1848293
ugaucgaagaacauuccag

SEQ ID NO: 1848295 - RNA, 19 nt, Artificial Sequence
  Description of Artificial Sequence: Synthetic oligonucleotide
  Sense strand starting at position 2110 of SEQ ID NO: 1564009
uggaauguucuucgaucag

SEQ ID NO: 1848296 - RNA, 19 nt, Artificial Sequence
  Description of Artificial Sequence: Synthetic oligonucleotide
  Antisense strand to SEQ ID NO: 1848295
cugaucgaagaacauucca

SEQ ID NO: 1848297 - RNA, 19 nt, Artificial Sequence
  Description of Artificial Sequence: Synthetic oligonucleotide
  Sense strand starting at position 2114 of SEQ ID NO: 1564009
auguucuucgaucagauau

SEQ ID NO: 1848298 - RNA, 19 nt, Artificial Sequence
  Description of Artificial Sequence: Synthetic oligonucleotide
  Antisense strand to SEQ ID NO: 1848297
auaucugaucgaagaacau

SEQ ID NO: 1848299 - RNA, 19 nt, Artificial Sequence
  Description of Artificial Sequence: Synthetic oligonucleotide
  Sense strand starting at position 2116 of SEQ ID NO: 1564009
guucuucgaucagauaucu

SEQ ID NO: 1848300 - RNA, 19 nt, Artificial Sequence
  Description of Artificial Sequence: Synthetic oligonucleotide
  Antisense strand to SEQ ID NO: 1848299
agauaucugaucgaagaac

SEQ ID NO: 1848301 - RNA, 19 nt, Artificial Sequence
  Description of Artificial Sequence: Synthetic oligonucleotide
  Sense strand starting at position 2125 of SEQ ID NO: 1564009
ucagauaucugccuggcuu

SEQ ID NO: 1848302 - RNA, 19 nt, Artificial Sequence
  Description of Artificial Sequence: Synthetic oligonucleotide
  Antisense strand to SEQ ID NO: 1848301
aagccaggcagauaucuga

SEQ ID NO: 1848303 - RNA, 19 nt, Artificial Sequence
  Description of Artificial Sequence: Synthetic oligonucleotide
  Sense strand starting at position 2126 of SEQ ID NO: 1564009
cagauaucugccuggcuug

SEQ ID NO: 1848304 - RNA, 19 nt, Artificial Sequence
  Description of Artificial Sequence: Synthetic oligonucleotide
  Antisense strand to SEQ ID NO: 1848303
caagccaggcagauaucug

SEQ ID NO: 1848305 - RNA, 19 nt, Artificial Sequence
  Description of Artificial Sequence: Synthetic oligonucleotide
  Sense strand starting at position 2144 of SEQ ID NO: 1564009
ggcuccucguuccaucaga

SEQ ID NO: 1848306 - RNA, 19 nt, Artificial Sequence
  Description of Artificial Sequence: Synthetic oligonucleotide
  Antisense strand to SEQ ID NO: 1848305
ucugauggaacgaggagcc

SEQ ID NO: 1848307 - RNA, 19 nt, Artificial Sequence
  Description of Artificial Sequence: Synthetic oligonucleotide
  Sense strand starting at position 2155 of SEQ ID NO: 1564009
ccaucagaucucggcucaa

SEQ ID NO: 1848308 - RNA, 19 nt, Artificial Sequence
  Description of Artificial Sequence: Synthetic oligonucleotide
  Antisense strand to SEQ ID NO: 1848307
uugagccgagaucugaugg

SEQ ID NO: 1848309 - RNA, 19 nt, Artificial Sequence
  Description of Artificial Sequence: Synthetic oligonucleotide
  Sense strand starting at position 2159 of SEQ ID NO: 1564009
cagaucucggcucaaaugu

SEQ ID NO: 1848310 - RNA, 19 nt, Artificial Sequence
  Description of Artificial Sequence: Synthetic oligonucleotide
  Antisense strand to SEQ ID NO: 1848309
acauuugagccgagaucug

SEQ ID NO: 1848311 - RNA, 19 nt, Artificial Sequence
  Description of Artificial Sequence: Synthetic oligonucleotide
  Sense strand starting at position 2212 of SEQ ID NO: 1564009
ugccaauucucuccgcaua

SEQ ID NO: 1848312 - RNA, 19 nt, Artificial Sequence
  Description of Artificial Sequence: Synthetic oligonucleotide
  Antisense strand to SEQ ID NO: 1848311
uaugcggagagaauuggca

SEQ ID NO: 1848313 - RNA, 19 nt, Artificial Sequence
  Description of Artificial Sequence: Synthetic oligonucleotide
  Sense strand starting at position 2213 of SEQ ID NO: 1564009
gccaauucucuccgcauaa

SEQ ID NO: 1848314 - RNA, 19 nt, Artificial Sequence
  Description of Artificial Sequence: Synthetic oligonucleotide
  Antisense strand to SEQ ID NO: 1848313
uuaugcggagagaauuggc

SEQ ID NO: 1848315 - RNA, 19 nt, Artificial Sequence
  Description of Artificial Sequence: Synthetic oligonucleotide
  Sense strand starting at position 2239 of SEQ ID NO: 1564009
cugucuuuagaacguccaa

SEQ ID NO: 1848316 - RNA, 19 nt, Artificial Sequence
  Description of Artificial Sequence: Synthetic oligonucleotide
  Antisense strand to SEQ ID NO: 1848315
uuggacguucuaaagacag

SEQ ID NO: 1848317 - RNA, 19 nt, Artificial Sequence
  Description of Artificial Sequence: Synthetic oligonucleotide
  Sense strand starting at position 2311 of SEQ ID NO: 1564009
gagaguguaucuccgcgaa

SEQ ID NO: 1848318 - RNA, 19 nt, Artificial Sequence
  Description of Artificial Sequence: Synthetic oligonucleotide
  Antisense strand to SEQ ID NO: 1848317
uucgcggagauacacucuc

SEQ ID NO: 1848319 - RNA, 19 nt, Artificial Sequence
  Description of Artificial Sequence: Synthetic oligonucleotide
  Sense strand starting at position 2417 of SEQ ID NO: 1564009
cauccagucccaugagguu

SEQ ID NO: 1848320 - RNA, 19 nt, Artificial Sequence
  Description of Artificial Sequence: Synthetic oligonucleotide
  Antisense strand to SEQ ID NO: 1848319
aaccucaugggacuggaug

SEQ ID NO: 1848321 - RNA, 19 nt, Artificial Sequence
  Description of Artificial Sequence: Synthetic oligonucleotide
  Sense strand starting at position 2485 of SEQ ID NO: 1564009
acacgacgucuucaagaga

SEQ ID NO: 1848322 - RNA, 19 nt, Artificial Sequence
  Description of Artificial Sequence: Synthetic oligonucleotide
  Antisense strand to SEQ ID NO: 1848321
ucucuugaagacgucgugu

SEQ ID NO: 1848323 - RNA, 19 nt, Artificial Sequence
  Description of Artificial Sequence: Synthetic oligonucleotide
  Sense strand starting at position 2693 of SEQ ID NO: 1564009
ccugcuccucuaugugaaa

SEQ ID NO: 1848324 - RNA, 19 nt, Artificial Sequence
  Description of Artificial Sequence: Synthetic oligonucleotide
  Antisense strand to SEQ ID NO: 1848323
uuucacauagaggagcagg

SEQ ID NO: 1848325 - RNA, 19 nt, Artificial Sequence
  Description of Artificial Sequence: Synthetic oligonucleotide
  Sense strand starting at position 2711 of SEQ ID NO: 1564009
aaugguuuccugggaccga

SEQ ID NO: 1848326 - RNA, 19 nt, Artificial Sequence
  Description of Artificial Sequence: Synthetic oligonucleotide
  Antisense strand to SEQ ID NO: 1848325
ucggucccaggaaaccauu

SEQ ID NO: 1848327 - RNA, 19 nt, Artificial Sequence
  Description of Artificial Sequence: Synthetic oligonucleotide
  Sense strand starting at position 2795 of SEQ ID NO: 1564009
gcaauuuguuuacagauac

SEQ ID NO: 1848328 - RNA, 19 nt, Artificial Sequence
  Description of Artificial Sequence: Synthetic oligonucleotide
  Antisense strand to SEQ ID NO: 1848327
guaucuguaaacaaauugc

SEQ ID NO: 1848329 - RNA, 19 nt, Artificial Sequence
  Description of Artificial Sequence: Synthetic oligonucleotide
  Sense strand starting at position 2834 of SEQ ID NO: 1564009
ugucuaauacgccaauggu

SEQ ID NO: 1848330 - RNA, 19 nt, Artificial Sequence
  Description of Artificial Sequence: Synthetic oligonucleotide
  Antisense strand to SEQ ID NO: 1848329
accauuggcguauuagaca

SEQ ID NO: 1848331 - RNA, 19 nt, Artificial Sequence
  Description of Artificial Sequence: Synthetic oligonucleotide
  Sense strand starting at position 2863 of SEQ ID NO: 1564009
agcagaguucuacaacaug

SEQ ID NO: 1848332 - RNA, 19 nt, Artificial Sequence
  Description of Artificial Sequence: Synthetic oligonucleotide
  Antisense strand to SEQ ID NO: 1848331
cauguuguagaacucugcu

SEQ ID NO: 1848333 - RNA, 19 nt, Artificial Sequence
  Description of Artificial Sequence: Synthetic oligonucleotide
  Sense strand starting at position 2874 of SEQ ID NO: 1564009
acaacaugguccuggguua

SEQ ID NO: 1848334 - RNA, 19 nt, Artificial Sequence
  Description of Artificial Sequence: Synthetic oligonucleotide
  Antisense strand to SEQ ID NO: 1848333
uaacccaggaccauguugu

SEQ ID NO: 1848335 - RNA, 19 nt, Artificial Sequence
  Description of Artificial Sequence: Synthetic oligonucleotide
  Sense strand starting at position 2875 of SEQ ID NO: 1564009
caacaugguccuggguuau

SEQ ID NO: 1848336 - RNA, 19 nt, Artificial Sequence
  Description of Artificial Sequence: Synthetic oligonucleotide
  Antisense strand to SEQ ID NO: 1848335
auaacccaggaccauguug

SEQ ID NO: 1848337 - RNA, 19 nt, Artificial Sequence
  Description of Artificial Sequence: Synthetic oligonucleotide
  Sense strand starting at position 3130 of SEQ ID NO: 1564009
uuguuugaaucauuguauc

SEQ ID NO: 1848338 - RNA, 19 nt, Artificial Sequence
  Description of Artificial Sequence: Synthetic oligonucleotide
  Antisense strand to SEQ ID NO: 1848337
gauacaaugauucaaacaa

SEQ ID NO: 1848339 - RNA, 19 nt, Artificial Sequence
  Description of Artificial Sequence: Synthetic oligonucleotide
  Sense strand starting at position 3133 of SEQ ID NO: 1564009
uuugaaucauuguaucaug

SEQ ID NO: 1848340 - RNA, 19 nt, Artificial Sequence
  Description of Artificial Sequence: Synthetic oligonucleotide
  Antisense strand to SEQ ID NO: 1848339
caugauacaaugauucaaa

SEQ ID NO: 1848341 - RNA, 19 nt, Artificial Sequence
  Description of Artificial Sequence: Synthetic oligonucleotide
  Sense strand starting at position 3460 of SEQ ID NO: 1564009
aggccuauauuguguguuu

SEQ ID NO: 1848342 - RNA, 19 nt, Artificial Sequence
  Description of Artificial Sequence: Synthetic oligonucleotide
  Antisense strand to SEQ ID NO: 1848341
aaacacacaauauaggccu

SEQ ID NO: 1848343 - RNA, 19 nt, Artificial Sequence
  Description of Artificial Sequence: Synthetic oligonucleotide
  Sense strand starting at position 3461 of SEQ ID NO: 1564009
ggccuauauuguguguuua

SEQ ID NO: 1848344 - RNA, 19 nt, Artificial Sequence
  Description of Artificial Sequence: Synthetic oligonucleotide
  Antisense strand to SEQ ID NO: 1848343
uaaacacacaauauaggcc

SEQ ID NO: 1848345 - RNA, 19 nt, Artificial Sequence
  Description of Artificial Sequence: Synthetic oligonucleotide
  Sense strand starting at position 3462 of SEQ ID NO: 1564009
gccuauauuguguguuuac

SEQ ID NO: 1848346 - RNA, 19 nt, Artificial Sequence
  Description of Artificial Sequence: Synthetic oligonucleotide
  Antisense strand to SEQ ID NO: 1848345
guaaacacacaauauaggc

SEQ ID NO: 1848347 - RNA, 19 nt, Artificial Sequence
  Description of Artificial Sequence: Synthetic oligonucleotide
  Sense strand starting at position 3463 of SEQ ID NO: 1564009
ccuauauuguguguuuaca

SEQ ID NO: 1848348 - RNA, 19 nt, Artificial Sequence
  Description of Artificial Sequence: Synthetic oligonucleotide
  Antisense strand to SEQ ID NO: 1848347
uguaaacacacaauauagg

SEQ ID NO: 1848349 - RNA, 19 nt, Artificial Sequence
  Description of Artificial Sequence: Synthetic oligonucleotide
  Sense strand starting at position 3465 of SEQ ID NO: 1564009
uauauuguguguuuacaag

SEQ ID NO: 1848350 - RNA, 19 nt, Artificial Sequence
  Description of Artificial Sequence: Synthetic oligonucleotide
  Antisense strand to SEQ ID NO: 1848349
cuuguaaacacacaauaua

SEQ ID NO: 1848351 - RNA, 19 nt, Artificial Sequence
  Description of Artificial Sequence: Synthetic oligonucleotide
  Sense strand starting at position 3471 of SEQ ID NO: 1564009
guguguuuacaagagaaau

SEQ ID NO: 1848352 - RNA, 19 nt, Artificial Sequence
  Description of Artificial Sequence: Synthetic oligonucleotide
  Antisense strand to SEQ ID NO: 1848351
auuucucuuguaaacacac

SEQ ID NO: 1848353 - RNA, 19 nt, Artificial Sequence
  Description of Artificial Sequence: Synthetic oligonucleotide
  Sense strand starting at position 3941 of SEQ ID NO: 1564009
uuucuaagccguuucguaa

SEQ ID NO: 1848354 - RNA, 19 nt, Artificial Sequence
  Description of Artificial Sequence: Synthetic oligonucleotide
  Antisense strand to SEQ ID NO: 1848353
uuacgaaacggcuuagaaa

SEQ ID NO: 1848355 - RNA, 19 nt, Artificial Sequence
  Description of Artificial Sequence: Synthetic oligonucleotide
  Sense strand starting at position 3945 of SEQ ID NO: 1564009
uaagccguuucguaagcaa

SEQ ID NO: 1848356 - RNA, 19 nt, Artificial Sequence
  Description of Artificial Sequence: Synthetic oligonucleotide
  Antisense strand to SEQ ID NO: 1848355
uugcuuacgaaacggcuua

SEQ ID NO: 1848357 - RNA, 19 nt, Artificial Sequence
  Description of Artificial Sequence: Synthetic oligonucleotide
  Sense strand starting at position 3948 of SEQ ID NO: 1564009
gccguuucguaagcaacuu

SEQ ID NO: 1848358 - RNA, 19 nt, Artificial Sequence
  Description of Artificial Sequence: Synthetic oligonucleotide
  Antisense strand to SEQ ID NO: 1848357
aaguugcuuacgaaacggc

SEQ ID NO: 1848359 - RNA, 19 nt, Artificial Sequence
  Description of Artificial Sequence: Synthetic oligonucleotide
  Sense strand starting at position 45 of SEQ ID NO: 1564010
uaggguuucugcuccaaga

SEQ ID NO: 1848360 - RNA, 19 nt, Artificial Sequence
  Description of Artificial Sequence: Synthetic oligonucleotide
  Antisense strand to SEQ ID NO: 1848359
ucuuggagcagaaacccua

SEQ ID NO: 1848361 - RNA, 19 nt, Artificial Sequence
  Description of Artificial Sequence: Synthetic oligonucleotide
  Sense strand starting at position 666 of SEQ ID NO: 1564010
uggcauccuucucugugua

SEQ ID NO: 1848362 - RNA, 19 nt, Artificial Sequence
  Description of Artificial Sequence: Synthetic oligonucleotide
  Antisense strand to SEQ ID NO: 1848361
uacacagagaaggaugcca

SEQ ID NO: 1848363 - RNA, 19 nt, Artificial Sequence
  Description of Artificial Sequence: Synthetic oligonucleotide
  Sense strand starting at position 669 of SEQ ID NO: 1564010
cauccuucucuguguagga

SEQ ID NO: 1848364 - RNA, 19 nt, Artificial Sequence
  Description of Artificial Sequence: Synthetic oligonucleotide
  Antisense strand to SEQ ID NO: 1848363
uccuacacagagaaggaug

SEQ ID NO: 1848365 - RNA, 19 nt, Artificial Sequence
  Description of Artificial Sequence: Synthetic oligonucleotide
  Sense strand starting at position 693 of SEQ ID NO: 1564010
gcuccaugaugcggucaaa

SEQ ID NO: 1848366 - RNA, 19 nt, Artificial Sequence
  Description of Artificial Sequence: Synthetic oligonucleotide
  Antisense strand to SEQ ID NO: 1848365
uuugaccgcaucauggagc

SEQ ID NO: 1848367 - RNA, 19 nt, Artificial Sequence
  Description of Artificial Sequence: Synthetic oligonucleotide
  Sense strand starting at position 902 of SEQ ID NO: 1564010
ggugacugauccugcaaug

SEQ ID NO: 1848368 - RNA, 19 nt, Artificial Sequence
  Description of Artificial Sequence: Synthetic oligonucleotide
  Antisense strand to SEQ ID NO: 1848367
cauugcaggaucagucacc

SEQ ID NO: 1848369 - RNA, 19 nt, Artificial Sequence
  Description of Artificial Sequence: Synthetic oligonucleotide
  Sense strand starting at position 1282 of SEQ ID NO: 1564010
ggagcacugcgaucucguu

SEQ ID NO: 1848370 - RNA, 19 nt, Artificial Sequence
  Description of Artificial Sequence: Synthetic oligonucleotide
  Antisense strand to SEQ ID NO: 1848369
aacgagaucgcagugcucc

SEQ ID NO: 1848371 - RNA, 19 nt, Artificial Sequence
  Description of Artificial Sequence: Synthetic oligonucleotide
  Sense strand starting at position 1755 of SEQ ID NO: 1564010
ugauguccuccguguguuu

SEQ ID NO: 1848372 - RNA, 19 nt, Artificial Sequence
  Description of Artificial Sequence: Synthetic oligonucleotide
  Antisense strand to SEQ ID NO: 1848371
aaacacacggaggacauca

SEQ ID NO: 1848373 - RNA, 19 nt, Artificial Sequence
  Description of Artificial Sequence: Synthetic oligonucleotide
  Sense strand starting at position 3048 of SEQ ID NO: 1564010
ugcagcucucuaugucaau

SEQ ID NO: 1848374 - RNA, 19 nt, Artificial Sequence
  Description of Artificial Sequence: Synthetic oligonucleotide
  Antisense strand to SEQ ID NO: 1848373
auugacauagagagcugca

SEQ ID NO: 1848375 - RNA, 19 nt, Artificial Sequence
  Description of Artificial Sequence: Synthetic oligonucleotide
  Sense strand starting at position 3071 of SEQ ID NO: 1564010
gucaaagcaugaguccuua

SEQ ID NO: 1848376 - RNA, 19 nt, Artificial Sequence
  Description of Artificial Sequence: Synthetic oligonucleotide
  Antisense strand to SEQ ID NO: 1848375
uaaggacucaugcuuugac

SEQ ID NO: 1848377 - RNA, 19 nt, Artificial Sequence
  Description of Artificial Sequence: Synthetic oligonucleotide
  Sense strand starting at position 3181 of SEQ ID NO: 1564010
ccuggaauguucuucgauc

SEQ ID NO: 1848378 - RNA, 19 nt, Artificial Sequence
  Description of Artificial Sequence: Synthetic oligonucleotide
  Antisense strand to SEQ ID NO: 1848377
gaucgaagaacauuccagg

SEQ ID NO: 1848379 - RNA, 19 nt, Artificial Sequence
  Description of Artificial Sequence: Synthetic oligonucleotide
  Sense strand starting at position 3182 of SEQ ID NO: 1564010
cuggaauguucuucgauca

SEQ ID NO: 1848380 - RNA, 19 nt, Artificial Sequence
  Description of Artificial Sequence: Synthetic oligonucleotide
  Antisense strand to SEQ ID NO: 1848379
ugaucgaagaacauuccag

SEQ ID NO: 1848381 - RNA, 19 nt, Artificial Sequence
  Description of Artificial Sequence: Synthetic oligonucleotide
  Sense strand starting at position 3183 of SEQ ID NO: 1564010
uggaauguucuucgaucag

SEQ ID NO: 1848382 - RNA, 19 nt, Artificial Sequence
  Description of Artificial Sequence: Synthetic oligonucleotide
  Antisense strand to SEQ ID NO: 1848381
cugaucgaagaacauucca

SEQ ID NO: 1848383 - RNA, 19 nt, Artificial Sequence
  Description of Artificial Sequence: Synthetic oligonucleotide
  Sense strand starting at position 3187 of SEQ ID NO: 1564010
auguucuucgaucagauau

SEQ ID NO: 1848384 - RNA, 19 nt, Artificial Sequence
  Description of Artificial Sequence: Synthetic oligonucleotide
  Antisense strand to SEQ ID NO: 1848383
auaucugaucgaagaacau

SEQ ID NO: 1848385 - RNA, 19 nt, Artificial Sequence
  Description of Artificial Sequence: Synthetic oligonucleotide
  Sense strand starting at position 3189 of SEQ ID NO: 1564010
guucuucgaucagauaucu

SEQ ID NO: 1848386 - RNA, 19 nt, Artificial Sequence
  Description of Artificial Sequence: Synthetic oligonucleotide
  Antisense strand to SEQ ID NO: 1848385
agauaucugaucgaagaac

SEQ ID NO: 1848387 - RNA, 19 nt, Artificial Sequence
  Description of Artificial Sequence: Synthetic oligonucleotide
  Sense strand starting at position 3198 of SEQ ID NO: 1564010
ucagauaucugccuggcuu

SEQ ID NO: 1848388 - RNA, 19 nt, Artificial Sequence
  Description of Artificial Sequence: Synthetic oligonucleotide
  Antisense strand to SEQ ID NO: 1848387
aagccaggcagauaucuga

SEQ ID NO: 1848389 - RNA, 19 nt, Artificial Sequence
  Description of Artificial Sequence: Synthetic oligonucleotide
  Sense strand starting at position 3199 of SEQ ID NO: 1564010
cagauaucugccuggcuug

SEQ ID NO: 1848390 - RNA, 19 nt, Artificial Sequence
  Description of Artificial Sequence: Synthetic oligonucleotide
  Antisense strand to SEQ ID NO: 1848389
caagccaggcagauaucug

SEQ ID NO: 1848391 - RNA, 19 nt, Artificial Sequence
  Description of Artificial Sequence: Synthetic oligonucleotide
  Sense strand starting at position 3217 of SEQ ID NO: 1564010
ggcuccucguuccaucaga

SEQ ID NO: 1848392 - RNA, 19 nt, Artificial Sequence
  Description of Artificial Sequence: Synthetic oligonucleotide
  Antisense strand to SEQ ID NO: 1848391
ucugauggaacgaggagcc

SEQ ID NO: 1848393 - RNA, 19 nt, Artificial Sequence
  Description of Artificial Sequence: Synthetic oligonucleotide
  Sense strand starting at position 3228 of SEQ ID NO: 1564010
ccaucagaucucggcucaa

SEQ ID NO: 1848394 - RNA, 19 nt, Artificial Sequence
  Description of Artificial Sequence: Synthetic oligonucleotide
  Antisense strand to SEQ ID NO: 1848393
uugagccgagaucugaugg

SEQ ID NO: 1848395 - RNA, 19 nt, Artificial Sequence
  Description of Artificial Sequence: Synthetic oligonucleotide
  Sense strand starting at position 3232 of SEQ ID NO: 1564010
cagaucucggcucaaaugu

SEQ ID NO: 1848396 - RNA, 19 nt, Artificial Sequence
  Description of Artificial Sequence: Synthetic oligonucleotide
  Antisense strand to SEQ ID NO: 1848395
acauuugagccgagaucug

SEQ ID NO: 1848397 - RNA, 19 nt, Artificial Sequence
  Description of Artificial Sequence: Synthetic oligonucleotide
  Sense strand starting at position 3285 of SEQ ID NO: 1564010
ugccaauucucuccgcaua

SEQ ID NO: 1848398 - RNA, 19 nt, Artificial Sequence
  Description of Artificial Sequence: Synthetic oligonucleotide
  Antisense strand to SEQ ID NO: 1848397
uaugcggagagaauuggca

SEQ ID NO: 1848399 - RNA, 19 nt, Artificial Sequence
  Description of Artificial Sequence: Synthetic oligonucleotide
  Sense strand starting at position 3286 of SEQ ID NO: 1564010
gccaauucucuccgcauaa

SEQ ID NO: 1848400 - RNA, 19 nt, Artificial Sequence
  Description of Artificial Sequence: Synthetic oligonucleotide
  Antisense strand to SEQ ID NO: 1848399
uuaugcggagagaauuggc

SEQ ID NO: 1848401 - RNA, 19 nt, Artificial Sequence
  Description of Artificial Sequence: Synthetic oligonucleotide
  Sense strand starting at position 3312 of SEQ ID NO: 1564010
cugucuuuagaacguccaa

SEQ ID NO: 1848402 - RNA, 19 nt, Artificial Sequence
  Description of Artificial Sequence: Synthetic oligonucleotide
  Antisense strand to SEQ ID NO: 1848401
uuggacguucuaaagacag

SEQ ID NO: 1848403 - RNA, 19 nt, Artificial Sequence
  Description of Artificial Sequence: Synthetic oligonucleotide
  Sense strand starting at position 3384 of SEQ ID NO: 1564010
gagaguguaucuccgcgaa

SEQ ID NO: 1848404 - RNA, 19 nt, Artificial Sequence
  Description of Artificial Sequence: Synthetic oligonucleotide
  Antisense strand to SEQ ID NO: 1848403
uucgcggagauacacucuc

SEQ ID NO: 1848405 - RNA, 19 nt, Artificial Sequence
  Description of Artificial Sequence: Synthetic oligonucleotide
  Sense strand starting at position 3490 of SEQ ID NO: 1564010
cauccagucccaugagguu

SEQ ID NO: 1848406 - RNA, 19 nt, Artificial Sequence
  Description of Artificial Sequence: Synthetic oligonucleotide
  Antisense strand to SEQ ID NO: 1848405
aaccucaugggacuggaug

SEQ ID NO: 1848407 - RNA, 19 nt, Artificial Sequence
  Description of Artificial Sequence: Synthetic oligonucleotide
  Sense strand starting at position 3558 of SEQ ID NO: 1564010
acacgacgucuucaagaga

SEQ ID NO: 1848408 - RNA, 19 nt, Artificial Sequence
  Description of Artificial Sequence: Synthetic oligonucleotide
  Antisense strand to SEQ ID NO: 1848407
ucucuugaagacgucgugu

SEQ ID NO: 1848409 - RNA, 19 nt, Artificial Sequence
  Description of Artificial Sequence: Synthetic oligonucleotide
  Sense strand starting at position 3766 of SEQ ID NO: 1564010
ccugcuccucuaugugaaa

SEQ ID NO: 1848410 - RNA, 19 nt, Artificial Sequence
  Description of Artificial Sequence: Synthetic oligonucleotide
  Antisense strand to SEQ ID NO: 1848409
uuucacauagaggagcagg

SEQ ID NO: 1848411 - RNA, 19 nt, Artificial Sequence
  Description of Artificial Sequence: Synthetic oligonucleotide
  Sense strand starting at position 3784 of SEQ ID NO: 1564010
aaugguuuccugggaccga

SEQ ID NO: 1848412 - RNA, 19 nt, Artificial Sequence
  Description of Artificial Sequence: Synthetic oligonucleotide
  Antisense strand to SEQ ID NO: 1848411
ucggucccaggaaaccauu

SEQ ID NO: 1848413 - RNA, 19 nt, Artificial Sequence
  Description of Artificial Sequence: Synthetic oligonucleotide
  Sense strand starting at position 3868 of SEQ ID NO: 1564010
gcaauuuguuuacagauac

SEQ ID NO: 1848414 - RNA, 19 nt, Artificial Sequence
  Description of Artificial Sequence: Synthetic oligonucleotide
  Antisense strand to SEQ ID NO: 1848413
guaucuguaaacaaauugc

SEQ ID NO: 1848415 - RNA, 19 nt, Artificial Sequence
  Description of Artificial Sequence: Synthetic oligonucleotide
  Sense strand starting at position 3907 of SEQ ID NO: 1564010
ugucuaauacgccaauggu

SEQ ID NO: 1848416 - RNA, 19 nt, Artificial Sequence
  Description of Artificial Sequence: Synthetic oligonucleotide
  Antisense strand to SEQ ID NO: 1848415
accauuggcguauuagaca

SEQ ID NO: 1848417 - RNA, 19 nt, Artificial Sequence
  Description of Artificial Sequence: Synthetic oligonucleotide
  Sense strand starting at position 3936 of SEQ ID NO: 1564010
agcagaguucuacaacaug

SEQ ID NO: 1848418 - RNA, 19 nt, Artificial Sequence
  Description of Artificial Sequence: Synthetic oligonucleotide
  Antisense strand to SEQ ID NO: 1848417
cauguuguagaacucugcu

SEQ ID NO: 1848419 - RNA, 19 nt, Artificial Sequence
  Description of Artificial Sequence: Synthetic oligonucleotide
  Sense strand starting at position 3947 of SEQ ID NO: 1564010
acaacaugguccuggguua

SEQ ID NO: 1848420 - RNA, 19 nt, Artificial Sequence
  Description of Artificial Sequence: Synthetic oligonucleotide
  Antisense strand to SEQ ID NO: 1848419
uaacccaggaccauguugu

SEQ ID NO: 1848421 - RNA, 19 nt, Artificial Sequence
  Description of Artificial Sequence: Synthetic oligonucleotide
  Sense strand starting at position 3948 of SEQ ID NO: 1564010
caacaugguccuggguuau

SEQ ID NO: 1848422 - RNA, 19 nt, Artificial Sequence
  Description of Artificial Sequence: Synthetic oligonucleotide
  Antisense strand to SEQ ID NO: 1848421
auaacccaggaccauguug

SEQ ID NO: 1848423 - RNA, 19 nt, Artificial Sequence
  Description of Artificial Sequence: Synthetic oligonucleotide
  Sense strand starting at position 2370 of SEQ ID NO: 1564011
ccaggcagcucugcauuau

SEQ ID NO: 1848424 - RNA, 19 nt, Artificial Sequence
  Description of Artificial Sequence: Synthetic oligonucleotide
  Antisense strand to SEQ ID NO: 1848423
auaaugcagagcugccugg

SEQ ID NO: 1848425 - RNA, 19 nt, Artificial Sequence
  Description of Artificial Sequence: Synthetic oligonucleotide
  Sense strand starting at position 2678 of SEQ ID NO: 1564011
cugcaaaucuagugacuug

SEQ ID NO: 1848426 - RNA, 19 nt, Artificial Sequence
  Description of Artificial Sequence: Synthetic oligonucleotide
  Antisense strand to SEQ ID NO: 1848425
caagucacuagauuugcag

SEQ ID NO: 1848427 - RNA, 19 nt, Artificial Sequence
  Description of Artificial Sequence: Synthetic oligonucleotide
  Sense strand starting at position 2758 of SEQ ID NO: 1564011
cgccguggguucuauugua

SEQ ID NO: 1848428 - RNA, 19 nt, Artificial Sequence
  Description of Artificial Sequence: Synthetic oligonucleotide
  Antisense strand to SEQ ID NO: 1848427
uacaauagaacccacggcg

SEQ ID NO: 1848429 - RNA, 19 nt, Artificial Sequence
  Description of Artificial Sequence: Synthetic oligonucleotide
  Sense strand starting at position 2768 of SEQ ID NO: 1564011
ucuauuguauccguuugau

SEQ ID NO: 1848430 - RNA, 19 nt, Artificial Sequence
  Description of Artificial Sequence: Synthetic oligonucleotide
  Antisense strand to SEQ ID NO: 1848429
aucaaacggauacaauaga

SEQ ID NO: 1848431 - RNA, 19 nt, Artificial Sequence
  Description of Artificial Sequence: Synthetic oligonucleotide
  Sense strand starting at position 3035 of SEQ ID NO: 1564011
cccugaguucugcucguca

SEQ ID NO: 1848432 - RNA, 19 nt, Artificial Sequence
  Description of Artificial Sequence: Synthetic oligonucleotide
  Antisense strand to SEQ ID NO: 1848431
ugacgagcagaacucaggg

SEQ ID NO: 1848433 - RNA, 19 nt, Artificial Sequence
  Description of Artificial Sequence: Synthetic oligonucleotide
  Sense strand starting at position 3039 of SEQ ID NO: 1564011
gaguucugcucgucagccu

SEQ ID NO: 1848434 - RNA, 19 nt, Artificial Sequence
  Description of Artificial Sequence: Synthetic oligonucleotide
  Antisense strand to SEQ ID NO: 1848433
aggcugacgagcagaacuc

SEQ ID NO: 1848435 - RNA, 19 nt, Artificial Sequence
  Description of Artificial Sequence: Synthetic oligonucleotide
  Sense strand starting at position 3058 of SEQ ID NO: 1564011
ggcacuugucagggaccaa

SEQ ID NO: 1848436 - RNA, 19 nt, Artificial Sequence
  Description of Artificial Sequence: Synthetic oligonucleotide
  Antisense strand to SEQ ID NO: 1848435
uuggucccugacaagugcc

SEQ ID NO: 1848437 - RNA, 19 nt, Artificial Sequence
  Description of Artificial Sequence: Synthetic oligonucleotide
  Sense strand starting at position 3059 of SEQ ID NO: 1564011
gcacuugucagggaccaag

SEQ ID NO: 1848438 - RNA, 19 nt, Artificial Sequence
  Description of Artificial Sequence: Synthetic oligonucleotide
  Antisense strand to SEQ ID NO: 1848437
cuuggucccugacaagugc

SEQ ID NO: 1848439 - RNA, 19 nt, Artificial Sequence
  Description of Artificial Sequence: Synthetic oligonucleotide
  Sense strand starting at position 3122 of SEQ ID NO: 1564011
gaaacaucuuuacaggagu

SEQ ID NO: 1848440 - RNA, 19 nt, Artificial Sequence
  Description of Artificial Sequence: Synthetic oligonucleotide
  Antisense strand to SEQ ID NO: 1848439
acuccuguaaagauguuuc

SEQ ID NO: 1848441 - RNA, 19 nt, Artificial Sequence
  Description of Artificial Sequence: Synthetic oligonucleotide
  Sense strand starting at position 3168 of SEQ ID NO: 1564011
ugaagcagguauuaacauu

SEQ ID NO: 1848442 - RNA, 19 nt, Artificial Sequence
  Description of Artificial Sequence: Synthetic oligonucleotide
  Antisense strand to SEQ ID NO: 1848441
aauguuaauaccugcuuca

SEQ ID NO: 1848443 - RNA, 19 nt, Artificial Sequence
  Description of Artificial Sequence: Synthetic oligonucleotide
  Sense strand starting at position 3191 of SEQ ID NO: 1564011
ugauuugacucaugaggcu

SEQ ID NO: 1848444 - RNA, 19 nt, Artificial Sequence
  Description of Artificial Sequence: Synthetic oligonucleotide
  Antisense strand to SEQ ID NO: 1848443
agccucaugagucaaauca

SEQ ID NO: 1848445 - RNA, 19 nt, Artificial Sequence
  Description of Artificial Sequence: Synthetic oligonucleotide
  Sense strand starting at position 3200 of SEQ ID NO: 1564011
ucaugaggcucagagagau

SEQ ID NO: 1848446 - RNA, 19 nt, Artificial Sequence
  Description of Artificial Sequence: Synthetic oligonucleotide
  Antisense strand to SEQ ID NO: 1848445
aucucucugagccucauga

SEQ ID NO: 1848447 - RNA, 19 nt, Artificial Sequence
  Description of Artificial Sequence: Synthetic oligonucleotide
  Sense strand starting at position 3235 of SEQ ID NO: 1564011
ggucacacaccguauugaa

SEQ ID NO: 1848448 - RNA, 19 nt, Artificial Sequence
  Description of Artificial Sequence: Synthetic oligonucleotide
  Antisense strand to SEQ ID NO: 1848447
uucaauacggugugugacc

SEQ ID NO: 1848449 - RNA, 19 nt, Artificial Sequence
  Description of Artificial Sequence: Synthetic oligonucleotide
  Sense strand starting at position 3242 of SEQ ID NO: 1564011
caccguauugaagguagaa

SEQ ID NO: 1848450 - RNA, 19 nt, Artificial Sequence
  Description of Artificial Sequence: Synthetic oligonucleotide
  Antisense strand to SEQ ID NO: 1848449
uucuaccuucaauacggug

SEQ ID NO: 1848451 - RNA, 19 nt, Artificial Sequence
  Description of Artificial Sequence: Synthetic oligonucleotide
  Sense strand starting at position 3244 of SEQ ID NO: 1564011
ccguauugaagguagaauu

SEQ ID NO: 1848452 - RNA, 19 nt, Artificial Sequence
  Description of Artificial Sequence: Synthetic oligonucleotide
  Antisense strand to SEQ ID NO: 1848451
aauucuaccuucaauacgg

SEQ ID NO: 1848453 - RNA, 19 nt, Artificial Sequence
  Description of Artificial Sequence: Synthetic oligonucleotide
  Sense strand starting at position 3284 of SEQ ID NO: 1564011
gcccaucagucuuugggua

SEQ ID NO: 1848454 - RNA, 19 nt, Artificial Sequence
  Description of Artificial Sequence: Synthetic oligonucleotide
  Antisense strand to SEQ ID NO: 1848453
uacccaaagacugaugggc

SEQ ID NO: 1848455 - RNA, 19 nt, Artificial Sequence
  Description of Artificial Sequence: Synthetic oligonucleotide
  Sense strand starting at position 3286 of SEQ ID NO: 1564011
ccaucagucuuuggguaga

SEQ ID NO: 1848456 - RNA, 19 nt, Artificial Sequence
  Description of Artificial Sequence: Synthetic oligonucleotide
  Antisense strand to SEQ ID NO: 1848455
ucuacccaaagacugaugg

SEQ ID NO: 1848457 - RNA, 19 nt, Artificial Sequence
  Description of Artificial Sequence: Synthetic oligonucleotide
  Sense strand starting at position 3288 of SEQ ID NO: 1564011
aucagucuuuggguagaau

SEQ ID NO: 1848458 - RNA, 19 nt, Artificial Sequence
  Description of Artificial Sequence: Synthetic oligonucleotide
  Antisense strand to SEQ ID NO: 1848457
auucuacccaaagacugau

SEQ ID NO: 1848459 - RNA, 19 nt, Artificial Sequence
  Description of Artificial Sequence: Synthetic oligonucleotide
  Sense strand starting at position 3289 of SEQ ID NO: 1564011
ucagucuuuggguagaauu

SEQ ID NO: 1848460 - RNA, 19 nt, Artificial Sequence
  Description of Artificial Sequence: Synthetic oligonucleotide
  Antisense strand to SEQ ID NO: 1848459
aauucuacccaaagacuga

SEQ ID NO: 1848461 - RNA, 19 nt, Artificial Sequence
  Description of Artificial Sequence: Synthetic oligonucleotide
  Sense strand starting at position 3297 of SEQ ID NO: 1564011
uggguagaauugggacuau

SEQ ID NO: 1848462 - RNA, 19 nt, Artificial Sequence
  Description of Artificial Sequence: Synthetic oligonucleotide
  Antisense strand to SEQ ID NO: 1848461
auagucccaauucuaccca

SEQ ID NO: 1848463 - RNA, 19 nt, Artificial Sequence
  Description of Artificial Sequence: Synthetic oligonucleotide
  Sense strand starting at position 3505 of SEQ ID NO: 1564011
gacaaagcuugagauguca

SEQ ID NO: 1848464 - RNA, 19 nt, Artificial Sequence
  Description of Artificial Sequence: Synthetic oligonucleotide
  Antisense strand to SEQ ID NO: 1848463
ugacaucucaagcuuuguc

SEQ ID NO: 1848465 - RNA, 19 nt, Artificial Sequence
  Description of Artificial Sequence: Synthetic oligonucleotide
  Sense strand starting at position 3565 of SEQ ID NO: 1564011
ucuggaaugucuccggaaa

SEQ ID NO: 1848466 - RNA, 19 nt, Artificial Sequence
  Description of Artificial Sequence: Synthetic oligonucleotide
  Antisense strand to SEQ ID NO: 1848465
uuuccggagacauuccaga

SEQ ID NO: 1848467 - RNA, 19 nt, Artificial Sequence
  Description of Artificial Sequence: Synthetic oligonucleotide
  Sense strand starting at position 3566 of SEQ ID NO: 1564011
cuggaaugucuccggaaag

SEQ ID NO: 1848468 - RNA, 19 nt, Artificial Sequence
  Description of Artificial Sequence: Synthetic oligonucleotide
  Antisense strand to SEQ ID NO: 1848467
cuuuccggagacauuccag

SEQ ID NO: 1848469 - RNA, 19 nt, Artificial Sequence
  Description of Artificial Sequence: Synthetic oligonucleotide
  Sense strand starting at position 3567 of SEQ ID NO: 1564011
uggaaugucuccggaaaga

SEQ ID NO: 1848470 - RNA, 19 nt, Artificial Sequence
  Description of Artificial Sequence: Synthetic oligonucleotide
  Antisense strand to SEQ ID NO: 1848469
ucuuuccggagacauucca

SEQ ID NO: 1848471 - RNA, 19 nt, Artificial Sequence
  Description of Artificial Sequence: Synthetic oligonucleotide
  Sense strand starting at position 3607 of SEQ ID NO: 1564011
gacgcagugaucuguggau

SEQ ID NO: 1848472 - RNA, 19 nt, Artificial Sequence
  Description of Artificial Sequence: Synthetic oligonucleotide
  Antisense strand to SEQ ID NO: 1848471
auccacagaucacugcguc

SEQ ID NO: 1848473 - RNA, 19 nt, Artificial Sequence
  Description of Artificial Sequence: Synthetic oligonucleotide
  Sense strand starting at position 3619 of SEQ ID NO: 1564011
uguggauguucugggcauu

SEQ ID NO: 1848474 - RNA, 19 nt, Artificial Sequence
  Description of Artificial Sequence: Synthetic oligonucleotide
  Antisense strand to SEQ ID NO: 1848473
aaugcccagaacauccaca

SEQ ID NO: 1848475 - RNA, 19 nt, Artificial Sequence
  Description of Artificial Sequence: Synthetic oligonucleotide
  Sense strand starting at position 3625 of SEQ ID NO: 1564011
uguucugggcauugggaaa

SEQ ID NO: 1848476 - RNA, 19 nt, Artificial Sequence
  Description of Artificial Sequence: Synthetic oligonucleotide
  Antisense strand to SEQ ID NO: 1848475
uuucccaaugcccagaaca

SEQ ID NO: 1848477 - RNA, 19 nt, Artificial Sequence
  Description of Artificial Sequence: Synthetic oligonucleotide
  Sense strand starting at position 3652 of SEQ ID NO: 1564011
uggaaacacugguaucaag

SEQ ID NO: 1848478 - RNA, 19 nt, Artificial Sequence
  Description of Artificial Sequence: Synthetic oligonucleotide
  Antisense strand to SEQ ID NO: 1848477
cuugauaccaguguuucca

SEQ ID NO: 1848479 - RNA, 19 nt, Artificial Sequence
  Description of Artificial Sequence: Synthetic oligonucleotide
  Sense strand starting at position 3670 of SEQ ID NO: 1564011
gacaauagaugugaauaug

SEQ ID NO: 1848480 - RNA, 19 nt, Artificial Sequence
  Description of Artificial Sequence: Synthetic oligonucleotide
  Antisense strand to SEQ ID NO: 1848479
cauauucacaucuauuguc

SEQ ID NO: 1848481 - RNA, 19 nt, Artificial Sequence
  Description of Artificial Sequence: Synthetic oligonucleotide
  Sense strand starting at position 3676 of SEQ ID NO: 1564011
agaugugaauauguccaau

SEQ ID NO: 1848482 - RNA, 19 nt, Artificial Sequence
  Description of Artificial Sequence: Synthetic oligonucleotide
  Antisense strand to SEQ ID NO: 1848481
auuggacauauucacaucu

SEQ ID NO: 1848483 - RNA, 19 nt, Artificial Sequence
  Description of Artificial Sequence: Synthetic oligonucleotide
  Sense strand starting at position 3710 of SEQ ID NO: 1564011
acuccuuuauauuggaguu

SEQ ID NO: 1848484 - RNA, 19 nt, Artificial Sequence
  Description of Artificial Sequence: Synthetic oligonucleotide
  Antisense strand to SEQ ID NO: 1848483
aacuccaauauaaaggagu

SEQ ID NO: 1848485 - RNA, 19 nt, Artificial Sequence
  Description of Artificial Sequence: Synthetic oligonucleotide
  Sense strand starting at position 3712 of SEQ ID NO: 1564011
uccuuuauauuggaguuaa

SEQ ID NO: 1848486 - RNA, 19 nt, Artificial Sequence
  Description of Artificial Sequence: Synthetic oligonucleotide
  Antisense strand to SEQ ID NO: 1848485
uuaacuccaauauaaagga

SEQ ID NO: 1848487 - RNA, 19 nt, Artificial Sequence
  Description of Artificial Sequence: Synthetic oligonucleotide
  Sense strand starting at position 3723 of SEQ ID NO: 1564011
ggaguuaaccuuugcccuu

SEQ ID NO: 1848488 - RNA, 19 nt, Artificial Sequence
  Description of Artificial Sequence: Synthetic oligonucleotide
  Antisense strand to SEQ ID NO: 1848487
aagggcaaagguuaacucc

SEQ ID NO: 1848489 - RNA, 19 nt, Artificial Sequence
  Description of Artificial Sequence: Synthetic oligonucleotide
  Sense strand starting at position 3738 of SEQ ID NO: 1564011
ccuugaaaccaguggaaau

SEQ ID NO: 1848490 - RNA, 19 nt, Artificial Sequence
  Description of Artificial Sequence: Synthetic oligonucleotide
  Antisense strand to SEQ ID NO: 1848489
auuuccacugguuucaagg

SEQ ID NO: 1848491 - RNA, 19 nt, Artificial Sequence
  Description of Artificial Sequence: Synthetic oligonucleotide
  Sense strand starting at position 3749 of SEQ ID NO: 1564011
guggaaaugucuuaauuac

SEQ ID NO: 1848492 - RNA, 19 nt, Artificial Sequence
  Description of Artificial Sequence: Synthetic oligonucleotide
  Antisense strand to SEQ ID NO: 1848491
guaauuaagacauuuccac

SEQ ID NO: 1848493 - RNA, 19 nt, Artificial Sequence
  Description of Artificial Sequence: Synthetic oligonucleotide
  Sense strand starting at position 3782 of SEQ ID NO: 1564011
cuccuugcaugguagauaa

SEQ ID NO: 1848494 - RNA, 19 nt, Artificial Sequence
  Description of Artificial Sequence: Synthetic oligonucleotide
  Antisense strand to SEQ ID NO: 1848493
uuaucuaccaugcaaggag

SEQ ID NO: 1848495 - RNA, 19 nt, Artificial Sequence
  Description of Artificial Sequence: Synthetic oligonucleotide
  Sense strand starting at position 3909 of SEQ ID NO: 1564011
ggcuuagaccaguagugac

SEQ ID NO: 1848496 - RNA, 19 nt, Artificial Sequence
  Description of Artificial Sequence: Synthetic oligonucleotide
  Antisense strand to SEQ ID NO: 1848495
gucacuacuggucuaagcc

SEQ ID NO: 1848497 - RNA, 19 nt, Artificial Sequence
  Description of Artificial Sequence: Synthetic oligonucleotide
  Sense strand starting at position 3970 of SEQ ID NO: 1564011
gcaaucugaucugcugagu

SEQ ID NO: 1848498 - RNA, 19 nt, Artificial Sequence
  Description of Artificial Sequence: Synthetic oligonucleotide
  Antisense strand to SEQ ID NO: 1848497
acucagcagaucagauugc

SEQ ID NO: 1848499 - RNA, 19 nt, Artificial Sequence
  Description of Artificial Sequence: Synthetic oligonucleotide
  Sense strand starting at position 3975 of SEQ ID NO: 1564011
cugaucugcugagucugaa

SEQ ID NO: 1848500 - RNA, 19 nt, Artificial Sequence
  Description of Artificial Sequence: Synthetic oligonucleotide
  Antisense strand to SEQ ID NO: 1848499
uucagacucagcagaucag

SEQ ID NO: 1848501 - RNA, 19 nt, Artificial Sequence
  Description of Artificial Sequence: Synthetic oligonucleotide
  Sense strand starting at position 3978 of SEQ ID NO: 1564011
aucugcugagucugaaaca

SEQ ID NO: 1848502 - RNA, 19 nt, Artificial Sequence
  Description of Artificial Sequence: Synthetic oligonucleotide
  Antisense strand to SEQ ID NO: 1848501
uguuucagacucagcagau

SEQ ID NO: 1848503 - RNA, 19 nt, Artificial Sequence
  Description of Artificial Sequence: Synthetic oligonucleotide
  Sense strand starting at position 24 of SEQ ID NO: 1564012
gucuucugagccuauguuu

SEQ ID NO: 1848504 - RNA, 19 nt, Artificial Sequence
  Description of Artificial Sequence: Synthetic oligonucleotide
  Antisense strand to SEQ ID NO: 1848503
aaacauaggcucagaagac

SEQ ID NO: 1848505 - RNA, 19 nt, Artificial Sequence
  Description of Artificial Sequence: Synthetic oligonucleotide
  Sense strand starting at position 345 of SEQ ID NO: 1564012
ccugauggcuucuccuuau

SEQ ID NO: 1848506 - RNA, 19 nt, Artificial Sequence
  Description of Artificial Sequence: Synthetic oligonucleotide
  Antisense strand to SEQ ID NO: 1848505
auaaggagaagccaucagg

SEQ ID NO: 1848507 - RNA, 19 nt, Artificial Sequence
  Description of Artificial Sequence: Synthetic oligonucleotide
  Sense strand starting at position 601 of SEQ ID NO: 1564012
uggagacuuucucuccaau

SEQ ID NO: 1848508 - RNA, 19 nt, Artificial Sequence
  Description of Artificial Sequence: Synthetic oligonucleotide
  Antisense strand to SEQ ID NO: 1848507
auuggagagaaagucucca

SEQ ID NO: 1848509 - RNA, 19 nt, Artificial Sequence
  Description of Artificial Sequence: Synthetic oligonucleotide
  Sense strand starting at position 621 of SEQ ID NO: 1564012
uucggagaggucugcagaa

SEQ ID NO: 1848510 - RNA, 19 nt, Artificial Sequence
  Description of Artificial Sequence: Synthetic oligonucleotide
  Antisense strand to SEQ ID NO: 1848509
uucugcagaccucuccgaa

SEQ ID NO: 1848511 - RNA, 19 nt, Artificial Sequence
  Description of Artificial Sequence: Synthetic oligonucleotide
  Sense strand starting at position 623 of SEQ ID NO: 1564012
cggagaggucugcagaaac

SEQ ID NO: 1848512 - RNA, 19 nt, Artificial Sequence
  Description of Artificial Sequence: Synthetic oligonucleotide
  Antisense strand to SEQ ID NO: 1848511
guuucugcagaccucuccg

SEQ ID NO: 1848513 - RNA, 19 nt, Artificial Sequence
  Description of Artificial Sequence: Synthetic oligonucleotide
  Sense strand starting at position 700 of SEQ ID NO: 1564012
ggcacugcuccacaguuau

SEQ ID NO: 1848514 - RNA, 19 nt, Artificial Sequence
  Description of Artificial Sequence: Synthetic oligonucleotide
  Antisense strand to SEQ ID NO: 1848513
auaacuguggagcagugcc

SEQ ID NO: 1848515 - RNA, 19 nt, Artificial Sequence
  Description of Artificial Sequence: Synthetic oligonucleotide
  Sense strand starting at position 720 of SEQ ID NO: 1564012
gagucauuguuggccugga

SEQ ID NO: 1848516 - RNA, 19 nt, Artificial Sequence
  Description of Artificial Sequence: Synthetic oligonucleotide
  Antisense strand to SEQ ID NO: 1848515
uccaggccaacaaugacuc

SEQ ID NO: 1848517 - RNA, 19 nt, Artificial Sequence
  Description of Artificial Sequence: Synthetic oligonucleotide
  Sense strand starting at position 767 of SEQ ID NO: 1564012
acguaagcucuccagcaaa

SEQ ID NO: 1848518 - RNA, 19 nt, Artificial Sequence
  Description of Artificial Sequence: Synthetic oligonucleotide
  Antisense strand to SEQ ID NO: 1848517
uuugcuggagagcuuacgu

SEQ ID NO: 1848519 - RNA, 19 nt, Artificial Sequence
  Description of Artificial Sequence: Synthetic oligonucleotide
  Sense strand starting at position 822 of SEQ ID NO: 1564012
ggcauuaucucagugaccu

SEQ ID NO: 1848520 - RNA, 19 nt, Artificial Sequence
  Description of Artificial Sequence: Synthetic oligonucleotide
  Antisense strand to SEQ ID NO: 1848519
aggucacugagauaaugcc

SEQ ID NO: 1848521 - RNA, 19 nt, Artificial Sequence
  Description of Artificial Sequence: Synthetic oligonucleotide
  Sense strand starting at position 823 of SEQ ID NO: 1564012
gcauuaucucagugaccug

SEQ ID NO: 1848522 - RNA, 19 nt, Artificial Sequence
  Description of Artificial Sequence: Synthetic oligonucleotide
  Antisense strand to SEQ ID NO: 1848521
caggucacugagauaaugc

SEQ ID NO: 1848523 - RNA, 19 nt, Artificial Sequence
  Description of Artificial Sequence: Synthetic oligonucleotide
  Sense strand starting at position 917 of SEQ ID NO: 1564012
ccacauacuuucuuucgga

SEQ ID NO: 1848524 - RNA, 19 nt, Artificial Sequence
  Description of Artificial Sequence: Synthetic oligonucleotide
  Antisense strand to SEQ ID NO: 1848523
uccgaaagaaaguaugugg

SEQ ID NO: 1848525 - RNA, 19 nt, Artificial Sequence
  Description of Artificial Sequence: Synthetic oligonucleotide
  Sense strand starting at position 1135 of SEQ ID NO: 1564012
guaugugacugggcagagu

SEQ ID NO: 1848526 - RNA, 19 nt, Artificial Sequence
  Description of Artificial Sequence: Synthetic oligonucleotide
  Antisense strand to SEQ ID NO: 1848525
acucugcccagucacauac

SEQ ID NO: 1848527 - RNA, 19 nt, Artificial Sequence
  Description of Artificial Sequence: Synthetic oligonucleotide
  Sense strand starting at position 1146 of SEQ ID NO: 1564012
ggcagaguaguguaauuga

SEQ ID NO: 1848528 - RNA, 19 nt, Artificial Sequence
  Description of Artificial Sequence: Synthetic oligonucleotide
  Antisense strand to SEQ ID NO: 1848527
ucaauuacacuacucugcc

SEQ ID NO: 1848529 - RNA, 19 nt, Artificial Sequence
  Description of Artificial Sequence: Synthetic oligonucleotide
  Sense strand starting at position 1149 of SEQ ID NO: 1564012
agaguaguguaauugacag

SEQ ID NO: 1848530 - RNA, 19 nt, Artificial Sequence
  Description of Artificial Sequence: Synthetic oligonucleotide
  Antisense strand to SEQ ID NO: 1848529
cugucaauuacacuacucu

SEQ ID NO: 1848531 - RNA, 19 nt, Artificial Sequence
  Description of Artificial Sequence: Synthetic oligonucleotide
  Sense strand starting at position 1183 of SEQ ID NO: 1564012
ugaagacugccuuggcauu

SEQ ID NO: 1848532 - RNA, 19 nt, Artificial Sequence
  Description of Artificial Sequence: Synthetic oligonucleotide
  Antisense strand to SEQ ID NO: 1848531
aaugccaaggcagucuuca

SEQ ID NO: 1848533 - RNA, 19 nt, Artificial Sequence
  Description of Artificial Sequence: Synthetic oligonucleotide
  Sense strand starting at position 1213 of SEQ ID NO: 1564012
ugaacauucucccuaggac

SEQ ID NO: 1848534 - RNA, 19 nt, Artificial Sequence
  Description of Artificial Sequence: Synthetic oligonucleotide
  Antisense strand to SEQ ID NO: 1848533
guccuagggagaauguuca

SEQ ID NO: 1848535 - RNA, 19 nt, Artificial Sequence
  Description of Artificial Sequence: Synthetic oligonucleotide
  Sense strand starting at position 1352 of SEQ ID NO: 1564012
gcaccaauccucuagcagu

SEQ ID NO: 1848536 - RNA, 19 nt, Artificial Sequence
  Description of Artificial Sequence: Synthetic oligonucleotide
  Antisense strand to SEQ ID NO: 1848535
acugcuagaggauuggugc

SEQ ID NO: 1848537 - RNA, 19 nt, Artificial Sequence
  Description of Artificial Sequence: Synthetic oligonucleotide
  Sense strand starting at position 1390 of SEQ ID NO: 1564012
cuuucuauggacugaucua

SEQ ID NO: 1848538 - RNA, 19 nt, Artificial Sequence
  Description of Artificial Sequence: Synthetic oligonucleotide
  Antisense strand to SEQ ID NO: 1848537
uagaucaguccauagaaag

SEQ ID NO: 1848539 - RNA, 19 nt, Artificial Sequence
  Description of Artificial Sequence: Synthetic oligonucleotide
  Sense strand starting at position 1429 of SEQ ID NO: 1564012
ucaguuugacagcacucaa

SEQ ID NO: 1848540 - RNA, 19 nt, Artificial Sequence
  Description of Artificial Sequence: Synthetic oligonucleotide
  Antisense strand to SEQ ID NO: 1848539
uugagugcugucaaacuga

SEQ ID NO: 1848541 - RNA, 19 nt, Artificial Sequence
  Description of Artificial Sequence: Synthetic oligonucleotide
  Sense strand starting at position 1519 of SEQ ID NO: 1564012
ggaugagagcauuguuaau

SEQ ID NO: 1848542 - RNA, 19 nt, Artificial Sequence
  Description of Artificial Sequence: Synthetic oligonucleotide
  Antisense strand to SEQ ID NO: 1848541
auuaacaaugcucucaucc

SEQ ID NO: 1848543 - RNA, 19 nt, Artificial Sequence
  Description of Artificial Sequence: Synthetic oligonucleotide
  Sense strand starting at position 1710 of SEQ ID NO: 1564012
guggguucuuccucaaagu

SEQ ID NO: 1848544 - RNA, 19 nt, Artificial Sequence
  Description of Artificial Sequence: Synthetic oligonucleotide
  Antisense strand to SEQ ID NO: 1848543
acuuugaggaagaacccac

SEQ ID NO: 1848545 - RNA, 19 nt, Artificial Sequence
  Description of Artificial Sequence: Synthetic oligonucleotide
  Sense strand starting at position 1946 of SEQ ID NO: 1564012
ucaggaaugccugacggau

SEQ ID NO: 1848546 - RNA, 19 nt, Artificial Sequence
  Description of Artificial Sequence: Synthetic oligonucleotide
  Antisense strand to SEQ ID NO: 1848545
auccgucaggcauuccuga

SEQ ID NO: 1848547 - RNA, 19 nt, Artificial Sequence
  Description of Artificial Sequence: Synthetic oligonucleotide
  Sense strand starting at position 1952 of SEQ ID NO: 1564012
augccugacggaugagaaa

SEQ ID NO: 1848548 - RNA, 19 nt, Artificial Sequence
  Description of Artificial Sequence: Synthetic oligonucleotide
  Antisense strand to SEQ ID NO: 1848547
uuucucauccgucaggcau

SEQ ID NO: 1848549 - RNA, 19 nt, Artificial Sequence
  Description of Artificial Sequence: Synthetic oligonucleotide
  Sense strand starting at position 2009 of SEQ ID NO: 1564012
uguggagauugugugacaa

SEQ ID NO: 1848550 - RNA, 19 nt, Artificial Sequence
  Description of Artificial Sequence: Synthetic oligonucleotide
  Antisense strand to SEQ ID NO: 1848549
uugucacacaaucuccaca

SEQ ID NO: 1848551 - RNA, 19 nt, Artificial Sequence
  Description of Artificial Sequence: Synthetic oligonucleotide
  Sense strand starting at position 2032 of SEQ ID NO: 1564012
caguguugccauggauaca

SEQ ID NO: 1848552 - RNA, 19 nt, Artificial Sequence
  Description of Artificial Sequence: Synthetic oligonucleotide
  Antisense strand to SEQ ID NO: 1848551
uguauccauggcaacacug

SEQ ID NO: 1848553 - RNA, 19 nt, Artificial Sequence
  Description of Artificial Sequence: Synthetic oligonucleotide
  Sense strand starting at position 2084 of SEQ ID NO: 1564012
gggagugucaugugguaag

SEQ ID NO: 1848554 - RNA, 19 nt, Artificial Sequence
  Description of Artificial Sequence: Synthetic oligonucleotide
  Antisense strand to SEQ ID NO: 1848553
cuuaccacaugacacuccc

SEQ ID NO: 1848555 - RNA, 19 nt, Artificial Sequence
  Description of Artificial Sequence: Synthetic oligonucleotide
  Sense strand starting at position 2128 of SEQ ID NO: 1564012
ugaugucauuggccuccaa

SEQ ID NO: 1848556 - RNA, 19 nt, Artificial Sequence
  Description of Artificial Sequence: Synthetic oligonucleotide
  Antisense strand to SEQ ID NO: 1848555
uuggaggccaaugacauca

SEQ ID NO: 1848557 - RNA, 19 nt, Artificial Sequence
  Description of Artificial Sequence: Synthetic oligonucleotide
  Sense strand starting at position 2132 of SEQ ID NO: 1564012
gucauuggccuccaaccaa

SEQ ID NO: 1848558 - RNA, 19 nt, Artificial Sequence
  Description of Artificial Sequence: Synthetic oligonucleotide
  Antisense strand to SEQ ID NO: 1848557
uugguuggaggccaaugac

SEQ ID NO: 1848559 - RNA, 19 nt, Artificial Sequence
  Description of Artificial Sequence: Synthetic oligonucleotide
  Sense strand starting at position 2566 of SEQ ID NO: 1564012
ggaucuguccaaggcaaag

SEQ ID NO: 1848560 - RNA, 19 nt, Artificial Sequence
  Description of Artificial Sequence: Synthetic oligonucleotide
  Antisense strand to SEQ ID NO: 1848559
cuuugccuuggacagaucc

SEQ ID NO: 1848561 - RNA, 19 nt, Artificial Sequence
  Description of Artificial Sequence: Synthetic oligonucleotide
  Sense strand starting at position 2598 of SEQ ID NO: 1564012
cugugauucugucccacac

SEQ ID NO: 1848562 - RNA, 19 nt, Artificial Sequence
  Description of Artificial Sequence: Synthetic oligonucleotide
  Antisense strand to SEQ ID NO: 1848561
gugugggacagaaucacag

SEQ ID NO: 1848563 - RNA, 19 nt, Artificial Sequence
  Description of Artificial Sequence: Synthetic oligonucleotide
  Sense strand starting at position 3104 of SEQ ID NO: 1564012
aggcaagucuaacugauau

SEQ ID NO: 1848564 - RNA, 19 nt, Artificial Sequence
  Description of Artificial Sequence: Synthetic oligonucleotide
  Antisense strand to SEQ ID NO: 1848563
auaucaguuagacuugccu

SEQ ID NO: 1848565 - RNA, 19 nt, Artificial Sequence
  Description of Artificial Sequence: Synthetic oligonucleotide
  Sense strand starting at position 3164 of SEQ ID NO: 1564012
ccacccgguuaucuacaua

SEQ ID NO: 1848566 - RNA, 19 nt, Artificial Sequence
  Description of Artificial Sequence: Synthetic oligonucleotide
  Antisense strand to SEQ ID NO: 1848565
uauguagauaaccgggugg

SEQ ID NO: 1848567 - RNA, 19 nt, Artificial Sequence
  Description of Artificial Sequence: Synthetic oligonucleotide
  Sense strand starting at position 3271 of SEQ ID NO: 1564012
cuacuauccugacugcagu

SEQ ID NO: 1848568 - RNA, 19 nt, Artificial Sequence
  Description of Artificial Sequence: Synthetic oligonucleotide
  Antisense strand to SEQ ID NO: 1848567
acugcagucaggauaguag

SEQ ID NO: 1848569 - RNA, 19 nt, Artificial Sequence
  Description of Artificial Sequence: Synthetic oligonucleotide
  Sense strand starting at position 3298 of SEQ ID NO: 1564012
gcaggucaaggguggaaua

SEQ ID NO: 1848570 - RNA, 19 nt, Artificial Sequence
  Description of Artificial Sequence: Synthetic oligonucleotide
  Antisense strand to SEQ ID NO: 1848569
uauuccacccuugaccugc

SEQ ID NO: 1848571 - RNA, 19 nt, Artificial Sequence
  Description of Artificial Sequence: Synthetic oligonucleotide
  Sense strand starting at position 3310 of SEQ ID NO: 1564012
uggaauaggucucccugaa

SEQ ID NO: 1848572 - RNA, 19 nt, Artificial Sequence
  Description of Artificial Sequence: Synthetic oligonucleotide
  Antisense strand to SEQ ID NO: 1848571
uucagggagaccuauucca

SEQ ID NO: 1848573 - RNA, 19 nt, Artificial Sequence
  Description of Artificial Sequence: Synthetic oligonucleotide
  Sense strand starting at position 3314 of SEQ ID NO: 1564012
auaggucucccugaaguuu

SEQ ID NO: 1848574 - RNA, 19 nt, Artificial Sequence
  Description of Artificial Sequence: Synthetic oligonucleotide
  Antisense strand to SEQ ID NO: 1848573
aaacuucagggagaccuau

SEQ ID NO: 1848575 - RNA, 19 nt, Artificial Sequence
  Description of Artificial Sequence: Synthetic oligonucleotide
  Sense strand starting at position 3637 of SEQ ID NO: 1564012
ugaaguucugccuggaaau

SEQ ID NO: 1848576 - RNA, 19 nt, Artificial Sequence
  Description of Artificial Sequence: Synthetic oligonucleotide
  Antisense strand to SEQ ID NO: 1848575
auuuccaggcagaacuuca

SEQ ID NO: 1848577 - RNA, 19 nt, Artificial Sequence
  Description of Artificial Sequence: Synthetic oligonucleotide
  Sense strand starting at position 3638 of SEQ ID NO: 1564012
gaaguucugccuggaaaug

SEQ ID NO: 1848578 - RNA, 19 nt, Artificial Sequence
  Description of Artificial Sequence: Synthetic oligonucleotide
  Antisense strand to SEQ ID NO: 1848577
cauuuccaggcagaacuuc

SEQ ID NO: 1848579 - RNA, 19 nt, Artificial Sequence
  Description of Artificial Sequence: Synthetic oligonucleotide
  Sense strand starting at position 3772 of SEQ ID NO: 1564012
ccguaaucuggguugcugu

SEQ ID NO: 1848580 - RNA, 19 nt, Artificial Sequence
  Description of Artificial Sequence: Synthetic oligonucleotide
  Antisense strand to SEQ ID NO: 1848579
acagcaacccagauuacgg

SEQ ID NO: 1848581 - RNA, 19 nt, Artificial Sequence
  Description of Artificial Sequence: Synthetic oligonucleotide
  Sense strand starting at position 3917 of SEQ ID NO: 1564012
ggaagagguugucugguga

SEQ ID NO: 1848582 - RNA, 19 nt, Artificial Sequence
  Description of Artificial Sequence: Synthetic oligonucleotide
  Antisense strand to SEQ ID NO: 1848581
ucaccagacaaccucuucc

SEQ ID NO: 1848583 - RNA, 19 nt, Artificial Sequence
  Description of Artificial Sequence: Synthetic oligonucleotide
  Sense strand starting at position 36 of SEQ ID NO: 1564013
ucaggaaugccugacggau

SEQ ID NO: 1848584 - RNA, 19 nt, Artificial Sequence
  Description of Artificial Sequence: Synthetic oligonucleotide
  Antisense strand to SEQ ID NO: 1848583
auccgucaggcauuccuga

SEQ ID NO: 1848585 - RNA, 19 nt, Artificial Sequence
  Description of Artificial Sequence: Synthetic oligonucleotide
  Sense strand starting at position 42 of SEQ ID NO: 1564013
augccugacggaugagaaa

SEQ ID NO: 1848586 - RNA, 19 nt, Artificial Sequence
  Description of Artificial Sequence: Synthetic oligonucleotide
  Antisense strand to SEQ ID NO: 1848585
uuucucauccgucaggcau

SEQ ID NO: 1848587 - RNA, 19 nt, Artificial Sequence
  Description of Artificial Sequence: Synthetic oligonucleotide
  Sense strand starting at position 99 of SEQ ID NO: 1564013
uguggagauugugugacaa

SEQ ID NO: 1848588 - RNA, 19 nt, Artificial Sequence
  Description of Artificial Sequence: Synthetic oligonucleotide
  Antisense strand to SEQ ID NO: 1848587
uugucacacaaucuccaca

SEQ ID NO: 1848589 - RNA, 19 nt, Artificial Sequence
  Description of Artificial Sequence: Synthetic oligonucleotide
  Sense strand starting at position 122 of SEQ ID NO: 1564013
caguguugccauggauaca

SEQ ID NO: 1848590 - RNA, 19 nt, Artificial Sequence
  Description of Artificial Sequence: Synthetic oligonucleotide
  Antisense strand to SEQ ID NO: 1848589
uguauccauggcaacacug

SEQ ID NO: 1848591 - RNA, 19 nt, Artificial Sequence
  Description of Artificial Sequence: Synthetic oligonucleotide
  Sense strand starting at position 174 of SEQ ID NO: 1564013
gggagugucaugugguaag

SEQ ID NO: 1848592 - RNA, 19 nt, Artificial Sequence
  Description of Artificial Sequence: Synthetic oligonucleotide
  Antisense strand to SEQ ID NO: 1848591
cuuaccacaugacacuccc

SEQ ID NO: 1848593 - RNA, 19 nt, Artificial Sequence
  Description of Artificial Sequence: Synthetic oligonucleotide
  Sense strand starting at position 218 of SEQ ID NO: 1564013
ugaugucauuggccuccaa

SEQ ID NO: 1848594 - RNA, 19 nt, Artificial Sequence
  Description of Artificial Sequence: Synthetic oligonucleotide
  Antisense strand to SEQ ID NO: 1848593
uuggaggccaaugacauca

SEQ ID NO: 1848595 - RNA, 19 nt, Artificial Sequence
  Description of Artificial Sequence: Synthetic oligonucleotide
  Sense strand starting at position 222 of SEQ ID NO: 1564013
gucauuggccuccaaccaa

SEQ ID NO: 1848596 - RNA, 19 nt, Artificial Sequence
  Description of Artificial Sequence: Synthetic oligonucleotide
  Antisense strand to SEQ ID NO: 1848595
uugguuggaggccaaugac

SEQ ID NO: 1848597 - RNA, 19 nt, Artificial Sequence
  Description of Artificial Sequence: Synthetic oligonucleotide
  Sense strand starting at position 656 of SEQ ID NO: 1564013
ggaucuguccaaggcaaag

SEQ ID NO: 1848598 - RNA, 19 nt, Artificial Sequence
  Description of Artificial Sequence: Synthetic oligonucleotide
  Antisense strand to SEQ ID NO: 1848597
cuuugccuuggacagaucc

SEQ ID NO: 1848599 - RNA, 19 nt, Artificial Sequence
  Description of Artificial Sequence: Synthetic oligonucleotide
  Sense strand starting at position 688 of SEQ ID NO: 1564013
cugugauucugucccacac

SEQ ID NO: 1848600 - RNA, 19 nt, Artificial Sequence
  Description of Artificial Sequence: Synthetic oligonucleotide
  Antisense strand to SEQ ID NO: 1848599
gugugggacagaaucacag

SEQ ID NO: 1848601 - RNA, 19 nt, Artificial Sequence
  Description of Artificial Sequence: Synthetic oligonucleotide
  Sense strand starting at position 1194 of SEQ ID NO: 1564013
aggcaagucuaacugauau

SEQ ID NO: 1848602 - RNA, 19 nt, Artificial Sequence
  Description of Artificial Sequence: Synthetic oligonucleotide
  Antisense strand to SEQ ID NO: 1848601
auaucaguuagacuugccu

SEQ ID NO: 1848603 - RNA, 19 nt, Artificial Sequence
  Description of Artificial Sequence: Synthetic oligonucleotide
  Sense strand starting at position 1254 of SEQ ID NO: 1564013
ccacccgguuaucuacaua

SEQ ID NO: 1848604 - RNA, 19 nt, Artificial Sequence
  Description of Artificial Sequence: Synthetic oligonucleotide
  Antisense strand to SEQ ID NO: 1848603
uauguagauaaccgggugg

SEQ ID NO: 1848605 - RNA, 19 nt, Artificial Sequence
  Description of Artificial Sequence: Synthetic oligonucleotide
  Sense strand starting at position 1361 of SEQ ID NO: 1564013
cuacuauccugacugcagu

SEQ ID NO: 1848606 - RNA, 19 nt, Artificial Sequence
  Description of Artificial Sequence: Synthetic oligonucleotide
  Antisense strand to SEQ ID NO: 1848605
acugcagucaggauaguag

SEQ ID NO: 1848607 - RNA, 19 nt, Artificial Sequence
  Description of Artificial Sequence: Synthetic oligonucleotide
  Sense strand starting at position 1388 of SEQ ID NO: 1564013
gcaggucaaggguggaaua

SEQ ID NO: 1848608 - RNA, 19 nt, Artificial Sequence
  Description of Artificial Sequence: Synthetic oligonucleotide
  Antisense strand to SEQ ID NO: 1848607
uauuccacccuugaccugc

SEQ ID NO: 1848609 - RNA, 19 nt, Artificial Sequence
  Description of Artificial Sequence: Synthetic oligonucleotide
  Sense strand starting at position 1400 of SEQ ID NO: 1564013
uggaauaggucucccugaa

SEQ ID NO: 1848610 - RNA, 19 nt, Artificial Sequence
  Description of Artificial Sequence: Synthetic oligonucleotide
  Antisense strand to SEQ ID NO: 1848609
uucagggagaccuauucca

SEQ ID NO: 1848611 - RNA, 19 nt, Artificial Sequence
  Description of Artificial Sequence: Synthetic oligonucleotide
  Sense strand starting at position 1404 of SEQ ID NO: 1564013
auaggucucccugaaguuu

SEQ ID NO: 1848612 - RNA, 19 nt, Artificial Sequence
  Description of Artificial Sequence: Synthetic oligonucleotide
  Antisense strand to SEQ ID NO: 1848611
aaacuucagggagaccuau

SEQ ID NO: 1848613 - RNA, 19 nt, Artificial Sequence
  Description of Artificial Sequence: Synthetic oligonucleotide
  Sense strand starting at position 1727 of SEQ ID NO: 1564013
ugaaguucugccuggaaau

SEQ ID NO: 1848614 - RNA, 19 nt, Artificial Sequence
  Description of Artificial Sequence: Synthetic oligonucleotide
  Antisense strand to SEQ ID NO: 1848613
auuuccaggcagaacuuca

SEQ ID NO: 1848615 - RNA, 19 nt, Artificial Sequence
  Description of Artificial Sequence: Synthetic oligonucleotide
  Sense strand starting at position 1728 of SEQ ID NO: 1564013
gaaguucugccuggaaaug

SEQ ID NO: 1848616 - RNA, 19 nt, Artificial Sequence
  Description of Artificial Sequence: Synthetic oligonucleotide
  Antisense strand to SEQ ID NO: 1848615
cauuuccaggcagaacuuc

SEQ ID NO: 1848617 - RNA, 19 nt, Artificial Sequence
  Description of Artificial Sequence: Synthetic oligonucleotide
  Sense strand starting at position 1862 of SEQ ID NO: 1564013
ccguaaucuggguugcugu

SEQ ID NO: 1848618 - RNA, 19 nt, Artificial Sequence
  Description of Artificial Sequence: Synthetic oligonucleotide
  Antisense strand to SEQ ID NO: 1848617
acagcaacccagauuacgg

SEQ ID NO: 1848619 - RNA, 19 nt, Artificial Sequence
  Description of Artificial Sequence: Synthetic oligonucleotide
  Sense strand starting at position 2007 of SEQ ID NO: 1564013
ggaagagguugucugguga

SEQ ID NO: 1848620 - RNA, 19 nt, Artificial Sequence
  Description of Artificial Sequence: Synthetic oligonucleotide
  Antisense strand to SEQ ID NO: 1848619
ucaccagacaaccucuucc

SEQ ID NO: 1848621 - RNA, 19 nt, Artificial Sequence
  Description of Artificial Sequence: Synthetic oligonucleotide
  Sense strand starting at position 2282 of SEQ ID NO: 1564013
ccacgugagcgcccuuaua

SEQ ID NO: 1848622 - RNA, 19 nt, Artificial Sequence
  Description of Artificial Sequence: Synthetic oligonucleotide
  Antisense strand to SEQ ID NO: 1848621
uauaagggcgcucacgugg

SEQ ID NO: 1848623 - RNA, 19 nt, Artificial Sequence
  Description of Artificial Sequence: Synthetic oligonucleotide
  Sense strand starting at position 2303 of SEQ ID NO: 1564013
cgagucauagcccucguuu

SEQ ID NO: 1848624 - RNA, 19 nt, Artificial Sequence
  Description of Artificial Sequence: Synthetic oligonucleotide
  Antisense strand to SEQ ID NO: 1848623
aaacgagggcuaugacucg

SEQ ID NO: 1848625 - RNA, 19 nt, Artificial Sequence
  Description of Artificial Sequence: Synthetic oligonucleotide
  Sense strand starting at position 2670 of SEQ ID NO: 1564013
cagggaugguuccacugaa

SEQ ID NO: 1848626 - RNA, 19 nt, Artificial Sequence
  Description of Artificial Sequence: Synthetic oligonucleotide
  Antisense strand to SEQ ID NO: 1848625
uucaguggaaccaucccug

SEQ ID NO: 1848627 - RNA, 19 nt, Artificial Sequence
  Description of Artificial Sequence: Synthetic oligonucleotide
  Sense strand starting at position 2682 of SEQ ID NO: 1564013
cacugaaagcuagguuacu

SEQ ID NO: 1848628 - RNA, 19 nt, Artificial Sequence
  Description of Artificial Sequence: Synthetic oligonucleotide
  Antisense strand to SEQ ID NO: 1848627
aguaaccuagcuuucagug

SEQ ID NO: 1848629 - RNA, 19 nt, Artificial Sequence
  Description of Artificial Sequence: Synthetic oligonucleotide
  Sense strand starting at position 2683 of SEQ ID NO: 1564013
acugaaagcuagguuacuu

SEQ ID NO: 1848630 - RNA, 19 nt, Artificial Sequence
  Description of Artificial Sequence: Synthetic oligonucleotide
  Antisense strand to SEQ ID NO: 1848629
aaguaaccuagcuuucagu

SEQ ID NO: 1848631 - RNA, 19 nt, Artificial Sequence
  Description of Artificial Sequence: Synthetic oligonucleotide
  Sense strand starting at position 2735 of SEQ ID NO: 1564013
gggucugaagccuaugauu

SEQ ID NO: 1848632 - RNA, 19 nt, Artificial Sequence
  Description of Artificial Sequence: Synthetic oligonucleotide
  Antisense strand to SEQ ID NO: 1848631
aaucauaggcuucagaccc

SEQ ID NO: 1848633 - RNA, 19 nt, Artificial Sequence
  Description of Artificial Sequence: Synthetic oligonucleotide
  Sense strand starting at position 2737 of SEQ ID NO: 1564013
gucugaagccuaugauuac

SEQ ID NO: 1848634 - RNA, 19 nt, Artificial Sequence
  Description of Artificial Sequence: Synthetic oligonucleotide
  Antisense strand to SEQ ID NO: 1848633
guaaucauaggcuucagac

SEQ ID NO: 1848635 - RNA, 19 nt, Artificial Sequence
  Description of Artificial Sequence: Synthetic oligonucleotide
  Sense strand starting at position 2740 of SEQ ID NO: 1564013
ugaagccuaugauuacauu

SEQ ID NO: 1848636 - RNA, 19 nt, Artificial Sequence
  Description of Artificial Sequence: Synthetic oligonucleotide
  Antisense strand to SEQ ID NO: 1848635
aauguaaucauaggcuuca

SEQ ID NO: 1848637 - RNA, 19 nt, Artificial Sequence
  Description of Artificial Sequence: Synthetic oligonucleotide
  Sense strand starting at position 2777 of SEQ ID NO: 1564013
gaccuuuagugacagaaua

SEQ ID NO: 1848638 - RNA, 19 nt, Artificial Sequence
  Description of Artificial Sequence: Synthetic oligonucleotide
  Antisense strand to SEQ ID NO: 1848637
uauucugucacuaaagguc

SEQ ID NO: 1848639 - RNA, 19 nt, Artificial Sequence
  Description of Artificial Sequence: Synthetic oligonucleotide
  Sense strand starting at position 2888 of SEQ ID NO: 1564013
uauggucacugagaaagau

SEQ ID NO: 1848640 - RNA, 19 nt, Artificial Sequence
  Description of Artificial Sequence: Synthetic oligonucleotide
  Antisense strand to SEQ ID NO: 1848639
aucuuucucagugaccaua

SEQ ID NO: 1848641 - RNA, 19 nt, Artificial Sequence
  Description of Artificial Sequence: Synthetic oligonucleotide
  Sense strand starting at position 3045 of SEQ ID NO: 1564013
aaaucagcuggguguguaa

SEQ ID NO: 1848642 - RNA, 19 nt, Artificial Sequence
  Description of Artificial Sequence: Synthetic oligonucleotide
  Antisense strand to SEQ ID NO: 1848641
uuacacacccagcugauuu

SEQ ID NO: 1848643 - RNA, 19 nt, Artificial Sequence
  Description of Artificial Sequence: Synthetic oligonucleotide
  Sense strand starting at position 3052 of SEQ ID NO: 1564013
cuggguguguaaucugagu

SEQ ID NO: 1848644 - RNA, 19 nt, Artificial Sequence
  Description of Artificial Sequence: Synthetic oligonucleotide
  Antisense strand to SEQ ID NO: 1848643
acucagauuacacacccag

SEQ ID NO: 1848645 - RNA, 19 nt, Artificial Sequence
  Description of Artificial Sequence: Synthetic oligonucleotide
  Sense strand starting at position 3054 of SEQ ID NO: 1564013
ggguguguaaucugaguag

SEQ ID NO: 1848646 - RNA, 19 nt, Artificial Sequence
  Description of Artificial Sequence: Synthetic oligonucleotide
  Antisense strand to SEQ ID NO: 1848645
cuacucagauuacacaccc

SEQ ID NO: 1848647 - RNA, 19 nt, Artificial Sequence
  Description of Artificial Sequence: Synthetic oligonucleotide
  Sense strand starting at position 3057 of SEQ ID NO: 1564013
uguguaaucugaguagcug

SEQ ID NO: 1848648 - RNA, 19 nt, Artificial Sequence
  Description of Artificial Sequence: Synthetic oligonucleotide
  Antisense strand to SEQ ID NO: 1848647
cagcuacucagauuacaca

SEQ ID NO: 1848649 - RNA, 19 nt, Artificial Sequence
  Description of Artificial Sequence: Synthetic oligonucleotide
  Sense strand starting at position 3058 of SEQ ID NO: 1564013
guguaaucugaguagcuga

SEQ ID NO: 1848650 - RNA, 19 nt, Artificial Sequence
  Description of Artificial Sequence: Synthetic oligonucleotide
  Antisense strand to SEQ ID NO: 1848649
ucagcuacucagauuacac

SEQ ID NO: 1848651 - RNA, 19 nt, Artificial Sequence
  Description of Artificial Sequence: Synthetic oligonucleotide
  Sense strand starting at position 3069 of SEQ ID NO: 1564013
guagcugaguagcuguaau

SEQ ID NO: 1848652 - RNA, 19 nt, Artificial Sequence
  Description of Artificial Sequence: Synthetic oligonucleotide
  Antisense strand to SEQ ID NO: 1848651
auuacagcuacucagcuac

SEQ ID NO: 1848653 - RNA, 19 nt, Artificial Sequence
  Description of Artificial Sequence: Synthetic oligonucleotide
  Sense strand starting at position 3503 of SEQ ID NO: 1564013
ccgagauccugucuggaaa

SEQ ID NO: 1848654 - RNA, 19 nt, Artificial Sequence
  Description of Artificial Sequence: Synthetic oligonucleotide
  Antisense strand to SEQ ID NO: 1848653
uuuccagacaggaucucgg

SEQ ID NO: 1848655 - RNA, 19 nt, Artificial Sequence
  Description of Artificial Sequence: Synthetic oligonucleotide
  Sense strand starting at position 3584 of SEQ ID NO: 1564013
gcugaaagccauugcuuag

SEQ ID NO: 1848656 - RNA, 19 nt, Artificial Sequence
  Description of Artificial Sequence: Synthetic oligonucleotide
  Antisense strand to SEQ ID NO: 1848655
cuaagcaauggcuuucagc

SEQ ID NO: 1848657 - RNA, 19 nt, Artificial Sequence
  Description of Artificial Sequence: Synthetic oligonucleotide
  Sense strand starting at position 3852 of SEQ ID NO: 1564013
ugagaacucuaagaucaag

SEQ ID NO: 1848658 - RNA, 19 nt, Artificial Sequence
  Description of Artificial Sequence: Synthetic oligonucleotide
  Antisense strand to SEQ ID NO: 1848657
cuugaucuuagaguucuca

SEQ ID NO: 1848659 - RNA, 19 nt, Artificial Sequence
  Description of Artificial Sequence: Synthetic oligonucleotide
  Sense strand starting at position 3902 of SEQ ID NO: 1564013
gcaucaagacgugaaagca

SEQ ID NO: 1848660 - RNA, 19 nt, Artificial Sequence
  Description of Artificial Sequence: Synthetic oligonucleotide
  Antisense strand to SEQ ID NO: 1848659
ugcuuucacgucuugaugc

SEQ ID NO: 1848661 - RNA, 19 nt, Artificial Sequence
  Description of Artificial Sequence: Synthetic oligonucleotide
  Sense strand starting at position 3911 of SEQ ID NO: 1564013
cgugaaagcauguguaaga

SEQ ID NO: 1848662 - RNA, 19 nt, Artificial Sequence
  Description of Artificial Sequence: Synthetic oligonucleotide
  Antisense strand to SEQ ID NO: 1848661
ucuuacacaugcuuucacg

SEQ ID NO: 1848663 - RNA, 19 nt, Artificial Sequence
  Description of Artificial Sequence: Synthetic oligonucleotide
  Sense strand starting at position 2547 of SEQ ID NO: 1564014
ggugccauuccguggagga

SEQ ID NO: 1848664 - RNA, 19 nt, Artificial Sequence
  Description of Artificial Sequence: Synthetic oligonucleotide
  Antisense strand to SEQ ID NO: 1848663
uccuccacggaauggcacc

SEQ ID NO: 1848665 - RNA, 19 nt, Artificial Sequence
  Description of Artificial Sequence: Synthetic oligonucleotide
  Sense strand starting at position 2549 of SEQ ID NO: 1564014
ugccauuccguggaggaga

SEQ ID NO: 1848666 - RNA, 19 nt, Artificial Sequence
  Description of Artificial Sequence: Synthetic oligonucleotide
  Antisense strand to SEQ ID NO: 1848665
ucuccuccacggaauggca

SEQ ID NO: 1848667 - RNA, 19 nt, Artificial Sequence
  Description of Artificial Sequence: Synthetic oligonucleotide
  Sense strand starting at position 2550 of SEQ ID NO: 1564014
gccauuccguggaggagau

SEQ ID NO: 1848668 - RNA, 19 nt, Artificial Sequence
  Description of Artificial Sequence: Synthetic oligonucleotide
  Antisense strand to SEQ ID NO: 1848667
aucuccuccacggaauggc

SEQ ID NO: 1848669 - RNA, 19 nt, Artificial Sequence
  Description of Artificial Sequence: Synthetic oligonucleotide
  Sense strand starting at position 2781 of SEQ ID NO: 1564014
cugagugugugccuggaaa

SEQ ID NO: 1848670 - RNA, 19 nt, Artificial Sequence
  Description of Artificial Sequence: Synthetic oligonucleotide
  Antisense strand to SEQ ID NO: 1848669
uuuccaggcacacacucag

SEQ ID NO: 1848671 - RNA, 19 nt, Artificial Sequence
  Description of Artificial Sequence: Synthetic oligonucleotide
  Sense strand starting at position 2785 of SEQ ID NO: 1564014
gugugugccuggaaaggua

SEQ ID NO: 1848672 - RNA, 19 nt, Artificial Sequence
  Description of Artificial Sequence: Synthetic oligonucleotide
  Antisense strand to SEQ ID NO: 1848671
uaccuuuccaggcacacac

SEQ ID NO: 1848673 - RNA, 19 nt, Artificial Sequence
  Description of Artificial Sequence: Synthetic oligonucleotide
  Sense strand starting at position 2907 of SEQ ID NO: 1564014
ugucguaccucccuggaga

SEQ ID NO: 1848674 - RNA, 19 nt, Artificial Sequence
  Description of Artificial Sequence: Synthetic oligonucleotide
  Antisense strand to SEQ ID NO: 1848673
ucuccagggagguacgaca

SEQ ID NO: 1848675 - RNA, 19 nt, Artificial Sequence
  Description of Artificial Sequence: Synthetic oligonucleotide
  Sense strand starting at position 2945 of SEQ ID NO: 1564014
gagucagccuuccauaggu

SEQ ID NO: 1848676 - RNA, 19 nt, Artificial Sequence
  Description of Artificial Sequence: Synthetic oligonucleotide
  Antisense strand to SEQ ID NO: 1848675
accuauggaaggcugacuc

SEQ ID NO: 1848677 - RNA, 19 nt, Artificial Sequence
  Description of Artificial Sequence: Synthetic oligonucleotide
  Sense strand starting at position 3240 of SEQ ID NO: 1564014
gcccaagcuccuugcugaa

SEQ ID NO: 1848678 - RNA, 19 nt, Artificial Sequence
  Description of Artificial Sequence: Synthetic oligonucleotide
  Antisense strand to SEQ ID NO: 1848677
uucagcaaggagcuugggc

SEQ ID NO: 1848679 - RNA, 19 nt, Artificial Sequence
  Description of Artificial Sequence: Synthetic oligonucleotide
  Sense strand starting at position 3457 of SEQ ID NO: 1564014
aagcauugcucaucuguga

SEQ ID NO: 1848680 - RNA, 19 nt, Artificial Sequence
  Description of Artificial Sequence: Synthetic oligonucleotide
  Antisense strand to SEQ ID NO: 1848679
ucacagaugagcaaugcuu

SEQ ID NO: 1848681 - RNA, 19 nt, Artificial Sequence
  Description of Artificial Sequence: Synthetic oligonucleotide
  Sense strand starting at position 3678 of SEQ ID NO: 1564014
gguuccucuucugugaauc

SEQ ID NO: 1848682 - RNA, 19 nt, Artificial Sequence
  Description of Artificial Sequence: Synthetic oligonucleotide
  Antisense strand to SEQ ID NO: 1848681
gauucacagaagaggaacc

SEQ ID NO: 1848683 - RNA, 19 nt, Artificial Sequence
  Description of Artificial Sequence: Synthetic oligonucleotide
  Sense strand starting at position 3688 of SEQ ID NO: 1564014
cugugaaucuccuuugcuc

SEQ ID NO: 1848684 - RNA, 19 nt, Artificial Sequence
  Description of Artificial Sequence: Synthetic oligonucleotide
  Antisense strand to SEQ ID NO: 1848683
gagcaaaggagauucacag

SEQ ID NO: 1848685 - RNA, 19 nt, Artificial Sequence
  Description of Artificial Sequence: Synthetic oligonucleotide
  Sense strand starting at position 3714 of SEQ ID NO: 1564014
ccucaucucgcagaugaca

SEQ ID NO: 1848686 - RNA, 19 nt, Artificial Sequence
  Description of Artificial Sequence: Synthetic oligonucleotide
  Antisense strand to SEQ ID NO: 1848685
ugucaucugcgagaugagg

SEQ ID NO: 1848687 - RNA, 19 nt, Artificial Sequence
  Description of Artificial Sequence: Synthetic oligonucleotide
  Sense strand starting at position 3741 of SEQ ID NO: 1564014
cggcccguuuccaggagaa

SEQ ID NO: 1848688 - RNA, 19 nt, Artificial Sequence
  Description of Artificial Sequence: Synthetic oligonucleotide
  Antisense strand to SEQ ID NO: 1848687
uucuccuggaaacgggccg

SEQ ID NO: 1848689 - RNA, 19 nt, Artificial Sequence
  Description of Artificial Sequence: Synthetic oligonucleotide
  Sense strand starting at position 3745 of SEQ ID NO: 1564014
ccguuuccaggagaaaguu

SEQ ID NO: 1848690 - RNA, 19 nt, Artificial Sequence
  Description of Artificial Sequence: Synthetic oligonucleotide
  Antisense strand to SEQ ID NO: 1848689
aacuuucuccuggaaacgg

SEQ ID NO: 1848691 - RNA, 19 nt, Artificial Sequence
  Description of Artificial Sequence: Synthetic oligonucleotide
  Sense strand starting at position 3753 of SEQ ID NO: 1564014
aggagaaaguuccuagcgu

SEQ ID NO: 1848692 - RNA, 19 nt, Artificial Sequence
  Description of Artificial Sequence: Synthetic oligonucleotide
  Antisense strand to SEQ ID NO: 1848691
acgcuaggaacuuucuccu

SEQ ID NO: 1848693 - RNA, 19 nt, Artificial Sequence
  Description of Artificial Sequence: Synthetic oligonucleotide
  Sense strand starting at position 3754 of SEQ ID NO: 1564014
ggagaaaguuccuagcguc

SEQ ID NO: 1848694 - RNA, 19 nt, Artificial Sequence
  Description of Artificial Sequence: Synthetic oligonucleotide
  Antisense strand to SEQ ID NO: 1848693
gacgcuaggaacuuucucc

SEQ ID NO: 1848695 - RNA, 19 nt, Artificial Sequence
  Description of Artificial Sequence: Synthetic oligonucleotide
  Sense strand starting at position 3757 of SEQ ID NO: 1564014
gaaaguuccuagcgucaag

SEQ ID NO: 1848696 - RNA, 19 nt, Artificial Sequence
  Description of Artificial Sequence: Synthetic oligonucleotide
  Antisense strand to SEQ ID NO: 1848695
cuugacgcuaggaacuuuc

SEQ ID NO: 1848697 - RNA, 19 nt, Artificial Sequence
  Description of Artificial Sequence: Synthetic oligonucleotide
  Sense strand starting at position 3798 of SEQ ID NO: 1564014
gauauaagccauggccagu

SEQ ID NO: 1848698 - RNA, 19 nt, Artificial Sequence
  Description of Artificial Sequence: Synthetic oligonucleotide
  Antisense strand to SEQ ID NO: 1848697
acuggccauggcuuauauc

SEQ ID NO: 1848699 - RNA, 19 nt, Artificial Sequence
  Description of Artificial Sequence: Synthetic oligonucleotide
  Sense strand starting at position 3846 of SEQ ID NO: 1564014
uggagugggccucacaauu

SEQ ID NO: 1848700 - RNA, 19 nt, Artificial Sequence
  Description of Artificial Sequence: Synthetic oligonucleotide
  Antisense strand to SEQ ID NO: 1848699
aauugugaggcccacucca

SEQ ID NO: 1848701 - RNA, 19 nt, Artificial Sequence
  Description of Artificial Sequence: Synthetic oligonucleotide
  Sense strand starting at position 3878 of SEQ ID NO: 1564014
cccguaugguugugaaagg

SEQ ID NO: 1848702 - RNA, 19 nt, Artificial Sequence
  Description of Artificial Sequence: Synthetic oligonucleotide
  Antisense strand to SEQ ID NO: 1848701
ccuuucacaaccauacggg

SEQ ID NO: 1848703 - RNA, 19 nt, Artificial Sequence
  Description of Artificial Sequence: Synthetic oligonucleotide
  Sense strand starting at position 3879 of SEQ ID NO: 1564014
ccguaugguugugaaaggu

SEQ ID NO: 1848704 - RNA, 19 nt, Artificial Sequence
  Description of Artificial Sequence: Synthetic oligonucleotide
  Antisense strand to SEQ ID NO: 1848703
accuuucacaaccauacgg

SEQ ID NO: 1848705 - RNA, 19 nt, Artificial Sequence
  Description of Artificial Sequence: Synthetic oligonucleotide
  Sense strand starting at position 3909 of SEQ ID NO: 1564014
gauggagucacuuguuguu

SEQ ID NO: 1848706 - RNA, 19 nt, Artificial Sequence
  Description of Artificial Sequence: Synthetic oligonucleotide
  Antisense strand to SEQ ID NO: 1848705
aacaacaagugacuccauc

SEQ ID NO: 1848707 - RNA, 19 nt, Artificial Sequence
  Description of Artificial Sequence: Synthetic oligonucleotide
  Sense strand starting at position 96 of SEQ ID NO: 1564015
acgauuauuucucugcagu

SEQ ID NO: 1848708 - RNA, 19 nt, Artificial Sequence
  Description of Artificial Sequence: Synthetic oligonucleotide
  Antisense strand to SEQ ID NO: 1848707
acugcagagaaauaaucgu

SEQ ID NO: 1848709 - RNA, 19 nt, Artificial Sequence
  Description of Artificial Sequence: Synthetic oligonucleotide
  Sense strand starting at position 97 of SEQ ID NO: 1564015
cgauuauuucucugcagug

SEQ ID NO: 1848710 - RNA, 19 nt, Artificial Sequence
  Description of Artificial Sequence: Synthetic oligonucleotide
  Antisense strand to SEQ ID NO: 1848709
cacugcagagaaauaaucg

SEQ ID NO: 1848711 - RNA, 19 nt, Artificial Sequence
  Description of Artificial Sequence: Synthetic oligonucleotide
  Sense strand starting at position 98 of SEQ ID NO: 1564015
gauuauuucucugcagugu

SEQ ID NO: 1848712 - RNA, 19 nt, Artificial Sequence
  Description of Artificial Sequence: Synthetic oligonucleotide
  Antisense strand to SEQ ID NO: 1848711
acacugcagagaaauaauc

SEQ ID NO: 1848713 - RNA, 19 nt, Artificial Sequence
  Description of Artificial Sequence: Synthetic oligonucleotide
  Sense strand starting at position 102 of SEQ ID NO: 1564015
auuucucugcaguguuaac

SEQ ID NO: 1848714 - RNA, 19 nt, Artificial Sequence
  Description of Artificial Sequence: Synthetic oligonucleotide
  Antisense strand to SEQ ID NO: 1848713
guuaacacugcagagaaau

SEQ ID NO: 1848715 - RNA, 19 nt, Artificial Sequence
  Description of Artificial Sequence: Synthetic oligonucleotide
  Sense strand starting at position 115 of SEQ ID NO: 1564015
guuaacuuaguagagucaa

SEQ ID NO: 1848716 - RNA, 19 nt, Artificial Sequence
  Description of Artificial Sequence: Synthetic oligonucleotide
  Antisense strand to SEQ ID NO: 1848715
uugacucuacuaaguuaac

SEQ ID NO: 1848717 - RNA, 19 nt, Artificial Sequence
  Description of Artificial Sequence: Synthetic oligonucleotide
  Sense strand starting at position 326 of SEQ ID NO: 1564015
agugguaaaugcccagaaa

SEQ ID NO: 1848718 - RNA, 19 nt, Artificial Sequence
  Description of Artificial Sequence: Synthetic oligonucleotide
  Antisense strand to SEQ ID NO: 1848717
uuucugggcauuuaccacu

SEQ ID NO: 1848719 - RNA, 19 nt, Artificial Sequence
  Description of Artificial Sequence: Synthetic oligonucleotide
  Sense strand starting at position 327 of SEQ ID NO: 1564015
gugguaaaugcccagaaau

SEQ ID NO: 1848720 - RNA, 19 nt, Artificial Sequence
  Description of Artificial Sequence: Synthetic oligonucleotide
  Antisense strand to SEQ ID NO: 1848719
auuucugggcauuuaccac

SEQ ID NO: 1848721 - RNA, 19 nt, Artificial Sequence
  Description of Artificial Sequence: Synthetic oligonucleotide
  Sense strand starting at position 353 of SEQ ID NO: 1564015
cugcaaaugauagguugau

SEQ ID NO: 1848722 - RNA, 19 nt, Artificial Sequence
  Description of Artificial Sequence: Synthetic oligonucleotide
  Antisense strand to SEQ ID NO: 1848721
aucaaccuaucauuugcag

SEQ ID NO: 1848723 - RNA, 19 nt, Artificial Sequence
  Description of Artificial Sequence: Synthetic oligonucleotide
  Sense strand starting at position 424 of SEQ ID NO: 1564015
guuggaauaguuuauccca

SEQ ID NO: 1848724 - RNA, 19 nt, Artificial Sequence
  Description of Artificial Sequence: Synthetic oligonucleotide
  Antisense strand to SEQ ID NO: 1848723
ugggauaaacuauuccaac

SEQ ID NO: 1848725 - RNA, 19 nt, Artificial Sequence
  Description of Artificial Sequence: Synthetic oligonucleotide
  Sense strand starting at position 426 of SEQ ID NO: 1564015
uggaauaguuuaucccaca

SEQ ID NO: 1848726 - RNA, 19 nt, Artificial Sequence
  Description of Artificial Sequence: Synthetic oligonucleotide
  Antisense strand to SEQ ID NO: 1848725
ugugggauaaacuauucca

SEQ ID NO: 1848727 - RNA, 19 nt, Artificial Sequence
  Description of Artificial Sequence: Synthetic oligonucleotide
  Sense strand starting at position 427 of SEQ ID NO: 1564015
ggaauaguuuaucccacau

SEQ ID NO: 1848728 - RNA, 19 nt, Artificial Sequence
  Description of Artificial Sequence: Synthetic oligonucleotide
  Antisense strand to SEQ ID NO: 1848727
augugggauaaacuauucc

SEQ ID NO: 1848729 - RNA, 19 nt, Artificial Sequence
  Description of Artificial Sequence: Synthetic oligonucleotide
  Sense strand starting at position 662 of SEQ ID NO: 1564015
uuuaauuacuuggcaggaa

SEQ ID NO: 1848730 - RNA, 19 nt, Artificial Sequence
  Description of Artificial Sequence: Synthetic oligonucleotide
  Antisense strand to SEQ ID NO: 1848729
uuccugccaaguaauuaaa

SEQ ID NO: 1848731 - RNA, 19 nt, Artificial Sequence
  Description of Artificial Sequence: Synthetic oligonucleotide
  Sense strand starting at position 674 of SEQ ID NO: 1564015
gcaggaaacagacguauaa

SEQ ID NO: 1848732 - RNA, 19 nt, Artificial Sequence
  Description of Artificial Sequence: Synthetic oligonucleotide
  Antisense strand to SEQ ID NO: 1848731
uuauacgucuguuuccugc

SEQ ID NO: 1848733 - RNA, 19 nt, Artificial Sequence
  Description of Artificial Sequence: Synthetic oligonucleotide
  Sense strand starting at position 757 of SEQ ID NO: 1564015
cggcacuaccauuaugaaa

SEQ ID NO: 1848734 - RNA, 19 nt, Artificial Sequence
  Description of Artificial Sequence: Synthetic oligonucleotide
  Antisense strand to SEQ ID NO: 1848733
uuucauaaugguagugccg

SEQ ID NO: 1848735 - RNA, 19 nt, Artificial Sequence
  Description of Artificial Sequence: Synthetic oligonucleotide
  Sense strand starting at position 782 of SEQ ID NO: 1564015
auuauuagagaccguauca

SEQ ID NO: 1848736 - RNA, 19 nt, Artificial Sequence
  Description of Artificial Sequence: Synthetic oligonucleotide
  Antisense strand to SEQ ID NO: 1848735
ugauacggucucuaauaau

SEQ ID NO: 1848737 - RNA, 19 nt, Artificial Sequence
  Description of Artificial Sequence: Synthetic oligonucleotide
  Sense strand starting at position 818 of SEQ ID NO: 1564015
acauuuguucuugguaagu

SEQ ID NO: 1848738 - RNA, 19 nt, Artificial Sequence
  Description of Artificial Sequence: Synthetic oligonucleotide
  Antisense strand to SEQ ID NO: 1848737
acuuaccaagaacaaaugu

SEQ ID NO: 1848739 - RNA, 19 nt, Artificial Sequence
  Description of Artificial Sequence: Synthetic oligonucleotide
  Sense strand starting at position 918 of SEQ ID NO: 1564015
acaauuacucaguaacgca

SEQ ID NO: 1848740 - RNA, 19 nt, Artificial Sequence
  Description of Artificial Sequence: Synthetic oligonucleotide
  Antisense strand to SEQ ID NO: 1848739
ugcguuacugaguaauugu

SEQ ID NO: 1848741 - RNA, 19 nt, Artificial Sequence
  Description of Artificial Sequence: Synthetic oligonucleotide
  Sense strand starting at position 1113 of SEQ ID NO: 1564015
ugcccaagugaaugaaauu

SEQ ID NO: 1848742 - RNA, 19 nt, Artificial Sequence
  Description of Artificial Sequence: Synthetic oligonucleotide
  Antisense strand to SEQ ID NO: 1848741
aauuucauucacuugggca

SEQ ID NO: 1848743 - RNA, 19 nt, Artificial Sequence
  Description of Artificial Sequence: Synthetic oligonucleotide
  Sense strand starting at position 1122 of SEQ ID NO: 1564015
gaaugaaauugugccucca

SEQ ID NO: 1848744 - RNA, 19 nt, Artificial Sequence
  Description of Artificial Sequence: Synthetic oligonucleotide
  Antisense strand to SEQ ID NO: 1848743
uggaggcacaauuucauuc

SEQ ID NO: 1848745 - RNA, 19 nt, Artificial Sequence
  Description of Artificial Sequence: Synthetic oligonucleotide
  Sense strand starting at position 1817 of SEQ ID NO: 1564015
aaggauuccucguuuagag

SEQ ID NO: 1848746 - RNA, 19 nt, Artificial Sequence
  Description of Artificial Sequence: Synthetic oligonucleotide
  Antisense strand to SEQ ID NO: 1848745
cucuaaacgaggaauccuu

SEQ ID NO: 1848747 - RNA, 19 nt, Artificial Sequence
  Description of Artificial Sequence: Synthetic oligonucleotide
  Sense strand starting at position 1887 of SEQ ID NO: 1564015
ggcguuguaauccuuacgu

SEQ ID NO: 1848748 - RNA, 19 nt, Artificial Sequence
  Description of Artificial Sequence: Synthetic oligonucleotide
  Antisense strand to SEQ ID NO: 1848747
acguaaggauuacaacgcc

SEQ ID NO: 1848749 - RNA, 19 nt, Artificial Sequence
  Description of Artificial Sequence: Synthetic oligonucleotide
  Sense strand starting at position 2259 of SEQ ID NO: 1564015
uuaugugcagauugagaug

SEQ ID NO: 1848750 - RNA, 19 nt, Artificial Sequence
  Description of Artificial Sequence: Synthetic oligonucleotide
  Antisense strand to SEQ ID NO: 1848749
caucucaaucugcacauaa

SEQ ID NO: 1848751 - RNA, 19 nt, Artificial Sequence
  Description of Artificial Sequence: Synthetic oligonucleotide
  Sense strand starting at position 2264 of SEQ ID NO: 1564015
ugcagauugagaugcuaaa

SEQ ID NO: 1848752 - RNA, 19 nt, Artificial Sequence
  Description of Artificial Sequence: Synthetic oligonucleotide
  Antisense strand to SEQ ID NO: 1848751
uuuagcaucucaaucugca

SEQ ID NO: 1848753 - RNA, 19 nt, Artificial Sequence
  Description of Artificial Sequence: Synthetic oligonucleotide
  Sense strand starting at position 2399 of SEQ ID NO: 1564015
ugccaugcccaccaagauu

SEQ ID NO: 1848754 - RNA, 19 nt, Artificial Sequence
  Description of Artificial Sequence: Synthetic oligonucleotide
  Antisense strand to SEQ ID NO: 1848753
aaucuuggugggcauggca

SEQ ID NO: 1848755 - RNA, 19 nt, Artificial Sequence
  Description of Artificial Sequence: Synthetic oligonucleotide
  Sense strand starting at position 2495 of SEQ ID NO: 1564015
cccugacuucgugauugaa

SEQ ID NO: 1848756 - RNA, 19 nt, Artificial Sequence
  Description of Artificial Sequence: Synthetic oligonucleotide
  Antisense strand to SEQ ID NO: 1848755
uucaaucacgaagucaggg

SEQ ID NO: 1848757 - RNA, 19 nt, Artificial Sequence
  Description of Artificial Sequence: Synthetic oligonucleotide
  Sense strand starting at position 2580 of SEQ ID NO: 1564015
cgagaaugucucuaccuua

SEQ ID NO: 1848758 - RNA, 19 nt, Artificial Sequence
  Description of Artificial Sequence: Synthetic oligonucleotide
  Antisense strand to SEQ ID NO: 1848757
uaagguagagacauucucg

SEQ ID NO: 1848759 - RNA, 19 nt, Artificial Sequence
  Description of Artificial Sequence: Synthetic oligonucleotide
  Sense strand starting at position 2617 of SEQ ID NO: 1564015
gguggagcucuccaaauug

SEQ ID NO: 1848760 - RNA, 19 nt, Artificial Sequence
  Description of Artificial Sequence: Synthetic oligonucleotide
  Antisense strand to SEQ ID NO: 1848759
caauuuggagagcuccacc

SEQ ID NO: 1848761 - RNA, 19 nt, Artificial Sequence
  Description of Artificial Sequence: Synthetic oligonucleotide
  Sense strand starting at position 2692 of SEQ ID NO: 1564015
cugugaguccuugauguga

SEQ ID NO: 1848762 - RNA, 19 nt, Artificial Sequence
  Description of Artificial Sequence: Synthetic oligonucleotide
  Antisense strand to SEQ ID NO: 1848761
ucacaucaaggacucacag

SEQ ID NO: 1848763 - RNA, 19 nt, Artificial Sequence
  Description of Artificial Sequence: Synthetic oligonucleotide
  Sense strand starting at position 2788 of SEQ ID NO: 1564015
guagaaugacugcauuacu

SEQ ID NO: 1848764 - RNA, 19 nt, Artificial Sequence
  Description of Artificial Sequence: Synthetic oligonucleotide
  Antisense strand to SEQ ID NO: 1848763
aguaaugcagucauucuac

SEQ ID NO: 1848765 - RNA, 19 nt, Artificial Sequence
  Description of Artificial Sequence: Synthetic oligonucleotide
  Sense strand starting at position 3051 of SEQ ID NO: 1564015
ggugguguuauuguuugca

SEQ ID NO: 1848766 - RNA, 19 nt, Artificial Sequence
  Description of Artificial Sequence: Synthetic oligonucleotide
  Antisense strand to SEQ ID NO: 1848765
ugcaaacaauaacaccacc

SEQ ID NO: 1848767 - RNA, 19 nt, Artificial Sequence
  Description of Artificial Sequence: Synthetic oligonucleotide
  Sense strand starting at position 3178 of SEQ ID NO: 1564015
ugggauuaguacucuuaga

SEQ ID NO: 1848768 - RNA, 19 nt, Artificial Sequence
  Description of Artificial Sequence: Synthetic oligonucleotide
  Antisense strand to SEQ ID NO: 1848767
ucuaagaguacuaauccca

SEQ ID NO: 1848769 - RNA, 19 nt, Artificial Sequence
  Description of Artificial Sequence: Synthetic oligonucleotide
  Sense strand starting at position 3210 of SEQ ID NO: 1564015
agaggucucuuuccaccau

SEQ ID NO: 1848770 - RNA, 19 nt, Artificial Sequence
  Description of Artificial Sequence: Synthetic oligonucleotide
  Antisense strand to SEQ ID NO: 1848769
augguggaaagagaccucu

SEQ ID NO: 1848771 - RNA, 19 nt, Artificial Sequence
  Description of Artificial Sequence: Synthetic oligonucleotide
  Sense strand starting at position 3214 of SEQ ID NO: 1564015
gucucuuuccaccauguaa

SEQ ID NO: 1848772 - RNA, 19 nt, Artificial Sequence
  Description of Artificial Sequence: Synthetic oligonucleotide
  Antisense strand to SEQ ID NO: 1848771
uuacaugguggaaagagac

SEQ ID NO: 1848773 - RNA, 19 nt, Artificial Sequence
  Description of Artificial Sequence: Synthetic oligonucleotide
  Sense strand starting at position 3490 of SEQ ID NO: 1564015
cuguuuacagagcaaguua

SEQ ID NO: 1848774 - RNA, 19 nt, Artificial Sequence
  Description of Artificial Sequence: Synthetic oligonucleotide
  Antisense strand to SEQ ID NO: 1848773
uaacuugcucuguaaacag

SEQ ID NO: 1848775 - RNA, 19 nt, Artificial Sequence
  Description of Artificial Sequence: Synthetic oligonucleotide
  Sense strand starting at position 3501 of SEQ ID NO: 1564015
gcaaguuauuuccugcauu

SEQ ID NO: 1848776 - RNA, 19 nt, Artificial Sequence
  Description of Artificial Sequence: Synthetic oligonucleotide
  Antisense strand to SEQ ID NO: 1848775
aaugcaggaaauaacuugc

SEQ ID NO: 1848777 - RNA, 19 nt, Artificial Sequence
  Description of Artificial Sequence: Synthetic oligonucleotide
  Sense strand starting at position 3658 of SEQ ID NO: 1564015
gugagagcucaccaaaggu

SEQ ID NO: 1848778 - RNA, 19 nt, Artificial Sequence
  Description of Artificial Sequence: Synthetic oligonucleotide
  Antisense strand to SEQ ID NO: 1848777
accuuuggugagcucucac

SEQ ID NO: 1848779 - RNA, 19 nt, Artificial Sequence
  Description of Artificial Sequence: Synthetic oligonucleotide
  Sense strand starting at position 3671 of SEQ ID NO: 1564015
aaagguaagucucuuugga

SEQ ID NO: 1848780 - RNA, 19 nt, Artificial Sequence
  Description of Artificial Sequence: Synthetic oligonucleotide
  Antisense strand to SEQ ID NO: 1848779
uccaaagagacuuaccuuu

SEQ ID NO: 1848781 - RNA, 19 nt, Artificial Sequence
  Description of Artificial Sequence: Synthetic oligonucleotide
  Sense strand starting at position 3759 of SEQ ID NO: 1564015
guaucauaucuccauguaa

SEQ ID NO: 1848782 - RNA, 19 nt, Artificial Sequence
  Description of Artificial Sequence: Synthetic oligonucleotide
  Antisense strand to SEQ ID NO: 1848781
uuacauggagauaugauac

SEQ ID NO: 1848783 - RNA, 19 nt, Artificial Sequence
  Description of Artificial Sequence: Synthetic oligonucleotide
  Sense strand starting at position 3976 of SEQ ID NO: 1564015
ucacauuugucuuugucau

SEQ ID NO: 1848784 - RNA, 19 nt, Artificial Sequence
  Description of Artificial Sequence: Synthetic oligonucleotide
  Antisense strand to SEQ ID NO: 1848783
augacaaagacaaauguga

SEQ ID NO: 1848785 - RNA, 19 nt, Artificial Sequence
  Description of Artificial Sequence: Synthetic oligonucleotide
  Sense strand starting at position 3978 of SEQ ID NO: 1564015
acauuugucuuugucaucu

SEQ ID NO: 1848786 - RNA, 19 nt, Artificial Sequence
  Description of Artificial Sequence: Synthetic oligonucleotide
  Antisense strand to SEQ ID NO: 1848785
agaugacaaagacaaaugu

SEQ ID NO: 1848787 - RNA, 19 nt, Artificial Sequence
  Description of Artificial Sequence: Synthetic oligonucleotide
  Sense strand starting at position 5 of SEQ ID NO: 1564016
cuggauaaauugcuuggaa

SEQ ID NO: 1848788 - RNA, 19 nt, Artificial Sequence
  Description of Artificial Sequence: Synthetic oligonucleotide
  Antisense strand to SEQ ID NO: 1848787
uuccaagcaauuuauccag

SEQ ID NO: 1848789 - RNA, 19 nt, Artificial Sequence
  Description of Artificial Sequence: Synthetic oligonucleotide
  Sense strand starting at position 6 of SEQ ID NO: 1564016
uggauaaauugcuuggaac

SEQ ID NO: 1848790 - RNA, 19 nt, Artificial Sequence
  Description of Artificial Sequence: Synthetic oligonucleotide
  Antisense strand to SEQ ID NO: 1848789
guuccaagcaauuuaucca

SEQ ID NO: 1848791 - RNA, 19 nt, Artificial Sequence
  Description of Artificial Sequence: Synthetic oligonucleotide
  Sense strand starting at position 7 of SEQ ID NO: 1564016
ggauaaauugcuuggaacu

SEQ ID NO: 1848792 - RNA, 19 nt, Artificial Sequence
  Description of Artificial Sequence: Synthetic oligonucleotide
  Antisense strand to SEQ ID NO: 1848791
aguuccaagcaauuuaucc

SEQ ID NO: 1848793 - RNA, 19 nt, Artificial Sequence
  Description of Artificial Sequence: Synthetic oligonucleotide
  Sense strand starting at position 127 of SEQ ID NO: 1564016
cuaaguagcagugagguaa

SEQ ID NO: 1848794 - RNA, 19 nt, Artificial Sequence
  Description of Artificial Sequence: Synthetic oligonucleotide
  Antisense strand to SEQ ID NO: 1848793
uuaccucacugcuacuuag

SEQ ID NO: 1848795 - RNA, 19 nt, Artificial Sequence
  Description of Artificial Sequence: Synthetic oligonucleotide
  Sense strand starting at position 131 of SEQ ID NO: 1564016
guagcagugagguaagacu

SEQ ID NO: 1848796 - RNA, 19 nt, Artificial Sequence
  Description of Artificial Sequence: Synthetic oligonucleotide
  Antisense strand to SEQ ID NO: 1848795
agucuuaccucacugcuac

SEQ ID NO: 1848797 - RNA, 19 nt, Artificial Sequence
  Description of Artificial Sequence: Synthetic oligonucleotide
  Sense strand starting at position 213 of SEQ ID NO: 1564016
agaaauauccuuugcuuga

SEQ ID NO: 1848798 - RNA, 19 nt, Artificial Sequence
  Description of Artificial Sequence: Synthetic oligonucleotide
  Antisense strand to SEQ ID NO: 1848797
ucaagcaaaggauauuucu

SEQ ID NO: 1848799 - RNA, 19 nt, Artificial Sequence
  Description of Artificial Sequence: Synthetic oligonucleotide
  Sense strand starting at position 401 of SEQ ID NO: 1564016
acgauuauuucucugcagu

SEQ ID NO: 1848800 - RNA, 19 nt, Artificial Sequence
  Description of Artificial Sequence: Synthetic oligonucleotide
  Antisense strand to SEQ ID NO: 1848799
acugcagagaaauaaucgu

SEQ ID NO: 1848801 - RNA, 19 nt, Artificial Sequence
  Description of Artificial Sequence: Synthetic oligonucleotide
  Sense strand starting at position 402 of SEQ ID NO: 1564016
cgauuauuucucugcagug

SEQ ID NO: 1848802 - RNA, 19 nt, Artificial Sequence
  Description of Artificial Sequence: Synthetic oligonucleotide
  Antisense strand to SEQ ID NO: 1848801
cacugcagagaaauaaucg

SEQ ID NO: 1848803 - RNA, 19 nt, Artificial Sequence
  Description of Artificial Sequence: Synthetic oligonucleotide
  Sense strand starting at position 403 of SEQ ID NO: 1564016
gauuauuucucugcagugu

SEQ ID NO: 1848804 - RNA, 19 nt, Artificial Sequence
  Description of Artificial Sequence: Synthetic oligonucleotide
  Antisense strand to SEQ ID NO: 1848803
acacugcagagaaauaauc

SEQ ID NO: 1848805 - RNA, 19 nt, Artificial Sequence
  Description of Artificial Sequence: Synthetic oligonucleotide
  Sense strand starting at position 407 of SEQ ID NO: 1564016
auuucucugcaguguuaac

SEQ ID NO: 1848806 - RNA, 19 nt, Artificial Sequence
  Description of Artificial Sequence: Synthetic oligonucleotide
  Antisense strand to SEQ ID NO: 1848805
guuaacacugcagagaaau

SEQ ID NO: 1848807 - RNA, 19 nt, Artificial Sequence
  Description of Artificial Sequence: Synthetic oligonucleotide
  Sense strand starting at position 420 of SEQ ID NO: 1564016
guuaacuuaguagagucaa

SEQ ID NO: 1848808 - RNA, 19 nt, Artificial Sequence
  Description of Artificial Sequence: Synthetic oligonucleotide
  Antisense strand to SEQ ID NO: 1848807
uugacucuacuaaguuaac

SEQ ID NO: 1848809 - RNA, 19 nt, Artificial Sequence
  Description of Artificial Sequence: Synthetic oligonucleotide
  Sense strand starting at position 631 of SEQ ID NO: 1564016
agugguaaaugcccagaaa

SEQ ID NO: 1848810 - RNA, 19 nt, Artificial Sequence
  Description of Artificial Sequence: Synthetic oligonucleotide
  Antisense strand to SEQ ID NO: 1848809
uuucugggcauuuaccacu

SEQ ID NO: 1848811 - RNA, 19 nt, Artificial Sequence
  Description of Artificial Sequence: Synthetic oligonucleotide
  Sense strand starting at position 632 of SEQ ID NO: 1564016
gugguaaaugcccagaaau

SEQ ID NO: 1848812 - RNA, 19 nt, Artificial Sequence
  Description of Artificial Sequence: Synthetic oligonucleotide
  Antisense strand to SEQ ID NO: 1848811
auuucugggcauuuaccac

SEQ ID NO: 1848813 - RNA, 19 nt, Artificial Sequence
  Description of Artificial Sequence: Synthetic oligonucleotide
  Sense strand starting at position 658 of SEQ ID NO: 1564016
cugcaaaugauagguugau

SEQ ID NO: 1848814 - RNA, 19 nt, Artificial Sequence
  Description of Artificial Sequence: Synthetic oligonucleotide
  Antisense strand to SEQ ID NO: 1848813
aucaaccuaucauuugcag

SEQ ID NO: 1848815 - RNA, 19 nt, Artificial Sequence
  Description of Artificial Sequence: Synthetic oligonucleotide
  Sense strand starting at position 729 of SEQ ID NO: 1564016
guuggaauaguuuauccca

SEQ ID NO: 1848816 - RNA, 19 nt, Artificial Sequence
  Description of Artificial Sequence: Synthetic oligonucleotide
  Antisense strand to SEQ ID NO: 1848815
ugggauaaacuauuccaac

SEQ ID NO: 1848817 - RNA, 19 nt, Artificial Sequence
  Description of Artificial Sequence: Synthetic oligonucleotide
  Sense strand starting at position 731 of SEQ ID NO: 1564016
uggaauaguuuaucccaca

SEQ ID NO: 1848818 - RNA, 19 nt, Artificial Sequence
  Description of Artificial Sequence: Synthetic oligonucleotide
  Antisense strand to SEQ ID NO: 1848817
ugugggauaaacuauucca

SEQ ID NO: 1848819 - RNA, 19 nt, Artificial Sequence
  Description of Artificial Sequence: Synthetic oligonucleotide
  Sense strand starting at position 732 of SEQ ID NO: 1564016
ggaauaguuuaucccacau

SEQ ID NO: 1848820 - RNA, 19 nt, Artificial Sequence
  Description of Artificial Sequence: Synthetic oligonucleotide
  Antisense strand to SEQ ID NO: 1848819
augugggauaaacuauucc

SEQ ID NO: 1848821 - RNA, 19 nt, Artificial Sequence
  Description of Artificial Sequence: Synthetic oligonucleotide
  Sense strand starting at position 967 of SEQ ID NO: 1564016
uuuaauuacuuggcaggaa

SEQ ID NO: 1848822 - RNA, 19 nt, Artificial Sequence
  Description of Artificial Sequence: Synthetic oligonucleotide
  Antisense strand to SEQ ID NO: 1848821
uuccugccaaguaauuaaa

SEQ ID NO: 1848823 - RNA, 19 nt, Artificial Sequence
  Description of Artificial Sequence: Synthetic oligonucleotide
  Sense strand starting at position 979 of SEQ ID NO: 1564016
gcaggaaacagacguauaa

SEQ ID NO: 1848824 - RNA, 19 nt, Artificial Sequence
  Description of Artificial Sequence: Synthetic oligonucleotide
  Antisense strand to SEQ ID NO: 1848823
uuauacgucuguuuccugc

SEQ ID NO: 1848825 - RNA, 19 nt, Artificial Sequence
  Description of Artificial Sequence: Synthetic oligonucleotide
  Sense strand starting at position 1062 of SEQ ID NO: 1564016
cggcacuaccauuaugaaa

SEQ ID NO: 1848826 - RNA, 19 nt, Artificial Sequence
  Description of Artificial Sequence: Synthetic oligonucleotide
  Antisense strand to SEQ ID NO: 1848825
uuucauaaugguagugccg

SEQ ID NO: 1848827 - RNA, 19 nt, Artificial Sequence
  Description of Artificial Sequence: Synthetic oligonucleotide
  Sense strand starting at position 1087 of SEQ ID NO: 1564016
auuauuagagaccguauca

SEQ ID NO: 1848828 - RNA, 19 nt, Artificial Sequence
  Description of Artificial Sequence: Synthetic oligonucleotide
  Antisense strand to SEQ ID NO: 1848827
ugauacggucucuaauaau

SEQ ID NO: 1848829 - RNA, 19 nt, Artificial Sequence
  Description of Artificial Sequence: Synthetic oligonucleotide
  Sense strand starting at position 1123 of SEQ ID NO: 1564016
acauuuguucuugguaagu

SEQ ID NO: 1848830 - RNA, 19 nt, Artificial Sequence
  Description of Artificial Sequence: Synthetic oligonucleotide
  Antisense strand to SEQ ID NO: 1848829
acuuaccaagaacaaaugu

SEQ ID NO: 1848831 - RNA, 19 nt, Artificial Sequence
  Description of Artificial Sequence: Synthetic oligonucleotide
  Sense strand starting at position 1223 of SEQ ID NO: 1564016
acaauuacucaguaacgca

SEQ ID NO: 1848832 - RNA, 19 nt, Artificial Sequence
  Description of Artificial Sequence: Synthetic oligonucleotide
  Antisense strand to SEQ ID NO: 1848831
ugcguuacugaguaauugu

SEQ ID NO: 1848833 - RNA, 19 nt, Artificial Sequence
  Description of Artificial Sequence: Synthetic oligonucleotide
  Sense strand starting at position 1418 of SEQ ID NO: 1564016
ugcccaagugaaugaaauu

SEQ ID NO: 1848834 - RNA, 19 nt, Artificial Sequence
  Description of Artificial Sequence: Synthetic oligonucleotide
  Antisense strand to SEQ ID NO: 1848833
aauuucauucacuugggca

SEQ ID NO: 1848835 - RNA, 19 nt, Artificial Sequence
  Description of Artificial Sequence: Synthetic oligonucleotide
  Sense strand starting at position 1427 of SEQ ID NO: 1564016
gaaugaaauugugccucca

SEQ ID NO: 1848836 - RNA, 19 nt, Artificial Sequence
  Description of Artificial Sequence: Synthetic oligonucleotide
  Antisense strand to SEQ ID NO: 1848835
uggaggcacaauuucauuc

SEQ ID NO: 1848837 - RNA, 19 nt, Artificial Sequence
  Description of Artificial Sequence: Synthetic oligonucleotide
  Sense strand starting at position 2122 of SEQ ID NO: 1564016
aaggauuccucguuuagag

SEQ ID NO: 1848838 - RNA, 19 nt, Artificial Sequence
  Description of Artificial Sequence: Synthetic oligonucleotide
  Antisense strand to SEQ ID NO: 1848837
cucuaaacgaggaauccuu

SEQ ID NO: 1848839 - RNA, 19 nt, Artificial Sequence
  Description of Artificial Sequence: Synthetic oligonucleotide
  Sense strand starting at position 2192 of SEQ ID NO: 1564016
ggcguuguaauccuuacgu

SEQ ID NO: 1848840 - RNA, 19 nt, Artificial Sequence
  Description of Artificial Sequence: Synthetic oligonucleotide
  Antisense strand to SEQ ID NO: 1848839
acguaaggauuacaacgcc

SEQ ID NO: 1848841 - RNA, 19 nt, Artificial Sequence
  Description of Artificial Sequence: Synthetic oligonucleotide
  Sense strand starting at position 2564 of SEQ ID NO: 1564016
uuaugugcagauugagaug

SEQ ID NO: 1848842 - RNA, 19 nt, Artificial Sequence
  Description of Artificial Sequence: Synthetic oligonucleotide
  Antisense strand to SEQ ID NO: 1848841
caucucaaucugcacauaa

SEQ ID NO: 1848843 - RNA, 19 nt, Artificial Sequence
  Description of Artificial Sequence: Synthetic oligonucleotide
  Sense strand starting at position 2569 of SEQ ID NO: 1564016
ugcagauugagaugcuaaa

SEQ ID NO: 1848844 - RNA, 19 nt, Artificial Sequence
  Description of Artificial Sequence: Synthetic oligonucleotide
  Antisense strand to SEQ ID NO: 1848843
uuuagcaucucaaucugca

SEQ ID NO: 1848845 - RNA, 19 nt, Artificial Sequence
  Description of Artificial Sequence: Synthetic oligonucleotide
  Sense strand starting at position 2800 of SEQ ID NO: 1564016
cccugacuucgugauugaa

SEQ ID NO: 1848846 - RNA, 19 nt, Artificial Sequence
  Description of Artificial Sequence: Synthetic oligonucleotide
  Antisense strand to SEQ ID NO: 1848845
uucaaucacgaagucaggg

SEQ ID NO: 1848847 - RNA, 19 nt, Artificial Sequence
  Description of Artificial Sequence: Synthetic oligonucleotide
  Sense strand starting at position 2885 of SEQ ID NO: 1564016
cgagaaugucucuaccuua

SEQ ID NO: 1848848 - RNA, 19 nt, Artificial Sequence
  Description of Artificial Sequence: Synthetic oligonucleotide
  Antisense strand to SEQ ID NO: 1848847
uaagguagagacauucucg

SEQ ID NO: 1848849 - RNA, 19 nt, Artificial Sequence
  Description of Artificial Sequence: Synthetic oligonucleotide
  Sense strand starting at position 2922 of SEQ ID NO: 1564016
gguggagcucuccaaauug

SEQ ID NO: 1848850 - RNA, 19 nt, Artificial Sequence
  Description of Artificial Sequence: Synthetic oligonucleotide
  Antisense strand to SEQ ID NO: 1848849
caauuuggagagcuccacc

SEQ ID NO: 1848851 - RNA, 19 nt, Artificial Sequence
  Description of Artificial Sequence: Synthetic oligonucleotide
  Sense strand starting at position 3093 of SEQ ID NO: 1564016
guagaaugacugcauuacu

SEQ ID NO: 1848852 - RNA, 19 nt, Artificial Sequence
  Description of Artificial Sequence: Synthetic oligonucleotide
  Antisense strand to SEQ ID NO: 1848851
aguaaugcagucauucuac

SEQ ID NO: 1848853 - RNA, 19 nt, Artificial Sequence
  Description of Artificial Sequence: Synthetic oligonucleotide
  Sense strand starting at position 3356 of SEQ ID NO: 1564016
ggugguguuauuguuugca

SEQ ID NO: 1848854 - RNA, 19 nt, Artificial Sequence
  Description of Artificial Sequence: Synthetic oligonucleotide
  Antisense strand to SEQ ID NO: 1848853
ugcaaacaauaacaccacc

SEQ ID NO: 1848855 - RNA, 19 nt, Artificial Sequence
  Description of Artificial Sequence: Synthetic oligonucleotide
  Sense strand starting at position 3483 of SEQ ID NO: 1564016
ugggauuaguacucuuaga

SEQ ID NO: 1848856 - RNA, 19 nt, Artificial Sequence
  Description of Artificial Sequence: Synthetic oligonucleotide
  Antisense strand to SEQ ID NO: 1848855
ucuaagaguacuaauccca

SEQ ID NO: 1848857 - RNA, 19 nt, Artificial Sequence
  Description of Artificial Sequence: Synthetic oligonucleotide
  Sense strand starting at position 3515 of SEQ ID NO: 1564016
agaggucucuuuccaccau

SEQ ID NO: 1848858 - RNA, 19 nt, Artificial Sequence
  Description of Artificial Sequence: Synthetic oligonucleotide
  Antisense strand to SEQ ID NO: 1848857
augguggaaagagaccucu

SEQ ID NO: 1848859 - RNA, 19 nt, Artificial Sequence
  Description of Artificial Sequence: Synthetic oligonucleotide
  Sense strand starting at position 3795 of SEQ ID NO: 1564016
cuguuuacagagcaaguua

SEQ ID NO: 1848860 - RNA, 19 nt, Artificial Sequence
  Description of Artificial Sequence: Synthetic oligonucleotide
  Antisense strand to SEQ ID NO: 1848859
uaacuugcucuguaaacag

SEQ ID NO: 1848861 - RNA, 19 nt, Artificial Sequence
  Description of Artificial Sequence: Synthetic oligonucleotide
  Sense strand starting at position 3806 of SEQ ID NO: 1564016
gcaaguuauuuccugcauu

SEQ ID NO: 1848862 - RNA, 19 nt, Artificial Sequence
  Description of Artificial Sequence: Synthetic oligonucleotide
  Antisense strand to SEQ ID NO: 1848861
aaugcaggaaauaacuugc

SEQ ID NO: 1848863 - RNA, 19 nt, Artificial Sequence
  Description of Artificial Sequence: Synthetic oligonucleotide
  Sense strand starting at position 3963 of SEQ ID NO: 1564016
gugagagcucaccaaaggu

SEQ ID NO: 1848864 - RNA, 19 nt, Artificial Sequence
  Description of Artificial Sequence: Synthetic oligonucleotide
  Antisense strand to SEQ ID NO: 1848863
accuuuggugagcucucac

SEQ ID NO: 1848865 - RNA, 19 nt, Artificial Sequence
  Description of Artificial Sequence: Synthetic oligonucleotide
  Sense strand starting at position 3976 of SEQ ID NO: 1564016
aaagguaagucucuuugga

SEQ ID NO: 1848866 - RNA, 19 nt, Artificial Sequence
  Description of Artificial Sequence: Synthetic oligonucleotide
  Antisense strand to SEQ ID NO: 1848865
uccaaagagacuuaccuuu

SEQ ID NO: 1848867 - RNA, 19 nt, Artificial Sequence
  Description of Artificial Sequence: Synthetic oligonucleotide
  Sense strand starting at position 1 of SEQ ID NO: 1564017
gauccugaguuauugaaag

SEQ ID NO: 1848868 - RNA, 19 nt, Artificial Sequence
  Description of Artificial Sequence: Synthetic oligonucleotide
  Antisense strand to SEQ ID NO: 1848867
cuuucaauaacucaggauc

SEQ ID NO: 1848869 - RNA, 19 nt, Artificial Sequence
  Description of Artificial Sequence: Synthetic oligonucleotide
  Sense strand starting at position 166 of SEQ ID NO: 1564017
uuuaaauagcuauggcaga

SEQ ID NO: 1848870 - RNA, 19 nt, Artificial Sequence
  Description of Artificial Sequence: Synthetic oligonucleotide
  Antisense strand to SEQ ID NO: 1848869
ucugccauagcuauuuaaa

SEQ ID NO: 1848871 - RNA, 19 nt, Artificial Sequence
  Description of Artificial Sequence: Synthetic oligonucleotide
  Sense strand starting at position 303 of SEQ ID NO: 1564017
ugaauauuggagugcacau

SEQ ID NO: 1848872 - RNA, 19 nt, Artificial Sequence
  Description of Artificial Sequence: Synthetic oligonucleotide
  Antisense strand to SEQ ID NO: 1848871
augugcacuccaauauuca

SEQ ID NO: 1848873 - RNA, 19 nt, Artificial Sequence
  Description of Artificial Sequence: Synthetic oligonucleotide
  Sense strand starting at position 312 of SEQ ID NO: 1564017
gagugcacauuugcauuau

SEQ ID NO: 1848874 - RNA, 19 nt, Artificial Sequence
  Description of Artificial Sequence: Synthetic oligonucleotide
  Antisense strand to SEQ ID NO: 1848873
auaaugcaaaugugcacuc

SEQ ID NO: 1848875 - RNA, 19 nt, Artificial Sequence
  Description of Artificial Sequence: Synthetic oligonucleotide
  Sense strand starting at position 377 of SEQ ID NO: 1564017
ucuccuugaccucaguaua

SEQ ID NO: 1848876 - RNA, 19 nt, Artificial Sequence
  Description of Artificial Sequence: Synthetic oligonucleotide
  Antisense strand to SEQ ID NO: 1848875
uauacugaggucaaggaga

SEQ ID NO: 1848877 - RNA, 19 nt, Artificial Sequence
  Description of Artificial Sequence: Synthetic oligonucleotide
  Sense strand starting at position 380 of SEQ ID NO: 1564017
ccuugaccucaguauaagu

SEQ ID NO: 1848878 - RNA, 19 nt, Artificial Sequence
  Description of Artificial Sequence: Synthetic oligonucleotide
  Antisense strand to SEQ ID NO: 1848877
acuuauacugaggucaagg

SEQ ID NO: 1848879 - RNA, 19 nt, Artificial Sequence
  Description of Artificial Sequence: Synthetic oligonucleotide
  Sense strand starting at position 472 of SEQ ID NO: 1564017
uguauuacuccugauuggu

SEQ ID NO: 1848880 - RNA, 19 nt, Artificial Sequence
  Description of Artificial Sequence: Synthetic oligonucleotide
  Antisense strand to SEQ ID NO: 1848879
accaaucaggaguaauaca

SEQ ID NO: 1848881 - RNA, 19 nt, Artificial Sequence
  Description of Artificial Sequence: Synthetic oligonucleotide
  Sense strand starting at position 475 of SEQ ID NO: 1564017
auuacuccugauugguaau

SEQ ID NO: 1848882 - RNA, 19 nt, Artificial Sequence
  Description of Artificial Sequence: Synthetic oligonucleotide
  Antisense strand to SEQ ID NO: 1848881
auuaccaaucaggaguaau

SEQ ID NO: 1848883 - RNA, 19 nt, Artificial Sequence
  Description of Artificial Sequence: Synthetic oligonucleotide
  Sense strand starting at position 841 of SEQ ID NO: 1564017
guacucuuucuacaaguau

SEQ ID NO: 1848884 - RNA, 19 nt, Artificial Sequence
  Description of Artificial Sequence: Synthetic oligonucleotide
  Antisense strand to SEQ ID NO: 1848883
auacuuguagaaagaguac

SEQ ID NO: 1848885 - RNA, 19 nt, Artificial Sequence
  Description of Artificial Sequence: Synthetic oligonucleotide
  Sense strand starting at position 1081 of SEQ ID NO: 1564017
guaggaacuuguucuaaua

SEQ ID NO: 1848886 - RNA, 19 nt, Artificial Sequence
  Description of Artificial Sequence: Synthetic oligonucleotide
  Antisense strand to SEQ ID NO: 1848885
uauuagaacaaguuccuac

SEQ ID NO: 1848887 - RNA, 19 nt, Artificial Sequence
  Description of Artificial Sequence: Synthetic oligonucleotide
  Sense strand starting at position 1198 of SEQ ID NO: 1564017
ccuauacuaugguuagauu

SEQ ID NO: 1848888 - RNA, 19 nt, Artificial Sequence
  Description of Artificial Sequence: Synthetic oligonucleotide
  Antisense strand to SEQ ID NO: 1848887
aaucuaaccauaguauagg

SEQ ID NO: 1848889 - RNA, 19 nt, Artificial Sequence
  Description of Artificial Sequence: Synthetic oligonucleotide
  Sense strand starting at position 1304 of SEQ ID NO: 1564017
aggcauauauaacugcaau

SEQ ID NO: 1848890 - RNA, 19 nt, Artificial Sequence
  Description of Artificial Sequence: Synthetic oligonucleotide
  Antisense strand to SEQ ID NO: 1848889
auugcaguuauauaugccu

SEQ ID NO: 1848891 - RNA, 19 nt, Artificial Sequence
  Description of Artificial Sequence: Synthetic oligonucleotide
  Sense strand starting at position 1420 of SEQ ID NO: 1564017
uuuguuguaccugagaaug

SEQ ID NO: 1848892 - RNA, 19 nt, Artificial Sequence
  Description of Artificial Sequence: Synthetic oligonucleotide
  Antisense strand to SEQ ID NO: 1848891
cauucucagguacaacaaa

SEQ ID NO: 1848893 - RNA, 19 nt, Artificial Sequence
  Description of Artificial Sequence: Synthetic oligonucleotide
  Sense strand starting at position 1597 of SEQ ID NO: 1564017
cuuggcuugacugauggua

SEQ ID NO: 1848894 - RNA, 19 nt, Artificial Sequence
  Description of Artificial Sequence: Synthetic oligonucleotide
  Antisense strand to SEQ ID NO: 1848893
uaccaucagucaagccaag

SEQ ID NO: 1848895 - RNA, 19 nt, Artificial Sequence
  Description of Artificial Sequence: Synthetic oligonucleotide
  Sense strand starting at position 1837 of SEQ ID NO: 1564017
guggaaaccgcuuaucaaa

SEQ ID NO: 1848896 - RNA, 19 nt, Artificial Sequence
  Description of Artificial Sequence: Synthetic oligonucleotide
  Antisense strand to SEQ ID NO: 1848895
uuugauaagcgguuuccac

SEQ ID NO: 1848897 - RNA, 19 nt, Artificial Sequence
  Description of Artificial Sequence: Synthetic oligonucleotide
  Sense strand starting at position 1978 of SEQ ID NO: 1564017
gugacauugcuccaggaaa

SEQ ID NO: 1848898 - RNA, 19 nt, Artificial Sequence
  Description of Artificial Sequence: Synthetic oligonucleotide
  Antisense strand to SEQ ID NO: 1848897
uuuccuggagcaaugucac

SEQ ID NO: 1848899 - RNA, 19 nt, Artificial Sequence
  Description of Artificial Sequence: Synthetic oligonucleotide
  Sense strand starting at position 2095 of SEQ ID NO: 1564017
gguaaaggagucugugaag

SEQ ID NO: 1848900 - RNA, 19 nt, Artificial Sequence
  Description of Artificial Sequence: Synthetic oligonucleotide
  Antisense strand to SEQ ID NO: 1848899
cuucacagacuccuuuacc

SEQ ID NO: 1848901 - RNA, 19 nt, Artificial Sequence
  Description of Artificial Sequence: Synthetic oligonucleotide
  Sense strand starting at position 2104 of SEQ ID NO: 1564017
gucugugaagagcagaaau

SEQ ID NO: 1848902 - RNA, 19 nt, Artificial Sequence
  Description of Artificial Sequence: Synthetic oligonucleotide
  Antisense strand to SEQ ID NO: 1848901
auuucugcucuucacagac

SEQ ID NO: 1848903 - RNA, 19 nt, Artificial Sequence
  Description of Artificial Sequence: Synthetic oligonucleotide
  Sense strand starting at position 2123 of SEQ ID NO: 1564017
guagaaugucagggaugaa

SEQ ID NO: 1848904 - RNA, 19 nt, Artificial Sequence
  Description of Artificial Sequence: Synthetic oligonucleotide
  Antisense strand to SEQ ID NO: 1848903
uucaucccugacauucuac

SEQ ID NO: 1848905 - RNA, 19 nt, Artificial Sequence
  Description of Artificial Sequence: Synthetic oligonucleotide
  Sense strand starting at position 2249 of SEQ ID NO: 1564017
gguucuuaaguuuagcaaa

SEQ ID NO: 1848906 - RNA, 19 nt, Artificial Sequence
  Description of Artificial Sequence: Synthetic oligonucleotide
  Antisense strand to SEQ ID NO: 1848905
uuugcuaaacuuaagaacc

SEQ ID NO: 1848907 - RNA, 19 nt, Artificial Sequence
  Description of Artificial Sequence: Synthetic oligonucleotide
  Sense strand starting at position 2320 of SEQ ID NO: 1564017
aguauuagucuaggaauac

SEQ ID NO: 1848908 - RNA, 19 nt, Artificial Sequence
  Description of Artificial Sequence: Synthetic oligonucleotide
  Antisense strand to SEQ ID NO: 1848907
guauuccuagacuaauacu

SEQ ID NO: 1848909 - RNA, 19 nt, Artificial Sequence
  Description of Artificial Sequence: Synthetic oligonucleotide
  Sense strand starting at position 2424 of SEQ ID NO: 1564017
agugacucugucuaauaua

SEQ ID NO: 1848910 - RNA, 19 nt, Artificial Sequence
  Description of Artificial Sequence: Synthetic oligonucleotide
  Antisense strand to SEQ ID NO: 1848909
uauauuagacagagucacu

SEQ ID NO: 1848911 - RNA, 19 nt, Artificial Sequence
  Description of Artificial Sequence: Synthetic oligonucleotide
  Sense strand starting at position 2503 of SEQ ID NO: 1564017
ugucuaaaugauugaauug

SEQ ID NO: 1848912 - RNA, 19 nt, Artificial Sequence
  Description of Artificial Sequence: Synthetic oligonucleotide
  Antisense strand to SEQ ID NO: 1848911
caauucaaucauuuagaca

SEQ ID NO: 1848913 - RNA, 19 nt, Artificial Sequence
  Description of Artificial Sequence: Synthetic oligonucleotide
  Sense strand starting at position 2513 of SEQ ID NO: 1564017
auugaauugcuguauagaa

SEQ ID NO: 1848914 - RNA, 19 nt, Artificial Sequence
  Description of Artificial Sequence: Synthetic oligonucleotide
  Antisense strand to SEQ ID NO: 1848913
uucuauacagcaauucaau

SEQ ID NO: 1848915 - RNA, 19 nt, Artificial Sequence
  Description of Artificial Sequence: Synthetic oligonucleotide
  Sense strand starting at position 2632 of SEQ ID NO: 1564017
uuauaugugcccuaggaaa

SEQ ID NO: 1848916 - RNA, 19 nt, Artificial Sequence
  Description of Artificial Sequence: Synthetic oligonucleotide
  Antisense strand to SEQ ID NO: 1848915
uuuccuagggcacauauaa

SEQ ID NO: 1848917 - RNA, 19 nt, Artificial Sequence
  Description of Artificial Sequence: Synthetic oligonucleotide
  Sense strand starting at position 2634 of SEQ ID NO: 1564017
auaugugcccuaggaaaca

SEQ ID NO: 1848918 - RNA, 19 nt, Artificial Sequence
  Description of Artificial Sequence: Synthetic oligonucleotide
  Antisense strand to SEQ ID NO: 1848917
uguuuccuagggcacauau

SEQ ID NO: 1848919 - RNA, 19 nt, Artificial Sequence
  Description of Artificial Sequence: Synthetic oligonucleotide
  Sense strand starting at position 2648 of SEQ ID NO: 1564017
aaacacugaguuugauuga

SEQ ID NO: 1848920 - RNA, 19 nt, Artificial Sequence
  Description of Artificial Sequence: Synthetic oligonucleotide
  Antisense strand to SEQ ID NO: 1848919
ucaaucaaacucaguguuu

SEQ ID NO: 1848921 - RNA, 19 nt, Artificial Sequence
  Description of Artificial Sequence: Synthetic oligonucleotide
  Sense strand starting at position 2651 of SEQ ID NO: 1564017
cacugaguuugauugacuu

SEQ ID NO: 1848922 - RNA, 19 nt, Artificial Sequence
  Description of Artificial Sequence: Synthetic oligonucleotide
  Antisense strand to SEQ ID NO: 1848921
aagucaaucaaacucagug

SEQ ID NO: 1848923 - RNA, 19 nt, Artificial Sequence
  Description of Artificial Sequence: Synthetic oligonucleotide
  Sense strand starting at position 2702 of SEQ ID NO: 1564017
ccugaaagaugccuuaacu

SEQ ID NO: 1848924 - RNA, 19 nt, Artificial Sequence
  Description of Artificial Sequence: Synthetic oligonucleotide
  Antisense strand to SEQ ID NO: 1848923
aguuaaggcaucuuucagg

SEQ ID NO: 1848925 - RNA, 19 nt, Artificial Sequence
  Description of Artificial Sequence: Synthetic oligonucleotide
  Sense strand starting at position 2719 of SEQ ID NO: 1564017
cugacauaaugagauuuaa

SEQ ID NO: 1848926 - RNA, 19 nt, Artificial Sequence
  Description of Artificial Sequence: Synthetic oligonucleotide
  Antisense strand to SEQ ID NO: 1848925
uuaaaucucauuaugucag

SEQ ID NO: 1848927 - RNA, 19 nt, Artificial Sequence
  Description of Artificial Sequence: Synthetic oligonucleotide
  Sense strand starting at position 3072 of SEQ ID NO: 1564017
cuuuaugagguuuauaggu

SEQ ID NO: 1848928 - RNA, 19 nt, Artificial Sequence
  Description of Artificial Sequence: Synthetic oligonucleotide
  Antisense strand to SEQ ID NO: 1848927
accuauaaaccucauaaag

SEQ ID NO: 1848929 - RNA, 19 nt, Artificial Sequence
  Description of Artificial Sequence: Synthetic oligonucleotide
  Sense strand starting at position 3077 of SEQ ID NO: 1564017
ugagguuuauaggugagaa

SEQ ID NO: 1848930 - RNA, 19 nt, Artificial Sequence
  Description of Artificial Sequence: Synthetic oligonucleotide
  Antisense strand to SEQ ID NO: 1848929
uucucaccuauaaaccuca

SEQ ID NO: 1848931 - RNA, 19 nt, Artificial Sequence
  Description of Artificial Sequence: Synthetic oligonucleotide
  Sense strand starting at position 3078 of SEQ ID NO: 1564017
gagguuuauaggugagaaa

SEQ ID NO: 1848932 - RNA, 19 nt, Artificial Sequence
  Description of Artificial Sequence: Synthetic oligonucleotide
  Antisense strand to SEQ ID NO: 1848931
uuucucaccuauaaaccuc

SEQ ID NO: 1848933 - RNA, 19 nt, Artificial Sequence
  Description of Artificial Sequence: Synthetic oligonucleotide
  Sense strand starting at position 3334 of SEQ ID NO: 1564017
aaaugcuagccaugagaga

SEQ ID NO: 1848934 - RNA, 19 nt, Artificial Sequence
  Description of Artificial Sequence: Synthetic oligonucleotide
  Antisense strand to SEQ ID NO: 1848933
ucucucauggcuagcauuu

SEQ ID NO: 1848935 - RNA, 19 nt, Artificial Sequence
  Description of Artificial Sequence: Synthetic oligonucleotide
  Sense strand starting at position 3453 of SEQ ID NO: 1564017
uuauauuuguguguugagu

SEQ ID NO: 1848936 - RNA, 19 nt, Artificial Sequence
  Description of Artificial Sequence: Synthetic oligonucleotide
  Antisense strand to SEQ ID NO: 1848935
acucaacacacaaauauaa

SEQ ID NO: 1848937 - RNA, 19 nt, Artificial Sequence
  Description of Artificial Sequence: Synthetic oligonucleotide
  Sense strand starting at position 3604 of SEQ ID NO: 1564017
gcaguaucacuuugaauaa

SEQ ID NO: 1848938 - RNA, 19 nt, Artificial Sequence
  Description of Artificial Sequence: Synthetic oligonucleotide
  Antisense strand to SEQ ID NO: 1848937
uuauucaaagugauacugc

SEQ ID NO: 1848939 - RNA, 19 nt, Artificial Sequence
  Description of Artificial Sequence: Synthetic oligonucleotide
  Sense strand starting at position 3621 of SEQ ID NO: 1564017
aaacuuuaugugugaacag

SEQ ID NO: 1848940 - RNA, 19 nt, Artificial Sequence
  Description of Artificial Sequence: Synthetic oligonucleotide
  Antisense strand to SEQ ID NO: 1848939
cuguucacacauaaaguuu

SEQ ID NO: 1848941 - RNA, 19 nt, Artificial Sequence
  Description of Artificial Sequence: Synthetic oligonucleotide
  Sense strand starting at position 3883 of SEQ ID NO: 1564017
ugagccaacuuccuugaua

SEQ ID NO: 1848942 - RNA, 19 nt, Artificial Sequence
  Description of Artificial Sequence: Synthetic oligonucleotide
  Antisense strand to SEQ ID NO: 1848941
uaucaaggaaguuggcuca

SEQ ID NO: 1848943 - RNA, 19 nt, Artificial Sequence
  Description of Artificial Sequence: Synthetic oligonucleotide
  Sense strand starting at position 3898 of SEQ ID NO: 1564017
gauacaguuuggcuacaau

SEQ ID NO: 1848944 - RNA, 19 nt, Artificial Sequence
  Description of Artificial Sequence: Synthetic oligonucleotide
  Antisense strand to SEQ ID NO: 1848943
auuguagccaaacuguauc

SEQ ID NO: 1848945 - RNA, 19 nt, Artificial Sequence
  Description of Artificial Sequence: Synthetic oligonucleotide
  Sense strand starting at position 3909 of SEQ ID NO: 1564017
gcuacaauuuguguguaaa

SEQ ID NO: 1848946 - RNA, 19 nt, Artificial Sequence
  Description of Artificial Sequence: Synthetic oligonucleotide
  Antisense strand to SEQ ID NO: 1848945
uuuacacacaaauuguagc

SEQ ID NO: 1848947 - RNA, 19 nt, Artificial Sequence
  Description of Artificial Sequence: Synthetic oligonucleotide
  Sense strand starting at position 434 of SEQ ID NO: 1564018
gagggaagcuuugucucaa

SEQ ID NO: 1848948 - RNA, 19 nt, Artificial Sequence
  Description of Artificial Sequence: Synthetic oligonucleotide
  Antisense strand to SEQ ID NO: 1848947
uugagacaaagcuucccuc

SEQ ID NO: 1848949 - RNA, 19 nt, Artificial Sequence
  Description of Artificial Sequence: Synthetic oligonucleotide
  Sense strand starting at position 435 of SEQ ID NO: 1564018
agggaagcuuugucucaaa

SEQ ID NO: 1848950 - RNA, 19 nt, Artificial Sequence
  Description of Artificial Sequence: Synthetic oligonucleotide
  Antisense strand to SEQ ID NO: 1848949
uuugagacaaagcuucccu

SEQ ID NO: 1848951 - RNA, 19 nt, Artificial Sequence
  Description of Artificial Sequence: Synthetic oligonucleotide
  Sense strand starting at position 497 of SEQ ID NO: 1564018
aguaacagcuaguuacaga

SEQ ID NO: 1848952 - RNA, 19 nt, Artificial Sequence
  Description of Artificial Sequence: Synthetic oligonucleotide
  Antisense strand to SEQ ID NO: 1848951
ucuguaacuagcuguuacu

SEQ ID NO: 1848953 - RNA, 19 nt, Artificial Sequence
  Description of Artificial Sequence: Synthetic oligonucleotide
  Sense strand starting at position 544 of SEQ ID NO: 1564018
ggugcccugccugcuaaua

SEQ ID NO: 1848954 - RNA, 19 nt, Artificial Sequence
  Description of Artificial Sequence: Synthetic oligonucleotide
  Antisense strand to SEQ ID NO: 1848953
uauuagcaggcagggcacc

SEQ ID NO: 1848955 - RNA, 19 nt, Artificial Sequence
  Description of Artificial Sequence: Synthetic oligonucleotide
  Sense strand starting at position 594 of SEQ ID NO: 1564018
uuuggaguaugucuccaau

SEQ ID NO: 1848956 - RNA, 19 nt, Artificial Sequence
  Description of Artificial Sequence: Synthetic oligonucleotide
  Antisense strand to SEQ ID NO: 1848955
auuggagacauacuccaaa

SEQ ID NO: 1848957 - RNA, 19 nt, Artificial Sequence
  Description of Artificial Sequence: Synthetic oligonucleotide
  Sense strand starting at position 597 of SEQ ID NO: 1564018
ggaguaugucuccaaugcu

SEQ ID NO: 1848958 - RNA, 19 nt, Artificial Sequence
  Description of Artificial Sequence: Synthetic oligonucleotide
  Antisense strand to SEQ ID NO: 1848957
agcauuggagacauacucc

SEQ ID NO: 1848959 - RNA, 19 nt, Artificial Sequence
  Description of Artificial Sequence: Synthetic oligonucleotide
  Sense strand starting at position 663 of SEQ ID NO: 1564018
gcuacaaagguuuaaauau

SEQ ID NO: 1848960 - RNA, 19 nt, Artificial Sequence
  Description of Artificial Sequence: Synthetic oligonucleotide
  Antisense strand to SEQ ID NO: 1848959
auauuuaaaccuuuguagc

SEQ ID NO: 1848961 - RNA, 19 nt, Artificial Sequence
  Description of Artificial Sequence: Synthetic oligonucleotide
  Sense strand starting at position 927 of SEQ ID NO: 1564018
guggcaaaucacugauaga

SEQ ID NO: 1848962 - RNA, 19 nt, Artificial Sequence
  Description of Artificial Sequence: Synthetic oligonucleotide
  Antisense strand to SEQ ID NO: 1848961
ucuaucagugauuugccac

SEQ ID NO: 1848963 - RNA, 19 nt, Artificial Sequence
  Description of Artificial Sequence: Synthetic oligonucleotide
  Sense strand starting at position 1053 of SEQ ID NO: 1564018
ugaaaucugugacucacaa

SEQ ID NO: 1848964 - RNA, 19 nt, Artificial Sequence
  Description of Artificial Sequence: Synthetic oligonucleotide
  Antisense strand to SEQ ID NO: 1848963
uugugagucacagauuuca

SEQ ID NO: 1848965 - RNA, 19 nt, Artificial Sequence
  Description of Artificial Sequence: Synthetic oligonucleotide
  Sense strand starting at position 1063 of SEQ ID NO: 1564018
gacucacaacuaggugaau

SEQ ID NO: 1848966 - RNA, 19 nt, Artificial Sequence
  Description of Artificial Sequence: Synthetic oligonucleotide
  Antisense strand to SEQ ID NO: 1848965
auucaccuaguugugaguc

SEQ ID NO: 1848967 - RNA, 19 nt, Artificial Sequence
  Description of Artificial Sequence: Synthetic oligonucleotide
  Sense strand starting at position 1099 of SEQ ID NO: 1564018
ggaagcgaguucucauuaa

SEQ ID NO: 1848968 - RNA, 19 nt, Artificial Sequence
  Description of Artificial Sequence: Synthetic oligonucleotide
  Antisense strand to SEQ ID NO: 1848967
uuaaugagaacucgcuucc

SEQ ID NO: 1848969 - RNA, 19 nt, Artificial Sequence
  Description of Artificial Sequence: Synthetic oligonucleotide
  Sense strand starting at position 1110 of SEQ ID NO: 1564018
cucauuaauggugauguau

SEQ ID NO: 1848970 - RNA, 19 nt, Artificial Sequence
  Description of Artificial Sequence: Synthetic oligonucleotide
  Antisense strand to SEQ ID NO: 1848969
auacaucaccauuaaugag

SEQ ID NO: 1848971 - RNA, 19 nt, Artificial Sequence
  Description of Artificial Sequence: Synthetic oligonucleotide
  Sense strand starting at position 1118 of SEQ ID NO: 1564018
uggugauguaucugaauga

SEQ ID NO: 1848972 - RNA, 19 nt, Artificial Sequence
  Description of Artificial Sequence: Synthetic oligonucleotide
  Antisense strand to SEQ ID NO: 1848971
ucauucagauacaucacca

SEQ ID NO: 1848973 - RNA, 19 nt, Artificial Sequence
  Description of Artificial Sequence: Synthetic oligonucleotide
  Sense strand starting at position 1184 of SEQ ID NO: 1564018
guuagaaguuaacugaagu

SEQ ID NO: 1848974 - RNA, 19 nt, Artificial Sequence
  Description of Artificial Sequence: Synthetic oligonucleotide
  Antisense strand to SEQ ID NO: 1848973
acuucaguuaacuucuaac

SEQ ID NO: 1848975 - RNA, 19 nt, Artificial Sequence
  Description of Artificial Sequence: Synthetic oligonucleotide
  Sense strand starting at position 1206 of SEQ ID NO: 1564018
gcuuuaguugaacacuuaa

SEQ ID NO: 1848976 - RNA, 19 nt, Artificial Sequence
  Description of Artificial Sequence: Synthetic oligonucleotide
  Antisense strand to SEQ ID NO: 1848975
uuaaguguucaacuaaagc

SEQ ID NO: 1848977 - RNA, 19 nt, Artificial Sequence
  Description of Artificial Sequence: Synthetic oligonucleotide
  Sense strand starting at position 1284 of SEQ ID NO: 1564018
ugacaaacggagugauaua

SEQ ID NO: 1848978 - RNA, 19 nt, Artificial Sequence
  Description of Artificial Sequence: Synthetic oligonucleotide
  Antisense strand to SEQ ID NO: 1848977
uauaucacuccguuuguca

SEQ ID NO: 1848979 - RNA, 19 nt, Artificial Sequence
  Description of Artificial Sequence: Synthetic oligonucleotide
  Sense strand starting at position 1310 of SEQ ID NO: 1564018
uccgaaaugcccuaaauug

SEQ ID NO: 1848980 - RNA, 19 nt, Artificial Sequence
  Description of Artificial Sequence: Synthetic oligonucleotide
  Antisense strand to SEQ ID NO: 1848979
caauuuagggcauuucgga

SEQ ID NO: 1848981 - RNA, 19 nt, Artificial Sequence
  Description of Artificial Sequence: Synthetic oligonucleotide
  Sense strand starting at position 1372 of SEQ ID NO: 1564018
acaggauuucuacgcagca

SEQ ID NO: 1848982 - RNA, 19 nt, Artificial Sequence
  Description of Artificial Sequence: Synthetic oligonucleotide
  Antisense strand to SEQ ID NO: 1848981
ugcugcguagaaauccugu

SEQ ID NO: 1848983 - RNA, 19 nt, Artificial Sequence
  Description of Artificial Sequence: Synthetic oligonucleotide
  Sense strand starting at position 1403 of SEQ ID NO: 1564018
uccaaagaaucugaaagaa

SEQ ID NO: 1848984 - RNA, 19 nt, Artificial Sequence
  Description of Artificial Sequence: Synthetic oligonucleotide
  Antisense strand to SEQ ID NO: 1848983
uucuuucagauucuuugga

SEQ ID NO: 1848985 - RNA, 19 nt, Artificial Sequence
  Description of Artificial Sequence: Synthetic oligonucleotide
  Sense strand starting at position 1498 of SEQ ID NO: 1564018
gcuuucuuuccugcuuagu

SEQ ID NO: 1848986 - RNA, 19 nt, Artificial Sequence
  Description of Artificial Sequence: Synthetic oligonucleotide
  Antisense strand to SEQ ID NO: 1848985
acuaagcaggaaagaaagc

SEQ ID NO: 1848987 - RNA, 19 nt, Artificial Sequence
  Description of Artificial Sequence: Synthetic oligonucleotide
  Sense strand starting at position 1598 of SEQ ID NO: 1564018
gggagaucgcagugaaaua

SEQ ID NO: 1848988 - RNA, 19 nt, Artificial Sequence
  Description of Artificial Sequence: Synthetic oligonucleotide
  Antisense strand to SEQ ID NO: 1848987
uauuucacugcgaucuccc

SEQ ID NO: 1848989 - RNA, 19 nt, Artificial Sequence
  Description of Artificial Sequence: Synthetic oligonucleotide
  Sense strand starting at position 1599 of SEQ ID NO: 1564018
ggagaucgcagugaaauac

SEQ ID NO: 1848990 - RNA, 19 nt, Artificial Sequence
  Description of Artificial Sequence: Synthetic oligonucleotide
  Antisense strand to SEQ ID NO: 1848989
guauuucacugcgaucucc

SEQ ID NO: 1848991 - RNA, 19 nt, Artificial Sequence
  Description of Artificial Sequence: Synthetic oligonucleotide
  Sense strand starting at position 1705 of SEQ ID NO: 1564018
ggagacucucaguggcaga

SEQ ID NO: 1848992 - RNA, 19 nt, Artificial Sequence
  Description of Artificial Sequence: Synthetic oligonucleotide
  Antisense strand to SEQ ID NO: 1848991
ucugccacugagagucucc

SEQ ID NO: 1848993 - RNA, 19 nt, Artificial Sequence
  Description of Artificial Sequence: Synthetic oligonucleotide
  Sense strand starting at position 1756 of SEQ ID NO: 1564018
aggcucugguccuccaaga

SEQ ID NO: 1848994 - RNA, 19 nt, Artificial Sequence
  Description of Artificial Sequence: Synthetic oligonucleotide
  Antisense strand to SEQ ID NO: 1848993
ucuuggaggaccagagccu

SEQ ID NO: 1848995 - RNA, 19 nt, Artificial Sequence
  Description of Artificial Sequence: Synthetic oligonucleotide
  Sense strand starting at position 1929 of SEQ ID NO: 1564018
ggaauugucccucaccacu

SEQ ID NO: 1848996 - RNA, 19 nt, Artificial Sequence
  Description of Artificial Sequence: Synthetic oligonucleotide
  Antisense strand to SEQ ID NO: 1848995
aguggugagggacaauucc

SEQ ID NO: 1848997 - RNA, 19 nt, Artificial Sequence
  Description of Artificial Sequence: Synthetic oligonucleotide
  Sense strand starting at position 2554 of SEQ ID NO: 1564018
auggccaucugaucucaua

SEQ ID NO: 1848998 - RNA, 19 nt, Artificial Sequence
  Description of Artificial Sequence: Synthetic oligonucleotide
  Antisense strand to SEQ ID NO: 1848997
uaugagaucagauggccau

SEQ ID NO: 1848999 - RNA, 19 nt, Artificial Sequence
  Description of Artificial Sequence: Synthetic oligonucleotide
  Sense strand starting at position 2580 of SEQ ID NO: 1564018
ugauguaaugcguaugaaa

SEQ ID NO: 1849000 - RNA, 19 nt, Artificial Sequence
  Description of Artificial Sequence: Synthetic oligonucleotide
  Antisense strand to SEQ ID NO: 1848999
uuucauacgcauuacauca

SEQ ID NO: 1849001 - RNA, 19 nt, Artificial Sequence
  Description of Artificial Sequence: Synthetic oligonucleotide
  Sense strand starting at position 2768 of SEQ ID NO: 1564018
augauacaauggcuguaau

SEQ ID NO: 1849002 - RNA, 19 nt, Artificial Sequence
  Description of Artificial Sequence: Synthetic oligonucleotide
  Antisense strand to SEQ ID NO: 1849001
auuacagccauuguaucau

SEQ ID NO: 1849003 - RNA, 19 nt, Artificial Sequence
  Description of Artificial Sequence: Synthetic oligonucleotide
  Sense strand starting at position 2780 of SEQ ID NO: 1564018
cuguaauguguacaucuca

SEQ ID NO: 1849004 - RNA, 19 nt, Artificial Sequence
  Description of Artificial Sequence: Synthetic oligonucleotide
  Antisense strand to SEQ ID NO: 1849003
ugagauguacacauuacag

SEQ ID NO: 1849005 - RNA, 19 nt, Artificial Sequence
  Description of Artificial Sequence: Synthetic oligonucleotide
  Sense strand starting at position 2967 of SEQ ID NO: 1564018
uagcaugguugaucaauac

SEQ ID NO: 1849006 - RNA, 19 nt, Artificial Sequence
  Description of Artificial Sequence: Synthetic oligonucleotide
  Antisense strand to SEQ ID NO: 1849005
guauugaucaaccaugcua

SEQ ID NO: 1849007 - RNA, 19 nt, Artificial Sequence
  Description of Artificial Sequence: Synthetic oligonucleotide
  Sense strand starting at position 2971 of SEQ ID NO: 1564018
augguugaucaauacuugu

SEQ ID NO: 1849008 - RNA, 19 nt, Artificial Sequence
  Description of Artificial Sequence: Synthetic oligonucleotide
  Antisense strand to SEQ ID NO: 1849007
acaaguauugaucaaccau

SEQ ID NO: 1849009 - RNA, 19 nt, Artificial Sequence
  Description of Artificial Sequence: Synthetic oligonucleotide
  Sense strand starting at position 3047 of SEQ ID NO: 1564018
uguuaugugauccauaugu

SEQ ID NO: 1849010 - RNA, 19 nt, Artificial Sequence
  Description of Artificial Sequence: Synthetic oligonucleotide
  Antisense strand to SEQ ID NO: 1849009
acauauggaucacauaaca

SEQ ID NO: 1849011 - RNA, 19 nt, Artificial Sequence
  Description of Artificial Sequence: Synthetic oligonucleotide
  Sense strand starting at position 3049 of SEQ ID NO: 1564018
uuaugugauccauauguug

SEQ ID NO: 1849012 - RNA, 19 nt, Artificial Sequence
  Description of Artificial Sequence: Synthetic oligonucleotide
  Antisense strand to SEQ ID NO: 1849011
caacauauggaucacauaa

SEQ ID NO: 1849013 - RNA, 19 nt, Artificial Sequence
  Description of Artificial Sequence: Synthetic oligonucleotide
  Sense strand starting at position 3112 of SEQ ID NO: 1564018
uuuaaaguacuacgacaga

SEQ ID NO: 1849014 - RNA, 19 nt, Artificial Sequence
  Description of Artificial Sequence: Synthetic oligonucleotide
  Antisense strand to SEQ ID NO: 1849013
ucugucguaguacuuuaaa

SEQ ID NO: 1849015 - RNA, 19 nt, Artificial Sequence
  Description of Artificial Sequence: Synthetic oligonucleotide
  Sense strand starting at position 3208 of SEQ ID NO: 1564018
aaccauguuggcuagucau

SEQ ID NO: 1849016 - RNA, 19 nt, Artificial Sequence
  Description of Artificial Sequence: Synthetic oligonucleotide
  Antisense strand to SEQ ID NO: 1849015
augacuagccaacaugguu

SEQ ID NO: 1849017 - RNA, 19 nt, Artificial Sequence
  Description of Artificial Sequence: Synthetic oligonucleotide
  Sense strand starting at position 3215 of SEQ ID NO: 1564018
uuggcuagucauuaauaag

SEQ ID NO: 1849018 - RNA, 19 nt, Artificial Sequence
  Description of Artificial Sequence: Synthetic oligonucleotide
  Antisense strand to SEQ ID NO: 1849017
cuuauuaaugacuagccaa

SEQ ID NO: 1849019 - RNA, 19 nt, Artificial Sequence
  Description of Artificial Sequence: Synthetic oligonucleotide
  Sense strand starting at position 3263 of SEQ ID NO: 1564018
gcugauuacuucccacaug

SEQ ID NO: 1849020 - RNA, 19 nt, Artificial Sequence
  Description of Artificial Sequence: Synthetic oligonucleotide
  Antisense strand to SEQ ID NO: 1849019
caugugggaaguaaucagc

SEQ ID NO: 1849021 - RNA, 19 nt, Artificial Sequence
  Description of Artificial Sequence: Synthetic oligonucleotide
  Sense strand starting at position 3284 of SEQ ID NO: 1564018
cggguauaacucuaggcau

SEQ ID NO: 1849022 - RNA, 19 nt, Artificial Sequence
  Description of Artificial Sequence: Synthetic oligonucleotide
  Antisense strand to SEQ ID NO: 1849021
augccuagaguuauacccg

SEQ ID NO: 1849023 - RNA, 19 nt, Artificial Sequence
  Description of Artificial Sequence: Synthetic oligonucleotide
  Sense strand starting at position 3360 of SEQ ID NO: 1564018
aauguaugcguugaaaccu

SEQ ID NO: 1849024 - RNA, 19 nt, Artificial Sequence
  Description of Artificial Sequence: Synthetic oligonucleotide
  Antisense strand to SEQ ID NO: 1849023
agguuucaacgcauacauu

SEQ ID NO: 1849025 - RNA, 19 nt, Artificial Sequence
  Description of Artificial Sequence: Synthetic oligonucleotide
  Sense strand starting at position 3701 of SEQ ID NO: 1564018
cccacauacuuugugggaa

SEQ ID NO: 1849026 - RNA, 19 nt, Artificial Sequence
  Description of Artificial Sequence: Synthetic oligonucleotide
  Antisense strand to SEQ ID NO: 1849025
uucccacaaaguauguggg

SEQ ID NO: 1849027 - RNA, 19 nt, Artificial Sequence
  Description of Artificial Sequence: Synthetic oligonucleotide
  Sense strand starting at position 37 of SEQ ID NO: 1564019
ggaggaugugguuguggga

SEQ ID NO: 1849028 - RNA, 19 nt, Artificial Sequence
  Description of Artificial Sequence: Synthetic oligonucleotide
  Antisense strand to SEQ ID NO: 1849027
ucccacaaccacauccucc

SEQ ID NO: 1849029 - RNA, 19 nt, Artificial Sequence
  Description of Artificial Sequence: Synthetic oligonucleotide
  Sense strand starting at position 52 of SEQ ID NO: 1564019
gggagaugauguccuuguu

SEQ ID NO: 1849030 - RNA, 19 nt, Artificial Sequence
  Description of Artificial Sequence: Synthetic oligonucleotide
  Antisense strand to SEQ ID NO: 1849029
aacaaggacaucaucuccc

SEQ ID NO: 1849031 - RNA, 19 nt, Artificial Sequence
  Description of Artificial Sequence: Synthetic oligonucleotide
  Sense strand starting at position 55 of SEQ ID NO: 1564019
agaugauguccuuguucuc

SEQ ID NO: 1849032 - RNA, 19 nt, Artificial Sequence
  Description of Artificial Sequence: Synthetic oligonucleotide
  Antisense strand to SEQ ID NO: 1849031
gagaacaaggacaucaucu

SEQ ID NO: 1849033 - RNA, 19 nt, Artificial Sequence
  Description of Artificial Sequence: Synthetic oligonucleotide
  Sense strand starting at position 108 of SEQ ID NO: 1564019
ucaugaugucagcagguua

SEQ ID NO: 1849034 - RNA, 19 nt, Artificial Sequence
  Description of Artificial Sequence: Synthetic oligonucleotide
  Antisense strand to SEQ ID NO: 1849033
uaaccugcugacaucauga

SEQ ID NO: 1849035 - RNA, 19 nt, Artificial Sequence
  Description of Artificial Sequence: Synthetic oligonucleotide
  Sense strand starting at position 274 of SEQ ID NO: 1564019
gggugcucacuguacuauu

SEQ ID NO: 1849036 - RNA, 19 nt, Artificial Sequence
  Description of Artificial Sequence: Synthetic oligonucleotide
  Antisense strand to SEQ ID NO: 1849035
aauaguacagugagcaccc

SEQ ID NO: 1849037 - RNA, 19 nt, Artificial Sequence
  Description of Artificial Sequence: Synthetic oligonucleotide
  Sense strand starting at position 419 of SEQ ID NO: 1564019
ccagaaaucuccgccuccu

SEQ ID NO: 1849038 - RNA, 19 nt, Artificial Sequence
  Description of Artificial Sequence: Synthetic oligonucleotide
  Antisense strand to SEQ ID NO: 1849037
aggaggcggagauuucugg

SEQ ID NO: 1849039 - RNA, 19 nt, Artificial Sequence
  Description of Artificial Sequence: Synthetic oligonucleotide
  Sense strand starting at position 427 of SEQ ID NO: 1564019
cuccgccuccuauaggaau

SEQ ID NO: 1849040 - RNA, 19 nt, Artificial Sequence
  Description of Artificial Sequence: Synthetic oligonucleotide
  Antisense strand to SEQ ID NO: 1849039
auuccuauaggaggcggag

SEQ ID NO: 1849041 - RNA, 19 nt, Artificial Sequence
  Description of Artificial Sequence: Synthetic oligonucleotide
  Sense strand starting at position 481 of SEQ ID NO: 1564019
cugcuaugacuguggaaac

SEQ ID NO: 1849042 - RNA, 19 nt, Artificial Sequence
  Description of Artificial Sequence: Synthetic oligonucleotide
  Antisense strand to SEQ ID NO: 1849041
guuuccacagucauagcag

SEQ ID NO: 1849043 - RNA, 19 nt, Artificial Sequence
  Description of Artificial Sequence: Synthetic oligonucleotide
  Sense strand starting at position 527 of SEQ ID NO: 1564019
gcaucaugcccugauuaua

SEQ ID NO: 1849044 - RNA, 19 nt, Artificial Sequence
  Description of Artificial Sequence: Synthetic oligonucleotide
  Antisense strand to SEQ ID NO: 1849043
uauaaucagggcaugaugc

SEQ ID NO: 1849045 - RNA, 19 nt, Artificial Sequence
  Description of Artificial Sequence: Synthetic oligonucleotide
  Sense strand starting at position 530 of SEQ ID NO: 1564019
ucaugcccugauuauagaa

SEQ ID NO: 1849046 - RNA, 19 nt, Artificial Sequence
  Description of Artificial Sequence: Synthetic oligonucleotide
  Antisense strand to SEQ ID NO: 1849045
uucuauaaucagggcauga

SEQ ID NO: 1849047 - RNA, 19 nt, Artificial Sequence
  Description of Artificial Sequence: Synthetic oligonucleotide
  Sense strand starting at position 574 of SEQ ID NO: 1564019
ucuagaaugugagaauuuc

SEQ ID NO: 1849048 - RNA, 19 nt, Artificial Sequence
  Description of Artificial Sequence: Synthetic oligonucleotide
  Antisense strand to SEQ ID NO: 1849047
gaaauucucacauucuaga

SEQ ID NO: 1849049 - RNA, 19 nt, Artificial Sequence
  Description of Artificial Sequence: Synthetic oligonucleotide
  Sense strand starting at position 606 of SEQ ID NO: 1564019
cuccaaacgcuguaaucau

SEQ ID NO: 1849050 - RNA, 19 nt, Artificial Sequence
  Description of Artificial Sequence: Synthetic oligonucleotide
  Antisense strand to SEQ ID NO: 1849049
augauuacagcguuuggag

SEQ ID NO: 1849051 - RNA, 19 nt, Artificial Sequence
  Description of Artificial Sequence: Synthetic oligonucleotide
  Sense strand starting at position 649 of SEQ ID NO: 1564019
gugacaucagcaugccaau

SEQ ID NO: 1849052 - RNA, 19 nt, Artificial Sequence
  Description of Artificial Sequence: Synthetic oligonucleotide
  Antisense strand to SEQ ID NO: 1849051
auuggcaugcugaugucac

SEQ ID NO: 1849053 - RNA, 19 nt, Artificial Sequence
  Description of Artificial Sequence: Synthetic oligonucleotide
  Sense strand starting at position 658 of SEQ ID NO: 1564019
gcaugccaaugucuuauaa

SEQ ID NO: 1849054 - RNA, 19 nt, Artificial Sequence
  Description of Artificial Sequence: Synthetic oligonucleotide
  Antisense strand to SEQ ID NO: 1849053
uuauaagacauuggcaugc

SEQ ID NO: 1849055 - RNA, 19 nt, Artificial Sequence
  Description of Artificial Sequence: Synthetic oligonucleotide
  Sense strand starting at position 668 of SEQ ID NO: 1564019
gucuuauaaccuugggaug

SEQ ID NO: 1849056 - RNA, 19 nt, Artificial Sequence
  Description of Artificial Sequence: Synthetic oligonucleotide
  Antisense strand to SEQ ID NO: 1849055
caucccaagguuauaagac

SEQ ID NO: 1849057 - RNA, 19 nt, Artificial Sequence
  Description of Artificial Sequence: Synthetic oligonucleotide
  Sense strand starting at position 669 of SEQ ID NO: 1564019
ucuuauaaccuugggaugu

SEQ ID NO: 1849058 - RNA, 19 nt, Artificial Sequence
  Description of Artificial Sequence: Synthetic oligonucleotide
  Antisense strand to SEQ ID NO: 1849057
acaucccaagguuauaaga

SEQ ID NO: 1849059 - RNA, 19 nt, Artificial Sequence
  Description of Artificial Sequence: Synthetic oligonucleotide
  Sense strand starting at position 811 of SEQ ID NO: 1564019
ggcauaguaggauguggua

SEQ ID NO: 1849060 - RNA, 19 nt, Artificial Sequence
  Description of Artificial Sequence: Synthetic oligonucleotide
  Antisense strand to SEQ ID NO: 1849059
uaccacauccuacuaugcc

SEQ ID NO: 1849061 - RNA, 19 nt, Artificial Sequence
  Description of Artificial Sequence: Synthetic oligonucleotide
  Sense strand starting at position 927 of SEQ ID NO: 1564019
gguguggcucgauauggau

SEQ ID NO: 1849062 - RNA, 19 nt, Artificial Sequence
  Description of Artificial Sequence: Synthetic oligonucleotide
  Antisense strand to SEQ ID NO: 1849061
auccauaucgagccacacc

SEQ ID NO: 1849063 - RNA, 19 nt, Artificial Sequence
  Description of Artificial Sequence: Synthetic oligonucleotide
  Sense strand starting at position 931 of SEQ ID NO: 1564019
uggcucgauauggaugaau

SEQ ID NO: 1849064 - RNA, 19 nt, Artificial Sequence
  Description of Artificial Sequence: Synthetic oligonucleotide
  Antisense strand to SEQ ID NO: 1849063
auucauccauaucgagcca

SEQ ID NO: 1849065 - RNA, 19 nt, Artificial Sequence
  Description of Artificial Sequence: Synthetic oligonucleotide
  Sense strand starting at position 933 of SEQ ID NO: 1564019
gcucgauauggaugaaugu

SEQ ID NO: 1849066 - RNA, 19 nt, Artificial Sequence
  Description of Artificial Sequence: Synthetic oligonucleotide
  Antisense strand to SEQ ID NO: 1849065
acauucauccauaucgagc

SEQ ID NO: 1849067 - RNA, 19 nt, Artificial Sequence
  Description of Artificial Sequence: Synthetic oligonucleotide
  Sense strand starting at position 1506 of SEQ ID NO: 1564019
gggaaucccugguuuccaa

SEQ ID NO: 1849068 - RNA, 19 nt, Artificial Sequence
  Description of Artificial Sequence: Synthetic oligonucleotide
  Antisense strand to SEQ ID NO: 1849067
uuggaaaccagggauuccc

SEQ ID NO: 1849069 - RNA, 19 nt, Artificial Sequence
  Description of Artificial Sequence: Synthetic oligonucleotide
  Sense strand starting at position 2301 of SEQ ID NO: 1564019
cgcgcacguccucuaaaua

SEQ ID NO: 1849070 - RNA, 19 nt, Artificial Sequence
  Description of Artificial Sequence: Synthetic oligonucleotide
  Antisense strand to SEQ ID NO: 1849069
uauuuagaggacgugcgcg

SEQ ID NO: 1849071 - RNA, 19 nt, Artificial Sequence
  Description of Artificial Sequence: Synthetic oligonucleotide
  Sense strand starting at position 2377 of SEQ ID NO: 1564019
cuuugagagaaccgaagua

SEQ ID NO: 1849072 - RNA, 19 nt, Artificial Sequence
  Description of Artificial Sequence: Synthetic oligonucleotide
  Antisense strand to SEQ ID NO: 1849071
uacuucgguucucucaaag

SEQ ID NO: 1849073 - RNA, 19 nt, Artificial Sequence
  Description of Artificial Sequence: Synthetic oligonucleotide
  Sense strand starting at position 2438 of SEQ ID NO: 1564019
auaaguaaugacuguguca

SEQ ID NO: 1849074 - RNA, 19 nt, Artificial Sequence
  Description of Artificial Sequence: Synthetic oligonucleotide
  Antisense strand to SEQ ID NO: 1849073
ugacacagucauuacuuau

SEQ ID NO: 1849075 - RNA, 19 nt, Artificial Sequence
  Description of Artificial Sequence: Synthetic oligonucleotide
  Sense strand starting at position 2512 of SEQ ID NO: 1564019
uggcgugucgucguugaga

SEQ ID NO: 1849076 - RNA, 19 nt, Artificial Sequence
  Description of Artificial Sequence: Synthetic oligonucleotide
  Antisense strand to SEQ ID NO: 1849075
ucucaacgacgacacgcca

SEQ ID NO: 1849077 - RNA, 19 nt, Artificial Sequence
  Description of Artificial Sequence: Synthetic oligonucleotide
  Sense strand starting at position 2518 of SEQ ID NO: 1564019
gucgucguugagaagugau

SEQ ID NO: 1849078 - RNA, 19 nt, Artificial Sequence
  Description of Artificial Sequence: Synthetic oligonucleotide
  Antisense strand to SEQ ID NO: 1849077
aucacuucucaacgacgac

SEQ ID NO: 1849079 - RNA, 19 nt, Artificial Sequence
  Description of Artificial Sequence: Synthetic oligonucleotide
  Sense strand starting at position 2521 of SEQ ID NO: 1564019
gucguugagaagugauuug

SEQ ID NO: 1849080 - RNA, 19 nt, Artificial Sequence
  Description of Artificial Sequence: Synthetic oligonucleotide
  Antisense strand to SEQ ID NO: 1849079
caaaucacuucucaacgac

SEQ ID NO: 1849081 - RNA, 19 nt, Artificial Sequence
  Description of Artificial Sequence: Synthetic oligonucleotide
  Sense strand starting at position 2530 of SEQ ID NO: 1564019
aagugauuugcaugcuuaa

SEQ ID NO: 1849082 - RNA, 19 nt, Artificial Sequence
  Description of Artificial Sequence: Synthetic oligonucleotide
  Antisense strand to SEQ ID NO: 1849081
uuaagcaugcaaaucacuu

SEQ ID NO: 1849083 - RNA, 19 nt, Artificial Sequence
  Description of Artificial Sequence: Synthetic oligonucleotide
  Sense strand starting at position 2533 of SEQ ID NO: 1564019
ugauuugcaugcuuaauuc

SEQ ID NO: 1849084 - RNA, 19 nt, Artificial Sequence
  Description of Artificial Sequence: Synthetic oligonucleotide
  Antisense strand to SEQ ID NO: 1849083
gaauuaagcaugcaaauca

SEQ ID NO: 1849085 - RNA, 19 nt, Artificial Sequence
  Description of Artificial Sequence: Synthetic oligonucleotide
  Sense strand starting at position 2588 of SEQ ID NO: 1564019
acuaguaaauguucucugu

SEQ ID NO: 1849086 - RNA, 19 nt, Artificial Sequence
  Description of Artificial Sequence: Synthetic oligonucleotide
  Antisense strand to SEQ ID NO: 1849085
acagagaacauuuacuagu

SEQ ID NO: 1849087 - RNA, 19 nt, Artificial Sequence
  Description of Artificial Sequence: Synthetic oligonucleotide
  Sense strand starting at position 2590 of SEQ ID NO: 1564019
uaguaaauguucucuguga

SEQ ID NO: 1849088 - RNA, 19 nt, Artificial Sequence
  Description of Artificial Sequence: Synthetic oligonucleotide
  Antisense strand to SEQ ID NO: 1849087
ucacagagaacauuuacua

SEQ ID NO: 1849089 - RNA, 19 nt, Artificial Sequence
  Description of Artificial Sequence: Synthetic oligonucleotide
  Sense strand starting at position 2591 of SEQ ID NO: 1564019
aguaaauguucucugugaa

SEQ ID NO: 1849090 - RNA, 19 nt, Artificial Sequence
  Description of Artificial Sequence: Synthetic oligonucleotide
  Antisense strand to SEQ ID NO: 1849089
uucacagagaacauuuacu

SEQ ID NO: 1849091 - RNA, 19 nt, Artificial Sequence
  Description of Artificial Sequence: Synthetic oligonucleotide
  Sense strand starting at position 2592 of SEQ ID NO: 1564019
guaaauguucucugugaac

SEQ ID NO: 1849092 - RNA, 19 nt, Artificial Sequence
  Description of Artificial Sequence: Synthetic oligonucleotide
  Antisense strand to SEQ ID NO: 1849091
guucacagagaacauuuac

SEQ ID NO: 1849093 - RNA, 19 nt, Artificial Sequence
  Description of Artificial Sequence: Synthetic oligonucleotide
  Sense strand starting at position 2620 of SEQ ID NO: 1564019
gcuaguaccgagcacuuaa

SEQ ID NO: 1849094 - RNA, 19 nt, Artificial Sequence
  Description of Artificial Sequence: Synthetic oligonucleotide
  Antisense strand to SEQ ID NO: 1849093
uuaagugcucgguacuagc

SEQ ID NO: 1849095 - RNA, 19 nt, Artificial Sequence
  Description of Artificial Sequence: Synthetic oligonucleotide
  Sense strand starting at position 2896 of SEQ ID NO: 1564019
gucauugugggcuacaaga

SEQ ID NO: 1849096 - RNA, 19 nt, Artificial Sequence
  Description of Artificial Sequence: Synthetic oligonucleotide
  Antisense strand to SEQ ID NO: 1849095
ucuuguagcccacaaugac

SEQ ID NO: 1849097 - RNA, 19 nt, Artificial Sequence
  Description of Artificial Sequence: Synthetic oligonucleotide
  Sense strand starting at position 3488 of SEQ ID NO: 1564019
gaaggaagcccaggucaaa

SEQ ID NO: 1849098 - RNA, 19 nt, Artificial Sequence
  Description of Artificial Sequence: Synthetic oligonucleotide
  Antisense strand to SEQ ID NO: 1849097
uuugaccugggcuuccuuc

SEQ ID NO: 1849099 - RNA, 19 nt, Artificial Sequence
  Description of Artificial Sequence: Synthetic oligonucleotide
  Sense strand starting at position 3555 of SEQ ID NO: 1564019
gauuaacaauggccuguau

SEQ ID NO: 1849100 - RNA, 19 nt, Artificial Sequence
  Description of Artificial Sequence: Synthetic oligonucleotide
  Antisense strand to SEQ ID NO: 1849099
auacaggccauuguuaauc

SEQ ID NO: 1849101 - RNA, 19 nt, Artificial Sequence
  Description of Artificial Sequence: Synthetic oligonucleotide
  Sense strand starting at position 3722 of SEQ ID NO: 1564019
ggaguucuagcucauaaau

SEQ ID NO: 1849102 - RNA, 19 nt, Artificial Sequence
  Description of Artificial Sequence: Synthetic oligonucleotide
  Antisense strand to SEQ ID NO: 1849101
auuuaugagcuagaacucc

SEQ ID NO: 1849103 - RNA, 19 nt, Artificial Sequence
  Description of Artificial Sequence: Synthetic oligonucleotide
  Sense strand starting at position 3776 of SEQ ID NO: 1564019
acgguaagaauauguauau

SEQ ID NO: 1849104 - RNA, 19 nt, Artificial Sequence
  Description of Artificial Sequence: Synthetic oligonucleotide
  Antisense strand to SEQ ID NO: 1849103
auauacauauucuuaccgu

SEQ ID NO: 1849105 - RNA, 19 nt, Artificial Sequence
  Description of Artificial Sequence: Synthetic oligonucleotide
  Sense strand starting at position 3777 of SEQ ID NO: 1564019
cgguaagaauauguauaua

SEQ ID NO: 1849106 - RNA, 19 nt, Artificial Sequence
  Description of Artificial Sequence: Synthetic oligonucleotide
  Antisense strand to SEQ ID NO: 1849105
uauauacauauucuuaccg

SEQ ID NO: 1849107 - RNA, 19 nt, Artificial Sequence
  Description of Artificial Sequence: Synthetic oligonucleotide
  Sense strand starting at position 75 of SEQ ID NO: 1564020
cuuacaguccugugaaagg

SEQ ID NO: 1849108 - RNA, 19 nt, Artificial Sequence
  Description of Artificial Sequence: Synthetic oligonucleotide
  Antisense strand to SEQ ID NO: 1849107
ccuuucacaggacuguaag

SEQ ID NO: 1849109 - RNA, 19 nt, Artificial Sequence
  Description of Artificial Sequence: Synthetic oligonucleotide
  Sense strand starting at position 80 of SEQ ID NO: 1564020
aguccugugaaaggacaaa

SEQ ID NO: 1849110 - RNA, 19 nt, Artificial Sequence
  Description of Artificial Sequence: Synthetic oligonucleotide
  Antisense strand to SEQ ID NO: 1849109
uuuguccuuucacaggacu

SEQ ID NO: 1849111 - RNA, 19 nt, Artificial Sequence
  Description of Artificial Sequence: Synthetic oligonucleotide
  Sense strand starting at position 159 of SEQ ID NO: 1564020
ggcaaaugauucucccaga

SEQ ID NO: 1849112 - RNA, 19 nt, Artificial Sequence
  Description of Artificial Sequence: Synthetic oligonucleotide
  Antisense strand to SEQ ID NO: 1849111
ucugggagaaucauuugcc

SEQ ID NO: 1849113 - RNA, 19 nt, Artificial Sequence
  Description of Artificial Sequence: Synthetic oligonucleotide
  Sense strand starting at position 160 of SEQ ID NO: 1564020
gcaaaugauucucccagac

SEQ ID NO: 1849114 - RNA, 19 nt, Artificial Sequence
  Description of Artificial Sequence: Synthetic oligonucleotide
  Antisense strand to SEQ ID NO: 1849113
gucugggagaaucauuugc

SEQ ID NO: 1849115 - RNA, 19 nt, Artificial Sequence
  Description of Artificial Sequence: Synthetic oligonucleotide
  Sense strand starting at position 666 of SEQ ID NO: 1564020
gccuucaggcuggaaugua

SEQ ID NO: 1849116 - RNA, 19 nt, Artificial Sequence
  Description of Artificial Sequence: Synthetic oligonucleotide
  Antisense strand to SEQ ID NO: 1849115
uacauuccagccugaaggc

SEQ ID NO: 1849117 - RNA, 19 nt, Artificial Sequence
  Description of Artificial Sequence: Synthetic oligonucleotide
  Sense strand starting at position 821 of SEQ ID NO: 1564020
acauuauuguauccagauu

SEQ ID NO: 1849118 - RNA, 19 nt, Artificial Sequence
  Description of Artificial Sequence: Synthetic oligonucleotide
  Antisense strand to SEQ ID NO: 1849117
aaucuggauacaauaaugu

SEQ ID NO: 1849119 - RNA, 19 nt, Artificial Sequence
  Description of Artificial Sequence: Synthetic oligonucleotide
  Sense strand starting at position 862 of SEQ ID NO: 1564020
ggaggaugugguuguggga

SEQ ID NO: 1849120 - RNA, 19 nt, Artificial Sequence
  Description of Artificial Sequence: Synthetic oligonucleotide
  Antisense strand to SEQ ID NO: 1849119
ucccacaaccacauccucc

SEQ ID NO: 1849121 - RNA, 19 nt, Artificial Sequence
  Description of Artificial Sequence: Synthetic oligonucleotide
  Sense strand starting at position 877 of SEQ ID NO: 1564020
gggagaugauguccuuguu

SEQ ID NO: 1849122 - RNA, 19 nt, Artificial Sequence
  Description of Artificial Sequence: Synthetic oligonucleotide
  Antisense strand to SEQ ID NO: 1849121
aacaaggacaucaucuccc

SEQ ID NO: 1849123 - RNA, 19 nt, Artificial Sequence
  Description of Artificial Sequence: Synthetic oligonucleotide
  Sense strand starting at position 880 of SEQ ID NO: 1564020
agaugauguccuuguucuc

SEQ ID NO: 1849124 - RNA, 19 nt, Artificial Sequence
  Description of Artificial Sequence: Synthetic oligonucleotide
  Antisense strand to SEQ ID NO: 1849123
gagaacaaggacaucaucu

SEQ ID NO: 1849125 - RNA, 19 nt, Artificial Sequence
  Description of Artificial Sequence: Synthetic oligonucleotide
  Sense strand starting at position 933 of SEQ ID NO: 1564020
ucaugaugucagcagguua

SEQ ID NO: 1849126 - RNA, 19 nt, Artificial Sequence
  Description of Artificial Sequence: Synthetic oligonucleotide
  Antisense strand to SEQ ID NO: 1849125
uaaccugcugacaucauga

SEQ ID NO: 1849127 - RNA, 19 nt, Artificial Sequence
  Description of Artificial Sequence: Synthetic oligonucleotide
  Sense strand starting at position 1099 of SEQ ID NO: 1564020
gggugcucacuguacuauu

SEQ ID NO: 1849128 - RNA, 19 nt, Artificial Sequence
  Description of Artificial Sequence: Synthetic oligonucleotide
  Antisense strand to SEQ ID NO: 1849127
aauaguacagugagcaccc

SEQ ID NO: 1849129 - RNA, 19 nt, Artificial Sequence
  Description of Artificial Sequence: Synthetic oligonucleotide
  Sense strand starting at position 1244 of SEQ ID NO: 1564020
ccagaaaucuccgccuccu

SEQ ID NO: 1849130 - RNA, 19 nt, Artificial Sequence
  Description of Artificial Sequence: Synthetic oligonucleotide
  Antisense strand to SEQ ID NO: 1849129
aggaggcggagauuucugg

SEQ ID NO: 1849131 - RNA, 19 nt, Artificial Sequence
  Description of Artificial Sequence: Synthetic oligonucleotide
  Sense strand starting at position 1252 of SEQ ID NO: 1564020
cuccgccuccuauaggaau

SEQ ID NO: 1849132 - RNA, 19 nt, Artificial Sequence
  Description of Artificial Sequence: Synthetic oligonucleotide
  Antisense strand to SEQ ID NO: 1849131
auuccuauaggaggcggag

SEQ ID NO: 1849133 - RNA, 19 nt, Artificial Sequence
  Description of Artificial Sequence: Synthetic oligonucleotide
  Sense strand starting at position 1306 of SEQ ID NO: 1564020
cugcuaugacuguggaaac

SEQ ID NO: 1849134 - RNA, 19 nt, Artificial Sequence
  Description of Artificial Sequence: Synthetic oligonucleotide
  Antisense strand to SEQ ID NO: 1849133
guuuccacagucauagcag

SEQ ID NO: 1849135 - RNA, 19 nt, Artificial Sequence
  Description of Artificial Sequence: Synthetic oligonucleotide
  Sense strand starting at position 1352 of SEQ ID NO: 1564020
gcaucaugcccugauuaua

SEQ ID NO: 1849136 - RNA, 19 nt, Artificial Sequence
  Description of Artificial Sequence: Synthetic oligonucleotide
  Antisense strand to SEQ ID NO: 1849135
uauaaucagggcaugaugc

SEQ ID NO: 1849137 - RNA, 19 nt, Artificial Sequence
  Description of Artificial Sequence: Synthetic oligonucleotide
  Sense strand starting at position 1355 of SEQ ID NO: 1564020
ucaugcccugauuauagaa

SEQ ID NO: 1849138 - RNA, 19 nt, Artificial Sequence
  Description of Artificial Sequence: Synthetic oligonucleotide
  Antisense strand to SEQ ID NO: 1849137
uucuauaaucagggcauga

SEQ ID NO: 1849139 - RNA, 19 nt, Artificial Sequence
  Description of Artificial Sequence: Synthetic oligonucleotide
  Sense strand starting at position 1399 of SEQ ID NO: 1564020
ucuagaaugugagaauuuc

SEQ ID NO: 1849140 - RNA, 19 nt, Artificial Sequence
  Description of Artificial Sequence: Synthetic oligonucleotide
  Antisense strand to SEQ ID NO: 1849139
gaaauucucacauucuaga

SEQ ID NO: 1849141 - RNA, 19 nt, Artificial Sequence
  Description of Artificial Sequence: Synthetic oligonucleotide
  Sense strand starting at position 1431 of SEQ ID NO: 1564020
cuccaaacgcuguaaucau

SEQ ID NO: 1849142 - RNA, 19 nt, Artificial Sequence
  Description of Artificial Sequence: Synthetic oligonucleotide
  Antisense strand to SEQ ID NO: 1849141
augauuacagcguuuggag

SEQ ID NO: 1849143 - RNA, 19 nt, Artificial Sequence
  Description of Artificial Sequence: Synthetic oligonucleotide
  Sense strand starting at position 1474 of SEQ ID NO: 1564020
gugacaucagcaugccaau

SEQ ID NO: 1849144 - RNA, 19 nt, Artificial Sequence
  Description of Artificial Sequence: Synthetic oligonucleotide
  Antisense strand to SEQ ID NO: 1849143
auuggcaugcugaugucac

SEQ ID NO: 1849145 - RNA, 19 nt, Artificial Sequence
  Description of Artificial Sequence: Synthetic oligonucleotide
  Sense strand starting at position 1493 of SEQ ID NO: 1564020
gucuuauaaccuugggaug

SEQ ID NO: 1849146 - RNA, 19 nt, Artificial Sequence
  Description of Artificial Sequence: Synthetic oligonucleotide
  Antisense strand to SEQ ID NO: 1849145
caucccaagguuauaagac

SEQ ID NO: 1849147 - RNA, 19 nt, Artificial Sequence
  Description of Artificial Sequence: Synthetic oligonucleotide
  Sense strand starting at position 1494 of SEQ ID NO: 1564020
ucuuauaaccuugggaugu

SEQ ID NO: 1849148 - RNA, 19 nt, Artificial Sequence
  Description of Artificial Sequence: Synthetic oligonucleotide
  Antisense strand to SEQ ID NO: 1849147
acaucccaagguuauaaga

SEQ ID NO: 1849149 - RNA, 19 nt, Artificial Sequence
  Description of Artificial Sequence: Synthetic oligonucleotide
  Sense strand starting at position 1636 of SEQ ID NO: 1564020
ggcauaguaggauguggua

SEQ ID NO: 1849150 - RNA, 19 nt, Artificial Sequence
  Description of Artificial Sequence: Synthetic oligonucleotide
  Antisense strand to SEQ ID NO: 1849149
uaccacauccuacuaugcc

SEQ ID NO: 1849151 - RNA, 19 nt, Artificial Sequence
  Description of Artificial Sequence: Synthetic oligonucleotide
  Sense strand starting at position 1752 of SEQ ID NO: 1564020
gguguggcucgauauggau

SEQ ID NO: 1849152 - RNA, 19 nt, Artificial Sequence
  Description of Artificial Sequence: Synthetic oligonucleotide
  Antisense strand to SEQ ID NO: 1849151
auccauaucgagccacacc

SEQ ID NO: 1849153 - RNA, 19 nt, Artificial Sequence
  Description of Artificial Sequence: Synthetic oligonucleotide
  Sense strand starting at position 1756 of SEQ ID NO: 1564020
uggcucgauauggaugaau

SEQ ID NO: 1849154 - RNA, 19 nt, Artificial Sequence
  Description of Artificial Sequence: Synthetic oligonucleotide
  Antisense strand to SEQ ID NO: 1849153
auucauccauaucgagcca

SEQ ID NO: 1849155 - RNA, 19 nt, Artificial Sequence
  Description of Artificial Sequence: Synthetic oligonucleotide
  Sense strand starting at position 1758 of SEQ ID NO: 1564020
gcucgauauggaugaaugu

SEQ ID NO: 1849156 - RNA, 19 nt, Artificial Sequence
  Description of Artificial Sequence: Synthetic oligonucleotide
  Antisense strand to SEQ ID NO: 1849155
acauucauccauaucgagc

SEQ ID NO: 1849157 - RNA, 19 nt, Artificial Sequence
  Description of Artificial Sequence: Synthetic oligonucleotide
  Sense strand starting at position 2331 of SEQ ID NO: 1564020
gggaaucccugguuuccaa

SEQ ID NO: 1849158 - RNA, 19 nt, Artificial Sequence
  Description of Artificial Sequence: Synthetic oligonucleotide
  Antisense strand to SEQ ID NO: 1849157
uuggaaaccagggauuccc

SEQ ID NO: 1849159 - RNA, 19 nt, Artificial Sequence
  Description of Artificial Sequence: Synthetic oligonucleotide
  Sense strand starting at position 3126 of SEQ ID NO: 1564020
cgcgcacguccucuaaaua

SEQ ID NO: 1849160 - RNA, 19 nt, Artificial Sequence
  Description of Artificial Sequence: Synthetic oligonucleotide
  Antisense strand to SEQ ID NO: 1849159
uauuuagaggacgugcgcg

SEQ ID NO: 1849161 - RNA, 19 nt, Artificial Sequence
  Description of Artificial Sequence: Synthetic oligonucleotide
  Sense strand starting at position 3202 of SEQ ID NO: 1564020
cuuugagagaaccgaagua

SEQ ID NO: 1849162 - RNA, 19 nt, Artificial Sequence
  Description of Artificial Sequence: Synthetic oligonucleotide
  Antisense strand to SEQ ID NO: 1849161
uacuucgguucucucaaag

SEQ ID NO: 1849163 - RNA, 19 nt, Artificial Sequence
  Description of Artificial Sequence: Synthetic oligonucleotide
  Sense strand starting at position 3263 of SEQ ID NO: 1564020
auaaguaaugacuguguca

SEQ ID NO: 1849164 - RNA, 19 nt, Artificial Sequence
  Description of Artificial Sequence: Synthetic oligonucleotide
  Antisense strand to SEQ ID NO: 1849163
ugacacagucauuacuuau

SEQ ID NO: 1849165 - RNA, 19 nt, Artificial Sequence
  Description of Artificial Sequence: Synthetic oligonucleotide
  Sense strand starting at position 3337 of SEQ ID NO: 1564020
uggcgugucgucguugaga

SEQ ID NO: 1849166 - RNA, 19 nt, Artificial Sequence
  Description of Artificial Sequence: Synthetic oligonucleotide
  Antisense strand to SEQ ID NO: 1849165
ucucaacgacgacacgcca

SEQ ID NO: 1849167 - RNA, 19 nt, Artificial Sequence
  Description of Artificial Sequence: Synthetic oligonucleotide
  Sense strand starting at position 3343 of SEQ ID NO: 1564020
gucgucguugagaagugau

SEQ ID NO: 1849168 - RNA, 19 nt, Artificial Sequence
  Description of Artificial Sequence: Synthetic oligonucleotide
  Antisense strand to SEQ ID NO: 1849167
aucacuucucaacgacgac

SEQ ID NO: 1849169 - RNA, 19 nt, Artificial Sequence
  Description of Artificial Sequence: Synthetic oligonucleotide
  Sense strand starting at position 3346 of SEQ ID NO: 1564020
gucguugagaagugauuug

SEQ ID NO: 1849170 - RNA, 19 nt, Artificial Sequence
  Description of Artificial Sequence: Synthetic oligonucleotide
  Antisense strand to SEQ ID NO: 1849169
caaaucacuucucaacgac

SEQ ID NO: 1849171 - RNA, 19 nt, Artificial Sequence
  Description of Artificial Sequence: Synthetic oligonucleotide
  Sense strand starting at position 3355 of SEQ ID NO: 1564020
aagugauuugcaugcuuaa

SEQ ID NO: 1849172 - RNA, 19 nt, Artificial Sequence
  Description of Artificial Sequence: Synthetic oligonucleotide
  Antisense strand to SEQ ID NO: 1849171
uuaagcaugcaaaucacuu

SEQ ID NO: 1849173 - RNA, 19 nt, Artificial Sequence
  Description of Artificial Sequence: Synthetic oligonucleotide
  Sense strand starting at position 3358 of SEQ ID NO: 1564020
ugauuugcaugcuuaauuc

SEQ ID NO: 1849174 - RNA, 19 nt, Artificial Sequence
  Description of Artificial Sequence: Synthetic oligonucleotide
  Antisense strand to SEQ ID NO: 1849173
gaauuaagcaugcaaauca

SEQ ID NO: 1849175 - RNA, 19 nt, Artificial Sequence
  Description of Artificial Sequence: Synthetic oligonucleotide
  Sense strand starting at position 3413 of SEQ ID NO: 1564020
acuaguaaauguucucugu

SEQ ID NO: 1849176 - RNA, 19 nt, Artificial Sequence
  Description of Artificial Sequence: Synthetic oligonucleotide
  Antisense strand to SEQ ID NO: 1849175
acagagaacauuuacuagu

SEQ ID NO: 1849177 - RNA, 19 nt, Artificial Sequence
  Description of Artificial Sequence: Synthetic oligonucleotide
  Sense strand starting at position 3415 of SEQ ID NO: 1564020
uaguaaauguucucuguga

SEQ ID NO: 1849178 - RNA, 19 nt, Artificial Sequence
  Description of Artificial Sequence: Synthetic oligonucleotide
  Antisense strand to SEQ ID NO: 1849177
ucacagagaacauuuacua

SEQ ID NO: 1849179 - RNA, 19 nt, Artificial Sequence
  Description of Artificial Sequence: Synthetic oligonucleotide
  Sense strand starting at position 3416 of SEQ ID NO: 1564020
aguaaauguucucugugaa

SEQ ID NO: 1849180 - RNA, 19 nt, Artificial Sequence
  Description of Artificial Sequence: Synthetic oligonucleotide
  Antisense strand to SEQ ID NO: 1849179
uucacagagaacauuuacu

SEQ ID NO: 1849181 - RNA, 19 nt, Artificial Sequence
  Description of Artificial Sequence: Synthetic oligonucleotide
  Sense strand starting at position 3417 of SEQ ID NO: 1564020
guaaauguucucugugaac

SEQ ID NO: 1849182 - RNA, 19 nt, Artificial Sequence
  Description of Artificial Sequence: Synthetic oligonucleotide
  Antisense strand to SEQ ID NO: 1849181
guucacagagaacauuuac

SEQ ID NO: 1849183 - RNA, 19 nt, Artificial Sequence
  Description of Artificial Sequence: Synthetic oligonucleotide
  Sense strand starting at position 3445 of SEQ ID NO: 1564020
gcuaguaccgagcacuuaa

SEQ ID NO: 1849184 - RNA, 19 nt, Artificial Sequence
  Description of Artificial Sequence: Synthetic oligonucleotide
  Antisense strand to SEQ ID NO: 1849183
uuaagugcucgguacuagc

SEQ ID NO: 1849185 - RNA, 19 nt, Artificial Sequence
  Description of Artificial Sequence: Synthetic oligonucleotide
  Sense strand starting at position 3721 of SEQ ID NO: 1564020
gucauugugggcuacaaga

SEQ ID NO: 1849186 - RNA, 19 nt, Artificial Sequence
  Description of Artificial Sequence: Synthetic oligonucleotide
  Antisense strand to SEQ ID NO: 1849185
ucuuguagcccacaaugac

SEQ ID NO: 1849187 - RNA, 19 nt, Artificial Sequence
  Description of Artificial Sequence: Synthetic oligonucleotide
  Sense strand starting at position 48 of SEQ ID NO: 1564021
agcucaacgaaguaguaau

SEQ ID NO: 1849188 - RNA, 19 nt, Artificial Sequence
  Description of Artificial Sequence: Synthetic oligonucleotide
  Antisense strand to SEQ ID NO: 1849187
auuacuacuucguugagcu

SEQ ID NO: 1849189 - RNA, 19 nt, Artificial Sequence
  Description of Artificial Sequence: Synthetic oligonucleotide
  Sense strand starting at position 80 of SEQ ID NO: 1564021
auaacauggaguggucgau

SEQ ID NO: 1849190 - RNA, 19 nt, Artificial Sequence
  Description of Artificial Sequence: Synthetic oligonucleotide
  Antisense strand to SEQ ID NO: 1849189
aucgaccacuccauguuau

SEQ ID NO: 1849191 - RNA, 19 nt, Artificial Sequence
  Description of Artificial Sequence: Synthetic oligonucleotide
  Sense strand starting at position 84 of SEQ ID NO: 1564021
cauggaguggucgauuaga

SEQ ID NO: 1849192 - RNA, 19 nt, Artificial Sequence
  Description of Artificial Sequence: Synthetic oligonucleotide
  Antisense strand to SEQ ID NO: 1849191
ucuaaucgaccacuccaug

SEQ ID NO: 1849193 - RNA, 19 nt, Artificial Sequence
  Description of Artificial Sequence: Synthetic oligonucleotide
  Sense strand starting at position 157 of SEQ ID NO: 1564021
uuagaaacgcuauagaagu

SEQ ID NO: 1849194 - RNA, 19 nt, Artificial Sequence
  Description of Artificial Sequence: Synthetic oligonucleotide
  Antisense strand to SEQ ID NO: 1849193
acuucuauagcguuucuaa

SEQ ID NO: 1849195 - RNA, 19 nt, Artificial Sequence
  Description of Artificial Sequence: Synthetic oligonucleotide
  Sense strand starting at position 245 of SEQ ID NO: 1564021
gcugaaagguuauucagag

SEQ ID NO: 1849196 - RNA, 19 nt, Artificial Sequence
  Description of Artificial Sequence: Synthetic oligonucleotide
  Antisense strand to SEQ ID NO: 1849195
cucugaauaaccuuucagc

SEQ ID NO: 1849197 - RNA, 19 nt, Artificial Sequence
  Description of Artificial Sequence: Synthetic oligonucleotide
  Sense strand starting at position 375 of SEQ ID NO: 1564021
auauguauugaucagcaga

SEQ ID NO: 1849198 - RNA, 19 nt, Artificial Sequence
  Description of Artificial Sequence: Synthetic oligonucleotide
  Antisense strand to SEQ ID NO: 1849197
ucugcugaucaauacauau

SEQ ID NO: 1849199 - RNA, 19 nt, Artificial Sequence
  Description of Artificial Sequence: Synthetic oligonucleotide
  Sense strand starting at position 377 of SEQ ID NO: 1564021
auguauugaucagcagaaa

SEQ ID NO: 1849200 - RNA, 19 nt, Artificial Sequence
  Description of Artificial Sequence: Synthetic oligonucleotide
  Antisense strand to SEQ ID NO: 1849199
uuucugcugaucaauacau

SEQ ID NO: 1849201 - RNA, 19 nt, Artificial Sequence
  Description of Artificial Sequence: Synthetic oligonucleotide
  Sense strand starting at position 465 of SEQ ID NO: 1564021
guguaucagcauugagaag

SEQ ID NO: 1849202 - RNA, 19 nt, Artificial Sequence
  Description of Artificial Sequence: Synthetic oligonucleotide
  Antisense strand to SEQ ID NO: 1849201
cuucucaaugcugauacac

SEQ ID NO: 1849203 - RNA, 19 nt, Artificial Sequence
  Description of Artificial Sequence: Synthetic oligonucleotide
  Sense strand starting at position 474 of SEQ ID NO: 1564021
cauugagaagccugaauga

SEQ ID NO: 1849204 - RNA, 19 nt, Artificial Sequence
  Description of Artificial Sequence: Synthetic oligonucleotide
  Antisense strand to SEQ ID NO: 1849203
ucauucaggcuucucaaug

SEQ ID NO: 1849205 - RNA, 19 nt, Artificial Sequence
  Description of Artificial Sequence: Synthetic oligonucleotide
  Sense strand starting at position 2113 of SEQ ID NO: 1564021
ucgggcucgcuuuccaaau

SEQ ID NO: 1849206 - RNA, 19 nt, Artificial Sequence
  Description of Artificial Sequence: Synthetic oligonucleotide
  Antisense strand to SEQ ID NO: 1849205
auuuggaaagcgagcccga

SEQ ID NO: 1849207 - RNA, 19 nt, Artificial Sequence
  Description of Artificial Sequence: Synthetic oligonucleotide
  Sense strand starting at position 2125 of SEQ ID NO: 1564021
uccaaauuaggcuggugaa

SEQ ID NO: 1849208 - RNA, 19 nt, Artificial Sequence
  Description of Artificial Sequence: Synthetic oligonucleotide
  Antisense strand to SEQ ID NO: 1849207
uucaccagccuaauuugga

SEQ ID NO: 1849209 - RNA, 19 nt, Artificial Sequence
  Description of Artificial Sequence: Synthetic oligonucleotide
  Sense strand starting at position 2126 of SEQ ID NO: 1564021
ccaaauuaggcuggugaag

SEQ ID NO: 1849210 - RNA, 19 nt, Artificial Sequence
  Description of Artificial Sequence: Synthetic oligonucleotide
  Antisense strand to SEQ ID NO: 1849209
cuucaccagccuaauuugg

SEQ ID NO: 1849211 - RNA, 19 nt, Artificial Sequence
  Description of Artificial Sequence: Synthetic oligonucleotide
  Sense strand starting at position 2596 of SEQ ID NO: 1564021
ccucgauaucaaggucuga

SEQ ID NO: 1849212 - RNA, 19 nt, Artificial Sequence
  Description of Artificial Sequence: Synthetic oligonucleotide
  Antisense strand to SEQ ID NO: 1849211
ucagaccuugauaucgagg

SEQ ID NO: 1849213 - RNA, 19 nt, Artificial Sequence
  Description of Artificial Sequence: Synthetic oligonucleotide
  Sense strand starting at position 2678 of SEQ ID NO: 1564021
ugaauuauucugggaaagu

SEQ ID NO: 1849214 - RNA, 19 nt, Artificial Sequence
  Description of Artificial Sequence: Synthetic oligonucleotide
  Antisense strand to SEQ ID NO: 1849213
acuuucccagaauaauuca

SEQ ID NO: 1849215 - RNA, 19 nt, Artificial Sequence
  Description of Artificial Sequence: Synthetic oligonucleotide
  Sense strand starting at position 2764 of SEQ ID NO: 1564021
uggaaaccuugcuuucuca

SEQ ID NO: 1849216 - RNA, 19 nt, Artificial Sequence
  Description of Artificial Sequence: Synthetic oligonucleotide
  Antisense strand to SEQ ID NO: 1849215
ugagaaagcaagguuucca

SEQ ID NO: 1849217 - RNA, 19 nt, Artificial Sequence
  Description of Artificial Sequence: Synthetic oligonucleotide
  Sense strand starting at position 2779 of SEQ ID NO: 1564021
cucacugcuccauaucagu

SEQ ID NO: 1849218 - RNA, 19 nt, Artificial Sequence
  Description of Artificial Sequence: Synthetic oligonucleotide
  Antisense strand to SEQ ID NO: 1849217
acugauauggagcagugag

SEQ ID NO: 1849219 - RNA, 19 nt, Artificial Sequence
  Description of Artificial Sequence: Synthetic oligonucleotide
  Sense strand starting at position 3023 of SEQ ID NO: 1564021
gagagaaauggcgggaugu

SEQ ID NO: 1849220 - RNA, 19 nt, Artificial Sequence
  Description of Artificial Sequence: Synthetic oligonucleotide
  Antisense strand to SEQ ID NO: 1849219
acaucccgccauuucucuc

SEQ ID NO: 1849221 - RNA, 19 nt, Artificial Sequence
  Description of Artificial Sequence: Synthetic oligonucleotide
  Sense strand starting at position 3024 of SEQ ID NO: 1564021
agagaaauggcgggauguu

SEQ ID NO: 1849222 - RNA, 19 nt, Artificial Sequence
  Description of Artificial Sequence: Synthetic oligonucleotide
  Antisense strand to SEQ ID NO: 1849221
aacaucccgccauuucucu

SEQ ID NO: 1849223 - RNA, 19 nt, Artificial Sequence
  Description of Artificial Sequence: Synthetic oligonucleotide
  Sense strand starting at position 3025 of SEQ ID NO: 1564021
gagaaauggcgggauguuu

SEQ ID NO: 1849224 - RNA, 19 nt, Artificial Sequence
  Description of Artificial Sequence: Synthetic oligonucleotide
  Antisense strand to SEQ ID NO: 1849223
aaacaucccgccauuucuc

SEQ ID NO: 1849225 - RNA, 19 nt, Artificial Sequence
  Description of Artificial Sequence: Synthetic oligonucleotide
  Sense strand starting at position 3037 of SEQ ID NO: 1564021
gauguuuggcaucaaguac

SEQ ID NO: 1849226 - RNA, 19 nt, Artificial Sequence
  Description of Artificial Sequence: Synthetic oligonucleotide
  Antisense strand to SEQ ID NO: 1849225
guacuugaugccaaacauc

SEQ ID NO: 1849227 - RNA, 19 nt, Artificial Sequence
  Description of Artificial Sequence: Synthetic oligonucleotide
  Sense strand starting at position 3301 of SEQ ID NO: 1564021
ccaacauggucuuugaagu

SEQ ID NO: 1849228 - RNA, 19 nt, Artificial Sequence
  Description of Artificial Sequence: Synthetic oligonucleotide
  Antisense strand to SEQ ID NO: 1849227
acuucaaagaccauguugg

SEQ ID NO: 1849229 - RNA, 19 nt, Artificial Sequence
  Description of Artificial Sequence: Synthetic oligonucleotide
  Sense strand starting at position 3302 of SEQ ID NO: 1564021
caacauggucuuugaaguu

SEQ ID NO: 1849230 - RNA, 19 nt, Artificial Sequence
  Description of Artificial Sequence: Synthetic oligonucleotide
  Antisense strand to SEQ ID NO: 1849229
aacuucaaagaccauguug

SEQ ID NO: 1849231 - RNA, 19 nt, Artificial Sequence
  Description of Artificial Sequence: Synthetic oligonucleotide
  Sense strand starting at position 3325 of SEQ ID NO: 1564021
aaaugaccuuucguugaau

SEQ ID NO: 1849232 - RNA, 19 nt, Artificial Sequence
  Description of Artificial Sequence: Synthetic oligonucleotide
  Antisense strand to SEQ ID NO: 1849231
auucaacgaaaggucauuu

SEQ ID NO: 1849233 - RNA, 19 nt, Artificial Sequence
  Description of Artificial Sequence: Synthetic oligonucleotide
  Sense strand starting at position 3326 of SEQ ID NO: 1564021
aaugaccuuucguugaaua

SEQ ID NO: 1849234 - RNA, 19 nt, Artificial Sequence
  Description of Artificial Sequence: Synthetic oligonucleotide
  Antisense strand to SEQ ID NO: 1849233
uauucaacgaaaggucauu

SEQ ID NO: 1849235 - RNA, 19 nt, Artificial Sequence
  Description of Artificial Sequence: Synthetic oligonucleotide
  Sense strand starting at position 3327 of SEQ ID NO: 1564021
augaccuuucguugaauaa

SEQ ID NO: 1849236 - RNA, 19 nt, Artificial Sequence
  Description of Artificial Sequence: Synthetic oligonucleotide
  Antisense strand to SEQ ID NO: 1849235
uuauucaacgaaaggucau

SEQ ID NO: 1849237 - RNA, 19 nt, Artificial Sequence
  Description of Artificial Sequence: Synthetic oligonucleotide
  Sense strand starting at position 3328 of SEQ ID NO: 1564021
ugaccuuucguugaauaau

SEQ ID NO: 1849238 - RNA, 19 nt, Artificial Sequence
  Description of Artificial Sequence: Synthetic oligonucleotide
  Antisense strand to SEQ ID NO: 1849237
auuauucaacgaaagguca

SEQ ID NO: 1849239 - RNA, 19 nt, Artificial Sequence
  Description of Artificial Sequence: Synthetic oligonucleotide
  Sense strand starting at position 3387 of SEQ ID NO: 1564021
agaagacggcaucagaguu

SEQ ID NO: 1849240 - RNA, 19 nt, Artificial Sequence
  Description of Artificial Sequence: Synthetic oligonucleotide
  Antisense strand to SEQ ID NO: 1849239
aacucugaugccgucuucu

SEQ ID NO: 1849241 - RNA, 19 nt, Artificial Sequence
  Description of Artificial Sequence: Synthetic oligonucleotide
  Sense strand starting at position 3404 of SEQ ID NO: 1564021
uucccuuauugguuugaaa

SEQ ID NO: 1849242 - RNA, 19 nt, Artificial Sequence
  Description of Artificial Sequence: Synthetic oligonucleotide
  Antisense strand to SEQ ID NO: 1849241
uuucaaaccaauaagggaa

SEQ ID NO: 1849243 - RNA, 19 nt, Artificial Sequence
  Description of Artificial Sequence: Synthetic oligonucleotide
  Sense strand starting at position 3406 of SEQ ID NO: 1564021
cccuuauugguuugaaauu

SEQ ID NO: 1849244 - RNA, 19 nt, Artificial Sequence
  Description of Artificial Sequence: Synthetic oligonucleotide
  Antisense strand to SEQ ID NO: 1849243
aauuucaaaccaauaaggg

SEQ ID NO: 1849245 - RNA, 19 nt, Artificial Sequence
  Description of Artificial Sequence: Synthetic oligonucleotide
  Sense strand starting at position 3536 of SEQ ID NO: 1564021
ggcauuaguuucucuaaga

SEQ ID NO: 1849246 - RNA, 19 nt, Artificial Sequence
  Description of Artificial Sequence: Synthetic oligonucleotide
  Antisense strand to SEQ ID NO: 1849245
ucuuagagaaacuaaugcc

SEQ ID NO: 1849247 - RNA, 19 nt, Artificial Sequence
  Description of Artificial Sequence: Synthetic oligonucleotide
  Sense strand starting at position 3537 of SEQ ID NO: 1564021
gcauuaguuucucuaagaa

SEQ ID NO: 1849248 - RNA, 19 nt, Artificial Sequence
  Description of Artificial Sequence: Synthetic oligonucleotide
  Antisense strand to SEQ ID NO: 1849247
uucuuagagaaacuaaugc

SEQ ID NO: 1849249 - RNA, 19 nt, Artificial Sequence
  Description of Artificial Sequence: Synthetic oligonucleotide
  Sense strand starting at position 3561 of SEQ ID NO: 1564021
aucugaagaaugugcaaga

SEQ ID NO: 1849250 - RNA, 19 nt, Artificial Sequence
  Description of Artificial Sequence: Synthetic oligonucleotide
  Antisense strand to SEQ ID NO: 1849249
ucuugcacauucuucagau

SEQ ID NO: 1849251 - RNA, 19 nt, Artificial Sequence
  Description of Artificial Sequence: Synthetic oligonucleotide
  Sense strand starting at position 3562 of SEQ ID NO: 1564021
ucugaagaaugugcaagaa

SEQ ID NO: 1849252 - RNA, 19 nt, Artificial Sequence
  Description of Artificial Sequence: Synthetic oligonucleotide
  Antisense strand to SEQ ID NO: 1849251
uucuugcacauucuucaga

SEQ ID NO: 1849253 - RNA, 19 nt, Artificial Sequence
  Description of Artificial Sequence: Synthetic oligonucleotide
  Sense strand starting at position 3660 of SEQ ID NO: 1564021
ugaguaauuucuuaugaga

SEQ ID NO: 1849254 - RNA, 19 nt, Artificial Sequence
  Description of Artificial Sequence: Synthetic oligonucleotide
  Antisense strand to SEQ ID NO: 1849253
ucucauaagaaauuacuca

SEQ ID NO: 1849255 - RNA, 19 nt, Artificial Sequence
  Description of Artificial Sequence: Synthetic oligonucleotide
  Sense strand starting at position 3685 of SEQ ID NO: 1564021
agcaauaggagcugauauu

SEQ ID NO: 1849256 - RNA, 19 nt, Artificial Sequence
  Description of Artificial Sequence: Synthetic oligonucleotide
  Antisense strand to SEQ ID NO: 1849255
aauaucagcuccuauugcu

SEQ ID NO: 1849257 - RNA, 19 nt, Artificial Sequence
  Description of Artificial Sequence: Synthetic oligonucleotide
  Sense strand starting at position 3697 of SEQ ID NO: 1564021
ugauauugguaaguguaaa

SEQ ID NO: 1849258 - RNA, 19 nt, Artificial Sequence
  Description of Artificial Sequence: Synthetic oligonucleotide
  Antisense strand to SEQ ID NO: 1849257
uuuacacuuaccaauauca

SEQ ID NO: 1849259 - RNA, 19 nt, Artificial Sequence
  Description of Artificial Sequence: Synthetic oligonucleotide
  Sense strand starting at position 3703 of SEQ ID NO: 1564021
ugguaaguguaaacguguu

SEQ ID NO: 1849260 - RNA, 19 nt, Artificial Sequence
  Description of Artificial Sequence: Synthetic oligonucleotide
  Antisense strand to SEQ ID NO: 1849259
aacacguuuacacuuacca

SEQ ID NO: 1849261 - RNA, 19 nt, Artificial Sequence
  Description of Artificial Sequence: Synthetic oligonucleotide
  Sense strand starting at position 3717 of SEQ ID NO: 1564021
guguuuauuaggcaugaaa

SEQ ID NO: 1849262 - RNA, 19 nt, Artificial Sequence
  Description of Artificial Sequence: Synthetic oligonucleotide
  Antisense strand to SEQ ID NO: 1849261
uuucaugccuaauaaacac

SEQ ID NO: 1849263 - RNA, 19 nt, Artificial Sequence
  Description of Artificial Sequence: Synthetic oligonucleotide
  Sense strand starting at position 3786 of SEQ ID NO: 1564021
gguaaacacuuaguaauua

SEQ ID NO: 1849264 - RNA, 19 nt, Artificial Sequence
  Description of Artificial Sequence: Synthetic oligonucleotide
  Antisense strand to SEQ ID NO: 1849263
uaauuacuaaguguuuacc

SEQ ID NO: 1849265 - RNA, 19 nt, Artificial Sequence
  Description of Artificial Sequence: Synthetic oligonucleotide
  Sense strand starting at position 3796 of SEQ ID NO: 1564021
uaguaauuauuggcagaga

SEQ ID NO: 1849266 - RNA, 19 nt, Artificial Sequence
  Description of Artificial Sequence: Synthetic oligonucleotide
  Antisense strand to SEQ ID NO: 1849265
ucucugccaauaauuacua

SEQ ID NO: 1849267 - RNA, 19 nt, Artificial Sequence
  Description of Artificial Sequence: Synthetic oligonucleotide
  Sense strand starting at position 123 of SEQ ID NO: 1564022
cguggauuccgcuuaaagc

SEQ ID NO: 1849268 - RNA, 19 nt, Artificial Sequence
  Description of Artificial Sequence: Synthetic oligonucleotide
  Antisense strand to SEQ ID NO: 1849267
gcuuuaagcggaauccacg

SEQ ID NO: 1849269 - RNA, 19 nt, Artificial Sequence
  Description of Artificial Sequence: Synthetic oligonucleotide
  Sense strand starting at position 151 of SEQ ID NO: 1564022
gcaaacucuguuuaaguca

SEQ ID NO: 1849270 - RNA, 19 nt, Artificial Sequence
  Description of Artificial Sequence: Synthetic oligonucleotide
  Antisense strand to SEQ ID NO: 1849269
ugacuuaaacagaguuugc

SEQ ID NO: 1849271 - RNA, 19 nt, Artificial Sequence
  Description of Artificial Sequence: Synthetic oligonucleotide
  Sense strand starting at position 181 of SEQ ID NO: 1564022
aggguaagcugauuagauu

SEQ ID NO: 1849272 - RNA, 19 nt, Artificial Sequence
  Description of Artificial Sequence: Synthetic oligonucleotide
  Antisense strand to SEQ ID NO: 1849271
aaucuaaucagcuuacccu

SEQ ID NO: 1849273 - RNA, 19 nt, Artificial Sequence
  Description of Artificial Sequence: Synthetic oligonucleotide
  Sense strand starting at position 182 of SEQ ID NO: 1564022
ggguaagcugauuagauuc

SEQ ID NO: 1849274 - RNA, 19 nt, Artificial Sequence
  Description of Artificial Sequence: Synthetic oligonucleotide
  Antisense strand to SEQ ID NO: 1849273
gaaucuaaucagcuuaccc

SEQ ID NO: 1849275 - RNA, 19 nt, Artificial Sequence
  Description of Artificial Sequence: Synthetic oligonucleotide
  Sense strand starting at position 280 of SEQ ID NO: 1564022
ugcaauaauccaggagaua

SEQ ID NO: 1849276 - RNA, 19 nt, Artificial Sequence
  Description of Artificial Sequence: Synthetic oligonucleotide
  Antisense strand to SEQ ID NO: 1849275
uaucuccuggauuauugca

SEQ ID NO: 1849277 - RNA, 19 nt, Artificial Sequence
  Description of Artificial Sequence: Synthetic oligonucleotide
  Sense strand starting at position 299 of SEQ ID NO: 1564022
gaugguaagggcugaauua

SEQ ID NO: 1849278 - RNA, 19 nt, Artificial Sequence
  Description of Artificial Sequence: Synthetic oligonucleotide
  Antisense strand to SEQ ID NO: 1849277
uaauucagcccuuaccauc

SEQ ID NO: 1849279 - RNA, 19 nt, Artificial Sequence
  Description of Artificial Sequence: Synthetic oligonucleotide
  Sense strand starting at position 663 of SEQ ID NO: 1564022
cgaguuuaugguggagaaa

SEQ ID NO: 1849280 - RNA, 19 nt, Artificial Sequence
  Description of Artificial Sequence: Synthetic oligonucleotide
  Antisense strand to SEQ ID NO: 1849279
uuucuccaccauaaacucg

SEQ ID NO: 1849281 - RNA, 19 nt, Artificial Sequence
  Description of Artificial Sequence: Synthetic oligonucleotide
  Sense strand starting at position 723 of SEQ ID NO: 1564022
gugagaccucacuguugaa

SEQ ID NO: 1849282 - RNA, 19 nt, Artificial Sequence
  Description of Artificial Sequence: Synthetic oligonucleotide
  Antisense strand to SEQ ID NO: 1849281
uucaacagugaggucucac

SEQ ID NO: 1849283 - RNA, 19 nt, Artificial Sequence
  Description of Artificial Sequence: Synthetic oligonucleotide
  Sense strand starting at position 808 of SEQ ID NO: 1564022
uuaaauaggucaucagguu

SEQ ID NO: 1849284 - RNA, 19 nt, Artificial Sequence
  Description of Artificial Sequence: Synthetic oligonucleotide
  Antisense strand to SEQ ID NO: 1849283
aaccugaugaccuauuuaa

SEQ ID NO: 1849285 - RNA, 19 nt, Artificial Sequence
  Description of Artificial Sequence: Synthetic oligonucleotide
  Sense strand starting at position 872 of SEQ ID NO: 1564022
gagcuuauagaguaaagcu

SEQ ID NO: 1849286 - RNA, 19 nt, Artificial Sequence
  Description of Artificial Sequence: Synthetic oligonucleotide
  Antisense strand to SEQ ID NO: 1849285
agcuuuacucuauaagcuc

SEQ ID NO: 1849287 - RNA, 19 nt, Artificial Sequence
  Description of Artificial Sequence: Synthetic oligonucleotide
  Sense strand starting at position 1005 of SEQ ID NO: 1564022
gagggcuaucuguaaagca

SEQ ID NO: 1849288 - RNA, 19 nt, Artificial Sequence
  Description of Artificial Sequence: Synthetic oligonucleotide
  Antisense strand to SEQ ID NO: 1849287
ugcuuuacagauagcccuc

SEQ ID NO: 1849289 - RNA, 19 nt, Artificial Sequence
  Description of Artificial Sequence: Synthetic oligonucleotide
  Sense strand starting at position 1025 of SEQ ID NO: 1564022
uggagacuugauuaccgua

SEQ ID NO: 1849290 - RNA, 19 nt, Artificial Sequence
  Description of Artificial Sequence: Synthetic oligonucleotide
  Antisense strand to SEQ ID NO: 1849289
uacgguaaucaagucucca

SEQ ID NO: 1849291 - RNA, 19 nt, Artificial Sequence
  Description of Artificial Sequence: Synthetic oligonucleotide
  Sense strand starting at position 1027 of SEQ ID NO: 1564022
gagacuugauuaccguaua

SEQ ID NO: 1849292 - RNA, 19 nt, Artificial Sequence
  Description of Artificial Sequence: Synthetic oligonucleotide
  Antisense strand to SEQ ID NO: 1849291
uauacgguaaucaagucuc

SEQ ID NO: 1849293 - RNA, 19 nt, Artificial Sequence
  Description of Artificial Sequence: Synthetic oligonucleotide
  Sense strand starting at position 1030 of SEQ ID NO: 1564022
acuugauuaccguauaguc

SEQ ID NO: 1849294 - RNA, 19 nt, Artificial Sequence
  Description of Artificial Sequence: Synthetic oligonucleotide
  Antisense strand to SEQ ID NO: 1849293
gacuauacgguaaucaagu

SEQ ID NO: 1849295 - RNA, 19 nt, Artificial Sequence
  Description of Artificial Sequence: Synthetic oligonucleotide
  Sense strand starting at position 1065 of SEQ ID NO: 1564022
uagaauuacugccuggaag

SEQ ID NO: 1849296 - RNA, 19 nt, Artificial Sequence
  Description of Artificial Sequence: Synthetic oligonucleotide
  Antisense strand to SEQ ID NO: 1849295
cuuccaggcaguaauucua

SEQ ID NO: 1849297 - RNA, 19 nt, Artificial Sequence
  Description of Artificial Sequence: Synthetic oligonucleotide
  Sense strand starting at position 1083 of SEQ ID NO: 1564022
gcaauuuaccuuugccaug

SEQ ID NO: 1849298 - RNA, 19 nt, Artificial Sequence
  Description of Artificial Sequence: Synthetic oligonucleotide
  Antisense strand to SEQ ID NO: 1849297
cauggcaaagguaaauugc

SEQ ID NO: 1849299 - RNA, 19 nt, Artificial Sequence
  Description of Artificial Sequence: Synthetic oligonucleotide
  Sense strand starting at position 1111 of SEQ ID NO: 1564022
gacugucagaguuauggau

SEQ ID NO: 1849300 - RNA, 19 nt, Artificial Sequence
  Description of Artificial Sequence: Synthetic oligonucleotide
  Antisense strand to SEQ ID NO: 1849299
auccauaacucugacaguc

SEQ ID NO: 1849301 - RNA, 19 nt, Artificial Sequence
  Description of Artificial Sequence: Synthetic oligonucleotide
  Sense strand starting at position 1115 of SEQ ID NO: 1564022
gucagaguuauggauguuu

SEQ ID NO: 1849302 - RNA, 19 nt, Artificial Sequence
  Description of Artificial Sequence: Synthetic oligonucleotide
  Antisense strand to SEQ ID NO: 1849301
aaacauccauaacucugac

SEQ ID NO: 1849303 - RNA, 19 nt, Artificial Sequence
  Description of Artificial Sequence: Synthetic oligonucleotide
  Sense strand starting at position 1173 of SEQ ID NO: 1564022
uuuagaaagcuaggauauu

SEQ ID NO: 1849304 - RNA, 19 nt, Artificial Sequence
  Description of Artificial Sequence: Synthetic oligonucleotide
  Antisense strand to SEQ ID NO: 1849303
aauauccuagcuuucuaaa

SEQ ID NO: 1849305 - RNA, 19 nt, Artificial Sequence
  Description of Artificial Sequence: Synthetic oligonucleotide
  Sense strand starting at position 1174 of SEQ ID NO: 1564022
uuagaaagcuaggauauuu

SEQ ID NO: 1849306 - RNA, 19 nt, Artificial Sequence
  Description of Artificial Sequence: Synthetic oligonucleotide
  Antisense strand to SEQ ID NO: 1849305
aaauauccuagcuuucuaa

SEQ ID NO: 1849307 - RNA, 19 nt, Artificial Sequence
  Description of Artificial Sequence: Synthetic oligonucleotide
  Sense strand starting at position 1257 of SEQ ID NO: 1564022
ugacaucuagcaugaguca

SEQ ID NO: 1849308 - RNA, 19 nt, Artificial Sequence
  Description of Artificial Sequence: Synthetic oligonucleotide
  Antisense strand to SEQ ID NO: 1849307
ugacucaugcuagauguca

SEQ ID NO: 1849309 - RNA, 19 nt, Artificial Sequence
  Description of Artificial Sequence: Synthetic oligonucleotide
  Sense strand starting at position 1258 of SEQ ID NO: 1564022
gacaucuagcaugagucaa

SEQ ID NO: 1849310 - RNA, 19 nt, Artificial Sequence
  Description of Artificial Sequence: Synthetic oligonucleotide
  Antisense strand to SEQ ID NO: 1849309
uugacucaugcuagauguc

SEQ ID NO: 1849311 - RNA, 19 nt, Artificial Sequence
  Description of Artificial Sequence: Synthetic oligonucleotide
  Sense strand starting at position 1269 of SEQ ID NO: 1564022
ugagucaauguagagcaau

SEQ ID NO: 1849312 - RNA, 19 nt, Artificial Sequence
  Description of Artificial Sequence: Synthetic oligonucleotide
  Antisense strand to SEQ ID NO: 1849311
auugcucuacauugacuca

SEQ ID NO: 1849313 - RNA, 19 nt, Artificial Sequence
  Description of Artificial Sequence: Synthetic oligonucleotide
  Sense strand starting at position 1391 of SEQ ID NO: 1564022
auguuaaagcacugggaau

SEQ ID NO: 1849314 - RNA, 19 nt, Artificial Sequence
  Description of Artificial Sequence: Synthetic oligonucleotide
  Antisense strand to SEQ ID NO: 1849313
auucccagugcuuuaacau

SEQ ID NO: 1849315 - RNA, 19 nt, Artificial Sequence
  Description of Artificial Sequence: Synthetic oligonucleotide
  Sense strand starting at position 1503 of SEQ ID NO: 1564022
gugguaagauacucugauc

SEQ ID NO: 1849316 - RNA, 19 nt, Artificial Sequence
  Description of Artificial Sequence: Synthetic oligonucleotide
  Antisense strand to SEQ ID NO: 1849315
gaucagaguaucuuaccac

SEQ ID NO: 1849317 - RNA, 19 nt, Artificial Sequence
  Description of Artificial Sequence: Synthetic oligonucleotide
  Sense strand starting at position 1523 of SEQ ID NO: 1564022
uucggacuugucuagaaag

SEQ ID NO: 1849318 - RNA, 19 nt, Artificial Sequence
  Description of Artificial Sequence: Synthetic oligonucleotide
  Antisense strand to SEQ ID NO: 1849317
cuuucuagacaaguccgaa

SEQ ID NO: 1849319 - RNA, 19 nt, Artificial Sequence
  Description of Artificial Sequence: Synthetic oligonucleotide
  Sense strand starting at position 1525 of SEQ ID NO: 1564022
cggacuugucuagaaaggu

SEQ ID NO: 1849320 - RNA, 19 nt, Artificial Sequence
  Description of Artificial Sequence: Synthetic oligonucleotide
  Antisense strand to SEQ ID NO: 1849319
accuuucuagacaaguccg

SEQ ID NO: 1849321 - RNA, 19 nt, Artificial Sequence
  Description of Artificial Sequence: Synthetic oligonucleotide
  Sense strand starting at position 1534 of SEQ ID NO: 1564022
cuagaaagguccucagaca

SEQ ID NO: 1849322 - RNA, 19 nt, Artificial Sequence
  Description of Artificial Sequence: Synthetic oligonucleotide
  Antisense strand to SEQ ID NO: 1849321
ugucugaggaccuuucuag

SEQ ID NO: 1849323 - RNA, 19 nt, Artificial Sequence
  Description of Artificial Sequence: Synthetic oligonucleotide
  Sense strand starting at position 1777 of SEQ ID NO: 1564022
caugccuacccggaucaua

SEQ ID NO: 1849324 - RNA, 19 nt, Artificial Sequence
  Description of Artificial Sequence: Synthetic oligonucleotide
  Antisense strand to SEQ ID NO: 1849323
uaugauccggguaggcaug

SEQ ID NO: 1849325 - RNA, 19 nt, Artificial Sequence
  Description of Artificial Sequence: Synthetic oligonucleotide
  Sense strand starting at position 2218 of SEQ ID NO: 1564022
uguuucuuggaggaauguu

SEQ ID NO: 1849326 - RNA, 19 nt, Artificial Sequence
  Description of Artificial Sequence: Synthetic oligonucleotide
  Antisense strand to SEQ ID NO: 1849325
aacauuccuccaagaaaca

SEQ ID NO: 1849327 - RNA, 19 nt, Artificial Sequence
  Description of Artificial Sequence: Synthetic oligonucleotide
  Sense strand starting at position 2516 of SEQ ID NO: 1564022
gaguaagacucuguuccac

SEQ ID NO: 1849328 - RNA, 19 nt, Artificial Sequence
  Description of Artificial Sequence: Synthetic oligonucleotide
  Antisense strand to SEQ ID NO: 1849327
guggaacagagucuuacuc

SEQ ID NO: 1849329 - RNA, 19 nt, Artificial Sequence
  Description of Artificial Sequence: Synthetic oligonucleotide
  Sense strand starting at position 2939 of SEQ ID NO: 1564022
ggaagucaucuuugaccug

SEQ ID NO: 1849330 - RNA, 19 nt, Artificial Sequence
  Description of Artificial Sequence: Synthetic oligonucleotide
  Antisense strand to SEQ ID NO: 1849329
caggucaaagaugacuucc

SEQ ID NO: 1849331 - RNA, 19 nt, Artificial Sequence
  Description of Artificial Sequence: Synthetic oligonucleotide
  Sense strand starting at position 2942 of SEQ ID NO: 1564022
agucaucuuugaccugaca

SEQ ID NO: 1849332 - RNA, 19 nt, Artificial Sequence
  Description of Artificial Sequence: Synthetic oligonucleotide
  Antisense strand to SEQ ID NO: 1849331
ugucaggucaaagaugacu

SEQ ID NO: 1849333 - RNA, 19 nt, Artificial Sequence
  Description of Artificial Sequence: Synthetic oligonucleotide
  Sense strand starting at position 2964 of SEQ ID NO: 1564022
gaagguugaauguggauua

SEQ ID NO: 1849334 - RNA, 19 nt, Artificial Sequence
  Description of Artificial Sequence: Synthetic oligonucleotide
  Antisense strand to SEQ ID NO: 1849333
uaauccacauucaaccuuc

SEQ ID NO: 1849335 - RNA, 19 nt, Artificial Sequence
  Description of Artificial Sequence: Synthetic oligonucleotide
  Sense strand starting at position 2977 of SEQ ID NO: 1564022
ggauuaauuaggugaaggu

SEQ ID NO: 1849336 - RNA, 19 nt, Artificial Sequence
  Description of Artificial Sequence: Synthetic oligonucleotide
  Antisense strand to SEQ ID NO: 1849335
accuucaccuaauuaaucc

SEQ ID NO: 1849337 - RNA, 19 nt, Artificial Sequence
  Description of Artificial Sequence: Synthetic oligonucleotide
  Sense strand starting at position 3008 of SEQ ID NO: 1564022
uggagucaagcauacaguu

SEQ ID NO: 1849338 - RNA, 19 nt, Artificial Sequence
  Description of Artificial Sequence: Synthetic oligonucleotide
  Antisense strand to SEQ ID NO: 1849337
aacuguaugcuugacucca

SEQ ID NO: 1849339 - RNA, 19 nt, Artificial Sequence
  Description of Artificial Sequence: Synthetic oligonucleotide
  Sense strand starting at position 3351 of SEQ ID NO: 1564022
gugacagugaagcauacuu

SEQ ID NO: 1849340 - RNA, 19 nt, Artificial Sequence
  Description of Artificial Sequence: Synthetic oligonucleotide
  Antisense strand to SEQ ID NO: 1849339
aaguaugcuucacugucac

SEQ ID NO: 1849341 - RNA, 19 nt, Artificial Sequence
  Description of Artificial Sequence: Synthetic oligonucleotide
  Sense strand starting at position 3375 of SEQ ID NO: 1564022
ggcacugcucuauaacaca

SEQ ID NO: 1849342 - RNA, 19 nt, Artificial Sequence
  Description of Artificial Sequence: Synthetic oligonucleotide
  Antisense strand to SEQ ID NO: 1849341
uguguuauagagcagugcc

SEQ ID NO: 1849343 - RNA, 19 nt, Artificial Sequence
  Description of Artificial Sequence: Synthetic oligonucleotide
  Sense strand starting at position 3446 of SEQ ID NO: 1564022
ucgagagugagcuaugauc

SEQ ID NO: 1849344 - RNA, 19 nt, Artificial Sequence
  Description of Artificial Sequence: Synthetic oligonucleotide
  Antisense strand to SEQ ID NO: 1849343
gaucauagcucacucucga

SEQ ID NO: 1849345 - RNA, 19 nt, Artificial Sequence
  Description of Artificial Sequence: Synthetic oligonucleotide
  Sense strand starting at position 3857 of SEQ ID NO: 1564022
auaccucuccgguauuaau

SEQ ID NO: 1849346 - RNA, 19 nt, Artificial Sequence
  Description of Artificial Sequence: Synthetic oligonucleotide
  Antisense strand to SEQ ID NO: 1849345
auuaauaccggagagguau

SEQ ID NO: 1849347 - RNA, 19 nt, Artificial Sequence
  Description of Artificial Sequence: Synthetic oligonucleotide
  Sense strand starting at position 126 of SEQ ID NO: 1564023
aguagauuacagcguuaac

SEQ ID NO: 1849348 - RNA, 19 nt, Artificial Sequence
  Description of Artificial Sequence: Synthetic oligonucleotide
  Antisense strand to SEQ ID NO: 1849347
guuaacgcuguaaucuacu

SEQ ID NO: 1849349 - RNA, 19 nt, Artificial Sequence
  Description of Artificial Sequence: Synthetic oligonucleotide
  Sense strand starting at position 129 of SEQ ID NO: 1564023
agauuacagcguuaacagu

SEQ ID NO: 1849350 - RNA, 19 nt, Artificial Sequence
  Description of Artificial Sequence: Synthetic oligonucleotide
  Antisense strand to SEQ ID NO: 1849349
acuguuaacgcuguaaucu

SEQ ID NO: 1849351 - RNA, 19 nt, Artificial Sequence
  Description of Artificial Sequence: Synthetic oligonucleotide
  Sense strand starting at position 239 of SEQ ID NO: 1564023
gguuuccugcucugucaga

SEQ ID NO: 1849352 - RNA, 19 nt, Artificial Sequence
  Description of Artificial Sequence: Synthetic oligonucleotide
  Antisense strand to SEQ ID NO: 1849351
ucugacagagcaggaaacc

SEQ ID NO: 1849353 - RNA, 19 nt, Artificial Sequence
  Description of Artificial Sequence: Synthetic oligonucleotide
  Sense strand starting at position 240 of SEQ ID NO: 1564023
guuuccugcucugucagaa

SEQ ID NO: 1849354 - RNA, 19 nt, Artificial Sequence
  Description of Artificial Sequence: Synthetic oligonucleotide
  Antisense strand to SEQ ID NO: 1849353
uucugacagagcaggaaac

SEQ ID NO: 1849355 - RNA, 19 nt, Artificial Sequence
  Description of Artificial Sequence: Synthetic oligonucleotide
  Sense strand starting at position 300 of SEQ ID NO: 1564023
acacuaugucauugcaguu

SEQ ID NO: 1849356 - RNA, 19 nt, Artificial Sequence
  Description of Artificial Sequence: Synthetic oligonucleotide
  Antisense strand to SEQ ID NO: 1849355
aacugcaaugacauagugu

SEQ ID NO: 1849357 - RNA, 19 nt, Artificial Sequence
  Description of Artificial Sequence: Synthetic oligonucleotide
  Sense strand starting at position 524 of SEQ ID NO: 1564023
accguaucugcauaacucu

SEQ ID NO: 1849358 - RNA, 19 nt, Artificial Sequence
  Description of Artificial Sequence: Synthetic oligonucleotide
  Antisense strand to SEQ ID NO: 1849357
agaguuaugcagauacggu

SEQ ID NO: 1849359 - RNA, 19 nt, Artificial Sequence
  Description of Artificial Sequence: Synthetic oligonucleotide
  Sense strand starting at position 543 of SEQ ID NO: 1564023
ucuuuaucaucauucggga

SEQ ID NO: 1849360 - RNA, 19 nt, Artificial Sequence
  Description of Artificial Sequence: Synthetic oligonucleotide
  Antisense strand to SEQ ID NO: 1849359
ucccgaaugaugauaaaga

SEQ ID NO: 1849361 - RNA, 19 nt, Artificial Sequence
  Description of Artificial Sequence: Synthetic oligonucleotide
  Sense strand starting at position 583 of SEQ ID NO: 1564023
ccuuuaacagcaugucuga

SEQ ID NO: 1849362 - RNA, 19 nt, Artificial Sequence
  Description of Artificial Sequence: Synthetic oligonucleotide
  Antisense strand to SEQ ID NO: 1849361
ucagacaugcuguuaaagg

SEQ ID NO: 1849363 - RNA, 19 nt, Artificial Sequence
  Description of Artificial Sequence: Synthetic oligonucleotide
  Sense strand starting at position 715 of SEQ ID NO: 1564023
guaugaauccuugagggua

SEQ ID NO: 1849364 - RNA, 19 nt, Artificial Sequence
  Description of Artificial Sequence: Synthetic oligonucleotide
  Antisense strand to SEQ ID NO: 1849363
uacccucaaggauucauac

SEQ ID NO: 1849365 - RNA, 19 nt, Artificial Sequence
  Description of Artificial Sequence: Synthetic oligonucleotide
  Sense strand starting at position 815 of SEQ ID NO: 1564023
gcacguguuugaccuccau

SEQ ID NO: 1849366 - RNA, 19 nt, Artificial Sequence
  Description of Artificial Sequence: Synthetic oligonucleotide
  Antisense strand to SEQ ID NO: 1849365
auggaggucaaacacgugc

SEQ ID NO: 1849367 - RNA, 19 nt, Artificial Sequence
  Description of Artificial Sequence: Synthetic oligonucleotide
  Sense strand starting at position 819 of SEQ ID NO: 1564023
guguuugaccuccaucacu

SEQ ID NO: 1849368 - RNA, 19 nt, Artificial Sequence
  Description of Artificial Sequence: Synthetic oligonucleotide
  Antisense strand to SEQ ID NO: 1849367
agugauggaggucaaacac

SEQ ID NO: 1849369 - RNA, 19 nt, Artificial Sequence
  Description of Artificial Sequence: Synthetic oligonucleotide
  Sense strand starting at position 833 of SEQ ID NO: 1564023
ucacucuuugacugacuga

SEQ ID NO: 1849370 - RNA, 19 nt, Artificial Sequence
  Description of Artificial Sequence: Synthetic oligonucleotide
  Antisense strand to SEQ ID NO: 1849369
ucagucagucaaagaguga

SEQ ID NO: 1849371 - RNA, 19 nt, Artificial Sequence
  Description of Artificial Sequence: Synthetic oligonucleotide
  Sense strand starting at position 905 of SEQ ID NO: 1564023
cggaaugcuuguccuccau

SEQ ID NO: 1849372 - RNA, 19 nt, Artificial Sequence
  Description of Artificial Sequence: Synthetic oligonucleotide
  Antisense strand to SEQ ID NO: 1849371
auggaggacaagcauuccg

SEQ ID NO: 1849373 - RNA, 19 nt, Artificial Sequence
  Description of Artificial Sequence: Synthetic oligonucleotide
  Sense strand starting at position 2156 of SEQ ID NO: 1564023
cgaauugagagccggagaa

SEQ ID NO: 1849374 - RNA, 19 nt, Artificial Sequence
  Description of Artificial Sequence: Synthetic oligonucleotide
  Antisense strand to SEQ ID NO: 1849373
uucuccggcucucaauucg

SEQ ID NO: 1849375 - RNA, 19 nt, Artificial Sequence
  Description of Artificial Sequence: Synthetic oligonucleotide
  Sense strand starting at position 2218 of SEQ ID NO: 1564023
gcgggaugaucgaggaauc

SEQ ID NO: 1849376 - RNA, 19 nt, Artificial Sequence
  Description of Artificial Sequence: Synthetic oligonucleotide
  Antisense strand to SEQ ID NO: 1849375
gauuccucgaucaucccgc

SEQ ID NO: 1849377 - RNA, 19 nt, Artificial Sequence
  Description of Artificial Sequence: Synthetic oligonucleotide
  Sense strand starting at position 2219 of SEQ ID NO: 1564023
cgggaugaucgaggaauca

SEQ ID NO: 1849378 - RNA, 19 nt, Artificial Sequence
  Description of Artificial Sequence: Synthetic oligonucleotide
  Antisense strand to SEQ ID NO: 1849377
ugauuccucgaucaucccg

SEQ ID NO: 1849379 - RNA, 19 nt, Artificial Sequence
  Description of Artificial Sequence: Synthetic oligonucleotide
  Sense strand starting at position 2261 of SEQ ID NO: 1564023
gugcgaaauccaugaugaa

SEQ ID NO: 1849380 - RNA, 19 nt, Artificial Sequence
  Description of Artificial Sequence: Synthetic oligonucleotide
  Antisense strand to SEQ ID NO: 1849379
uucaucauggauuucgcac

SEQ ID NO: 1849381 - RNA, 19 nt, Artificial Sequence
  Description of Artificial Sequence: Synthetic oligonucleotide
  Sense strand starting at position 2302 of SEQ ID NO: 1564023
ugcggaagucugagcgaga

SEQ ID NO: 1849382 - RNA, 19 nt, Artificial Sequence
  Description of Artificial Sequence: Synthetic oligonucleotide
  Antisense strand to SEQ ID NO: 1849381
ucucgcucagacuuccgca

SEQ ID NO: 1849383 - RNA, 19 nt, Artificial Sequence
  Description of Artificial Sequence: Synthetic oligonucleotide
  Sense strand starting at position 2304 of SEQ ID NO: 1564023
cggaagucugagcgagaga

SEQ ID NO: 1849384 - RNA, 19 nt, Artificial Sequence
  Description of Artificial Sequence: Synthetic oligonucleotide
  Antisense strand to SEQ ID NO: 1849383
ucucucgcucagacuuccg

SEQ ID NO: 1849385 - RNA, 19 nt, Artificial Sequence
  Description of Artificial Sequence: Synthetic oligonucleotide
  Sense strand starting at position 2831 of SEQ ID NO: 1564023
aggcaugaguagccaauaa

SEQ ID NO: 1849386 - RNA, 19 nt, Artificial Sequence
  Description of Artificial Sequence: Synthetic oligonucleotide
  Antisense strand to SEQ ID NO: 1849385
uuauuggcuacucaugccu

SEQ ID NO: 1849387 - RNA, 19 nt, Artificial Sequence
  Description of Artificial Sequence: Synthetic oligonucleotide
  Sense strand starting at position 2923 of SEQ ID NO: 1564023
gcaggcagccauuaggaaa

SEQ ID NO: 1849388 - RNA, 19 nt, Artificial Sequence
  Description of Artificial Sequence: Synthetic oligonucleotide
  Antisense strand to SEQ ID NO: 1849387
uuuccuaauggcugccugc

SEQ ID NO: 1849389 - RNA, 19 nt, Artificial Sequence
  Description of Artificial Sequence: Synthetic oligonucleotide
  Sense strand starting at position 3036 of SEQ ID NO: 1564023
caccuuggugugugaacua

SEQ ID NO: 1849390 - RNA, 19 nt, Artificial Sequence
  Description of Artificial Sequence: Synthetic oligonucleotide
  Antisense strand to SEQ ID NO: 1849389
uaguucacacaccaaggug

SEQ ID NO: 1849391 - RNA, 19 nt, Artificial Sequence
  Description of Artificial Sequence: Synthetic oligonucleotide
  Sense strand starting at position 3041 of SEQ ID NO: 1564023
uggugugugaacuaggaaa

SEQ ID NO: 1849392 - RNA, 19 nt, Artificial Sequence
  Description of Artificial Sequence: Synthetic oligonucleotide
  Antisense strand to SEQ ID NO: 1849391
uuuccuaguucacacacca

SEQ ID NO: 1849393 - RNA, 19 nt, Artificial Sequence
  Description of Artificial Sequence: Synthetic oligonucleotide
  Sense strand starting at position 3043 of SEQ ID NO: 1564023
gugugugaacuaggaaagu

SEQ ID NO: 1849394 - RNA, 19 nt, Artificial Sequence
  Description of Artificial Sequence: Synthetic oligonucleotide
  Antisense strand to SEQ ID NO: 1849393
acuuuccuaguucacacac

SEQ ID NO: 1849395 - RNA, 19 nt, Artificial Sequence
  Description of Artificial Sequence: Synthetic oligonucleotide
  Sense strand starting at position 3154 of SEQ ID NO: 1564023
cccugauuguuagccgcaa

SEQ ID NO: 1849396 - RNA, 19 nt, Artificial Sequence
  Description of Artificial Sequence: Synthetic oligonucleotide
  Antisense strand to SEQ ID NO: 1849395
uugcggcuaacaaucaggg

SEQ ID NO: 1849397 - RNA, 19 nt, Artificial Sequence
  Description of Artificial Sequence: Synthetic oligonucleotide
  Sense strand starting at position 3187 of SEQ ID NO: 1564023
uugauacuauuguugaaug

SEQ ID NO: 1849398 - RNA, 19 nt, Artificial Sequence
  Description of Artificial Sequence: Synthetic oligonucleotide
  Antisense strand to SEQ ID NO: 1849397
cauucaacaauaguaucaa

SEQ ID NO: 1849399 - RNA, 19 nt, Artificial Sequence
  Description of Artificial Sequence: Synthetic oligonucleotide
  Sense strand starting at position 3199 of SEQ ID NO: 1564023
uugaaugaauggccgaaua

SEQ ID NO: 1849400 - RNA, 19 nt, Artificial Sequence
  Description of Artificial Sequence: Synthetic oligonucleotide
  Antisense strand to SEQ ID NO: 1849399
uauucggccauucauucaa

SEQ ID NO: 1849401 - RNA, 19 nt, Artificial Sequence
  Description of Artificial Sequence: Synthetic oligonucleotide
  Sense strand starting at position 3222 of SEQ ID NO: 1564023
auuuaacuuucugaaggau

SEQ ID NO: 1849402 - RNA, 19 nt, Artificial Sequence
  Description of Artificial Sequence: Synthetic oligonucleotide
  Antisense strand to SEQ ID NO: 1849401
auccuucagaaaguuaaau

SEQ ID NO: 1849403 - RNA, 19 nt, Artificial Sequence
  Description of Artificial Sequence: Synthetic oligonucleotide
  Sense strand starting at position 3290 of SEQ ID NO: 1564023
ccagaaguugauugggcau

SEQ ID NO: 1849404 - RNA, 19 nt, Artificial Sequence
  Description of Artificial Sequence: Synthetic oligonucleotide
  Antisense strand to SEQ ID NO: 1849403
augcccaaucaacuucugg

SEQ ID NO: 1849405 - RNA, 19 nt, Artificial Sequence
  Description of Artificial Sequence: Synthetic oligonucleotide
  Sense strand starting at position 3313 of SEQ ID NO: 1564023
guagcuucugacuaaugga

SEQ ID NO: 1849406 - RNA, 19 nt, Artificial Sequence
  Description of Artificial Sequence: Synthetic oligonucleotide
  Antisense strand to SEQ ID NO: 1849405
uccauuagucagaagcuac

SEQ ID NO: 1849407 - RNA, 19 nt, Artificial Sequence
  Description of Artificial Sequence: Synthetic oligonucleotide
  Sense strand starting at position 3472 of SEQ ID NO: 1564023
cuaguaaacuccuuucgcu

SEQ ID NO: 1849408 - RNA, 19 nt, Artificial Sequence
  Description of Artificial Sequence: Synthetic oligonucleotide
  Antisense strand to SEQ ID NO: 1849407
agcgaaaggaguuuacuag

SEQ ID NO: 1849409 - RNA, 19 nt, Artificial Sequence
  Description of Artificial Sequence: Synthetic oligonucleotide
  Sense strand starting at position 3567 of SEQ ID NO: 1564023
uucuccauccugggaagau

SEQ ID NO: 1849410 - RNA, 19 nt, Artificial Sequence
  Description of Artificial Sequence: Synthetic oligonucleotide
  Antisense strand to SEQ ID NO: 1849409
aucuucccaggauggagaa

SEQ ID NO: 1849411 - RNA, 19 nt, Artificial Sequence
  Description of Artificial Sequence: Synthetic oligonucleotide
  Sense strand starting at position 3568 of SEQ ID NO: 1564023
ucuccauccugggaagauu

SEQ ID NO: 1849412 - RNA, 19 nt, Artificial Sequence
  Description of Artificial Sequence: Synthetic oligonucleotide
  Antisense strand to SEQ ID NO: 1849411
aaucuucccaggauggaga

SEQ ID NO: 1849413 - RNA, 19 nt, Artificial Sequence
  Description of Artificial Sequence: Synthetic oligonucleotide
  Sense strand starting at position 3618 of SEQ ID NO: 1564023
gcaugcuguuaucucauua

SEQ ID NO: 1849414 - RNA, 19 nt, Artificial Sequence
  Description of Artificial Sequence: Synthetic oligonucleotide
  Antisense strand to SEQ ID NO: 1849413
uaaugagauaacagcaugc

SEQ ID NO: 1849415 - RNA, 19 nt, Artificial Sequence
  Description of Artificial Sequence: Synthetic oligonucleotide
  Sense strand starting at position 3622 of SEQ ID NO: 1564023
gcuguuaucucauuagaac

SEQ ID NO: 1849416 - RNA, 19 nt, Artificial Sequence
  Description of Artificial Sequence: Synthetic oligonucleotide
  Antisense strand to SEQ ID NO: 1849415
guucuaaugagauaacagc

SEQ ID NO: 1849417 - RNA, 19 nt, Artificial Sequence
  Description of Artificial Sequence: Synthetic oligonucleotide
  Sense strand starting at position 3702 of SEQ ID NO: 1564023
ucaggauguccaugaguua

SEQ ID NO: 1849418 - RNA, 19 nt, Artificial Sequence
  Description of Artificial Sequence: Synthetic oligonucleotide
  Antisense strand to SEQ ID NO: 1849417
uaacucauggacauccuga

SEQ ID NO: 1849419 - RNA, 19 nt, Artificial Sequence
  Description of Artificial Sequence: Synthetic oligonucleotide
  Sense strand starting at position 3703 of SEQ ID NO: 1564023
caggauguccaugaguuag

SEQ ID NO: 1849420 - RNA, 19 nt, Artificial Sequence
  Description of Artificial Sequence: Synthetic oligonucleotide
  Antisense strand to SEQ ID NO: 1849419
cuaacucauggacauccug

SEQ ID NO: 1849421 - RNA, 19 nt, Artificial Sequence
  Description of Artificial Sequence: Synthetic oligonucleotide
  Sense strand starting at position 3705 of SEQ ID NO: 1564023
ggauguccaugaguuagaa

SEQ ID NO: 1849422 - RNA, 19 nt, Artificial Sequence
  Description of Artificial Sequence: Synthetic oligonucleotide
  Antisense strand to SEQ ID NO: 1849421
uucuaacucauggacaucc

SEQ ID NO: 1849423 - RNA, 19 nt, Artificial Sequence
  Description of Artificial Sequence: Synthetic oligonucleotide
  Sense strand starting at position 3709 of SEQ ID NO: 1564023
guccaugaguuagaaauga

SEQ ID NO: 1849424 - RNA, 19 nt, Artificial Sequence
  Description of Artificial Sequence: Synthetic oligonucleotide
  Antisense strand to SEQ ID NO: 1849423
ucauuucuaacucauggac

SEQ ID NO: 1849425 - RNA, 19 nt, Artificial Sequence
  Description of Artificial Sequence: Synthetic oligonucleotide
  Sense strand starting at position 3874 of SEQ ID NO: 1564023
ccgaucuggcuccaagacu

SEQ ID NO: 1849426 - RNA, 19 nt, Artificial Sequence
  Description of Artificial Sequence: Synthetic oligonucleotide
  Antisense strand to SEQ ID NO: 1849425
agucuuggagccagaucgg

SEQ ID NO: 1849427 - RNA, 19 nt, Artificial Sequence
  Description of Artificial Sequence: Synthetic oligonucleotide
  Sense strand starting at position 7 of SEQ ID NO: 1564025
agaugucaguuaucaauaa

SEQ ID NO: 1849428 - RNA, 19 nt, Artificial Sequence
  Description of Artificial Sequence: Synthetic oligonucleotide
  Antisense strand to SEQ ID NO: 1849427
uuauugauaacugacaucu

SEQ ID NO: 1849429 - RNA, 19 nt, Artificial Sequence
  Description of Artificial Sequence: Synthetic oligonucleotide
  Sense strand starting at position 92 of SEQ ID NO: 1564025
cugauaauaaggugugauu

SEQ ID NO: 1849430 - RNA, 19 nt, Artificial Sequence
  Description of Artificial Sequence: Synthetic oligonucleotide
  Antisense strand to SEQ ID NO: 1849429
aaucacaccuuauuaucag

SEQ ID NO: 1849431 - RNA, 19 nt, Artificial Sequence
  Description of Artificial Sequence: Synthetic oligonucleotide
  Sense strand starting at position 105 of SEQ ID NO: 1564025
gugauuugcagccagagca

SEQ ID NO: 1849432 - RNA, 19 nt, Artificial Sequence
  Description of Artificial Sequence: Synthetic oligonucleotide
  Antisense strand to SEQ ID NO: 1849431
ugcucuggcugcaaaucac

SEQ ID NO: 1849433 - RNA, 19 nt, Artificial Sequence
  Description of Artificial Sequence: Synthetic oligonucleotide
  Sense strand starting at position 136 of SEQ ID NO: 1564025
augauagauccucacugca

SEQ ID NO: 1849434 - RNA, 19 nt, Artificial Sequence
  Description of Artificial Sequence: Synthetic oligonucleotide
  Antisense strand to SEQ ID NO: 1849433
ugcagugaggaucuaucau

SEQ ID NO: 1849435 - RNA, 19 nt, Artificial Sequence
  Description of Artificial Sequence: Synthetic oligonucleotide
  Sense strand starting at position 204 of SEQ ID NO: 1564025
auuagauacuaugucauca

SEQ ID NO: 1849436 - RNA, 19 nt, Artificial Sequence
  Description of Artificial Sequence: Synthetic oligonucleotide
  Antisense strand to SEQ ID NO: 1849435
ugaugacauaguaucuaau

SEQ ID NO: 1849437 - RNA, 19 nt, Artificial Sequence
  Description of Artificial Sequence: Synthetic oligonucleotide
  Sense strand starting at position 229 of SEQ ID NO: 1564025
uagaguaauccaugggauu

SEQ ID NO: 1849438 - RNA, 19 nt, Artificial Sequence
  Description of Artificial Sequence: Synthetic oligonucleotide
  Antisense strand to SEQ ID NO: 1849437
aaucccauggauuacucua

SEQ ID NO: 1849439 - RNA, 19 nt, Artificial Sequence
  Description of Artificial Sequence: Synthetic oligonucleotide
  Sense strand starting at position 232 of SEQ ID NO: 1564025
aguaauccaugggauuuaa

SEQ ID NO: 1849440 - RNA, 19 nt, Artificial Sequence
  Description of Artificial Sequence: Synthetic oligonucleotide
  Antisense strand to SEQ ID NO: 1849439
uuaaaucccauggauuacu

SEQ ID NO: 1849441 - RNA, 19 nt, Artificial Sequence
  Description of Artificial Sequence: Synthetic oligonucleotide
  Sense strand starting at position 277 of SEQ ID NO: 1564025
gcauuagguggucaguauu

SEQ ID NO: 1849442 - RNA, 19 nt, Artificial Sequence
  Description of Artificial Sequence: Synthetic oligonucleotide
  Antisense strand to SEQ ID NO: 1849441
aauacugaccaccuaaugc

SEQ ID NO: 1849443 - RNA, 19 nt, Artificial Sequence
  Description of Artificial Sequence: Synthetic oligonucleotide
  Sense strand starting at position 280 of SEQ ID NO: 1564025
uuagguggucaguauuauu

SEQ ID NO: 1849444 - RNA, 19 nt, Artificial Sequence
  Description of Artificial Sequence: Synthetic oligonucleotide
  Antisense strand to SEQ ID NO: 1849443
aauaauacugaccaccuaa

SEQ ID NO: 1849445 - RNA, 19 nt, Artificial Sequence
  Description of Artificial Sequence: Synthetic oligonucleotide
  Sense strand starting at position 605 of SEQ ID NO: 1564025
cagucaguauuguuaagaa

SEQ ID NO: 1849446 - RNA, 19 nt, Artificial Sequence
  Description of Artificial Sequence: Synthetic oligonucleotide
  Antisense strand to SEQ ID NO: 1849445
uucuuaacaauacugacug

SEQ ID NO: 1849447 - RNA, 19 nt, Artificial Sequence
  Description of Artificial Sequence: Synthetic oligonucleotide
  Sense strand starting at position 625 of SEQ ID NO: 1564025
gaaauaucugccgggcaca

SEQ ID NO: 1849448 - RNA, 19 nt, Artificial Sequence
  Description of Artificial Sequence: Synthetic oligonucleotide
  Antisense strand to SEQ ID NO: 1849447
ugugcccggcagauauuuc

SEQ ID NO: 1849449 - RNA, 19 nt, Artificial Sequence
  Description of Artificial Sequence: Synthetic oligonucleotide
  Sense strand starting at position 973 of SEQ ID NO: 1564025
ccaacuacucgggaaguua

SEQ ID NO: 1849450 - RNA, 19 nt, Artificial Sequence
  Description of Artificial Sequence: Synthetic oligonucleotide
  Antisense strand to SEQ ID NO: 1849449
uaacuucccgaguaguugg

SEQ ID NO: 1849451 - RNA, 19 nt, Artificial Sequence
  Description of Artificial Sequence: Synthetic oligonucleotide
  Sense strand starting at position 1173 of SEQ ID NO: 1564025
agggauggaugucaggaau

SEQ ID NO: 1849452 - RNA, 19 nt, Artificial Sequence
  Description of Artificial Sequence: Synthetic oligonucleotide
  Antisense strand to SEQ ID NO: 1849451
auuccugacauccaucccu

SEQ ID NO: 1849453 - RNA, 19 nt, Artificial Sequence
  Description of Artificial Sequence: Synthetic oligonucleotide
  Sense strand starting at position 1186 of SEQ ID NO: 1564025
aggaauccacauuguuaac

SEQ ID NO: 1849454 - RNA, 19 nt, Artificial Sequence
  Description of Artificial Sequence: Synthetic oligonucleotide
  Antisense strand to SEQ ID NO: 1849453
guuaacaauguggauuccu

SEQ ID NO: 1849455 - RNA, 19 nt, Artificial Sequence
  Description of Artificial Sequence: Synthetic oligonucleotide
  Sense strand starting at position 1245 of SEQ ID NO: 1564025
ggcccaugcuagguaucaa

SEQ ID NO: 1849456 - RNA, 19 nt, Artificial Sequence
  Description of Artificial Sequence: Synthetic oligonucleotide
  Antisense strand to SEQ ID NO: 1849455
uugauaccuagcaugggcc

SEQ ID NO: 1849457 - RNA, 19 nt, Artificial Sequence
  Description of Artificial Sequence: Synthetic oligonucleotide
  Sense strand starting at position 1246 of SEQ ID NO: 1564025
gcccaugcuagguaucaag

SEQ ID NO: 1849458 - RNA, 19 nt, Artificial Sequence
  Description of Artificial Sequence: Synthetic oligonucleotide
  Antisense strand to SEQ ID NO: 1849457
cuugauaccuagcaugggc

SEQ ID NO: 1849459 - RNA, 19 nt, Artificial Sequence
  Description of Artificial Sequence: Synthetic oligonucleotide
  Sense strand starting at position 1258 of SEQ ID NO: 1564025
uaucaagcgucaguaucaa

SEQ ID NO: 1849460 - RNA, 19 nt, Artificial Sequence
  Description of Artificial Sequence: Synthetic oligonucleotide
  Antisense strand to SEQ ID NO: 1849459
uugauacugacgcuugaua

SEQ ID NO: 1849461 - RNA, 19 nt, Artificial Sequence
  Description of Artificial Sequence: Synthetic oligonucleotide
  Sense strand starting at position 2021 of SEQ ID NO: 1564025
ucgauuggccaaugagagu

SEQ ID NO: 1849462 - RNA, 19 nt, Artificial Sequence
  Description of Artificial Sequence: Synthetic oligonucleotide
  Antisense strand to SEQ ID NO: 1849461
acucucauuggccaaucga

SEQ ID NO: 1849463 - RNA, 19 nt, Artificial Sequence
  Description of Artificial Sequence: Synthetic oligonucleotide
  Sense strand starting at position 2083 of SEQ ID NO: 1564025
cgguaauaggcggaaagcu

SEQ ID NO: 1849464 - RNA, 19 nt, Artificial Sequence
  Description of Artificial Sequence: Synthetic oligonucleotide
  Antisense strand to SEQ ID NO: 1849463
agcuuuccgccuauuaccg

SEQ ID NO: 1849465 - RNA, 19 nt, Artificial Sequence
  Description of Artificial Sequence: Synthetic oligonucleotide
  Sense strand starting at position 2201 of SEQ ID NO: 1564025
ggcacaggcauccggaaua

SEQ ID NO: 1849466 - RNA, 19 nt, Artificial Sequence
  Description of Artificial Sequence: Synthetic oligonucleotide
  Antisense strand to SEQ ID NO: 1849465
uauuccggaugccugugcc

SEQ ID NO: 1849467 - RNA, 19 nt, Artificial Sequence
  Description of Artificial Sequence: Synthetic oligonucleotide
  Sense strand starting at position 2337 of SEQ ID NO: 1564025
ugucauucgggcuccguua

SEQ ID NO: 1849468 - RNA, 19 nt, Artificial Sequence
  Description of Artificial Sequence: Synthetic oligonucleotide
  Antisense strand to SEQ ID NO: 1849467
uaacggagcccgaaugaca

SEQ ID NO: 1849469 - RNA, 19 nt, Artificial Sequence
  Description of Artificial Sequence: Synthetic oligonucleotide
  Sense strand starting at position 2411 of SEQ ID NO: 1564025
cugacuucguaaucuccua

SEQ ID NO: 1849470 - RNA, 19 nt, Artificial Sequence
  Description of Artificial Sequence: Synthetic oligonucleotide
  Antisense strand to SEQ ID NO: 1849469
uaggagauuacgaagucag

SEQ ID NO: 1849471 - RNA, 19 nt, Artificial Sequence
  Description of Artificial Sequence: Synthetic oligonucleotide
  Sense strand starting at position 2482 of SEQ ID NO: 1564025
uacgguguugaccggaaau

SEQ ID NO: 1849472 - RNA, 19 nt, Artificial Sequence
  Description of Artificial Sequence: Synthetic oligonucleotide
  Antisense strand to SEQ ID NO: 1849471
auuuccggucaacaccgua

SEQ ID NO: 1849473 - RNA, 19 nt, Artificial Sequence
  Description of Artificial Sequence: Synthetic oligonucleotide
  Sense strand starting at position 2624 of SEQ ID NO: 1564025
ccaguugugccggauugaa

SEQ ID NO: 1849474 - RNA, 19 nt, Artificial Sequence
  Description of Artificial Sequence: Synthetic oligonucleotide
  Antisense strand to SEQ ID NO: 1849473
uucaauccggcacaacugg

SEQ ID NO: 1849475 - RNA, 19 nt, Artificial Sequence
  Description of Artificial Sequence: Synthetic oligonucleotide
  Sense strand starting at position 2734 of SEQ ID NO: 1564025
cgccuaugucgcuuauuga

SEQ ID NO: 1849476 - RNA, 19 nt, Artificial Sequence
  Description of Artificial Sequence: Synthetic oligonucleotide
  Antisense strand to SEQ ID NO: 1849475
ucaauaagcgacauaggcg

SEQ ID NO: 1849477 - RNA, 19 nt, Artificial Sequence
  Description of Artificial Sequence: Synthetic oligonucleotide
  Sense strand starting at position 2737 of SEQ ID NO: 1564025
cuaugucgcuuauugaaac

SEQ ID NO: 1849478 - RNA, 19 nt, Artificial Sequence
  Description of Artificial Sequence: Synthetic oligonucleotide
  Antisense strand to SEQ ID NO: 1849477
guuucaauaagcgacauag

SEQ ID NO: 1849479 - RNA, 19 nt, Artificial Sequence
  Description of Artificial Sequence: Synthetic oligonucleotide
  Sense strand starting at position 2811 of SEQ ID NO: 1564025
ugauuccuugguugguaga

SEQ ID NO: 1849480 - RNA, 19 nt, Artificial Sequence
  Description of Artificial Sequence: Synthetic oligonucleotide
  Antisense strand to SEQ ID NO: 1849479
ucuaccaaccaaggaauca

SEQ ID NO: 1849481 - RNA, 19 nt, Artificial Sequence
  Description of Artificial Sequence: Synthetic oligonucleotide
  Sense strand starting at position 2833 of SEQ ID NO: 1564025
ggcgaagacuaauauuucu

SEQ ID NO: 1849482 - RNA, 19 nt, Artificial Sequence
  Description of Artificial Sequence: Synthetic oligonucleotide
  Antisense strand to SEQ ID NO: 1849481
agaaauauuagucuucgcc

SEQ ID NO: 1849483 - RNA, 19 nt, Artificial Sequence
  Description of Artificial Sequence: Synthetic oligonucleotide
  Sense strand starting at position 2912 of SEQ ID NO: 1564025
agcucauuauuaucugaag

SEQ ID NO: 1849484 - RNA, 19 nt, Artificial Sequence
  Description of Artificial Sequence: Synthetic oligonucleotide
  Antisense strand to SEQ ID NO: 1849483
cuucagauaauaaugagcu

SEQ ID NO: 1849485 - RNA, 19 nt, Artificial Sequence
  Description of Artificial Sequence: Synthetic oligonucleotide
  Sense strand starting at position 2913 of SEQ ID NO: 1564025
gcucauuauuaucugaagu

SEQ ID NO: 1849486 - RNA, 19 nt, Artificial Sequence
  Description of Artificial Sequence: Synthetic oligonucleotide
  Antisense strand to SEQ ID NO: 1849485
acuucagauaauaaugagc

SEQ ID NO: 1849487 - RNA, 19 nt, Artificial Sequence
  Description of Artificial Sequence: Synthetic oligonucleotide
  Sense strand starting at position 2932 of SEQ ID NO: 1564025
guuuguuccuacuuaggaa

SEQ ID NO: 1849488 - RNA, 19 nt, Artificial Sequence
  Description of Artificial Sequence: Synthetic oligonucleotide
  Antisense strand to SEQ ID NO: 1849487
uuccuaaguaggaacaaac

SEQ ID NO: 1849489 - RNA, 19 nt, Artificial Sequence
  Description of Artificial Sequence: Synthetic oligonucleotide
  Sense strand starting at position 3059 of SEQ ID NO: 1564025
uggcgaauuguggaugauu

SEQ ID NO: 1849490 - RNA, 19 nt, Artificial Sequence
  Description of Artificial Sequence: Synthetic oligonucleotide
  Antisense strand to SEQ ID NO: 1849489
aaucauccacaauucgcca

SEQ ID NO: 1849491 - RNA, 19 nt, Artificial Sequence
  Description of Artificial Sequence: Synthetic oligonucleotide
  Sense strand starting at position 3192 of SEQ ID NO: 1564025
cuaucuugcccacaaggga

SEQ ID NO: 1849492 - RNA, 19 nt, Artificial Sequence
  Description of Artificial Sequence: Synthetic oligonucleotide
  Antisense strand to SEQ ID NO: 1849491
ucccuugugggcaagauag

SEQ ID NO: 1849493 - RNA, 19 nt, Artificial Sequence
  Description of Artificial Sequence: Synthetic oligonucleotide
  Sense strand starting at position 3205 of SEQ ID NO: 1564025
aagggaggcugcucugaaa

SEQ ID NO: 1849494 - RNA, 19 nt, Artificial Sequence
  Description of Artificial Sequence: Synthetic oligonucleotide
  Antisense strand to SEQ ID NO: 1849493
uuucagagcagccucccuu

SEQ ID NO: 1849495 - RNA, 19 nt, Artificial Sequence
  Description of Artificial Sequence: Synthetic oligonucleotide
  Sense strand starting at position 3294 of SEQ ID NO: 1564025
ggcuccuguaucugggauu

SEQ ID NO: 1849496 - RNA, 19 nt, Artificial Sequence
  Description of Artificial Sequence: Synthetic oligonucleotide
  Antisense strand to SEQ ID NO: 1849495
aaucccagauacaggagcc

SEQ ID NO: 1849497 - RNA, 19 nt, Artificial Sequence
  Description of Artificial Sequence: Synthetic oligonucleotide
  Sense strand starting at position 3365 of SEQ ID NO: 1564025
uggagcuccucuguggaaa

SEQ ID NO: 1849498 - RNA, 19 nt, Artificial Sequence
  Description of Artificial Sequence: Synthetic oligonucleotide
  Antisense strand to SEQ ID NO: 1849497
uuuccacagaggagcucca

SEQ ID NO: 1849499 - RNA, 19 nt, Artificial Sequence
  Description of Artificial Sequence: Synthetic oligonucleotide
  Sense strand starting at position 3366 of SEQ ID NO: 1564025
ggagcuccucuguggaaau

SEQ ID NO: 1849500 - RNA, 19 nt, Artificial Sequence
  Description of Artificial Sequence: Synthetic oligonucleotide
  Antisense strand to SEQ ID NO: 1849499
auuuccacagaggagcucc

SEQ ID NO: 1849501 - RNA, 19 nt, Artificial Sequence
  Description of Artificial Sequence: Synthetic oligonucleotide
  Sense strand starting at position 3803 of SEQ ID NO: 1564025
gccugaucaugggucacua

SEQ ID NO: 1849502 - RNA, 19 nt, Artificial Sequence
  Description of Artificial Sequence: Synthetic oligonucleotide
  Antisense strand to SEQ ID NO: 1849501
uagugacccaugaucaggc

SEQ ID NO: 1849503 - RNA, 19 nt, Artificial Sequence
  Description of Artificial Sequence: Synthetic oligonucleotide
  Sense strand starting at position 3903 of SEQ ID NO: 1564025
ccggcuaauuauuuaugua

SEQ ID NO: 1849504 - RNA, 19 nt, Artificial Sequence
  Description of Artificial Sequence: Synthetic oligonucleotide
  Antisense strand to SEQ ID NO: 1849503
uacauaaauaauuagccgg

SEQ ID NO: 1849505 - RNA, 19 nt, Artificial Sequence
  Description of Artificial Sequence: Synthetic oligonucleotide
  Sense strand starting at position 3970 of SEQ ID NO: 1564025
ggucucuaauuccugaacu

SEQ ID NO: 1849506 - RNA, 19 nt, Artificial Sequence
  Description of Artificial Sequence: Synthetic oligonucleotide
  Antisense strand to SEQ ID NO: 1849505
aguucaggaauuagagacc

SEQ ID NO: 1849507 - RNA, 19 nt, Artificial Sequence
  Description of Artificial Sequence: Synthetic oligonucleotide
  Sense strand starting at position 340 of SEQ ID NO: 1564026
aggcuuguaauagauguca

SEQ ID NO: 1849508 - RNA, 19 nt, Artificial Sequence
  Description of Artificial Sequence: Synthetic oligonucleotide
  Antisense strand to SEQ ID NO: 1849507
ugacaucuauuacaagccu

SEQ ID NO: 1849509 - RNA, 19 nt, Artificial Sequence
  Description of Artificial Sequence: Synthetic oligonucleotide
  Sense strand starting at position 351 of SEQ ID NO: 1564026
agaugucaguuaucaauaa

SEQ ID NO: 1849510 - RNA, 19 nt, Artificial Sequence
  Description of Artificial Sequence: Synthetic oligonucleotide
  Antisense strand to SEQ ID NO: 1849509
uuauugauaacugacaucu

SEQ ID NO: 1849511 - RNA, 19 nt, Artificial Sequence
  Description of Artificial Sequence: Synthetic oligonucleotide
  Sense strand starting at position 436 of SEQ ID NO: 1564026
cugauaauaaggugugauu

SEQ ID NO: 1849512 - RNA, 19 nt, Artificial Sequence
  Description of Artificial Sequence: Synthetic oligonucleotide
  Antisense strand to SEQ ID NO: 1849511
aaucacaccuuauuaucag

SEQ ID NO: 1849513 - RNA, 19 nt, Artificial Sequence
  Description of Artificial Sequence: Synthetic oligonucleotide
  Sense strand starting at position 449 of SEQ ID NO: 1564026
gugauuugcagccagagca

SEQ ID NO: 1849514 - RNA, 19 nt, Artificial Sequence
  Description of Artificial Sequence: Synthetic oligonucleotide
  Antisense strand to SEQ ID NO: 1849513
ugcucuggcugcaaaucac

SEQ ID NO: 1849515 - RNA, 19 nt, Artificial Sequence
  Description of Artificial Sequence: Synthetic oligonucleotide
  Sense strand starting at position 480 of SEQ ID NO: 1564026
augauagauccucacugca

SEQ ID NO: 1849516 - RNA, 19 nt, Artificial Sequence
  Description of Artificial Sequence: Synthetic oligonucleotide
  Antisense strand to SEQ ID NO: 1849515
ugcagugaggaucuaucau

SEQ ID NO: 1849517 - RNA, 19 nt, Artificial Sequence
  Description of Artificial Sequence: Synthetic oligonucleotide
  Sense strand starting at position 548 of SEQ ID NO: 1564026
auuagauacuaugucauca

SEQ ID NO: 1849518 - RNA, 19 nt, Artificial Sequence
  Description of Artificial Sequence: Synthetic oligonucleotide
  Antisense strand to SEQ ID NO: 1849517
ugaugacauaguaucuaau

SEQ ID NO: 1849519 - RNA, 19 nt, Artificial Sequence
  Description of Artificial Sequence: Synthetic oligonucleotide
  Sense strand starting at position 573 of SEQ ID NO: 1564026
uagaguaauccaugggauu

SEQ ID NO: 1849520 - RNA, 19 nt, Artificial Sequence
  Description of Artificial Sequence: Synthetic oligonucleotide
  Antisense strand to SEQ ID NO: 1849519
aaucccauggauuacucua

SEQ ID NO: 1849521 - RNA, 19 nt, Artificial Sequence
  Description of Artificial Sequence: Synthetic oligonucleotide
  Sense strand starting at position 576 of SEQ ID NO: 1564026
aguaauccaugggauuuaa

SEQ ID NO: 1849522 - RNA, 19 nt, Artificial Sequence
  Description of Artificial Sequence: Synthetic oligonucleotide
  Antisense strand to SEQ ID NO: 1849521
uuaaaucccauggauuacu

SEQ ID NO: 1849523 - RNA, 19 nt, Artificial Sequence
  Description of Artificial Sequence: Synthetic oligonucleotide
  Sense strand starting at position 620 of SEQ ID NO: 1564026
ggcauuagguggucaguau

SEQ ID NO: 1849524 - RNA, 19 nt, Artificial Sequence
  Description of Artificial Sequence: Synthetic oligonucleotide
  Antisense strand to SEQ ID NO: 1849523
auacugaccaccuaaugcc

SEQ ID NO: 1849525 - RNA, 19 nt, Artificial Sequence
  Description of Artificial Sequence: Synthetic oligonucleotide
  Sense strand starting at position 621 of SEQ ID NO: 1564026
gcauuagguggucaguauu

SEQ ID NO: 1849526 - RNA, 19 nt, Artificial Sequence
  Description of Artificial Sequence: Synthetic oligonucleotide
  Antisense strand to SEQ ID NO: 1849525
aauacugaccaccuaaugc

SEQ ID NO: 1849527 - RNA, 19 nt, Artificial Sequence
  Description of Artificial Sequence: Synthetic oligonucleotide
  Sense strand starting at position 624 of SEQ ID NO: 1564026
uuagguggucaguauuauu

SEQ ID NO: 1849528 - RNA, 19 nt, Artificial Sequence
  Description of Artificial Sequence: Synthetic oligonucleotide
  Antisense strand to SEQ ID NO: 1849527
aauaauacugaccaccuaa

SEQ ID NO: 1849529 - RNA, 19 nt, Artificial Sequence
  Description of Artificial Sequence: Synthetic oligonucleotide
  Sense strand starting at position 949 of SEQ ID NO: 1564026
cagucaguauuguuaagaa

SEQ ID NO: 1849530 - RNA, 19 nt, Artificial Sequence
  Description of Artificial Sequence: Synthetic oligonucleotide
  Antisense strand to SEQ ID NO: 1849529
uucuuaacaauacugacug

SEQ ID NO: 1849531 - RNA, 19 nt, Artificial Sequence
  Description of Artificial Sequence: Synthetic oligonucleotide
  Sense strand starting at position 969 of SEQ ID NO: 1564026
gaaauaucugccgggcaca

SEQ ID NO: 1849532 - RNA, 19 nt, Artificial Sequence
  Description of Artificial Sequence: Synthetic oligonucleotide
  Antisense strand to SEQ ID NO: 1849531
ugugcccggcagauauuuc

SEQ ID NO: 1849533 - RNA, 19 nt, Artificial Sequence
  Description of Artificial Sequence: Synthetic oligonucleotide
  Sense strand starting at position 1317 of SEQ ID NO: 1564026
ccaacuacucgggaaguua

SEQ ID NO: 1849534 - RNA, 19 nt, Artificial Sequence
  Description of Artificial Sequence: Synthetic oligonucleotide
  Antisense strand to SEQ ID NO: 1849533
uaacuucccgaguaguugg

SEQ ID NO: 1849535 - RNA, 19 nt, Artificial Sequence
  Description of Artificial Sequence: Synthetic oligonucleotide
  Sense strand starting at position 1517 of SEQ ID NO: 1564026
agggauggaugucaggaau

SEQ ID NO: 1849536 - RNA, 19 nt, Artificial Sequence
  Description of Artificial Sequence: Synthetic oligonucleotide
  Antisense strand to SEQ ID NO: 1849535
auuccugacauccaucccu

SEQ ID NO: 1849537 - RNA, 19 nt, Artificial Sequence
  Description of Artificial Sequence: Synthetic oligonucleotide
  Sense strand starting at position 1530 of SEQ ID NO: 1564026
aggaauccacauuguuaac

SEQ ID NO: 1849538 - RNA, 19 nt, Artificial Sequence
  Description of Artificial Sequence: Synthetic oligonucleotide
  Antisense strand to SEQ ID NO: 1849537
guuaacaauguggauuccu

SEQ ID NO: 1849539 - RNA, 19 nt, Artificial Sequence
  Description of Artificial Sequence: Synthetic oligonucleotide
  Sense strand starting at position 1589 of SEQ ID NO: 1564026
ggcccaugcuagguaucaa

SEQ ID NO: 1849540 - RNA, 19 nt, Artificial Sequence
  Description of Artificial Sequence: Synthetic oligonucleotide
  Antisense strand to SEQ ID NO: 1849539
uugauaccuagcaugggcc

SEQ ID NO: 1849541 - RNA, 19 nt, Artificial Sequence
  Description of Artificial Sequence: Synthetic oligonucleotide
  Sense strand starting at position 1590 of SEQ ID NO: 1564026
gcccaugcuagguaucaag

SEQ ID NO: 1849542 - RNA, 19 nt, Artificial Sequence
  Description of Artificial Sequence: Synthetic oligonucleotide
  Antisense strand to SEQ ID NO: 1849541
cuugauaccuagcaugggc

SEQ ID NO: 1849543 - RNA, 19 nt, Artificial Sequence
  Description of Artificial Sequence: Synthetic oligonucleotide
  Sense strand starting at position 1602 of SEQ ID NO: 1564026
uaucaagcgucaguaucaa

SEQ ID NO: 1849544 - RNA, 19 nt, Artificial Sequence
  Description of Artificial Sequence: Synthetic oligonucleotide
  Antisense strand to SEQ ID NO: 1849543
uugauacugacgcuugaua

SEQ ID NO: 1849545 - RNA, 19 nt, Artificial Sequence
  Description of Artificial Sequence: Synthetic oligonucleotide
  Sense strand starting at position 2365 of SEQ ID NO: 1564026
ucgauuggccaaugagagu

SEQ ID NO: 1849546 - RNA, 19 nt, Artificial Sequence
  Description of Artificial Sequence: Synthetic oligonucleotide
  Antisense strand to SEQ ID NO: 1849545
acucucauuggccaaucga

SEQ ID NO: 1849547 - RNA, 19 nt, Artificial Sequence
  Description of Artificial Sequence: Synthetic oligonucleotide
  Sense strand starting at position 2427 of SEQ ID NO: 1564026
cgguaauaggcggaaagcu

SEQ ID NO: 1849548 - RNA, 19 nt, Artificial Sequence
  Description of Artificial Sequence: Synthetic oligonucleotide
  Antisense strand to SEQ ID NO: 1849547
agcuuuccgccuauuaccg

SEQ ID NO: 1849549 - RNA, 19 nt, Artificial Sequence
  Description of Artificial Sequence: Synthetic oligonucleotide
  Sense strand starting at position 2545 of SEQ ID NO: 1564026
ggcacaggcauccggaaua

SEQ ID NO: 1849550 - RNA, 19 nt, Artificial Sequence
  Description of Artificial Sequence: Synthetic oligonucleotide
  Antisense strand to SEQ ID NO: 1849549
uauuccggaugccugugcc

SEQ ID NO: 1849551 - RNA, 19 nt, Artificial Sequence
  Description of Artificial Sequence: Synthetic oligonucleotide
  Sense strand starting at position 2681 of SEQ ID NO: 1564026
ugucauucgggcuccguua

SEQ ID NO: 1849552 - RNA, 19 nt, Artificial Sequence
  Description of Artificial Sequence: Synthetic oligonucleotide
  Antisense strand to SEQ ID NO: 1849551
uaacggagcccgaaugaca

SEQ ID NO: 1849553 - RNA, 19 nt, Artificial Sequence
  Description of Artificial Sequence: Synthetic oligonucleotide
  Sense strand starting at position 2755 of SEQ ID NO: 1564026
cugacuucguaaucuccua

SEQ ID NO: 1849554 - RNA, 19 nt, Artificial Sequence
  Description of Artificial Sequence: Synthetic oligonucleotide
  Antisense strand to SEQ ID NO: 1849553
uaggagauuacgaagucag

SEQ ID NO: 1849555 - RNA, 19 nt, Artificial Sequence
  Description of Artificial Sequence: Synthetic oligonucleotide
  Sense strand starting at position 2826 of SEQ ID NO: 1564026
uacgguguugaccggaaau

SEQ ID NO: 1849556 - RNA, 19 nt, Artificial Sequence
  Description of Artificial Sequence: Synthetic oligonucleotide
  Antisense strand to SEQ ID NO: 1849555
auuuccggucaacaccgua

SEQ ID NO: 1849557 - RNA, 19 nt, Artificial Sequence
  Description of Artificial Sequence: Synthetic oligonucleotide
  Sense strand starting at position 2968 of SEQ ID NO: 1564026
ccaguugugccggauugaa

SEQ ID NO: 1849558 - RNA, 19 nt, Artificial Sequence
  Description of Artificial Sequence: Synthetic oligonucleotide
  Antisense strand to SEQ ID NO: 1849557
uucaauccggcacaacugg

SEQ ID NO: 1849559 - RNA, 19 nt, Artificial Sequence
  Description of Artificial Sequence: Synthetic oligonucleotide
  Sense strand starting at position 3057 of SEQ ID NO: 1564026
gucugucuuggcuaguuaa

SEQ ID NO: 1849560 - RNA, 19 nt, Artificial Sequence
  Description of Artificial Sequence: Synthetic oligonucleotide
  Antisense strand to SEQ ID NO: 1849559
uuaacuagccaagacagac

SEQ ID NO: 1849561 - RNA, 19 nt, Artificial Sequence
  Description of Artificial Sequence: Synthetic oligonucleotide
  Sense strand starting at position 3078 of SEQ ID NO: 1564026
cgccuaugucgcuuauuga

SEQ ID NO: 1849562 - RNA, 19 nt, Artificial Sequence
  Description of Artificial Sequence: Synthetic oligonucleotide
  Antisense strand to SEQ ID NO: 1849561
ucaauaagcgacauaggcg

SEQ ID NO: 1849563 - RNA, 19 nt, Artificial Sequence
  Description of Artificial Sequence: Synthetic oligonucleotide
  Sense strand starting at position 3081 of SEQ ID NO: 1564026
cuaugucgcuuauugaaac

SEQ ID NO: 1849564 - RNA, 19 nt, Artificial Sequence
  Description of Artificial Sequence: Synthetic oligonucleotide
  Antisense strand to SEQ ID NO: 1849563
guuucaauaagcgacauag

SEQ ID NO: 1849565 - RNA, 19 nt, Artificial Sequence
  Description of Artificial Sequence: Synthetic oligonucleotide
  Sense strand starting at position 3155 of SEQ ID NO: 1564026
ugauuccuugguugguaga

SEQ ID NO: 1849566 - RNA, 19 nt, Artificial Sequence
  Description of Artificial Sequence: Synthetic oligonucleotide
  Antisense strand to SEQ ID NO: 1849565
ucuaccaaccaaggaauca

SEQ ID NO: 1849567 - RNA, 19 nt, Artificial Sequence
  Description of Artificial Sequence: Synthetic oligonucleotide
  Sense strand starting at position 3177 of SEQ ID NO: 1564026
ggcgaagacuaauauuucu

SEQ ID NO: 1849568 - RNA, 19 nt, Artificial Sequence
  Description of Artificial Sequence: Synthetic oligonucleotide
  Antisense strand to SEQ ID NO: 1849567
agaaauauuagucuucgcc

SEQ ID NO: 1849569 - RNA, 19 nt, Artificial Sequence
  Description of Artificial Sequence: Synthetic oligonucleotide
  Sense strand starting at position 3256 of SEQ ID NO: 1564026
agcucauuauuaucugaag

SEQ ID NO: 1849570 - RNA, 19 nt, Artificial Sequence
  Description of Artificial Sequence: Synthetic oligonucleotide
  Antisense strand to SEQ ID NO: 1849569
cuucagauaauaaugagcu

SEQ ID NO: 1849571 - RNA, 19 nt, Artificial Sequence
  Description of Artificial Sequence: Synthetic oligonucleotide
  Sense strand starting at position 3257 of SEQ ID NO: 1564026
gcucauuauuaucugaagu

SEQ ID NO: 1849572 - RNA, 19 nt, Artificial Sequence
  Description of Artificial Sequence: Synthetic oligonucleotide
  Antisense strand to SEQ ID NO: 1849571
acuucagauaauaaugagc

SEQ ID NO: 1849573 - RNA, 19 nt, Artificial Sequence
  Description of Artificial Sequence: Synthetic oligonucleotide
  Sense strand starting at position 3276 of SEQ ID NO: 1564026
guuuguuccuacuuaggaa

SEQ ID NO: 1849574 - RNA, 19 nt, Artificial Sequence
  Description of Artificial Sequence: Synthetic oligonucleotide
  Antisense strand to SEQ ID NO: 1849573
uuccuaaguaggaacaaac

SEQ ID NO: 1849575 - RNA, 19 nt, Artificial Sequence
  Description of Artificial Sequence: Synthetic oligonucleotide
  Sense strand starting at position 3403 of SEQ ID NO: 1564026
uggcgaauuguggaugauu

SEQ ID NO: 1849576 - RNA, 19 nt, Artificial Sequence
  Description of Artificial Sequence: Synthetic oligonucleotide
  Antisense strand to SEQ ID NO: 1849575
aaucauccacaauucgcca

SEQ ID NO: 1849577 - RNA, 19 nt, Artificial Sequence
  Description of Artificial Sequence: Synthetic oligonucleotide
  Sense strand starting at position 3536 of SEQ ID NO: 1564026
cuaucuugcccacaaggga

SEQ ID NO: 1849578 - RNA, 19 nt, Artificial Sequence
  Description of Artificial Sequence: Synthetic oligonucleotide
  Antisense strand to SEQ ID NO: 1849577
ucccuugugggcaagauag

SEQ ID NO: 1849579 - RNA, 19 nt, Artificial Sequence
  Description of Artificial Sequence: Synthetic oligonucleotide
  Sense strand starting at position 3549 of SEQ ID NO: 1564026
aagggaggcugcucugaaa

SEQ ID NO: 1849580 - RNA, 19 nt, Artificial Sequence
  Description of Artificial Sequence: Synthetic oligonucleotide
  Antisense strand to SEQ ID NO: 1849579
uuucagagcagccucccuu

SEQ ID NO: 1849581 - RNA, 19 nt, Artificial Sequence
  Description of Artificial Sequence: Synthetic oligonucleotide
  Sense strand starting at position 3638 of SEQ ID NO: 1564026
ggcuccuguaucugggauu

SEQ ID NO: 1849582 - RNA, 19 nt, Artificial Sequence
  Description of Artificial Sequence: Synthetic oligonucleotide
  Antisense strand to SEQ ID NO: 1849581
aaucccagauacaggagcc

SEQ ID NO: 1849583 - RNA, 19 nt, Artificial Sequence
  Description of Artificial Sequence: Synthetic oligonucleotide
  Sense strand starting at position 3709 of SEQ ID NO: 1564026
uggagcuccucuguggaaa

SEQ ID NO: 1849584 - RNA, 19 nt, Artificial Sequence
  Description of Artificial Sequence: Synthetic oligonucleotide
  Antisense strand to SEQ ID NO: 1849583
uuuccacagaggagcucca

SEQ ID NO: 1849585 - RNA, 19 nt, Artificial Sequence
  Description of Artificial Sequence: Synthetic oligonucleotide
  Sense strand starting at position 3710 of SEQ ID NO: 1564026
ggagcuccucuguggaaau

SEQ ID NO: 1849586 - RNA, 19 nt, Artificial Sequence
  Description of Artificial Sequence: Synthetic oligonucleotide
  Antisense strand to SEQ ID NO: 1849585
auuuccacagaggagcucc

SEQ ID NO: 1849587 - RNA, 19 nt, Artificial Sequence
  Description of Artificial Sequence: Synthetic oligonucleotide
  Sense strand starting at position 14 of SEQ ID NO: 1564027
aggcuuguaauagauguca

SEQ ID NO: 1849588 - RNA, 19 nt, Artificial Sequence
  Description of Artificial Sequence: Synthetic oligonucleotide
  Antisense strand to SEQ ID NO: 1849587
ugacaucuauuacaagccu

SEQ ID NO: 1849589 - RNA, 19 nt, Artificial Sequence
  Description of Artificial Sequence: Synthetic oligonucleotide
  Sense strand starting at position 25 of SEQ ID NO: 1564027
agaugucaguuaucaauaa

SEQ ID NO: 1849590 - RNA, 19 nt, Artificial Sequence
  Description of Artificial Sequence: Synthetic oligonucleotide
  Antisense strand to SEQ ID NO: 1849589
uuauugauaacugacaucu

SEQ ID NO: 1849591 - RNA, 19 nt, Artificial Sequence
  Description of Artificial Sequence: Synthetic oligonucleotide
  Sense strand starting at position 110 of SEQ ID NO: 1564027
cugauaauaaggugugauu

SEQ ID NO: 1849592 - RNA, 19 nt, Artificial Sequence
  Description of Artificial Sequence: Synthetic oligonucleotide
  Antisense strand to SEQ ID NO: 1849591
aaucacaccuuauuaucag

SEQ ID NO: 1849593 - RNA, 19 nt, Artificial Sequence
  Description of Artificial Sequence: Synthetic oligonucleotide
  Sense strand starting at position 123 of SEQ ID NO: 1564027
gugauuugcagccagagca

SEQ ID NO: 1849594 - RNA, 19 nt, Artificial Sequence
  Description of Artificial Sequence: Synthetic oligonucleotide
  Antisense strand to SEQ ID NO: 1849593
ugcucuggcugcaaaucac

SEQ ID NO: 1849595 - RNA, 19 nt, Artificial Sequence
  Description of Artificial Sequence: Synthetic oligonucleotide
  Sense strand starting at position 154 of SEQ ID NO: 1564027
augauagauccucacugca

SEQ ID NO: 1849596 - RNA, 19 nt, Artificial Sequence
  Description of Artificial Sequence: Synthetic oligonucleotide
  Antisense strand to SEQ ID NO: 1849595
ugcagugaggaucuaucau

SEQ ID NO: 1849597 - RNA, 19 nt, Artificial Sequence
  Description of Artificial Sequence: Synthetic oligonucleotide
  Sense strand starting at position 222 of SEQ ID NO: 1564027
auuagauacuaugucauca

SEQ ID NO: 1849598 - RNA, 19 nt, Artificial Sequence
  Description of Artificial Sequence: Synthetic oligonucleotide
  Antisense strand to SEQ ID NO: 1849597
ugaugacauaguaucuaau

SEQ ID NO: 1849599 - RNA, 19 nt, Artificial Sequence
  Description of Artificial Sequence: Synthetic oligonucleotide
  Sense strand starting at position 247 of SEQ ID NO: 1564027
uagaguaauccaugggauu

SEQ ID NO: 1849600 - RNA, 19 nt, Artificial Sequence
  Description of Artificial Sequence: Synthetic oligonucleotide
  Antisense strand to SEQ ID NO: 1849599
aaucccauggauuacucua

SEQ ID NO: 1849601 - RNA, 19 nt, Artificial Sequence
  Description of Artificial Sequence: Synthetic oligonucleotide
  Sense strand starting at position 250 of SEQ ID NO: 1564027
aguaauccaugggauuuaa

SEQ ID NO: 1849602 - RNA, 19 nt, Artificial Sequence
  Description of Artificial Sequence: Synthetic oligonucleotide
  Antisense strand to SEQ ID NO: 1849601
uuaaaucccauggauuacu

SEQ ID NO: 1849603 - RNA, 19 nt, Artificial Sequence
  Description of Artificial Sequence: Synthetic oligonucleotide
  Sense strand starting at position 295 of SEQ ID NO: 1564027
gcauuagguggucaguauu

SEQ ID NO: 1849604 - RNA, 19 nt, Artificial Sequence
  Description of Artificial Sequence: Synthetic oligonucleotide
  Antisense strand to SEQ ID NO: 1849603
aauacugaccaccuaaugc

SEQ ID NO: 1849605 - RNA, 19 nt, Artificial Sequence
  Description of Artificial Sequence: Synthetic oligonucleotide
  Sense strand starting at position 298 of SEQ ID NO: 1564027
uuagguggucaguauuauu

SEQ ID NO: 1849606 - RNA, 19 nt, Artificial Sequence
  Description of Artificial Sequence: Synthetic oligonucleotide
  Antisense strand to SEQ ID NO: 1849605
aauaauacugaccaccuaa

SEQ ID NO: 1849607 - RNA, 19 nt, Artificial Sequence
  Description of Artificial Sequence: Synthetic oligonucleotide
  Sense strand starting at position 623 of SEQ ID NO: 1564027
cagucaguauuguuaagaa

SEQ ID NO: 1849608 - RNA, 19 nt, Artificial Sequence
  Description of Artificial Sequence: Synthetic oligonucleotide
  Antisense strand to SEQ ID NO: 1849607
uucuuaacaauacugacug

SEQ ID NO: 1849609 - RNA, 19 nt, Artificial Sequence
  Description of Artificial Sequence: Synthetic oligonucleotide
  Sense strand starting at position 643 of SEQ ID NO: 1564027
gaaauaucugccgggcaca

SEQ ID NO: 1849610 - RNA, 19 nt, Artificial Sequence
  Description of Artificial Sequence: Synthetic oligonucleotide
  Antisense strand to SEQ ID NO: 1849609
ugugcccggcagauauuuc

SEQ ID NO: 1849611 - RNA, 19 nt, Artificial Sequence
  Description of Artificial Sequence: Synthetic oligonucleotide
  Sense strand starting at position 991 of SEQ ID NO: 1564027
ccaacuacucgggaaguua

SEQ ID NO: 1849612 - RNA, 19 nt, Artificial Sequence
  Description of Artificial Sequence: Synthetic oligonucleotide
  Antisense strand to SEQ ID NO: 1849611
uaacuucccgaguaguugg

SEQ ID NO: 1849613 - RNA, 19 nt, Artificial Sequence
  Description of Artificial Sequence: Synthetic oligonucleotide
  Sense strand starting at position 1191 of SEQ ID NO: 1564027
agggauggaugucaggaau

SEQ ID NO: 1849614 - RNA, 19 nt, Artificial Sequence
  Description of Artificial Sequence: Synthetic oligonucleotide
  Antisense strand to SEQ ID NO: 1849613
auuccugacauccaucccu

SEQ ID NO: 1849615 - RNA, 19 nt, Artificial Sequence
  Description of Artificial Sequence: Synthetic oligonucleotide
  Sense strand starting at position 1204 of SEQ ID NO: 1564027
aggaauccacauuguuaac

SEQ ID NO: 1849616 - RNA, 19 nt, Artificial Sequence
  Description of Artificial Sequence: Synthetic oligonucleotide
  Antisense strand to SEQ ID NO: 1849615
guuaacaauguggauuccu

SEQ ID NO: 1849617 - RNA, 19 nt, Artificial Sequence
  Description of Artificial Sequence: Synthetic oligonucleotide
  Sense strand starting at position 1263 of SEQ ID NO: 1564027
ggcccaugcuagguaucaa

SEQ ID NO: 1849618 - RNA, 19 nt, Artificial Sequence
  Description of Artificial Sequence: Synthetic oligonucleotide
  Antisense strand to SEQ ID NO: 1849617
uugauaccuagcaugggcc

SEQ ID NO: 1849619 - RNA, 19 nt, Artificial Sequence
  Description of Artificial Sequence: Synthetic oligonucleotide
  Sense strand starting at position 1264 of SEQ ID NO: 1564027
gcccaugcuagguaucaag

SEQ ID NO: 1849620 - RNA, 19 nt, Artificial Sequence
  Description of Artificial Sequence: Synthetic oligonucleotide
  Antisense strand to SEQ ID NO: 1849619
cuugauaccuagcaugggc

SEQ ID NO: 1849621 - RNA, 19 nt, Artificial Sequence
  Description of Artificial Sequence: Synthetic oligonucleotide
  Sense strand starting at position 1276 of SEQ ID NO: 1564027
uaucaagcgucaguaucaa

SEQ ID NO: 1849622 - RNA, 19 nt, Artificial Sequence
  Description of Artificial Sequence: Synthetic oligonucleotide
  Antisense strand to SEQ ID NO: 1849621
uugauacugacgcuugaua

SEQ ID NO: 1849623 - RNA, 19 nt, Artificial Sequence
  Description of Artificial Sequence: Synthetic oligonucleotide
  Sense strand starting at position 2039 of SEQ ID NO: 1564027
ucgauuggccaaugagagu

SEQ ID NO: 1849624 - RNA, 19 nt, Artificial Sequence
  Description of Artificial Sequence: Synthetic oligonucleotide
  Antisense strand to SEQ ID NO: 1849623
acucucauuggccaaucga

SEQ ID NO: 1849625 - RNA, 19 nt, Artificial Sequence
  Description of Artificial Sequence: Synthetic oligonucleotide
  Sense strand starting at position 2101 of SEQ ID NO: 1564027
cgguaauaggcggaaagcu

SEQ ID NO: 1849626 - RNA, 19 nt, Artificial Sequence
  Description of Artificial Sequence: Synthetic oligonucleotide
  Antisense strand to SEQ ID NO: 1849625
agcuuuccgccuauuaccg

SEQ ID NO: 1849627 - RNA, 19 nt, Artificial Sequence
  Description of Artificial Sequence: Synthetic oligonucleotide
  Sense strand starting at position 2219 of SEQ ID NO: 1564027
ggcacaggcauccggaaua

SEQ ID NO: 1849628 - RNA, 19 nt, Artificial Sequence
  Description of Artificial Sequence: Synthetic oligonucleotide
  Antisense strand to SEQ ID NO: 1849627
uauuccggaugccugugcc

SEQ ID NO: 1849629 - RNA, 19 nt, Artificial Sequence
  Description of Artificial Sequence: Synthetic oligonucleotide
  Sense strand starting at position 2355 of SEQ ID NO: 1564027
ugucauucgggcuccguua

SEQ ID NO: 1849630 - RNA, 19 nt, Artificial Sequence
  Description of Artificial Sequence: Synthetic oligonucleotide
  Antisense strand to SEQ ID NO: 1849629
uaacggagcccgaaugaca

SEQ ID NO: 1849631 - RNA, 19 nt, Artificial Sequence
  Description of Artificial Sequence: Synthetic oligonucleotide
  Sense strand starting at position 2429 of SEQ ID NO: 1564027
cugacuucguaaucuccua

SEQ ID NO: 1849632 - RNA, 19 nt, Artificial Sequence
  Description of Artificial Sequence: Synthetic oligonucleotide
  Antisense strand to SEQ ID NO: 1849631
uaggagauuacgaagucag

SEQ ID NO: 1849633 - RNA, 19 nt, Artificial Sequence
  Description of Artificial Sequence: Synthetic oligonucleotide
  Sense strand starting at position 2500 of SEQ ID NO: 1564027
uacgguguugaccggaaau

SEQ ID NO: 1849634 - RNA, 19 nt, Artificial Sequence
  Description of Artificial Sequence: Synthetic oligonucleotide
  Antisense strand to SEQ ID NO: 1849633
auuuccggucaacaccgua

SEQ ID NO: 1849635 - RNA, 19 nt, Artificial Sequence
  Description of Artificial Sequence: Synthetic oligonucleotide
  Sense strand starting at position 2642 of SEQ ID NO: 1564027
ccaguugugccggauugaa

SEQ ID NO: 1849636 - RNA, 19 nt, Artificial Sequence
  Description of Artificial Sequence: Synthetic oligonucleotide
  Antisense strand to SEQ ID NO: 1849635
uucaauccggcacaacugg

SEQ ID NO: 1849637 - RNA, 19 nt, Artificial Sequence
  Description of Artificial Sequence: Synthetic oligonucleotide
  Sense strand starting at position 2752 of SEQ ID NO: 1564027
cgccuaugucgcuuauuga

SEQ ID NO: 1849638 - RNA, 19 nt, Artificial Sequence
  Description of Artificial Sequence: Synthetic oligonucleotide
  Antisense strand to SEQ ID NO: 1849637
ucaauaagcgacauaggcg

SEQ ID NO: 1849639 - RNA, 19 nt, Artificial Sequence
  Description of Artificial Sequence: Synthetic oligonucleotide
  Sense strand starting at position 2755 of SEQ ID NO: 1564027
cuaugucgcuuauugaaac

SEQ ID NO: 1849640 - RNA, 19 nt, Artificial Sequence
  Description of Artificial Sequence: Synthetic oligonucleotide
  Antisense strand to SEQ ID NO: 1849639
guuucaauaagcgacauag

SEQ ID NO: 1849641 - RNA, 19 nt, Artificial Sequence
  Description of Artificial Sequence: Synthetic oligonucleotide
  Sense strand starting at position 2829 of SEQ ID NO: 1564027
ugauuccuugguugguaga

SEQ ID NO: 1849642 - RNA, 19 nt, Artificial Sequence
  Description of Artificial Sequence: Synthetic oligonucleotide
  Antisense strand to SEQ ID NO: 1849641
ucuaccaaccaaggaauca

SEQ ID NO: 1849643 - RNA, 19 nt, Artificial Sequence
  Description of Artificial Sequence: Synthetic oligonucleotide
  Sense strand starting at position 2851 of SEQ ID NO: 1564027
ggcgaagacuaauauuucu

SEQ ID NO: 1849644 - RNA, 19 nt, Artificial Sequence
  Description of Artificial Sequence: Synthetic oligonucleotide
  Antisense strand to SEQ ID NO: 1849643
agaaauauuagucuucgcc

SEQ ID NO: 1849645 - RNA, 19 nt, Artificial Sequence
  Description of Artificial Sequence: Synthetic oligonucleotide
  Sense strand starting at position 2930 of SEQ ID NO: 1564027
agcucauuauuaucugaag

SEQ ID NO: 1849646 - RNA, 19 nt, Artificial Sequence
  Description of Artificial Sequence: Synthetic oligonucleotide
  Antisense strand to SEQ ID NO: 1849645
cuucagauaauaaugagcu

SEQ ID NO: 1849647 - RNA, 19 nt, Artificial Sequence
  Description of Artificial Sequence: Synthetic oligonucleotide
  Sense strand starting at position 2931 of SEQ ID NO: 1564027
gcucauuauuaucugaagu

SEQ ID NO: 1849648 - RNA, 19 nt, Artificial Sequence
  Description of Artificial Sequence: Synthetic oligonucleotide
  Antisense strand to SEQ ID NO: 1849647
acuucagauaauaaugagc

SEQ ID NO: 1849649 - RNA, 19 nt, Artificial Sequence
  Description of Artificial Sequence: Synthetic oligonucleotide
  Sense strand starting at position 2950 of SEQ ID NO: 1564027
guuuguuccuacuuaggaa

SEQ ID NO: 1849650 - RNA, 19 nt, Artificial Sequence
  Description of Artificial Sequence: Synthetic oligonucleotide
  Antisense strand to SEQ ID NO: 1849649
uuccuaaguaggaacaaac

SEQ ID NO: 1849651 - RNA, 19 nt, Artificial Sequence
  Description of Artificial Sequence: Synthetic oligonucleotide
  Sense strand starting at position 3077 of SEQ ID NO: 1564027
uggcgaauuguggaugauu

SEQ ID NO: 1849652 - RNA, 19 nt, Artificial Sequence
  Description of Artificial Sequence: Synthetic oligonucleotide
  Antisense strand to SEQ ID NO: 1849651
aaucauccacaauucgcca

SEQ ID NO: 1849653 - RNA, 19 nt, Artificial Sequence
  Description of Artificial Sequence: Synthetic oligonucleotide
  Sense strand starting at position 3210 of SEQ ID NO: 1564027
cuaucuugcccacaaggga

SEQ ID NO: 1849654 - RNA, 19 nt, Artificial Sequence
  Description of Artificial Sequence: Synthetic oligonucleotide
  Antisense strand to SEQ ID NO: 1849653
ucccuugugggcaagauag

SEQ ID NO: 1849655 - RNA, 19 nt, Artificial Sequence
  Description of Artificial Sequence: Synthetic oligonucleotide
  Sense strand starting at position 3223 of SEQ ID NO: 1564027
aagggaggcugcucugaaa

SEQ ID NO: 1849656 - RNA, 19 nt, Artificial Sequence
  Description of Artificial Sequence: Synthetic oligonucleotide
  Antisense strand to SEQ ID NO: 1849655
uuucagagcagccucccuu

SEQ ID NO: 1849657 - RNA, 19 nt, Artificial Sequence
  Description of Artificial Sequence: Synthetic oligonucleotide
  Sense strand starting at position 3312 of SEQ ID NO: 1564027
ggcuccuguaucugggauu

SEQ ID NO: 1849658 - RNA, 19 nt, Artificial Sequence
  Description of Artificial Sequence: Synthetic oligonucleotide
  Antisense strand to SEQ ID NO: 1849657
aaucccagauacaggagcc

SEQ ID NO: 1849659 - RNA, 19 nt, Artificial Sequence
  Description of Artificial Sequence: Synthetic oligonucleotide
  Sense strand starting at position 3383 of SEQ ID NO: 1564027
uggagcuccucuguggaaa

SEQ ID NO: 1849660 - RNA, 19 nt, Artificial Sequence
  Description of Artificial Sequence: Synthetic oligonucleotide
  Antisense strand to SEQ ID NO: 1849659
uuuccacagaggagcucca

SEQ ID NO: 1849661 - RNA, 19 nt, Artificial Sequence
  Description of Artificial Sequence: Synthetic oligonucleotide
  Sense strand starting at position 3384 of SEQ ID NO: 1564027
ggagcuccucuguggaaau

SEQ ID NO: 1849662 - RNA, 19 nt, Artificial Sequence
  Description of Artificial Sequence: Synthetic oligonucleotide
  Antisense strand to SEQ ID NO: 1849661
auuuccacagaggagcucc

SEQ ID NO: 1849663 - RNA, 19 nt, Artificial Sequence
  Description of Artificial Sequence: Synthetic oligonucleotide
  Sense strand starting at position 3821 of SEQ ID NO: 1564027
gccugaucaugggucacua

SEQ ID NO: 1849664 - RNA, 19 nt, Artificial Sequence
  Description of Artificial Sequence: Synthetic oligonucleotide
  Antisense strand to SEQ ID NO: 1849663
uagugacccaugaucaggc

SEQ ID NO: 1849665 - RNA, 19 nt, Artificial Sequence
  Description of Artificial Sequence: Synthetic oligonucleotide
  Sense strand starting at position 3921 of SEQ ID NO: 1564027
ccggcuaauuauuuaugua

SEQ ID NO: 1849666 - RNA, 19 nt, Artificial Sequence
  Description of Artificial Sequence: Synthetic oligonucleotide
  Antisense strand to SEQ ID NO: 1849665
uacauaaauaauuagccgg

SEQ ID NO: 1849667 - RNA, 19 nt, Artificial Sequence
  Description of Artificial Sequence: Synthetic oligonucleotide
  Sense strand starting at position 213 of SEQ ID NO: 1564028
aucaaugaucauugccagu

SEQ ID NO: 1849668 - RNA, 19 nt, Artificial Sequence
  Description of Artificial Sequence: Synthetic oligonucleotide
  Antisense strand to SEQ ID NO: 1849667
acuggcaaugaucauugau

SEQ ID NO: 1849669 - RNA, 19 nt, Artificial Sequence
  Description of Artificial Sequence: Synthetic oligonucleotide
  Sense strand starting at position 576 of SEQ ID NO: 1564028
aggcuuguaauagauguca

SEQ ID NO: 1849670 - RNA, 19 nt, Artificial Sequence
  Description of Artificial Sequence: Synthetic oligonucleotide
  Antisense strand to SEQ ID NO: 1849669
ugacaucuauuacaagccu

SEQ ID NO: 1849671 - RNA, 19 nt, Artificial Sequence
  Description of Artificial Sequence: Synthetic oligonucleotide
  Sense strand starting at position 587 of SEQ ID NO: 1564028
agaugucaguuaucaauaa

SEQ ID NO: 1849672 - RNA, 19 nt, Artificial Sequence
  Description of Artificial Sequence: Synthetic oligonucleotide
  Antisense strand to SEQ ID NO: 1849671
uuauugauaacugacaucu

SEQ ID NO: 1849673 - RNA, 19 nt, Artificial Sequence
  Description of Artificial Sequence: Synthetic oligonucleotide
  Sense strand starting at position 672 of SEQ ID NO: 1564028
cugauaauaaggugugauu

SEQ ID NO: 1849674 - RNA, 19 nt, Artificial Sequence
  Description of Artificial Sequence: Synthetic oligonucleotide
  Antisense strand to SEQ ID NO: 1849673
aaucacaccuuauuaucag

SEQ ID NO: 1849675 - RNA, 19 nt, Artificial Sequence
  Description of Artificial Sequence: Synthetic oligonucleotide
  Sense strand starting at position 685 of SEQ ID NO: 1564028
gugauuugcagccagagca

SEQ ID NO: 1849676 - RNA, 19 nt, Artificial Sequence
  Description of Artificial Sequence: Synthetic oligonucleotide
  Antisense strand to SEQ ID NO: 1849675
ugcucuggcugcaaaucac

SEQ ID NO: 1849677 - RNA, 19 nt, Artificial Sequence
  Description of Artificial Sequence: Synthetic oligonucleotide
  Sense strand starting at position 716 of SEQ ID NO: 1564028
augauagauccucacugca

SEQ ID NO: 1849678 - RNA, 19 nt, Artificial Sequence
  Description of Artificial Sequence: Synthetic oligonucleotide
  Antisense strand to SEQ ID NO: 1849677
ugcagugaggaucuaucau

SEQ ID NO: 1849679 - RNA, 19 nt, Artificial Sequence
  Description of Artificial Sequence: Synthetic oligonucleotide
  Sense strand starting at position 784 of SEQ ID NO: 1564028
auuagauacuaugucauca

SEQ ID NO: 1849680 - RNA, 19 nt, Artificial Sequence
  Description of Artificial Sequence: Synthetic oligonucleotide
  Antisense strand to SEQ ID NO: 1849679
ugaugacauaguaucuaau

SEQ ID NO: 1849681 - RNA, 19 nt, Artificial Sequence
  Description of Artificial Sequence: Synthetic oligonucleotide
  Sense strand starting at position 809 of SEQ ID NO: 1564028
uagaguaauccaugggauu

SEQ ID NO: 1849682 - RNA, 19 nt, Artificial Sequence
  Description of Artificial Sequence: Synthetic oligonucleotide
  Antisense strand to SEQ ID NO: 1849681
aaucccauggauuacucua

SEQ ID NO: 1849683 - RNA, 19 nt, Artificial Sequence
  Description of Artificial Sequence: Synthetic oligonucleotide
  Sense strand starting at position 812 of SEQ ID NO: 1564028
aguaauccaugggauuuaa

SEQ ID NO: 1849684 - RNA, 19 nt, Artificial Sequence
  Description of Artificial Sequence: Synthetic oligonucleotide
  Antisense strand to SEQ ID NO: 1849683
uuaaaucccauggauuacu

SEQ ID NO: 1849685 - RNA, 19 nt, Artificial Sequence
  Description of Artificial Sequence: Synthetic oligonucleotide
  Sense strand starting at position 857 of SEQ ID NO: 1564028
gcauuagguggucaguauu

SEQ ID NO: 1849686 - RNA, 19 nt, Artificial Sequence
  Description of Artificial Sequence: Synthetic oligonucleotide
  Antisense strand to SEQ ID NO: 1849685
aauacugaccaccuaaugc

SEQ ID NO: 1849687 - RNA, 19 nt, Artificial Sequence
  Description of Artificial Sequence: Synthetic oligonucleotide
  Sense strand starting at position 860 of SEQ ID NO: 1564028
uuagguggucaguauuauu

SEQ ID NO: 1849688 - RNA, 19 nt, Artificial Sequence
  Description of Artificial Sequence: Synthetic oligonucleotide
  Antisense strand to SEQ ID NO: 1849687
aauaauacugaccaccuaa

SEQ ID NO: 1849689 - RNA, 19 nt, Artificial Sequence
  Description of Artificial Sequence: Synthetic oligonucleotide
  Sense strand starting at position 1185 of SEQ ID NO: 1564028
cagucaguauuguuaagaa

SEQ ID NO: 1849690 - RNA, 19 nt, Artificial Sequence
  Description of Artificial Sequence: Synthetic oligonucleotide
  Antisense strand to SEQ ID NO: 1849689
uucuuaacaauacugacug

SEQ ID NO: 1849691 - RNA, 19 nt, Artificial Sequence
  Description of Artificial Sequence: Synthetic oligonucleotide
  Sense strand starting at position 1205 of SEQ ID NO: 1564028
gaaauaucugccgggcaca

SEQ ID NO: 1849692 - RNA, 19 nt, Artificial Sequence
  Description of Artificial Sequence: Synthetic oligonucleotide
  Antisense strand to SEQ ID NO: 1849691
ugugcccggcagauauuuc

SEQ ID NO: 1849693 - RNA, 19 nt, Artificial Sequence
  Description of Artificial Sequence: Synthetic oligonucleotide
  Sense strand starting at position 1553 of SEQ ID NO: 1564028
ccaacuacucgggaaguua

SEQ ID NO: 1849694 - RNA, 19 nt, Artificial Sequence
  Description of Artificial Sequence: Synthetic oligonucleotide
  Antisense strand to SEQ ID NO: 1849693
uaacuucccgaguaguugg

SEQ ID NO: 1849695 - RNA, 19 nt, Artificial Sequence
  Description of Artificial Sequence: Synthetic oligonucleotide
  Sense strand starting at position 1753 of SEQ ID NO: 1564028
agggauggaugucaggaau

SEQ ID NO: 1849696 - RNA, 19 nt, Artificial Sequence
  Description of Artificial Sequence: Synthetic oligonucleotide
  Antisense strand to SEQ ID NO: 1849695
auuccugacauccaucccu

SEQ ID NO: 1849697 - RNA, 19 nt, Artificial Sequence
  Description of Artificial Sequence: Synthetic oligonucleotide
  Sense strand starting at position 1766 of SEQ ID NO: 1564028
aggaauccacauuguuaac

SEQ ID NO: 1849698 - RNA, 19 nt, Artificial Sequence
  Description of Artificial Sequence: Synthetic oligonucleotide
  Antisense strand to SEQ ID NO: 1849697
guuaacaauguggauuccu

SEQ ID NO: 1849699 - RNA, 19 nt, Artificial Sequence
  Description of Artificial Sequence: Synthetic oligonucleotide
  Sense strand starting at position 1825 of SEQ ID NO: 1564028
ggcccaugcuagguaucaa

SEQ ID NO: 1849700 - RNA, 19 nt, Artificial Sequence
  Description of Artificial Sequence: Synthetic oligonucleotide
  Antisense strand to SEQ ID NO: 1849699
uugauaccuagcaugggcc

SEQ ID NO: 1849701 - RNA, 19 nt, Artificial Sequence
  Description of Artificial Sequence: Synthetic oligonucleotide
  Sense strand starting at position 1826 of SEQ ID NO: 1564028
gcccaugcuagguaucaag

SEQ ID NO: 1849702 - RNA, 19 nt, Artificial Sequence
  Description of Artificial Sequence: Synthetic oligonucleotide
  Antisense strand to SEQ ID NO: 1849701
cuugauaccuagcaugggc

SEQ ID NO: 1849703 - RNA, 19 nt, Artificial Sequence
  Description of Artificial Sequence: Synthetic oligonucleotide
  Sense strand starting at position 1838 of SEQ ID NO: 1564028
uaucaagcgucaguaucaa

SEQ ID NO: 1849704 - RNA, 19 nt, Artificial Sequence
  Description of Artificial Sequence: Synthetic oligonucleotide
  Antisense strand to SEQ ID NO: 1849703
uugauacugacgcuugaua

SEQ ID NO: 1849705 - RNA, 19 nt, Artificial Sequence
  Description of Artificial Sequence: Synthetic oligonucleotide
  Sense strand starting at position 2601 of SEQ ID NO: 1564028
ucgauuggccaaugagagu

SEQ ID NO: 1849706 - RNA, 19 nt, Artificial Sequence
  Description of Artificial Sequence: Synthetic oligonucleotide
  Antisense strand to SEQ ID NO: 1849705
acucucauuggccaaucga

SEQ ID NO: 1849707 - RNA, 19 nt, Artificial Sequence
  Description of Artificial Sequence: Synthetic oligonucleotide
  Sense strand starting at position 2663 of SEQ ID NO: 1564028
cgguaauaggcggaaagcu

SEQ ID NO: 1849708 - RNA, 19 nt, Artificial Sequence
  Description of Artificial Sequence: Synthetic oligonucleotide
  Antisense strand to SEQ ID NO: 1849707
agcuuuccgccuauuaccg

SEQ ID NO: 1849709 - RNA, 19 nt, Artificial Sequence
  Description of Artificial Sequence: Synthetic oligonucleotide
  Sense strand starting at position 2781 of SEQ ID NO: 1564028
ggcacaggcauccggaaua

SEQ ID NO: 1849710 - RNA, 19 nt, Artificial Sequence
  Description of Artificial Sequence: Synthetic oligonucleotide
  Antisense strand to SEQ ID NO: 1849709
uauuccggaugccugugcc

SEQ ID NO: 1849711 - RNA, 19 nt, Artificial Sequence
  Description of Artificial Sequence: Synthetic oligonucleotide
  Sense strand starting at position 2917 of SEQ ID NO: 1564028
ugucauucgggcuccguua

SEQ ID NO: 1849712 - RNA, 19 nt, Artificial Sequence
  Description of Artificial Sequence: Synthetic oligonucleotide
  Antisense strand to SEQ ID NO: 1849711
uaacggagcccgaaugaca

SEQ ID NO: 1849713 - RNA, 19 nt, Artificial Sequence
  Description of Artificial Sequence: Synthetic oligonucleotide
  Sense strand starting at position 2991 of SEQ ID NO: 1564028
cugacuucguaaucuccua

SEQ ID NO: 1849714 - RNA, 19 nt, Artificial Sequence
  Description of Artificial Sequence: Synthetic oligonucleotide
  Antisense strand to SEQ ID NO: 1849713
uaggagauuacgaagucag

SEQ ID NO: 1849715 - RNA, 19 nt, Artificial Sequence
  Description of Artificial Sequence: Synthetic oligonucleotide
  Sense strand starting at position 3062 of SEQ ID NO: 1564028
uacgguguugaccggaaau

SEQ ID NO: 1849716 - RNA, 19 nt, Artificial Sequence
  Description of Artificial Sequence: Synthetic oligonucleotide
  Antisense strand to SEQ ID NO: 1849715
auuuccggucaacaccgua

SEQ ID NO: 1849717 - RNA, 19 nt, Artificial Sequence
  Description of Artificial Sequence: Synthetic oligonucleotide
  Sense strand starting at position 3204 of SEQ ID NO: 1564028
ccaguugugccggauugaa

SEQ ID NO: 1849718 - RNA, 19 nt, Artificial Sequence
  Description of Artificial Sequence: Synthetic oligonucleotide
  Antisense strand to SEQ ID NO: 1849717
uucaauccggcacaacugg

SEQ ID NO: 1849719 - RNA, 19 nt, Artificial Sequence
  Description of Artificial Sequence: Synthetic oligonucleotide
  Sense strand starting at position 3293 of SEQ ID NO: 1564028
gucugucuuggcuaguuaa

SEQ ID NO: 1849720 - RNA, 19 nt, Artificial Sequence
  Description of Artificial Sequence: Synthetic oligonucleotide
  Antisense strand to SEQ ID NO: 1849719
uuaacuagccaagacagac

SEQ ID NO: 1849721 - RNA, 19 nt, Artificial Sequence
  Description of Artificial Sequence: Synthetic oligonucleotide
  Sense strand starting at position 3314 of SEQ ID NO: 1564028
cgccuaugucgcuuauuga

SEQ ID NO: 1849722 - RNA, 19 nt, Artificial Sequence
  Description of Artificial Sequence: Synthetic oligonucleotide
  Antisense strand to SEQ ID NO: 1849721
ucaauaagcgacauaggcg

SEQ ID NO: 1849723 - RNA, 19 nt, Artificial Sequence
  Description of Artificial Sequence: Synthetic oligonucleotide
  Sense strand starting at position 3317 of SEQ ID NO: 1564028
cuaugucgcuuauugaaac

SEQ ID NO: 1849724 - RNA, 19 nt, Artificial Sequence
  Description of Artificial Sequence: Synthetic oligonucleotide
  Antisense strand to SEQ ID NO: 1849723
guuucaauaagcgacauag

SEQ ID NO: 1849725 - RNA, 19 nt, Artificial Sequence
  Description of Artificial Sequence: Synthetic oligonucleotide
  Sense strand starting at position 3391 of SEQ ID NO: 1564028
ugauuccuugguugguaga

SEQ ID NO: 1849726 - RNA, 19 nt, Artificial Sequence
  Description of Artificial Sequence: Synthetic oligonucleotide
  Antisense strand to SEQ ID NO: 1849725
ucuaccaaccaaggaauca

SEQ ID NO: 1849727 - RNA, 19 nt, Artificial Sequence
  Description of Artificial Sequence: Synthetic oligonucleotide
  Sense strand starting at position 3413 of SEQ ID NO: 1564028
ggcgaagacuaauauuucu

SEQ ID NO: 1849728 - RNA, 19 nt, Artificial Sequence
  Description of Artificial Sequence: Synthetic oligonucleotide
  Antisense strand to SEQ ID NO: 1849727
agaaauauuagucuucgcc

SEQ ID NO: 1849729 - RNA, 19 nt, Artificial Sequence
  Description of Artificial Sequence: Synthetic oligonucleotide
  Sense strand starting at position 3492 of SEQ ID NO: 1564028
agcucauuauuaucugaag

SEQ ID NO: 1849730 - RNA, 19 nt, Artificial Sequence
  Description of Artificial Sequence: Synthetic oligonucleotide
  Antisense strand to SEQ ID NO: 1849729
cuucagauaauaaugagcu

SEQ ID NO: 1849731 - RNA, 19 nt, Artificial Sequence
  Description of Artificial Sequence: Synthetic oligonucleotide
  Sense strand starting at position 3493 of SEQ ID NO: 1564028
gcucauuauuaucugaagu

SEQ ID NO: 1849732 - RNA, 19 nt, Artificial Sequence
  Description of Artificial Sequence: Synthetic oligonucleotide
  Antisense strand to SEQ ID NO: 1849731
acuucagauaauaaugagc

SEQ ID NO: 1849733 - RNA, 19 nt, Artificial Sequence
  Description of Artificial Sequence: Synthetic oligonucleotide
  Sense strand starting at position 3512 of SEQ ID NO: 1564028
guuuguuccuacuuaggaa

SEQ ID NO: 1849734 - RNA, 19 nt, Artificial Sequence
  Description of Artificial Sequence: Synthetic oligonucleotide
  Antisense strand to SEQ ID NO: 1849733
uuccuaaguaggaacaaac

SEQ ID NO: 1849735 - RNA, 19 nt, Artificial Sequence
  Description of Artificial Sequence: Synthetic oligonucleotide
  Sense strand starting at position 3639 of SEQ ID NO: 1564028
uggcgaauuguggaugauu

SEQ ID NO: 1849736 - RNA, 19 nt, Artificial Sequence
  Description of Artificial Sequence: Synthetic oligonucleotide
  Antisense strand to SEQ ID NO: 1849735
aaucauccacaauucgcca

SEQ ID NO: 1849737 - RNA, 19 nt, Artificial Sequence
  Description of Artificial Sequence: Synthetic oligonucleotide
  Sense strand starting at position 3772 of SEQ ID NO: 1564028
cuaucuugcccacaaggga

SEQ ID NO: 1849738 - RNA, 19 nt, Artificial Sequence
  Description of Artificial Sequence: Synthetic oligonucleotide
  Antisense strand to SEQ ID NO: 1849737
ucccuugugggcaagauag

SEQ ID NO: 1849739 - RNA, 19 nt, Artificial Sequence
  Description of Artificial Sequence: Synthetic oligonucleotide
  Sense strand starting at position 3785 of SEQ ID NO: 1564028
aagggaggcugcucugaaa

SEQ ID NO: 1849740 - RNA, 19 nt, Artificial Sequence
  Description of Artificial Sequence: Synthetic oligonucleotide
  Antisense strand to SEQ ID NO: 1849739
uuucagagcagccucccuu

SEQ ID NO: 1849741 - RNA, 19 nt, Artificial Sequence
  Description of Artificial Sequence: Synthetic oligonucleotide
  Sense strand starting at position 3874 of SEQ ID NO: 1564028
ggcuccuguaucugggauu

SEQ ID NO: 1849742 - RNA, 19 nt, Artificial Sequence
  Description of Artificial Sequence: Synthetic oligonucleotide
  Antisense strand to SEQ ID NO: 1849741
aaucccagauacaggagcc

SEQ ID NO: 1849743 - RNA, 19 nt, Artificial Sequence
  Description of Artificial Sequence: Synthetic oligonucleotide
  Sense strand starting at position 3945 of SEQ ID NO: 1564028
uggagcuccucuguggaaa

SEQ ID NO: 1849744 - RNA, 19 nt, Artificial Sequence
  Description of Artificial Sequence: Synthetic oligonucleotide
  Antisense strand to SEQ ID NO: 1849743
uuuccacagaggagcucca

SEQ ID NO: 1849745 - RNA, 19 nt, Artificial Sequence
  Description of Artificial Sequence: Synthetic oligonucleotide
  Sense strand starting at position 3946 of SEQ ID NO: 1564028
ggagcuccucuguggaaau

SEQ ID NO: 1849746 - RNA, 19 nt, Artificial Sequence
  Description of Artificial Sequence: Synthetic oligonucleotide
  Antisense strand to SEQ ID NO: 1849745
auuuccacagaggagcucc

SEQ ID NO: 1849747 - RNA, 19 nt, Artificial Sequence
  Description of Artificial Sequence: Synthetic oligonucleotide
  Sense strand starting at position 93 of SEQ ID NO: 1564029
gaaagcguggccgaguaau

SEQ ID NO: 1849748 - RNA, 19 nt, Artificial Sequence
  Description of Artificial Sequence: Synthetic oligonucleotide
  Antisense strand to SEQ ID NO: 1849747
auuacucggccacgcuuuc

SEQ ID NO: 1849749 - RNA, 19 nt, Artificial Sequence
  Description of Artificial Sequence: Synthetic oligonucleotide
  Sense strand starting at position 103 of SEQ ID NO: 1564029
ccgaguaauuggcuuggca

SEQ ID NO: 1849750 - RNA, 19 nt, Artificial Sequence
  Description of Artificial Sequence: Synthetic oligonucleotide
  Antisense strand to SEQ ID NO: 1849749
ugccaagccaauuacucgg

SEQ ID NO: 1849751 - RNA, 19 nt, Artificial Sequence
  Description of Artificial Sequence: Synthetic oligonucleotide
  Sense strand starting at position 105 of SEQ ID NO: 1564029
gaguaauuggcuuggcaac

SEQ ID NO: 1849752 - RNA, 19 nt, Artificial Sequence
  Description of Artificial Sequence: Synthetic oligonucleotide
  Antisense strand to SEQ ID NO: 1849751
guugccaagccaauuacuc

SEQ ID NO: 1849753 - RNA, 19 nt, Artificial Sequence
  Description of Artificial Sequence: Synthetic oligonucleotide
  Sense strand starting at position 174 of SEQ ID NO: 1564029
ggcacuuaacaccaagagu

SEQ ID NO: 1849754 - RNA, 19 nt, Artificial Sequence
  Description of Artificial Sequence: Synthetic oligonucleotide
  Antisense strand to SEQ ID NO: 1849753
acucuugguguuaagugcc

SEQ ID NO: 1849755 - RNA, 19 nt, Artificial Sequence
  Description of Artificial Sequence: Synthetic oligonucleotide
  Sense strand starting at position 1025 of SEQ ID NO: 1564029
ggccuaggguccuuauaga

SEQ ID NO: 1849756 - RNA, 19 nt, Artificial Sequence
  Description of Artificial Sequence: Synthetic oligonucleotide
  Antisense strand to SEQ ID NO: 1849755
ucuauaaggacccuaggcc

SEQ ID NO: 1849757 - RNA, 19 nt, Artificial Sequence
  Description of Artificial Sequence: Synthetic oligonucleotide
  Sense strand starting at position 1683 of SEQ ID NO: 1564029
ccguccugguccucaaaga

SEQ ID NO: 1849758 - RNA, 19 nt, Artificial Sequence
  Description of Artificial Sequence: Synthetic oligonucleotide
  Antisense strand to SEQ ID NO: 1849757
ucuuugaggaccaggacgg

SEQ ID NO: 1849759 - RNA, 19 nt, Artificial Sequence
  Description of Artificial Sequence: Synthetic oligonucleotide
  Sense strand starting at position 1795 of SEQ ID NO: 1564029
gaagguaguugguuuggua

SEQ ID NO: 1849760 - RNA, 19 nt, Artificial Sequence
  Description of Artificial Sequence: Synthetic oligonucleotide
  Antisense strand to SEQ ID NO: 1849759
uaccaaaccaacuaccuuc

SEQ ID NO: 1849761 - RNA, 19 nt, Artificial Sequence
  Description of Artificial Sequence: Synthetic oligonucleotide
  Sense strand starting at position 1937 of SEQ ID NO: 1564029
cgacauccugccgguuaau

SEQ ID NO: 1849762 - RNA, 19 nt, Artificial Sequence
  Description of Artificial Sequence: Synthetic oligonucleotide
  Antisense strand to SEQ ID NO: 1849761
auuaaccggcaggaugucg

SEQ ID NO: 1849763 - RNA, 19 nt, Artificial Sequence
  Description of Artificial Sequence: Synthetic oligonucleotide
  Sense strand starting at position 1949 of SEQ ID NO: 1564029
gguuaauguggcuggacca

SEQ ID NO: 1849764 - RNA, 19 nt, Artificial Sequence
  Description of Artificial Sequence: Synthetic oligonucleotide
  Antisense strand to SEQ ID NO: 1849763
ugguccagccacauuaacc

SEQ ID NO: 1849765 - RNA, 19 nt, Artificial Sequence
  Description of Artificial Sequence: Synthetic oligonucleotide
  Sense strand starting at position 2285 of SEQ ID NO: 1564029
gagggacugucacaaggau

SEQ ID NO: 1849766 - RNA, 19 nt, Artificial Sequence
  Description of Artificial Sequence: Synthetic oligonucleotide
  Antisense strand to SEQ ID NO: 1849765
auccuugugacagucccuc

SEQ ID NO: 1849767 - RNA, 19 nt, Artificial Sequence
  Description of Artificial Sequence: Synthetic oligonucleotide
  Sense strand starting at position 2432 of SEQ ID NO: 1564029
cggagaucaucucuuccua

SEQ ID NO: 1849768 - RNA, 19 nt, Artificial Sequence
  Description of Artificial Sequence: Synthetic oligonucleotide
  Antisense strand to SEQ ID NO: 1849767
uaggaagagaugaucuccg

SEQ ID NO: 1849769 - RNA, 19 nt, Artificial Sequence
  Description of Artificial Sequence: Synthetic oligonucleotide
  Sense strand starting at position 2572 of SEQ ID NO: 1564029
ggcacacagucaucaagaa

SEQ ID NO: 1849770 - RNA, 19 nt, Artificial Sequence
  Description of Artificial Sequence: Synthetic oligonucleotide
  Antisense strand to SEQ ID NO: 1849769
uucuugaugacugugugcc

SEQ ID NO: 1849771 - RNA, 19 nt, Artificial Sequence
  Description of Artificial Sequence: Synthetic oligonucleotide
  Sense strand starting at position 2608 of SEQ ID NO: 1564029
gcucuuuauuuagacauag

SEQ ID NO: 1849772 - RNA, 19 nt, Artificial Sequence
  Description of Artificial Sequence: Synthetic oligonucleotide
  Antisense strand to SEQ ID NO: 1849771
cuaugucuaaauaaagagc

SEQ ID NO: 1849773 - RNA, 19 nt, Artificial Sequence
  Description of Artificial Sequence: Synthetic oligonucleotide
  Sense strand starting at position 2619 of SEQ ID NO: 1564029
agacauagcucugcugagu

SEQ ID NO: 1849774 - RNA, 19 nt, Artificial Sequence
  Description of Artificial Sequence: Synthetic oligonucleotide
  Antisense strand to SEQ ID NO: 1849773
acucagcagagcuaugucu

SEQ ID NO: 1849775 - RNA, 19 nt, Artificial Sequence
  Description of Artificial Sequence: Synthetic oligonucleotide
  Sense strand starting at position 2624 of SEQ ID NO: 1564029
uagcucugcugaguggaaa

SEQ ID NO: 1849776 - RNA, 19 nt, Artificial Sequence
  Description of Artificial Sequence: Synthetic oligonucleotide
  Antisense strand to SEQ ID NO: 1849775
uuuccacucagcagagcua

SEQ ID NO: 1849777 - RNA, 19 nt, Artificial Sequence
  Description of Artificial Sequence: Synthetic oligonucleotide
  Sense strand starting at position 2772 of SEQ ID NO: 1564029
caucacagaugucaaggua

SEQ ID NO: 1849778 - RNA, 19 nt, Artificial Sequence
  Description of Artificial Sequence: Synthetic oligonucleotide
  Antisense strand to SEQ ID NO: 1849777
uaccuugacaucugugaug

SEQ ID NO: 1849779 - RNA, 19 nt, Artificial Sequence
  Description of Artificial Sequence: Synthetic oligonucleotide
  Sense strand starting at position 2793 of SEQ ID NO: 1564029
cgucgaaagccucucuguu

SEQ ID NO: 1849780 - RNA, 19 nt, Artificial Sequence
  Description of Artificial Sequence: Synthetic oligonucleotide
  Antisense strand to SEQ ID NO: 1849779
aacagagaggcuuucgacg

SEQ ID NO: 1849781 - RNA, 19 nt, Artificial Sequence
  Description of Artificial Sequence: Synthetic oligonucleotide
  Sense strand starting at position 2811 of SEQ ID NO: 1564029
ugcaguuuccaucaggagu

SEQ ID NO: 1849782 - RNA, 19 nt, Artificial Sequence
  Description of Artificial Sequence: Synthetic oligonucleotide
  Antisense strand to SEQ ID NO: 1849781
acuccugauggaaacugca

SEQ ID NO: 1849783 - RNA, 19 nt, Artificial Sequence
  Description of Artificial Sequence: Synthetic oligonucleotide
  Sense strand starting at position 2832 of SEQ ID NO: 1564029
agacauauuuguggaaggu

SEQ ID NO: 1849784 - RNA, 19 nt, Artificial Sequence
  Description of Artificial Sequence: Synthetic oligonucleotide
  Antisense strand to SEQ ID NO: 1849783
accuuccacaaauaugucu

SEQ ID NO: 1849785 - RNA, 19 nt, Artificial Sequence
  Description of Artificial Sequence: Synthetic oligonucleotide
  Sense strand starting at position 3091 of SEQ ID NO: 1564029
caaugacagaguugacguu

SEQ ID NO: 1849786 - RNA, 19 nt, Artificial Sequence
  Description of Artificial Sequence: Synthetic oligonucleotide
  Antisense strand to SEQ ID NO: 1849785
aacgucaacucugucauug

SEQ ID NO: 1849787 - RNA, 19 nt, Artificial Sequence
  Description of Artificial Sequence: Synthetic oligonucleotide
  Sense strand starting at position 3101 of SEQ ID NO: 1564029
guugacguucuuggaagua

SEQ ID NO: 1849788 - RNA, 19 nt, Artificial Sequence
  Description of Artificial Sequence: Synthetic oligonucleotide
  Antisense strand to SEQ ID NO: 1849787
uacuuccaagaacgucaac

SEQ ID NO: 1849789 - RNA, 19 nt, Artificial Sequence
  Description of Artificial Sequence: Synthetic oligonucleotide
  Sense strand starting at position 3190 of SEQ ID NO: 1564029
ccacguacugcccaaucau

SEQ ID NO: 1849790 - RNA, 19 nt, Artificial Sequence
  Description of Artificial Sequence: Synthetic oligonucleotide
  Antisense strand to SEQ ID NO: 1849789
augauugggcaguacgugg

SEQ ID NO: 1849791 - RNA, 19 nt, Artificial Sequence
  Description of Artificial Sequence: Synthetic oligonucleotide
  Sense strand starting at position 3336 of SEQ ID NO: 1564029
gcggguauccuugagagca

SEQ ID NO: 1849792 - RNA, 19 nt, Artificial Sequence
  Description of Artificial Sequence: Synthetic oligonucleotide
  Antisense strand to SEQ ID NO: 1849791
ugcucucaaggauacccgc

SEQ ID NO: 1849793 - RNA, 19 nt, Artificial Sequence
  Description of Artificial Sequence: Synthetic oligonucleotide
  Sense strand starting at position 3338 of SEQ ID NO: 1564029
ggguauccuugagagcaaa

SEQ ID NO: 1849794 - RNA, 19 nt, Artificial Sequence
  Description of Artificial Sequence: Synthetic oligonucleotide
  Antisense strand to SEQ ID NO: 1849793
uuugcucucaaggauaccc

SEQ ID NO: 1849795 - RNA, 19 nt, Artificial Sequence
  Description of Artificial Sequence: Synthetic oligonucleotide
  Sense strand starting at position 3395 of SEQ ID NO: 1564029
aggaggagucguggcugaa

SEQ ID NO: 1849796 - RNA, 19 nt, Artificial Sequence
  Description of Artificial Sequence: Synthetic oligonucleotide
  Antisense strand to SEQ ID NO: 1849795
uucagccacgacuccuccu

SEQ ID NO: 1849797 - RNA, 19 nt, Artificial Sequence
  Description of Artificial Sequence: Synthetic oligonucleotide
  Sense strand starting at position 3398 of SEQ ID NO: 1564029
aggagucguggcugaaguu

SEQ ID NO: 1849798 - RNA, 19 nt, Artificial Sequence
  Description of Artificial Sequence: Synthetic oligonucleotide
  Antisense strand to SEQ ID NO: 1849797
aacuucagccacgacuccu

SEQ ID NO: 1849799 - RNA, 19 nt, Artificial Sequence
  Description of Artificial Sequence: Synthetic oligonucleotide
  Sense strand starting at position 3399 of SEQ ID NO: 1564029
ggagucguggcugaaguua

SEQ ID NO: 1849800 - RNA, 19 nt, Artificial Sequence
  Description of Artificial Sequence: Synthetic oligonucleotide
  Antisense strand to SEQ ID NO: 1849799
uaacuucagccacgacucc

SEQ ID NO: 1849801 - RNA, 19 nt, Artificial Sequence
  Description of Artificial Sequence: Synthetic oligonucleotide
  Sense strand starting at position 3410 of SEQ ID NO: 1564029
ugaaguuaaugcuagaaga

SEQ ID NO: 1849802 - RNA, 19 nt, Artificial Sequence
  Description of Artificial Sequence: Synthetic oligonucleotide
  Antisense strand to SEQ ID NO: 1849801
ucuucuagcauuaacuuca

SEQ ID NO: 1849803 - RNA, 19 nt, Artificial Sequence
  Description of Artificial Sequence: Synthetic oligonucleotide
  Sense strand starting at position 3437 of SEQ ID NO: 1564029
cagugaugcccacauguca

SEQ ID NO: 1849804 - RNA, 19 nt, Artificial Sequence
  Description of Artificial Sequence: Synthetic oligonucleotide
  Antisense strand to SEQ ID NO: 1849803
ugacaugugggcaucacug

SEQ ID NO: 1849805 - RNA, 19 nt, Artificial Sequence
  Description of Artificial Sequence: Synthetic oligonucleotide
  Sense strand starting at position 3446 of SEQ ID NO: 1564029
ccacaugucaugugguaug

SEQ ID NO: 1849806 - RNA, 19 nt, Artificial Sequence
  Description of Artificial Sequence: Synthetic oligonucleotide
  Antisense strand to SEQ ID NO: 1849805
cauaccacaugacaugugg

SEQ ID NO: 1849807 - RNA, 19 nt, Artificial Sequence
  Description of Artificial Sequence: Synthetic oligonucleotide
  Sense strand starting at position 3488 of SEQ ID NO: 1564029
cccugugcucaccaguaga

SEQ ID NO: 1849808 - RNA, 19 nt, Artificial Sequence
  Description of Artificial Sequence: Synthetic oligonucleotide
  Antisense strand to SEQ ID NO: 1849807
ucuacuggugagcacaggg

SEQ ID NO: 1849809 - RNA, 19 nt, Artificial Sequence
  Description of Artificial Sequence: Synthetic oligonucleotide
  Sense strand starting at position 3539 of SEQ ID NO: 1564029
accaguuucuccuuggauu

SEQ ID NO: 1849810 - RNA, 19 nt, Artificial Sequence
  Description of Artificial Sequence: Synthetic oligonucleotide
  Antisense strand to SEQ ID NO: 1849809
aauccaaggagaaacuggu

SEQ ID NO: 1849811 - RNA, 19 nt, Artificial Sequence
  Description of Artificial Sequence: Synthetic oligonucleotide
  Sense strand starting at position 3550 of SEQ ID NO: 1564029
cuuggauugugugucaaag

SEQ ID NO: 1849812 - RNA, 19 nt, Artificial Sequence
  Description of Artificial Sequence: Synthetic oligonucleotide
  Antisense strand to SEQ ID NO: 1849811
cuuugacacacaauccaag

SEQ ID NO: 1849813 - RNA, 19 nt, Artificial Sequence
  Description of Artificial Sequence: Synthetic oligonucleotide
  Sense strand starting at position 3560 of SEQ ID NO: 1564029
gugucaaagaggcgaauaa

SEQ ID NO: 1849814 - RNA, 19 nt, Artificial Sequence
  Description of Artificial Sequence: Synthetic oligonucleotide
  Antisense strand to SEQ ID NO: 1849813
uuauucgccucuuugacac

SEQ ID NO: 1849815 - RNA, 19 nt, Artificial Sequence
  Description of Artificial Sequence: Synthetic oligonucleotide
  Sense strand starting at position 3635 of SEQ ID NO: 1564029
caggcuaugucacucugau

SEQ ID NO: 1849816 - RNA, 19 nt, Artificial Sequence
  Description of Artificial Sequence: Synthetic oligonucleotide
  Antisense strand to SEQ ID NO: 1849815
aucagagugacauagccug

SEQ ID NO: 1849817 - RNA, 19 nt, Artificial Sequence
  Description of Artificial Sequence: Synthetic oligonucleotide
  Sense strand starting at position 3645 of SEQ ID NO: 1564029
cacucugaugugcauugau

SEQ ID NO: 1849818 - RNA, 19 nt, Artificial Sequence
  Description of Artificial Sequence: Synthetic oligonucleotide
  Antisense strand to SEQ ID NO: 1849817
aucaaugcacaucagagug

SEQ ID NO: 1849819 - RNA, 19 nt, Artificial Sequence
  Description of Artificial Sequence: Synthetic oligonucleotide
  Sense strand starting at position 3652 of SEQ ID NO: 1564029
augugcauugaucgugaau

SEQ ID NO: 1849820 - RNA, 19 nt, Artificial Sequence
  Description of Artificial Sequence: Synthetic oligonucleotide
  Antisense strand to SEQ ID NO: 1849819
auucacgaucaaugcacau

SEQ ID NO: 1849821 - RNA, 19 nt, Artificial Sequence
  Description of Artificial Sequence: Synthetic oligonucleotide
  Sense strand starting at position 3655 of SEQ ID NO: 1564029
ugcauugaucgugaaugga

SEQ ID NO: 1849822 - RNA, 19 nt, Artificial Sequence
  Description of Artificial Sequence: Synthetic oligonucleotide
  Antisense strand to SEQ ID NO: 1849821
uccauucacgaucaaugca

SEQ ID NO: 1849823 - RNA, 19 nt, Artificial Sequence
  Description of Artificial Sequence: Synthetic oligonucleotide
  Sense strand starting at position 3718 of SEQ ID NO: 1564029
gagggaggagucugagguu

SEQ ID NO: 1849824 - RNA, 19 nt, Artificial Sequence
  Description of Artificial Sequence: Synthetic oligonucleotide
  Antisense strand to SEQ ID NO: 1849823
aaccucagacuccucccuc

SEQ ID NO: 1849825 - RNA, 19 nt, Artificial Sequence
  Description of Artificial Sequence: Synthetic oligonucleotide
  Sense strand starting at position 3897 of SEQ ID NO: 1564029
agcccuagggugugaagau

SEQ ID NO: 1849826 - RNA, 19 nt, Artificial Sequence
  Description of Artificial Sequence: Synthetic oligonucleotide
  Antisense strand to SEQ ID NO: 1849825
aucuucacacccuagggcu

SEQ ID NO: 1849827 - RNA, 19 nt, Artificial Sequence
  Description of Artificial Sequence: Synthetic oligonucleotide
  Sense strand starting at position 17 of SEQ ID NO: 1564030
uggccuuaauggcuccaua

SEQ ID NO: 1849828 - RNA, 19 nt, Artificial Sequence
  Description of Artificial Sequence: Synthetic oligonucleotide
  Antisense strand to SEQ ID NO: 1849827
uauggagccauuaaggcca

SEQ ID NO: 1849829 - RNA, 19 nt, Artificial Sequence
  Description of Artificial Sequence: Synthetic oligonucleotide
  Sense strand starting at position 74 of SEQ ID NO: 1564030
uagauaagccuacauguga

SEQ ID NO: 1849830 - RNA, 19 nt, Artificial Sequence
  Description of Artificial Sequence: Synthetic oligonucleotide
  Antisense strand to SEQ ID NO: 1849829
ucacauguaggcuuaucua

SEQ ID NO: 1849831 - RNA, 19 nt, Artificial Sequence
  Description of Artificial Sequence: Synthetic oligonucleotide
  Sense strand starting at position 89 of SEQ ID NO: 1564030
gugacagagaaauguagua

SEQ ID NO: 1849832 - RNA, 19 nt, Artificial Sequence
  Description of Artificial Sequence: Synthetic oligonucleotide
  Antisense strand to SEQ ID NO: 1849831
uacuacauuucucugucac

SEQ ID NO: 1849833 - RNA, 19 nt, Artificial Sequence
  Description of Artificial Sequence: Synthetic oligonucleotide
  Sense strand starting at position 94 of SEQ ID NO: 1564030
agagaaauguaguaaacaa

SEQ ID NO: 1849834 - RNA, 19 nt, Artificial Sequence
  Description of Artificial Sequence: Synthetic oligonucleotide
  Antisense strand to SEQ ID NO: 1849833
uuguuuacuacauuucucu

SEQ ID NO: 1849835 - RNA, 19 nt, Artificial Sequence
  Description of Artificial Sequence: Synthetic oligonucleotide
  Sense strand starting at position 137 of SEQ ID NO: 1564030
aagggaaagcuuugaagua

SEQ ID NO: 1849836 - RNA, 19 nt, Artificial Sequence
  Description of Artificial Sequence: Synthetic oligonucleotide
  Antisense strand to SEQ ID NO: 1849835
uacuucaaagcuuucccuu

SEQ ID NO: 1849837 - RNA, 19 nt, Artificial Sequence
  Description of Artificial Sequence: Synthetic oligonucleotide
  Sense strand starting at position 155 of SEQ ID NO: 1564030
agauuuguuuccuauggaa

SEQ ID NO: 1849838 - RNA, 19 nt, Artificial Sequence
  Description of Artificial Sequence: Synthetic oligonucleotide
  Antisense strand to SEQ ID NO: 1849837
uuccauaggaaacaaaucu

SEQ ID NO: 1849839 - RNA, 19 nt, Artificial Sequence
  Description of Artificial Sequence: Synthetic oligonucleotide
  Sense strand starting at position 194 of SEQ ID NO: 1564030
acacuuaacuggcugacau

SEQ ID NO: 1849840 - RNA, 19 nt, Artificial Sequence
  Description of Artificial Sequence: Synthetic oligonucleotide
  Antisense strand to SEQ ID NO: 1849839
augucagccaguuaagugu

SEQ ID NO: 1849841 - RNA, 19 nt, Artificial Sequence
  Description of Artificial Sequence: Synthetic oligonucleotide
  Sense strand starting at position 196 of SEQ ID NO: 1564030
acuuaacuggcugacauau

SEQ ID NO: 1849842 - RNA, 19 nt, Artificial Sequence
  Description of Artificial Sequence: Synthetic oligonucleotide
  Antisense strand to SEQ ID NO: 1849841
auaugucagccaguuaagu

SEQ ID NO: 1849843 - RNA, 19 nt, Artificial Sequence
  Description of Artificial Sequence: Synthetic oligonucleotide
  Sense strand starting at position 198 of SEQ ID NO: 1564030
uuaacuggcugacauauuu

SEQ ID NO: 1849844 - RNA, 19 nt, Artificial Sequence
  Description of Artificial Sequence: Synthetic oligonucleotide
  Antisense strand to SEQ ID NO: 1849843
aaauaugucagccaguuaa

SEQ ID NO: 1849845 - RNA, 19 nt, Artificial Sequence
  Description of Artificial Sequence: Synthetic oligonucleotide
  Sense strand starting at position 614 of SEQ ID NO: 1564030
ucccaaagugguuaacuga

SEQ ID NO: 1849846 - RNA, 19 nt, Artificial Sequence
  Description of Artificial Sequence: Synthetic oligonucleotide
  Antisense strand to SEQ ID NO: 1849845
ucaguuaaccacuuuggga

SEQ ID NO: 1849847 - RNA, 19 nt, Artificial Sequence
  Description of Artificial Sequence: Synthetic oligonucleotide
  Sense strand starting at position 657 of SEQ ID NO: 1564030
aacuguaaauguuuaagag

SEQ ID NO: 1849848 - RNA, 19 nt, Artificial Sequence
  Description of Artificial Sequence: Synthetic oligonucleotide
  Antisense strand to SEQ ID NO: 1849847
cucuuaaacauuuacaguu

SEQ ID NO: 1849849 - RNA, 19 nt, Artificial Sequence
  Description of Artificial Sequence: Synthetic oligonucleotide
  Sense strand starting at position 783 of SEQ ID NO: 1564030
ugaauacuggcauggaaca

SEQ ID NO: 1849850 - RNA, 19 nt, Artificial Sequence
  Description of Artificial Sequence: Synthetic oligonucleotide
  Antisense strand to SEQ ID NO: 1849849
uguuccaugccaguauuca

SEQ ID NO: 1849851 - RNA, 19 nt, Artificial Sequence
  Description of Artificial Sequence: Synthetic oligonucleotide
  Sense strand starting at position 784 of SEQ ID NO: 1564030
gaauacuggcauggaacau

SEQ ID NO: 1849852 - RNA, 19 nt, Artificial Sequence
  Description of Artificial Sequence: Synthetic oligonucleotide
  Antisense strand to SEQ ID NO: 1849851
auguuccaugccaguauuc

SEQ ID NO: 1849853 - RNA, 19 nt, Artificial Sequence
  Description of Artificial Sequence: Synthetic oligonucleotide
  Sense strand starting at position 795 of SEQ ID NO: 1564030
uggaacaugcuguaacuga

SEQ ID NO: 1849854 - RNA, 19 nt, Artificial Sequence
  Description of Artificial Sequence: Synthetic oligonucleotide
  Antisense strand to SEQ ID NO: 1849853
ucaguuacagcauguucca

SEQ ID NO: 1849855 - RNA, 19 nt, Artificial Sequence
  Description of Artificial Sequence: Synthetic oligonucleotide
  Sense strand starting at position 844 of SEQ ID NO: 1564030
ugucaaaugaucugcagga

SEQ ID NO: 1849856 - RNA, 19 nt, Artificial Sequence
  Description of Artificial Sequence: Synthetic oligonucleotide
  Antisense strand to SEQ ID NO: 1849855
uccugcagaucauuugaca

SEQ ID NO: 1849857 - RNA, 19 nt, Artificial Sequence
  Description of Artificial Sequence: Synthetic oligonucleotide
  Sense strand starting at position 845 of SEQ ID NO: 1564030
gucaaaugaucugcaggaa

SEQ ID NO: 1849858 - RNA, 19 nt, Artificial Sequence
  Description of Artificial Sequence: Synthetic oligonucleotide
  Antisense strand to SEQ ID NO: 1849857
uuccugcagaucauuugac

SEQ ID NO: 1849859 - RNA, 19 nt, Artificial Sequence
  Description of Artificial Sequence: Synthetic oligonucleotide
  Sense strand starting at position 888 of SEQ ID NO: 1564030
agagacagccuuuaucuau

SEQ ID NO: 1849860 - RNA, 19 nt, Artificial Sequence
  Description of Artificial Sequence: Synthetic oligonucleotide
  Antisense strand to SEQ ID NO: 1849859
auagauaaaggcugucucu

SEQ ID NO: 1849861 - RNA, 19 nt, Artificial Sequence
  Description of Artificial Sequence: Synthetic oligonucleotide
  Sense strand starting at position 984 of SEQ ID NO: 1564030
cgugucauuccugaaagug

SEQ ID NO: 1849862 - RNA, 19 nt, Artificial Sequence
  Description of Artificial Sequence: Synthetic oligonucleotide
  Antisense strand to SEQ ID NO: 1849861
cacuuucaggaaugacacg

SEQ ID NO: 1849863 - RNA, 19 nt, Artificial Sequence
  Description of Artificial Sequence: Synthetic oligonucleotide
  Sense strand starting at position 996 of SEQ ID NO: 1564030
gaaaguggccauuagcuuu

SEQ ID NO: 1849864 - RNA, 19 nt, Artificial Sequence
  Description of Artificial Sequence: Synthetic oligonucleotide
  Antisense strand to SEQ ID NO: 1849863
aaagcuaauggccacuuuc

SEQ ID NO: 1849865 - RNA, 19 nt, Artificial Sequence
  Description of Artificial Sequence: Synthetic oligonucleotide
  Sense strand starting at position 1071 of SEQ ID NO: 1564030
ccacgagguuuaucaucaa

SEQ ID NO: 1849866 - RNA, 19 nt, Artificial Sequence
  Description of Artificial Sequence: Synthetic oligonucleotide
  Antisense strand to SEQ ID NO: 1849865
uugaugauaaaccucgugg

SEQ ID NO: 1849867 - RNA, 19 nt, Artificial Sequence
  Description of Artificial Sequence: Synthetic oligonucleotide
  Sense strand starting at position 1714 of SEQ ID NO: 1564030
cuacucuucgcuuugcuua

SEQ ID NO: 1849868 - RNA, 19 nt, Artificial Sequence
  Description of Artificial Sequence: Synthetic oligonucleotide
  Antisense strand to SEQ ID NO: 1849867
uaagcaaagcgaagaguag

SEQ ID NO: 1849869 - RNA, 19 nt, Artificial Sequence
  Description of Artificial Sequence: Synthetic oligonucleotide
  Sense strand starting at position 2308 of SEQ ID NO: 1564030
agcggaaucuaaccuauau

SEQ ID NO: 1849870 - RNA, 19 nt, Artificial Sequence
  Description of Artificial Sequence: Synthetic oligonucleotide
  Antisense strand to SEQ ID NO: 1849869
auauagguuagauuccgcu

SEQ ID NO: 1849871 - RNA, 19 nt, Artificial Sequence
  Description of Artificial Sequence: Synthetic oligonucleotide
  Sense strand starting at position 2329 of SEQ ID NO: 1564030
uugugaauggcuugcauuu

SEQ ID NO: 1849872 - RNA, 19 nt, Artificial Sequence
  Description of Artificial Sequence: Synthetic oligonucleotide
  Antisense strand to SEQ ID NO: 1849871
aaaugcaagccauucacaa

SEQ ID NO: 1849873 - RNA, 19 nt, Artificial Sequence
  Description of Artificial Sequence: Synthetic oligonucleotide
  Sense strand starting at position 2418 of SEQ ID NO: 1564030
auuguauacauucguggga

SEQ ID NO: 1849874 - RNA, 19 nt, Artificial Sequence
  Description of Artificial Sequence: Synthetic oligonucleotide
  Antisense strand to SEQ ID NO: 1849873
ucccacgaauguauacaau

SEQ ID NO: 1849875 - RNA, 19 nt, Artificial Sequence
  Description of Artificial Sequence: Synthetic oligonucleotide
  Sense strand starting at position 2419 of SEQ ID NO: 1564030
uuguauacauucgugggau

SEQ ID NO: 1849876 - RNA, 19 nt, Artificial Sequence
  Description of Artificial Sequence: Synthetic oligonucleotide
  Antisense strand to SEQ ID NO: 1849875
aucccacgaauguauacaa

SEQ ID NO: 1849877 - RNA, 19 nt, Artificial Sequence
  Description of Artificial Sequence: Synthetic oligonucleotide
  Sense strand starting at position 2422 of SEQ ID NO: 1564030
uauacauucgugggaugca

SEQ ID NO: 1849878 - RNA, 19 nt, Artificial Sequence
  Description of Artificial Sequence: Synthetic oligonucleotide
  Antisense strand to SEQ ID NO: 1849877
ugcaucccacgaauguaua

SEQ ID NO: 1849879 - RNA, 19 nt, Artificial Sequence
  Description of Artificial Sequence: Synthetic oligonucleotide
  Sense strand starting at position 2452 of SEQ ID NO: 1564030
ugaaauauguauccaaugu

SEQ ID NO: 1849880 - RNA, 19 nt, Artificial Sequence
  Description of Artificial Sequence: Synthetic oligonucleotide
  Antisense strand to SEQ ID NO: 1849879
acauuggauacauauuuca

SEQ ID NO: 1849881 - RNA, 19 nt, Artificial Sequence
  Description of Artificial Sequence: Synthetic oligonucleotide
  Sense strand starting at position 2456 of SEQ ID NO: 1564030
auauguauccaauguggga

SEQ ID NO: 1849882 - RNA, 19 nt, Artificial Sequence
  Description of Artificial Sequence: Synthetic oligonucleotide
  Antisense strand to SEQ ID NO: 1849881
ucccacauuggauacauau

SEQ ID NO: 1849883 - RNA, 19 nt, Artificial Sequence
  Description of Artificial Sequence: Synthetic oligonucleotide
  Sense strand starting at position 2460 of SEQ ID NO: 1564030
guauccaaugugggaugau

SEQ ID NO: 1849884 - RNA, 19 nt, Artificial Sequence
  Description of Artificial Sequence: Synthetic oligonucleotide
  Antisense strand to SEQ ID NO: 1849883
aucaucccacauuggauac

SEQ ID NO: 1849885 - RNA, 19 nt, Artificial Sequence
  Description of Artificial Sequence: Synthetic oligonucleotide
  Sense strand starting at position 2504 of SEQ ID NO: 1564030
cuuguuuaccuaugacuuu

SEQ ID NO: 1849886 - RNA, 19 nt, Artificial Sequence
  Description of Artificial Sequence: Synthetic oligonucleotide
  Antisense strand to SEQ ID NO: 1849885
aaagucauagguaaacaag

SEQ ID NO: 1849887 - RNA, 19 nt, Artificial Sequence
  Description of Artificial Sequence: Synthetic oligonucleotide
  Sense strand starting at position 2646 of SEQ ID NO: 1564030
gggaguuaguuguugguca

SEQ ID NO: 1849888 - RNA, 19 nt, Artificial Sequence
  Description of Artificial Sequence: Synthetic oligonucleotide
  Antisense strand to SEQ ID NO: 1849887
ugaccaacaacuaacuccc

SEQ ID NO: 1849889 - RNA, 19 nt, Artificial Sequence
  Description of Artificial Sequence: Synthetic oligonucleotide
  Sense strand starting at position 2648 of SEQ ID NO: 1564030
gaguuaguuguuggucaga

SEQ ID NO: 1849890 - RNA, 19 nt, Artificial Sequence
  Description of Artificial Sequence: Synthetic oligonucleotide
  Antisense strand to SEQ ID NO: 1849889
ucugaccaacaacuaacuc

SEQ ID NO: 1849891 - RNA, 19 nt, Artificial Sequence
  Description of Artificial Sequence: Synthetic oligonucleotide
  Sense strand starting at position 2650 of SEQ ID NO: 1564030
guuaguuguuggucagagg

SEQ ID NO: 1849892 - RNA, 19 nt, Artificial Sequence
  Description of Artificial Sequence: Synthetic oligonucleotide
  Antisense strand to SEQ ID NO: 1849891
ccucugaccaacaacuaac

SEQ ID NO: 1849893 - RNA, 19 nt, Artificial Sequence
  Description of Artificial Sequence: Synthetic oligonucleotide
  Sense strand starting at position 2651 of SEQ ID NO: 1564030
uuaguuguuggucagaggu

SEQ ID NO: 1849894 - RNA, 19 nt, Artificial Sequence
  Description of Artificial Sequence: Synthetic oligonucleotide
  Antisense strand to SEQ ID NO: 1849893
accucugaccaacaacuaa

SEQ ID NO: 1849895 - RNA, 19 nt, Artificial Sequence
  Description of Artificial Sequence: Synthetic oligonucleotide
  Sense strand starting at position 2654 of SEQ ID NO: 1564030
guuguuggucagagguuac

SEQ ID NO: 1849896 - RNA, 19 nt, Artificial Sequence
  Description of Artificial Sequence: Synthetic oligonucleotide
  Antisense strand to SEQ ID NO: 1849895
guaaccucugaccaacaac

SEQ ID NO: 1849897 - RNA, 19 nt, Artificial Sequence
  Description of Artificial Sequence: Synthetic oligonucleotide
  Sense strand starting at position 2756 of SEQ ID NO: 1564030
ggccaugaucugcacuacu

SEQ ID NO: 1849898 - RNA, 19 nt, Artificial Sequence
  Description of Artificial Sequence: Synthetic oligonucleotide
  Antisense strand to SEQ ID NO: 1849897
aguagugcagaucauggcc

SEQ ID NO: 1849899 - RNA, 19 nt, Artificial Sequence
  Description of Artificial Sequence: Synthetic oligonucleotide
  Sense strand starting at position 3437 of SEQ ID NO: 1564030
ugaccuuucugccucugaa

SEQ ID NO: 1849900 - RNA, 19 nt, Artificial Sequence
  Description of Artificial Sequence: Synthetic oligonucleotide
  Antisense strand to SEQ ID NO: 1849899
uucagaggcagaaagguca

SEQ ID NO: 1849901 - RNA, 19 nt, Artificial Sequence
  Description of Artificial Sequence: Synthetic oligonucleotide
  Sense strand starting at position 3508 of SEQ ID NO: 1564030
gaucuuugugaacagccau

SEQ ID NO: 1849902 - RNA, 19 nt, Artificial Sequence
  Description of Artificial Sequence: Synthetic oligonucleotide
  Antisense strand to SEQ ID NO: 1849901
auggcuguucacaaagauc

SEQ ID NO: 1849903 - RNA, 19 nt, Artificial Sequence
  Description of Artificial Sequence: Synthetic oligonucleotide
  Sense strand starting at position 3898 of SEQ ID NO: 1564030
caggcaugagccuguauga

SEQ ID NO: 1849904 - RNA, 19 nt, Artificial Sequence
  Description of Artificial Sequence: Synthetic oligonucleotide
  Antisense strand to SEQ ID NO: 1849903
ucauacaggcucaugccug

SEQ ID NO: 1849905 - RNA, 19 nt, Artificial Sequence
  Description of Artificial Sequence: Synthetic oligonucleotide
  Sense strand starting at position 3939 of SEQ ID NO: 1564030
cugcaagugcuuguuaucu

SEQ ID NO: 1849906 - RNA, 19 nt, Artificial Sequence
  Description of Artificial Sequence: Synthetic oligonucleotide
  Antisense strand to SEQ ID NO: 1849905
agauaacaagcacuugcag

SEQ ID NO: 1849907 - RNA, 19 nt, Artificial Sequence
  Description of Artificial Sequence: Synthetic oligonucleotide
  Sense strand starting at position 36 of SEQ ID NO: 1564031
cgaagaaucucccuaggga

SEQ ID NO: 1849908 - RNA, 19 nt, Artificial Sequence
  Description of Artificial Sequence: Synthetic oligonucleotide
  Antisense strand to SEQ ID NO: 1849907
ucccuagggagauucuucg

SEQ ID NO: 1849909 - RNA, 19 nt, Artificial Sequence
  Description of Artificial Sequence: Synthetic oligonucleotide
  Sense strand starting at position 108 of SEQ ID NO: 1564031
uggagcucuccugggaaag

SEQ ID NO: 1849910 - RNA, 19 nt, Artificial Sequence
  Description of Artificial Sequence: Synthetic oligonucleotide
  Antisense strand to SEQ ID NO: 1849909
cuuucccaggagagcucca

SEQ ID NO: 1849911 - RNA, 19 nt, Artificial Sequence
  Description of Artificial Sequence: Synthetic oligonucleotide
  Sense strand starting at position 229 of SEQ ID NO: 1564031
gcguaaggcuccuggauuu

SEQ ID NO: 1849912 - RNA, 19 nt, Artificial Sequence
  Description of Artificial Sequence: Synthetic oligonucleotide
  Antisense strand to SEQ ID NO: 1849911
aaauccaggagccuuacgc

SEQ ID NO: 1849913 - RNA, 19 nt, Artificial Sequence
  Description of Artificial Sequence: Synthetic oligonucleotide
  Sense strand starting at position 848 of SEQ ID NO: 1564031
accgcauucuuccuugaga

SEQ ID NO: 1849914 - RNA, 19 nt, Artificial Sequence
  Description of Artificial Sequence: Synthetic oligonucleotide
  Antisense strand to SEQ ID NO: 1849913
ucucaaggaagaaugcggu

SEQ ID NO: 1849915 - RNA, 19 nt, Artificial Sequence
  Description of Artificial Sequence: Synthetic oligonucleotide
  Sense strand starting at position 849 of SEQ ID NO: 1564031
ccgcauucuuccuugagau

SEQ ID NO: 1849916 - RNA, 19 nt, Artificial Sequence
  Description of Artificial Sequence: Synthetic oligonucleotide
  Antisense strand to SEQ ID NO: 1849915
aucucaaggaagaaugcgg

SEQ ID NO: 1849917 - RNA, 19 nt, Artificial Sequence
  Description of Artificial Sequence: Synthetic oligonucleotide
  Sense strand starting at position 850 of SEQ ID NO: 1564031
cgcauucuuccuugagauc

SEQ ID NO: 1849918 - RNA, 19 nt, Artificial Sequence
  Description of Artificial Sequence: Synthetic oligonucleotide
  Antisense strand to SEQ ID NO: 1849917
gaucucaaggaagaaugcg

SEQ ID NO: 1849919 - RNA, 19 nt, Artificial Sequence
  Description of Artificial Sequence: Synthetic oligonucleotide
  Sense strand starting at position 1007 of SEQ ID NO: 1564031
ccaagaaaccuuggccuuu

SEQ ID NO: 1849920 - RNA, 19 nt, Artificial Sequence
  Description of Artificial Sequence: Synthetic oligonucleotide
  Antisense strand to SEQ ID NO: 1849919
aaaggccaagguuucuugg

SEQ ID NO: 1849921 - RNA, 19 nt, Artificial Sequence
  Description of Artificial Sequence: Synthetic oligonucleotide
  Sense strand starting at position 1079 of SEQ ID NO: 1564031
cccacauucccaggucaga

SEQ ID NO: 1849922 - RNA, 19 nt, Artificial Sequence
  Description of Artificial Sequence: Synthetic oligonucleotide
  Antisense strand to SEQ ID NO: 1849921
ucugaccugggaauguggg

SEQ ID NO: 1849923 - RNA, 19 nt, Artificial Sequence
  Description of Artificial Sequence: Synthetic oligonucleotide
  Sense strand starting at position 1250 of SEQ ID NO: 1564031
ugcacauuccuccaaggua

SEQ ID NO: 1849924 - RNA, 19 nt, Artificial Sequence
  Description of Artificial Sequence: Synthetic oligonucleotide
  Antisense strand to SEQ ID NO: 1849923
uaccuuggaggaaugugca

SEQ ID NO: 1849925 - RNA, 19 nt, Artificial Sequence
  Description of Artificial Sequence: Synthetic oligonucleotide
  Sense strand starting at position 1265 of SEQ ID NO: 1564031
gguacuguguccuuuagaa

SEQ ID NO: 1849926 - RNA, 19 nt, Artificial Sequence
  Description of Artificial Sequence: Synthetic oligonucleotide
  Antisense strand to SEQ ID NO: 1849925
uucuaaaggacacaguacc

SEQ ID NO: 1849927 - RNA, 19 nt, Artificial Sequence
  Description of Artificial Sequence: Synthetic oligonucleotide
  Sense strand starting at position 1605 of SEQ ID NO: 1564031
ucaggagguuccugcucaa

SEQ ID NO: 1849928 - RNA, 19 nt, Artificial Sequence
  Description of Artificial Sequence: Synthetic oligonucleotide
  Antisense strand to SEQ ID NO: 1849927
uugagcaggaaccuccuga

SEQ ID NO: 1849929 - RNA, 19 nt, Artificial Sequence
  Description of Artificial Sequence: Synthetic oligonucleotide
  Sense strand starting at position 1609 of SEQ ID NO: 1564031
gagguuccugcucaaccua

SEQ ID NO: 1849930 - RNA, 19 nt, Artificial Sequence
  Description of Artificial Sequence: Synthetic oligonucleotide
  Antisense strand to SEQ ID NO: 1849929
uagguugagcaggaaccuc

SEQ ID NO: 1849931 - RNA, 19 nt, Artificial Sequence
  Description of Artificial Sequence: Synthetic oligonucleotide
  Sense strand starting at position 1712 of SEQ ID NO: 1564031
ugaugaaaguguguggaga

SEQ ID NO: 1849932 - RNA, 19 nt, Artificial Sequence
  Description of Artificial Sequence: Synthetic oligonucleotide
  Antisense strand to SEQ ID NO: 1849931
ucuccacacacuuucauca

SEQ ID NO: 1849933 - RNA, 19 nt, Artificial Sequence
  Description of Artificial Sequence: Synthetic oligonucleotide
  Sense strand starting at position 2004 of SEQ ID NO: 1564031
gggucaggcgaauguaauc

SEQ ID NO: 1849934 - RNA, 19 nt, Artificial Sequence
  Description of Artificial Sequence: Synthetic oligonucleotide
  Antisense strand to SEQ ID NO: 1849933
gauuacauucgccugaccc

SEQ ID NO: 1849935 - RNA, 19 nt, Artificial Sequence
  Description of Artificial Sequence: Synthetic oligonucleotide
  Sense strand starting at position 2013 of SEQ ID NO: 1564031
gaauguaauccuugcgacc

SEQ ID NO: 1849936 - RNA, 19 nt, Artificial Sequence
  Description of Artificial Sequence: Synthetic oligonucleotide
  Antisense strand to SEQ ID NO: 1849935
ggucgcaaggauuacauuc

SEQ ID NO: 1849937 - RNA, 19 nt, Artificial Sequence
  Description of Artificial Sequence: Synthetic oligonucleotide
  Sense strand starting at position 2015 of SEQ ID NO: 1564031
auguaauccuugcgaccgu

SEQ ID NO: 1849938 - RNA, 19 nt, Artificial Sequence
  Description of Artificial Sequence: Synthetic oligonucleotide
  Antisense strand to SEQ ID NO: 1849937
acggucgcaaggauuacau

SEQ ID NO: 1849939 - RNA, 19 nt, Artificial Sequence
  Description of Artificial Sequence: Synthetic oligonucleotide
  Sense strand starting at position 2293 of SEQ ID NO: 1564031
gcuugaagguucuguagug

SEQ ID NO: 1849940 - RNA, 19 nt, Artificial Sequence
  Description of Artificial Sequence: Synthetic oligonucleotide
  Antisense strand to SEQ ID NO: 1849939
cacuacagaaccuucaagc

SEQ ID NO: 1849941 - RNA, 19 nt, Artificial Sequence
  Description of Artificial Sequence: Synthetic oligonucleotide
  Sense strand starting at position 2365 of SEQ ID NO: 1564031
gggugcuuguguugacguu

SEQ ID NO: 1849942 - RNA, 19 nt, Artificial Sequence
  Description of Artificial Sequence: Synthetic oligonucleotide
  Antisense strand to SEQ ID NO: 1849941
aacgucaacacaagcaccc

SEQ ID NO: 1849943 - RNA, 19 nt, Artificial Sequence
  Description of Artificial Sequence: Synthetic oligonucleotide
  Sense strand starting at position 2389 of SEQ ID NO: 1564031
ucgauuuauuucggaugcu

SEQ ID NO: 1849944 - RNA, 19 nt, Artificial Sequence
  Description of Artificial Sequence: Synthetic oligonucleotide
  Antisense strand to SEQ ID NO: 1849943
agcauccgaaauaaaucga

SEQ ID NO: 1849945 - RNA, 19 nt, Artificial Sequence
  Description of Artificial Sequence: Synthetic oligonucleotide
  Sense strand starting at position 2390 of SEQ ID NO: 1564031
cgauuuauuucggaugcuu

SEQ ID NO: 1849946 - RNA, 19 nt, Artificial Sequence
  Description of Artificial Sequence: Synthetic oligonucleotide
  Antisense strand to SEQ ID NO: 1849945
aagcauccgaaauaaaucg

SEQ ID NO: 1849947 - RNA, 19 nt, Artificial Sequence
  Description of Artificial Sequence: Synthetic oligonucleotide
  Sense strand starting at position 2472 of SEQ ID NO: 1564031
cccgaugaaugcugcaaca

SEQ ID NO: 1849948 - RNA, 19 nt, Artificial Sequence
  Description of Artificial Sequence: Synthetic oligonucleotide
  Antisense strand to SEQ ID NO: 1849947
uguugcagcauucaucggg

SEQ ID NO: 1849949 - RNA, 19 nt, Artificial Sequence
  Description of Artificial Sequence: Synthetic oligonucleotide
  Sense strand starting at position 2474 of SEQ ID NO: 1564031
cgaugaaugcugcaacaau

SEQ ID NO: 1849950 - RNA, 19 nt, Artificial Sequence
  Description of Artificial Sequence: Synthetic oligonucleotide
  Antisense strand to SEQ ID NO: 1849949
auuguugcagcauucaucg

SEQ ID NO: 1849951 - RNA, 19 nt, Artificial Sequence
  Description of Artificial Sequence: Synthetic oligonucleotide
  Sense strand starting at position 3086 of SEQ ID NO: 1564031
gacaguagggucugaagau

SEQ ID NO: 1849952 - RNA, 19 nt, Artificial Sequence
  Description of Artificial Sequence: Synthetic oligonucleotide
  Antisense strand to SEQ ID NO: 1849951
aucuucagacccuacuguc

SEQ ID NO: 1849953 - RNA, 19 nt, Artificial Sequence
  Description of Artificial Sequence: Synthetic oligonucleotide
  Sense strand starting at position 3087 of SEQ ID NO: 1564031
acaguagggucugaagauu

SEQ ID NO: 1849954 - RNA, 19 nt, Artificial Sequence
  Description of Artificial Sequence: Synthetic oligonucleotide
  Antisense strand to SEQ ID NO: 1849953
aaucuucagacccuacugu

SEQ ID NO: 1849955 - RNA, 19 nt, Artificial Sequence
  Description of Artificial Sequence: Synthetic oligonucleotide
  Sense strand starting at position 3183 of SEQ ID NO: 1564031
ucggaagaggcuuggcuaa

SEQ ID NO: 1849956 - RNA, 19 nt, Artificial Sequence
  Description of Artificial Sequence: Synthetic oligonucleotide
  Antisense strand to SEQ ID NO: 1849955
uuagccaagccucuuccga

SEQ ID NO: 1849957 - RNA, 19 nt, Artificial Sequence
  Description of Artificial Sequence: Synthetic oligonucleotide
  Sense strand starting at position 3288 of SEQ ID NO: 1564031
cagagugauuggcaggaga

SEQ ID NO: 1849958 - RNA, 19 nt, Artificial Sequence
  Description of Artificial Sequence: Synthetic oligonucleotide
  Antisense strand to SEQ ID NO: 1849957
ucuccugccaaucacucug

SEQ ID NO: 1849959 - RNA, 19 nt, Artificial Sequence
  Description of Artificial Sequence: Synthetic oligonucleotide
  Sense strand starting at position 3504 of SEQ ID NO: 1564031
gaguuuauuugggagagga

SEQ ID NO: 1849960 - RNA, 19 nt, Artificial Sequence
  Description of Artificial Sequence: Synthetic oligonucleotide
  Antisense strand to SEQ ID NO: 1849959
uccucucccaaauaaacuc

SEQ ID NO: 1849961 - RNA, 19 nt, Artificial Sequence
  Description of Artificial Sequence: Synthetic oligonucleotide
  Sense strand starting at position 3517 of SEQ ID NO: 1564031
agaggagaaucauauuugu

SEQ ID NO: 1849962 - RNA, 19 nt, Artificial Sequence
  Description of Artificial Sequence: Synthetic oligonucleotide
  Antisense strand to SEQ ID NO: 1849961
acaaauaugauucuccucu

SEQ ID NO: 1849963 - RNA, 19 nt, Artificial Sequence
  Description of Artificial Sequence: Synthetic oligonucleotide
  Sense strand starting at position 3567 of SEQ ID NO: 1564031
uaccgaaggguuugggaaa

SEQ ID NO: 1849964 - RNA, 19 nt, Artificial Sequence
  Description of Artificial Sequence: Synthetic oligonucleotide
  Antisense strand to SEQ ID NO: 1849963
uuucccaaacccuucggua

SEQ ID NO: 1849965 - RNA, 19 nt, Artificial Sequence
  Description of Artificial Sequence: Synthetic oligonucleotide
  Sense strand starting at position 3796 of SEQ ID NO: 1564031
uugguucuguccuccuauu

SEQ ID NO: 1849966 - RNA, 19 nt, Artificial Sequence
  Description of Artificial Sequence: Synthetic oligonucleotide
  Antisense strand to SEQ ID NO: 1849965
aauaggaggacagaaccaa

SEQ ID NO: 1849967 - RNA, 19 nt, Artificial Sequence
  Description of Artificial Sequence: Synthetic oligonucleotide
  Sense strand starting at position 3821 of SEQ ID NO: 1564031
gcuguuucaucacgggagu

SEQ ID NO: 1849968 - RNA, 19 nt, Artificial Sequence
  Description of Artificial Sequence: Synthetic oligonucleotide
  Antisense strand to SEQ ID NO: 1849967
acucccgugaugaaacagc

SEQ ID NO: 1849969 - RNA, 19 nt, Artificial Sequence
  Description of Artificial Sequence: Synthetic oligonucleotide
  Sense strand starting at position 3897 of SEQ ID NO: 1564031
gccauaucacucgacucuu

SEQ ID NO: 1849970 - RNA, 19 nt, Artificial Sequence
  Description of Artificial Sequence: Synthetic oligonucleotide
  Antisense strand to SEQ ID NO: 1849969
aagagucgagugauauggc

SEQ ID NO: 1849971 - RNA, 19 nt, Artificial Sequence
  Description of Artificial Sequence: Synthetic oligonucleotide
  Sense strand starting at position 3979 of SEQ ID NO: 1564031
ucuggaagcuccuauccaa

SEQ ID NO: 1849972 - RNA, 19 nt, Artificial Sequence
  Description of Artificial Sequence: Synthetic oligonucleotide
  Antisense strand to SEQ ID NO: 1849971
uuggauaggagcuuccaga

SEQ ID NO: 1849973 - RNA, 19 nt, Artificial Sequence
  Description of Artificial Sequence: Synthetic oligonucleotide
  Sense strand starting at position 347 of SEQ ID NO: 1564032
gcccuuccucaaggucuaa

SEQ ID NO: 1849974 - RNA, 19 nt, Artificial Sequence
  Description of Artificial Sequence: Synthetic oligonucleotide
  Antisense strand to SEQ ID NO: 1849973
uuagaccuugaggaagggc

SEQ ID NO: 1849975 - RNA, 19 nt, Artificial Sequence
  Description of Artificial Sequence: Synthetic oligonucleotide
  Sense strand starting at position 442 of SEQ ID NO: 1564032
uggucuuccuaagucauaa

SEQ ID NO: 1849976 - RNA, 19 nt, Artificial Sequence
  Description of Artificial Sequence: Synthetic oligonucleotide
  Antisense strand to SEQ ID NO: 1849975
uuaugacuuaggaagacca

SEQ ID NO: 1849977 - RNA, 19 nt, Artificial Sequence
  Description of Artificial Sequence: Synthetic oligonucleotide
  Sense strand starting at position 653 of SEQ ID NO: 1564032
gccgaugacaacuguuuaa

SEQ ID NO: 1849978 - RNA, 19 nt, Artificial Sequence
  Description of Artificial Sequence: Synthetic oligonucleotide
  Antisense strand to SEQ ID NO: 1849977
uuaaacaguugucaucggc

SEQ ID NO: 1849979 - RNA, 19 nt, Artificial Sequence
  Description of Artificial Sequence: Synthetic oligonucleotide
  Sense strand starting at position 681 of SEQ ID NO: 1564032
ccacguucaguugggauau

SEQ ID NO: 1849980 - RNA, 19 nt, Artificial Sequence
  Description of Artificial Sequence: Synthetic oligonucleotide
  Antisense strand to SEQ ID NO: 1849979
auaucccaacugaacgugg

SEQ ID NO: 1849981 - RNA, 19 nt, Artificial Sequence
  Description of Artificial Sequence: Synthetic oligonucleotide
  Sense strand starting at position 825 of SEQ ID NO: 1564032
ggauaaagcguccgauaca

SEQ ID NO: 1849982 - RNA, 19 nt, Artificial Sequence
  Description of Artificial Sequence: Synthetic oligonucleotide
  Antisense strand to SEQ ID NO: 1849981
uguaucggacgcuuuaucc

SEQ ID NO: 1849983 - RNA, 19 nt, Artificial Sequence
  Description of Artificial Sequence: Synthetic oligonucleotide
  Sense strand starting at position 828 of SEQ ID NO: 1564032
uaaagcguccgauacaaga

SEQ ID NO: 1849984 - RNA, 19 nt, Artificial Sequence
  Description of Artificial Sequence: Synthetic oligonucleotide
  Antisense strand to SEQ ID NO: 1849983
ucuuguaucggacgcuuua

SEQ ID NO: 1849985 - RNA, 19 nt, Artificial Sequence
  Description of Artificial Sequence: Synthetic oligonucleotide
  Sense strand starting at position 2284 of SEQ ID NO: 1564032
ggcguagcucagcagaagu

SEQ ID NO: 1849986 - RNA, 19 nt, Artificial Sequence
  Description of Artificial Sequence: Synthetic oligonucleotide
  Antisense strand to SEQ ID NO: 1849985
acuucugcugagcuacgcc

SEQ ID NO: 1849987 - RNA, 19 nt, Artificial Sequence
  Description of Artificial Sequence: Synthetic oligonucleotide
  Sense strand starting at position 2323 of SEQ ID NO: 1564032
gaaacuggcguuuggugaa

SEQ ID NO: 1849988 - RNA, 19 nt, Artificial Sequence
  Description of Artificial Sequence: Synthetic oligonucleotide
  Antisense strand to SEQ ID NO: 1849987
uucaccaaacgccaguuuc

SEQ ID NO: 1849989 - RNA, 19 nt, Artificial Sequence
  Description of Artificial Sequence: Synthetic oligonucleotide
  Sense strand starting at position 2327 of SEQ ID NO: 1564032
cuggcguuuggugaagaga

SEQ ID NO: 1849990 - RNA, 19 nt, Artificial Sequence
  Description of Artificial Sequence: Synthetic oligonucleotide
  Antisense strand to SEQ ID NO: 1849989
ucucuucaccaaacgccag

SEQ ID NO: 1849991 - RNA, 19 nt, Artificial Sequence
  Description of Artificial Sequence: Synthetic oligonucleotide
  Sense strand starting at position 2504 of SEQ ID NO: 1564032
ucugauuggcuuuaaguca

SEQ ID NO: 1849992 - RNA, 19 nt, Artificial Sequence
  Description of Artificial Sequence: Synthetic oligonucleotide
  Antisense strand to SEQ ID NO: 1849991
ugacuuaaagccaaucaga

SEQ ID NO: 1849993 - RNA, 19 nt, Artificial Sequence
  Description of Artificial Sequence: Synthetic oligonucleotide
  Sense strand starting at position 2544 of SEQ ID NO: 1564032
uggcaaucugcauacagau

SEQ ID NO: 1849994 - RNA, 19 nt, Artificial Sequence
  Description of Artificial Sequence: Synthetic oligonucleotide
  Antisense strand to SEQ ID NO: 1849993
aucuguaugcagauugcca

SEQ ID NO: 1849995 - RNA, 19 nt, Artificial Sequence
  Description of Artificial Sequence: Synthetic oligonucleotide
  Sense strand starting at position 2607 of SEQ ID NO: 1564032
uuguuugggaccugagaga

SEQ ID NO: 1849996 - RNA, 19 nt, Artificial Sequence
  Description of Artificial Sequence: Synthetic oligonucleotide
  Antisense strand to SEQ ID NO: 1849995
ucucucaggucccaaacaa

SEQ ID NO: 1849997 - RNA, 19 nt, Artificial Sequence
  Description of Artificial Sequence: Synthetic oligonucleotide
  Sense strand starting at position 2618 of SEQ ID NO: 1564032
cugagagaauuuggaauga

SEQ ID NO: 1849998 - RNA, 19 nt, Artificial Sequence
  Description of Artificial Sequence: Synthetic oligonucleotide
  Antisense strand to SEQ ID NO: 1849997
ucauuccaaauucucucag

SEQ ID NO: 1849999 - RNA, 19 nt, Artificial Sequence
  Description of Artificial Sequence: Synthetic oligonucleotide
  Sense strand starting at position 2660 of SEQ ID NO: 1564032
ccgggucuucgggaugagu

SEQ ID NO: 1850000 - RNA, 19 nt, Artificial Sequence
  Description of Artificial Sequence: Synthetic oligonucleotide
  Antisense strand to SEQ ID NO: 1849999
acucaucccgaagacccgg

SEQ ID NO: 1850001 - RNA, 19 nt, Artificial Sequence
  Description of Artificial Sequence: Synthetic oligonucleotide
  Sense strand starting at position 2662 of SEQ ID NO: 1564032
gggucuucgggaugaguuc

SEQ ID NO: 1850002 - RNA, 19 nt, Artificial Sequence
  Description of Artificial Sequence: Synthetic oligonucleotide
  Antisense strand to SEQ ID NO: 1850001
gaacucaucccgaagaccc

SEQ ID NO: 1850003 - RNA, 19 nt, Artificial Sequence
  Description of Artificial Sequence: Synthetic oligonucleotide
  Sense strand starting at position 2695 of SEQ ID NO: 1564032
gcuguaggacucuggugau

SEQ ID NO: 1850004 - RNA, 19 nt, Artificial Sequence
  Description of Artificial Sequence: Synthetic oligonucleotide
  Antisense strand to SEQ ID NO: 1850003
aucaccagaguccuacagc

SEQ ID NO: 1850005 - RNA, 19 nt, Artificial Sequence
  Description of Artificial Sequence: Synthetic oligonucleotide
  Sense strand starting at position 2701 of SEQ ID NO: 1564032
ggacucuggugauucuaga

SEQ ID NO: 1850006 - RNA, 19 nt, Artificial Sequence
  Description of Artificial Sequence: Synthetic oligonucleotide
  Antisense strand to SEQ ID NO: 1850005
ucuagaaucaccagagucc

SEQ ID NO: 1850007 - RNA, 19 nt, Artificial Sequence
  Description of Artificial Sequence: Synthetic oligonucleotide
  Sense strand starting at position 2842 of SEQ ID NO: 1564032
gagagaucgcccgaccaaa

SEQ ID NO: 1850008 - RNA, 19 nt, Artificial Sequence
  Description of Artificial Sequence: Synthetic oligonucleotide
  Antisense strand to SEQ ID NO: 1850007
uuuggucgggcgaucucuc

SEQ ID NO: 1850009 - RNA, 19 nt, Artificial Sequence
  Description of Artificial Sequence: Synthetic oligonucleotide
  Sense strand starting at position 2856 of SEQ ID NO: 1564032
ccaaauguagugcgugaaa

SEQ ID NO: 1850010 - RNA, 19 nt, Artificial Sequence
  Description of Artificial Sequence: Synthetic oligonucleotide
  Antisense strand to SEQ ID NO: 1850009
uuucacgcacuacauuugg

SEQ ID NO: 1850011 - RNA, 19 nt, Artificial Sequence
  Description of Artificial Sequence: Synthetic oligonucleotide
  Sense strand starting at position 2858 of SEQ ID NO: 1564032
aaauguagugcgugaaacu

SEQ ID NO: 1850012 - RNA, 19 nt, Artificial Sequence
  Description of Artificial Sequence: Synthetic oligonucleotide
  Antisense strand to SEQ ID NO: 1850011
aguuucacgcacuacauuu

SEQ ID NO: 1850013 - RNA, 19 nt, Artificial Sequence
  Description of Artificial Sequence: Synthetic oligonucleotide
  Sense strand starting at position 2859 of SEQ ID NO: 1564032
aauguagugcgugaaacuu

SEQ ID NO: 1850014 - RNA, 19 nt, Artificial Sequence
  Description of Artificial Sequence: Synthetic oligonucleotide
  Antisense strand to SEQ ID NO: 1850013
aaguuucacgcacuacauu

SEQ ID NO: 1850015 - RNA, 19 nt, Artificial Sequence
  Description of Artificial Sequence: Synthetic oligonucleotide
  Sense strand starting at position 2868 of SEQ ID NO: 1564032
cgugaaacuugauugguca

SEQ ID NO: 1850016 - RNA, 19 nt, Artificial Sequence
  Description of Artificial Sequence: Synthetic oligonucleotide
  Antisense strand to SEQ ID NO: 1850015
ugaccaaucaaguuucacg

SEQ ID NO: 1850017 - RNA, 19 nt, Artificial Sequence
  Description of Artificial Sequence: Synthetic oligonucleotide
  Sense strand starting at position 2872 of SEQ ID NO: 1564032
aaacuugauuggucacugu

SEQ ID NO: 1850018 - RNA, 19 nt, Artificial Sequence
  Description of Artificial Sequence: Synthetic oligonucleotide
  Antisense strand to SEQ ID NO: 1850017
acagugaccaaucaaguuu

SEQ ID NO: 1850019 - RNA, 19 nt, Artificial Sequence
  Description of Artificial Sequence: Synthetic oligonucleotide
  Sense strand starting at position 2918 of SEQ ID NO: 1564032
aagaauugugcagaggcau

SEQ ID NO: 1850020 - RNA, 19 nt, Artificial Sequence
  Description of Artificial Sequence: Synthetic oligonucleotide
  Antisense strand to SEQ ID NO: 1850019
augccucugcacaauucuu

SEQ ID NO: 1850021 - RNA, 19 nt, Artificial Sequence
  Description of Artificial Sequence: Synthetic oligonucleotide
  Sense strand starting at position 2975 of SEQ ID NO: 1564032
uuaaguguggcucaggcaa

SEQ ID NO: 1850022 - RNA, 19 nt, Artificial Sequence
  Description of Artificial Sequence: Synthetic oligonucleotide
  Antisense strand to SEQ ID NO: 1850021
uugccugagccacacuuaa

SEQ ID NO: 1850023 - RNA, 19 nt, Artificial Sequence
  Description of Artificial Sequence: Synthetic oligonucleotide
  Sense strand starting at position 2987 of SEQ ID NO: 1564032
caggcaauaguuggacaua

SEQ ID NO: 1850024 - RNA, 19 nt, Artificial Sequence
  Description of Artificial Sequence: Synthetic oligonucleotide
  Antisense strand to SEQ ID NO: 1850023
uauguccaacuauugccug

SEQ ID NO: 1850025 - RNA, 19 nt, Artificial Sequence
  Description of Artificial Sequence: Synthetic oligonucleotide
  Sense strand starting at position 2990 of SEQ ID NO: 1564032
gcaauaguuggacauacuu

SEQ ID NO: 1850026 - RNA, 19 nt, Artificial Sequence
  Description of Artificial Sequence: Synthetic oligonucleotide
  Antisense strand to SEQ ID NO: 1850025
aaguauguccaacuauugc

SEQ ID NO: 1850027 - RNA, 19 nt, Artificial Sequence
  Description of Artificial Sequence: Synthetic oligonucleotide
  Sense strand starting at position 3017 of SEQ ID NO: 1564032
aacccauauccguguggau

SEQ ID NO: 1850028 - RNA, 19 nt, Artificial Sequence
  Description of Artificial Sequence: Synthetic oligonucleotide
  Antisense strand to SEQ ID NO: 1850027
auccacacggauauggguu

SEQ ID NO: 1850029 - RNA, 19 nt, Artificial Sequence
  Description of Artificial Sequence: Synthetic oligonucleotide
  Sense strand starting at position 3019 of SEQ ID NO: 1564032
cccauauccguguggauuu

SEQ ID NO: 1850030 - RNA, 19 nt, Artificial Sequence
  Description of Artificial Sequence: Synthetic oligonucleotide
  Antisense strand to SEQ ID NO: 1850029
aaauccacacggauauggg

SEQ ID NO: 1850031 - RNA, 19 nt, Artificial Sequence
  Description of Artificial Sequence: Synthetic oligonucleotide
  Sense strand starting at position 3041 of SEQ ID NO: 1564032
augcaaauauagcuagaua

SEQ ID NO: 1850032 - RNA, 19 nt, Artificial Sequence
  Description of Artificial Sequence: Synthetic oligonucleotide
  Antisense strand to SEQ ID NO: 1850031
uaucuagcuauauuugcau

SEQ ID NO: 1850033 - RNA, 19 nt, Artificial Sequence
  Description of Artificial Sequence: Synthetic oligonucleotide
  Sense strand starting at position 3086 of SEQ ID NO: 1564032
ugcagacagugcuuaacuu

SEQ ID NO: 1850034 - RNA, 19 nt, Artificial Sequence
  Description of Artificial Sequence: Synthetic oligonucleotide
  Antisense strand to SEQ ID NO: 1850033
aaguuaagcacugucugca

SEQ ID NO: 1850035 - RNA, 19 nt, Artificial Sequence
  Description of Artificial Sequence: Synthetic oligonucleotide
  Sense strand starting at position 3223 of SEQ ID NO: 1564032
gagggaucucagcgauucu

SEQ ID NO: 1850036 - RNA, 19 nt, Artificial Sequence
  Description of Artificial Sequence: Synthetic oligonucleotide
  Antisense strand to SEQ ID NO: 1850035
agaaucgcugagaucccuc

SEQ ID NO: 1850037 - RNA, 19 nt, Artificial Sequence
  Description of Artificial Sequence: Synthetic oligonucleotide
  Sense strand starting at position 3625 of SEQ ID NO: 1564032
ccuugauccugguuaggac

SEQ ID NO: 1850038 - RNA, 19 nt, Artificial Sequence
  Description of Artificial Sequence: Synthetic oligonucleotide
  Antisense strand to SEQ ID NO: 1850037
guccuaaccaggaucaagg

SEQ ID NO: 1850039 - RNA, 19 nt, Artificial Sequence
  Description of Artificial Sequence: Synthetic oligonucleotide
  Sense strand starting at position 3752 of SEQ ID NO: 1564032
agggccugaccuuggaaau

SEQ ID NO: 1850040 - RNA, 19 nt, Artificial Sequence
  Description of Artificial Sequence: Synthetic oligonucleotide
  Antisense strand to SEQ ID NO: 1850039
auuuccaaggucaggcccu

SEQ ID NO: 1850041 - RNA, 19 nt, Artificial Sequence
  Description of Artificial Sequence: Synthetic oligonucleotide
  Sense strand starting at position 3753 of SEQ ID NO: 1564032
gggccugaccuuggaaaug

SEQ ID NO: 1850042 - RNA, 19 nt, Artificial Sequence
  Description of Artificial Sequence: Synthetic oligonucleotide
  Antisense strand to SEQ ID NO: 1850041
cauuuccaaggucaggccc

SEQ ID NO: 1850043 - RNA, 19 nt, Artificial Sequence
  Description of Artificial Sequence: Synthetic oligonucleotide
  Sense strand starting at position 3832 of SEQ ID NO: 1564032
agauguccuugccugcaaa

SEQ ID NO: 1850044 - RNA, 19 nt, Artificial Sequence
  Description of Artificial Sequence: Synthetic oligonucleotide
  Antisense strand to SEQ ID NO: 1850043
uuugcaggcaaggacaucu

SEQ ID NO: 1850045 - RNA, 19 nt, Artificial Sequence
  Description of Artificial Sequence: Synthetic oligonucleotide
  Sense strand starting at position 3833 of SEQ ID NO: 1564032
gauguccuugccugcaaau

SEQ ID NO: 1850046 - RNA, 19 nt, Artificial Sequence
  Description of Artificial Sequence: Synthetic oligonucleotide
  Antisense strand to SEQ ID NO: 1850045
auuugcaggcaaggacauc

SEQ ID NO: 1850047 - RNA, 19 nt, Artificial Sequence
  Description of Artificial Sequence: Synthetic oligonucleotide
  Sense strand starting at position 3876 of SEQ ID NO: 1564032
acagauuugcagcguuaaa

SEQ ID NO: 1850048 - RNA, 19 nt, Artificial Sequence
  Description of Artificial Sequence: Synthetic oligonucleotide
  Antisense strand to SEQ ID NO: 1850047
uuuaacgcugcaaaucugu

SEQ ID NO: 1850049 - RNA, 19 nt, Artificial Sequence
  Description of Artificial Sequence: Synthetic oligonucleotide
  Sense strand starting at position 3886 of SEQ ID NO: 1564032
agcguuaaacucugcuuga

SEQ ID NO: 1850050 - RNA, 19 nt, Artificial Sequence
  Description of Artificial Sequence: Synthetic oligonucleotide
  Antisense strand to SEQ ID NO: 1850049
ucaagcagaguuuaacgcu

SEQ ID NO: 1850051 - RNA, 19 nt, Artificial Sequence
  Description of Artificial Sequence: Synthetic oligonucleotide
  Sense strand starting at position 3889 of SEQ ID NO: 1564032
guuaaacucugcuugagcu

SEQ ID NO: 1850052 - RNA, 19 nt, Artificial Sequence
  Description of Artificial Sequence: Synthetic oligonucleotide
  Antisense strand to SEQ ID NO: 1850051
agcucaagcagaguuuaac

SEQ ID NO: 1850053 - RNA, 19 nt, Artificial Sequence
  Description of Artificial Sequence: Synthetic oligonucleotide
  Sense strand starting at position 100 of SEQ ID NO: 1564033
uuccuagacgcauaggaaa

SEQ ID NO: 1850054 - RNA, 19 nt, Artificial Sequence
  Description of Artificial Sequence: Synthetic oligonucleotide
  Antisense strand to SEQ ID NO: 1850053
uuuccuaugcgucuaggaa

SEQ ID NO: 1850055 - RNA, 19 nt, Artificial Sequence
  Description of Artificial Sequence: Synthetic oligonucleotide
  Sense strand starting at position 230 of SEQ ID NO: 1564033
gcccaugagccauaauggu

SEQ ID NO: 1850056 - RNA, 19 nt, Artificial Sequence
  Description of Artificial Sequence: Synthetic oligonucleotide
  Antisense strand to SEQ ID NO: 1850055
accauuauggcucaugggc

SEQ ID NO: 1850057 - RNA, 19 nt, Artificial Sequence
  Description of Artificial Sequence: Synthetic oligonucleotide
  Sense strand starting at position 236 of SEQ ID NO: 1564033
gagccauaaugguuuggaa

SEQ ID NO: 1850058 - RNA, 19 nt, Artificial Sequence
  Description of Artificial Sequence: Synthetic oligonucleotide
  Antisense strand to SEQ ID NO: 1850057
uuccaaaccauuauggcuc

SEQ ID NO: 1850059 - RNA, 19 nt, Artificial Sequence
  Description of Artificial Sequence: Synthetic oligonucleotide
  Sense strand starting at position 301 of SEQ ID NO: 1564033
ccugguuacagauggcaau

SEQ ID NO: 1850060 - RNA, 19 nt, Artificial Sequence
  Description of Artificial Sequence: Synthetic oligonucleotide
  Antisense strand to SEQ ID NO: 1850059
auugccaucuguaaccagg

SEQ ID NO: 1850061 - RNA, 19 nt, Artificial Sequence
  Description of Artificial Sequence: Synthetic oligonucleotide
  Sense strand starting at position 311 of SEQ ID NO: 1564033
gauggcaauguuuacacua

SEQ ID NO: 1850062 - RNA, 19 nt, Artificial Sequence
  Description of Artificial Sequence: Synthetic oligonucleotide
  Antisense strand to SEQ ID NO: 1850061
uaguguaaacauugccauc

SEQ ID NO: 1850063 - RNA, 19 nt, Artificial Sequence
  Description of Artificial Sequence: Synthetic oligonucleotide
  Sense strand starting at position 364 of SEQ ID NO: 1564033
ggaagaagcuguccauuau

SEQ ID NO: 1850064 - RNA, 19 nt, Artificial Sequence
  Description of Artificial Sequence: Synthetic oligonucleotide
  Antisense strand to SEQ ID NO: 1850063
auaauggacagcuucuucc

SEQ ID NO: 1850065 - RNA, 19 nt, Artificial Sequence
  Description of Artificial Sequence: Synthetic oligonucleotide
  Sense strand starting at position 365 of SEQ ID NO: 1564033
gaagaagcuguccauuauc

SEQ ID NO: 1850066 - RNA, 19 nt, Artificial Sequence
  Description of Artificial Sequence: Synthetic oligonucleotide
  Antisense strand to SEQ ID NO: 1850065
gauaauggacagcuucuuc

SEQ ID NO: 1850067 - RNA, 19 nt, Artificial Sequence
  Description of Artificial Sequence: Synthetic oligonucleotide
  Sense strand starting at position 375 of SEQ ID NO: 1564033
uccauuaucggugacauua

SEQ ID NO: 1850068 - RNA, 19 nt, Artificial Sequence
  Description of Artificial Sequence: Synthetic oligonucleotide
  Antisense strand to SEQ ID NO: 1850067
uaaugucaccgauaaugga

SEQ ID NO: 1850069 - RNA, 19 nt, Artificial Sequence
  Description of Artificial Sequence: Synthetic oligonucleotide
  Sense strand starting at position 383 of SEQ ID NO: 1564033
cggugacauuacuuuauca

SEQ ID NO: 1850070 - RNA, 19 nt, Artificial Sequence
  Description of Artificial Sequence: Synthetic oligonucleotide
  Antisense strand to SEQ ID NO: 1850069
ugauaaaguaaugucaccg

SEQ ID NO: 1850071 - RNA, 19 nt, Artificial Sequence
  Description of Artificial Sequence: Synthetic oligonucleotide
  Sense strand starting at position 385 of SEQ ID NO: 1564033
gugacauuacuuuaucagc

SEQ ID NO: 1850072 - RNA, 19 nt, Artificial Sequence
  Description of Artificial Sequence: Synthetic oligonucleotide
  Antisense strand to SEQ ID NO: 1850071
gcugauaaaguaaugucac

SEQ ID NO: 1850073 - RNA, 19 nt, Artificial Sequence
  Description of Artificial Sequence: Synthetic oligonucleotide
  Sense strand starting at position 395 of SEQ ID NO: 1564033
uuuaucagcugggucuaaa

SEQ ID NO: 1850074 - RNA, 19 nt, Artificial Sequence
  Description of Artificial Sequence: Synthetic oligonucleotide
  Antisense strand to SEQ ID NO: 1850073
uuuagacccagcugauaaa

SEQ ID NO: 1850075 - RNA, 19 nt, Artificial Sequence
  Description of Artificial Sequence: Synthetic oligonucleotide
  Sense strand starting at position 423 of SEQ ID NO: 1564033
gcgaguuaaacuuggaaau

SEQ ID NO: 1850076 - RNA, 19 nt, Artificial Sequence
  Description of Artificial Sequence: Synthetic oligonucleotide
  Antisense strand to SEQ ID NO: 1850075
auuuccaaguuuaacucgc

SEQ ID NO: 1850077 - RNA, 19 nt, Artificial Sequence
  Description of Artificial Sequence: Synthetic oligonucleotide
  Sense strand starting at position 424 of SEQ ID NO: 1564033
cgaguuaaacuuggaaauc

SEQ ID NO: 1850078 - RNA, 19 nt, Artificial Sequence
  Description of Artificial Sequence: Synthetic oligonucleotide
  Antisense strand to SEQ ID NO: 1850077
gauuuccaaguuuaacucg

SEQ ID NO: 1850079 - RNA, 19 nt, Artificial Sequence
  Description of Artificial Sequence: Synthetic oligonucleotide
  Sense strand starting at position 490 of SEQ ID NO: 1564033
uucgaaauauucuuaucug

SEQ ID NO: 1850080 - RNA, 19 nt, Artificial Sequence
  Description of Artificial Sequence: Synthetic oligonucleotide
  Antisense strand to SEQ ID NO: 1850079
cagauaagaauauuucgaa

SEQ ID NO: 1850081 - RNA, 19 nt, Artificial Sequence
  Description of Artificial Sequence: Synthetic oligonucleotide
  Sense strand starting at position 884 of SEQ ID NO: 1564033
gauggacucgguuacugaa

SEQ ID NO: 1850082 - RNA, 19 nt, Artificial Sequence
  Description of Artificial Sequence: Synthetic oligonucleotide
  Antisense strand to SEQ ID NO: 1850081
uucaguaaccgaguccauc

SEQ ID NO: 1850083 - RNA, 19 nt, Artificial Sequence
  Description of Artificial Sequence: Synthetic oligonucleotide
  Sense strand starting at position 913 of SEQ ID NO: 1564033
uugcauuaucuguaccacu

SEQ ID NO: 1850084 - RNA, 19 nt, Artificial Sequence
  Description of Artificial Sequence: Synthetic oligonucleotide
  Antisense strand to SEQ ID NO: 1850083
agugguacagauaaugcaa

SEQ ID NO: 1850085 - RNA, 19 nt, Artificial Sequence
  Description of Artificial Sequence: Synthetic oligonucleotide
  Sense strand starting at position 998 of SEQ ID NO: 1564033
ugagaugcuggcuaucaag

SEQ ID NO: 1850086 - RNA, 19 nt, Artificial Sequence
  Description of Artificial Sequence: Synthetic oligonucleotide
  Antisense strand to SEQ ID NO: 1850085
cuugauagccagcaucuca

SEQ ID NO: 1850087 - RNA, 19 nt, Artificial Sequence
  Description of Artificial Sequence: Synthetic oligonucleotide
  Sense strand starting at position 1023 of SEQ ID NO: 1564033
gagucaacgcaucacuuua

SEQ ID NO: 1850088 - RNA, 19 nt, Artificial Sequence
  Description of Artificial Sequence: Synthetic oligonucleotide
  Antisense strand to SEQ ID NO: 1850087
uaaagugaugcguugacuc

SEQ ID NO: 1850089 - RNA, 19 nt, Artificial Sequence
  Description of Artificial Sequence: Synthetic oligonucleotide
  Sense strand starting at position 1262 of SEQ ID NO: 1564033
cagguaggcucucuaaaug

SEQ ID NO: 1850090 - RNA, 19 nt, Artificial Sequence
  Description of Artificial Sequence: Synthetic oligonucleotide
  Antisense strand to SEQ ID NO: 1850089
cauuuagagagccuaccug

SEQ ID NO: 1850091 - RNA, 19 nt, Artificial Sequence
  Description of Artificial Sequence: Synthetic oligonucleotide
  Sense strand starting at position 1287 of SEQ ID NO: 1564033
agucuaagagcugaagcaa

SEQ ID NO: 1850092 - RNA, 19 nt, Artificial Sequence
  Description of Artificial Sequence: Synthetic oligonucleotide
  Antisense strand to SEQ ID NO: 1850091
uugcuucagcucuuagacu

SEQ ID NO: 1850093 - RNA, 19 nt, Artificial Sequence
  Description of Artificial Sequence: Synthetic oligonucleotide
  Sense strand starting at position 2061 of SEQ ID NO: 1564033
ucagguauugggugaagag

SEQ ID NO: 1850094 - RNA, 19 nt, Artificial Sequence
  Description of Artificial Sequence: Synthetic oligonucleotide
  Antisense strand to SEQ ID NO: 1850093
cucuucacccaauaccuga

SEQ ID NO: 1850095 - RNA, 19 nt, Artificial Sequence
  Description of Artificial Sequence: Synthetic oligonucleotide
  Sense strand starting at position 2529 of SEQ ID NO: 1564033
uuucuagugcuggaaccaa

SEQ ID NO: 1850096 - RNA, 19 nt, Artificial Sequence
  Description of Artificial Sequence: Synthetic oligonucleotide
  Antisense strand to SEQ ID NO: 1850095
uugguuccagcacuagaaa

SEQ ID NO: 1850097 - RNA, 19 nt, Artificial Sequence
  Description of Artificial Sequence: Synthetic oligonucleotide
  Sense strand starting at position 2540 of SEQ ID NO: 1564033
ggaaccaaguauguugaaa

SEQ ID NO: 1850098 - RNA, 19 nt, Artificial Sequence
  Description of Artificial Sequence: Synthetic oligonucleotide
  Antisense strand to SEQ ID NO: 1850097
uuucaacauacuugguucc

SEQ ID NO: 1850099 - RNA, 19 nt, Artificial Sequence
  Description of Artificial Sequence: Synthetic oligonucleotide
  Sense strand starting at position 2638 of SEQ ID NO: 1564033
uauaguguucuaugggacu

SEQ ID NO: 1850100 - RNA, 19 nt, Artificial Sequence
  Description of Artificial Sequence: Synthetic oligonucleotide
  Antisense strand to SEQ ID NO: 1850099
agucccauagaacacuaua

SEQ ID NO: 1850101 - RNA, 19 nt, Artificial Sequence
  Description of Artificial Sequence: Synthetic oligonucleotide
  Sense strand starting at position 2802 of SEQ ID NO: 1564033
ggaccuaagugagccuuua

SEQ ID NO: 1850102 - RNA, 19 nt, Artificial Sequence
  Description of Artificial Sequence: Synthetic oligonucleotide
  Antisense strand to SEQ ID NO: 1850101
uaaaggcucacuuaggucc

SEQ ID NO: 1850103 - RNA, 19 nt, Artificial Sequence
  Description of Artificial Sequence: Synthetic oligonucleotide
  Sense strand starting at position 2902 of SEQ ID NO: 1564033
ugaccauagugcucauaac

SEQ ID NO: 1850104 - RNA, 19 nt, Artificial Sequence
  Description of Artificial Sequence: Synthetic oligonucleotide
  Antisense strand to SEQ ID NO: 1850103
guuaugagcacuaugguca

SEQ ID NO: 1850105 - RNA, 19 nt, Artificial Sequence
  Description of Artificial Sequence: Synthetic oligonucleotide
  Sense strand starting at position 3085 of SEQ ID NO: 1564033
gaggacuucuccuucugac

SEQ ID NO: 1850106 - RNA, 19 nt, Artificial Sequence
  Description of Artificial Sequence: Synthetic oligonucleotide
  Antisense strand to SEQ ID NO: 1850105
gucagaaggagaaguccuc

SEQ ID NO: 1850107 - RNA, 19 nt, Artificial Sequence
  Description of Artificial Sequence: Synthetic oligonucleotide
  Sense strand starting at position 3141 of SEQ ID NO: 1564033
ggcccauguauauaggaau

SEQ ID NO: 1850108 - RNA, 19 nt, Artificial Sequence
  Description of Artificial Sequence: Synthetic oligonucleotide
  Antisense strand to SEQ ID NO: 1850107
auuccuauauacaugggcc

SEQ ID NO: 1850109 - RNA, 19 nt, Artificial Sequence
  Description of Artificial Sequence: Synthetic oligonucleotide
  Sense strand starting at position 3326 of SEQ ID NO: 1564033
agugaacauucuuuaugug

SEQ ID NO: 1850110 - RNA, 19 nt, Artificial Sequence
  Description of Artificial Sequence: Synthetic oligonucleotide
  Antisense strand to SEQ ID NO: 1850109
cacauaaagaauguucacu

SEQ ID NO: 1850111 - RNA, 19 nt, Artificial Sequence
  Description of Artificial Sequence: Synthetic oligonucleotide
  Sense strand starting at position 3342 of SEQ ID NO: 1564033
gugcuaggcccuguguauu

SEQ ID NO: 1850112 - RNA, 19 nt, Artificial Sequence
  Description of Artificial Sequence: Synthetic oligonucleotide
  Antisense strand to SEQ ID NO: 1850111
aauacacagggccuagcac

SEQ ID NO: 1850113 - RNA, 19 nt, Artificial Sequence
  Description of Artificial Sequence: Synthetic oligonucleotide
  Sense strand starting at position 3353 of SEQ ID NO: 1564033
uguguauuggcacaagaau

SEQ ID NO: 1850114 - RNA, 19 nt, Artificial Sequence
  Description of Artificial Sequence: Synthetic oligonucleotide
  Antisense strand to SEQ ID NO: 1850113
auucuugugccaauacaca

SEQ ID NO: 1850115 - RNA, 19 nt, Artificial Sequence
  Description of Artificial Sequence: Synthetic oligonucleotide
  Sense strand starting at position 3459 of SEQ ID NO: 1564033
gucaaauggcaauaagugu

SEQ ID NO: 1850116 - RNA, 19 nt, Artificial Sequence
  Description of Artificial Sequence: Synthetic oligonucleotide
  Antisense strand to SEQ ID NO: 1850115
acacuuauugccauuugac

SEQ ID NO: 1850117 - RNA, 19 nt, Artificial Sequence
  Description of Artificial Sequence: Synthetic oligonucleotide
  Sense strand starting at position 3509 of SEQ ID NO: 1564033
gauaaugugccagagugua

SEQ ID NO: 1850118 - RNA, 19 nt, Artificial Sequence
  Description of Artificial Sequence: Synthetic oligonucleotide
  Antisense strand to SEQ ID NO: 1850117
uacacucuggcacauuauc

SEQ ID NO: 1850119 - RNA, 19 nt, Artificial Sequence
  Description of Artificial Sequence: Synthetic oligonucleotide
  Sense strand starting at position 3547 of SEQ ID NO: 1564033
uaaguaggguggucagaga

SEQ ID NO: 1850120 - RNA, 19 nt, Artificial Sequence
  Description of Artificial Sequence: Synthetic oligonucleotide
  Antisense strand to SEQ ID NO: 1850119
ucucugaccacccuacuua

SEQ ID NO: 1850121 - RNA, 19 nt, Artificial Sequence
  Description of Artificial Sequence: Synthetic oligonucleotide
  Sense strand starting at position 3569 of SEQ ID NO: 1564033
ccugucuuggaagguaaca

SEQ ID NO: 1850122 - RNA, 19 nt, Artificial Sequence
  Description of Artificial Sequence: Synthetic oligonucleotide
  Antisense strand to SEQ ID NO: 1850121
uguuaccuuccaagacagg

SEQ ID NO: 1850123 - RNA, 19 nt, Artificial Sequence
  Description of Artificial Sequence: Synthetic oligonucleotide
  Sense strand starting at position 3571 of SEQ ID NO: 1564033
ugucuuggaagguaacauu

SEQ ID NO: 1850124 - RNA, 19 nt, Artificial Sequence
  Description of Artificial Sequence: Synthetic oligonucleotide
  Antisense strand to SEQ ID NO: 1850123
aauguuaccuuccaagaca

SEQ ID NO: 1850125 - RNA, 19 nt, Artificial Sequence
  Description of Artificial Sequence: Synthetic oligonucleotide
  Sense strand starting at position 3633 of SEQ ID NO: 1564033
ccauguugauaucucgaua

SEQ ID NO: 1850126 - RNA, 19 nt, Artificial Sequence
  Description of Artificial Sequence: Synthetic oligonucleotide
  Antisense strand to SEQ ID NO: 1850125
uaucgagauaucaacaugg

SEQ ID NO: 1850127 - RNA, 19 nt, Artificial Sequence
  Description of Artificial Sequence: Synthetic oligonucleotide
  Sense strand starting at position 3636 of SEQ ID NO: 1564033
uguugauaucucgauaagc

SEQ ID NO: 1850128 - RNA, 19 nt, Artificial Sequence
  Description of Artificial Sequence: Synthetic oligonucleotide
  Antisense strand to SEQ ID NO: 1850127
gcuuaucgagauaucaaca

SEQ ID NO: 1850129 - RNA, 19 nt, Artificial Sequence
  Description of Artificial Sequence: Synthetic oligonucleotide
  Sense strand starting at position 3638 of SEQ ID NO: 1564033
uugauaucucgauaagcaa

SEQ ID NO: 1850130 - RNA, 19 nt, Artificial Sequence
  Description of Artificial Sequence: Synthetic oligonucleotide
  Antisense strand to SEQ ID NO: 1850129
uugcuuaucgagauaucaa

SEQ ID NO: 1850131 - RNA, 19 nt, Artificial Sequence
  Description of Artificial Sequence: Synthetic oligonucleotide
  Sense strand starting at position 3743 of SEQ ID NO: 1564033
gguggaauguaucuauaag

SEQ ID NO: 1850132 - RNA, 19 nt, Artificial Sequence
  Description of Artificial Sequence: Synthetic oligonucleotide
  Antisense strand to SEQ ID NO: 1850131
cuuauagauacauuccacc

SEQ ID NO: 1850133 - RNA, 19 nt, Artificial Sequence
  Description of Artificial Sequence: Synthetic oligonucleotide
  Sense strand starting at position 38 of SEQ ID NO: 1564034
cugacuuagcagugaacug

SEQ ID NO: 1850134 - RNA, 19 nt, Artificial Sequence
  Description of Artificial Sequence: Synthetic oligonucleotide
  Antisense strand to SEQ ID NO: 1850133
caguucacugcuaagucag

SEQ ID NO: 1850135 - RNA, 19 nt, Artificial Sequence
  Description of Artificial Sequence: Synthetic oligonucleotide
  Sense strand starting at position 39 of SEQ ID NO: 1564034
ugacuuagcagugaacuga

SEQ ID NO: 1850136 - RNA, 19 nt, Artificial Sequence
  Description of Artificial Sequence: Synthetic oligonucleotide
  Antisense strand to SEQ ID NO: 1850135
ucaguucacugcuaaguca

SEQ ID NO: 1850137 - RNA, 19 nt, Artificial Sequence
  Description of Artificial Sequence: Synthetic oligonucleotide
  Sense strand starting at position 207 of SEQ ID NO: 1564034
uguucuuacagcgacugaa

SEQ ID NO: 1850138 - RNA, 19 nt, Artificial Sequence
  Description of Artificial Sequence: Synthetic oligonucleotide
  Antisense strand to SEQ ID NO: 1850137
uucagucgcuguaagaaca

SEQ ID NO: 1850139 - RNA, 19 nt, Artificial Sequence
  Description of Artificial Sequence: Synthetic oligonucleotide
  Sense strand starting at position 267 of SEQ ID NO: 1564034
gcucuauccuucuccagag

SEQ ID NO: 1850140 - RNA, 19 nt, Artificial Sequence
  Description of Artificial Sequence: Synthetic oligonucleotide
  Antisense strand to SEQ ID NO: 1850139
cucuggagaaggauagagc

SEQ ID NO: 1850141 - RNA, 19 nt, Artificial Sequence
  Description of Artificial Sequence: Synthetic oligonucleotide
  Sense strand starting at position 327 of SEQ ID NO: 1564034
aguggaauucuuuagccaa

SEQ ID NO: 1850142 - RNA, 19 nt, Artificial Sequence
  Description of Artificial Sequence: Synthetic oligonucleotide
  Antisense strand to SEQ ID NO: 1850141
uuggcuaaagaauuccacu

SEQ ID NO: 1850143 - RNA, 19 nt, Artificial Sequence
  Description of Artificial Sequence: Synthetic oligonucleotide
  Sense strand starting at position 329 of SEQ ID NO: 1564034
uggaauucuuuagccaaag

SEQ ID NO: 1850144 - RNA, 19 nt, Artificial Sequence
  Description of Artificial Sequence: Synthetic oligonucleotide
  Antisense strand to SEQ ID NO: 1850143
cuuuggcuaaagaauucca

SEQ ID NO: 1850145 - RNA, 19 nt, Artificial Sequence
  Description of Artificial Sequence: Synthetic oligonucleotide
  Sense strand starting at position 330 of SEQ ID NO: 1564034
ggaauucuuuagccaaagu

SEQ ID NO: 1850146 - RNA, 19 nt, Artificial Sequence
  Description of Artificial Sequence: Synthetic oligonucleotide
  Antisense strand to SEQ ID NO: 1850145
acuuuggcuaaagaauucc

SEQ ID NO: 1850147 - RNA, 19 nt, Artificial Sequence
  Description of Artificial Sequence: Synthetic oligonucleotide
  Sense strand starting at position 393 of SEQ ID NO: 1564034
cggagccauaacuggaauu

SEQ ID NO: 1850148 - RNA, 19 nt, Artificial Sequence
  Description of Artificial Sequence: Synthetic oligonucleotide
  Antisense strand to SEQ ID NO: 1850147
aauuccaguuauggcuccg

SEQ ID NO: 1850149 - RNA, 19 nt, Artificial Sequence
  Description of Artificial Sequence: Synthetic oligonucleotide
  Sense strand starting at position 417 of SEQ ID NO: 1564034
ccuggaagaagucacguaa

SEQ ID NO: 1850150 - RNA, 19 nt, Artificial Sequence
  Description of Artificial Sequence: Synthetic oligonucleotide
  Antisense strand to SEQ ID NO: 1850149
uuacgugacuucuuccagg

SEQ ID NO: 1850151 - RNA, 19 nt, Artificial Sequence
  Description of Artificial Sequence: Synthetic oligonucleotide
  Sense strand starting at position 701 of SEQ ID NO: 1564034
auugaaccuuugccaaaga

SEQ ID NO: 1850152 - RNA, 19 nt, Artificial Sequence
  Description of Artificial Sequence: Synthetic oligonucleotide
  Antisense strand to SEQ ID NO: 1850151
ucuuuggcaaagguucaau

SEQ ID NO: 1850153 - RNA, 19 nt, Artificial Sequence
  Description of Artificial Sequence: Synthetic oligonucleotide
  Sense strand starting at position 731 of SEQ ID NO: 1564034
ucaguaacuguggacaguu

SEQ ID NO: 1850154 - RNA, 19 nt, Artificial Sequence
  Description of Artificial Sequence: Synthetic oligonucleotide
  Antisense strand to SEQ ID NO: 1850153
aacuguccacaguuacuga

SEQ ID NO: 1850155 - RNA, 19 nt, Artificial Sequence
  Description of Artificial Sequence: Synthetic oligonucleotide
  Sense strand starting at position 741 of SEQ ID NO: 1564034
uggacaguuaacgguacua

SEQ ID NO: 1850156 - RNA, 19 nt, Artificial Sequence
  Description of Artificial Sequence: Synthetic oligonucleotide
  Antisense strand to SEQ ID NO: 1850155
uaguaccguuaacugucca

SEQ ID NO: 1850157 - RNA, 19 nt, Artificial Sequence
  Description of Artificial Sequence: Synthetic oligonucleotide
  Sense strand starting at position 743 of SEQ ID NO: 1564034
gacaguuaacgguacuaga

SEQ ID NO: 1850158 - RNA, 19 nt, Artificial Sequence
  Description of Artificial Sequence: Synthetic oligonucleotide
  Antisense strand to SEQ ID NO: 1850157
ucuaguaccguuaacuguc

SEQ ID NO: 1850159 - RNA, 19 nt, Artificial Sequence
  Description of Artificial Sequence: Synthetic oligonucleotide
  Sense strand starting at position 895 of SEQ ID NO: 1564034
uugagaaaugggugaaagu

SEQ ID NO: 1850160 - RNA, 19 nt, Artificial Sequence
  Description of Artificial Sequence: Synthetic oligonucleotide
  Antisense strand to SEQ ID NO: 1850159
acuuucacccauuucucaa

SEQ ID NO: 1850161 - RNA, 19 nt, Artificial Sequence
  Description of Artificial Sequence: Synthetic oligonucleotide
  Sense strand starting at position 986 of SEQ ID NO: 1564034
ucuuuaaagcagcaagagu

SEQ ID NO: 1850162 - RNA, 19 nt, Artificial Sequence
  Description of Artificial Sequence: Synthetic oligonucleotide
  Antisense strand to SEQ ID NO: 1850161
acucuugcugcuuuaaaga

SEQ ID NO: 1850163 - RNA, 19 nt, Artificial Sequence
  Description of Artificial Sequence: Synthetic oligonucleotide
  Sense strand starting at position 2323 of SEQ ID NO: 1564034
gguguucagcuauagcaag

SEQ ID NO: 1850164 - RNA, 19 nt, Artificial Sequence
  Description of Artificial Sequence: Synthetic oligonucleotide
  Antisense strand to SEQ ID NO: 1850163
cuugcuauagcugaacacc

SEQ ID NO: 1850165 - RNA, 19 nt, Artificial Sequence
  Description of Artificial Sequence: Synthetic oligonucleotide
  Sense strand starting at position 2388 of SEQ ID NO: 1564034
guuuguaccagagagcuaa

SEQ ID NO: 1850166 - RNA, 19 nt, Artificial Sequence
  Description of Artificial Sequence: Synthetic oligonucleotide
  Antisense strand to SEQ ID NO: 1850165
uuagcucucugguacaaac

SEQ ID NO: 1850167 - RNA, 19 nt, Artificial Sequence
  Description of Artificial Sequence: Synthetic oligonucleotide
  Sense strand starting at position 2392 of SEQ ID NO: 1564034
guaccagagagcuaagcau

SEQ ID NO: 1850168 - RNA, 19 nt, Artificial Sequence
  Description of Artificial Sequence: Synthetic oligonucleotide
  Antisense strand to SEQ ID NO: 1850167
augcuuagcucucugguac

SEQ ID NO: 1850169 - RNA, 19 nt, Artificial Sequence
  Description of Artificial Sequence: Synthetic oligonucleotide
  Sense strand starting at position 2434 of SEQ ID NO: 1564034
acuuuaugugaugauagca

SEQ ID NO: 1850170 - RNA, 19 nt, Artificial Sequence
  Description of Artificial Sequence: Synthetic oligonucleotide
  Antisense strand to SEQ ID NO: 1850169
ugcuaucaucacauaaagu

SEQ ID NO: 1850171 - RNA, 19 nt, Artificial Sequence
  Description of Artificial Sequence: Synthetic oligonucleotide
  Sense strand starting at position 2520 of SEQ ID NO: 1564034
auagaugugaguugcaaau

SEQ ID NO: 1850172 - RNA, 19 nt, Artificial Sequence
  Description of Artificial Sequence: Synthetic oligonucleotide
  Antisense strand to SEQ ID NO: 1850171
auuugcaacucacaucuau

SEQ ID NO: 1850173 - RNA, 19 nt, Artificial Sequence
  Description of Artificial Sequence: Synthetic oligonucleotide
  Sense strand starting at position 2526 of SEQ ID NO: 1564034
gugaguugcaaauaauugu

SEQ ID NO: 1850174 - RNA, 19 nt, Artificial Sequence
  Description of Artificial Sequence: Synthetic oligonucleotide
  Antisense strand to SEQ ID NO: 1850173
acaauuauuugcaacucac

SEQ ID NO: 1850175 - RNA, 19 nt, Artificial Sequence
  Description of Artificial Sequence: Synthetic oligonucleotide
  Sense strand starting at position 2800 of SEQ ID NO: 1564034
gguggcucacuggaucaaa

SEQ ID NO: 1850176 - RNA, 19 nt, Artificial Sequence
  Description of Artificial Sequence: Synthetic oligonucleotide
  Antisense strand to SEQ ID NO: 1850175
uuugauccagugagccacc

SEQ ID NO: 1850177 - RNA, 19 nt, Artificial Sequence
  Description of Artificial Sequence: Synthetic oligonucleotide
  Sense strand starting at position 3146 of SEQ ID NO: 1564034
cugauucaaccggguagau

SEQ ID NO: 1850178 - RNA, 19 nt, Artificial Sequence
  Description of Artificial Sequence: Synthetic oligonucleotide
  Antisense strand to SEQ ID NO: 1850177
aucuacccgguugaaucag

SEQ ID NO: 1850179 - RNA, 19 nt, Artificial Sequence
  Description of Artificial Sequence: Synthetic oligonucleotide
  Sense strand starting at position 3159 of SEQ ID NO: 1564034
guagauaaauggcuugguu

SEQ ID NO: 1850180 - RNA, 19 nt, Artificial Sequence
  Description of Artificial Sequence: Synthetic oligonucleotide
  Antisense strand to SEQ ID NO: 1850179
aaccaagccauuuaucuac

SEQ ID NO: 1850181 - RNA, 19 nt, Artificial Sequence
  Description of Artificial Sequence: Synthetic oligonucleotide
  Sense strand starting at position 3194 of SEQ ID NO: 1564034
cgaauuggcucuccaucaa

SEQ ID NO: 1850182 - RNA, 19 nt, Artificial Sequence
  Description of Artificial Sequence: Synthetic oligonucleotide
  Antisense strand to SEQ ID NO: 1850181
uugauggagagccaauucg

SEQ ID NO: 1850183 - RNA, 19 nt, Artificial Sequence
  Description of Artificial Sequence: Synthetic oligonucleotide
  Sense strand starting at position 3283 of SEQ ID NO: 1564034
cagggaugauucgcaucau

SEQ ID NO: 1850184 - RNA, 19 nt, Artificial Sequence
  Description of Artificial Sequence: Synthetic oligonucleotide
  Antisense strand to SEQ ID NO: 1850183
augaugcgaaucaucccug

SEQ ID NO: 1850185 - RNA, 19 nt, Artificial Sequence
  Description of Artificial Sequence: Synthetic oligonucleotide
  Sense strand starting at position 3289 of SEQ ID NO: 1564034
ugauucgcaucauugggau

SEQ ID NO: 1850186 - RNA, 19 nt, Artificial Sequence
  Description of Artificial Sequence: Synthetic oligonucleotide
  Antisense strand to SEQ ID NO: 1850185
aucccaaugaugcgaauca

SEQ ID NO: 1850187 - RNA, 19 nt, Artificial Sequence
  Description of Artificial Sequence: Synthetic oligonucleotide
  Sense strand starting at position 3324 of SEQ ID NO: 1564034
uguacuuugcaaggagauu

SEQ ID NO: 1850188 - RNA, 19 nt, Artificial Sequence
  Description of Artificial Sequence: Synthetic oligonucleotide
  Antisense strand to SEQ ID NO: 1850187
aaucuccuugcaaaguaca

SEQ ID NO: 1850189 - RNA, 19 nt, Artificial Sequence
  Description of Artificial Sequence: Synthetic oligonucleotide
  Sense strand starting at position 3325 of SEQ ID NO: 1564034
guacuuugcaaggagauua

SEQ ID NO: 1850190 - RNA, 19 nt, Artificial Sequence
  Description of Artificial Sequence: Synthetic oligonucleotide
  Antisense strand to SEQ ID NO: 1850189
uaaucuccuugcaaaguac

SEQ ID NO: 1850191 - RNA, 19 nt, Artificial Sequence
  Description of Artificial Sequence: Synthetic oligonucleotide
  Sense strand starting at position 3335 of SEQ ID NO: 1564034
aggagauuacuuggcacau

SEQ ID NO: 1850192 - RNA, 19 nt, Artificial Sequence
  Description of Artificial Sequence: Synthetic oligonucleotide
  Antisense strand to SEQ ID NO: 1850191
augugccaaguaaucuccu

SEQ ID NO: 1850193 - RNA, 19 nt, Artificial Sequence
  Description of Artificial Sequence: Synthetic oligonucleotide
  Sense strand starting at position 3336 of SEQ ID NO: 1564034
ggagauuacuuggcacauc

SEQ ID NO: 1850194 - RNA, 19 nt, Artificial Sequence
  Description of Artificial Sequence: Synthetic oligonucleotide
  Antisense strand to SEQ ID NO: 1850193
gaugugccaaguaaucucc

SEQ ID NO: 1850195 - RNA, 19 nt, Artificial Sequence
  Description of Artificial Sequence: Synthetic oligonucleotide
  Sense strand starting at position 3500 of SEQ ID NO: 1564034
ucugcaaugguuuauuauc

SEQ ID NO: 1850196 - RNA, 19 nt, Artificial Sequence
  Description of Artificial Sequence: Synthetic oligonucleotide
  Antisense strand to SEQ ID NO: 1850195
gauaauaaaccauugcaga

SEQ ID NO: 1850197 - RNA, 19 nt, Artificial Sequence
  Description of Artificial Sequence: Synthetic oligonucleotide
  Sense strand starting at position 3502 of SEQ ID NO: 1564034
ugcaaugguuuauuaucua

SEQ ID NO: 1850198 - RNA, 19 nt, Artificial Sequence
  Description of Artificial Sequence: Synthetic oligonucleotide
  Antisense strand to SEQ ID NO: 1850197
uagauaauaaaccauugca

SEQ ID NO: 1850199 - RNA, 19 nt, Artificial Sequence
  Description of Artificial Sequence: Synthetic oligonucleotide
  Sense strand starting at position 3537 of SEQ ID NO: 1564034
uuaccauagcaaugagauu

SEQ ID NO: 1850200 - RNA, 19 nt, Artificial Sequence
  Description of Artificial Sequence: Synthetic oligonucleotide
  Antisense strand to SEQ ID NO: 1850199
aaucucauugcuaugguaa

SEQ ID NO: 1850201 - RNA, 19 nt, Artificial Sequence
  Description of Artificial Sequence: Synthetic oligonucleotide
  Sense strand starting at position 3831 of SEQ ID NO: 1564034
uggucuuuggguggguaaa

SEQ ID NO: 1850202 - RNA, 19 nt, Artificial Sequence
  Description of Artificial Sequence: Synthetic oligonucleotide
  Antisense strand to SEQ ID NO: 1850201
uuuacccacccaaagacca

SEQ ID NO: 1850203 - RNA, 19 nt, Artificial Sequence
  Description of Artificial Sequence: Synthetic oligonucleotide
  Sense strand starting at position 3832 of SEQ ID NO: 1564034
ggucuuuggguggguaaau

SEQ ID NO: 1850204 - RNA, 19 nt, Artificial Sequence
  Description of Artificial Sequence: Synthetic oligonucleotide
  Antisense strand to SEQ ID NO: 1850203
auuuacccacccaaagacc

SEQ ID NO: 1850205 - RNA, 19 nt, Artificial Sequence
  Description of Artificial Sequence: Synthetic oligonucleotide
  Sense strand starting at position 3868 of SEQ ID NO: 1564034
cucggauugaauugugaca

SEQ ID NO: 1850206 - RNA, 19 nt, Artificial Sequence
  Description of Artificial Sequence: Synthetic oligonucleotide
  Antisense strand to SEQ ID NO: 1850205
ugucacaauucaauccgag

SEQ ID NO: 1850207 - RNA, 19 nt, Artificial Sequence
  Description of Artificial Sequence: Synthetic oligonucleotide
  Sense strand starting at position 3954 of SEQ ID NO: 1564034
gguucaauaguuugaugag

SEQ ID NO: 1850208 - RNA, 19 nt, Artificial Sequence
  Description of Artificial Sequence: Synthetic oligonucleotide
  Antisense strand to SEQ ID NO: 1850207
cucaucaaacuauugaacc

SEQ ID NO: 1850209 - RNA, 19 nt, Artificial Sequence
  Description of Artificial Sequence: Synthetic oligonucleotide
  Sense strand starting at position 3968 of SEQ ID NO: 1564034
augaguuacucugcuuaaa

SEQ ID NO: 1850210 - RNA, 19 nt, Artificial Sequence
  Description of Artificial Sequence: Synthetic oligonucleotide
  Antisense strand to SEQ ID NO: 1850209
uuuaagcagaguaacucau

SEQ ID NO: 1850211 - RNA, 19 nt, Artificial Sequence
  Description of Artificial Sequence: Synthetic oligonucleotide
  Sense strand starting at position 3970 of SEQ ID NO: 1564034
gaguuacucugcuuaaaug

SEQ ID NO: 1850212 - RNA, 19 nt, Artificial Sequence
  Description of Artificial Sequence: Synthetic oligonucleotide
  Antisense strand to SEQ ID NO: 1850211
cauuuaagcagaguaacuc

SEQ ID NO: 1850213 - RNA, 19 nt, Artificial Sequence
  Description of Artificial Sequence: Synthetic oligonucleotide
  Sense strand starting at position 1171 of SEQ ID NO: 1564035
auauguaauugacugagcu

SEQ ID NO: 1850214 - RNA, 19 nt, Artificial Sequence
  Description of Artificial Sequence: Synthetic oligonucleotide
  Antisense strand to SEQ ID NO: 1850213
agcucagucaauuacauau

SEQ ID NO: 1850215 - RNA, 19 nt, Artificial Sequence
  Description of Artificial Sequence: Synthetic oligonucleotide
  Sense strand starting at position 1175 of SEQ ID NO: 1564035
guaauugacugagcucacu

SEQ ID NO: 1850216 - RNA, 19 nt, Artificial Sequence
  Description of Artificial Sequence: Synthetic oligonucleotide
  Antisense strand to SEQ ID NO: 1850215
agugagcucagucaauuac

SEQ ID NO: 1850217 - RNA, 19 nt, Artificial Sequence
  Description of Artificial Sequence: Synthetic oligonucleotide
  Sense strand starting at position 1191 of SEQ ID NO: 1564035
acugaaauauaccagggaa

SEQ ID NO: 1850218 - RNA, 19 nt, Artificial Sequence
  Description of Artificial Sequence: Synthetic oligonucleotide
  Antisense strand to SEQ ID NO: 1850217
uucccugguauauuucagu

SEQ ID NO: 1850219 - RNA, 19 nt, Artificial Sequence
  Description of Artificial Sequence: Synthetic oligonucleotide
  Sense strand starting at position 1285 of SEQ ID NO: 1564035
aguacuaggcuacaugauu

SEQ ID NO: 1850220 - RNA, 19 nt, Artificial Sequence
  Description of Artificial Sequence: Synthetic oligonucleotide
  Antisense strand to SEQ ID NO: 1850219
aaucauguagccuaguacu

SEQ ID NO: 1850221 - RNA, 19 nt, Artificial Sequence
  Description of Artificial Sequence: Synthetic oligonucleotide
  Sense strand starting at position 1311 of SEQ ID NO: 1564035
augacuacucaguggccua

SEQ ID NO: 1850222 - RNA, 19 nt, Artificial Sequence
  Description of Artificial Sequence: Synthetic oligonucleotide
  Antisense strand to SEQ ID NO: 1850221
uaggccacugaguagucau

SEQ ID NO: 1850223 - RNA, 19 nt, Artificial Sequence
  Description of Artificial Sequence: Synthetic oligonucleotide
  Sense strand starting at position 1469 of SEQ ID NO: 1564035
agauucuggcaagauuguu

SEQ ID NO: 1850224 - RNA, 19 nt, Artificial Sequence
  Description of Artificial Sequence: Synthetic oligonucleotide
  Antisense strand to SEQ ID NO: 1850223
aacaaucuugccagaaucu

SEQ ID NO: 1850225 - RNA, 19 nt, Artificial Sequence
  Description of Artificial Sequence: Synthetic oligonucleotide
  Sense strand starting at position 1562 of SEQ ID NO: 1564035
acaaguuucucuucuugag

SEQ ID NO: 1850226 - RNA, 19 nt, Artificial Sequence
  Description of Artificial Sequence: Synthetic oligonucleotide
  Antisense strand to SEQ ID NO: 1850225
cucaagaagagaaacuugu

SEQ ID NO: 1850227 - RNA, 19 nt, Artificial Sequence
  Description of Artificial Sequence: Synthetic oligonucleotide
  Sense strand starting at position 1566 of SEQ ID NO: 1564035
guuucucuucuugagguau

SEQ ID NO: 1850228 - RNA, 19 nt, Artificial Sequence
  Description of Artificial Sequence: Synthetic oligonucleotide
  Antisense strand to SEQ ID NO: 1850227
auaccucaagaagagaaac

SEQ ID NO: 1850229 - RNA, 19 nt, Artificial Sequence
  Description of Artificial Sequence: Synthetic oligonucleotide
  Sense strand starting at position 1733 of SEQ ID NO: 1564035
ucuuaaauccgguauucuu

SEQ ID NO: 1850230 - RNA, 19 nt, Artificial Sequence
  Description of Artificial Sequence: Synthetic oligonucleotide
  Antisense strand to SEQ ID NO: 1850229
aagaauaccggauuuaaga

SEQ ID NO: 1850231 - RNA, 19 nt, Artificial Sequence
  Description of Artificial Sequence: Synthetic oligonucleotide
  Sense strand starting at position 2150 of SEQ ID NO: 1564035
cugugacacuccuuugaac

SEQ ID NO: 1850232 - RNA, 19 nt, Artificial Sequence
  Description of Artificial Sequence: Synthetic oligonucleotide
  Antisense strand to SEQ ID NO: 1850231
guucaaaggagugucacag

SEQ ID NO: 1850233 - RNA, 19 nt, Artificial Sequence
  Description of Artificial Sequence: Synthetic oligonucleotide
  Sense strand starting at position 2152 of SEQ ID NO: 1564035
gugacacuccuuugaacuu

SEQ ID NO: 1850234 - RNA, 19 nt, Artificial Sequence
  Description of Artificial Sequence: Synthetic oligonucleotide
  Antisense strand to SEQ ID NO: 1850233
aaguucaaaggagugucac

SEQ ID NO: 1850235 - RNA, 19 nt, Artificial Sequence
  Description of Artificial Sequence: Synthetic oligonucleotide
  Sense strand starting at position 2195 of SEQ ID NO: 1564035
guaguagauggaugguaaa

SEQ ID NO: 1850236 - RNA, 19 nt, Artificial Sequence
  Description of Artificial Sequence: Synthetic oligonucleotide
  Antisense strand to SEQ ID NO: 1850235
uuuaccauccaucuacuac

SEQ ID NO: 1850237 - RNA, 19 nt, Artificial Sequence
  Description of Artificial Sequence: Synthetic oligonucleotide
  Sense strand starting at position 2346 of SEQ ID NO: 1564035
ugucaagucuccucaaauu

SEQ ID NO: 1850238 - RNA, 19 nt, Artificial Sequence
  Description of Artificial Sequence: Synthetic oligonucleotide
  Antisense strand to SEQ ID NO: 1850237
aauuugaggagacuugaca

SEQ ID NO: 1850239 - RNA, 19 nt, Artificial Sequence
  Description of Artificial Sequence: Synthetic oligonucleotide
  Sense strand starting at position 2370 of SEQ ID NO: 1564035
acacauugagcagaguauu

SEQ ID NO: 1850240 - RNA, 19 nt, Artificial Sequence
  Description of Artificial Sequence: Synthetic oligonucleotide
  Antisense strand to SEQ ID NO: 1850239
aauacucugcucaaugugu

SEQ ID NO: 1850241 - RNA, 19 nt, Artificial Sequence
  Description of Artificial Sequence: Synthetic oligonucleotide
  Sense strand starting at position 2382 of SEQ ID NO: 1564035
gaguauugugccuaauauu

SEQ ID NO: 1850242 - RNA, 19 nt, Artificial Sequence
  Description of Artificial Sequence: Synthetic oligonucleotide
  Antisense strand to SEQ ID NO: 1850241
aauauuaggcacaauacuc

SEQ ID NO: 1850243 - RNA, 19 nt, Artificial Sequence
  Description of Artificial Sequence: Synthetic oligonucleotide
  Sense strand starting at position 2423 of SEQ ID NO: 1564035
ggaugcauauuauuaacuu

SEQ ID NO: 1850244 - RNA, 19 nt, Artificial Sequence
  Description of Artificial Sequence: Synthetic oligonucleotide
  Antisense strand to SEQ ID NO: 1850243
aaguuaauaauaugcaucc

SEQ ID NO: 1850245 - RNA, 19 nt, Artificial Sequence
  Description of Artificial Sequence: Synthetic oligonucleotide
  Sense strand starting at position 2431 of SEQ ID NO: 1564035
auuauuaacuugguggaga

SEQ ID NO: 1850246 - RNA, 19 nt, Artificial Sequence
  Description of Artificial Sequence: Synthetic oligonucleotide
  Antisense strand to SEQ ID NO: 1850245
ucuccaccaaguuaauaau

SEQ ID NO: 1850247 - RNA, 19 nt, Artificial Sequence
  Description of Artificial Sequence: Synthetic oligonucleotide
  Sense strand starting at position 2505 of SEQ ID NO: 1564035
cucuaagaaucauugugac

SEQ ID NO: 1850248 - RNA, 19 nt, Artificial Sequence
  Description of Artificial Sequence: Synthetic oligonucleotide
  Antisense strand to SEQ ID NO: 1850247
gucacaaugauucuuagag

SEQ ID NO: 1850249 - RNA, 19 nt, Artificial Sequence
  Description of Artificial Sequence: Synthetic oligonucleotide
  Sense strand starting at position 2667 of SEQ ID NO: 1564035
guaauagagcucuggaagu

SEQ ID NO: 1850250 - RNA, 19 nt, Artificial Sequence
  Description of Artificial Sequence: Synthetic oligonucleotide
  Antisense strand to SEQ ID NO: 1850249
acuuccagagcucuauuac

SEQ ID NO: 1850251 - RNA, 19 nt, Artificial Sequence
  Description of Artificial Sequence: Synthetic oligonucleotide
  Sense strand starting at position 2669 of SEQ ID NO: 1564035
aauagagcucuggaaguuu

SEQ ID NO: 1850252 - RNA, 19 nt, Artificial Sequence
  Description of Artificial Sequence: Synthetic oligonucleotide
  Antisense strand to SEQ ID NO: 1850251
aaacuuccagagcucuauu

SEQ ID NO: 1850253 - RNA, 19 nt, Artificial Sequence
  Description of Artificial Sequence: Synthetic oligonucleotide
  Sense strand starting at position 2848 of SEQ ID NO: 1564035
gccauugaucuacagauua

SEQ ID NO: 1850254 - RNA, 19 nt, Artificial Sequence
  Description of Artificial Sequence: Synthetic oligonucleotide
  Antisense strand to SEQ ID NO: 1850253
uaaucuguagaucaauggc

SEQ ID NO: 1850255 - RNA, 19 nt, Artificial Sequence
  Description of Artificial Sequence: Synthetic oligonucleotide
  Sense strand starting at position 2859 of SEQ ID NO: 1564035
acagauuaauugcuccgaa

SEQ ID NO: 1850256 - RNA, 19 nt, Artificial Sequence
  Description of Artificial Sequence: Synthetic oligonucleotide
  Antisense strand to SEQ ID NO: 1850255
uucggagcaauuaaucugu

SEQ ID NO: 1850257 - RNA, 19 nt, Artificial Sequence
  Description of Artificial Sequence: Synthetic oligonucleotide
  Sense strand starting at position 2907 of SEQ ID NO: 1564035
aauuacuguugcucuagga

SEQ ID NO: 1850258 - RNA, 19 nt, Artificial Sequence
  Description of Artificial Sequence: Synthetic oligonucleotide
  Antisense strand to SEQ ID NO: 1850257
uccuagagcaacaguaauu

SEQ ID NO: 1850259 - RNA, 19 nt, Artificial Sequence
  Description of Artificial Sequence: Synthetic oligonucleotide
  Sense strand starting at position 2911 of SEQ ID NO: 1564035
acuguugcucuaggacaaa

SEQ ID NO: 1850260 - RNA, 19 nt, Artificial Sequence
  Description of Artificial Sequence: Synthetic oligonucleotide
  Antisense strand to SEQ ID NO: 1850259
uuuguccuagagcaacagu

SEQ ID NO: 1850261 - RNA, 19 nt, Artificial Sequence
  Description of Artificial Sequence: Synthetic oligonucleotide
  Sense strand starting at position 2940 of SEQ ID NO: 1564035
uggcaaaccugccuaaauu

SEQ ID NO: 1850262 - RNA, 19 nt, Artificial Sequence
  Description of Artificial Sequence: Synthetic oligonucleotide
  Antisense strand to SEQ ID NO: 1850261
aauuuaggcagguuugcca

SEQ ID NO: 1850263 - RNA, 19 nt, Artificial Sequence
  Description of Artificial Sequence: Synthetic oligonucleotide
  Sense strand starting at position 2980 of SEQ ID NO: 1564035
aggcuagaccugggagauu

SEQ ID NO: 1850264 - RNA, 19 nt, Artificial Sequence
  Description of Artificial Sequence: Synthetic oligonucleotide
  Antisense strand to SEQ ID NO: 1850263
aaucucccaggucuagccu

SEQ ID NO: 1850265 - RNA, 19 nt, Artificial Sequence
  Description of Artificial Sequence: Synthetic oligonucleotide
  Sense strand starting at position 2991 of SEQ ID NO: 1564035
gggagauugugucuuccuu

SEQ ID NO: 1850266 - RNA, 19 nt, Artificial Sequence
  Description of Artificial Sequence: Synthetic oligonucleotide
  Antisense strand to SEQ ID NO: 1850265
aaggaagacacaaucuccc

SEQ ID NO: 1850267 - RNA, 19 nt, Artificial Sequence
  Description of Artificial Sequence: Synthetic oligonucleotide
  Sense strand starting at position 3374 of SEQ ID NO: 1564035
cccagauucuguuucuauu

SEQ ID NO: 1850268 - RNA, 19 nt, Artificial Sequence
  Description of Artificial Sequence: Synthetic oligonucleotide
  Antisense strand to SEQ ID NO: 1850267
aauagaaacagaaucuggg

SEQ ID NO: 1850269 - RNA, 19 nt, Artificial Sequence
  Description of Artificial Sequence: Synthetic oligonucleotide
  Sense strand starting at position 3488 of SEQ ID NO: 1564035
ugucguaucagagaggaaa

SEQ ID NO: 1850270 - RNA, 19 nt, Artificial Sequence
  Description of Artificial Sequence: Synthetic oligonucleotide
  Antisense strand to SEQ ID NO: 1850269
uuuccucucugauacgaca

SEQ ID NO: 1850271 - RNA, 19 nt, Artificial Sequence
  Description of Artificial Sequence: Synthetic oligonucleotide
  Sense strand starting at position 3490 of SEQ ID NO: 1564035
ucguaucagagaggaaauu

SEQ ID NO: 1850272 - RNA, 19 nt, Artificial Sequence
  Description of Artificial Sequence: Synthetic oligonucleotide
  Antisense strand to SEQ ID NO: 1850271
aauuuccucucugauacga

SEQ ID NO: 1850273 - RNA, 19 nt, Artificial Sequence
  Description of Artificial Sequence: Synthetic oligonucleotide
  Sense strand starting at position 3566 of SEQ ID NO: 1564035
aguauaauagguugcauau

SEQ ID NO: 1850274 - RNA, 19 nt, Artificial Sequence
  Description of Artificial Sequence: Synthetic oligonucleotide
  Antisense strand to SEQ ID NO: 1850273
auaugcaaccuauuauacu

SEQ ID NO: 1850275 - RNA, 19 nt, Artificial Sequence
  Description of Artificial Sequence: Synthetic oligonucleotide
  Sense strand starting at position 3666 of SEQ ID NO: 1564035
agaaauaccuguuugguaa

SEQ ID NO: 1850276 - RNA, 19 nt, Artificial Sequence
  Description of Artificial Sequence: Synthetic oligonucleotide
  Antisense strand to SEQ ID NO: 1850275
uuaccaaacagguauuucu

SEQ ID NO: 1850277 - RNA, 19 nt, Artificial Sequence
  Description of Artificial Sequence: Synthetic oligonucleotide
  Sense strand starting at position 3667 of SEQ ID NO: 1564035
gaaauaccuguuugguaag

SEQ ID NO: 1850278 - RNA, 19 nt, Artificial Sequence
  Description of Artificial Sequence: Synthetic oligonucleotide
  Antisense strand to SEQ ID NO: 1850277
cuuaccaaacagguauuuc

SEQ ID NO: 1850279 - RNA, 19 nt, Artificial Sequence
  Description of Artificial Sequence: Synthetic oligonucleotide
  Sense strand starting at position 3669 of SEQ ID NO: 1564035
aauaccuguuugguaagau

SEQ ID NO: 1850280 - RNA, 19 nt, Artificial Sequence
  Description of Artificial Sequence: Synthetic oligonucleotide
  Antisense strand to SEQ ID NO: 1850279
aucuuaccaaacagguauu

SEQ ID NO: 1850281 - RNA, 19 nt, Artificial Sequence
  Description of Artificial Sequence: Synthetic oligonucleotide
  Sense strand starting at position 3685 of SEQ ID NO: 1564035
gauaucaucuuaguuggau

SEQ ID NO: 1850282 - RNA, 19 nt, Artificial Sequence
  Description of Artificial Sequence: Synthetic oligonucleotide
  Antisense strand to SEQ ID NO: 1850281
auccaacuaagaugauauc

SEQ ID NO: 1850283 - RNA, 19 nt, Artificial Sequence
  Description of Artificial Sequence: Synthetic oligonucleotide
  Sense strand starting at position 3686 of SEQ ID NO: 1564035
auaucaucuuaguuggauu

SEQ ID NO: 1850284 - RNA, 19 nt, Artificial Sequence
  Description of Artificial Sequence: Synthetic oligonucleotide
  Antisense strand to SEQ ID NO: 1850283
aauccaacuaagaugauau

SEQ ID NO: 1850285 - RNA, 19 nt, Artificial Sequence
  Description of Artificial Sequence: Synthetic oligonucleotide
  Sense strand starting at position 3709 of SEQ ID NO: 1564035
aacaguaugguguaauaua

SEQ ID NO: 1850286 - RNA, 19 nt, Artificial Sequence
  Description of Artificial Sequence: Synthetic oligonucleotide
  Antisense strand to SEQ ID NO: 1850285
uauauuacaccauacuguu

SEQ ID NO: 1850287 - RNA, 19 nt, Artificial Sequence
  Description of Artificial Sequence: Synthetic oligonucleotide
  Sense strand starting at position 3716 of SEQ ID NO: 1564035
ugguguaauauaggaacca

SEQ ID NO: 1850288 - RNA, 19 nt, Artificial Sequence
  Description of Artificial Sequence: Synthetic oligonucleotide
  Antisense strand to SEQ ID NO: 1850287
ugguuccuauauuacacca

SEQ ID NO: 1850289 - RNA, 19 nt, Artificial Sequence
  Description of Artificial Sequence: Synthetic oligonucleotide
  Sense strand starting at position 3731 of SEQ ID NO: 1564035
accaaauugcugggaacaa

SEQ ID NO: 1850290 - RNA, 19 nt, Artificial Sequence
  Description of Artificial Sequence: Synthetic oligonucleotide
  Antisense strand to SEQ ID NO: 1850289
uuguucccagcaauuuggu

SEQ ID NO: 1850291 - RNA, 19 nt, Artificial Sequence
  Description of Artificial Sequence: Synthetic oligonucleotide
  Sense strand starting at position 3782 of SEQ ID NO: 1564035
agccaugaaguguauaauu

SEQ ID NO: 1850292 - RNA, 19 nt, Artificial Sequence
  Description of Artificial Sequence: Synthetic oligonucleotide
  Antisense strand to SEQ ID NO: 1850291
aauuauacacuucauggcu

SEQ ID NO: 1850293 - RNA, 19 nt, Artificial Sequence
  Description of Artificial Sequence: Synthetic oligonucleotide
  Sense strand starting at position 117 of SEQ ID NO: 1564036
uuauuaggugcuuaucaca

SEQ ID NO: 1850294 - RNA, 19 nt, Artificial Sequence
  Description of Artificial Sequence: Synthetic oligonucleotide
  Antisense strand to SEQ ID NO: 1850293
ugugauaagcaccuaauaa

SEQ ID NO: 1850295 - RNA, 19 nt, Artificial Sequence
  Description of Artificial Sequence: Synthetic oligonucleotide
  Sense strand starting at position 180 of SEQ ID NO: 1564036
ucuaguaguaauggagaaa

SEQ ID NO: 1850296 - RNA, 19 nt, Artificial Sequence
  Description of Artificial Sequence: Synthetic oligonucleotide
  Antisense strand to SEQ ID NO: 1850295
uuucuccauuacuacuaga

SEQ ID NO: 1850297 - RNA, 19 nt, Artificial Sequence
  Description of Artificial Sequence: Synthetic oligonucleotide
  Sense strand starting at position 275 of SEQ ID NO: 1564036
agugaaucaggcuaagucu

SEQ ID NO: 1850298 - RNA, 19 nt, Artificial Sequence
  Description of Artificial Sequence: Synthetic oligonucleotide
  Antisense strand to SEQ ID NO: 1850297
agacuuagccugauucacu

SEQ ID NO: 1850299 - RNA, 19 nt, Artificial Sequence
  Description of Artificial Sequence: Synthetic oligonucleotide
  Sense strand starting at position 559 of SEQ ID NO: 1564036
ggaggaaguucaguuuauu

SEQ ID NO: 1850300 - RNA, 19 nt, Artificial Sequence
  Description of Artificial Sequence: Synthetic oligonucleotide
  Antisense strand to SEQ ID NO: 1850299
aauaaacugaacuuccucc

SEQ ID NO: 1850301 - RNA, 19 nt, Artificial Sequence
  Description of Artificial Sequence: Synthetic oligonucleotide
  Sense strand starting at position 616 of SEQ ID NO: 1564036
acaucuaugcuugggaaca

SEQ ID NO: 1850302 - RNA, 19 nt, Artificial Sequence
  Description of Artificial Sequence: Synthetic oligonucleotide
  Antisense strand to SEQ ID NO: 1850301
uguucccaagcauagaugu

SEQ ID NO: 1850303 - RNA, 19 nt, Artificial Sequence
  Description of Artificial Sequence: Synthetic oligonucleotide
  Sense strand starting at position 883 of SEQ ID NO: 1564036
aaagucuggcuuuauagua

SEQ ID NO: 1850304 - RNA, 19 nt, Artificial Sequence
  Description of Artificial Sequence: Synthetic oligonucleotide
  Antisense strand to SEQ ID NO: 1850303
uacuauaaagccagacuuu

SEQ ID NO: 1850305 - RNA, 19 nt, Artificial Sequence
  Description of Artificial Sequence: Synthetic oligonucleotide
  Sense strand starting at position 890 of SEQ ID NO: 1564036
ggcuuuauaguaugaccau

SEQ ID NO: 1850306 - RNA, 19 nt, Artificial Sequence
  Description of Artificial Sequence: Synthetic oligonucleotide
  Antisense strand to SEQ ID NO: 1850305
auggucauacuauaaagcc

SEQ ID NO: 1850307 - RNA, 19 nt, Artificial Sequence
  Description of Artificial Sequence: Synthetic oligonucleotide
  Sense strand starting at position 1005 of SEQ ID NO: 1564036
ccuaaagggacucguagaa

SEQ ID NO: 1850308 - RNA, 19 nt, Artificial Sequence
  Description of Artificial Sequence: Synthetic oligonucleotide
  Antisense strand to SEQ ID NO: 1850307
uucuacgagucccuuuagg

SEQ ID NO: 1850309 - RNA, 19 nt, Artificial Sequence
  Description of Artificial Sequence: Synthetic oligonucleotide
  Sense strand starting at position 1115 of SEQ ID NO: 1564036
uguuccuaccagugaucaa

SEQ ID NO: 1850310 - RNA, 19 nt, Artificial Sequence
  Description of Artificial Sequence: Synthetic oligonucleotide
  Antisense strand to SEQ ID NO: 1850309
uugaucacugguaggaaca

SEQ ID NO: 1850311 - RNA, 19 nt, Artificial Sequence
  Description of Artificial Sequence: Synthetic oligonucleotide
  Sense strand starting at position 1168 of SEQ ID NO: 1564036
caggaagacuguuucucuu

SEQ ID NO: 1850312 - RNA, 19 nt, Artificial Sequence
  Description of Artificial Sequence: Synthetic oligonucleotide
  Antisense strand to SEQ ID NO: 1850311
aagagaaacagucuuccug

SEQ ID NO: 1850313 - RNA, 19 nt, Artificial Sequence
  Description of Artificial Sequence: Synthetic oligonucleotide
  Sense strand starting at position 1474 of SEQ ID NO: 1564036
gcaacucugcaccagagaa

SEQ ID NO: 1850314 - RNA, 19 nt, Artificial Sequence
  Description of Artificial Sequence: Synthetic oligonucleotide
  Antisense strand to SEQ ID NO: 1850313
uucucuggugcagaguugc

SEQ ID NO: 1850315 - RNA, 19 nt, Artificial Sequence
  Description of Artificial Sequence: Synthetic oligonucleotide
  Sense strand starting at position 1619 of SEQ ID NO: 1564036
ggacuuccagccuguaaac

SEQ ID NO: 1850316 - RNA, 19 nt, Artificial Sequence
  Description of Artificial Sequence: Synthetic oligonucleotide
  Antisense strand to SEQ ID NO: 1850315
guuuacaggcuggaagucc

SEQ ID NO: 1850317 - RNA, 19 nt, Artificial Sequence
  Description of Artificial Sequence: Synthetic oligonucleotide
  Sense strand starting at position 2426 of SEQ ID NO: 1564036
agggcauccuaguuaauau

SEQ ID NO: 1850318 - RNA, 19 nt, Artificial Sequence
  Description of Artificial Sequence: Synthetic oligonucleotide
  Antisense strand to SEQ ID NO: 1850317
auauuaacuaggaugcccu

SEQ ID NO: 1850319 - RNA, 19 nt, Artificial Sequence
  Description of Artificial Sequence: Synthetic oligonucleotide
  Sense strand starting at position 2501 of SEQ ID NO: 1564036
acuguuacagcucagagaa

SEQ ID NO: 1850320 - RNA, 19 nt, Artificial Sequence
  Description of Artificial Sequence: Synthetic oligonucleotide
  Antisense strand to SEQ ID NO: 1850319
uucucugagcuguaacagu

SEQ ID NO: 1850321 - RNA, 19 nt, Artificial Sequence
  Description of Artificial Sequence: Synthetic oligonucleotide
  Sense strand starting at position 2519 of SEQ ID NO: 1564036
auugcacuuuccuugagga

SEQ ID NO: 1850322 - RNA, 19 nt, Artificial Sequence
  Description of Artificial Sequence: Synthetic oligonucleotide
  Antisense strand to SEQ ID NO: 1850321
uccucaaggaaagugcaau

SEQ ID NO: 1850323 - RNA, 19 nt, Artificial Sequence
  Description of Artificial Sequence: Synthetic oligonucleotide
  Sense strand starting at position 2520 of SEQ ID NO: 1564036
uugcacuuuccuugaggaa

SEQ ID NO: 1850324 - RNA, 19 nt, Artificial Sequence
  Description of Artificial Sequence: Synthetic oligonucleotide
  Antisense strand to SEQ ID NO: 1850323
uuccucaaggaaagugcaa

SEQ ID NO: 1850325 - RNA, 19 nt, Artificial Sequence
  Description of Artificial Sequence: Synthetic oligonucleotide
  Sense strand starting at position 2521 of SEQ ID NO: 1564036
ugcacuuuccuugaggaau

SEQ ID NO: 1850326 - RNA, 19 nt, Artificial Sequence
  Description of Artificial Sequence: Synthetic oligonucleotide
  Antisense strand to SEQ ID NO: 1850325
auuccucaaggaaagugca

SEQ ID NO: 1850327 - RNA, 19 nt, Artificial Sequence
  Description of Artificial Sequence: Synthetic oligonucleotide
  Sense strand starting at position 2534 of SEQ ID NO: 1564036
aggaauaauucccuugcca

SEQ ID NO: 1850328 - RNA, 19 nt, Artificial Sequence
  Description of Artificial Sequence: Synthetic oligonucleotide
  Antisense strand to SEQ ID NO: 1850327
uggcaagggaauuauuccu

SEQ ID NO: 1850329 - RNA, 19 nt, Artificial Sequence
  Description of Artificial Sequence: Synthetic oligonucleotide
  Sense strand starting at position 2560 of SEQ ID NO: 1564036
cggacaacucuuggugaca

SEQ ID NO: 1850330 - RNA, 19 nt, Artificial Sequence
  Description of Artificial Sequence: Synthetic oligonucleotide
  Antisense strand to SEQ ID NO: 1850329
ugucaccaagaguuguccg

SEQ ID NO: 1850331 - RNA, 19 nt, Artificial Sequence
  Description of Artificial Sequence: Synthetic oligonucleotide
  Sense strand starting at position 2561 of SEQ ID NO: 1564036
ggacaacucuuggugacaa

SEQ ID NO: 1850332 - RNA, 19 nt, Artificial Sequence
  Description of Artificial Sequence: Synthetic oligonucleotide
  Antisense strand to SEQ ID NO: 1850331
uugucaccaagaguugucc

SEQ ID NO: 1850333 - RNA, 19 nt, Artificial Sequence
  Description of Artificial Sequence: Synthetic oligonucleotide
  Sense strand starting at position 2756 of SEQ ID NO: 1564036
uuguguaaacuuugaccua

SEQ ID NO: 1850334 - RNA, 19 nt, Artificial Sequence
  Description of Artificial Sequence: Synthetic oligonucleotide
  Antisense strand to SEQ ID NO: 1850333
uaggucaaaguuuacacaa

SEQ ID NO: 1850335 - RNA, 19 nt, Artificial Sequence
  Description of Artificial Sequence: Synthetic oligonucleotide
  Sense strand starting at position 2769 of SEQ ID NO: 1564036
gaccuaaugcuuggagguu

SEQ ID NO: 1850336 - RNA, 19 nt, Artificial Sequence
  Description of Artificial Sequence: Synthetic oligonucleotide
  Antisense strand to SEQ ID NO: 1850335
aaccuccaagcauuagguc

SEQ ID NO: 1850337 - RNA, 19 nt, Artificial Sequence
  Description of Artificial Sequence: Synthetic oligonucleotide
  Sense strand starting at position 2806 of SEQ ID NO: 1564036
uaaggagucuagcuugauu

SEQ ID NO: 1850338 - RNA, 19 nt, Artificial Sequence
  Description of Artificial Sequence: Synthetic oligonucleotide
  Antisense strand to SEQ ID NO: 1850337
aaucaagcuagacuccuua

SEQ ID NO: 1850339 - RNA, 19 nt, Artificial Sequence
  Description of Artificial Sequence: Synthetic oligonucleotide
  Sense strand starting at position 2808 of SEQ ID NO: 1564036
aggagucuagcuugauuau

SEQ ID NO: 1850340 - RNA, 19 nt, Artificial Sequence
  Description of Artificial Sequence: Synthetic oligonucleotide
  Antisense strand to SEQ ID NO: 1850339
auaaucaagcuagacuccu

SEQ ID NO: 1850341 - RNA, 19 nt, Artificial Sequence
  Description of Artificial Sequence: Synthetic oligonucleotide
  Sense strand starting at position 2809 of SEQ ID NO: 1564036
ggagucuagcuugauuauu

SEQ ID NO: 1850342 - RNA, 19 nt, Artificial Sequence
  Description of Artificial Sequence: Synthetic oligonucleotide
  Antisense strand to SEQ ID NO: 1850341
aauaaucaagcuagacucc

SEQ ID NO: 1850343 - RNA, 19 nt, Artificial Sequence
  Description of Artificial Sequence: Synthetic oligonucleotide
  Sense strand starting at position 2817 of SEQ ID NO: 1564036
gcuugauuauuauuccaug

SEQ ID NO: 1850344 - RNA, 19 nt, Artificial Sequence
  Description of Artificial Sequence: Synthetic oligonucleotide
  Antisense strand to SEQ ID NO: 1850343
cauggaauaauaaucaagc

SEQ ID NO: 1850345 - RNA, 19 nt, Artificial Sequence
  Description of Artificial Sequence: Synthetic oligonucleotide
  Sense strand starting at position 3294 of SEQ ID NO: 1564036
aaagguauauugguaaugu

SEQ ID NO: 1850346 - RNA, 19 nt, Artificial Sequence
  Description of Artificial Sequence: Synthetic oligonucleotide
  Antisense strand to SEQ ID NO: 1850345
acauuaccaauauaccuuu

SEQ ID NO: 1850347 - RNA, 19 nt, Artificial Sequence
  Description of Artificial Sequence: Synthetic oligonucleotide
  Sense strand starting at position 3303 of SEQ ID NO: 1564036
uugguaauguaggcacaaa

SEQ ID NO: 1850348 - RNA, 19 nt, Artificial Sequence
  Description of Artificial Sequence: Synthetic oligonucleotide
  Antisense strand to SEQ ID NO: 1850347
uuugugccuacauuaccaa

SEQ ID NO: 1850349 - RNA, 19 nt, Artificial Sequence
  Description of Artificial Sequence: Synthetic oligonucleotide
  Sense strand starting at position 3304 of SEQ ID NO: 1564036
ugguaauguaggcacaaau

SEQ ID NO: 1850350 - RNA, 19 nt, Artificial Sequence
  Description of Artificial Sequence: Synthetic oligonucleotide
  Antisense strand to SEQ ID NO: 1850349
auuugugccuacauuacca

SEQ ID NO: 1850351 - RNA, 19 nt, Artificial Sequence
  Description of Artificial Sequence: Synthetic oligonucleotide
  Sense strand starting at position 3327 of SEQ ID NO: 1564036
caggauuaguaagucugua

SEQ ID NO: 1850352 - RNA, 19 nt, Artificial Sequence
  Description of Artificial Sequence: Synthetic oligonucleotide
  Antisense strand to SEQ ID NO: 1850351
uacagacuuacuaauccug

SEQ ID NO: 1850353 - RNA, 19 nt, Artificial Sequence
  Description of Artificial Sequence: Synthetic oligonucleotide
  Sense strand starting at position 3579 of SEQ ID NO: 1564036
gaaguuauuguguaaccca

SEQ ID NO: 1850354 - RNA, 19 nt, Artificial Sequence
  Description of Artificial Sequence: Synthetic oligonucleotide
  Antisense strand to SEQ ID NO: 1850353
uggguuacacaauaacuuc

SEQ ID NO: 1850355 - RNA, 19 nt, Artificial Sequence
  Description of Artificial Sequence: Synthetic oligonucleotide
  Sense strand starting at position 3601 of SEQ ID NO: 1564036
ugugaaaggguaggucuau

SEQ ID NO: 1850356 - RNA, 19 nt, Artificial Sequence
  Description of Artificial Sequence: Synthetic oligonucleotide
  Antisense strand to SEQ ID NO: 1850355
auagaccuacccuuucaca

SEQ ID NO: 1850357 - RNA, 19 nt, Artificial Sequence
  Description of Artificial Sequence: Synthetic oligonucleotide
  Sense strand starting at position 3612 of SEQ ID NO: 1564036
aggucuaugauuggccaua

SEQ ID NO: 1850358 - RNA, 19 nt, Artificial Sequence
  Description of Artificial Sequence: Synthetic oligonucleotide
  Antisense strand to SEQ ID NO: 1850357
uauggccaaucauagaccu

SEQ ID NO: 1850359 - RNA, 19 nt, Artificial Sequence
  Description of Artificial Sequence: Synthetic oligonucleotide
  Sense strand starting at position 3613 of SEQ ID NO: 1564036
ggucuaugauuggccauag

SEQ ID NO: 1850360 - RNA, 19 nt, Artificial Sequence
  Description of Artificial Sequence: Synthetic oligonucleotide
  Antisense strand to SEQ ID NO: 1850359
cuauggccaaucauagacc

SEQ ID NO: 1850361 - RNA, 19 nt, Artificial Sequence
  Description of Artificial Sequence: Synthetic oligonucleotide
  Sense strand starting at position 3650 of SEQ ID NO: 1564036
acaggaaugcuuugaauuc

SEQ ID NO: 1850362 - RNA, 19 nt, Artificial Sequence
  Description of Artificial Sequence: Synthetic oligonucleotide
  Antisense strand to SEQ ID NO: 1850361
gaauucaaagcauuccugu

SEQ ID NO: 1850363 - RNA, 19 nt, Artificial Sequence
  Description of Artificial Sequence: Synthetic oligonucleotide
  Sense strand starting at position 3687 of SEQ ID NO: 1564036
cagacagggucauucuaac

SEQ ID NO: 1850364 - RNA, 19 nt, Artificial Sequence
  Description of Artificial Sequence: Synthetic oligonucleotide
  Antisense strand to SEQ ID NO: 1850363
guuagaaugacccugucug

SEQ ID NO: 1850365 - RNA, 19 nt, Artificial Sequence
  Description of Artificial Sequence: Synthetic oligonucleotide
  Sense strand starting at position 3785 of SEQ ID NO: 1564036
gagagaaaguaucucucuu

SEQ ID NO: 1850366 - RNA, 19 nt, Artificial Sequence
  Description of Artificial Sequence: Synthetic oligonucleotide
  Antisense strand to SEQ ID NO: 1850365
aagagagauacuuucucuc

SEQ ID NO: 1850367 - RNA, 19 nt, Artificial Sequence
  Description of Artificial Sequence: Synthetic oligonucleotide
  Sense strand starting at position 3837 of SEQ ID NO: 1564036
acaucugauuggguagaau

SEQ ID NO: 1850368 - RNA, 19 nt, Artificial Sequence
  Description of Artificial Sequence: Synthetic oligonucleotide
  Antisense strand to SEQ ID NO: 1850367
auucuacccaaucagaugu

SEQ ID NO: 1850369 - RNA, 19 nt, Artificial Sequence
  Description of Artificial Sequence: Synthetic oligonucleotide
  Sense strand starting at position 3848 of SEQ ID NO: 1564036
gguagaauugaguaccgua

SEQ ID NO: 1850370 - RNA, 19 nt, Artificial Sequence
  Description of Artificial Sequence: Synthetic oligonucleotide
  Antisense strand to SEQ ID NO: 1850369
uacgguacucaauucuacc

SEQ ID NO: 1850371 - RNA, 19 nt, Artificial Sequence
  Description of Artificial Sequence: Synthetic oligonucleotide
  Sense strand starting at position 3887 of SEQ ID NO: 1564036
gcguaugugacauaagaau

SEQ ID NO: 1850372 - RNA, 19 nt, Artificial Sequence
  Description of Artificial Sequence: Synthetic oligonucleotide
  Antisense strand to SEQ ID NO: 1850371
auucuuaugucacauacgc

SEQ ID NO: 1850373 - RNA, 19 nt, Artificial Sequence
  Description of Artificial Sequence: Synthetic oligonucleotide
  Sense strand starting at position 172 of SEQ ID NO: 1564037
uuauuaggugcuuaucaca

SEQ ID NO: 1850374 - RNA, 19 nt, Artificial Sequence
  Description of Artificial Sequence: Synthetic oligonucleotide
  Antisense strand to SEQ ID NO: 1850373
ugugauaagcaccuaauaa

SEQ ID NO: 1850375 - RNA, 19 nt, Artificial Sequence
  Description of Artificial Sequence: Synthetic oligonucleotide
  Sense strand starting at position 235 of SEQ ID NO: 1564037
ucuaguaguaauggagaaa

SEQ ID NO: 1850376 - RNA, 19 nt, Artificial Sequence
  Description of Artificial Sequence: Synthetic oligonucleotide
  Antisense strand to SEQ ID NO: 1850375
uuucuccauuacuacuaga

SEQ ID NO: 1850377 - RNA, 19 nt, Artificial Sequence
  Description of Artificial Sequence: Synthetic oligonucleotide
  Sense strand starting at position 330 of SEQ ID NO: 1564037
agugaaucaggcuaagucu

SEQ ID NO: 1850378 - RNA, 19 nt, Artificial Sequence
  Description of Artificial Sequence: Synthetic oligonucleotide
  Antisense strand to SEQ ID NO: 1850377
agacuuagccugauucacu

SEQ ID NO: 1850379 - RNA, 19 nt, Artificial Sequence
  Description of Artificial Sequence: Synthetic oligonucleotide
  Sense strand starting at position 614 of SEQ ID NO: 1564037
ggaggaaguucaguuuauu

SEQ ID NO: 1850380 - RNA, 19 nt, Artificial Sequence
  Description of Artificial Sequence: Synthetic oligonucleotide
  Antisense strand to SEQ ID NO: 1850379
aauaaacugaacuuccucc

SEQ ID NO: 1850381 - RNA, 19 nt, Artificial Sequence
  Description of Artificial Sequence: Synthetic oligonucleotide
  Sense strand starting at position 671 of SEQ ID NO: 1564037
acaucuaugcuugggaaca

SEQ ID NO: 1850382 - RNA, 19 nt, Artificial Sequence
  Description of Artificial Sequence: Synthetic oligonucleotide
  Antisense strand to SEQ ID NO: 1850381
uguucccaagcauagaugu

SEQ ID NO: 1850383 - RNA, 19 nt, Artificial Sequence
  Description of Artificial Sequence: Synthetic oligonucleotide
  Sense strand starting at position 938 of SEQ ID NO: 1564037
aaagucuggcuuuauagua

SEQ ID NO: 1850384 - RNA, 19 nt, Artificial Sequence
  Description of Artificial Sequence: Synthetic oligonucleotide
  Antisense strand to SEQ ID NO: 1850383
uacuauaaagccagacuuu

SEQ ID NO: 1850385 - RNA, 19 nt, Artificial Sequence
  Description of Artificial Sequence: Synthetic oligonucleotide
  Sense strand starting at position 945 of SEQ ID NO: 1564037
ggcuuuauaguaugaccau

SEQ ID NO: 1850386 - RNA, 19 nt, Artificial Sequence
  Description of Artificial Sequence: Synthetic oligonucleotide
  Antisense strand to SEQ ID NO: 1850385
auggucauacuauaaagcc

SEQ ID NO: 1850387 - RNA, 19 nt, Artificial Sequence
  Description of Artificial Sequence: Synthetic oligonucleotide
  Sense strand starting at position 1060 of SEQ ID NO: 1564037
ccuaaagggacucguagaa

SEQ ID NO: 1850388 - RNA, 19 nt, Artificial Sequence
  Description of Artificial Sequence: Synthetic oligonucleotide
  Antisense strand to SEQ ID NO: 1850387
uucuacgagucccuuuagg

SEQ ID NO: 1850389 - RNA, 19 nt, Artificial Sequence
  Description of Artificial Sequence: Synthetic oligonucleotide
  Sense strand starting at position 1170 of SEQ ID NO: 1564037
uguuccuaccagugaucaa

SEQ ID NO: 1850390 - RNA, 19 nt, Artificial Sequence
  Description of Artificial Sequence: Synthetic oligonucleotide
  Antisense strand to SEQ ID NO: 1850389
uugaucacugguaggaaca

SEQ ID NO: 1850391 - RNA, 19 nt, Artificial Sequence
  Description of Artificial Sequence: Synthetic oligonucleotide
  Sense strand starting at position 1223 of SEQ ID NO: 1564037
caggaagacuguuucucuu

SEQ ID NO: 1850392 - RNA, 19 nt, Artificial Sequence
  Description of Artificial Sequence: Synthetic oligonucleotide
  Antisense strand to SEQ ID NO: 1850391
aagagaaacagucuuccug

SEQ ID NO: 1850393 - RNA, 19 nt, Artificial Sequence
  Description of Artificial Sequence: Synthetic oligonucleotide
  Sense strand starting at position 1529 of SEQ ID NO: 1564037
gcaacucugcaccagagaa

SEQ ID NO: 1850394 - RNA, 19 nt, Artificial Sequence
  Description of Artificial Sequence: Synthetic oligonucleotide
  Antisense strand to SEQ ID NO: 1850393
uucucuggugcagaguugc

SEQ ID NO: 1850395 - RNA, 19 nt, Artificial Sequence
  Description of Artificial Sequence: Synthetic oligonucleotide
  Sense strand starting at position 1674 of SEQ ID NO: 1564037
ggacuuccagccuguaaac

SEQ ID NO: 1850396 - RNA, 19 nt, Artificial Sequence
  Description of Artificial Sequence: Synthetic oligonucleotide
  Antisense strand to SEQ ID NO: 1850395
guuuacaggcuggaagucc

SEQ ID NO: 1850397 - RNA, 19 nt, Artificial Sequence
  Description of Artificial Sequence: Synthetic oligonucleotide
  Sense strand starting at position 2481 of SEQ ID NO: 1564037
agggcauccuaguuaauau

SEQ ID NO: 1850398 - RNA, 19 nt, Artificial Sequence
  Description of Artificial Sequence: Synthetic oligonucleotide
  Antisense strand to SEQ ID NO: 1850397
auauuaacuaggaugcccu

SEQ ID NO: 1850399 - RNA, 19 nt, Artificial Sequence
  Description of Artificial Sequence: Synthetic oligonucleotide
  Sense strand starting at position 2556 of SEQ ID NO: 1564037
acuguuacagcucagagaa

SEQ ID NO: 1850400 - RNA, 19 nt, Artificial Sequence
  Description of Artificial Sequence: Synthetic oligonucleotide
  Antisense strand to SEQ ID NO: 1850399
uucucugagcuguaacagu

SEQ ID NO: 1850401 - RNA, 19 nt, Artificial Sequence
  Description of Artificial Sequence: Synthetic oligonucleotide
  Sense strand starting at position 2574 of SEQ ID NO: 1564037
auugcacuuuccuugagga

SEQ ID NO: 1850402 - RNA, 19 nt, Artificial Sequence
  Description of Artificial Sequence: Synthetic oligonucleotide
  Antisense strand to SEQ ID NO: 1850401
uccucaaggaaagugcaau

SEQ ID NO: 1850403 - RNA, 19 nt, Artificial Sequence
  Description of Artificial Sequence: Synthetic oligonucleotide
  Sense strand starting at position 2575 of SEQ ID NO: 1564037
uugcacuuuccuugaggaa

SEQ ID NO: 1850404 - RNA, 19 nt, Artificial Sequence
  Description of Artificial Sequence: Synthetic oligonucleotide
  Antisense strand to SEQ ID NO: 1850403
uuccucaaggaaagugcaa

SEQ ID NO: 1850405 - RNA, 19 nt, Artificial Sequence
  Description of Artificial Sequence: Synthetic oligonucleotide
  Sense strand starting at position 2576 of SEQ ID NO: 1564037
ugcacuuuccuugaggaau

SEQ ID NO: 1850406 - RNA, 19 nt, Artificial Sequence
  Description of Artificial Sequence: Synthetic oligonucleotide
  Antisense strand to SEQ ID NO: 1850405
auuccucaaggaaagugca

SEQ ID NO: 1850407 - RNA, 19 nt, Artificial Sequence
  Description of Artificial Sequence: Synthetic oligonucleotide
  Sense strand starting at position 2589 of SEQ ID NO: 1564037
aggaauaauucccuugcca

SEQ ID NO: 1850408 - RNA, 19 nt, Artificial Sequence
  Description of Artificial Sequence: Synthetic oligonucleotide
  Antisense strand to SEQ ID NO: 1850407
uggcaagggaauuauuccu

SEQ ID NO: 1850409 - RNA, 19 nt, Artificial Sequence
  Description of Artificial Sequence: Synthetic oligonucleotide
  Sense strand starting at position 2615 of SEQ ID NO: 1564037
cggacaacucuuggugaca

SEQ ID NO: 1850410 - RNA, 19 nt, Artificial Sequence
  Description of Artificial Sequence: Synthetic oligonucleotide
  Antisense strand to SEQ ID NO: 1850409
ugucaccaagaguuguccg

SEQ ID NO: 1850411 - RNA, 19 nt, Artificial Sequence
  Description of Artificial Sequence: Synthetic oligonucleotide
  Sense strand starting at position 2616 of SEQ ID NO: 1564037
ggacaacucuuggugacaa

SEQ ID NO: 1850412 - RNA, 19 nt, Artificial Sequence
  Description of Artificial Sequence: Synthetic oligonucleotide
  Antisense strand to SEQ ID NO: 1850411
uugucaccaagaguugucc

SEQ ID NO: 1850413 - RNA, 19 nt, Artificial Sequence
  Description of Artificial Sequence: Synthetic oligonucleotide
  Sense strand starting at position 2811 of SEQ ID NO: 1564037
uuguguaaacuuugaccua

SEQ ID NO: 1850414 - RNA, 19 nt, Artificial Sequence
  Description of Artificial Sequence: Synthetic oligonucleotide
  Antisense strand to SEQ ID NO: 1850413
uaggucaaaguuuacacaa

SEQ ID NO: 1850415 - RNA, 19 nt, Artificial Sequence
  Description of Artificial Sequence: Synthetic oligonucleotide
  Sense strand starting at position 2824 of SEQ ID NO: 1564037
gaccuaaugcuuggagguu

SEQ ID NO: 1850416 - RNA, 19 nt, Artificial Sequence
  Description of Artificial Sequence: Synthetic oligonucleotide
  Antisense strand to SEQ ID NO: 1850415
aaccuccaagcauuagguc

SEQ ID NO: 1850417 - RNA, 19 nt, Artificial Sequence
  Description of Artificial Sequence: Synthetic oligonucleotide
  Sense strand starting at position 2861 of SEQ ID NO: 1564037
uaaggagucuagcuugauu

SEQ ID NO: 1850418 - RNA, 19 nt, Artificial Sequence
  Description of Artificial Sequence: Synthetic oligonucleotide
  Antisense strand to SEQ ID NO: 1850417
aaucaagcuagacuccuua

SEQ ID NO: 1850419 - RNA, 19 nt, Artificial Sequence
  Description of Artificial Sequence: Synthetic oligonucleotide
  Sense strand starting at position 2863 of SEQ ID NO: 1564037
aggagucuagcuugauuau

SEQ ID NO: 1850420 - RNA, 19 nt, Artificial Sequence
  Description of Artificial Sequence: Synthetic oligonucleotide
  Antisense strand to SEQ ID NO: 1850419
auaaucaagcuagacuccu

SEQ ID NO: 1850421 - RNA, 19 nt, Artificial Sequence
  Description of Artificial Sequence: Synthetic oligonucleotide
  Sense strand starting at position 2864 of SEQ ID NO: 1564037
ggagucuagcuugauuauu

SEQ ID NO: 1850422 - RNA, 19 nt, Artificial Sequence
  Description of Artificial Sequence: Synthetic oligonucleotide
  Antisense strand to SEQ ID NO: 1850421
aauaaucaagcuagacucc

SEQ ID NO: 1850423 - RNA, 19 nt, Artificial Sequence
  Description of Artificial Sequence: Synthetic oligonucleotide
  Sense strand starting at position 2872 of SEQ ID NO: 1564037
gcuugauuauuauuccaug

SEQ ID NO: 1850424 - RNA, 19 nt, Artificial Sequence
  Description of Artificial Sequence: Synthetic oligonucleotide
  Antisense strand to SEQ ID NO: 1850423
cauggaauaauaaucaagc

SEQ ID NO: 1850425 - RNA, 19 nt, Artificial Sequence
  Description of Artificial Sequence: Synthetic oligonucleotide
  Sense strand starting at position 3349 of SEQ ID NO: 1564037
aaagguauauugguaaugu

SEQ ID NO: 1850426 - RNA, 19 nt, Artificial Sequence
  Description of Artificial Sequence: Synthetic oligonucleotide
  Antisense strand to SEQ ID NO: 1850425
acauuaccaauauaccuuu

SEQ ID NO: 1850427 - RNA, 19 nt, Artificial Sequence
  Description of Artificial Sequence: Synthetic oligonucleotide
  Sense strand starting at position 3358 of SEQ ID NO: 1564037
uugguaauguaggcacaaa

SEQ ID NO: 1850428 - RNA, 19 nt, Artificial Sequence
  Description of Artificial Sequence: Synthetic oligonucleotide
  Antisense strand to SEQ ID NO: 1850427
uuugugccuacauuaccaa

SEQ ID NO: 1850429 - RNA, 19 nt, Artificial Sequence
  Description of Artificial Sequence: Synthetic oligonucleotide
  Sense strand starting at position 3359 of SEQ ID NO: 1564037
ugguaauguaggcacaaau

SEQ ID NO: 1850430 - RNA, 19 nt, Artificial Sequence
  Description of Artificial Sequence: Synthetic oligonucleotide
  Antisense strand to SEQ ID NO: 1850429
auuugugccuacauuacca

SEQ ID NO: 1850431 - RNA, 19 nt, Artificial Sequence
  Description of Artificial Sequence: Synthetic oligonucleotide
  Sense strand starting at position 3382 of SEQ ID NO: 1564037
caggauuaguaagucugua

SEQ ID NO: 1850432 - RNA, 19 nt, Artificial Sequence
  Description of Artificial Sequence: Synthetic oligonucleotide
  Antisense strand to SEQ ID NO: 1850431
uacagacuuacuaauccug

SEQ ID NO: 1850433 - RNA, 19 nt, Artificial Sequence
  Description of Artificial Sequence: Synthetic oligonucleotide
  Sense strand starting at position 3634 of SEQ ID NO: 1564037
gaaguuauuguguaaccca

SEQ ID NO: 1850434 - RNA, 19 nt, Artificial Sequence
  Description of Artificial Sequence: Synthetic oligonucleotide
  Antisense strand to SEQ ID NO: 1850433
uggguuacacaauaacuuc

SEQ ID NO: 1850435 - RNA, 19 nt, Artificial Sequence
  Description of Artificial Sequence: Synthetic oligonucleotide
  Sense strand starting at position 3656 of SEQ ID NO: 1564037
ugugaaaggguaggucuau

SEQ ID NO: 1850436 - RNA, 19 nt, Artificial Sequence
  Description of Artificial Sequence: Synthetic oligonucleotide
  Antisense strand to SEQ ID NO: 1850435
auagaccuacccuuucaca

SEQ ID NO: 1850437 - RNA, 19 nt, Artificial Sequence
  Description of Artificial Sequence: Synthetic oligonucleotide
  Sense strand starting at position 3667 of SEQ ID NO: 1564037
aggucuaugauuggccaua

SEQ ID NO: 1850438 - RNA, 19 nt, Artificial Sequence
  Description of Artificial Sequence: Synthetic oligonucleotide
  Antisense strand to SEQ ID NO: 1850437
uauggccaaucauagaccu

SEQ ID NO: 1850439 - RNA, 19 nt, Artificial Sequence
  Description of Artificial Sequence: Synthetic oligonucleotide
  Sense strand starting at position 3668 of SEQ ID NO: 1564037
ggucuaugauuggccauag

SEQ ID NO: 1850440 - RNA, 19 nt, Artificial Sequence
  Description of Artificial Sequence: Synthetic oligonucleotide
  Antisense strand to SEQ ID NO: 1850439
cuauggccaaucauagacc

SEQ ID NO: 1850441 - RNA, 19 nt, Artificial Sequence
  Description of Artificial Sequence: Synthetic oligonucleotide
  Sense strand starting at position 3705 of SEQ ID NO: 1564037
acaggaaugcuuugaauuc

SEQ ID NO: 1850442 - RNA, 19 nt, Artificial Sequence
  Description of Artificial Sequence: Synthetic oligonucleotide
  Antisense strand to SEQ ID NO: 1850441
gaauucaaagcauuccugu

SEQ ID NO: 1850443 - RNA, 19 nt, Artificial Sequence
  Description of Artificial Sequence: Synthetic oligonucleotide
  Sense strand starting at position 3742 of SEQ ID NO: 1564037
cagacagggucauucuaac

SEQ ID NO: 1850444 - RNA, 19 nt, Artificial Sequence
  Description of Artificial Sequence: Synthetic oligonucleotide
  Antisense strand to SEQ ID NO: 1850443
guuagaaugacccugucug

SEQ ID NO: 1850445 - RNA, 19 nt, Artificial Sequence
  Description of Artificial Sequence: Synthetic oligonucleotide
  Sense strand starting at position 3840 of SEQ ID NO: 1564037
gagagaaaguaucucucuu

SEQ ID NO: 1850446 - RNA, 19 nt, Artificial Sequence
  Description of Artificial Sequence: Synthetic oligonucleotide
  Antisense strand to SEQ ID NO: 1850445
aagagagauacuuucucuc

SEQ ID NO: 1850447 - RNA, 19 nt, Artificial Sequence
  Description of Artificial Sequence: Synthetic oligonucleotide
  Sense strand starting at position 3892 of SEQ ID NO: 1564037
acaucugauuggguagaau

SEQ ID NO: 1850448 - RNA, 19 nt, Artificial Sequence
  Description of Artificial Sequence: Synthetic oligonucleotide
  Antisense strand to SEQ ID NO: 1850447
auucuacccaaucagaugu

SEQ ID NO: 1850449 - RNA, 19 nt, Artificial Sequence
  Description of Artificial Sequence: Synthetic oligonucleotide
  Sense strand starting at position 3903 of SEQ ID NO: 1564037
gguagaauugaguaccgua

SEQ ID NO: 1850450 - RNA, 19 nt, Artificial Sequence
  Description of Artificial Sequence: Synthetic oligonucleotide
  Antisense strand to SEQ ID NO: 1850449
uacgguacucaauucuacc

SEQ ID NO: 1850451 - RNA, 19 nt, Artificial Sequence
  Description of Artificial Sequence: Synthetic oligonucleotide
  Sense strand starting at position 3942 of SEQ ID NO: 1564037
gcguaugugacauaagaau

SEQ ID NO: 1850452 - RNA, 19 nt, Artificial Sequence
  Description of Artificial Sequence: Synthetic oligonucleotide
  Antisense strand to SEQ ID NO: 1850451
auucuuaugucacauacgc

SEQ ID NO: 1850453 - RNA, 19 nt, Artificial Sequence
  Description of Artificial Sequence: Synthetic oligonucleotide
  Sense strand starting at position 319 of SEQ ID NO: 1564038
gacaucuauuuguggaaac

SEQ ID NO: 1850454 - RNA, 19 nt, Artificial Sequence
  Description of Artificial Sequence: Synthetic oligonucleotide
  Antisense strand to SEQ ID NO: 1850453
guuuccacaaauagauguc

SEQ ID NO: 1850455 - RNA, 19 nt, Artificial Sequence
  Description of Artificial Sequence: Synthetic oligonucleotide
  Sense strand starting at position 397 of SEQ ID NO: 1564038
augugaauuugucaacaga

SEQ ID NO: 1850456 - RNA, 19 nt, Artificial Sequence
  Description of Artificial Sequence: Synthetic oligonucleotide
  Antisense strand to SEQ ID NO: 1850455
ucuguugacaaauucacau

SEQ ID NO: 1850457 - RNA, 19 nt, Artificial Sequence
  Description of Artificial Sequence: Synthetic oligonucleotide
  Sense strand starting at position 414 of SEQ ID NO: 1564038
gauggccugccuugugaga

SEQ ID NO: 1850458 - RNA, 19 nt, Artificial Sequence
  Description of Artificial Sequence: Synthetic oligonucleotide
  Antisense strand to SEQ ID NO: 1850457
ucucacaaggcaggccauc

SEQ ID NO: 1850459 - RNA, 19 nt, Artificial Sequence
  Description of Artificial Sequence: Synthetic oligonucleotide
  Sense strand starting at position 432 of SEQ ID NO: 1564038
acaguuggcccucaauguu

SEQ ID NO: 1850460 - RNA, 19 nt, Artificial Sequence
  Description of Artificial Sequence: Synthetic oligonucleotide
  Antisense strand to SEQ ID NO: 1850459
aacauugagggccaacugu

SEQ ID NO: 1850461 - RNA, 19 nt, Artificial Sequence
  Description of Artificial Sequence: Synthetic oligonucleotide
  Sense strand starting at position 439 of SEQ ID NO: 1564038
gcccucaauguuugucaga

SEQ ID NO: 1850462 - RNA, 19 nt, Artificial Sequence
  Description of Artificial Sequence: Synthetic oligonucleotide
  Antisense strand to SEQ ID NO: 1850461
ucugacaaacauugagggc

SEQ ID NO: 1850463 - RNA, 19 nt, Artificial Sequence
  Description of Artificial Sequence: Synthetic oligonucleotide
  Sense strand starting at position 440 of SEQ ID NO: 1564038
cccucaauguuugucagaa

SEQ ID NO: 1850464 - RNA, 19 nt, Artificial Sequence
  Description of Artificial Sequence: Synthetic oligonucleotide
  Antisense strand to SEQ ID NO: 1850463
uucugacaaacauugaggg

SEQ ID NO: 1850465 - RNA, 19 nt, Artificial Sequence
  Description of Artificial Sequence: Synthetic oligonucleotide
  Sense strand starting at position 441 of SEQ ID NO: 1564038
ccucaauguuugucagaac

SEQ ID NO: 1850466 - RNA, 19 nt, Artificial Sequence
  Description of Artificial Sequence: Synthetic oligonucleotide
  Antisense strand to SEQ ID NO: 1850465
guucugacaaacauugagg

SEQ ID NO: 1850467 - RNA, 19 nt, Artificial Sequence
  Description of Artificial Sequence: Synthetic oligonucleotide
  Sense strand starting at position 483 of SEQ ID NO: 1564038
uucugcuugcauuauggau

SEQ ID NO: 1850468 - RNA, 19 nt, Artificial Sequence
  Description of Artificial Sequence: Synthetic oligonucleotide
  Antisense strand to SEQ ID NO: 1850467
auccauaaugcaagcagaa

SEQ ID NO: 1850469 - RNA, 19 nt, Artificial Sequence
  Description of Artificial Sequence: Synthetic oligonucleotide
  Sense strand starting at position 489 of SEQ ID NO: 1564038
uugcauuauggauaccuga

SEQ ID NO: 1850470 - RNA, 19 nt, Artificial Sequence
  Description of Artificial Sequence: Synthetic oligonucleotide
  Antisense strand to SEQ ID NO: 1850469
ucagguauccauaaugcaa

SEQ ID NO: 1850471 - RNA, 19 nt, Artificial Sequence
  Description of Artificial Sequence: Synthetic oligonucleotide
  Sense strand starting at position 496 of SEQ ID NO: 1564038
auggauaccugagcuuuau

SEQ ID NO: 1850472 - RNA, 19 nt, Artificial Sequence
  Description of Artificial Sequence: Synthetic oligonucleotide
  Antisense strand to SEQ ID NO: 1850471
auaaagcucagguauccau

SEQ ID NO: 1850473 - RNA, 19 nt, Artificial Sequence
  Description of Artificial Sequence: Synthetic oligonucleotide
  Sense strand starting at position 526 of SEQ ID NO: 1564038
guggauauaguaugccuca

SEQ ID NO: 1850474 - RNA, 19 nt, Artificial Sequence
  Description of Artificial Sequence: Synthetic oligonucleotide
  Antisense strand to SEQ ID NO: 1850473
ugaggcauacuauauccac

SEQ ID NO: 1850475 - RNA, 19 nt, Artificial Sequence
  Description of Artificial Sequence: Synthetic oligonucleotide
  Sense strand starting at position 527 of SEQ ID NO: 1564038
uggauauaguaugccucau

SEQ ID NO: 1850476 - RNA, 19 nt, Artificial Sequence
  Description of Artificial Sequence: Synthetic oligonucleotide
  Antisense strand to SEQ ID NO: 1850475
augaggcauacuauaucca

SEQ ID NO: 1850477 - RNA, 19 nt, Artificial Sequence
  Description of Artificial Sequence: Synthetic oligonucleotide
  Sense strand starting at position 531 of SEQ ID NO: 1564038
uauaguaugccucauggca

SEQ ID NO: 1850478 - RNA, 19 nt, Artificial Sequence
  Description of Artificial Sequence: Synthetic oligonucleotide
  Antisense strand to SEQ ID NO: 1850477
ugccaugaggcauacuaua

SEQ ID NO: 1850479 - RNA, 19 nt, Artificial Sequence
  Description of Artificial Sequence: Synthetic oligonucleotide
  Sense strand starting at position 582 of SEQ ID NO: 1564038
uguaucuggguuugagaag

SEQ ID NO: 1850480 - RNA, 19 nt, Artificial Sequence
  Description of Artificial Sequence: Synthetic oligonucleotide
  Antisense strand to SEQ ID NO: 1850479
cuucucaaacccagauaca

SEQ ID NO: 1850481 - RNA, 19 nt, Artificial Sequence
  Description of Artificial Sequence: Synthetic oligonucleotide
  Sense strand starting at position 591 of SEQ ID NO: 1564038
guuugagaagaaugcauau

SEQ ID NO: 1850482 - RNA, 19 nt, Artificial Sequence
  Description of Artificial Sequence: Synthetic oligonucleotide
  Antisense strand to SEQ ID NO: 1850481
auaugcauucuucucaaac

SEQ ID NO: 1850483 - RNA, 19 nt, Artificial Sequence
  Description of Artificial Sequence: Synthetic oligonucleotide
  Sense strand starting at position 609 of SEQ ID NO: 1564038
uagucuuaauaagggaaga

SEQ ID NO: 1850484 - RNA, 19 nt, Artificial Sequence
  Description of Artificial Sequence: Synthetic oligonucleotide
  Antisense strand to SEQ ID NO: 1850483
ucuucccuuauuaagacua

SEQ ID NO: 1850485 - RNA, 19 nt, Artificial Sequence
  Description of Artificial Sequence: Synthetic oligonucleotide
  Sense strand starting at position 727 of SEQ ID NO: 1564038
acaccuagccuuggucaaa

SEQ ID NO: 1850486 - RNA, 19 nt, Artificial Sequence
  Description of Artificial Sequence: Synthetic oligonucleotide
  Antisense strand to SEQ ID NO: 1850485
uuugaccaaggcuaggugu

SEQ ID NO: 1850487 - RNA, 19 nt, Artificial Sequence
  Description of Artificial Sequence: Synthetic oligonucleotide
  Sense strand starting at position 739 of SEQ ID NO: 1564038
ggucaaagguggcuauaug

SEQ ID NO: 1850488 - RNA, 19 nt, Artificial Sequence
  Description of Artificial Sequence: Synthetic oligonucleotide
  Antisense strand to SEQ ID NO: 1850487
cauauagccaccuuugacc

SEQ ID NO: 1850489 - RNA, 19 nt, Artificial Sequence
  Description of Artificial Sequence: Synthetic oligonucleotide
  Sense strand starting at position 740 of SEQ ID NO: 1564038
gucaaagguggcuauaugu

SEQ ID NO: 1850490 - RNA, 19 nt, Artificial Sequence
  Description of Artificial Sequence: Synthetic oligonucleotide
  Antisense strand to SEQ ID NO: 1850489
acauauagccaccuuugac

SEQ ID NO: 1850491 - RNA, 19 nt, Artificial Sequence
  Description of Artificial Sequence: Synthetic oligonucleotide
  Sense strand starting at position 872 of SEQ ID NO: 1564038
ggcccacuccauuagcaau

SEQ ID NO: 1850492 - RNA, 19 nt, Artificial Sequence
  Description of Artificial Sequence: Synthetic oligonucleotide
  Antisense strand to SEQ ID NO: 1850491
auugcuaauggagugggcc

SEQ ID NO: 1850493 - RNA, 19 nt, Artificial Sequence
  Description of Artificial Sequence: Synthetic oligonucleotide
  Sense strand starting at position 1373 of SEQ ID NO: 1564038
cagaacugaucgccaggaa

SEQ ID NO: 1850494 - RNA, 19 nt, Artificial Sequence
  Description of Artificial Sequence: Synthetic oligonucleotide
  Antisense strand to SEQ ID NO: 1850493
uuccuggcgaucaguucug

SEQ ID NO: 1850495 - RNA, 19 nt, Artificial Sequence
  Description of Artificial Sequence: Synthetic oligonucleotide
  Sense strand starting at position 1398 of SEQ ID NO: 1564038
cuccaaaucgcaugacuca

SEQ ID NO: 1850496 - RNA, 19 nt, Artificial Sequence
  Description of Artificial Sequence: Synthetic oligonucleotide
  Antisense strand to SEQ ID NO: 1850495
ugagucaugcgauuuggag

SEQ ID NO: 1850497 - RNA, 19 nt, Artificial Sequence
  Description of Artificial Sequence: Synthetic oligonucleotide
  Sense strand starting at position 1399 of SEQ ID NO: 1564038
uccaaaucgcaugacucau

SEQ ID NO: 1850498 - RNA, 19 nt, Artificial Sequence
  Description of Artificial Sequence: Synthetic oligonucleotide
  Antisense strand to SEQ ID NO: 1850497
augagucaugcgauuugga

SEQ ID NO: 1850499 - RNA, 19 nt, Artificial Sequence
  Description of Artificial Sequence: Synthetic oligonucleotide
  Sense strand starting at position 2702 of SEQ ID NO: 1564038
gcaggcuucucuccugcaa

SEQ ID NO: 1850500 - RNA, 19 nt, Artificial Sequence
  Description of Artificial Sequence: Synthetic oligonucleotide
  Antisense strand to SEQ ID NO: 1850499
uugcaggagagaagccugc

SEQ ID NO: 1850501 - RNA, 19 nt, Artificial Sequence
  Description of Artificial Sequence: Synthetic oligonucleotide
  Sense strand starting at position 2735 of SEQ ID NO: 1564038
ggagaauucugccucccuc

SEQ ID NO: 1850502 - RNA, 19 nt, Artificial Sequence
  Description of Artificial Sequence: Synthetic oligonucleotide
  Antisense strand to SEQ ID NO: 1850501
gagggaggcagaauucucc

SEQ ID NO: 1850503 - RNA, 19 nt, Artificial Sequence
  Description of Artificial Sequence: Synthetic oligonucleotide
  Sense strand starting at position 2867 of SEQ ID NO: 1564038
ggccgcacugugagaaguu

SEQ ID NO: 1850504 - RNA, 19 nt, Artificial Sequence
  Description of Artificial Sequence: Synthetic oligonucleotide
  Antisense strand to SEQ ID NO: 1850503
aacuucucacagugcggcc

SEQ ID NO: 1850505 - RNA, 19 nt, Artificial Sequence
  Description of Artificial Sequence: Synthetic oligonucleotide
  Sense strand starting at position 2877 of SEQ ID NO: 1564038
ugagaaguucagcauggca

SEQ ID NO: 1850506 - RNA, 19 nt, Artificial Sequence
  Description of Artificial Sequence: Synthetic oligonucleotide
  Antisense strand to SEQ ID NO: 1850505
ugccaugcugaacuucuca

SEQ ID NO: 1850507 - RNA, 19 nt, Artificial Sequence
  Description of Artificial Sequence: Synthetic oligonucleotide
  Sense strand starting at position 2901 of SEQ ID NO: 1564038
agacgcauagcagagauua

SEQ ID NO: 1850508 - RNA, 19 nt, Artificial Sequence
  Description of Artificial Sequence: Synthetic oligonucleotide
  Antisense strand to SEQ ID NO: 1850507
uaaucucugcuaugcgucu

SEQ ID NO: 1850509 - RNA, 19 nt, Artificial Sequence
  Description of Artificial Sequence: Synthetic oligonucleotide
  Sense strand starting at position 2903 of SEQ ID NO: 1564038
acgcauagcagagauuaca

SEQ ID NO: 1850510 - RNA, 19 nt, Artificial Sequence
  Description of Artificial Sequence: Synthetic oligonucleotide
  Antisense strand to SEQ ID NO: 1850509
uguaaucucugcuaugcgu

SEQ ID NO: 1850511 - RNA, 19 nt, Artificial Sequence
  Description of Artificial Sequence: Synthetic oligonucleotide
  Sense strand starting at position 2991 of SEQ ID NO: 1564038
gguucugggucuaggaaag

SEQ ID NO: 1850512 - RNA, 19 nt, Artificial Sequence
  Description of Artificial Sequence: Synthetic oligonucleotide
  Antisense strand to SEQ ID NO: 1850511
cuuuccuagacccagaacc

SEQ ID NO: 1850513 - RNA, 19 nt, Artificial Sequence
  Description of Artificial Sequence: Synthetic oligonucleotide
  Sense strand starting at position 3005 of SEQ ID NO: 1564038
gaaagccucccucggagaa

SEQ ID NO: 1850514 - RNA, 19 nt, Artificial Sequence
  Description of Artificial Sequence: Synthetic oligonucleotide
  Antisense strand to SEQ ID NO: 1850513
uucuccgagggaggcuuuc

SEQ ID NO: 1850515 - RNA, 19 nt, Artificial Sequence
  Description of Artificial Sequence: Synthetic oligonucleotide
  Sense strand starting at position 3356 of SEQ ID NO: 1564038
cuguuagaguucuucccua

SEQ ID NO: 1850516 - RNA, 19 nt, Artificial Sequence
  Description of Artificial Sequence: Synthetic oligonucleotide
  Antisense strand to SEQ ID NO: 1850515
uagggaagaacucuaacag

SEQ ID NO: 1850517 - RNA, 19 nt, Artificial Sequence
  Description of Artificial Sequence: Synthetic oligonucleotide
  Sense strand starting at position 3361 of SEQ ID NO: 1564038
agaguucuucccuagcuug

SEQ ID NO: 1850518 - RNA, 19 nt, Artificial Sequence
  Description of Artificial Sequence: Synthetic oligonucleotide
  Antisense strand to SEQ ID NO: 1850517
caagcuagggaagaacucu

SEQ ID NO: 1850519 - RNA, 19 nt, Artificial Sequence
  Description of Artificial Sequence: Synthetic oligonucleotide
  Sense strand starting at position 3471 of SEQ ID NO: 1564038
uccacagacucuucuggaa

SEQ ID NO: 1850520 - RNA, 19 nt, Artificial Sequence
  Description of Artificial Sequence: Synthetic oligonucleotide
  Antisense strand to SEQ ID NO: 1850519
uuccagaagagucugugga

SEQ ID NO: 1850521 - RNA, 19 nt, Artificial Sequence
  Description of Artificial Sequence: Synthetic oligonucleotide
  Sense strand starting at position 3521 of SEQ ID NO: 1564038
uguucccaucgugaucuua

SEQ ID NO: 1850522 - RNA, 19 nt, Artificial Sequence
  Description of Artificial Sequence: Synthetic oligonucleotide
  Antisense strand to SEQ ID NO: 1850521
uaagaucacgaugggaaca

SEQ ID NO: 1850523 - RNA, 19 nt, Artificial Sequence
  Description of Artificial Sequence: Synthetic oligonucleotide
  Sense strand starting at position 3523 of SEQ ID NO: 1564038
uucccaucgugaucuuaac

SEQ ID NO: 1850524 - RNA, 19 nt, Artificial Sequence
  Description of Artificial Sequence: Synthetic oligonucleotide
  Antisense strand to SEQ ID NO: 1850523
guuaagaucacgaugggaa

SEQ ID NO: 1850525 - RNA, 19 nt, Artificial Sequence
  Description of Artificial Sequence: Synthetic oligonucleotide
  Sense strand starting at position 3555 of SEQ ID NO: 1564038
uugugcacuugacuguuaa

SEQ ID NO: 1850526 - RNA, 19 nt, Artificial Sequence
  Description of Artificial Sequence: Synthetic oligonucleotide
  Antisense strand to SEQ ID NO: 1850525
uuaacagucaagugcacaa

SEQ ID NO: 1850527 - RNA, 19 nt, Artificial Sequence
  Description of Artificial Sequence: Synthetic oligonucleotide
  Sense strand starting at position 3556 of SEQ ID NO: 1564038
ugugcacuugacuguuaaa

SEQ ID NO: 1850528 - RNA, 19 nt, Artificial Sequence
  Description of Artificial Sequence: Synthetic oligonucleotide
  Antisense strand to SEQ ID NO: 1850527
uuuaacagucaagugcaca

SEQ ID NO: 1850529 - RNA, 19 nt, Artificial Sequence
  Description of Artificial Sequence: Synthetic oligonucleotide
  Sense strand starting at position 3750 of SEQ ID NO: 1564038
gcaugacaucucuacugug

SEQ ID NO: 1850530 - RNA, 19 nt, Artificial Sequence
  Description of Artificial Sequence: Synthetic oligonucleotide
  Antisense strand to SEQ ID NO: 1850529
cacaguagagaugucaugc

SEQ ID NO: 1850531 - RNA, 19 nt, Artificial Sequence
  Description of Artificial Sequence: Synthetic oligonucleotide
  Sense strand starting at position 3814 of SEQ ID NO: 1564038
ucaggacuaucugcagaga

SEQ ID NO: 1850532 - RNA, 19 nt, Artificial Sequence
  Description of Artificial Sequence: Synthetic oligonucleotide
  Antisense strand to SEQ ID NO: 1850531
ucucugcagauaguccuga

SEQ ID NO: 1850533 - RNA, 19 nt, Artificial Sequence
  Description of Artificial Sequence: Synthetic oligonucleotide
  Sense strand starting at position 263 of SEQ ID NO: 1564039
auuugcagugacugcuaua

SEQ ID NO: 1850534 - RNA, 19 nt, Artificial Sequence
  Description of Artificial Sequence: Synthetic oligonucleotide
  Antisense strand to SEQ ID NO: 1850533
uauagcagucacugcaaau

SEQ ID NO: 1850535 - RNA, 19 nt, Artificial Sequence
  Description of Artificial Sequence: Synthetic oligonucleotide
  Sense strand starting at position 701 of SEQ ID NO: 1564039
ucucuugaugcugaauagu

SEQ ID NO: 1850536 - RNA, 19 nt, Artificial Sequence
  Description of Artificial Sequence: Synthetic oligonucleotide
  Antisense strand to SEQ ID NO: 1850535
acuauucagcaucaagaga

SEQ ID NO: 1850537 - RNA, 19 nt, Artificial Sequence
  Description of Artificial Sequence: Synthetic oligonucleotide
  Sense strand starting at position 757 of SEQ ID NO: 1564039
ugguuaaauuuccaaugga

SEQ ID NO: 1850538 - RNA, 19 nt, Artificial Sequence
  Description of Artificial Sequence: Synthetic oligonucleotide
  Antisense strand to SEQ ID NO: 1850537
uccauuggaaauuuaacca

SEQ ID NO: 1850539 - RNA, 19 nt, Artificial Sequence
  Description of Artificial Sequence: Synthetic oligonucleotide
  Sense strand starting at position 957 of SEQ ID NO: 1564039
ucuguaaguaugggacagu

SEQ ID NO: 1850540 - RNA, 19 nt, Artificial Sequence
  Description of Artificial Sequence: Synthetic oligonucleotide
  Antisense strand to SEQ ID NO: 1850539
acugucccauacuuacaga

SEQ ID NO: 1850541 - RNA, 19 nt, Artificial Sequence
  Description of Artificial Sequence: Synthetic oligonucleotide
  Sense strand starting at position 976 of SEQ ID NO: 1564039
cucacuagugcuuacgaca

SEQ ID NO: 1850542 - RNA, 19 nt, Artificial Sequence
  Description of Artificial Sequence: Synthetic oligonucleotide
  Antisense strand to SEQ ID NO: 1850541
ugucguaagcacuagugag

SEQ ID NO: 1850543 - RNA, 19 nt, Artificial Sequence
  Description of Artificial Sequence: Synthetic oligonucleotide
  Sense strand starting at position 1221 of SEQ ID NO: 1564039
uccaauuaacgacagucau

SEQ ID NO: 1850544 - RNA, 19 nt, Artificial Sequence
  Description of Artificial Sequence: Synthetic oligonucleotide
  Antisense strand to SEQ ID NO: 1850543
augacugucguuaauugga

SEQ ID NO: 1850545 - RNA, 19 nt, Artificial Sequence
  Description of Artificial Sequence: Synthetic oligonucleotide
  Sense strand starting at position 1269 of SEQ ID NO: 1564039
uucugaaagcaccauguaa

SEQ ID NO: 1850546 - RNA, 19 nt, Artificial Sequence
  Description of Artificial Sequence: Synthetic oligonucleotide
  Antisense strand to SEQ ID NO: 1850545
uuacauggugcuuucagaa

SEQ ID NO: 1850547 - RNA, 19 nt, Artificial Sequence
  Description of Artificial Sequence: Synthetic oligonucleotide
  Sense strand starting at position 1314 of SEQ ID NO: 1564039
uuuguaaucggacauguuu

SEQ ID NO: 1850548 - RNA, 19 nt, Artificial Sequence
  Description of Artificial Sequence: Synthetic oligonucleotide
  Antisense strand to SEQ ID NO: 1850547
aaacauguccgauuacaaa

SEQ ID NO: 1850549 - RNA, 19 nt, Artificial Sequence
  Description of Artificial Sequence: Synthetic oligonucleotide
  Sense strand starting at position 1432 of SEQ ID NO: 1564039
ugaauacaguuacuaguaa

SEQ ID NO: 1850550 - RNA, 19 nt, Artificial Sequence
  Description of Artificial Sequence: Synthetic oligonucleotide
  Antisense strand to SEQ ID NO: 1850549
uuacuaguaacuguauuca

SEQ ID NO: 1850551 - RNA, 19 nt, Artificial Sequence
  Description of Artificial Sequence: Synthetic oligonucleotide
  Sense strand starting at position 1499 of SEQ ID NO: 1564039
uucugagaaaugcgguaga

SEQ ID NO: 1850552 - RNA, 19 nt, Artificial Sequence
  Description of Artificial Sequence: Synthetic oligonucleotide
  Antisense strand to SEQ ID NO: 1850551
ucuaccgcauuucucagaa

SEQ ID NO: 1850553 - RNA, 19 nt, Artificial Sequence
  Description of Artificial Sequence: Synthetic oligonucleotide
  Sense strand starting at position 1513 of SEQ ID NO: 1564039
guagacguucuagaacuau

SEQ ID NO: 1850554 - RNA, 19 nt, Artificial Sequence
  Description of Artificial Sequence: Synthetic oligonucleotide
  Antisense strand to SEQ ID NO: 1850553
auaguucuagaacgucuac

SEQ ID NO: 1850555 - RNA, 19 nt, Artificial Sequence
  Description of Artificial Sequence: Synthetic oligonucleotide
  Sense strand starting at position 1841 of SEQ ID NO: 1564039
guugcagaccauuagguua

SEQ ID NO: 1850556 - RNA, 19 nt, Artificial Sequence
  Description of Artificial Sequence: Synthetic oligonucleotide
  Antisense strand to SEQ ID NO: 1850555
uaaccuaauggucugcaac

SEQ ID NO: 1850557 - RNA, 19 nt, Artificial Sequence
  Description of Artificial Sequence: Synthetic oligonucleotide
  Sense strand starting at position 2211 of SEQ ID NO: 1564039
aguggaaccgugugaaaga

SEQ ID NO: 1850558 - RNA, 19 nt, Artificial Sequence
  Description of Artificial Sequence: Synthetic oligonucleotide
  Antisense strand to SEQ ID NO: 1850557
ucuuucacacgguuccacu

SEQ ID NO: 1850559 - RNA, 19 nt, Artificial Sequence
  Description of Artificial Sequence: Synthetic oligonucleotide
  Sense strand starting at position 2258 of SEQ ID NO: 1564039
uugagucggccauaugaaa

SEQ ID NO: 1850560 - RNA, 19 nt, Artificial Sequence
  Description of Artificial Sequence: Synthetic oligonucleotide
  Antisense strand to SEQ ID NO: 1850559
uuucauauggccgacucaa

SEQ ID NO: 1850561 - RNA, 19 nt, Artificial Sequence
  Description of Artificial Sequence: Synthetic oligonucleotide
  Sense strand starting at position 2459 of SEQ ID NO: 1564039
gguuaauuacucugacauc

SEQ ID NO: 1850562 - RNA, 19 nt, Artificial Sequence
  Description of Artificial Sequence: Synthetic oligonucleotide
  Antisense strand to SEQ ID NO: 1850561
gaugucagaguaauuaacc

SEQ ID NO: 1850563 - RNA, 19 nt, Artificial Sequence
  Description of Artificial Sequence: Synthetic oligonucleotide
  Sense strand starting at position 2582 of SEQ ID NO: 1564039
gugggagccaccugauauc

SEQ ID NO: 1850564 - RNA, 19 nt, Artificial Sequence
  Description of Artificial Sequence: Synthetic oligonucleotide
  Antisense strand to SEQ ID NO: 1850563
gauaucagguggcucccac

SEQ ID NO: 1850565 - RNA, 19 nt, Artificial Sequence
  Description of Artificial Sequence: Synthetic oligonucleotide
  Sense strand starting at position 2600 of SEQ ID NO: 1564039
cuaagagaccucggugagu

SEQ ID NO: 1850566 - RNA, 19 nt, Artificial Sequence
  Description of Artificial Sequence: Synthetic oligonucleotide
  Antisense strand to SEQ ID NO: 1850565
acucaccgaggucucuuag

SEQ ID NO: 1850567 - RNA, 19 nt, Artificial Sequence
  Description of Artificial Sequence: Synthetic oligonucleotide
  Sense strand starting at position 2643 of SEQ ID NO: 1564039
ugaugagggucaucuuaag

SEQ ID NO: 1850568 - RNA, 19 nt, Artificial Sequence
  Description of Artificial Sequence: Synthetic oligonucleotide
  Antisense strand to SEQ ID NO: 1850567
cuuaagaugacccucauca

SEQ ID NO: 1850569 - RNA, 19 nt, Artificial Sequence
  Description of Artificial Sequence: Synthetic oligonucleotide
  Sense strand starting at position 2693 of SEQ ID NO: 1564039
ucacgauauuaacuauguu

SEQ ID NO: 1850570 - RNA, 19 nt, Artificial Sequence
  Description of Artificial Sequence: Synthetic oligonucleotide
  Antisense strand to SEQ ID NO: 1850569
aacauaguuaauaucguga

SEQ ID NO: 1850571 - RNA, 19 nt, Artificial Sequence
  Description of Artificial Sequence: Synthetic oligonucleotide
  Sense strand starting at position 2766 of SEQ ID NO: 1564039
caaauagugccauagcaga

SEQ ID NO: 1850572 - RNA, 19 nt, Artificial Sequence
  Description of Artificial Sequence: Synthetic oligonucleotide
  Antisense strand to SEQ ID NO: 1850571
ucugcuauggcacuauuug

SEQ ID NO: 1850573 - RNA, 19 nt, Artificial Sequence
  Description of Artificial Sequence: Synthetic oligonucleotide
  Sense strand starting at position 2789 of SEQ ID NO: 1564039
augcaagacugauccuuua

SEQ ID NO: 1850574 - RNA, 19 nt, Artificial Sequence
  Description of Artificial Sequence: Synthetic oligonucleotide
  Antisense strand to SEQ ID NO: 1850573
uaaaggaucagucuugcau

SEQ ID NO: 1850575 - RNA, 19 nt, Artificial Sequence
  Description of Artificial Sequence: Synthetic oligonucleotide
  Sense strand starting at position 2811 of SEQ ID NO: 1564039
ggcauauccagaggacauu

SEQ ID NO: 1850576 - RNA, 19 nt, Artificial Sequence
  Description of Artificial Sequence: Synthetic oligonucleotide
  Antisense strand to SEQ ID NO: 1850575
aauguccucuggauaugcc

SEQ ID NO: 1850577 - RNA, 19 nt, Artificial Sequence
  Description of Artificial Sequence: Synthetic oligonucleotide
  Sense strand starting at position 2832 of SEQ ID NO: 1564039
gccacaacuagguaacgau

SEQ ID NO: 1850578 - RNA, 19 nt, Artificial Sequence
  Description of Artificial Sequence: Synthetic oligonucleotide
  Antisense strand to SEQ ID NO: 1850577
aucguuaccuaguuguggc

SEQ ID NO: 1850579 - RNA, 19 nt, Artificial Sequence
  Description of Artificial Sequence: Synthetic oligonucleotide
  Sense strand starting at position 2893 of SEQ ID NO: 1564039
ccuguuauaguguagaaca

SEQ ID NO: 1850580 - RNA, 19 nt, Artificial Sequence
  Description of Artificial Sequence: Synthetic oligonucleotide
  Antisense strand to SEQ ID NO: 1850579
uguucuacacuauaacagg

SEQ ID NO: 1850581 - RNA, 19 nt, Artificial Sequence
  Description of Artificial Sequence: Synthetic oligonucleotide
  Sense strand starting at position 3158 of SEQ ID NO: 1564039
gaauuaguguucccuauug

SEQ ID NO: 1850582 - RNA, 19 nt, Artificial Sequence
  Description of Artificial Sequence: Synthetic oligonucleotide
  Antisense strand to SEQ ID NO: 1850581
caauagggaacacuaauuc

SEQ ID NO: 1850583 - RNA, 19 nt, Artificial Sequence
  Description of Artificial Sequence: Synthetic oligonucleotide
  Sense strand starting at position 3205 of SEQ ID NO: 1564039
uaaugcugaucuguuagga

SEQ ID NO: 1850584 - RNA, 19 nt, Artificial Sequence
  Description of Artificial Sequence: Synthetic oligonucleotide
  Antisense strand to SEQ ID NO: 1850583
uccuaacagaucagcauua

SEQ ID NO: 1850585 - RNA, 19 nt, Artificial Sequence
  Description of Artificial Sequence: Synthetic oligonucleotide
  Sense strand starting at position 3210 of SEQ ID NO: 1564039
cugaucuguuaggaaauuu

SEQ ID NO: 1850586 - RNA, 19 nt, Artificial Sequence
  Description of Artificial Sequence: Synthetic oligonucleotide
  Antisense strand to SEQ ID NO: 1850585
aaauuuccuaacagaucag

SEQ ID NO: 1850587 - RNA, 19 nt, Artificial Sequence
  Description of Artificial Sequence: Synthetic oligonucleotide
  Sense strand starting at position 3386 of SEQ ID NO: 1564039
agaguuccuguauaacacu

SEQ ID NO: 1850588 - RNA, 19 nt, Artificial Sequence
  Description of Artificial Sequence: Synthetic oligonucleotide
  Antisense strand to SEQ ID NO: 1850587
aguguuauacaggaacucu

SEQ ID NO: 1850589 - RNA, 19 nt, Artificial Sequence
  Description of Artificial Sequence: Synthetic oligonucleotide
  Sense strand starting at position 3473 of SEQ ID NO: 1564039
uugguaacuuuacugaagu

SEQ ID NO: 1850590 - RNA, 19 nt, Artificial Sequence
  Description of Artificial Sequence: Synthetic oligonucleotide
  Antisense strand to SEQ ID NO: 1850589
acuucaguaaaguuaccaa

SEQ ID NO: 1850591 - RNA, 19 nt, Artificial Sequence
  Description of Artificial Sequence: Synthetic oligonucleotide
  Sense strand starting at position 3493 of SEQ ID NO: 1564039
gggcaaccaucaccauaaa

SEQ ID NO: 1850592 - RNA, 19 nt, Artificial Sequence
  Description of Artificial Sequence: Synthetic oligonucleotide
  Antisense strand to SEQ ID NO: 1850591
uuuauggugaugguugccc

SEQ ID NO: 1850593 - RNA, 19 nt, Artificial Sequence
  Description of Artificial Sequence: Synthetic oligonucleotide
  Sense strand starting at position 3544 of SEQ ID NO: 1564039
ggucccucaugccuauuua

SEQ ID NO: 1850594 - RNA, 19 nt, Artificial Sequence
  Description of Artificial Sequence: Synthetic oligonucleotide
  Antisense strand to SEQ ID NO: 1850593
uaaauaggcaugagggacc

SEQ ID NO: 1850595 - RNA, 19 nt, Artificial Sequence
  Description of Artificial Sequence: Synthetic oligonucleotide
  Sense strand starting at position 3677 of SEQ ID NO: 1564039
cagucuuugugucugauuu

SEQ ID NO: 1850596 - RNA, 19 nt, Artificial Sequence
  Description of Artificial Sequence: Synthetic oligonucleotide
  Antisense strand to SEQ ID NO: 1850595
aaaucagacacaaagacug

SEQ ID NO: 1850597 - RNA, 19 nt, Artificial Sequence
  Description of Artificial Sequence: Synthetic oligonucleotide
  Sense strand starting at position 3678 of SEQ ID NO: 1564039
agucuuugugucugauuuc

SEQ ID NO: 1850598 - RNA, 19 nt, Artificial Sequence
  Description of Artificial Sequence: Synthetic oligonucleotide
  Antisense strand to SEQ ID NO: 1850597
gaaaucagacacaaagacu

SEQ ID NO: 1850599 - RNA, 19 nt, Artificial Sequence
  Description of Artificial Sequence: Synthetic oligonucleotide
  Sense strand starting at position 3810 of SEQ ID NO: 1564039
cugucuacucacuauuaga

SEQ ID NO: 1850600 - RNA, 19 nt, Artificial Sequence
  Description of Artificial Sequence: Synthetic oligonucleotide
  Antisense strand to SEQ ID NO: 1850599
ucuaauagugaguagacag

SEQ ID NO: 1850601 - RNA, 19 nt, Artificial Sequence
  Description of Artificial Sequence: Synthetic oligonucleotide
  Sense strand starting at position 3823 of SEQ ID NO: 1564039
auuagauaggcacaucagu

SEQ ID NO: 1850602 - RNA, 19 nt, Artificial Sequence
  Description of Artificial Sequence: Synthetic oligonucleotide
  Antisense strand to SEQ ID NO: 1850601
acugaugugccuaucuaau

SEQ ID NO: 1850603 - RNA, 19 nt, Artificial Sequence
  Description of Artificial Sequence: Synthetic oligonucleotide
  Sense strand starting at position 3873 of SEQ ID NO: 1564039
cuaagaagauuaguaugua

SEQ ID NO: 1850604 - RNA, 19 nt, Artificial Sequence
  Description of Artificial Sequence: Synthetic oligonucleotide
  Antisense strand to SEQ ID NO: 1850603
uacauacuaaucuucuuag

SEQ ID NO: 1850605 - RNA, 19 nt, Artificial Sequence
  Description of Artificial Sequence: Synthetic oligonucleotide
  Sense strand starting at position 3876 of SEQ ID NO: 1564039
agaagauuaguauguaagu

SEQ ID NO: 1850606 - RNA, 19 nt, Artificial Sequence
  Description of Artificial Sequence: Synthetic oligonucleotide
  Antisense strand to SEQ ID NO: 1850605
acuuacauacuaaucuucu

SEQ ID NO: 1850607 - RNA, 19 nt, Artificial Sequence
  Description of Artificial Sequence: Synthetic oligonucleotide
  Sense strand starting at position 3877 of SEQ ID NO: 1564039
gaagauuaguauguaaguc

SEQ ID NO: 1850608 - RNA, 19 nt, Artificial Sequence
  Description of Artificial Sequence: Synthetic oligonucleotide
  Antisense strand to SEQ ID NO: 1850607
gacuuacauacuaaucuuc

SEQ ID NO: 1850609 - RNA, 19 nt, Artificial Sequence
  Description of Artificial Sequence: Synthetic oligonucleotide
  Sense strand starting at position 3889 of SEQ ID NO: 1564039
guaagucuucgugcggaca

SEQ ID NO: 1850610 - RNA, 19 nt, Artificial Sequence
  Description of Artificial Sequence: Synthetic oligonucleotide
  Antisense strand to SEQ ID NO: 1850609
uguccgcacgaagacuuac

SEQ ID NO: 1850611 - RNA, 19 nt, Artificial Sequence
  Description of Artificial Sequence: Synthetic oligonucleotide
  Sense strand starting at position 3932 of SEQ ID NO: 1564039
gauacuuaaggguggaguu

SEQ ID NO: 1850612 - RNA, 19 nt, Artificial Sequence
  Description of Artificial Sequence: Synthetic oligonucleotide
  Antisense strand to SEQ ID NO: 1850611
aacuccacccuuaaguauc

SEQ ID NO: 1850613 - RNA, 19 nt, Artificial Sequence
  Description of Artificial Sequence: Synthetic oligonucleotide
  Sense strand starting at position 11 of SEQ ID NO: 1564040
uccuuaugcccaugaugaa

SEQ ID NO: 1850614 - RNA, 19 nt, Artificial Sequence
  Description of Artificial Sequence: Synthetic oligonucleotide
  Antisense strand to SEQ ID NO: 1850613
uucaucaugggcauaagga

SEQ ID NO: 1850615 - RNA, 19 nt, Artificial Sequence
  Description of Artificial Sequence: Synthetic oligonucleotide
  Sense strand starting at position 12 of SEQ ID NO: 1564040
ccuuaugcccaugaugaau

SEQ ID NO: 1850616 - RNA, 19 nt, Artificial Sequence
  Description of Artificial Sequence: Synthetic oligonucleotide
  Antisense strand to SEQ ID NO: 1850615
auucaucaugggcauaagg

SEQ ID NO: 1850617 - RNA, 19 nt, Artificial Sequence
  Description of Artificial Sequence: Synthetic oligonucleotide
  Sense strand starting at position 23 of SEQ ID NO: 1564040
ugaugaaucuacuaugugu

SEQ ID NO: 1850618 - RNA, 19 nt, Artificial Sequence
  Description of Artificial Sequence: Synthetic oligonucleotide
  Antisense strand to SEQ ID NO: 1850617
acacauaguagauucauca

SEQ ID NO: 1850619 - RNA, 19 nt, Artificial Sequence
  Description of Artificial Sequence: Synthetic oligonucleotide
  Sense strand starting at position 25 of SEQ ID NO: 1564040
augaaucuacuauguguuu

SEQ ID NO: 1850620 - RNA, 19 nt, Artificial Sequence
  Description of Artificial Sequence: Synthetic oligonucleotide
  Antisense strand to SEQ ID NO: 1850619
aaacacauaguagauucau

SEQ ID NO: 1850621 - RNA, 19 nt, Artificial Sequence
  Description of Artificial Sequence: Synthetic oligonucleotide
  Sense strand starting at position 65 of SEQ ID NO: 1564040
aguauuuaucuguguccca

SEQ ID NO: 1850622 - RNA, 19 nt, Artificial Sequence
  Description of Artificial Sequence: Synthetic oligonucleotide
  Antisense strand to SEQ ID NO: 1850621
ugggacacagauaaauacu

SEQ ID NO: 1850623 - RNA, 19 nt, Artificial Sequence
  Description of Artificial Sequence: Synthetic oligonucleotide
  Sense strand starting at position 66 of SEQ ID NO: 1564040
guauuuaucugugucccaa

SEQ ID NO: 1850624 - RNA, 19 nt, Artificial Sequence
  Description of Artificial Sequence: Synthetic oligonucleotide
  Antisense strand to SEQ ID NO: 1850623
uugggacacagauaaauac

SEQ ID NO: 1850625 - RNA, 19 nt, Artificial Sequence
  Description of Artificial Sequence: Synthetic oligonucleotide
  Sense strand starting at position 92 of SEQ ID NO: 1564040
ucacuaaaguauugagaga

SEQ ID NO: 1850626 - RNA, 19 nt, Artificial Sequence
  Description of Artificial Sequence: Synthetic oligonucleotide
  Antisense strand to SEQ ID NO: 1850625
ucucucaauacuuuaguga

SEQ ID NO: 1850627 - RNA, 19 nt, Artificial Sequence
  Description of Artificial Sequence: Synthetic oligonucleotide
  Sense strand starting at position 132 of SEQ ID NO: 1564040
cuggaagucuaaucaugag

SEQ ID NO: 1850628 - RNA, 19 nt, Artificial Sequence
  Description of Artificial Sequence: Synthetic oligonucleotide
  Antisense strand to SEQ ID NO: 1850627
cucaugauuagacuuccag

SEQ ID NO: 1850629 - RNA, 19 nt, Artificial Sequence
  Description of Artificial Sequence: Synthetic oligonucleotide
  Sense strand starting at position 155 of SEQ ID NO: 1564040
acaaacaucucgggauuaa

SEQ ID NO: 1850630 - RNA, 19 nt, Artificial Sequence
  Description of Artificial Sequence: Synthetic oligonucleotide
  Antisense strand to SEQ ID NO: 1850629
uuaaucccgagauguuugu

SEQ ID NO: 1850631 - RNA, 19 nt, Artificial Sequence
  Description of Artificial Sequence: Synthetic oligonucleotide
  Sense strand starting at position 159 of SEQ ID NO: 1564040
acaucucgggauuaauguu

SEQ ID NO: 1850632 - RNA, 19 nt, Artificial Sequence
  Description of Artificial Sequence: Synthetic oligonucleotide
  Antisense strand to SEQ ID NO: 1850631
aacauuaaucccgagaugu

SEQ ID NO: 1850633 - RNA, 19 nt, Artificial Sequence
  Description of Artificial Sequence: Synthetic oligonucleotide
  Sense strand starting at position 165 of SEQ ID NO: 1564040
cgggauuaauguuauuaag

SEQ ID NO: 1850634 - RNA, 19 nt, Artificial Sequence
  Description of Artificial Sequence: Synthetic oligonucleotide
  Antisense strand to SEQ ID NO: 1850633
cuuaauaacauuaaucccg

SEQ ID NO: 1850635 - RNA, 19 nt, Artificial Sequence
  Description of Artificial Sequence: Synthetic oligonucleotide
  Sense strand starting at position 167 of SEQ ID NO: 1564040
ggauuaauguuauuaaggu

SEQ ID NO: 1850636 - RNA, 19 nt, Artificial Sequence
  Description of Artificial Sequence: Synthetic oligonucleotide
  Antisense strand to SEQ ID NO: 1850635
accuuaauaacauuaaucc

SEQ ID NO: 1850637 - RNA, 19 nt, Artificial Sequence
  Description of Artificial Sequence: Synthetic oligonucleotide
  Sense strand starting at position 177 of SEQ ID NO: 1564040
uauuaagguucugugauga

SEQ ID NO: 1850638 - RNA, 19 nt, Artificial Sequence
  Description of Artificial Sequence: Synthetic oligonucleotide
  Antisense strand to SEQ ID NO: 1850637
ucaucacagaaccuuaaua

SEQ ID NO: 1850639 - RNA, 19 nt, Artificial Sequence
  Description of Artificial Sequence: Synthetic oligonucleotide
  Sense strand starting at position 182 of SEQ ID NO: 1564040
agguucugugaugaguaaa

SEQ ID NO: 1850640 - RNA, 19 nt, Artificial Sequence
  Description of Artificial Sequence: Synthetic oligonucleotide
  Antisense strand to SEQ ID NO: 1850639
uuuacucaucacagaaccu

SEQ ID NO: 1850641 - RNA, 19 nt, Artificial Sequence
  Description of Artificial Sequence: Synthetic oligonucleotide
  Sense strand starting at position 185 of SEQ ID NO: 1564040
uucugugaugaguaaaugu

SEQ ID NO: 1850642 - RNA, 19 nt, Artificial Sequence
  Description of Artificial Sequence: Synthetic oligonucleotide
  Antisense strand to SEQ ID NO: 1850641
acauuuacucaucacagaa

SEQ ID NO: 1850643 - RNA, 19 nt, Artificial Sequence
  Description of Artificial Sequence: Synthetic oligonucleotide
  Sense strand starting at position 192 of SEQ ID NO: 1564040
augaguaaaugugugaugu

SEQ ID NO: 1850644 - RNA, 19 nt, Artificial Sequence
  Description of Artificial Sequence: Synthetic oligonucleotide
  Antisense strand to SEQ ID NO: 1850643
acaucacacauuuacucau

SEQ ID NO: 1850645 - RNA, 19 nt, Artificial Sequence
  Description of Artificial Sequence: Synthetic oligonucleotide
  Sense strand starting at position 193 of SEQ ID NO: 1564040
ugaguaaaugugugaugug

SEQ ID NO: 1850646 - RNA, 19 nt, Artificial Sequence
  Description of Artificial Sequence: Synthetic oligonucleotide
  Antisense strand to SEQ ID NO: 1850645
cacaucacacauuuacuca

SEQ ID NO: 1850647 - RNA, 19 nt, Artificial Sequence
  Description of Artificial Sequence: Synthetic oligonucleotide
  Sense strand starting at position 198 of SEQ ID NO: 1564040
aaaugugugaugugugcca

SEQ ID NO: 1850648 - RNA, 19 nt, Artificial Sequence
  Description of Artificial Sequence: Synthetic oligonucleotide
  Antisense strand to SEQ ID NO: 1850647
uggcacacaucacacauuu

SEQ ID NO: 1850649 - RNA, 19 nt, Artificial Sequence
  Description of Artificial Sequence: Synthetic oligonucleotide
  Sense strand starting at position 200 of SEQ ID NO: 1564040
augugugaugugugccauu

SEQ ID NO: 1850650 - RNA, 19 nt, Artificial Sequence
  Description of Artificial Sequence: Synthetic oligonucleotide
  Antisense strand to SEQ ID NO: 1850649
aauggcacacaucacacau

SEQ ID NO: 1850651 - RNA, 19 nt, Artificial Sequence
  Description of Artificial Sequence: Synthetic oligonucleotide
  Sense strand starting at position 297 of SEQ ID NO: 1564040
gcuaauugauaacauguca

SEQ ID NO: 1850652 - RNA, 19 nt, Artificial Sequence
  Description of Artificial Sequence: Synthetic oligonucleotide
  Antisense strand to SEQ ID NO: 1850651
ugacauguuaucaauuagc

SEQ ID NO: 1850653 - RNA, 19 nt, Artificial Sequence
  Description of Artificial Sequence: Synthetic oligonucleotide
  Sense strand starting at position 343 of SEQ ID NO: 1564040
auuagcuugucucuaggga

SEQ ID NO: 1850654 - RNA, 19 nt, Artificial Sequence
  Description of Artificial Sequence: Synthetic oligonucleotide
  Antisense strand to SEQ ID NO: 1850653
ucccuagagacaagcuaau

SEQ ID NO: 1850655 - RNA, 19 nt, Artificial Sequence
  Description of Artificial Sequence: Synthetic oligonucleotide
  Sense strand starting at position 344 of SEQ ID NO: 1564040
uuagcuugucucuagggau

SEQ ID NO: 1850656 - RNA, 19 nt, Artificial Sequence
  Description of Artificial Sequence: Synthetic oligonucleotide
  Antisense strand to SEQ ID NO: 1850655
aucccuagagacaagcuaa

SEQ ID NO: 1850657 - RNA, 19 nt, Artificial Sequence
  Description of Artificial Sequence: Synthetic oligonucleotide
  Sense strand starting at position 358 of SEQ ID NO: 1564040
gggauaaacuauuaccugu

SEQ ID NO: 1850658 - RNA, 19 nt, Artificial Sequence
  Description of Artificial Sequence: Synthetic oligonucleotide
  Antisense strand to SEQ ID NO: 1850657
acagguaauaguuuauccc

SEQ ID NO: 1850659 - RNA, 19 nt, Artificial Sequence
  Description of Artificial Sequence: Synthetic oligonucleotide
  Sense strand starting at position 763 of SEQ ID NO: 1564040
ccgguuucugcgaguguca

SEQ ID NO: 1850660 - RNA, 19 nt, Artificial Sequence
  Description of Artificial Sequence: Synthetic oligonucleotide
  Antisense strand to SEQ ID NO: 1850659
ugacacucgcagaaaccgg

SEQ ID NO: 1850661 - RNA, 19 nt, Artificial Sequence
  Description of Artificial Sequence: Synthetic oligonucleotide
  Sense strand starting at position 933 of SEQ ID NO: 1564040
ggcauuucuugaggagcua

SEQ ID NO: 1850662 - RNA, 19 nt, Artificial Sequence
  Description of Artificial Sequence: Synthetic oligonucleotide
  Antisense strand to SEQ ID NO: 1850661
uagcuccucaagaaaugcc

SEQ ID NO: 1850663 - RNA, 19 nt, Artificial Sequence
  Description of Artificial Sequence: Synthetic oligonucleotide
  Sense strand starting at position 1275 of SEQ ID NO: 1564040
cagaaugucuucucucguu

SEQ ID NO: 1850664 - RNA, 19 nt, Artificial Sequence
  Description of Artificial Sequence: Synthetic oligonucleotide
  Antisense strand to SEQ ID NO: 1850663
aacgagagaagacauucug

SEQ ID NO: 1850665 - RNA, 19 nt, Artificial Sequence
  Description of Artificial Sequence: Synthetic oligonucleotide
  Sense strand starting at position 2451 of SEQ ID NO: 1564040
cggcgcuaucgccaggaga

SEQ ID NO: 1850666 - RNA, 19 nt, Artificial Sequence
  Description of Artificial Sequence: Synthetic oligonucleotide
  Antisense strand to SEQ ID NO: 1850665
ucuccuggcgauagcgccg

SEQ ID NO: 1850667 - RNA, 19 nt, Artificial Sequence
  Description of Artificial Sequence: Synthetic oligonucleotide
  Sense strand starting at position 2453 of SEQ ID NO: 1564040
gcgcuaucgccaggagacu

SEQ ID NO: 1850668 - RNA, 19 nt, Artificial Sequence
  Description of Artificial Sequence: Synthetic oligonucleotide
  Antisense strand to SEQ ID NO: 1850667
agucuccuggcgauagcgc

SEQ ID NO: 1850669 - RNA, 19 nt, Artificial Sequence
  Description of Artificial Sequence: Synthetic oligonucleotide
  Sense strand starting at position 2497 of SEQ ID NO: 1564040
gacggagaauuccaggcua

SEQ ID NO: 1850670 - RNA, 19 nt, Artificial Sequence
  Description of Artificial Sequence: Synthetic oligonucleotide
  Antisense strand to SEQ ID NO: 1850669
uagccuggaauucuccguc

SEQ ID NO: 1850671 - RNA, 19 nt, Artificial Sequence
  Description of Artificial Sequence: Synthetic oligonucleotide
  Sense strand starting at position 2499 of SEQ ID NO: 1564040
cggagaauuccaggcuaca

SEQ ID NO: 1850672 - RNA, 19 nt, Artificial Sequence
  Description of Artificial Sequence: Synthetic oligonucleotide
  Antisense strand to SEQ ID NO: 1850671
uguagccuggaauucuccg

SEQ ID NO: 1850673 - RNA, 19 nt, Artificial Sequence
  Description of Artificial Sequence: Synthetic oligonucleotide
  Sense strand starting at position 2647 of SEQ ID NO: 1564040
aguaaagaguucucaggag

SEQ ID NO: 1850674 - RNA, 19 nt, Artificial Sequence
  Description of Artificial Sequence: Synthetic oligonucleotide
  Antisense strand to SEQ ID NO: 1850673
cuccugagaacucuuuacu

SEQ ID NO: 1850675 - RNA, 19 nt, Artificial Sequence
  Description of Artificial Sequence: Synthetic oligonucleotide
  Sense strand starting at position 2819 of SEQ ID NO: 1564040
gacgcucgaacguggaaau

SEQ ID NO: 1850676 - RNA, 19 nt, Artificial Sequence
  Description of Artificial Sequence: Synthetic oligonucleotide
  Antisense strand to SEQ ID NO: 1850675
auuuccacguucgagcguc

SEQ ID NO: 1850677 - RNA, 19 nt, Artificial Sequence
  Description of Artificial Sequence: Synthetic oligonucleotide
  Sense strand starting at position 2937 of SEQ ID NO: 1564040
aaagguauccguggagaau

SEQ ID NO: 1850678 - RNA, 19 nt, Artificial Sequence
  Description of Artificial Sequence: Synthetic oligonucleotide
  Antisense strand to SEQ ID NO: 1850677
auucuccacggauaccuuu

SEQ ID NO: 1850679 - RNA, 19 nt, Artificial Sequence
  Description of Artificial Sequence: Synthetic oligonucleotide
  Sense strand starting at position 2938 of SEQ ID NO: 1564040
aagguauccguggagaauc

SEQ ID NO: 1850680 - RNA, 19 nt, Artificial Sequence
  Description of Artificial Sequence: Synthetic oligonucleotide
  Antisense strand to SEQ ID NO: 1850679
gauucuccacggauaccuu

SEQ ID NO: 1850681 - RNA, 19 nt, Artificial Sequence
  Description of Artificial Sequence: Synthetic oligonucleotide
  Sense strand starting at position 3037 of SEQ ID NO: 1564040
cccaguccuuuaguaauaa

SEQ ID NO: 1850682 - RNA, 19 nt, Artificial Sequence
  Description of Artificial Sequence: Synthetic oligonucleotide
  Antisense strand to SEQ ID NO: 1850681
uuauuacuaaaggacuggg

SEQ ID NO: 1850683 - RNA, 19 nt, Artificial Sequence
  Description of Artificial Sequence: Synthetic oligonucleotide
  Sense strand starting at position 3038 of SEQ ID NO: 1564040
ccaguccuuuaguaauaaa

SEQ ID NO: 1850684 - RNA, 19 nt, Artificial Sequence
  Description of Artificial Sequence: Synthetic oligonucleotide
  Antisense strand to SEQ ID NO: 1850683
uuuauuacuaaaggacugg

SEQ ID NO: 1850685 - RNA, 19 nt, Artificial Sequence
  Description of Artificial Sequence: Synthetic oligonucleotide
  Sense strand starting at position 3237 of SEQ ID NO: 1564040
ggcguagaguguuugagaa

SEQ ID NO: 1850686 - RNA, 19 nt, Artificial Sequence
  Description of Artificial Sequence: Synthetic oligonucleotide
  Antisense strand to SEQ ID NO: 1850685
uucucaaacacucuacgcc

SEQ ID NO: 1850687 - RNA, 19 nt, Artificial Sequence
  Description of Artificial Sequence: Synthetic oligonucleotide
  Sense strand starting at position 3344 of SEQ ID NO: 1564040
ggaaccuuaucucagagca

SEQ ID NO: 1850688 - RNA, 19 nt, Artificial Sequence
  Description of Artificial Sequence: Synthetic oligonucleotide
  Antisense strand to SEQ ID NO: 1850687
ugcucugagauaagguucc

SEQ ID NO: 1850689 - RNA, 19 nt, Artificial Sequence
  Description of Artificial Sequence: Synthetic oligonucleotide
  Sense strand starting at position 3843 of SEQ ID NO: 1564040
ggagcauagacaugcauau

SEQ ID NO: 1850690 - RNA, 19 nt, Artificial Sequence
  Description of Artificial Sequence: Synthetic oligonucleotide
  Antisense strand to SEQ ID NO: 1850689
auaugcaugucuaugcucc

SEQ ID NO: 1850691 - RNA, 19 nt, Artificial Sequence
  Description of Artificial Sequence: Synthetic oligonucleotide
  Sense strand starting at position 3958 of SEQ ID NO: 1564040
ggaggcauuucccuaacgu

SEQ ID NO: 1850692 - RNA, 19 nt, Artificial Sequence
  Description of Artificial Sequence: Synthetic oligonucleotide
  Antisense strand to SEQ ID NO: 1850691
acguuagggaaaugccucc

SEQ ID NO: 1850693 - RNA, 19 nt, Artificial Sequence
  Description of Artificial Sequence: Synthetic oligonucleotide
  Sense strand starting at position 201 of SEQ ID NO: 1564041
guccaucuuccugacaucu

SEQ ID NO: 1850694 - RNA, 19 nt, Artificial Sequence
  Description of Artificial Sequence: Synthetic oligonucleotide
  Antisense strand to SEQ ID NO: 1850693
agaugucaggaagauggac

SEQ ID NO: 1850695 - RNA, 19 nt, Artificial Sequence
  Description of Artificial Sequence: Synthetic oligonucleotide
  Sense strand starting at position 531 of SEQ ID NO: 1564041
acaagaaguugcccuuguu

SEQ ID NO: 1850696 - RNA, 19 nt, Artificial Sequence
  Description of Artificial Sequence: Synthetic oligonucleotide
  Antisense strand to SEQ ID NO: 1850695
aacaagggcaacuucuugu

SEQ ID NO: 1850697 - RNA, 19 nt, Artificial Sequence
  Description of Artificial Sequence: Synthetic oligonucleotide
  Sense strand starting at position 534 of SEQ ID NO: 1564041
agaaguugcccuuguuaug

SEQ ID NO: 1850698 - RNA, 19 nt, Artificial Sequence
  Description of Artificial Sequence: Synthetic oligonucleotide
  Antisense strand to SEQ ID NO: 1850697
cauaacaagggcaacuucu

SEQ ID NO: 1850699 - RNA, 19 nt, Artificial Sequence
  Description of Artificial Sequence: Synthetic oligonucleotide
  Sense strand starting at position 578 of SEQ ID NO: 1564041
auugacauauuccugucau

SEQ ID NO: 1850700 - RNA, 19 nt, Artificial Sequence
  Description of Artificial Sequence: Synthetic oligonucleotide
  Antisense strand to SEQ ID NO: 1850699
augacaggaauaugucaau

SEQ ID NO: 1850701 - RNA, 19 nt, Artificial Sequence
  Description of Artificial Sequence: Synthetic oligonucleotide
  Sense strand starting at position 628 of SEQ ID NO: 1564041
gagcacaaauggucagaca

SEQ ID NO: 1850702 - RNA, 19 nt, Artificial Sequence
  Description of Artificial Sequence: Synthetic oligonucleotide
  Antisense strand to SEQ ID NO: 1850701
ugucugaccauuugugcuc

SEQ ID NO: 1850703 - RNA, 19 nt, Artificial Sequence
  Description of Artificial Sequence: Synthetic oligonucleotide
  Sense strand starting at position 631 of SEQ ID NO: 1564041
cacaaauggucagacaaga

SEQ ID NO: 1850704 - RNA, 19 nt, Artificial Sequence
  Description of Artificial Sequence: Synthetic oligonucleotide
  Antisense strand to SEQ ID NO: 1850703
ucuugucugaccauuugug

SEQ ID NO: 1850705 - RNA, 19 nt, Artificial Sequence
  Description of Artificial Sequence: Synthetic oligonucleotide
  Sense strand starting at position 714 of SEQ ID NO: 1564041
cgguuaagucacugcauuu

SEQ ID NO: 1850706 - RNA, 19 nt, Artificial Sequence
  Description of Artificial Sequence: Synthetic oligonucleotide
  Antisense strand to SEQ ID NO: 1850705
aaaugcagugacuuaaccg

SEQ ID NO: 1850707 - RNA, 19 nt, Artificial Sequence
  Description of Artificial Sequence: Synthetic oligonucleotide
  Sense strand starting at position 1089 of SEQ ID NO: 1564041
gagacaucaggauguguaa

SEQ ID NO: 1850708 - RNA, 19 nt, Artificial Sequence
  Description of Artificial Sequence: Synthetic oligonucleotide
  Antisense strand to SEQ ID NO: 1850707
uuacacauccugaugucuc

SEQ ID NO: 1850709 - RNA, 19 nt, Artificial Sequence
  Description of Artificial Sequence: Synthetic oligonucleotide
  Sense strand starting at position 1091 of SEQ ID NO: 1564041
gacaucaggauguguaaag

SEQ ID NO: 1850710 - RNA, 19 nt, Artificial Sequence
  Description of Artificial Sequence: Synthetic oligonucleotide
  Antisense strand to SEQ ID NO: 1850709
cuuuacacauccugauguc

SEQ ID NO: 1850711 - RNA, 19 nt, Artificial Sequence
  Description of Artificial Sequence: Synthetic oligonucleotide
  Sense strand starting at position 1092 of SEQ ID NO: 1564041
acaucaggauguguaaagu

SEQ ID NO: 1850712 - RNA, 19 nt, Artificial Sequence
  Description of Artificial Sequence: Synthetic oligonucleotide
  Antisense strand to SEQ ID NO: 1850711
acuuuacacauccugaugu

SEQ ID NO: 1850713 - RNA, 19 nt, Artificial Sequence
  Description of Artificial Sequence: Synthetic oligonucleotide
  Sense strand starting at position 1101 of SEQ ID NO: 1564041
uguguaaagugcuuuggga

SEQ ID NO: 1850714 - RNA, 19 nt, Artificial Sequence
  Description of Artificial Sequence: Synthetic oligonucleotide
  Antisense strand to SEQ ID NO: 1850713
ucccaaagcacuuuacaca

SEQ ID NO: 1850715 - RNA, 19 nt, Artificial Sequence
  Description of Artificial Sequence: Synthetic oligonucleotide
  Sense strand starting at position 1103 of SEQ ID NO: 1564041
uguaaagugcuuugggauc

SEQ ID NO: 1850716 - RNA, 19 nt, Artificial Sequence
  Description of Artificial Sequence: Synthetic oligonucleotide
  Antisense strand to SEQ ID NO: 1850715
gaucccaaagcacuuuaca

SEQ ID NO: 1850717 - RNA, 19 nt, Artificial Sequence
  Description of Artificial Sequence: Synthetic oligonucleotide
  Sense strand starting at position 1470 of SEQ ID NO: 1564041
ccuggaucaccuugaucuu

SEQ ID NO: 1850718 - RNA, 19 nt, Artificial Sequence
  Description of Artificial Sequence: Synthetic oligonucleotide
  Antisense strand to SEQ ID NO: 1850717
aagaucaaggugauccagg

SEQ ID NO: 1850719 - RNA, 19 nt, Artificial Sequence
  Description of Artificial Sequence: Synthetic oligonucleotide
  Sense strand starting at position 2322 of SEQ ID NO: 1564041
agagcugcaccuuaagaca

SEQ ID NO: 1850720 - RNA, 19 nt, Artificial Sequence
  Description of Artificial Sequence: Synthetic oligonucleotide
  Antisense strand to SEQ ID NO: 1850719
ugucuuaaggugcagcucu

SEQ ID NO: 1850721 - RNA, 19 nt, Artificial Sequence
  Description of Artificial Sequence: Synthetic oligonucleotide
  Sense strand starting at position 2511 of SEQ ID NO: 1564041
aagggaugcucugucuuaa

SEQ ID NO: 1850722 - RNA, 19 nt, Artificial Sequence
  Description of Artificial Sequence: Synthetic oligonucleotide
  Antisense strand to SEQ ID NO: 1850721
uuaagacagagcaucccuu

SEQ ID NO: 1850723 - RNA, 19 nt, Artificial Sequence
  Description of Artificial Sequence: Synthetic oligonucleotide
  Sense strand starting at position 2521 of SEQ ID NO: 1564041
cugucuuaaugagugagca

SEQ ID NO: 1850724 - RNA, 19 nt, Artificial Sequence
  Description of Artificial Sequence: Synthetic oligonucleotide
  Antisense strand to SEQ ID NO: 1850723
ugcucacucauuaagacag

SEQ ID NO: 1850725 - RNA, 19 nt, Artificial Sequence
  Description of Artificial Sequence: Synthetic oligonucleotide
  Sense strand starting at position 2522 of SEQ ID NO: 1564041
ugucuuaaugagugagcag

SEQ ID NO: 1850726 - RNA, 19 nt, Artificial Sequence
  Description of Artificial Sequence: Synthetic oligonucleotide
  Antisense strand to SEQ ID NO: 1850725
cugcucacucauuaagaca

SEQ ID NO: 1850727 - RNA, 19 nt, Artificial Sequence
  Description of Artificial Sequence: Synthetic oligonucleotide
  Sense strand starting at position 2738 of SEQ ID NO: 1564041
gcacccauccucugaaugu

SEQ ID NO: 1850728 - RNA, 19 nt, Artificial Sequence
  Description of Artificial Sequence: Synthetic oligonucleotide
  Antisense strand to SEQ ID NO: 1850727
acauucagaggaugggugc

SEQ ID NO: 1850729 - RNA, 19 nt, Artificial Sequence
  Description of Artificial Sequence: Synthetic oligonucleotide
  Sense strand starting at position 2930 of SEQ ID NO: 1564041
ggaggaucuugggacaaug

SEQ ID NO: 1850730 - RNA, 19 nt, Artificial Sequence
  Description of Artificial Sequence: Synthetic oligonucleotide
  Antisense strand to SEQ ID NO: 1850729
cauugucccaagauccucc

SEQ ID NO: 1850731 - RNA, 19 nt, Artificial Sequence
  Description of Artificial Sequence: Synthetic oligonucleotide
  Sense strand starting at position 3014 of SEQ ID NO: 1564041
uggaguuucagagggaguu

SEQ ID NO: 1850732 - RNA, 19 nt, Artificial Sequence
  Description of Artificial Sequence: Synthetic oligonucleotide
  Antisense strand to SEQ ID NO: 1850731
aacucccucugaaacucca

SEQ ID NO: 1850733 - RNA, 19 nt, Artificial Sequence
  Description of Artificial Sequence: Synthetic oligonucleotide
  Sense strand starting at position 3079 of SEQ ID NO: 1564041
caaagugguugggucuaau

SEQ ID NO: 1850734 - RNA, 19 nt, Artificial Sequence
  Description of Artificial Sequence: Synthetic oligonucleotide
  Antisense strand to SEQ ID NO: 1850733
auuagacccaaccacuuug

SEQ ID NO: 1850735 - RNA, 19 nt, Artificial Sequence
  Description of Artificial Sequence: Synthetic oligonucleotide
  Sense strand starting at position 3098 of SEQ ID NO: 1564041
uugccagaagccuagauua

SEQ ID NO: 1850736 - RNA, 19 nt, Artificial Sequence
  Description of Artificial Sequence: Synthetic oligonucleotide
  Antisense strand to SEQ ID NO: 1850735
uaaucuaggcuucuggcaa

SEQ ID NO: 1850737 - RNA, 19 nt, Artificial Sequence
  Description of Artificial Sequence: Synthetic oligonucleotide
  Sense strand starting at position 3100 of SEQ ID NO: 1564041
gccagaagccuagauuaug

SEQ ID NO: 1850738 - RNA, 19 nt, Artificial Sequence
  Description of Artificial Sequence: Synthetic oligonucleotide
  Antisense strand to SEQ ID NO: 1850737
cauaaucuaggcuucuggc

SEQ ID NO: 1850739 - RNA, 19 nt, Artificial Sequence
  Description of Artificial Sequence: Synthetic oligonucleotide
  Sense strand starting at position 3108 of SEQ ID NO: 1564041
ccuagauuaugcuuggaag

SEQ ID NO: 1850740 - RNA, 19 nt, Artificial Sequence
  Description of Artificial Sequence: Synthetic oligonucleotide
  Antisense strand to SEQ ID NO: 1850739
cuuccaagcauaaucuagg

SEQ ID NO: 1850741 - RNA, 19 nt, Artificial Sequence
  Description of Artificial Sequence: Synthetic oligonucleotide
  Sense strand starting at position 3109 of SEQ ID NO: 1564041
cuagauuaugcuuggaaga

SEQ ID NO: 1850742 - RNA, 19 nt, Artificial Sequence
  Description of Artificial Sequence: Synthetic oligonucleotide
  Antisense strand to SEQ ID NO: 1850741
ucuuccaagcauaaucuag

SEQ ID NO: 1850743 - RNA, 19 nt, Artificial Sequence
  Description of Artificial Sequence: Synthetic oligonucleotide
  Sense strand starting at position 3110 of SEQ ID NO: 1564041
uagauuaugcuuggaagau

SEQ ID NO: 1850744 - RNA, 19 nt, Artificial Sequence
  Description of Artificial Sequence: Synthetic oligonucleotide
  Antisense strand to SEQ ID NO: 1850743
aucuuccaagcauaaucua

SEQ ID NO: 1850745 - RNA, 19 nt, Artificial Sequence
  Description of Artificial Sequence: Synthetic oligonucleotide
  Sense strand starting at position 3119 of SEQ ID NO: 1564041
cuuggaagaugauaaauga

SEQ ID NO: 1850746 - RNA, 19 nt, Artificial Sequence
  Description of Artificial Sequence: Synthetic oligonucleotide
  Antisense strand to SEQ ID NO: 1850745
ucauuuaucaucuuccaag

SEQ ID NO: 1850747 - RNA, 19 nt, Artificial Sequence
  Description of Artificial Sequence: Synthetic oligonucleotide
  Sense strand starting at position 3191 of SEQ ID NO: 1564041
acacacaucuuggucaaga

SEQ ID NO: 1850748 - RNA, 19 nt, Artificial Sequence
  Description of Artificial Sequence: Synthetic oligonucleotide
  Antisense strand to SEQ ID NO: 1850747
ucuugaccaagaugugugu

SEQ ID NO: 1850749 - RNA, 19 nt, Artificial Sequence
  Description of Artificial Sequence: Synthetic oligonucleotide
  Sense strand starting at position 3199 of SEQ ID NO: 1564041
cuuggucaagaccaguauu

SEQ ID NO: 1850750 - RNA, 19 nt, Artificial Sequence
  Description of Artificial Sequence: Synthetic oligonucleotide
  Antisense strand to SEQ ID NO: 1850749
aauacuggucuugaccaag

SEQ ID NO: 1850751 - RNA, 19 nt, Artificial Sequence
  Description of Artificial Sequence: Synthetic oligonucleotide
  Sense strand starting at position 3202 of SEQ ID NO: 1564041
ggucaagaccaguauuccu

SEQ ID NO: 1850752 - RNA, 19 nt, Artificial Sequence
  Description of Artificial Sequence: Synthetic oligonucleotide
  Antisense strand to SEQ ID NO: 1850751
aggaauacuggucuugacc

SEQ ID NO: 1850753 - RNA, 19 nt, Artificial Sequence
  Description of Artificial Sequence: Synthetic oligonucleotide
  Sense strand starting at position 3440 of SEQ ID NO: 1564041
gcugccaucuuauuuggga

SEQ ID NO: 1850754 - RNA, 19 nt, Artificial Sequence
  Description of Artificial Sequence: Synthetic oligonucleotide
  Antisense strand to SEQ ID NO: 1850753
ucccaaauaagauggcagc

SEQ ID NO: 1850755 - RNA, 19 nt, Artificial Sequence
  Description of Artificial Sequence: Synthetic oligonucleotide
  Sense strand starting at position 3544 of SEQ ID NO: 1564041
agcaaauuggaaugugacu

SEQ ID NO: 1850756 - RNA, 19 nt, Artificial Sequence
  Description of Artificial Sequence: Synthetic oligonucleotide
  Antisense strand to SEQ ID NO: 1850755
agucacauuccaauuugcu

SEQ ID NO: 1850757 - RNA, 19 nt, Artificial Sequence
  Description of Artificial Sequence: Synthetic oligonucleotide
  Sense strand starting at position 3549 of SEQ ID NO: 1564041
auuggaaugugacuacuca

SEQ ID NO: 1850758 - RNA, 19 nt, Artificial Sequence
  Description of Artificial Sequence: Synthetic oligonucleotide
  Antisense strand to SEQ ID NO: 1850757
ugaguagucacauuccaau

SEQ ID NO: 1850759 - RNA, 19 nt, Artificial Sequence
  Description of Artificial Sequence: Synthetic oligonucleotide
  Sense strand starting at position 3572 of SEQ ID NO: 1564041
cguccaaguuacucagaau

SEQ ID NO: 1850760 - RNA, 19 nt, Artificial Sequence
  Description of Artificial Sequence: Synthetic oligonucleotide
  Antisense strand to SEQ ID NO: 1850759
auucugaguaacuuggacg

SEQ ID NO: 1850761 - RNA, 19 nt, Artificial Sequence
  Description of Artificial Sequence: Synthetic oligonucleotide
  Sense strand starting at position 3731 of SEQ ID NO: 1564041
cucuuaguuggcuaaucca

SEQ ID NO: 1850762 - RNA, 19 nt, Artificial Sequence
  Description of Artificial Sequence: Synthetic oligonucleotide
  Antisense strand to SEQ ID NO: 1850761
uggauuagccaacuaagag

SEQ ID NO: 1850763 - RNA, 19 nt, Artificial Sequence
  Description of Artificial Sequence: Synthetic oligonucleotide
  Sense strand starting at position 3785 of SEQ ID NO: 1564041
auguaucaaucaucauugu

SEQ ID NO: 1850764 - RNA, 19 nt, Artificial Sequence
  Description of Artificial Sequence: Synthetic oligonucleotide
  Antisense strand to SEQ ID NO: 1850763
acaaugaugauugauacau

SEQ ID NO: 1850765 - RNA, 19 nt, Artificial Sequence
  Description of Artificial Sequence: Synthetic oligonucleotide
  Sense strand starting at position 3786 of SEQ ID NO: 1564041
uguaucaaucaucauugua

SEQ ID NO: 1850766 - RNA, 19 nt, Artificial Sequence
  Description of Artificial Sequence: Synthetic oligonucleotide
  Antisense strand to SEQ ID NO: 1850765
uacaaugaugauugauaca

SEQ ID NO: 1850767 - RNA, 19 nt, Artificial Sequence
  Description of Artificial Sequence: Synthetic oligonucleotide
  Sense strand starting at position 3880 of SEQ ID NO: 1564041
ugaugaucuuuaucuacag

SEQ ID NO: 1850768 - RNA, 19 nt, Artificial Sequence
  Description of Artificial Sequence: Synthetic oligonucleotide
  Antisense strand to SEQ ID NO: 1850767
cuguagauaaagaucauca

SEQ ID NO: 1850769 - RNA, 19 nt, Artificial Sequence
  Description of Artificial Sequence: Synthetic oligonucleotide
  Sense strand starting at position 3920 of SEQ ID NO: 1564041
gguaacuauuaauuaggua

SEQ ID NO: 1850770 - RNA, 19 nt, Artificial Sequence
  Description of Artificial Sequence: Synthetic oligonucleotide
  Antisense strand to SEQ ID NO: 1850769
uaccuaauuaauaguuacc

SEQ ID NO: 1850771 - RNA, 19 nt, Artificial Sequence
  Description of Artificial Sequence: Synthetic oligonucleotide
  Sense strand starting at position 3934 of SEQ ID NO: 1564041
agguacauccuguacacaa

SEQ ID NO: 1850772 - RNA, 19 nt, Artificial Sequence
  Description of Artificial Sequence: Synthetic oligonucleotide
  Antisense strand to SEQ ID NO: 1850771
uuguguacaggauguaccu

SEQ ID NO: 1850773 - RNA, 19 nt, Artificial Sequence
  Description of Artificial Sequence: Synthetic oligonucleotide
  Sense strand starting at position 3 of SEQ ID NO: 1564042
gccuucuaagcauggacau

SEQ ID NO: 1850774 - RNA, 19 nt, Artificial Sequence
  Description of Artificial Sequence: Synthetic oligonucleotide
  Antisense strand to SEQ ID NO: 1850773
auguccaugcuuagaaggc

SEQ ID NO: 1850775 - RNA, 19 nt, Artificial Sequence
  Description of Artificial Sequence: Synthetic oligonucleotide
  Sense strand starting at position 4 of SEQ ID NO: 1564042
ccuucuaagcauggacaua

SEQ ID NO: 1850776 - RNA, 19 nt, Artificial Sequence
  Description of Artificial Sequence: Synthetic oligonucleotide
  Antisense strand to SEQ ID NO: 1850775
uauguccaugcuuagaagg

SEQ ID NO: 1850777 - RNA, 19 nt, Artificial Sequence
  Description of Artificial Sequence: Synthetic oligonucleotide
  Sense strand starting at position 128 of SEQ ID NO: 1564042
ggguuaauauucuuaaucu

SEQ ID NO: 1850778 - RNA, 19 nt, Artificial Sequence
  Description of Artificial Sequence: Synthetic oligonucleotide
  Antisense strand to SEQ ID NO: 1850777
agauuaagaauauuaaccc

SEQ ID NO: 1850779 - RNA, 19 nt, Artificial Sequence
  Description of Artificial Sequence: Synthetic oligonucleotide
  Sense strand starting at position 182 of SEQ ID NO: 1564042
auaaauaagcaguggauau

SEQ ID NO: 1850780 - RNA, 19 nt, Artificial Sequence
  Description of Artificial Sequence: Synthetic oligonucleotide
  Antisense strand to SEQ ID NO: 1850779
auauccacugcuuauuuau

SEQ ID NO: 1850781 - RNA, 19 nt, Artificial Sequence
  Description of Artificial Sequence: Synthetic oligonucleotide
  Sense strand starting at position 250 of SEQ ID NO: 1564042
ccuuucuuugcuuaggaga

SEQ ID NO: 1850782 - RNA, 19 nt, Artificial Sequence
  Description of Artificial Sequence: Synthetic oligonucleotide
  Antisense strand to SEQ ID NO: 1850781
ucuccuaagcaaagaaagg

SEQ ID NO: 1850783 - RNA, 19 nt, Artificial Sequence
  Description of Artificial Sequence: Synthetic oligonucleotide
  Sense strand starting at position 291 of SEQ ID NO: 1564042
gaaccuguacaaggauauu

SEQ ID NO: 1850784 - RNA, 19 nt, Artificial Sequence
  Description of Artificial Sequence: Synthetic oligonucleotide
  Antisense strand to SEQ ID NO: 1850783
aauauccuuguacagguuc

SEQ ID NO: 1850785 - RNA, 19 nt, Artificial Sequence
  Description of Artificial Sequence: Synthetic oligonucleotide
  Sense strand starting at position 343 of SEQ ID NO: 1564042
gagguaacuuaaguuugua

SEQ ID NO: 1850786 - RNA, 19 nt, Artificial Sequence
  Description of Artificial Sequence: Synthetic oligonucleotide
  Antisense strand to SEQ ID NO: 1850785
uacaaacuuaaguuaccuc

SEQ ID NO: 1850787 - RNA, 19 nt, Artificial Sequence
  Description of Artificial Sequence: Synthetic oligonucleotide
  Sense strand starting at position 624 of SEQ ID NO: 1564042
ggucucaucuucuccaguu

SEQ ID NO: 1850788 - RNA, 19 nt, Artificial Sequence
  Description of Artificial Sequence: Synthetic oligonucleotide
  Antisense strand to SEQ ID NO: 1850787
aacuggagaagaugagacc

SEQ ID NO: 1850789 - RNA, 19 nt, Artificial Sequence
  Description of Artificial Sequence: Synthetic oligonucleotide
  Sense strand starting at position 625 of SEQ ID NO: 1564042
gucucaucuucuccaguua

SEQ ID NO: 1850790 - RNA, 19 nt, Artificial Sequence
  Description of Artificial Sequence: Synthetic oligonucleotide
  Antisense strand to SEQ ID NO: 1850789
uaacuggagaagaugagac

SEQ ID NO: 1850791 - RNA, 19 nt, Artificial Sequence
  Description of Artificial Sequence: Synthetic oligonucleotide
  Sense strand starting at position 706 of SEQ ID NO: 1564042
aaggguucugagugaaagu

SEQ ID NO: 1850792 - RNA, 19 nt, Artificial Sequence
  Description of Artificial Sequence: Synthetic oligonucleotide
  Antisense strand to SEQ ID NO: 1850791
acuuucacucagaacccuu

SEQ ID NO: 1850793 - RNA, 19 nt, Artificial Sequence
  Description of Artificial Sequence: Synthetic oligonucleotide
  Sense strand starting at position 707 of SEQ ID NO: 1564042
aggguucugagugaaagua

SEQ ID NO: 1850794 - RNA, 19 nt, Artificial Sequence
  Description of Artificial Sequence: Synthetic oligonucleotide
  Antisense strand to SEQ ID NO: 1850793
uacuuucacucagaacccu

SEQ ID NO: 1850795 - RNA, 19 nt, Artificial Sequence
  Description of Artificial Sequence: Synthetic oligonucleotide
  Sense strand starting at position 758 of SEQ ID NO: 1564042
gauugaaauuaagcauguu

SEQ ID NO: 1850796 - RNA, 19 nt, Artificial Sequence
  Description of Artificial Sequence: Synthetic oligonucleotide
  Antisense strand to SEQ ID NO: 1850795
aacaugcuuaauuucaauc

SEQ ID NO: 1850797 - RNA, 19 nt, Artificial Sequence
  Description of Artificial Sequence: Synthetic oligonucleotide
  Sense strand starting at position 830 of SEQ ID NO: 1564042
acacuuucguaauugcuga

SEQ ID NO: 1850798 - RNA, 19 nt, Artificial Sequence
  Description of Artificial Sequence: Synthetic oligonucleotide
  Antisense strand to SEQ ID NO: 1850797
ucagcaauuacgaaagugu

SEQ ID NO: 1850799 - RNA, 19 nt, Artificial Sequence
  Description of Artificial Sequence: Synthetic oligonucleotide
  Sense strand starting at position 835 of SEQ ID NO: 1564042
uucguaauugcugauuauc

SEQ ID NO: 1850800 - RNA, 19 nt, Artificial Sequence
  Description of Artificial Sequence: Synthetic oligonucleotide
  Antisense strand to SEQ ID NO: 1850799
gauaaucagcaauuacgaa

SEQ ID NO: 1850801 - RNA, 19 nt, Artificial Sequence
  Description of Artificial Sequence: Synthetic oligonucleotide
  Sense strand starting at position 837 of SEQ ID NO: 1564042
cguaauugcugauuaucua

SEQ ID NO: 1850802 - RNA, 19 nt, Artificial Sequence
  Description of Artificial Sequence: Synthetic oligonucleotide
  Antisense strand to SEQ ID NO: 1850801
uagauaaucagcaauuacg

SEQ ID NO: 1850803 - RNA, 19 nt, Artificial Sequence
  Description of Artificial Sequence: Synthetic oligonucleotide
  Sense strand starting at position 838 of SEQ ID NO: 1564042
guaauugcugauuaucuau

SEQ ID NO: 1850804 - RNA, 19 nt, Artificial Sequence
  Description of Artificial Sequence: Synthetic oligonucleotide
  Antisense strand to SEQ ID NO: 1850803
auagauaaucagcaauuac

SEQ ID NO: 1850805 - RNA, 19 nt, Artificial Sequence
  Description of Artificial Sequence: Synthetic oligonucleotide
  Sense strand starting at position 862 of SEQ ID NO: 1564042
ucaacuauguuagcacaga

SEQ ID NO: 1850806 - RNA, 19 nt, Artificial Sequence
  Description of Artificial Sequence: Synthetic oligonucleotide
  Antisense strand to SEQ ID NO: 1850805
ucugugcuaacauaguuga

SEQ ID NO: 1850807 - RNA, 19 nt, Artificial Sequence
  Description of Artificial Sequence: Synthetic oligonucleotide
  Sense strand starting at position 930 of SEQ ID NO: 1564042
uugugugagucuccucaca

SEQ ID NO: 1850808 - RNA, 19 nt, Artificial Sequence
  Description of Artificial Sequence: Synthetic oligonucleotide
  Antisense strand to SEQ ID NO: 1850807
ugugaggagacucacacaa

SEQ ID NO: 1850809 - RNA, 19 nt, Artificial Sequence
  Description of Artificial Sequence: Synthetic oligonucleotide
  Sense strand starting at position 932 of SEQ ID NO: 1564042
gugugagucuccucacacu

SEQ ID NO: 1850810 - RNA, 19 nt, Artificial Sequence
  Description of Artificial Sequence: Synthetic oligonucleotide
  Antisense strand to SEQ ID NO: 1850809
agugugaggagacucacac

SEQ ID NO: 1850811 - RNA, 19 nt, Artificial Sequence
  Description of Artificial Sequence: Synthetic oligonucleotide
  Sense strand starting at position 982 of SEQ ID NO: 1564042
cauaguagaugaucacuga

SEQ ID NO: 1850812 - RNA, 19 nt, Artificial Sequence
  Description of Artificial Sequence: Synthetic oligonucleotide
  Antisense strand to SEQ ID NO: 1850811
ucagugaucaucuacuaug

SEQ ID NO: 1850813 - RNA, 19 nt, Artificial Sequence
  Description of Artificial Sequence: Synthetic oligonucleotide
  Sense strand starting at position 986 of SEQ ID NO: 1564042
guagaugaucacugaaugu

SEQ ID NO: 1850814 - RNA, 19 nt, Artificial Sequence
  Description of Artificial Sequence: Synthetic oligonucleotide
  Antisense strand to SEQ ID NO: 1850813
acauucagugaucaucuac

SEQ ID NO: 1850815 - RNA, 19 nt, Artificial Sequence
  Description of Artificial Sequence: Synthetic oligonucleotide
  Sense strand starting at position 1014 of SEQ ID NO: 1564042
gcaagaaggaaucaaucgu

SEQ ID NO: 1850816 - RNA, 19 nt, Artificial Sequence
  Description of Artificial Sequence: Synthetic oligonucleotide
  Antisense strand to SEQ ID NO: 1850815
acgauugauuccuucuugc

SEQ ID NO: 1850817 - RNA, 19 nt, Artificial Sequence
  Description of Artificial Sequence: Synthetic oligonucleotide
  Sense strand starting at position 1044 of SEQ ID NO: 1564042
guuagaacauauguuagca

SEQ ID NO: 1850818 - RNA, 19 nt, Artificial Sequence
  Description of Artificial Sequence: Synthetic oligonucleotide
  Antisense strand to SEQ ID NO: 1850817
ugcuaacauauguucuaac

SEQ ID NO: 1850819 - RNA, 19 nt, Artificial Sequence
  Description of Artificial Sequence: Synthetic oligonucleotide
  Sense strand starting at position 1129 of SEQ ID NO: 1564042
ucugucaguuauguuagga

SEQ ID NO: 1850820 - RNA, 19 nt, Artificial Sequence
  Description of Artificial Sequence: Synthetic oligonucleotide
  Antisense strand to SEQ ID NO: 1850819
uccuaacauaacugacaga

SEQ ID NO: 1850821 - RNA, 19 nt, Artificial Sequence
  Description of Artificial Sequence: Synthetic oligonucleotide
  Sense strand starting at position 1225 of SEQ ID NO: 1564042
cuaguuuguuagccaccaa

SEQ ID NO: 1850822 - RNA, 19 nt, Artificial Sequence
  Description of Artificial Sequence: Synthetic oligonucleotide
  Antisense strand to SEQ ID NO: 1850821
uugguggcuaacaaacuag

SEQ ID NO: 1850823 - RNA, 19 nt, Artificial Sequence
  Description of Artificial Sequence: Synthetic oligonucleotide
  Sense strand starting at position 1257 of SEQ ID NO: 1564042
ggaguuguggugcaagcaa

SEQ ID NO: 1850824 - RNA, 19 nt, Artificial Sequence
  Description of Artificial Sequence: Synthetic oligonucleotide
  Antisense strand to SEQ ID NO: 1850823
uugcuugcaccacaacucc

SEQ ID NO: 1850825 - RNA, 19 nt, Artificial Sequence
  Description of Artificial Sequence: Synthetic oligonucleotide
  Sense strand starting at position 1363 of SEQ ID NO: 1564042
ccucaagacccuugguguu

SEQ ID NO: 1850826 - RNA, 19 nt, Artificial Sequence
  Description of Artificial Sequence: Synthetic oligonucleotide
  Antisense strand to SEQ ID NO: 1850825
aacaccaagggucuugagg

SEQ ID NO: 1850827 - RNA, 19 nt, Artificial Sequence
  Description of Artificial Sequence: Synthetic oligonucleotide
  Sense strand starting at position 1634 of SEQ ID NO: 1564042
ggacuugcccacuguggaa

SEQ ID NO: 1850828 - RNA, 19 nt, Artificial Sequence
  Description of Artificial Sequence: Synthetic oligonucleotide
  Antisense strand to SEQ ID NO: 1850827
uuccacagugggcaagucc

SEQ ID NO: 1850829 - RNA, 19 nt, Artificial Sequence
  Description of Artificial Sequence: Synthetic oligonucleotide
  Sense strand starting at position 1877 of SEQ ID NO: 1564042
gcucgcaaaggugaugaaa

SEQ ID NO: 1850830 - RNA, 19 nt, Artificial Sequence
  Description of Artificial Sequence: Synthetic oligonucleotide
  Antisense strand to SEQ ID NO: 1850829
uuucaucaccuuugcgagc

SEQ ID NO: 1850831 - RNA, 19 nt, Artificial Sequence
  Description of Artificial Sequence: Synthetic oligonucleotide
  Sense strand starting at position 2189 of SEQ ID NO: 1564042
guguuuccaugcucacaua

SEQ ID NO: 1850832 - RNA, 19 nt, Artificial Sequence
  Description of Artificial Sequence: Synthetic oligonucleotide
  Antisense strand to SEQ ID NO: 1850831
uaugugagcauggaaacac

SEQ ID NO: 1850833 - RNA, 19 nt, Artificial Sequence
  Description of Artificial Sequence: Synthetic oligonucleotide
  Sense strand starting at position 2224 of SEQ ID NO: 1564042
auguguuuguauuccuaua

SEQ ID NO: 1850834 - RNA, 19 nt, Artificial Sequence
  Description of Artificial Sequence: Synthetic oligonucleotide
  Antisense strand to SEQ ID NO: 1850833
uauaggaauacaaacacau

SEQ ID NO: 1850835 - RNA, 19 nt, Artificial Sequence
  Description of Artificial Sequence: Synthetic oligonucleotide
  Sense strand starting at position 2229 of SEQ ID NO: 1564042
uuuguauuccuauaugcau

SEQ ID NO: 1850836 - RNA, 19 nt, Artificial Sequence
  Description of Artificial Sequence: Synthetic oligonucleotide
  Antisense strand to SEQ ID NO: 1850835
augcauauaggaauacaaa

SEQ ID NO: 1850837 - RNA, 19 nt, Artificial Sequence
  Description of Artificial Sequence: Synthetic oligonucleotide
  Sense strand starting at position 2475 of SEQ ID NO: 1564042
ugggcauucuacuuuccaa

SEQ ID NO: 1850838 - RNA, 19 nt, Artificial Sequence
  Description of Artificial Sequence: Synthetic oligonucleotide
  Antisense strand to SEQ ID NO: 1850837
uuggaaaguagaaugccca

SEQ ID NO: 1850839 - RNA, 19 nt, Artificial Sequence
  Description of Artificial Sequence: Synthetic oligonucleotide
  Sense strand starting at position 2537 of SEQ ID NO: 1564042
accaucgcucugcauuauu

SEQ ID NO: 1850840 - RNA, 19 nt, Artificial Sequence
  Description of Artificial Sequence: Synthetic oligonucleotide
  Antisense strand to SEQ ID NO: 1850839
aauaaugcagagcgauggu

SEQ ID NO: 1850841 - RNA, 19 nt, Artificial Sequence
  Description of Artificial Sequence: Synthetic oligonucleotide
  Sense strand starting at position 2622 of SEQ ID NO: 1564042
augucucauugcuuuauuu

SEQ ID NO: 1850842 - RNA, 19 nt, Artificial Sequence
  Description of Artificial Sequence: Synthetic oligonucleotide
  Antisense strand to SEQ ID NO: 1850841
aaauaaagcaaugagacau

SEQ ID NO: 1850843 - RNA, 19 nt, Artificial Sequence
  Description of Artificial Sequence: Synthetic oligonucleotide
  Sense strand starting at position 3049 of SEQ ID NO: 1564042
gccuucuauguguaaucuu

SEQ ID NO: 1850844 - RNA, 19 nt, Artificial Sequence
  Description of Artificial Sequence: Synthetic oligonucleotide
  Antisense strand to SEQ ID NO: 1850843
aagauuacacauagaaggc

SEQ ID NO: 1850845 - RNA, 19 nt, Artificial Sequence
  Description of Artificial Sequence: Synthetic oligonucleotide
  Sense strand starting at position 3146 of SEQ ID NO: 1564042
agugaacaauucuuagcau

SEQ ID NO: 1850846 - RNA, 19 nt, Artificial Sequence
  Description of Artificial Sequence: Synthetic oligonucleotide
  Antisense strand to SEQ ID NO: 1850845
augcuaagaauuguucacu

SEQ ID NO: 1850847 - RNA, 19 nt, Artificial Sequence
  Description of Artificial Sequence: Synthetic oligonucleotide
  Sense strand starting at position 3492 of SEQ ID NO: 1564042
uuuggcaaccauuaaugua

SEQ ID NO: 1850848 - RNA, 19 nt, Artificial Sequence
  Description of Artificial Sequence: Synthetic oligonucleotide
  Antisense strand to SEQ ID NO: 1850847
uacauuaaugguugccaaa

SEQ ID NO: 1850849 - RNA, 19 nt, Artificial Sequence
  Description of Artificial Sequence: Synthetic oligonucleotide
  Sense strand starting at position 3844 of SEQ ID NO: 1564042
cggaauuccucaguccugu

SEQ ID NO: 1850850 - RNA, 19 nt, Artificial Sequence
  Description of Artificial Sequence: Synthetic oligonucleotide
  Antisense strand to SEQ ID NO: 1850849
acaggacugaggaauuccg

SEQ ID NO: 1850851 - RNA, 19 nt, Artificial Sequence
  Description of Artificial Sequence: Synthetic oligonucleotide
  Sense strand starting at position 3885 of SEQ ID NO: 1564042
ugaugaaaugccugacuuu

SEQ ID NO: 1850852 - RNA, 19 nt, Artificial Sequence
  Description of Artificial Sequence: Synthetic oligonucleotide
  Antisense strand to SEQ ID NO: 1850851
aaagucaggcauuucauca

SEQ ID NO: 1850853 - RNA, 19 nt, Artificial Sequence
  Description of Artificial Sequence: Synthetic oligonucleotide
  Sense strand starting at position 193 of SEQ ID NO: 1564043
cggagaauguaucccaaag

SEQ ID NO: 1850854 - RNA, 19 nt, Artificial Sequence
  Description of Artificial Sequence: Synthetic oligonucleotide
  Antisense strand to SEQ ID NO: 1850853
cuuugggauacauucuccg

SEQ ID NO: 1850855 - RNA, 19 nt, Artificial Sequence
  Description of Artificial Sequence: Synthetic oligonucleotide
  Sense strand starting at position 246 of SEQ ID NO: 1564043
aggucauucuuggcagaac

SEQ ID NO: 1850856 - RNA, 19 nt, Artificial Sequence
  Description of Artificial Sequence: Synthetic oligonucleotide
  Antisense strand to SEQ ID NO: 1850855
guucugccaagaaugaccu

SEQ ID NO: 1850857 - RNA, 19 nt, Artificial Sequence
  Description of Artificial Sequence: Synthetic oligonucleotide
  Sense strand starting at position 466 of SEQ ID NO: 1564043
gcuguugucccauaccaua

SEQ ID NO: 1850858 - RNA, 19 nt, Artificial Sequence
  Description of Artificial Sequence: Synthetic oligonucleotide
  Antisense strand to SEQ ID NO: 1850857
uaugguaugggacaacagc

SEQ ID NO: 1850859 - RNA, 19 nt, Artificial Sequence
  Description of Artificial Sequence: Synthetic oligonucleotide
  Sense strand starting at position 491 of SEQ ID NO: 1564043
ggccacucauggcuauuua

SEQ ID NO: 1850860 - RNA, 19 nt, Artificial Sequence
  Description of Artificial Sequence: Synthetic oligonucleotide
  Antisense strand to SEQ ID NO: 1850859
uaaauagccaugaguggcc

SEQ ID NO: 1850861 - RNA, 19 nt, Artificial Sequence
  Description of Artificial Sequence: Synthetic oligonucleotide
  Sense strand starting at position 572 of SEQ ID NO: 1564043
guguuuaauagucacaggu

SEQ ID NO: 1850862 - RNA, 19 nt, Artificial Sequence
  Description of Artificial Sequence: Synthetic oligonucleotide
  Antisense strand to SEQ ID NO: 1850861
accugugacuauuaaacac

SEQ ID NO: 1850863 - RNA, 19 nt, Artificial Sequence
  Description of Artificial Sequence: Synthetic oligonucleotide
  Sense strand starting at position 656 of SEQ ID NO: 1564043
ggacuccaccaguguagaa

SEQ ID NO: 1850864 - RNA, 19 nt, Artificial Sequence
  Description of Artificial Sequence: Synthetic oligonucleotide
  Antisense strand to SEQ ID NO: 1850863
uucuacacugguggagucc

SEQ ID NO: 1850865 - RNA, 19 nt, Artificial Sequence
  Description of Artificial Sequence: Synthetic oligonucleotide
  Sense strand starting at position 658 of SEQ ID NO: 1564043
acuccaccaguguagaaua

SEQ ID NO: 1850866 - RNA, 19 nt, Artificial Sequence
  Description of Artificial Sequence: Synthetic oligonucleotide
  Antisense strand to SEQ ID NO: 1850865
uauucuacacugguggagu

SEQ ID NO: 1850867 - RNA, 19 nt, Artificial Sequence
  Description of Artificial Sequence: Synthetic oligonucleotide
  Sense strand starting at position 961 of SEQ ID NO: 1564043
ggaacuagguuaucuuaga

SEQ ID NO: 1850868 - RNA, 19 nt, Artificial Sequence
  Description of Artificial Sequence: Synthetic oligonucleotide
  Antisense strand to SEQ ID NO: 1850867
ucuaagauaaccuaguucc

SEQ ID NO: 1850869 - RNA, 19 nt, Artificial Sequence
  Description of Artificial Sequence: Synthetic oligonucleotide
  Sense strand starting at position 962 of SEQ ID NO: 1564043
gaacuagguuaucuuagag

SEQ ID NO: 1850870 - RNA, 19 nt, Artificial Sequence
  Description of Artificial Sequence: Synthetic oligonucleotide
  Antisense strand to SEQ ID NO: 1850869
cucuaagauaaccuaguuc

SEQ ID NO: 1850871 - RNA, 19 nt, Artificial Sequence
  Description of Artificial Sequence: Synthetic oligonucleotide
  Sense strand starting at position 1006 of SEQ ID NO: 1564043
gccauucuacuagaugaau

SEQ ID NO: 1850872 - RNA, 19 nt, Artificial Sequence
  Description of Artificial Sequence: Synthetic oligonucleotide
  Antisense strand to SEQ ID NO: 1850871
auucaucuaguagaauggc

SEQ ID NO: 1850873 - RNA, 19 nt, Artificial Sequence
  Description of Artificial Sequence: Synthetic oligonucleotide
  Sense strand starting at position 1085 of SEQ ID NO: 1564043
gcucucgcuggacaaagau

SEQ ID NO: 1850874 - RNA, 19 nt, Artificial Sequence
  Description of Artificial Sequence: Synthetic oligonucleotide
  Antisense strand to SEQ ID NO: 1850873
aucuuuguccagcgagagc

SEQ ID NO: 1850875 - RNA, 19 nt, Artificial Sequence
  Description of Artificial Sequence: Synthetic oligonucleotide
  Sense strand starting at position 1230 of SEQ ID NO: 1564043
auugcuugccuuuggagaa

SEQ ID NO: 1850876 - RNA, 19 nt, Artificial Sequence
  Description of Artificial Sequence: Synthetic oligonucleotide
  Antisense strand to SEQ ID NO: 1850875
uucuccaaaggcaagcaau

SEQ ID NO: 1850877 - RNA, 19 nt, Artificial Sequence
  Description of Artificial Sequence: Synthetic oligonucleotide
  Sense strand starting at position 1342 of SEQ ID NO: 1564043
guaaccuaaugguuuauga

SEQ ID NO: 1850878 - RNA, 19 nt, Artificial Sequence
  Description of Artificial Sequence: Synthetic oligonucleotide
  Antisense strand to SEQ ID NO: 1850877
ucauaaaccauuagguuac

SEQ ID NO: 1850879 - RNA, 19 nt, Artificial Sequence
  Description of Artificial Sequence: Synthetic oligonucleotide
  Sense strand starting at position 1740 of SEQ ID NO: 1564043
ggagaauguacagguuugu

SEQ ID NO: 1850880 - RNA, 19 nt, Artificial Sequence
  Description of Artificial Sequence: Synthetic oligonucleotide
  Antisense strand to SEQ ID NO: 1850879
acaaaccuguacauucucc

SEQ ID NO: 1850881 - RNA, 19 nt, Artificial Sequence
  Description of Artificial Sequence: Synthetic oligonucleotide
  Sense strand starting at position 2062 of SEQ ID NO: 1564043
aaaugaauguggcucgaaa

SEQ ID NO: 1850882 - RNA, 19 nt, Artificial Sequence
  Description of Artificial Sequence: Synthetic oligonucleotide
  Antisense strand to SEQ ID NO: 1850881
uuucgagccacauucauuu

SEQ ID NO: 1850883 - RNA, 19 nt, Artificial Sequence
  Description of Artificial Sequence: Synthetic oligonucleotide
  Sense strand starting at position 2064 of SEQ ID NO: 1564043
augaauguggcucgaaauu

SEQ ID NO: 1850884 - RNA, 19 nt, Artificial Sequence
  Description of Artificial Sequence: Synthetic oligonucleotide
  Antisense strand to SEQ ID NO: 1850883
aauuucgagccacauucau

SEQ ID NO: 1850885 - RNA, 19 nt, Artificial Sequence
  Description of Artificial Sequence: Synthetic oligonucleotide
  Sense strand starting at position 2086 of SEQ ID NO: 1564043
auuguaagauuucggauuu

SEQ ID NO: 1850886 - RNA, 19 nt, Artificial Sequence
  Description of Artificial Sequence: Synthetic oligonucleotide
  Antisense strand to SEQ ID NO: 1850885
aaauccgaaaucuuacaau

SEQ ID NO: 1850887 - RNA, 19 nt, Artificial Sequence
  Description of Artificial Sequence: Synthetic oligonucleotide
  Sense strand starting at position 2087 of SEQ ID NO: 1564043
uuguaagauuucggauuuc

SEQ ID NO: 1850888 - RNA, 19 nt, Artificial Sequence
  Description of Artificial Sequence: Synthetic oligonucleotide
  Antisense strand to SEQ ID NO: 1850887
gaaauccgaaaucuuacaa

SEQ ID NO: 1850889 - RNA, 19 nt, Artificial Sequence
  Description of Artificial Sequence: Synthetic oligonucleotide
  Sense strand starting at position 2117 of SEQ ID NO: 1564043
cacagagaaguuugguuga

SEQ ID NO: 1850890 - RNA, 19 nt, Artificial Sequence
  Description of Artificial Sequence: Synthetic oligonucleotide
  Antisense strand to SEQ ID NO: 1850889
ucaaccaaacuucucugug

SEQ ID NO: 1850891 - RNA, 19 nt, Artificial Sequence
  Description of Artificial Sequence: Synthetic oligonucleotide
  Sense strand starting at position 2120 of SEQ ID NO: 1564043
agagaaguuugguugaccu

SEQ ID NO: 1850892 - RNA, 19 nt, Artificial Sequence
  Description of Artificial Sequence: Synthetic oligonucleotide
  Antisense strand to SEQ ID NO: 1850891
aggucaaccaaacuucucu

SEQ ID NO: 1850893 - RNA, 19 nt, Artificial Sequence
  Description of Artificial Sequence: Synthetic oligonucleotide
  Sense strand starting at position 2124 of SEQ ID NO: 1564043
aaguuugguugaccuaaau

SEQ ID NO: 1850894 - RNA, 19 nt, Artificial Sequence
  Description of Artificial Sequence: Synthetic oligonucleotide
  Antisense strand to SEQ ID NO: 1850893
auuuaggucaaccaaacuu

SEQ ID NO: 1850895 - RNA, 19 nt, Artificial Sequence
  Description of Artificial Sequence: Synthetic oligonucleotide
  Sense strand starting at position 2368 of SEQ ID NO: 1564043
gaauguauuugucuauagc

SEQ ID NO: 1850896 - RNA, 19 nt, Artificial Sequence
  Description of Artificial Sequence: Synthetic oligonucleotide
  Antisense strand to SEQ ID NO: 1850895
gcuauagacaaauacauuc

SEQ ID NO: 1850897 - RNA, 19 nt, Artificial Sequence
  Description of Artificial Sequence: Synthetic oligonucleotide
  Sense strand starting at position 2377 of SEQ ID NO: 1564043
ugucuauagcuacaaggua

SEQ ID NO: 1850898 - RNA, 19 nt, Artificial Sequence
  Description of Artificial Sequence: Synthetic oligonucleotide
  Antisense strand to SEQ ID NO: 1850897
uaccuuguagcuauagaca

SEQ ID NO: 1850899 - RNA, 19 nt, Artificial Sequence
  Description of Artificial Sequence: Synthetic oligonucleotide
  Sense strand starting at position 2819 of SEQ ID NO: 1564043
uuauguuaucuguagcuua

SEQ ID NO: 1850900 - RNA, 19 nt, Artificial Sequence
  Description of Artificial Sequence: Synthetic oligonucleotide
  Antisense strand to SEQ ID NO: 1850899
uaagcuacagauaacauaa

SEQ ID NO: 1850901 - RNA, 19 nt, Artificial Sequence
  Description of Artificial Sequence: Synthetic oligonucleotide
  Sense strand starting at position 2830 of SEQ ID NO: 1564043
guagcuuaaccucagauaa

SEQ ID NO: 1850902 - RNA, 19 nt, Artificial Sequence
  Description of Artificial Sequence: Synthetic oligonucleotide
  Antisense strand to SEQ ID NO: 1850901
uuaucugagguuaagcuac

SEQ ID NO: 1850903 - RNA, 19 nt, Artificial Sequence
  Description of Artificial Sequence: Synthetic oligonucleotide
  Sense strand starting at position 2929 of SEQ ID NO: 1564043
ggcaauguggugugagaga

SEQ ID NO: 1850904 - RNA, 19 nt, Artificial Sequence
  Description of Artificial Sequence: Synthetic oligonucleotide
  Antisense strand to SEQ ID NO: 1850903
ucucucacaccacauugcc

SEQ ID NO: 1850905 - RNA, 19 nt, Artificial Sequence
  Description of Artificial Sequence: Synthetic oligonucleotide
  Sense strand starting at position 3097 of SEQ ID NO: 1564043
auaggauugacaugaugca

SEQ ID NO: 1850906 - RNA, 19 nt, Artificial Sequence
  Description of Artificial Sequence: Synthetic oligonucleotide
  Antisense strand to SEQ ID NO: 1850905
ugcaucaugucaauccuau

SEQ ID NO: 1850907 - RNA, 19 nt, Artificial Sequence
  Description of Artificial Sequence: Synthetic oligonucleotide
  Sense strand starting at position 3128 of SEQ ID NO: 1564043
ucaaguaguccuuacaaua

SEQ ID NO: 1850908 - RNA, 19 nt, Artificial Sequence
  Description of Artificial Sequence: Synthetic oligonucleotide
  Antisense strand to SEQ ID NO: 1850907
uauuguaaggacuacuuga

SEQ ID NO: 1850909 - RNA, 19 nt, Artificial Sequence
  Description of Artificial Sequence: Synthetic oligonucleotide
  Sense strand starting at position 3235 of SEQ ID NO: 1564043
agaauuuauugagguugau

SEQ ID NO: 1850910 - RNA, 19 nt, Artificial Sequence
  Description of Artificial Sequence: Synthetic oligonucleotide
  Antisense strand to SEQ ID NO: 1850909
aucaaccucaauaaauucu

SEQ ID NO: 1850911 - RNA, 19 nt, Artificial Sequence
  Description of Artificial Sequence: Synthetic oligonucleotide
  Sense strand starting at position 3271 of SEQ ID NO: 1564043
aguaaaucucgccaggcau

SEQ ID NO: 1850912 - RNA, 19 nt, Artificial Sequence
  Description of Artificial Sequence: Synthetic oligonucleotide
  Antisense strand to SEQ ID NO: 1850911
augccuggcgagauuuacu

SEQ ID NO: 1850913 - RNA, 19 nt, Artificial Sequence
  Description of Artificial Sequence: Synthetic oligonucleotide
  Sense strand starting at position 3347 of SEQ ID NO: 1564043
agguuaggagugugagaga

SEQ ID NO: 1850914 - RNA, 19 nt, Artificial Sequence
  Description of Artificial Sequence: Synthetic oligonucleotide
  Antisense strand to SEQ ID NO: 1850913
ucucucacacuccuaaccu

SEQ ID NO: 1850915 - RNA, 19 nt, Artificial Sequence
  Description of Artificial Sequence: Synthetic oligonucleotide
  Sense strand starting at position 3631 of SEQ ID NO: 1564043
guagaauugucucuggaac

SEQ ID NO: 1850916 - RNA, 19 nt, Artificial Sequence
  Description of Artificial Sequence: Synthetic oligonucleotide
  Antisense strand to SEQ ID NO: 1850915
guuccagagacaauucuac

SEQ ID NO: 1850917 - RNA, 19 nt, Artificial Sequence
  Description of Artificial Sequence: Synthetic oligonucleotide
  Sense strand starting at position 3632 of SEQ ID NO: 1564043
uagaauugucucuggaaca

SEQ ID NO: 1850918 - RNA, 19 nt, Artificial Sequence
  Description of Artificial Sequence: Synthetic oligonucleotide
  Antisense strand to SEQ ID NO: 1850917
uguuccagagacaauucua

SEQ ID NO: 1850919 - RNA, 19 nt, Artificial Sequence
  Description of Artificial Sequence: Synthetic oligonucleotide
  Sense strand starting at position 3666 of SEQ ID NO: 1564043
ucaauauaucgccaaugac

SEQ ID NO: 1850920 - RNA, 19 nt, Artificial Sequence
  Description of Artificial Sequence: Synthetic oligonucleotide
  Antisense strand to SEQ ID NO: 1850919
gucauuggcgauauauuga

SEQ ID NO: 1850921 - RNA, 19 nt, Artificial Sequence
  Description of Artificial Sequence: Synthetic oligonucleotide
  Sense strand starting at position 3834 of SEQ ID NO: 1564043
agcaauuguguuuaacaaa

SEQ ID NO: 1850922 - RNA, 19 nt, Artificial Sequence
  Description of Artificial Sequence: Synthetic oligonucleotide
  Antisense strand to SEQ ID NO: 1850921
uuuguuaaacacaauugcu

SEQ ID NO: 1850923 - RNA, 19 nt, Artificial Sequence
  Description of Artificial Sequence: Synthetic oligonucleotide
  Sense strand starting at position 3861 of SEQ ID NO: 1564043
uguauagcaucaucaagag

SEQ ID NO: 1850924 - RNA, 19 nt, Artificial Sequence
  Description of Artificial Sequence: Synthetic oligonucleotide
  Antisense strand to SEQ ID NO: 1850923
cucuugaugaugcuauaca

SEQ ID NO: 1850925 - RNA, 19 nt, Artificial Sequence
  Description of Artificial Sequence: Synthetic oligonucleotide
  Sense strand starting at position 3865 of SEQ ID NO: 1564043
uagcaucaucaagaguaug

SEQ ID NO: 1850926 - RNA, 19 nt, Artificial Sequence
  Description of Artificial Sequence: Synthetic oligonucleotide
  Antisense strand to SEQ ID NO: 1850925
cauacucuugaugaugcua

SEQ ID NO: 1850927 - RNA, 19 nt, Artificial Sequence
  Description of Artificial Sequence: Synthetic oligonucleotide
  Sense strand starting at position 3893 of SEQ ID NO: 1564043
ugaacaaucuguccacaga

SEQ ID NO: 1850928 - RNA, 19 nt, Artificial Sequence
  Description of Artificial Sequence: Synthetic oligonucleotide
  Antisense strand to SEQ ID NO: 1850927
ucuguggacagauuguuca

SEQ ID NO: 1850929 - RNA, 19 nt, Artificial Sequence
  Description of Artificial Sequence: Synthetic oligonucleotide
  Sense strand starting at position 3896 of SEQ ID NO: 1564043
acaaucuguccacagaugu

SEQ ID NO: 1850930 - RNA, 19 nt, Artificial Sequence
  Description of Artificial Sequence: Synthetic oligonucleotide
  Antisense strand to SEQ ID NO: 1850929
acaucuguggacagauugu

SEQ ID NO: 1850931 - RNA, 19 nt, Artificial Sequence
  Description of Artificial Sequence: Synthetic oligonucleotide
  Sense strand starting at position 3977 of SEQ ID NO: 1564043
gaggacuuaccaugcucau

SEQ ID NO: 1850932 - RNA, 19 nt, Artificial Sequence
  Description of Artificial Sequence: Synthetic oligonucleotide
  Antisense strand to SEQ ID NO: 1850931
augagcaugguaaguccuc

SEQ ID NO: 1850933 - RNA, 19 nt, Artificial Sequence
  Description of Artificial Sequence: Synthetic oligonucleotide
  Sense strand starting at position 111 of SEQ ID NO: 1564044
agaagugcuuucccagaug

SEQ ID NO: 1850934 - RNA, 19 nt, Artificial Sequence
  Description of Artificial Sequence: Synthetic oligonucleotide
  Antisense strand to SEQ ID NO: 1850933
caucugggaaagcacuucu

SEQ ID NO: 1850935 - RNA, 19 nt, Artificial Sequence
  Description of Artificial Sequence: Synthetic oligonucleotide
  Sense strand starting at position 114 of SEQ ID NO: 1564044
agugcuuucccagauguga

SEQ ID NO: 1850936 - RNA, 19 nt, Artificial Sequence
  Description of Artificial Sequence: Synthetic oligonucleotide
  Antisense strand to SEQ ID NO: 1850935
ucacaucugggaaagcacu

SEQ ID NO: 1850937 - RNA, 19 nt, Artificial Sequence
  Description of Artificial Sequence: Synthetic oligonucleotide
  Sense strand starting at position 144 of SEQ ID NO: 1564044
ucuauaucgaucugagagg

SEQ ID NO: 1850938 - RNA, 19 nt, Artificial Sequence
  Description of Artificial Sequence: Synthetic oligonucleotide
  Antisense strand to SEQ ID NO: 1850937
ccucucagaucgauauaga

SEQ ID NO: 1850939 - RNA, 19 nt, Artificial Sequence
  Description of Artificial Sequence: Synthetic oligonucleotide
  Sense strand starting at position 149 of SEQ ID NO: 1564044
aucgaucugagagguguua

SEQ ID NO: 1850940 - RNA, 19 nt, Artificial Sequence
  Description of Artificial Sequence: Synthetic oligonucleotide
  Antisense strand to SEQ ID NO: 1850939
uaacaccucucagaucgau

SEQ ID NO: 1850941 - RNA, 19 nt, Artificial Sequence
  Description of Artificial Sequence: Synthetic oligonucleotide
  Sense strand starting at position 151 of SEQ ID NO: 1564044
cgaucugagagguguuaac

SEQ ID NO: 1850942 - RNA, 19 nt, Artificial Sequence
  Description of Artificial Sequence: Synthetic oligonucleotide
  Antisense strand to SEQ ID NO: 1850941
guuaacaccucucagaucg

SEQ ID NO: 1850943 - RNA, 19 nt, Artificial Sequence
  Description of Artificial Sequence: Synthetic oligonucleotide
  Sense strand starting at position 229 of SEQ ID NO: 1564044
ccguguucuauugcauugu

SEQ ID NO: 1850944 - RNA, 19 nt, Artificial Sequence
  Description of Artificial Sequence: Synthetic oligonucleotide
  Antisense strand to SEQ ID NO: 1850943
acaaugcaauagaacacgg

SEQ ID NO: 1850945 - RNA, 19 nt, Artificial Sequence
  Description of Artificial Sequence: Synthetic oligonucleotide
  Sense strand starting at position 714 of SEQ ID NO: 1564044
uaucaaugacucggaauga

SEQ ID NO: 1850946 - RNA, 19 nt, Artificial Sequence
  Description of Artificial Sequence: Synthetic oligonucleotide
  Antisense strand to SEQ ID NO: 1850945
ucauuccgagucauugaua

SEQ ID NO: 1850947 - RNA, 19 nt, Artificial Sequence
  Description of Artificial Sequence: Synthetic oligonucleotide
  Sense strand starting at position 862 of SEQ ID NO: 1564044
ucauguuaucaagaguuaa

SEQ ID NO: 1850948 - RNA, 19 nt, Artificial Sequence
  Description of Artificial Sequence: Synthetic oligonucleotide
  Antisense strand to SEQ ID NO: 1850947
uuaacucuugauaacauga

SEQ ID NO: 1850949 - RNA, 19 nt, Artificial Sequence
  Description of Artificial Sequence: Synthetic oligonucleotide
  Sense strand starting at position 870 of SEQ ID NO: 1564044
ucaagaguuaagcagagua

SEQ ID NO: 1850950 - RNA, 19 nt, Artificial Sequence
  Description of Artificial Sequence: Synthetic oligonucleotide
  Antisense strand to SEQ ID NO: 1850949
uacucugcuuaacucuuga

SEQ ID NO: 1850951 - RNA, 19 nt, Artificial Sequence
  Description of Artificial Sequence: Synthetic oligonucleotide
  Sense strand starting at position 872 of SEQ ID NO: 1564044
aagaguuaagcagaguacu

SEQ ID NO: 1850952 - RNA, 19 nt, Artificial Sequence
  Description of Artificial Sequence: Synthetic oligonucleotide
  Antisense strand to SEQ ID NO: 1850951
aguacucugcuuaacucuu

SEQ ID NO: 1850953 - RNA, 19 nt, Artificial Sequence
  Description of Artificial Sequence: Synthetic oligonucleotide
  Sense strand starting at position 875 of SEQ ID NO: 1564044
aguuaagcagaguacuaau

SEQ ID NO: 1850954 - RNA, 19 nt, Artificial Sequence
  Description of Artificial Sequence: Synthetic oligonucleotide
  Antisense strand to SEQ ID NO: 1850953
auuaguacucugcuuaacu

SEQ ID NO: 1850955 - RNA, 19 nt, Artificial Sequence
  Description of Artificial Sequence: Synthetic oligonucleotide
  Sense strand starting at position 2228 of SEQ ID NO: 1564044
ucaugugaucguuauggaa

SEQ ID NO: 1850956 - RNA, 19 nt, Artificial Sequence
  Description of Artificial Sequence: Synthetic oligonucleotide
  Antisense strand to SEQ ID NO: 1850955
uuccauaacgaucacauga

SEQ ID NO: 1850957 - RNA, 19 nt, Artificial Sequence
  Description of Artificial Sequence: Synthetic oligonucleotide
  Sense strand starting at position 2232 of SEQ ID NO: 1564044
gugaucguuauggaaccau

SEQ ID NO: 1850958 - RNA, 19 nt, Artificial Sequence
  Description of Artificial Sequence: Synthetic oligonucleotide
  Antisense strand to SEQ ID NO: 1850957
augguuccauaacgaucac

SEQ ID NO: 1850959 - RNA, 19 nt, Artificial Sequence
  Description of Artificial Sequence: Synthetic oligonucleotide
  Sense strand starting at position 2312 of SEQ ID NO: 1564044
agacuaagauguguugagu

SEQ ID NO: 1850960 - RNA, 19 nt, Artificial Sequence
  Description of Artificial Sequence: Synthetic oligonucleotide
  Antisense strand to SEQ ID NO: 1850959
acucaacacaucuuagucu

SEQ ID NO: 1850961 - RNA, 19 nt, Artificial Sequence
  Description of Artificial Sequence: Synthetic oligonucleotide
  Sense strand starting at position 2389 of SEQ ID NO: 1564044
gaacaauugucuuugguag

SEQ ID NO: 1850962 - RNA, 19 nt, Artificial Sequence
  Description of Artificial Sequence: Synthetic oligonucleotide
  Antisense strand to SEQ ID NO: 1850961
cuaccaaagacaauuguuc

SEQ ID NO: 1850963 - RNA, 19 nt, Artificial Sequence
  Description of Artificial Sequence: Synthetic oligonucleotide
  Sense strand starting at position 2478 of SEQ ID NO: 1564044
gccguuaguauagagauca

SEQ ID NO: 1850964 - RNA, 19 nt, Artificial Sequence
  Description of Artificial Sequence: Synthetic oligonucleotide
  Antisense strand to SEQ ID NO: 1850963
ugaucucuauacuaacggc

SEQ ID NO: 1850965 - RNA, 19 nt, Artificial Sequence
  Description of Artificial Sequence: Synthetic oligonucleotide
  Sense strand starting at position 2600 of SEQ ID NO: 1564044
gcaugugauccuugacaag

SEQ ID NO: 1850966 - RNA, 19 nt, Artificial Sequence
  Description of Artificial Sequence: Synthetic oligonucleotide
  Antisense strand to SEQ ID NO: 1850965
cuugucaaggaucacaugc

SEQ ID NO: 1850967 - RNA, 19 nt, Artificial Sequence
  Description of Artificial Sequence: Synthetic oligonucleotide
  Sense strand starting at position 2722 of SEQ ID NO: 1564044
uuucuagagugucucauaa

SEQ ID NO: 1850968 - RNA, 19 nt, Artificial Sequence
  Description of Artificial Sequence: Synthetic oligonucleotide
  Antisense strand to SEQ ID NO: 1850967
uuaugagacacucuagaaa

SEQ ID NO: 1850969 - RNA, 19 nt, Artificial Sequence
  Description of Artificial Sequence: Synthetic oligonucleotide
  Sense strand starting at position 2752 of SEQ ID NO: 1564044
ccaagaaagauguguugaa

SEQ ID NO: 1850970 - RNA, 19 nt, Artificial Sequence
  Description of Artificial Sequence: Synthetic oligonucleotide
  Antisense strand to SEQ ID NO: 1850969
uucaacacaucuuucuugg

SEQ ID NO: 1850971 - RNA, 19 nt, Artificial Sequence
  Description of Artificial Sequence: Synthetic oligonucleotide
  Sense strand starting at position 2767 of SEQ ID NO: 1564044
ugaaauaacgcaugcauag

SEQ ID NO: 1850972 - RNA, 19 nt, Artificial Sequence
  Description of Artificial Sequence: Synthetic oligonucleotide
  Antisense strand to SEQ ID NO: 1850971
cuaugcaugcguuauuuca

SEQ ID NO: 1850973 - RNA, 19 nt, Artificial Sequence
  Description of Artificial Sequence: Synthetic oligonucleotide
  Sense strand starting at position 2776 of SEQ ID NO: 1564044
gcaugcauagaucaaugaa

SEQ ID NO: 1850974 - RNA, 19 nt, Artificial Sequence
  Description of Artificial Sequence: Synthetic oligonucleotide
  Antisense strand to SEQ ID NO: 1850973
uucauugaucuaugcaugc

SEQ ID NO: 1850975 - RNA, 19 nt, Artificial Sequence
  Description of Artificial Sequence: Synthetic oligonucleotide
  Sense strand starting at position 2880 of SEQ ID NO: 1564044
gcaaauggccaauaaucau

SEQ ID NO: 1850976 - RNA, 19 nt, Artificial Sequence
  Description of Artificial Sequence: Synthetic oligonucleotide
  Antisense strand to SEQ ID NO: 1850975
augauuauuggccauuugc

SEQ ID NO: 1850977 - RNA, 19 nt, Artificial Sequence
  Description of Artificial Sequence: Synthetic oligonucleotide
  Sense strand starting at position 2965 of SEQ ID NO: 1564044
ucaccuaucguuugacaaa

SEQ ID NO: 1850978 - RNA, 19 nt, Artificial Sequence
  Description of Artificial Sequence: Synthetic oligonucleotide
  Antisense strand to SEQ ID NO: 1850977
uuugucaaacgauagguga

SEQ ID NO: 1850979 - RNA, 19 nt, Artificial Sequence
  Description of Artificial Sequence: Synthetic oligonucleotide
  Sense strand starting at position 3231 of SEQ ID NO: 1564044
agggauagauguguaagca

SEQ ID NO: 1850980 - RNA, 19 nt, Artificial Sequence
  Description of Artificial Sequence: Synthetic oligonucleotide
  Antisense strand to SEQ ID NO: 1850979
ugcuuacacaucuaucccu

SEQ ID NO: 1850981 - RNA, 19 nt, Artificial Sequence
  Description of Artificial Sequence: Synthetic oligonucleotide
  Sense strand starting at position 3232 of SEQ ID NO: 1564044
gggauagauguguaagcau

SEQ ID NO: 1850982 - RNA, 19 nt, Artificial Sequence
  Description of Artificial Sequence: Synthetic oligonucleotide
  Antisense strand to SEQ ID NO: 1850981
augcuuacacaucuauccc

SEQ ID NO: 1850983 - RNA, 19 nt, Artificial Sequence
  Description of Artificial Sequence: Synthetic oligonucleotide
  Sense strand starting at position 3240 of SEQ ID NO: 1564044
uguguaagcauguaaugga

SEQ ID NO: 1850984 - RNA, 19 nt, Artificial Sequence
  Description of Artificial Sequence: Synthetic oligonucleotide
  Antisense strand to SEQ ID NO: 1850983
uccauuacaugcuuacaca

SEQ ID NO: 1850985 - RNA, 19 nt, Artificial Sequence
  Description of Artificial Sequence: Synthetic oligonucleotide
  Sense strand starting at position 3247 of SEQ ID NO: 1564044
gcauguaauggaugaaaca

SEQ ID NO: 1850986 - RNA, 19 nt, Artificial Sequence
  Description of Artificial Sequence: Synthetic oligonucleotide
  Antisense strand to SEQ ID NO: 1850985
uguuucauccauuacaugc

SEQ ID NO: 1850987 - RNA, 19 nt, Artificial Sequence
  Description of Artificial Sequence: Synthetic oligonucleotide
  Sense strand starting at position 3421 of SEQ ID NO: 1564044
aagacaucgccaugaucug

SEQ ID NO: 1850988 - RNA, 19 nt, Artificial Sequence
  Description of Artificial Sequence: Synthetic oligonucleotide
  Antisense strand to SEQ ID NO: 1850987
cagaucauggcgaugucuu

SEQ ID NO: 1850989 - RNA, 19 nt, Artificial Sequence
  Description of Artificial Sequence: Synthetic oligonucleotide
  Sense strand starting at position 3422 of SEQ ID NO: 1564044
agacaucgccaugaucuga

SEQ ID NO: 1850990 - RNA, 19 nt, Artificial Sequence
  Description of Artificial Sequence: Synthetic oligonucleotide
  Antisense strand to SEQ ID NO: 1850989
ucagaucauggcgaugucu

SEQ ID NO: 1850991 - RNA, 19 nt, Artificial Sequence
  Description of Artificial Sequence: Synthetic oligonucleotide
  Sense strand starting at position 3430 of SEQ ID NO: 1564044
ccaugaucugaauggugga

SEQ ID NO: 1850992 - RNA, 19 nt, Artificial Sequence
  Description of Artificial Sequence: Synthetic oligonucleotide
  Antisense strand to SEQ ID NO: 1850991
uccaccauucagaucaugg

SEQ ID NO: 1850993 - RNA, 19 nt, Artificial Sequence
  Description of Artificial Sequence: Synthetic oligonucleotide
  Sense strand starting at position 3632 of SEQ ID NO: 1564044
gaguuauucccaggcauaa

SEQ ID NO: 1850994 - RNA, 19 nt, Artificial Sequence
  Description of Artificial Sequence: Synthetic oligonucleotide
  Antisense strand to SEQ ID NO: 1850993
uuaugccugggaauaacuc

SEQ ID NO: 1850995 - RNA, 19 nt, Artificial Sequence
  Description of Artificial Sequence: Synthetic oligonucleotide
  Sense strand starting at position 3657 of SEQ ID NO: 1564044
aaaccuguccaggguauau

SEQ ID NO: 1850996 - RNA, 19 nt, Artificial Sequence
  Description of Artificial Sequence: Synthetic oligonucleotide
  Antisense strand to SEQ ID NO: 1850995
auauacccuggacagguuu

SEQ ID NO: 1850997 - RNA, 19 nt, Artificial Sequence
  Description of Artificial Sequence: Synthetic oligonucleotide
  Sense strand starting at position 3668 of SEQ ID NO: 1564044
ggguauauggcauggaaug

SEQ ID NO: 1850998 - RNA, 19 nt, Artificial Sequence
  Description of Artificial Sequence: Synthetic oligonucleotide
  Antisense strand to SEQ ID NO: 1850997
cauuccaugccauauaccc

SEQ ID NO: 1850999 - RNA, 19 nt, Artificial Sequence
  Description of Artificial Sequence: Synthetic oligonucleotide
  Sense strand starting at position 3820 of SEQ ID NO: 1564044
aggcaaaucucccugauac

SEQ ID NO: 1851000 - RNA, 19 nt, Artificial Sequence
  Description of Artificial Sequence: Synthetic oligonucleotide
  Antisense strand to SEQ ID NO: 1850999
guaucagggagauuugccu

SEQ ID NO: 1851001 - RNA, 19 nt, Artificial Sequence
  Description of Artificial Sequence: Synthetic oligonucleotide
  Sense strand starting at position 3821 of SEQ ID NO: 1564044
ggcaaaucucccugauaca

SEQ ID NO: 1851002 - RNA, 19 nt, Artificial Sequence
  Description of Artificial Sequence: Synthetic oligonucleotide
  Antisense strand to SEQ ID NO: 1851001
uguaucagggagauuugcc

SEQ ID NO: 1851003 - RNA, 19 nt, Artificial Sequence
  Description of Artificial Sequence: Synthetic oligonucleotide
  Sense strand starting at position 3861 of SEQ ID NO: 1564044
gauggaguucucuacauuc

SEQ ID NO: 1851004 - RNA, 19 nt, Artificial Sequence
  Description of Artificial Sequence: Synthetic oligonucleotide
  Antisense strand to SEQ ID NO: 1851003
gaauguagagaacuccauc

SEQ ID NO: 1851005 - RNA, 19 nt, Artificial Sequence
  Description of Artificial Sequence: Synthetic oligonucleotide
  Sense strand starting at position 3863 of SEQ ID NO: 1564044
uggaguucucuacauucuu

SEQ ID NO: 1851006 - RNA, 19 nt, Artificial Sequence
  Description of Artificial Sequence: Synthetic oligonucleotide
  Antisense strand to SEQ ID NO: 1851005
aagaauguagagaacucca

SEQ ID NO: 1851007 - RNA, 19 nt, Artificial Sequence
  Description of Artificial Sequence: Synthetic oligonucleotide
  Sense strand starting at position 3913 of SEQ ID NO: 1564044
acaucaugccuccgagaag

SEQ ID NO: 1851008 - RNA, 19 nt, Artificial Sequence
  Description of Artificial Sequence: Synthetic oligonucleotide
  Antisense strand to SEQ ID NO: 1851007
cuucucggaggcaugaugu

SEQ ID NO: 1851009 - RNA, 19 nt, Artificial Sequence
  Description of Artificial Sequence: Synthetic oligonucleotide
  Sense strand starting at position 3916 of SEQ ID NO: 1564044
ucaugccuccgagaagaca

SEQ ID NO: 1851010 - RNA, 19 nt, Artificial Sequence
  Description of Artificial Sequence: Synthetic oligonucleotide
  Antisense strand to SEQ ID NO: 1851009
ugucuucucggaggcauga

SEQ ID NO: 1851011 - RNA, 19 nt, Artificial Sequence
  Description of Artificial Sequence: Synthetic oligonucleotide
  Sense strand starting at position 3966 of SEQ ID NO: 1564044
aacugaucgguguaaaugu

SEQ ID NO: 1851012 - RNA, 19 nt, Artificial Sequence
  Description of Artificial Sequence: Synthetic oligonucleotide
  Antisense strand to SEQ ID NO: 1851011
acauuuacaccgaucaguu

SEQ ID NO: 1851013 - RNA, 19 nt, Artificial Sequence
  Description of Artificial Sequence: Synthetic oligonucleotide
  Sense strand starting at position 61 of SEQ ID NO: 1564045
aagaguaaacaguaguagu

SEQ ID NO: 1851014 - RNA, 19 nt, Artificial Sequence
  Description of Artificial Sequence: Synthetic oligonucleotide
  Antisense strand to SEQ ID NO: 1851013
acuacuacuguuuacucuu

SEQ ID NO: 1851015 - RNA, 19 nt, Artificial Sequence
  Description of Artificial Sequence: Synthetic oligonucleotide
  Sense strand starting at position 215 of SEQ ID NO: 1564045
gugacuugucuggacgaau

SEQ ID NO: 1851016 - RNA, 19 nt, Artificial Sequence
  Description of Artificial Sequence: Synthetic oligonucleotide
  Antisense strand to SEQ ID NO: 1851015
auucguccagacaagucac

SEQ ID NO: 1851017 - RNA, 19 nt, Artificial Sequence
  Description of Artificial Sequence: Synthetic oligonucleotide
  Sense strand starting at position 249 of SEQ ID NO: 1564045
gggccagaguuauuggaua

SEQ ID NO: 1851018 - RNA, 19 nt, Artificial Sequence
  Description of Artificial Sequence: Synthetic oligonucleotide
  Antisense strand to SEQ ID NO: 1851017
uauccaauaacucuggccc

SEQ ID NO: 1851019 - RNA, 19 nt, Artificial Sequence
  Description of Artificial Sequence: Synthetic oligonucleotide
  Sense strand starting at position 251 of SEQ ID NO: 1564045
gccagaguuauuggauaug

SEQ ID NO: 1851020 - RNA, 19 nt, Artificial Sequence
  Description of Artificial Sequence: Synthetic oligonucleotide
  Antisense strand to SEQ ID NO: 1851019
cauauccaauaacucuggc

SEQ ID NO: 1851021 - RNA, 19 nt, Artificial Sequence
  Description of Artificial Sequence: Synthetic oligonucleotide
  Sense strand starting at position 275 of SEQ ID NO: 1564045
acucuucugagguguaaug

SEQ ID NO: 1851022 - RNA, 19 nt, Artificial Sequence
  Description of Artificial Sequence: Synthetic oligonucleotide
  Antisense strand to SEQ ID NO: 1851021
cauuacaccucagaagagu

SEQ ID NO: 1851023 - RNA, 19 nt, Artificial Sequence
  Description of Artificial Sequence: Synthetic oligonucleotide
  Sense strand starting at position 277 of SEQ ID NO: 1564045
ucuucugagguguaaugau

SEQ ID NO: 1851024 - RNA, 19 nt, Artificial Sequence
  Description of Artificial Sequence: Synthetic oligonucleotide
  Antisense strand to SEQ ID NO: 1851023
aucauuacaccucagaaga

SEQ ID NO: 1851025 - RNA, 19 nt, Artificial Sequence
  Description of Artificial Sequence: Synthetic oligonucleotide
  Sense strand starting at position 527 of SEQ ID NO: 1564045
agaaguuguaguuauacuu

SEQ ID NO: 1851026 - RNA, 19 nt, Artificial Sequence
  Description of Artificial Sequence: Synthetic oligonucleotide
  Antisense strand to SEQ ID NO: 1851025
aaguauaacuacaacuucu

SEQ ID NO: 1851027 - RNA, 19 nt, Artificial Sequence
  Description of Artificial Sequence: Synthetic oligonucleotide
  Sense strand starting at position 534 of SEQ ID NO: 1564045
guaguuauacuuuaccuuu

SEQ ID NO: 1851028 - RNA, 19 nt, Artificial Sequence
  Description of Artificial Sequence: Synthetic oligonucleotide
  Antisense strand to SEQ ID NO: 1851027
aaagguaaaguauaacuac

SEQ ID NO: 1851029 - RNA, 19 nt, Artificial Sequence
  Description of Artificial Sequence: Synthetic oligonucleotide
  Sense strand starting at position 649 of SEQ ID NO: 1564045
aagaauugaugucugcaag

SEQ ID NO: 1851030 - RNA, 19 nt, Artificial Sequence
  Description of Artificial Sequence: Synthetic oligonucleotide
  Antisense strand to SEQ ID NO: 1851029
cuugcagacaucaauucuu

SEQ ID NO: 1851031 - RNA, 19 nt, Artificial Sequence
  Description of Artificial Sequence: Synthetic oligonucleotide
  Sense strand starting at position 650 of SEQ ID NO: 1564045
agaauugaugucugcaaga

SEQ ID NO: 1851032 - RNA, 19 nt, Artificial Sequence
  Description of Artificial Sequence: Synthetic oligonucleotide
  Antisense strand to SEQ ID NO: 1851031
ucuugcagacaucaauucu

SEQ ID NO: 1851033 - RNA, 19 nt, Artificial Sequence
  Description of Artificial Sequence: Synthetic oligonucleotide
  Sense strand starting at position 669 of SEQ ID NO: 1564045
gaauauguuccagagcguu

SEQ ID NO: 1851034 - RNA, 19 nt, Artificial Sequence
  Description of Artificial Sequence: Synthetic oligonucleotide
  Antisense strand to SEQ ID NO: 1851033
aacgcucuggaacauauuc

SEQ ID NO: 1851035 - RNA, 19 nt, Artificial Sequence
  Description of Artificial Sequence: Synthetic oligonucleotide
  Sense strand starting at position 686 of SEQ ID NO: 1564045
uugaaacauuuaggagaga

SEQ ID NO: 1851036 - RNA, 19 nt, Artificial Sequence
  Description of Artificial Sequence: Synthetic oligonucleotide
  Antisense strand to SEQ ID NO: 1851035
ucucuccuaaauguuucaa

SEQ ID NO: 1851037 - RNA, 19 nt, Artificial Sequence
  Description of Artificial Sequence: Synthetic oligonucleotide
  Sense strand starting at position 1143 of SEQ ID NO: 1564045
ucucuuggacuuuauguua

SEQ ID NO: 1851038 - RNA, 19 nt, Artificial Sequence
  Description of Artificial Sequence: Synthetic oligonucleotide
  Antisense strand to SEQ ID NO: 1851037
uaacauaaaguccaagaga

SEQ ID NO: 1851039 - RNA, 19 nt, Artificial Sequence
  Description of Artificial Sequence: Synthetic oligonucleotide
  Sense strand starting at position 1154 of SEQ ID NO: 1564045
uuauguuacaguuggagau

SEQ ID NO: 1851040 - RNA, 19 nt, Artificial Sequence
  Description of Artificial Sequence: Synthetic oligonucleotide
  Antisense strand to SEQ ID NO: 1851039
aucuccaacuguaacauaa

SEQ ID NO: 1851041 - RNA, 19 nt, Artificial Sequence
  Description of Artificial Sequence: Synthetic oligonucleotide
  Sense strand starting at position 1155 of SEQ ID NO: 1564045
uauguuacaguuggagauu

SEQ ID NO: 1851042 - RNA, 19 nt, Artificial Sequence
  Description of Artificial Sequence: Synthetic oligonucleotide
  Antisense strand to SEQ ID NO: 1851041
aaucuccaacuguaacaua

SEQ ID NO: 1851043 - RNA, 19 nt, Artificial Sequence
  Description of Artificial Sequence: Synthetic oligonucleotide
  Sense strand starting at position 1199 of SEQ ID NO: 1564045
caucauagggcuugguaau

SEQ ID NO: 1851044 - RNA, 19 nt, Artificial Sequence
  Description of Artificial Sequence: Synthetic oligonucleotide
  Antisense strand to SEQ ID NO: 1851043
auuaccaagcccuaugaug

SEQ ID NO: 1851045 - RNA, 19 nt, Artificial Sequence
  Description of Artificial Sequence: Synthetic oligonucleotide
  Sense strand starting at position 1200 of SEQ ID NO: 1564045
aucauagggcuugguaauu

SEQ ID NO: 1851046 - RNA, 19 nt, Artificial Sequence
  Description of Artificial Sequence: Synthetic oligonucleotide
  Antisense strand to SEQ ID NO: 1851045
aauuaccaagcccuaugau

SEQ ID NO: 1851047 - RNA, 19 nt, Artificial Sequence
  Description of Artificial Sequence: Synthetic oligonucleotide
  Sense strand starting at position 1256 of SEQ ID NO: 1564045
cugugaugaauaggccuaa

SEQ ID NO: 1851048 - RNA, 19 nt, Artificial Sequence
  Description of Artificial Sequence: Synthetic oligonucleotide
  Antisense strand to SEQ ID NO: 1851047
uuaggccuauucaucacag

SEQ ID NO: 1851049 - RNA, 19 nt, Artificial Sequence
  Description of Artificial Sequence: Synthetic oligonucleotide
  Sense strand starting at position 1512 of SEQ ID NO: 1564045
ggagaaucuccaggugagu

SEQ ID NO: 1851050 - RNA, 19 nt, Artificial Sequence
  Description of Artificial Sequence: Synthetic oligonucleotide
  Antisense strand to SEQ ID NO: 1851049
acucaccuggagauucucc

SEQ ID NO: 1851051 - RNA, 19 nt, Artificial Sequence
  Description of Artificial Sequence: Synthetic oligonucleotide
  Sense strand starting at position 1523 of SEQ ID NO: 1564045
aggugaguccgccaagaag

SEQ ID NO: 1851052 - RNA, 19 nt, Artificial Sequence
  Description of Artificial Sequence: Synthetic oligonucleotide
  Antisense strand to SEQ ID NO: 1851051
cuucuuggcggacucaccu

SEQ ID NO: 1851053 - RNA, 19 nt, Artificial Sequence
  Description of Artificial Sequence: Synthetic oligonucleotide
  Sense strand starting at position 1636 of SEQ ID NO: 1564045
cccuacugugagggagaua

SEQ ID NO: 1851054 - RNA, 19 nt, Artificial Sequence
  Description of Artificial Sequence: Synthetic oligonucleotide
  Antisense strand to SEQ ID NO: 1851053
uaucucccucacaguaggg

SEQ ID NO: 1851055 - RNA, 19 nt, Artificial Sequence
  Description of Artificial Sequence: Synthetic oligonucleotide
  Sense strand starting at position 1647 of SEQ ID NO: 1564045
gggagauaagcaggccaau

SEQ ID NO: 1851056 - RNA, 19 nt, Artificial Sequence
  Description of Artificial Sequence: Synthetic oligonucleotide
  Antisense strand to SEQ ID NO: 1851055
auuggccugcuuaucuccc

SEQ ID NO: 1851057 - RNA, 19 nt, Artificial Sequence
  Description of Artificial Sequence: Synthetic oligonucleotide
  Sense strand starting at position 2231 of SEQ ID NO: 1564045
cuaaguguaguguaaucac

SEQ ID NO: 1851058 - RNA, 19 nt, Artificial Sequence
  Description of Artificial Sequence: Synthetic oligonucleotide
  Antisense strand to SEQ ID NO: 1851057
gugauuacacuacacuuag

SEQ ID NO: 1851059 - RNA, 19 nt, Artificial Sequence
  Description of Artificial Sequence: Synthetic oligonucleotide
  Sense strand starting at position 2269 of SEQ ID NO: 1564045
ggaagauuguucucaguag

SEQ ID NO: 1851060 - RNA, 19 nt, Artificial Sequence
  Description of Artificial Sequence: Synthetic oligonucleotide
  Antisense strand to SEQ ID NO: 1851059
cuacugagaacaaucuucc

SEQ ID NO: 1851061 - RNA, 19 nt, Artificial Sequence
  Description of Artificial Sequence: Synthetic oligonucleotide
  Sense strand starting at position 2319 of SEQ ID NO: 1564045
aagagaucgcuaggcacau

SEQ ID NO: 1851062 - RNA, 19 nt, Artificial Sequence
  Description of Artificial Sequence: Synthetic oligonucleotide
  Antisense strand to SEQ ID NO: 1851061
augugccuagcgaucucuu

SEQ ID NO: 1851063 - RNA, 19 nt, Artificial Sequence
  Description of Artificial Sequence: Synthetic oligonucleotide
  Sense strand starting at position 2749 of SEQ ID NO: 1564045
gagggaagguaucaaagaa

SEQ ID NO: 1851064 - RNA, 19 nt, Artificial Sequence
  Description of Artificial Sequence: Synthetic oligonucleotide
  Antisense strand to SEQ ID NO: 1851063
uucuuugauaccuucccuc

SEQ ID NO: 1851065 - RNA, 19 nt, Artificial Sequence
  Description of Artificial Sequence: Synthetic oligonucleotide
  Sense strand starting at position 2839 of SEQ ID NO: 1564045
gaaggaugauuccaacaag

SEQ ID NO: 1851066 - RNA, 19 nt, Artificial Sequence
  Description of Artificial Sequence: Synthetic oligonucleotide
  Antisense strand to SEQ ID NO: 1851065
cuuguuggaaucauccuuc

SEQ ID NO: 1851067 - RNA, 19 nt, Artificial Sequence
  Description of Artificial Sequence: Synthetic oligonucleotide
  Sense strand starting at position 2929 of SEQ ID NO: 1564045
gaagcuaagccauauguuu

SEQ ID NO: 1851068 - RNA, 19 nt, Artificial Sequence
  Description of Artificial Sequence: Synthetic oligonucleotide
  Antisense strand to SEQ ID NO: 1851067
aaacauauggcuuagcuuc

SEQ ID NO: 1851069 - RNA, 19 nt, Artificial Sequence
  Description of Artificial Sequence: Synthetic oligonucleotide
  Sense strand starting at position 3050 of SEQ ID NO: 1564045
cuuguauuccauuaccuag

SEQ ID NO: 1851070 - RNA, 19 nt, Artificial Sequence
  Description of Artificial Sequence: Synthetic oligonucleotide
  Antisense strand to SEQ ID NO: 1851069
cuagguaauggaauacaag

SEQ ID NO: 1851071 - RNA, 19 nt, Artificial Sequence
  Description of Artificial Sequence: Synthetic oligonucleotide
  Sense strand starting at position 3107 of SEQ ID NO: 1564045
ggagcugaagcugauuaga

SEQ ID NO: 1851072 - RNA, 19 nt, Artificial Sequence
  Description of Artificial Sequence: Synthetic oligonucleotide
  Antisense strand to SEQ ID NO: 1851071
ucuaaucagcuucagcucc

SEQ ID NO: 1851073 - RNA, 19 nt, Artificial Sequence
  Description of Artificial Sequence: Synthetic oligonucleotide
  Sense strand starting at position 3133 of SEQ ID NO: 1564045
cgguucccugaagaaguau

SEQ ID NO: 1851074 - RNA, 19 nt, Artificial Sequence
  Description of Artificial Sequence: Synthetic oligonucleotide
  Antisense strand to SEQ ID NO: 1851073
auacuucuucagggaaccg

SEQ ID NO: 1851075 - RNA, 19 nt, Artificial Sequence
  Description of Artificial Sequence: Synthetic oligonucleotide
  Sense strand starting at position 3345 of SEQ ID NO: 1564045
ggucacucaccaugagaug

SEQ ID NO: 1851076 - RNA, 19 nt, Artificial Sequence
  Description of Artificial Sequence: Synthetic oligonucleotide
  Antisense strand to SEQ ID NO: 1851075
caucucauggugagugacc

SEQ ID NO: 1851077 - RNA, 19 nt, Artificial Sequence
  Description of Artificial Sequence: Synthetic oligonucleotide
  Sense strand starting at position 3399 of SEQ ID NO: 1564045
ccaacaucgcugcaaggau

SEQ ID NO: 1851078 - RNA, 19 nt, Artificial Sequence
  Description of Artificial Sequence: Synthetic oligonucleotide
  Antisense strand to SEQ ID NO: 1851077
auccuugcagcgauguugg

SEQ ID NO: 1851079 - RNA, 19 nt, Artificial Sequence
  Description of Artificial Sequence: Synthetic oligonucleotide
  Sense strand starting at position 3426 of SEQ ID NO: 1564045
ggaguuacaucuccucucu

SEQ ID NO: 1851080 - RNA, 19 nt, Artificial Sequence
  Description of Artificial Sequence: Synthetic oligonucleotide
  Antisense strand to SEQ ID NO: 1851079
agagaggagauguaacucc

SEQ ID NO: 1851081 - RNA, 19 nt, Artificial Sequence
  Description of Artificial Sequence: Synthetic oligonucleotide
  Sense strand starting at position 3636 of SEQ ID NO: 1564045
aaauuagcagcgggaaaua

SEQ ID NO: 1851082 - RNA, 19 nt, Artificial Sequence
  Description of Artificial Sequence: Synthetic oligonucleotide
  Antisense strand to SEQ ID NO: 1851081
uauuucccgcugcuaauuu

SEQ ID NO: 1851083 - RNA, 19 nt, Artificial Sequence
  Description of Artificial Sequence: Synthetic oligonucleotide
  Sense strand starting at position 3686 of SEQ ID NO: 1564045
gagggaucauaagaccuaa

SEQ ID NO: 1851084 - RNA, 19 nt, Artificial Sequence
  Description of Artificial Sequence: Synthetic oligonucleotide
  Antisense strand to SEQ ID NO: 1851083
uuaggucuuaugaucccuc

SEQ ID NO: 1851085 - RNA, 19 nt, Artificial Sequence
  Description of Artificial Sequence: Synthetic oligonucleotide
  Sense strand starting at position 3734 of SEQ ID NO: 1564045
gggaaagugacuugcucac

SEQ ID NO: 1851086 - RNA, 19 nt, Artificial Sequence
  Description of Artificial Sequence: Synthetic oligonucleotide
  Antisense strand to SEQ ID NO: 1851085
gugagcaagucacuuuccc

SEQ ID NO: 1851087 - RNA, 19 nt, Artificial Sequence
  Description of Artificial Sequence: Synthetic oligonucleotide
  Sense strand starting at position 3799 of SEQ ID NO: 1564045
ugguuugauugggucaauc

SEQ ID NO: 1851088 - RNA, 19 nt, Artificial Sequence
  Description of Artificial Sequence: Synthetic oligonucleotide
  Antisense strand to SEQ ID NO: 1851087
gauugacccaaucaaacca

SEQ ID NO: 1851089 - RNA, 19 nt, Artificial Sequence
  Description of Artificial Sequence: Synthetic oligonucleotide
  Sense strand starting at position 3801 of SEQ ID NO: 1564045
guuugauugggucaaucua

SEQ ID NO: 1851090 - RNA, 19 nt, Artificial Sequence
  Description of Artificial Sequence: Synthetic oligonucleotide
  Antisense strand to SEQ ID NO: 1851089
uagauugacccaaucaaac

SEQ ID NO: 1851091 - RNA, 19 nt, Artificial Sequence
  Description of Artificial Sequence: Synthetic oligonucleotide
  Sense strand starting at position 3972 of SEQ ID NO: 1564045
ucuaauacuggagguugua

SEQ ID NO: 1851092 - RNA, 19 nt, Artificial Sequence
  Description of Artificial Sequence: Synthetic oligonucleotide
  Antisense strand to SEQ ID NO: 1851091
uacaaccuccaguauuaga

SEQ ID NO: 1851093 - RNA, 19 nt, Artificial Sequence
  Description of Artificial Sequence: Synthetic oligonucleotide
  Sense strand starting at position 357 of SEQ ID NO: 1564046
uuuacacguacggaauauu

SEQ ID NO: 1851094 - RNA, 19 nt, Artificial Sequence
  Description of Artificial Sequence: Synthetic oligonucleotide
  Antisense strand to SEQ ID NO: 1851093
aauauuccguacguguaaa

SEQ ID NO: 1851095 - RNA, 19 nt, Artificial Sequence
  Description of Artificial Sequence: Synthetic oligonucleotide
  Sense strand starting at position 437 of SEQ ID NO: 1564046
ucgagaacucaaggaucuu

SEQ ID NO: 1851096 - RNA, 19 nt, Artificial Sequence
  Description of Artificial Sequence: Synthetic oligonucleotide
  Antisense strand to SEQ ID NO: 1851095
aagauccuugaguucucga

SEQ ID NO: 1851097 - RNA, 19 nt, Artificial Sequence
  Description of Artificial Sequence: Synthetic oligonucleotide
  Sense strand starting at position 457 of SEQ ID NO: 1564046
ucuuuaggccuccagagua

SEQ ID NO: 1851098 - RNA, 19 nt, Artificial Sequence
  Description of Artificial Sequence: Synthetic oligonucleotide
  Antisense strand to SEQ ID NO: 1851097
uacucuggaggccuaaaga

SEQ ID NO: 1851099 - RNA, 19 nt, Artificial Sequence
  Description of Artificial Sequence: Synthetic oligonucleotide
  Sense strand starting at position 540 of SEQ ID NO: 1564046
aagugauagcacuaaggua

SEQ ID NO: 1851100 - RNA, 19 nt, Artificial Sequence
  Description of Artificial Sequence: Synthetic oligonucleotide
  Antisense strand to SEQ ID NO: 1851099
uaccuuagugcuaucacuu

SEQ ID NO: 1851101 - RNA, 19 nt, Artificial Sequence
  Description of Artificial Sequence: Synthetic oligonucleotide
  Sense strand starting at position 687 of SEQ ID NO: 1564046
aagagaaacuuuguaguau

SEQ ID NO: 1851102 - RNA, 19 nt, Artificial Sequence
  Description of Artificial Sequence: Synthetic oligonucleotide
  Antisense strand to SEQ ID NO: 1851101
auacuacaaaguuucucuu

SEQ ID NO: 1851103 - RNA, 19 nt, Artificial Sequence
  Description of Artificial Sequence: Synthetic oligonucleotide
  Sense strand starting at position 693 of SEQ ID NO: 1564046
aacuuuguaguauaaacga

SEQ ID NO: 1851104 - RNA, 19 nt, Artificial Sequence
  Description of Artificial Sequence: Synthetic oligonucleotide
  Antisense strand to SEQ ID NO: 1851103
ucguuuauacuacaaaguu

SEQ ID NO: 1851105 - RNA, 19 nt, Artificial Sequence
  Description of Artificial Sequence: Synthetic oligonucleotide
  Sense strand starting at position 1110 of SEQ ID NO: 1564046
aacuguagucacgagaugu

SEQ ID NO: 1851106 - RNA, 19 nt, Artificial Sequence
  Description of Artificial Sequence: Synthetic oligonucleotide
  Antisense strand to SEQ ID NO: 1851105
acaucucgugacuacaguu

SEQ ID NO: 1851107 - RNA, 19 nt, Artificial Sequence
  Description of Artificial Sequence: Synthetic oligonucleotide
  Sense strand starting at position 1126 of SEQ ID NO: 1564046
ugugucaucccuuaccaaa

SEQ ID NO: 1851108 - RNA, 19 nt, Artificial Sequence
  Description of Artificial Sequence: Synthetic oligonucleotide
  Antisense strand to SEQ ID NO: 1851107
uuugguaagggaugacaca

SEQ ID NO: 1851109 - RNA, 19 nt, Artificial Sequence
  Description of Artificial Sequence: Synthetic oligonucleotide
  Sense strand starting at position 1304 of SEQ ID NO: 1564046
cucuaagauuggcuuuacu

SEQ ID NO: 1851110 - RNA, 19 nt, Artificial Sequence
  Description of Artificial Sequence: Synthetic oligonucleotide
  Antisense strand to SEQ ID NO: 1851109
aguaaagccaaucuuagag

SEQ ID NO: 1851111 - RNA, 19 nt, Artificial Sequence
  Description of Artificial Sequence: Synthetic oligonucleotide
  Sense strand starting at position 1346 of SEQ ID NO: 1564046
ucguaagacaucgagcaaa

SEQ ID NO: 1851112 - RNA, 19 nt, Artificial Sequence
  Description of Artificial Sequence: Synthetic oligonucleotide
  Antisense strand to SEQ ID NO: 1851111
uuugcucgaugucuuacga

SEQ ID NO: 1851113 - RNA, 19 nt, Artificial Sequence
  Description of Artificial Sequence: Synthetic oligonucleotide
  Sense strand starting at position 1436 of SEQ ID NO: 1564046
uaaucauucggguguagga

SEQ ID NO: 1851114 - RNA, 19 nt, Artificial Sequence
  Description of Artificial Sequence: Synthetic oligonucleotide
  Antisense strand to SEQ ID NO: 1851113
uccuacacccgaaugauua

SEQ ID NO: 1851115 - RNA, 19 nt, Artificial Sequence
  Description of Artificial Sequence: Synthetic oligonucleotide
  Sense strand starting at position 1438 of SEQ ID NO: 1564046
aucauucggguguaggauu

SEQ ID NO: 1851116 - RNA, 19 nt, Artificial Sequence
  Description of Artificial Sequence: Synthetic oligonucleotide
  Antisense strand to SEQ ID NO: 1851115
aauccuacacccgaaugau

SEQ ID NO: 1851117 - RNA, 19 nt, Artificial Sequence
  Description of Artificial Sequence: Synthetic oligonucleotide
  Sense strand starting at position 1513 of SEQ ID NO: 1564046
acguguguucccaggugac

SEQ ID NO: 1851118 - RNA, 19 nt, Artificial Sequence
  Description of Artificial Sequence: Synthetic oligonucleotide
  Antisense strand to SEQ ID NO: 1851117
gucaccugggaacacacgu

SEQ ID NO: 1851119 - RNA, 19 nt, Artificial Sequence
  Description of Artificial Sequence: Synthetic oligonucleotide
  Sense strand starting at position 2249 of SEQ ID NO: 1564046
acaggaugucgugauuaca

SEQ ID NO: 1851120 - RNA, 19 nt, Artificial Sequence
  Description of Artificial Sequence: Synthetic oligonucleotide
  Antisense strand to SEQ ID NO: 1851119
uguaaucacgacauccugu

SEQ ID NO: 1851121 - RNA, 19 nt, Artificial Sequence
  Description of Artificial Sequence: Synthetic oligonucleotide
  Sense strand starting at position 2252 of SEQ ID NO: 1564046
ggaugucgugauuacaaug

SEQ ID NO: 1851122 - RNA, 19 nt, Artificial Sequence
  Description of Artificial Sequence: Synthetic oligonucleotide
  Antisense strand to SEQ ID NO: 1851121
cauuguaaucacgacaucc

SEQ ID NO: 1851123 - RNA, 19 nt, Artificial Sequence
  Description of Artificial Sequence: Synthetic oligonucleotide
  Sense strand starting at position 2257 of SEQ ID NO: 1564046
ucgugauuacaaugauaaa

SEQ ID NO: 1851124 - RNA, 19 nt, Artificial Sequence
  Description of Artificial Sequence: Synthetic oligonucleotide
  Antisense strand to SEQ ID NO: 1851123
uuuaucauuguaaucacga

SEQ ID NO: 1851125 - RNA, 19 nt, Artificial Sequence
  Description of Artificial Sequence: Synthetic oligonucleotide
  Sense strand starting at position 2278 of SEQ ID NO: 1564046
cgacuagucaaacggacaa

SEQ ID NO: 1851126 - RNA, 19 nt, Artificial Sequence
  Description of Artificial Sequence: Synthetic oligonucleotide
  Antisense strand to SEQ ID NO: 1851125
uuguccguuugacuagucg

SEQ ID NO: 1851127 - RNA, 19 nt, Artificial Sequence
  Description of Artificial Sequence: Synthetic oligonucleotide
  Sense strand starting at position 2405 of SEQ ID NO: 1564046
cucugucaucucugaauag

SEQ ID NO: 1851128 - RNA, 19 nt, Artificial Sequence
  Description of Artificial Sequence: Synthetic oligonucleotide
  Antisense strand to SEQ ID NO: 1851127
cuauucagagaugacagag

SEQ ID NO: 1851129 - RNA, 19 nt, Artificial Sequence
  Description of Artificial Sequence: Synthetic oligonucleotide
  Sense strand starting at position 2449 of SEQ ID NO: 1564046
uggagaagcucuccuuaag

SEQ ID NO: 1851130 - RNA, 19 nt, Artificial Sequence
  Description of Artificial Sequence: Synthetic oligonucleotide
  Antisense strand to SEQ ID NO: 1851129
cuuaaggagagcuucucca

SEQ ID NO: 1851131 - RNA, 19 nt, Artificial Sequence
  Description of Artificial Sequence: Synthetic oligonucleotide
  Sense strand starting at position 2483 of SEQ ID NO: 1564046
ugaaguugagugcauggau

SEQ ID NO: 1851132 - RNA, 19 nt, Artificial Sequence
  Description of Artificial Sequence: Synthetic oligonucleotide
  Antisense strand to SEQ ID NO: 1851131
auccaugcacucaacuuca

SEQ ID NO: 1851133 - RNA, 19 nt, Artificial Sequence
  Description of Artificial Sequence: Synthetic oligonucleotide
  Sense strand starting at position 2540 of SEQ ID NO: 1564046
gggacaucucaauacguuu

SEQ ID NO: 1851134 - RNA, 19 nt, Artificial Sequence
  Description of Artificial Sequence: Synthetic oligonucleotide
  Antisense strand to SEQ ID NO: 1851133
aaacguauugagauguccc

SEQ ID NO: 1851135 - RNA, 19 nt, Artificial Sequence
  Description of Artificial Sequence: Synthetic oligonucleotide
  Sense strand starting at position 2557 of SEQ ID NO: 1564046
uuuguacggugauuuaguu

SEQ ID NO: 1851136 - RNA, 19 nt, Artificial Sequence
  Description of Artificial Sequence: Synthetic oligonucleotide
  Antisense strand to SEQ ID NO: 1851135
aacuaaaucaccguacaaa

SEQ ID NO: 1851137 - RNA, 19 nt, Artificial Sequence
  Description of Artificial Sequence: Synthetic oligonucleotide
  Sense strand starting at position 2564 of SEQ ID NO: 1564046
ggugauuuaguuuguuuau

SEQ ID NO: 1851138 - RNA, 19 nt, Artificial Sequence
  Description of Artificial Sequence: Synthetic oligonucleotide
  Antisense strand to SEQ ID NO: 1851137
auaaacaaacuaaaucacc

SEQ ID NO: 1851139 - RNA, 19 nt, Artificial Sequence
  Description of Artificial Sequence: Synthetic oligonucleotide
  Sense strand starting at position 2565 of SEQ ID NO: 1564046
gugauuuaguuuguuuauc

SEQ ID NO: 1851140 - RNA, 19 nt, Artificial Sequence
  Description of Artificial Sequence: Synthetic oligonucleotide
  Antisense strand to SEQ ID NO: 1851139
gauaaacaaacuaaaucac

SEQ ID NO: 1851141 - RNA, 19 nt, Artificial Sequence
  Description of Artificial Sequence: Synthetic oligonucleotide
  Sense strand starting at position 2633 of SEQ ID NO: 1564046
gagaacucauggucacaua

SEQ ID NO: 1851142 - RNA, 19 nt, Artificial Sequence
  Description of Artificial Sequence: Synthetic oligonucleotide
  Antisense strand to SEQ ID NO: 1851141
uaugugaccaugaguucuc

SEQ ID NO: 1851143 - RNA, 19 nt, Artificial Sequence
  Description of Artificial Sequence: Synthetic oligonucleotide
  Sense strand starting at position 2790 of SEQ ID NO: 1564046
gcaguuuaccuacaugaca

SEQ ID NO: 1851144 - RNA, 19 nt, Artificial Sequence
  Description of Artificial Sequence: Synthetic oligonucleotide
  Antisense strand to SEQ ID NO: 1851143
ugucauguagguaaacugc

SEQ ID NO: 1851145 - RNA, 19 nt, Artificial Sequence
  Description of Artificial Sequence: Synthetic oligonucleotide
  Sense strand starting at position 2993 of SEQ ID NO: 1564046
uugagaaaguuccucacaa

SEQ ID NO: 1851146 - RNA, 19 nt, Artificial Sequence
  Description of Artificial Sequence: Synthetic oligonucleotide
  Antisense strand to SEQ ID NO: 1851145
uugugaggaacuuucucaa

SEQ ID NO: 1851147 - RNA, 19 nt, Artificial Sequence
  Description of Artificial Sequence: Synthetic oligonucleotide
  Sense strand starting at position 3268 of SEQ ID NO: 1564046
cauguacauugggucaaau

SEQ ID NO: 1851148 - RNA, 19 nt, Artificial Sequence
  Description of Artificial Sequence: Synthetic oligonucleotide
  Antisense strand to SEQ ID NO: 1851147
auuugacccaauguacaug

SEQ ID NO: 1851149 - RNA, 19 nt, Artificial Sequence
  Description of Artificial Sequence: Synthetic oligonucleotide
  Sense strand starting at position 3280 of SEQ ID NO: 1564046
gucaaauugcaacaagcaa

SEQ ID NO: 1851150 - RNA, 19 nt, Artificial Sequence
  Description of Artificial Sequence: Synthetic oligonucleotide
  Antisense strand to SEQ ID NO: 1851149
uugcuuguugcaauuugac

SEQ ID NO: 1851151 - RNA, 19 nt, Artificial Sequence
  Description of Artificial Sequence: Synthetic oligonucleotide
  Sense strand starting at position 3294 of SEQ ID NO: 1564046
agcaauccacaggguaauu

SEQ ID NO: 1851152 - RNA, 19 nt, Artificial Sequence
  Description of Artificial Sequence: Synthetic oligonucleotide
  Antisense strand to SEQ ID NO: 1851151
aauuacccuguggauugcu

SEQ ID NO: 1851153 - RNA, 19 nt, Artificial Sequence
  Description of Artificial Sequence: Synthetic oligonucleotide
  Sense strand starting at position 3344 of SEQ ID NO: 1564046
aaccauagucaaggaguga

SEQ ID NO: 1851154 - RNA, 19 nt, Artificial Sequence
  Description of Artificial Sequence: Synthetic oligonucleotide
  Antisense strand to SEQ ID NO: 1851153
ucacuccuugacuaugguu

SEQ ID NO: 1851155 - RNA, 19 nt, Artificial Sequence
  Description of Artificial Sequence: Synthetic oligonucleotide
  Sense strand starting at position 3348 of SEQ ID NO: 1564046
auagucaaggagugaucaa

SEQ ID NO: 1851156 - RNA, 19 nt, Artificial Sequence
  Description of Artificial Sequence: Synthetic oligonucleotide
  Antisense strand to SEQ ID NO: 1851155
uugaucacuccuugacuau

SEQ ID NO: 1851157 - RNA, 19 nt, Artificial Sequence
  Description of Artificial Sequence: Synthetic oligonucleotide
  Sense strand starting at position 3364 of SEQ ID NO: 1564046
caaauaggaguuuaucugu

SEQ ID NO: 1851158 - RNA, 19 nt, Artificial Sequence
  Description of Artificial Sequence: Synthetic oligonucleotide
  Antisense strand to SEQ ID NO: 1851157
acagauaaacuccuauuug

SEQ ID NO: 1851159 - RNA, 19 nt, Artificial Sequence
  Description of Artificial Sequence: Synthetic oligonucleotide
  Sense strand starting at position 3558 of SEQ ID NO: 1564046
agcuuauaguaccuuaaga

SEQ ID NO: 1851160 - RNA, 19 nt, Artificial Sequence
  Description of Artificial Sequence: Synthetic oligonucleotide
  Antisense strand to SEQ ID NO: 1851159
ucuuaagguacuauaagcu

SEQ ID NO: 1851161 - RNA, 19 nt, Artificial Sequence
  Description of Artificial Sequence: Synthetic oligonucleotide
  Sense strand starting at position 3610 of SEQ ID NO: 1564046
uuacuaucaguuggauacu

SEQ ID NO: 1851162 - RNA, 19 nt, Artificial Sequence
  Description of Artificial Sequence: Synthetic oligonucleotide
  Antisense strand to SEQ ID NO: 1851161
aguauccaacugauaguaa

SEQ ID NO: 1851163 - RNA, 19 nt, Artificial Sequence
  Description of Artificial Sequence: Synthetic oligonucleotide
  Sense strand starting at position 3634 of SEQ ID NO: 1564046
acugacauuuaagaaaguu

SEQ ID NO: 1851164 - RNA, 19 nt, Artificial Sequence
  Description of Artificial Sequence: Synthetic oligonucleotide
  Antisense strand to SEQ ID NO: 1851163
aacuuucuuaaaugucagu

SEQ ID NO: 1851165 - RNA, 19 nt, Artificial Sequence
  Description of Artificial Sequence: Synthetic oligonucleotide
  Sense strand starting at position 3699 of SEQ ID NO: 1564046
augucagugcaagaguaaa

SEQ ID NO: 1851166 - RNA, 19 nt, Artificial Sequence
  Description of Artificial Sequence: Synthetic oligonucleotide
  Antisense strand to SEQ ID NO: 1851165
uuuacucuugcacugacau

SEQ ID NO: 1851167 - RNA, 19 nt, Artificial Sequence
  Description of Artificial Sequence: Synthetic oligonucleotide
  Sense strand starting at position 3709 of SEQ ID NO: 1564046
aagaguaaaguggguuaaa

SEQ ID NO: 1851168 - RNA, 19 nt, Artificial Sequence
  Description of Artificial Sequence: Synthetic oligonucleotide
  Antisense strand to SEQ ID NO: 1851167
uuuaacccacuuuacucuu

SEQ ID NO: 1851169 - RNA, 19 nt, Artificial Sequence
  Description of Artificial Sequence: Synthetic oligonucleotide
  Sense strand starting at position 3928 of SEQ ID NO: 1564046
gcaucacucacgggagaga

SEQ ID NO: 1851170 - RNA, 19 nt, Artificial Sequence
  Description of Artificial Sequence: Synthetic oligonucleotide
  Antisense strand to SEQ ID NO: 1851169
ucucucccgugagugaugc

SEQ ID NO: 1851171 - RNA, 19 nt, Artificial Sequence
  Description of Artificial Sequence: Synthetic oligonucleotide
  Sense strand starting at position 3957 of SEQ ID NO: 1564046
aguugcuaugcauaaauga

SEQ ID NO: 1851172 - RNA, 19 nt, Artificial Sequence
  Description of Artificial Sequence: Synthetic oligonucleotide
  Antisense strand to SEQ ID NO: 1851171
ucauuuaugcauagcaacu

SEQ ID NO: 1851173 - RNA, 19 nt, Artificial Sequence
  Description of Artificial Sequence: Synthetic oligonucleotide
  Sense strand starting at position 95 of SEQ ID NO: 1564047
gcaaaugaauucuuugaua

SEQ ID NO: 1851174 - RNA, 19 nt, Artificial Sequence
  Description of Artificial Sequence: Synthetic oligonucleotide
  Antisense strand to SEQ ID NO: 1851173
uaucaaagaauucauuugc

SEQ ID NO: 1851175 - RNA, 19 nt, Artificial Sequence
  Description of Artificial Sequence: Synthetic oligonucleotide
  Sense strand starting at position 131 of SEQ ID NO: 1564047
aggaaagucaaaugacgua

SEQ ID NO: 1851176 - RNA, 19 nt, Artificial Sequence
  Description of Artificial Sequence: Synthetic oligonucleotide
  Antisense strand to SEQ ID NO: 1851175
uacgucauuugacuuuccu

SEQ ID NO: 1851177 - RNA, 19 nt, Artificial Sequence
  Description of Artificial Sequence: Synthetic oligonucleotide
  Sense strand starting at position 136 of SEQ ID NO: 1564047
agucaaaugacguaugcau

SEQ ID NO: 1851178 - RNA, 19 nt, Artificial Sequence
  Description of Artificial Sequence: Synthetic oligonucleotide
  Antisense strand to SEQ ID NO: 1851177
augcauacgucauuugacu

SEQ ID NO: 1851179 - RNA, 19 nt, Artificial Sequence
  Description of Artificial Sequence: Synthetic oligonucleotide
  Sense strand starting at position 147 of SEQ ID NO: 1564047
guaugcaucccuuaugggu

SEQ ID NO: 1851180 - RNA, 19 nt, Artificial Sequence
  Description of Artificial Sequence: Synthetic oligonucleotide
  Antisense strand to SEQ ID NO: 1851179
acccauaagggaugcauac

SEQ ID NO: 1851181 - RNA, 19 nt, Artificial Sequence
  Description of Artificial Sequence: Synthetic oligonucleotide
  Sense strand starting at position 221 of SEQ ID NO: 1564047
agagaaagaucugacucua

SEQ ID NO: 1851182 - RNA, 19 nt, Artificial Sequence
  Description of Artificial Sequence: Synthetic oligonucleotide
  Antisense strand to SEQ ID NO: 1851181
uagagucagaucuuucucu

SEQ ID NO: 1851183 - RNA, 19 nt, Artificial Sequence
  Description of Artificial Sequence: Synthetic oligonucleotide
  Sense strand starting at position 229 of SEQ ID NO: 1564047
aucugacucuaacugagua

SEQ ID NO: 1851184 - RNA, 19 nt, Artificial Sequence
  Description of Artificial Sequence: Synthetic oligonucleotide
  Antisense strand to SEQ ID NO: 1851183
uacucaguuagagucagau

SEQ ID NO: 1851185 - RNA, 19 nt, Artificial Sequence
  Description of Artificial Sequence: Synthetic oligonucleotide
  Sense strand starting at position 297 of SEQ ID NO: 1564047
augagcaugcucuaaggau

SEQ ID NO: 1851186 - RNA, 19 nt, Artificial Sequence
  Description of Artificial Sequence: Synthetic oligonucleotide
  Antisense strand to SEQ ID NO: 1851185
auccuuagagcaugcucau

SEQ ID NO: 1851187 - RNA, 19 nt, Artificial Sequence
  Description of Artificial Sequence: Synthetic oligonucleotide
  Sense strand starting at position 301 of SEQ ID NO: 1564047
gcaugcucuaaggauaguu

SEQ ID NO: 1851188 - RNA, 19 nt, Artificial Sequence
  Description of Artificial Sequence: Synthetic oligonucleotide
  Antisense strand to SEQ ID NO: 1851187
aacuauccuuagagcaugc

SEQ ID NO: 1851189 - RNA, 19 nt, Artificial Sequence
  Description of Artificial Sequence: Synthetic oligonucleotide
  Sense strand starting at position 303 of SEQ ID NO: 1564047
augcucuaaggauaguuua

SEQ ID NO: 1851190 - RNA, 19 nt, Artificial Sequence
  Description of Artificial Sequence: Synthetic oligonucleotide
  Antisense strand to SEQ ID NO: 1851189
uaaacuauccuuagagcau

SEQ ID NO: 1851191 - RNA, 19 nt, Artificial Sequence
  Description of Artificial Sequence: Synthetic oligonucleotide
  Sense strand starting at position 306 of SEQ ID NO: 1564047
cucuaaggauaguuuacua

SEQ ID NO: 1851192 - RNA, 19 nt, Artificial Sequence
  Description of Artificial Sequence: Synthetic oligonucleotide
  Antisense strand to SEQ ID NO: 1851191
uaguaaacuauccuuagag

SEQ ID NO: 1851193 - RNA, 19 nt, Artificial Sequence
  Description of Artificial Sequence: Synthetic oligonucleotide
  Sense strand starting at position 348 of SEQ ID NO: 1564047
cucagucuuggagaguaag

SEQ ID NO: 1851194 - RNA, 19 nt, Artificial Sequence
  Description of Artificial Sequence: Synthetic oligonucleotide
  Antisense strand to SEQ ID NO: 1851193
cuuacucuccaagacugag

SEQ ID NO: 1851195 - RNA, 19 nt, Artificial Sequence
  Description of Artificial Sequence: Synthetic oligonucleotide
  Sense strand starting at position 356 of SEQ ID NO: 1564047
uggagaguaaggugaauua

SEQ ID NO: 1851196 - RNA, 19 nt, Artificial Sequence
  Description of Artificial Sequence: Synthetic oligonucleotide
  Antisense strand to SEQ ID NO: 1851195
uaauucaccuuacucucca

SEQ ID NO: 1851197 - RNA, 19 nt, Artificial Sequence
  Description of Artificial Sequence: Synthetic oligonucleotide
  Sense strand starting at position 363 of SEQ ID NO: 1564047
uaaggugaauuaggaauuu

SEQ ID NO: 1851198 - RNA, 19 nt, Artificial Sequence
  Description of Artificial Sequence: Synthetic oligonucleotide
  Antisense strand to SEQ ID NO: 1851197
aaauuccuaauucaccuua

SEQ ID NO: 1851199 - RNA, 19 nt, Artificial Sequence
  Description of Artificial Sequence: Synthetic oligonucleotide
  Sense strand starting at position 569 of SEQ ID NO: 1564047
guaugaugauggagagaag

SEQ ID NO: 1851200 - RNA, 19 nt, Artificial Sequence
  Description of Artificial Sequence: Synthetic oligonucleotide
  Antisense strand to SEQ ID NO: 1851199
cuucucuccaucaucauac

SEQ ID NO: 1851201 - RNA, 19 nt, Artificial Sequence
  Description of Artificial Sequence: Synthetic oligonucleotide
  Sense strand starting at position 685 of SEQ ID NO: 1564047
ggauguguacugcagggau

SEQ ID NO: 1851202 - RNA, 19 nt, Artificial Sequence
  Description of Artificial Sequence: Synthetic oligonucleotide
  Antisense strand to SEQ ID NO: 1851201
aucccugcaguacacaucc

SEQ ID NO: 1851203 - RNA, 19 nt, Artificial Sequence
  Description of Artificial Sequence: Synthetic oligonucleotide
  Sense strand starting at position 895 of SEQ ID NO: 1564047
cgcggcuauauuuauguaa

SEQ ID NO: 1851204 - RNA, 19 nt, Artificial Sequence
  Description of Artificial Sequence: Synthetic oligonucleotide
  Antisense strand to SEQ ID NO: 1851203
uuacauaaauauagccgcg

SEQ ID NO: 1851205 - RNA, 19 nt, Artificial Sequence
  Description of Artificial Sequence: Synthetic oligonucleotide
  Sense strand starting at position 949 of SEQ ID NO: 1564047
guguguuuccaauacaacc

SEQ ID NO: 1851206 - RNA, 19 nt, Artificial Sequence
  Description of Artificial Sequence: Synthetic oligonucleotide
  Antisense strand to SEQ ID NO: 1851205
gguuguauuggaaacacac

SEQ ID NO: 1851207 - RNA, 19 nt, Artificial Sequence
  Description of Artificial Sequence: Synthetic oligonucleotide
  Sense strand starting at position 996 of SEQ ID NO: 1564047
gugcuucguagcgcggaaa

SEQ ID NO: 1851208 - RNA, 19 nt, Artificial Sequence
  Description of Artificial Sequence: Synthetic oligonucleotide
  Antisense strand to SEQ ID NO: 1851207
uuuccgcgcuacgaagcac

SEQ ID NO: 1851209 - RNA, 19 nt, Artificial Sequence
  Description of Artificial Sequence: Synthetic oligonucleotide
  Sense strand starting at position 1052 of SEQ ID NO: 1564047
aguuaucagcuacauccau

SEQ ID NO: 1851210 - RNA, 19 nt, Artificial Sequence
  Description of Artificial Sequence: Synthetic oligonucleotide
  Antisense strand to SEQ ID NO: 1851209
auggauguagcugauaacu

SEQ ID NO: 1851211 - RNA, 19 nt, Artificial Sequence
  Description of Artificial Sequence: Synthetic oligonucleotide
  Sense strand starting at position 1165 of SEQ ID NO: 1564047
uguggagucccacaucuaa

SEQ ID NO: 1851212 - RNA, 19 nt, Artificial Sequence
  Description of Artificial Sequence: Synthetic oligonucleotide
  Antisense strand to SEQ ID NO: 1851211
uuagaugugggacuccaca

SEQ ID NO: 1851213 - RNA, 19 nt, Artificial Sequence
  Description of Artificial Sequence: Synthetic oligonucleotide
  Sense strand starting at position 1261 of SEQ ID NO: 1564047
ggacacuucuuccucagua

SEQ ID NO: 1851214 - RNA, 19 nt, Artificial Sequence
  Description of Artificial Sequence: Synthetic oligonucleotide
  Antisense strand to SEQ ID NO: 1851213
uacugaggaagaagugucc

SEQ ID NO: 1851215 - RNA, 19 nt, Artificial Sequence
  Description of Artificial Sequence: Synthetic oligonucleotide
  Sense strand starting at position 1263 of SEQ ID NO: 1564047
acacuucuuccucaguaga

SEQ ID NO: 1851216 - RNA, 19 nt, Artificial Sequence
  Description of Artificial Sequence: Synthetic oligonucleotide
  Antisense strand to SEQ ID NO: 1851215
ucuacugaggaagaagugu

SEQ ID NO: 1851217 - RNA, 19 nt, Artificial Sequence
  Description of Artificial Sequence: Synthetic oligonucleotide
  Sense strand starting at position 1265 of SEQ ID NO: 1564047
acuucuuccucaguagacu

SEQ ID NO: 1851218 - RNA, 19 nt, Artificial Sequence
  Description of Artificial Sequence: Synthetic oligonucleotide
  Antisense strand to SEQ ID NO: 1851217
agucuacugaggaagaagu

SEQ ID NO: 1851219 - RNA, 19 nt, Artificial Sequence
  Description of Artificial Sequence: Synthetic oligonucleotide
  Sense strand starting at position 1300 of SEQ ID NO: 1564047
guagauaagguuuggauga

SEQ ID NO: 1851220 - RNA, 19 nt, Artificial Sequence
  Description of Artificial Sequence: Synthetic oligonucleotide
  Antisense strand to SEQ ID NO: 1851219
ucauccaaaccuuaucuac

SEQ ID NO: 1851221 - RNA, 19 nt, Artificial Sequence
  Description of Artificial Sequence: Synthetic oligonucleotide
  Sense strand starting at position 2186 of SEQ ID NO: 1564047
gcaauagaccgucaaauau

SEQ ID NO: 1851222 - RNA, 19 nt, Artificial Sequence
  Description of Artificial Sequence: Synthetic oligonucleotide
  Antisense strand to SEQ ID NO: 1851221
auauuugacggucuauugc

SEQ ID NO: 1851223 - RNA, 19 nt, Artificial Sequence
  Description of Artificial Sequence: Synthetic oligonucleotide
  Sense strand starting at position 2412 of SEQ ID NO: 1564047
cuggcuacagcuuaugaaa

SEQ ID NO: 1851224 - RNA, 19 nt, Artificial Sequence
  Description of Artificial Sequence: Synthetic oligonucleotide
  Antisense strand to SEQ ID NO: 1851223
uuucauaagcuguagccag

SEQ ID NO: 1851225 - RNA, 19 nt, Artificial Sequence
  Description of Artificial Sequence: Synthetic oligonucleotide
  Sense strand starting at position 2639 of SEQ ID NO: 1564047
acuuccaacuaguuuguga

SEQ ID NO: 1851226 - RNA, 19 nt, Artificial Sequence
  Description of Artificial Sequence: Synthetic oligonucleotide
  Antisense strand to SEQ ID NO: 1851225
ucacaaacuaguuggaagu

SEQ ID NO: 1851227 - RNA, 19 nt, Artificial Sequence
  Description of Artificial Sequence: Synthetic oligonucleotide
  Sense strand starting at position 2641 of SEQ ID NO: 1564047
uuccaacuaguuugugauu

SEQ ID NO: 1851228 - RNA, 19 nt, Artificial Sequence
  Description of Artificial Sequence: Synthetic oligonucleotide
  Antisense strand to SEQ ID NO: 1851227
aaucacaaacuaguuggaa

SEQ ID NO: 1851229 - RNA, 19 nt, Artificial Sequence
  Description of Artificial Sequence: Synthetic oligonucleotide
  Sense strand starting at position 2869 of SEQ ID NO: 1564047
aaggcaaucgugcaaucaa

SEQ ID NO: 1851230 - RNA, 19 nt, Artificial Sequence
  Description of Artificial Sequence: Synthetic oligonucleotide
  Antisense strand to SEQ ID NO: 1851229
uugauugcacgauugccuu

SEQ ID NO: 1851231 - RNA, 19 nt, Artificial Sequence
  Description of Artificial Sequence: Synthetic oligonucleotide
  Sense strand starting at position 2921 of SEQ ID NO: 1564047
aggauaaccuuucucgaua

SEQ ID NO: 1851232 - RNA, 19 nt, Artificial Sequence
  Description of Artificial Sequence: Synthetic oligonucleotide
  Antisense strand to SEQ ID NO: 1851231
uaucgagaaagguuauccu

SEQ ID NO: 1851233 - RNA, 19 nt, Artificial Sequence
  Description of Artificial Sequence: Synthetic oligonucleotide
  Sense strand starting at position 2922 of SEQ ID NO: 1564047
ggauaaccuuucucgauaa

SEQ ID NO: 1851234 - RNA, 19 nt, Artificial Sequence
  Description of Artificial Sequence: Synthetic oligonucleotide
  Antisense strand to SEQ ID NO: 1851233
uuaucgagaaagguuaucc

SEQ ID NO: 1851235 - RNA, 19 nt, Artificial Sequence
  Description of Artificial Sequence: Synthetic oligonucleotide
  Sense strand starting at position 2929 of SEQ ID NO: 1564047
cuuucucgauaaucucaga

SEQ ID NO: 1851236 - RNA, 19 nt, Artificial Sequence
  Description of Artificial Sequence: Synthetic oligonucleotide
  Antisense strand to SEQ ID NO: 1851235
ucugagauuaucgagaaag

SEQ ID NO: 1851237 - RNA, 19 nt, Artificial Sequence
  Description of Artificial Sequence: Synthetic oligonucleotide
  Sense strand starting at position 3153 of SEQ ID NO: 1564047
caaugcuugcugcauagga

SEQ ID NO: 1851238 - RNA, 19 nt, Artificial Sequence
  Description of Artificial Sequence: Synthetic oligonucleotide
  Antisense strand to SEQ ID NO: 1851237
uccuaugcagcaagcauug

SEQ ID NO: 1851239 - RNA, 19 nt, Artificial Sequence
  Description of Artificial Sequence: Synthetic oligonucleotide
  Sense strand starting at position 3318 of SEQ ID NO: 1564047
uucugaugaagacgagauu

SEQ ID NO: 1851240 - RNA, 19 nt, Artificial Sequence
  Description of Artificial Sequence: Synthetic oligonucleotide
  Antisense strand to SEQ ID NO: 1851239
aaucucgucuucaucagaa

SEQ ID NO: 1851241 - RNA, 19 nt, Artificial Sequence
  Description of Artificial Sequence: Synthetic oligonucleotide
  Sense strand starting at position 3446 of SEQ ID NO: 1564047
acuguacauguauacauua

SEQ ID NO: 1851242 - RNA, 19 nt, Artificial Sequence
  Description of Artificial Sequence: Synthetic oligonucleotide
  Antisense strand to SEQ ID NO: 1851241
uaauguauacauguacagu

SEQ ID NO: 1851243 - RNA, 19 nt, Artificial Sequence
  Description of Artificial Sequence: Synthetic oligonucleotide
  Sense strand starting at position 3543 of SEQ ID NO: 1564047
auauauugauguuccaaug

SEQ ID NO: 1851244 - RNA, 19 nt, Artificial Sequence
  Description of Artificial Sequence: Synthetic oligonucleotide
  Antisense strand to SEQ ID NO: 1851243
cauuggaacaucaauauau

SEQ ID NO: 1851245 - RNA, 19 nt, Artificial Sequence
  Description of Artificial Sequence: Synthetic oligonucleotide
  Sense strand starting at position 3623 of SEQ ID NO: 1564047
uagaguaacucgucuuuag

SEQ ID NO: 1851246 - RNA, 19 nt, Artificial Sequence
  Description of Artificial Sequence: Synthetic oligonucleotide
  Antisense strand to SEQ ID NO: 1851245
cuaaagacgaguuacucua

SEQ ID NO: 1851247 - RNA, 19 nt, Artificial Sequence
  Description of Artificial Sequence: Synthetic oligonucleotide
  Sense strand starting at position 3633 of SEQ ID NO: 1564047
cgucuuuagguguaacaau

SEQ ID NO: 1851248 - RNA, 19 nt, Artificial Sequence
  Description of Artificial Sequence: Synthetic oligonucleotide
  Antisense strand to SEQ ID NO: 1851247
auuguuacaccuaaagacg

SEQ ID NO: 1851249 - RNA, 19 nt, Artificial Sequence
  Description of Artificial Sequence: Synthetic oligonucleotide
  Sense strand starting at position 3768 of SEQ ID NO: 1564047
uucuguagucaggaucuca

SEQ ID NO: 1851250 - RNA, 19 nt, Artificial Sequence
  Description of Artificial Sequence: Synthetic oligonucleotide
  Antisense strand to SEQ ID NO: 1851249
ugagauccugacuacagaa

SEQ ID NO: 1851251 - RNA, 19 nt, Artificial Sequence
  Description of Artificial Sequence: Synthetic oligonucleotide
  Sense strand starting at position 3799 of SEQ ID NO: 1564047
gcaccacacguuuagugaa

SEQ ID NO: 1851252 - RNA, 19 nt, Artificial Sequence
  Description of Artificial Sequence: Synthetic oligonucleotide
  Antisense strand to SEQ ID NO: 1851251
uucacuaaacguguggugc

SEQ ID NO: 1851253 - RNA, 19 nt, Artificial Sequence
  Description of Artificial Sequence: Synthetic oligonucleotide
  Sense strand starting at position 191 of SEQ ID NO: 1564048
agaauacgcgguuaucaaa

SEQ ID NO: 1851254 - RNA, 19 nt, Artificial Sequence
  Description of Artificial Sequence: Synthetic oligonucleotide
  Antisense strand to SEQ ID NO: 1851253
uuugauaaccgcguauucu

SEQ ID NO: 1851255 - RNA, 19 nt, Artificial Sequence
  Description of Artificial Sequence: Synthetic oligonucleotide
  Sense strand starting at position 212 of SEQ ID NO: 1564048
uuuguuuggccauaucuau

SEQ ID NO: 1851256 - RNA, 19 nt, Artificial Sequence
  Description of Artificial Sequence: Synthetic oligonucleotide
  Antisense strand to SEQ ID NO: 1851255
auagauauggccaaacaaa

SEQ ID NO: 1851257 - RNA, 19 nt, Artificial Sequence
  Description of Artificial Sequence: Synthetic oligonucleotide
  Sense strand starting at position 226 of SEQ ID NO: 1564048
ucuauuuaucaucgcugca

SEQ ID NO: 1851258 - RNA, 19 nt, Artificial Sequence
  Description of Artificial Sequence: Synthetic oligonucleotide
  Antisense strand to SEQ ID NO: 1851257
ugcagcgaugauaaauaga

SEQ ID NO: 1851259 - RNA, 19 nt, Artificial Sequence
  Description of Artificial Sequence: Synthetic oligonucleotide
  Sense strand starting at position 260 of SEQ ID NO: 1564048
gaauaucauucuguugaug

SEQ ID NO: 1851260 - RNA, 19 nt, Artificial Sequence
  Description of Artificial Sequence: Synthetic oligonucleotide
  Antisense strand to SEQ ID NO: 1851259
caucaacagaaugauauuc

SEQ ID NO: 1851261 - RNA, 19 nt, Artificial Sequence
  Description of Artificial Sequence: Synthetic oligonucleotide
  Sense strand starting at position 917 of SEQ ID NO: 1564048
gcuuauccugaacaauagu

SEQ ID NO: 1851262 - RNA, 19 nt, Artificial Sequence
  Description of Artificial Sequence: Synthetic oligonucleotide
  Antisense strand to SEQ ID NO: 1851261
acuauuguucaggauaagc

SEQ ID NO: 1851263 - RNA, 19 nt, Artificial Sequence
  Description of Artificial Sequence: Synthetic oligonucleotide
  Sense strand starting at position 2371 of SEQ ID NO: 1564048
uugugauaccgguggagga

SEQ ID NO: 1851264 - RNA, 19 nt, Artificial Sequence
  Description of Artificial Sequence: Synthetic oligonucleotide
  Antisense strand to SEQ ID NO: 1851263
uccuccaccgguaucacaa

SEQ ID NO: 1851265 - RNA, 19 nt, Artificial Sequence
  Description of Artificial Sequence: Synthetic oligonucleotide
  Sense strand starting at position 2372 of SEQ ID NO: 1564048
ugugauaccgguggaggau

SEQ ID NO: 1851266 - RNA, 19 nt, Artificial Sequence
  Description of Artificial Sequence: Synthetic oligonucleotide
  Antisense strand to SEQ ID NO: 1851265
auccuccaccgguaucaca

SEQ ID NO: 1851267 - RNA, 19 nt, Artificial Sequence
  Description of Artificial Sequence: Synthetic oligonucleotide
  Sense strand starting at position 2384 of SEQ ID NO: 1564048
ggaggaugcuucucacaag

SEQ ID NO: 1851268 - RNA, 19 nt, Artificial Sequence
  Description of Artificial Sequence: Synthetic oligonucleotide
  Antisense strand to SEQ ID NO: 1851267
cuugugagaagcauccucc

SEQ ID NO: 1851269 - RNA, 19 nt, Artificial Sequence
  Description of Artificial Sequence: Synthetic oligonucleotide
  Sense strand starting at position 2428 of SEQ ID NO: 1564048
aguccaccuacguaaugua

SEQ ID NO: 1851270 - RNA, 19 nt, Artificial Sequence
  Description of Artificial Sequence: Synthetic oligonucleotide
  Antisense strand to SEQ ID NO: 1851269
uacauuacguagguggacu

SEQ ID NO: 1851271 - RNA, 19 nt, Artificial Sequence
  Description of Artificial Sequence: Synthetic oligonucleotide
  Sense strand starting at position 2498 of SEQ ID NO: 1564048
uaguguuugccagauacug

SEQ ID NO: 1851272 - RNA, 19 nt, Artificial Sequence
  Description of Artificial Sequence: Synthetic oligonucleotide
  Antisense strand to SEQ ID NO: 1851271
caguaucuggcaaacacua

SEQ ID NO: 1851273 - RNA, 19 nt, Artificial Sequence
  Description of Artificial Sequence: Synthetic oligonucleotide
  Sense strand starting at position 2506 of SEQ ID NO: 1564048
gccagauacugggcaaaga

SEQ ID NO: 1851274 - RNA, 19 nt, Artificial Sequence
  Description of Artificial Sequence: Synthetic oligonucleotide
  Antisense strand to SEQ ID NO: 1851273
ucuuugcccaguaucuggc

SEQ ID NO: 1851275 - RNA, 19 nt, Artificial Sequence
  Description of Artificial Sequence: Synthetic oligonucleotide
  Sense strand starting at position 2516 of SEQ ID NO: 1564048
gggcaaagaacuggaguua

SEQ ID NO: 1851276 - RNA, 19 nt, Artificial Sequence
  Description of Artificial Sequence: Synthetic oligonucleotide
  Antisense strand to SEQ ID NO: 1851275
uaacuccaguucuuugccc

SEQ ID NO: 1851277 - RNA, 19 nt, Artificial Sequence
  Description of Artificial Sequence: Synthetic oligonucleotide
  Sense strand starting at position 2550 of SEQ ID NO: 1564048
uaugauugcugaccaguaa

SEQ ID NO: 1851278 - RNA, 19 nt, Artificial Sequence
  Description of Artificial Sequence: Synthetic oligonucleotide
  Antisense strand to SEQ ID NO: 1851277
uuacuggucagcaaucaua

SEQ ID NO: 1851279 - RNA, 19 nt, Artificial Sequence
  Description of Artificial Sequence: Synthetic oligonucleotide
  Sense strand starting at position 2551 of SEQ ID NO: 1564048
augauugcugaccaguaaa

SEQ ID NO: 1851280 - RNA, 19 nt, Artificial Sequence
  Description of Artificial Sequence: Synthetic oligonucleotide
  Antisense strand to SEQ ID NO: 1851279
uuuacuggucagcaaucau

SEQ ID NO: 1851281 - RNA, 19 nt, Artificial Sequence
  Description of Artificial Sequence: Synthetic oligonucleotide
  Sense strand starting at position 2554 of SEQ ID NO: 1564048
auugcugaccaguaaauaa

SEQ ID NO: 1851282 - RNA, 19 nt, Artificial Sequence
  Description of Artificial Sequence: Synthetic oligonucleotide
  Antisense strand to SEQ ID NO: 1851281
uuauuuacuggucagcaau

SEQ ID NO: 1851283 - RNA, 19 nt, Artificial Sequence
  Description of Artificial Sequence: Synthetic oligonucleotide
  Sense strand starting at position 2573 of SEQ ID NO: 1564048
guaguaggugucaguugua

SEQ ID NO: 1851284 - RNA, 19 nt, Artificial Sequence
  Description of Artificial Sequence: Synthetic oligonucleotide
  Antisense strand to SEQ ID NO: 1851283
uacaacugacaccuacuac

SEQ ID NO: 1851285 - RNA, 19 nt, Artificial Sequence
  Description of Artificial Sequence: Synthetic oligonucleotide
  Sense strand starting at position 2624 of SEQ ID NO: 1564048
cccuuagaauucuugagac

SEQ ID NO: 1851286 - RNA, 19 nt, Artificial Sequence
  Description of Artificial Sequence: Synthetic oligonucleotide
  Antisense strand to SEQ ID NO: 1851285
gucucaagaauucuaaggg

SEQ ID NO: 1851287 - RNA, 19 nt, Artificial Sequence
  Description of Artificial Sequence: Synthetic oligonucleotide
  Sense strand starting at position 2653 of SEQ ID NO: 1564048
gcaaccaaauugguuuaau

SEQ ID NO: 1851288 - RNA, 19 nt, Artificial Sequence
  Description of Artificial Sequence: Synthetic oligonucleotide
  Antisense strand to SEQ ID NO: 1851287
auuaaaccaauuugguugc

SEQ ID NO: 1851289 - RNA, 19 nt, Artificial Sequence
  Description of Artificial Sequence: Synthetic oligonucleotide
  Sense strand starting at position 2665 of SEQ ID NO: 1564048
guuuaaugauucuccaaag

SEQ ID NO: 1851290 - RNA, 19 nt, Artificial Sequence
  Description of Artificial Sequence: Synthetic oligonucleotide
  Antisense strand to SEQ ID NO: 1851289
cuuuggagaaucauuaaac

SEQ ID NO: 1851291 - RNA, 19 nt, Artificial Sequence
  Description of Artificial Sequence: Synthetic oligonucleotide
  Sense strand starting at position 2751 of SEQ ID NO: 1564048
auuauuuaaucagagcaga

SEQ ID NO: 1851292 - RNA, 19 nt, Artificial Sequence
  Description of Artificial Sequence: Synthetic oligonucleotide
  Antisense strand to SEQ ID NO: 1851291
ucugcucugauuaaauaau

SEQ ID NO: 1851293 - RNA, 19 nt, Artificial Sequence
  Description of Artificial Sequence: Synthetic oligonucleotide
  Sense strand starting at position 2827 of SEQ ID NO: 1564048
guguguauuaaacaugacu

SEQ ID NO: 1851294 - RNA, 19 nt, Artificial Sequence
  Description of Artificial Sequence: Synthetic oligonucleotide
  Antisense strand to SEQ ID NO: 1851293
agucauguuuaauacacac

SEQ ID NO: 1851295 - RNA, 19 nt, Artificial Sequence
  Description of Artificial Sequence: Synthetic oligonucleotide
  Sense strand starting at position 2899 of SEQ ID NO: 1564048
cugaacuuguguuugaaag

SEQ ID NO: 1851296 - RNA, 19 nt, Artificial Sequence
  Description of Artificial Sequence: Synthetic oligonucleotide
  Antisense strand to SEQ ID NO: 1851295
cuuucaaacacaaguucag

SEQ ID NO: 1851297 - RNA, 19 nt, Artificial Sequence
  Description of Artificial Sequence: Synthetic oligonucleotide
  Sense strand starting at position 2910 of SEQ ID NO: 1564048
uuugaaaggcuguauucua

SEQ ID NO: 1851298 - RNA, 19 nt, Artificial Sequence
  Description of Artificial Sequence: Synthetic oligonucleotide
  Antisense strand to SEQ ID NO: 1851297
uagaauacagccuuucaaa

SEQ ID NO: 1851299 - RNA, 19 nt, Artificial Sequence
  Description of Artificial Sequence: Synthetic oligonucleotide
  Sense strand starting at position 2930 of SEQ ID NO: 1564048
cuauguuguguugcaagca

SEQ ID NO: 1851300 - RNA, 19 nt, Artificial Sequence
  Description of Artificial Sequence: Synthetic oligonucleotide
  Antisense strand to SEQ ID NO: 1851299
ugcuugcaacacaacauag

SEQ ID NO: 1851301 - RNA, 19 nt, Artificial Sequence
  Description of Artificial Sequence: Synthetic oligonucleotide
  Sense strand starting at position 3007 of SEQ ID NO: 1564048
acuccuuccuccguagaaa

SEQ ID NO: 1851302 - RNA, 19 nt, Artificial Sequence
  Description of Artificial Sequence: Synthetic oligonucleotide
  Antisense strand to SEQ ID NO: 1851301
uuucuacggaggaaggagu

SEQ ID NO: 1851303 - RNA, 19 nt, Artificial Sequence
  Description of Artificial Sequence: Synthetic oligonucleotide
  Sense strand starting at position 3008 of SEQ ID NO: 1564048
cuccuuccuccguagaaag

SEQ ID NO: 1851304 - RNA, 19 nt, Artificial Sequence
  Description of Artificial Sequence: Synthetic oligonucleotide
  Antisense strand to SEQ ID NO: 1851303
cuuucuacggaggaaggag

SEQ ID NO: 1851305 - RNA, 19 nt, Artificial Sequence
  Description of Artificial Sequence: Synthetic oligonucleotide
  Sense strand starting at position 3010 of SEQ ID NO: 1564048
ccuuccuccguagaaagau

SEQ ID NO: 1851306 - RNA, 19 nt, Artificial Sequence
  Description of Artificial Sequence: Synthetic oligonucleotide
  Antisense strand to SEQ ID NO: 1851305
aucuuucuacggaggaagg

SEQ ID NO: 1851307 - RNA, 19 nt, Artificial Sequence
  Description of Artificial Sequence: Synthetic oligonucleotide
  Sense strand starting at position 3152 of SEQ ID NO: 1564048
uuaugugggucccuaaaca

SEQ ID NO: 1851308 - RNA, 19 nt, Artificial Sequence
  Description of Artificial Sequence: Synthetic oligonucleotide
  Antisense strand to SEQ ID NO: 1851307
uguuuagggacccacauaa

SEQ ID NO: 1851309 - RNA, 19 nt, Artificial Sequence
  Description of Artificial Sequence: Synthetic oligonucleotide
  Sense strand starting at position 3188 of SEQ ID NO: 1564048
gucuacuaugccuaaggga

SEQ ID NO: 1851310 - RNA, 19 nt, Artificial Sequence
  Description of Artificial Sequence: Synthetic oligonucleotide
  Antisense strand to SEQ ID NO: 1851309
ucccuuaggcauaguagac

SEQ ID NO: 1851311 - RNA, 19 nt, Artificial Sequence
  Description of Artificial Sequence: Synthetic oligonucleotide
  Sense strand starting at position 3220 of SEQ ID NO: 1564048
guaguaccauuccuugaua

SEQ ID NO: 1851312 - RNA, 19 nt, Artificial Sequence
  Description of Artificial Sequence: Synthetic oligonucleotide
  Antisense strand to SEQ ID NO: 1851311
uaucaaggaaugguacuac

SEQ ID NO: 1851313 - RNA, 19 nt, Artificial Sequence
  Description of Artificial Sequence: Synthetic oligonucleotide
  Sense strand starting at position 3222 of SEQ ID NO: 1564048
aguaccauuccuugauacu

SEQ ID NO: 1851314 - RNA, 19 nt, Artificial Sequence
  Description of Artificial Sequence: Synthetic oligonucleotide
  Antisense strand to SEQ ID NO: 1851313
aguaucaaggaaugguacu

SEQ ID NO: 1851315 - RNA, 19 nt, Artificial Sequence
  Description of Artificial Sequence: Synthetic oligonucleotide
  Sense strand starting at position 3223 of SEQ ID NO: 1564048
guaccauuccuugauacug

SEQ ID NO: 1851316 - RNA, 19 nt, Artificial Sequence
  Description of Artificial Sequence: Synthetic oligonucleotide
  Antisense strand to SEQ ID NO: 1851315
caguaucaaggaaugguac

SEQ ID NO: 1851317 - RNA, 19 nt, Artificial Sequence
  Description of Artificial Sequence: Synthetic oligonucleotide
  Sense strand starting at position 3348 of SEQ ID NO: 1564048
cagaaagugucaguuucua

SEQ ID NO: 1851318 - RNA, 19 nt, Artificial Sequence
  Description of Artificial Sequence: Synthetic oligonucleotide
  Antisense strand to SEQ ID NO: 1851317
uagaaacugacacuuucug

SEQ ID NO: 1851319 - RNA, 19 nt, Artificial Sequence
  Description of Artificial Sequence: Synthetic oligonucleotide
  Sense strand starting at position 3414 of SEQ ID NO: 1564048
uaaugauaccuguggaaau

SEQ ID NO: 1851320 - RNA, 19 nt, Artificial Sequence
  Description of Artificial Sequence: Synthetic oligonucleotide
  Antisense strand to SEQ ID NO: 1851319
auuuccacagguaucauua

SEQ ID NO: 1851321 - RNA, 19 nt, Artificial Sequence
  Description of Artificial Sequence: Synthetic oligonucleotide
  Sense strand starting at position 3485 of SEQ ID NO: 1564048
ucucauaacuguucuaagu

SEQ ID NO: 1851322 - RNA, 19 nt, Artificial Sequence
  Description of Artificial Sequence: Synthetic oligonucleotide
  Antisense strand to SEQ ID NO: 1851321
acuuagaacaguuaugaga

SEQ ID NO: 1851323 - RNA, 19 nt, Artificial Sequence
  Description of Artificial Sequence: Synthetic oligonucleotide
  Sense strand starting at position 3496 of SEQ ID NO: 1564048
uucuaaguucuuggauaag

SEQ ID NO: 1851324 - RNA, 19 nt, Artificial Sequence
  Description of Artificial Sequence: Synthetic oligonucleotide
  Antisense strand to SEQ ID NO: 1851323
cuuauccaagaacuuagaa

SEQ ID NO: 1851325 - RNA, 19 nt, Artificial Sequence
  Description of Artificial Sequence: Synthetic oligonucleotide
  Sense strand starting at position 3584 of SEQ ID NO: 1564048
gggcaaguucauggaugaa

SEQ ID NO: 1851326 - RNA, 19 nt, Artificial Sequence
  Description of Artificial Sequence: Synthetic oligonucleotide
  Antisense strand to SEQ ID NO: 1851325
uucauccaugaacuugccc

SEQ ID NO: 1851327 - RNA, 19 nt, Artificial Sequence
  Description of Artificial Sequence: Synthetic oligonucleotide
  Sense strand starting at position 3639 of SEQ ID NO: 1564048
guguguauaagguagggau

SEQ ID NO: 1851328 - RNA, 19 nt, Artificial Sequence
  Description of Artificial Sequence: Synthetic oligonucleotide
  Antisense strand to SEQ ID NO: 1851327
aucccuaccuuauacacac

SEQ ID NO: 1851329 - RNA, 19 nt, Artificial Sequence
  Description of Artificial Sequence: Synthetic oligonucleotide
  Sense strand starting at position 3655 of SEQ ID NO: 1564048
gauugauauccuggaaggc

SEQ ID NO: 1851330 - RNA, 19 nt, Artificial Sequence
  Description of Artificial Sequence: Synthetic oligonucleotide
  Antisense strand to SEQ ID NO: 1851329
gccuuccaggauaucaauc

SEQ ID NO: 1851331 - RNA, 19 nt, Artificial Sequence
  Description of Artificial Sequence: Synthetic oligonucleotide
  Sense strand starting at position 3704 of SEQ ID NO: 1564048
aucacaacccuggguuaau

SEQ ID NO: 1851332 - RNA, 19 nt, Artificial Sequence
  Description of Artificial Sequence: Synthetic oligonucleotide
  Antisense strand to SEQ ID NO: 1851331
auuaacccaggguugugau

SEQ ID NO: 1851333 - RNA, 19 nt, Artificial Sequence
  Description of Artificial Sequence: Synthetic oligonucleotide
  Sense strand starting at position 991 of SEQ ID NO: 1564049
gaaccugcgggcuaauaau

SEQ ID NO: 1851334 - RNA, 19 nt, Artificial Sequence
  Description of Artificial Sequence: Synthetic oligonucleotide
  Antisense strand to SEQ ID NO: 1851333
auuauuagcccgcagguuc

SEQ ID NO: 1851335 - RNA, 19 nt, Artificial Sequence
  Description of Artificial Sequence: Synthetic oligonucleotide
  Sense strand starting at position 1379 of SEQ ID NO: 1564049
uuugauuggaaacgguuua

SEQ ID NO: 1851336 - RNA, 19 nt, Artificial Sequence
  Description of Artificial Sequence: Synthetic oligonucleotide
  Antisense strand to SEQ ID NO: 1851335
uaaaccguuuccaaucaaa

SEQ ID NO: 1851337 - RNA, 19 nt, Artificial Sequence
  Description of Artificial Sequence: Synthetic oligonucleotide
  Sense strand starting at position 1390 of SEQ ID NO: 1564049
acgguuuaggccuaaagac

SEQ ID NO: 1851338 - RNA, 19 nt, Artificial Sequence
  Description of Artificial Sequence: Synthetic oligonucleotide
  Antisense strand to SEQ ID NO: 1851337
gucuuuaggccuaaaccgu

SEQ ID NO: 1851339 - RNA, 19 nt, Artificial Sequence
  Description of Artificial Sequence: Synthetic oligonucleotide
  Sense strand starting at position 1455 of SEQ ID NO: 1564049
cucuuacaugcugaaguuu

SEQ ID NO: 1851340 - RNA, 19 nt, Artificial Sequence
  Description of Artificial Sequence: Synthetic oligonucleotide
  Antisense strand to SEQ ID NO: 1851339
aaacuucagcauguaagag

SEQ ID NO: 1851341 - RNA, 19 nt, Artificial Sequence
  Description of Artificial Sequence: Synthetic oligonucleotide
  Sense strand starting at position 1490 of SEQ ID NO: 1564049
cuauguagucuuugaaauu

SEQ ID NO: 1851342 - RNA, 19 nt, Artificial Sequence
  Description of Artificial Sequence: Synthetic oligonucleotide
  Antisense strand to SEQ ID NO: 1851341
aauuucaaagacuacauag

SEQ ID NO: 1851343 - RNA, 19 nt, Artificial Sequence
  Description of Artificial Sequence: Synthetic oligonucleotide
  Sense strand starting at position 1532 of SEQ ID NO: 1564049
guuagauucuaaguuucua

SEQ ID NO: 1851344 - RNA, 19 nt, Artificial Sequence
  Description of Artificial Sequence: Synthetic oligonucleotide
  Antisense strand to SEQ ID NO: 1851343
uagaaacuuagaaucuaac

SEQ ID NO: 1851345 - RNA, 19 nt, Artificial Sequence
  Description of Artificial Sequence: Synthetic oligonucleotide
  Sense strand starting at position 1566 of SEQ ID NO: 1564049
guuacuuccgacuaucuuu

SEQ ID NO: 1851346 - RNA, 19 nt, Artificial Sequence
  Description of Artificial Sequence: Synthetic oligonucleotide
  Antisense strand to SEQ ID NO: 1851345
aaagauagucggaaguaac

SEQ ID NO: 1851347 - RNA, 19 nt, Artificial Sequence
  Description of Artificial Sequence: Synthetic oligonucleotide
  Sense strand starting at position 1608 of SEQ ID NO: 1564049
aaacuuugugucggaucca

SEQ ID NO: 1851348 - RNA, 19 nt, Artificial Sequence
  Description of Artificial Sequence: Synthetic oligonucleotide
  Antisense strand to SEQ ID NO: 1851347
uggauccgacacaaaguuu

SEQ ID NO: 1851349 - RNA, 19 nt, Artificial Sequence
  Description of Artificial Sequence: Synthetic oligonucleotide
  Sense strand starting at position 1640 of SEQ ID NO: 1564049
ccaggagucuaggcuguau

SEQ ID NO: 1851350 - RNA, 19 nt, Artificial Sequence
  Description of Artificial Sequence: Synthetic oligonucleotide
  Antisense strand to SEQ ID NO: 1851349
auacagccuagacuccugg

SEQ ID NO: 1851351 - RNA, 19 nt, Artificial Sequence
  Description of Artificial Sequence: Synthetic oligonucleotide
  Sense strand starting at position 1642 of SEQ ID NO: 1564049
aggagucuaggcuguauuu

SEQ ID NO: 1851352 - RNA, 19 nt, Artificial Sequence
  Description of Artificial Sequence: Synthetic oligonucleotide
  Antisense strand to SEQ ID NO: 1851351
aaauacagccuagacuccu

SEQ ID NO: 1851353 - RNA, 19 nt, Artificial Sequence
  Description of Artificial Sequence: Synthetic oligonucleotide
  Sense strand starting at position 1685 of SEQ ID NO: 1564049
ucaagcauguacccagaaa

SEQ ID NO: 1851354 - RNA, 19 nt, Artificial Sequence
  Description of Artificial Sequence: Synthetic oligonucleotide
  Antisense strand to SEQ ID NO: 1851353
uuucuggguacaugcuuga

SEQ ID NO: 1851355 - RNA, 19 nt, Artificial Sequence
  Description of Artificial Sequence: Synthetic oligonucleotide
  Sense strand starting at position 1696 of SEQ ID NO: 1564049
cccagaaaccugcgagacu

SEQ ID NO: 1851356 - RNA, 19 nt, Artificial Sequence
  Description of Artificial Sequence: Synthetic oligonucleotide
  Antisense strand to SEQ ID NO: 1851355
agucucgcagguuucuggg

SEQ ID NO: 1851357 - RNA, 19 nt, Artificial Sequence
  Description of Artificial Sequence: Synthetic oligonucleotide
  Sense strand starting at position 1801 of SEQ ID NO: 1564049
gccuaaauuguuggacauu

SEQ ID NO: 1851358 - RNA, 19 nt, Artificial Sequence
  Description of Artificial Sequence: Synthetic oligonucleotide
  Antisense strand to SEQ ID NO: 1851357
aauguccaacaauuuaggc

SEQ ID NO: 1851359 - RNA, 19 nt, Artificial Sequence
  Description of Artificial Sequence: Synthetic oligonucleotide
  Sense strand starting at position 1855 of SEQ ID NO: 1564049
cugucccucccugaguauu

SEQ ID NO: 1851360 - RNA, 19 nt, Artificial Sequence
  Description of Artificial Sequence: Synthetic oligonucleotide
  Antisense strand to SEQ ID NO: 1851359
aauacucagggagggacag

SEQ ID NO: 1851361 - RNA, 19 nt, Artificial Sequence
  Description of Artificial Sequence: Synthetic oligonucleotide
  Sense strand starting at position 2027 of SEQ ID NO: 1564049
uuuggucugugaguuauga

SEQ ID NO: 1851362 - RNA, 19 nt, Artificial Sequence
  Description of Artificial Sequence: Synthetic oligonucleotide
  Antisense strand to SEQ ID NO: 1851361
ucauaacucacagaccaaa

SEQ ID NO: 1851363 - RNA, 19 nt, Artificial Sequence
  Description of Artificial Sequence: Synthetic oligonucleotide
  Sense strand starting at position 2029 of SEQ ID NO: 1564049
uggucugugaguuaugagu

SEQ ID NO: 1851364 - RNA, 19 nt, Artificial Sequence
  Description of Artificial Sequence: Synthetic oligonucleotide
  Antisense strand to SEQ ID NO: 1851363
acucauaacucacagacca

SEQ ID NO: 1851365 - RNA, 19 nt, Artificial Sequence
  Description of Artificial Sequence: Synthetic oligonucleotide
  Sense strand starting at position 2169 of SEQ ID NO: 1564049
gcuuguaacugagucugga

SEQ ID NO: 1851366 - RNA, 19 nt, Artificial Sequence
  Description of Artificial Sequence: Synthetic oligonucleotide
  Antisense strand to SEQ ID NO: 1851365
uccagacucaguuacaagc

SEQ ID NO: 1851367 - RNA, 19 nt, Artificial Sequence
  Description of Artificial Sequence: Synthetic oligonucleotide
  Sense strand starting at position 2172 of SEQ ID NO: 1564049
uguaacugagucuggaaau

SEQ ID NO: 1851368 - RNA, 19 nt, Artificial Sequence
  Description of Artificial Sequence: Synthetic oligonucleotide
  Antisense strand to SEQ ID NO: 1851367
auuuccagacucaguuaca

SEQ ID NO: 1851369 - RNA, 19 nt, Artificial Sequence
  Description of Artificial Sequence: Synthetic oligonucleotide
  Sense strand starting at position 2185 of SEQ ID NO: 1564049
ggaaauuccucuucugauc

SEQ ID NO: 1851370 - RNA, 19 nt, Artificial Sequence
  Description of Artificial Sequence: Synthetic oligonucleotide
  Antisense strand to SEQ ID NO: 1851369
gaucagaagaggaauuucc

SEQ ID NO: 1851371 - RNA, 19 nt, Artificial Sequence
  Description of Artificial Sequence: Synthetic oligonucleotide
  Sense strand starting at position 2307 of SEQ ID NO: 1564049
ucugaauguguuggucaug

SEQ ID NO: 1851372 - RNA, 19 nt, Artificial Sequence
  Description of Artificial Sequence: Synthetic oligonucleotide
  Antisense strand to SEQ ID NO: 1851371
caugaccaacacauucaga

SEQ ID NO: 1851373 - RNA, 19 nt, Artificial Sequence
  Description of Artificial Sequence: Synthetic oligonucleotide
  Sense strand starting at position 2310 of SEQ ID NO: 1564049
gaauguguuggucaugcuu

SEQ ID NO: 1851374 - RNA, 19 nt, Artificial Sequence
  Description of Artificial Sequence: Synthetic oligonucleotide
  Antisense strand to SEQ ID NO: 1851373
aagcaugaccaacacauuc

SEQ ID NO: 1851375 - RNA, 19 nt, Artificial Sequence
  Description of Artificial Sequence: Synthetic oligonucleotide
  Sense strand starting at position 2316 of SEQ ID NO: 1564049
guuggucaugcuuaggaga

SEQ ID NO: 1851376 - RNA, 19 nt, Artificial Sequence
  Description of Artificial Sequence: Synthetic oligonucleotide
  Antisense strand to SEQ ID NO: 1851375
ucuccuaagcaugaccaac

SEQ ID NO: 1851377 - RNA, 19 nt, Artificial Sequence
  Description of Artificial Sequence: Synthetic oligonucleotide
  Sense strand starting at position 2329 of SEQ ID NO: 1564049
aggagagaguucuuuguuu

SEQ ID NO: 1851378 - RNA, 19 nt, Artificial Sequence
  Description of Artificial Sequence: Synthetic oligonucleotide
  Antisense strand to SEQ ID NO: 1851377
aaacaaagaacucucuccu

SEQ ID NO: 1851379 - RNA, 19 nt, Artificial Sequence
  Description of Artificial Sequence: Synthetic oligonucleotide
  Sense strand starting at position 2334 of SEQ ID NO: 1564049
agaguucuuuguuucucca

SEQ ID NO: 1851380 - RNA, 19 nt, Artificial Sequence
  Description of Artificial Sequence: Synthetic oligonucleotide
  Antisense strand to SEQ ID NO: 1851379
uggagaaacaaagaacucu

SEQ ID NO: 1851381 - RNA, 19 nt, Artificial Sequence
  Description of Artificial Sequence: Synthetic oligonucleotide
  Sense strand starting at position 2454 of SEQ ID NO: 1564049
cuuucuuaggaaggguauu

SEQ ID NO: 1851382 - RNA, 19 nt, Artificial Sequence
  Description of Artificial Sequence: Synthetic oligonucleotide
  Antisense strand to SEQ ID NO: 1851381
aauacccuuccuaagaaag

SEQ ID NO: 1851383 - RNA, 19 nt, Artificial Sequence
  Description of Artificial Sequence: Synthetic oligonucleotide
  Sense strand starting at position 2472 of SEQ ID NO: 1564049
ucauuacagcauugauuag

SEQ ID NO: 1851384 - RNA, 19 nt, Artificial Sequence
  Description of Artificial Sequence: Synthetic oligonucleotide
  Antisense strand to SEQ ID NO: 1851383
cuaaucaaugcuguaauga

SEQ ID NO: 1851385 - RNA, 19 nt, Artificial Sequence
  Description of Artificial Sequence: Synthetic oligonucleotide
  Sense strand starting at position 2627 of SEQ ID NO: 1564049
auaggauauuaugcagcua

SEQ ID NO: 1851386 - RNA, 19 nt, Artificial Sequence
  Description of Artificial Sequence: Synthetic oligonucleotide
  Antisense strand to SEQ ID NO: 1851385
uagcugcauaauauccuau

SEQ ID NO: 1851387 - RNA, 19 nt, Artificial Sequence
  Description of Artificial Sequence: Synthetic oligonucleotide
  Sense strand starting at position 2661 of SEQ ID NO: 1564049
gcagauuuguaaguguuua

SEQ ID NO: 1851388 - RNA, 19 nt, Artificial Sequence
  Description of Artificial Sequence: Synthetic oligonucleotide
  Antisense strand to SEQ ID NO: 1851387
uaaacacuuacaaaucugc

SEQ ID NO: 1851389 - RNA, 19 nt, Artificial Sequence
  Description of Artificial Sequence: Synthetic oligonucleotide
  Sense strand starting at position 2696 of SEQ ID NO: 1564049
agauauauuguagggcuga

SEQ ID NO: 1851390 - RNA, 19 nt, Artificial Sequence
  Description of Artificial Sequence: Synthetic oligonucleotide
  Antisense strand to SEQ ID NO: 1851389
ucagcccuacaauauaucu

SEQ ID NO: 1851391 - RNA, 19 nt, Artificial Sequence
  Description of Artificial Sequence: Synthetic oligonucleotide
  Sense strand starting at position 2768 of SEQ ID NO: 1564049
guguguaauaguuacauag

SEQ ID NO: 1851392 - RNA, 19 nt, Artificial Sequence
  Description of Artificial Sequence: Synthetic oligonucleotide
  Antisense strand to SEQ ID NO: 1851391
cuauguaacuauuacacac

SEQ ID NO: 1851393 - RNA, 19 nt, Artificial Sequence
  Description of Artificial Sequence: Synthetic oligonucleotide
  Sense strand starting at position 2806 of SEQ ID NO: 1564049
aguaauuaugggugaggac

SEQ ID NO: 1851394 - RNA, 19 nt, Artificial Sequence
  Description of Artificial Sequence: Synthetic oligonucleotide
  Antisense strand to SEQ ID NO: 1851393
guccucacccauaauuacu

SEQ ID NO: 1851395 - RNA, 19 nt, Artificial Sequence
  Description of Artificial Sequence: Synthetic oligonucleotide
  Sense strand starting at position 2928 of SEQ ID NO: 1564049
gaaaguuguugaucuuggu

SEQ ID NO: 1851396 - RNA, 19 nt, Artificial Sequence
  Description of Artificial Sequence: Synthetic oligonucleotide
  Antisense strand to SEQ ID NO: 1851395
accaagaucaacaacuuuc

SEQ ID NO: 1851397 - RNA, 19 nt, Artificial Sequence
  Description of Artificial Sequence: Synthetic oligonucleotide
  Sense strand starting at position 3097 of SEQ ID NO: 1564049
uguuguuugcuaguguacu

SEQ ID NO: 1851398 - RNA, 19 nt, Artificial Sequence
  Description of Artificial Sequence: Synthetic oligonucleotide
  Antisense strand to SEQ ID NO: 1851397
aguacacuagcaaacaaca

SEQ ID NO: 1851399 - RNA, 19 nt, Artificial Sequence
  Description of Artificial Sequence: Synthetic oligonucleotide
  Sense strand starting at position 3108 of SEQ ID NO: 1564049
aguguacucucauuaagca

SEQ ID NO: 1851400 - RNA, 19 nt, Artificial Sequence
  Description of Artificial Sequence: Synthetic oligonucleotide
  Antisense strand to SEQ ID NO: 1851399
ugcuuaaugagaguacacu

SEQ ID NO: 1851401 - RNA, 19 nt, Artificial Sequence
  Description of Artificial Sequence: Synthetic oligonucleotide
  Sense strand starting at position 3109 of SEQ ID NO: 1564049
guguacucucauuaagcaa

SEQ ID NO: 1851402 - RNA, 19 nt, Artificial Sequence
  Description of Artificial Sequence: Synthetic oligonucleotide
  Antisense strand to SEQ ID NO: 1851401
uugcuuaaugagaguacac

SEQ ID NO: 1851403 - RNA, 19 nt, Artificial Sequence
  Description of Artificial Sequence: Synthetic oligonucleotide
  Sense strand starting at position 3120 of SEQ ID NO: 1564049
uuaagcaaugaggguauaa

SEQ ID NO: 1851404 - RNA, 19 nt, Artificial Sequence
  Description of Artificial Sequence: Synthetic oligonucleotide
  Antisense strand to SEQ ID NO: 1851403
uuauacccucauugcuuaa

SEQ ID NO: 1851405 - RNA, 19 nt, Artificial Sequence
  Description of Artificial Sequence: Synthetic oligonucleotide
  Sense strand starting at position 3172 of SEQ ID NO: 1564049
gagcuaaggcucugaaaug

SEQ ID NO: 1851406 - RNA, 19 nt, Artificial Sequence
  Description of Artificial Sequence: Synthetic oligonucleotide
  Antisense strand to SEQ ID NO: 1851405
cauuucagagccuuagcuc

SEQ ID NO: 1851407 - RNA, 19 nt, Artificial Sequence
  Description of Artificial Sequence: Synthetic oligonucleotide
  Sense strand starting at position 3322 of SEQ ID NO: 1564049
ugagguauuacagguaaag

SEQ ID NO: 1851408 - RNA, 19 nt, Artificial Sequence
  Description of Artificial Sequence: Synthetic oligonucleotide
  Antisense strand to SEQ ID NO: 1851407
cuuuaccuguaauaccuca

SEQ ID NO: 1851409 - RNA, 19 nt, Artificial Sequence
  Description of Artificial Sequence: Synthetic oligonucleotide
  Sense strand starting at position 3324 of SEQ ID NO: 1564049
agguauuacagguaaagug

SEQ ID NO: 1851410 - RNA, 19 nt, Artificial Sequence
  Description of Artificial Sequence: Synthetic oligonucleotide
  Antisense strand to SEQ ID NO: 1851409
cacuuuaccuguaauaccu

SEQ ID NO: 1851411 - RNA, 19 nt, Artificial Sequence
  Description of Artificial Sequence: Synthetic oligonucleotide
  Sense strand starting at position 3465 of SEQ ID NO: 1564049
gcucaaauaucugcaagug

SEQ ID NO: 1851412 - RNA, 19 nt, Artificial Sequence
  Description of Artificial Sequence: Synthetic oligonucleotide
  Antisense strand to SEQ ID NO: 1851411
cacuugcagauauuugagc

SEQ ID NO: 1851413 - RNA, 19 nt, Artificial Sequence
  Description of Artificial Sequence: Synthetic oligonucleotide
  Sense strand starting at position 13 of SEQ ID NO: 1564050
ucuguuucccagugaagga

SEQ ID NO: 1851414 - RNA, 19 nt, Artificial Sequence
  Description of Artificial Sequence: Synthetic oligonucleotide
  Antisense strand to SEQ ID NO: 1851413
uccuucacugggaaacaga

SEQ ID NO: 1851415 - RNA, 19 nt, Artificial Sequence
  Description of Artificial Sequence: Synthetic oligonucleotide
  Sense strand starting at position 140 of SEQ ID NO: 1564050
caggcaauguuaccagaaa

SEQ ID NO: 1851416 - RNA, 19 nt, Artificial Sequence
  Description of Artificial Sequence: Synthetic oligonucleotide
  Antisense strand to SEQ ID NO: 1851415
uuucugguaacauugccug

SEQ ID NO: 1851417 - RNA, 19 nt, Artificial Sequence
  Description of Artificial Sequence: Synthetic oligonucleotide
  Sense strand starting at position 327 of SEQ ID NO: 1564050
uuaugaaucuaguugagaa

SEQ ID NO: 1851418 - RNA, 19 nt, Artificial Sequence
  Description of Artificial Sequence: Synthetic oligonucleotide
  Antisense strand to SEQ ID NO: 1851417
uucucaacuagauucauaa

SEQ ID NO: 1851419 - RNA, 19 nt, Artificial Sequence
  Description of Artificial Sequence: Synthetic oligonucleotide
  Sense strand starting at position 422 of SEQ ID NO: 1564050
gaggacuuaucugugcaac

SEQ ID NO: 1851420 - RNA, 19 nt, Artificial Sequence
  Description of Artificial Sequence: Synthetic oligonucleotide
  Antisense strand to SEQ ID NO: 1851419
guugcacagauaaguccuc

SEQ ID NO: 1851421 - RNA, 19 nt, Artificial Sequence
  Description of Artificial Sequence: Synthetic oligonucleotide
  Sense strand starting at position 423 of SEQ ID NO: 1564050
aggacuuaucugugcaaca

SEQ ID NO: 1851422 - RNA, 19 nt, Artificial Sequence
  Description of Artificial Sequence: Synthetic oligonucleotide
  Antisense strand to SEQ ID NO: 1851421
uguugcacagauaaguccu

SEQ ID NO: 1851423 - RNA, 19 nt, Artificial Sequence
  Description of Artificial Sequence: Synthetic oligonucleotide
  Sense strand starting at position 424 of SEQ ID NO: 1564050
ggacuuaucugugcaacag

SEQ ID NO: 1851424 - RNA, 19 nt, Artificial Sequence
  Description of Artificial Sequence: Synthetic oligonucleotide
  Antisense strand to SEQ ID NO: 1851423
cuguugcacagauaagucc

SEQ ID NO: 1851425 - RNA, 19 nt, Artificial Sequence
  Description of Artificial Sequence: Synthetic oligonucleotide
  Sense strand starting at position 425 of SEQ ID NO: 1564050
gacuuaucugugcaacaga

SEQ ID NO: 1851426 - RNA, 19 nt, Artificial Sequence
  Description of Artificial Sequence: Synthetic oligonucleotide
  Antisense strand to SEQ ID NO: 1851425
ucuguugcacagauaaguc

SEQ ID NO: 1851427 - RNA, 19 nt, Artificial Sequence
  Description of Artificial Sequence: Synthetic oligonucleotide
  Sense strand starting at position 428 of SEQ ID NO: 1564050
uuaucugugcaacagauaa

SEQ ID NO: 1851428 - RNA, 19 nt, Artificial Sequence
  Description of Artificial Sequence: Synthetic oligonucleotide
  Antisense strand to SEQ ID NO: 1851427
uuaucuguugcacagauaa

SEQ ID NO: 1851429 - RNA, 19 nt, Artificial Sequence
  Description of Artificial Sequence: Synthetic oligonucleotide
  Sense strand starting at position 471 of SEQ ID NO: 1564050
gugcucuauuuacccgaga

SEQ ID NO: 1851430 - RNA, 19 nt, Artificial Sequence
  Description of Artificial Sequence: Synthetic oligonucleotide
  Antisense strand to SEQ ID NO: 1851429
ucucggguaaauagagcac

SEQ ID NO: 1851431 - RNA, 19 nt, Artificial Sequence
  Description of Artificial Sequence: Synthetic oligonucleotide
  Sense strand starting at position 472 of SEQ ID NO: 1564050
ugcucuauuuacccgagau

SEQ ID NO: 1851432 - RNA, 19 nt, Artificial Sequence
  Description of Artificial Sequence: Synthetic oligonucleotide
  Antisense strand to SEQ ID NO: 1851431
aucucggguaaauagagca

SEQ ID NO: 1851433 - RNA, 19 nt, Artificial Sequence
  Description of Artificial Sequence: Synthetic oligonucleotide
  Sense strand starting at position 517 of SEQ ID NO: 1564050
guuaaucaauacuuguuga

SEQ ID NO: 1851434 - RNA, 19 nt, Artificial Sequence
  Description of Artificial Sequence: Synthetic oligonucleotide
  Antisense strand to SEQ ID NO: 1851433
ucaacaaguauugauuaac

SEQ ID NO: 1851435 - RNA, 19 nt, Artificial Sequence
  Description of Artificial Sequence: Synthetic oligonucleotide
  Sense strand starting at position 530 of SEQ ID NO: 1564050
uguugaauugagcaagcaa

SEQ ID NO: 1851436 - RNA, 19 nt, Artificial Sequence
  Description of Artificial Sequence: Synthetic oligonucleotide
  Antisense strand to SEQ ID NO: 1851435
uugcuugcucaauucaaca

SEQ ID NO: 1851437 - RNA, 19 nt, Artificial Sequence
  Description of Artificial Sequence: Synthetic oligonucleotide
  Sense strand starting at position 655 of SEQ ID NO: 1564050
uuuacuacgcucuauagaa

SEQ ID NO: 1851438 - RNA, 19 nt, Artificial Sequence
  Description of Artificial Sequence: Synthetic oligonucleotide
  Antisense strand to SEQ ID NO: 1851437
uucuauagagcguaguaaa

SEQ ID NO: 1851439 - RNA, 19 nt, Artificial Sequence
  Description of Artificial Sequence: Synthetic oligonucleotide
  Sense strand starting at position 671 of SEQ ID NO: 1564050
gaaacaacccgauagucuu

SEQ ID NO: 1851440 - RNA, 19 nt, Artificial Sequence
  Description of Artificial Sequence: Synthetic oligonucleotide
  Antisense strand to SEQ ID NO: 1851439
aagacuaucggguuguuuc

SEQ ID NO: 1851441 - RNA, 19 nt, Artificial Sequence
  Description of Artificial Sequence: Synthetic oligonucleotide
  Sense strand starting at position 822 of SEQ ID NO: 1564050
uugguuugguuaccugaaa

SEQ ID NO: 1851442 - RNA, 19 nt, Artificial Sequence
  Description of Artificial Sequence: Synthetic oligonucleotide
  Antisense strand to SEQ ID NO: 1851441
uuucagguaaccaaaccaa

SEQ ID NO: 1851443 - RNA, 19 nt, Artificial Sequence
  Description of Artificial Sequence: Synthetic oligonucleotide
  Sense strand starting at position 846 of SEQ ID NO: 1564050
guugauuaaccaggcuaua

SEQ ID NO: 1851444 - RNA, 19 nt, Artificial Sequence
  Description of Artificial Sequence: Synthetic oligonucleotide
  Antisense strand to SEQ ID NO: 1851443
uauagccugguuaaucaac

SEQ ID NO: 1851445 - RNA, 19 nt, Artificial Sequence
  Description of Artificial Sequence: Synthetic oligonucleotide
  Sense strand starting at position 898 of SEQ ID NO: 1564050
gagaucucucauggaggca

SEQ ID NO: 1851446 - RNA, 19 nt, Artificial Sequence
  Description of Artificial Sequence: Synthetic oligonucleotide
  Antisense strand to SEQ ID NO: 1851445
ugccuccaugagagaucuc

SEQ ID NO: 1851447 - RNA, 19 nt, Artificial Sequence
  Description of Artificial Sequence: Synthetic oligonucleotide
  Sense strand starting at position 977 of SEQ ID NO: 1564050
aucucuuugcgguagaaau

SEQ ID NO: 1851448 - RNA, 19 nt, Artificial Sequence
  Description of Artificial Sequence: Synthetic oligonucleotide
  Antisense strand to SEQ ID NO: 1851447
auuucuaccgcaaagagau

SEQ ID NO: 1851449 - RNA, 19 nt, Artificial Sequence
  Description of Artificial Sequence: Synthetic oligonucleotide
  Sense strand starting at position 979 of SEQ ID NO: 1564050
cucuuugcgguagaaaucu

SEQ ID NO: 1851450 - RNA, 19 nt, Artificial Sequence
  Description of Artificial Sequence: Synthetic oligonucleotide
  Antisense strand to SEQ ID NO: 1851449
agauuucuaccgcaaagag

SEQ ID NO: 1851451 - RNA, 19 nt, Artificial Sequence
  Description of Artificial Sequence: Synthetic oligonucleotide
  Sense strand starting at position 1093 of SEQ ID NO: 1564050
cuuguauucccucaugagu

SEQ ID NO: 1851452 - RNA, 19 nt, Artificial Sequence
  Description of Artificial Sequence: Synthetic oligonucleotide
  Antisense strand to SEQ ID NO: 1851451
acucaugagggaauacaag

SEQ ID NO: 1851453 - RNA, 19 nt, Artificial Sequence
  Description of Artificial Sequence: Synthetic oligonucleotide
  Sense strand starting at position 2310 of SEQ ID NO: 1564050
gaaccugcgggcuaauaau

SEQ ID NO: 1851454 - RNA, 19 nt, Artificial Sequence
  Description of Artificial Sequence: Synthetic oligonucleotide
  Antisense strand to SEQ ID NO: 1851453
auuauuagcccgcagguuc

SEQ ID NO: 1851455 - RNA, 19 nt, Artificial Sequence
  Description of Artificial Sequence: Synthetic oligonucleotide
  Sense strand starting at position 2698 of SEQ ID NO: 1564050
uuugauuggaaacgguuua

SEQ ID NO: 1851456 - RNA, 19 nt, Artificial Sequence
  Description of Artificial Sequence: Synthetic oligonucleotide
  Antisense strand to SEQ ID NO: 1851455
uaaaccguuuccaaucaaa

SEQ ID NO: 1851457 - RNA, 19 nt, Artificial Sequence
  Description of Artificial Sequence: Synthetic oligonucleotide
  Sense strand starting at position 2709 of SEQ ID NO: 1564050
acgguuuaggccuaaagac

SEQ ID NO: 1851458 - RNA, 19 nt, Artificial Sequence
  Description of Artificial Sequence: Synthetic oligonucleotide
  Antisense strand to SEQ ID NO: 1851457
gucuuuaggccuaaaccgu

SEQ ID NO: 1851459 - RNA, 19 nt, Artificial Sequence
  Description of Artificial Sequence: Synthetic oligonucleotide
  Sense strand starting at position 2774 of SEQ ID NO: 1564050
cucuuacaugcugaaguuu

SEQ ID NO: 1851460 - RNA, 19 nt, Artificial Sequence
  Description of Artificial Sequence: Synthetic oligonucleotide
  Antisense strand to SEQ ID NO: 1851459
aaacuucagcauguaagag

SEQ ID NO: 1851461 - RNA, 19 nt, Artificial Sequence
  Description of Artificial Sequence: Synthetic oligonucleotide
  Sense strand starting at position 2809 of SEQ ID NO: 1564050
cuauguagucuuugaaauu

SEQ ID NO: 1851462 - RNA, 19 nt, Artificial Sequence
  Description of Artificial Sequence: Synthetic oligonucleotide
  Antisense strand to SEQ ID NO: 1851461
aauuucaaagacuacauag

SEQ ID NO: 1851463 - RNA, 19 nt, Artificial Sequence
  Description of Artificial Sequence: Synthetic oligonucleotide
  Sense strand starting at position 2851 of SEQ ID NO: 1564050
guuagauucuaaguuucua

SEQ ID NO: 1851464 - RNA, 19 nt, Artificial Sequence
  Description of Artificial Sequence: Synthetic oligonucleotide
  Antisense strand to SEQ ID NO: 1851463
uagaaacuuagaaucuaac

SEQ ID NO: 1851465 - RNA, 19 nt, Artificial Sequence
  Description of Artificial Sequence: Synthetic oligonucleotide
  Sense strand starting at position 2885 of SEQ ID NO: 1564050
guuacuuccgacuaucuuu

SEQ ID NO: 1851466 - RNA, 19 nt, Artificial Sequence
  Description of Artificial Sequence: Synthetic oligonucleotide
  Antisense strand to SEQ ID NO: 1851465
aaagauagucggaaguaac

SEQ ID NO: 1851467 - RNA, 19 nt, Artificial Sequence
  Description of Artificial Sequence: Synthetic oligonucleotide
  Sense strand starting at position 2961 of SEQ ID NO: 1564050
aggagucuaggcuguauuu

SEQ ID NO: 1851468 - RNA, 19 nt, Artificial Sequence
  Description of Artificial Sequence: Synthetic oligonucleotide
  Antisense strand to SEQ ID NO: 1851467
aaauacagccuagacuccu

SEQ ID NO: 1851469 - RNA, 19 nt, Artificial Sequence
  Description of Artificial Sequence: Synthetic oligonucleotide
  Sense strand starting at position 3004 of SEQ ID NO: 1564050
ucaagcauguacccagaaa

SEQ ID NO: 1851470 - RNA, 19 nt, Artificial Sequence
  Description of Artificial Sequence: Synthetic oligonucleotide
  Antisense strand to SEQ ID NO: 1851469
uuucuggguacaugcuuga

SEQ ID NO: 1851471 - RNA, 19 nt, Artificial Sequence
  Description of Artificial Sequence: Synthetic oligonucleotide
  Sense strand starting at position 3015 of SEQ ID NO: 1564050
cccagaaaccugcgagacu

SEQ ID NO: 1851472 - RNA, 19 nt, Artificial Sequence
  Description of Artificial Sequence: Synthetic oligonucleotide
  Antisense strand to SEQ ID NO: 1851471
agucucgcagguuucuggg

SEQ ID NO: 1851473 - RNA, 19 nt, Artificial Sequence
  Description of Artificial Sequence: Synthetic oligonucleotide
  Sense strand starting at position 3120 of SEQ ID NO: 1564050
gccuaaauuguuggacauu

SEQ ID NO: 1851474 - RNA, 19 nt, Artificial Sequence
  Description of Artificial Sequence: Synthetic oligonucleotide
  Antisense strand to SEQ ID NO: 1851473
aauguccaacaauuuaggc

SEQ ID NO: 1851475 - RNA, 19 nt, Artificial Sequence
  Description of Artificial Sequence: Synthetic oligonucleotide
  Sense strand starting at position 3174 of SEQ ID NO: 1564050
cugucccucccugaguauu

SEQ ID NO: 1851476 - RNA, 19 nt, Artificial Sequence
  Description of Artificial Sequence: Synthetic oligonucleotide
  Antisense strand to SEQ ID NO: 1851475
aauacucagggagggacag

SEQ ID NO: 1851477 - RNA, 19 nt, Artificial Sequence
  Description of Artificial Sequence: Synthetic oligonucleotide
  Sense strand starting at position 3491 of SEQ ID NO: 1564050
uguaacugagucuggaaau

SEQ ID NO: 1851478 - RNA, 19 nt, Artificial Sequence
  Description of Artificial Sequence: Synthetic oligonucleotide
  Antisense strand to SEQ ID NO: 1851477
auuuccagacucaguuaca

SEQ ID NO: 1851479 - RNA, 19 nt, Artificial Sequence
  Description of Artificial Sequence: Synthetic oligonucleotide
  Sense strand starting at position 3504 of SEQ ID NO: 1564050
ggaaauuccucuucugauc

SEQ ID NO: 1851480 - RNA, 19 nt, Artificial Sequence
  Description of Artificial Sequence: Synthetic oligonucleotide
  Antisense strand to SEQ ID NO: 1851479
gaucagaagaggaauuucc

SEQ ID NO: 1851481 - RNA, 19 nt, Artificial Sequence
  Description of Artificial Sequence: Synthetic oligonucleotide
  Sense strand starting at position 3635 of SEQ ID NO: 1564050
guuggucaugcuuaggaga

SEQ ID NO: 1851482 - RNA, 19 nt, Artificial Sequence
  Description of Artificial Sequence: Synthetic oligonucleotide
  Antisense strand to SEQ ID NO: 1851481
ucuccuaagcaugaccaac

SEQ ID NO: 1851483 - RNA, 19 nt, Artificial Sequence
  Description of Artificial Sequence: Synthetic oligonucleotide
  Sense strand starting at position 3648 of SEQ ID NO: 1564050
aggagagaguucuuuguuu

SEQ ID NO: 1851484 - RNA, 19 nt, Artificial Sequence
  Description of Artificial Sequence: Synthetic oligonucleotide
  Antisense strand to SEQ ID NO: 1851483
aaacaaagaacucucuccu

SEQ ID NO: 1851485 - RNA, 19 nt, Artificial Sequence
  Description of Artificial Sequence: Synthetic oligonucleotide
  Sense strand starting at position 3773 of SEQ ID NO: 1564050
cuuucuuaggaaggguauu

SEQ ID NO: 1851486 - RNA, 19 nt, Artificial Sequence
  Description of Artificial Sequence: Synthetic oligonucleotide
  Antisense strand to SEQ ID NO: 1851485
aauacccuuccuaagaaag

SEQ ID NO: 1851487 - RNA, 19 nt, Artificial Sequence
  Description of Artificial Sequence: Synthetic oligonucleotide
  Sense strand starting at position 3791 of SEQ ID NO: 1564050
ucauuacagcauugauuag

SEQ ID NO: 1851488 - RNA, 19 nt, Artificial Sequence
  Description of Artificial Sequence: Synthetic oligonucleotide
  Antisense strand to SEQ ID NO: 1851487
cuaaucaaugcuguaauga

SEQ ID NO: 1851489 - RNA, 19 nt, Artificial Sequence
  Description of Artificial Sequence: Synthetic oligonucleotide
  Sense strand starting at position 3946 of SEQ ID NO: 1564050
auaggauauuaugcagcua

SEQ ID NO: 1851490 - RNA, 19 nt, Artificial Sequence
  Description of Artificial Sequence: Synthetic oligonucleotide
  Antisense strand to SEQ ID NO: 1851489
uagcugcauaauauccuau

SEQ ID NO: 1851491 - RNA, 19 nt, Artificial Sequence
  Description of Artificial Sequence: Synthetic oligonucleotide
  Sense strand starting at position 3980 of SEQ ID NO: 1564050
gcagauuuguaaguguuua

SEQ ID NO: 1851492 - RNA, 19 nt, Artificial Sequence
  Description of Artificial Sequence: Synthetic oligonucleotide
  Antisense strand to SEQ ID NO: 1851491
uaaacacuuacaaaucugc

SEQ ID NO: 1851493 - RNA, 19 nt, Artificial Sequence
  Description of Artificial Sequence: Synthetic oligonucleotide
  Sense strand starting at position 269 of SEQ ID NO: 1564051
cacucuguuggcuaagcua

SEQ ID NO: 1851494 - RNA, 19 nt, Artificial Sequence
  Description of Artificial Sequence: Synthetic oligonucleotide
  Antisense strand to SEQ ID NO: 1851493
uagcuuagccaacagagug

SEQ ID NO: 1851495 - RNA, 19 nt, Artificial Sequence
  Description of Artificial Sequence: Synthetic oligonucleotide
  Sense strand starting at position 442 of SEQ ID NO: 1564051
ggugcaagugaaugagaaa

SEQ ID NO: 1851496 - RNA, 19 nt, Artificial Sequence
  Description of Artificial Sequence: Synthetic oligonucleotide
  Antisense strand to SEQ ID NO: 1851495
uuucucauucacuugcacc

SEQ ID NO: 1851497 - RNA, 19 nt, Artificial Sequence
  Description of Artificial Sequence: Synthetic oligonucleotide
  Sense strand starting at position 575 of SEQ ID NO: 1564051
uuaugaggauuacaacaaa

SEQ ID NO: 1851498 - RNA, 19 nt, Artificial Sequence
  Description of Artificial Sequence: Synthetic oligonucleotide
  Antisense strand to SEQ ID NO: 1851497
uuuguuguaauccucauaa

SEQ ID NO: 1851499 - RNA, 19 nt, Artificial Sequence
  Description of Artificial Sequence: Synthetic oligonucleotide
  Sense strand starting at position 599 of SEQ ID NO: 1564051
ggacguagauucuucagau

SEQ ID NO: 1851500 - RNA, 19 nt, Artificial Sequence
  Description of Artificial Sequence: Synthetic oligonucleotide
  Antisense strand to SEQ ID NO: 1851499
aucugaagaaucuacgucc

SEQ ID NO: 1851501 - RNA, 19 nt, Artificial Sequence
  Description of Artificial Sequence: Synthetic oligonucleotide
  Sense strand starting at position 633 of SEQ ID NO: 1564051
cugagugcucaauaaaugc

SEQ ID NO: 1851502 - RNA, 19 nt, Artificial Sequence
  Description of Artificial Sequence: Synthetic oligonucleotide
  Antisense strand to SEQ ID NO: 1851501
gcauuuauugagcacucag

SEQ ID NO: 1851503 - RNA, 19 nt, Artificial Sequence
  Description of Artificial Sequence: Synthetic oligonucleotide
  Sense strand starting at position 720 of SEQ ID NO: 1564051
cucaaaguguauuccauaa

SEQ ID NO: 1851504 - RNA, 19 nt, Artificial Sequence
  Description of Artificial Sequence: Synthetic oligonucleotide
  Antisense strand to SEQ ID NO: 1851503
uuauggaauacacuuugag

SEQ ID NO: 1851505 - RNA, 19 nt, Artificial Sequence
  Description of Artificial Sequence: Synthetic oligonucleotide
  Sense strand starting at position 730 of SEQ ID NO: 1564051
auuccauaagccgauaaca

SEQ ID NO: 1851506 - RNA, 19 nt, Artificial Sequence
  Description of Artificial Sequence: Synthetic oligonucleotide
  Antisense strand to SEQ ID NO: 1851505
uguuaucggcuuauggaau

SEQ ID NO: 1851507 - RNA, 19 nt, Artificial Sequence
  Description of Artificial Sequence: Synthetic oligonucleotide
  Sense strand starting at position 756 of SEQ ID NO: 1564051
uuuggucaauuguugacaa

SEQ ID NO: 1851508 - RNA, 19 nt, Artificial Sequence
  Description of Artificial Sequence: Synthetic oligonucleotide
  Antisense strand to SEQ ID NO: 1851507
uugucaacaauugaccaaa

SEQ ID NO: 1851509 - RNA, 19 nt, Artificial Sequence
  Description of Artificial Sequence: Synthetic oligonucleotide
  Sense strand starting at position 802 of SEQ ID NO: 1564051
guauuuaucuuggaugacu

SEQ ID NO: 1851510 - RNA, 19 nt, Artificial Sequence
  Description of Artificial Sequence: Synthetic oligonucleotide
  Antisense strand to SEQ ID NO: 1851509
agucauccaagauaaauac

SEQ ID NO: 1851511 - RNA, 19 nt, Artificial Sequence
  Description of Artificial Sequence: Synthetic oligonucleotide
  Sense strand starting at position 819 of SEQ ID NO: 1564051
cuguuacguguguucacuu

SEQ ID NO: 1851512 - RNA, 19 nt, Artificial Sequence
  Description of Artificial Sequence: Synthetic oligonucleotide
  Antisense strand to SEQ ID NO: 1851511
aagugaacacacguaacag

SEQ ID NO: 1851513 - RNA, 19 nt, Artificial Sequence
  Description of Artificial Sequence: Synthetic oligonucleotide
  Sense strand starting at position 863 of SEQ ID NO: 1564051
cacuuaagaugugugaacu

SEQ ID NO: 1851514 - RNA, 19 nt, Artificial Sequence
  Description of Artificial Sequence: Synthetic oligonucleotide
  Antisense strand to SEQ ID NO: 1851513
aguucacacaucuuaagug

SEQ ID NO: 1851515 - RNA, 19 nt, Artificial Sequence
  Description of Artificial Sequence: Synthetic oligonucleotide
  Sense strand starting at position 864 of SEQ ID NO: 1564051
acuuaagaugugugaacuu

SEQ ID NO: 1851516 - RNA, 19 nt, Artificial Sequence
  Description of Artificial Sequence: Synthetic oligonucleotide
  Antisense strand to SEQ ID NO: 1851515
aaguucacacaucuuaagu

SEQ ID NO: 1851517 - RNA, 19 nt, Artificial Sequence
  Description of Artificial Sequence: Synthetic oligonucleotide
  Sense strand starting at position 927 of SEQ ID NO: 1564051
uuaguuugggcccagaaag

SEQ ID NO: 1851518 - RNA, 19 nt, Artificial Sequence
  Description of Artificial Sequence: Synthetic oligonucleotide
  Antisense strand to SEQ ID NO: 1851517
cuuucugggcccaaacuaa

SEQ ID NO: 1851519 - RNA, 19 nt, Artificial Sequence
  Description of Artificial Sequence: Synthetic oligonucleotide
  Sense strand starting at position 1206 of SEQ ID NO: 1564051
gccagaaacccuuacuuag

SEQ ID NO: 1851520 - RNA, 19 nt, Artificial Sequence
  Description of Artificial Sequence: Synthetic oligonucleotide
  Antisense strand to SEQ ID NO: 1851519
cuaaguaaggguuucuggc

SEQ ID NO: 1851521 - RNA, 19 nt, Artificial Sequence
  Description of Artificial Sequence: Synthetic oligonucleotide
  Sense strand starting at position 1237 of SEQ ID NO: 1564051
gccacugaacgguaagacu

SEQ ID NO: 1851522 - RNA, 19 nt, Artificial Sequence
  Description of Artificial Sequence: Synthetic oligonucleotide
  Antisense strand to SEQ ID NO: 1851521
agucuuaccguucaguggc

SEQ ID NO: 1851523 - RNA, 19 nt, Artificial Sequence
  Description of Artificial Sequence: Synthetic oligonucleotide
  Sense strand starting at position 1263 of SEQ ID NO: 1564051
ugaagagcaugggucauaa

SEQ ID NO: 1851524 - RNA, 19 nt, Artificial Sequence
  Description of Artificial Sequence: Synthetic oligonucleotide
  Antisense strand to SEQ ID NO: 1851523
uuaugacccaugcucuuca

SEQ ID NO: 1851525 - RNA, 19 nt, Artificial Sequence
  Description of Artificial Sequence: Synthetic oligonucleotide
  Sense strand starting at position 1273 of SEQ ID NO: 1564051
gggucauaaccaggucaua

SEQ ID NO: 1851526 - RNA, 19 nt, Artificial Sequence
  Description of Artificial Sequence: Synthetic oligonucleotide
  Antisense strand to SEQ ID NO: 1851525
uaugaccugguuaugaccc

SEQ ID NO: 1851527 - RNA, 19 nt, Artificial Sequence
  Description of Artificial Sequence: Synthetic oligonucleotide
  Sense strand starting at position 1286 of SEQ ID NO: 1564051
gucauauagaaacggugua

SEQ ID NO: 1851528 - RNA, 19 nt, Artificial Sequence
  Description of Artificial Sequence: Synthetic oligonucleotide
  Antisense strand to SEQ ID NO: 1851527
uacaccguuucuauaugac

SEQ ID NO: 1851529 - RNA, 19 nt, Artificial Sequence
  Description of Artificial Sequence: Synthetic oligonucleotide
  Sense strand starting at position 1291 of SEQ ID NO: 1564051
auagaaacgguguauucuu

SEQ ID NO: 1851530 - RNA, 19 nt, Artificial Sequence
  Description of Artificial Sequence: Synthetic oligonucleotide
  Antisense strand to SEQ ID NO: 1851529
aagaauacaccguuucuau

SEQ ID NO: 1851531 - RNA, 19 nt, Artificial Sequence
  Description of Artificial Sequence: Synthetic oligonucleotide
  Sense strand starting at position 1299 of SEQ ID NO: 1564051
gguguauucuucuuccaga

SEQ ID NO: 1851532 - RNA, 19 nt, Artificial Sequence
  Description of Artificial Sequence: Synthetic oligonucleotide
  Antisense strand to SEQ ID NO: 1851531
ucuggaagaagaauacacc

SEQ ID NO: 1851533 - RNA, 19 nt, Artificial Sequence
  Description of Artificial Sequence: Synthetic oligonucleotide
  Sense strand starting at position 1388 of SEQ ID NO: 1564051
acgauuaaguggcugagau

SEQ ID NO: 1851534 - RNA, 19 nt, Artificial Sequence
  Description of Artificial Sequence: Synthetic oligonucleotide
  Antisense strand to SEQ ID NO: 1851533
aucucagccacuuaaucgu

SEQ ID NO: 1851535 - RNA, 19 nt, Artificial Sequence
  Description of Artificial Sequence: Synthetic oligonucleotide
  Sense strand starting at position 1389 of SEQ ID NO: 1564051
cgauuaaguggcugagaua

SEQ ID NO: 1851536 - RNA, 19 nt, Artificial Sequence
  Description of Artificial Sequence: Synthetic oligonucleotide
  Antisense strand to SEQ ID NO: 1851535
uaucucagccacuuaaucg

SEQ ID NO: 1851537 - RNA, 19 nt, Artificial Sequence
  Description of Artificial Sequence: Synthetic oligonucleotide
  Sense strand starting at position 1575 of SEQ ID NO: 1564051
caccauguuggguagucaa

SEQ ID NO: 1851538 - RNA, 19 nt, Artificial Sequence
  Description of Artificial Sequence: Synthetic oligonucleotide
  Antisense strand to SEQ ID NO: 1851537
uugacuacccaacauggug

SEQ ID NO: 1851539 - RNA, 19 nt, Artificial Sequence
  Description of Artificial Sequence: Synthetic oligonucleotide
  Sense strand starting at position 1578 of SEQ ID NO: 1564051
cauguuggguagucaauua

SEQ ID NO: 1851540 - RNA, 19 nt, Artificial Sequence
  Description of Artificial Sequence: Synthetic oligonucleotide
  Antisense strand to SEQ ID NO: 1851539
uaauugacuacccaacaug

SEQ ID NO: 1851541 - RNA, 19 nt, Artificial Sequence
  Description of Artificial Sequence: Synthetic oligonucleotide
  Sense strand starting at position 1606 of SEQ ID NO: 1564051
ggaaauuguuuacccuguu

SEQ ID NO: 1851542 - RNA, 19 nt, Artificial Sequence
  Description of Artificial Sequence: Synthetic oligonucleotide
  Antisense strand to SEQ ID NO: 1851541
aacaggguaaacaauuucc

SEQ ID NO: 1851543 - RNA, 19 nt, Artificial Sequence
  Description of Artificial Sequence: Synthetic oligonucleotide
  Sense strand starting at position 2235 of SEQ ID NO: 1564051
gacuccucucguuagccaa

SEQ ID NO: 1851544 - RNA, 19 nt, Artificial Sequence
  Description of Artificial Sequence: Synthetic oligonucleotide
  Antisense strand to SEQ ID NO: 1851543
uuggcuaacgagaggaguc

SEQ ID NO: 1851545 - RNA, 19 nt, Artificial Sequence
  Description of Artificial Sequence: Synthetic oligonucleotide
  Sense strand starting at position 2942 of SEQ ID NO: 1564051
guuccuguucucgagagau

SEQ ID NO: 1851546 - RNA, 19 nt, Artificial Sequence
  Description of Artificial Sequence: Synthetic oligonucleotide
  Antisense strand to SEQ ID NO: 1851545
aucucucgagaacaggaac

SEQ ID NO: 1851547 - RNA, 19 nt, Artificial Sequence
  Description of Artificial Sequence: Synthetic oligonucleotide
  Sense strand starting at position 2944 of SEQ ID NO: 1564051
uccuguucucgagagauua

SEQ ID NO: 1851548 - RNA, 19 nt, Artificial Sequence
  Description of Artificial Sequence: Synthetic oligonucleotide
  Antisense strand to SEQ ID NO: 1851547
uaaucucucgagaacagga

SEQ ID NO: 1851549 - RNA, 19 nt, Artificial Sequence
  Description of Artificial Sequence: Synthetic oligonucleotide
  Sense strand starting at position 2946 of SEQ ID NO: 1564051
cuguucucgagagauuacu

SEQ ID NO: 1851550 - RNA, 19 nt, Artificial Sequence
  Description of Artificial Sequence: Synthetic oligonucleotide
  Antisense strand to SEQ ID NO: 1851549
aguaaucucucgagaacag

SEQ ID NO: 1851551 - RNA, 19 nt, Artificial Sequence
  Description of Artificial Sequence: Synthetic oligonucleotide
  Sense strand starting at position 2954 of SEQ ID NO: 1564051
gagagauuacugugccuuc

SEQ ID NO: 1851552 - RNA, 19 nt, Artificial Sequence
  Description of Artificial Sequence: Synthetic oligonucleotide
  Antisense strand to SEQ ID NO: 1851551
gaaggcacaguaaucucuc

SEQ ID NO: 1851553 - RNA, 19 nt, Artificial Sequence
  Description of Artificial Sequence: Synthetic oligonucleotide
  Sense strand starting at position 3015 of SEQ ID NO: 1564051
cugaaauguucuccuccag

SEQ ID NO: 1851554 - RNA, 19 nt, Artificial Sequence
  Description of Artificial Sequence: Synthetic oligonucleotide
  Antisense strand to SEQ ID NO: 1851553
cuggaggagaacauuucag

SEQ ID NO: 1851555 - RNA, 19 nt, Artificial Sequence
  Description of Artificial Sequence: Synthetic oligonucleotide
  Sense strand starting at position 3199 of SEQ ID NO: 1564051
gccgauuuacacuguuaca

SEQ ID NO: 1851556 - RNA, 19 nt, Artificial Sequence
  Description of Artificial Sequence: Synthetic oligonucleotide
  Antisense strand to SEQ ID NO: 1851555
uguaacaguguaaaucggc

SEQ ID NO: 1851557 - RNA, 19 nt, Artificial Sequence
  Description of Artificial Sequence: Synthetic oligonucleotide
  Sense strand starting at position 3232 of SEQ ID NO: 1564051
auguuuggguccuuaagau

SEQ ID NO: 1851558 - RNA, 19 nt, Artificial Sequence
  Description of Artificial Sequence: Synthetic oligonucleotide
  Antisense strand to SEQ ID NO: 1851557
aucuuaaggacccaaacau

SEQ ID NO: 1851559 - RNA, 19 nt, Artificial Sequence
  Description of Artificial Sequence: Synthetic oligonucleotide
  Sense strand starting at position 3770 of SEQ ID NO: 1564051
acauucccuucuguagaua

SEQ ID NO: 1851560 - RNA, 19 nt, Artificial Sequence
  Description of Artificial Sequence: Synthetic oligonucleotide
  Antisense strand to SEQ ID NO: 1851559
uaucuacagaagggaaugu

SEQ ID NO: 1851561 - RNA, 19 nt, Artificial Sequence
  Description of Artificial Sequence: Synthetic oligonucleotide
  Sense strand starting at position 3784 of SEQ ID NO: 1564051
agauauuuacuguguuguu

SEQ ID NO: 1851562 - RNA, 19 nt, Artificial Sequence
  Description of Artificial Sequence: Synthetic oligonucleotide
  Antisense strand to SEQ ID NO: 1851561
aacaacacaguaaauaucu

SEQ ID NO: 1851563 - RNA, 19 nt, Artificial Sequence
  Description of Artificial Sequence: Synthetic oligonucleotide
  Sense strand starting at position 3785 of SEQ ID NO: 1564051
gauauuuacuguguuguuu

SEQ ID NO: 1851564 - RNA, 19 nt, Artificial Sequence
  Description of Artificial Sequence: Synthetic oligonucleotide
  Antisense strand to SEQ ID NO: 1851563
aaacaacacaguaaauauc

SEQ ID NO: 1851565 - RNA, 19 nt, Artificial Sequence
  Description of Artificial Sequence: Synthetic oligonucleotide
  Sense strand starting at position 3796 of SEQ ID NO: 1564051
uguuguuuccgauacaaua

SEQ ID NO: 1851566 - RNA, 19 nt, Artificial Sequence
  Description of Artificial Sequence: Synthetic oligonucleotide
  Antisense strand to SEQ ID NO: 1851565
uauuguaucggaaacaaca

SEQ ID NO: 1851567 - RNA, 19 nt, Artificial Sequence
  Description of Artificial Sequence: Synthetic oligonucleotide
  Sense strand starting at position 3901 of SEQ ID NO: 1564051
gagaguuggaaggguguuu

SEQ ID NO: 1851568 - RNA, 19 nt, Artificial Sequence
  Description of Artificial Sequence: Synthetic oligonucleotide
  Antisense strand to SEQ ID NO: 1851567
aaacacccuuccaacucuc

SEQ ID NO: 1851569 - RNA, 19 nt, Artificial Sequence
  Description of Artificial Sequence: Synthetic oligonucleotide
  Sense strand starting at position 3943 of SEQ ID NO: 1564051
aggacauuaguuggcaaga

SEQ ID NO: 1851570 - RNA, 19 nt, Artificial Sequence
  Description of Artificial Sequence: Synthetic oligonucleotide
  Antisense strand to SEQ ID NO: 1851569
ucuugccaacuaauguccu

SEQ ID NO: 1851571 - RNA, 19 nt, Artificial Sequence
  Description of Artificial Sequence: Synthetic oligonucleotide
  Sense strand starting at position 3944 of SEQ ID NO: 1564051
ggacauuaguuggcaagac

SEQ ID NO: 1851572 - RNA, 19 nt, Artificial Sequence
  Description of Artificial Sequence: Synthetic oligonucleotide
  Antisense strand to SEQ ID NO: 1851571
gucuugccaacuaaugucc

SEQ ID NO: 1851573 - RNA, 19 nt, Artificial Sequence
  Description of Artificial Sequence: Synthetic oligonucleotide
  Sense strand starting at position 43 of SEQ ID NO: 1564052
ggacguagauucuucagau

SEQ ID NO: 1851574 - RNA, 19 nt, Artificial Sequence
  Description of Artificial Sequence: Synthetic oligonucleotide
  Antisense strand to SEQ ID NO: 1851573
aucugaagaaucuacgucc

SEQ ID NO: 1851575 - RNA, 19 nt, Artificial Sequence
  Description of Artificial Sequence: Synthetic oligonucleotide
  Sense strand starting at position 77 of SEQ ID NO: 1564052
cugagugcucaauaaaugc

SEQ ID NO: 1851576 - RNA, 19 nt, Artificial Sequence
  Description of Artificial Sequence: Synthetic oligonucleotide
  Antisense strand to SEQ ID NO: 1851575
gcauuuauugagcacucag

SEQ ID NO: 1851577 - RNA, 19 nt, Artificial Sequence
  Description of Artificial Sequence: Synthetic oligonucleotide
  Sense strand starting at position 164 of SEQ ID NO: 1564052
cucaaaguguauuccauaa

SEQ ID NO: 1851578 - RNA, 19 nt, Artificial Sequence
  Description of Artificial Sequence: Synthetic oligonucleotide
  Antisense strand to SEQ ID NO: 1851577
uuauggaauacacuuugag

SEQ ID NO: 1851579 - RNA, 19 nt, Artificial Sequence
  Description of Artificial Sequence: Synthetic oligonucleotide
  Sense strand starting at position 174 of SEQ ID NO: 1564052
auuccauaagccgauaaca

SEQ ID NO: 1851580 - RNA, 19 nt, Artificial Sequence
  Description of Artificial Sequence: Synthetic oligonucleotide
  Antisense strand to SEQ ID NO: 1851579
uguuaucggcuuauggaau

SEQ ID NO: 1851581 - RNA, 19 nt, Artificial Sequence
  Description of Artificial Sequence: Synthetic oligonucleotide
  Sense strand starting at position 200 of SEQ ID NO: 1564052
uuuggucaauuguugacaa

SEQ ID NO: 1851582 - RNA, 19 nt, Artificial Sequence
  Description of Artificial Sequence: Synthetic oligonucleotide
  Antisense strand to SEQ ID NO: 1851581
uugucaacaauugaccaaa

SEQ ID NO: 1851583 - RNA, 19 nt, Artificial Sequence
  Description of Artificial Sequence: Synthetic oligonucleotide
  Sense strand starting at position 263 of SEQ ID NO: 1564052
cuguuacguguguucacuu

SEQ ID NO: 1851584 - RNA, 19 nt, Artificial Sequence
  Description of Artificial Sequence: Synthetic oligonucleotide
  Antisense strand to SEQ ID NO: 1851583
aagugaacacacguaacag

SEQ ID NO: 1851585 - RNA, 19 nt, Artificial Sequence
  Description of Artificial Sequence: Synthetic oligonucleotide
  Sense strand starting at position 307 of SEQ ID NO: 1564052
cacuuaagaugugugaacu

SEQ ID NO: 1851586 - RNA, 19 nt, Artificial Sequence
  Description of Artificial Sequence: Synthetic oligonucleotide
  Antisense strand to SEQ ID NO: 1851585
aguucacacaucuuaagug

SEQ ID NO: 1851587 - RNA, 19 nt, Artificial Sequence
  Description of Artificial Sequence: Synthetic oligonucleotide
  Sense strand starting at position 308 of SEQ ID NO: 1564052
acuuaagaugugugaacuu

SEQ ID NO: 1851588 - RNA, 19 nt, Artificial Sequence
  Description of Artificial Sequence: Synthetic oligonucleotide
  Antisense strand to SEQ ID NO: 1851587
aaguucacacaucuuaagu

SEQ ID NO: 1851589 - RNA, 19 nt, Artificial Sequence
  Description of Artificial Sequence: Synthetic oligonucleotide
  Sense strand starting at position 371 of SEQ ID NO: 1564052
uuaguuugggcccagaaag

SEQ ID NO: 1851590 - RNA, 19 nt, Artificial Sequence
  Description of Artificial Sequence: Synthetic oligonucleotide
  Antisense strand to SEQ ID NO: 1851589
cuuucugggcccaaacuaa

SEQ ID NO: 1851591 - RNA, 19 nt, Artificial Sequence
  Description of Artificial Sequence: Synthetic oligonucleotide
  Sense strand starting at position 650 of SEQ ID NO: 1564052
gccagaaacccuuacuuag

SEQ ID NO: 1851592 - RNA, 19 nt, Artificial Sequence
  Description of Artificial Sequence: Synthetic oligonucleotide
  Antisense strand to SEQ ID NO: 1851591
cuaaguaaggguuucuggc

SEQ ID NO: 1851593 - RNA, 19 nt, Artificial Sequence
  Description of Artificial Sequence: Synthetic oligonucleotide
  Sense strand starting at position 681 of SEQ ID NO: 1564052
gccacugaacgguaagacu

SEQ ID NO: 1851594 - RNA, 19 nt, Artificial Sequence
  Description of Artificial Sequence: Synthetic oligonucleotide
  Antisense strand to SEQ ID NO: 1851593
agucuuaccguucaguggc

SEQ ID NO: 1851595 - RNA, 19 nt, Artificial Sequence
  Description of Artificial Sequence: Synthetic oligonucleotide
  Sense strand starting at position 707 of SEQ ID NO: 1564052
ugaagagcaugggucauaa

SEQ ID NO: 1851596 - RNA, 19 nt, Artificial Sequence
  Description of Artificial Sequence: Synthetic oligonucleotide
  Antisense strand to SEQ ID NO: 1851595
uuaugacccaugcucuuca

SEQ ID NO: 1851597 - RNA, 19 nt, Artificial Sequence
  Description of Artificial Sequence: Synthetic oligonucleotide
  Sense strand starting at position 717 of SEQ ID NO: 1564052
gggucauaaccaggucaua

SEQ ID NO: 1851598 - RNA, 19 nt, Artificial Sequence
  Description of Artificial Sequence: Synthetic oligonucleotide
  Antisense strand to SEQ ID NO: 1851597
uaugaccugguuaugaccc

SEQ ID NO: 1851599 - RNA, 19 nt, Artificial Sequence
  Description of Artificial Sequence: Synthetic oligonucleotide
  Sense strand starting at position 735 of SEQ ID NO: 1564052
auagaaacgguguauucuu

SEQ ID NO: 1851600 - RNA, 19 nt, Artificial Sequence
  Description of Artificial Sequence: Synthetic oligonucleotide
  Antisense strand to SEQ ID NO: 1851599
aagaauacaccguuucuau

SEQ ID NO: 1851601 - RNA, 19 nt, Artificial Sequence
  Description of Artificial Sequence: Synthetic oligonucleotide
  Sense strand starting at position 832 of SEQ ID NO: 1564052
acgauuaaguggcugagau

SEQ ID NO: 1851602 - RNA, 19 nt, Artificial Sequence
  Description of Artificial Sequence: Synthetic oligonucleotide
  Antisense strand to SEQ ID NO: 1851601
aucucagccacuuaaucgu

SEQ ID NO: 1851603 - RNA, 19 nt, Artificial Sequence
  Description of Artificial Sequence: Synthetic oligonucleotide
  Sense strand starting at position 833 of SEQ ID NO: 1564052
cgauuaaguggcugagaua

SEQ ID NO: 1851604 - RNA, 19 nt, Artificial Sequence
  Description of Artificial Sequence: Synthetic oligonucleotide
  Antisense strand to SEQ ID NO: 1851603
uaucucagccacuuaaucg

SEQ ID NO: 1851605 - RNA, 19 nt, Artificial Sequence
  Description of Artificial Sequence: Synthetic oligonucleotide
  Sense strand starting at position 1019 of SEQ ID NO: 1564052
caccauguuggguagucaa

SEQ ID NO: 1851606 - RNA, 19 nt, Artificial Sequence
  Description of Artificial Sequence: Synthetic oligonucleotide
  Antisense strand to SEQ ID NO: 1851605
uugacuacccaacauggug

SEQ ID NO: 1851607 - RNA, 19 nt, Artificial Sequence
  Description of Artificial Sequence: Synthetic oligonucleotide
  Sense strand starting at position 1050 of SEQ ID NO: 1564052
ggaaauuguuuacccuguu

SEQ ID NO: 1851608 - RNA, 19 nt, Artificial Sequence
  Description of Artificial Sequence: Synthetic oligonucleotide
  Antisense strand to SEQ ID NO: 1851607
aacaggguaaacaauuucc

SEQ ID NO: 1851609 - RNA, 19 nt, Artificial Sequence
  Description of Artificial Sequence: Synthetic oligonucleotide
  Sense strand starting at position 2386 of SEQ ID NO: 1564052
guuccuguucucgagagau

SEQ ID NO: 1851610 - RNA, 19 nt, Artificial Sequence
  Description of Artificial Sequence: Synthetic oligonucleotide
  Antisense strand to SEQ ID NO: 1851609
aucucucgagaacaggaac

SEQ ID NO: 1851611 - RNA, 19 nt, Artificial Sequence
  Description of Artificial Sequence: Synthetic oligonucleotide
  Sense strand starting at position 2388 of SEQ ID NO: 1564052
uccuguucucgagagauua

SEQ ID NO: 1851612 - RNA, 19 nt, Artificial Sequence
  Description of Artificial Sequence: Synthetic oligonucleotide
  Antisense strand to SEQ ID NO: 1851611
uaaucucucgagaacagga

SEQ ID NO: 1851613 - RNA, 19 nt, Artificial Sequence
  Description of Artificial Sequence: Synthetic oligonucleotide
  Sense strand starting at position 2390 of SEQ ID NO: 1564052
cuguucucgagagauuacu

SEQ ID NO: 1851614 - RNA, 19 nt, Artificial Sequence
  Description of Artificial Sequence: Synthetic oligonucleotide
  Antisense strand to SEQ ID NO: 1851613
aguaaucucucgagaacag

SEQ ID NO: 1851615 - RNA, 19 nt, Artificial Sequence
  Description of Artificial Sequence: Synthetic oligonucleotide
  Sense strand starting at position 2459 of SEQ ID NO: 1564052
cugaaauguucuccuccag

SEQ ID NO: 1851616 - RNA, 19 nt, Artificial Sequence
  Description of Artificial Sequence: Synthetic oligonucleotide
  Antisense strand to SEQ ID NO: 1851615
cuggaggagaacauuucag

SEQ ID NO: 1851617 - RNA, 19 nt, Artificial Sequence
  Description of Artificial Sequence: Synthetic oligonucleotide
  Sense strand starting at position 2643 of SEQ ID NO: 1564052
gccgauuuacacuguuaca

SEQ ID NO: 1851618 - RNA, 19 nt, Artificial Sequence
  Description of Artificial Sequence: Synthetic oligonucleotide
  Antisense strand to SEQ ID NO: 1851617
uguaacaguguaaaucggc

SEQ ID NO: 1851619 - RNA, 19 nt, Artificial Sequence
  Description of Artificial Sequence: Synthetic oligonucleotide
  Sense strand starting at position 2676 of SEQ ID NO: 1564052
auguuuggguccuuaagau

SEQ ID NO: 1851620 - RNA, 19 nt, Artificial Sequence
  Description of Artificial Sequence: Synthetic oligonucleotide
  Antisense strand to SEQ ID NO: 1851619
aucuuaaggacccaaacau

SEQ ID NO: 1851621 - RNA, 19 nt, Artificial Sequence
  Description of Artificial Sequence: Synthetic oligonucleotide
  Sense strand starting at position 3214 of SEQ ID NO: 1564052
acauucccuucuguagaua

SEQ ID NO: 1851622 - RNA, 19 nt, Artificial Sequence
  Description of Artificial Sequence: Synthetic oligonucleotide
  Antisense strand to SEQ ID NO: 1851621
uaucuacagaagggaaugu

SEQ ID NO: 1851623 - RNA, 19 nt, Artificial Sequence
  Description of Artificial Sequence: Synthetic oligonucleotide
  Sense strand starting at position 3228 of SEQ ID NO: 1564052
agauauuuacuguguuguu

SEQ ID NO: 1851624 - RNA, 19 nt, Artificial Sequence
  Description of Artificial Sequence: Synthetic oligonucleotide
  Antisense strand to SEQ ID NO: 1851623
aacaacacaguaaauaucu

SEQ ID NO: 1851625 - RNA, 19 nt, Artificial Sequence
  Description of Artificial Sequence: Synthetic oligonucleotide
  Sense strand starting at position 3229 of SEQ ID NO: 1564052
gauauuuacuguguuguuu

SEQ ID NO: 1851626 - RNA, 19 nt, Artificial Sequence
  Description of Artificial Sequence: Synthetic oligonucleotide
  Antisense strand to SEQ ID NO: 1851625
aaacaacacaguaaauauc

SEQ ID NO: 1851627 - RNA, 19 nt, Artificial Sequence
  Description of Artificial Sequence: Synthetic oligonucleotide
  Sense strand starting at position 3240 of SEQ ID NO: 1564052
uguuguuuccgauacaaua

SEQ ID NO: 1851628 - RNA, 19 nt, Artificial Sequence
  Description of Artificial Sequence: Synthetic oligonucleotide
  Antisense strand to SEQ ID NO: 1851627
uauuguaucggaaacaaca

SEQ ID NO: 1851629 - RNA, 19 nt, Artificial Sequence
  Description of Artificial Sequence: Synthetic oligonucleotide
  Sense strand starting at position 3345 of SEQ ID NO: 1564052
gagaguuggaaggguguuu

SEQ ID NO: 1851630 - RNA, 19 nt, Artificial Sequence
  Description of Artificial Sequence: Synthetic oligonucleotide
  Antisense strand to SEQ ID NO: 1851629
aaacacccuuccaacucuc

SEQ ID NO: 1851631 - RNA, 19 nt, Artificial Sequence
  Description of Artificial Sequence: Synthetic oligonucleotide
  Sense strand starting at position 3387 of SEQ ID NO: 1564052
aggacauuaguuggcaaga

SEQ ID NO: 1851632 - RNA, 19 nt, Artificial Sequence
  Description of Artificial Sequence: Synthetic oligonucleotide
  Antisense strand to SEQ ID NO: 1851631
ucuugccaacuaauguccu

SEQ ID NO: 1851633 - RNA, 19 nt, Artificial Sequence
  Description of Artificial Sequence: Synthetic oligonucleotide
  Sense strand starting at position 3388 of SEQ ID NO: 1564052
ggacauuaguuggcaagac

SEQ ID NO: 1851634 - RNA, 19 nt, Artificial Sequence
  Description of Artificial Sequence: Synthetic oligonucleotide
  Antisense strand to SEQ ID NO: 1851633
gucuugccaacuaaugucc

SEQ ID NO: 1851635 - RNA, 19 nt, Artificial Sequence
  Description of Artificial Sequence: Synthetic oligonucleotide
  Sense strand starting at position 3509 of SEQ ID NO: 1564052
uuuggcugcguuccgauaa

SEQ ID NO: 1851636 - RNA, 19 nt, Artificial Sequence
  Description of Artificial Sequence: Synthetic oligonucleotide
  Antisense strand to SEQ ID NO: 1851635
uuaucggaacgcagccaaa

SEQ ID NO: 1851637 - RNA, 19 nt, Artificial Sequence
  Description of Artificial Sequence: Synthetic oligonucleotide
  Sense strand starting at position 3632 of SEQ ID NO: 1564052
aaacaugugguggguuaga

SEQ ID NO: 1851638 - RNA, 19 nt, Artificial Sequence
  Description of Artificial Sequence: Synthetic oligonucleotide
  Antisense strand to SEQ ID NO: 1851637
ucuaacccaccacauguuu

SEQ ID NO: 1851639 - RNA, 19 nt, Artificial Sequence
  Description of Artificial Sequence: Synthetic oligonucleotide
  Sense strand starting at position 3642 of SEQ ID NO: 1564052
uggguuagauuuagucgga

SEQ ID NO: 1851640 - RNA, 19 nt, Artificial Sequence
  Description of Artificial Sequence: Synthetic oligonucleotide
  Antisense strand to SEQ ID NO: 1851639
uccgacuaaaucuaaccca

SEQ ID NO: 1851641 - RNA, 19 nt, Artificial Sequence
  Description of Artificial Sequence: Synthetic oligonucleotide
  Sense strand starting at position 3679 of SEQ ID NO: 1564052
cuuguucuagaauaauugu

SEQ ID NO: 1851642 - RNA, 19 nt, Artificial Sequence
  Description of Artificial Sequence: Synthetic oligonucleotide
  Antisense strand to SEQ ID NO: 1851641
acaauuauucuagaacaag

SEQ ID NO: 1851643 - RNA, 19 nt, Artificial Sequence
  Description of Artificial Sequence: Synthetic oligonucleotide
  Sense strand starting at position 3743 of SEQ ID NO: 1564052
ggcggcuugggagaugauu

SEQ ID NO: 1851644 - RNA, 19 nt, Artificial Sequence
  Description of Artificial Sequence: Synthetic oligonucleotide
  Antisense strand to SEQ ID NO: 1851643
aaucaucucccaagccgcc

SEQ ID NO: 1851645 - RNA, 19 nt, Artificial Sequence
  Description of Artificial Sequence: Synthetic oligonucleotide
  Sense strand starting at position 3752 of SEQ ID NO: 1564052
ggagaugauuuguaucccu

SEQ ID NO: 1851646 - RNA, 19 nt, Artificial Sequence
  Description of Artificial Sequence: Synthetic oligonucleotide
  Antisense strand to SEQ ID NO: 1851645
agggauacaaaucaucucc

SEQ ID NO: 1851647 - RNA, 19 nt, Artificial Sequence
  Description of Artificial Sequence: Synthetic oligonucleotide
  Sense strand starting at position 3783 of SEQ ID NO: 1564052
acucauuucugacaaguag

SEQ ID NO: 1851648 - RNA, 19 nt, Artificial Sequence
  Description of Artificial Sequence: Synthetic oligonucleotide
  Antisense strand to SEQ ID NO: 1851647
cuacuugucagaaaugagu

SEQ ID NO: 1851649 - RNA, 19 nt, Artificial Sequence
  Description of Artificial Sequence: Synthetic oligonucleotide
  Sense strand starting at position 3938 of SEQ ID NO: 1564052
uugggaauuucugagaaua

SEQ ID NO: 1851650 - RNA, 19 nt, Artificial Sequence
  Description of Artificial Sequence: Synthetic oligonucleotide
  Antisense strand to SEQ ID NO: 1851649
uauucucagaaauucccaa

SEQ ID NO: 1851651 - RNA, 19 nt, Artificial Sequence
  Description of Artificial Sequence: Synthetic oligonucleotide
  Sense strand starting at position 3940 of SEQ ID NO: 1564052
gggaauuucugagaauauu

SEQ ID NO: 1851652 - RNA, 19 nt, Artificial Sequence
  Description of Artificial Sequence: Synthetic oligonucleotide
  Antisense strand to SEQ ID NO: 1851651
aauauucucagaaauuccc

SEQ ID NO: 1851653 - RNA, 19 nt, Artificial Sequence
  Description of Artificial Sequence: Synthetic oligonucleotide
  Sense strand starting at position 218 of SEQ ID NO: 1564053
gacucucagggcugaaagu

SEQ ID NO: 1851654 - RNA, 19 nt, Artificial Sequence
  Description of Artificial Sequence: Synthetic oligonucleotide
  Antisense strand to SEQ ID NO: 1851653
acuuucagcccugagaguc

SEQ ID NO: 1851655 - RNA, 19 nt, Artificial Sequence
  Description of Artificial Sequence: Synthetic oligonucleotide
  Sense strand starting at position 229 of SEQ ID NO: 1564053
cugaaagucuugccugaga

SEQ ID NO: 1851656 - RNA, 19 nt, Artificial Sequence
  Description of Artificial Sequence: Synthetic oligonucleotide
  Antisense strand to SEQ ID NO: 1851655
ucucaggcaagacuuucag

SEQ ID NO: 1851657 - RNA, 19 nt, Artificial Sequence
  Description of Artificial Sequence: Synthetic oligonucleotide
  Sense strand starting at position 231 of SEQ ID NO: 1564053
gaaagucuugccugagauu

SEQ ID NO: 1851658 - RNA, 19 nt, Artificial Sequence
  Description of Artificial Sequence: Synthetic oligonucleotide
  Antisense strand to SEQ ID NO: 1851657
aaucucaggcaagacuuuc

SEQ ID NO: 1851659 - RNA, 19 nt, Artificial Sequence
  Description of Artificial Sequence: Synthetic oligonucleotide
  Sense strand starting at position 600 of SEQ ID NO: 1564053
cuucuauugggauggagca

SEQ ID NO: 1851660 - RNA, 19 nt, Artificial Sequence
  Description of Artificial Sequence: Synthetic oligonucleotide
  Antisense strand to SEQ ID NO: 1851659
ugcuccaucccaauagaag

SEQ ID NO: 1851661 - RNA, 19 nt, Artificial Sequence
  Description of Artificial Sequence: Synthetic oligonucleotide
  Sense strand starting at position 743 of SEQ ID NO: 1564053
gguaaagccaggcaauaau

SEQ ID NO: 1851662 - RNA, 19 nt, Artificial Sequence
  Description of Artificial Sequence: Synthetic oligonucleotide
  Antisense strand to SEQ ID NO: 1851661
auuauugccuggcuuuacc

SEQ ID NO: 1851663 - RNA, 19 nt, Artificial Sequence
  Description of Artificial Sequence: Synthetic oligonucleotide
  Sense strand starting at position 899 of SEQ ID NO: 1564053
gaguuagaaucacacagag

SEQ ID NO: 1851664 - RNA, 19 nt, Artificial Sequence
  Description of Artificial Sequence: Synthetic oligonucleotide
  Antisense strand to SEQ ID NO: 1851663
cucugugugauucuaacuc

SEQ ID NO: 1851665 - RNA, 19 nt, Artificial Sequence
  Description of Artificial Sequence: Synthetic oligonucleotide
  Sense strand starting at position 1107 of SEQ ID NO: 1564053
gucagugucacagauacaa

SEQ ID NO: 1851666 - RNA, 19 nt, Artificial Sequence
  Description of Artificial Sequence: Synthetic oligonucleotide
  Antisense strand to SEQ ID NO: 1851665
uuguaucugugacacugac

SEQ ID NO: 1851667 - RNA, 19 nt, Artificial Sequence
  Description of Artificial Sequence: Synthetic oligonucleotide
  Sense strand starting at position 1191 of SEQ ID NO: 1564053
guggguuagggucaaucaa

SEQ ID NO: 1851668 - RNA, 19 nt, Artificial Sequence
  Description of Artificial Sequence: Synthetic oligonucleotide
  Antisense strand to SEQ ID NO: 1851667
uugauugacccuaacccac

SEQ ID NO: 1851669 - RNA, 19 nt, Artificial Sequence
  Description of Artificial Sequence: Synthetic oligonucleotide
  Sense strand starting at position 1432 of SEQ ID NO: 1564053
acugauaaacuucgaugua

SEQ ID NO: 1851670 - RNA, 19 nt, Artificial Sequence
  Description of Artificial Sequence: Synthetic oligonucleotide
  Antisense strand to SEQ ID NO: 1851669
uacaucgaaguuuaucagu

SEQ ID NO: 1851671 - RNA, 19 nt, Artificial Sequence
  Description of Artificial Sequence: Synthetic oligonucleotide
  Sense strand starting at position 2058 of SEQ ID NO: 1564053
ggccuccucugauuggcaa

SEQ ID NO: 1851672 - RNA, 19 nt, Artificial Sequence
  Description of Artificial Sequence: Synthetic oligonucleotide
  Antisense strand to SEQ ID NO: 1851671
uugccaaucagaggaggcc

SEQ ID NO: 1851673 - RNA, 19 nt, Artificial Sequence
  Description of Artificial Sequence: Synthetic oligonucleotide
  Sense strand starting at position 2172 of SEQ ID NO: 1564053
uugauuuccuuugaagaug

SEQ ID NO: 1851674 - RNA, 19 nt, Artificial Sequence
  Description of Artificial Sequence: Synthetic oligonucleotide
  Antisense strand to SEQ ID NO: 1851673
caucuucaaaggaaaucaa

SEQ ID NO: 1851675 - RNA, 19 nt, Artificial Sequence
  Description of Artificial Sequence: Synthetic oligonucleotide
  Sense strand starting at position 2240 of SEQ ID NO: 1564053
gggcgauuggcugggaacu

SEQ ID NO: 1851676 - RNA, 19 nt, Artificial Sequence
  Description of Artificial Sequence: Synthetic oligonucleotide
  Antisense strand to SEQ ID NO: 1851675
aguucccagccaaucgccc

SEQ ID NO: 1851677 - RNA, 19 nt, Artificial Sequence
  Description of Artificial Sequence: Synthetic oligonucleotide
  Sense strand starting at position 2276 of SEQ ID NO: 1564053
accgauuucuuccuaugca

SEQ ID NO: 1851678 - RNA, 19 nt, Artificial Sequence
  Description of Artificial Sequence: Synthetic oligonucleotide
  Antisense strand to SEQ ID NO: 1851677
ugcauaggaagaaaucggu

SEQ ID NO: 1851679 - RNA, 19 nt, Artificial Sequence
  Description of Artificial Sequence: Synthetic oligonucleotide
  Sense strand starting at position 2456 of SEQ ID NO: 1564053
gaugauugucgcgcucgca

SEQ ID NO: 1851680 - RNA, 19 nt, Artificial Sequence
  Description of Artificial Sequence: Synthetic oligonucleotide
  Antisense strand to SEQ ID NO: 1851679
ugcgagcgcgacaaucauc

SEQ ID NO: 1851681 - RNA, 19 nt, Artificial Sequence
  Description of Artificial Sequence: Synthetic oligonucleotide
  Sense strand starting at position 2734 of SEQ ID NO: 1564053
cuuguaugagaaggugaga

SEQ ID NO: 1851682 - RNA, 19 nt, Artificial Sequence
  Description of Artificial Sequence: Synthetic oligonucleotide
  Antisense strand to SEQ ID NO: 1851681
ucucaccuucucauacaag

SEQ ID NO: 1851683 - RNA, 19 nt, Artificial Sequence
  Description of Artificial Sequence: Synthetic oligonucleotide
  Sense strand starting at position 2832 of SEQ ID NO: 1564053
gacguucuuaggcaguaga

SEQ ID NO: 1851684 - RNA, 19 nt, Artificial Sequence
  Description of Artificial Sequence: Synthetic oligonucleotide
  Antisense strand to SEQ ID NO: 1851683
ucuacugccuaagaacguc

SEQ ID NO: 1851685 - RNA, 19 nt, Artificial Sequence
  Description of Artificial Sequence: Synthetic oligonucleotide
  Sense strand starting at position 2835 of SEQ ID NO: 1564053
guucuuaggcaguagagga

SEQ ID NO: 1851686 - RNA, 19 nt, Artificial Sequence
  Description of Artificial Sequence: Synthetic oligonucleotide
  Antisense strand to SEQ ID NO: 1851685
uccucuacugccuaagaac

SEQ ID NO: 1851687 - RNA, 19 nt, Artificial Sequence
  Description of Artificial Sequence: Synthetic oligonucleotide
  Sense strand starting at position 2864 of SEQ ID NO: 1564053
ggcgaaagccuagaagacu

SEQ ID NO: 1851688 - RNA, 19 nt, Artificial Sequence
  Description of Artificial Sequence: Synthetic oligonucleotide
  Antisense strand to SEQ ID NO: 1851687
agucuucuaggcuuucgcc

SEQ ID NO: 1851689 - RNA, 19 nt, Artificial Sequence
  Description of Artificial Sequence: Synthetic oligonucleotide
  Sense strand starting at position 2873 of SEQ ID NO: 1564053
cuagaagacuugggaauuu

SEQ ID NO: 1851690 - RNA, 19 nt, Artificial Sequence
  Description of Artificial Sequence: Synthetic oligonucleotide
  Antisense strand to SEQ ID NO: 1851689
aaauucccaagucuucuag

SEQ ID NO: 1851691 - RNA, 19 nt, Artificial Sequence
  Description of Artificial Sequence: Synthetic oligonucleotide
  Sense strand starting at position 3003 of SEQ ID NO: 1564053
acacguuagaagcaguaua

SEQ ID NO: 1851692 - RNA, 19 nt, Artificial Sequence
  Description of Artificial Sequence: Synthetic oligonucleotide
  Antisense strand to SEQ ID NO: 1851691
uauacugcuucuaacgugu

SEQ ID NO: 1851693 - RNA, 19 nt, Artificial Sequence
  Description of Artificial Sequence: Synthetic oligonucleotide
  Sense strand starting at position 3016 of SEQ ID NO: 1564053
aguauaguacaacgauaau

SEQ ID NO: 1851694 - RNA, 19 nt, Artificial Sequence
  Description of Artificial Sequence: Synthetic oligonucleotide
  Antisense strand to SEQ ID NO: 1851693
auuaucguuguacuauacu

SEQ ID NO: 1851695 - RNA, 19 nt, Artificial Sequence
  Description of Artificial Sequence: Synthetic oligonucleotide
  Sense strand starting at position 3022 of SEQ ID NO: 1564053
guacaacgauaauacuaaa

SEQ ID NO: 1851696 - RNA, 19 nt, Artificial Sequence
  Description of Artificial Sequence: Synthetic oligonucleotide
  Antisense strand to SEQ ID NO: 1851695
uuuaguauuaucguuguac

SEQ ID NO: 1851697 - RNA, 19 nt, Artificial Sequence
  Description of Artificial Sequence: Synthetic oligonucleotide
  Sense strand starting at position 3272 of SEQ ID NO: 1564053
cgaggugggcucuauuauu

SEQ ID NO: 1851698 - RNA, 19 nt, Artificial Sequence
  Description of Artificial Sequence: Synthetic oligonucleotide
  Antisense strand to SEQ ID NO: 1851697
aauaauagagcccaccucg

SEQ ID NO: 1851699 - RNA, 19 nt, Artificial Sequence
  Description of Artificial Sequence: Synthetic oligonucleotide
  Sense strand starting at position 3323 of SEQ ID NO: 1564053
cagagauguuaaguggauu

SEQ ID NO: 1851700 - RNA, 19 nt, Artificial Sequence
  Description of Artificial Sequence: Synthetic oligonucleotide
  Antisense strand to SEQ ID NO: 1851699
aauccacuuaacaucucug

SEQ ID NO: 1851701 - RNA, 19 nt, Artificial Sequence
  Description of Artificial Sequence: Synthetic oligonucleotide
  Sense strand starting at position 3334 of SEQ ID NO: 1564053
aguggauugcccuagcuca

SEQ ID NO: 1851702 - RNA, 19 nt, Artificial Sequence
  Description of Artificial Sequence: Synthetic oligonucleotide
  Antisense strand to SEQ ID NO: 1851701
ugagcuagggcaauccacu

SEQ ID NO: 1851703 - RNA, 19 nt, Artificial Sequence
  Description of Artificial Sequence: Synthetic oligonucleotide
  Sense strand starting at position 3407 of SEQ ID NO: 1564053
gucugcugugcuguauuaa

SEQ ID NO: 1851704 - RNA, 19 nt, Artificial Sequence
  Description of Artificial Sequence: Synthetic oligonucleotide
  Antisense strand to SEQ ID NO: 1851703
uuaauacagcacagcagac

SEQ ID NO: 1851705 - RNA, 19 nt, Artificial Sequence
  Description of Artificial Sequence: Synthetic oligonucleotide
  Sense strand starting at position 3408 of SEQ ID NO: 1564053
ucugcugugcuguauuaau

SEQ ID NO: 1851706 - RNA, 19 nt, Artificial Sequence
  Description of Artificial Sequence: Synthetic oligonucleotide
  Antisense strand to SEQ ID NO: 1851705
auuaauacagcacagcaga

SEQ ID NO: 1851707 - RNA, 19 nt, Artificial Sequence
  Description of Artificial Sequence: Synthetic oligonucleotide
  Sense strand starting at position 3424 of SEQ ID NO: 1564053
aauagcagacgcugugaaa

SEQ ID NO: 1851708 - RNA, 19 nt, Artificial Sequence
  Description of Artificial Sequence: Synthetic oligonucleotide
  Antisense strand to SEQ ID NO: 1851707
uuucacagcgucugcuauu

SEQ ID NO: 1851709 - RNA, 19 nt, Artificial Sequence
  Description of Artificial Sequence: Synthetic oligonucleotide
  Sense strand starting at position 3436 of SEQ ID NO: 1564053
ugugaaaucaggcagcacu

SEQ ID NO: 1851710 - RNA, 19 nt, Artificial Sequence
  Description of Artificial Sequence: Synthetic oligonucleotide
  Antisense strand to SEQ ID NO: 1851709
agugcugccugauuucaca

SEQ ID NO: 1851711 - RNA, 19 nt, Artificial Sequence
  Description of Artificial Sequence: Synthetic oligonucleotide
  Sense strand starting at position 3616 of SEQ ID NO: 1564053
cuucguaaguauguacuca

SEQ ID NO: 1851712 - RNA, 19 nt, Artificial Sequence
  Description of Artificial Sequence: Synthetic oligonucleotide
  Antisense strand to SEQ ID NO: 1851711
ugaguacauacuuacgaag

SEQ ID NO: 1851713 - RNA, 19 nt, Artificial Sequence
  Description of Artificial Sequence: Synthetic oligonucleotide
  Sense strand starting at position 3624 of SEQ ID NO: 1564053
guauguacucagcacuaga

SEQ ID NO: 1851714 - RNA, 19 nt, Artificial Sequence
  Description of Artificial Sequence: Synthetic oligonucleotide
  Antisense strand to SEQ ID NO: 1851713
ucuagugcugaguacauac

SEQ ID NO: 1851715 - RNA, 19 nt, Artificial Sequence
  Description of Artificial Sequence: Synthetic oligonucleotide
  Sense strand starting at position 3627 of SEQ ID NO: 1564053
uguacucagcacuagaaug

SEQ ID NO: 1851716 - RNA, 19 nt, Artificial Sequence
  Description of Artificial Sequence: Synthetic oligonucleotide
  Antisense strand to SEQ ID NO: 1851715
cauucuagugcugaguaca

SEQ ID NO: 1851717 - RNA, 19 nt, Artificial Sequence
  Description of Artificial Sequence: Synthetic oligonucleotide
  Sense strand starting at position 3635 of SEQ ID NO: 1564053
gcacuagaauguguuuauu

SEQ ID NO: 1851718 - RNA, 19 nt, Artificial Sequence
  Description of Artificial Sequence: Synthetic oligonucleotide
  Antisense strand to SEQ ID NO: 1851717
aauaaacacauucuagugc

SEQ ID NO: 1851719 - RNA, 19 nt, Artificial Sequence
  Description of Artificial Sequence: Synthetic oligonucleotide
  Sense strand starting at position 3677 of SEQ ID NO: 1564053
gauauugugagguguuucu

SEQ ID NO: 1851720 - RNA, 19 nt, Artificial Sequence
  Description of Artificial Sequence: Synthetic oligonucleotide
  Antisense strand to SEQ ID NO: 1851719
agaaacaccucacaauauc

SEQ ID NO: 1851721 - RNA, 19 nt, Artificial Sequence
  Description of Artificial Sequence: Synthetic oligonucleotide
  Sense strand starting at position 3757 of SEQ ID NO: 1564053
ggauauauaggaugcuugu

SEQ ID NO: 1851722 - RNA, 19 nt, Artificial Sequence
  Description of Artificial Sequence: Synthetic oligonucleotide
  Antisense strand to SEQ ID NO: 1851721
acaagcauccuauauaucc

SEQ ID NO: 1851723 - RNA, 19 nt, Artificial Sequence
  Description of Artificial Sequence: Synthetic oligonucleotide
  Sense strand starting at position 3834 of SEQ ID NO: 1564053
gggauacagcaguguggaa

SEQ ID NO: 1851724 - RNA, 19 nt, Artificial Sequence
  Description of Artificial Sequence: Synthetic oligonucleotide
  Antisense strand to SEQ ID NO: 1851723
uuccacacugcuguauccc

SEQ ID NO: 1851725 - RNA, 19 nt, Artificial Sequence
  Description of Artificial Sequence: Synthetic oligonucleotide
  Sense strand starting at position 3836 of SEQ ID NO: 1564053
gauacagcaguguggaaau

SEQ ID NO: 1851726 - RNA, 19 nt, Artificial Sequence
  Description of Artificial Sequence: Synthetic oligonucleotide
  Antisense strand to SEQ ID NO: 1851725
auuuccacacugcuguauc

SEQ ID NO: 1851727 - RNA, 19 nt, Artificial Sequence
  Description of Artificial Sequence: Synthetic oligonucleotide
  Sense strand starting at position 3871 of SEQ ID NO: 1564053
ucucauagagcuuacauga

SEQ ID NO: 1851728 - RNA, 19 nt, Artificial Sequence
  Description of Artificial Sequence: Synthetic oligonucleotide
  Antisense strand to SEQ ID NO: 1851727
ucauguaagcucuaugaga

SEQ ID NO: 1851729 - RNA, 19 nt, Artificial Sequence
  Description of Artificial Sequence: Synthetic oligonucleotide
  Sense strand starting at position 3965 of SEQ ID NO: 1564053
augagaauguaugauauac

SEQ ID NO: 1851730 - RNA, 19 nt, Artificial Sequence
  Description of Artificial Sequence: Synthetic oligonucleotide
  Antisense strand to SEQ ID NO: 1851729
guauaucauacauucucau

SEQ ID NO: 1851731 - RNA, 19 nt, Artificial Sequence
  Description of Artificial Sequence: Synthetic oligonucleotide
  Sense strand starting at position 3967 of SEQ ID NO: 1564053
gagaauguaugauauacag

SEQ ID NO: 1851732 - RNA, 19 nt, Artificial Sequence
  Description of Artificial Sequence: Synthetic oligonucleotide
  Antisense strand to SEQ ID NO: 1851731
cuguauaucauacauucuc

SEQ ID NO: 1851733 - RNA, 19 nt, Artificial Sequence
  Description of Artificial Sequence: Synthetic oligonucleotide
  Sense strand starting at position 38 of SEQ ID NO: 1564054
agacuaagugugggagaca

SEQ ID NO: 1851734 - RNA, 19 nt, Artificial Sequence
  Description of Artificial Sequence: Synthetic oligonucleotide
  Antisense strand to SEQ ID NO: 1851733
ugucucccacacuuagucu

SEQ ID NO: 1851735 - RNA, 19 nt, Artificial Sequence
  Description of Artificial Sequence: Synthetic oligonucleotide
  Sense strand starting at position 84 of SEQ ID NO: 1564054
gggcaauggugagggaaga

SEQ ID NO: 1851736 - RNA, 19 nt, Artificial Sequence
  Description of Artificial Sequence: Synthetic oligonucleotide
  Antisense strand to SEQ ID NO: 1851735
ucuucccucaccauugccc

SEQ ID NO: 1851737 - RNA, 19 nt, Artificial Sequence
  Description of Artificial Sequence: Synthetic oligonucleotide
  Sense strand starting at position 163 of SEQ ID NO: 1564054
ugccauguuccagaauaag

SEQ ID NO: 1851738 - RNA, 19 nt, Artificial Sequence
  Description of Artificial Sequence: Synthetic oligonucleotide
  Antisense strand to SEQ ID NO: 1851737
cuuauucuggaacauggca

SEQ ID NO: 1851739 - RNA, 19 nt, Artificial Sequence
  Description of Artificial Sequence: Synthetic oligonucleotide
  Sense strand starting at position 364 of SEQ ID NO: 1564054
cagaguccaugucagaaga

SEQ ID NO: 1851740 - RNA, 19 nt, Artificial Sequence
  Description of Artificial Sequence: Synthetic oligonucleotide
  Antisense strand to SEQ ID NO: 1851739
ucuucugacauggacucug

SEQ ID NO: 1851741 - RNA, 19 nt, Artificial Sequence
  Description of Artificial Sequence: Synthetic oligonucleotide
  Sense strand starting at position 366 of SEQ ID NO: 1564054
gaguccaugucagaagacu

SEQ ID NO: 1851742 - RNA, 19 nt, Artificial Sequence
  Description of Artificial Sequence: Synthetic oligonucleotide
  Antisense strand to SEQ ID NO: 1851741
agucuucugacauggacuc

SEQ ID NO: 1851743 - RNA, 19 nt, Artificial Sequence
  Description of Artificial Sequence: Synthetic oligonucleotide
  Sense strand starting at position 657 of SEQ ID NO: 1564054
caaggucccucugcagaua

SEQ ID NO: 1851744 - RNA, 19 nt, Artificial Sequence
  Description of Artificial Sequence: Synthetic oligonucleotide
  Antisense strand to SEQ ID NO: 1851743
uaucugcagagggaccuug

SEQ ID NO: 1851745 - RNA, 19 nt, Artificial Sequence
  Description of Artificial Sequence: Synthetic oligonucleotide
  Sense strand starting at position 945 of SEQ ID NO: 1564054
accauaggcuuaggaagaa

SEQ ID NO: 1851746 - RNA, 19 nt, Artificial Sequence
  Description of Artificial Sequence: Synthetic oligonucleotide
  Antisense strand to SEQ ID NO: 1851745
uucuuccuaagccuauggu

SEQ ID NO: 1851747 - RNA, 19 nt, Artificial Sequence
  Description of Artificial Sequence: Synthetic oligonucleotide
  Sense strand starting at position 997 of SEQ ID NO: 1564054
guuaauacuccuugaaaug

SEQ ID NO: 1851748 - RNA, 19 nt, Artificial Sequence
  Description of Artificial Sequence: Synthetic oligonucleotide
  Antisense strand to SEQ ID NO: 1851747
cauuucaaggaguauuaac

SEQ ID NO: 1851749 - RNA, 19 nt, Artificial Sequence
  Description of Artificial Sequence: Synthetic oligonucleotide
  Sense strand starting at position 1051 of SEQ ID NO: 1564054
gugaguauggcccgucuca

SEQ ID NO: 1851750 - RNA, 19 nt, Artificial Sequence
  Description of Artificial Sequence: Synthetic oligonucleotide
  Antisense strand to SEQ ID NO: 1851749
ugagacgggccauacucac

SEQ ID NO: 1851751 - RNA, 19 nt, Artificial Sequence
  Description of Artificial Sequence: Synthetic oligonucleotide
  Sense strand starting at position 1062 of SEQ ID NO: 1564054
ccgucucacccucagagau

SEQ ID NO: 1851752 - RNA, 19 nt, Artificial Sequence
  Description of Artificial Sequence: Synthetic oligonucleotide
  Antisense strand to SEQ ID NO: 1851751
aucucugagggugagacgg

SEQ ID NO: 1851753 - RNA, 19 nt, Artificial Sequence
  Description of Artificial Sequence: Synthetic oligonucleotide
  Sense strand starting at position 1178 of SEQ ID NO: 1564054
guucaaguccugugggaag

SEQ ID NO: 1851754 - RNA, 19 nt, Artificial Sequence
  Description of Artificial Sequence: Synthetic oligonucleotide
  Antisense strand to SEQ ID NO: 1851753
cuucccacaggacuugaac

SEQ ID NO: 1851755 - RNA, 19 nt, Artificial Sequence
  Description of Artificial Sequence: Synthetic oligonucleotide
  Sense strand starting at position 1180 of SEQ ID NO: 1564054
ucaaguccugugggaagaa

SEQ ID NO: 1851756 - RNA, 19 nt, Artificial Sequence
  Description of Artificial Sequence: Synthetic oligonucleotide
  Antisense strand to SEQ ID NO: 1851755
uucuucccacaggacuuga

SEQ ID NO: 1851757 - RNA, 19 nt, Artificial Sequence
  Description of Artificial Sequence: Synthetic oligonucleotide
  Sense strand starting at position 1335 of SEQ ID NO: 1564054
cggccaauaaggugguaau

SEQ ID NO: 1851758 - RNA, 19 nt, Artificial Sequence
  Description of Artificial Sequence: Synthetic oligonucleotide
  Antisense strand to SEQ ID NO: 1851757
auuaccaccuuauuggccg

SEQ ID NO: 1851759 - RNA, 19 nt, Artificial Sequence
  Description of Artificial Sequence: Synthetic oligonucleotide
  Sense strand starting at position 1395 of SEQ ID NO: 1564054
uugcgcaugcucucacauu

SEQ ID NO: 1851760 - RNA, 19 nt, Artificial Sequence
  Description of Artificial Sequence: Synthetic oligonucleotide
  Antisense strand to SEQ ID NO: 1851759
aaugugagagcaugcgcaa

SEQ ID NO: 1851761 - RNA, 19 nt, Artificial Sequence
  Description of Artificial Sequence: Synthetic oligonucleotide
  Sense strand starting at position 1752 of SEQ ID NO: 1564054
cgccguuucgcaggacaua

SEQ ID NO: 1851762 - RNA, 19 nt, Artificial Sequence
  Description of Artificial Sequence: Synthetic oligonucleotide
  Antisense strand to SEQ ID NO: 1851761
uauguccugcgaaacggcg

SEQ ID NO: 1851763 - RNA, 19 nt, Artificial Sequence
  Description of Artificial Sequence: Synthetic oligonucleotide
  Sense strand starting at position 1753 of SEQ ID NO: 1564054
gccguuucgcaggacauau

SEQ ID NO: 1851764 - RNA, 19 nt, Artificial Sequence
  Description of Artificial Sequence: Synthetic oligonucleotide
  Antisense strand to SEQ ID NO: 1851763
auauguccugcgaaacggc

SEQ ID NO: 1851765 - RNA, 19 nt, Artificial Sequence
  Description of Artificial Sequence: Synthetic oligonucleotide
  Sense strand starting at position 1771 of SEQ ID NO: 1564054
ugcaacuuaccuggaaauu

SEQ ID NO: 1851766 - RNA, 19 nt, Artificial Sequence
  Description of Artificial Sequence: Synthetic oligonucleotide
  Antisense strand to SEQ ID NO: 1851765
aauuuccagguaaguugca

SEQ ID NO: 1851767 - RNA, 19 nt, Artificial Sequence
  Description of Artificial Sequence: Synthetic oligonucleotide
  Sense strand starting at position 1992 of SEQ ID NO: 1564054
agcaguguucuccgcgaaa

SEQ ID NO: 1851768 - RNA, 19 nt, Artificial Sequence
  Description of Artificial Sequence: Synthetic oligonucleotide
  Antisense strand to SEQ ID NO: 1851767
uuucgcggagaacacugcu

SEQ ID NO: 1851769 - RNA, 19 nt, Artificial Sequence
  Description of Artificial Sequence: Synthetic oligonucleotide
  Sense strand starting at position 1994 of SEQ ID NO: 1564054
caguguucuccgcgaaaug

SEQ ID NO: 1851770 - RNA, 19 nt, Artificial Sequence
  Description of Artificial Sequence: Synthetic oligonucleotide
  Antisense strand to SEQ ID NO: 1851769
cauuucgcggagaacacug

SEQ ID NO: 1851771 - RNA, 19 nt, Artificial Sequence
  Description of Artificial Sequence: Synthetic oligonucleotide
  Sense strand starting at position 1995 of SEQ ID NO: 1564054
aguguucuccgcgaaaugg

SEQ ID NO: 1851772 - RNA, 19 nt, Artificial Sequence
  Description of Artificial Sequence: Synthetic oligonucleotide
  Antisense strand to SEQ ID NO: 1851771
ccauuucgcggagaacacu

SEQ ID NO: 1851773 - RNA, 19 nt, Artificial Sequence
  Description of Artificial Sequence: Synthetic oligonucleotide
  Sense strand starting at position 2249 of SEQ ID NO: 1564054
ccugccauucucugauguu

SEQ ID NO: 1851774 - RNA, 19 nt, Artificial Sequence
  Description of Artificial Sequence: Synthetic oligonucleotide
  Antisense strand to SEQ ID NO: 1851773
aacaucagagaauggcagg

SEQ ID NO: 1851775 - RNA, 19 nt, Artificial Sequence
  Description of Artificial Sequence: Synthetic oligonucleotide
  Sense strand starting at position 2303 of SEQ ID NO: 1564054
ccuuuaaaggccugacauu

SEQ ID NO: 1851776 - RNA, 19 nt, Artificial Sequence
  Description of Artificial Sequence: Synthetic oligonucleotide
  Antisense strand to SEQ ID NO: 1851775
aaugucaggccuuuaaagg

SEQ ID NO: 1851777 - RNA, 19 nt, Artificial Sequence
  Description of Artificial Sequence: Synthetic oligonucleotide
  Sense strand starting at position 2364 of SEQ ID NO: 1564054
ugaugucagacccaacguu

SEQ ID NO: 1851778 - RNA, 19 nt, Artificial Sequence
  Description of Artificial Sequence: Synthetic oligonucleotide
  Antisense strand to SEQ ID NO: 1851777
aacguugggucugacauca

SEQ ID NO: 1851779 - RNA, 19 nt, Artificial Sequence
  Description of Artificial Sequence: Synthetic oligonucleotide
  Sense strand starting at position 2541 of SEQ ID NO: 1564054
ccaauagacugccugagau

SEQ ID NO: 1851780 - RNA, 19 nt, Artificial Sequence
  Description of Artificial Sequence: Synthetic oligonucleotide
  Antisense strand to SEQ ID NO: 1851779
aucucaggcagucuauugg

SEQ ID NO: 1851781 - RNA, 19 nt, Artificial Sequence
  Description of Artificial Sequence: Synthetic oligonucleotide
  Sense strand starting at position 2913 of SEQ ID NO: 1564054
gguuguaaaucccaaucca

SEQ ID NO: 1851782 - RNA, 19 nt, Artificial Sequence
  Description of Artificial Sequence: Synthetic oligonucleotide
  Antisense strand to SEQ ID NO: 1851781
uggauugggauuuacaacc

SEQ ID NO: 1851783 - RNA, 19 nt, Artificial Sequence
  Description of Artificial Sequence: Synthetic oligonucleotide
  Sense strand starting at position 3299 of SEQ ID NO: 1564054
aagggacuuucgcaauaca

SEQ ID NO: 1851784 - RNA, 19 nt, Artificial Sequence
  Description of Artificial Sequence: Synthetic oligonucleotide
  Antisense strand to SEQ ID NO: 1851783
uguauugcgaaagucccuu

SEQ ID NO: 1851785 - RNA, 19 nt, Artificial Sequence
  Description of Artificial Sequence: Synthetic oligonucleotide
  Sense strand starting at position 3302 of SEQ ID NO: 1564054
ggacuuucgcaauacacaa

SEQ ID NO: 1851786 - RNA, 19 nt, Artificial Sequence
  Description of Artificial Sequence: Synthetic oligonucleotide
  Antisense strand to SEQ ID NO: 1851785
uuguguauugcgaaagucc

SEQ ID NO: 1851787 - RNA, 19 nt, Artificial Sequence
  Description of Artificial Sequence: Synthetic oligonucleotide
  Sense strand starting at position 3448 of SEQ ID NO: 1564054
aaguuaguuugcccucaga

SEQ ID NO: 1851788 - RNA, 19 nt, Artificial Sequence
  Description of Artificial Sequence: Synthetic oligonucleotide
  Antisense strand to SEQ ID NO: 1851787
ucugagggcaaacuaacuu

SEQ ID NO: 1851789 - RNA, 19 nt, Artificial Sequence
  Description of Artificial Sequence: Synthetic oligonucleotide
  Sense strand starting at position 3580 of SEQ ID NO: 1564054
guuauugucagggauuccu

SEQ ID NO: 1851790 - RNA, 19 nt, Artificial Sequence
  Description of Artificial Sequence: Synthetic oligonucleotide
  Antisense strand to SEQ ID NO: 1851789
aggaaucccugacaauaac

SEQ ID NO: 1851791 - RNA, 19 nt, Artificial Sequence
  Description of Artificial Sequence: Synthetic oligonucleotide
  Sense strand starting at position 3589 of SEQ ID NO: 1564054
agggauuccucacauaguc

SEQ ID NO: 1851792 - RNA, 19 nt, Artificial Sequence
  Description of Artificial Sequence: Synthetic oligonucleotide
  Antisense strand to SEQ ID NO: 1851791
gacuaugugaggaaucccu

SEQ ID NO: 1851793 - RNA, 19 nt, Artificial Sequence
  Description of Artificial Sequence: Synthetic oligonucleotide
  Sense strand starting at position 3611 of SEQ ID NO: 1564054
uuauuaaucccuuaggugu

SEQ ID NO: 1851794 - RNA, 19 nt, Artificial Sequence
  Description of Artificial Sequence: Synthetic oligonucleotide
  Antisense strand to SEQ ID NO: 1851793
acaccuaagggauuaauaa

SEQ ID NO: 1851795 - RNA, 19 nt, Artificial Sequence
  Description of Artificial Sequence: Synthetic oligonucleotide
  Sense strand starting at position 3619 of SEQ ID NO: 1564054
cccuuagguguuggaaaua

SEQ ID NO: 1851796 - RNA, 19 nt, Artificial Sequence
  Description of Artificial Sequence: Synthetic oligonucleotide
  Antisense strand to SEQ ID NO: 1851795
uauuuccaacaccuaaggg

SEQ ID NO: 1851797 - RNA, 19 nt, Artificial Sequence
  Description of Artificial Sequence: Synthetic oligonucleotide
  Sense strand starting at position 3646 of SEQ ID NO: 1564054
agcucuggcauuuguguua

SEQ ID NO: 1851798 - RNA, 19 nt, Artificial Sequence
  Description of Artificial Sequence: Synthetic oligonucleotide
  Antisense strand to SEQ ID NO: 1851797
uaacacaaaugccagagcu

SEQ ID NO: 1851799 - RNA, 19 nt, Artificial Sequence
  Description of Artificial Sequence: Synthetic oligonucleotide
  Sense strand starting at position 3649 of SEQ ID NO: 1564054
ucuggcauuuguguuauua

SEQ ID NO: 1851800 - RNA, 19 nt, Artificial Sequence
  Description of Artificial Sequence: Synthetic oligonucleotide
  Antisense strand to SEQ ID NO: 1851799
uaauaacacaaaugccaga

SEQ ID NO: 1851801 - RNA, 19 nt, Artificial Sequence
  Description of Artificial Sequence: Synthetic oligonucleotide
  Sense strand starting at position 3651 of SEQ ID NO: 1564054
uggcauuuguguuauuaac

SEQ ID NO: 1851802 - RNA, 19 nt, Artificial Sequence
  Description of Artificial Sequence: Synthetic oligonucleotide
  Antisense strand to SEQ ID NO: 1851801
guuaauaacacaaaugcca

SEQ ID NO: 1851803 - RNA, 19 nt, Artificial Sequence
  Description of Artificial Sequence: Synthetic oligonucleotide
  Sense strand starting at position 3653 of SEQ ID NO: 1564054
gcauuuguguuauuaacuu

SEQ ID NO: 1851804 - RNA, 19 nt, Artificial Sequence
  Description of Artificial Sequence: Synthetic oligonucleotide
  Antisense strand to SEQ ID NO: 1851803
aaguuaauaacacaaaugc

SEQ ID NO: 1851805 - RNA, 19 nt, Artificial Sequence
  Description of Artificial Sequence: Synthetic oligonucleotide
  Sense strand starting at position 3661 of SEQ ID NO: 1564054
guuauuaacuuuguaagca

SEQ ID NO: 1851806 - RNA, 19 nt, Artificial Sequence
  Description of Artificial Sequence: Synthetic oligonucleotide
  Antisense strand to SEQ ID NO: 1851805
ugcuuacaaaguuaauaac

SEQ ID NO: 1851807 - RNA, 19 nt, Artificial Sequence
  Description of Artificial Sequence: Synthetic oligonucleotide
  Sense strand starting at position 3665 of SEQ ID NO: 1564054
uuaacuuuguaagcaguaa

SEQ ID NO: 1851808 - RNA, 19 nt, Artificial Sequence
  Description of Artificial Sequence: Synthetic oligonucleotide
  Antisense strand to SEQ ID NO: 1851807
uuacugcuuacaaaguuaa

SEQ ID NO: 1851809 - RNA, 19 nt, Artificial Sequence
  Description of Artificial Sequence: Synthetic oligonucleotide
  Sense strand starting at position 3669 of SEQ ID NO: 1564054
cuuuguaagcaguaaacuu

SEQ ID NO: 1851810 - RNA, 19 nt, Artificial Sequence
  Description of Artificial Sequence: Synthetic oligonucleotide
  Antisense strand to SEQ ID NO: 1851809
aaguuuacugcuuacaaag

SEQ ID NO: 1851811 - RNA, 19 nt, Artificial Sequence
  Description of Artificial Sequence: Synthetic oligonucleotide
  Sense strand starting at position 3677 of SEQ ID NO: 1564054
gcaguaaacuuaguugaau

SEQ ID NO: 1851812 - RNA, 19 nt, Artificial Sequence
  Description of Artificial Sequence: Synthetic oligonucleotide
  Antisense strand to SEQ ID NO: 1851811
auucaacuaaguuuacugc

SEQ ID NO: 1851813 - RNA, 19 nt, Artificial Sequence
  Description of Artificial Sequence: Synthetic oligonucleotide
  Sense strand starting at position 137 of SEQ ID NO: 1564055
agggaagucaaagguguuu

SEQ ID NO: 1851814 - RNA, 19 nt, Artificial Sequence
  Description of Artificial Sequence: Synthetic oligonucleotide
  Antisense strand to SEQ ID NO: 1851813
aaacaccuuugacuucccu

SEQ ID NO: 1851815 - RNA, 19 nt, Artificial Sequence
  Description of Artificial Sequence: Synthetic oligonucleotide
  Sense strand starting at position 139 of SEQ ID NO: 1564055
ggaagucaaagguguuuaa

SEQ ID NO: 1851816 - RNA, 19 nt, Artificial Sequence
  Description of Artificial Sequence: Synthetic oligonucleotide
  Antisense strand to SEQ ID NO: 1851815
uuaaacaccuuugacuucc

SEQ ID NO: 1851817 - RNA, 19 nt, Artificial Sequence
  Description of Artificial Sequence: Synthetic oligonucleotide
  Sense strand starting at position 143 of SEQ ID NO: 1564055
gucaaagguguuuaagaca

SEQ ID NO: 1851818 - RNA, 19 nt, Artificial Sequence
  Description of Artificial Sequence: Synthetic oligonucleotide
  Antisense strand to SEQ ID NO: 1851817
ugucuuaaacaccuuugac

SEQ ID NO: 1851819 - RNA, 19 nt, Artificial Sequence
  Description of Artificial Sequence: Synthetic oligonucleotide
  Sense strand starting at position 148 of SEQ ID NO: 1564055
agguguuuaagacauaguc

SEQ ID NO: 1851820 - RNA, 19 nt, Artificial Sequence
  Description of Artificial Sequence: Synthetic oligonucleotide
  Antisense strand to SEQ ID NO: 1851819
gacuaugucuuaaacaccu

SEQ ID NO: 1851821 - RNA, 19 nt, Artificial Sequence
  Description of Artificial Sequence: Synthetic oligonucleotide
  Sense strand starting at position 185 of SEQ ID NO: 1564055
acaaucuauuuagggagaa

SEQ ID NO: 1851822 - RNA, 19 nt, Artificial Sequence
  Description of Artificial Sequence: Synthetic oligonucleotide
  Antisense strand to SEQ ID NO: 1851821
uucucccuaaauagauugu

SEQ ID NO: 1851823 - RNA, 19 nt, Artificial Sequence
  Description of Artificial Sequence: Synthetic oligonucleotide
  Sense strand starting at position 212 of SEQ ID NO: 1564055
uguuuauguguugugugca

SEQ ID NO: 1851824 - RNA, 19 nt, Artificial Sequence
  Description of Artificial Sequence: Synthetic oligonucleotide
  Antisense strand to SEQ ID NO: 1851823
ugcacacaacacauaaaca

SEQ ID NO: 1851825 - RNA, 19 nt, Artificial Sequence
  Description of Artificial Sequence: Synthetic oligonucleotide
  Sense strand starting at position 251 of SEQ ID NO: 1564055
aggagagaauaauaacaca

SEQ ID NO: 1851826 - RNA, 19 nt, Artificial Sequence
  Description of Artificial Sequence: Synthetic oligonucleotide
  Antisense strand to SEQ ID NO: 1851825
uguguuauuauucucuccu

SEQ ID NO: 1851827 - RNA, 19 nt, Artificial Sequence
  Description of Artificial Sequence: Synthetic oligonucleotide
  Sense strand starting at position 281 of SEQ ID NO: 1564055
gccaaauuaguagaaauuc

SEQ ID NO: 1851828 - RNA, 19 nt, Artificial Sequence
  Description of Artificial Sequence: Synthetic oligonucleotide
  Antisense strand to SEQ ID NO: 1851827
gaauuucuacuaauuuggc

SEQ ID NO: 1851829 - RNA, 19 nt, Artificial Sequence
  Description of Artificial Sequence: Synthetic oligonucleotide
  Sense strand starting at position 491 of SEQ ID NO: 1564055
gguuuagacagaugaaugu

SEQ ID NO: 1851830 - RNA, 19 nt, Artificial Sequence
  Description of Artificial Sequence: Synthetic oligonucleotide
  Antisense strand to SEQ ID NO: 1851829
acauucaucugucuaaacc

SEQ ID NO: 1851831 - RNA, 19 nt, Artificial Sequence
  Description of Artificial Sequence: Synthetic oligonucleotide
  Sense strand starting at position 495 of SEQ ID NO: 1564055
uagacagaugaaugugguu

SEQ ID NO: 1851832 - RNA, 19 nt, Artificial Sequence
  Description of Artificial Sequence: Synthetic oligonucleotide
  Antisense strand to SEQ ID NO: 1851831
aaccacauucaucugucua

SEQ ID NO: 1851833 - RNA, 19 nt, Artificial Sequence
  Description of Artificial Sequence: Synthetic oligonucleotide
  Sense strand starting at position 497 of SEQ ID NO: 1564055
gacagaugaaugugguuau

SEQ ID NO: 1851834 - RNA, 19 nt, Artificial Sequence
  Description of Artificial Sequence: Synthetic oligonucleotide
  Antisense strand to SEQ ID NO: 1851833
auaaccacauucaucuguc

SEQ ID NO: 1851835 - RNA, 19 nt, Artificial Sequence
  Description of Artificial Sequence: Synthetic oligonucleotide
  Sense strand starting at position 500 of SEQ ID NO: 1564055
agaugaaugugguuauaau

SEQ ID NO: 1851836 - RNA, 19 nt, Artificial Sequence
  Description of Artificial Sequence: Synthetic oligonucleotide
  Antisense strand to SEQ ID NO: 1851835
auuauaaccacauucaucu

SEQ ID NO: 1851837 - RNA, 19 nt, Artificial Sequence
  Description of Artificial Sequence: Synthetic oligonucleotide
  Sense strand starting at position 694 of SEQ ID NO: 1564055
gucuguguaacugagagaa

SEQ ID NO: 1851838 - RNA, 19 nt, Artificial Sequence
  Description of Artificial Sequence: Synthetic oligonucleotide
  Antisense strand to SEQ ID NO: 1851837
uucucucaguuacacagac

SEQ ID NO: 1851839 - RNA, 19 nt, Artificial Sequence
  Description of Artificial Sequence: Synthetic oligonucleotide
  Sense strand starting at position 751 of SEQ ID NO: 1564055
aauaaaugauuugggaaag

SEQ ID NO: 1851840 - RNA, 19 nt, Artificial Sequence
  Description of Artificial Sequence: Synthetic oligonucleotide
  Antisense strand to SEQ ID NO: 1851839
cuuucccaaaucauuuauu

SEQ ID NO: 1851841 - RNA, 19 nt, Artificial Sequence
  Description of Artificial Sequence: Synthetic oligonucleotide
  Sense strand starting at position 767 of SEQ ID NO: 1564055
aagggaaagucaguauugu

SEQ ID NO: 1851842 - RNA, 19 nt, Artificial Sequence
  Description of Artificial Sequence: Synthetic oligonucleotide
  Antisense strand to SEQ ID NO: 1851841
acaauacugacuuucccuu

SEQ ID NO: 1851843 - RNA, 19 nt, Artificial Sequence
  Description of Artificial Sequence: Synthetic oligonucleotide
  Sense strand starting at position 768 of SEQ ID NO: 1564055
agggaaagucaguauuguu

SEQ ID NO: 1851844 - RNA, 19 nt, Artificial Sequence
  Description of Artificial Sequence: Synthetic oligonucleotide
  Antisense strand to SEQ ID NO: 1851843
aacaauacugacuuucccu

SEQ ID NO: 1851845 - RNA, 19 nt, Artificial Sequence
  Description of Artificial Sequence: Synthetic oligonucleotide
  Sense strand starting at position 1225 of SEQ ID NO: 1564055
ugcacuauuccagagugau

SEQ ID NO: 1851846 - RNA, 19 nt, Artificial Sequence
  Description of Artificial Sequence: Synthetic oligonucleotide
  Antisense strand to SEQ ID NO: 1851845
aucacucuggaauagugca

SEQ ID NO: 1851847 - RNA, 19 nt, Artificial Sequence
  Description of Artificial Sequence: Synthetic oligonucleotide
  Sense strand starting at position 1228 of SEQ ID NO: 1564055
acuauuccagagugaugau

SEQ ID NO: 1851848 - RNA, 19 nt, Artificial Sequence
  Description of Artificial Sequence: Synthetic oligonucleotide
  Antisense strand to SEQ ID NO: 1851847
aucaucacucuggaauagu

SEQ ID NO: 1851849 - RNA, 19 nt, Artificial Sequence
  Description of Artificial Sequence: Synthetic oligonucleotide
  Sense strand starting at position 1240 of SEQ ID NO: 1564055
ugaugauucuacuugcaga

SEQ ID NO: 1851850 - RNA, 19 nt, Artificial Sequence
  Description of Artificial Sequence: Synthetic oligonucleotide
  Antisense strand to SEQ ID NO: 1851849
ucugcaaguagaaucauca

SEQ ID NO: 1851851 - RNA, 19 nt, Artificial Sequence
  Description of Artificial Sequence: Synthetic oligonucleotide
  Sense strand starting at position 1245 of SEQ ID NO: 1564055
auucuacuugcagagugaa

SEQ ID NO: 1851852 - RNA, 19 nt, Artificial Sequence
  Description of Artificial Sequence: Synthetic oligonucleotide
  Antisense strand to SEQ ID NO: 1851851
uucacucugcaaguagaau

SEQ ID NO: 1851853 - RNA, 19 nt, Artificial Sequence
  Description of Artificial Sequence: Synthetic oligonucleotide
  Sense strand starting at position 1271 of SEQ ID NO: 1564055
uuaauuuaagcccgucaau

SEQ ID NO: 1851854 - RNA, 19 nt, Artificial Sequence
  Description of Artificial Sequence: Synthetic oligonucleotide
  Antisense strand to SEQ ID NO: 1851853
auugacgggcuuaaauuaa

SEQ ID NO: 1851855 - RNA, 19 nt, Artificial Sequence
  Description of Artificial Sequence: Synthetic oligonucleotide
  Sense strand starting at position 1492 of SEQ ID NO: 1564055
gcaaguagucuuuaacaca

SEQ ID NO: 1851856 - RNA, 19 nt, Artificial Sequence
  Description of Artificial Sequence: Synthetic oligonucleotide
  Antisense strand to SEQ ID NO: 1851855
uguguuaaagacuacuugc

SEQ ID NO: 1851857 - RNA, 19 nt, Artificial Sequence
  Description of Artificial Sequence: Synthetic oligonucleotide
  Sense strand starting at position 1964 of SEQ ID NO: 1564055
ccuccaacuuggguaaaua

SEQ ID NO: 1851858 - RNA, 19 nt, Artificial Sequence
  Description of Artificial Sequence: Synthetic oligonucleotide
  Antisense strand to SEQ ID NO: 1851857
uauuuacccaaguuggagg

SEQ ID NO: 1851859 - RNA, 19 nt, Artificial Sequence
  Description of Artificial Sequence: Synthetic oligonucleotide
  Sense strand starting at position 2243 of SEQ ID NO: 1564055
ccuggcucuucuguaauuu

SEQ ID NO: 1851860 - RNA, 19 nt, Artificial Sequence
  Description of Artificial Sequence: Synthetic oligonucleotide
  Antisense strand to SEQ ID NO: 1851859
aaauuacagaagagccagg

SEQ ID NO: 1851861 - RNA, 19 nt, Artificial Sequence
  Description of Artificial Sequence: Synthetic oligonucleotide
  Sense strand starting at position 2353 of SEQ ID NO: 1564055
uagccagagucaucagaca

SEQ ID NO: 1851862 - RNA, 19 nt, Artificial Sequence
  Description of Artificial Sequence: Synthetic oligonucleotide
  Antisense strand to SEQ ID NO: 1851861
ugucugaugacucuggcua

SEQ ID NO: 1851863 - RNA, 19 nt, Artificial Sequence
  Description of Artificial Sequence: Synthetic oligonucleotide
  Sense strand starting at position 2358 of SEQ ID NO: 1564055
agagucaucagacacgagu

SEQ ID NO: 1851864 - RNA, 19 nt, Artificial Sequence
  Description of Artificial Sequence: Synthetic oligonucleotide
  Antisense strand to SEQ ID NO: 1851863
acucgugucugaugacucu

SEQ ID NO: 1851865 - RNA, 19 nt, Artificial Sequence
  Description of Artificial Sequence: Synthetic oligonucleotide
  Sense strand starting at position 2415 of SEQ ID NO: 1564055
guaacagagacuugagagu

SEQ ID NO: 1851866 - RNA, 19 nt, Artificial Sequence
  Description of Artificial Sequence: Synthetic oligonucleotide
  Antisense strand to SEQ ID NO: 1851865
acucucaagucucuguuac

SEQ ID NO: 1851867 - RNA, 19 nt, Artificial Sequence
  Description of Artificial Sequence: Synthetic oligonucleotide
  Sense strand starting at position 2571 of SEQ ID NO: 1564055
ugucuuuaaguguaugaaa

SEQ ID NO: 1851868 - RNA, 19 nt, Artificial Sequence
  Description of Artificial Sequence: Synthetic oligonucleotide
  Antisense strand to SEQ ID NO: 1851867
uuucauacacuuaaagaca

SEQ ID NO: 1851869 - RNA, 19 nt, Artificial Sequence
  Description of Artificial Sequence: Synthetic oligonucleotide
  Sense strand starting at position 2697 of SEQ ID NO: 1564055
gagucaugaugacuaaagu

SEQ ID NO: 1851870 - RNA, 19 nt, Artificial Sequence
  Description of Artificial Sequence: Synthetic oligonucleotide
  Antisense strand to SEQ ID NO: 1851869
acuuuagucaucaugacuc

SEQ ID NO: 1851871 - RNA, 19 nt, Artificial Sequence
  Description of Artificial Sequence: Synthetic oligonucleotide
  Sense strand starting at position 2720 of SEQ ID NO: 1564055
caguaucuuggaugggauc

SEQ ID NO: 1851872 - RNA, 19 nt, Artificial Sequence
  Description of Artificial Sequence: Synthetic oligonucleotide
  Antisense strand to SEQ ID NO: 1851871
gaucccauccaagauacug

SEQ ID NO: 1851873 - RNA, 19 nt, Artificial Sequence
  Description of Artificial Sequence: Synthetic oligonucleotide
  Sense strand starting at position 2838 of SEQ ID NO: 1564055
agaguuaugcaagggaaac

SEQ ID NO: 1851874 - RNA, 19 nt, Artificial Sequence
  Description of Artificial Sequence: Synthetic oligonucleotide
  Antisense strand to SEQ ID NO: 1851873
guuucccuugcauaacucu

SEQ ID NO: 1851875 - RNA, 19 nt, Artificial Sequence
  Description of Artificial Sequence: Synthetic oligonucleotide
  Sense strand starting at position 3042 of SEQ ID NO: 1564055
acacuagugguaggaauau

SEQ ID NO: 1851876 - RNA, 19 nt, Artificial Sequence
  Description of Artificial Sequence: Synthetic oligonucleotide
  Antisense strand to SEQ ID NO: 1851875
auauuccuaccacuagugu

SEQ ID NO: 1851877 - RNA, 19 nt, Artificial Sequence
  Description of Artificial Sequence: Synthetic oligonucleotide
  Sense strand starting at position 3194 of SEQ ID NO: 1564055
ugcaacauuguuuaugaaa

SEQ ID NO: 1851878 - RNA, 19 nt, Artificial Sequence
  Description of Artificial Sequence: Synthetic oligonucleotide
  Antisense strand to SEQ ID NO: 1851877
uuucauaaacaauguugca

SEQ ID NO: 1851879 - RNA, 19 nt, Artificial Sequence
  Description of Artificial Sequence: Synthetic oligonucleotide
  Sense strand starting at position 3287 of SEQ ID NO: 1564055
augacaaaguucucuauga

SEQ ID NO: 1851880 - RNA, 19 nt, Artificial Sequence
  Description of Artificial Sequence: Synthetic oligonucleotide
  Antisense strand to SEQ ID NO: 1851879
ucauagagaacuuugucau

SEQ ID NO: 1851881 - RNA, 19 nt, Artificial Sequence
  Description of Artificial Sequence: Synthetic oligonucleotide
  Sense strand starting at position 3288 of SEQ ID NO: 1564055
ugacaaaguucucuaugaa

SEQ ID NO: 1851882 - RNA, 19 nt, Artificial Sequence
  Description of Artificial Sequence: Synthetic oligonucleotide
  Antisense strand to SEQ ID NO: 1851881
uucauagagaacuuuguca

SEQ ID NO: 1851883 - RNA, 19 nt, Artificial Sequence
  Description of Artificial Sequence: Synthetic oligonucleotide
  Sense strand starting at position 3394 of SEQ ID NO: 1564055
gggagcucuagucacuuaa

SEQ ID NO: 1851884 - RNA, 19 nt, Artificial Sequence
  Description of Artificial Sequence: Synthetic oligonucleotide
  Antisense strand to SEQ ID NO: 1851883
uuaagugacuagagcuccc

SEQ ID NO: 1851885 - RNA, 19 nt, Artificial Sequence
  Description of Artificial Sequence: Synthetic oligonucleotide
  Sense strand starting at position 3425 of SEQ ID NO: 1564055
guguguuugcuuguauaug

SEQ ID NO: 1851886 - RNA, 19 nt, Artificial Sequence
  Description of Artificial Sequence: Synthetic oligonucleotide
  Antisense strand to SEQ ID NO: 1851885
cauauacaagcaaacacac

SEQ ID NO: 1851887 - RNA, 19 nt, Artificial Sequence
  Description of Artificial Sequence: Synthetic oligonucleotide
  Sense strand starting at position 3650 of SEQ ID NO: 1564055
aaagauuguagguaauggu

SEQ ID NO: 1851888 - RNA, 19 nt, Artificial Sequence
  Description of Artificial Sequence: Synthetic oligonucleotide
  Antisense strand to SEQ ID NO: 1851887
accauuaccuacaaucuuu

SEQ ID NO: 1851889 - RNA, 19 nt, Artificial Sequence
  Description of Artificial Sequence: Synthetic oligonucleotide
  Sense strand starting at position 3917 of SEQ ID NO: 1564055
gguaaucuaugaguaaaua

SEQ ID NO: 1851890 - RNA, 19 nt, Artificial Sequence
  Description of Artificial Sequence: Synthetic oligonucleotide
  Antisense strand to SEQ ID NO: 1851889
uauuuacucauagauuacc

SEQ ID NO: 1851891 - RNA, 19 nt, Artificial Sequence
  Description of Artificial Sequence: Synthetic oligonucleotide
  Sense strand starting at position 3979 of SEQ ID NO: 1564055
guauuuccaugcucaaguu

SEQ ID NO: 1851892 - RNA, 19 nt, Artificial Sequence
  Description of Artificial Sequence: Synthetic oligonucleotide
  Antisense strand to SEQ ID NO: 1851891
aacuugagcauggaaauac

SEQ ID NO: 1851893 - RNA, 19 nt, Artificial Sequence
  Description of Artificial Sequence: Synthetic oligonucleotide
  Sense strand starting at position 19 of SEQ ID NO: 1564056
gaauguuacgagcauaaga

SEQ ID NO: 1851894 - RNA, 19 nt, Artificial Sequence
  Description of Artificial Sequence: Synthetic oligonucleotide
  Antisense strand to SEQ ID NO: 1851893
ucuuaugcucguaacauuc

SEQ ID NO: 1851895 - RNA, 19 nt, Artificial Sequence
  Description of Artificial Sequence: Synthetic oligonucleotide
  Sense strand starting at position 21 of SEQ ID NO: 1564056
auguuacgagcauaagaua

SEQ ID NO: 1851896 - RNA, 19 nt, Artificial Sequence
  Description of Artificial Sequence: Synthetic oligonucleotide
  Antisense strand to SEQ ID NO: 1851895
uaucuuaugcucguaacau

SEQ ID NO: 1851897 - RNA, 19 nt, Artificial Sequence
  Description of Artificial Sequence: Synthetic oligonucleotide
  Sense strand starting at position 108 of SEQ ID NO: 1564056
guggaucccagacagguau

SEQ ID NO: 1851898 - RNA, 19 nt, Artificial Sequence
  Description of Artificial Sequence: Synthetic oligonucleotide
  Antisense strand to SEQ ID NO: 1851897
auaccugucugggauccac

SEQ ID NO: 1851899 - RNA, 19 nt, Artificial Sequence
  Description of Artificial Sequence: Synthetic oligonucleotide
  Sense strand starting at position 110 of SEQ ID NO: 1564056
ggaucccagacagguauau

SEQ ID NO: 1851900 - RNA, 19 nt, Artificial Sequence
  Description of Artificial Sequence: Synthetic oligonucleotide
  Antisense strand to SEQ ID NO: 1851899
auauaccugucugggaucc

SEQ ID NO: 1851901 - RNA, 19 nt, Artificial Sequence
  Description of Artificial Sequence: Synthetic oligonucleotide
  Sense strand starting at position 151 of SEQ ID NO: 1564056
aaagcuguccuagaccaga

SEQ ID NO: 1851902 - RNA, 19 nt, Artificial Sequence
  Description of Artificial Sequence: Synthetic oligonucleotide
  Antisense strand to SEQ ID NO: 1851901
ucuggucuaggacagcuuu

SEQ ID NO: 1851903 - RNA, 19 nt, Artificial Sequence
  Description of Artificial Sequence: Synthetic oligonucleotide
  Sense strand starting at position 212 of SEQ ID NO: 1564056
ucauccaucguguagacaa

SEQ ID NO: 1851904 - RNA, 19 nt, Artificial Sequence
  Description of Artificial Sequence: Synthetic oligonucleotide
  Antisense strand to SEQ ID NO: 1851903
uugucuacacgauggauga

SEQ ID NO: 1851905 - RNA, 19 nt, Artificial Sequence
  Description of Artificial Sequence: Synthetic oligonucleotide
  Sense strand starting at position 370 of SEQ ID NO: 1564056
aguguuacccuaggucaaa

SEQ ID NO: 1851906 - RNA, 19 nt, Artificial Sequence
  Description of Artificial Sequence: Synthetic oligonucleotide
  Antisense strand to SEQ ID NO: 1851905
uuugaccuaggguaacacu

SEQ ID NO: 1851907 - RNA, 19 nt, Artificial Sequence
  Description of Artificial Sequence: Synthetic oligonucleotide
  Sense strand starting at position 371 of SEQ ID NO: 1564056
guguuacccuaggucaaau

SEQ ID NO: 1851908 - RNA, 19 nt, Artificial Sequence
  Description of Artificial Sequence: Synthetic oligonucleotide
  Antisense strand to SEQ ID NO: 1851907
auuugaccuaggguaacac

SEQ ID NO: 1851909 - RNA, 19 nt, Artificial Sequence
  Description of Artificial Sequence: Synthetic oligonucleotide
  Sense strand starting at position 517 of SEQ ID NO: 1564056
ccuguacugccagacaacu

SEQ ID NO: 1851910 - RNA, 19 nt, Artificial Sequence
  Description of Artificial Sequence: Synthetic oligonucleotide
  Antisense strand to SEQ ID NO: 1851909
aguugucuggcaguacagg

SEQ ID NO: 1851911 - RNA, 19 nt, Artificial Sequence
  Description of Artificial Sequence: Synthetic oligonucleotide
  Sense strand starting at position 684 of SEQ ID NO: 1564056
ggaauaguauuaccucacu

SEQ ID NO: 1851912 - RNA, 19 nt, Artificial Sequence
  Description of Artificial Sequence: Synthetic oligonucleotide
  Antisense strand to SEQ ID NO: 1851911
agugagguaauacuauucc

SEQ ID NO: 1851913 - RNA, 19 nt, Artificial Sequence
  Description of Artificial Sequence: Synthetic oligonucleotide
  Sense strand starting at position 687 of SEQ ID NO: 1564056
auaguauuaccucacugca

SEQ ID NO: 1851914 - RNA, 19 nt, Artificial Sequence
  Description of Artificial Sequence: Synthetic oligonucleotide
  Antisense strand to SEQ ID NO: 1851913
ugcagugagguaauacuau

SEQ ID NO: 1851915 - RNA, 19 nt, Artificial Sequence
  Description of Artificial Sequence: Synthetic oligonucleotide
  Sense strand starting at position 712 of SEQ ID NO: 1564056
uccucaaguuuauuggaca

SEQ ID NO: 1851916 - RNA, 19 nt, Artificial Sequence
  Description of Artificial Sequence: Synthetic oligonucleotide
  Antisense strand to SEQ ID NO: 1851915
uguccaauaaacuugagga

SEQ ID NO: 1851917 - RNA, 19 nt, Artificial Sequence
  Description of Artificial Sequence: Synthetic oligonucleotide
  Sense strand starting at position 835 of SEQ ID NO: 1564056
ugaacuaaguaguuuagua

SEQ ID NO: 1851918 - RNA, 19 nt, Artificial Sequence
  Description of Artificial Sequence: Synthetic oligonucleotide
  Antisense strand to SEQ ID NO: 1851917
uacuaaacuacuuaguuca

SEQ ID NO: 1851919 - RNA, 19 nt, Artificial Sequence
  Description of Artificial Sequence: Synthetic oligonucleotide
  Sense strand starting at position 935 of SEQ ID NO: 1564056
gcaacagcugcuuaacauu

SEQ ID NO: 1851920 - RNA, 19 nt, Artificial Sequence
  Description of Artificial Sequence: Synthetic oligonucleotide
  Antisense strand to SEQ ID NO: 1851919
aauguuaagcagcuguugc

SEQ ID NO: 1851921 - RNA, 19 nt, Artificial Sequence
  Description of Artificial Sequence: Synthetic oligonucleotide
  Sense strand starting at position 978 of SEQ ID NO: 1564056
uccucuugccuuugaaaga

SEQ ID NO: 1851922 - RNA, 19 nt, Artificial Sequence
  Description of Artificial Sequence: Synthetic oligonucleotide
  Antisense strand to SEQ ID NO: 1851921
ucuuucaaaggcaagagga

SEQ ID NO: 1851923 - RNA, 19 nt, Artificial Sequence
  Description of Artificial Sequence: Synthetic oligonucleotide
  Sense strand starting at position 1234 of SEQ ID NO: 1564056
cgucaacaucguuugcuau

SEQ ID NO: 1851924 - RNA, 19 nt, Artificial Sequence
  Description of Artificial Sequence: Synthetic oligonucleotide
  Antisense strand to SEQ ID NO: 1851923
auagcaaacgauguugacg

SEQ ID NO: 1851925 - RNA, 19 nt, Artificial Sequence
  Description of Artificial Sequence: Synthetic oligonucleotide
  Sense strand starting at position 1415 of SEQ ID NO: 1564056
ccaacauuggcugggaaca

SEQ ID NO: 1851926 - RNA, 19 nt, Artificial Sequence
  Description of Artificial Sequence: Synthetic oligonucleotide
  Antisense strand to SEQ ID NO: 1851925
uguucccagccaauguugg

SEQ ID NO: 1851927 - RNA, 19 nt, Artificial Sequence
  Description of Artificial Sequence: Synthetic oligonucleotide
  Sense strand starting at position 1416 of SEQ ID NO: 1564056
caacauuggcugggaacau

SEQ ID NO: 1851928 - RNA, 19 nt, Artificial Sequence
  Description of Artificial Sequence: Synthetic oligonucleotide
  Antisense strand to SEQ ID NO: 1851927
auguucccagccaauguug

SEQ ID NO: 1851929 - RNA, 19 nt, Artificial Sequence
  Description of Artificial Sequence: Synthetic oligonucleotide
  Sense strand starting at position 1615 of SEQ ID NO: 1564056
agccaaacuuucucgagaa

SEQ ID NO: 1851930 - RNA, 19 nt, Artificial Sequence
  Description of Artificial Sequence: Synthetic oligonucleotide
  Antisense strand to SEQ ID NO: 1851929
uucucgagaaaguuuggcu

SEQ ID NO: 1851931 - RNA, 19 nt, Artificial Sequence
  Description of Artificial Sequence: Synthetic oligonucleotide
  Sense strand starting at position 1967 of SEQ ID NO: 1564056
acuuuauacugcccgggaa

SEQ ID NO: 1851932 - RNA, 19 nt, Artificial Sequence
  Description of Artificial Sequence: Synthetic oligonucleotide
  Antisense strand to SEQ ID NO: 1851931
uucccgggcaguauaaagu

SEQ ID NO: 1851933 - RNA, 19 nt, Artificial Sequence
  Description of Artificial Sequence: Synthetic oligonucleotide
  Sense strand starting at position 2239 of SEQ ID NO: 1564056
guuuauugagcguccuagu

SEQ ID NO: 1851934 - RNA, 19 nt, Artificial Sequence
  Description of Artificial Sequence: Synthetic oligonucleotide
  Antisense strand to SEQ ID NO: 1851933
acuaggacgcucaauaaac

SEQ ID NO: 1851935 - RNA, 19 nt, Artificial Sequence
  Description of Artificial Sequence: Synthetic oligonucleotide
  Sense strand starting at position 2316 of SEQ ID NO: 1564056
aaaugugaugaggguagau

SEQ ID NO: 1851936 - RNA, 19 nt, Artificial Sequence
  Description of Artificial Sequence: Synthetic oligonucleotide
  Antisense strand to SEQ ID NO: 1851935
aucuacccucaucacauuu

SEQ ID NO: 1851937 - RNA, 19 nt, Artificial Sequence
  Description of Artificial Sequence: Synthetic oligonucleotide
  Sense strand starting at position 2435 of SEQ ID NO: 1564056
gggaauuucugauaaauac

SEQ ID NO: 1851938 - RNA, 19 nt, Artificial Sequence
  Description of Artificial Sequence: Synthetic oligonucleotide
  Antisense strand to SEQ ID NO: 1851937
guauuuaucagaaauuccc

SEQ ID NO: 1851939 - RNA, 19 nt, Artificial Sequence
  Description of Artificial Sequence: Synthetic oligonucleotide
  Sense strand starting at position 2937 of SEQ ID NO: 1564056
acgcuaauuuauucugcga

SEQ ID NO: 1851940 - RNA, 19 nt, Artificial Sequence
  Description of Artificial Sequence: Synthetic oligonucleotide
  Antisense strand to SEQ ID NO: 1851939
ucgcagaauaaauuagcgu

SEQ ID NO: 1851941 - RNA, 19 nt, Artificial Sequence
  Description of Artificial Sequence: Synthetic oligonucleotide
  Sense strand starting at position 3344 of SEQ ID NO: 1564056
aguauaguaugucccaaau

SEQ ID NO: 1851942 - RNA, 19 nt, Artificial Sequence
  Description of Artificial Sequence: Synthetic oligonucleotide
  Antisense strand to SEQ ID NO: 1851941
auuugggacauacuauacu

SEQ ID NO: 1851943 - RNA, 19 nt, Artificial Sequence
  Description of Artificial Sequence: Synthetic oligonucleotide
  Sense strand starting at position 3521 of SEQ ID NO: 1564056
ugauuaaugccagggagga

SEQ ID NO: 1851944 - RNA, 19 nt, Artificial Sequence
  Description of Artificial Sequence: Synthetic oligonucleotide
  Antisense strand to SEQ ID NO: 1851943
uccucccuggcauuaauca

SEQ ID NO: 1851945 - RNA, 19 nt, Artificial Sequence
  Description of Artificial Sequence: Synthetic oligonucleotide
  Sense strand starting at position 3548 of SEQ ID NO: 1564056
aguugcuuugauggacaau

SEQ ID NO: 1851946 - RNA, 19 nt, Artificial Sequence
  Description of Artificial Sequence: Synthetic oligonucleotide
  Antisense strand to SEQ ID NO: 1851945
auuguccaucaaagcaacu

SEQ ID NO: 1851947 - RNA, 19 nt, Artificial Sequence
  Description of Artificial Sequence: Synthetic oligonucleotide
  Sense strand starting at position 3549 of SEQ ID NO: 1564056
guugcuuugauggacaaua

SEQ ID NO: 1851948 - RNA, 19 nt, Artificial Sequence
  Description of Artificial Sequence: Synthetic oligonucleotide
  Antisense strand to SEQ ID NO: 1851947
uauuguccaucaaagcaac

SEQ ID NO: 1851949 - RNA, 19 nt, Artificial Sequence
  Description of Artificial Sequence: Synthetic oligonucleotide
  Sense strand starting at position 3551 of SEQ ID NO: 1564056
ugcuuugauggacaauauu

SEQ ID NO: 1851950 - RNA, 19 nt, Artificial Sequence
  Description of Artificial Sequence: Synthetic oligonucleotide
  Antisense strand to SEQ ID NO: 1851949
aauauuguccaucaaagca

SEQ ID NO: 1851951 - RNA, 19 nt, Artificial Sequence
  Description of Artificial Sequence: Synthetic oligonucleotide
  Sense strand starting at position 3597 of SEQ ID NO: 1564056
agggaaggucuaugugaag

SEQ ID NO: 1851952 - RNA, 19 nt, Artificial Sequence
  Description of Artificial Sequence: Synthetic oligonucleotide
  Antisense strand to SEQ ID NO: 1851951
cuucacauagaccuucccu

SEQ ID NO: 1851953 - RNA, 19 nt, Artificial Sequence
  Description of Artificial Sequence: Synthetic oligonucleotide
  Sense strand starting at position 3603 of SEQ ID NO: 1564056
ggucuaugugaagagguga

SEQ ID NO: 1851954 - RNA, 19 nt, Artificial Sequence
  Description of Artificial Sequence: Synthetic oligonucleotide
  Antisense strand to SEQ ID NO: 1851953
ucaccucuucacauagacc

SEQ ID NO: 1851955 - RNA, 19 nt, Artificial Sequence
  Description of Artificial Sequence: Synthetic oligonucleotide
  Sense strand starting at position 3720 of SEQ ID NO: 1564056
agaggaagagcuuggcaua

SEQ ID NO: 1851956 - RNA, 19 nt, Artificial Sequence
  Description of Artificial Sequence: Synthetic oligonucleotide
  Antisense strand to SEQ ID NO: 1851955
uaugccaagcucuuccucu

SEQ ID NO: 1851957 - RNA, 19 nt, Artificial Sequence
  Description of Artificial Sequence: Synthetic oligonucleotide
  Sense strand starting at position 3721 of SEQ ID NO: 1564056
gaggaagagcuuggcauau

SEQ ID NO: 1851958 - RNA, 19 nt, Artificial Sequence
  Description of Artificial Sequence: Synthetic oligonucleotide
  Antisense strand to SEQ ID NO: 1851957
auaugccaagcucuuccuc

SEQ ID NO: 1851959 - RNA, 19 nt, Artificial Sequence
  Description of Artificial Sequence: Synthetic oligonucleotide
  Sense strand starting at position 3798 of SEQ ID NO: 1564056
ccaagauuggcaggaccuu

SEQ ID NO: 1851960 - RNA, 19 nt, Artificial Sequence
  Description of Artificial Sequence: Synthetic oligonucleotide
  Antisense strand to SEQ ID NO: 1851959
aagguccugccaaucuugg

SEQ ID NO: 1851961 - RNA, 19 nt, Artificial Sequence
  Description of Artificial Sequence: Synthetic oligonucleotide
  Sense strand starting at position 3814 of SEQ ID NO: 1564056
cuuugagcccauuaaauga

SEQ ID NO: 1851962 - RNA, 19 nt, Artificial Sequence
  Description of Artificial Sequence: Synthetic oligonucleotide
  Antisense strand to SEQ ID NO: 1851961
ucauuuaaugggcucaaag

SEQ ID NO: 1851963 - RNA, 19 nt, Artificial Sequence
  Description of Artificial Sequence: Synthetic oligonucleotide
  Sense strand starting at position 3893 of SEQ ID NO: 1564056
agaggaugguggcuugaau

SEQ ID NO: 1851964 - RNA, 19 nt, Artificial Sequence
  Description of Artificial Sequence: Synthetic oligonucleotide
  Antisense strand to SEQ ID NO: 1851963
auucaagccaccauccucu

SEQ ID NO: 1851965 - RNA, 19 nt, Artificial Sequence
  Description of Artificial Sequence: Synthetic oligonucleotide
  Sense strand starting at position 3957 of SEQ ID NO: 1564056
ugaauaugauagguaucgu

SEQ ID NO: 1851966 - RNA, 19 nt, Artificial Sequence
  Description of Artificial Sequence: Synthetic oligonucleotide
  Antisense strand to SEQ ID NO: 1851965
acgauaccuaucauauuca

SEQ ID NO: 1851967 - RNA, 19 nt, Artificial Sequence
  Description of Artificial Sequence: Synthetic oligonucleotide
  Sense strand starting at position 3958 of SEQ ID NO: 1564056
gaauaugauagguaucgug

SEQ ID NO: 1851968 - RNA, 19 nt, Artificial Sequence
  Description of Artificial Sequence: Synthetic oligonucleotide
  Antisense strand to SEQ ID NO: 1851967
cacgauaccuaucauauuc

SEQ ID NO: 1851969 - RNA, 19 nt, Artificial Sequence
  Description of Artificial Sequence: Synthetic oligonucleotide
  Sense strand starting at position 3967 of SEQ ID NO: 1564056
agguaucguguuuaauggu

SEQ ID NO: 1851970 - RNA, 19 nt, Artificial Sequence
  Description of Artificial Sequence: Synthetic oligonucleotide
  Antisense strand to SEQ ID NO: 1851969
accauuaaacacgauaccu

SEQ ID NO: 1851971 - RNA, 19 nt, Artificial Sequence
  Description of Artificial Sequence: Synthetic oligonucleotide
  Sense strand starting at position 3972 of SEQ ID NO: 1564056
ucguguuuaauggugcuau

SEQ ID NO: 1851972 - RNA, 19 nt, Artificial Sequence
  Description of Artificial Sequence: Synthetic oligonucleotide
  Antisense strand to SEQ ID NO: 1851971
auagcaccauuaaacacga

SEQ ID NO: 1851973 - RNA, 19 nt, Artificial Sequence
  Description of Artificial Sequence: Synthetic oligonucleotide
  Sense strand starting at position 107 of SEQ ID NO: 1564057
ggacacuuacugugagaac

SEQ ID NO: 1851974 - RNA, 19 nt, Artificial Sequence
  Description of Artificial Sequence: Synthetic oligonucleotide
  Antisense strand to SEQ ID NO: 1851973
guucucacaguaagugucc

SEQ ID NO: 1851975 - RNA, 19 nt, Artificial Sequence
  Description of Artificial Sequence: Synthetic oligonucleotide
  Sense strand starting at position 205 of SEQ ID NO: 1564057
uuaccaaguguuuacuaca

SEQ ID NO: 1851976 - RNA, 19 nt, Artificial Sequence
  Description of Artificial Sequence: Synthetic oligonucleotide
  Antisense strand to SEQ ID NO: 1851975
uguaguaaacacuugguaa

SEQ ID NO: 1851977 - RNA, 19 nt, Artificial Sequence
  Description of Artificial Sequence: Synthetic oligonucleotide
  Sense strand starting at position 906 of SEQ ID NO: 1564057
uuaagcauuuccuagggaa

SEQ ID NO: 1851978 - RNA, 19 nt, Artificial Sequence
  Description of Artificial Sequence: Synthetic oligonucleotide
  Antisense strand to SEQ ID NO: 1851977
uucccuaggaaaugcuuaa

SEQ ID NO: 1851979 - RNA, 19 nt, Artificial Sequence
  Description of Artificial Sequence: Synthetic oligonucleotide
  Sense strand starting at position 909 of SEQ ID NO: 1564057
agcauuuccuagggaauaa

SEQ ID NO: 1851980 - RNA, 19 nt, Artificial Sequence
  Description of Artificial Sequence: Synthetic oligonucleotide
  Antisense strand to SEQ ID NO: 1851979
uuauucccuaggaaaugcu

SEQ ID NO: 1851981 - RNA, 19 nt, Artificial Sequence
  Description of Artificial Sequence: Synthetic oligonucleotide
  Sense strand starting at position 966 of SEQ ID NO: 1564057
gggauauuagcacguaacu

SEQ ID NO: 1851982 - RNA, 19 nt, Artificial Sequence
  Description of Artificial Sequence: Synthetic oligonucleotide
  Antisense strand to SEQ ID NO: 1851981
aguuacgugcuaauauccc

SEQ ID NO: 1851983 - RNA, 19 nt, Artificial Sequence
  Description of Artificial Sequence: Synthetic oligonucleotide
  Sense strand starting at position 978 of SEQ ID NO: 1564057
cguaacucgcaagauuauu

SEQ ID NO: 1851984 - RNA, 19 nt, Artificial Sequence
  Description of Artificial Sequence: Synthetic oligonucleotide
  Antisense strand to SEQ ID NO: 1851983
aauaaucuugcgaguuacg

SEQ ID NO: 1851985 - RNA, 19 nt, Artificial Sequence
  Description of Artificial Sequence: Synthetic oligonucleotide
  Sense strand starting at position 983 of SEQ ID NO: 1564057
cucgcaagauuauuauaag

SEQ ID NO: 1851986 - RNA, 19 nt, Artificial Sequence
  Description of Artificial Sequence: Synthetic oligonucleotide
  Antisense strand to SEQ ID NO: 1851985
cuuauaauaaucuugcgag

SEQ ID NO: 1851987 - RNA, 19 nt, Artificial Sequence
  Description of Artificial Sequence: Synthetic oligonucleotide
  Sense strand starting at position 1034 of SEQ ID NO: 1564057
gcacaauguuugguacaau

SEQ ID NO: 1851988 - RNA, 19 nt, Artificial Sequence
  Description of Artificial Sequence: Synthetic oligonucleotide
  Antisense strand to SEQ ID NO: 1851987
auuguaccaaacauugugc

SEQ ID NO: 1851989 - RNA, 19 nt, Artificial Sequence
  Description of Artificial Sequence: Synthetic oligonucleotide
  Sense strand starting at position 1078 of SEQ ID NO: 1564057
acaauuacugauugugaua

SEQ ID NO: 1851990 - RNA, 19 nt, Artificial Sequence
  Description of Artificial Sequence: Synthetic oligonucleotide
  Antisense strand to SEQ ID NO: 1851989
uaucacaaucaguaauugu

SEQ ID NO: 1851991 - RNA, 19 nt, Artificial Sequence
  Description of Artificial Sequence: Synthetic oligonucleotide
  Sense strand starting at position 1216 of SEQ ID NO: 1564057
ggcuaagaccaagaguucu

SEQ ID NO: 1851992 - RNA, 19 nt, Artificial Sequence
  Description of Artificial Sequence: Synthetic oligonucleotide
  Antisense strand to SEQ ID NO: 1851991
agaacucuuggucuuagcc

SEQ ID NO: 1851993 - RNA, 19 nt, Artificial Sequence
  Description of Artificial Sequence: Synthetic oligonucleotide
  Sense strand starting at position 1224 of SEQ ID NO: 1564057
ccaagaguucuagaaugcu

SEQ ID NO: 1851994 - RNA, 19 nt, Artificial Sequence
  Description of Artificial Sequence: Synthetic oligonucleotide
  Antisense strand to SEQ ID NO: 1851993
agcauucuagaacucuugg

SEQ ID NO: 1851995 - RNA, 19 nt, Artificial Sequence
  Description of Artificial Sequence: Synthetic oligonucleotide
  Sense strand starting at position 1227 of SEQ ID NO: 1564057
agaguucuagaaugcuaua

SEQ ID NO: 1851996 - RNA, 19 nt, Artificial Sequence
  Description of Artificial Sequence: Synthetic oligonucleotide
  Antisense strand to SEQ ID NO: 1851995
uauagcauucuagaacucu

SEQ ID NO: 1851997 - RNA, 19 nt, Artificial Sequence
  Description of Artificial Sequence: Synthetic oligonucleotide
  Sense strand starting at position 1232 of SEQ ID NO: 1564057
ucuagaaugcuauaguucu

SEQ ID NO: 1851998 - RNA, 19 nt, Artificial Sequence
  Description of Artificial Sequence: Synthetic oligonucleotide
  Antisense strand to SEQ ID NO: 1851997
agaacuauagcauucuaga

SEQ ID NO: 1851999 - RNA, 19 nt, Artificial Sequence
  Description of Artificial Sequence: Synthetic oligonucleotide
  Sense strand starting at position 1312 of SEQ ID NO: 1564057
uuuccucagcaguauaaug

SEQ ID NO: 1852000 - RNA, 19 nt, Artificial Sequence
  Description of Artificial Sequence: Synthetic oligonucleotide
  Antisense strand to SEQ ID NO: 1851999
cauuauacugcugaggaaa

SEQ ID NO: 1852001 - RNA, 19 nt, Artificial Sequence
  Description of Artificial Sequence: Synthetic oligonucleotide
  Sense strand starting at position 1319 of SEQ ID NO: 1564057
agcaguauaaugggucaga

SEQ ID NO: 1852002 - RNA, 19 nt, Artificial Sequence
  Description of Artificial Sequence: Synthetic oligonucleotide
  Antisense strand to SEQ ID NO: 1852001
ucugacccauuauacugcu

SEQ ID NO: 1852003 - RNA, 19 nt, Artificial Sequence
  Description of Artificial Sequence: Synthetic oligonucleotide
  Sense strand starting at position 1320 of SEQ ID NO: 1564057
gcaguauaaugggucagag

SEQ ID NO: 1852004 - RNA, 19 nt, Artificial Sequence
  Description of Artificial Sequence: Synthetic oligonucleotide
  Antisense strand to SEQ ID NO: 1852003
cucugacccauuauacugc

SEQ ID NO: 1852005 - RNA, 19 nt, Artificial Sequence
  Description of Artificial Sequence: Synthetic oligonucleotide
  Sense strand starting at position 1501 of SEQ ID NO: 1564057
gaugaauguaagcaggagu

SEQ ID NO: 1852006 - RNA, 19 nt, Artificial Sequence
  Description of Artificial Sequence: Synthetic oligonucleotide
  Antisense strand to SEQ ID NO: 1852005
acuccugcuuacauucauc

SEQ ID NO: 1852007 - RNA, 19 nt, Artificial Sequence
  Description of Artificial Sequence: Synthetic oligonucleotide
  Sense strand starting at position 2201 of SEQ ID NO: 1564057
ccaccucuugaacgauauc

SEQ ID NO: 1852008 - RNA, 19 nt, Artificial Sequence
  Description of Artificial Sequence: Synthetic oligonucleotide
  Antisense strand to SEQ ID NO: 1852007
gauaucguucaagaggugg

SEQ ID NO: 1852009 - RNA, 19 nt, Artificial Sequence
  Description of Artificial Sequence: Synthetic oligonucleotide
  Sense strand starting at position 2204 of SEQ ID NO: 1564057
ccucuugaacgauaucuga

SEQ ID NO: 1852010 - RNA, 19 nt, Artificial Sequence
  Description of Artificial Sequence: Synthetic oligonucleotide
  Antisense strand to SEQ ID NO: 1852009
ucagauaucguucaagagg

SEQ ID NO: 1852011 - RNA, 19 nt, Artificial Sequence
  Description of Artificial Sequence: Synthetic oligonucleotide
  Sense strand starting at position 2207 of SEQ ID NO: 1564057
cuugaacgauaucugaaac

SEQ ID NO: 1852012 - RNA, 19 nt, Artificial Sequence
  Description of Artificial Sequence: Synthetic oligonucleotide
  Antisense strand to SEQ ID NO: 1852011
guuucagauaucguucaag

SEQ ID NO: 1852013 - RNA, 19 nt, Artificial Sequence
  Description of Artificial Sequence: Synthetic oligonucleotide
  Sense strand starting at position 2217 of SEQ ID NO: 1564057
aucugaaacugguuagauu

SEQ ID NO: 1852014 - RNA, 19 nt, Artificial Sequence
  Description of Artificial Sequence: Synthetic oligonucleotide
  Antisense strand to SEQ ID NO: 1852013
aaucuaaccaguuucagau

SEQ ID NO: 1852015 - RNA, 19 nt, Artificial Sequence
  Description of Artificial Sequence: Synthetic oligonucleotide
  Sense strand starting at position 2225 of SEQ ID NO: 1564057
cugguuagauuagcuauaa

SEQ ID NO: 1852016 - RNA, 19 nt, Artificial Sequence
  Description of Artificial Sequence: Synthetic oligonucleotide
  Antisense strand to SEQ ID NO: 1852015
uuauagcuaaucuaaccag

SEQ ID NO: 1852017 - RNA, 19 nt, Artificial Sequence
  Description of Artificial Sequence: Synthetic oligonucleotide
  Sense strand starting at position 2226 of SEQ ID NO: 1564057
ugguuagauuagcuauaaa

SEQ ID NO: 1852018 - RNA, 19 nt, Artificial Sequence
  Description of Artificial Sequence: Synthetic oligonucleotide
  Antisense strand to SEQ ID NO: 1852017
uuuauagcuaaucuaacca

SEQ ID NO: 1852019 - RNA, 19 nt, Artificial Sequence
  Description of Artificial Sequence: Synthetic oligonucleotide
  Sense strand starting at position 2271 of SEQ ID NO: 1564057
gccugauguggcgacuuua

SEQ ID NO: 1852020 - RNA, 19 nt, Artificial Sequence
  Description of Artificial Sequence: Synthetic oligonucleotide
  Antisense strand to SEQ ID NO: 1852019
uaaagucgccacaucaggc

SEQ ID NO: 1852021 - RNA, 19 nt, Artificial Sequence
  Description of Artificial Sequence: Synthetic oligonucleotide
  Sense strand starting at position 2419 of SEQ ID NO: 1564057
uucuguuguccuuauccca

SEQ ID NO: 1852022 - RNA, 19 nt, Artificial Sequence
  Description of Artificial Sequence: Synthetic oligonucleotide
  Antisense strand to SEQ ID NO: 1852021
ugggauaaggacaacagaa

SEQ ID NO: 1852023 - RNA, 19 nt, Artificial Sequence
  Description of Artificial Sequence: Synthetic oligonucleotide
  Sense strand starting at position 2451 of SEQ ID NO: 1564057
agaccagugugcuucuaua

SEQ ID NO: 1852024 - RNA, 19 nt, Artificial Sequence
  Description of Artificial Sequence: Synthetic oligonucleotide
  Antisense strand to SEQ ID NO: 1852023
uauagaagcacacuggucu

SEQ ID NO: 1852025 - RNA, 19 nt, Artificial Sequence
  Description of Artificial Sequence: Synthetic oligonucleotide
  Sense strand starting at position 2484 of SEQ ID NO: 1564057
ccuacacauuugcaugaga

SEQ ID NO: 1852026 - RNA, 19 nt, Artificial Sequence
  Description of Artificial Sequence: Synthetic oligonucleotide
  Antisense strand to SEQ ID NO: 1852025
ucucaugcaaauguguagg

SEQ ID NO: 1852027 - RNA, 19 nt, Artificial Sequence
  Description of Artificial Sequence: Synthetic oligonucleotide
  Sense strand starting at position 2599 of SEQ ID NO: 1564057
uguacuauacgaugcuaga

SEQ ID NO: 1852028 - RNA, 19 nt, Artificial Sequence
  Description of Artificial Sequence: Synthetic oligonucleotide
  Antisense strand to SEQ ID NO: 1852027
ucuagcaucguauaguaca

SEQ ID NO: 1852029 - RNA, 19 nt, Artificial Sequence
  Description of Artificial Sequence: Synthetic oligonucleotide
  Sense strand starting at position 2609 of SEQ ID NO: 1564057
gaugcuagaguauguacua

SEQ ID NO: 1852030 - RNA, 19 nt, Artificial Sequence
  Description of Artificial Sequence: Synthetic oligonucleotide
  Antisense strand to SEQ ID NO: 1852029
uaguacauacucuagcauc

SEQ ID NO: 1852031 - RNA, 19 nt, Artificial Sequence
  Description of Artificial Sequence: Synthetic oligonucleotide
  Sense strand starting at position 2610 of SEQ ID NO: 1564057
augcuagaguauguacuaa

SEQ ID NO: 1852032 - RNA, 19 nt, Artificial Sequence
  Description of Artificial Sequence: Synthetic oligonucleotide
  Antisense strand to SEQ ID NO: 1852031
uuaguacauacucuagcau

SEQ ID NO: 1852033 - RNA, 19 nt, Artificial Sequence
  Description of Artificial Sequence: Synthetic oligonucleotide
  Sense strand starting at position 3280 of SEQ ID NO: 1564057
cagcuaaggucuguagaca

SEQ ID NO: 1852034 - RNA, 19 nt, Artificial Sequence
  Description of Artificial Sequence: Synthetic oligonucleotide
  Antisense strand to SEQ ID NO: 1852033
ugucuacagaccuuagcug

SEQ ID NO: 1852035 - RNA, 19 nt, Artificial Sequence
  Description of Artificial Sequence: Synthetic oligonucleotide
  Sense strand starting at position 3404 of SEQ ID NO: 1564057
ggaagagauuauuaaugua

SEQ ID NO: 1852036 - RNA, 19 nt, Artificial Sequence
  Description of Artificial Sequence: Synthetic oligonucleotide
  Antisense strand to SEQ ID NO: 1852035
uacauuaauaaucucuucc

SEQ ID NO: 1852037 - RNA, 19 nt, Artificial Sequence
  Description of Artificial Sequence: Synthetic oligonucleotide
  Sense strand starting at position 3487 of SEQ ID NO: 1564057
gcucuuggacuaugauguu

SEQ ID NO: 1852038 - RNA, 19 nt, Artificial Sequence
  Description of Artificial Sequence: Synthetic oligonucleotide
  Antisense strand to SEQ ID NO: 1852037
aacaucauaguccaagagc

SEQ ID NO: 1852039 - RNA, 19 nt, Artificial Sequence
  Description of Artificial Sequence: Synthetic oligonucleotide
  Sense strand starting at position 3753 of SEQ ID NO: 1564057
aaagcuaaacagugacaga

SEQ ID NO: 1852040 - RNA, 19 nt, Artificial Sequence
  Description of Artificial Sequence: Synthetic oligonucleotide
  Antisense strand to SEQ ID NO: 1852039
ucugucacuguuuagcuuu

SEQ ID NO: 1852041 - RNA, 19 nt, Artificial Sequence
  Description of Artificial Sequence: Synthetic oligonucleotide
  Sense strand starting at position 3813 of SEQ ID NO: 1564057
uuaguuguggguugaagua

SEQ ID NO: 1852042 - RNA, 19 nt, Artificial Sequence
  Description of Artificial Sequence: Synthetic oligonucleotide
  Antisense strand to SEQ ID NO: 1852041
uacuucaacccacaacuaa

SEQ ID NO: 1852043 - RNA, 19 nt, Artificial Sequence
  Description of Artificial Sequence: Synthetic oligonucleotide
  Sense strand starting at position 3832 of SEQ ID NO: 1564057
gccauugcagagugguaaa

SEQ ID NO: 1852044 - RNA, 19 nt, Artificial Sequence
  Description of Artificial Sequence: Synthetic oligonucleotide
  Antisense strand to SEQ ID NO: 1852043
uuuaccacucugcaauggc

SEQ ID NO: 1852045 - RNA, 19 nt, Artificial Sequence
  Description of Artificial Sequence: Synthetic oligonucleotide
  Sense strand starting at position 3860 of SEQ ID NO: 1564057
agcauuaucuugcugacuu

SEQ ID NO: 1852046 - RNA, 19 nt, Artificial Sequence
  Description of Artificial Sequence: Synthetic oligonucleotide
  Antisense strand to SEQ ID NO: 1852045
aagucagcaagauaaugcu

SEQ ID NO: 1852047 - RNA, 19 nt, Artificial Sequence
  Description of Artificial Sequence: Synthetic oligonucleotide
  Sense strand starting at position 3885 of SEQ ID NO: 1564057
auggcugugaaaugagaga

SEQ ID NO: 1852048 - RNA, 19 nt, Artificial Sequence
  Description of Artificial Sequence: Synthetic oligonucleotide
  Antisense strand to SEQ ID NO: 1852047
ucucucauuucacagccau

SEQ ID NO: 1852049 - RNA, 19 nt, Artificial Sequence
  Description of Artificial Sequence: Synthetic oligonucleotide
  Sense strand starting at position 3920 of SEQ ID NO: 1564057
gggauuagucaucaguguu

SEQ ID NO: 1852050 - RNA, 19 nt, Artificial Sequence
  Description of Artificial Sequence: Synthetic oligonucleotide
  Antisense strand to SEQ ID NO: 1852049
aacacugaugacuaauccc

SEQ ID NO: 1852051 - RNA, 19 nt, Artificial Sequence
  Description of Artificial Sequence: Synthetic oligonucleotide
  Sense strand starting at position 3926 of SEQ ID NO: 1564057
agucaucaguguuccgaga

SEQ ID NO: 1852052 - RNA, 19 nt, Artificial Sequence
  Description of Artificial Sequence: Synthetic oligonucleotide
  Antisense strand to SEQ ID NO: 1852051
ucucggaacacugaugacu

SEQ ID NO: 1852053 - RNA, 19 nt, Artificial Sequence
  Description of Artificial Sequence: Synthetic oligonucleotide
  Sense strand starting at position 2098 of SEQ ID NO: 1564058
acgucauaguucuugggaa

SEQ ID NO: 1852054 - RNA, 19 nt, Artificial Sequence
  Description of Artificial Sequence: Synthetic oligonucleotide
  Antisense strand to SEQ ID NO: 1852053
uucccaagaacuaugacgu

SEQ ID NO: 1852055 - RNA, 19 nt, Artificial Sequence
  Description of Artificial Sequence: Synthetic oligonucleotide
  Sense strand starting at position 2100 of SEQ ID NO: 1564058
gucauaguucuugggaaca

SEQ ID NO: 1852056 - RNA, 19 nt, Artificial Sequence
  Description of Artificial Sequence: Synthetic oligonucleotide
  Antisense strand to SEQ ID NO: 1852055
uguucccaagaacuaugac

SEQ ID NO: 1852057 - RNA, 19 nt, Artificial Sequence
  Description of Artificial Sequence: Synthetic oligonucleotide
  Sense strand starting at position 2141 of SEQ ID NO: 1564058
aggaaauccuaggaauaga

SEQ ID NO: 1852058 - RNA, 19 nt, Artificial Sequence
  Description of Artificial Sequence: Synthetic oligonucleotide
  Antisense strand to SEQ ID NO: 1852057
ucuauuccuaggauuuccu

SEQ ID NO: 1852059 - RNA, 19 nt, Artificial Sequence
  Description of Artificial Sequence: Synthetic oligonucleotide
  Sense strand starting at position 2194 of SEQ ID NO: 1564058
ccagaaguguagucuucua

SEQ ID NO: 1852060 - RNA, 19 nt, Artificial Sequence
  Description of Artificial Sequence: Synthetic oligonucleotide
  Antisense strand to SEQ ID NO: 1852059
uagaagacuacacuucugg

SEQ ID NO: 1852061 - RNA, 19 nt, Artificial Sequence
  Description of Artificial Sequence: Synthetic oligonucleotide
  Sense strand starting at position 2242 of SEQ ID NO: 1564058
auggaaugguuauugauau

SEQ ID NO: 1852062 - RNA, 19 nt, Artificial Sequence
  Description of Artificial Sequence: Synthetic oligonucleotide
  Antisense strand to SEQ ID NO: 1852061
auaucaauaaccauuccau

SEQ ID NO: 1852063 - RNA, 19 nt, Artificial Sequence
  Description of Artificial Sequence: Synthetic oligonucleotide
  Sense strand starting at position 2272 of SEQ ID NO: 1564058
guuacauugguggauguga

SEQ ID NO: 1852064 - RNA, 19 nt, Artificial Sequence
  Description of Artificial Sequence: Synthetic oligonucleotide
  Antisense strand to SEQ ID NO: 1852063
ucacauccaccaauguaac

SEQ ID NO: 1852065 - RNA, 19 nt, Artificial Sequence
  Description of Artificial Sequence: Synthetic oligonucleotide
  Sense strand starting at position 2274 of SEQ ID NO: 1564058
uacauugguggaugugaga

SEQ ID NO: 1852066 - RNA, 19 nt, Artificial Sequence
  Description of Artificial Sequence: Synthetic oligonucleotide
  Antisense strand to SEQ ID NO: 1852065
ucucacauccaccaaugua

SEQ ID NO: 1852067 - RNA, 19 nt, Artificial Sequence
  Description of Artificial Sequence: Synthetic oligonucleotide
  Sense strand starting at position 2303 of SEQ ID NO: 1564058
accaaauugcaguggguua

SEQ ID NO: 1852068 - RNA, 19 nt, Artificial Sequence
  Description of Artificial Sequence: Synthetic oligonucleotide
  Antisense strand to SEQ ID NO: 1852067
uaacccacugcaauuuggu

SEQ ID NO: 1852069 - RNA, 19 nt, Artificial Sequence
  Description of Artificial Sequence: Synthetic oligonucleotide
  Sense strand starting at position 2304 of SEQ ID NO: 1564058
ccaaauugcaguggguuaa

SEQ ID NO: 1852070 - RNA, 19 nt, Artificial Sequence
  Description of Artificial Sequence: Synthetic oligonucleotide
  Antisense strand to SEQ ID NO: 1852069
uuaacccacugcaauuugg

SEQ ID NO: 1852071 - RNA, 19 nt, Artificial Sequence
  Description of Artificial Sequence: Synthetic oligonucleotide
  Sense strand starting at position 2317 of SEQ ID NO: 1564058
gguuaagaaguccauggua

SEQ ID NO: 1852072 - RNA, 19 nt, Artificial Sequence
  Description of Artificial Sequence: Synthetic oligonucleotide
  Antisense strand to SEQ ID NO: 1852071
uaccauggacuucuuaacc

SEQ ID NO: 1852073 - RNA, 19 nt, Artificial Sequence
  Description of Artificial Sequence: Synthetic oligonucleotide
  Sense strand starting at position 2319 of SEQ ID NO: 1564058
uuaagaaguccaugguaag

SEQ ID NO: 1852074 - RNA, 19 nt, Artificial Sequence
  Description of Artificial Sequence: Synthetic oligonucleotide
  Antisense strand to SEQ ID NO: 1852073
cuuaccauggacuucuuaa

SEQ ID NO: 1852075 - RNA, 19 nt, Artificial Sequence
  Description of Artificial Sequence: Synthetic oligonucleotide
  Sense strand starting at position 2320 of SEQ ID NO: 1564058
uaagaaguccaugguaagu

SEQ ID NO: 1852076 - RNA, 19 nt, Artificial Sequence
  Description of Artificial Sequence: Synthetic oligonucleotide
  Antisense strand to SEQ ID NO: 1852075
acuuaccauggacuucuua

SEQ ID NO: 1852077 - RNA, 19 nt, Artificial Sequence
  Description of Artificial Sequence: Synthetic oligonucleotide
  Sense strand starting at position 2325 of SEQ ID NO: 1564058
aguccaugguaaguaagaa

SEQ ID NO: 1852078 - RNA, 19 nt, Artificial Sequence
  Description of Artificial Sequence: Synthetic oligonucleotide
  Antisense strand to SEQ ID NO: 1852077
uucuuacuuaccauggacu

SEQ ID NO: 1852079 - RNA, 19 nt, Artificial Sequence
  Description of Artificial Sequence: Synthetic oligonucleotide
  Sense strand starting at position 2329 of SEQ ID NO: 1564058
caugguaaguaagaaauuu

SEQ ID NO: 1852080 - RNA, 19 nt, Artificial Sequence
  Description of Artificial Sequence: Synthetic oligonucleotide
  Antisense strand to SEQ ID NO: 1852079
aaauuucuuacuuaccaug

SEQ ID NO: 1852081 - RNA, 19 nt, Artificial Sequence
  Description of Artificial Sequence: Synthetic oligonucleotide
  Sense strand starting at position 2350 of SEQ ID NO: 1564058
uuguguuguggguuuaugu

SEQ ID NO: 1852082 - RNA, 19 nt, Artificial Sequence
  Description of Artificial Sequence: Synthetic oligonucleotide
  Antisense strand to SEQ ID NO: 1852081
acauaaacccacaacacaa

SEQ ID NO: 1852083 - RNA, 19 nt, Artificial Sequence
  Description of Artificial Sequence: Synthetic oligonucleotide
  Sense strand starting at position 2448 of SEQ ID NO: 1564058
cagagauaauucuucguug

SEQ ID NO: 1852084 - RNA, 19 nt, Artificial Sequence
  Description of Artificial Sequence: Synthetic oligonucleotide
  Antisense strand to SEQ ID NO: 1852083
caacgaagaauuaucucug

SEQ ID NO: 1852085 - RNA, 19 nt, Artificial Sequence
  Description of Artificial Sequence: Synthetic oligonucleotide
  Sense strand starting at position 2454 of SEQ ID NO: 1564058
uaauucuucguugguauuu

SEQ ID NO: 1852086 - RNA, 19 nt, Artificial Sequence
  Description of Artificial Sequence: Synthetic oligonucleotide
  Antisense strand to SEQ ID NO: 1852085
aaauaccaacgaagaauua

SEQ ID NO: 1852087 - RNA, 19 nt, Artificial Sequence
  Description of Artificial Sequence: Synthetic oligonucleotide
  Sense strand starting at position 2850 of SEQ ID NO: 1564058
gccguaugaguguauuucu

SEQ ID NO: 1852088 - RNA, 19 nt, Artificial Sequence
  Description of Artificial Sequence: Synthetic oligonucleotide
  Antisense strand to SEQ ID NO: 1852087
agaaauacacucauacggc

SEQ ID NO: 1852089 - RNA, 19 nt, Artificial Sequence
  Description of Artificial Sequence: Synthetic oligonucleotide
  Sense strand starting at position 2928 of SEQ ID NO: 1564058
uaaguaguugcuuagauuc

SEQ ID NO: 1852090 - RNA, 19 nt, Artificial Sequence
  Description of Artificial Sequence: Synthetic oligonucleotide
  Antisense strand to SEQ ID NO: 1852089
gaaucuaagcaacuacuua

SEQ ID NO: 1852091 - RNA, 19 nt, Artificial Sequence
  Description of Artificial Sequence: Synthetic oligonucleotide
  Sense strand starting at position 2938 of SEQ ID NO: 1564058
cuuagauucuaagugauuc

SEQ ID NO: 1852092 - RNA, 19 nt, Artificial Sequence
  Description of Artificial Sequence: Synthetic oligonucleotide
  Antisense strand to SEQ ID NO: 1852091
gaaucacuuagaaucuaag

SEQ ID NO: 1852093 - RNA, 19 nt, Artificial Sequence
  Description of Artificial Sequence: Synthetic oligonucleotide
  Sense strand starting at position 3230 of SEQ ID NO: 1564058
uuuagucgcaaaggaauau

SEQ ID NO: 1852094 - RNA, 19 nt, Artificial Sequence
  Description of Artificial Sequence: Synthetic oligonucleotide
  Antisense strand to SEQ ID NO: 1852093
auauuccuuugcgacuaaa

SEQ ID NO: 1852095 - RNA, 19 nt, Artificial Sequence
  Description of Artificial Sequence: Synthetic oligonucleotide
  Sense strand starting at position 3234 of SEQ ID NO: 1564058
gucgcaaaggaauauguuu

SEQ ID NO: 1852096 - RNA, 19 nt, Artificial Sequence
  Description of Artificial Sequence: Synthetic oligonucleotide
  Antisense strand to SEQ ID NO: 1852095
aaacauauuccuuugcgac

SEQ ID NO: 1852097 - RNA, 19 nt, Artificial Sequence
  Description of Artificial Sequence: Synthetic oligonucleotide
  Sense strand starting at position 3245 of SEQ ID NO: 1564058
auauguuugauuuggcugu

SEQ ID NO: 1852098 - RNA, 19 nt, Artificial Sequence
  Description of Artificial Sequence: Synthetic oligonucleotide
  Antisense strand to SEQ ID NO: 1852097
acagccaaaucaaacauau

SEQ ID NO: 1852099 - RNA, 19 nt, Artificial Sequence
  Description of Artificial Sequence: Synthetic oligonucleotide
  Sense strand starting at position 3249 of SEQ ID NO: 1564058
guuugauuuggcuguguag

SEQ ID NO: 1852100 - RNA, 19 nt, Artificial Sequence
  Description of Artificial Sequence: Synthetic oligonucleotide
  Antisense strand to SEQ ID NO: 1852099
cuacacagccaaaucaaac

SEQ ID NO: 1852101 - RNA, 19 nt, Artificial Sequence
  Description of Artificial Sequence: Synthetic oligonucleotide
  Sense strand starting at position 3258 of SEQ ID NO: 1564058
ggcuguguagcuuaaauuu

SEQ ID NO: 1852102 - RNA, 19 nt, Artificial Sequence
  Description of Artificial Sequence: Synthetic oligonucleotide
  Antisense strand to SEQ ID NO: 1852101
aaauuuaagcuacacagcc

SEQ ID NO: 1852103 - RNA, 19 nt, Artificial Sequence
  Description of Artificial Sequence: Synthetic oligonucleotide
  Sense strand starting at position 3283 of SEQ ID NO: 1564058
acaguaucuuauuuguguu

SEQ ID NO: 1852104 - RNA, 19 nt, Artificial Sequence
  Description of Artificial Sequence: Synthetic oligonucleotide
  Antisense strand to SEQ ID NO: 1852103
aacacaaauaagauacugu

SEQ ID NO: 1852105 - RNA, 19 nt, Artificial Sequence
  Description of Artificial Sequence: Synthetic oligonucleotide
  Sense strand starting at position 3333 of SEQ ID NO: 1564058
ugucuuguucuugagagca

SEQ ID NO: 1852106 - RNA, 19 nt, Artificial Sequence
  Description of Artificial Sequence: Synthetic oligonucleotide
  Antisense strand to SEQ ID NO: 1852105
ugcucucaagaacaagaca

SEQ ID NO: 1852107 - RNA, 19 nt, Artificial Sequence
  Description of Artificial Sequence: Synthetic oligonucleotide
  Sense strand starting at position 3345 of SEQ ID NO: 1564058
gagagcagagcuuagcaaa

SEQ ID NO: 1852108 - RNA, 19 nt, Artificial Sequence
  Description of Artificial Sequence: Synthetic oligonucleotide
  Antisense strand to SEQ ID NO: 1852107
uuugcuaagcucugcucuc

SEQ ID NO: 1852109 - RNA, 19 nt, Artificial Sequence
  Description of Artificial Sequence: Synthetic oligonucleotide
  Sense strand starting at position 3489 of SEQ ID NO: 1564058
accucaguuugaguagcaa

SEQ ID NO: 1852110 - RNA, 19 nt, Artificial Sequence
  Description of Artificial Sequence: Synthetic oligonucleotide
  Antisense strand to SEQ ID NO: 1852109
uugcuacucaaacugaggu

SEQ ID NO: 1852111 - RNA, 19 nt, Artificial Sequence
  Description of Artificial Sequence: Synthetic oligonucleotide
  Sense strand starting at position 3566 of SEQ ID NO: 1564058
auccuuagauaugugaaac

SEQ ID NO: 1852112 - RNA, 19 nt, Artificial Sequence
  Description of Artificial Sequence: Synthetic oligonucleotide
  Antisense strand to SEQ ID NO: 1852111
guuucacauaucuaaggau

SEQ ID NO: 1852113 - RNA, 19 nt, Artificial Sequence
  Description of Artificial Sequence: Synthetic oligonucleotide
  Sense strand starting at position 3583 of SEQ ID NO: 1564058
acaaacagugcuugaguua

SEQ ID NO: 1852114 - RNA, 19 nt, Artificial Sequence
  Description of Artificial Sequence: Synthetic oligonucleotide
  Antisense strand to SEQ ID NO: 1852113
uaacucaagcacuguuugu

SEQ ID NO: 1852115 - RNA, 19 nt, Artificial Sequence
  Description of Artificial Sequence: Synthetic oligonucleotide
  Sense strand starting at position 3584 of SEQ ID NO: 1564058
caaacagugcuugaguuau

SEQ ID NO: 1852116 - RNA, 19 nt, Artificial Sequence
  Description of Artificial Sequence: Synthetic oligonucleotide
  Antisense strand to SEQ ID NO: 1852115
auaacucaagcacuguuug

SEQ ID NO: 1852117 - RNA, 19 nt, Artificial Sequence
  Description of Artificial Sequence: Synthetic oligonucleotide
  Sense strand starting at position 3586 of SEQ ID NO: 1564058
aacagugcuugaguuauuu

SEQ ID NO: 1852118 - RNA, 19 nt, Artificial Sequence
  Description of Artificial Sequence: Synthetic oligonucleotide
  Antisense strand to SEQ ID NO: 1852117
aaauaacucaagcacuguu

SEQ ID NO: 1852119 - RNA, 19 nt, Artificial Sequence
  Description of Artificial Sequence: Synthetic oligonucleotide
  Sense strand starting at position 3634 of SEQ ID NO: 1564058
cuucaaggaugguuagagu

SEQ ID NO: 1852120 - RNA, 19 nt, Artificial Sequence
  Description of Artificial Sequence: Synthetic oligonucleotide
  Antisense strand to SEQ ID NO: 1852119
acucuaaccauccuugaag

SEQ ID NO: 1852121 - RNA, 19 nt, Artificial Sequence
  Description of Artificial Sequence: Synthetic oligonucleotide
  Sense strand starting at position 3663 of SEQ ID NO: 1564058
uguugaaagguuuggaagu

SEQ ID NO: 1852122 - RNA, 19 nt, Artificial Sequence
  Description of Artificial Sequence: Synthetic oligonucleotide
  Antisense strand to SEQ ID NO: 1852121
acuuccaaaccuuucaaca

SEQ ID NO: 1852123 - RNA, 19 nt, Artificial Sequence
  Description of Artificial Sequence: Synthetic oligonucleotide
  Sense strand starting at position 3669 of SEQ ID NO: 1564058
aagguuuggaaguggauga

SEQ ID NO: 1852124 - RNA, 19 nt, Artificial Sequence
  Description of Artificial Sequence: Synthetic oligonucleotide
  Antisense strand to SEQ ID NO: 1852123
ucauccacuuccaaaccuu

SEQ ID NO: 1852125 - RNA, 19 nt, Artificial Sequence
  Description of Artificial Sequence: Synthetic oligonucleotide
  Sense strand starting at position 3803 of SEQ ID NO: 1564058
uuguuaucccugcauuaca

SEQ ID NO: 1852126 - RNA, 19 nt, Artificial Sequence
  Description of Artificial Sequence: Synthetic oligonucleotide
  Antisense strand to SEQ ID NO: 1852125
uguaaugcagggauaacaa

SEQ ID NO: 1852127 - RNA, 19 nt, Artificial Sequence
  Description of Artificial Sequence: Synthetic oligonucleotide
  Sense strand starting at position 3812 of SEQ ID NO: 1564058
cugcauuacagaugaggaa

SEQ ID NO: 1852128 - RNA, 19 nt, Artificial Sequence
  Description of Artificial Sequence: Synthetic oligonucleotide
  Antisense strand to SEQ ID NO: 1852127
uuccucaucuguaaugcag

SEQ ID NO: 1852129 - RNA, 19 nt, Artificial Sequence
  Description of Artificial Sequence: Synthetic oligonucleotide
  Sense strand starting at position 3834 of SEQ ID NO: 1564058
ggguuaagcuauuugucca

SEQ ID NO: 1852130 - RNA, 19 nt, Artificial Sequence
  Description of Artificial Sequence: Synthetic oligonucleotide
  Antisense strand to SEQ ID NO: 1852129
uggacaaauagcuuaaccc

SEQ ID NO: 1852131 - RNA, 19 nt, Artificial Sequence
  Description of Artificial Sequence: Synthetic oligonucleotide
  Sense strand starting at position 3898 of SEQ ID NO: 1564058
aaagcagucuggcuauaga

SEQ ID NO: 1852132 - RNA, 19 nt, Artificial Sequence
  Description of Artificial Sequence: Synthetic oligonucleotide
  Antisense strand to SEQ ID NO: 1852131
ucuauagccagacugcuuu

SEQ ID NO: 1852133 - RNA, 19 nt, Artificial Sequence
  Description of Artificial Sequence: Synthetic oligonucleotide
  Sense strand starting at position 263 of SEQ ID NO: 1564059
aguggacgaucugauccau

SEQ ID NO: 1852134 - RNA, 19 nt, Artificial Sequence
  Description of Artificial Sequence: Synthetic oligonucleotide
  Antisense strand to SEQ ID NO: 1852133
auggaucagaucguccacu

SEQ ID NO: 1852135 - RNA, 19 nt, Artificial Sequence
  Description of Artificial Sequence: Synthetic oligonucleotide
  Sense strand starting at position 684 of SEQ ID NO: 1564059
uugcguagugagugggaau

SEQ ID NO: 1852136 - RNA, 19 nt, Artificial Sequence
  Description of Artificial Sequence: Synthetic oligonucleotide
  Antisense strand to SEQ ID NO: 1852135
auucccacucacuacgcaa

SEQ ID NO: 1852137 - RNA, 19 nt, Artificial Sequence
  Description of Artificial Sequence: Synthetic oligonucleotide
  Sense strand starting at position 801 of SEQ ID NO: 1564059
cguucauggccauggugua

SEQ ID NO: 1852138 - RNA, 19 nt, Artificial Sequence
  Description of Artificial Sequence: Synthetic oligonucleotide
  Antisense strand to SEQ ID NO: 1852137
uacaccauggccaugaacg

SEQ ID NO: 1852139 - RNA, 19 nt, Artificial Sequence
  Description of Artificial Sequence: Synthetic oligonucleotide
  Sense strand starting at position 1054 of SEQ ID NO: 1564059
gugcccuguugaguaaaca

SEQ ID NO: 1852140 - RNA, 19 nt, Artificial Sequence
  Description of Artificial Sequence: Synthetic oligonucleotide
  Antisense strand to SEQ ID NO: 1852139
uguuuacucaacagggcac

SEQ ID NO: 1852141 - RNA, 19 nt, Artificial Sequence
  Description of Artificial Sequence: Synthetic oligonucleotide
  Sense strand starting at position 1055 of SEQ ID NO: 1564059
ugcccuguugaguaaacau

SEQ ID NO: 1852142 - RNA, 19 nt, Artificial Sequence
  Description of Artificial Sequence: Synthetic oligonucleotide
  Antisense strand to SEQ ID NO: 1852141
auguuuacucaacagggca

SEQ ID NO: 1852143 - RNA, 19 nt, Artificial Sequence
  Description of Artificial Sequence: Synthetic oligonucleotide
  Sense strand starting at position 1075 of SEQ ID NO: 1564059
gacggagucacugggagau

SEQ ID NO: 1852144 - RNA, 19 nt, Artificial Sequence
  Description of Artificial Sequence: Synthetic oligonucleotide
  Antisense strand to SEQ ID NO: 1852143
aucucccagugacuccguc

SEQ ID NO: 1852145 - RNA, 19 nt, Artificial Sequence
  Description of Artificial Sequence: Synthetic oligonucleotide
  Sense strand starting at position 1145 of SEQ ID NO: 1564059
ggcggaagcgcucgaaagu

SEQ ID NO: 1852146 - RNA, 19 nt, Artificial Sequence
  Description of Artificial Sequence: Synthetic oligonucleotide
  Antisense strand to SEQ ID NO: 1852145
acuuucgagcgcuuccgcc

SEQ ID NO: 1852147 - RNA, 19 nt, Artificial Sequence
  Description of Artificial Sequence: Synthetic oligonucleotide
  Sense strand starting at position 1204 of SEQ ID NO: 1564059
gagggaaaguggcuuaagu

SEQ ID NO: 1852148 - RNA, 19 nt, Artificial Sequence
  Description of Artificial Sequence: Synthetic oligonucleotide
  Antisense strand to SEQ ID NO: 1852147
acuuaagccacuuucccuc

SEQ ID NO: 1852149 - RNA, 19 nt, Artificial Sequence
  Description of Artificial Sequence: Synthetic oligonucleotide
  Sense strand starting at position 1450 of SEQ ID NO: 1564059
cugugaggugccugagagu

SEQ ID NO: 1852150 - RNA, 19 nt, Artificial Sequence
  Description of Artificial Sequence: Synthetic oligonucleotide
  Antisense strand to SEQ ID NO: 1852149
acucucaggcaccucacag

SEQ ID NO: 1852151 - RNA, 19 nt, Artificial Sequence
  Description of Artificial Sequence: Synthetic oligonucleotide
  Sense strand starting at position 1623 of SEQ ID NO: 1564059
gcucuuucuccauguccua

SEQ ID NO: 1852152 - RNA, 19 nt, Artificial Sequence
  Description of Artificial Sequence: Synthetic oligonucleotide
  Antisense strand to SEQ ID NO: 1852151
uaggacauggagaaagagc

SEQ ID NO: 1852153 - RNA, 19 nt, Artificial Sequence
  Description of Artificial Sequence: Synthetic oligonucleotide
  Sense strand starting at position 1812 of SEQ ID NO: 1564059
cugggagacccuugcucau

SEQ ID NO: 1852154 - RNA, 19 nt, Artificial Sequence
  Description of Artificial Sequence: Synthetic oligonucleotide
  Antisense strand to SEQ ID NO: 1852153
augagcaagggucucccag

SEQ ID NO: 1852155 - RNA, 19 nt, Artificial Sequence
  Description of Artificial Sequence: Synthetic oligonucleotide
  Sense strand starting at position 2035 of SEQ ID NO: 1564059
gagcucuggucucaagauc

SEQ ID NO: 1852156 - RNA, 19 nt, Artificial Sequence
  Description of Artificial Sequence: Synthetic oligonucleotide
  Antisense strand to SEQ ID NO: 1852155
gaucuugagaccagagcuc

SEQ ID NO: 1852157 - RNA, 19 nt, Artificial Sequence
  Description of Artificial Sequence: Synthetic oligonucleotide
  Sense strand starting at position 2050 of SEQ ID NO: 1564059
gauccugcuuggugggaaa

SEQ ID NO: 1852158 - RNA, 19 nt, Artificial Sequence
  Description of Artificial Sequence: Synthetic oligonucleotide
  Antisense strand to SEQ ID NO: 1852157
uuucccaccaagcaggauc

SEQ ID NO: 1852159 - RNA, 19 nt, Artificial Sequence
  Description of Artificial Sequence: Synthetic oligonucleotide
  Sense strand starting at position 2590 of SEQ ID NO: 1564059
ugaaucaguuugucaccaa

SEQ ID NO: 1852160 - RNA, 19 nt, Artificial Sequence
  Description of Artificial Sequence: Synthetic oligonucleotide
  Antisense strand to SEQ ID NO: 1852159
uuggugacaaacugauuca

SEQ ID NO: 1852161 - RNA, 19 nt, Artificial Sequence
  Description of Artificial Sequence: Synthetic oligonucleotide
  Sense strand starting at position 2593 of SEQ ID NO: 1564059
aucaguuugucaccaacua

SEQ ID NO: 1852162 - RNA, 19 nt, Artificial Sequence
  Description of Artificial Sequence: Synthetic oligonucleotide
  Antisense strand to SEQ ID NO: 1852161
uaguuggugacaaacugau

SEQ ID NO: 1852163 - RNA, 19 nt, Artificial Sequence
  Description of Artificial Sequence: Synthetic oligonucleotide
  Sense strand starting at position 3060 of SEQ ID NO: 1564059
cccagaucugucuguagcu

SEQ ID NO: 1852164 - RNA, 19 nt, Artificial Sequence
  Description of Artificial Sequence: Synthetic oligonucleotide
  Antisense strand to SEQ ID NO: 1852163
agcuacagacagaucuggg

SEQ ID NO: 1852165 - RNA, 19 nt, Artificial Sequence
  Description of Artificial Sequence: Synthetic oligonucleotide
  Sense strand starting at position 3079 of SEQ ID NO: 1564059
cuaugacugacccgaugau

SEQ ID NO: 1852166 - RNA, 19 nt, Artificial Sequence
  Description of Artificial Sequence: Synthetic oligonucleotide
  Antisense strand to SEQ ID NO: 1852165
aucaucgggucagucauag

SEQ ID NO: 1852167 - RNA, 19 nt, Artificial Sequence
  Description of Artificial Sequence: Synthetic oligonucleotide
  Sense strand starting at position 3188 of SEQ ID NO: 1564059
gcuggucuuugaugccaca

SEQ ID NO: 1852168 - RNA, 19 nt, Artificial Sequence
  Description of Artificial Sequence: Synthetic oligonucleotide
  Antisense strand to SEQ ID NO: 1852167
uguggcaucaaagaccagc

SEQ ID NO: 1852169 - RNA, 19 nt, Artificial Sequence
  Description of Artificial Sequence: Synthetic oligonucleotide
  Sense strand starting at position 3670 of SEQ ID NO: 1564059
ugccaaagguauggcaaau

SEQ ID NO: 1852170 - RNA, 19 nt, Artificial Sequence
  Description of Artificial Sequence: Synthetic oligonucleotide
  Antisense strand to SEQ ID NO: 1852169
auuugccauaccuuuggca

SEQ ID NO: 1852171 - RNA, 19 nt, Artificial Sequence
  Description of Artificial Sequence: Synthetic oligonucleotide
  Sense strand starting at position 57 of SEQ ID NO: 1564060
ccucuuauccgaugcauua

SEQ ID NO: 1852172 - RNA, 19 nt, Artificial Sequence
  Description of Artificial Sequence: Synthetic oligonucleotide
  Antisense strand to SEQ ID NO: 1852171
uaaugcaucggauaagagg

SEQ ID NO: 1852173 - RNA, 19 nt, Artificial Sequence
  Description of Artificial Sequence: Synthetic oligonucleotide
  Sense strand starting at position 182 of SEQ ID NO: 1564060
aauguauuaugcucgggac

SEQ ID NO: 1852174 - RNA, 19 nt, Artificial Sequence
  Description of Artificial Sequence: Synthetic oligonucleotide
  Antisense strand to SEQ ID NO: 1852173
gucccgagcauaauacauu

SEQ ID NO: 1852175 - RNA, 19 nt, Artificial Sequence
  Description of Artificial Sequence: Synthetic oligonucleotide
  Sense strand starting at position 183 of SEQ ID NO: 1564060
auguauuaugcucgggacu

SEQ ID NO: 1852176 - RNA, 19 nt, Artificial Sequence
  Description of Artificial Sequence: Synthetic oligonucleotide
  Antisense strand to SEQ ID NO: 1852175
agucccgagcauaauacau

SEQ ID NO: 1852177 - RNA, 19 nt, Artificial Sequence
  Description of Artificial Sequence: Synthetic oligonucleotide
  Sense strand starting at position 184 of SEQ ID NO: 1564060
uguauuaugcucgggacua

SEQ ID NO: 1852178 - RNA, 19 nt, Artificial Sequence
  Description of Artificial Sequence: Synthetic oligonucleotide
  Antisense strand to SEQ ID NO: 1852177
uagucccgagcauaauaca

SEQ ID NO: 1852179 - RNA, 19 nt, Artificial Sequence
  Description of Artificial Sequence: Synthetic oligonucleotide
  Sense strand starting at position 186 of SEQ ID NO: 1564060
uauuaugcucgggacuauu

SEQ ID NO: 1852180 - RNA, 19 nt, Artificial Sequence
  Description of Artificial Sequence: Synthetic oligonucleotide
  Antisense strand to SEQ ID NO: 1852179
aauagucccgagcauaaua

SEQ ID NO: 1852181 - RNA, 19 nt, Artificial Sequence
  Description of Artificial Sequence: Synthetic oligonucleotide
  Sense strand starting at position 292 of SEQ ID NO: 1564060
ggcagaacugucuacauau

SEQ ID NO: 1852182 - RNA, 19 nt, Artificial Sequence
  Description of Artificial Sequence: Synthetic oligonucleotide
  Antisense strand to SEQ ID NO: 1852181
auauguagacaguucugcc

SEQ ID NO: 1852183 - RNA, 19 nt, Artificial Sequence
  Description of Artificial Sequence: Synthetic oligonucleotide
  Sense strand starting at position 325 of SEQ ID NO: 1564060
gggauaaacagccaugcua

SEQ ID NO: 1852184 - RNA, 19 nt, Artificial Sequence
  Description of Artificial Sequence: Synthetic oligonucleotide
  Antisense strand to SEQ ID NO: 1852183
uagcauggcuguuuauccc

SEQ ID NO: 1852185 - RNA, 19 nt, Artificial Sequence
  Description of Artificial Sequence: Synthetic oligonucleotide
  Sense strand starting at position 338 of SEQ ID NO: 1564060
augcuaaguucugugaaua

SEQ ID NO: 1852186 - RNA, 19 nt, Artificial Sequence
  Description of Artificial Sequence: Synthetic oligonucleotide
  Antisense strand to SEQ ID NO: 1852185
uauucacagaacuuagcau

SEQ ID NO: 1852187 - RNA, 19 nt, Artificial Sequence
  Description of Artificial Sequence: Synthetic oligonucleotide
  Sense strand starting at position 343 of SEQ ID NO: 1564060
aaguucugugaauacuagu

SEQ ID NO: 1852188 - RNA, 19 nt, Artificial Sequence
  Description of Artificial Sequence: Synthetic oligonucleotide
  Antisense strand to SEQ ID NO: 1852187
acuaguauucacagaacuu

SEQ ID NO: 1852189 - RNA, 19 nt, Artificial Sequence
  Description of Artificial Sequence: Synthetic oligonucleotide
  Sense strand starting at position 349 of SEQ ID NO: 1564060
ugugaauacuaguuacagu

SEQ ID NO: 1852190 - RNA, 19 nt, Artificial Sequence
  Description of Artificial Sequence: Synthetic oligonucleotide
  Antisense strand to SEQ ID NO: 1852189
acuguaacuaguauucaca

SEQ ID NO: 1852191 - RNA, 19 nt, Artificial Sequence
  Description of Artificial Sequence: Synthetic oligonucleotide
  Sense strand starting at position 350 of SEQ ID NO: 1564060
gugaauacuaguuacaguu

SEQ ID NO: 1852192 - RNA, 19 nt, Artificial Sequence
  Description of Artificial Sequence: Synthetic oligonucleotide
  Antisense strand to SEQ ID NO: 1852191
aacuguaacuaguauucac

SEQ ID NO: 1852193 - RNA, 19 nt, Artificial Sequence
  Description of Artificial Sequence: Synthetic oligonucleotide
  Sense strand starting at position 399 of SEQ ID NO: 1564060
auuacaaagugucuaaagu

SEQ ID NO: 1852194 - RNA, 19 nt, Artificial Sequence
  Description of Artificial Sequence: Synthetic oligonucleotide
  Antisense strand to SEQ ID NO: 1852193
acuuuagacacuuuguaau

SEQ ID NO: 1852195 - RNA, 19 nt, Artificial Sequence
  Description of Artificial Sequence: Synthetic oligonucleotide
  Sense strand starting at position 400 of SEQ ID NO: 1564060
uuacaaagugucuaaaguu

SEQ ID NO: 1852196 - RNA, 19 nt, Artificial Sequence
  Description of Artificial Sequence: Synthetic oligonucleotide
  Antisense strand to SEQ ID NO: 1852195
aacuuuagacacuuuguaa

SEQ ID NO: 1852197 - RNA, 19 nt, Artificial Sequence
  Description of Artificial Sequence: Synthetic oligonucleotide
  Sense strand starting at position 409 of SEQ ID NO: 1564060
gucuaaaguuaugcucaca

SEQ ID NO: 1852198 - RNA, 19 nt, Artificial Sequence
  Description of Artificial Sequence: Synthetic oligonucleotide
  Antisense strand to SEQ ID NO: 1852197
ugugagcauaacuuuagac

SEQ ID NO: 1852199 - RNA, 19 nt, Artificial Sequence
  Description of Artificial Sequence: Synthetic oligonucleotide
  Sense strand starting at position 500 of SEQ ID NO: 1564060
acacaaugacauugcaagu

SEQ ID NO: 1852200 - RNA, 19 nt, Artificial Sequence
  Description of Artificial Sequence: Synthetic oligonucleotide
  Antisense strand to SEQ ID NO: 1852199
acuugcaaugucauugugu

SEQ ID NO: 1852201 - RNA, 19 nt, Artificial Sequence
  Description of Artificial Sequence: Synthetic oligonucleotide
  Sense strand starting at position 661 of SEQ ID NO: 1564060
gucuuaucaccaugaagug

SEQ ID NO: 1852202 - RNA, 19 nt, Artificial Sequence
  Description of Artificial Sequence: Synthetic oligonucleotide
  Antisense strand to SEQ ID NO: 1852201
cacuucauggugauaagac

SEQ ID NO: 1852203 - RNA, 19 nt, Artificial Sequence
  Description of Artificial Sequence: Synthetic oligonucleotide
  Sense strand starting at position 670 of SEQ ID NO: 1564060
ccaugaagugcuggugaca

SEQ ID NO: 1852204 - RNA, 19 nt, Artificial Sequence
  Description of Artificial Sequence: Synthetic oligonucleotide
  Antisense strand to SEQ ID NO: 1852203
ugucaccagcacuucaugg

SEQ ID NO: 1852205 - RNA, 19 nt, Artificial Sequence
  Description of Artificial Sequence: Synthetic oligonucleotide
  Sense strand starting at position 673 of SEQ ID NO: 1564060
ugaagugcuggugacauga

SEQ ID NO: 1852206 - RNA, 19 nt, Artificial Sequence
  Description of Artificial Sequence: Synthetic oligonucleotide
  Antisense strand to SEQ ID NO: 1852205
ucaugucaccagcacuuca

SEQ ID NO: 1852207 - RNA, 19 nt, Artificial Sequence
  Description of Artificial Sequence: Synthetic oligonucleotide
  Sense strand starting at position 699 of SEQ ID NO: 1564060
gacaaaggcuuaucaagua

SEQ ID NO: 1852208 - RNA, 19 nt, Artificial Sequence
  Description of Artificial Sequence: Synthetic oligonucleotide
  Antisense strand to SEQ ID NO: 1852207
uacuugauaagccuuuguc

SEQ ID NO: 1852209 - RNA, 19 nt, Artificial Sequence
  Description of Artificial Sequence: Synthetic oligonucleotide
  Sense strand starting at position 808 of SEQ ID NO: 1564060
aaaggugguagcuaugaca

SEQ ID NO: 1852210 - RNA, 19 nt, Artificial Sequence
  Description of Artificial Sequence: Synthetic oligonucleotide
  Antisense strand to SEQ ID NO: 1852209
ugucauagcuaccaccuuu

SEQ ID NO: 1852211 - RNA, 19 nt, Artificial Sequence
  Description of Artificial Sequence: Synthetic oligonucleotide
  Sense strand starting at position 861 of SEQ ID NO: 1564060
aaugauagaugggaaacua

SEQ ID NO: 1852212 - RNA, 19 nt, Artificial Sequence
  Description of Artificial Sequence: Synthetic oligonucleotide
  Antisense strand to SEQ ID NO: 1852211
uaguuucccaucuaucauu

SEQ ID NO: 1852213 - RNA, 19 nt, Artificial Sequence
  Description of Artificial Sequence: Synthetic oligonucleotide
  Sense strand starting at position 881 of SEQ ID NO: 1564060
agcuguuucccauggugga

SEQ ID NO: 1852214 - RNA, 19 nt, Artificial Sequence
  Description of Artificial Sequence: Synthetic oligonucleotide
  Antisense strand to SEQ ID NO: 1852213
uccaccaugggaaacagcu

SEQ ID NO: 1852215 - RNA, 19 nt, Artificial Sequence
  Description of Artificial Sequence: Synthetic oligonucleotide
  Sense strand starting at position 947 of SEQ ID NO: 1564060
ugacaaacguccucuugca

SEQ ID NO: 1852216 - RNA, 19 nt, Artificial Sequence
  Description of Artificial Sequence: Synthetic oligonucleotide
  Antisense strand to SEQ ID NO: 1852215
ugcaagaggacguuuguca

SEQ ID NO: 1852217 - RNA, 19 nt, Artificial Sequence
  Description of Artificial Sequence: Synthetic oligonucleotide
  Sense strand starting at position 983 of SEQ ID NO: 1564060
ugcaacuugucauuaaggu

SEQ ID NO: 1852218 - RNA, 19 nt, Artificial Sequence
  Description of Artificial Sequence: Synthetic oligonucleotide
  Antisense strand to SEQ ID NO: 1852217
accuuaaugacaaguugca

SEQ ID NO: 1852219 - RNA, 19 nt, Artificial Sequence
  Description of Artificial Sequence: Synthetic oligonucleotide
  Sense strand starting at position 984 of SEQ ID NO: 1564060
gcaacuugucauuaagguu

SEQ ID NO: 1852220 - RNA, 19 nt, Artificial Sequence
  Description of Artificial Sequence: Synthetic oligonucleotide
  Antisense strand to SEQ ID NO: 1852219
aaccuuaaugacaaguugc

SEQ ID NO: 1852221 - RNA, 19 nt, Artificial Sequence
  Description of Artificial Sequence: Synthetic oligonucleotide
  Sense strand starting at position 1028 of SEQ ID NO: 1564060
auauguuaugggcaauuac

SEQ ID NO: 1852222 - RNA, 19 nt, Artificial Sequence
  Description of Artificial Sequence: Synthetic oligonucleotide
  Antisense strand to SEQ ID NO: 1852221
guaauugcccauaacauau

SEQ ID NO: 1852223 - RNA, 19 nt, Artificial Sequence
  Description of Artificial Sequence: Synthetic oligonucleotide
  Sense strand starting at position 2415 of SEQ ID NO: 1564060
agguuuccuuucuuccaua

SEQ ID NO: 1852224 - RNA, 19 nt, Artificial Sequence
  Description of Artificial Sequence: Synthetic oligonucleotide
  Antisense strand to SEQ ID NO: 1852223
uauggaagaaaggaaaccu

SEQ ID NO: 1852225 - RNA, 19 nt, Artificial Sequence
  Description of Artificial Sequence: Synthetic oligonucleotide
  Sense strand starting at position 2420 of SEQ ID NO: 1564060
uccuuucuuccauagcagu

SEQ ID NO: 1852226 - RNA, 19 nt, Artificial Sequence
  Description of Artificial Sequence: Synthetic oligonucleotide
  Antisense strand to SEQ ID NO: 1852225
acugcuauggaagaaagga

SEQ ID NO: 1852227 - RNA, 19 nt, Artificial Sequence
  Description of Artificial Sequence: Synthetic oligonucleotide
  Sense strand starting at position 2502 of SEQ ID NO: 1564060
cagaguguucaggguggua

SEQ ID NO: 1852228 - RNA, 19 nt, Artificial Sequence
  Description of Artificial Sequence: Synthetic oligonucleotide
  Antisense strand to SEQ ID NO: 1852227
uaccacccugaacacucug

SEQ ID NO: 1852229 - RNA, 19 nt, Artificial Sequence
  Description of Artificial Sequence: Synthetic oligonucleotide
  Sense strand starting at position 2504 of SEQ ID NO: 1564060
gaguguucagggugguauu

SEQ ID NO: 1852230 - RNA, 19 nt, Artificial Sequence
  Description of Artificial Sequence: Synthetic oligonucleotide
  Antisense strand to SEQ ID NO: 1852229
aauaccacccugaacacuc

SEQ ID NO: 1852231 - RNA, 19 nt, Artificial Sequence
  Description of Artificial Sequence: Synthetic oligonucleotide
  Sense strand starting at position 2511 of SEQ ID NO: 1564060
cagggugguauuggaguua

SEQ ID NO: 1852232 - RNA, 19 nt, Artificial Sequence
  Description of Artificial Sequence: Synthetic oligonucleotide
  Antisense strand to SEQ ID NO: 1852231
uaacuccaauaccacccug

SEQ ID NO: 1852233 - RNA, 19 nt, Artificial Sequence
  Description of Artificial Sequence: Synthetic oligonucleotide
  Sense strand starting at position 2576 of SEQ ID NO: 1564060
aggaauaacaucgguuacu

SEQ ID NO: 1852234 - RNA, 19 nt, Artificial Sequence
  Description of Artificial Sequence: Synthetic oligonucleotide
  Antisense strand to SEQ ID NO: 1852233
aguaaccgauguuauuccu

SEQ ID NO: 1852235 - RNA, 19 nt, Artificial Sequence
  Description of Artificial Sequence: Synthetic oligonucleotide
  Sense strand starting at position 2577 of SEQ ID NO: 1564060
ggaauaacaucgguuacuc

SEQ ID NO: 1852236 - RNA, 19 nt, Artificial Sequence
  Description of Artificial Sequence: Synthetic oligonucleotide
  Antisense strand to SEQ ID NO: 1852235
gaguaaccgauguuauucc

SEQ ID NO: 1852237 - RNA, 19 nt, Artificial Sequence
  Description of Artificial Sequence: Synthetic oligonucleotide
  Sense strand starting at position 2582 of SEQ ID NO: 1564060
aacaucgguuacucguaaa

SEQ ID NO: 1852238 - RNA, 19 nt, Artificial Sequence
  Description of Artificial Sequence: Synthetic oligonucleotide
  Antisense strand to SEQ ID NO: 1852237
uuuacgaguaaccgauguu

SEQ ID NO: 1852239 - RNA, 19 nt, Artificial Sequence
  Description of Artificial Sequence: Synthetic oligonucleotide
  Sense strand starting at position 2594 of SEQ ID NO: 1564060
ucguaaauacuagaguagu

SEQ ID NO: 1852240 - RNA, 19 nt, Artificial Sequence
  Description of Artificial Sequence: Synthetic oligonucleotide
  Antisense strand to SEQ ID NO: 1852239
acuacucuaguauuuacga

SEQ ID NO: 1852241 - RNA, 19 nt, Artificial Sequence
  Description of Artificial Sequence: Synthetic oligonucleotide
  Sense strand starting at position 2707 of SEQ ID NO: 1564060
ccaguugaauaucucguau

SEQ ID NO: 1852242 - RNA, 19 nt, Artificial Sequence
  Description of Artificial Sequence: Synthetic oligonucleotide
  Antisense strand to SEQ ID NO: 1852241
auacgagauauucaacugg

SEQ ID NO: 1852243 - RNA, 19 nt, Artificial Sequence
  Description of Artificial Sequence: Synthetic oligonucleotide
  Sense strand starting at position 2715 of SEQ ID NO: 1564060
auaucucguauguagcaga

SEQ ID NO: 1852244 - RNA, 19 nt, Artificial Sequence
  Description of Artificial Sequence: Synthetic oligonucleotide
  Antisense strand to SEQ ID NO: 1852243
ucugcuacauacgagauau

SEQ ID NO: 1852245 - RNA, 19 nt, Artificial Sequence
  Description of Artificial Sequence: Synthetic oligonucleotide
  Sense strand starting at position 3682 of SEQ ID NO: 1564060
ccaccauugcacuggaagu

SEQ ID NO: 1852246 - RNA, 19 nt, Artificial Sequence
  Description of Artificial Sequence: Synthetic oligonucleotide
  Antisense strand to SEQ ID NO: 1852245
acuuccagugcaauggugg

SEQ ID NO: 1852247 - RNA, 19 nt, Artificial Sequence
  Description of Artificial Sequence: Synthetic oligonucleotide
  Sense strand starting at position 3778 of SEQ ID NO: 1564060
gcagaaauauaugcaugaa

SEQ ID NO: 1852248 - RNA, 19 nt, Artificial Sequence
  Description of Artificial Sequence: Synthetic oligonucleotide
  Antisense strand to SEQ ID NO: 1852247
uucaugcauauauuucugc

SEQ ID NO: 1852249 - RNA, 19 nt, Artificial Sequence
  Description of Artificial Sequence: Synthetic oligonucleotide
  Sense strand starting at position 3827 of SEQ ID NO: 1564060
aacaucagucuaggguuaa

SEQ ID NO: 1852250 - RNA, 19 nt, Artificial Sequence
  Description of Artificial Sequence: Synthetic oligonucleotide
  Antisense strand to SEQ ID NO: 1852249
uuaacccuagacugauguu

SEQ ID NO: 1852251 - RNA, 19 nt, Artificial Sequence
  Description of Artificial Sequence: Synthetic oligonucleotide
  Sense strand starting at position 21 of SEQ ID NO: 1564061
cgcaaauaucaaugacaua

SEQ ID NO: 1852252 - RNA, 19 nt, Artificial Sequence
  Description of Artificial Sequence: Synthetic oligonucleotide
  Antisense strand to SEQ ID NO: 1852251
uaugucauugauauuugcg

SEQ ID NO: 1852253 - RNA, 19 nt, Artificial Sequence
  Description of Artificial Sequence: Synthetic oligonucleotide
  Sense strand starting at position 57 of SEQ ID NO: 1564061
gcucucucgcugguguaau

SEQ ID NO: 1852254 - RNA, 19 nt, Artificial Sequence
  Description of Artificial Sequence: Synthetic oligonucleotide
  Antisense strand to SEQ ID NO: 1852253
auuacaccagcgagagagc

SEQ ID NO: 1852255 - RNA, 19 nt, Artificial Sequence
  Description of Artificial Sequence: Synthetic oligonucleotide
  Sense strand starting at position 264 of SEQ ID NO: 1564061
guaugaaaguucccacuug

SEQ ID NO: 1852256 - RNA, 19 nt, Artificial Sequence
  Description of Artificial Sequence: Synthetic oligonucleotide
  Antisense strand to SEQ ID NO: 1852255
caagugggaacuuucauac

SEQ ID NO: 1852257 - RNA, 19 nt, Artificial Sequence
  Description of Artificial Sequence: Synthetic oligonucleotide
  Sense strand starting at position 358 of SEQ ID NO: 1564061
guuuguggguauuuguuua

SEQ ID NO: 1852258 - RNA, 19 nt, Artificial Sequence
  Description of Artificial Sequence: Synthetic oligonucleotide
  Antisense strand to SEQ ID NO: 1852257
uaaacaaauacccacaaac

SEQ ID NO: 1852259 - RNA, 19 nt, Artificial Sequence
  Description of Artificial Sequence: Synthetic oligonucleotide
  Sense strand starting at position 448 of SEQ ID NO: 1564061
cacugaaaguuuguuuaag

SEQ ID NO: 1852260 - RNA, 19 nt, Artificial Sequence
  Description of Artificial Sequence: Synthetic oligonucleotide
  Antisense strand to SEQ ID NO: 1852259
cuuaaacaaacuuucagug

SEQ ID NO: 1852261 - RNA, 19 nt, Artificial Sequence
  Description of Artificial Sequence: Synthetic oligonucleotide
  Sense strand starting at position 449 of SEQ ID NO: 1564061
acugaaaguuuguuuaagu

SEQ ID NO: 1852262 - RNA, 19 nt, Artificial Sequence
  Description of Artificial Sequence: Synthetic oligonucleotide
  Antisense strand to SEQ ID NO: 1852261
acuuaaacaaacuuucagu

SEQ ID NO: 1852263 - RNA, 19 nt, Artificial Sequence
  Description of Artificial Sequence: Synthetic oligonucleotide
  Sense strand starting at position 539 of SEQ ID NO: 1564061
ggaacacugcuuugguuua

SEQ ID NO: 1852264 - RNA, 19 nt, Artificial Sequence
  Description of Artificial Sequence: Synthetic oligonucleotide
  Antisense strand to SEQ ID NO: 1852263
uaaaccaaagcaguguucc

SEQ ID NO: 1852265 - RNA, 19 nt, Artificial Sequence
  Description of Artificial Sequence: Synthetic oligonucleotide
  Sense strand starting at position 634 of SEQ ID NO: 1564061
uaugcuugaccagggaaau

SEQ ID NO: 1852266 - RNA, 19 nt, Artificial Sequence
  Description of Artificial Sequence: Synthetic oligonucleotide
  Antisense strand to SEQ ID NO: 1852265
auuucccuggucaagcaua

SEQ ID NO: 1852267 - RNA, 19 nt, Artificial Sequence
  Description of Artificial Sequence: Synthetic oligonucleotide
  Sense strand starting at position 635 of SEQ ID NO: 1564061
augcuugaccagggaaaua

SEQ ID NO: 1852268 - RNA, 19 nt, Artificial Sequence
  Description of Artificial Sequence: Synthetic oligonucleotide
  Antisense strand to SEQ ID NO: 1852267
uauuucccuggucaagcau

SEQ ID NO: 1852269 - RNA, 19 nt, Artificial Sequence
  Description of Artificial Sequence: Synthetic oligonucleotide
  Sense strand starting at position 731 of SEQ ID NO: 1564061
caacgaauauuccuugguu

SEQ ID NO: 1852270 - RNA, 19 nt, Artificial Sequence
  Description of Artificial Sequence: Synthetic oligonucleotide
  Antisense strand to SEQ ID NO: 1852269
aaccaaggaauauucguug

SEQ ID NO: 1852271 - RNA, 19 nt, Artificial Sequence
  Description of Artificial Sequence: Synthetic oligonucleotide
  Sense strand starting at position 732 of SEQ ID NO: 1564061
aacgaauauuccuugguua

SEQ ID NO: 1852272 - RNA, 19 nt, Artificial Sequence
  Description of Artificial Sequence: Synthetic oligonucleotide
  Antisense strand to SEQ ID NO: 1852271
uaaccaaggaauauucguu

SEQ ID NO: 1852273 - RNA, 19 nt, Artificial Sequence
  Description of Artificial Sequence: Synthetic oligonucleotide
  Sense strand starting at position 733 of SEQ ID NO: 1564061
acgaauauuccuugguuag

SEQ ID NO: 1852274 - RNA, 19 nt, Artificial Sequence
  Description of Artificial Sequence: Synthetic oligonucleotide
  Antisense strand to SEQ ID NO: 1852273
cuaaccaaggaauauucgu

SEQ ID NO: 1852275 - RNA, 19 nt, Artificial Sequence
  Description of Artificial Sequence: Synthetic oligonucleotide
  Sense strand starting at position 744 of SEQ ID NO: 1564061
uugguuagcuauuccagaa

SEQ ID NO: 1852276 - RNA, 19 nt, Artificial Sequence
  Description of Artificial Sequence: Synthetic oligonucleotide
  Antisense strand to SEQ ID NO: 1852275
uucuggaauagcuaaccaa

SEQ ID NO: 1852277 - RNA, 19 nt, Artificial Sequence
  Description of Artificial Sequence: Synthetic oligonucleotide
  Sense strand starting at position 808 of SEQ ID NO: 1564061
agucucugcacuugagaag

SEQ ID NO: 1852278 - RNA, 19 nt, Artificial Sequence
  Description of Artificial Sequence: Synthetic oligonucleotide
  Antisense strand to SEQ ID NO: 1852277
cuucucaagugcagagacu

SEQ ID NO: 1852279 - RNA, 19 nt, Artificial Sequence
  Description of Artificial Sequence: Synthetic oligonucleotide
  Sense strand starting at position 950 of SEQ ID NO: 1564061
gcagguggcauagaugauu

SEQ ID NO: 1852280 - RNA, 19 nt, Artificial Sequence
  Description of Artificial Sequence: Synthetic oligonucleotide
  Antisense strand to SEQ ID NO: 1852279
aaucaucuaugccaccugc

SEQ ID NO: 1852281 - RNA, 19 nt, Artificial Sequence
  Description of Artificial Sequence: Synthetic oligonucleotide
  Sense strand starting at position 1110 of SEQ ID NO: 1564061
acgucauuggguuaugaug

SEQ ID NO: 1852282 - RNA, 19 nt, Artificial Sequence
  Description of Artificial Sequence: Synthetic oligonucleotide
  Antisense strand to SEQ ID NO: 1852281
caucauaacccaaugacgu

SEQ ID NO: 1852283 - RNA, 19 nt, Artificial Sequence
  Description of Artificial Sequence: Synthetic oligonucleotide
  Sense strand starting at position 1138 of SEQ ID NO: 1564061
ugagauaaucuguguagaa

SEQ ID NO: 1852284 - RNA, 19 nt, Artificial Sequence
  Description of Artificial Sequence: Synthetic oligonucleotide
  Antisense strand to SEQ ID NO: 1852283
uucuacacagauuaucuca

SEQ ID NO: 1852285 - RNA, 19 nt, Artificial Sequence
  Description of Artificial Sequence: Synthetic oligonucleotide
  Sense strand starting at position 1139 of SEQ ID NO: 1564061
gagauaaucuguguagaac

SEQ ID NO: 1852286 - RNA, 19 nt, Artificial Sequence
  Description of Artificial Sequence: Synthetic oligonucleotide
  Antisense strand to SEQ ID NO: 1852285
guucuacacagauuaucuc

SEQ ID NO: 1852287 - RNA, 19 nt, Artificial Sequence
  Description of Artificial Sequence: Synthetic oligonucleotide
  Sense strand starting at position 1328 of SEQ ID NO: 1564061
uuuccuauggaaugacaca

SEQ ID NO: 1852288 - RNA, 19 nt, Artificial Sequence
  Description of Artificial Sequence: Synthetic oligonucleotide
  Antisense strand to SEQ ID NO: 1852287
ugugucauuccauaggaaa

SEQ ID NO: 1852289 - RNA, 19 nt, Artificial Sequence
  Description of Artificial Sequence: Synthetic oligonucleotide
  Sense strand starting at position 1340 of SEQ ID NO: 1564061
ugacacaguucugccauaa

SEQ ID NO: 1852290 - RNA, 19 nt, Artificial Sequence
  Description of Artificial Sequence: Synthetic oligonucleotide
  Antisense strand to SEQ ID NO: 1852289
uuauggcagaacuguguca

SEQ ID NO: 1852291 - RNA, 19 nt, Artificial Sequence
  Description of Artificial Sequence: Synthetic oligonucleotide
  Sense strand starting at position 1371 of SEQ ID NO: 1564061
caaccauaugucuggcaag

SEQ ID NO: 1852292 - RNA, 19 nt, Artificial Sequence
  Description of Artificial Sequence: Synthetic oligonucleotide
  Antisense strand to SEQ ID NO: 1852291
cuugccagacauaugguug

SEQ ID NO: 1852293 - RNA, 19 nt, Artificial Sequence
  Description of Artificial Sequence: Synthetic oligonucleotide
  Sense strand starting at position 1644 of SEQ ID NO: 1564061
aacuguggguggucagaga

SEQ ID NO: 1852294 - RNA, 19 nt, Artificial Sequence
  Description of Artificial Sequence: Synthetic oligonucleotide
  Antisense strand to SEQ ID NO: 1852293
ucucugaccacccacaguu

SEQ ID NO: 1852295 - RNA, 19 nt, Artificial Sequence
  Description of Artificial Sequence: Synthetic oligonucleotide
  Sense strand starting at position 1664 of SEQ ID NO: 1564061
ggcucuucucaggagguaa

SEQ ID NO: 1852296 - RNA, 19 nt, Artificial Sequence
  Description of Artificial Sequence: Synthetic oligonucleotide
  Antisense strand to SEQ ID NO: 1852295
uuaccuccugagaagagcc

SEQ ID NO: 1852297 - RNA, 19 nt, Artificial Sequence
  Description of Artificial Sequence: Synthetic oligonucleotide
  Sense strand starting at position 1710 of SEQ ID NO: 1564061
aggagccuuccaugccaaa

SEQ ID NO: 1852298 - RNA, 19 nt, Artificial Sequence
  Description of Artificial Sequence: Synthetic oligonucleotide
  Antisense strand to SEQ ID NO: 1852297
uuuggcauggaaggcuccu

SEQ ID NO: 1852299 - RNA, 19 nt, Artificial Sequence
  Description of Artificial Sequence: Synthetic oligonucleotide
  Sense strand starting at position 1795 of SEQ ID NO: 1564061
uguugcagaaauugaaaga

SEQ ID NO: 1852300 - RNA, 19 nt, Artificial Sequence
  Description of Artificial Sequence: Synthetic oligonucleotide
  Antisense strand to SEQ ID NO: 1852299
ucuuucaauuucugcaaca

SEQ ID NO: 1852301 - RNA, 19 nt, Artificial Sequence
  Description of Artificial Sequence: Synthetic oligonucleotide
  Sense strand starting at position 1847 of SEQ ID NO: 1564061
agguaaagccggcaggauu

SEQ ID NO: 1852302 - RNA, 19 nt, Artificial Sequence
  Description of Artificial Sequence: Synthetic oligonucleotide
  Antisense strand to SEQ ID NO: 1852301
aauccugccggcuuuaccu

SEQ ID NO: 1852303 - RNA, 19 nt, Artificial Sequence
  Description of Artificial Sequence: Synthetic oligonucleotide
  Sense strand starting at position 1858 of SEQ ID NO: 1564061
gcaggauuaguacaugcau

SEQ ID NO: 1852304 - RNA, 19 nt, Artificial Sequence
  Description of Artificial Sequence: Synthetic oligonucleotide
  Antisense strand to SEQ ID NO: 1852303
augcauguacuaauccugc

SEQ ID NO: 1852305 - RNA, 19 nt, Artificial Sequence
  Description of Artificial Sequence: Synthetic oligonucleotide
  Sense strand starting at position 2003 of SEQ ID NO: 1564061
uccaaaucggacugagauu

SEQ ID NO: 1852306 - RNA, 19 nt, Artificial Sequence
  Description of Artificial Sequence: Synthetic oligonucleotide
  Antisense strand to SEQ ID NO: 1852305
aaucucaguccgauuugga

SEQ ID NO: 1852307 - RNA, 19 nt, Artificial Sequence
  Description of Artificial Sequence: Synthetic oligonucleotide
  Sense strand starting at position 2080 of SEQ ID NO: 1564061
uggugagucauaggcaaug

SEQ ID NO: 1852308 - RNA, 19 nt, Artificial Sequence
  Description of Artificial Sequence: Synthetic oligonucleotide
  Antisense strand to SEQ ID NO: 1852307
cauugccuaugacucacca

SEQ ID NO: 1852309 - RNA, 19 nt, Artificial Sequence
  Description of Artificial Sequence: Synthetic oligonucleotide
  Sense strand starting at position 2082 of SEQ ID NO: 1564061
gugagucauaggcaaugca

SEQ ID NO: 1852310 - RNA, 19 nt, Artificial Sequence
  Description of Artificial Sequence: Synthetic oligonucleotide
  Antisense strand to SEQ ID NO: 1852309
ugcauugccuaugacucac

SEQ ID NO: 1852311 - RNA, 19 nt, Artificial Sequence
  Description of Artificial Sequence: Synthetic oligonucleotide
  Sense strand starting at position 2189 of SEQ ID NO: 1564061
cauguuuaugaugagcuga

SEQ ID NO: 1852312 - RNA, 19 nt, Artificial Sequence
  Description of Artificial Sequence: Synthetic oligonucleotide
  Antisense strand to SEQ ID NO: 1852311
ucagcucaucauaaacaug

SEQ ID NO: 1852313 - RNA, 19 nt, Artificial Sequence
  Description of Artificial Sequence: Synthetic oligonucleotide
  Sense strand starting at position 2191 of SEQ ID NO: 1564061
uguuuaugaugagcugaaa

SEQ ID NO: 1852314 - RNA, 19 nt, Artificial Sequence
  Description of Artificial Sequence: Synthetic oligonucleotide
  Antisense strand to SEQ ID NO: 1852313
uuucagcucaucauaaaca

SEQ ID NO: 1852315 - RNA, 19 nt, Artificial Sequence
  Description of Artificial Sequence: Synthetic oligonucleotide
  Sense strand starting at position 2320 of SEQ ID NO: 1564061
ucagguauucggcuccguu

SEQ ID NO: 1852316 - RNA, 19 nt, Artificial Sequence
  Description of Artificial Sequence: Synthetic oligonucleotide
  Antisense strand to SEQ ID NO: 1852315
aacggagccgaauaccuga

SEQ ID NO: 1852317 - RNA, 19 nt, Artificial Sequence
  Description of Artificial Sequence: Synthetic oligonucleotide
  Sense strand starting at position 2321 of SEQ ID NO: 1564061
cagguauucggcuccguuu

SEQ ID NO: 1852318 - RNA, 19 nt, Artificial Sequence
  Description of Artificial Sequence: Synthetic oligonucleotide
  Antisense strand to SEQ ID NO: 1852317
aaacggagccgaauaccug

SEQ ID NO: 1852319 - RNA, 19 nt, Artificial Sequence
  Description of Artificial Sequence: Synthetic oligonucleotide
  Sense strand starting at position 2688 of SEQ ID NO: 1564061
cucucagcacaguagaauu

SEQ ID NO: 1852320 - RNA, 19 nt, Artificial Sequence
  Description of Artificial Sequence: Synthetic oligonucleotide
  Antisense strand to SEQ ID NO: 1852319
aauucuacugugcugagag

SEQ ID NO: 1852321 - RNA, 19 nt, Artificial Sequence
  Description of Artificial Sequence: Synthetic oligonucleotide
  Sense strand starting at position 2745 of SEQ ID NO: 1564061
gcaagauaguaucauuuga

SEQ ID NO: 1852322 - RNA, 19 nt, Artificial Sequence
  Description of Artificial Sequence: Synthetic oligonucleotide
  Antisense strand to SEQ ID NO: 1852321
ucaaaugauacuaucuugc

SEQ ID NO: 1852323 - RNA, 19 nt, Artificial Sequence
  Description of Artificial Sequence: Synthetic oligonucleotide
  Sense strand starting at position 2952 of SEQ ID NO: 1564061
ggguucuuugcucagaaua

SEQ ID NO: 1852324 - RNA, 19 nt, Artificial Sequence
  Description of Artificial Sequence: Synthetic oligonucleotide
  Antisense strand to SEQ ID NO: 1852323
uauucugagcaaagaaccc

SEQ ID NO: 1852325 - RNA, 19 nt, Artificial Sequence
  Description of Artificial Sequence: Synthetic oligonucleotide
  Sense strand starting at position 3234 of SEQ ID NO: 1564061
gccucaaugggauguugga

SEQ ID NO: 1852326 - RNA, 19 nt, Artificial Sequence
  Description of Artificial Sequence: Synthetic oligonucleotide
  Antisense strand to SEQ ID NO: 1852325
uccaacaucccauugaggc

SEQ ID NO: 1852327 - RNA, 19 nt, Artificial Sequence
  Description of Artificial Sequence: Synthetic oligonucleotide
  Sense strand starting at position 3884 of SEQ ID NO: 1564061
agggauucagaguggguaa

SEQ ID NO: 1852328 - RNA, 19 nt, Artificial Sequence
  Description of Artificial Sequence: Synthetic oligonucleotide
  Antisense strand to SEQ ID NO: 1852327
uuacccacucugaaucccu

SEQ ID NO: 1852329 - RNA, 19 nt, Artificial Sequence
  Description of Artificial Sequence: Synthetic oligonucleotide
  Sense strand starting at position 3922 of SEQ ID NO: 1564061
ggaugagugcgguagggaa

SEQ ID NO: 1852330 - RNA, 19 nt, Artificial Sequence
  Description of Artificial Sequence: Synthetic oligonucleotide
  Antisense strand to SEQ ID NO: 1852329
uucccuaccgcacucaucc

SEQ ID NO: 1852331 - RNA, 19 nt, Artificial Sequence
  Description of Artificial Sequence: Synthetic oligonucleotide
  Sense strand starting at position 56 of SEQ ID NO: 1564062
ggagcuguagaauggugaa

SEQ ID NO: 1852332 - RNA, 19 nt, Artificial Sequence
  Description of Artificial Sequence: Synthetic oligonucleotide
  Antisense strand to SEQ ID NO: 1852331
uucaccauucuacagcucc

SEQ ID NO: 1852333 - RNA, 19 nt, Artificial Sequence
  Description of Artificial Sequence: Synthetic oligonucleotide
  Sense strand starting at position 70 of SEQ ID NO: 1564062
gugaauuggugccuggaag

SEQ ID NO: 1852334 - RNA, 19 nt, Artificial Sequence
  Description of Artificial Sequence: Synthetic oligonucleotide
  Antisense strand to SEQ ID NO: 1852333
cuuccaggcaccaauucac

SEQ ID NO: 1852335 - RNA, 19 nt, Artificial Sequence
  Description of Artificial Sequence: Synthetic oligonucleotide
  Sense strand starting at position 135 of SEQ ID NO: 1564062
uguauuaugggaggugaug

SEQ ID NO: 1852336 - RNA, 19 nt, Artificial Sequence
  Description of Artificial Sequence: Synthetic oligonucleotide
  Antisense strand to SEQ ID NO: 1852335
caucaccucccauaauaca

SEQ ID NO: 1852337 - RNA, 19 nt, Artificial Sequence
  Description of Artificial Sequence: Synthetic oligonucleotide
  Sense strand starting at position 201 of SEQ ID NO: 1564062
ugggaugacgcgugaacaa

SEQ ID NO: 1852338 - RNA, 19 nt, Artificial Sequence
  Description of Artificial Sequence: Synthetic oligonucleotide
  Antisense strand to SEQ ID NO: 1852337
uuguucacgcgucauccca

SEQ ID NO: 1852339 - RNA, 19 nt, Artificial Sequence
  Description of Artificial Sequence: Synthetic oligonucleotide
  Sense strand starting at position 214 of SEQ ID NO: 1564062
gaacaaaggucggcuccau

SEQ ID NO: 1852340 - RNA, 19 nt, Artificial Sequence
  Description of Artificial Sequence: Synthetic oligonucleotide
  Antisense strand to SEQ ID NO: 1852339
auggagccgaccuuuguuc

SEQ ID NO: 1852341 - RNA, 19 nt, Artificial Sequence
  Description of Artificial Sequence: Synthetic oligonucleotide
  Sense strand starting at position 772 of SEQ ID NO: 1564062
auaagagcucuuugcggaa

SEQ ID NO: 1852342 - RNA, 19 nt, Artificial Sequence
  Description of Artificial Sequence: Synthetic oligonucleotide
  Antisense strand to SEQ ID NO: 1852341
uuccgcaaagagcucuuau

SEQ ID NO: 1852343 - RNA, 19 nt, Artificial Sequence
  Description of Artificial Sequence: Synthetic oligonucleotide
  Sense strand starting at position 776 of SEQ ID NO: 1564062
gagcucuuugcggaagaau

SEQ ID NO: 1852344 - RNA, 19 nt, Artificial Sequence
  Description of Artificial Sequence: Synthetic oligonucleotide
  Antisense strand to SEQ ID NO: 1852343
auucuuccgcaaagagcuc

SEQ ID NO: 1852345 - RNA, 19 nt, Artificial Sequence
  Description of Artificial Sequence: Synthetic oligonucleotide
  Sense strand starting at position 788 of SEQ ID NO: 1564062
gaagaauuccgacaggccu

SEQ ID NO: 1852346 - RNA, 19 nt, Artificial Sequence
  Description of Artificial Sequence: Synthetic oligonucleotide
  Antisense strand to SEQ ID NO: 1852345
aggccugucggaauucuuc

SEQ ID NO: 1852347 - RNA, 19 nt, Artificial Sequence
  Description of Artificial Sequence: Synthetic oligonucleotide
  Sense strand starting at position 796 of SEQ ID NO: 1564062
ccgacaggccuuugaggaa

SEQ ID NO: 1852348 - RNA, 19 nt, Artificial Sequence
  Description of Artificial Sequence: Synthetic oligonucleotide
  Antisense strand to SEQ ID NO: 1852347
uuccucaaaggccugucgg

SEQ ID NO: 1852349 - RNA, 19 nt, Artificial Sequence
  Description of Artificial Sequence: Synthetic oligonucleotide
  Sense strand starting at position 1141 of SEQ ID NO: 1564062
ggaauucagccagguagac

SEQ ID NO: 1852350 - RNA, 19 nt, Artificial Sequence
  Description of Artificial Sequence: Synthetic oligonucleotide
  Antisense strand to SEQ ID NO: 1852349
gucuaccuggcugaauucc

SEQ ID NO: 1852351 - RNA, 19 nt, Artificial Sequence
  Description of Artificial Sequence: Synthetic oligonucleotide
  Sense strand starting at position 1155 of SEQ ID NO: 1564062
uagacugggucuccugaaa

SEQ ID NO: 1852352 - RNA, 19 nt, Artificial Sequence
  Description of Artificial Sequence: Synthetic oligonucleotide
  Antisense strand to SEQ ID NO: 1852351
uuucaggagacccagucua

SEQ ID NO: 1852353 - RNA, 19 nt, Artificial Sequence
  Description of Artificial Sequence: Synthetic oligonucleotide
  Sense strand starting at position 1312 of SEQ ID NO: 1564062
ccuggaucacguuaaucaa

SEQ ID NO: 1852354 - RNA, 19 nt, Artificial Sequence
  Description of Artificial Sequence: Synthetic oligonucleotide
  Antisense strand to SEQ ID NO: 1852353
uugauuaacgugauccagg

SEQ ID NO: 1852355 - RNA, 19 nt, Artificial Sequence
  Description of Artificial Sequence: Synthetic oligonucleotide
  Sense strand starting at position 1399 of SEQ ID NO: 1564062
cgggaaugacuucgaucuc

SEQ ID NO: 1852356 - RNA, 19 nt, Artificial Sequence
  Description of Artificial Sequence: Synthetic oligonucleotide
  Antisense strand to SEQ ID NO: 1852355
gagaucgaagucauucccg

SEQ ID NO: 1852357 - RNA, 19 nt, Artificial Sequence
  Description of Artificial Sequence: Synthetic oligonucleotide
  Sense strand starting at position 1434 of SEQ ID NO: 1564062
aaguucuccuccgcaagga

SEQ ID NO: 1852358 - RNA, 19 nt, Artificial Sequence
  Description of Artificial Sequence: Synthetic oligonucleotide
  Antisense strand to SEQ ID NO: 1852357
uccuugcggaggagaacuu

SEQ ID NO: 1852359 - RNA, 19 nt, Artificial Sequence
  Description of Artificial Sequence: Synthetic oligonucleotide
  Sense strand starting at position 1569 of SEQ ID NO: 1564062
gcauuuaauucuucgcgca

SEQ ID NO: 1852360 - RNA, 19 nt, Artificial Sequence
  Description of Artificial Sequence: Synthetic oligonucleotide
  Antisense strand to SEQ ID NO: 1852359
ugcgcgaagaauuaaaugc

SEQ ID NO: 1852361 - RNA, 19 nt, Artificial Sequence
  Description of Artificial Sequence: Synthetic oligonucleotide
  Sense strand starting at position 2000 of SEQ ID NO: 1564062
gcaggaucugucgaggaaa

SEQ ID NO: 1852362 - RNA, 19 nt, Artificial Sequence
  Description of Artificial Sequence: Synthetic oligonucleotide
  Antisense strand to SEQ ID NO: 1852361
uuuccucgacagauccugc

SEQ ID NO: 1852363 - RNA, 19 nt, Artificial Sequence
  Description of Artificial Sequence: Synthetic oligonucleotide
  Sense strand starting at position 2483 of SEQ ID NO: 1564062
ucagccuaaugauucugaa

SEQ ID NO: 1852364 - RNA, 19 nt, Artificial Sequence
  Description of Artificial Sequence: Synthetic oligonucleotide
  Antisense strand to SEQ ID NO: 1852363
uucagaaucauuaggcuga

SEQ ID NO: 1852365 - RNA, 19 nt, Artificial Sequence
  Description of Artificial Sequence: Synthetic oligonucleotide
  Sense strand starting at position 2487 of SEQ ID NO: 1564062
ccuaaugauucugaaagag

SEQ ID NO: 1852366 - RNA, 19 nt, Artificial Sequence
  Description of Artificial Sequence: Synthetic oligonucleotide
  Antisense strand to SEQ ID NO: 1852365
cucuuucagaaucauuagg

SEQ ID NO: 1852367 - RNA, 19 nt, Artificial Sequence
  Description of Artificial Sequence: Synthetic oligonucleotide
  Sense strand starting at position 2505 of SEQ ID NO: 1564062
ggcuauuuccagggcuguu

SEQ ID NO: 1852368 - RNA, 19 nt, Artificial Sequence
  Description of Artificial Sequence: Synthetic oligonucleotide
  Antisense strand to SEQ ID NO: 1852367
aacagcccuggaaauagcc

SEQ ID NO: 1852369 - RNA, 19 nt, Artificial Sequence
  Description of Artificial Sequence: Synthetic oligonucleotide
  Sense strand starting at position 2586 of SEQ ID NO: 1564062
gaggcagggccauaaguua

SEQ ID NO: 1852370 - RNA, 19 nt, Artificial Sequence
  Description of Artificial Sequence: Synthetic oligonucleotide
  Antisense strand to SEQ ID NO: 1852369
uaacuuauggcccugccuc

SEQ ID NO: 1852371 - RNA, 19 nt, Artificial Sequence
  Description of Artificial Sequence: Synthetic oligonucleotide
  Sense strand starting at position 2857 of SEQ ID NO: 1564062
ugagcuucucgauguaaag

SEQ ID NO: 1852372 - RNA, 19 nt, Artificial Sequence
  Description of Artificial Sequence: Synthetic oligonucleotide
  Antisense strand to SEQ ID NO: 1852371
cuuuacaucgagaagcuca

SEQ ID NO: 1852373 - RNA, 19 nt, Artificial Sequence
  Description of Artificial Sequence: Synthetic oligonucleotide
  Sense strand starting at position 2859 of SEQ ID NO: 1564062
agcuucucgauguaaagaa

SEQ ID NO: 1852374 - RNA, 19 nt, Artificial Sequence
  Description of Artificial Sequence: Synthetic oligonucleotide
  Antisense strand to SEQ ID NO: 1852373
uucuuuacaucgagaagcu

SEQ ID NO: 1852375 - RNA, 19 nt, Artificial Sequence
  Description of Artificial Sequence: Synthetic oligonucleotide
  Sense strand starting at position 2956 of SEQ ID NO: 1564062
aguggauguugagcaugaa

SEQ ID NO: 1852376 - RNA, 19 nt, Artificial Sequence
  Description of Artificial Sequence: Synthetic oligonucleotide
  Antisense strand to SEQ ID NO: 1852375
uucaugcucaacauccacu

SEQ ID NO: 1852377 - RNA, 19 nt, Artificial Sequence
  Description of Artificial Sequence: Synthetic oligonucleotide
  Sense strand starting at position 2957 of SEQ ID NO: 1564062
guggauguugagcaugaaa

SEQ ID NO: 1852378 - RNA, 19 nt, Artificial Sequence
  Description of Artificial Sequence: Synthetic oligonucleotide
  Antisense strand to SEQ ID NO: 1852377
uuucaugcucaacauccac

SEQ ID NO: 1852379 - RNA, 19 nt, Artificial Sequence
  Description of Artificial Sequence: Synthetic oligonucleotide
  Sense strand starting at position 3015 of SEQ ID NO: 1564062
guuaacucuaauggcgaau

SEQ ID NO: 1852380 - RNA, 19 nt, Artificial Sequence
  Description of Artificial Sequence: Synthetic oligonucleotide
  Antisense strand to SEQ ID NO: 1852379
auucgccauuagaguuaac

SEQ ID NO: 1852381 - RNA, 19 nt, Artificial Sequence
  Description of Artificial Sequence: Synthetic oligonucleotide
  Sense strand starting at position 3179 of SEQ ID NO: 1564062
agucgaugugcucuguguu

SEQ ID NO: 1852382 - RNA, 19 nt, Artificial Sequence
  Description of Artificial Sequence: Synthetic oligonucleotide
  Antisense strand to SEQ ID NO: 1852381
aacacagagcacaucgacu

SEQ ID NO: 1852383 - RNA, 19 nt, Artificial Sequence
  Description of Artificial Sequence: Synthetic oligonucleotide
  Sense strand starting at position 3265 of SEQ ID NO: 1564062
ggaagaacuuucugacaca

SEQ ID NO: 1852384 - RNA, 19 nt, Artificial Sequence
  Description of Artificial Sequence: Synthetic oligonucleotide
  Antisense strand to SEQ ID NO: 1852383
ugugucagaaaguucuucc

SEQ ID NO: 1852385 - RNA, 19 nt, Artificial Sequence
  Description of Artificial Sequence: Synthetic oligonucleotide
  Sense strand starting at position 3293 of SEQ ID NO: 1564062
cccaacuguccguggaaga

SEQ ID NO: 1852386 - RNA, 19 nt, Artificial Sequence
  Description of Artificial Sequence: Synthetic oligonucleotide
  Antisense strand to SEQ ID NO: 1852385
ucuuccacggacaguuggg

SEQ ID NO: 1852387 - RNA, 19 nt, Artificial Sequence
  Description of Artificial Sequence: Synthetic oligonucleotide
  Sense strand starting at position 3294 of SEQ ID NO: 1564062
ccaacuguccguggaagaa

SEQ ID NO: 1852388 - RNA, 19 nt, Artificial Sequence
  Description of Artificial Sequence: Synthetic oligonucleotide
  Antisense strand to SEQ ID NO: 1852387
uucuuccacggacaguugg

SEQ ID NO: 1852389 - RNA, 19 nt, Artificial Sequence
  Description of Artificial Sequence: Synthetic oligonucleotide
  Sense strand starting at position 3469 of SEQ ID NO: 1564062
ugagucuuuguucagugua

SEQ ID NO: 1852390 - RNA, 19 nt, Artificial Sequence
  Description of Artificial Sequence: Synthetic oligonucleotide
  Antisense strand to SEQ ID NO: 1852389
uacacugaacaaagacuca

SEQ ID NO: 1852391 - RNA, 19 nt, Artificial Sequence
  Description of Artificial Sequence: Synthetic oligonucleotide
  Sense strand starting at position 3483 of SEQ ID NO: 1564062
guguacauacagcaugaau

SEQ ID NO: 1852392 - RNA, 19 nt, Artificial Sequence
  Description of Artificial Sequence: Synthetic oligonucleotide
  Antisense strand to SEQ ID NO: 1852391
auucaugcuguauguacac

SEQ ID NO: 1852393 - RNA, 19 nt, Artificial Sequence
  Description of Artificial Sequence: Synthetic oligonucleotide
  Sense strand starting at position 3485 of SEQ ID NO: 1564062
guacauacagcaugaaugu

SEQ ID NO: 1852394 - RNA, 19 nt, Artificial Sequence
  Description of Artificial Sequence: Synthetic oligonucleotide
  Antisense strand to SEQ ID NO: 1852393
acauucaugcuguauguac

SEQ ID NO: 1852395 - RNA, 19 nt, Artificial Sequence
  Description of Artificial Sequence: Synthetic oligonucleotide
  Sense strand starting at position 3494 of SEQ ID NO: 1564062
gcaugaaugucccuucucu

SEQ ID NO: 1852396 - RNA, 19 nt, Artificial Sequence
  Description of Artificial Sequence: Synthetic oligonucleotide
  Antisense strand to SEQ ID NO: 1852395
agagaagggacauucaugc

SEQ ID NO: 1852397 - RNA, 19 nt, Artificial Sequence
  Description of Artificial Sequence: Synthetic oligonucleotide
  Sense strand starting at position 3592 of SEQ ID NO: 1564062
ugaugaugccgcugaacuu

SEQ ID NO: 1852398 - RNA, 19 nt, Artificial Sequence
  Description of Artificial Sequence: Synthetic oligonucleotide
  Antisense strand to SEQ ID NO: 1852397
aaguucagcggcaucauca

SEQ ID NO: 1852399 - RNA, 19 nt, Artificial Sequence
  Description of Artificial Sequence: Synthetic oligonucleotide
  Sense strand starting at position 3760 of SEQ ID NO: 1564062
auuggacuuccugguguaa

SEQ ID NO: 1852400 - RNA, 19 nt, Artificial Sequence
  Description of Artificial Sequence: Synthetic oligonucleotide
  Antisense strand to SEQ ID NO: 1852399
uuacaccaggaaguccaau

SEQ ID NO: 1852401 - RNA, 19 nt, Artificial Sequence
  Description of Artificial Sequence: Synthetic oligonucleotide
  Sense strand starting at position 3764 of SEQ ID NO: 1564062
gacuuccugguguaaaucu

SEQ ID NO: 1852402 - RNA, 19 nt, Artificial Sequence
  Description of Artificial Sequence: Synthetic oligonucleotide
  Antisense strand to SEQ ID NO: 1852401
agauuuacaccaggaaguc

SEQ ID NO: 1852403 - RNA, 19 nt, Artificial Sequence
  Description of Artificial Sequence: Synthetic oligonucleotide
  Sense strand starting at position 3773 of SEQ ID NO: 1564062
guguaaaucucuucuugcu

SEQ ID NO: 1852404 - RNA, 19 nt, Artificial Sequence
  Description of Artificial Sequence: Synthetic oligonucleotide
  Antisense strand to SEQ ID NO: 1852403
agcaagaagagauuuacac

SEQ ID NO: 1852405 - RNA, 19 nt, Artificial Sequence
  Description of Artificial Sequence: Synthetic oligonucleotide
  Sense strand starting at position 3800 of SEQ ID NO: 1564062
gucauuuccuugguagggu

SEQ ID NO: 1852406 - RNA, 19 nt, Artificial Sequence
  Description of Artificial Sequence: Synthetic oligonucleotide
  Antisense strand to SEQ ID NO: 1852405
acccuaccaaggaaaugac

SEQ ID NO: 1852407 - RNA, 19 nt, Artificial Sequence
  Description of Artificial Sequence: Synthetic oligonucleotide
  Sense strand starting at position 3857 of SEQ ID NO: 1564062
gaacuugcaguccaaagua

SEQ ID NO: 1852408 - RNA, 19 nt, Artificial Sequence
  Description of Artificial Sequence: Synthetic oligonucleotide
  Antisense strand to SEQ ID NO: 1852407
uacuuuggacugcaaguuc

SEQ ID NO: 1852409 - RNA, 19 nt, Artificial Sequence
  Description of Artificial Sequence: Synthetic oligonucleotide
  Sense strand starting at position 3968 of SEQ ID NO: 1564062
gcaugaauuuauugacuuu

SEQ ID NO: 1852410 - RNA, 19 nt, Artificial Sequence
  Description of Artificial Sequence: Synthetic oligonucleotide
  Antisense strand to SEQ ID NO: 1852409
aaagucaauaaauucaugc

SEQ ID NO: 1852411 - RNA, 19 nt, Artificial Sequence
  Description of Artificial Sequence: Synthetic oligonucleotide
  Sense strand starting at position 136 of SEQ ID NO: 1564063
guaggcgguuuccaggaau

SEQ ID NO: 1852412 - RNA, 19 nt, Artificial Sequence
  Description of Artificial Sequence: Synthetic oligonucleotide
  Antisense strand to SEQ ID NO: 1852411
auuccuggaaaccgccuac

SEQ ID NO: 1852413 - RNA, 19 nt, Artificial Sequence
  Description of Artificial Sequence: Synthetic oligonucleotide
  Sense strand starting at position 139 of SEQ ID NO: 1564063
ggcgguuuccaggaaugau

SEQ ID NO: 1852414 - RNA, 19 nt, Artificial Sequence
  Description of Artificial Sequence: Synthetic oligonucleotide
  Antisense strand to SEQ ID NO: 1852413
aucauuccuggaaaccgcc

SEQ ID NO: 1852415 - RNA, 19 nt, Artificial Sequence
  Description of Artificial Sequence: Synthetic oligonucleotide
  Sense strand starting at position 501 of SEQ ID NO: 1564063
guagcuaucugcuuugaag

SEQ ID NO: 1852416 - RNA, 19 nt, Artificial Sequence
  Description of Artificial Sequence: Synthetic oligonucleotide
  Antisense strand to SEQ ID NO: 1852415
cuucaaagcagauagcuac

SEQ ID NO: 1852417 - RNA, 19 nt, Artificial Sequence
  Description of Artificial Sequence: Synthetic oligonucleotide
  Sense strand starting at position 504 of SEQ ID NO: 1564063
gcuaucugcuuugaaguaa

SEQ ID NO: 1852418 - RNA, 19 nt, Artificial Sequence
  Description of Artificial Sequence: Synthetic oligonucleotide
  Antisense strand to SEQ ID NO: 1852417
uuacuucaaagcagauagc

SEQ ID NO: 1852419 - RNA, 19 nt, Artificial Sequence
  Description of Artificial Sequence: Synthetic oligonucleotide
  Sense strand starting at position 515 of SEQ ID NO: 1564063
ugaaguaagugguccuaca

SEQ ID NO: 1852420 - RNA, 19 nt, Artificial Sequence
  Description of Artificial Sequence: Synthetic oligonucleotide
  Antisense strand to SEQ ID NO: 1852419
uguaggaccacuuacuuca

SEQ ID NO: 1852421 - RNA, 19 nt, Artificial Sequence
  Description of Artificial Sequence: Synthetic oligonucleotide
  Sense strand starting at position 1364 of SEQ ID NO: 1564063
cugagaccuugucucggaa

SEQ ID NO: 1852422 - RNA, 19 nt, Artificial Sequence
  Description of Artificial Sequence: Synthetic oligonucleotide
  Antisense strand to SEQ ID NO: 1852421
uuccgagacaaggucucag

SEQ ID NO: 1852423 - RNA, 19 nt, Artificial Sequence
  Description of Artificial Sequence: Synthetic oligonucleotide
  Sense strand starting at position 1443 of SEQ ID NO: 1564063
cuaucagucuuagauaagg

SEQ ID NO: 1852424 - RNA, 19 nt, Artificial Sequence
  Description of Artificial Sequence: Synthetic oligonucleotide
  Antisense strand to SEQ ID NO: 1852423
ccuuaucuaagacugauag

SEQ ID NO: 1852425 - RNA, 19 nt, Artificial Sequence
  Description of Artificial Sequence: Synthetic oligonucleotide
  Sense strand starting at position 1448 of SEQ ID NO: 1564063
agucuuagauaaggcucaa

SEQ ID NO: 1852426 - RNA, 19 nt, Artificial Sequence
  Description of Artificial Sequence: Synthetic oligonucleotide
  Antisense strand to SEQ ID NO: 1852425
uugagccuuaucuaagacu

SEQ ID NO: 1852427 - RNA, 19 nt, Artificial Sequence
  Description of Artificial Sequence: Synthetic oligonucleotide
  Sense strand starting at position 1543 of SEQ ID NO: 1564063
ggugccaaauguuccauuu

SEQ ID NO: 1852428 - RNA, 19 nt, Artificial Sequence
  Description of Artificial Sequence: Synthetic oligonucleotide
  Antisense strand to SEQ ID NO: 1852427
aaauggaacauuuggcacc

SEQ ID NO: 1852429 - RNA, 19 nt, Artificial Sequence
  Description of Artificial Sequence: Synthetic oligonucleotide
  Sense strand starting at position 1545 of SEQ ID NO: 1564063
ugccaaauguuccauuuag

SEQ ID NO: 1852430 - RNA, 19 nt, Artificial Sequence
  Description of Artificial Sequence: Synthetic oligonucleotide
  Antisense strand to SEQ ID NO: 1852429
cuaaauggaacauuuggca

SEQ ID NO: 1852431 - RNA, 19 nt, Artificial Sequence
  Description of Artificial Sequence: Synthetic oligonucleotide
  Sense strand starting at position 1991 of SEQ ID NO: 1564063
ggagauuucucaggcggcu

SEQ ID NO: 1852432 - RNA, 19 nt, Artificial Sequence
  Description of Artificial Sequence: Synthetic oligonucleotide
  Antisense strand to SEQ ID NO: 1852431
agccgccugagaaaucucc

SEQ ID NO: 1852433 - RNA, 19 nt, Artificial Sequence
  Description of Artificial Sequence: Synthetic oligonucleotide
  Sense strand starting at position 2125 of SEQ ID NO: 1564063
cuggaagaauccugcaaag

SEQ ID NO: 1852434 - RNA, 19 nt, Artificial Sequence
  Description of Artificial Sequence: Synthetic oligonucleotide
  Antisense strand to SEQ ID NO: 1852433
cuuugcaggauucuuccag

SEQ ID NO: 1852435 - RNA, 19 nt, Artificial Sequence
  Description of Artificial Sequence: Synthetic oligonucleotide
  Sense strand starting at position 2192 of SEQ ID NO: 1564063
gaaccugagcuuuggaguu

SEQ ID NO: 1852436 - RNA, 19 nt, Artificial Sequence
  Description of Artificial Sequence: Synthetic oligonucleotide
  Antisense strand to SEQ ID NO: 1852435
aacuccaaagcucagguuc

SEQ ID NO: 1852437 - RNA, 19 nt, Artificial Sequence
  Description of Artificial Sequence: Synthetic oligonucleotide
  Sense strand starting at position 2253 of SEQ ID NO: 1564063
uuguuaaaugccgaacaga

SEQ ID NO: 1852438 - RNA, 19 nt, Artificial Sequence
  Description of Artificial Sequence: Synthetic oligonucleotide
  Antisense strand to SEQ ID NO: 1852437
ucuguucggcauuuaacaa

SEQ ID NO: 1852439 - RNA, 19 nt, Artificial Sequence
  Description of Artificial Sequence: Synthetic oligonucleotide
  Sense strand starting at position 2273 of SEQ ID NO: 1564063
agagacugggacgguuaaa

SEQ ID NO: 1852440 - RNA, 19 nt, Artificial Sequence
  Description of Artificial Sequence: Synthetic oligonucleotide
  Antisense strand to SEQ ID NO: 1852439
uuuaaccgucccagucucu

SEQ ID NO: 1852441 - RNA, 19 nt, Artificial Sequence
  Description of Artificial Sequence: Synthetic oligonucleotide
  Sense strand starting at position 2326 of SEQ ID NO: 1564063
ucuccauccuaguggagaa

SEQ ID NO: 1852442 - RNA, 19 nt, Artificial Sequence
  Description of Artificial Sequence: Synthetic oligonucleotide
  Antisense strand to SEQ ID NO: 1852441
uucuccacuaggauggaga

SEQ ID NO: 1852443 - RNA, 19 nt, Artificial Sequence
  Description of Artificial Sequence: Synthetic oligonucleotide
  Sense strand starting at position 2474 of SEQ ID NO: 1564063
gccuaaauguauuccuggu

SEQ ID NO: 1852444 - RNA, 19 nt, Artificial Sequence
  Description of Artificial Sequence: Synthetic oligonucleotide
  Antisense strand to SEQ ID NO: 1852443
accaggaauacauuuaggc

SEQ ID NO: 1852445 - RNA, 19 nt, Artificial Sequence
  Description of Artificial Sequence: Synthetic oligonucleotide
  Sense strand starting at position 2509 of SEQ ID NO: 1564063
cugggcuuucuccaaauaa

SEQ ID NO: 1852446 - RNA, 19 nt, Artificial Sequence
  Description of Artificial Sequence: Synthetic oligonucleotide
  Antisense strand to SEQ ID NO: 1852445
uuauuuggagaaagcccag

SEQ ID NO: 1852447 - RNA, 19 nt, Artificial Sequence
  Description of Artificial Sequence: Synthetic oligonucleotide
  Sense strand starting at position 3201 of SEQ ID NO: 1564063
cuacuuccucagugcugau

SEQ ID NO: 1852448 - RNA, 19 nt, Artificial Sequence
  Description of Artificial Sequence: Synthetic oligonucleotide
  Antisense strand to SEQ ID NO: 1852447
aucagcacugaggaaguag

SEQ ID NO: 1852449 - RNA, 19 nt, Artificial Sequence
  Description of Artificial Sequence: Synthetic oligonucleotide
  Sense strand starting at position 3214 of SEQ ID NO: 1564063
gcugaugucucccuaaccu

SEQ ID NO: 1852450 - RNA, 19 nt, Artificial Sequence
  Description of Artificial Sequence: Synthetic oligonucleotide
  Antisense strand to SEQ ID NO: 1852449
agguuagggagacaucagc

SEQ ID NO: 1852451 - RNA, 19 nt, Artificial Sequence
  Description of Artificial Sequence: Synthetic oligonucleotide
  Sense strand starting at position 3324 of SEQ ID NO: 1564063
agcacucuguccugggaaa

SEQ ID NO: 1852452 - RNA, 19 nt, Artificial Sequence
  Description of Artificial Sequence: Synthetic oligonucleotide
  Antisense strand to SEQ ID NO: 1852451
uuucccaggacagagugcu

SEQ ID NO: 1852453 - RNA, 19 nt, Artificial Sequence
  Description of Artificial Sequence: Synthetic oligonucleotide
  Sense strand starting at position 3325 of SEQ ID NO: 1564063
gcacucuguccugggaaau

SEQ ID NO: 1852454 - RNA, 19 nt, Artificial Sequence
  Description of Artificial Sequence: Synthetic oligonucleotide
  Antisense strand to SEQ ID NO: 1852453
auuucccaggacagagugc

SEQ ID NO: 1852455 - RNA, 19 nt, Artificial Sequence
  Description of Artificial Sequence: Synthetic oligonucleotide
  Sense strand starting at position 3326 of SEQ ID NO: 1564063
cacucuguccugggaaaug

SEQ ID NO: 1852456 - RNA, 19 nt, Artificial Sequence
  Description of Artificial Sequence: Synthetic oligonucleotide
  Antisense strand to SEQ ID NO: 1852455
cauuucccaggacagagug

SEQ ID NO: 1852457 - RNA, 19 nt, Artificial Sequence
  Description of Artificial Sequence: Synthetic oligonucleotide
  Sense strand starting at position 3427 of SEQ ID NO: 1564063
gucaccaggucauagaauu

SEQ ID NO: 1852458 - RNA, 19 nt, Artificial Sequence
  Description of Artificial Sequence: Synthetic oligonucleotide
  Antisense strand to SEQ ID NO: 1852457
aauucuaugaccuggugac

SEQ ID NO: 1852459 - RNA, 19 nt, Artificial Sequence
  Description of Artificial Sequence: Synthetic oligonucleotide
  Sense strand starting at position 3435 of SEQ ID NO: 1564063
gucauagaauugucccuuu

SEQ ID NO: 1852460 - RNA, 19 nt, Artificial Sequence
  Description of Artificial Sequence: Synthetic oligonucleotide
  Antisense strand to SEQ ID NO: 1852459
aaagggacaauucuaugac

SEQ ID NO: 1852461 - RNA, 19 nt, Artificial Sequence
  Description of Artificial Sequence: Synthetic oligonucleotide
  Sense strand starting at position 3538 of SEQ ID NO: 1564063
ucaucucaucccuguggau

SEQ ID NO: 1852462 - RNA, 19 nt, Artificial Sequence
  Description of Artificial Sequence: Synthetic oligonucleotide
  Antisense strand to SEQ ID NO: 1852461
auccacagggaugagauga

SEQ ID NO: 1852463 - RNA, 19 nt, Artificial Sequence
  Description of Artificial Sequence: Synthetic oligonucleotide
  Sense strand starting at position 3573 of SEQ ID NO: 1564063
cugcuagaccgugagucuu

SEQ ID NO: 1852464 - RNA, 19 nt, Artificial Sequence
  Description of Artificial Sequence: Synthetic oligonucleotide
  Antisense strand to SEQ ID NO: 1852463
aagacucacggucuagcag

SEQ ID NO: 1852465 - RNA, 19 nt, Artificial Sequence
  Description of Artificial Sequence: Synthetic oligonucleotide
  Sense strand starting at position 91 of SEQ ID NO: 1564064
gcaaauguugcagagagcu

SEQ ID NO: 1852466 - RNA, 19 nt, Artificial Sequence
  Description of Artificial Sequence: Synthetic oligonucleotide
  Antisense strand to SEQ ID NO: 1852465
agcucucugcaacauuugc

SEQ ID NO: 1852467 - RNA, 19 nt, Artificial Sequence
  Description of Artificial Sequence: Synthetic oligonucleotide
  Sense strand starting at position 391 of SEQ ID NO: 1564064
gggaggauugcuuggguga

SEQ ID NO: 1852468 - RNA, 19 nt, Artificial Sequence
  Description of Artificial Sequence: Synthetic oligonucleotide
  Antisense strand to SEQ ID NO: 1852467
ucacccaagcaauccuccc

SEQ ID NO: 1852469 - RNA, 19 nt, Artificial Sequence
  Description of Artificial Sequence: Synthetic oligonucleotide
  Sense strand starting at position 392 of SEQ ID NO: 1564064
ggaggauugcuugggugac

SEQ ID NO: 1852470 - RNA, 19 nt, Artificial Sequence
  Description of Artificial Sequence: Synthetic oligonucleotide
  Antisense strand to SEQ ID NO: 1852469
gucacccaagcaauccucc

SEQ ID NO: 1852471 - RNA, 19 nt, Artificial Sequence
  Description of Artificial Sequence: Synthetic oligonucleotide
  Sense strand starting at position 396 of SEQ ID NO: 1564064
gauugcuugggugacagau

SEQ ID NO: 1852472 - RNA, 19 nt, Artificial Sequence
  Description of Artificial Sequence: Synthetic oligonucleotide
  Antisense strand to SEQ ID NO: 1852471
aucugucacccaagcaauc

SEQ ID NO: 1852473 - RNA, 19 nt, Artificial Sequence
  Description of Artificial Sequence: Synthetic oligonucleotide
  Sense strand starting at position 600 of SEQ ID NO: 1564064
gguuaauauccagagugua

SEQ ID NO: 1852474 - RNA, 19 nt, Artificial Sequence
  Description of Artificial Sequence: Synthetic oligonucleotide
  Antisense strand to SEQ ID NO: 1852473
uacacucuggauauuaacc

SEQ ID NO: 1852475 - RNA, 19 nt, Artificial Sequence
  Description of Artificial Sequence: Synthetic oligonucleotide
  Sense strand starting at position 793 of SEQ ID NO: 1564064
ucgaaacuacaaugaagua

SEQ ID NO: 1852476 - RNA, 19 nt, Artificial Sequence
  Description of Artificial Sequence: Synthetic oligonucleotide
  Antisense strand to SEQ ID NO: 1852475
uacuucauuguaguuucga

SEQ ID NO: 1852477 - RNA, 19 nt, Artificial Sequence
  Description of Artificial Sequence: Synthetic oligonucleotide
  Sense strand starting at position 823 of SEQ ID NO: 1564064
ccauuaggauggcuaugua

SEQ ID NO: 1852478 - RNA, 19 nt, Artificial Sequence
  Description of Artificial Sequence: Synthetic oligonucleotide
  Antisense strand to SEQ ID NO: 1852477
uacauagccauccuaaugg

SEQ ID NO: 1852479 - RNA, 19 nt, Artificial Sequence
  Description of Artificial Sequence: Synthetic oligonucleotide
  Sense strand starting at position 975 of SEQ ID NO: 1564064
cugcgauauggaugaaccu

SEQ ID NO: 1852480 - RNA, 19 nt, Artificial Sequence
  Description of Artificial Sequence: Synthetic oligonucleotide
  Antisense strand to SEQ ID NO: 1852479
agguucauccauaucgcag

SEQ ID NO: 1852481 - RNA, 19 nt, Artificial Sequence
  Description of Artificial Sequence: Synthetic oligonucleotide
  Sense strand starting at position 976 of SEQ ID NO: 1564064
ugcgauauggaugaaccuu

SEQ ID NO: 1852482 - RNA, 19 nt, Artificial Sequence
  Description of Artificial Sequence: Synthetic oligonucleotide
  Antisense strand to SEQ ID NO: 1852481
aagguucauccauaucgca

SEQ ID NO: 1852483 - RNA, 19 nt, Artificial Sequence
  Description of Artificial Sequence: Synthetic oligonucleotide
  Sense strand starting at position 1033 of SEQ ID NO: 1564064
augcaaauacuguaugauu

SEQ ID NO: 1852484 - RNA, 19 nt, Artificial Sequence
  Description of Artificial Sequence: Synthetic oligonucleotide
  Antisense strand to SEQ ID NO: 1852483
aaucauacaguauuugcau

SEQ ID NO: 1852485 - RNA, 19 nt, Artificial Sequence
  Description of Artificial Sequence: Synthetic oligonucleotide
  Sense strand starting at position 1150 of SEQ ID NO: 1564064
gcuuaacugguauagagac

SEQ ID NO: 1852486 - RNA, 19 nt, Artificial Sequence
  Description of Artificial Sequence: Synthetic oligonucleotide
  Antisense strand to SEQ ID NO: 1852485
gucucuauaccaguuaagc

SEQ ID NO: 1852487 - RNA, 19 nt, Artificial Sequence
  Description of Artificial Sequence: Synthetic oligonucleotide
  Sense strand starting at position 1164 of SEQ ID NO: 1564064
gagacuuagcuuggcaaga

SEQ ID NO: 1852488 - RNA, 19 nt, Artificial Sequence
  Description of Artificial Sequence: Synthetic oligonucleotide
  Antisense strand to SEQ ID NO: 1852487
ucuugccaagcuaagucuc

SEQ ID NO: 1852489 - RNA, 19 nt, Artificial Sequence
  Description of Artificial Sequence: Synthetic oligonucleotide
  Sense strand starting at position 1165 of SEQ ID NO: 1564064
agacuuagcuuggcaagau

SEQ ID NO: 1852490 - RNA, 19 nt, Artificial Sequence
  Description of Artificial Sequence: Synthetic oligonucleotide
  Antisense strand to SEQ ID NO: 1852489
aucuugccaagcuaagucu

SEQ ID NO: 1852491 - RNA, 19 nt, Artificial Sequence
  Description of Artificial Sequence: Synthetic oligonucleotide
  Sense strand starting at position 1169 of SEQ ID NO: 1564064
uuagcuuggcaagaugaga

SEQ ID NO: 1852492 - RNA, 19 nt, Artificial Sequence
  Description of Artificial Sequence: Synthetic oligonucleotide
  Antisense strand to SEQ ID NO: 1852491
ucucaucuugccaagcuaa

SEQ ID NO: 1852493 - RNA, 19 nt, Artificial Sequence
  Description of Artificial Sequence: Synthetic oligonucleotide
  Sense strand starting at position 1369 of SEQ ID NO: 1564064
ccuugaugcccaggaggua

SEQ ID NO: 1852494 - RNA, 19 nt, Artificial Sequence
  Description of Artificial Sequence: Synthetic oligonucleotide
  Antisense strand to SEQ ID NO: 1852493
uaccuccugggcaucaagg

SEQ ID NO: 1852495 - RNA, 19 nt, Artificial Sequence
  Description of Artificial Sequence: Synthetic oligonucleotide
  Sense strand starting at position 1749 of SEQ ID NO: 1564064
gccguucucgugguucaca

SEQ ID NO: 1852496 - RNA, 19 nt, Artificial Sequence
  Description of Artificial Sequence: Synthetic oligonucleotide
  Antisense strand to SEQ ID NO: 1852495
ugugaaccacgagaacggc

SEQ ID NO: 1852497 - RNA, 19 nt, Artificial Sequence
  Description of Artificial Sequence: Synthetic oligonucleotide
  Sense strand starting at position 2013 of SEQ ID NO: 1564064
cuugguauugguuacaguu

SEQ ID NO: 1852498 - RNA, 19 nt, Artificial Sequence
  Description of Artificial Sequence: Synthetic oligonucleotide
  Antisense strand to SEQ ID NO: 1852497
aacuguaaccaauaccaag

SEQ ID NO: 1852499 - RNA, 19 nt, Artificial Sequence
  Description of Artificial Sequence: Synthetic oligonucleotide
  Sense strand starting at position 2035 of SEQ ID NO: 1564064
augagugggacuugcuuau

SEQ ID NO: 1852500 - RNA, 19 nt, Artificial Sequence
  Description of Artificial Sequence: Synthetic oligonucleotide
  Antisense strand to SEQ ID NO: 1852499
auaagcaagucccacucau

SEQ ID NO: 1852501 - RNA, 19 nt, Artificial Sequence
  Description of Artificial Sequence: Synthetic oligonucleotide
  Sense strand starting at position 2450 of SEQ ID NO: 1564064
gccaauaggaggcauauau

SEQ ID NO: 1852502 - RNA, 19 nt, Artificial Sequence
  Description of Artificial Sequence: Synthetic oligonucleotide
  Antisense strand to SEQ ID NO: 1852501
auauaugccuccuauuggc

SEQ ID NO: 1852503 - RNA, 19 nt, Artificial Sequence
  Description of Artificial Sequence: Synthetic oligonucleotide
  Sense strand starting at position 2524 of SEQ ID NO: 1564064
uaguuauuacccugaggaa

SEQ ID NO: 1852504 - RNA, 19 nt, Artificial Sequence
  Description of Artificial Sequence: Synthetic oligonucleotide
  Antisense strand to SEQ ID NO: 1852503
uuccucaggguaauaacua

SEQ ID NO: 1852505 - RNA, 19 nt, Artificial Sequence
  Description of Artificial Sequence: Synthetic oligonucleotide
  Sense strand starting at position 2571 of SEQ ID NO: 1564064
gagaucucacggugaccau

SEQ ID NO: 1852506 - RNA, 19 nt, Artificial Sequence
  Description of Artificial Sequence: Synthetic oligonucleotide
  Antisense strand to SEQ ID NO: 1852505
auggucaccgugagaucuc

SEQ ID NO: 1852507 - RNA, 19 nt, Artificial Sequence
  Description of Artificial Sequence: Synthetic oligonucleotide
  Sense strand starting at position 2572 of SEQ ID NO: 1564064
agaucucacggugaccaua

SEQ ID NO: 1852508 - RNA, 19 nt, Artificial Sequence
  Description of Artificial Sequence: Synthetic oligonucleotide
  Antisense strand to SEQ ID NO: 1852507
uauggucaccgugagaucu

SEQ ID NO: 1852509 - RNA, 19 nt, Artificial Sequence
  Description of Artificial Sequence: Synthetic oligonucleotide
  Sense strand starting at position 2588 of SEQ ID NO: 1564064
auaggacgccuugaguaaa

SEQ ID NO: 1852510 - RNA, 19 nt, Artificial Sequence
  Description of Artificial Sequence: Synthetic oligonucleotide
  Antisense strand to SEQ ID NO: 1852509
uuuacucaaggcguccuau

SEQ ID NO: 1852511 - RNA, 19 nt, Artificial Sequence
  Description of Artificial Sequence: Synthetic oligonucleotide
  Sense strand starting at position 2614 of SEQ ID NO: 1564064
agaauaucucauggccuga

SEQ ID NO: 1852512 - RNA, 19 nt, Artificial Sequence
  Description of Artificial Sequence: Synthetic oligonucleotide
  Antisense strand to SEQ ID NO: 1852511
ucaggccaugagauauucu

SEQ ID NO: 1852513 - RNA, 19 nt, Artificial Sequence
  Description of Artificial Sequence: Synthetic oligonucleotide
  Sense strand starting at position 2666 of SEQ ID NO: 1564064
gcuauuaauuaagcagaaa

SEQ ID NO: 1852514 - RNA, 19 nt, Artificial Sequence
  Description of Artificial Sequence: Synthetic oligonucleotide
  Antisense strand to SEQ ID NO: 1852513
uuucugcuuaauuaauagc

SEQ ID NO: 1852515 - RNA, 19 nt, Artificial Sequence
  Description of Artificial Sequence: Synthetic oligonucleotide
  Sense strand starting at position 2790 of SEQ ID NO: 1564064
gagcauucugggugguaag

SEQ ID NO: 1852516 - RNA, 19 nt, Artificial Sequence
  Description of Artificial Sequence: Synthetic oligonucleotide
  Antisense strand to SEQ ID NO: 1852515
cuuaccacccagaaugcuc

SEQ ID NO: 1852517 - RNA, 19 nt, Artificial Sequence
  Description of Artificial Sequence: Synthetic oligonucleotide
  Sense strand starting at position 2791 of SEQ ID NO: 1564064
agcauucugggugguaaga

SEQ ID NO: 1852518 - RNA, 19 nt, Artificial Sequence
  Description of Artificial Sequence: Synthetic oligonucleotide
  Antisense strand to SEQ ID NO: 1852517
ucuuaccacccagaaugcu

SEQ ID NO: 1852519 - RNA, 19 nt, Artificial Sequence
  Description of Artificial Sequence: Synthetic oligonucleotide
  Sense strand starting at position 2810 of SEQ ID NO: 1564064
ugugcucugcaagaaaucu

SEQ ID NO: 1852520 - RNA, 19 nt, Artificial Sequence
  Description of Artificial Sequence: Synthetic oligonucleotide
  Antisense strand to SEQ ID NO: 1852519
agauuucuugcagagcaca

SEQ ID NO: 1852521 - RNA, 19 nt, Artificial Sequence
  Description of Artificial Sequence: Synthetic oligonucleotide
  Sense strand starting at position 2871 of SEQ ID NO: 1564064
ugaaucuguuagccugaga

SEQ ID NO: 1852522 - RNA, 19 nt, Artificial Sequence
  Description of Artificial Sequence: Synthetic oligonucleotide
  Antisense strand to SEQ ID NO: 1852521
ucucaggcuaacagauuca

SEQ ID NO: 1852523 - RNA, 19 nt, Artificial Sequence
  Description of Artificial Sequence: Synthetic oligonucleotide
  Sense strand starting at position 2879 of SEQ ID NO: 1564064
uuagccugagacugaauau

SEQ ID NO: 1852524 - RNA, 19 nt, Artificial Sequence
  Description of Artificial Sequence: Synthetic oligonucleotide
  Antisense strand to SEQ ID NO: 1852523
auauucagucucaggcuaa

SEQ ID NO: 1852525 - RNA, 19 nt, Artificial Sequence
  Description of Artificial Sequence: Synthetic oligonucleotide
  Sense strand starting at position 2889 of SEQ ID NO: 1564064
acugaauaucuuuggcuau

SEQ ID NO: 1852526 - RNA, 19 nt, Artificial Sequence
  Description of Artificial Sequence: Synthetic oligonucleotide
  Antisense strand to SEQ ID NO: 1852525
auagccaaagauauucagu

SEQ ID NO: 1852527 - RNA, 19 nt, Artificial Sequence
  Description of Artificial Sequence: Synthetic oligonucleotide
  Sense strand starting at position 3097 of SEQ ID NO: 1564064
uccacagagccuuguaacu

SEQ ID NO: 1852528 - RNA, 19 nt, Artificial Sequence
  Description of Artificial Sequence: Synthetic oligonucleotide
  Antisense strand to SEQ ID NO: 1852527
aguuacaaggcucugugga

SEQ ID NO: 1852529 - RNA, 19 nt, Artificial Sequence
  Description of Artificial Sequence: Synthetic oligonucleotide
  Sense strand starting at position 3373 of SEQ ID NO: 1564064
cuaagagagucugucauga

SEQ ID NO: 1852530 - RNA, 19 nt, Artificial Sequence
  Description of Artificial Sequence: Synthetic oligonucleotide
  Antisense strand to SEQ ID NO: 1852529
ucaugacagacucucuuag

SEQ ID NO: 1852531 - RNA, 19 nt, Artificial Sequence
  Description of Artificial Sequence: Synthetic oligonucleotide
  Sense strand starting at position 3395 of SEQ ID NO: 1564064
agggcauggagaugucuuu

SEQ ID NO: 1852532 - RNA, 19 nt, Artificial Sequence
  Description of Artificial Sequence: Synthetic oligonucleotide
  Antisense strand to SEQ ID NO: 1852531
aaagacaucuccaugcccu

SEQ ID NO: 1852533 - RNA, 19 nt, Artificial Sequence
  Description of Artificial Sequence: Synthetic oligonucleotide
  Sense strand starting at position 3657 of SEQ ID NO: 1564064
uggugauucugagcaugga

SEQ ID NO: 1852534 - RNA, 19 nt, Artificial Sequence
  Description of Artificial Sequence: Synthetic oligonucleotide
  Antisense strand to SEQ ID NO: 1852533
uccaugcucagaaucacca

SEQ ID NO: 1852535 - RNA, 19 nt, Artificial Sequence
  Description of Artificial Sequence: Synthetic oligonucleotide
  Sense strand starting at position 3658 of SEQ ID NO: 1564064
ggugauucugagcauggaa

SEQ ID NO: 1852536 - RNA, 19 nt, Artificial Sequence
  Description of Artificial Sequence: Synthetic oligonucleotide
  Antisense strand to SEQ ID NO: 1852535
uuccaugcucagaaucacc

SEQ ID NO: 1852537 - RNA, 19 nt, Artificial Sequence
  Description of Artificial Sequence: Synthetic oligonucleotide
  Sense strand starting at position 3660 of SEQ ID NO: 1564064
ugauucugagcauggaaag

SEQ ID NO: 1852538 - RNA, 19 nt, Artificial Sequence
  Description of Artificial Sequence: Synthetic oligonucleotide
  Antisense strand to SEQ ID NO: 1852537
cuuuccaugcucagaauca

SEQ ID NO: 1852539 - RNA, 19 nt, Artificial Sequence
  Description of Artificial Sequence: Synthetic oligonucleotide
  Sense strand starting at position 3875 of SEQ ID NO: 1564064
ccaguaaugggaggcauca

SEQ ID NO: 1852540 - RNA, 19 nt, Artificial Sequence
  Description of Artificial Sequence: Synthetic oligonucleotide
  Antisense strand to SEQ ID NO: 1852539
ugaugccucccauuacugg

SEQ ID NO: 1852541 - RNA, 19 nt, Artificial Sequence
  Description of Artificial Sequence: Synthetic oligonucleotide
  Sense strand starting at position 3943 of SEQ ID NO: 1564064
ggaugaaucuaucugguuc

SEQ ID NO: 1852542 - RNA, 19 nt, Artificial Sequence
  Description of Artificial Sequence: Synthetic oligonucleotide
  Antisense strand to SEQ ID NO: 1852541
gaaccagauagauucaucc

SEQ ID NO: 1852543 - RNA, 19 nt, Artificial Sequence
  Description of Artificial Sequence: Synthetic oligonucleotide
  Sense strand starting at position 3947 of SEQ ID NO: 1564064
gaaucuaucugguucucag

SEQ ID NO: 1852544 - RNA, 19 nt, Artificial Sequence
  Description of Artificial Sequence: Synthetic oligonucleotide
  Antisense strand to SEQ ID NO: 1852543
cugagaaccagauagauuc

SEQ ID NO: 1852545 - RNA, 19 nt, Artificial Sequence
  Description of Artificial Sequence: Synthetic oligonucleotide
  Sense strand starting at position 71 of SEQ ID NO: 1564065
uggcaaugucugggucaaa

SEQ ID NO: 1852546 - RNA, 19 nt, Artificial Sequence
  Description of Artificial Sequence: Synthetic oligonucleotide
  Antisense strand to SEQ ID NO: 1852545
uuugacccagacauugcca

SEQ ID NO: 1852547 - RNA, 19 nt, Artificial Sequence
  Description of Artificial Sequence: Synthetic oligonucleotide
  Sense strand starting at position 72 of SEQ ID NO: 1564065
ggcaaugucugggucaaag

SEQ ID NO: 1852548 - RNA, 19 nt, Artificial Sequence
  Description of Artificial Sequence: Synthetic oligonucleotide
  Antisense strand to SEQ ID NO: 1852547
cuuugacccagacauugcc

SEQ ID NO: 1852549 - RNA, 19 nt, Artificial Sequence
  Description of Artificial Sequence: Synthetic oligonucleotide
  Sense strand starting at position 195 of SEQ ID NO: 1564065
agccuccuucuauggaaga

SEQ ID NO: 1852550 - RNA, 19 nt, Artificial Sequence
  Description of Artificial Sequence: Synthetic oligonucleotide
  Antisense strand to SEQ ID NO: 1852549
ucuuccauagaaggaggcu

SEQ ID NO: 1852551 - RNA, 19 nt, Artificial Sequence
  Description of Artificial Sequence: Synthetic oligonucleotide
  Sense strand starting at position 235 of SEQ ID NO: 1564065
ggaguugugggugucguuu

SEQ ID NO: 1852552 - RNA, 19 nt, Artificial Sequence
  Description of Artificial Sequence: Synthetic oligonucleotide
  Antisense strand to SEQ ID NO: 1852551
aaacgacacccacaacucc

SEQ ID NO: 1852553 - RNA, 19 nt, Artificial Sequence
  Description of Artificial Sequence: Synthetic oligonucleotide
  Sense strand starting at position 241 of SEQ ID NO: 1564065
gugggugucguuucauucu

SEQ ID NO: 1852554 - RNA, 19 nt, Artificial Sequence
  Description of Artificial Sequence: Synthetic oligonucleotide
  Antisense strand to SEQ ID NO: 1852553
agaaugaaacgacacccac

SEQ ID NO: 1852555 - RNA, 19 nt, Artificial Sequence
  Description of Artificial Sequence: Synthetic oligonucleotide
  Sense strand starting at position 318 of SEQ ID NO: 1564065
ccagcugagccucacauua

SEQ ID NO: 1852556 - RNA, 19 nt, Artificial Sequence
  Description of Artificial Sequence: Synthetic oligonucleotide
  Antisense strand to SEQ ID NO: 1852555
uaaugugaggcucagcugg

SEQ ID NO: 1852557 - RNA, 19 nt, Artificial Sequence
  Description of Artificial Sequence: Synthetic oligonucleotide
  Sense strand starting at position 561 of SEQ ID NO: 1564065
gacgcugagguaggauaau

SEQ ID NO: 1852558 - RNA, 19 nt, Artificial Sequence
  Description of Artificial Sequence: Synthetic oligonucleotide
  Antisense strand to SEQ ID NO: 1852557
auuauccuaccucagcguc

SEQ ID NO: 1852559 - RNA, 19 nt, Artificial Sequence
  Description of Artificial Sequence: Synthetic oligonucleotide
  Sense strand starting at position 883 of SEQ ID NO: 1564065
ggaguuauuuaucauaacu

SEQ ID NO: 1852560 - RNA, 19 nt, Artificial Sequence
  Description of Artificial Sequence: Synthetic oligonucleotide
  Antisense strand to SEQ ID NO: 1852559
aguuaugauaaauaacucc

SEQ ID NO: 1852561 - RNA, 19 nt, Artificial Sequence
  Description of Artificial Sequence: Synthetic oligonucleotide
  Sense strand starting at position 1523 of SEQ ID NO: 1564065
gcgacagcaccauagcauu

SEQ ID NO: 1852562 - RNA, 19 nt, Artificial Sequence
  Description of Artificial Sequence: Synthetic oligonucleotide
  Antisense strand to SEQ ID NO: 1852561
aaugcuauggugcugucgc

SEQ ID NO: 1852563 - RNA, 19 nt, Artificial Sequence
  Description of Artificial Sequence: Synthetic oligonucleotide
  Sense strand starting at position 1625 of SEQ ID NO: 1564065
cucugagagcagugguagu

SEQ ID NO: 1852564 - RNA, 19 nt, Artificial Sequence
  Description of Artificial Sequence: Synthetic oligonucleotide
  Antisense strand to SEQ ID NO: 1852563
acuaccacugcucucagag

SEQ ID NO: 1852565 - RNA, 19 nt, Artificial Sequence
  Description of Artificial Sequence: Synthetic oligonucleotide
  Sense strand starting at position 1680 of SEQ ID NO: 1564065
gaaccuugguuuccugagu

SEQ ID NO: 1852566 - RNA, 19 nt, Artificial Sequence
  Description of Artificial Sequence: Synthetic oligonucleotide
  Antisense strand to SEQ ID NO: 1852565
acucaggaaaccaagguuc

SEQ ID NO: 1852567 - RNA, 19 nt, Artificial Sequence
  Description of Artificial Sequence: Synthetic oligonucleotide
  Sense strand starting at position 1765 of SEQ ID NO: 1564065
ugagcaagcuggucauaua

SEQ ID NO: 1852568 - RNA, 19 nt, Artificial Sequence
  Description of Artificial Sequence: Synthetic oligonucleotide
  Antisense strand to SEQ ID NO: 1852567
uauaugaccagcuugcuca

SEQ ID NO: 1852569 - RNA, 19 nt, Artificial Sequence
  Description of Artificial Sequence: Synthetic oligonucleotide
  Sense strand starting at position 1766 of SEQ ID NO: 1564065
gagcaagcuggucauauac

SEQ ID NO: 1852570 - RNA, 19 nt, Artificial Sequence
  Description of Artificial Sequence: Synthetic oligonucleotide
  Antisense strand to SEQ ID NO: 1852569
guauaugaccagcuugcuc

SEQ ID NO: 1852571 - RNA, 19 nt, Artificial Sequence
  Description of Artificial Sequence: Synthetic oligonucleotide
  Sense strand starting at position 1776 of SEQ ID NO: 1564065
gucauauacuggcuacacu

SEQ ID NO: 1852572 - RNA, 19 nt, Artificial Sequence
  Description of Artificial Sequence: Synthetic oligonucleotide
  Antisense strand to SEQ ID NO: 1852571
aguguagccaguauaugac

SEQ ID NO: 1852573 - RNA, 19 nt, Artificial Sequence
  Description of Artificial Sequence: Synthetic oligonucleotide
  Sense strand starting at position 1881 of SEQ ID NO: 1564065
cagugcuagaacugugagu

SEQ ID NO: 1852574 - RNA, 19 nt, Artificial Sequence
  Description of Artificial Sequence: Synthetic oligonucleotide
  Antisense strand to SEQ ID NO: 1852573
acucacaguucuagcacug

SEQ ID NO: 1852575 - RNA, 19 nt, Artificial Sequence
  Description of Artificial Sequence: Synthetic oligonucleotide
  Sense strand starting at position 1935 of SEQ ID NO: 1564065
gcaacaguguauccacuua

SEQ ID NO: 1852576 - RNA, 19 nt, Artificial Sequence
  Description of Artificial Sequence: Synthetic oligonucleotide
  Antisense strand to SEQ ID NO: 1852575
uaaguggauacacuguugc

SEQ ID NO: 1852577 - RNA, 19 nt, Artificial Sequence
  Description of Artificial Sequence: Synthetic oligonucleotide
  Sense strand starting at position 2158 of SEQ ID NO: 1564065
gcaugcguuguccuguaga

SEQ ID NO: 1852578 - RNA, 19 nt, Artificial Sequence
  Description of Artificial Sequence: Synthetic oligonucleotide
  Antisense strand to SEQ ID NO: 1852577
ucuacaggacaacgcaugc

SEQ ID NO: 1852579 - RNA, 19 nt, Artificial Sequence
  Description of Artificial Sequence: Synthetic oligonucleotide
  Sense strand starting at position 2161 of SEQ ID NO: 1564065
ugcguuguccuguagacag

SEQ ID NO: 1852580 - RNA, 19 nt, Artificial Sequence
  Description of Artificial Sequence: Synthetic oligonucleotide
  Antisense strand to SEQ ID NO: 1852579
cugucuacaggacaacgca

SEQ ID NO: 1852581 - RNA, 19 nt, Artificial Sequence
  Description of Artificial Sequence: Synthetic oligonucleotide
  Sense strand starting at position 2329 of SEQ ID NO: 1564065
gcgcaaaugcacuauguaa

SEQ ID NO: 1852582 - RNA, 19 nt, Artificial Sequence
  Description of Artificial Sequence: Synthetic oligonucleotide
  Antisense strand to SEQ ID NO: 1852581
uuacauagugcauuugcgc

SEQ ID NO: 1852583 - RNA, 19 nt, Artificial Sequence
  Description of Artificial Sequence: Synthetic oligonucleotide
  Sense strand starting at position 2352 of SEQ ID NO: 1564065
gcagcacacuccuugagaa

SEQ ID NO: 1852584 - RNA, 19 nt, Artificial Sequence
  Description of Artificial Sequence: Synthetic oligonucleotide
  Antisense strand to SEQ ID NO: 1852583
uucucaaggagugugcugc

SEQ ID NO: 1852585 - RNA, 19 nt, Artificial Sequence
  Description of Artificial Sequence: Synthetic oligonucleotide
  Sense strand starting at position 2588 of SEQ ID NO: 1564065
guaacaguguauccacuua

SEQ ID NO: 1852586 - RNA, 19 nt, Artificial Sequence
  Description of Artificial Sequence: Synthetic oligonucleotide
  Antisense strand to SEQ ID NO: 1852585
uaaguggauacacuguuac

SEQ ID NO: 1852587 - RNA, 19 nt, Artificial Sequence
  Description of Artificial Sequence: Synthetic oligonucleotide
  Sense strand starting at position 2831 of SEQ ID NO: 1564065
guggguguuugcauguauu

SEQ ID NO: 1852588 - RNA, 19 nt, Artificial Sequence
  Description of Artificial Sequence: Synthetic oligonucleotide
  Antisense strand to SEQ ID NO: 1852587
aauacaugcaaacacccac

SEQ ID NO: 1852589 - RNA, 19 nt, Artificial Sequence
  Description of Artificial Sequence: Synthetic oligonucleotide
  Sense strand starting at position 2833 of SEQ ID NO: 1564065
ggguguuugcauguauugu

SEQ ID NO: 1852590 - RNA, 19 nt, Artificial Sequence
  Description of Artificial Sequence: Synthetic oligonucleotide
  Antisense strand to SEQ ID NO: 1852589
acaauacaugcaaacaccc

SEQ ID NO: 1852591 - RNA, 19 nt, Artificial Sequence
  Description of Artificial Sequence: Synthetic oligonucleotide
  Sense strand starting at position 2908 of SEQ ID NO: 1564065
agcacaccuggguaauuau

SEQ ID NO: 1852592 - RNA, 19 nt, Artificial Sequence
  Description of Artificial Sequence: Synthetic oligonucleotide
  Antisense strand to SEQ ID NO: 1852591
auaauuacccaggugugcu

SEQ ID NO: 1852593 - RNA, 19 nt, Artificial Sequence
  Description of Artificial Sequence: Synthetic oligonucleotide
  Sense strand starting at position 3098 of SEQ ID NO: 1564065
uuugguugugacuguggau

SEQ ID NO: 1852594 - RNA, 19 nt, Artificial Sequence
  Description of Artificial Sequence: Synthetic oligonucleotide
  Antisense strand to SEQ ID NO: 1852593
auccacagucacaaccaaa

SEQ ID NO: 1852595 - RNA, 19 nt, Artificial Sequence
  Description of Artificial Sequence: Synthetic oligonucleotide
  Sense strand starting at position 3130 of SEQ ID NO: 1564065
cuaugucucuggcuacaga

SEQ ID NO: 1852596 - RNA, 19 nt, Artificial Sequence
  Description of Artificial Sequence: Synthetic oligonucleotide
  Antisense strand to SEQ ID NO: 1852595
ucuguagccagagacauag

SEQ ID NO: 1852597 - RNA, 19 nt, Artificial Sequence
  Description of Artificial Sequence: Synthetic oligonucleotide
  Sense strand starting at position 3199 of SEQ ID NO: 1564065
ugcagugauuucccuucuu

SEQ ID NO: 1852598 - RNA, 19 nt, Artificial Sequence
  Description of Artificial Sequence: Synthetic oligonucleotide
  Antisense strand to SEQ ID NO: 1852597
aagaagggaaaucacugca

SEQ ID NO: 1852599 - RNA, 19 nt, Artificial Sequence
  Description of Artificial Sequence: Synthetic oligonucleotide
  Sense strand starting at position 3277 of SEQ ID NO: 1564065
ugagcucuuguuuaggaau

SEQ ID NO: 1852600 - RNA, 19 nt, Artificial Sequence
  Description of Artificial Sequence: Synthetic oligonucleotide
  Antisense strand to SEQ ID NO: 1852599
auuccuaaacaagagcuca

SEQ ID NO: 1852601 - RNA, 19 nt, Artificial Sequence
  Description of Artificial Sequence: Synthetic oligonucleotide
  Sense strand starting at position 3335 of SEQ ID NO: 1564065
cagauugagugcucuaaga

SEQ ID NO: 1852602 - RNA, 19 nt, Artificial Sequence
  Description of Artificial Sequence: Synthetic oligonucleotide
  Antisense strand to SEQ ID NO: 1852601
ucuuagagcacucaaucug

SEQ ID NO: 1852603 - RNA, 19 nt, Artificial Sequence
  Description of Artificial Sequence: Synthetic oligonucleotide
  Sense strand starting at position 3337 of SEQ ID NO: 1564065
gauugagugcucuaagauu

SEQ ID NO: 1852604 - RNA, 19 nt, Artificial Sequence
  Description of Artificial Sequence: Synthetic oligonucleotide
  Antisense strand to SEQ ID NO: 1852603
aaucuuagagcacucaauc

SEQ ID NO: 1852605 - RNA, 19 nt, Artificial Sequence
  Description of Artificial Sequence: Synthetic oligonucleotide
  Sense strand starting at position 3390 of SEQ ID NO: 1564065
acuuguuaauguccugaau

SEQ ID NO: 1852606 - RNA, 19 nt, Artificial Sequence
  Description of Artificial Sequence: Synthetic oligonucleotide
  Antisense strand to SEQ ID NO: 1852605
auucaggacauuaacaagu

SEQ ID NO: 1852607 - RNA, 19 nt, Artificial Sequence
  Description of Artificial Sequence: Synthetic oligonucleotide
  Sense strand starting at position 3393 of SEQ ID NO: 1564065
uguuaauguccugaauaua

SEQ ID NO: 1852608 - RNA, 19 nt, Artificial Sequence
  Description of Artificial Sequence: Synthetic oligonucleotide
  Antisense strand to SEQ ID NO: 1852607
uauauucaggacauuaaca

SEQ ID NO: 1852609 - RNA, 19 nt, Artificial Sequence
  Description of Artificial Sequence: Synthetic oligonucleotide
  Sense strand starting at position 3439 of SEQ ID NO: 1564065
uccuccaucguuugaguga

SEQ ID NO: 1852610 - RNA, 19 nt, Artificial Sequence
  Description of Artificial Sequence: Synthetic oligonucleotide
  Antisense strand to SEQ ID NO: 1852609
ucacucaaacgauggagga

SEQ ID NO: 1852611 - RNA, 19 nt, Artificial Sequence
  Description of Artificial Sequence: Synthetic oligonucleotide
  Sense strand starting at position 3450 of SEQ ID NO: 1564065
uugagugacucauucuauu

SEQ ID NO: 1852612 - RNA, 19 nt, Artificial Sequence
  Description of Artificial Sequence: Synthetic oligonucleotide
  Antisense strand to SEQ ID NO: 1852611
aauagaaugagucacucaa

SEQ ID NO: 1852613 - RNA, 19 nt, Artificial Sequence
  Description of Artificial Sequence: Synthetic oligonucleotide
  Sense strand starting at position 3563 of SEQ ID NO: 1564065
cccaacgacugauccuaau

SEQ ID NO: 1852614 - RNA, 19 nt, Artificial Sequence
  Description of Artificial Sequence: Synthetic oligonucleotide
  Antisense strand to SEQ ID NO: 1852613
auuaggaucagucguuggg

SEQ ID NO: 1852615 - RNA, 19 nt, Artificial Sequence
  Description of Artificial Sequence: Synthetic oligonucleotide
  Sense strand starting at position 3712 of SEQ ID NO: 1564065
uaagaugucuccucgucag

SEQ ID NO: 1852616 - RNA, 19 nt, Artificial Sequence
  Description of Artificial Sequence: Synthetic oligonucleotide
  Antisense strand to SEQ ID NO: 1852615
cugacgaggagacaucuua

SEQ ID NO: 1852617 - RNA, 19 nt, Artificial Sequence
  Description of Artificial Sequence: Synthetic oligonucleotide
  Sense strand starting at position 3733 of SEQ ID NO: 1564065
uggcucuuccuggagcuaa

SEQ ID NO: 1852618 - RNA, 19 nt, Artificial Sequence
  Description of Artificial Sequence: Synthetic oligonucleotide
  Antisense strand to SEQ ID NO: 1852617
uuagcuccaggaagagcca

SEQ ID NO: 1852619 - RNA, 19 nt, Artificial Sequence
  Description of Artificial Sequence: Synthetic oligonucleotide
  Sense strand starting at position 3794 of SEQ ID NO: 1564065
uggcuaaucucacuugauc

SEQ ID NO: 1852620 - RNA, 19 nt, Artificial Sequence
  Description of Artificial Sequence: Synthetic oligonucleotide
  Antisense strand to SEQ ID NO: 1852619
gaucaagugagauuagcca

SEQ ID NO: 1852621 - RNA, 19 nt, Artificial Sequence
  Description of Artificial Sequence: Synthetic oligonucleotide
  Sense strand starting at position 3924 of SEQ ID NO: 1564065
ugcuucugucaguuuguau

SEQ ID NO: 1852622 - RNA, 19 nt, Artificial Sequence
  Description of Artificial Sequence: Synthetic oligonucleotide
  Antisense strand to SEQ ID NO: 1852621
auacaaacugacagaagca

SEQ ID NO: 1852623 - RNA, 19 nt, Artificial Sequence
  Description of Artificial Sequence: Synthetic oligonucleotide
  Sense strand starting at position 3972 of SEQ ID NO: 1564065
gagagaugauggcuauucu

SEQ ID NO: 1852624 - RNA, 19 nt, Artificial Sequence
  Description of Artificial Sequence: Synthetic oligonucleotide
  Antisense strand to SEQ ID NO: 1852623
agaauagccaucaucucuc

SEQ ID NO: 1852625 - RNA, 19 nt, Artificial Sequence
  Description of Artificial Sequence: Synthetic oligonucleotide
  Sense strand starting at position 72 of SEQ ID NO: 1564066
uggcaaugucugggucaaa

SEQ ID NO: 1852626 - RNA, 19 nt, Artificial Sequence
  Description of Artificial Sequence: Synthetic oligonucleotide
  Antisense strand to SEQ ID NO: 1852625
uuugacccagacauugcca

SEQ ID NO: 1852627 - RNA, 19 nt, Artificial Sequence
  Description of Artificial Sequence: Synthetic oligonucleotide
  Sense strand starting at position 73 of SEQ ID NO: 1564066
ggcaaugucugggucaaag

SEQ ID NO: 1852628 - RNA, 19 nt, Artificial Sequence
  Description of Artificial Sequence: Synthetic oligonucleotide
  Antisense strand to SEQ ID NO: 1852627
cuuugacccagacauugcc

SEQ ID NO: 1852629 - RNA, 19 nt, Artificial Sequence
  Description of Artificial Sequence: Synthetic oligonucleotide
  Sense strand starting at position 196 of SEQ ID NO: 1564066
agccuccuucuauggaaga

SEQ ID NO: 1852630 - RNA, 19 nt, Artificial Sequence
  Description of Artificial Sequence: Synthetic oligonucleotide
  Antisense strand to SEQ ID NO: 1852629
ucuuccauagaaggaggcu

SEQ ID NO: 1852631 - RNA, 19 nt, Artificial Sequence
  Description of Artificial Sequence: Synthetic oligonucleotide
  Sense strand starting at position 236 of SEQ ID NO: 1564066
ggaguugugggugucguuu

SEQ ID NO: 1852632 - RNA, 19 nt, Artificial Sequence
  Description of Artificial Sequence: Synthetic oligonucleotide
  Antisense strand to SEQ ID NO: 1852631
aaacgacacccacaacucc

SEQ ID NO: 1852633 - RNA, 19 nt, Artificial Sequence
  Description of Artificial Sequence: Synthetic oligonucleotide
  Sense strand starting at position 242 of SEQ ID NO: 1564066
gugggugucguuucauucu

SEQ ID NO: 1852634 - RNA, 19 nt, Artificial Sequence
  Description of Artificial Sequence: Synthetic oligonucleotide
  Antisense strand to SEQ ID NO: 1852633
agaaugaaacgacacccac

SEQ ID NO: 1852635 - RNA, 19 nt, Artificial Sequence
  Description of Artificial Sequence: Synthetic oligonucleotide
  Sense strand starting at position 297 of SEQ ID NO: 1564066
ccaguaggcuguucuguaa

SEQ ID NO: 1852636 - RNA, 19 nt, Artificial Sequence
  Description of Artificial Sequence: Synthetic oligonucleotide
  Antisense strand to SEQ ID NO: 1852635
uuacagaacagccuacugg

SEQ ID NO: 1852637 - RNA, 19 nt, Artificial Sequence
  Description of Artificial Sequence: Synthetic oligonucleotide
  Sense strand starting at position 319 of SEQ ID NO: 1564066
ccagcugagccucacauua

SEQ ID NO: 1852638 - RNA, 19 nt, Artificial Sequence
  Description of Artificial Sequence: Synthetic oligonucleotide
  Antisense strand to SEQ ID NO: 1852637
uaaugugaggcucagcugg

SEQ ID NO: 1852639 - RNA, 19 nt, Artificial Sequence
  Description of Artificial Sequence: Synthetic oligonucleotide
  Sense strand starting at position 884 of SEQ ID NO: 1564066
ggaguuauuuaucauaacu

SEQ ID NO: 1852640 - RNA, 19 nt, Artificial Sequence
  Description of Artificial Sequence: Synthetic oligonucleotide
  Antisense strand to SEQ ID NO: 1852639
aguuaugauaaauaacucc

SEQ ID NO: 1852641 - RNA, 19 nt, Artificial Sequence
  Description of Artificial Sequence: Synthetic oligonucleotide
  Sense strand starting at position 1626 of SEQ ID NO: 1564066
cucugagagcagugguagu

SEQ ID NO: 1852642 - RNA, 19 nt, Artificial Sequence
  Description of Artificial Sequence: Synthetic oligonucleotide
  Antisense strand to SEQ ID NO: 1852641
acuaccacugcucucagag

SEQ ID NO: 1852643 - RNA, 19 nt, Artificial Sequence
  Description of Artificial Sequence: Synthetic oligonucleotide
  Sense strand starting at position 1677 of SEQ ID NO: 1564066
cagagaaccuugguuuccu

SEQ ID NO: 1852644 - RNA, 19 nt, Artificial Sequence
  Description of Artificial Sequence: Synthetic oligonucleotide
  Antisense strand to SEQ ID NO: 1852643
aggaaaccaagguucucug

SEQ ID NO: 1852645 - RNA, 19 nt, Artificial Sequence
  Description of Artificial Sequence: Synthetic oligonucleotide
  Sense strand starting at position 1681 of SEQ ID NO: 1564066
gaaccuugguuuccugagu

SEQ ID NO: 1852646 - RNA, 19 nt, Artificial Sequence
  Description of Artificial Sequence: Synthetic oligonucleotide
  Antisense strand to SEQ ID NO: 1852645
acucaggaaaccaagguuc

SEQ ID NO: 1852647 - RNA, 19 nt, Artificial Sequence
  Description of Artificial Sequence: Synthetic oligonucleotide
  Sense strand starting at position 1682 of SEQ ID NO: 1564066
aaccuugguuuccugaguu

SEQ ID NO: 1852648 - RNA, 19 nt, Artificial Sequence
  Description of Artificial Sequence: Synthetic oligonucleotide
  Antisense strand to SEQ ID NO: 1852647
aacucaggaaaccaagguu

SEQ ID NO: 1852649 - RNA, 19 nt, Artificial Sequence
  Description of Artificial Sequence: Synthetic oligonucleotide
  Sense strand starting at position 2159 of SEQ ID NO: 1564066
gcaugcguuguccuguaga

SEQ ID NO: 1852650 - RNA, 19 nt, Artificial Sequence
  Description of Artificial Sequence: Synthetic oligonucleotide
  Antisense strand to SEQ ID NO: 1852649
ucuacaggacaacgcaugc

SEQ ID NO: 1852651 - RNA, 19 nt, Artificial Sequence
  Description of Artificial Sequence: Synthetic oligonucleotide
  Sense strand starting at position 2162 of SEQ ID NO: 1564066
ugcguuguccuguagacag

SEQ ID NO: 1852652 - RNA, 19 nt, Artificial Sequence
  Description of Artificial Sequence: Synthetic oligonucleotide
  Antisense strand to SEQ ID NO: 1852651
cugucuacaggacaacgca

SEQ ID NO: 1852653 - RNA, 19 nt, Artificial Sequence
  Description of Artificial Sequence: Synthetic oligonucleotide
  Sense strand starting at position 2330 of SEQ ID NO: 1564066
gcgcaaaugcacuauguaa

SEQ ID NO: 1852654 - RNA, 19 nt, Artificial Sequence
  Description of Artificial Sequence: Synthetic oligonucleotide
  Antisense strand to SEQ ID NO: 1852653
uuacauagugcauuugcgc

SEQ ID NO: 1852655 - RNA, 19 nt, Artificial Sequence
  Description of Artificial Sequence: Synthetic oligonucleotide
  Sense strand starting at position 2353 of SEQ ID NO: 1564066
gcagcacacuccuugagaa

SEQ ID NO: 1852656 - RNA, 19 nt, Artificial Sequence
  Description of Artificial Sequence: Synthetic oligonucleotide
  Antisense strand to SEQ ID NO: 1852655
uucucaaggagugugcugc

SEQ ID NO: 1852657 - RNA, 19 nt, Artificial Sequence
  Description of Artificial Sequence: Synthetic oligonucleotide
  Sense strand starting at position 2831 of SEQ ID NO: 1564066
guggguguuugcauguauu

SEQ ID NO: 1852658 - RNA, 19 nt, Artificial Sequence
  Description of Artificial Sequence: Synthetic oligonucleotide
  Antisense strand to SEQ ID NO: 1852657
aauacaugcaaacacccac

SEQ ID NO: 1852659 - RNA, 19 nt, Artificial Sequence
  Description of Artificial Sequence: Synthetic oligonucleotide
  Sense strand starting at position 2833 of SEQ ID NO: 1564066
ggguguuugcauguauugu

SEQ ID NO: 1852660 - RNA, 19 nt, Artificial Sequence
  Description of Artificial Sequence: Synthetic oligonucleotide
  Antisense strand to SEQ ID NO: 1852659
acaauacaugcaaacaccc

SEQ ID NO: 1852661 - RNA, 19 nt, Artificial Sequence
  Description of Artificial Sequence: Synthetic oligonucleotide
  Sense strand starting at position 2907 of SEQ ID NO: 1564066
cagcacaccuggguaauua

SEQ ID NO: 1852662 - RNA, 19 nt, Artificial Sequence
  Description of Artificial Sequence: Synthetic oligonucleotide
  Antisense strand to SEQ ID NO: 1852661
uaauuacccaggugugcug

SEQ ID NO: 1852663 - RNA, 19 nt, Artificial Sequence
  Description of Artificial Sequence: Synthetic oligonucleotide
  Sense strand starting at position 2908 of SEQ ID NO: 1564066
agcacaccuggguaauuau

SEQ ID NO: 1852664 - RNA, 19 nt, Artificial Sequence
  Description of Artificial Sequence: Synthetic oligonucleotide
  Antisense strand to SEQ ID NO: 1852663
auaauuacccaggugugcu

SEQ ID NO: 1852665 - RNA, 19 nt, Artificial Sequence
  Description of Artificial Sequence: Synthetic oligonucleotide
  Sense strand starting at position 3098 of SEQ ID NO: 1564066
uuugguugugacuguggau

SEQ ID NO: 1852666 - RNA, 19 nt, Artificial Sequence
  Description of Artificial Sequence: Synthetic oligonucleotide
  Antisense strand to SEQ ID NO: 1852665
auccacagucacaaccaaa

SEQ ID NO: 1852667 - RNA, 19 nt, Artificial Sequence
  Description of Artificial Sequence: Synthetic oligonucleotide
  Sense strand starting at position 3130 of SEQ ID NO: 1564066
cuaugucucuggcuacaga

SEQ ID NO: 1852668 - RNA, 19 nt, Artificial Sequence
  Description of Artificial Sequence: Synthetic oligonucleotide
  Antisense strand to SEQ ID NO: 1852667
ucuguagccagagacauag

SEQ ID NO: 1852669 - RNA, 19 nt, Artificial Sequence
  Description of Artificial Sequence: Synthetic oligonucleotide
  Sense strand starting at position 3199 of SEQ ID NO: 1564066
ugcagugauuucccuucuu

SEQ ID NO: 1852670 - RNA, 19 nt, Artificial Sequence
  Description of Artificial Sequence: Synthetic oligonucleotide
  Antisense strand to SEQ ID NO: 1852669
aagaagggaaaucacugca

SEQ ID NO: 1852671 - RNA, 19 nt, Artificial Sequence
  Description of Artificial Sequence: Synthetic oligonucleotide
  Sense strand starting at position 3264 of SEQ ID NO: 1564066
acagauaucuuucugagcu

SEQ ID NO: 1852672 - RNA, 19 nt, Artificial Sequence
  Description of Artificial Sequence: Synthetic oligonucleotide
  Antisense strand to SEQ ID NO: 1852671
agcucagaaagauaucugu

SEQ ID NO: 1852673 - RNA, 19 nt, Artificial Sequence
  Description of Artificial Sequence: Synthetic oligonucleotide
  Sense strand starting at position 3276 of SEQ ID NO: 1564066
cugagcucuuguuuaggaa

SEQ ID NO: 1852674 - RNA, 19 nt, Artificial Sequence
  Description of Artificial Sequence: Synthetic oligonucleotide
  Antisense strand to SEQ ID NO: 1852673
uuccuaaacaagagcucag

SEQ ID NO: 1852675 - RNA, 19 nt, Artificial Sequence
  Description of Artificial Sequence: Synthetic oligonucleotide
  Sense strand starting at position 3277 of SEQ ID NO: 1564066
ugagcucuuguuuaggaau

SEQ ID NO: 1852676 - RNA, 19 nt, Artificial Sequence
  Description of Artificial Sequence: Synthetic oligonucleotide
  Antisense strand to SEQ ID NO: 1852675
auuccuaaacaagagcuca

SEQ ID NO: 1852677 - RNA, 19 nt, Artificial Sequence
  Description of Artificial Sequence: Synthetic oligonucleotide
  Sense strand starting at position 3335 of SEQ ID NO: 1564066
cagauugagugcucuaaga

SEQ ID NO: 1852678 - RNA, 19 nt, Artificial Sequence
  Description of Artificial Sequence: Synthetic oligonucleotide
  Antisense strand to SEQ ID NO: 1852677
ucuuagagcacucaaucug

SEQ ID NO: 1852679 - RNA, 19 nt, Artificial Sequence
  Description of Artificial Sequence: Synthetic oligonucleotide
  Sense strand starting at position 3337 of SEQ ID NO: 1564066
gauugagugcucuaagauu

SEQ ID NO: 1852680 - RNA, 19 nt, Artificial Sequence
  Description of Artificial Sequence: Synthetic oligonucleotide
  Antisense strand to SEQ ID NO: 1852679
aaucuuagagcacucaauc

SEQ ID NO: 1852681 - RNA, 19 nt, Artificial Sequence
  Description of Artificial Sequence: Synthetic oligonucleotide
  Sense strand starting at position 3390 of SEQ ID NO: 1564066
acuuguuaauguccugaau

SEQ ID NO: 1852682 - RNA, 19 nt, Artificial Sequence
  Description of Artificial Sequence: Synthetic oligonucleotide
  Antisense strand to SEQ ID NO: 1852681
auucaggacauuaacaagu

SEQ ID NO: 1852683 - RNA, 19 nt, Artificial Sequence
  Description of Artificial Sequence: Synthetic oligonucleotide
  Sense strand starting at position 3393 of SEQ ID NO: 1564066
uguuaauguccugaauaua

SEQ ID NO: 1852684 - RNA, 19 nt, Artificial Sequence
  Description of Artificial Sequence: Synthetic oligonucleotide
  Antisense strand to SEQ ID NO: 1852683
uauauucaggacauuaaca

SEQ ID NO: 1852685 - RNA, 19 nt, Artificial Sequence
  Description of Artificial Sequence: Synthetic oligonucleotide
  Sense strand starting at position 3439 of SEQ ID NO: 1564066
uccuccaucguuugaguga

SEQ ID NO: 1852686 - RNA, 19 nt, Artificial Sequence
  Description of Artificial Sequence: Synthetic oligonucleotide
  Antisense strand to SEQ ID NO: 1852685
ucacucaaacgauggagga

SEQ ID NO: 1852687 - RNA, 19 nt, Artificial Sequence
  Description of Artificial Sequence: Synthetic oligonucleotide
  Sense strand starting at position 3450 of SEQ ID NO: 1564066
uugagugacucauucuauu

SEQ ID NO: 1852688 - RNA, 19 nt, Artificial Sequence
  Description of Artificial Sequence: Synthetic oligonucleotide
  Antisense strand to SEQ ID NO: 1852687
aauagaaugagucacucaa

SEQ ID NO: 1852689 - RNA, 19 nt, Artificial Sequence
  Description of Artificial Sequence: Synthetic oligonucleotide
  Sense strand starting at position 3563 of SEQ ID NO: 1564066
cccaacgacugauccuaau

SEQ ID NO: 1852690 - RNA, 19 nt, Artificial Sequence
  Description of Artificial Sequence: Synthetic oligonucleotide
  Antisense strand to SEQ ID NO: 1852689
auuaggaucagucguuggg

SEQ ID NO: 1852691 - RNA, 19 nt, Artificial Sequence
  Description of Artificial Sequence: Synthetic oligonucleotide
  Sense strand starting at position 3566 of SEQ ID NO: 1564066
aacgacugauccuaaugga

SEQ ID NO: 1852692 - RNA, 19 nt, Artificial Sequence
  Description of Artificial Sequence: Synthetic oligonucleotide
  Antisense strand to SEQ ID NO: 1852691
uccauuaggaucagucguu

SEQ ID NO: 1852693 - RNA, 19 nt, Artificial Sequence
  Description of Artificial Sequence: Synthetic oligonucleotide
  Sense strand starting at position 3712 of SEQ ID NO: 1564066
uaagaugucuccucgucag

SEQ ID NO: 1852694 - RNA, 19 nt, Artificial Sequence
  Description of Artificial Sequence: Synthetic oligonucleotide
  Antisense strand to SEQ ID NO: 1852693
cugacgaggagacaucuua

SEQ ID NO: 1852695 - RNA, 19 nt, Artificial Sequence
  Description of Artificial Sequence: Synthetic oligonucleotide
  Sense strand starting at position 3733 of SEQ ID NO: 1564066
uggcucuuccuggagcuaa

SEQ ID NO: 1852696 - RNA, 19 nt, Artificial Sequence
  Description of Artificial Sequence: Synthetic oligonucleotide
  Antisense strand to SEQ ID NO: 1852695
uuagcuccaggaagagcca

SEQ ID NO: 1852697 - RNA, 19 nt, Artificial Sequence
  Description of Artificial Sequence: Synthetic oligonucleotide
  Sense strand starting at position 3794 of SEQ ID NO: 1564066
uggcuaaucucacuugauc

SEQ ID NO: 1852698 - RNA, 19 nt, Artificial Sequence
  Description of Artificial Sequence: Synthetic oligonucleotide
  Antisense strand to SEQ ID NO: 1852697
gaucaagugagauuagcca

SEQ ID NO: 1852699 - RNA, 19 nt, Artificial Sequence
  Description of Artificial Sequence: Synthetic oligonucleotide
  Sense strand starting at position 3924 of SEQ ID NO: 1564066
ugcuucugucaguuuguau

SEQ ID NO: 1852700 - RNA, 19 nt, Artificial Sequence
  Description of Artificial Sequence: Synthetic oligonucleotide
  Antisense strand to SEQ ID NO: 1852699
auacaaacugacagaagca

SEQ ID NO: 1852701 - RNA, 19 nt, Artificial Sequence
  Description of Artificial Sequence: Synthetic oligonucleotide
  Sense strand starting at position 3951 of SEQ ID NO: 1564066
uuacaaggguccuugaaag

SEQ ID NO: 1852702 - RNA, 19 nt, Artificial Sequence
  Description of Artificial Sequence: Synthetic oligonucleotide
  Antisense strand to SEQ ID NO: 1852701
cuuucaaggacccuuguaa

SEQ ID NO: 1852703 - RNA, 19 nt, Artificial Sequence
  Description of Artificial Sequence: Synthetic oligonucleotide
  Sense strand starting at position 3972 of SEQ ID NO: 1564066
gagagaugauggcuauucu

SEQ ID NO: 1852704 - RNA, 19 nt, Artificial Sequence
  Description of Artificial Sequence: Synthetic oligonucleotide
  Antisense strand to SEQ ID NO: 1852703
agaauagccaucaucucuc

SEQ ID NO: 1852705 - RNA, 19 nt, Artificial Sequence
  Description of Artificial Sequence: Synthetic oligonucleotide
  Sense strand starting at position 195 of SEQ ID NO: 1564067
agccuccuucuauggaaga

SEQ ID NO: 1852706 - RNA, 19 nt, Artificial Sequence
  Description of Artificial Sequence: Synthetic oligonucleotide
  Antisense strand to SEQ ID NO: 1852705
ucuuccauagaaggaggcu

SEQ ID NO: 1852707 - RNA, 19 nt, Artificial Sequence
  Description of Artificial Sequence: Synthetic oligonucleotide
  Sense strand starting at position 235 of SEQ ID NO: 1564067
ggaguugugggugucguuu

SEQ ID NO: 1852708 - RNA, 19 nt, Artificial Sequence
  Description of Artificial Sequence: Synthetic oligonucleotide
  Antisense strand to SEQ ID NO: 1852707
aaacgacacccacaacucc

SEQ ID NO: 1852709 - RNA, 19 nt, Artificial Sequence
  Description of Artificial Sequence: Synthetic oligonucleotide
  Sense strand starting at position 241 of SEQ ID NO: 1564067
gugggugucguuucauucu

SEQ ID NO: 1852710 - RNA, 19 nt, Artificial Sequence
  Description of Artificial Sequence: Synthetic oligonucleotide
  Antisense strand to SEQ ID NO: 1852709
agaaugaaacgacacccac

SEQ ID NO: 1852711 - RNA, 19 nt, Artificial Sequence
  Description of Artificial Sequence: Synthetic oligonucleotide
  Sense strand starting at position 318 of SEQ ID NO: 1564067
ccagcugagccucacauua

SEQ ID NO: 1852712 - RNA, 19 nt, Artificial Sequence
  Description of Artificial Sequence: Synthetic oligonucleotide
  Antisense strand to SEQ ID NO: 1852711
uaaugugaggcucagcugg

SEQ ID NO: 1852713 - RNA, 19 nt, Artificial Sequence
  Description of Artificial Sequence: Synthetic oligonucleotide
  Sense strand starting at position 561 of SEQ ID NO: 1564067
gacgcugagguaggauaau

SEQ ID NO: 1852714 - RNA, 19 nt, Artificial Sequence
  Description of Artificial Sequence: Synthetic oligonucleotide
  Antisense strand to SEQ ID NO: 1852713
auuauccuaccucagcguc

SEQ ID NO: 1852715 - RNA, 19 nt, Artificial Sequence
  Description of Artificial Sequence: Synthetic oligonucleotide
  Sense strand starting at position 1766 of SEQ ID NO: 1564067
gagcaagcuggucauauac

SEQ ID NO: 1852716 - RNA, 19 nt, Artificial Sequence
  Description of Artificial Sequence: Synthetic oligonucleotide
  Antisense strand to SEQ ID NO: 1852715
guauaugaccagcuugcuc

SEQ ID NO: 1852717 - RNA, 19 nt, Artificial Sequence
  Description of Artificial Sequence: Synthetic oligonucleotide
  Sense strand starting at position 2158 of SEQ ID NO: 1564067
gcaugcguuguccuguaga

SEQ ID NO: 1852718 - RNA, 19 nt, Artificial Sequence
  Description of Artificial Sequence: Synthetic oligonucleotide
  Antisense strand to SEQ ID NO: 1852717
ucuacaggacaacgcaugc

SEQ ID NO: 1852719 - RNA, 19 nt, Artificial Sequence
  Description of Artificial Sequence: Synthetic oligonucleotide
  Sense strand starting at position 2831 of SEQ ID NO: 1564067
guggguguuugcauguauu

SEQ ID NO: 1852720 - RNA, 19 nt, Artificial Sequence
  Description of Artificial Sequence: Synthetic oligonucleotide
  Antisense strand to SEQ ID NO: 1852719
aauacaugcaaacacccac

SEQ ID NO: 1852721 - RNA, 19 nt, Artificial Sequence
  Description of Artificial Sequence: Synthetic oligonucleotide
  Sense strand starting at position 2833 of SEQ ID NO: 1564067
ggguguuugcauguauugu

SEQ ID NO: 1852722 - RNA, 19 nt, Artificial Sequence
  Description of Artificial Sequence: Synthetic oligonucleotide
  Antisense strand to SEQ ID NO: 1852721
acaauacaugcaaacaccc

SEQ ID NO: 1852723 - RNA, 19 nt, Artificial Sequence
  Description of Artificial Sequence: Synthetic oligonucleotide
  Sense strand starting at position 2908 of SEQ ID NO: 1564067
agcacaccuggguaauuau

SEQ ID NO: 1852724 - RNA, 19 nt, Artificial Sequence
  Description of Artificial Sequence: Synthetic oligonucleotide
  Antisense strand to SEQ ID NO: 1852723
auaauuacccaggugugcu

SEQ ID NO: 1852725 - RNA, 19 nt, Artificial Sequence
  Description of Artificial Sequence: Synthetic oligonucleotide
  Sense strand starting at position 3199 of SEQ ID NO: 1564067
ugcagugauuucccuucuu

SEQ ID NO: 1852726 - RNA, 19 nt, Artificial Sequence
  Description of Artificial Sequence: Synthetic oligonucleotide
  Antisense strand to SEQ ID NO: 1852725
aagaagggaaaucacugca

SEQ ID NO: 1852727 - RNA, 19 nt, Artificial Sequence
  Description of Artificial Sequence: Synthetic oligonucleotide
  Sense strand starting at position 3277 of SEQ ID NO: 1564067
ugagcucuuguuuaggaau

SEQ ID NO: 1852728 - RNA, 19 nt, Artificial Sequence
  Description of Artificial Sequence: Synthetic oligonucleotide
  Antisense strand to SEQ ID NO: 1852727
auuccuaaacaagagcuca

SEQ ID NO: 1852729 - RNA, 19 nt, Artificial Sequence
  Description of Artificial Sequence: Synthetic oligonucleotide
  Sense strand starting at position 3335 of SEQ ID NO: 1564067
cagauugagugcucuaaga

SEQ ID NO: 1852730 - RNA, 19 nt, Artificial Sequence
  Description of Artificial Sequence: Synthetic oligonucleotide
  Antisense strand to SEQ ID NO: 1852729
ucuuagagcacucaaucug

SEQ ID NO: 1852731 - RNA, 19 nt, Artificial Sequence
  Description of Artificial Sequence: Synthetic oligonucleotide
  Sense strand starting at position 3337 of SEQ ID NO: 1564067
gauugagugcucuaagauu

SEQ ID NO: 1852732 - RNA, 19 nt, Artificial Sequence
  Description of Artificial Sequence: Synthetic oligonucleotide
  Antisense strand to SEQ ID NO: 1852731
aaucuuagagcacucaauc

SEQ ID NO: 1852733 - RNA, 19 nt, Artificial Sequence
  Description of Artificial Sequence: Synthetic oligonucleotide
  Sense strand starting at position 3393 of SEQ ID NO: 1564067
uguuaauguccugaauaua

SEQ ID NO: 1852734 - RNA, 19 nt, Artificial Sequence
  Description of Artificial Sequence: Synthetic oligonucleotide
  Antisense strand to SEQ ID NO: 1852733
uauauucaggacauuaaca

SEQ ID NO: 1852735 - RNA, 19 nt, Artificial Sequence
  Description of Artificial Sequence: Synthetic oligonucleotide
  Sense strand starting at position 3450 of SEQ ID NO: 1564067
uugagugacucauucuauu

SEQ ID NO: 1852736 - RNA, 19 nt, Artificial Sequence
  Description of Artificial Sequence: Synthetic oligonucleotide
  Antisense strand to SEQ ID NO: 1852735
aauagaaugagucacucaa

SEQ ID NO: 1852737 - RNA, 19 nt, Artificial Sequence
  Description of Artificial Sequence: Synthetic oligonucleotide
  Sense strand starting at position 3563 of SEQ ID NO: 1564067
cccaacgacugauccuaau

SEQ ID NO: 1852738 - RNA, 19 nt, Artificial Sequence
  Description of Artificial Sequence: Synthetic oligonucleotide
  Antisense strand to SEQ ID NO: 1852737
auuaggaucagucguuggg

SEQ ID NO: 1852739 - RNA, 19 nt, Artificial Sequence
  Description of Artificial Sequence: Synthetic oligonucleotide
  Sense strand starting at position 3924 of SEQ ID NO: 1564067
ugcuucugucaguuuguau

SEQ ID NO: 1852740 - RNA, 19 nt, Artificial Sequence
  Description of Artificial Sequence: Synthetic oligonucleotide
  Antisense strand to SEQ ID NO: 1852739
auacaaacugacagaagca

SEQ ID NO: 1852741 - RNA, 19 nt, Artificial Sequence
  Description of Artificial Sequence: Synthetic oligonucleotide
  Sense strand starting at position 3972 of SEQ ID NO: 1564067
gagagaugauggcuauucu

SEQ ID NO: 1852742 - RNA, 19 nt, Artificial Sequence
  Description of Artificial Sequence: Synthetic oligonucleotide
  Antisense strand to SEQ ID NO: 1852741
agaauagccaucaucucuc

SEQ ID NO: 1852743 - RNA, 19 nt, Artificial Sequence
  Description of Artificial Sequence: Synthetic oligonucleotide
  Sense strand starting at position 196 of SEQ ID NO: 1564068
agccuccuucuauggaaga

SEQ ID NO: 1852744 - RNA, 19 nt, Artificial Sequence
  Description of Artificial Sequence: Synthetic oligonucleotide
  Antisense strand to SEQ ID NO: 1852743
ucuuccauagaaggaggcu

SEQ ID NO: 1852745 - RNA, 19 nt, Artificial Sequence
  Description of Artificial Sequence: Synthetic oligonucleotide
  Sense strand starting at position 236 of SEQ ID NO: 1564068
ggaguugugggugucguuu

SEQ ID NO: 1852746 - RNA, 19 nt, Artificial Sequence
  Description of Artificial Sequence: Synthetic oligonucleotide
  Antisense strand to SEQ ID NO: 1852745
aaacgacacccacaacucc

SEQ ID NO: 1852747 - RNA, 19 nt, Artificial Sequence
  Description of Artificial Sequence: Synthetic oligonucleotide
  Sense strand starting at position 242 of SEQ ID NO: 1564068
gugggugucguuucauucu

SEQ ID NO: 1852748 - RNA, 19 nt, Artificial Sequence
  Description of Artificial Sequence: Synthetic oligonucleotide
  Antisense strand to SEQ ID NO: 1852747
agaaugaaacgacacccac

SEQ ID NO: 1852749 - RNA, 19 nt, Artificial Sequence
  Description of Artificial Sequence: Synthetic oligonucleotide
  Sense strand starting at position 319 of SEQ ID NO: 1564068
ccagcugagccucacauua

SEQ ID NO: 1852750 - RNA, 19 nt, Artificial Sequence
  Description of Artificial Sequence: Synthetic oligonucleotide
  Antisense strand to SEQ ID NO: 1852749
uaaugugaggcucagcugg

SEQ ID NO: 1852751 - RNA, 19 nt, Artificial Sequence
  Description of Artificial Sequence: Synthetic oligonucleotide
  Sense strand starting at position 1677 of SEQ ID NO: 1564068
cagagaaccuugguuuccu

SEQ ID NO: 1852752 - RNA, 19 nt, Artificial Sequence
  Description of Artificial Sequence: Synthetic oligonucleotide
  Antisense strand to SEQ ID NO: 1852751
aggaaaccaagguucucug

SEQ ID NO: 1852753 - RNA, 19 nt, Artificial Sequence
  Description of Artificial Sequence: Synthetic oligonucleotide
  Sense strand starting at position 2159 of SEQ ID NO: 1564068
gcaugcguuguccuguaga

SEQ ID NO: 1852754 - RNA, 19 nt, Artificial Sequence
  Description of Artificial Sequence: Synthetic oligonucleotide
  Antisense strand to SEQ ID NO: 1852753
ucuacaggacaacgcaugc

SEQ ID NO: 1852755 - RNA, 19 nt, Artificial Sequence
  Description of Artificial Sequence: Synthetic oligonucleotide
  Sense strand starting at position 2831 of SEQ ID NO: 1564068
guggguguuugcauguauu

SEQ ID NO: 1852756 - RNA, 19 nt, Artificial Sequence
  Description of Artificial Sequence: Synthetic oligonucleotide
  Antisense strand to SEQ ID NO: 1852755
aauacaugcaaacacccac

SEQ ID NO: 1852757 - RNA, 19 nt, Artificial Sequence
  Description of Artificial Sequence: Synthetic oligonucleotide
  Sense strand starting at position 2833 of SEQ ID NO: 1564068
ggguguuugcauguauugu

SEQ ID NO: 1852758 - RNA, 19 nt, Artificial Sequence
  Description of Artificial Sequence: Synthetic oligonucleotide
  Antisense strand to SEQ ID NO: 1852757
acaauacaugcaaacaccc

SEQ ID NO: 1852759 - RNA, 19 nt, Artificial Sequence
  Description of Artificial Sequence: Synthetic oligonucleotide
  Sense strand starting at position 2907 of SEQ ID NO: 1564068
cagcacaccuggguaauua

SEQ ID NO: 1852760 - RNA, 19 nt, Artificial Sequence
  Description of Artificial Sequence: Synthetic oligonucleotide
  Antisense strand to SEQ ID NO: 1852759
uaauuacccaggugugcug

SEQ ID NO: 1852761 - RNA, 19 nt, Artificial Sequence
  Description of Artificial Sequence: Synthetic oligonucleotide
  Sense strand starting at position 2908 of SEQ ID NO: 1564068
agcacaccuggguaauuau

SEQ ID NO: 1852762 - RNA, 19 nt, Artificial Sequence
  Description of Artificial Sequence: Synthetic oligonucleotide
  Antisense strand to SEQ ID NO: 1852761
auaauuacccaggugugcu

SEQ ID NO: 1852763 - RNA, 19 nt, Artificial Sequence
  Description of Artificial Sequence: Synthetic oligonucleotide
  Sense strand starting at position 3199 of SEQ ID NO: 1564068
ugcagugauuucccuucuu

SEQ ID NO: 1852764 - RNA, 19 nt, Artificial Sequence
  Description of Artificial Sequence: Synthetic oligonucleotide
  Antisense strand to SEQ ID NO: 1852763
aagaagggaaaucacugca

SEQ ID NO: 1852765 - RNA, 19 nt, Artificial Sequence
  Description of Artificial Sequence: Synthetic oligonucleotide
  Sense strand starting at position 3264 of SEQ ID NO: 1564068
acagauaucuuucugagcu

SEQ ID NO: 1852766 - RNA, 19 nt, Artificial Sequence
  Description of Artificial Sequence: Synthetic oligonucleotide
  Antisense strand to SEQ ID NO: 1852765
agcucagaaagauaucugu

SEQ ID NO: 1852767 - RNA, 19 nt, Artificial Sequence
  Description of Artificial Sequence: Synthetic oligonucleotide
  Sense strand starting at position 3277 of SEQ ID NO: 1564068
ugagcucuuguuuaggaau

SEQ ID NO: 1852768 - RNA, 19 nt, Artificial Sequence
  Description of Artificial Sequence: Synthetic oligonucleotide
  Antisense strand to SEQ ID NO: 1852767
auuccuaaacaagagcuca

SEQ ID NO: 1852769 - RNA, 19 nt, Artificial Sequence
  Description of Artificial Sequence: Synthetic oligonucleotide
  Sense strand starting at position 3335 of SEQ ID NO: 1564068
cagauugagugcucuaaga

SEQ ID NO: 1852770 - RNA, 19 nt, Artificial Sequence
  Description of Artificial Sequence: Synthetic oligonucleotide
  Antisense strand to SEQ ID NO: 1852769
ucuuagagcacucaaucug

SEQ ID NO: 1852771 - RNA, 19 nt, Artificial Sequence
  Description of Artificial Sequence: Synthetic oligonucleotide
  Sense strand starting at position 3337 of SEQ ID NO: 1564068
gauugagugcucuaagauu

SEQ ID NO: 1852772 - RNA, 19 nt, Artificial Sequence
  Description of Artificial Sequence: Synthetic oligonucleotide
  Antisense strand to SEQ ID NO: 1852771
aaucuuagagcacucaauc

SEQ ID NO: 1852773 - RNA, 19 nt, Artificial Sequence
  Description of Artificial Sequence: Synthetic oligonucleotide
  Sense strand starting at position 3393 of SEQ ID NO: 1564068
uguuaauguccugaauaua

SEQ ID NO: 1852774 - RNA, 19 nt, Artificial Sequence
  Description of Artificial Sequence: Synthetic oligonucleotide
  Antisense strand to SEQ ID NO: 1852773
uauauucaggacauuaaca

SEQ ID NO: 1852775 - RNA, 19 nt, Artificial Sequence
  Description of Artificial Sequence: Synthetic oligonucleotide
  Sense strand starting at position 3450 of SEQ ID NO: 1564068
uugagugacucauucuauu

SEQ ID NO: 1852776 - RNA, 19 nt, Artificial Sequence
  Description of Artificial Sequence: Synthetic oligonucleotide
  Antisense strand to SEQ ID NO: 1852775
aauagaaugagucacucaa

SEQ ID NO: 1852777 - RNA, 19 nt, Artificial Sequence
  Description of Artificial Sequence: Synthetic oligonucleotide
  Sense strand starting at position 3563 of SEQ ID NO: 1564068
cccaacgacugauccuaau

SEQ ID NO: 1852778 - RNA, 19 nt, Artificial Sequence
  Description of Artificial Sequence: Synthetic oligonucleotide
  Antisense strand to SEQ ID NO: 1852777
auuaggaucagucguuggg

SEQ ID NO: 1852779 - RNA, 19 nt, Artificial Sequence
  Description of Artificial Sequence: Synthetic oligonucleotide
  Sense strand starting at position 3924 of SEQ ID NO: 1564068
ugcuucugucaguuuguau

SEQ ID NO: 1852780 - RNA, 19 nt, Artificial Sequence
  Description of Artificial Sequence: Synthetic oligonucleotide
  Antisense strand to SEQ ID NO: 1852779
auacaaacugacagaagca

SEQ ID NO: 1852781 - RNA, 19 nt, Artificial Sequence
  Description of Artificial Sequence: Synthetic oligonucleotide
  Sense strand starting at position 3951 of SEQ ID NO: 1564068
uuacaaggguccuugaaag

SEQ ID NO: 1852782 - RNA, 19 nt, Artificial Sequence
  Description of Artificial Sequence: Synthetic oligonucleotide
  Antisense strand to SEQ ID NO: 1852781
cuuucaaggacccuuguaa

SEQ ID NO: 1852783 - RNA, 19 nt, Artificial Sequence
  Description of Artificial Sequence: Synthetic oligonucleotide
  Sense strand starting at position 3972 of SEQ ID NO: 1564068
gagagaugauggcuauucu

SEQ ID NO: 1852784 - RNA, 19 nt, Artificial Sequence
  Description of Artificial Sequence: Synthetic oligonucleotide
  Antisense strand to SEQ ID NO: 1852783
agaauagccaucaucucuc

SEQ ID NO: 1852785 - RNA, 19 nt, Artificial Sequence
  Description of Artificial Sequence: Synthetic oligonucleotide
  Sense strand starting at position 1025 of SEQ ID NO: 1564069
ucacgaugggauuacaguu

SEQ ID NO: 1852786 - RNA, 19 nt, Artificial Sequence
  Description of Artificial Sequence: Synthetic oligonucleotide
  Antisense strand to SEQ ID NO: 1852785
aacuguaaucccaucguga

SEQ ID NO: 1852787 - RNA, 19 nt, Artificial Sequence
  Description of Artificial Sequence: Synthetic oligonucleotide
  Sense strand starting at position 1086 of SEQ ID NO: 1564069
guccuaagucuuuaggacu

SEQ ID NO: 1852788 - RNA, 19 nt, Artificial Sequence
  Description of Artificial Sequence: Synthetic oligonucleotide
  Antisense strand to SEQ ID NO: 1852787
aguccuaaagacuuaggac

SEQ ID NO: 1852789 - RNA, 19 nt, Artificial Sequence
  Description of Artificial Sequence: Synthetic oligonucleotide
  Sense strand starting at position 1109 of SEQ ID NO: 1564069
cuagccuucggacauaauu

SEQ ID NO: 1852790 - RNA, 19 nt, Artificial Sequence
  Description of Artificial Sequence: Synthetic oligonucleotide
  Antisense strand to SEQ ID NO: 1852789
aauuauguccgaaggcuag

SEQ ID NO: 1852791 - RNA, 19 nt, Artificial Sequence
  Description of Artificial Sequence: Synthetic oligonucleotide
  Sense strand starting at position 1161 of SEQ ID NO: 1564069
accagauccuuuccauguu

SEQ ID NO: 1852792 - RNA, 19 nt, Artificial Sequence
  Description of Artificial Sequence: Synthetic oligonucleotide
  Antisense strand to SEQ ID NO: 1852791
aacauggaaaggaucuggu

SEQ ID NO: 1852793 - RNA, 19 nt, Artificial Sequence
  Description of Artificial Sequence: Synthetic oligonucleotide
  Sense strand starting at position 1296 of SEQ ID NO: 1564069
ccuuauuaaugauagagag

SEQ ID NO: 1852794 - RNA, 19 nt, Artificial Sequence
  Description of Artificial Sequence: Synthetic oligonucleotide
  Antisense strand to SEQ ID NO: 1852793
cucucuaucauuaauaagg

SEQ ID NO: 1852795 - RNA, 19 nt, Artificial Sequence
  Description of Artificial Sequence: Synthetic oligonucleotide
  Sense strand starting at position 1338 of SEQ ID NO: 1564069
ggcauugugguauagagcu

SEQ ID NO: 1852796 - RNA, 19 nt, Artificial Sequence
  Description of Artificial Sequence: Synthetic oligonucleotide
  Antisense strand to SEQ ID NO: 1852795
agcucuauaccacaaugcc

SEQ ID NO: 1852797 - RNA, 19 nt, Artificial Sequence
  Description of Artificial Sequence: Synthetic oligonucleotide
  Sense strand starting at position 1344 of SEQ ID NO: 1564069
gugguauagagcuguggga

SEQ ID NO: 1852798 - RNA, 19 nt, Artificial Sequence
  Description of Artificial Sequence: Synthetic oligonucleotide
  Antisense strand to SEQ ID NO: 1852797
ucccacagcucuauaccac

SEQ ID NO: 1852799 - RNA, 19 nt, Artificial Sequence
  Description of Artificial Sequence: Synthetic oligonucleotide
  Sense strand starting at position 1346 of SEQ ID NO: 1564069
gguauagagcugugggaau

SEQ ID NO: 1852800 - RNA, 19 nt, Artificial Sequence
  Description of Artificial Sequence: Synthetic oligonucleotide
  Antisense strand to SEQ ID NO: 1852799
auucccacagcucuauacc

SEQ ID NO: 1852801 - RNA, 19 nt, Artificial Sequence
  Description of Artificial Sequence: Synthetic oligonucleotide
  Sense strand starting at position 1451 of SEQ ID NO: 1564069
auaccuuucucaguaagga

SEQ ID NO: 1852802 - RNA, 19 nt, Artificial Sequence
  Description of Artificial Sequence: Synthetic oligonucleotide
  Antisense strand to SEQ ID NO: 1852801
uccuuacugagaaagguau

SEQ ID NO: 1852803 - RNA, 19 nt, Artificial Sequence
  Description of Artificial Sequence: Synthetic oligonucleotide
  Sense strand starting at position 1537 of SEQ ID NO: 1564069
cugaacucugcuugguaca

SEQ ID NO: 1852804 - RNA, 19 nt, Artificial Sequence
  Description of Artificial Sequence: Synthetic oligonucleotide
  Antisense strand to SEQ ID NO: 1852803
uguaccaagcagaguucag

SEQ ID NO: 1852805 - RNA, 19 nt, Artificial Sequence
  Description of Artificial Sequence: Synthetic oligonucleotide
  Sense strand starting at position 1538 of SEQ ID NO: 1564069
ugaacucugcuugguacaa

SEQ ID NO: 1852806 - RNA, 19 nt, Artificial Sequence
  Description of Artificial Sequence: Synthetic oligonucleotide
  Antisense strand to SEQ ID NO: 1852805
uuguaccaagcagaguuca

SEQ ID NO: 1852807 - RNA, 19 nt, Artificial Sequence
  Description of Artificial Sequence: Synthetic oligonucleotide
  Sense strand starting at position 1803 of SEQ ID NO: 1564069
uguccuagccuugaaagcu

SEQ ID NO: 1852808 - RNA, 19 nt, Artificial Sequence
  Description of Artificial Sequence: Synthetic oligonucleotide
  Antisense strand to SEQ ID NO: 1852807
agcuuucaaggcuaggaca

SEQ ID NO: 1852809 - RNA, 19 nt, Artificial Sequence
  Description of Artificial Sequence: Synthetic oligonucleotide
  Sense strand starting at position 2137 of SEQ ID NO: 1564069
acguauucucgcgacauuu

SEQ ID NO: 1852810 - RNA, 19 nt, Artificial Sequence
  Description of Artificial Sequence: Synthetic oligonucleotide
  Antisense strand to SEQ ID NO: 1852809
aaaugucgcgagaauacgu

SEQ ID NO: 1852811 - RNA, 19 nt, Artificial Sequence
  Description of Artificial Sequence: Synthetic oligonucleotide
  Sense strand starting at position 2261 of SEQ ID NO: 1564069
gguuccugaaacugauuga

SEQ ID NO: 1852812 - RNA, 19 nt, Artificial Sequence
  Description of Artificial Sequence: Synthetic oligonucleotide
  Antisense strand to SEQ ID NO: 1852811
ucaaucaguuucaggaacc

SEQ ID NO: 1852813 - RNA, 19 nt, Artificial Sequence
  Description of Artificial Sequence: Synthetic oligonucleotide
  Sense strand starting at position 2274 of SEQ ID NO: 1564069
gauugagauugagaacuuu

SEQ ID NO: 1852814 - RNA, 19 nt, Artificial Sequence
  Description of Artificial Sequence: Synthetic oligonucleotide
  Antisense strand to SEQ ID NO: 1852813
aaaguucucaaucucaauc

SEQ ID NO: 1852815 - RNA, 19 nt, Artificial Sequence
  Description of Artificial Sequence: Synthetic oligonucleotide
  Sense strand starting at position 2297 of SEQ ID NO: 1564069
cguacaagggucgacagau

SEQ ID NO: 1852816 - RNA, 19 nt, Artificial Sequence
  Description of Artificial Sequence: Synthetic oligonucleotide
  Antisense strand to SEQ ID NO: 1852815
aucugucgacccuuguacg

SEQ ID NO: 1852817 - RNA, 19 nt, Artificial Sequence
  Description of Artificial Sequence: Synthetic oligonucleotide
  Sense strand starting at position 2909 of SEQ ID NO: 1564069
cagucuuuagaaugcuuga

SEQ ID NO: 1852818 - RNA, 19 nt, Artificial Sequence
  Description of Artificial Sequence: Synthetic oligonucleotide
  Antisense strand to SEQ ID NO: 1852817
ucaagcauucuaaagacug

SEQ ID NO: 1852819 - RNA, 19 nt, Artificial Sequence
  Description of Artificial Sequence: Synthetic oligonucleotide
  Sense strand starting at position 2914 of SEQ ID NO: 1564069
uuuagaaugcuugaggugu

SEQ ID NO: 1852820 - RNA, 19 nt, Artificial Sequence
  Description of Artificial Sequence: Synthetic oligonucleotide
  Antisense strand to SEQ ID NO: 1852819
acaccucaagcauucuaaa

SEQ ID NO: 1852821 - RNA, 19 nt, Artificial Sequence
  Description of Artificial Sequence: Synthetic oligonucleotide
  Sense strand starting at position 3044 of SEQ ID NO: 1564069
gcuuauuguuuaucaggag

SEQ ID NO: 1852822 - RNA, 19 nt, Artificial Sequence
  Description of Artificial Sequence: Synthetic oligonucleotide
  Antisense strand to SEQ ID NO: 1852821
cuccugauaaacaauaagc

SEQ ID NO: 1852823 - RNA, 19 nt, Artificial Sequence
  Description of Artificial Sequence: Synthetic oligonucleotide
  Sense strand starting at position 3048 of SEQ ID NO: 1564069
auuguuuaucaggaguuau

SEQ ID NO: 1852824 - RNA, 19 nt, Artificial Sequence
  Description of Artificial Sequence: Synthetic oligonucleotide
  Antisense strand to SEQ ID NO: 1852823
auaacuccugauaaacaau

SEQ ID NO: 1852825 - RNA, 19 nt, Artificial Sequence
  Description of Artificial Sequence: Synthetic oligonucleotide
  Sense strand starting at position 3182 of SEQ ID NO: 1564069
ucauaagugcuauacagga

SEQ ID NO: 1852826 - RNA, 19 nt, Artificial Sequence
  Description of Artificial Sequence: Synthetic oligonucleotide
  Antisense strand to SEQ ID NO: 1852825
uccuguauagcacuuauga

SEQ ID NO: 1852827 - RNA, 19 nt, Artificial Sequence
  Description of Artificial Sequence: Synthetic oligonucleotide
  Sense strand starting at position 3204 of SEQ ID NO: 1564069
gagacagguggaugugaua

SEQ ID NO: 1852828 - RNA, 19 nt, Artificial Sequence
  Description of Artificial Sequence: Synthetic oligonucleotide
  Antisense strand to SEQ ID NO: 1852827
uaucacauccaccugucuc

SEQ ID NO: 1852829 - RNA, 19 nt, Artificial Sequence
  Description of Artificial Sequence: Synthetic oligonucleotide
  Sense strand starting at position 3217 of SEQ ID NO: 1564069
gugauaaagugacuuaggu

SEQ ID NO: 1852830 - RNA, 19 nt, Artificial Sequence
  Description of Artificial Sequence: Synthetic oligonucleotide
  Antisense strand to SEQ ID NO: 1852829
accuaagucacuuuaucac

SEQ ID NO: 1852831 - RNA, 19 nt, Artificial Sequence
  Description of Artificial Sequence: Synthetic oligonucleotide
  Sense strand starting at position 3244 of SEQ ID NO: 1564069
uagaaaggguggucaggua

SEQ ID NO: 1852832 - RNA, 19 nt, Artificial Sequence
  Description of Artificial Sequence: Synthetic oligonucleotide
  Antisense strand to SEQ ID NO: 1852831
uaccugaccacccuuucua

SEQ ID NO: 1852833 - RNA, 19 nt, Artificial Sequence
  Description of Artificial Sequence: Synthetic oligonucleotide
  Sense strand starting at position 3306 of SEQ ID NO: 1564069
ggauuccucucaccucaga

SEQ ID NO: 1852834 - RNA, 19 nt, Artificial Sequence
  Description of Artificial Sequence: Synthetic oligonucleotide
  Antisense strand to SEQ ID NO: 1852833
ucugaggugagaggaaucc

SEQ ID NO: 1852835 - RNA, 19 nt, Artificial Sequence
  Description of Artificial Sequence: Synthetic oligonucleotide
  Sense strand starting at position 3362 of SEQ ID NO: 1564069
agauguucuagcugaauga

SEQ ID NO: 1852836 - RNA, 19 nt, Artificial Sequence
  Description of Artificial Sequence: Synthetic oligonucleotide
  Antisense strand to SEQ ID NO: 1852835
ucauucagcuagaacaucu

SEQ ID NO: 1852837 - RNA, 19 nt, Artificial Sequence
  Description of Artificial Sequence: Synthetic oligonucleotide
  Sense strand starting at position 3363 of SEQ ID NO: 1564069
gauguucuagcugaaugau

SEQ ID NO: 1852838 - RNA, 19 nt, Artificial Sequence
  Description of Artificial Sequence: Synthetic oligonucleotide
  Antisense strand to SEQ ID NO: 1852837
aucauucagcuagaacauc

SEQ ID NO: 1852839 - RNA, 19 nt, Artificial Sequence
  Description of Artificial Sequence: Synthetic oligonucleotide
  Sense strand starting at position 3366 of SEQ ID NO: 1564069
guucuagcugaaugauauc

SEQ ID NO: 1852840 - RNA, 19 nt, Artificial Sequence
  Description of Artificial Sequence: Synthetic oligonucleotide
  Antisense strand to SEQ ID NO: 1852839
gauaucauucagcuagaac

SEQ ID NO: 1852841 - RNA, 19 nt, Artificial Sequence
  Description of Artificial Sequence: Synthetic oligonucleotide
  Sense strand starting at position 3377 of SEQ ID NO: 1564069
augauauccuagccuaaga

SEQ ID NO: 1852842 - RNA, 19 nt, Artificial Sequence
  Description of Artificial Sequence: Synthetic oligonucleotide
  Antisense strand to SEQ ID NO: 1852841
ucuuaggcuaggauaucau

SEQ ID NO: 1852843 - RNA, 19 nt, Artificial Sequence
  Description of Artificial Sequence: Synthetic oligonucleotide
  Sense strand starting at position 3423 of SEQ ID NO: 1564069
ugaguaccuuuccuggaga

SEQ ID NO: 1852844 - RNA, 19 nt, Artificial Sequence
  Description of Artificial Sequence: Synthetic oligonucleotide
  Antisense strand to SEQ ID NO: 1852843
ucuccaggaaagguacuca

SEQ ID NO: 1852845 - RNA, 19 nt, Artificial Sequence
  Description of Artificial Sequence: Synthetic oligonucleotide
  Sense strand starting at position 3425 of SEQ ID NO: 1564069
aguaccuuuccuggagacu

SEQ ID NO: 1852846 - RNA, 19 nt, Artificial Sequence
  Description of Artificial Sequence: Synthetic oligonucleotide
  Antisense strand to SEQ ID NO: 1852845
agucuccaggaaagguacu

SEQ ID NO: 1852847 - RNA, 19 nt, Artificial Sequence
  Description of Artificial Sequence: Synthetic oligonucleotide
  Sense strand starting at position 3438 of SEQ ID NO: 1564069
gagacugagugucucaaca

SEQ ID NO: 1852848 - RNA, 19 nt, Artificial Sequence
  Description of Artificial Sequence: Synthetic oligonucleotide
  Antisense strand to SEQ ID NO: 1852847
uguugagacacucagucuc

SEQ ID NO: 1852849 - RNA, 19 nt, Artificial Sequence
  Description of Artificial Sequence: Synthetic oligonucleotide
  Sense strand starting at position 3496 of SEQ ID NO: 1564069
gugggaugugcucugugca

SEQ ID NO: 1852850 - RNA, 19 nt, Artificial Sequence
  Description of Artificial Sequence: Synthetic oligonucleotide
  Antisense strand to SEQ ID NO: 1852849
ugcacagagcacaucccac

SEQ ID NO: 1852851 - RNA, 19 nt, Artificial Sequence
  Description of Artificial Sequence: Synthetic oligonucleotide
  Sense strand starting at position 3604 of SEQ ID NO: 1564069
uagacauugcuagauguca

SEQ ID NO: 1852852 - RNA, 19 nt, Artificial Sequence
  Description of Artificial Sequence: Synthetic oligonucleotide
  Antisense strand to SEQ ID NO: 1852851
ugacaucuagcaaugucua

SEQ ID NO: 1852853 - RNA, 19 nt, Artificial Sequence
  Description of Artificial Sequence: Synthetic oligonucleotide
  Sense strand starting at position 3736 of SEQ ID NO: 1564069
uuggaagagcuaggaugua

SEQ ID NO: 1852854 - RNA, 19 nt, Artificial Sequence
  Description of Artificial Sequence: Synthetic oligonucleotide
  Antisense strand to SEQ ID NO: 1852853
uacauccuagcucuuccaa

SEQ ID NO: 1852855 - RNA, 19 nt, Artificial Sequence
  Description of Artificial Sequence: Synthetic oligonucleotide
  Sense strand starting at position 3772 of SEQ ID NO: 1564069
cccucagcauuaguagauu

SEQ ID NO: 1852856 - RNA, 19 nt, Artificial Sequence
  Description of Artificial Sequence: Synthetic oligonucleotide
  Antisense strand to SEQ ID NO: 1852855
aaucuacuaaugcugaggg

SEQ ID NO: 1852857 - RNA, 19 nt, Artificial Sequence
  Description of Artificial Sequence: Synthetic oligonucleotide
  Sense strand starting at position 3794 of SEQ ID NO: 1564069
auucccagcuguucugaaa

SEQ ID NO: 1852858 - RNA, 19 nt, Artificial Sequence
  Description of Artificial Sequence: Synthetic oligonucleotide
  Antisense strand to SEQ ID NO: 1852857
uuucagaacagcugggaau

SEQ ID NO: 1852859 - RNA, 19 nt, Artificial Sequence
  Description of Artificial Sequence: Synthetic oligonucleotide
  Sense strand starting at position 3878 of SEQ ID NO: 1564069
gucccuuuggugagugagu

SEQ ID NO: 1852860 - RNA, 19 nt, Artificial Sequence
  Description of Artificial Sequence: Synthetic oligonucleotide
  Antisense strand to SEQ ID NO: 1852859
acucacucaccaaagggac

SEQ ID NO: 1852861 - RNA, 19 nt, Artificial Sequence
  Description of Artificial Sequence: Synthetic oligonucleotide
  Sense strand starting at position 3929 of SEQ ID NO: 1564069
cacguuaauguuuauuaag

SEQ ID NO: 1852862 - RNA, 19 nt, Artificial Sequence
  Description of Artificial Sequence: Synthetic oligonucleotide
  Antisense strand to SEQ ID NO: 1852861
cuuaauaaacauuaacgug

SEQ ID NO: 1852863 - RNA, 19 nt, Artificial Sequence
  Description of Artificial Sequence: Synthetic oligonucleotide
  Sense strand starting at position 3948 of SEQ ID NO: 1564069
uccuauauugauggugcau

SEQ ID NO: 1852864 - RNA, 19 nt, Artificial Sequence
  Description of Artificial Sequence: Synthetic oligonucleotide
  Antisense strand to SEQ ID NO: 1852863
augcaccaucaauauagga

SEQ ID NO: 1852865 - RNA, 19 nt, Artificial Sequence
  Description of Artificial Sequence: Synthetic oligonucleotide
  Sense strand starting at position 33 of SEQ ID NO: 1564070
agcgaucauagauagcaau

SEQ ID NO: 1852866 - RNA, 19 nt, Artificial Sequence
  Description of Artificial Sequence: Synthetic oligonucleotide
  Antisense strand to SEQ ID NO: 1852865
auugcuaucuaugaucgcu

SEQ ID NO: 1852867 - RNA, 19 nt, Artificial Sequence
  Description of Artificial Sequence: Synthetic oligonucleotide
  Sense strand starting at position 237 of SEQ ID NO: 1564070
caaaguacauggcuagaua

SEQ ID NO: 1852868 - RNA, 19 nt, Artificial Sequence
  Description of Artificial Sequence: Synthetic oligonucleotide
  Antisense strand to SEQ ID NO: 1852867
uaucuagccauguacuuug

SEQ ID NO: 1852869 - RNA, 19 nt, Artificial Sequence
  Description of Artificial Sequence: Synthetic oligonucleotide
  Sense strand starting at position 240 of SEQ ID NO: 1564070
aguacauggcuagauaacu

SEQ ID NO: 1852870 - RNA, 19 nt, Artificial Sequence
  Description of Artificial Sequence: Synthetic oligonucleotide
  Antisense strand to SEQ ID NO: 1852869
aguuaucuagccauguacu

SEQ ID NO: 1852871 - RNA, 19 nt, Artificial Sequence
  Description of Artificial Sequence: Synthetic oligonucleotide
  Sense strand starting at position 264 of SEQ ID NO: 1564070
cucuguacuagaggucaga

SEQ ID NO: 1852872 - RNA, 19 nt, Artificial Sequence
  Description of Artificial Sequence: Synthetic oligonucleotide
  Antisense strand to SEQ ID NO: 1852871
ucugaccucuaguacagag

SEQ ID NO: 1852873 - RNA, 19 nt, Artificial Sequence
  Description of Artificial Sequence: Synthetic oligonucleotide
  Sense strand starting at position 277 of SEQ ID NO: 1564070
gucagaaagcugcagguaa

SEQ ID NO: 1852874 - RNA, 19 nt, Artificial Sequence
  Description of Artificial Sequence: Synthetic oligonucleotide
  Antisense strand to SEQ ID NO: 1852873
uuaccugcagcuuucugac

SEQ ID NO: 1852875 - RNA, 19 nt, Artificial Sequence
  Description of Artificial Sequence: Synthetic oligonucleotide
  Sense strand starting at position 688 of SEQ ID NO: 1564070
ugaggaugcuaucucagau

SEQ ID NO: 1852876 - RNA, 19 nt, Artificial Sequence
  Description of Artificial Sequence: Synthetic oligonucleotide
  Antisense strand to SEQ ID NO: 1852875
aucugagauagcauccuca

SEQ ID NO: 1852877 - RNA, 19 nt, Artificial Sequence
  Description of Artificial Sequence: Synthetic oligonucleotide
  Sense strand starting at position 872 of SEQ ID NO: 1564070
gagacaaguuccucuggga

SEQ ID NO: 1852878 - RNA, 19 nt, Artificial Sequence
  Description of Artificial Sequence: Synthetic oligonucleotide
  Antisense strand to SEQ ID NO: 1852877
ucccagaggaacuugucuc

SEQ ID NO: 1852879 - RNA, 19 nt, Artificial Sequence
  Description of Artificial Sequence: Synthetic oligonucleotide
  Sense strand starting at position 876 of SEQ ID NO: 1564070
caaguuccucugggacaaa

SEQ ID NO: 1852880 - RNA, 19 nt, Artificial Sequence
  Description of Artificial Sequence: Synthetic oligonucleotide
  Antisense strand to SEQ ID NO: 1852879
uuugucccagaggaacuug

SEQ ID NO: 1852881 - RNA, 19 nt, Artificial Sequence
  Description of Artificial Sequence: Synthetic oligonucleotide
  Sense strand starting at position 898 of SEQ ID NO: 1564070
gagagaucaauccguagag

SEQ ID NO: 1852882 - RNA, 19 nt, Artificial Sequence
  Description of Artificial Sequence: Synthetic oligonucleotide
  Antisense strand to SEQ ID NO: 1852881
cucuacggauugaucucuc

SEQ ID NO: 1852883 - RNA, 19 nt, Artificial Sequence
  Description of Artificial Sequence: Synthetic oligonucleotide
  Sense strand starting at position 1112 of SEQ ID NO: 1564070
gcuucuuaagcucaaagau

SEQ ID NO: 1852884 - RNA, 19 nt, Artificial Sequence
  Description of Artificial Sequence: Synthetic oligonucleotide
  Antisense strand to SEQ ID NO: 1852883
aucuuugagcuuaagaagc

SEQ ID NO: 1852885 - RNA, 19 nt, Artificial Sequence
  Description of Artificial Sequence: Synthetic oligonucleotide
  Sense strand starting at position 1121 of SEQ ID NO: 1564070
gcucaaagauaugcucaau

SEQ ID NO: 1852886 - RNA, 19 nt, Artificial Sequence
  Description of Artificial Sequence: Synthetic oligonucleotide
  Antisense strand to SEQ ID NO: 1852885
auugagcauaucuuugagc

SEQ ID NO: 1852887 - RNA, 19 nt, Artificial Sequence
  Description of Artificial Sequence: Synthetic oligonucleotide
  Sense strand starting at position 1124 of SEQ ID NO: 1564070
caaagauaugcucaaucgu

SEQ ID NO: 1852888 - RNA, 19 nt, Artificial Sequence
  Description of Artificial Sequence: Synthetic oligonucleotide
  Antisense strand to SEQ ID NO: 1852887
acgauugagcauaucuuug

SEQ ID NO: 1852889 - RNA, 19 nt, Artificial Sequence
  Description of Artificial Sequence: Synthetic oligonucleotide
  Sense strand starting at position 1193 of SEQ ID NO: 1564070
aguaaauguuuguugaaga

SEQ ID NO: 1852890 - RNA, 19 nt, Artificial Sequence
  Description of Artificial Sequence: Synthetic oligonucleotide
  Antisense strand to SEQ ID NO: 1852889
ucuucaacaaacauuuacu

SEQ ID NO: 1852891 - RNA, 19 nt, Artificial Sequence
  Description of Artificial Sequence: Synthetic oligonucleotide
  Sense strand starting at position 1201 of SEQ ID NO: 1564070
uuuguugaagacuaaaugu

SEQ ID NO: 1852892 - RNA, 19 nt, Artificial Sequence
  Description of Artificial Sequence: Synthetic oligonucleotide
  Antisense strand to SEQ ID NO: 1852891
acauuuagucuucaacaaa

SEQ ID NO: 1852893 - RNA, 19 nt, Artificial Sequence
  Description of Artificial Sequence: Synthetic oligonucleotide
  Sense strand starting at position 1209 of SEQ ID NO: 1564070
agacuaaauguuuggagua

SEQ ID NO: 1852894 - RNA, 19 nt, Artificial Sequence
  Description of Artificial Sequence: Synthetic oligonucleotide
  Antisense strand to SEQ ID NO: 1852893
uacuccaaacauuuagucu

SEQ ID NO: 1852895 - RNA, 19 nt, Artificial Sequence
  Description of Artificial Sequence: Synthetic oligonucleotide
  Sense strand starting at position 1327 of SEQ ID NO: 1564070
agaaauguuccugggucca

SEQ ID NO: 1852896 - RNA, 19 nt, Artificial Sequence
  Description of Artificial Sequence: Synthetic oligonucleotide
  Antisense strand to SEQ ID NO: 1852895
uggacccaggaacauuucu

SEQ ID NO: 1852897 - RNA, 19 nt, Artificial Sequence
  Description of Artificial Sequence: Synthetic oligonucleotide
  Sense strand starting at position 1815 of SEQ ID NO: 1564070
uuacuucuuguccagagga

SEQ ID NO: 1852898 - RNA, 19 nt, Artificial Sequence
  Description of Artificial Sequence: Synthetic oligonucleotide
  Antisense strand to SEQ ID NO: 1852897
uccucuggacaagaaguaa

SEQ ID NO: 1852899 - RNA, 19 nt, Artificial Sequence
  Description of Artificial Sequence: Synthetic oligonucleotide
  Sense strand starting at position 2168 of SEQ ID NO: 1564070
uugaauaaacaugguguca

SEQ ID NO: 1852900 - RNA, 19 nt, Artificial Sequence
  Description of Artificial Sequence: Synthetic oligonucleotide
  Antisense strand to SEQ ID NO: 1852899
ugacaccauguuuauucaa

SEQ ID NO: 1852901 - RNA, 19 nt, Artificial Sequence
  Description of Artificial Sequence: Synthetic oligonucleotide
  Sense strand starting at position 2199 of SEQ ID NO: 1564070
ggauuugcuuugccuccaa

SEQ ID NO: 1852902 - RNA, 19 nt, Artificial Sequence
  Description of Artificial Sequence: Synthetic oligonucleotide
  Antisense strand to SEQ ID NO: 1852901
uuggaggcaaagcaaaucc

SEQ ID NO: 1852903 - RNA, 19 nt, Artificial Sequence
  Description of Artificial Sequence: Synthetic oligonucleotide
  Sense strand starting at position 2240 of SEQ ID NO: 1564070
gggcaaaucgcacaccauu

SEQ ID NO: 1852904 - RNA, 19 nt, Artificial Sequence
  Description of Artificial Sequence: Synthetic oligonucleotide
  Antisense strand to SEQ ID NO: 1852903
aauggugugcgauuugccc

SEQ ID NO: 1852905 - RNA, 19 nt, Artificial Sequence
  Description of Artificial Sequence: Synthetic oligonucleotide
  Sense strand starting at position 2302 of SEQ ID NO: 1564070
agaggagcucauuagcacu

SEQ ID NO: 1852906 - RNA, 19 nt, Artificial Sequence
  Description of Artificial Sequence: Synthetic oligonucleotide
  Antisense strand to SEQ ID NO: 1852905
agugcuaaugagcuccucu

SEQ ID NO: 1852907 - RNA, 19 nt, Artificial Sequence
  Description of Artificial Sequence: Synthetic oligonucleotide
  Sense strand starting at position 2464 of SEQ ID NO: 1564070
ccagguggaccugaaugua

SEQ ID NO: 1852908 - RNA, 19 nt, Artificial Sequence
  Description of Artificial Sequence: Synthetic oligonucleotide
  Antisense strand to SEQ ID NO: 1852907
uacauucagguccaccugg

SEQ ID NO: 1852909 - RNA, 19 nt, Artificial Sequence
  Description of Artificial Sequence: Synthetic oligonucleotide
  Sense strand starting at position 2559 of SEQ ID NO: 1564070
uuggguaaaccuuaagucu

SEQ ID NO: 1852910 - RNA, 19 nt, Artificial Sequence
  Description of Artificial Sequence: Synthetic oligonucleotide
  Antisense strand to SEQ ID NO: 1852909
agacuuaagguuuacccaa

SEQ ID NO: 1852911 - RNA, 19 nt, Artificial Sequence
  Description of Artificial Sequence: Synthetic oligonucleotide
  Sense strand starting at position 2643 of SEQ ID NO: 1564070
caguaagugguccagugaa

SEQ ID NO: 1852912 - RNA, 19 nt, Artificial Sequence
  Description of Artificial Sequence: Synthetic oligonucleotide
  Antisense strand to SEQ ID NO: 1852911
uucacuggaccacuuacug

SEQ ID NO: 1852913 - RNA, 19 nt, Artificial Sequence
  Description of Artificial Sequence: Synthetic oligonucleotide
  Sense strand starting at position 2755 of SEQ ID NO: 1564070
aaaguucugcccgacuaca

SEQ ID NO: 1852914 - RNA, 19 nt, Artificial Sequence
  Description of Artificial Sequence: Synthetic oligonucleotide
  Antisense strand to SEQ ID NO: 1852913
uguagucgggcagaacuuu

SEQ ID NO: 1852915 - RNA, 19 nt, Artificial Sequence
  Description of Artificial Sequence: Synthetic oligonucleotide
  Sense strand starting at position 2816 of SEQ ID NO: 1564070
ucauguaagagaugagggu

SEQ ID NO: 1852916 - RNA, 19 nt, Artificial Sequence
  Description of Artificial Sequence: Synthetic oligonucleotide
  Antisense strand to SEQ ID NO: 1852915
acccucaucucuuacauga

SEQ ID NO: 1852917 - RNA, 19 nt, Artificial Sequence
  Description of Artificial Sequence: Synthetic oligonucleotide
  Sense strand starting at position 2843 of SEQ ID NO: 1564070
aguggucucauaggaccau

SEQ ID NO: 1852918 - RNA, 19 nt, Artificial Sequence
  Description of Artificial Sequence: Synthetic oligonucleotide
  Antisense strand to SEQ ID NO: 1852917
augguccuaugagaccacu

SEQ ID NO: 1852919 - RNA, 19 nt, Artificial Sequence
  Description of Artificial Sequence: Synthetic oligonucleotide
  Sense strand starting at position 3202 of SEQ ID NO: 1564070
aaucauguucugggaagua

SEQ ID NO: 1852920 - RNA, 19 nt, Artificial Sequence
  Description of Artificial Sequence: Synthetic oligonucleotide
  Antisense strand to SEQ ID NO: 1852919
uacuucccagaacaugauu

SEQ ID NO: 1852921 - RNA, 19 nt, Artificial Sequence
  Description of Artificial Sequence: Synthetic oligonucleotide
  Sense strand starting at position 3207 of SEQ ID NO: 1564070
uguucugggaaguauaauu

SEQ ID NO: 1852922 - RNA, 19 nt, Artificial Sequence
  Description of Artificial Sequence: Synthetic oligonucleotide
  Antisense strand to SEQ ID NO: 1852921
aauuauacuucccagaaca

SEQ ID NO: 1852923 - RNA, 19 nt, Artificial Sequence
  Description of Artificial Sequence: Synthetic oligonucleotide
  Sense strand starting at position 3394 of SEQ ID NO: 1564070
uuagauaaaucauugggca

SEQ ID NO: 1852924 - RNA, 19 nt, Artificial Sequence
  Description of Artificial Sequence: Synthetic oligonucleotide
  Antisense strand to SEQ ID NO: 1852923
ugcccaaugauuuaucuaa

SEQ ID NO: 1852925 - RNA, 19 nt, Artificial Sequence
  Description of Artificial Sequence: Synthetic oligonucleotide
  Sense strand starting at position 3396 of SEQ ID NO: 1564070
agauaaaucauugggcagu

SEQ ID NO: 1852926 - RNA, 19 nt, Artificial Sequence
  Description of Artificial Sequence: Synthetic oligonucleotide
  Antisense strand to SEQ ID NO: 1852925
acugcccaaugauuuaucu

SEQ ID NO: 1852927 - RNA, 19 nt, Artificial Sequence
  Description of Artificial Sequence: Synthetic oligonucleotide
  Sense strand starting at position 3398 of SEQ ID NO: 1564070
auaaaucauugggcaguua

SEQ ID NO: 1852928 - RNA, 19 nt, Artificial Sequence
  Description of Artificial Sequence: Synthetic oligonucleotide
  Antisense strand to SEQ ID NO: 1852927
uaacugcccaaugauuuau

SEQ ID NO: 1852929 - RNA, 19 nt, Artificial Sequence
  Description of Artificial Sequence: Synthetic oligonucleotide
  Sense strand starting at position 3594 of SEQ ID NO: 1564070
guguuaggguugucauuuc

SEQ ID NO: 1852930 - RNA, 19 nt, Artificial Sequence
  Description of Artificial Sequence: Synthetic oligonucleotide
  Antisense strand to SEQ ID NO: 1852929
gaaaugacaacccuaacac

SEQ ID NO: 1852931 - RNA, 19 nt, Artificial Sequence
  Description of Artificial Sequence: Synthetic oligonucleotide
  Sense strand starting at position 3738 of SEQ ID NO: 1564070
agaaauguuuauccaugga

SEQ ID NO: 1852932 - RNA, 19 nt, Artificial Sequence
  Description of Artificial Sequence: Synthetic oligonucleotide
  Antisense strand to SEQ ID NO: 1852931
uccauggauaaacauuucu

SEQ ID NO: 1852933 - RNA, 19 nt, Artificial Sequence
  Description of Artificial Sequence: Synthetic oligonucleotide
  Sense strand starting at position 3741 of SEQ ID NO: 1564070
aauguuuauccauggagga

SEQ ID NO: 1852934 - RNA, 19 nt, Artificial Sequence
  Description of Artificial Sequence: Synthetic oligonucleotide
  Antisense strand to SEQ ID NO: 1852933
uccuccauggauaaacauu

SEQ ID NO: 1852935 - RNA, 19 nt, Artificial Sequence
  Description of Artificial Sequence: Synthetic oligonucleotide
  Sense strand starting at position 3742 of SEQ ID NO: 1564070
auguuuauccauggaggaa

SEQ ID NO: 1852936 - RNA, 19 nt, Artificial Sequence
  Description of Artificial Sequence: Synthetic oligonucleotide
  Antisense strand to SEQ ID NO: 1852935
uuccuccauggauaaacau

SEQ ID NO: 1852937 - RNA, 19 nt, Artificial Sequence
  Description of Artificial Sequence: Synthetic oligonucleotide
  Sense strand starting at position 3798 of SEQ ID NO: 1564070
ugaggauuagacugcaaug

SEQ ID NO: 1852938 - RNA, 19 nt, Artificial Sequence
  Description of Artificial Sequence: Synthetic oligonucleotide
  Antisense strand to SEQ ID NO: 1852937
cauugcagucuaauccuca

SEQ ID NO: 1852939 - RNA, 19 nt, Artificial Sequence
  Description of Artificial Sequence: Synthetic oligonucleotide
  Sense strand starting at position 3803 of SEQ ID NO: 1564070
auuagacugcaaugagauu

SEQ ID NO: 1852940 - RNA, 19 nt, Artificial Sequence
  Description of Artificial Sequence: Synthetic oligonucleotide
  Antisense strand to SEQ ID NO: 1852939
aaucucauugcagucuaau

SEQ ID NO: 1852941 - RNA, 19 nt, Artificial Sequence
  Description of Artificial Sequence: Synthetic oligonucleotide
  Sense strand starting at position 3809 of SEQ ID NO: 1564070
cugcaaugagauuacacuu

SEQ ID NO: 1852942 - RNA, 19 nt, Artificial Sequence
  Description of Artificial Sequence: Synthetic oligonucleotide
  Antisense strand to SEQ ID NO: 1852941
aaguguaaucucauugcag

SEQ ID NO: 1852943 - RNA, 19 nt, Artificial Sequence
  Description of Artificial Sequence: Synthetic oligonucleotide
  Sense strand starting at position 3971 of SEQ ID NO: 1564070
aacagagguuuauuauaug

SEQ ID NO: 1852944 - RNA, 19 nt, Artificial Sequence
  Description of Artificial Sequence: Synthetic oligonucleotide
  Antisense strand to SEQ ID NO: 1852943
cauauaauaaaccucuguu

SEQ ID NO: 1852945 - RNA, 19 nt, Artificial Sequence
  Description of Artificial Sequence: Synthetic oligonucleotide
  Sense strand starting at position 197 of SEQ ID NO: 1564071
gucuucuaagacugagaga

SEQ ID NO: 1852946 - RNA, 19 nt, Artificial Sequence
  Description of Artificial Sequence: Synthetic oligonucleotide
  Antisense strand to SEQ ID NO: 1852945
ucucucagucuuagaagac

SEQ ID NO: 1852947 - RNA, 19 nt, Artificial Sequence
  Description of Artificial Sequence: Synthetic oligonucleotide
  Sense strand starting at position 282 of SEQ ID NO: 1564071
agauucugauagucacuuu

SEQ ID NO: 1852948 - RNA, 19 nt, Artificial Sequence
  Description of Artificial Sequence: Synthetic oligonucleotide
  Antisense strand to SEQ ID NO: 1852947
aaagugacuaucagaaucu

SEQ ID NO: 1852949 - RNA, 19 nt, Artificial Sequence
  Description of Artificial Sequence: Synthetic oligonucleotide
  Sense strand starting at position 516 of SEQ ID NO: 1564071
gccaguccuccagggaaga

SEQ ID NO: 1852950 - RNA, 19 nt, Artificial Sequence
  Description of Artificial Sequence: Synthetic oligonucleotide
  Antisense strand to SEQ ID NO: 1852949
ucuucccuggaggacuggc

SEQ ID NO: 1852951 - RNA, 19 nt, Artificial Sequence
  Description of Artificial Sequence: Synthetic oligonucleotide
  Sense strand starting at position 517 of SEQ ID NO: 1564071
ccaguccuccagggaagau

SEQ ID NO: 1852952 - RNA, 19 nt, Artificial Sequence
  Description of Artificial Sequence: Synthetic oligonucleotide
  Antisense strand to SEQ ID NO: 1852951
aucuucccuggaggacugg

SEQ ID NO: 1852953 - RNA, 19 nt, Artificial Sequence
  Description of Artificial Sequence: Synthetic oligonucleotide
  Sense strand starting at position 562 of SEQ ID NO: 1564071
aguuacucugucuauaauc

SEQ ID NO: 1852954 - RNA, 19 nt, Artificial Sequence
  Description of Artificial Sequence: Synthetic oligonucleotide
  Antisense strand to SEQ ID NO: 1852953
gauuauagacagaguaacu

SEQ ID NO: 1852955 - RNA, 19 nt, Artificial Sequence
  Description of Artificial Sequence: Synthetic oligonucleotide
  Sense strand starting at position 712 of SEQ ID NO: 1564071
gggucuugcaaauggaaga

SEQ ID NO: 1852956 - RNA, 19 nt, Artificial Sequence
  Description of Artificial Sequence: Synthetic oligonucleotide
  Antisense strand to SEQ ID NO: 1852955
ucuuccauuugcaagaccc

SEQ ID NO: 1852957 - RNA, 19 nt, Artificial Sequence
  Description of Artificial Sequence: Synthetic oligonucleotide
  Sense strand starting at position 713 of SEQ ID NO: 1564071
ggucuugcaaauggaagau

SEQ ID NO: 1852958 - RNA, 19 nt, Artificial Sequence
  Description of Artificial Sequence: Synthetic oligonucleotide
  Antisense strand to SEQ ID NO: 1852957
aucuuccauuugcaagacc

SEQ ID NO: 1852959 - RNA, 19 nt, Artificial Sequence
  Description of Artificial Sequence: Synthetic oligonucleotide
  Sense strand starting at position 816 of SEQ ID NO: 1564071
cagacuaaccuguggaaua

SEQ ID NO: 1852960 - RNA, 19 nt, Artificial Sequence
  Description of Artificial Sequence: Synthetic oligonucleotide
  Antisense strand to SEQ ID NO: 1852959
uauuccacagguuagucug

SEQ ID NO: 1852961 - RNA, 19 nt, Artificial Sequence
  Description of Artificial Sequence: Synthetic oligonucleotide
  Sense strand starting at position 827 of SEQ ID NO: 1564071
guggaauaaguauggugaa

SEQ ID NO: 1852962 - RNA, 19 nt, Artificial Sequence
  Description of Artificial Sequence: Synthetic oligonucleotide
  Antisense strand to SEQ ID NO: 1852961
uucaccauacuuauuccac

SEQ ID NO: 1852963 - RNA, 19 nt, Artificial Sequence
  Description of Artificial Sequence: Synthetic oligonucleotide
  Sense strand starting at position 839 of SEQ ID NO: 1564071
uggugaaacugucuaggga

SEQ ID NO: 1852964 - RNA, 19 nt, Artificial Sequence
  Description of Artificial Sequence: Synthetic oligonucleotide
  Antisense strand to SEQ ID NO: 1852963
ucccuagacaguuucacca

SEQ ID NO: 1852965 - RNA, 19 nt, Artificial Sequence
  Description of Artificial Sequence: Synthetic oligonucleotide
  Sense strand starting at position 913 of SEQ ID NO: 1564071
ccgaguauucaggaagcag

SEQ ID NO: 1852966 - RNA, 19 nt, Artificial Sequence
  Description of Artificial Sequence: Synthetic oligonucleotide
  Antisense strand to SEQ ID NO: 1852965
cugcuuccugaauacucgg

SEQ ID NO: 1852967 - RNA, 19 nt, Artificial Sequence
  Description of Artificial Sequence: Synthetic oligonucleotide
  Sense strand starting at position 942 of SEQ ID NO: 1564071
gguuaauacuaguuacuaa

SEQ ID NO: 1852968 - RNA, 19 nt, Artificial Sequence
  Description of Artificial Sequence: Synthetic oligonucleotide
  Antisense strand to SEQ ID NO: 1852967
uuaguaacuaguauuaacc

SEQ ID NO: 1852969 - RNA, 19 nt, Artificial Sequence
  Description of Artificial Sequence: Synthetic oligonucleotide
  Sense strand starting at position 1095 of SEQ ID NO: 1564071
aucccuuauccaggagaac

SEQ ID NO: 1852970 - RNA, 19 nt, Artificial Sequence
  Description of Artificial Sequence: Synthetic oligonucleotide
  Antisense strand to SEQ ID NO: 1852969
guucuccuggauaagggau

SEQ ID NO: 1852971 - RNA, 19 nt, Artificial Sequence
  Description of Artificial Sequence: Synthetic oligonucleotide
  Sense strand starting at position 1154 of SEQ ID NO: 1564071
ggauccuuccagugauacc

SEQ ID NO: 1852972 - RNA, 19 nt, Artificial Sequence
  Description of Artificial Sequence: Synthetic oligonucleotide
  Antisense strand to SEQ ID NO: 1852971
gguaucacuggaaggaucc

SEQ ID NO: 1852973 - RNA, 19 nt, Artificial Sequence
  Description of Artificial Sequence: Synthetic oligonucleotide
  Sense strand starting at position 1178 of SEQ ID NO: 1564071
aaggauaugccaggguuau

SEQ ID NO: 1852974 - RNA, 19 nt, Artificial Sequence
  Description of Artificial Sequence: Synthetic oligonucleotide
  Antisense strand to SEQ ID NO: 1852973
auaacccuggcauauccuu

SEQ ID NO: 1852975 - RNA, 19 nt, Artificial Sequence
  Description of Artificial Sequence: Synthetic oligonucleotide
  Sense strand starting at position 1179 of SEQ ID NO: 1564071
aggauaugccaggguuauu

SEQ ID NO: 1852976 - RNA, 19 nt, Artificial Sequence
  Description of Artificial Sequence: Synthetic oligonucleotide
  Antisense strand to SEQ ID NO: 1852975
aauaacccuggcauauccu

SEQ ID NO: 1852977 - RNA, 19 nt, Artificial Sequence
  Description of Artificial Sequence: Synthetic oligonucleotide
  Sense strand starting at position 1190 of SEQ ID NO: 1564071
ggguuauucgagcaaggga

SEQ ID NO: 1852978 - RNA, 19 nt, Artificial Sequence
  Description of Artificial Sequence: Synthetic oligonucleotide
  Antisense strand to SEQ ID NO: 1852977
ucccuugcucgaauaaccc

SEQ ID NO: 1852979 - RNA, 19 nt, Artificial Sequence
  Description of Artificial Sequence: Synthetic oligonucleotide
  Sense strand starting at position 2200 of SEQ ID NO: 1564071
uugaauuguggcgagaaau

SEQ ID NO: 1852980 - RNA, 19 nt, Artificial Sequence
  Description of Artificial Sequence: Synthetic oligonucleotide
  Antisense strand to SEQ ID NO: 1852979
auuucucgccacaauucaa

SEQ ID NO: 1852981 - RNA, 19 nt, Artificial Sequence
  Description of Artificial Sequence: Synthetic oligonucleotide
  Sense strand starting at position 2211 of SEQ ID NO: 1564071
cgagaaauuugcguucuga

SEQ ID NO: 1852982 - RNA, 19 nt, Artificial Sequence
  Description of Artificial Sequence: Synthetic oligonucleotide
  Antisense strand to SEQ ID NO: 1852981
ucagaacgcaaauuucucg

SEQ ID NO: 1852983 - RNA, 19 nt, Artificial Sequence
  Description of Artificial Sequence: Synthetic oligonucleotide
  Sense strand starting at position 2226 of SEQ ID NO: 1564071
cugagaauugugggaaccu

SEQ ID NO: 1852984 - RNA, 19 nt, Artificial Sequence
  Description of Artificial Sequence: Synthetic oligonucleotide
  Antisense strand to SEQ ID NO: 1852983
agguucccacaauucucag

SEQ ID NO: 1852985 - RNA, 19 nt, Artificial Sequence
  Description of Artificial Sequence: Synthetic oligonucleotide
  Sense strand starting at position 2280 of SEQ ID NO: 1564071
gucugacugcuugaagaca

SEQ ID NO: 1852986 - RNA, 19 nt, Artificial Sequence
  Description of Artificial Sequence: Synthetic oligonucleotide
  Antisense strand to SEQ ID NO: 1852985
ugucuucaagcagucagac

SEQ ID NO: 1852987 - RNA, 19 nt, Artificial Sequence
  Description of Artificial Sequence: Synthetic oligonucleotide
  Sense strand starting at position 2318 of SEQ ID NO: 1564071
gugauauuagucuacccug

SEQ ID NO: 1852988 - RNA, 19 nt, Artificial Sequence
  Description of Artificial Sequence: Synthetic oligonucleotide
  Antisense strand to SEQ ID NO: 1852987
caggguagacuaauaucac

SEQ ID NO: 1852989 - RNA, 19 nt, Artificial Sequence
  Description of Artificial Sequence: Synthetic oligonucleotide
  Sense strand starting at position 2321 of SEQ ID NO: 1564071
auauuagucuacccugaca

SEQ ID NO: 1852990 - RNA, 19 nt, Artificial Sequence
  Description of Artificial Sequence: Synthetic oligonucleotide
  Antisense strand to SEQ ID NO: 1852989
ugucaggguagacuaauau

SEQ ID NO: 1852991 - RNA, 19 nt, Artificial Sequence
  Description of Artificial Sequence: Synthetic oligonucleotide
  Sense strand starting at position 2323 of SEQ ID NO: 1564071
auuagucuacccugacauc

SEQ ID NO: 1852992 - RNA, 19 nt, Artificial Sequence
  Description of Artificial Sequence: Synthetic oligonucleotide
  Antisense strand to SEQ ID NO: 1852991
gaugucaggguagacuaau

SEQ ID NO: 1852993 - RNA, 19 nt, Artificial Sequence
  Description of Artificial Sequence: Synthetic oligonucleotide
  Sense strand starting at position 2324 of SEQ ID NO: 1564071
uuagucuacccugacauca

SEQ ID NO: 1852994 - RNA, 19 nt, Artificial Sequence
  Description of Artificial Sequence: Synthetic oligonucleotide
  Antisense strand to SEQ ID NO: 1852993
ugaugucaggguagacuaa

SEQ ID NO: 1852995 - RNA, 19 nt, Artificial Sequence
  Description of Artificial Sequence: Synthetic oligonucleotide
  Sense strand starting at position 2437 of SEQ ID NO: 1564071
auuguagcugcuuaggaaa

SEQ ID NO: 1852996 - RNA, 19 nt, Artificial Sequence
  Description of Artificial Sequence: Synthetic oligonucleotide
  Antisense strand to SEQ ID NO: 1852995
uuuccuaagcagcuacaau

SEQ ID NO: 1852997 - RNA, 19 nt, Artificial Sequence
  Description of Artificial Sequence: Synthetic oligonucleotide
  Sense strand starting at position 2919 of SEQ ID NO: 1564071
acagaagaguuccuuguag

SEQ ID NO: 1852998 - RNA, 19 nt, Artificial Sequence
  Description of Artificial Sequence: Synthetic oligonucleotide
  Antisense strand to SEQ ID NO: 1852997
cuacaaggaacucuucugu

SEQ ID NO: 1852999 - RNA, 19 nt, Artificial Sequence
  Description of Artificial Sequence: Synthetic oligonucleotide
  Sense strand starting at position 2921 of SEQ ID NO: 1564071
agaagaguuccuuguaggg

SEQ ID NO: 1853000 - RNA, 19 nt, Artificial Sequence
  Description of Artificial Sequence: Synthetic oligonucleotide
  Antisense strand to SEQ ID NO: 1852999
cccuacaaggaacucuucu

SEQ ID NO: 1853001 - RNA, 19 nt, Artificial Sequence
  Description of Artificial Sequence: Synthetic oligonucleotide
  Sense strand starting at position 2965 of SEQ ID NO: 1564071
gacugauaacuuugaggca

SEQ ID NO: 1853002 - RNA, 19 nt, Artificial Sequence
  Description of Artificial Sequence: Synthetic oligonucleotide
  Antisense strand to SEQ ID NO: 1853001
ugccucaaaguuaucaguc

SEQ ID NO: 1853003 - RNA, 19 nt, Artificial Sequence
  Description of Artificial Sequence: Synthetic oligonucleotide
  Sense strand starting at position 2979 of SEQ ID NO: 1564071
aggcauuaacucuaaagua

SEQ ID NO: 1853004 - RNA, 19 nt, Artificial Sequence
  Description of Artificial Sequence: Synthetic oligonucleotide
  Antisense strand to SEQ ID NO: 1853003
uacuuuagaguuaaugccu

SEQ ID NO: 1853005 - RNA, 19 nt, Artificial Sequence
  Description of Artificial Sequence: Synthetic oligonucleotide
  Sense strand starting at position 3034 of SEQ ID NO: 1564071
aucugauaacguugggauu

SEQ ID NO: 1853006 - RNA, 19 nt, Artificial Sequence
  Description of Artificial Sequence: Synthetic oligonucleotide
  Antisense strand to SEQ ID NO: 1853005
aaucccaacguuaucagau

SEQ ID NO: 1853007 - RNA, 19 nt, Artificial Sequence
  Description of Artificial Sequence: Synthetic oligonucleotide
  Sense strand starting at position 3085 of SEQ ID NO: 1564071
gguaguaaugccugaaaga

SEQ ID NO: 1853008 - RNA, 19 nt, Artificial Sequence
  Description of Artificial Sequence: Synthetic oligonucleotide
  Antisense strand to SEQ ID NO: 1853007
ucuuucaggcauuacuacc

SEQ ID NO: 1853009 - RNA, 19 nt, Artificial Sequence
  Description of Artificial Sequence: Synthetic oligonucleotide
  Sense strand starting at position 3086 of SEQ ID NO: 1564071
guaguaaugccugaaagaa

SEQ ID NO: 1853010 - RNA, 19 nt, Artificial Sequence
  Description of Artificial Sequence: Synthetic oligonucleotide
  Antisense strand to SEQ ID NO: 1853009
uucuuucaggcauuacuac

SEQ ID NO: 1853011 - RNA, 19 nt, Artificial Sequence
  Description of Artificial Sequence: Synthetic oligonucleotide
  Sense strand starting at position 3221 of SEQ ID NO: 1564071
agcuaugcuggcuuuguua

SEQ ID NO: 1853012 - RNA, 19 nt, Artificial Sequence
  Description of Artificial Sequence: Synthetic oligonucleotide
  Antisense strand to SEQ ID NO: 1853011
uaacaaagccagcauagcu

SEQ ID NO: 1853013 - RNA, 19 nt, Artificial Sequence
  Description of Artificial Sequence: Synthetic oligonucleotide
  Sense strand starting at position 3282 of SEQ ID NO: 1564071
uuaccuuugcuggaauauu

SEQ ID NO: 1853014 - RNA, 19 nt, Artificial Sequence
  Description of Artificial Sequence: Synthetic oligonucleotide
  Antisense strand to SEQ ID NO: 1853013
aauauuccagcaaagguaa

SEQ ID NO: 1853015 - RNA, 19 nt, Artificial Sequence
  Description of Artificial Sequence: Synthetic oligonucleotide
  Sense strand starting at position 3531 of SEQ ID NO: 1564071
acccuuucugagcaguaaa

SEQ ID NO: 1853016 - RNA, 19 nt, Artificial Sequence
  Description of Artificial Sequence: Synthetic oligonucleotide
  Antisense strand to SEQ ID NO: 1853015
uuuacugcucagaaagggu

SEQ ID NO: 1853017 - RNA, 19 nt, Artificial Sequence
  Description of Artificial Sequence: Synthetic oligonucleotide
  Sense strand starting at position 3628 of SEQ ID NO: 1564071
caccaugauggauguuaua

SEQ ID NO: 1853018 - RNA, 19 nt, Artificial Sequence
  Description of Artificial Sequence: Synthetic oligonucleotide
  Antisense strand to SEQ ID NO: 1853017
uauaacauccaucauggug

SEQ ID NO: 1853019 - RNA, 19 nt, Artificial Sequence
  Description of Artificial Sequence: Synthetic oligonucleotide
  Sense strand starting at position 3642 of SEQ ID NO: 1564071
uuauaucagccuggaauau

SEQ ID NO: 1853020 - RNA, 19 nt, Artificial Sequence
  Description of Artificial Sequence: Synthetic oligonucleotide
  Antisense strand to SEQ ID NO: 1853019
auauuccaggcugauauaa

SEQ ID NO: 1853021 - RNA, 19 nt, Artificial Sequence
  Description of Artificial Sequence: Synthetic oligonucleotide
  Sense strand starting at position 3707 of SEQ ID NO: 1564071
ugcccaacucccuagaaga

SEQ ID NO: 1853022 - RNA, 19 nt, Artificial Sequence
  Description of Artificial Sequence: Synthetic oligonucleotide
  Antisense strand to SEQ ID NO: 1853021
ucuucuagggaguugggca

SEQ ID NO: 1853023 - RNA, 19 nt, Artificial Sequence
  Description of Artificial Sequence: Synthetic oligonucleotide
  Sense strand starting at position 3880 of SEQ ID NO: 1564071
ugauauucugauuauggca

SEQ ID NO: 1853024 - RNA, 19 nt, Artificial Sequence
  Description of Artificial Sequence: Synthetic oligonucleotide
  Antisense strand to SEQ ID NO: 1853023
ugccauaaucagaauauca

SEQ ID NO: 1853025 - RNA, 19 nt, Artificial Sequence
  Description of Artificial Sequence: Synthetic oligonucleotide
  Sense strand starting at position 288 of SEQ ID NO: 1564072
aggaacauuucccauaugu

SEQ ID NO: 1853026 - RNA, 19 nt, Artificial Sequence
  Description of Artificial Sequence: Synthetic oligonucleotide
  Antisense strand to SEQ ID NO: 1853025
acauaugggaaauguuccu

SEQ ID NO: 1853027 - RNA, 19 nt, Artificial Sequence
  Description of Artificial Sequence: Synthetic oligonucleotide
  Sense strand starting at position 407 of SEQ ID NO: 1564072
gcaugaaaguacuuuguaa

SEQ ID NO: 1853028 - RNA, 19 nt, Artificial Sequence
  Description of Artificial Sequence: Synthetic oligonucleotide
  Antisense strand to SEQ ID NO: 1853027
uuacaaaguacuuucaugc

SEQ ID NO: 1853029 - RNA, 19 nt, Artificial Sequence
  Description of Artificial Sequence: Synthetic oligonucleotide
  Sense strand starting at position 434 of SEQ ID NO: 1564072
gugauacagaaaugugaua

SEQ ID NO: 1853030 - RNA, 19 nt, Artificial Sequence
  Description of Artificial Sequence: Synthetic oligonucleotide
  Antisense strand to SEQ ID NO: 1853029
uaucacauuucuguaucac

SEQ ID NO: 1853031 - RNA, 19 nt, Artificial Sequence
  Description of Artificial Sequence: Synthetic oligonucleotide
  Sense strand starting at position 493 of SEQ ID NO: 1564072
gguuacuucgagcaaauua

SEQ ID NO: 1853032 - RNA, 19 nt, Artificial Sequence
  Description of Artificial Sequence: Synthetic oligonucleotide
  Antisense strand to SEQ ID NO: 1853031
uaauuugcucgaaguaacc

SEQ ID NO: 1853033 - RNA, 19 nt, Artificial Sequence
  Description of Artificial Sequence: Synthetic oligonucleotide
  Sense strand starting at position 549 of SEQ ID NO: 1564072
augccaaaguguucugaaa

SEQ ID NO: 1853034 - RNA, 19 nt, Artificial Sequence
  Description of Artificial Sequence: Synthetic oligonucleotide
  Antisense strand to SEQ ID NO: 1853033
uuucagaacacuuuggcau

SEQ ID NO: 1853035 - RNA, 19 nt, Artificial Sequence
  Description of Artificial Sequence: Synthetic oligonucleotide
  Sense strand starting at position 583 of SEQ ID NO: 1564072
augguuauccuagggcuaa

SEQ ID NO: 1853036 - RNA, 19 nt, Artificial Sequence
  Description of Artificial Sequence: Synthetic oligonucleotide
  Antisense strand to SEQ ID NO: 1853035
uuagcccuaggauaaccau

SEQ ID NO: 1853037 - RNA, 19 nt, Artificial Sequence
  Description of Artificial Sequence: Synthetic oligonucleotide
  Sense strand starting at position 848 of SEQ ID NO: 1564072
aauucuuucgcuggauuga

SEQ ID NO: 1853038 - RNA, 19 nt, Artificial Sequence
  Description of Artificial Sequence: Synthetic oligonucleotide
  Antisense strand to SEQ ID NO: 1853037
ucaauccagcgaaagaauu

SEQ ID NO: 1853039 - RNA, 19 nt, Artificial Sequence
  Description of Artificial Sequence: Synthetic oligonucleotide
  Sense strand starting at position 849 of SEQ ID NO: 1564072
auucuuucgcuggauugaa

SEQ ID NO: 1853040 - RNA, 19 nt, Artificial Sequence
  Description of Artificial Sequence: Synthetic oligonucleotide
  Antisense strand to SEQ ID NO: 1853039
uucaauccagcgaaagaau

SEQ ID NO: 1853041 - RNA, 19 nt, Artificial Sequence
  Description of Artificial Sequence: Synthetic oligonucleotide
  Sense strand starting at position 931 of SEQ ID NO: 1564072
acagcucucgcagaaauaa

SEQ ID NO: 1853042 - RNA, 19 nt, Artificial Sequence
  Description of Artificial Sequence: Synthetic oligonucleotide
  Antisense strand to SEQ ID NO: 1853041
uuauuucugcgagagcugu

SEQ ID NO: 1853043 - RNA, 19 nt, Artificial Sequence
  Description of Artificial Sequence: Synthetic oligonucleotide
  Sense strand starting at position 978 of SEQ ID NO: 1564072
ggaagcucuggcgacagau

SEQ ID NO: 1853044 - RNA, 19 nt, Artificial Sequence
  Description of Artificial Sequence: Synthetic oligonucleotide
  Antisense strand to SEQ ID NO: 1853043
aucugucgccagagcuucc

SEQ ID NO: 1853045 - RNA, 19 nt, Artificial Sequence
  Description of Artificial Sequence: Synthetic oligonucleotide
  Sense strand starting at position 997 of SEQ ID NO: 1564072
gaaacacuugaaugguauu

SEQ ID NO: 1853046 - RNA, 19 nt, Artificial Sequence
  Description of Artificial Sequence: Synthetic oligonucleotide
  Antisense strand to SEQ ID NO: 1853045
aauaccauucaaguguuuc

SEQ ID NO: 1853047 - RNA, 19 nt, Artificial Sequence
  Description of Artificial Sequence: Synthetic oligonucleotide
  Sense strand starting at position 1100 of SEQ ID NO: 1564072
ccaugcuuguaaucugaac

SEQ ID NO: 1853048 - RNA, 19 nt, Artificial Sequence
  Description of Artificial Sequence: Synthetic oligonucleotide
  Antisense strand to SEQ ID NO: 1853047
guucagauuacaagcaugg

SEQ ID NO: 1853049 - RNA, 19 nt, Artificial Sequence
  Description of Artificial Sequence: Synthetic oligonucleotide
  Sense strand starting at position 1106 of SEQ ID NO: 1564072
uuguaaucugaacggucau

SEQ ID NO: 1853050 - RNA, 19 nt, Artificial Sequence
  Description of Artificial Sequence: Synthetic oligonucleotide
  Antisense strand to SEQ ID NO: 1853049
augaccguucagauuacaa

SEQ ID NO: 1853051 - RNA, 19 nt, Artificial Sequence
  Description of Artificial Sequence: Synthetic oligonucleotide
  Sense strand starting at position 1167 of SEQ ID NO: 1564072
cuuuguaguccuuacagau

SEQ ID NO: 1853052 - RNA, 19 nt, Artificial Sequence
  Description of Artificial Sequence: Synthetic oligonucleotide
  Antisense strand to SEQ ID NO: 1853051
aucuguaaggacuacaaag

SEQ ID NO: 1853053 - RNA, 19 nt, Artificial Sequence
  Description of Artificial Sequence: Synthetic oligonucleotide
  Sense strand starting at position 1266 of SEQ ID NO: 1564072
aggcauugcccauagacgu

SEQ ID NO: 1853054 - RNA, 19 nt, Artificial Sequence
  Description of Artificial Sequence: Synthetic oligonucleotide
  Antisense strand to SEQ ID NO: 1853053
acgucuaugggcaaugccu

SEQ ID NO: 1853055 - RNA, 19 nt, Artificial Sequence
  Description of Artificial Sequence: Synthetic oligonucleotide
  Sense strand starting at position 1304 of SEQ ID NO: 1564072
uucugauaauuguugauuc

SEQ ID NO: 1853056 - RNA, 19 nt, Artificial Sequence
  Description of Artificial Sequence: Synthetic oligonucleotide
  Antisense strand to SEQ ID NO: 1853055
gaaucaacaauuaucagaa

SEQ ID NO: 1853057 - RNA, 19 nt, Artificial Sequence
  Description of Artificial Sequence: Synthetic oligonucleotide
  Sense strand starting at position 1573 of SEQ ID NO: 1564072
acgggucuucuguaucauu

SEQ ID NO: 1853058 - RNA, 19 nt, Artificial Sequence
  Description of Artificial Sequence: Synthetic oligonucleotide
  Antisense strand to SEQ ID NO: 1853057
aaugauacagaagacccgu

SEQ ID NO: 1853059 - RNA, 19 nt, Artificial Sequence
  Description of Artificial Sequence: Synthetic oligonucleotide
  Sense strand starting at position 1578 of SEQ ID NO: 1564072
ucuucuguaucauuggauu

SEQ ID NO: 1853060 - RNA, 19 nt, Artificial Sequence
  Description of Artificial Sequence: Synthetic oligonucleotide
  Antisense strand to SEQ ID NO: 1853059
aauccaaugauacagaaga

SEQ ID NO: 1853061 - RNA, 19 nt, Artificial Sequence
  Description of Artificial Sequence: Synthetic oligonucleotide
  Sense strand starting at position 1584 of SEQ ID NO: 1564072
guaucauuggauugugggu

SEQ ID NO: 1853062 - RNA, 19 nt, Artificial Sequence
  Description of Artificial Sequence: Synthetic oligonucleotide
  Antisense strand to SEQ ID NO: 1853061
acccacaauccaaugauac

SEQ ID NO: 1853063 - RNA, 19 nt, Artificial Sequence
  Description of Artificial Sequence: Synthetic oligonucleotide
  Sense strand starting at position 1754 of SEQ ID NO: 1564072
accgccuuuccuggagaaa

SEQ ID NO: 1853064 - RNA, 19 nt, Artificial Sequence
  Description of Artificial Sequence: Synthetic oligonucleotide
  Antisense strand to SEQ ID NO: 1853063
uuucuccaggaaaggcggu

SEQ ID NO: 1853065 - RNA, 19 nt, Artificial Sequence
  Description of Artificial Sequence: Synthetic oligonucleotide
  Sense strand starting at position 1755 of SEQ ID NO: 1564072
ccgccuuuccuggagaaag

SEQ ID NO: 1853066 - RNA, 19 nt, Artificial Sequence
  Description of Artificial Sequence: Synthetic oligonucleotide
  Antisense strand to SEQ ID NO: 1853065
cuuucuccaggaaaggcgg

SEQ ID NO: 1853067 - RNA, 19 nt, Artificial Sequence
  Description of Artificial Sequence: Synthetic oligonucleotide
  Sense strand starting at position 1757 of SEQ ID NO: 1564072
gccuuuccuggagaaagcu

SEQ ID NO: 1853068 - RNA, 19 nt, Artificial Sequence
  Description of Artificial Sequence: Synthetic oligonucleotide
  Antisense strand to SEQ ID NO: 1853067
agcuuucuccaggaaaggc

SEQ ID NO: 1853069 - RNA, 19 nt, Artificial Sequence
  Description of Artificial Sequence: Synthetic oligonucleotide
  Sense strand starting at position 1791 of SEQ ID NO: 1564072
aguccugagcuccgaaaca

SEQ ID NO: 1853070 - RNA, 19 nt, Artificial Sequence
  Description of Artificial Sequence: Synthetic oligonucleotide
  Antisense strand to SEQ ID NO: 1853069
uguuucggagcucaggacu

SEQ ID NO: 1853071 - RNA, 19 nt, Artificial Sequence
  Description of Artificial Sequence: Synthetic oligonucleotide
  Sense strand starting at position 2373 of SEQ ID NO: 1564072
cguuucuggguguaucaga

SEQ ID NO: 1853072 - RNA, 19 nt, Artificial Sequence
  Description of Artificial Sequence: Synthetic oligonucleotide
  Antisense strand to SEQ ID NO: 1853071
ucugauacacccagaaacg

SEQ ID NO: 1853073 - RNA, 19 nt, Artificial Sequence
  Description of Artificial Sequence: Synthetic oligonucleotide
  Sense strand starting at position 2457 of SEQ ID NO: 1564072
cugagaaucgcucacugca

SEQ ID NO: 1853074 - RNA, 19 nt, Artificial Sequence
  Description of Artificial Sequence: Synthetic oligonucleotide
  Antisense strand to SEQ ID NO: 1853073
ugcagugagcgauucucag

SEQ ID NO: 1853075 - RNA, 19 nt, Artificial Sequence
  Description of Artificial Sequence: Synthetic oligonucleotide
  Sense strand starting at position 2914 of SEQ ID NO: 1564072
acuucugaccucgguugau

SEQ ID NO: 1853076 - RNA, 19 nt, Artificial Sequence
  Description of Artificial Sequence: Synthetic oligonucleotide
  Antisense strand to SEQ ID NO: 1853075
aucaaccgaggucagaagu

SEQ ID NO: 1853077 - RNA, 19 nt, Artificial Sequence
  Description of Artificial Sequence: Synthetic oligonucleotide
  Sense strand starting at position 3021 of SEQ ID NO: 1564072
cuugcaagccuuuaggaau

SEQ ID NO: 1853078 - RNA, 19 nt, Artificial Sequence
  Description of Artificial Sequence: Synthetic oligonucleotide
  Antisense strand to SEQ ID NO: 1853077
auuccuaaaggcuugcaag

SEQ ID NO: 1853079 - RNA, 19 nt, Artificial Sequence
  Description of Artificial Sequence: Synthetic oligonucleotide
  Sense strand starting at position 3302 of SEQ ID NO: 1564072
aaaguuuaguggucugauu

SEQ ID NO: 1853080 - RNA, 19 nt, Artificial Sequence
  Description of Artificial Sequence: Synthetic oligonucleotide
  Antisense strand to SEQ ID NO: 1853079
aaucagaccacuaaacuuu

SEQ ID NO: 1853081 - RNA, 19 nt, Artificial Sequence
  Description of Artificial Sequence: Synthetic oligonucleotide
  Sense strand starting at position 3325 of SEQ ID NO: 1564072
uuaggagauucuguucuuu

SEQ ID NO: 1853082 - RNA, 19 nt, Artificial Sequence
  Description of Artificial Sequence: Synthetic oligonucleotide
  Antisense strand to SEQ ID NO: 1853081
aaagaacagaaucuccuaa

SEQ ID NO: 1853083 - RNA, 19 nt, Artificial Sequence
  Description of Artificial Sequence: Synthetic oligonucleotide
  Sense strand starting at position 3327 of SEQ ID NO: 1564072
aggagauucuguucuuugu

SEQ ID NO: 1853084 - RNA, 19 nt, Artificial Sequence
  Description of Artificial Sequence: Synthetic oligonucleotide
  Antisense strand to SEQ ID NO: 1853083
acaaagaacagaaucuccu

SEQ ID NO: 1853085 - RNA, 19 nt, Artificial Sequence
  Description of Artificial Sequence: Synthetic oligonucleotide
  Sense strand starting at position 3329 of SEQ ID NO: 1564072
gagauucuguucuuuguac

SEQ ID NO: 1853086 - RNA, 19 nt, Artificial Sequence
  Description of Artificial Sequence: Synthetic oligonucleotide
  Antisense strand to SEQ ID NO: 1853085
guacaaagaacagaaucuc

SEQ ID NO: 1853087 - RNA, 19 nt, Artificial Sequence
  Description of Artificial Sequence: Synthetic oligonucleotide
  Sense strand starting at position 3366 of SEQ ID NO: 1564072
uuuaaacgaugauuccauu

SEQ ID NO: 1853088 - RNA, 19 nt, Artificial Sequence
  Description of Artificial Sequence: Synthetic oligonucleotide
  Antisense strand to SEQ ID NO: 1853087
aauggaaucaucguuuaaa

SEQ ID NO: 1853089 - RNA, 19 nt, Artificial Sequence
  Description of Artificial Sequence: Synthetic oligonucleotide
  Sense strand starting at position 3460 of SEQ ID NO: 1564072
ugucucuuauuugaaggaa

SEQ ID NO: 1853090 - RNA, 19 nt, Artificial Sequence
  Description of Artificial Sequence: Synthetic oligonucleotide
  Antisense strand to SEQ ID NO: 1853089
uuccuucaaauaagagaca

SEQ ID NO: 1853091 - RNA, 19 nt, Artificial Sequence
  Description of Artificial Sequence: Synthetic oligonucleotide
  Sense strand starting at position 3553 of SEQ ID NO: 1564072
cuaugugucaaagguaaga

SEQ ID NO: 1853092 - RNA, 19 nt, Artificial Sequence
  Description of Artificial Sequence: Synthetic oligonucleotide
  Antisense strand to SEQ ID NO: 1853091
ucuuaccuuugacacauag

SEQ ID NO: 1853093 - RNA, 19 nt, Artificial Sequence
  Description of Artificial Sequence: Synthetic oligonucleotide
  Sense strand starting at position 3555 of SEQ ID NO: 1564072
augugucaaagguaagaug

SEQ ID NO: 1853094 - RNA, 19 nt, Artificial Sequence
  Description of Artificial Sequence: Synthetic oligonucleotide
  Antisense strand to SEQ ID NO: 1853093
caucuuaccuuugacacau

SEQ ID NO: 1853095 - RNA, 19 nt, Artificial Sequence
  Description of Artificial Sequence: Synthetic oligonucleotide
  Sense strand starting at position 3631 of SEQ ID NO: 1564072
agggucauacagugcuaau

SEQ ID NO: 1853096 - RNA, 19 nt, Artificial Sequence
  Description of Artificial Sequence: Synthetic oligonucleotide
  Antisense strand to SEQ ID NO: 1853095
auuagcacuguaugacccu

SEQ ID NO: 1853097 - RNA, 19 nt, Artificial Sequence
  Description of Artificial Sequence: Synthetic oligonucleotide
  Sense strand starting at position 3811 of SEQ ID NO: 1564072
gagcuaugguucuuuauau

SEQ ID NO: 1853098 - RNA, 19 nt, Artificial Sequence
  Description of Artificial Sequence: Synthetic oligonucleotide
  Antisense strand to SEQ ID NO: 1853097
auauaaagaaccauagcuc

SEQ ID NO: 1853099 - RNA, 19 nt, Artificial Sequence
  Description of Artificial Sequence: Synthetic oligonucleotide
  Sense strand starting at position 3812 of SEQ ID NO: 1564072
agcuaugguucuuuauaua

SEQ ID NO: 1853100 - RNA, 19 nt, Artificial Sequence
  Description of Artificial Sequence: Synthetic oligonucleotide
  Antisense strand to SEQ ID NO: 1853099
uauauaaagaaccauagcu

SEQ ID NO: 1853101 - RNA, 19 nt, Artificial Sequence
  Description of Artificial Sequence: Synthetic oligonucleotide
  Sense strand starting at position 3955 of SEQ ID NO: 1564072
uuuguuguucuggauucua

SEQ ID NO: 1853102 - RNA, 19 nt, Artificial Sequence
  Description of Artificial Sequence: Synthetic oligonucleotide
  Antisense strand to SEQ ID NO: 1853101
uagaauccagaacaacaaa

SEQ ID NO: 1853103 - RNA, 19 nt, Artificial Sequence
  Description of Artificial Sequence: Synthetic oligonucleotide
  Sense strand starting at position 3979 of SEQ ID NO: 1564072
uuaugucucccguacaaag

SEQ ID NO: 1853104 - RNA, 19 nt, Artificial Sequence
  Description of Artificial Sequence: Synthetic oligonucleotide
  Antisense strand to SEQ ID NO: 1853103
cuuuguacgggagacauaa

SEQ ID NO: 1853105 - RNA, 19 nt, Artificial Sequence
  Description of Artificial Sequence: Synthetic oligonucleotide
  Sense strand starting at position 15 of SEQ ID NO: 1564073
gaauaaguagaauguguuc

SEQ ID NO: 1853106 - RNA, 19 nt, Artificial Sequence
  Description of Artificial Sequence: Synthetic oligonucleotide
  Antisense strand to SEQ ID NO: 1853105
gaacacauucuacuuauuc

SEQ ID NO: 1853107 - RNA, 19 nt, Artificial Sequence
  Description of Artificial Sequence: Synthetic oligonucleotide
  Sense strand starting at position 84 of SEQ ID NO: 1564073
caaguugguuccuuagaac

SEQ ID NO: 1853108 - RNA, 19 nt, Artificial Sequence
  Description of Artificial Sequence: Synthetic oligonucleotide
  Antisense strand to SEQ ID NO: 1853107
guucuaaggaaccaacuug

SEQ ID NO: 1853109 - RNA, 19 nt, Artificial Sequence
  Description of Artificial Sequence: Synthetic oligonucleotide
  Sense strand starting at position 154 of SEQ ID NO: 1564073
aaaugaaagucacucguaa

SEQ ID NO: 1853110 - RNA, 19 nt, Artificial Sequence
  Description of Artificial Sequence: Synthetic oligonucleotide
  Antisense strand to SEQ ID NO: 1853109
uuacgagugacuuucauuu

SEQ ID NO: 1853111 - RNA, 19 nt, Artificial Sequence
  Description of Artificial Sequence: Synthetic oligonucleotide
  Sense strand starting at position 240 of SEQ ID NO: 1564073
gucugagcucuugcagugu

SEQ ID NO: 1853112 - RNA, 19 nt, Artificial Sequence
  Description of Artificial Sequence: Synthetic oligonucleotide
  Antisense strand to SEQ ID NO: 1853111
acacugcaagagcucagac

SEQ ID NO: 1853113 - RNA, 19 nt, Artificial Sequence
  Description of Artificial Sequence: Synthetic oligonucleotide
  Sense strand starting at position 385 of SEQ ID NO: 1564073
aguaccaaacagugauauu

SEQ ID NO: 1853114 - RNA, 19 nt, Artificial Sequence
  Description of Artificial Sequence: Synthetic oligonucleotide
  Antisense strand to SEQ ID NO: 1853113
aauaucacuguuugguacu

SEQ ID NO: 1853115 - RNA, 19 nt, Artificial Sequence
  Description of Artificial Sequence: Synthetic oligonucleotide
  Sense strand starting at position 397 of SEQ ID NO: 1564073
ugauauuguauguguacaa

SEQ ID NO: 1853116 - RNA, 19 nt, Artificial Sequence
  Description of Artificial Sequence: Synthetic oligonucleotide
  Antisense strand to SEQ ID NO: 1853115
uuguacacauacaauauca

SEQ ID NO: 1853117 - RNA, 19 nt, Artificial Sequence
  Description of Artificial Sequence: Synthetic oligonucleotide
  Sense strand starting at position 398 of SEQ ID NO: 1564073
gauauuguauguguacaac

SEQ ID NO: 1853118 - RNA, 19 nt, Artificial Sequence
  Description of Artificial Sequence: Synthetic oligonucleotide
  Antisense strand to SEQ ID NO: 1853117
guuguacacauacaauauc

SEQ ID NO: 1853119 - RNA, 19 nt, Artificial Sequence
  Description of Artificial Sequence: Synthetic oligonucleotide
  Sense strand starting at position 805 of SEQ ID NO: 1564073
aguaaauauuucuaaggga

SEQ ID NO: 1853120 - RNA, 19 nt, Artificial Sequence
  Description of Artificial Sequence: Synthetic oligonucleotide
  Antisense strand to SEQ ID NO: 1853119
ucccuuagaaauauuuacu

SEQ ID NO: 1853121 - RNA, 19 nt, Artificial Sequence
  Description of Artificial Sequence: Synthetic oligonucleotide
  Sense strand starting at position 909 of SEQ ID NO: 1564073
guuuguaucagucccgcaa

SEQ ID NO: 1853122 - RNA, 19 nt, Artificial Sequence
  Description of Artificial Sequence: Synthetic oligonucleotide
  Antisense strand to SEQ ID NO: 1853121
uugcgggacugauacaaac

SEQ ID NO: 1853123 - RNA, 19 nt, Artificial Sequence
  Description of Artificial Sequence: Synthetic oligonucleotide
  Sense strand starting at position 1132 of SEQ ID NO: 1564073
gagguaaaggcacaguuua

SEQ ID NO: 1853124 - RNA, 19 nt, Artificial Sequence
  Description of Artificial Sequence: Synthetic oligonucleotide
  Antisense strand to SEQ ID NO: 1853123
uaaacugugccuuuaccuc

SEQ ID NO: 1853125 - RNA, 19 nt, Artificial Sequence
  Description of Artificial Sequence: Synthetic oligonucleotide
  Sense strand starting at position 1165 of SEQ ID NO: 1564073
acgauauaaugcccacuga

SEQ ID NO: 1853126 - RNA, 19 nt, Artificial Sequence
  Description of Artificial Sequence: Synthetic oligonucleotide
  Antisense strand to SEQ ID NO: 1853125
ucagugggcauuauaucgu

SEQ ID NO: 1853127 - RNA, 19 nt, Artificial Sequence
  Description of Artificial Sequence: Synthetic oligonucleotide
  Sense strand starting at position 1296 of SEQ ID NO: 1564073
aguugugccaggcaagaaa

SEQ ID NO: 1853128 - RNA, 19 nt, Artificial Sequence
  Description of Artificial Sequence: Synthetic oligonucleotide
  Antisense strand to SEQ ID NO: 1853127
uuucuugccuggcacaacu

SEQ ID NO: 1853129 - RNA, 19 nt, Artificial Sequence
  Description of Artificial Sequence: Synthetic oligonucleotide
  Sense strand starting at position 1359 of SEQ ID NO: 1564073
ccaguucuagauggaaaua

SEQ ID NO: 1853130 - RNA, 19 nt, Artificial Sequence
  Description of Artificial Sequence: Synthetic oligonucleotide
  Antisense strand to SEQ ID NO: 1853129
uauuuccaucuagaacugg

SEQ ID NO: 1853131 - RNA, 19 nt, Artificial Sequence
  Description of Artificial Sequence: Synthetic oligonucleotide
  Sense strand starting at position 2135 of SEQ ID NO: 1564073
gaugacuuccugcaguaca

SEQ ID NO: 1853132 - RNA, 19 nt, Artificial Sequence
  Description of Artificial Sequence: Synthetic oligonucleotide
  Antisense strand to SEQ ID NO: 1853131
uguacugcaggaagucauc

SEQ ID NO: 1853133 - RNA, 19 nt, Artificial Sequence
  Description of Artificial Sequence: Synthetic oligonucleotide
  Sense strand starting at position 2231 of SEQ ID NO: 1564073
gggaaucccacgugacaag

SEQ ID NO: 1853134 - RNA, 19 nt, Artificial Sequence
  Description of Artificial Sequence: Synthetic oligonucleotide
  Antisense strand to SEQ ID NO: 1853133
cuugucacgugggauuccc

SEQ ID NO: 1853135 - RNA, 19 nt, Artificial Sequence
  Description of Artificial Sequence: Synthetic oligonucleotide
  Sense strand starting at position 2297 of SEQ ID NO: 1564073
ccaagcccugcugaaauau

SEQ ID NO: 1853136 - RNA, 19 nt, Artificial Sequence
  Description of Artificial Sequence: Synthetic oligonucleotide
  Antisense strand to SEQ ID NO: 1853135
auauuucagcagggcuugg

SEQ ID NO: 1853137 - RNA, 19 nt, Artificial Sequence
  Description of Artificial Sequence: Synthetic oligonucleotide
  Sense strand starting at position 2342 of SEQ ID NO: 1564073
aguuaagauccaugaguuu

SEQ ID NO: 1853138 - RNA, 19 nt, Artificial Sequence
  Description of Artificial Sequence: Synthetic oligonucleotide
  Antisense strand to SEQ ID NO: 1853137
aaacucauggaucuuaacu

SEQ ID NO: 1853139 - RNA, 19 nt, Artificial Sequence
  Description of Artificial Sequence: Synthetic oligonucleotide
  Sense strand starting at position 2363 of SEQ ID NO: 1564073
uugcuauggcauuaguaga

SEQ ID NO: 1853140 - RNA, 19 nt, Artificial Sequence
  Description of Artificial Sequence: Synthetic oligonucleotide
  Antisense strand to SEQ ID NO: 1853139
ucuacuaaugccauagcaa

SEQ ID NO: 1853141 - RNA, 19 nt, Artificial Sequence
  Description of Artificial Sequence: Synthetic oligonucleotide
  Sense strand starting at position 2497 of SEQ ID NO: 1564073
agggauauccucuguuacc

SEQ ID NO: 1853142 - RNA, 19 nt, Artificial Sequence
  Description of Artificial Sequence: Synthetic oligonucleotide
  Antisense strand to SEQ ID NO: 1853141
gguaacagaggauaucccu

SEQ ID NO: 1853143 - RNA, 19 nt, Artificial Sequence
  Description of Artificial Sequence: Synthetic oligonucleotide
  Sense strand starting at position 2498 of SEQ ID NO: 1564073
gggauauccucuguuaccu

SEQ ID NO: 1853144 - RNA, 19 nt, Artificial Sequence
  Description of Artificial Sequence: Synthetic oligonucleotide
  Antisense strand to SEQ ID NO: 1853143
agguaacagaggauauccc

SEQ ID NO: 1853145 - RNA, 19 nt, Artificial Sequence
  Description of Artificial Sequence: Synthetic oligonucleotide
  Sense strand starting at position 2617 of SEQ ID NO: 1564073
gauugauaccugcaaguug

SEQ ID NO: 1853146 - RNA, 19 nt, Artificial Sequence
  Description of Artificial Sequence: Synthetic oligonucleotide
  Antisense strand to SEQ ID NO: 1853145
caacuugcagguaucaauc

SEQ ID NO: 1853147 - RNA, 19 nt, Artificial Sequence
  Description of Artificial Sequence: Synthetic oligonucleotide
  Sense strand starting at position 2680 of SEQ ID NO: 1564073
aagguuguugaagguuuaa

SEQ ID NO: 1853148 - RNA, 19 nt, Artificial Sequence
  Description of Artificial Sequence: Synthetic oligonucleotide
  Antisense strand to SEQ ID NO: 1853147
uuaaaccuucaacaaccuu

SEQ ID NO: 1853149 - RNA, 19 nt, Artificial Sequence
  Description of Artificial Sequence: Synthetic oligonucleotide
  Sense strand starting at position 2725 of SEQ ID NO: 1564073
uuaguucucccagauguau

SEQ ID NO: 1853150 - RNA, 19 nt, Artificial Sequence
  Description of Artificial Sequence: Synthetic oligonucleotide
  Antisense strand to SEQ ID NO: 1853149
auacaucugggagaacuaa

SEQ ID NO: 1853151 - RNA, 19 nt, Artificial Sequence
  Description of Artificial Sequence: Synthetic oligonucleotide
  Sense strand starting at position 2842 of SEQ ID NO: 1564073
ggucaacuggucugugaaa

SEQ ID NO: 1853152 - RNA, 19 nt, Artificial Sequence
  Description of Artificial Sequence: Synthetic oligonucleotide
  Antisense strand to SEQ ID NO: 1853151
uuucacagaccaguugacc

SEQ ID NO: 1853153 - RNA, 19 nt, Artificial Sequence
  Description of Artificial Sequence: Synthetic oligonucleotide
  Sense strand starting at position 2945 of SEQ ID NO: 1564073
gucugacugggccaagagu

SEQ ID NO: 1853154 - RNA, 19 nt, Artificial Sequence
  Description of Artificial Sequence: Synthetic oligonucleotide
  Antisense strand to SEQ ID NO: 1853153
acucuuggcccagucagac

SEQ ID NO: 1853155 - RNA, 19 nt, Artificial Sequence
  Description of Artificial Sequence: Synthetic oligonucleotide
  Sense strand starting at position 2954 of SEQ ID NO: 1564073
ggccaagagucagcaaacu

SEQ ID NO: 1853156 - RNA, 19 nt, Artificial Sequence
  Description of Artificial Sequence: Synthetic oligonucleotide
  Antisense strand to SEQ ID NO: 1853155
aguuugcugacucuuggcc

SEQ ID NO: 1853157 - RNA, 19 nt, Artificial Sequence
  Description of Artificial Sequence: Synthetic oligonucleotide
  Sense strand starting at position 3051 of SEQ ID NO: 1564073
guccaagucagguaaucug

SEQ ID NO: 1853158 - RNA, 19 nt, Artificial Sequence
  Description of Artificial Sequence: Synthetic oligonucleotide
  Antisense strand to SEQ ID NO: 1853157
cagauuaccugacuuggac

SEQ ID NO: 1853159 - RNA, 19 nt, Artificial Sequence
  Description of Artificial Sequence: Synthetic oligonucleotide
  Sense strand starting at position 3054 of SEQ ID NO: 1564073
caagucagguaaucuggaa

SEQ ID NO: 1853160 - RNA, 19 nt, Artificial Sequence
  Description of Artificial Sequence: Synthetic oligonucleotide
  Antisense strand to SEQ ID NO: 1853159
uuccagauuaccugacuug

SEQ ID NO: 1853161 - RNA, 19 nt, Artificial Sequence
  Description of Artificial Sequence: Synthetic oligonucleotide
  Sense strand starting at position 3074 of SEQ ID NO: 1564073
caggaagguuuacuagagu

SEQ ID NO: 1853162 - RNA, 19 nt, Artificial Sequence
  Description of Artificial Sequence: Synthetic oligonucleotide
  Antisense strand to SEQ ID NO: 1853161
acucuaguaaaccuuccug

SEQ ID NO: 1853163 - RNA, 19 nt, Artificial Sequence
  Description of Artificial Sequence: Synthetic oligonucleotide
  Sense strand starting at position 3135 of SEQ ID NO: 1564073
guugauggagguggucaau

SEQ ID NO: 1853164 - RNA, 19 nt, Artificial Sequence
  Description of Artificial Sequence: Synthetic oligonucleotide
  Antisense strand to SEQ ID NO: 1853163
auugaccaccuccaucaac

SEQ ID NO: 1853165 - RNA, 19 nt, Artificial Sequence
  Description of Artificial Sequence: Synthetic oligonucleotide
  Sense strand starting at position 3141 of SEQ ID NO: 1564073
ggagguggucaaugaagcu

SEQ ID NO: 1853166 - RNA, 19 nt, Artificial Sequence
  Description of Artificial Sequence: Synthetic oligonucleotide
  Antisense strand to SEQ ID NO: 1853165
agcuucauugaccaccucc

SEQ ID NO: 1853167 - RNA, 19 nt, Artificial Sequence
  Description of Artificial Sequence: Synthetic oligonucleotide
  Sense strand starting at position 3196 of SEQ ID NO: 1564073
cugaaauaucaguguugga

SEQ ID NO: 1853168 - RNA, 19 nt, Artificial Sequence
  Description of Artificial Sequence: Synthetic oligonucleotide
  Antisense strand to SEQ ID NO: 1853167
uccaacacugauauuucag

SEQ ID NO: 1853169 - RNA, 19 nt, Artificial Sequence
  Description of Artificial Sequence: Synthetic oligonucleotide
  Sense strand starting at position 3217 of SEQ ID NO: 1564073
ggacccugcaggugagaau

SEQ ID NO: 1853170 - RNA, 19 nt, Artificial Sequence
  Description of Artificial Sequence: Synthetic oligonucleotide
  Antisense strand to SEQ ID NO: 1853169
auucucaccugcagggucc

SEQ ID NO: 1853171 - RNA, 19 nt, Artificial Sequence
  Description of Artificial Sequence: Synthetic oligonucleotide
  Sense strand starting at position 3218 of SEQ ID NO: 1564073
gacccugcaggugagaauu

SEQ ID NO: 1853172 - RNA, 19 nt, Artificial Sequence
  Description of Artificial Sequence: Synthetic oligonucleotide
  Antisense strand to SEQ ID NO: 1853171
aauucucaccugcaggguc

SEQ ID NO: 1853173 - RNA, 19 nt, Artificial Sequence
  Description of Artificial Sequence: Synthetic oligonucleotide
  Sense strand starting at position 3224 of SEQ ID NO: 1564073
gcaggugagaauuaacagu

SEQ ID NO: 1853174 - RNA, 19 nt, Artificial Sequence
  Description of Artificial Sequence: Synthetic oligonucleotide
  Antisense strand to SEQ ID NO: 1853173
acuguuaauucucaccugc

SEQ ID NO: 1853175 - RNA, 19 nt, Artificial Sequence
  Description of Artificial Sequence: Synthetic oligonucleotide
  Sense strand starting at position 3284 of SEQ ID NO: 1564073
gcagaaccugcugaauaaa

SEQ ID NO: 1853176 - RNA, 19 nt, Artificial Sequence
  Description of Artificial Sequence: Synthetic oligonucleotide
  Antisense strand to SEQ ID NO: 1853175
uuuauucagcagguucugc

SEQ ID NO: 1853177 - RNA, 19 nt, Artificial Sequence
  Description of Artificial Sequence: Synthetic oligonucleotide
  Sense strand starting at position 3305 of SEQ ID NO: 1564073
ccagcagauguauaauaca

SEQ ID NO: 1853178 - RNA, 19 nt, Artificial Sequence
  Description of Artificial Sequence: Synthetic oligonucleotide
  Antisense strand to SEQ ID NO: 1853177
uguauuauacaucugcugg

SEQ ID NO: 1853179 - RNA, 19 nt, Artificial Sequence
  Description of Artificial Sequence: Synthetic oligonucleotide
  Sense strand starting at position 3354 of SEQ ID NO: 1564073
ccaauuacucauuagcgua

SEQ ID NO: 1853180 - RNA, 19 nt, Artificial Sequence
  Description of Artificial Sequence: Synthetic oligonucleotide
  Antisense strand to SEQ ID NO: 1853179
uacgcuaaugaguaauugg

SEQ ID NO: 1853181 - RNA, 19 nt, Artificial Sequence
  Description of Artificial Sequence: Synthetic oligonucleotide
  Sense strand starting at position 3475 of SEQ ID NO: 1564073
uggucaauuuaagaguaaa

SEQ ID NO: 1853182 - RNA, 19 nt, Artificial Sequence
  Description of Artificial Sequence: Synthetic oligonucleotide
  Antisense strand to SEQ ID NO: 1853181
uuuacucuuaaauugacca

SEQ ID NO: 1853183 - RNA, 19 nt, Artificial Sequence
  Description of Artificial Sequence: Synthetic oligonucleotide
  Sense strand starting at position 3644 of SEQ ID NO: 1564073
gagauugcugauggacagu

SEQ ID NO: 1853184 - RNA, 19 nt, Artificial Sequence
  Description of Artificial Sequence: Synthetic oligonucleotide
  Antisense strand to SEQ ID NO: 1853183
acuguccaucagcaaucuc

SEQ ID NO: 1853185 - RNA, 19 nt, Artificial Sequence
  Description of Artificial Sequence: Synthetic oligonucleotide
  Sense strand starting at position 159 of SEQ ID NO: 1564074
gaugaugugcuuuacugca

SEQ ID NO: 1853186 - RNA, 19 nt, Artificial Sequence
  Description of Artificial Sequence: Synthetic oligonucleotide
  Antisense strand to SEQ ID NO: 1853185
ugcaguaaagcacaucauc

SEQ ID NO: 1853187 - RNA, 19 nt, Artificial Sequence
  Description of Artificial Sequence: Synthetic oligonucleotide
  Sense strand starting at position 215 of SEQ ID NO: 1564074
ggcaaacuuguggauaagu

SEQ ID NO: 1853188 - RNA, 19 nt, Artificial Sequence
  Description of Artificial Sequence: Synthetic oligonucleotide
  Antisense strand to SEQ ID NO: 1853187
acuuauccacaaguuugcc

SEQ ID NO: 1853189 - RNA, 19 nt, Artificial Sequence
  Description of Artificial Sequence: Synthetic oligonucleotide
  Sense strand starting at position 217 of SEQ ID NO: 1564074
caaacuuguggauaaguuu

SEQ ID NO: 1853190 - RNA, 19 nt, Artificial Sequence
  Description of Artificial Sequence: Synthetic oligonucleotide
  Antisense strand to SEQ ID NO: 1853189
aaacuuauccacaaguuug

SEQ ID NO: 1853191 - RNA, 19 nt, Artificial Sequence
  Description of Artificial Sequence: Synthetic oligonucleotide
  Sense strand starting at position 251 of SEQ ID NO: 1564074
ucauuugacugaugagaga

SEQ ID NO: 1853192 - RNA, 19 nt, Artificial Sequence
  Description of Artificial Sequence: Synthetic oligonucleotide
  Antisense strand to SEQ ID NO: 1853191
ucucucaucagucaaauga

SEQ ID NO: 1853193 - RNA, 19 nt, Artificial Sequence
  Description of Artificial Sequence: Synthetic oligonucleotide
  Sense strand starting at position 288 of SEQ ID NO: 1564074
gaaauaaguugcccaaggu

SEQ ID NO: 1853194 - RNA, 19 nt, Artificial Sequence
  Description of Artificial Sequence: Synthetic oligonucleotide
  Antisense strand to SEQ ID NO: 1853193
accuugggcaacuuauuuc

SEQ ID NO: 1853195 - RNA, 19 nt, Artificial Sequence
  Description of Artificial Sequence: Synthetic oligonucleotide
  Sense strand starting at position 313 of SEQ ID NO: 1564074
acuaguaagcaacagagua

SEQ ID NO: 1853196 - RNA, 19 nt, Artificial Sequence
  Description of Artificial Sequence: Synthetic oligonucleotide
  Antisense strand to SEQ ID NO: 1853195
uacucuguugcuuacuagu

SEQ ID NO: 1853197 - RNA, 19 nt, Artificial Sequence
  Description of Artificial Sequence: Synthetic oligonucleotide
  Sense strand starting at position 321 of SEQ ID NO: 1564074
gcaacagaguaggaauuua

SEQ ID NO: 1853198 - RNA, 19 nt, Artificial Sequence
  Description of Artificial Sequence: Synthetic oligonucleotide
  Antisense strand to SEQ ID NO: 1853197
uaaauuccuacucuguugc

SEQ ID NO: 1853199 - RNA, 19 nt, Artificial Sequence
  Description of Artificial Sequence: Synthetic oligonucleotide
  Sense strand starting at position 441 of SEQ ID NO: 1564074
ggucuaggauaacuauaua

SEQ ID NO: 1853200 - RNA, 19 nt, Artificial Sequence
  Description of Artificial Sequence: Synthetic oligonucleotide
  Antisense strand to SEQ ID NO: 1853199
uauauaguuauccuagacc

SEQ ID NO: 1853201 - RNA, 19 nt, Artificial Sequence
  Description of Artificial Sequence: Synthetic oligonucleotide
  Sense strand starting at position 490 of SEQ ID NO: 1564074
ggaaguuuguggaaggaua

SEQ ID NO: 1853202 - RNA, 19 nt, Artificial Sequence
  Description of Artificial Sequence: Synthetic oligonucleotide
  Antisense strand to SEQ ID NO: 1853201
uauccuuccacaaacuucc

SEQ ID NO: 1853203 - RNA, 19 nt, Artificial Sequence
  Description of Artificial Sequence: Synthetic oligonucleotide
  Sense strand starting at position 492 of SEQ ID NO: 1564074
aaguuuguggaaggauaac

SEQ ID NO: 1853204 - RNA, 19 nt, Artificial Sequence
  Description of Artificial Sequence: Synthetic oligonucleotide
  Antisense strand to SEQ ID NO: 1853203
guuauccuuccacaaacuu

SEQ ID NO: 1853205 - RNA, 19 nt, Artificial Sequence
  Description of Artificial Sequence: Synthetic oligonucleotide
  Sense strand starting at position 867 of SEQ ID NO: 1564074
ccagucugagguuguuaaa

SEQ ID NO: 1853206 - RNA, 19 nt, Artificial Sequence
  Description of Artificial Sequence: Synthetic oligonucleotide
  Antisense strand to SEQ ID NO: 1853205
uuuaacaaccucagacugg

SEQ ID NO: 1853207 - RNA, 19 nt, Artificial Sequence
  Description of Artificial Sequence: Synthetic oligonucleotide
  Sense strand starting at position 897 of SEQ ID NO: 1564074
ggaagagauuuccagguga

SEQ ID NO: 1853208 - RNA, 19 nt, Artificial Sequence
  Description of Artificial Sequence: Synthetic oligonucleotide
  Antisense strand to SEQ ID NO: 1853207
ucaccuggaaaucucuucc

SEQ ID NO: 1853209 - RNA, 19 nt, Artificial Sequence
  Description of Artificial Sequence: Synthetic oligonucleotide
  Sense strand starting at position 912 of SEQ ID NO: 1564074
gugaucuccucggucauuu

SEQ ID NO: 1853210 - RNA, 19 nt, Artificial Sequence
  Description of Artificial Sequence: Synthetic oligonucleotide
  Antisense strand to SEQ ID NO: 1853209
aaaugaccgaggagaucac

SEQ ID NO: 1853211 - RNA, 19 nt, Artificial Sequence
  Description of Artificial Sequence: Synthetic oligonucleotide
  Sense strand starting at position 963 of SEQ ID NO: 1564074
gcuagacacccuugugaaa

SEQ ID NO: 1853212 - RNA, 19 nt, Artificial Sequence
  Description of Artificial Sequence: Synthetic oligonucleotide
  Antisense strand to SEQ ID NO: 1853211
uuucacaagggugucuagc

SEQ ID NO: 1853213 - RNA, 19 nt, Artificial Sequence
  Description of Artificial Sequence: Synthetic oligonucleotide
  Sense strand starting at position 2324 of SEQ ID NO: 1564074
cugaguuguagucaaggga

SEQ ID NO: 1853214 - RNA, 19 nt, Artificial Sequence
  Description of Artificial Sequence: Synthetic oligonucleotide
  Antisense strand to SEQ ID NO: 1853213
ucccuugacuacaacucag

SEQ ID NO: 1853215 - RNA, 19 nt, Artificial Sequence
  Description of Artificial Sequence: Synthetic oligonucleotide
  Sense strand starting at position 2327 of SEQ ID NO: 1564074
aguuguagucaagggaauu

SEQ ID NO: 1853216 - RNA, 19 nt, Artificial Sequence
  Description of Artificial Sequence: Synthetic oligonucleotide
  Antisense strand to SEQ ID NO: 1853215
aauucccuugacuacaacu

SEQ ID NO: 1853217 - RNA, 19 nt, Artificial Sequence
  Description of Artificial Sequence: Synthetic oligonucleotide
  Sense strand starting at position 2488 of SEQ ID NO: 1564074
auguguauuuccucaccgu

SEQ ID NO: 1853218 - RNA, 19 nt, Artificial Sequence
  Description of Artificial Sequence: Synthetic oligonucleotide
  Antisense strand to SEQ ID NO: 1853217
acggugaggaaauacacau

SEQ ID NO: 1853219 - RNA, 19 nt, Artificial Sequence
  Description of Artificial Sequence: Synthetic oligonucleotide
  Sense strand starting at position 2489 of SEQ ID NO: 1564074
uguguauuuccucaccguu

SEQ ID NO: 1853220 - RNA, 19 nt, Artificial Sequence
  Description of Artificial Sequence: Synthetic oligonucleotide
  Antisense strand to SEQ ID NO: 1853219
aacggugaggaaauacaca

SEQ ID NO: 1853221 - RNA, 19 nt, Artificial Sequence
  Description of Artificial Sequence: Synthetic oligonucleotide
  Sense strand starting at position 2640 of SEQ ID NO: 1564074
gcggauguuccugcgcuau

SEQ ID NO: 1853222 - RNA, 19 nt, Artificial Sequence
  Description of Artificial Sequence: Synthetic oligonucleotide
  Antisense strand to SEQ ID NO: 1853221
auagcgcaggaacauccgc

SEQ ID NO: 1853223 - RNA, 19 nt, Artificial Sequence
  Description of Artificial Sequence: Synthetic oligonucleotide
  Sense strand starting at position 2738 of SEQ ID NO: 1564074
gcauuauuacauuacgauu

SEQ ID NO: 1853224 - RNA, 19 nt, Artificial Sequence
  Description of Artificial Sequence: Synthetic oligonucleotide
  Antisense strand to SEQ ID NO: 1853223
aaucguaauguaauaaugc

SEQ ID NO: 1853225 - RNA, 19 nt, Artificial Sequence
  Description of Artificial Sequence: Synthetic oligonucleotide
  Sense strand starting at position 2805 of SEQ ID NO: 1564074
uuuacuagaugguuaacaa

SEQ ID NO: 1853226 - RNA, 19 nt, Artificial Sequence
  Description of Artificial Sequence: Synthetic oligonucleotide
  Antisense strand to SEQ ID NO: 1853225
uuguuaaccaucuaguaaa

SEQ ID NO: 1853227 - RNA, 19 nt, Artificial Sequence
  Description of Artificial Sequence: Synthetic oligonucleotide
  Sense strand starting at position 2820 of SEQ ID NO: 1564074
acaaaugagccuugaauua

SEQ ID NO: 1853228 - RNA, 19 nt, Artificial Sequence
  Description of Artificial Sequence: Synthetic oligonucleotide
  Antisense strand to SEQ ID NO: 1853227
uaauucaaggcucauuugu

SEQ ID NO: 1853229 - RNA, 19 nt, Artificial Sequence
  Description of Artificial Sequence: Synthetic oligonucleotide
  Sense strand starting at position 3004 of SEQ ID NO: 1564074
uuagaacaaugcuuagcaa

SEQ ID NO: 1853230 - RNA, 19 nt, Artificial Sequence
  Description of Artificial Sequence: Synthetic oligonucleotide
  Antisense strand to SEQ ID NO: 1853229
uugcuaagcauuguucuaa

SEQ ID NO: 1853231 - RNA, 19 nt, Artificial Sequence
  Description of Artificial Sequence: Synthetic oligonucleotide
  Sense strand starting at position 3288 of SEQ ID NO: 1564074
auacucuuauggcuugaga

SEQ ID NO: 1853232 - RNA, 19 nt, Artificial Sequence
  Description of Artificial Sequence: Synthetic oligonucleotide
  Antisense strand to SEQ ID NO: 1853231
ucucaagccauaagaguau

SEQ ID NO: 1853233 - RNA, 19 nt, Artificial Sequence
  Description of Artificial Sequence: Synthetic oligonucleotide
  Sense strand starting at position 3290 of SEQ ID NO: 1564074
acucuuauggcuugagaga

SEQ ID NO: 1853234 - RNA, 19 nt, Artificial Sequence
  Description of Artificial Sequence: Synthetic oligonucleotide
  Antisense strand to SEQ ID NO: 1853233
ucucucaagccauaagagu

SEQ ID NO: 1853235 - RNA, 19 nt, Artificial Sequence
  Description of Artificial Sequence: Synthetic oligonucleotide
  Sense strand starting at position 3381 of SEQ ID NO: 1564074
auauacucuuagguauuga

SEQ ID NO: 1853236 - RNA, 19 nt, Artificial Sequence
  Description of Artificial Sequence: Synthetic oligonucleotide
  Antisense strand to SEQ ID NO: 1853235
ucaauaccuaagaguauau

SEQ ID NO: 1853237 - RNA, 19 nt, Artificial Sequence
  Description of Artificial Sequence: Synthetic oligonucleotide
  Sense strand starting at position 3410 of SEQ ID NO: 1564074
agaggucaaaguggguaua

SEQ ID NO: 1853238 - RNA, 19 nt, Artificial Sequence
  Description of Artificial Sequence: Synthetic oligonucleotide
  Antisense strand to SEQ ID NO: 1853237
uauacccacuuugaccucu

SEQ ID NO: 1853239 - RNA, 19 nt, Artificial Sequence
  Description of Artificial Sequence: Synthetic oligonucleotide
  Sense strand starting at position 3413 of SEQ ID NO: 1564074
ggucaaaguggguauauga

SEQ ID NO: 1853240 - RNA, 19 nt, Artificial Sequence
  Description of Artificial Sequence: Synthetic oligonucleotide
  Antisense strand to SEQ ID NO: 1853239
ucauauacccacuuugacc

SEQ ID NO: 1853241 - RNA, 19 nt, Artificial Sequence
  Description of Artificial Sequence: Synthetic oligonucleotide
  Sense strand starting at position 3451 of SEQ ID NO: 1564074
ccaaauacugaugguaauc

SEQ ID NO: 1853242 - RNA, 19 nt, Artificial Sequence
  Description of Artificial Sequence: Synthetic oligonucleotide
  Antisense strand to SEQ ID NO: 1853241
gauuaccaucaguauuugg

SEQ ID NO: 1853243 - RNA, 19 nt, Artificial Sequence
  Description of Artificial Sequence: Synthetic oligonucleotide
  Sense strand starting at position 3456 of SEQ ID NO: 1564074
uacugaugguaaucucuga

SEQ ID NO: 1853244 - RNA, 19 nt, Artificial Sequence
  Description of Artificial Sequence: Synthetic oligonucleotide
  Antisense strand to SEQ ID NO: 1853243
ucagagauuaccaucagua

SEQ ID NO: 1853245 - RNA, 19 nt, Artificial Sequence
  Description of Artificial Sequence: Synthetic oligonucleotide
  Sense strand starting at position 3460 of SEQ ID NO: 1564074
gaugguaaucucugagaua

SEQ ID NO: 1853246 - RNA, 19 nt, Artificial Sequence
  Description of Artificial Sequence: Synthetic oligonucleotide
  Antisense strand to SEQ ID NO: 1853245
uaucucagagauuaccauc

SEQ ID NO: 1853247 - RNA, 19 nt, Artificial Sequence
  Description of Artificial Sequence: Synthetic oligonucleotide
  Sense strand starting at position 3605 of SEQ ID NO: 1564074
acuauauuguacuuugaag

SEQ ID NO: 1853248 - RNA, 19 nt, Artificial Sequence
  Description of Artificial Sequence: Synthetic oligonucleotide
  Antisense strand to SEQ ID NO: 1853247
cuucaaaguacaauauagu

SEQ ID NO: 1853249 - RNA, 19 nt, Artificial Sequence
  Description of Artificial Sequence: Synthetic oligonucleotide
  Sense strand starting at position 3729 of SEQ ID NO: 1564074
guacaucugccauaagcca

SEQ ID NO: 1853250 - RNA, 19 nt, Artificial Sequence
  Description of Artificial Sequence: Synthetic oligonucleotide
  Antisense strand to SEQ ID NO: 1853249
uggcuuauggcagauguac

SEQ ID NO: 1853251 - RNA, 19 nt, Artificial Sequence
  Description of Artificial Sequence: Synthetic oligonucleotide
  Sense strand starting at position 3847 of SEQ ID NO: 1564074
ugcaguauagagugauaua

SEQ ID NO: 1853252 - RNA, 19 nt, Artificial Sequence
  Description of Artificial Sequence: Synthetic oligonucleotide
  Antisense strand to SEQ ID NO: 1853251
uauaucacucuauacugca

SEQ ID NO: 1853253 - RNA, 19 nt, Artificial Sequence
  Description of Artificial Sequence: Synthetic oligonucleotide
  Sense strand starting at position 3848 of SEQ ID NO: 1564074
gcaguauagagugauauau

SEQ ID NO: 1853254 - RNA, 19 nt, Artificial Sequence
  Description of Artificial Sequence: Synthetic oligonucleotide
  Antisense strand to SEQ ID NO: 1853253
auauaucacucuauacugc

SEQ ID NO: 1853255 - RNA, 19 nt, Artificial Sequence
  Description of Artificial Sequence: Synthetic oligonucleotide
  Sense strand starting at position 3858 of SEQ ID NO: 1564074
gugauauauguauauagug

SEQ ID NO: 1853256 - RNA, 19 nt, Artificial Sequence
  Description of Artificial Sequence: Synthetic oligonucleotide
  Antisense strand to SEQ ID NO: 1853255
cacuauauacauauaucac

SEQ ID NO: 1853257 - RNA, 19 nt, Artificial Sequence
  Description of Artificial Sequence: Synthetic oligonucleotide
  Sense strand starting at position 3872 of SEQ ID NO: 1564074
uaguguaagcacuaugaug

SEQ ID NO: 1853258 - RNA, 19 nt, Artificial Sequence
  Description of Artificial Sequence: Synthetic oligonucleotide
  Antisense strand to SEQ ID NO: 1853257
caucauagugcuuacacua

SEQ ID NO: 1853259 - RNA, 19 nt, Artificial Sequence
  Description of Artificial Sequence: Synthetic oligonucleotide
  Sense strand starting at position 3874 of SEQ ID NO: 1564074
guguaagcacuaugaugga

SEQ ID NO: 1853260 - RNA, 19 nt, Artificial Sequence
  Description of Artificial Sequence: Synthetic oligonucleotide
  Antisense strand to SEQ ID NO: 1853259
uccaucauagugcuuacac

SEQ ID NO: 1853261 - RNA, 19 nt, Artificial Sequence
  Description of Artificial Sequence: Synthetic oligonucleotide
  Sense strand starting at position 3890 of SEQ ID NO: 1564074
ggagauaugacaggguagu

SEQ ID NO: 1853262 - RNA, 19 nt, Artificial Sequence
  Description of Artificial Sequence: Synthetic oligonucleotide
  Antisense strand to SEQ ID NO: 1853261
acuacccugucauaucucc

SEQ ID NO: 1853263 - RNA, 19 nt, Artificial Sequence
  Description of Artificial Sequence: Synthetic oligonucleotide
  Sense strand starting at position 3891 of SEQ ID NO: 1564074
gagauaugacaggguagua

SEQ ID NO: 1853264 - RNA, 19 nt, Artificial Sequence
  Description of Artificial Sequence: Synthetic oligonucleotide
  Antisense strand to SEQ ID NO: 1853263
uacuacccugucauaucuc

SEQ ID NO: 1853265 - RNA, 19 nt, Artificial Sequence
  Description of Artificial Sequence: Synthetic oligonucleotide
  Sense strand starting at position 7 of SEQ ID NO: 1564075
aaagguucucuguaagcuc

SEQ ID NO: 1853266 - RNA, 19 nt, Artificial Sequence
  Description of Artificial Sequence: Synthetic oligonucleotide
  Antisense strand to SEQ ID NO: 1853265
gagcuuacagagaaccuuu

SEQ ID NO: 1853267 - RNA, 19 nt, Artificial Sequence
  Description of Artificial Sequence: Synthetic oligonucleotide
  Sense strand starting at position 10 of SEQ ID NO: 1564075
gguucucuguaagcucaaa

SEQ ID NO: 1853268 - RNA, 19 nt, Artificial Sequence
  Description of Artificial Sequence: Synthetic oligonucleotide
  Antisense strand to SEQ ID NO: 1853267
uuugagcuuacagagaacc

SEQ ID NO: 1853269 - RNA, 19 nt, Artificial Sequence
  Description of Artificial Sequence: Synthetic oligonucleotide
  Sense strand starting at position 82 of SEQ ID NO: 1564075
agauguugguguccaaugu

SEQ ID NO: 1853270 - RNA, 19 nt, Artificial Sequence
  Description of Artificial Sequence: Synthetic oligonucleotide
  Antisense strand to SEQ ID NO: 1853269
acauuggacaccaacaucu

SEQ ID NO: 1853271 - RNA, 19 nt, Artificial Sequence
  Description of Artificial Sequence: Synthetic oligonucleotide
  Sense strand starting at position 83 of SEQ ID NO: 1564075
gauguugguguccaauguu

SEQ ID NO: 1853272 - RNA, 19 nt, Artificial Sequence
  Description of Artificial Sequence: Synthetic oligonucleotide
  Antisense strand to SEQ ID NO: 1853271
aacauuggacaccaacauc

SEQ ID NO: 1853273 - RNA, 19 nt, Artificial Sequence
  Description of Artificial Sequence: Synthetic oligonucleotide
  Sense strand starting at position 241 of SEQ ID NO: 1564075
acaauuuauugugaaacga

SEQ ID NO: 1853274 - RNA, 19 nt, Artificial Sequence
  Description of Artificial Sequence: Synthetic oligonucleotide
  Antisense strand to SEQ ID NO: 1853273
ucguuucacaauaaauugu

SEQ ID NO: 1853275 - RNA, 19 nt, Artificial Sequence
  Description of Artificial Sequence: Synthetic oligonucleotide
  Sense strand starting at position 249 of SEQ ID NO: 1564075
uugugaaacgaugagucau

SEQ ID NO: 1853276 - RNA, 19 nt, Artificial Sequence
  Description of Artificial Sequence: Synthetic oligonucleotide
  Antisense strand to SEQ ID NO: 1853275
augacucaucguuucacaa

SEQ ID NO: 1853277 - RNA, 19 nt, Artificial Sequence
  Description of Artificial Sequence: Synthetic oligonucleotide
  Sense strand starting at position 361 of SEQ ID NO: 1564075
ugcaacuuucucuaaggca

SEQ ID NO: 1853278 - RNA, 19 nt, Artificial Sequence
  Description of Artificial Sequence: Synthetic oligonucleotide
  Antisense strand to SEQ ID NO: 1853277
ugccuuagagaaaguugca

SEQ ID NO: 1853279 - RNA, 19 nt, Artificial Sequence
  Description of Artificial Sequence: Synthetic oligonucleotide
  Sense strand starting at position 368 of SEQ ID NO: 1564075
uucucuaaggcagacaauu

SEQ ID NO: 1853280 - RNA, 19 nt, Artificial Sequence
  Description of Artificial Sequence: Synthetic oligonucleotide
  Antisense strand to SEQ ID NO: 1853279
aauugucugccuuagagaa

SEQ ID NO: 1853281 - RNA, 19 nt, Artificial Sequence
  Description of Artificial Sequence: Synthetic oligonucleotide
  Sense strand starting at position 473 of SEQ ID NO: 1564075
ggugcaaucuucuugugaa

SEQ ID NO: 1853282 - RNA, 19 nt, Artificial Sequence
  Description of Artificial Sequence: Synthetic oligonucleotide
  Antisense strand to SEQ ID NO: 1853281
uucacaagaagauugcacc

SEQ ID NO: 1853283 - RNA, 19 nt, Artificial Sequence
  Description of Artificial Sequence: Synthetic oligonucleotide
  Sense strand starting at position 531 of SEQ ID NO: 1564075
gcuacuaucgaguaugacu

SEQ ID NO: 1853284 - RNA, 19 nt, Artificial Sequence
  Description of Artificial Sequence: Synthetic oligonucleotide
  Antisense strand to SEQ ID NO: 1853283
agucauacucgauaguagc

SEQ ID NO: 1853285 - RNA, 19 nt, Artificial Sequence
  Description of Artificial Sequence: Synthetic oligonucleotide
  Sense strand starting at position 533 of SEQ ID NO: 1564075
uacuaucgaguaugacuaa

SEQ ID NO: 1853286 - RNA, 19 nt, Artificial Sequence
  Description of Artificial Sequence: Synthetic oligonucleotide
  Antisense strand to SEQ ID NO: 1853285
uuagucauacucgauagua

SEQ ID NO: 1853287 - RNA, 19 nt, Artificial Sequence
  Description of Artificial Sequence: Synthetic oligonucleotide
  Sense strand starting at position 540 of SEQ ID NO: 1564075
gaguaugacuaacagagaa

SEQ ID NO: 1853288 - RNA, 19 nt, Artificial Sequence
  Description of Artificial Sequence: Synthetic oligonucleotide
  Antisense strand to SEQ ID NO: 1853287
uucucuguuagucauacuc

SEQ ID NO: 1853289 - RNA, 19 nt, Artificial Sequence
  Description of Artificial Sequence: Synthetic oligonucleotide
  Sense strand starting at position 574 of SEQ ID NO: 1564075
acccaagaaggguguguau

SEQ ID NO: 1853290 - RNA, 19 nt, Artificial Sequence
  Description of Artificial Sequence: Synthetic oligonucleotide
  Antisense strand to SEQ ID NO: 1853289
auacacacccuucuugggu

SEQ ID NO: 1853291 - RNA, 19 nt, Artificial Sequence
  Description of Artificial Sequence: Synthetic oligonucleotide
  Sense strand starting at position 576 of SEQ ID NO: 1564075
ccaagaaggguguguauga

SEQ ID NO: 1853292 - RNA, 19 nt, Artificial Sequence
  Description of Artificial Sequence: Synthetic oligonucleotide
  Antisense strand to SEQ ID NO: 1853291
ucauacacacccuucuugg

SEQ ID NO: 1853293 - RNA, 19 nt, Artificial Sequence
  Description of Artificial Sequence: Synthetic oligonucleotide
  Sense strand starting at position 668 of SEQ ID NO: 1564075
accagagcuuaccugaaua

SEQ ID NO: 1853294 - RNA, 19 nt, Artificial Sequence
  Description of Artificial Sequence: Synthetic oligonucleotide
  Antisense strand to SEQ ID NO: 1853293
uauucagguaagcucuggu

SEQ ID NO: 1853295 - RNA, 19 nt, Artificial Sequence
  Description of Artificial Sequence: Synthetic oligonucleotide
  Sense strand starting at position 711 of SEQ ID NO: 1564075
ugcagaaaggucugugauu

SEQ ID NO: 1853296 - RNA, 19 nt, Artificial Sequence
  Description of Artificial Sequence: Synthetic oligonucleotide
  Antisense strand to SEQ ID NO: 1853295
aaucacagaccuuucugca

SEQ ID NO: 1853297 - RNA, 19 nt, Artificial Sequence
  Description of Artificial Sequence: Synthetic oligonucleotide
  Sense strand starting at position 712 of SEQ ID NO: 1564075
gcagaaaggucugugauuc

SEQ ID NO: 1853298 - RNA, 19 nt, Artificial Sequence
  Description of Artificial Sequence: Synthetic oligonucleotide
  Antisense strand to SEQ ID NO: 1853297
gaaucacagaccuuucugc

SEQ ID NO: 1853299 - RNA, 19 nt, Artificial Sequence
  Description of Artificial Sequence: Synthetic oligonucleotide
  Sense strand starting at position 716 of SEQ ID NO: 1564075
aaaggucugugauuccaaa

SEQ ID NO: 1853300 - RNA, 19 nt, Artificial Sequence
  Description of Artificial Sequence: Synthetic oligonucleotide
  Antisense strand to SEQ ID NO: 1853299
uuuggaaucacagaccuuu

SEQ ID NO: 1853301 - RNA, 19 nt, Artificial Sequence
  Description of Artificial Sequence: Synthetic oligonucleotide
  Sense strand starting at position 753 of SEQ ID NO: 1564075
uaaaguaaucuuggguaaa

SEQ ID NO: 1853302 - RNA, 19 nt, Artificial Sequence
  Description of Artificial Sequence: Synthetic oligonucleotide
  Antisense strand to SEQ ID NO: 1853301
uuuacccaagauuacuuua

SEQ ID NO: 1853303 - RNA, 19 nt, Artificial Sequence
  Description of Artificial Sequence: Synthetic oligonucleotide
  Sense strand starting at position 755 of SEQ ID NO: 1564075
aaguaaucuuggguaaaga

SEQ ID NO: 1853304 - RNA, 19 nt, Artificial Sequence
  Description of Artificial Sequence: Synthetic oligonucleotide
  Antisense strand to SEQ ID NO: 1853303
ucuuuacccaagauuacuu

SEQ ID NO: 1853305 - RNA, 19 nt, Artificial Sequence
  Description of Artificial Sequence: Synthetic oligonucleotide
  Sense strand starting at position 769 of SEQ ID NO: 1564075
aaagauauguugccuuaag

SEQ ID NO: 1853306 - RNA, 19 nt, Artificial Sequence
  Description of Artificial Sequence: Synthetic oligonucleotide
  Antisense strand to SEQ ID NO: 1853305
cuuaaggcaacauaucuuu

SEQ ID NO: 1853307 - RNA, 19 nt, Artificial Sequence
  Description of Artificial Sequence: Synthetic oligonucleotide
  Sense strand starting at position 859 of SEQ ID NO: 1564075
ccaucaaaguaguuuagua

SEQ ID NO: 1853308 - RNA, 19 nt, Artificial Sequence
  Description of Artificial Sequence: Synthetic oligonucleotide
  Antisense strand to SEQ ID NO: 1853307
uacuaaacuacuuugaugg

SEQ ID NO: 1853309 - RNA, 19 nt, Artificial Sequence
  Description of Artificial Sequence: Synthetic oligonucleotide
  Sense strand starting at position 863 of SEQ ID NO: 1564075
caaaguaguuuaguaagca

SEQ ID NO: 1853310 - RNA, 19 nt, Artificial Sequence
  Description of Artificial Sequence: Synthetic oligonucleotide
  Antisense strand to SEQ ID NO: 1853309
ugcuuacuaaacuacuuug

SEQ ID NO: 1853311 - RNA, 19 nt, Artificial Sequence
  Description of Artificial Sequence: Synthetic oligonucleotide
  Sense strand starting at position 867 of SEQ ID NO: 1564075
guaguuuaguaagcacaaa

SEQ ID NO: 1853312 - RNA, 19 nt, Artificial Sequence
  Description of Artificial Sequence: Synthetic oligonucleotide
  Antisense strand to SEQ ID NO: 1853311
uuugugcuuacuaaacuac

SEQ ID NO: 1853313 - RNA, 19 nt, Artificial Sequence
  Description of Artificial Sequence: Synthetic oligonucleotide
  Sense strand starting at position 913 of SEQ ID NO: 1564075
uuaugaaauguaugaccga

SEQ ID NO: 1853314 - RNA, 19 nt, Artificial Sequence
  Description of Artificial Sequence: Synthetic oligonucleotide
  Antisense strand to SEQ ID NO: 1853313
ucggucauacauuucauaa

SEQ ID NO: 1853315 - RNA, 19 nt, Artificial Sequence
  Description of Artificial Sequence: Synthetic oligonucleotide
  Sense strand starting at position 974 of SEQ ID NO: 1564075
cguuucuggcuauauacaa

SEQ ID NO: 1853316 - RNA, 19 nt, Artificial Sequence
  Description of Artificial Sequence: Synthetic oligonucleotide
  Antisense strand to SEQ ID NO: 1853315
uuguauauagccagaaacg

SEQ ID NO: 1853317 - RNA, 19 nt, Artificial Sequence
  Description of Artificial Sequence: Synthetic oligonucleotide
  Sense strand starting at position 1044 of SEQ ID NO: 1564075
cugguuuaugccgcuuauu

SEQ ID NO: 1853318 - RNA, 19 nt, Artificial Sequence
  Description of Artificial Sequence: Synthetic oligonucleotide
  Antisense strand to SEQ ID NO: 1853317
aauaagcggcauaaaccag

SEQ ID NO: 1853319 - RNA, 19 nt, Artificial Sequence
  Description of Artificial Sequence: Synthetic oligonucleotide
  Sense strand starting at position 1089 of SEQ ID NO: 1564075
ccaagacugaugcgauauu

SEQ ID NO: 1853320 - RNA, 19 nt, Artificial Sequence
  Description of Artificial Sequence: Synthetic oligonucleotide
  Antisense strand to SEQ ID NO: 1853319
aauaucgcaucagucuugg

SEQ ID NO: 1853321 - RNA, 19 nt, Artificial Sequence
  Description of Artificial Sequence: Synthetic oligonucleotide
  Sense strand starting at position 1110 of SEQ ID NO: 1564075
uuauuucuuucggauaacu

SEQ ID NO: 1853322 - RNA, 19 nt, Artificial Sequence
  Description of Artificial Sequence: Synthetic oligonucleotide
  Antisense strand to SEQ ID NO: 1853321
aguuauccgaaagaaauaa

SEQ ID NO: 1853323 - RNA, 19 nt, Artificial Sequence
  Description of Artificial Sequence: Synthetic oligonucleotide
  Sense strand starting at position 1141 of SEQ ID NO: 1564075
ggaguaaagcuguacauua

SEQ ID NO: 1853324 - RNA, 19 nt, Artificial Sequence
  Description of Artificial Sequence: Synthetic oligonucleotide
  Antisense strand to SEQ ID NO: 1853323
uaauguacagcuuuacucc

SEQ ID NO: 1853325 - RNA, 19 nt, Artificial Sequence
  Description of Artificial Sequence: Synthetic oligonucleotide
  Sense strand starting at position 1143 of SEQ ID NO: 1564075
aguaaagcuguacauuaaa

SEQ ID NO: 1853326 - RNA, 19 nt, Artificial Sequence
  Description of Artificial Sequence: Synthetic oligonucleotide
  Antisense strand to SEQ ID NO: 1853325
uuuaauguacagcuuuacu

SEQ ID NO: 1853327 - RNA, 19 nt, Artificial Sequence
  Description of Artificial Sequence: Synthetic oligonucleotide
  Sense strand starting at position 1279 of SEQ ID NO: 1564075
agaugagaaucggucccau

SEQ ID NO: 1853328 - RNA, 19 nt, Artificial Sequence
  Description of Artificial Sequence: Synthetic oligonucleotide
  Antisense strand to SEQ ID NO: 1853327
augggaccgauucucaucu

SEQ ID NO: 1853329 - RNA, 19 nt, Artificial Sequence
  Description of Artificial Sequence: Synthetic oligonucleotide
  Sense strand starting at position 1343 of SEQ ID NO: 1564075
ugggugaaacgaggugauu

SEQ ID NO: 1853330 - RNA, 19 nt, Artificial Sequence
  Description of Artificial Sequence: Synthetic oligonucleotide
  Antisense strand to SEQ ID NO: 1853329
aaucaccucguuucaccca

SEQ ID NO: 1853331 - RNA, 19 nt, Artificial Sequence
  Description of Artificial Sequence: Synthetic oligonucleotide
  Sense strand starting at position 1396 of SEQ ID NO: 1564075
ucgaaucgaucaucuccaa

SEQ ID NO: 1853332 - RNA, 19 nt, Artificial Sequence
  Description of Artificial Sequence: Synthetic oligonucleotide
  Antisense strand to SEQ ID NO: 1853331
uuggagaugaucgauucga

SEQ ID NO: 1853333 - RNA, 19 nt, Artificial Sequence
  Description of Artificial Sequence: Synthetic oligonucleotide
  Sense strand starting at position 1586 of SEQ ID NO: 1564075
ucagcuauccgcguucaag

SEQ ID NO: 1853334 - RNA, 19 nt, Artificial Sequence
  Description of Artificial Sequence: Synthetic oligonucleotide
  Antisense strand to SEQ ID NO: 1853333
cuugaacgcggauagcuga

SEQ ID NO: 1853335 - RNA, 19 nt, Artificial Sequence
  Description of Artificial Sequence: Synthetic oligonucleotide
  Sense strand starting at position 2310 of SEQ ID NO: 1564075
agagaucucuaguugaaca

SEQ ID NO: 1853336 - RNA, 19 nt, Artificial Sequence
  Description of Artificial Sequence: Synthetic oligonucleotide
  Antisense strand to SEQ ID NO: 1853335
uguucaacuagagaucucu

SEQ ID NO: 1853337 - RNA, 19 nt, Artificial Sequence
  Description of Artificial Sequence: Synthetic oligonucleotide
  Sense strand starting at position 2363 of SEQ ID NO: 1564075
agaaauucccgcugacaca

SEQ ID NO: 1853338 - RNA, 19 nt, Artificial Sequence
  Description of Artificial Sequence: Synthetic oligonucleotide
  Antisense strand to SEQ ID NO: 1853337
ugugucagcgggaauuucu

SEQ ID NO: 1853339 - RNA, 19 nt, Artificial Sequence
  Description of Artificial Sequence: Synthetic oligonucleotide
  Sense strand starting at position 2957 of SEQ ID NO: 1564075
guguauuguuucccuauuu

SEQ ID NO: 1853340 - RNA, 19 nt, Artificial Sequence
  Description of Artificial Sequence: Synthetic oligonucleotide
  Antisense strand to SEQ ID NO: 1853339
aaauagggaaacaauacac

SEQ ID NO: 1853341 - RNA, 19 nt, Artificial Sequence
  Description of Artificial Sequence: Synthetic oligonucleotide
  Sense strand starting at position 2977 of SEQ ID NO: 1564075
aacugugacuuucuugaga

SEQ ID NO: 1853342 - RNA, 19 nt, Artificial Sequence
  Description of Artificial Sequence: Synthetic oligonucleotide
  Antisense strand to SEQ ID NO: 1853341
ucucaagaaagucacaguu

SEQ ID NO: 1853343 - RNA, 19 nt, Artificial Sequence
  Description of Artificial Sequence: Synthetic oligonucleotide
  Sense strand starting at position 2980 of SEQ ID NO: 1564075
ugugacuuucuugagauca

SEQ ID NO: 1853344 - RNA, 19 nt, Artificial Sequence
  Description of Artificial Sequence: Synthetic oligonucleotide
  Antisense strand to SEQ ID NO: 1853343
ugaucucaagaaagucaca

SEQ ID NO: 1853345 - RNA, 19 nt, Artificial Sequence
  Description of Artificial Sequence: Synthetic oligonucleotide
  Sense strand starting at position 273 of SEQ ID NO: 1564076
acauaaauguuugaacuga

SEQ ID NO: 1853346 - RNA, 19 nt, Artificial Sequence
  Description of Artificial Sequence: Synthetic oligonucleotide
  Antisense strand to SEQ ID NO: 1853345
ucaguucaaacauuuaugu

SEQ ID NO: 1853347 - RNA, 19 nt, Artificial Sequence
  Description of Artificial Sequence: Synthetic oligonucleotide
  Sense strand starting at position 2100 of SEQ ID NO: 1564076
gcacaaagugcuuggcaaa

SEQ ID NO: 1853348 - RNA, 19 nt, Artificial Sequence
  Description of Artificial Sequence: Synthetic oligonucleotide
  Antisense strand to SEQ ID NO: 1853347
uuugccaagcacuuugugc

SEQ ID NO: 1853349 - RNA, 19 nt, Artificial Sequence
  Description of Artificial Sequence: Synthetic oligonucleotide
  Sense strand starting at position 2120 of SEQ ID NO: 1564076
cgguagagugcuguacguu

SEQ ID NO: 1853350 - RNA, 19 nt, Artificial Sequence
  Description of Artificial Sequence: Synthetic oligonucleotide
  Antisense strand to SEQ ID NO: 1853349
aacguacagcacucuaccg

SEQ ID NO: 1853351 - RNA, 19 nt, Artificial Sequence
  Description of Artificial Sequence: Synthetic oligonucleotide
  Sense strand starting at position 2121 of SEQ ID NO: 1564076
gguagagugcuguacguua

SEQ ID NO: 1853352 - RNA, 19 nt, Artificial Sequence
  Description of Artificial Sequence: Synthetic oligonucleotide
  Antisense strand to SEQ ID NO: 1853351
uaacguacagcacucuacc

SEQ ID NO: 1853353 - RNA, 19 nt, Artificial Sequence
  Description of Artificial Sequence: Synthetic oligonucleotide
  Sense strand starting at position 2165 of SEQ ID NO: 1564076
cguaguuacuguucucaag

SEQ ID NO: 1853354 - RNA, 19 nt, Artificial Sequence
  Description of Artificial Sequence: Synthetic oligonucleotide
  Antisense strand to SEQ ID NO: 1853353
cuugagaacaguaacuacg

SEQ ID NO: 1853355 - RNA, 19 nt, Artificial Sequence
  Description of Artificial Sequence: Synthetic oligonucleotide
  Sense strand starting at position 2168 of SEQ ID NO: 1564076
aguuacuguucucaagaac

SEQ ID NO: 1853356 - RNA, 19 nt, Artificial Sequence
  Description of Artificial Sequence: Synthetic oligonucleotide
  Antisense strand to SEQ ID NO: 1853355
guucuugagaacaguaacu

SEQ ID NO: 1853357 - RNA, 19 nt, Artificial Sequence
  Description of Artificial Sequence: Synthetic oligonucleotide
  Sense strand starting at position 2319 of SEQ ID NO: 1564076
cugccaacguggugaaauc

SEQ ID NO: 1853358 - RNA, 19 nt, Artificial Sequence
  Description of Artificial Sequence: Synthetic oligonucleotide
  Antisense strand to SEQ ID NO: 1853357
gauuucaccacguuggcag

SEQ ID NO: 1853359 - RNA, 19 nt, Artificial Sequence
  Description of Artificial Sequence: Synthetic oligonucleotide
  Sense strand starting at position 2566 of SEQ ID NO: 1564076
uggcaagacaaucgucuuu

SEQ ID NO: 1853360 - RNA, 19 nt, Artificial Sequence
  Description of Artificial Sequence: Synthetic oligonucleotide
  Antisense strand to SEQ ID NO: 1853359
aaagacgauugucuugcca

SEQ ID NO: 1853361 - RNA, 19 nt, Artificial Sequence
  Description of Artificial Sequence: Synthetic oligonucleotide
  Sense strand starting at position 2588 of SEQ ID NO: 1564076
cgauuaucauacucuaaga

SEQ ID NO: 1853362 - RNA, 19 nt, Artificial Sequence
  Description of Artificial Sequence: Synthetic oligonucleotide
  Antisense strand to SEQ ID NO: 1853361
ucuuagaguaugauaaucg

SEQ ID NO: 1853363 - RNA, 19 nt, Artificial Sequence
  Description of Artificial Sequence: Synthetic oligonucleotide
  Sense strand starting at position 2677 of SEQ ID NO: 1564076
ugccaagugcacuauaaau

SEQ ID NO: 1853364 - RNA, 19 nt, Artificial Sequence
  Description of Artificial Sequence: Synthetic oligonucleotide
  Antisense strand to SEQ ID NO: 1853363
auuuauagugcacuuggca

SEQ ID NO: 1853365 - RNA, 19 nt, Artificial Sequence
  Description of Artificial Sequence: Synthetic oligonucleotide
  Sense strand starting at position 2734 of SEQ ID NO: 1564076
cugaaugacugagcucuaa

SEQ ID NO: 1853366 - RNA, 19 nt, Artificial Sequence
  Description of Artificial Sequence: Synthetic oligonucleotide
  Antisense strand to SEQ ID NO: 1853365
uuagagcucagucauucag

SEQ ID NO: 1853367 - RNA, 19 nt, Artificial Sequence
  Description of Artificial Sequence: Synthetic oligonucleotide
  Sense strand starting at position 2787 of SEQ ID NO: 1564076
guacaagacuuagaccuau

SEQ ID NO: 1853368 - RNA, 19 nt, Artificial Sequence
  Description of Artificial Sequence: Synthetic oligonucleotide
  Antisense strand to SEQ ID NO: 1853367
auaggucuaagucuuguac

SEQ ID NO: 1853369 - RNA, 19 nt, Artificial Sequence
  Description of Artificial Sequence: Synthetic oligonucleotide
  Sense strand starting at position 2846 of SEQ ID NO: 1564076
uuuauauacucuuauggag

SEQ ID NO: 1853370 - RNA, 19 nt, Artificial Sequence
  Description of Artificial Sequence: Synthetic oligonucleotide
  Antisense strand to SEQ ID NO: 1853369
cuccauaagaguauauaaa

SEQ ID NO: 1853371 - RNA, 19 nt, Artificial Sequence
  Description of Artificial Sequence: Synthetic oligonucleotide
  Sense strand starting at position 2860 of SEQ ID NO: 1564076
uggaguaaauucugaacuu

SEQ ID NO: 1853372 - RNA, 19 nt, Artificial Sequence
  Description of Artificial Sequence: Synthetic oligonucleotide
  Antisense strand to SEQ ID NO: 1853371
aaguucagaauuuacucca

SEQ ID NO: 1853373 - RNA, 19 nt, Artificial Sequence
  Description of Artificial Sequence: Synthetic oligonucleotide
  Sense strand starting at position 2861 of SEQ ID NO: 1564076
ggaguaaauucugaacuua

SEQ ID NO: 1853374 - RNA, 19 nt, Artificial Sequence
  Description of Artificial Sequence: Synthetic oligonucleotide
  Antisense strand to SEQ ID NO: 1853373
uaaguucagaauuuacucc

SEQ ID NO: 1853375 - RNA, 19 nt, Artificial Sequence
  Description of Artificial Sequence: Synthetic oligonucleotide
  Sense strand starting at position 2877 of SEQ ID NO: 1564076
uuaagauucuaguaguuac

SEQ ID NO: 1853376 - RNA, 19 nt, Artificial Sequence
  Description of Artificial Sequence: Synthetic oligonucleotide
  Antisense strand to SEQ ID NO: 1853375
guaacuacuagaaucuuaa

SEQ ID NO: 1853377 - RNA, 19 nt, Artificial Sequence
  Description of Artificial Sequence: Synthetic oligonucleotide
  Sense strand starting at position 2880 of SEQ ID NO: 1564076
agauucuaguaguuacaua

SEQ ID NO: 1853378 - RNA, 19 nt, Artificial Sequence
  Description of Artificial Sequence: Synthetic oligonucleotide
  Antisense strand to SEQ ID NO: 1853377
uauguaacuacuagaaucu

SEQ ID NO: 1853379 - RNA, 19 nt, Artificial Sequence
  Description of Artificial Sequence: Synthetic oligonucleotide
  Sense strand starting at position 2896 of SEQ ID NO: 1564076
auaaauagaucccggauuu

SEQ ID NO: 1853380 - RNA, 19 nt, Artificial Sequence
  Description of Artificial Sequence: Synthetic oligonucleotide
  Antisense strand to SEQ ID NO: 1853379
aaauccgggaucuauuuau

SEQ ID NO: 1853381 - RNA, 19 nt, Artificial Sequence
  Description of Artificial Sequence: Synthetic oligonucleotide
  Sense strand starting at position 3045 of SEQ ID NO: 1564076
accucagccucgugaauac

SEQ ID NO: 1853382 - RNA, 19 nt, Artificial Sequence
  Description of Artificial Sequence: Synthetic oligonucleotide
  Antisense strand to SEQ ID NO: 1853381
guauucacgaggcugaggu

SEQ ID NO: 1853383 - RNA, 19 nt, Artificial Sequence
  Description of Artificial Sequence: Synthetic oligonucleotide
  Sense strand starting at position 3056 of SEQ ID NO: 1564076
gugaauaccugggaccaca

SEQ ID NO: 1853384 - RNA, 19 nt, Artificial Sequence
  Description of Artificial Sequence: Synthetic oligonucleotide
  Antisense strand to SEQ ID NO: 1853383
uguggucccagguauucac

SEQ ID NO: 1853385 - RNA, 19 nt, Artificial Sequence
  Description of Artificial Sequence: Synthetic oligonucleotide
  Sense strand starting at position 3191 of SEQ ID NO: 1564076
cccugaagugcagggauua

SEQ ID NO: 1853386 - RNA, 19 nt, Artificial Sequence
  Description of Artificial Sequence: Synthetic oligonucleotide
  Antisense strand to SEQ ID NO: 1853385
uaaucccugcacuucaggg

SEQ ID NO: 1853387 - RNA, 19 nt, Artificial Sequence
  Description of Artificial Sequence: Synthetic oligonucleotide
  Sense strand starting at position 3362 of SEQ ID NO: 1564076
auaacaauccuuuguaguu

SEQ ID NO: 1853388 - RNA, 19 nt, Artificial Sequence
  Description of Artificial Sequence: Synthetic oligonucleotide
  Antisense strand to SEQ ID NO: 1853387
aacuacaaaggauuguuau

SEQ ID NO: 1853389 - RNA, 19 nt, Artificial Sequence
  Description of Artificial Sequence: Synthetic oligonucleotide
  Sense strand starting at position 3371 of SEQ ID NO: 1564076
cuuuguaguuaguuaauag

SEQ ID NO: 1853390 - RNA, 19 nt, Artificial Sequence
  Description of Artificial Sequence: Synthetic oligonucleotide
  Antisense strand to SEQ ID NO: 1853389
cuauuaacuaacuacaaag

SEQ ID NO: 1853391 - RNA, 19 nt, Artificial Sequence
  Description of Artificial Sequence: Synthetic oligonucleotide
  Sense strand starting at position 3375 of SEQ ID NO: 1564076
guaguuaguuaauagccua

SEQ ID NO: 1853392 - RNA, 19 nt, Artificial Sequence
  Description of Artificial Sequence: Synthetic oligonucleotide
  Antisense strand to SEQ ID NO: 1853391
uaggcuauuaacuaacuac

SEQ ID NO: 1853393 - RNA, 19 nt, Artificial Sequence
  Description of Artificial Sequence: Synthetic oligonucleotide
  Sense strand starting at position 3378 of SEQ ID NO: 1564076
guuaguuaauagccuaaau

SEQ ID NO: 1853394 - RNA, 19 nt, Artificial Sequence
  Description of Artificial Sequence: Synthetic oligonucleotide
  Antisense strand to SEQ ID NO: 1853393
auuuaggcuauuaacuaac

SEQ ID NO: 1853395 - RNA, 19 nt, Artificial Sequence
  Description of Artificial Sequence: Synthetic oligonucleotide
  Sense strand starting at position 3388 of SEQ ID NO: 1564076
agccuaaauuaguagaguu

SEQ ID NO: 1853396 - RNA, 19 nt, Artificial Sequence
  Description of Artificial Sequence: Synthetic oligonucleotide
  Antisense strand to SEQ ID NO: 1853395
aacucuacuaauuuaggcu

SEQ ID NO: 1853397 - RNA, 19 nt, Artificial Sequence
  Description of Artificial Sequence: Synthetic oligonucleotide
  Sense strand starting at position 3408 of SEQ ID NO: 1564076
ugagaaguuuauuaaugcu

SEQ ID NO: 1853398 - RNA, 19 nt, Artificial Sequence
  Description of Artificial Sequence: Synthetic oligonucleotide
  Antisense strand to SEQ ID NO: 1853397
agcauuaauaaacuucuca

SEQ ID NO: 1853399 - RNA, 19 nt, Artificial Sequence
  Description of Artificial Sequence: Synthetic oligonucleotide
  Sense strand starting at position 3477 of SEQ ID NO: 1564076
acagaaauaugugaagagu

SEQ ID NO: 1853400 - RNA, 19 nt, Artificial Sequence
  Description of Artificial Sequence: Synthetic oligonucleotide
  Antisense strand to SEQ ID NO: 1853399
acucuucacauauuucugu

SEQ ID NO: 1853401 - RNA, 19 nt, Artificial Sequence
  Description of Artificial Sequence: Synthetic oligonucleotide
  Sense strand starting at position 3935 of SEQ ID NO: 1564076
ccauguaaauguggauauu

SEQ ID NO: 1853402 - RNA, 19 nt, Artificial Sequence
  Description of Artificial Sequence: Synthetic oligonucleotide
  Antisense strand to SEQ ID NO: 1853401
aauauccacauuuacaugg

SEQ ID NO: 1853403 - RNA, 19 nt, Artificial Sequence
  Description of Artificial Sequence: Synthetic oligonucleotide
  Sense strand starting at position 3960 of SEQ ID NO: 1564076
cuggcucuauguuaacauu

SEQ ID NO: 1853404 - RNA, 19 nt, Artificial Sequence
  Description of Artificial Sequence: Synthetic oligonucleotide
  Antisense strand to SEQ ID NO: 1853403
aauguuaacauagagccag

SEQ ID NO: 1853405 - RNA, 19 nt, Artificial Sequence
  Description of Artificial Sequence: Synthetic oligonucleotide
  Sense strand starting at position 3963 of SEQ ID NO: 1564076
gcucuauguuaacauuugu

SEQ ID NO: 1853406 - RNA, 19 nt, Artificial Sequence
  Description of Artificial Sequence: Synthetic oligonucleotide
  Antisense strand to SEQ ID NO: 1853405
acaaauguuaacauagagc

SEQ ID NO: 1853407 - RNA, 19 nt, Artificial Sequence
  Description of Artificial Sequence: Synthetic oligonucleotide
  Sense strand starting at position 27 of SEQ ID NO: 1564077
acagcuacucaggaaguuu

SEQ ID NO: 1853408 - RNA, 19 nt, Artificial Sequence
  Description of Artificial Sequence: Synthetic oligonucleotide
  Antisense strand to SEQ ID NO: 1853407
aaacuuccugaguagcugu

SEQ ID NO: 1853409 - RNA, 19 nt, Artificial Sequence
  Description of Artificial Sequence: Synthetic oligonucleotide
  Sense strand starting at position 38 of SEQ ID NO: 1564077
ggaaguuucuaauucucau

SEQ ID NO: 1853410 - RNA, 19 nt, Artificial Sequence
  Description of Artificial Sequence: Synthetic oligonucleotide
  Antisense strand to SEQ ID NO: 1853409
augagaauuagaaacuucc

SEQ ID NO: 1853411 - RNA, 19 nt, Artificial Sequence
  Description of Artificial Sequence: Synthetic oligonucleotide
  Sense strand starting at position 74 of SEQ ID NO: 1564077
guuaguuauagagaugucu

SEQ ID NO: 1853412 - RNA, 19 nt, Artificial Sequence
  Description of Artificial Sequence: Synthetic oligonucleotide
  Antisense strand to SEQ ID NO: 1853411
agacaucucuauaacuaac

SEQ ID NO: 1853413 - RNA, 19 nt, Artificial Sequence
  Description of Artificial Sequence: Synthetic oligonucleotide
  Sense strand starting at position 116 of SEQ ID NO: 1564077
augggaaaggacgguuuau

SEQ ID NO: 1853414 - RNA, 19 nt, Artificial Sequence
  Description of Artificial Sequence: Synthetic oligonucleotide
  Antisense strand to SEQ ID NO: 1853413
auaaaccguccuuucccau

SEQ ID NO: 1853415 - RNA, 19 nt, Artificial Sequence
  Description of Artificial Sequence: Synthetic oligonucleotide
  Sense strand starting at position 236 of SEQ ID NO: 1564077
accugaucugaguaguauu

SEQ ID NO: 1853416 - RNA, 19 nt, Artificial Sequence
  Description of Artificial Sequence: Synthetic oligonucleotide
  Antisense strand to SEQ ID NO: 1853415
aauacuacucagaucaggu

SEQ ID NO: 1853417 - RNA, 19 nt, Artificial Sequence
  Description of Artificial Sequence: Synthetic oligonucleotide
  Sense strand starting at position 550 of SEQ ID NO: 1564077
uagaacagacucugaguuu

SEQ ID NO: 1853418 - RNA, 19 nt, Artificial Sequence
  Description of Artificial Sequence: Synthetic oligonucleotide
  Antisense strand to SEQ ID NO: 1853417
aaacucagagucuguucua

SEQ ID NO: 1853419 - RNA, 19 nt, Artificial Sequence
  Description of Artificial Sequence: Synthetic oligonucleotide
  Sense strand starting at position 848 of SEQ ID NO: 1564077
accuauuagugggccagaa

SEQ ID NO: 1853420 - RNA, 19 nt, Artificial Sequence
  Description of Artificial Sequence: Synthetic oligonucleotide
  Antisense strand to SEQ ID NO: 1853419
uucuggcccacuaauaggu

SEQ ID NO: 1853421 - RNA, 19 nt, Artificial Sequence
  Description of Artificial Sequence: Synthetic oligonucleotide
  Sense strand starting at position 877 of SEQ ID NO: 1564077
guggaucacgaucagcauu

SEQ ID NO: 1853422 - RNA, 19 nt, Artificial Sequence
  Description of Artificial Sequence: Synthetic oligonucleotide
  Antisense strand to SEQ ID NO: 1853421
aaugcugaucgugauccac

SEQ ID NO: 1853423 - RNA, 19 nt, Artificial Sequence
  Description of Artificial Sequence: Synthetic oligonucleotide
  Sense strand starting at position 925 of SEQ ID NO: 1564077
uguggaaucuaaguggaua

SEQ ID NO: 1853424 - RNA, 19 nt, Artificial Sequence
  Description of Artificial Sequence: Synthetic oligonucleotide
  Antisense strand to SEQ ID NO: 1853423
uauccacuuagauuccaca

SEQ ID NO: 1853425 - RNA, 19 nt, Artificial Sequence
  Description of Artificial Sequence: Synthetic oligonucleotide
  Sense strand starting at position 926 of SEQ ID NO: 1564077
guggaaucuaaguggauag

SEQ ID NO: 1853426 - RNA, 19 nt, Artificial Sequence
  Description of Artificial Sequence: Synthetic oligonucleotide
  Antisense strand to SEQ ID NO: 1853425
cuauccacuuagauuccac

SEQ ID NO: 1853427 - RNA, 19 nt, Artificial Sequence
  Description of Artificial Sequence: Synthetic oligonucleotide
  Sense strand starting at position 993 of SEQ ID NO: 1564077
ggaguaucgggucacaaug

SEQ ID NO: 1853428 - RNA, 19 nt, Artificial Sequence
  Description of Artificial Sequence: Synthetic oligonucleotide
  Antisense strand to SEQ ID NO: 1853427
cauugugacccgauacucc

SEQ ID NO: 1853429 - RNA, 19 nt, Artificial Sequence
  Description of Artificial Sequence: Synthetic oligonucleotide
  Sense strand starting at position 1951 of SEQ ID NO: 1564077
ggcgaaacuccggagauca

SEQ ID NO: 1853430 - RNA, 19 nt, Artificial Sequence
  Description of Artificial Sequence: Synthetic oligonucleotide
  Antisense strand to SEQ ID NO: 1853429
ugaucuccggaguuucgcc

SEQ ID NO: 1853431 - RNA, 19 nt, Artificial Sequence
  Description of Artificial Sequence: Synthetic oligonucleotide
  Sense strand starting at position 2240 of SEQ ID NO: 1564077
aguggcaaacgucacaaau

SEQ ID NO: 1853432 - RNA, 19 nt, Artificial Sequence
  Description of Artificial Sequence: Synthetic oligonucleotide
  Antisense strand to SEQ ID NO: 1853431
auuugugacguuugccacu

SEQ ID NO: 1853433 - RNA, 19 nt, Artificial Sequence
  Description of Artificial Sequence: Synthetic oligonucleotide
  Sense strand starting at position 2259 of SEQ ID NO: 1564077
cccauacuccgugacauaa

SEQ ID NO: 1853434 - RNA, 19 nt, Artificial Sequence
  Description of Artificial Sequence: Synthetic oligonucleotide
  Antisense strand to SEQ ID NO: 1853433
uuaugucacggaguauggg

SEQ ID NO: 1853435 - RNA, 19 nt, Artificial Sequence
  Description of Artificial Sequence: Synthetic oligonucleotide
  Sense strand starting at position 2380 of SEQ ID NO: 1564077
acaucuggccuauacugaa

SEQ ID NO: 1853436 - RNA, 19 nt, Artificial Sequence
  Description of Artificial Sequence: Synthetic oligonucleotide
  Antisense strand to SEQ ID NO: 1853435
uucaguauaggccagaugu

SEQ ID NO: 1853437 - RNA, 19 nt, Artificial Sequence
  Description of Artificial Sequence: Synthetic oligonucleotide
  Sense strand starting at position 2588 of SEQ ID NO: 1564077
ucuagaauuugcucagcga

SEQ ID NO: 1853438 - RNA, 19 nt, Artificial Sequence
  Description of Artificial Sequence: Synthetic oligonucleotide
  Antisense strand to SEQ ID NO: 1853437
ucgcugagcaaauucuaga

SEQ ID NO: 1853439 - RNA, 19 nt, Artificial Sequence
  Description of Artificial Sequence: Synthetic oligonucleotide
  Sense strand starting at position 2591 of SEQ ID NO: 1564077
agaauuugcucagcgaugu

SEQ ID NO: 1853440 - RNA, 19 nt, Artificial Sequence
  Description of Artificial Sequence: Synthetic oligonucleotide
  Antisense strand to SEQ ID NO: 1853439
acaucgcugagcaaauucu

SEQ ID NO: 1853441 - RNA, 19 nt, Artificial Sequence
  Description of Artificial Sequence: Synthetic oligonucleotide
  Sense strand starting at position 2687 of SEQ ID NO: 1564077
agcagauuuacguacguuu

SEQ ID NO: 1853442 - RNA, 19 nt, Artificial Sequence
  Description of Artificial Sequence: Synthetic oligonucleotide
  Antisense strand to SEQ ID NO: 1853441
aaacguacguaaaucugcu

SEQ ID NO: 1853443 - RNA, 19 nt, Artificial Sequence
  Description of Artificial Sequence: Synthetic oligonucleotide
  Sense strand starting at position 2782 of SEQ ID NO: 1564077
acacuuucucaggaaguuu

SEQ ID NO: 1853444 - RNA, 19 nt, Artificial Sequence
  Description of Artificial Sequence: Synthetic oligonucleotide
  Antisense strand to SEQ ID NO: 1853443
aaacuuccugagaaagugu

SEQ ID NO: 1853445 - RNA, 19 nt, Artificial Sequence
  Description of Artificial Sequence: Synthetic oligonucleotide
  Sense strand starting at position 2793 of SEQ ID NO: 1564077
ggaaguuugcauuaacaug

SEQ ID NO: 1853446 - RNA, 19 nt, Artificial Sequence
  Description of Artificial Sequence: Synthetic oligonucleotide
  Antisense strand to SEQ ID NO: 1853445
cauguuaaugcaaacuucc

SEQ ID NO: 1853447 - RNA, 19 nt, Artificial Sequence
  Description of Artificial Sequence: Synthetic oligonucleotide
  Sense strand starting at position 2874 of SEQ ID NO: 1564077
uuacuaaggaagugguuaa

SEQ ID NO: 1853448 - RNA, 19 nt, Artificial Sequence
  Description of Artificial Sequence: Synthetic oligonucleotide
  Antisense strand to SEQ ID NO: 1853447
uuaaccacuuccuuaguaa

SEQ ID NO: 1853449 - RNA, 19 nt, Artificial Sequence
  Description of Artificial Sequence: Synthetic oligonucleotide
  Sense strand starting at position 2991 of SEQ ID NO: 1564077
gagcucuuggcagagagua

SEQ ID NO: 1853450 - RNA, 19 nt, Artificial Sequence
  Description of Artificial Sequence: Synthetic oligonucleotide
  Antisense strand to SEQ ID NO: 1853449
uacucucugccaagagcuc

SEQ ID NO: 1853451 - RNA, 19 nt, Artificial Sequence
  Description of Artificial Sequence: Synthetic oligonucleotide
  Sense strand starting at position 2993 of SEQ ID NO: 1564077
gcucuuggcagagaguaaa

SEQ ID NO: 1853452 - RNA, 19 nt, Artificial Sequence
  Description of Artificial Sequence: Synthetic oligonucleotide
  Antisense strand to SEQ ID NO: 1853451
uuuacucucugccaagagc

SEQ ID NO: 1853453 - RNA, 19 nt, Artificial Sequence
  Description of Artificial Sequence: Synthetic oligonucleotide
  Sense strand starting at position 3007 of SEQ ID NO: 1564077
guaaauuguguauaaaggu

SEQ ID NO: 1853454 - RNA, 19 nt, Artificial Sequence
  Description of Artificial Sequence: Synthetic oligonucleotide
  Antisense strand to SEQ ID NO: 1853453
accuuuauacacaauuuac

SEQ ID NO: 1853455 - RNA, 19 nt, Artificial Sequence
  Description of Artificial Sequence: Synthetic oligonucleotide
  Sense strand starting at position 3016 of SEQ ID NO: 1564077
guauaaagguuuguaagga

SEQ ID NO: 1853456 - RNA, 19 nt, Artificial Sequence
  Description of Artificial Sequence: Synthetic oligonucleotide
  Antisense strand to SEQ ID NO: 1853455
uccuuacaaaccuuuauac

SEQ ID NO: 1853457 - RNA, 19 nt, Artificial Sequence
  Description of Artificial Sequence: Synthetic oligonucleotide
  Sense strand starting at position 3038 of SEQ ID NO: 1564077
ugacucuuuccaggaacac

SEQ ID NO: 1853458 - RNA, 19 nt, Artificial Sequence
  Description of Artificial Sequence: Synthetic oligonucleotide
  Antisense strand to SEQ ID NO: 1853457
guguuccuggaaagaguca

SEQ ID NO: 1853459 - RNA, 19 nt, Artificial Sequence
  Description of Artificial Sequence: Synthetic oligonucleotide
  Sense strand starting at position 3090 of SEQ ID NO: 1564077
aggucuugggccuauuaag

SEQ ID NO: 1853460 - RNA, 19 nt, Artificial Sequence
  Description of Artificial Sequence: Synthetic oligonucleotide
  Antisense strand to SEQ ID NO: 1853459
cuuaauaggcccaagaccu

SEQ ID NO: 1853461 - RNA, 19 nt, Artificial Sequence
  Description of Artificial Sequence: Synthetic oligonucleotide
  Sense strand starting at position 3187 of SEQ ID NO: 1564077
augugugucccugaaauca

SEQ ID NO: 1853462 - RNA, 19 nt, Artificial Sequence
  Description of Artificial Sequence: Synthetic oligonucleotide
  Antisense strand to SEQ ID NO: 1853461
ugauuucagggacacacau

SEQ ID NO: 1853463 - RNA, 19 nt, Artificial Sequence
  Description of Artificial Sequence: Synthetic oligonucleotide
  Sense strand starting at position 3279 of SEQ ID NO: 1564077
ucagacauguggucaggau

SEQ ID NO: 1853464 - RNA, 19 nt, Artificial Sequence
  Description of Artificial Sequence: Synthetic oligonucleotide
  Antisense strand to SEQ ID NO: 1853463
auccugaccacaugucuga

SEQ ID NO: 1853465 - RNA, 19 nt, Artificial Sequence
  Description of Artificial Sequence: Synthetic oligonucleotide
  Sense strand starting at position 3371 of SEQ ID NO: 1564077
aggaaaugguuucugacua

SEQ ID NO: 1853466 - RNA, 19 nt, Artificial Sequence
  Description of Artificial Sequence: Synthetic oligonucleotide
  Antisense strand to SEQ ID NO: 1853465
uagucagaaaccauuuccu

SEQ ID NO: 1853467 - RNA, 19 nt, Artificial Sequence
  Description of Artificial Sequence: Synthetic oligonucleotide
  Sense strand starting at position 3375 of SEQ ID NO: 1564077
aaugguuucugacuauuga

SEQ ID NO: 1853468 - RNA, 19 nt, Artificial Sequence
  Description of Artificial Sequence: Synthetic oligonucleotide
  Antisense strand to SEQ ID NO: 1853467
ucaauagucagaaaccauu

SEQ ID NO: 1853469 - RNA, 19 nt, Artificial Sequence
  Description of Artificial Sequence: Synthetic oligonucleotide
  Sense strand starting at position 3487 of SEQ ID NO: 1564077
agaguaucauaauuguuac

SEQ ID NO: 1853470 - RNA, 19 nt, Artificial Sequence
  Description of Artificial Sequence: Synthetic oligonucleotide
  Antisense strand to SEQ ID NO: 1853469
guaacaauuaugauacucu

SEQ ID NO: 1853471 - RNA, 19 nt, Artificial Sequence
  Description of Artificial Sequence: Synthetic oligonucleotide
  Sense strand starting at position 3706 of SEQ ID NO: 1564077
cgacauuggaguuagguaa

SEQ ID NO: 1853472 - RNA, 19 nt, Artificial Sequence
  Description of Artificial Sequence: Synthetic oligonucleotide
  Antisense strand to SEQ ID NO: 1853471
uuaccuaacuccaaugucg

SEQ ID NO: 1853473 - RNA, 19 nt, Artificial Sequence
  Description of Artificial Sequence: Synthetic oligonucleotide
  Sense strand starting at position 3792 of SEQ ID NO: 1564077
cagguaauuggugagcaga

SEQ ID NO: 1853474 - RNA, 19 nt, Artificial Sequence
  Description of Artificial Sequence: Synthetic oligonucleotide
  Antisense strand to SEQ ID NO: 1853473
ucugcucaccaauuaccug

SEQ ID NO: 1853475 - RNA, 19 nt, Artificial Sequence
  Description of Artificial Sequence: Synthetic oligonucleotide
  Sense strand starting at position 3794 of SEQ ID NO: 1564077
gguaauuggugagcagaag

SEQ ID NO: 1853476 - RNA, 19 nt, Artificial Sequence
  Description of Artificial Sequence: Synthetic oligonucleotide
  Antisense strand to SEQ ID NO: 1853475
cuucugcucaccaauuacc

SEQ ID NO: 1853477 - RNA, 19 nt, Artificial Sequence
  Description of Artificial Sequence: Synthetic oligonucleotide
  Sense strand starting at position 3834 of SEQ ID NO: 1564077
ugaggaaugacugggucua

SEQ ID NO: 1853478 - RNA, 19 nt, Artificial Sequence
  Description of Artificial Sequence: Synthetic oligonucleotide
  Antisense strand to SEQ ID NO: 1853477
uagacccagucauuccuca

SEQ ID NO: 1853479 - RNA, 19 nt, Artificial Sequence
  Description of Artificial Sequence: Synthetic oligonucleotide
  Sense strand starting at position 3835 of SEQ ID NO: 1564077
gaggaaugacugggucuau

SEQ ID NO: 1853480 - RNA, 19 nt, Artificial Sequence
  Description of Artificial Sequence: Synthetic oligonucleotide
  Antisense strand to SEQ ID NO: 1853479
auagacccagucauuccuc

SEQ ID NO: 1853481 - RNA, 19 nt, Artificial Sequence
  Description of Artificial Sequence: Synthetic oligonucleotide
  Sense strand starting at position 3847 of SEQ ID NO: 1564077
ggucuauauagugaaagca

SEQ ID NO: 1853482 - RNA, 19 nt, Artificial Sequence
  Description of Artificial Sequence: Synthetic oligonucleotide
  Antisense strand to SEQ ID NO: 1853481
ugcuuucacuauauagacc

SEQ ID NO: 1853483 - RNA, 19 nt, Artificial Sequence
  Description of Artificial Sequence: Synthetic oligonucleotide
  Sense strand starting at position 3886 of SEQ ID NO: 1564077
cuggaaagugacuguagaa

SEQ ID NO: 1853484 - RNA, 19 nt, Artificial Sequence
  Description of Artificial Sequence: Synthetic oligonucleotide
  Antisense strand to SEQ ID NO: 1853483
uucuacagucacuuuccag

SEQ ID NO: 1853485 - RNA, 19 nt, Artificial Sequence
  Description of Artificial Sequence: Synthetic oligonucleotide
  Sense strand starting at position 3899 of SEQ ID NO: 1564077
guagaauugaggcaguaga

SEQ ID NO: 1853486 - RNA, 19 nt, Artificial Sequence
  Description of Artificial Sequence: Synthetic oligonucleotide
  Antisense strand to SEQ ID NO: 1853485
ucuacugccucaauucuac

SEQ ID NO: 1853487 - RNA, 19 nt, Artificial Sequence
  Description of Artificial Sequence: Synthetic oligonucleotide
  Sense strand starting at position 11 of SEQ ID NO: 1564078
cuggcaagaugguugucau

SEQ ID NO: 1853488 - RNA, 19 nt, Artificial Sequence
  Description of Artificial Sequence: Synthetic oligonucleotide
  Antisense strand to SEQ ID NO: 1853487
augacaaccaucuugccag

SEQ ID NO: 1853489 - RNA, 19 nt, Artificial Sequence
  Description of Artificial Sequence: Synthetic oligonucleotide
  Sense strand starting at position 12 of SEQ ID NO: 1564078
uggcaagaugguugucauu

SEQ ID NO: 1853490 - RNA, 19 nt, Artificial Sequence
  Description of Artificial Sequence: Synthetic oligonucleotide
  Antisense strand to SEQ ID NO: 1853489
aaugacaaccaucuugcca

SEQ ID NO: 1853491 - RNA, 19 nt, Artificial Sequence
  Description of Artificial Sequence: Synthetic oligonucleotide
  Sense strand starting at position 85 of SEQ ID NO: 1564078
ggaagagcuugcuaagacu

SEQ ID NO: 1853492 - RNA, 19 nt, Artificial Sequence
  Description of Artificial Sequence: Synthetic oligonucleotide
  Antisense strand to SEQ ID NO: 1853491
agucuuagcaagcucuucc

SEQ ID NO: 1853493 - RNA, 19 nt, Artificial Sequence
  Description of Artificial Sequence: Synthetic oligonucleotide
  Sense strand starting at position 105 of SEQ ID NO: 1564078
acucaugcuuuguuuguau

SEQ ID NO: 1853494 - RNA, 19 nt, Artificial Sequence
  Description of Artificial Sequence: Synthetic oligonucleotide
  Antisense strand to SEQ ID NO: 1853493
auacaaacaaagcaugagu

SEQ ID NO: 1853495 - RNA, 19 nt, Artificial Sequence
  Description of Artificial Sequence: Synthetic oligonucleotide
  Sense strand starting at position 113 of SEQ ID NO: 1564078
uuuguuuguaucugcagga

SEQ ID NO: 1853496 - RNA, 19 nt, Artificial Sequence
  Description of Artificial Sequence: Synthetic oligonucleotide
  Antisense strand to SEQ ID NO: 1853495
uccugcagauacaaacaaa

SEQ ID NO: 1853497 - RNA, 19 nt, Artificial Sequence
  Description of Artificial Sequence: Synthetic oligonucleotide
  Sense strand starting at position 114 of SEQ ID NO: 1564078
uuguuuguaucugcaggaa

SEQ ID NO: 1853498 - RNA, 19 nt, Artificial Sequence
  Description of Artificial Sequence: Synthetic oligonucleotide
  Antisense strand to SEQ ID NO: 1853497
uuccugcagauacaaacaa

SEQ ID NO: 1853499 - RNA, 19 nt, Artificial Sequence
  Description of Artificial Sequence: Synthetic oligonucleotide
  Sense strand starting at position 139 of SEQ ID NO: 1564078
cugagugaccacugaaagu

SEQ ID NO: 1853500 - RNA, 19 nt, Artificial Sequence
  Description of Artificial Sequence: Synthetic oligonucleotide
  Antisense strand to SEQ ID NO: 1853499
acuuucaguggucacucag

SEQ ID NO: 1853501 - RNA, 19 nt, Artificial Sequence
  Description of Artificial Sequence: Synthetic oligonucleotide
  Sense strand starting at position 506 of SEQ ID NO: 1564078
ggaacuguguuggcugagu

SEQ ID NO: 1853502 - RNA, 19 nt, Artificial Sequence
  Description of Artificial Sequence: Synthetic oligonucleotide
  Antisense strand to SEQ ID NO: 1853501
acucagccaacacaguucc

SEQ ID NO: 1853503 - RNA, 19 nt, Artificial Sequence
  Description of Artificial Sequence: Synthetic oligonucleotide
  Sense strand starting at position 508 of SEQ ID NO: 1564078
aacuguguuggcugaguuu

SEQ ID NO: 1853504 - RNA, 19 nt, Artificial Sequence
  Description of Artificial Sequence: Synthetic oligonucleotide
  Antisense strand to SEQ ID NO: 1853503
aaacucagccaacacaguu

SEQ ID NO: 1853505 - RNA, 19 nt, Artificial Sequence
  Description of Artificial Sequence: Synthetic oligonucleotide
  Sense strand starting at position 729 of SEQ ID NO: 1564078
augcgaaucuuggcaucua

SEQ ID NO: 1853506 - RNA, 19 nt, Artificial Sequence
  Description of Artificial Sequence: Synthetic oligonucleotide
  Antisense strand to SEQ ID NO: 1853505
uagaugccaagauucgcau

SEQ ID NO: 1853507 - RNA, 19 nt, Artificial Sequence
  Description of Artificial Sequence: Synthetic oligonucleotide
  Sense strand starting at position 921 of SEQ ID NO: 1564078
aggugagguucacagaaag

SEQ ID NO: 1853508 - RNA, 19 nt, Artificial Sequence
  Description of Artificial Sequence: Synthetic oligonucleotide
  Antisense strand to SEQ ID NO: 1853507
cuuucugugaaccucaccu

SEQ ID NO: 1853509 - RNA, 19 nt, Artificial Sequence
  Description of Artificial Sequence: Synthetic oligonucleotide
  Sense strand starting at position 1121 of SEQ ID NO: 1564078
gucuuacgcuuccuauaaa

SEQ ID NO: 1853510 - RNA, 19 nt, Artificial Sequence
  Description of Artificial Sequence: Synthetic oligonucleotide
  Antisense strand to SEQ ID NO: 1853509
uuuauaggaagcguaagac

SEQ ID NO: 1853511 - RNA, 19 nt, Artificial Sequence
  Description of Artificial Sequence: Synthetic oligonucleotide
  Sense strand starting at position 1203 of SEQ ID NO: 1564078
gccgcauuaucauugcaca

SEQ ID NO: 1853512 - RNA, 19 nt, Artificial Sequence
  Description of Artificial Sequence: Synthetic oligonucleotide
  Antisense strand to SEQ ID NO: 1853511
ugugcaaugauaaugcggc

SEQ ID NO: 1853513 - RNA, 19 nt, Artificial Sequence
  Description of Artificial Sequence: Synthetic oligonucleotide
  Sense strand starting at position 1271 of SEQ ID NO: 1564078
cuccaagccgaguggaaau

SEQ ID NO: 1853514 - RNA, 19 nt, Artificial Sequence
  Description of Artificial Sequence: Synthetic oligonucleotide
  Antisense strand to SEQ ID NO: 1853513
auuuccacucggcuuggag

SEQ ID NO: 1853515 - RNA, 19 nt, Artificial Sequence
  Description of Artificial Sequence: Synthetic oligonucleotide
  Sense strand starting at position 1372 of SEQ ID NO: 1564078
gcacgucgcccggaaauaa

SEQ ID NO: 1853516 - RNA, 19 nt, Artificial Sequence
  Description of Artificial Sequence: Synthetic oligonucleotide
  Antisense strand to SEQ ID NO: 1853515
uuauuuccgggcgacgugc

SEQ ID NO: 1853517 - RNA, 19 nt, Artificial Sequence
  Description of Artificial Sequence: Synthetic oligonucleotide
  Sense strand starting at position 1420 of SEQ ID NO: 1564078
gcguaucuagcgcccgaaa

SEQ ID NO: 1853518 - RNA, 19 nt, Artificial Sequence
  Description of Artificial Sequence: Synthetic oligonucleotide
  Antisense strand to SEQ ID NO: 1853517
uuucgggcgcuagauacgc

SEQ ID NO: 1853519 - RNA, 19 nt, Artificial Sequence
  Description of Artificial Sequence: Synthetic oligonucleotide
  Sense strand starting at position 1517 of SEQ ID NO: 1564078
acaguaauauugcagacua

SEQ ID NO: 1853520 - RNA, 19 nt, Artificial Sequence
  Description of Artificial Sequence: Synthetic oligonucleotide
  Antisense strand to SEQ ID NO: 1853519
uagucugcaauauuacugu

SEQ ID NO: 1853521 - RNA, 19 nt, Artificial Sequence
  Description of Artificial Sequence: Synthetic oligonucleotide
  Sense strand starting at position 1562 of SEQ ID NO: 1564078
agggucaguucccaagaca

SEQ ID NO: 1853522 - RNA, 19 nt, Artificial Sequence
  Description of Artificial Sequence: Synthetic oligonucleotide
  Antisense strand to SEQ ID NO: 1853521
ugucuugggaacugacccu

SEQ ID NO: 1853523 - RNA, 19 nt, Artificial Sequence
  Description of Artificial Sequence: Synthetic oligonucleotide
  Sense strand starting at position 1647 of SEQ ID NO: 1564078
gcccguuucccagcaguga

SEQ ID NO: 1853524 - RNA, 19 nt, Artificial Sequence
  Description of Artificial Sequence: Synthetic oligonucleotide
  Antisense strand to SEQ ID NO: 1853523
ucacugcugggaaacgggc

SEQ ID NO: 1853525 - RNA, 19 nt, Artificial Sequence
  Description of Artificial Sequence: Synthetic oligonucleotide
  Sense strand starting at position 1648 of SEQ ID NO: 1564078
cccguuucccagcagugaa

SEQ ID NO: 1853526 - RNA, 19 nt, Artificial Sequence
  Description of Artificial Sequence: Synthetic oligonucleotide
  Antisense strand to SEQ ID NO: 1853525
uucacugcugggaaacggg

SEQ ID NO: 1853527 - RNA, 19 nt, Artificial Sequence
  Description of Artificial Sequence: Synthetic oligonucleotide
  Sense strand starting at position 1651 of SEQ ID NO: 1564078
guuucccagcagugaaagu

SEQ ID NO: 1853528 - RNA, 19 nt, Artificial Sequence
  Description of Artificial Sequence: Synthetic oligonucleotide
  Antisense strand to SEQ ID NO: 1853527
acuuucacugcugggaaac

SEQ ID NO: 1853529 - RNA, 19 nt, Artificial Sequence
  Description of Artificial Sequence: Synthetic oligonucleotide
  Sense strand starting at position 2104 of SEQ ID NO: 1564078
ggccaucuugggcguagaa

SEQ ID NO: 1853530 - RNA, 19 nt, Artificial Sequence
  Description of Artificial Sequence: Synthetic oligonucleotide
  Antisense strand to SEQ ID NO: 1853529
uucuacgcccaagauggcc

SEQ ID NO: 1853531 - RNA, 19 nt, Artificial Sequence
  Description of Artificial Sequence: Synthetic oligonucleotide
  Sense strand starting at position 2106 of SEQ ID NO: 1564078
ccaucuugggcguagaacu

SEQ ID NO: 1853532 - RNA, 19 nt, Artificial Sequence
  Description of Artificial Sequence: Synthetic oligonucleotide
  Antisense strand to SEQ ID NO: 1853531
aguucuacgcccaagaugg

SEQ ID NO: 1853533 - RNA, 19 nt, Artificial Sequence
  Description of Artificial Sequence: Synthetic oligonucleotide
  Sense strand starting at position 2131 of SEQ ID NO: 1564078
cuaggcuuugccguuaacu

SEQ ID NO: 1853534 - RNA, 19 nt, Artificial Sequence
  Description of Artificial Sequence: Synthetic oligonucleotide
  Antisense strand to SEQ ID NO: 1853533
aguuaacggcaaagccuag

SEQ ID NO: 1853535 - RNA, 19 nt, Artificial Sequence
  Description of Artificial Sequence: Synthetic oligonucleotide
  Sense strand starting at position 2133 of SEQ ID NO: 1564078
aggcuuugccguuaacugu

SEQ ID NO: 1853536 - RNA, 19 nt, Artificial Sequence
  Description of Artificial Sequence: Synthetic oligonucleotide
  Antisense strand to SEQ ID NO: 1853535
acaguuaacggcaaagccu

SEQ ID NO: 1853537 - RNA, 19 nt, Artificial Sequence
  Description of Artificial Sequence: Synthetic oligonucleotide
  Sense strand starting at position 2139 of SEQ ID NO: 1564078
ugccguuaacugugacaga

SEQ ID NO: 1853538 - RNA, 19 nt, Artificial Sequence
  Description of Artificial Sequence: Synthetic oligonucleotide
  Antisense strand to SEQ ID NO: 1853537
ucugucacaguuaacggca

SEQ ID NO: 1853539 - RNA, 19 nt, Artificial Sequence
  Description of Artificial Sequence: Synthetic oligonucleotide
  Sense strand starting at position 2144 of SEQ ID NO: 1564078
uuaacugugacagacguau

SEQ ID NO: 1853540 - RNA, 19 nt, Artificial Sequence
  Description of Artificial Sequence: Synthetic oligonucleotide
  Antisense strand to SEQ ID NO: 1853539
auacgucugucacaguuaa

SEQ ID NO: 1853541 - RNA, 19 nt, Artificial Sequence
  Description of Artificial Sequence: Synthetic oligonucleotide
  Sense strand starting at position 2156 of SEQ ID NO: 1564078
gacguauauuucugagagu

SEQ ID NO: 1853542 - RNA, 19 nt, Artificial Sequence
  Description of Artificial Sequence: Synthetic oligonucleotide
  Antisense strand to SEQ ID NO: 1853541
acucucagaaauauacguc

SEQ ID NO: 1853543 - RNA, 19 nt, Artificial Sequence
  Description of Artificial Sequence: Synthetic oligonucleotide
  Sense strand starting at position 2157 of SEQ ID NO: 1564078
acguauauuucugagagug

SEQ ID NO: 1853544 - RNA, 19 nt, Artificial Sequence
  Description of Artificial Sequence: Synthetic oligonucleotide
  Antisense strand to SEQ ID NO: 1853543
cacucucagaaauauacgu

SEQ ID NO: 1853545 - RNA, 19 nt, Artificial Sequence
  Description of Artificial Sequence: Synthetic oligonucleotide
  Sense strand starting at position 2159 of SEQ ID NO: 1564078
guauauuucugagagugga

SEQ ID NO: 1853546 - RNA, 19 nt, Artificial Sequence
  Description of Artificial Sequence: Synthetic oligonucleotide
  Antisense strand to SEQ ID NO: 1853545
uccacucucagaaauauac

SEQ ID NO: 1853547 - RNA, 19 nt, Artificial Sequence
  Description of Artificial Sequence: Synthetic oligonucleotide
  Sense strand starting at position 2215 of SEQ ID NO: 1564078
gcgagagugucccugagcu

SEQ ID NO: 1853548 - RNA, 19 nt, Artificial Sequence
  Description of Artificial Sequence: Synthetic oligonucleotide
  Antisense strand to SEQ ID NO: 1853547
agcucagggacacucucgc

SEQ ID NO: 1853549 - RNA, 19 nt, Artificial Sequence
  Description of Artificial Sequence: Synthetic oligonucleotide
  Sense strand starting at position 2313 of SEQ ID NO: 1564078
gcccgcguuccuuugucaa

SEQ ID NO: 1853550 - RNA, 19 nt, Artificial Sequence
  Description of Artificial Sequence: Synthetic oligonucleotide
  Antisense strand to SEQ ID NO: 1853549
uugacaaaggaacgcgggc

SEQ ID NO: 1853551 - RNA, 19 nt, Artificial Sequence
  Description of Artificial Sequence: Synthetic oligonucleotide
  Sense strand starting at position 2464 of SEQ ID NO: 1564078
agaaaucuccacggagacu

SEQ ID NO: 1853552 - RNA, 19 nt, Artificial Sequence
  Description of Artificial Sequence: Synthetic oligonucleotide
  Antisense strand to SEQ ID NO: 1853551
agucuccguggagauuucu

SEQ ID NO: 1853553 - RNA, 19 nt, Artificial Sequence
  Description of Artificial Sequence: Synthetic oligonucleotide
  Sense strand starting at position 2479 of SEQ ID NO: 1564078
gacucauggccugggaaac

SEQ ID NO: 1853554 - RNA, 19 nt, Artificial Sequence
  Description of Artificial Sequence: Synthetic oligonucleotide
  Antisense strand to SEQ ID NO: 1853553
guuucccaggccaugaguc

SEQ ID NO: 1853555 - RNA, 19 nt, Artificial Sequence
  Description of Artificial Sequence: Synthetic oligonucleotide
  Sense strand starting at position 2620 of SEQ ID NO: 1564078
cuccacugugcucaagagu

SEQ ID NO: 1853556 - RNA, 19 nt, Artificial Sequence
  Description of Artificial Sequence: Synthetic oligonucleotide
  Antisense strand to SEQ ID NO: 1853555
acucuugagcacaguggag

SEQ ID NO: 1853557 - RNA, 19 nt, Artificial Sequence
  Description of Artificial Sequence: Synthetic oligonucleotide
  Sense strand starting at position 2754 of SEQ ID NO: 1564078
ggagguaucuguccaccau

SEQ ID NO: 1853558 - RNA, 19 nt, Artificial Sequence
  Description of Artificial Sequence: Synthetic oligonucleotide
  Antisense strand to SEQ ID NO: 1853557
augguggacagauaccucc

SEQ ID NO: 1853559 - RNA, 19 nt, Artificial Sequence
  Description of Artificial Sequence: Synthetic oligonucleotide
  Sense strand starting at position 2755 of SEQ ID NO: 1564078
gagguaucuguccaccauu

SEQ ID NO: 1853560 - RNA, 19 nt, Artificial Sequence
  Description of Artificial Sequence: Synthetic oligonucleotide
  Antisense strand to SEQ ID NO: 1853559
aaugguggacagauaccuc

SEQ ID NO: 1853561 - RNA, 19 nt, Artificial Sequence
  Description of Artificial Sequence: Synthetic oligonucleotide
  Sense strand starting at position 2810 of SEQ ID NO: 1564078
cguccuuugacaggaagga

SEQ ID NO: 1853562 - RNA, 19 nt, Artificial Sequence
  Description of Artificial Sequence: Synthetic oligonucleotide
  Antisense strand to SEQ ID NO: 1853561
uccuuccugucaaaggacg

SEQ ID NO: 1853563 - RNA, 19 nt, Artificial Sequence
  Description of Artificial Sequence: Synthetic oligonucleotide
  Sense strand starting at position 3011 of SEQ ID NO: 1564078
gugacuuaggucuggaaac

SEQ ID NO: 1853564 - RNA, 19 nt, Artificial Sequence
  Description of Artificial Sequence: Synthetic oligonucleotide
  Antisense strand to SEQ ID NO: 1853563
guuuccagaccuaagucac

SEQ ID NO: 1853565 - RNA, 19 nt, Artificial Sequence
  Description of Artificial Sequence: Synthetic oligonucleotide
  Sense strand starting at position 3056 of SEQ ID NO: 1564078
ggcaguacaagucaggaau

SEQ ID NO: 1853566 - RNA, 19 nt, Artificial Sequence
  Description of Artificial Sequence: Synthetic oligonucleotide
  Antisense strand to SEQ ID NO: 1853565
auuccugacuuguacugcc

SEQ ID NO: 1853567 - RNA, 19 nt, Artificial Sequence
  Description of Artificial Sequence: Synthetic oligonucleotide
  Sense strand starting at position 1168 of SEQ ID NO: 1564079
uacugaagaucagcaagua

SEQ ID NO: 1853568 - RNA, 19 nt, Artificial Sequence
  Description of Artificial Sequence: Synthetic oligonucleotide
  Antisense strand to SEQ ID NO: 1853567
uacuugcugaucuucagua

SEQ ID NO: 1853569 - RNA, 19 nt, Artificial Sequence
  Description of Artificial Sequence: Synthetic oligonucleotide
  Sense strand starting at position 1299 of SEQ ID NO: 1564079
acaccaaauuaugcggaau

SEQ ID NO: 1853570 - RNA, 19 nt, Artificial Sequence
  Description of Artificial Sequence: Synthetic oligonucleotide
  Antisense strand to SEQ ID NO: 1853569
auuccgcauaauuuggugu

SEQ ID NO: 1853571 - RNA, 19 nt, Artificial Sequence
  Description of Artificial Sequence: Synthetic oligonucleotide
  Sense strand starting at position 1302 of SEQ ID NO: 1564079
ccaaauuaugcggaaucca

SEQ ID NO: 1853572 - RNA, 19 nt, Artificial Sequence
  Description of Artificial Sequence: Synthetic oligonucleotide
  Antisense strand to SEQ ID NO: 1853571
uggauuccgcauaauuugg

SEQ ID NO: 1853573 - RNA, 19 nt, Artificial Sequence
  Description of Artificial Sequence: Synthetic oligonucleotide
  Sense strand starting at position 1456 of SEQ ID NO: 1564079
gugcaauguuauuugacca

SEQ ID NO: 1853574 - RNA, 19 nt, Artificial Sequence
  Description of Artificial Sequence: Synthetic oligonucleotide
  Antisense strand to SEQ ID NO: 1853573
uggucaaauaacauugcac

SEQ ID NO: 1853575 - RNA, 19 nt, Artificial Sequence
  Description of Artificial Sequence: Synthetic oligonucleotide
  Sense strand starting at position 1705 of SEQ ID NO: 1564079
aggguugaucccggcaaga

SEQ ID NO: 1853576 - RNA, 19 nt, Artificial Sequence
  Description of Artificial Sequence: Synthetic oligonucleotide
  Antisense strand to SEQ ID NO: 1853575
ucuugccgggaucaacccu

SEQ ID NO: 1853577 - RNA, 19 nt, Artificial Sequence
  Description of Artificial Sequence: Synthetic oligonucleotide
  Sense strand starting at position 1707 of SEQ ID NO: 1564079
gguugaucccggcaagauu

SEQ ID NO: 1853578 - RNA, 19 nt, Artificial Sequence
  Description of Artificial Sequence: Synthetic oligonucleotide
  Antisense strand to SEQ ID NO: 1853577
aaucuugccgggaucaacc

SEQ ID NO: 1853579 - RNA, 19 nt, Artificial Sequence
  Description of Artificial Sequence: Synthetic oligonucleotide
  Sense strand starting at position 1720 of SEQ ID NO: 1564079
aagauuggguugcucugau

SEQ ID NO: 1853580 - RNA, 19 nt, Artificial Sequence
  Description of Artificial Sequence: Synthetic oligonucleotide
  Antisense strand to SEQ ID NO: 1853579
aucagagcaacccaaucuu

SEQ ID NO: 1853581 - RNA, 19 nt, Artificial Sequence
  Description of Artificial Sequence: Synthetic oligonucleotide
  Sense strand starting at position 1800 of SEQ ID NO: 1564079
aaagauuaagcuggauguu

SEQ ID NO: 1853582 - RNA, 19 nt, Artificial Sequence
  Description of Artificial Sequence: Synthetic oligonucleotide
  Antisense strand to SEQ ID NO: 1853581
aacauccagcuuaaucuuu

SEQ ID NO: 1853583 - RNA, 19 nt, Artificial Sequence
  Description of Artificial Sequence: Synthetic oligonucleotide
  Sense strand starting at position 1803 of SEQ ID NO: 1564079
gauuaagcuggauguuacu

SEQ ID NO: 1853584 - RNA, 19 nt, Artificial Sequence
  Description of Artificial Sequence: Synthetic oligonucleotide
  Antisense strand to SEQ ID NO: 1853583
aguaacauccagcuuaauc

SEQ ID NO: 1853585 - RNA, 19 nt, Artificial Sequence
  Description of Artificial Sequence: Synthetic oligonucleotide
  Sense strand starting at position 2201 of SEQ ID NO: 1564079
ggacuagggucgaaugaag

SEQ ID NO: 1853586 - RNA, 19 nt, Artificial Sequence
  Description of Artificial Sequence: Synthetic oligonucleotide
  Antisense strand to SEQ ID NO: 1853585
cuucauucgacccuagucc

SEQ ID NO: 1853587 - RNA, 19 nt, Artificial Sequence
  Description of Artificial Sequence: Synthetic oligonucleotide
  Sense strand starting at position 2313 of SEQ ID NO: 1564079
ggagccaauuguuccaguu

SEQ ID NO: 1853588 - RNA, 19 nt, Artificial Sequence
  Description of Artificial Sequence: Synthetic oligonucleotide
  Antisense strand to SEQ ID NO: 1853587
aacuggaacaauuggcucc

SEQ ID NO: 1853589 - RNA, 19 nt, Artificial Sequence
  Description of Artificial Sequence: Synthetic oligonucleotide
  Sense strand starting at position 2369 of SEQ ID NO: 1564079
guuauuggaugcccauuau

SEQ ID NO: 1853590 - RNA, 19 nt, Artificial Sequence
  Description of Artificial Sequence: Synthetic oligonucleotide
  Antisense strand to SEQ ID NO: 1853589
auaaugggcauccaauaac

SEQ ID NO: 1853591 - RNA, 19 nt, Artificial Sequence
  Description of Artificial Sequence: Synthetic oligonucleotide
  Sense strand starting at position 2411 of SEQ ID NO: 1564079
gagguacaguaaucuaaua

SEQ ID NO: 1853592 - RNA, 19 nt, Artificial Sequence
  Description of Artificial Sequence: Synthetic oligonucleotide
  Antisense strand to SEQ ID NO: 1853591
uauuagauuacuguaccuc

SEQ ID NO: 1853593 - RNA, 19 nt, Artificial Sequence
  Description of Artificial Sequence: Synthetic oligonucleotide
  Sense strand starting at position 2419 of SEQ ID NO: 1564079
guaaucuaauaggcuuaua

SEQ ID NO: 1853594 - RNA, 19 nt, Artificial Sequence
  Description of Artificial Sequence: Synthetic oligonucleotide
  Antisense strand to SEQ ID NO: 1853593
uauaagccuauuagauuac

SEQ ID NO: 1853595 - RNA, 19 nt, Artificial Sequence
  Description of Artificial Sequence: Synthetic oligonucleotide
  Sense strand starting at position 2472 of SEQ ID NO: 1564079
aggaacaaugauuggcauu

SEQ ID NO: 1853596 - RNA, 19 nt, Artificial Sequence
  Description of Artificial Sequence: Synthetic oligonucleotide
  Antisense strand to SEQ ID NO: 1853595
aaugccaaucauuguuccu

SEQ ID NO: 1853597 - RNA, 19 nt, Artificial Sequence
  Description of Artificial Sequence: Synthetic oligonucleotide
  Sense strand starting at position 2501 of SEQ ID NO: 1564079
ccuucuguugagggaguaa

SEQ ID NO: 1853598 - RNA, 19 nt, Artificial Sequence
  Description of Artificial Sequence: Synthetic oligonucleotide
  Antisense strand to SEQ ID NO: 1853597
uuacucccucaacagaagg

SEQ ID NO: 1853599 - RNA, 19 nt, Artificial Sequence
  Description of Artificial Sequence: Synthetic oligonucleotide
  Sense strand starting at position 2641 of SEQ ID NO: 1564079
ggcauauacuaggucucaa

SEQ ID NO: 1853600 - RNA, 19 nt, Artificial Sequence
  Description of Artificial Sequence: Synthetic oligonucleotide
  Antisense strand to SEQ ID NO: 1853599
uugagaccuaguauaugcc

SEQ ID NO: 1853601 - RNA, 19 nt, Artificial Sequence
  Description of Artificial Sequence: Synthetic oligonucleotide
  Sense strand starting at position 2724 of SEQ ID NO: 1564079
ucacaauaauucuaggaga

SEQ ID NO: 1853602 - RNA, 19 nt, Artificial Sequence
  Description of Artificial Sequence: Synthetic oligonucleotide
  Antisense strand to SEQ ID NO: 1853601
ucuccuagaauuauuguga

SEQ ID NO: 1853603 - RNA, 19 nt, Artificial Sequence
  Description of Artificial Sequence: Synthetic oligonucleotide
  Sense strand starting at position 2746 of SEQ ID NO: 1564079
gugguacuauuauucucau

SEQ ID NO: 1853604 - RNA, 19 nt, Artificial Sequence
  Description of Artificial Sequence: Synthetic oligonucleotide
  Antisense strand to SEQ ID NO: 1853603
augagaauaauaguaccac

SEQ ID NO: 1853605 - RNA, 19 nt, Artificial Sequence
  Description of Artificial Sequence: Synthetic oligonucleotide
  Sense strand starting at position 2776 of SEQ ID NO: 1564079
agaaauugaggcuguagga

SEQ ID NO: 1853606 - RNA, 19 nt, Artificial Sequence
  Description of Artificial Sequence: Synthetic oligonucleotide
  Antisense strand to SEQ ID NO: 1853605
uccuacagccucaauuucu

SEQ ID NO: 1853607 - RNA, 19 nt, Artificial Sequence
  Description of Artificial Sequence: Synthetic oligonucleotide
  Sense strand starting at position 2783 of SEQ ID NO: 1564079
gaggcuguaggauguuaaa

SEQ ID NO: 1853608 - RNA, 19 nt, Artificial Sequence
  Description of Artificial Sequence: Synthetic oligonucleotide
  Antisense strand to SEQ ID NO: 1853607
uuuaacauccuacagccuc

SEQ ID NO: 1853609 - RNA, 19 nt, Artificial Sequence
  Description of Artificial Sequence: Synthetic oligonucleotide
  Sense strand starting at position 2802 of SEQ ID NO: 1564079
cgauuugcccaaugucaac

SEQ ID NO: 1853610 - RNA, 19 nt, Artificial Sequence
  Description of Artificial Sequence: Synthetic oligonucleotide
  Antisense strand to SEQ ID NO: 1853609
guugacauugggcaaaucg

SEQ ID NO: 1853611 - RNA, 19 nt, Artificial Sequence
  Description of Artificial Sequence: Synthetic oligonucleotide
  Sense strand starting at position 2868 of SEQ ID NO: 1564079
gcccgcguuccuuuaacau

SEQ ID NO: 1853612 - RNA, 19 nt, Artificial Sequence
  Description of Artificial Sequence: Synthetic oligonucleotide
  Antisense strand to SEQ ID NO: 1853611
auguuaaaggaacgcgggc

SEQ ID NO: 1853613 - RNA, 19 nt, Artificial Sequence
  Description of Artificial Sequence: Synthetic oligonucleotide
  Sense strand starting at position 2897 of SEQ ID NO: 1564079
ugcuguuguggccugguaa

SEQ ID NO: 1853614 - RNA, 19 nt, Artificial Sequence
  Description of Artificial Sequence: Synthetic oligonucleotide
  Antisense strand to SEQ ID NO: 1853613
uuaccaggccacaacagca

SEQ ID NO: 1853615 - RNA, 19 nt, Artificial Sequence
  Description of Artificial Sequence: Synthetic oligonucleotide
  Sense strand starting at position 2904 of SEQ ID NO: 1564079
guggccugguaauuauaau

SEQ ID NO: 1853616 - RNA, 19 nt, Artificial Sequence
  Description of Artificial Sequence: Synthetic oligonucleotide
  Antisense strand to SEQ ID NO: 1853615
auuauaauuaccaggccac

SEQ ID NO: 1853617 - RNA, 19 nt, Artificial Sequence
  Description of Artificial Sequence: Synthetic oligonucleotide
  Sense strand starting at position 3016 of SEQ ID NO: 1564079
gguauauaccaguauuagu

SEQ ID NO: 1853618 - RNA, 19 nt, Artificial Sequence
  Description of Artificial Sequence: Synthetic oligonucleotide
  Antisense strand to SEQ ID NO: 1853617
acuaauacugguauauacc

SEQ ID NO: 1853619 - RNA, 19 nt, Artificial Sequence
  Description of Artificial Sequence: Synthetic oligonucleotide
  Sense strand starting at position 3029 of SEQ ID NO: 1564079
auuaguauuuaacagguga

SEQ ID NO: 1853620 - RNA, 19 nt, Artificial Sequence
  Description of Artificial Sequence: Synthetic oligonucleotide
  Antisense strand to SEQ ID NO: 1853619
ucaccuguuaaauacuaau

SEQ ID NO: 1853621 - RNA, 19 nt, Artificial Sequence
  Description of Artificial Sequence: Synthetic oligonucleotide
  Sense strand starting at position 3062 of SEQ ID NO: 1564079
aagagauguuaaguuuacu

SEQ ID NO: 1853622 - RNA, 19 nt, Artificial Sequence
  Description of Artificial Sequence: Synthetic oligonucleotide
  Antisense strand to SEQ ID NO: 1853621
aguaaacuuaacaucucuu

SEQ ID NO: 1853623 - RNA, 19 nt, Artificial Sequence
  Description of Artificial Sequence: Synthetic oligonucleotide
  Sense strand starting at position 3074 of SEQ ID NO: 1564079
guuuacuuaccugaaguca

SEQ ID NO: 1853624 - RNA, 19 nt, Artificial Sequence
  Description of Artificial Sequence: Synthetic oligonucleotide
  Antisense strand to SEQ ID NO: 1853623
ugacuucagguaaguaaac

SEQ ID NO: 1853625 - RNA, 19 nt, Artificial Sequence
  Description of Artificial Sequence: Synthetic oligonucleotide
  Sense strand starting at position 3120 of SEQ ID NO: 1564079
ggaauuugauccuagguag

SEQ ID NO: 1853626 - RNA, 19 nt, Artificial Sequence
  Description of Artificial Sequence: Synthetic oligonucleotide
  Antisense strand to SEQ ID NO: 1853625
cuaccuaggaucaaauucc

SEQ ID NO: 1853627 - RNA, 19 nt, Artificial Sequence
  Description of Artificial Sequence: Synthetic oligonucleotide
  Sense strand starting at position 3127 of SEQ ID NO: 1564079
gauccuagguagucuaaca

SEQ ID NO: 1853628 - RNA, 19 nt, Artificial Sequence
  Description of Artificial Sequence: Synthetic oligonucleotide
  Antisense strand to SEQ ID NO: 1853627
uguuagacuaccuaggauc

SEQ ID NO: 1853629 - RNA, 19 nt, Artificial Sequence
  Description of Artificial Sequence: Synthetic oligonucleotide
  Sense strand starting at position 3243 of SEQ ID NO: 1564079
aggagguggcaguggaaua

SEQ ID NO: 1853630 - RNA, 19 nt, Artificial Sequence
  Description of Artificial Sequence: Synthetic oligonucleotide
  Antisense strand to SEQ ID NO: 1853629
uauuccacugccaccuccu

SEQ ID NO: 1853631 - RNA, 19 nt, Artificial Sequence
  Description of Artificial Sequence: Synthetic oligonucleotide
  Sense strand starting at position 3265 of SEQ ID NO: 1564079
gcugaagaaccgugagagu

SEQ ID NO: 1853632 - RNA, 19 nt, Artificial Sequence
  Description of Artificial Sequence: Synthetic oligonucleotide
  Antisense strand to SEQ ID NO: 1853631
acucucacgguucuucagc

SEQ ID NO: 1853633 - RNA, 19 nt, Artificial Sequence
  Description of Artificial Sequence: Synthetic oligonucleotide
  Sense strand starting at position 3360 of SEQ ID NO: 1564079
guuggguggucucugggaa

SEQ ID NO: 1853634 - RNA, 19 nt, Artificial Sequence
  Description of Artificial Sequence: Synthetic oligonucleotide
  Antisense strand to SEQ ID NO: 1853633
uucccagagaccacccaac

SEQ ID NO: 1853635 - RNA, 19 nt, Artificial Sequence
  Description of Artificial Sequence: Synthetic oligonucleotide
  Sense strand starting at position 3361 of SEQ ID NO: 1564079
uuggguggucucugggaau

SEQ ID NO: 1853636 - RNA, 19 nt, Artificial Sequence
  Description of Artificial Sequence: Synthetic oligonucleotide
  Antisense strand to SEQ ID NO: 1853635
auucccagagaccacccaa

SEQ ID NO: 1853637 - RNA, 19 nt, Artificial Sequence
  Description of Artificial Sequence: Synthetic oligonucleotide
  Sense strand starting at position 3363 of SEQ ID NO: 1564079
ggguggucucugggaauga

SEQ ID NO: 1853638 - RNA, 19 nt, Artificial Sequence
  Description of Artificial Sequence: Synthetic oligonucleotide
  Antisense strand to SEQ ID NO: 1853637
ucauucccagagaccaccc

SEQ ID NO: 1853639 - RNA, 19 nt, Artificial Sequence
  Description of Artificial Sequence: Synthetic oligonucleotide
  Sense strand starting at position 3367 of SEQ ID NO: 1564079
ggucucugggaaugagaua

SEQ ID NO: 1853640 - RNA, 19 nt, Artificial Sequence
  Description of Artificial Sequence: Synthetic oligonucleotide
  Antisense strand to SEQ ID NO: 1853639
uaucucauucccagagacc

SEQ ID NO: 1853641 - RNA, 19 nt, Artificial Sequence
  Description of Artificial Sequence: Synthetic oligonucleotide
  Sense strand starting at position 3492 of SEQ ID NO: 1564079
ggguuuauguuaguaacau

SEQ ID NO: 1853642 - RNA, 19 nt, Artificial Sequence
  Description of Artificial Sequence: Synthetic oligonucleotide
  Antisense strand to SEQ ID NO: 1853641
auguuacuaacauaaaccc

SEQ ID NO: 1853643 - RNA, 19 nt, Artificial Sequence
  Description of Artificial Sequence: Synthetic oligonucleotide
  Sense strand starting at position 3515 of SEQ ID NO: 1564079
auaugaagaccgugaacau

SEQ ID NO: 1853644 - RNA, 19 nt, Artificial Sequence
  Description of Artificial Sequence: Synthetic oligonucleotide
  Antisense strand to SEQ ID NO: 1853643
auguucacggucuucauau

SEQ ID NO: 1853645 - RNA, 19 nt, Artificial Sequence
  Description of Artificial Sequence: Synthetic oligonucleotide
  Sense strand starting at position 3918 of SEQ ID NO: 1564079
gcuugagcuguucucuguu

SEQ ID NO: 1853646 - RNA, 19 nt, Artificial Sequence
  Description of Artificial Sequence: Synthetic oligonucleotide
  Antisense strand to SEQ ID NO: 1853645
aacagagaacagcucaagc

SEQ ID NO: 1853647 - RNA, 19 nt, Artificial Sequence
  Description of Artificial Sequence: Synthetic oligonucleotide
  Sense strand starting at position 1168 of SEQ ID NO: 1564080
uacugaagaucagcaagua

SEQ ID NO: 1853648 - RNA, 19 nt, Artificial Sequence
  Description of Artificial Sequence: Synthetic oligonucleotide
  Antisense strand to SEQ ID NO: 1853647
uacuugcugaucuucagua

SEQ ID NO: 1853649 - RNA, 19 nt, Artificial Sequence
  Description of Artificial Sequence: Synthetic oligonucleotide
  Sense strand starting at position 1299 of SEQ ID NO: 1564080
acaccaaauuaugcggaau

SEQ ID NO: 1853650 - RNA, 19 nt, Artificial Sequence
  Description of Artificial Sequence: Synthetic oligonucleotide
  Antisense strand to SEQ ID NO: 1853649
auuccgcauaauuuggugu

SEQ ID NO: 1853651 - RNA, 19 nt, Artificial Sequence
  Description of Artificial Sequence: Synthetic oligonucleotide
  Sense strand starting at position 1302 of SEQ ID NO: 1564080
ccaaauuaugcggaaucca

SEQ ID NO: 1853652 - RNA, 19 nt, Artificial Sequence
  Description of Artificial Sequence: Synthetic oligonucleotide
  Antisense strand to SEQ ID NO: 1853651
uggauuccgcauaauuugg

SEQ ID NO: 1853653 - RNA, 19 nt, Artificial Sequence
  Description of Artificial Sequence: Synthetic oligonucleotide
  Sense strand starting at position 1456 of SEQ ID NO: 1564080
gugcaauguuauuugacca

SEQ ID NO: 1853654 - RNA, 19 nt, Artificial Sequence
  Description of Artificial Sequence: Synthetic oligonucleotide
  Antisense strand to SEQ ID NO: 1853653
uggucaaauaacauugcac

SEQ ID NO: 1853655 - RNA, 19 nt, Artificial Sequence
  Description of Artificial Sequence: Synthetic oligonucleotide
  Sense strand starting at position 1705 of SEQ ID NO: 1564080
aggguugaucccggcaaga

SEQ ID NO: 1853656 - RNA, 19 nt, Artificial Sequence
  Description of Artificial Sequence: Synthetic oligonucleotide
  Antisense strand to SEQ ID NO: 1853655
ucuugccgggaucaacccu

SEQ ID NO: 1853657 - RNA, 19 nt, Artificial Sequence
  Description of Artificial Sequence: Synthetic oligonucleotide
  Sense strand starting at position 1707 of SEQ ID NO: 1564080
gguugaucccggcaagauu

SEQ ID NO: 1853658 - RNA, 19 nt, Artificial Sequence
  Description of Artificial Sequence: Synthetic oligonucleotide
  Antisense strand to SEQ ID NO: 1853657
aaucuugccgggaucaacc

SEQ ID NO: 1853659 - RNA, 19 nt, Artificial Sequence
  Description of Artificial Sequence: Synthetic oligonucleotide
  Sense strand starting at position 1720 of SEQ ID NO: 1564080
aagauuggguugcucugau

SEQ ID NO: 1853660 - RNA, 19 nt, Artificial Sequence
  Description of Artificial Sequence: Synthetic oligonucleotide
  Antisense strand to SEQ ID NO: 1853659
aucagagcaacccaaucuu

SEQ ID NO: 1853661 - RNA, 19 nt, Artificial Sequence
  Description of Artificial Sequence: Synthetic oligonucleotide
  Sense strand starting at position 1800 of SEQ ID NO: 1564080
aaagauuaagcuggauguu

SEQ ID NO: 1853662 - RNA, 19 nt, Artificial Sequence
  Description of Artificial Sequence: Synthetic oligonucleotide
  Antisense strand to SEQ ID NO: 1853661
aacauccagcuuaaucuuu

SEQ ID NO: 1853663 - RNA, 19 nt, Artificial Sequence
  Description of Artificial Sequence: Synthetic oligonucleotide
  Sense strand starting at position 1803 of SEQ ID NO: 1564080
gauuaagcuggauguuacu

SEQ ID NO: 1853664 - RNA, 19 nt, Artificial Sequence
  Description of Artificial Sequence: Synthetic oligonucleotide
  Antisense strand to SEQ ID NO: 1853663
aguaacauccagcuuaauc

SEQ ID NO: 1853665 - RNA, 19 nt, Artificial Sequence
  Description of Artificial Sequence: Synthetic oligonucleotide
  Sense strand starting at position 2201 of SEQ ID NO: 1564080
ggacuagggucgaaugaag

SEQ ID NO: 1853666 - RNA, 19 nt, Artificial Sequence
  Description of Artificial Sequence: Synthetic oligonucleotide
  Antisense strand to SEQ ID NO: 1853665
cuucauucgacccuagucc

SEQ ID NO: 1853667 - RNA, 19 nt, Artificial Sequence
  Description of Artificial Sequence: Synthetic oligonucleotide
  Sense strand starting at position 2313 of SEQ ID NO: 1564080
ggagccaauuguuccaguu

SEQ ID NO: 1853668 - RNA, 19 nt, Artificial Sequence
  Description of Artificial Sequence: Synthetic oligonucleotide
  Antisense strand to SEQ ID NO: 1853667
aacuggaacaauuggcucc

SEQ ID NO: 1853669 - RNA, 19 nt, Artificial Sequence
  Description of Artificial Sequence: Synthetic oligonucleotide
  Sense strand starting at position 2369 of SEQ ID NO: 1564080
guuauuggaugcccauuau

SEQ ID NO: 1853670 - RNA, 19 nt, Artificial Sequence
  Description of Artificial Sequence: Synthetic oligonucleotide
  Antisense strand to SEQ ID NO: 1853669
auaaugggcauccaauaac

SEQ ID NO: 1853671 - RNA, 19 nt, Artificial Sequence
  Description of Artificial Sequence: Synthetic oligonucleotide
  Sense strand starting at position 2411 of SEQ ID NO: 1564080
gagguacaguaaucuaaua

SEQ ID NO: 1853672 - RNA, 19 nt, Artificial Sequence
  Description of Artificial Sequence: Synthetic oligonucleotide
  Antisense strand to SEQ ID NO: 1853671
uauuagauuacuguaccuc

SEQ ID NO: 1853673 - RNA, 19 nt, Artificial Sequence
  Description of Artificial Sequence: Synthetic oligonucleotide
  Sense strand starting at position 2419 of SEQ ID NO: 1564080
guaaucuaauaggcuuaua

SEQ ID NO: 1853674 - RNA, 19 nt, Artificial Sequence
  Description of Artificial Sequence: Synthetic oligonucleotide
  Antisense strand to SEQ ID NO: 1853673
uauaagccuauuagauuac

SEQ ID NO: 1853675 - RNA, 19 nt, Artificial Sequence
  Description of Artificial Sequence: Synthetic oligonucleotide
  Sense strand starting at position 2472 of SEQ ID NO: 1564080
aggaacaaugauuggcauu

SEQ ID NO: 1853676 - RNA, 19 nt, Artificial Sequence
  Description of Artificial Sequence: Synthetic oligonucleotide
  Antisense strand to SEQ ID NO: 1853675
aaugccaaucauuguuccu

SEQ ID NO: 1853677 - RNA, 19 nt, Artificial Sequence
  Description of Artificial Sequence: Synthetic oligonucleotide
  Sense strand starting at position 2501 of SEQ ID NO: 1564080
ccuucuguugagggaguaa

SEQ ID NO: 1853678 - RNA, 19 nt, Artificial Sequence
  Description of Artificial Sequence: Synthetic oligonucleotide
  Antisense strand to SEQ ID NO: 1853677
uuacucccucaacagaagg

SEQ ID NO: 1853679 - RNA, 19 nt, Artificial Sequence
  Description of Artificial Sequence: Synthetic oligonucleotide
  Sense strand starting at position 2641 of SEQ ID NO: 1564080
ggcauauacuaggucucaa

SEQ ID NO: 1853680 - RNA, 19 nt, Artificial Sequence
  Description of Artificial Sequence: Synthetic oligonucleotide
  Antisense strand to SEQ ID NO: 1853679
uugagaccuaguauaugcc

SEQ ID NO: 1853681 - RNA, 19 nt, Artificial Sequence
  Description of Artificial Sequence: Synthetic oligonucleotide
  Sense strand starting at position 2724 of SEQ ID NO: 1564080
ucacaauaauucuaggaga

SEQ ID NO: 1853682 - RNA, 19 nt, Artificial Sequence
  Description of Artificial Sequence: Synthetic oligonucleotide
  Antisense strand to SEQ ID NO: 1853681
ucuccuagaauuauuguga

SEQ ID NO: 1853683 - RNA, 19 nt, Artificial Sequence
  Description of Artificial Sequence: Synthetic oligonucleotide
  Sense strand starting at position 2746 of SEQ ID NO: 1564080
gugguacuauuauucucau

SEQ ID NO: 1853684 - RNA, 19 nt, Artificial Sequence
  Description of Artificial Sequence: Synthetic oligonucleotide
  Antisense strand to SEQ ID NO: 1853683
augagaauaauaguaccac

SEQ ID NO: 1853685 - RNA, 19 nt, Artificial Sequence
  Description of Artificial Sequence: Synthetic oligonucleotide
  Sense strand starting at position 2776 of SEQ ID NO: 1564080
agaaauugaggcuguagga

SEQ ID NO: 1853686 - RNA, 19 nt, Artificial Sequence
  Description of Artificial Sequence: Synthetic oligonucleotide
  Antisense strand to SEQ ID NO: 1853685
uccuacagccucaauuucu

SEQ ID NO: 1853687 - RNA, 19 nt, Artificial Sequence
  Description of Artificial Sequence: Synthetic oligonucleotide
  Sense strand starting at position 2783 of SEQ ID NO: 1564080
gaggcuguaggauguuaaa

SEQ ID NO: 1853688 - RNA, 19 nt, Artificial Sequence
  Description of Artificial Sequence: Synthetic oligonucleotide
  Antisense strand to SEQ ID NO: 1853687
uuuaacauccuacagccuc

SEQ ID NO: 1853689 - RNA, 19 nt, Artificial Sequence
  Description of Artificial Sequence: Synthetic oligonucleotide
  Sense strand starting at position 2802 of SEQ ID NO: 1564080
cgauuugcccaaugucaac

SEQ ID NO: 1853690 - RNA, 19 nt, Artificial Sequence
  Description of Artificial Sequence: Synthetic oligonucleotide
  Antisense strand to SEQ ID NO: 1853689
guugacauugggcaaaucg

SEQ ID NO: 1853691 - RNA, 19 nt, Artificial Sequence
  Description of Artificial Sequence: Synthetic oligonucleotide
  Sense strand starting at position 2868 of SEQ ID NO: 1564080
gcccgcguuccuuuaacau

SEQ ID NO: 1853692 - RNA, 19 nt, Artificial Sequence
  Description of Artificial Sequence: Synthetic oligonucleotide
  Antisense strand to SEQ ID NO: 1853691
auguuaaaggaacgcgggc

SEQ ID NO: 1853693 - RNA, 19 nt, Artificial Sequence
  Description of Artificial Sequence: Synthetic oligonucleotide
  Sense strand starting at position 2897 of SEQ ID NO: 1564080
ugcuguuguggccugguaa

SEQ ID NO: 1853694 - RNA, 19 nt, Artificial Sequence
  Description of Artificial Sequence: Synthetic oligonucleotide
  Antisense strand to SEQ ID NO: 1853693
uuaccaggccacaacagca

SEQ ID NO: 1853695 - RNA, 19 nt, Artificial Sequence
  Description of Artificial Sequence: Synthetic oligonucleotide
  Sense strand starting at position 2904 of SEQ ID NO: 1564080
guggccugguaauuauaau

SEQ ID NO: 1853696 - RNA, 19 nt, Artificial Sequence
  Description of Artificial Sequence: Synthetic oligonucleotide
  Antisense strand to SEQ ID NO: 1853695
auuauaauuaccaggccac

SEQ ID NO: 1853697 - RNA, 19 nt, Artificial Sequence
  Description of Artificial Sequence: Synthetic oligonucleotide
  Sense strand starting at position 3016 of SEQ ID NO: 1564080
gguauauaccaguauuagu

SEQ ID NO: 1853698 - RNA, 19 nt, Artificial Sequence
  Description of Artificial Sequence: Synthetic oligonucleotide
  Antisense strand to SEQ ID NO: 1853697
acuaauacugguauauacc

SEQ ID NO: 1853699 - RNA, 19 nt, Artificial Sequence
  Description of Artificial Sequence: Synthetic oligonucleotide
  Sense strand starting at position 3029 of SEQ ID NO: 1564080
auuaguauuuaacagguga

SEQ ID NO: 1853700 - RNA, 19 nt, Artificial Sequence
  Description of Artificial Sequence: Synthetic oligonucleotide
  Antisense strand to SEQ ID NO: 1853699
ucaccuguuaaauacuaau

SEQ ID NO: 1853701 - RNA, 19 nt, Artificial Sequence
  Description of Artificial Sequence: Synthetic oligonucleotide
  Sense strand starting at position 3062 of SEQ ID NO: 1564080
aagagauguuaaguuuacu

SEQ ID NO: 1853702 - RNA, 19 nt, Artificial Sequence
  Description of Artificial Sequence: Synthetic oligonucleotide
  Antisense strand to SEQ ID NO: 1853701
aguaaacuuaacaucucuu

SEQ ID NO: 1853703 - RNA, 19 nt, Artificial Sequence
  Description of Artificial Sequence: Synthetic oligonucleotide
  Sense strand starting at position 3074 of SEQ ID NO: 1564080
guuuacuuaccugaaguca

SEQ ID NO: 1853704 - RNA, 19 nt, Artificial Sequence
  Description of Artificial Sequence: Synthetic oligonucleotide
  Antisense strand to SEQ ID NO: 1853703
ugacuucagguaaguaaac

SEQ ID NO: 1853705 - RNA, 19 nt, Artificial Sequence
  Description of Artificial Sequence: Synthetic oligonucleotide
  Sense strand starting at position 3120 of SEQ ID NO: 1564080
ggaauuugauccuagguag

SEQ ID NO: 1853706 - RNA, 19 nt, Artificial Sequence
  Description of Artificial Sequence: Synthetic oligonucleotide
  Antisense strand to SEQ ID NO: 1853705
cuaccuaggaucaaauucc

SEQ ID NO: 1853707 - RNA, 19 nt, Artificial Sequence
  Description of Artificial Sequence: Synthetic oligonucleotide
  Sense strand starting at position 3127 of SEQ ID NO: 1564080
gauccuagguagucuaaca

SEQ ID NO: 1853708 - RNA, 19 nt, Artificial Sequence
  Description of Artificial Sequence: Synthetic oligonucleotide
  Antisense strand to SEQ ID NO: 1853707
uguuagacuaccuaggauc

SEQ ID NO: 1853709 - RNA, 19 nt, Artificial Sequence
  Description of Artificial Sequence: Synthetic oligonucleotide
  Sense strand starting at position 3243 of SEQ ID NO: 1564080
aggagguggcaguggaaua

SEQ ID NO: 1853710 - RNA, 19 nt, Artificial Sequence
  Description of Artificial Sequence: Synthetic oligonucleotide
  Antisense strand to SEQ ID NO: 1853709
uauuccacugccaccuccu

SEQ ID NO: 1853711 - RNA, 19 nt, Artificial Sequence
  Description of Artificial Sequence: Synthetic oligonucleotide
  Sense strand starting at position 3265 of SEQ ID NO: 1564080
gcugaagaaccgugagagu

SEQ ID NO: 1853712 - RNA, 19 nt, Artificial Sequence
  Description of Artificial Sequence: Synthetic oligonucleotide
  Antisense strand to SEQ ID NO: 1853711
acucucacgguucuucagc

SEQ ID NO: 1853713 - RNA, 19 nt, Artificial Sequence
  Description of Artificial Sequence: Synthetic oligonucleotide
  Sense strand starting at position 3360 of SEQ ID NO: 1564080
guuggguggucucugggaa

SEQ ID NO: 1853714 - RNA, 19 nt, Artificial Sequence
  Description of Artificial Sequence: Synthetic oligonucleotide
  Antisense strand to SEQ ID NO: 1853713
uucccagagaccacccaac

SEQ ID NO: 1853715 - RNA, 19 nt, Artificial Sequence
  Description of Artificial Sequence: Synthetic oligonucleotide
  Sense strand starting at position 3361 of SEQ ID NO: 1564080
uuggguggucucugggaau

SEQ ID NO: 1853716 - RNA, 19 nt, Artificial Sequence
  Description of Artificial Sequence: Synthetic oligonucleotide
  Antisense strand to SEQ ID NO: 1853715
auucccagagaccacccaa

SEQ ID NO: 1853717 - RNA, 19 nt, Artificial Sequence
  Description of Artificial Sequence: Synthetic oligonucleotide
  Sense strand starting at position 3363 of SEQ ID NO: 1564080
ggguggucucugggaauga

SEQ ID NO: 1853718 - RNA, 19 nt, Artificial Sequence
  Description of Artificial Sequence: Synthetic oligonucleotide
  Antisense strand to SEQ ID NO: 1853717
ucauucccagagaccaccc

SEQ ID NO: 1853719 - RNA, 19 nt, Artificial Sequence
  Description of Artificial Sequence: Synthetic oligonucleotide
  Sense strand starting at position 3367 of SEQ ID NO: 1564080
ggucucugggaaugagaua

SEQ ID NO: 1853720 - RNA, 19 nt, Artificial Sequence
  Description of Artificial Sequence: Synthetic oligonucleotide
  Antisense strand to SEQ ID NO: 1853719
uaucucauucccagagacc

SEQ ID NO: 1853721 - RNA, 19 nt, Artificial Sequence
  Description of Artificial Sequence: Synthetic oligonucleotide
  Sense strand starting at position 3492 of SEQ ID NO: 1564080
ggguuuauguuaguaacau

SEQ ID NO: 1853722 - RNA, 19 nt, Artificial Sequence
  Description of Artificial Sequence: Synthetic oligonucleotide
  Antisense strand to SEQ ID NO: 1853721
auguuacuaacauaaaccc

SEQ ID NO: 1853723 - RNA, 19 nt, Artificial Sequence
  Description of Artificial Sequence: Synthetic oligonucleotide
  Sense strand starting at position 3515 of SEQ ID NO: 1564080
auaugaagaccgugaacau

SEQ ID NO: 1853724 - RNA, 19 nt, Artificial Sequence
  Description of Artificial Sequence: Synthetic oligonucleotide
  Antisense strand to SEQ ID NO: 1853723
auguucacggucuucauau

SEQ ID NO: 1853725 - RNA, 19 nt, Artificial Sequence
  Description of Artificial Sequence: Synthetic oligonucleotide
  Sense strand starting at position 3918 of SEQ ID NO: 1564080
gcuugagcuguucucuguu

SEQ ID NO: 1853726 - RNA, 19 nt, Artificial Sequence
  Description of Artificial Sequence: Synthetic oligonucleotide
  Antisense strand to SEQ ID NO: 1853725
aacagagaacagcucaagc

SEQ ID NO: 1853727 - RNA, 19 nt, Artificial Sequence
  Description of Artificial Sequence: Synthetic oligonucleotide
  Sense strand starting at position 17 of SEQ ID NO: 1564081
ccaggaaauuaauaaguau

SEQ ID NO: 1853728 - RNA, 19 nt, Artificial Sequence
  Description of Artificial Sequence: Synthetic oligonucleotide
  Antisense strand to SEQ ID NO: 1853727
auacuuauuaauuuccugg

SEQ ID NO: 1853729 - RNA, 19 nt, Artificial Sequence
  Description of Artificial Sequence: Synthetic oligonucleotide
  Sense strand starting at position 37 of SEQ ID NO: 1564081
ggagaauuaucugcccaua

SEQ ID NO: 1853730 - RNA, 19 nt, Artificial Sequence
  Description of Artificial Sequence: Synthetic oligonucleotide
  Antisense strand to SEQ ID NO: 1853729
uaugggcagauaauucucc

SEQ ID NO: 1853731 - RNA, 19 nt, Artificial Sequence
  Description of Artificial Sequence: Synthetic oligonucleotide
  Sense strand starting at position 108 of SEQ ID NO: 1564081
aaacgaauuugagaaugcu

SEQ ID NO: 1853732 - RNA, 19 nt, Artificial Sequence
  Description of Artificial Sequence: Synthetic oligonucleotide
  Antisense strand to SEQ ID NO: 1853731
agcauucucaaauucguuu

SEQ ID NO: 1853733 - RNA, 19 nt, Artificial Sequence
  Description of Artificial Sequence: Synthetic oligonucleotide
  Sense strand starting at position 229 of SEQ ID NO: 1564081
caguaugauggaggucuua

SEQ ID NO: 1853734 - RNA, 19 nt, Artificial Sequence
  Description of Artificial Sequence: Synthetic oligonucleotide
  Antisense strand to SEQ ID NO: 1853733
uaagaccuccaucauacug

SEQ ID NO: 1853735 - RNA, 19 nt, Artificial Sequence
  Description of Artificial Sequence: Synthetic oligonucleotide
  Sense strand starting at position 559 of SEQ ID NO: 1564081
auaaguggaauccgguuaa

SEQ ID NO: 1853736 - RNA, 19 nt, Artificial Sequence
  Description of Artificial Sequence: Synthetic oligonucleotide
  Antisense strand to SEQ ID NO: 1853735
uuaaccggauuccacuuau

SEQ ID NO: 1853737 - RNA, 19 nt, Artificial Sequence
  Description of Artificial Sequence: Synthetic oligonucleotide
  Sense strand starting at position 563 of SEQ ID NO: 1564081
guggaauccgguuaagaaa

SEQ ID NO: 1853738 - RNA, 19 nt, Artificial Sequence
  Description of Artificial Sequence: Synthetic oligonucleotide
  Antisense strand to SEQ ID NO: 1853737
uuucuuaaccggauuccac

SEQ ID NO: 1853739 - RNA, 19 nt, Artificial Sequence
  Description of Artificial Sequence: Synthetic oligonucleotide
  Sense strand starting at position 595 of SEQ ID NO: 1564081
agagcaucaaugugcagaa

SEQ ID NO: 1853740 - RNA, 19 nt, Artificial Sequence
  Description of Artificial Sequence: Synthetic oligonucleotide
  Antisense strand to SEQ ID NO: 1853739
uucugcacauugaugcucu

SEQ ID NO: 1853741 - RNA, 19 nt, Artificial Sequence
  Description of Artificial Sequence: Synthetic oligonucleotide
  Sense strand starting at position 722 of SEQ ID NO: 1564081
ucuggcuuccugggaagaa

SEQ ID NO: 1853742 - RNA, 19 nt, Artificial Sequence
  Description of Artificial Sequence: Synthetic oligonucleotide
  Antisense strand to SEQ ID NO: 1853741
uucuucccaggaagccaga

SEQ ID NO: 1853743 - RNA, 19 nt, Artificial Sequence
  Description of Artificial Sequence: Synthetic oligonucleotide
  Sense strand starting at position 786 of SEQ ID NO: 1564081
caacgaaucucagugcucu

SEQ ID NO: 1853744 - RNA, 19 nt, Artificial Sequence
  Description of Artificial Sequence: Synthetic oligonucleotide
  Antisense strand to SEQ ID NO: 1853743
agagcacugagauucguug

SEQ ID NO: 1853745 - RNA, 19 nt, Artificial Sequence
  Description of Artificial Sequence: Synthetic oligonucleotide
  Sense strand starting at position 787 of SEQ ID NO: 1564081
aacgaaucucagugcucua

SEQ ID NO: 1853746 - RNA, 19 nt, Artificial Sequence
  Description of Artificial Sequence: Synthetic oligonucleotide
  Antisense strand to SEQ ID NO: 1853745
uagagcacugagauucguu

SEQ ID NO: 1853747 - RNA, 19 nt, Artificial Sequence
  Description of Artificial Sequence: Synthetic oligonucleotide
  Sense strand starting at position 836 of SEQ ID NO: 1564081
guguuauugggaggguaau

SEQ ID NO: 1853748 - RNA, 19 nt, Artificial Sequence
  Description of Artificial Sequence: Synthetic oligonucleotide
  Antisense strand to SEQ ID NO: 1853747
auuacccucccaauaacac

SEQ ID NO: 1853749 - RNA, 19 nt, Artificial Sequence
  Description of Artificial Sequence: Synthetic oligonucleotide
  Sense strand starting at position 837 of SEQ ID NO: 1564081
uguuauugggaggguaauu

SEQ ID NO: 1853750 - RNA, 19 nt, Artificial Sequence
  Description of Artificial Sequence: Synthetic oligonucleotide
  Antisense strand to SEQ ID NO: 1853749
aauuacccucccaauaaca

SEQ ID NO: 1853751 - RNA, 19 nt, Artificial Sequence
  Description of Artificial Sequence: Synthetic oligonucleotide
  Sense strand starting at position 852 of SEQ ID NO: 1564081
aauuaagacuuagggaaag

SEQ ID NO: 1853752 - RNA, 19 nt, Artificial Sequence
  Description of Artificial Sequence: Synthetic oligonucleotide
  Antisense strand to SEQ ID NO: 1853751
cuuucccuaagucuuaauu

SEQ ID NO: 1853753 - RNA, 19 nt, Artificial Sequence
  Description of Artificial Sequence: Synthetic oligonucleotide
  Sense strand starting at position 862 of SEQ ID NO: 1564081
uagggaaagucccugacau

SEQ ID NO: 1853754 - RNA, 19 nt, Artificial Sequence
  Description of Artificial Sequence: Synthetic oligonucleotide
  Antisense strand to SEQ ID NO: 1853753
augucagggacuuucccua

SEQ ID NO: 1853755 - RNA, 19 nt, Artificial Sequence
  Description of Artificial Sequence: Synthetic oligonucleotide
  Sense strand starting at position 863 of SEQ ID NO: 1564081
agggaaagucccugacauu

SEQ ID NO: 1853756 - RNA, 19 nt, Artificial Sequence
  Description of Artificial Sequence: Synthetic oligonucleotide
  Antisense strand to SEQ ID NO: 1853755
aaugucagggacuuucccu

SEQ ID NO: 1853757 - RNA, 19 nt, Artificial Sequence
  Description of Artificial Sequence: Synthetic oligonucleotide
  Sense strand starting at position 1001 of SEQ ID NO: 1564081
aaggaugacugucucaauu

SEQ ID NO: 1853758 - RNA, 19 nt, Artificial Sequence
  Description of Artificial Sequence: Synthetic oligonucleotide
  Antisense strand to SEQ ID NO: 1853757
aauugagacagucauccuu

SEQ ID NO: 1853759 - RNA, 19 nt, Artificial Sequence
  Description of Artificial Sequence: Synthetic oligonucleotide
  Sense strand starting at position 1003 of SEQ ID NO: 1564081
ggaugacugucucaauuuc

SEQ ID NO: 1853760 - RNA, 19 nt, Artificial Sequence
  Description of Artificial Sequence: Synthetic oligonucleotide
  Antisense strand to SEQ ID NO: 1853759
gaaauugagacagucaucc

SEQ ID NO: 1853761 - RNA, 19 nt, Artificial Sequence
  Description of Artificial Sequence: Synthetic oligonucleotide
  Sense strand starting at position 1108 of SEQ ID NO: 1564081
agguuuaaugccuggccaa

SEQ ID NO: 1853762 - RNA, 19 nt, Artificial Sequence
  Description of Artificial Sequence: Synthetic oligonucleotide
  Antisense strand to SEQ ID NO: 1853761
uuggccaggcauuaaaccu

SEQ ID NO: 1853763 - RNA, 19 nt, Artificial Sequence
  Description of Artificial Sequence: Synthetic oligonucleotide
  Sense strand starting at position 1133 of SEQ ID NO: 1564081
cgaacauacccuugcauaa

SEQ ID NO: 1853764 - RNA, 19 nt, Artificial Sequence
  Description of Artificial Sequence: Synthetic oligonucleotide
  Antisense strand to SEQ ID NO: 1853763
uuaugcaaggguauguucg

SEQ ID NO: 1853765 - RNA, 19 nt, Artificial Sequence
  Description of Artificial Sequence: Synthetic oligonucleotide
  Sense strand starting at position 1268 of SEQ ID NO: 1564081
ucgccuccauaucuagaaa

SEQ ID NO: 1853766 - RNA, 19 nt, Artificial Sequence
  Description of Artificial Sequence: Synthetic oligonucleotide
  Antisense strand to SEQ ID NO: 1853765
uuucuagauauggaggcga

SEQ ID NO: 1853767 - RNA, 19 nt, Artificial Sequence
  Description of Artificial Sequence: Synthetic oligonucleotide
  Sense strand starting at position 1405 of SEQ ID NO: 1564081
acgcucaagucucugaaua

SEQ ID NO: 1853768 - RNA, 19 nt, Artificial Sequence
  Description of Artificial Sequence: Synthetic oligonucleotide
  Antisense strand to SEQ ID NO: 1853767
uauucagagacuugagcgu

SEQ ID NO: 1853769 - RNA, 19 nt, Artificial Sequence
  Description of Artificial Sequence: Synthetic oligonucleotide
  Sense strand starting at position 1406 of SEQ ID NO: 1564081
cgcucaagucucugaauaa

SEQ ID NO: 1853770 - RNA, 19 nt, Artificial Sequence
  Description of Artificial Sequence: Synthetic oligonucleotide
  Antisense strand to SEQ ID NO: 1853769
uuauucagagacuugagcg

SEQ ID NO: 1853771 - RNA, 19 nt, Artificial Sequence
  Description of Artificial Sequence: Synthetic oligonucleotide
  Sense strand starting at position 1410 of SEQ ID NO: 1564081
caagucucugaauaaacgu

SEQ ID NO: 1853772 - RNA, 19 nt, Artificial Sequence
  Description of Artificial Sequence: Synthetic oligonucleotide
  Antisense strand to SEQ ID NO: 1853771
acguuuauucagagacuug

SEQ ID NO: 1853773 - RNA, 19 nt, Artificial Sequence
  Description of Artificial Sequence: Synthetic oligonucleotide
  Sense strand starting at position 1613 of SEQ ID NO: 1564081
gaacgaguucgcuacaagc

SEQ ID NO: 1853774 - RNA, 19 nt, Artificial Sequence
  Description of Artificial Sequence: Synthetic oligonucleotide
  Antisense strand to SEQ ID NO: 1853773
gcuuguagcgaacucguuc

SEQ ID NO: 1853775 - RNA, 19 nt, Artificial Sequence
  Description of Artificial Sequence: Synthetic oligonucleotide
  Sense strand starting at position 2204 of SEQ ID NO: 1564081
gcagacagcccgugauaaa

SEQ ID NO: 1853776 - RNA, 19 nt, Artificial Sequence
  Description of Artificial Sequence: Synthetic oligonucleotide
  Antisense strand to SEQ ID NO: 1853775
uuuaucacgggcugucugc

SEQ ID NO: 1853777 - RNA, 19 nt, Artificial Sequence
  Description of Artificial Sequence: Synthetic oligonucleotide
  Sense strand starting at position 2205 of SEQ ID NO: 1564081
cagacagcccgugauaaau

SEQ ID NO: 1853778 - RNA, 19 nt, Artificial Sequence
  Description of Artificial Sequence: Synthetic oligonucleotide
  Antisense strand to SEQ ID NO: 1853777
auuuaucacgggcugucug

SEQ ID NO: 1853779 - RNA, 19 nt, Artificial Sequence
  Description of Artificial Sequence: Synthetic oligonucleotide
  Sense strand starting at position 2421 of SEQ ID NO: 1564081
gacagucgugucggaggaa

SEQ ID NO: 1853780 - RNA, 19 nt, Artificial Sequence
  Description of Artificial Sequence: Synthetic oligonucleotide
  Antisense strand to SEQ ID NO: 1853779
uuccuccgacacgacuguc

SEQ ID NO: 1853781 - RNA, 19 nt, Artificial Sequence
  Description of Artificial Sequence: Synthetic oligonucleotide
  Sense strand starting at position 2782 of SEQ ID NO: 1564081
ggcggauuacuugaaacga

SEQ ID NO: 1853782 - RNA, 19 nt, Artificial Sequence
  Description of Artificial Sequence: Synthetic oligonucleotide
  Antisense strand to SEQ ID NO: 1853781
ucguuucaaguaauccgcc

SEQ ID NO: 1853783 - RNA, 19 nt, Artificial Sequence
  Description of Artificial Sequence: Synthetic oligonucleotide
  Sense strand starting at position 3049 of SEQ ID NO: 1564081
ccauguauauuugcaguca

SEQ ID NO: 1853784 - RNA, 19 nt, Artificial Sequence
  Description of Artificial Sequence: Synthetic oligonucleotide
  Antisense strand to SEQ ID NO: 1853783
ugacugcaaauauacaugg

SEQ ID NO: 1853785 - RNA, 19 nt, Artificial Sequence
  Description of Artificial Sequence: Synthetic oligonucleotide
  Sense strand starting at position 3119 of SEQ ID NO: 1564081
uccacaagaguccauguau

SEQ ID NO: 1853786 - RNA, 19 nt, Artificial Sequence
  Description of Artificial Sequence: Synthetic oligonucleotide
  Antisense strand to SEQ ID NO: 1853785
auacauggacucuugugga

SEQ ID NO: 1853787 - RNA, 19 nt, Artificial Sequence
  Description of Artificial Sequence: Synthetic oligonucleotide
  Sense strand starting at position 3261 of SEQ ID NO: 1564081
acucgugacuuggucacua

SEQ ID NO: 1853788 - RNA, 19 nt, Artificial Sequence
  Description of Artificial Sequence: Synthetic oligonucleotide
  Antisense strand to SEQ ID NO: 1853787
uagugaccaagucacgagu

SEQ ID NO: 1853789 - RNA, 19 nt, Artificial Sequence
  Description of Artificial Sequence: Synthetic oligonucleotide
  Sense strand starting at position 3263 of SEQ ID NO: 1564081
ucgugacuuggucacuaau

SEQ ID NO: 1853790 - RNA, 19 nt, Artificial Sequence
  Description of Artificial Sequence: Synthetic oligonucleotide
  Antisense strand to SEQ ID NO: 1853789
auuagugaccaagucacga

SEQ ID NO: 1853791 - RNA, 19 nt, Artificial Sequence
  Description of Artificial Sequence: Synthetic oligonucleotide
  Sense strand starting at position 3265 of SEQ ID NO: 1564081
gugacuuggucacuaauag

SEQ ID NO: 1853792 - RNA, 19 nt, Artificial Sequence
  Description of Artificial Sequence: Synthetic oligonucleotide
  Antisense strand to SEQ ID NO: 1853791
cuauuagugaccaagucac

SEQ ID NO: 1853793 - RNA, 19 nt, Artificial Sequence
  Description of Artificial Sequence: Synthetic oligonucleotide
  Sense strand starting at position 3316 of SEQ ID NO: 1564081
ugaugcagaugucuccaua

SEQ ID NO: 1853794 - RNA, 19 nt, Artificial Sequence
  Description of Artificial Sequence: Synthetic oligonucleotide
  Antisense strand to SEQ ID NO: 1853793
uauggagacaucugcauca

SEQ ID NO: 1853795 - RNA, 19 nt, Artificial Sequence
  Description of Artificial Sequence: Synthetic oligonucleotide
  Sense strand starting at position 3382 of SEQ ID NO: 1564081
auagaacuauguuaagaag

SEQ ID NO: 1853796 - RNA, 19 nt, Artificial Sequence
  Description of Artificial Sequence: Synthetic oligonucleotide
  Antisense strand to SEQ ID NO: 1853795
cuucuuaacauaguucuau

SEQ ID NO: 1853797 - RNA, 19 nt, Artificial Sequence
  Description of Artificial Sequence: Synthetic oligonucleotide
  Sense strand starting at position 3391 of SEQ ID NO: 1564081
uguuaagaagcccauguau

SEQ ID NO: 1853798 - RNA, 19 nt, Artificial Sequence
  Description of Artificial Sequence: Synthetic oligonucleotide
  Antisense strand to SEQ ID NO: 1853797
auacaugggcuucuuaaca

SEQ ID NO: 1853799 - RNA, 19 nt, Artificial Sequence
  Description of Artificial Sequence: Synthetic oligonucleotide
  Sense strand starting at position 3393 of SEQ ID NO: 1564081
uuaagaagcccauguauua

SEQ ID NO: 1853800 - RNA, 19 nt, Artificial Sequence
  Description of Artificial Sequence: Synthetic oligonucleotide
  Antisense strand to SEQ ID NO: 1853799
uaauacaugggcuucuuaa

SEQ ID NO: 1853801 - RNA, 19 nt, Artificial Sequence
  Description of Artificial Sequence: Synthetic oligonucleotide
  Sense strand starting at position 3887 of SEQ ID NO: 1564081
guuuauuuguaccuuucuu

SEQ ID NO: 1853802 - RNA, 19 nt, Artificial Sequence
  Description of Artificial Sequence: Synthetic oligonucleotide
  Antisense strand to SEQ ID NO: 1853801
aagaaagguacaaauaaac

SEQ ID NO: 1853803 - RNA, 19 nt, Artificial Sequence
  Description of Artificial Sequence: Synthetic oligonucleotide
  Sense strand starting at position 3974 of SEQ ID NO: 1564081
gggcuugauaguuacuaug

SEQ ID NO: 1853804 - RNA, 19 nt, Artificial Sequence
  Description of Artificial Sequence: Synthetic oligonucleotide
  Antisense strand to SEQ ID NO: 1853803
cauaguaacuaucaagccc

SEQ ID NO: 1853805 - RNA, 19 nt, Artificial Sequence
  Description of Artificial Sequence: Synthetic oligonucleotide
  Sense strand starting at position 3976 of SEQ ID NO: 1564081
gcuugauaguuacuaugua

SEQ ID NO: 1853806 - RNA, 19 nt, Artificial Sequence
  Description of Artificial Sequence: Synthetic oligonucleotide
  Antisense strand to SEQ ID NO: 1853805
uacauaguaacuaucaagc

SEQ ID NO: 1853807 - RNA, 19 nt, Artificial Sequence
  Description of Artificial Sequence: Synthetic oligonucleotide
  Sense strand starting at position 87 of SEQ ID NO: 1564082
ucaugauuauuugcauguu

SEQ ID NO: 1853808 - RNA, 19 nt, Artificial Sequence
  Description of Artificial Sequence: Synthetic oligonucleotide
  Antisense strand to SEQ ID NO: 1853807
aacaugcaaauaaucauga

SEQ ID NO: 1853809 - RNA, 19 nt, Artificial Sequence
  Description of Artificial Sequence: Synthetic oligonucleotide
  Sense strand starting at position 144 of SEQ ID NO: 1564082
guuucugagacuugacaga

SEQ ID NO: 1853810 - RNA, 19 nt, Artificial Sequence
  Description of Artificial Sequence: Synthetic oligonucleotide
  Antisense strand to SEQ ID NO: 1853809
ucugucaagucucagaaac

SEQ ID NO: 1853811 - RNA, 19 nt, Artificial Sequence
  Description of Artificial Sequence: Synthetic oligonucleotide
  Sense strand starting at position 646 of SEQ ID NO: 1564082
caugaauccugaguccaug

SEQ ID NO: 1853812 - RNA, 19 nt, Artificial Sequence
  Description of Artificial Sequence: Synthetic oligonucleotide
  Antisense strand to SEQ ID NO: 1853811
cauggacucaggauucaug

SEQ ID NO: 1853813 - RNA, 19 nt, Artificial Sequence
  Description of Artificial Sequence: Synthetic oligonucleotide
  Sense strand starting at position 649 of SEQ ID NO: 1564082
gaauccugaguccauguaa

SEQ ID NO: 1853814 - RNA, 19 nt, Artificial Sequence
  Description of Artificial Sequence: Synthetic oligonucleotide
  Antisense strand to SEQ ID NO: 1853813
uuacauggacucaggauuc

SEQ ID NO: 1853815 - RNA, 19 nt, Artificial Sequence
  Description of Artificial Sequence: Synthetic oligonucleotide
  Sense strand starting at position 671 of SEQ ID NO: 1564082
uacuaugugguauguggaa

SEQ ID NO: 1853816 - RNA, 19 nt, Artificial Sequence
  Description of Artificial Sequence: Synthetic oligonucleotide
  Antisense strand to SEQ ID NO: 1853815
uuccacauaccacauagua

SEQ ID NO: 1853817 - RNA, 19 nt, Artificial Sequence
  Description of Artificial Sequence: Synthetic oligonucleotide
  Sense strand starting at position 673 of SEQ ID NO: 1564082
cuaugugguauguggaaua

SEQ ID NO: 1853818 - RNA, 19 nt, Artificial Sequence
  Description of Artificial Sequence: Synthetic oligonucleotide
  Antisense strand to SEQ ID NO: 1853817
uauuccacauaccacauag

SEQ ID NO: 1853819 - RNA, 19 nt, Artificial Sequence
  Description of Artificial Sequence: Synthetic oligonucleotide
  Sense strand starting at position 707 of SEQ ID NO: 1564082
uauuaaaucgauuggaagu

SEQ ID NO: 1853820 - RNA, 19 nt, Artificial Sequence
  Description of Artificial Sequence: Synthetic oligonucleotide
  Antisense strand to SEQ ID NO: 1853819
acuuccaaucgauuuaaua

SEQ ID NO: 1853821 - RNA, 19 nt, Artificial Sequence
  Description of Artificial Sequence: Synthetic oligonucleotide
  Sense strand starting at position 829 of SEQ ID NO: 1564082
aacaguggccacggaaaua

SEQ ID NO: 1853822 - RNA, 19 nt, Artificial Sequence
  Description of Artificial Sequence: Synthetic oligonucleotide
  Antisense strand to SEQ ID NO: 1853821
uauuuccguggccacuguu

SEQ ID NO: 1853823 - RNA, 19 nt, Artificial Sequence
  Description of Artificial Sequence: Synthetic oligonucleotide
  Sense strand starting at position 1009 of SEQ ID NO: 1564082
acuaaacucuuaguuuagu

SEQ ID NO: 1853824 - RNA, 19 nt, Artificial Sequence
  Description of Artificial Sequence: Synthetic oligonucleotide
  Antisense strand to SEQ ID NO: 1853823
acuaaacuaagaguuuagu

SEQ ID NO: 1853825 - RNA, 19 nt, Artificial Sequence
  Description of Artificial Sequence: Synthetic oligonucleotide
  Sense strand starting at position 1010 of SEQ ID NO: 1564082
cuaaacucuuaguuuaguu

SEQ ID NO: 1853826 - RNA, 19 nt, Artificial Sequence
  Description of Artificial Sequence: Synthetic oligonucleotide
  Antisense strand to SEQ ID NO: 1853825
aacuaaacuaagaguuuag

SEQ ID NO: 1853827 - RNA, 19 nt, Artificial Sequence
  Description of Artificial Sequence: Synthetic oligonucleotide
  Sense strand starting at position 1057 of SEQ ID NO: 1564082
aaaguauaguguuccgaua

SEQ ID NO: 1853828 - RNA, 19 nt, Artificial Sequence
  Description of Artificial Sequence: Synthetic oligonucleotide
  Antisense strand to SEQ ID NO: 1853827
uaucggaacacuauacuuu

SEQ ID NO: 1853829 - RNA, 19 nt, Artificial Sequence
  Description of Artificial Sequence: Synthetic oligonucleotide
  Sense strand starting at position 1099 of SEQ ID NO: 1564082
uaacaaacaccgugagauc

SEQ ID NO: 1853830 - RNA, 19 nt, Artificial Sequence
  Description of Artificial Sequence: Synthetic oligonucleotide
  Antisense strand to SEQ ID NO: 1853829
gaucucacgguguuuguua

SEQ ID NO: 1853831 - RNA, 19 nt, Artificial Sequence
  Description of Artificial Sequence: Synthetic oligonucleotide
  Sense strand starting at position 1108 of SEQ ID NO: 1564082
ccgugagauccauaagcug

SEQ ID NO: 1853832 - RNA, 19 nt, Artificial Sequence
  Description of Artificial Sequence: Synthetic oligonucleotide
  Antisense strand to SEQ ID NO: 1853831
cagcuuauggaucucacgg

SEQ ID NO: 1853833 - RNA, 19 nt, Artificial Sequence
  Description of Artificial Sequence: Synthetic oligonucleotide
  Sense strand starting at position 1151 of SEQ ID NO: 1564082
agaauauucuugguuacua

SEQ ID NO: 1853834 - RNA, 19 nt, Artificial Sequence
  Description of Artificial Sequence: Synthetic oligonucleotide
  Antisense strand to SEQ ID NO: 1853833
uaguaaccaagaauauucu

SEQ ID NO: 1853835 - RNA, 19 nt, Artificial Sequence
  Description of Artificial Sequence: Synthetic oligonucleotide
  Sense strand starting at position 1174 of SEQ ID NO: 1564082
ucagaacguuuacugauua

SEQ ID NO: 1853836 - RNA, 19 nt, Artificial Sequence
  Description of Artificial Sequence: Synthetic oligonucleotide
  Antisense strand to SEQ ID NO: 1853835
uaaucaguaaacguucuga

SEQ ID NO: 1853837 - RNA, 19 nt, Artificial Sequence
  Description of Artificial Sequence: Synthetic oligonucleotide
  Sense strand starting at position 1222 of SEQ ID NO: 1564082
ccauguuacuguuugaaac

SEQ ID NO: 1853838 - RNA, 19 nt, Artificial Sequence
  Description of Artificial Sequence: Synthetic oligonucleotide
  Antisense strand to SEQ ID NO: 1853837
guuucaaacaguaacaugg

SEQ ID NO: 1853839 - RNA, 19 nt, Artificial Sequence
  Description of Artificial Sequence: Synthetic oligonucleotide
  Sense strand starting at position 1234 of SEQ ID NO: 1564082
uugaaacuguaucugcuua

SEQ ID NO: 1853840 - RNA, 19 nt, Artificial Sequence
  Description of Artificial Sequence: Synthetic oligonucleotide
  Antisense strand to SEQ ID NO: 1853839
uaagcagauacaguuucaa

SEQ ID NO: 1853841 - RNA, 19 nt, Artificial Sequence
  Description of Artificial Sequence: Synthetic oligonucleotide
  Sense strand starting at position 1236 of SEQ ID NO: 1564082
gaaacuguaucugcuuaga

SEQ ID NO: 1853842 - RNA, 19 nt, Artificial Sequence
  Description of Artificial Sequence: Synthetic oligonucleotide
  Antisense strand to SEQ ID NO: 1853841
ucuaagcagauacaguuuc

SEQ ID NO: 1853843 - RNA, 19 nt, Artificial Sequence
  Description of Artificial Sequence: Synthetic oligonucleotide
  Sense strand starting at position 1239 of SEQ ID NO: 1564082
acuguaucugcuuagaggu

SEQ ID NO: 1853844 - RNA, 19 nt, Artificial Sequence
  Description of Artificial Sequence: Synthetic oligonucleotide
  Antisense strand to SEQ ID NO: 1853843
accucuaagcagauacagu

SEQ ID NO: 1853845 - RNA, 19 nt, Artificial Sequence
  Description of Artificial Sequence: Synthetic oligonucleotide
  Sense strand starting at position 1254 of SEQ ID NO: 1564082
agguuagggucuuucaaga

SEQ ID NO: 1853846 - RNA, 19 nt, Artificial Sequence
  Description of Artificial Sequence: Synthetic oligonucleotide
  Antisense strand to SEQ ID NO: 1853845
ucuugaaagacccuaaccu

SEQ ID NO: 1853847 - RNA, 19 nt, Artificial Sequence
  Description of Artificial Sequence: Synthetic oligonucleotide
  Sense strand starting at position 1409 of SEQ ID NO: 1564082
ugcuccuucguacacuaaa

SEQ ID NO: 1853848 - RNA, 19 nt, Artificial Sequence
  Description of Artificial Sequence: Synthetic oligonucleotide
  Antisense strand to SEQ ID NO: 1853847
uuuaguguacgaaggagca

SEQ ID NO: 1853849 - RNA, 19 nt, Artificial Sequence
  Description of Artificial Sequence: Synthetic oligonucleotide
  Sense strand starting at position 1870 of SEQ ID NO: 1564082
cguccuaagagcucgcuaa

SEQ ID NO: 1853850 - RNA, 19 nt, Artificial Sequence
  Description of Artificial Sequence: Synthetic oligonucleotide
  Antisense strand to SEQ ID NO: 1853849
uuagcgagcucuuaggacg

SEQ ID NO: 1853851 - RNA, 19 nt, Artificial Sequence
  Description of Artificial Sequence: Synthetic oligonucleotide
  Sense strand starting at position 1874 of SEQ ID NO: 1564082
cuaagagcucgcuaacuaa

SEQ ID NO: 1853852 - RNA, 19 nt, Artificial Sequence
  Description of Artificial Sequence: Synthetic oligonucleotide
  Antisense strand to SEQ ID NO: 1853851
uuaguuagcgagcucuuag

SEQ ID NO: 1853853 - RNA, 19 nt, Artificial Sequence
  Description of Artificial Sequence: Synthetic oligonucleotide
  Sense strand starting at position 2056 of SEQ ID NO: 1564082
gucagaagucccgaguuga

SEQ ID NO: 1853854 - RNA, 19 nt, Artificial Sequence
  Description of Artificial Sequence: Synthetic oligonucleotide
  Antisense strand to SEQ ID NO: 1853853
ucaacucgggacuucugac

SEQ ID NO: 1853855 - RNA, 19 nt, Artificial Sequence
  Description of Artificial Sequence: Synthetic oligonucleotide
  Sense strand starting at position 2087 of SEQ ID NO: 1564082
gaaagagggugucuccuaa

SEQ ID NO: 1853856 - RNA, 19 nt, Artificial Sequence
  Description of Artificial Sequence: Synthetic oligonucleotide
  Antisense strand to SEQ ID NO: 1853855
uuaggagacacccucuuuc

SEQ ID NO: 1853857 - RNA, 19 nt, Artificial Sequence
  Description of Artificial Sequence: Synthetic oligonucleotide
  Sense strand starting at position 2161 of SEQ ID NO: 1564082
gccucuugugugccuuauu

SEQ ID NO: 1853858 - RNA, 19 nt, Artificial Sequence
  Description of Artificial Sequence: Synthetic oligonucleotide
  Antisense strand to SEQ ID NO: 1853857
aauaaggcacacaagaggc

SEQ ID NO: 1853859 - RNA, 19 nt, Artificial Sequence
  Description of Artificial Sequence: Synthetic oligonucleotide
  Sense strand starting at position 2261 of SEQ ID NO: 1564082
gucucacguacagaugauu

SEQ ID NO: 1853860 - RNA, 19 nt, Artificial Sequence
  Description of Artificial Sequence: Synthetic oligonucleotide
  Antisense strand to SEQ ID NO: 1853859
aaucaucuguacgugagac

SEQ ID NO: 1853861 - RNA, 19 nt, Artificial Sequence
  Description of Artificial Sequence: Synthetic oligonucleotide
  Sense strand starting at position 2264 of SEQ ID NO: 1564082
ucacguacagaugauucua

SEQ ID NO: 1853862 - RNA, 19 nt, Artificial Sequence
  Description of Artificial Sequence: Synthetic oligonucleotide
  Antisense strand to SEQ ID NO: 1853861
uagaaucaucuguacguga

SEQ ID NO: 1853863 - RNA, 19 nt, Artificial Sequence
  Description of Artificial Sequence: Synthetic oligonucleotide
  Sense strand starting at position 2737 of SEQ ID NO: 1564082
cugcuugaacucugacauc

SEQ ID NO: 1853864 - RNA, 19 nt, Artificial Sequence
  Description of Artificial Sequence: Synthetic oligonucleotide
  Antisense strand to SEQ ID NO: 1853863
gaugucagaguucaagcag

SEQ ID NO: 1853865 - RNA, 19 nt, Artificial Sequence
  Description of Artificial Sequence: Synthetic oligonucleotide
  Sense strand starting at position 2822 of SEQ ID NO: 1564082
gaaaucgucugguuauauc

SEQ ID NO: 1853866 - RNA, 19 nt, Artificial Sequence
  Description of Artificial Sequence: Synthetic oligonucleotide
  Antisense strand to SEQ ID NO: 1853865
gauauaaccagacgauuuc

SEQ ID NO: 1853867 - RNA, 19 nt, Artificial Sequence
  Description of Artificial Sequence: Synthetic oligonucleotide
  Sense strand starting at position 2855 of SEQ ID NO: 1564082
aucugauccugcuucgaaa

SEQ ID NO: 1853868 - RNA, 19 nt, Artificial Sequence
  Description of Artificial Sequence: Synthetic oligonucleotide
  Antisense strand to SEQ ID NO: 1853867
uuucgaagcaggaucagau

SEQ ID NO: 1853869 - RNA, 19 nt, Artificial Sequence
  Description of Artificial Sequence: Synthetic oligonucleotide
  Sense strand starting at position 3341 of SEQ ID NO: 1564082
ucgauuccuuagcuuggaa

SEQ ID NO: 1853870 - RNA, 19 nt, Artificial Sequence
  Description of Artificial Sequence: Synthetic oligonucleotide
  Antisense strand to SEQ ID NO: 1853869
uuccaagcuaaggaaucga

SEQ ID NO: 1853871 - RNA, 19 nt, Artificial Sequence
  Description of Artificial Sequence: Synthetic oligonucleotide
  Sense strand starting at position 3473 of SEQ ID NO: 1564082
ggguaaaucccucauucuu

SEQ ID NO: 1853872 - RNA, 19 nt, Artificial Sequence
  Description of Artificial Sequence: Synthetic oligonucleotide
  Antisense strand to SEQ ID NO: 1853871
aagaaugagggauuuaccc

SEQ ID NO: 1853873 - RNA, 19 nt, Artificial Sequence
  Description of Artificial Sequence: Synthetic oligonucleotide
  Sense strand starting at position 3592 of SEQ ID NO: 1564082
gauggagccugcccuaauu

SEQ ID NO: 1853874 - RNA, 19 nt, Artificial Sequence
  Description of Artificial Sequence: Synthetic oligonucleotide
  Antisense strand to SEQ ID NO: 1853873
aauuagggcaggcuccauc

SEQ ID NO: 1853875 - RNA, 19 nt, Artificial Sequence
  Description of Artificial Sequence: Synthetic oligonucleotide
  Sense strand starting at position 3655 of SEQ ID NO: 1564082
uguccagcacuugauaaau

SEQ ID NO: 1853876 - RNA, 19 nt, Artificial Sequence
  Description of Artificial Sequence: Synthetic oligonucleotide
  Antisense strand to SEQ ID NO: 1853875
auuuaucaagugcuggaca

SEQ ID NO: 1853877 - RNA, 19 nt, Artificial Sequence
  Description of Artificial Sequence: Synthetic oligonucleotide
  Sense strand starting at position 3726 of SEQ ID NO: 1564082
acuguacuaucccugagag

SEQ ID NO: 1853878 - RNA, 19 nt, Artificial Sequence
  Description of Artificial Sequence: Synthetic oligonucleotide
  Antisense strand to SEQ ID NO: 1853877
cucucagggauaguacagu

SEQ ID NO: 1853879 - RNA, 19 nt, Artificial Sequence
  Description of Artificial Sequence: Synthetic oligonucleotide
  Sense strand starting at position 3727 of SEQ ID NO: 1564082
cuguacuaucccugagagc

SEQ ID NO: 1853880 - RNA, 19 nt, Artificial Sequence
  Description of Artificial Sequence: Synthetic oligonucleotide
  Antisense strand to SEQ ID NO: 1853879
gcucucagggauaguacag

SEQ ID NO: 1853881 - RNA, 19 nt, Artificial Sequence
  Description of Artificial Sequence: Synthetic oligonucleotide
  Sense strand starting at position 3728 of SEQ ID NO: 1564082
uguacuaucccugagagca

SEQ ID NO: 1853882 - RNA, 19 nt, Artificial Sequence
  Description of Artificial Sequence: Synthetic oligonucleotide
  Antisense strand to SEQ ID NO: 1853881
ugcucucagggauaguaca

SEQ ID NO: 1853883 - RNA, 19 nt, Artificial Sequence
  Description of Artificial Sequence: Synthetic oligonucleotide
  Sense strand starting at position 3871 of SEQ ID NO: 1564082
ggaaacauuguuggcucuu

SEQ ID NO: 1853884 - RNA, 19 nt, Artificial Sequence
  Description of Artificial Sequence: Synthetic oligonucleotide
  Antisense strand to SEQ ID NO: 1853883
aagagccaacaauguuucc

SEQ ID NO: 1853885 - RNA, 19 nt, Artificial Sequence
  Description of Artificial Sequence: Synthetic oligonucleotide
  Sense strand starting at position 3938 of SEQ ID NO: 1564082
ggaacuccuccuugucuaa

SEQ ID NO: 1853886 - RNA, 19 nt, Artificial Sequence
  Description of Artificial Sequence: Synthetic oligonucleotide
  Antisense strand to SEQ ID NO: 1853885
uuagacaaggaggaguucc

SEQ ID NO: 1853887 - RNA, 19 nt, Artificial Sequence
  Description of Artificial Sequence: Synthetic oligonucleotide
  Sense strand starting at position 121 of SEQ ID NO: 1564083
agaaauguggacugaucuu

SEQ ID NO: 1853888 - RNA, 19 nt, Artificial Sequence
  Description of Artificial Sequence: Synthetic oligonucleotide
  Antisense strand to SEQ ID NO: 1853887
aagaucaguccacauuucu

SEQ ID NO: 1853889 - RNA, 19 nt, Artificial Sequence
  Description of Artificial Sequence: Synthetic oligonucleotide
  Sense strand starting at position 130 of SEQ ID NO: 1564083
gacugaucuugaguugcaa

SEQ ID NO: 1853890 - RNA, 19 nt, Artificial Sequence
  Description of Artificial Sequence: Synthetic oligonucleotide
  Antisense strand to SEQ ID NO: 1853889
uugcaacucaagaucaguc

SEQ ID NO: 1853891 - RNA, 19 nt, Artificial Sequence
  Description of Artificial Sequence: Synthetic oligonucleotide
  Sense strand starting at position 284 of SEQ ID NO: 1564083
cgagcucuugcauacuguu

SEQ ID NO: 1853892 - RNA, 19 nt, Artificial Sequence
  Description of Artificial Sequence: Synthetic oligonucleotide
  Antisense strand to SEQ ID NO: 1853891
aacaguaugcaagagcucg

SEQ ID NO: 1853893 - RNA, 19 nt, Artificial Sequence
  Description of Artificial Sequence: Synthetic oligonucleotide
  Sense strand starting at position 366 of SEQ ID NO: 1564083
auaguauuagucugguuaa

SEQ ID NO: 1853894 - RNA, 19 nt, Artificial Sequence
  Description of Artificial Sequence: Synthetic oligonucleotide
  Antisense strand to SEQ ID NO: 1853893
uuaaccagacuaauacuau

SEQ ID NO: 1853895 - RNA, 19 nt, Artificial Sequence
  Description of Artificial Sequence: Synthetic oligonucleotide
  Sense strand starting at position 369 of SEQ ID NO: 1564083
guauuagucugguuaacaa

SEQ ID NO: 1853896 - RNA, 19 nt, Artificial Sequence
  Description of Artificial Sequence: Synthetic oligonucleotide
  Antisense strand to SEQ ID NO: 1853895
uuguuaaccagacuaauac

SEQ ID NO: 1853897 - RNA, 19 nt, Artificial Sequence
  Description of Artificial Sequence: Synthetic oligonucleotide
  Sense strand starting at position 508 of SEQ ID NO: 1564083
uuacaaguaugauccaagu

SEQ ID NO: 1853898 - RNA, 19 nt, Artificial Sequence
  Description of Artificial Sequence: Synthetic oligonucleotide
  Antisense strand to SEQ ID NO: 1853897
acuuggaucauacuuguaa

SEQ ID NO: 1853899 - RNA, 19 nt, Artificial Sequence
  Description of Artificial Sequence: Synthetic oligonucleotide
  Sense strand starting at position 561 of SEQ ID NO: 1564083
acaacucugcgugcguuaa

SEQ ID NO: 1853900 - RNA, 19 nt, Artificial Sequence
  Description of Artificial Sequence: Synthetic oligonucleotide
  Antisense strand to SEQ ID NO: 1853899
uuaacgcacgcagaguugu

SEQ ID NO: 1853901 - RNA, 19 nt, Artificial Sequence
  Description of Artificial Sequence: Synthetic oligonucleotide
  Sense strand starting at position 665 of SEQ ID NO: 1564083
cauuauaccggagaaugca

SEQ ID NO: 1853902 - RNA, 19 nt, Artificial Sequence
  Description of Artificial Sequence: Synthetic oligonucleotide
  Antisense strand to SEQ ID NO: 1853901
ugcauucuccgguauaaug

SEQ ID NO: 1853903 - RNA, 19 nt, Artificial Sequence
  Description of Artificial Sequence: Synthetic oligonucleotide
  Sense strand starting at position 681 of SEQ ID NO: 1564083
gcaagugucccgcaucuca

SEQ ID NO: 1853904 - RNA, 19 nt, Artificial Sequence
  Description of Artificial Sequence: Synthetic oligonucleotide
  Antisense strand to SEQ ID NO: 1853903
ugagaugcgggacacuugc

SEQ ID NO: 1853905 - RNA, 19 nt, Artificial Sequence
  Description of Artificial Sequence: Synthetic oligonucleotide
  Sense strand starting at position 689 of SEQ ID NO: 1564083
cccgcaucucaagauuaaa

SEQ ID NO: 1853906 - RNA, 19 nt, Artificial Sequence
  Description of Artificial Sequence: Synthetic oligonucleotide
  Antisense strand to SEQ ID NO: 1853905
uuuaaucuugagaugcggg

SEQ ID NO: 1853907 - RNA, 19 nt, Artificial Sequence
  Description of Artificial Sequence: Synthetic oligonucleotide
  Sense strand starting at position 838 of SEQ ID NO: 1564083
ucaugcuuuccagaaaugg

SEQ ID NO: 1853908 - RNA, 19 nt, Artificial Sequence
  Description of Artificial Sequence: Synthetic oligonucleotide
  Antisense strand to SEQ ID NO: 1853907
ccauuucuggaaagcauga

SEQ ID NO: 1853909 - RNA, 19 nt, Artificial Sequence
  Description of Artificial Sequence: Synthetic oligonucleotide
  Sense strand starting at position 858 of SEQ ID NO: 1564083
gucacucacucaguaacua

SEQ ID NO: 1853910 - RNA, 19 nt, Artificial Sequence
  Description of Artificial Sequence: Synthetic oligonucleotide
  Antisense strand to SEQ ID NO: 1853909
uaguuacugagugagugac

SEQ ID NO: 1853911 - RNA, 19 nt, Artificial Sequence
  Description of Artificial Sequence: Synthetic oligonucleotide
  Sense strand starting at position 1023 of SEQ ID NO: 1564083
acgggucuugucuggauua

SEQ ID NO: 1853912 - RNA, 19 nt, Artificial Sequence
  Description of Artificial Sequence: Synthetic oligonucleotide
  Antisense strand to SEQ ID NO: 1853911
uaauccagacaagacccgu

SEQ ID NO: 1853913 - RNA, 19 nt, Artificial Sequence
  Description of Artificial Sequence: Synthetic oligonucleotide
  Sense strand starting at position 1025 of SEQ ID NO: 1564083
gggucuugucuggauuauu

SEQ ID NO: 1853914 - RNA, 19 nt, Artificial Sequence
  Description of Artificial Sequence: Synthetic oligonucleotide
  Antisense strand to SEQ ID NO: 1853913
aauaauccagacaagaccc

SEQ ID NO: 1853915 - RNA, 19 nt, Artificial Sequence
  Description of Artificial Sequence: Synthetic oligonucleotide
  Sense strand starting at position 1055 of SEQ ID NO: 1564083
cgaguuguucugggauagg

SEQ ID NO: 1853916 - RNA, 19 nt, Artificial Sequence
  Description of Artificial Sequence: Synthetic oligonucleotide
  Antisense strand to SEQ ID NO: 1853915
ccuaucccagaacaacucg

SEQ ID NO: 1853917 - RNA, 19 nt, Artificial Sequence
  Description of Artificial Sequence: Synthetic oligonucleotide
  Sense strand starting at position 1081 of SEQ ID NO: 1564083
caggaaagcucgguguagu

SEQ ID NO: 1853918 - RNA, 19 nt, Artificial Sequence
  Description of Artificial Sequence: Synthetic oligonucleotide
  Antisense strand to SEQ ID NO: 1853917
acuacaccgagcuuuccug

SEQ ID NO: 1853919 - RNA, 19 nt, Artificial Sequence
  Description of Artificial Sequence: Synthetic oligonucleotide
  Sense strand starting at position 1082 of SEQ ID NO: 1564083
aggaaagcucgguguagug

SEQ ID NO: 1853920 - RNA, 19 nt, Artificial Sequence
  Description of Artificial Sequence: Synthetic oligonucleotide
  Antisense strand to SEQ ID NO: 1853919
cacuacaccgagcuuuccu

SEQ ID NO: 1853921 - RNA, 19 nt, Artificial Sequence
  Description of Artificial Sequence: Synthetic oligonucleotide
  Sense strand starting at position 1084 of SEQ ID NO: 1564083
gaaagcucgguguagugau

SEQ ID NO: 1853922 - RNA, 19 nt, Artificial Sequence
  Description of Artificial Sequence: Synthetic oligonucleotide
  Antisense strand to SEQ ID NO: 1853921
aucacuacaccgagcuuuc

SEQ ID NO: 1853923 - RNA, 19 nt, Artificial Sequence
  Description of Artificial Sequence: Synthetic oligonucleotide
  Sense strand starting at position 1124 of SEQ ID NO: 1564083
ugcccuguuuggguauauu

SEQ ID NO: 1853924 - RNA, 19 nt, Artificial Sequence
  Description of Artificial Sequence: Synthetic oligonucleotide
  Antisense strand to SEQ ID NO: 1853923
aauauacccaaacagggca

SEQ ID NO: 1853925 - RNA, 19 nt, Artificial Sequence
  Description of Artificial Sequence: Synthetic oligonucleotide
  Sense strand starting at position 1133 of SEQ ID NO: 1564083
uggguauauuguuuggguu

SEQ ID NO: 1853926 - RNA, 19 nt, Artificial Sequence
  Description of Artificial Sequence: Synthetic oligonucleotide
  Antisense strand to SEQ ID NO: 1853925
aacccaaacaauauaccca

SEQ ID NO: 1853927 - RNA, 19 nt, Artificial Sequence
  Description of Artificial Sequence: Synthetic oligonucleotide
  Sense strand starting at position 1134 of SEQ ID NO: 1564083
ggguauauuguuuggguuu

SEQ ID NO: 1853928 - RNA, 19 nt, Artificial Sequence
  Description of Artificial Sequence: Synthetic oligonucleotide
  Antisense strand to SEQ ID NO: 1853927
aaacccaaacaauauaccc

SEQ ID NO: 1853929 - RNA, 19 nt, Artificial Sequence
  Description of Artificial Sequence: Synthetic oligonucleotide
  Sense strand starting at position 1226 of SEQ ID NO: 1564083
ggccgcugaucuccuugaa

SEQ ID NO: 1853930 - RNA, 19 nt, Artificial Sequence
  Description of Artificial Sequence: Synthetic oligonucleotide
  Antisense strand to SEQ ID NO: 1853929
uucaaggagaucagcggcc

SEQ ID NO: 1853931 - RNA, 19 nt, Artificial Sequence
  Description of Artificial Sequence: Synthetic oligonucleotide
  Sense strand starting at position 1229 of SEQ ID NO: 1564083
cgcugaucuccuugaauau

SEQ ID NO: 1853932 - RNA, 19 nt, Artificial Sequence
  Description of Artificial Sequence: Synthetic oligonucleotide
  Antisense strand to SEQ ID NO: 1853931
auauucaaggagaucagcg

SEQ ID NO: 1853933 - RNA, 19 nt, Artificial Sequence
  Description of Artificial Sequence: Synthetic oligonucleotide
  Sense strand starting at position 1230 of SEQ ID NO: 1564083
gcugaucuccuugaauauc

SEQ ID NO: 1853934 - RNA, 19 nt, Artificial Sequence
  Description of Artificial Sequence: Synthetic oligonucleotide
  Antisense strand to SEQ ID NO: 1853933
gauauucaaggagaucagc

SEQ ID NO: 1853935 - RNA, 19 nt, Artificial Sequence
  Description of Artificial Sequence: Synthetic oligonucleotide
  Sense strand starting at position 1638 of SEQ ID NO: 1564083
ccacgcaaaguugauuaaa

SEQ ID NO: 1853936 - RNA, 19 nt, Artificial Sequence
  Description of Artificial Sequence: Synthetic oligonucleotide
  Antisense strand to SEQ ID NO: 1853935
uuuaaucaacuuugcgugg

SEQ ID NO: 1853937 - RNA, 19 nt, Artificial Sequence
  Description of Artificial Sequence: Synthetic oligonucleotide
  Sense strand starting at position 2680 of SEQ ID NO: 1564083
gucggaggcuccuugggaa

SEQ ID NO: 1853938 - RNA, 19 nt, Artificial Sequence
  Description of Artificial Sequence: Synthetic oligonucleotide
  Antisense strand to SEQ ID NO: 1853937
uucccaaggagccuccgac

SEQ ID NO: 1853939 - RNA, 19 nt, Artificial Sequence
  Description of Artificial Sequence: Synthetic oligonucleotide
  Sense strand starting at position 2683 of SEQ ID NO: 1564083
ggaggcuccuugggaauga

SEQ ID NO: 1853940 - RNA, 19 nt, Artificial Sequence
  Description of Artificial Sequence: Synthetic oligonucleotide
  Antisense strand to SEQ ID NO: 1853939
ucauucccaaggagccucc

SEQ ID NO: 1853941 - RNA, 19 nt, Artificial Sequence
  Description of Artificial Sequence: Synthetic oligonucleotide
  Sense strand starting at position 2889 of SEQ ID NO: 1564083
gggucacaugcugggaaau

SEQ ID NO: 1853942 - RNA, 19 nt, Artificial Sequence
  Description of Artificial Sequence: Synthetic oligonucleotide
  Antisense strand to SEQ ID NO: 1853941
auuucccagcaugugaccc

SEQ ID NO: 1853943 - RNA, 19 nt, Artificial Sequence
  Description of Artificial Sequence: Synthetic oligonucleotide
  Sense strand starting at position 2891 of SEQ ID NO: 1564083
gucacaugcugggaaauca

SEQ ID NO: 1853944 - RNA, 19 nt, Artificial Sequence
  Description of Artificial Sequence: Synthetic oligonucleotide
  Antisense strand to SEQ ID NO: 1853943
ugauuucccagcaugugac

SEQ ID NO: 1853945 - RNA, 19 nt, Artificial Sequence
  Description of Artificial Sequence: Synthetic oligonucleotide
  Sense strand starting at position 2972 of SEQ ID NO: 1564083
cucggcucccgguuugauu

SEQ ID NO: 1853946 - RNA, 19 nt, Artificial Sequence
  Description of Artificial Sequence: Synthetic oligonucleotide
  Antisense strand to SEQ ID NO: 1853945
aaucaaaccgggagccgag

SEQ ID NO: 1853947 - RNA, 19 nt, Artificial Sequence
  Description of Artificial Sequence: Synthetic oligonucleotide
  Sense strand starting at position 3018 of SEQ ID NO: 1564083
guuaaauuguggcuauuug

SEQ ID NO: 1853948 - RNA, 19 nt, Artificial Sequence
  Description of Artificial Sequence: Synthetic oligonucleotide
  Antisense strand to SEQ ID NO: 1853947
caaauagccacaauuuaac

SEQ ID NO: 1853949 - RNA, 19 nt, Artificial Sequence
  Description of Artificial Sequence: Synthetic oligonucleotide
  Sense strand starting at position 3025 of SEQ ID NO: 1564083
uguggcuauuugggauuaa

SEQ ID NO: 1853950 - RNA, 19 nt, Artificial Sequence
  Description of Artificial Sequence: Synthetic oligonucleotide
  Antisense strand to SEQ ID NO: 1853949
uuaaucccaaauagccaca

SEQ ID NO: 1853951 - RNA, 19 nt, Artificial Sequence
  Description of Artificial Sequence: Synthetic oligonucleotide
  Sense strand starting at position 3026 of SEQ ID NO: 1564083
guggcuauuugggauuaau

SEQ ID NO: 1853952 - RNA, 19 nt, Artificial Sequence
  Description of Artificial Sequence: Synthetic oligonucleotide
  Antisense strand to SEQ ID NO: 1853951
auuaaucccaaauagccac

SEQ ID NO: 1853953 - RNA, 19 nt, Artificial Sequence
  Description of Artificial Sequence: Synthetic oligonucleotide
  Sense strand starting at position 3035 of SEQ ID NO: 1564083
ugggauuaauuccucuugu

SEQ ID NO: 1853954 - RNA, 19 nt, Artificial Sequence
  Description of Artificial Sequence: Synthetic oligonucleotide
  Antisense strand to SEQ ID NO: 1853953
acaagaggaauuaauccca

SEQ ID NO: 1853955 - RNA, 19 nt, Artificial Sequence
  Description of Artificial Sequence: Synthetic oligonucleotide
  Sense strand starting at position 3036 of SEQ ID NO: 1564083
gggauuaauuccucuugua

SEQ ID NO: 1853956 - RNA, 19 nt, Artificial Sequence
  Description of Artificial Sequence: Synthetic oligonucleotide
  Antisense strand to SEQ ID NO: 1853955
uacaagaggaauuaauccc

SEQ ID NO: 1853957 - RNA, 19 nt, Artificial Sequence
  Description of Artificial Sequence: Synthetic oligonucleotide
  Sense strand starting at position 3216 of SEQ ID NO: 1564083
cucgguagagguuggagaa

SEQ ID NO: 1853958 - RNA, 19 nt, Artificial Sequence
  Description of Artificial Sequence: Synthetic oligonucleotide
  Antisense strand to SEQ ID NO: 1853957
uucuccaaccucuaccgag

SEQ ID NO: 1853959 - RNA, 19 nt, Artificial Sequence
  Description of Artificial Sequence: Synthetic oligonucleotide
  Sense strand starting at position 3217 of SEQ ID NO: 1564083
ucgguagagguuggagaau

SEQ ID NO: 1853960 - RNA, 19 nt, Artificial Sequence
  Description of Artificial Sequence: Synthetic oligonucleotide
  Antisense strand to SEQ ID NO: 1853959
auucuccaaccucuaccga

SEQ ID NO: 1853961 - RNA, 19 nt, Artificial Sequence
  Description of Artificial Sequence: Synthetic oligonucleotide
  Sense strand starting at position 3218 of SEQ ID NO: 1564083
cgguagagguuggagaauu

SEQ ID NO: 1853962 - RNA, 19 nt, Artificial Sequence
  Description of Artificial Sequence: Synthetic oligonucleotide
  Antisense strand to SEQ ID NO: 1853961
aauucuccaaccucuaccg

SEQ ID NO: 1853963 - RNA, 19 nt, Artificial Sequence
  Description of Artificial Sequence: Synthetic oligonucleotide
  Sense strand starting at position 3219 of SEQ ID NO: 1564083
gguagagguuggagaauua

SEQ ID NO: 1853964 - RNA, 19 nt, Artificial Sequence
  Description of Artificial Sequence: Synthetic oligonucleotide
  Antisense strand to SEQ ID NO: 1853963
uaauucuccaaccucuacc

SEQ ID NO: 1853965 - RNA, 19 nt, Artificial Sequence
  Description of Artificial Sequence: Synthetic oligonucleotide
  Sense strand starting at position 3830 of SEQ ID NO: 1564083
gugugaggaugagauuaga

SEQ ID NO: 1853966 - RNA, 19 nt, Artificial Sequence
  Description of Artificial Sequence: Synthetic oligonucleotide
  Antisense strand to SEQ ID NO: 1853965
ucuaaucucauccucacac

SEQ ID NO: 1853967 - RNA, 19 nt, Artificial Sequence
  Description of Artificial Sequence: Synthetic oligonucleotide
  Sense strand starting at position 46 of SEQ ID NO: 1564084
aaguaacuugcaggguuaa

SEQ ID NO: 1853968 - RNA, 19 nt, Artificial Sequence
  Description of Artificial Sequence: Synthetic oligonucleotide
  Antisense strand to SEQ ID NO: 1853967
uuaacccugcaaguuacuu

SEQ ID NO: 1853969 - RNA, 19 nt, Artificial Sequence
  Description of Artificial Sequence: Synthetic oligonucleotide
  Sense strand starting at position 47 of SEQ ID NO: 1564084
aguaacuugcaggguuaaa

SEQ ID NO: 1853970 - RNA, 19 nt, Artificial Sequence
  Description of Artificial Sequence: Synthetic oligonucleotide
  Antisense strand to SEQ ID NO: 1853969
uuuaacccugcaaguuacu

SEQ ID NO: 1853971 - RNA, 19 nt, Artificial Sequence
  Description of Artificial Sequence: Synthetic oligonucleotide
  Sense strand starting at position 192 of SEQ ID NO: 1564084
gguagagagacccauuguu

SEQ ID NO: 1853972 - RNA, 19 nt, Artificial Sequence
  Description of Artificial Sequence: Synthetic oligonucleotide
  Antisense strand to SEQ ID NO: 1853971
aacaaugggucucucuacc

SEQ ID NO: 1853973 - RNA, 19 nt, Artificial Sequence
  Description of Artificial Sequence: Synthetic oligonucleotide
  Sense strand starting at position 444 of SEQ ID NO: 1564084
ucaauagacuugcuagaca

SEQ ID NO: 1853974 - RNA, 19 nt, Artificial Sequence
  Description of Artificial Sequence: Synthetic oligonucleotide
  Antisense strand to SEQ ID NO: 1853973
ugucuagcaagucuauuga

SEQ ID NO: 1853975 - RNA, 19 nt, Artificial Sequence
  Description of Artificial Sequence: Synthetic oligonucleotide
  Sense strand starting at position 523 of SEQ ID NO: 1564084
uuguucuuacgagauguaa

SEQ ID NO: 1853976 - RNA, 19 nt, Artificial Sequence
  Description of Artificial Sequence: Synthetic oligonucleotide
  Antisense strand to SEQ ID NO: 1853975
uuacaucucguaagaacaa

SEQ ID NO: 1853977 - RNA, 19 nt, Artificial Sequence
  Description of Artificial Sequence: Synthetic oligonucleotide
  Sense strand starting at position 557 of SEQ ID NO: 1564084
auuggaauugcuugguuua

SEQ ID NO: 1853978 - RNA, 19 nt, Artificial Sequence
  Description of Artificial Sequence: Synthetic oligonucleotide
  Antisense strand to SEQ ID NO: 1853977
uaaaccaagcaauuccaau

SEQ ID NO: 1853979 - RNA, 19 nt, Artificial Sequence
  Description of Artificial Sequence: Synthetic oligonucleotide
  Sense strand starting at position 559 of SEQ ID NO: 1564084
uggaauugcuugguuuacu

SEQ ID NO: 1853980 - RNA, 19 nt, Artificial Sequence
  Description of Artificial Sequence: Synthetic oligonucleotide
  Antisense strand to SEQ ID NO: 1853979
aguaaaccaagcaauucca

SEQ ID NO: 1853981 - RNA, 19 nt, Artificial Sequence
  Description of Artificial Sequence: Synthetic oligonucleotide
  Sense strand starting at position 560 of SEQ ID NO: 1564084
ggaauugcuugguuuacua

SEQ ID NO: 1853982 - RNA, 19 nt, Artificial Sequence
  Description of Artificial Sequence: Synthetic oligonucleotide
  Antisense strand to SEQ ID NO: 1853981
uaguaaaccaagcaauucc

SEQ ID NO: 1853983 - RNA, 19 nt, Artificial Sequence
  Description of Artificial Sequence: Synthetic oligonucleotide
  Sense strand starting at position 615 of SEQ ID NO: 1564084
uaggguacuucugaauuua

SEQ ID NO: 1853984 - RNA, 19 nt, Artificial Sequence
  Description of Artificial Sequence: Synthetic oligonucleotide
  Antisense strand to SEQ ID NO: 1853983
uaaauucagaaguacccua

SEQ ID NO: 1853985 - RNA, 19 nt, Artificial Sequence
  Description of Artificial Sequence: Synthetic oligonucleotide
  Sense strand starting at position 651 of SEQ ID NO: 1564084
accacauguuauucuagca

SEQ ID NO: 1853986 - RNA, 19 nt, Artificial Sequence
  Description of Artificial Sequence: Synthetic oligonucleotide
  Antisense strand to SEQ ID NO: 1853985
ugcuagaauaacauguggu

SEQ ID NO: 1853987 - RNA, 19 nt, Artificial Sequence
  Description of Artificial Sequence: Synthetic oligonucleotide
  Sense strand starting at position 682 of SEQ ID NO: 1564084
cccaguuuaguugauaaau

SEQ ID NO: 1853988 - RNA, 19 nt, Artificial Sequence
  Description of Artificial Sequence: Synthetic oligonucleotide
  Antisense strand to SEQ ID NO: 1853987
auuuaucaacuaaacuggg

SEQ ID NO: 1853989 - RNA, 19 nt, Artificial Sequence
  Description of Artificial Sequence: Synthetic oligonucleotide
  Sense strand starting at position 769 of SEQ ID NO: 1564084
ggagcaaguacuugaagac

SEQ ID NO: 1853990 - RNA, 19 nt, Artificial Sequence
  Description of Artificial Sequence: Synthetic oligonucleotide
  Antisense strand to SEQ ID NO: 1853989
gucuucaaguacuugcucc

SEQ ID NO: 1853991 - RNA, 19 nt, Artificial Sequence
  Description of Artificial Sequence: Synthetic oligonucleotide
  Sense strand starting at position 798 of SEQ ID NO: 1564084
ccuuuagaugucgaggauu

SEQ ID NO: 1853992 - RNA, 19 nt, Artificial Sequence
  Description of Artificial Sequence: Synthetic oligonucleotide
  Antisense strand to SEQ ID NO: 1853991
aauccucgacaucuaaagg

SEQ ID NO: 1853993 - RNA, 19 nt, Artificial Sequence
  Description of Artificial Sequence: Synthetic oligonucleotide
  Sense strand starting at position 800 of SEQ ID NO: 1564084
uuuagaugucgaggauuga

SEQ ID NO: 1853994 - RNA, 19 nt, Artificial Sequence
  Description of Artificial Sequence: Synthetic oligonucleotide
  Antisense strand to SEQ ID NO: 1853993
ucaauccucgacaucuaaa

SEQ ID NO: 1853995 - RNA, 19 nt, Artificial Sequence
  Description of Artificial Sequence: Synthetic oligonucleotide
  Sense strand starting at position 804 of SEQ ID NO: 1564084
gaugucgaggauugagagu

SEQ ID NO: 1853996 - RNA, 19 nt, Artificial Sequence
  Description of Artificial Sequence: Synthetic oligonucleotide
  Antisense strand to SEQ ID NO: 1853995
acucucaauccucgacauc

SEQ ID NO: 1853997 - RNA, 19 nt, Artificial Sequence
  Description of Artificial Sequence: Synthetic oligonucleotide
  Sense strand starting at position 815 of SEQ ID NO: 1564084
uugagagucuuaccucaaa

SEQ ID NO: 1853998 - RNA, 19 nt, Artificial Sequence
  Description of Artificial Sequence: Synthetic oligonucleotide
  Antisense strand to SEQ ID NO: 1853997
uuugagguaagacucucaa

SEQ ID NO: 1853999 - RNA, 19 nt, Artificial Sequence
  Description of Artificial Sequence: Synthetic oligonucleotide
  Sense strand starting at position 894 of SEQ ID NO: 1564084
ggaguaguacgcagucgau

SEQ ID NO: 1854000 - RNA, 19 nt, Artificial Sequence
  Description of Artificial Sequence: Synthetic oligonucleotide
  Antisense strand to SEQ ID NO: 1853999
aucgacugcguacuacucc

SEQ ID NO: 1854001 - RNA, 19 nt, Artificial Sequence
  Description of Artificial Sequence: Synthetic oligonucleotide
  Sense strand starting at position 900 of SEQ ID NO: 1564084
guacgcagucgauuaaguu

SEQ ID NO: 1854002 - RNA, 19 nt, Artificial Sequence
  Description of Artificial Sequence: Synthetic oligonucleotide
  Antisense strand to SEQ ID NO: 1854001
aacuuaaucgacugcguac

SEQ ID NO: 1854003 - RNA, 19 nt, Artificial Sequence
  Description of Artificial Sequence: Synthetic oligonucleotide
  Sense strand starting at position 906 of SEQ ID NO: 1564084
agucgauuaaguuaucaga

SEQ ID NO: 1854004 - RNA, 19 nt, Artificial Sequence
  Description of Artificial Sequence: Synthetic oligonucleotide
  Antisense strand to SEQ ID NO: 1854003
ucugauaacuuaaucgacu

SEQ ID NO: 1854005 - RNA, 19 nt, Artificial Sequence
  Description of Artificial Sequence: Synthetic oligonucleotide
  Sense strand starting at position 908 of SEQ ID NO: 1564084
ucgauuaaguuaucagaaa

SEQ ID NO: 1854006 - RNA, 19 nt, Artificial Sequence
  Description of Artificial Sequence: Synthetic oligonucleotide
  Antisense strand to SEQ ID NO: 1854005
uuucugauaacuuaaucga

SEQ ID NO: 1854007 - RNA, 19 nt, Artificial Sequence
  Description of Artificial Sequence: Synthetic oligonucleotide
  Sense strand starting at position 1011 of SEQ ID NO: 1564084
guguacaucuaaguucuca

SEQ ID NO: 1854008 - RNA, 19 nt, Artificial Sequence
  Description of Artificial Sequence: Synthetic oligonucleotide
  Antisense strand to SEQ ID NO: 1854007
ugagaacuuagauguacac

SEQ ID NO: 1854009 - RNA, 19 nt, Artificial Sequence
  Description of Artificial Sequence: Synthetic oligonucleotide
  Sense strand starting at position 1117 of SEQ ID NO: 1564084
cgcuaagucuuaccaaaga

SEQ ID NO: 1854010 - RNA, 19 nt, Artificial Sequence
  Description of Artificial Sequence: Synthetic oligonucleotide
  Antisense strand to SEQ ID NO: 1854009
ucuuugguaagacuuagcg

SEQ ID NO: 1854011 - RNA, 19 nt, Artificial Sequence
  Description of Artificial Sequence: Synthetic oligonucleotide
  Sense strand starting at position 1230 of SEQ ID NO: 1564084
gcaagagugcaguagaauc

SEQ ID NO: 1854012 - RNA, 19 nt, Artificial Sequence
  Description of Artificial Sequence: Synthetic oligonucleotide
  Antisense strand to SEQ ID NO: 1854011
gauucuacugcacucuugc

SEQ ID NO: 1854013 - RNA, 19 nt, Artificial Sequence
  Description of Artificial Sequence: Synthetic oligonucleotide
  Sense strand starting at position 1299 of SEQ ID NO: 1564084
gagauaggucgccagugua

SEQ ID NO: 1854014 - RNA, 19 nt, Artificial Sequence
  Description of Artificial Sequence: Synthetic oligonucleotide
  Antisense strand to SEQ ID NO: 1854013
uacacuggcgaccuaucuc

SEQ ID NO: 1854015 - RNA, 19 nt, Artificial Sequence
  Description of Artificial Sequence: Synthetic oligonucleotide
  Sense strand starting at position 1312 of SEQ ID NO: 1564084
aguguaucucgacaugggu

SEQ ID NO: 1854016 - RNA, 19 nt, Artificial Sequence
  Description of Artificial Sequence: Synthetic oligonucleotide
  Antisense strand to SEQ ID NO: 1854015
acccaugucgagauacacu

SEQ ID NO: 1854017 - RNA, 19 nt, Artificial Sequence
  Description of Artificial Sequence: Synthetic oligonucleotide
  Sense strand starting at position 1319 of SEQ ID NO: 1564084
cucgacaugggucauuaca

SEQ ID NO: 1854018 - RNA, 19 nt, Artificial Sequence
  Description of Artificial Sequence: Synthetic oligonucleotide
  Antisense strand to SEQ ID NO: 1854017
uguaaugacccaugucgag

SEQ ID NO: 1854019 - RNA, 19 nt, Artificial Sequence
  Description of Artificial Sequence: Synthetic oligonucleotide
  Sense strand starting at position 1321 of SEQ ID NO: 1564084
cgacaugggucauuacaag

SEQ ID NO: 1854020 - RNA, 19 nt, Artificial Sequence
  Description of Artificial Sequence: Synthetic oligonucleotide
  Antisense strand to SEQ ID NO: 1854019
cuuguaaugacccaugucg

SEQ ID NO: 1854021 - RNA, 19 nt, Artificial Sequence
  Description of Artificial Sequence: Synthetic oligonucleotide
  Sense strand starting at position 1371 of SEQ ID NO: 1564084
gcuguuaccagggaacacu

SEQ ID NO: 1854022 - RNA, 19 nt, Artificial Sequence
  Description of Artificial Sequence: Synthetic oligonucleotide
  Antisense strand to SEQ ID NO: 1854021
aguguucccugguaacagc

SEQ ID NO: 1854023 - RNA, 19 nt, Artificial Sequence
  Description of Artificial Sequence: Synthetic oligonucleotide
  Sense strand starting at position 1413 of SEQ ID NO: 1564084
agaguuacuuagucaccuu

SEQ ID NO: 1854024 - RNA, 19 nt, Artificial Sequence
  Description of Artificial Sequence: Synthetic oligonucleotide
  Antisense strand to SEQ ID NO: 1854023
aaggugacuaaguaacucu

SEQ ID NO: 1854025 - RNA, 19 nt, Artificial Sequence
  Description of Artificial Sequence: Synthetic oligonucleotide
  Sense strand starting at position 2385 of SEQ ID NO: 1564084
cccaaacgucaauggagau

SEQ ID NO: 1854026 - RNA, 19 nt, Artificial Sequence
  Description of Artificial Sequence: Synthetic oligonucleotide
  Antisense strand to SEQ ID NO: 1854025
aucuccauugacguuuggg

SEQ ID NO: 1854027 - RNA, 19 nt, Artificial Sequence
  Description of Artificial Sequence: Synthetic oligonucleotide
  Sense strand starting at position 2386 of SEQ ID NO: 1564084
ccaaacgucaauggagauu

SEQ ID NO: 1854028 - RNA, 19 nt, Artificial Sequence
  Description of Artificial Sequence: Synthetic oligonucleotide
  Antisense strand to SEQ ID NO: 1854027
aaucuccauugacguuugg

SEQ ID NO: 1854029 - RNA, 19 nt, Artificial Sequence
  Description of Artificial Sequence: Synthetic oligonucleotide
  Sense strand starting at position 2510 of SEQ ID NO: 1564084
gcgacugaacaguaguaaa

SEQ ID NO: 1854030 - RNA, 19 nt, Artificial Sequence
  Description of Artificial Sequence: Synthetic oligonucleotide
  Antisense strand to SEQ ID NO: 1854029
uuuacuacuguucagucgc

SEQ ID NO: 1854031 - RNA, 19 nt, Artificial Sequence
  Description of Artificial Sequence: Synthetic oligonucleotide
  Sense strand starting at position 2716 of SEQ ID NO: 1564084
ccaagaguaucucuuugca

SEQ ID NO: 1854032 - RNA, 19 nt, Artificial Sequence
  Description of Artificial Sequence: Synthetic oligonucleotide
  Antisense strand to SEQ ID NO: 1854031
ugcaaagagauacucuugg

SEQ ID NO: 1854033 - RNA, 19 nt, Artificial Sequence
  Description of Artificial Sequence: Synthetic oligonucleotide
  Sense strand starting at position 2744 of SEQ ID NO: 1564084
aagagcaggugucuuauau

SEQ ID NO: 1854034 - RNA, 19 nt, Artificial Sequence
  Description of Artificial Sequence: Synthetic oligonucleotide
  Antisense strand to SEQ ID NO: 1854033
auauaagacaccugcucuu

SEQ ID NO: 1854035 - RNA, 19 nt, Artificial Sequence
  Description of Artificial Sequence: Synthetic oligonucleotide
  Sense strand starting at position 2778 of SEQ ID NO: 1564084
uuucgauacuuagugacaa

SEQ ID NO: 1854036 - RNA, 19 nt, Artificial Sequence
  Description of Artificial Sequence: Synthetic oligonucleotide
  Antisense strand to SEQ ID NO: 1854035
uugucacuaaguaucgaaa

SEQ ID NO: 1854037 - RNA, 19 nt, Artificial Sequence
  Description of Artificial Sequence: Synthetic oligonucleotide
  Sense strand starting at position 3073 of SEQ ID NO: 1564084
ugagaauguugggucugua

SEQ ID NO: 1854038 - RNA, 19 nt, Artificial Sequence
  Description of Artificial Sequence: Synthetic oligonucleotide
  Antisense strand to SEQ ID NO: 1854037
uacagacccaacauucuca

SEQ ID NO: 1854039 - RNA, 19 nt, Artificial Sequence
  Description of Artificial Sequence: Synthetic oligonucleotide
  Sense strand starting at position 3082 of SEQ ID NO: 1564084
ugggucuguagugacaaua

SEQ ID NO: 1854040 - RNA, 19 nt, Artificial Sequence
  Description of Artificial Sequence: Synthetic oligonucleotide
  Antisense strand to SEQ ID NO: 1854039
uauugucacuacagaccca

SEQ ID NO: 1854041 - RNA, 19 nt, Artificial Sequence
  Description of Artificial Sequence: Synthetic oligonucleotide
  Sense strand starting at position 3168 of SEQ ID NO: 1564084
cugggagcuggcgauauaa

SEQ ID NO: 1854042 - RNA, 19 nt, Artificial Sequence
  Description of Artificial Sequence: Synthetic oligonucleotide
  Antisense strand to SEQ ID NO: 1854041
uuauaucgccagcucccag

SEQ ID NO: 1854043 - RNA, 19 nt, Artificial Sequence
  Description of Artificial Sequence: Synthetic oligonucleotide
  Sense strand starting at position 3170 of SEQ ID NO: 1564084
gggagcuggcgauauaaca

SEQ ID NO: 1854044 - RNA, 19 nt, Artificial Sequence
  Description of Artificial Sequence: Synthetic oligonucleotide
  Antisense strand to SEQ ID NO: 1854043
uguuauaucgccagcuccc

SEQ ID NO: 1854045 - RNA, 19 nt, Artificial Sequence
  Description of Artificial Sequence: Synthetic oligonucleotide
  Sense strand starting at position 3569 of SEQ ID NO: 1564084
aagucaaagcuucgaaagu

SEQ ID NO: 1854046 - RNA, 19 nt, Artificial Sequence
  Description of Artificial Sequence: Synthetic oligonucleotide
  Antisense strand to SEQ ID NO: 1854045
acuuucgaagcuuugacuu

SEQ ID NO: 1854047 - RNA, 19 nt, Artificial Sequence
  Description of Artificial Sequence: Synthetic oligonucleotide
  Sense strand starting at position 3 of SEQ ID NO: 1564085
caauaaauucuguagggcu

SEQ ID NO: 1854048 - RNA, 19 nt, Artificial Sequence
  Description of Artificial Sequence: Synthetic oligonucleotide
  Antisense strand to SEQ ID NO: 1854047
agcccuacagaauuuauug

SEQ ID NO: 1854049 - RNA, 19 nt, Artificial Sequence
  Description of Artificial Sequence: Synthetic oligonucleotide
  Sense strand starting at position 21 of SEQ ID NO: 1564085
ugugauagggugcauaagu

SEQ ID NO: 1854050 - RNA, 19 nt, Artificial Sequence
  Description of Artificial Sequence: Synthetic oligonucleotide
  Antisense strand to SEQ ID NO: 1854049
acuuaugcacccuaucaca

SEQ ID NO: 1854051 - RNA, 19 nt, Artificial Sequence
  Description of Artificial Sequence: Synthetic oligonucleotide
  Sense strand starting at position 68 of SEQ ID NO: 1564085
uuuaaagggccaugaaauc

SEQ ID NO: 1854052 - RNA, 19 nt, Artificial Sequence
  Description of Artificial Sequence: Synthetic oligonucleotide
  Antisense strand to SEQ ID NO: 1854051
gauuucauggcccuuuaaa

SEQ ID NO: 1854053 - RNA, 19 nt, Artificial Sequence
  Description of Artificial Sequence: Synthetic oligonucleotide
  Sense strand starting at position 95 of SEQ ID NO: 1564085
uuuauuccaugggcuuaaa

SEQ ID NO: 1854054 - RNA, 19 nt, Artificial Sequence
  Description of Artificial Sequence: Synthetic oligonucleotide
  Antisense strand to SEQ ID NO: 1854053
uuuaagcccauggaauaaa

SEQ ID NO: 1854055 - RNA, 19 nt, Artificial Sequence
  Description of Artificial Sequence: Synthetic oligonucleotide
  Sense strand starting at position 123 of SEQ ID NO: 1564085
aaagguucuuaaguaugua

SEQ ID NO: 1854056 - RNA, 19 nt, Artificial Sequence
  Description of Artificial Sequence: Synthetic oligonucleotide
  Antisense strand to SEQ ID NO: 1854055
uacauacuuaagaaccuuu

SEQ ID NO: 1854057 - RNA, 19 nt, Artificial Sequence
  Description of Artificial Sequence: Synthetic oligonucleotide
  Sense strand starting at position 126 of SEQ ID NO: 1564085
gguucuuaaguauguagau

SEQ ID NO: 1854058 - RNA, 19 nt, Artificial Sequence
  Description of Artificial Sequence: Synthetic oligonucleotide
  Antisense strand to SEQ ID NO: 1854057
aucuacauacuuaagaacc

SEQ ID NO: 1854059 - RNA, 19 nt, Artificial Sequence
  Description of Artificial Sequence: Synthetic oligonucleotide
  Sense strand starting at position 127 of SEQ ID NO: 1564085
guucuuaaguauguagaug

SEQ ID NO: 1854060 - RNA, 19 nt, Artificial Sequence
  Description of Artificial Sequence: Synthetic oligonucleotide
  Antisense strand to SEQ ID NO: 1854059
caucuacauacuuaagaac

SEQ ID NO: 1854061 - RNA, 19 nt, Artificial Sequence
  Description of Artificial Sequence: Synthetic oligonucleotide
  Sense strand starting at position 139 of SEQ ID NO: 1564085
guagaugacucagucggau

SEQ ID NO: 1854062 - RNA, 19 nt, Artificial Sequence
  Description of Artificial Sequence: Synthetic oligonucleotide
  Antisense strand to SEQ ID NO: 1854061
auccgacugagucaucuac

SEQ ID NO: 1854063 - RNA, 19 nt, Artificial Sequence
  Description of Artificial Sequence: Synthetic oligonucleotide
  Sense strand starting at position 261 of SEQ ID NO: 1564085
gucacaaaguuccugaaua

SEQ ID NO: 1854064 - RNA, 19 nt, Artificial Sequence
  Description of Artificial Sequence: Synthetic oligonucleotide
  Antisense strand to SEQ ID NO: 1854063
uauucaggaacuuugugac

SEQ ID NO: 1854065 - RNA, 19 nt, Artificial Sequence
  Description of Artificial Sequence: Synthetic oligonucleotide
  Sense strand starting at position 539 of SEQ ID NO: 1564085
cuguguguauacucucuau

SEQ ID NO: 1854066 - RNA, 19 nt, Artificial Sequence
  Description of Artificial Sequence: Synthetic oligonucleotide
  Antisense strand to SEQ ID NO: 1854065
auagagaguauacacacag

SEQ ID NO: 1854067 - RNA, 19 nt, Artificial Sequence
  Description of Artificial Sequence: Synthetic oligonucleotide
  Sense strand starting at position 579 of SEQ ID NO: 1564085
gagaacuccuaggaagauu

SEQ ID NO: 1854068 - RNA, 19 nt, Artificial Sequence
  Description of Artificial Sequence: Synthetic oligonucleotide
  Antisense strand to SEQ ID NO: 1854067
aaucuuccuaggaguucuc

SEQ ID NO: 1854069 - RNA, 19 nt, Artificial Sequence
  Description of Artificial Sequence: Synthetic oligonucleotide
  Sense strand starting at position 718 of SEQ ID NO: 1564085
gauauccucuacuugagga

SEQ ID NO: 1854070 - RNA, 19 nt, Artificial Sequence
  Description of Artificial Sequence: Synthetic oligonucleotide
  Antisense strand to SEQ ID NO: 1854069
uccucaaguagaggauauc

SEQ ID NO: 1854071 - RNA, 19 nt, Artificial Sequence
  Description of Artificial Sequence: Synthetic oligonucleotide
  Sense strand starting at position 726 of SEQ ID NO: 1564085
cuacuugaggacugaguau

SEQ ID NO: 1854072 - RNA, 19 nt, Artificial Sequence
  Description of Artificial Sequence: Synthetic oligonucleotide
  Antisense strand to SEQ ID NO: 1854071
auacucaguccucaaguag

SEQ ID NO: 1854073 - RNA, 19 nt, Artificial Sequence
  Description of Artificial Sequence: Synthetic oligonucleotide
  Sense strand starting at position 909 of SEQ ID NO: 1564085
aagcucugaccuggaaaug

SEQ ID NO: 1854074 - RNA, 19 nt, Artificial Sequence
  Description of Artificial Sequence: Synthetic oligonucleotide
  Antisense strand to SEQ ID NO: 1854073
cauuuccaggucagagcuu

SEQ ID NO: 1854075 - RNA, 19 nt, Artificial Sequence
  Description of Artificial Sequence: Synthetic oligonucleotide
  Sense strand starting at position 1066 of SEQ ID NO: 1564085
gguuguuucugaucaguua

SEQ ID NO: 1854076 - RNA, 19 nt, Artificial Sequence
  Description of Artificial Sequence: Synthetic oligonucleotide
  Antisense strand to SEQ ID NO: 1854075
uaacugaucagaaacaacc

SEQ ID NO: 1854077 - RNA, 19 nt, Artificial Sequence
  Description of Artificial Sequence: Synthetic oligonucleotide
  Sense strand starting at position 1067 of SEQ ID NO: 1564085
guuguuucugaucaguuag

SEQ ID NO: 1854078 - RNA, 19 nt, Artificial Sequence
  Description of Artificial Sequence: Synthetic oligonucleotide
  Antisense strand to SEQ ID NO: 1854077
cuaacugaucagaaacaac

SEQ ID NO: 1854079 - RNA, 19 nt, Artificial Sequence
  Description of Artificial Sequence: Synthetic oligonucleotide
  Sense strand starting at position 1069 of SEQ ID NO: 1564085
uguuucugaucaguuagca

SEQ ID NO: 1854080 - RNA, 19 nt, Artificial Sequence
  Description of Artificial Sequence: Synthetic oligonucleotide
  Antisense strand to SEQ ID NO: 1854079
ugcuaacugaucagaaaca

SEQ ID NO: 1854081 - RNA, 19 nt, Artificial Sequence
  Description of Artificial Sequence: Synthetic oligonucleotide
  Sense strand starting at position 2016 of SEQ ID NO: 1564085
gccagagugccgucuguca

SEQ ID NO: 1854082 - RNA, 19 nt, Artificial Sequence
  Description of Artificial Sequence: Synthetic oligonucleotide
  Antisense strand to SEQ ID NO: 1854081
ugacagacggcacucuggc

SEQ ID NO: 1854083 - RNA, 19 nt, Artificial Sequence
  Description of Artificial Sequence: Synthetic oligonucleotide
  Sense strand starting at position 2020 of SEQ ID NO: 1564085
gagugccgucugucaucau

SEQ ID NO: 1854084 - RNA, 19 nt, Artificial Sequence
  Description of Artificial Sequence: Synthetic oligonucleotide
  Antisense strand to SEQ ID NO: 1854083
augaugacagacggcacuc

SEQ ID NO: 1854085 - RNA, 19 nt, Artificial Sequence
  Description of Artificial Sequence: Synthetic oligonucleotide
  Sense strand starting at position 2128 of SEQ ID NO: 1564085
ccauccgcuauggagaauu

SEQ ID NO: 1854086 - RNA, 19 nt, Artificial Sequence
  Description of Artificial Sequence: Synthetic oligonucleotide
  Antisense strand to SEQ ID NO: 1854085
aauucuccauagcggaugg

SEQ ID NO: 1854087 - RNA, 19 nt, Artificial Sequence
  Description of Artificial Sequence: Synthetic oligonucleotide
  Sense strand starting at position 2130 of SEQ ID NO: 1564085
auccgcuauggagaauuaa

SEQ ID NO: 1854088 - RNA, 19 nt, Artificial Sequence
  Description of Artificial Sequence: Synthetic oligonucleotide
  Antisense strand to SEQ ID NO: 1854087
uuaauucuccauagcggau

SEQ ID NO: 1854089 - RNA, 19 nt, Artificial Sequence
  Description of Artificial Sequence: Synthetic oligonucleotide
  Sense strand starting at position 2195 of SEQ ID NO: 1564085
gcugguuaccgguaauggu

SEQ ID NO: 1854090 - RNA, 19 nt, Artificial Sequence
  Description of Artificial Sequence: Synthetic oligonucleotide
  Antisense strand to SEQ ID NO: 1854089
accauuaccgguaaccagc

SEQ ID NO: 1854091 - RNA, 19 nt, Artificial Sequence
  Description of Artificial Sequence: Synthetic oligonucleotide
  Sense strand starting at position 2272 of SEQ ID NO: 1564085
gcaaucgaguuuguaauua

SEQ ID NO: 1854092 - RNA, 19 nt, Artificial Sequence
  Description of Artificial Sequence: Synthetic oligonucleotide
  Antisense strand to SEQ ID NO: 1854091
uaauuacaaacucgauugc

SEQ ID NO: 1854093 - RNA, 19 nt, Artificial Sequence
  Description of Artificial Sequence: Synthetic oligonucleotide
  Sense strand starting at position 2276 of SEQ ID NO: 1564085
ucgaguuuguaauuaaaug

SEQ ID NO: 1854094 - RNA, 19 nt, Artificial Sequence
  Description of Artificial Sequence: Synthetic oligonucleotide
  Antisense strand to SEQ ID NO: 1854093
cauuuaauuacaaacucga

SEQ ID NO: 1854095 - RNA, 19 nt, Artificial Sequence
  Description of Artificial Sequence: Synthetic oligonucleotide
  Sense strand starting at position 2277 of SEQ ID NO: 1564085
cgaguuuguaauuaaauga

SEQ ID NO: 1854096 - RNA, 19 nt, Artificial Sequence
  Description of Artificial Sequence: Synthetic oligonucleotide
  Antisense strand to SEQ ID NO: 1854095
ucauuuaauuacaaacucg

SEQ ID NO: 1854097 - RNA, 19 nt, Artificial Sequence
  Description of Artificial Sequence: Synthetic oligonucleotide
  Sense strand starting at position 2303 of SEQ ID NO: 1564085
auccaaagcgcuuagaacu

SEQ ID NO: 1854098 - RNA, 19 nt, Artificial Sequence
  Description of Artificial Sequence: Synthetic oligonucleotide
  Antisense strand to SEQ ID NO: 1854097
aguucuaagcgcuuuggau

SEQ ID NO: 1854099 - RNA, 19 nt, Artificial Sequence
  Description of Artificial Sequence: Synthetic oligonucleotide
  Sense strand starting at position 2310 of SEQ ID NO: 1564085
gcgcuuagaacugugucuu

SEQ ID NO: 1854100 - RNA, 19 nt, Artificial Sequence
  Description of Artificial Sequence: Synthetic oligonucleotide
  Antisense strand to SEQ ID NO: 1854099
aagacacaguucuaagcgc

SEQ ID NO: 1854101 - RNA, 19 nt, Artificial Sequence
  Description of Artificial Sequence: Synthetic oligonucleotide
  Sense strand starting at position 2316 of SEQ ID NO: 1564085
agaacugugucuuccacau

SEQ ID NO: 1854102 - RNA, 19 nt, Artificial Sequence
  Description of Artificial Sequence: Synthetic oligonucleotide
  Antisense strand to SEQ ID NO: 1854101
auguggaagacacaguucu

SEQ ID NO: 1854103 - RNA, 19 nt, Artificial Sequence
  Description of Artificial Sequence: Synthetic oligonucleotide
  Sense strand starting at position 2349 of SEQ ID NO: 1564085
aaauuaucguuauugcuga

SEQ ID NO: 1854104 - RNA, 19 nt, Artificial Sequence
  Description of Artificial Sequence: Synthetic oligonucleotide
  Antisense strand to SEQ ID NO: 1854103
ucagcaauaacgauaauuu

SEQ ID NO: 1854105 - RNA, 19 nt, Artificial Sequence
  Description of Artificial Sequence: Synthetic oligonucleotide
  Sense strand starting at position 2354 of SEQ ID NO: 1564085
aucguuauugcugaaacca

SEQ ID NO: 1854106 - RNA, 19 nt, Artificial Sequence
  Description of Artificial Sequence: Synthetic oligonucleotide
  Antisense strand to SEQ ID NO: 1854105
ugguuucagcaauaacgau

SEQ ID NO: 1854107 - RNA, 19 nt, Artificial Sequence
  Description of Artificial Sequence: Synthetic oligonucleotide
  Sense strand starting at position 2437 of SEQ ID NO: 1564085
gaaguaccauaguaagaag

SEQ ID NO: 1854108 - RNA, 19 nt, Artificial Sequence
  Description of Artificial Sequence: Synthetic oligonucleotide
  Antisense strand to SEQ ID NO: 1854107
cuucuuacuaugguacuuc

SEQ ID NO: 1854109 - RNA, 19 nt, Artificial Sequence
  Description of Artificial Sequence: Synthetic oligonucleotide
  Sense strand starting at position 2670 of SEQ ID NO: 1564085
caaagauguuccuucugga

SEQ ID NO: 1854110 - RNA, 19 nt, Artificial Sequence
  Description of Artificial Sequence: Synthetic oligonucleotide
  Antisense strand to SEQ ID NO: 1854109
uccagaaggaacaucuuug

SEQ ID NO: 1854111 - RNA, 19 nt, Artificial Sequence
  Description of Artificial Sequence: Synthetic oligonucleotide
  Sense strand starting at position 2700 of SEQ ID NO: 1564085
gggauaggacgugauaugu

SEQ ID NO: 1854112 - RNA, 19 nt, Artificial Sequence
  Description of Artificial Sequence: Synthetic oligonucleotide
  Antisense strand to SEQ ID NO: 1854111
acauaucacguccuauccc

SEQ ID NO: 1854113 - RNA, 19 nt, Artificial Sequence
  Description of Artificial Sequence: Synthetic oligonucleotide
  Sense strand starting at position 2927 of SEQ ID NO: 1564085
guauuauuuacacguaagu

SEQ ID NO: 1854114 - RNA, 19 nt, Artificial Sequence
  Description of Artificial Sequence: Synthetic oligonucleotide
  Antisense strand to SEQ ID NO: 1854113
acuuacguguaaauaauac

SEQ ID NO: 1854115 - RNA, 19 nt, Artificial Sequence
  Description of Artificial Sequence: Synthetic oligonucleotide
  Sense strand starting at position 2936 of SEQ ID NO: 1564085
acacguaaguguguacaua

SEQ ID NO: 1854116 - RNA, 19 nt, Artificial Sequence
  Description of Artificial Sequence: Synthetic oligonucleotide
  Antisense strand to SEQ ID NO: 1854115
uauguacacacuuacgugu

SEQ ID NO: 1854117 - RNA, 19 nt, Artificial Sequence
  Description of Artificial Sequence: Synthetic oligonucleotide
  Sense strand starting at position 2937 of SEQ ID NO: 1564085
cacguaaguguguacauau

SEQ ID NO: 1854118 - RNA, 19 nt, Artificial Sequence
  Description of Artificial Sequence: Synthetic oligonucleotide
  Antisense strand to SEQ ID NO: 1854117
auauguacacacuuacgug

SEQ ID NO: 1854119 - RNA, 19 nt, Artificial Sequence
  Description of Artificial Sequence: Synthetic oligonucleotide
  Sense strand starting at position 3254 of SEQ ID NO: 1564085
ccuucuuaccugggaacca

SEQ ID NO: 1854120 - RNA, 19 nt, Artificial Sequence
  Description of Artificial Sequence: Synthetic oligonucleotide
  Antisense strand to SEQ ID NO: 1854119
ugguucccagguaagaagg

SEQ ID NO: 1854121 - RNA, 19 nt, Artificial Sequence
  Description of Artificial Sequence: Synthetic oligonucleotide
  Sense strand starting at position 3409 of SEQ ID NO: 1564085
accuaagaucacuguuuga

SEQ ID NO: 1854122 - RNA, 19 nt, Artificial Sequence
  Description of Artificial Sequence: Synthetic oligonucleotide
  Antisense strand to SEQ ID NO: 1854121
ucaaacagugaucuuaggu

SEQ ID NO: 1854123 - RNA, 19 nt, Artificial Sequence
  Description of Artificial Sequence: Synthetic oligonucleotide
  Sense strand starting at position 3413 of SEQ ID NO: 1564085
aagaucacuguuugauaug

SEQ ID NO: 1854124 - RNA, 19 nt, Artificial Sequence
  Description of Artificial Sequence: Synthetic oligonucleotide
  Antisense strand to SEQ ID NO: 1854123
cauaucaaacagugaucuu

SEQ ID NO: 1854125 - RNA, 19 nt, Artificial Sequence
  Description of Artificial Sequence: Synthetic oligonucleotide
  Sense strand starting at position 3913 of SEQ ID NO: 1564085
cgaaacugauuugaguaau

SEQ ID NO: 1854126 - RNA, 19 nt, Artificial Sequence
  Description of Artificial Sequence: Synthetic oligonucleotide
  Antisense strand to SEQ ID NO: 1854125
auuacucaaaucaguuucg

SEQ ID NO: 1854127 - RNA, 19 nt, Artificial Sequence
  Description of Artificial Sequence: Synthetic oligonucleotide
  Sense strand starting at position 12 of SEQ ID NO: 1564086
gguaaacauuucuaggacu

SEQ ID NO: 1854128 - RNA, 19 nt, Artificial Sequence
  Description of Artificial Sequence: Synthetic oligonucleotide
  Antisense strand to SEQ ID NO: 1854127
aguccuagaaauguuuacc

SEQ ID NO: 1854129 - RNA, 19 nt, Artificial Sequence
  Description of Artificial Sequence: Synthetic oligonucleotide
  Sense strand starting at position 58 of SEQ ID NO: 1564086
acagaacaggguuguuaga

SEQ ID NO: 1854130 - RNA, 19 nt, Artificial Sequence
  Description of Artificial Sequence: Synthetic oligonucleotide
  Antisense strand to SEQ ID NO: 1854129
ucuaacaacccuguucugu

SEQ ID NO: 1854131 - RNA, 19 nt, Artificial Sequence
  Description of Artificial Sequence: Synthetic oligonucleotide
  Sense strand starting at position 60 of SEQ ID NO: 1564086
agaacaggguuguuagacu

SEQ ID NO: 1854132 - RNA, 19 nt, Artificial Sequence
  Description of Artificial Sequence: Synthetic oligonucleotide
  Antisense strand to SEQ ID NO: 1854131
agucuaacaacccuguucu

SEQ ID NO: 1854133 - RNA, 19 nt, Artificial Sequence
  Description of Artificial Sequence: Synthetic oligonucleotide
  Sense strand starting at position 553 of SEQ ID NO: 1564086
gucugacaaccaggaguau

SEQ ID NO: 1854134 - RNA, 19 nt, Artificial Sequence
  Description of Artificial Sequence: Synthetic oligonucleotide
  Antisense strand to SEQ ID NO: 1854133
auacuccugguugucagac

SEQ ID NO: 1854135 - RNA, 19 nt, Artificial Sequence
  Description of Artificial Sequence: Synthetic oligonucleotide
  Sense strand starting at position 574 of SEQ ID NO: 1564086
agaucuaagccuugaaaga

SEQ ID NO: 1854136 - RNA, 19 nt, Artificial Sequence
  Description of Artificial Sequence: Synthetic oligonucleotide
  Antisense strand to SEQ ID NO: 1854135
ucuuucaaggcuuagaucu

SEQ ID NO: 1854137 - RNA, 19 nt, Artificial Sequence
  Description of Artificial Sequence: Synthetic oligonucleotide
  Sense strand starting at position 585 of SEQ ID NO: 1564086
uugaaagagucugcuuaga

SEQ ID NO: 1854138 - RNA, 19 nt, Artificial Sequence
  Description of Artificial Sequence: Synthetic oligonucleotide
  Antisense strand to SEQ ID NO: 1854137
ucuaagcagacucuuucaa

SEQ ID NO: 1854139 - RNA, 19 nt, Artificial Sequence
  Description of Artificial Sequence: Synthetic oligonucleotide
  Sense strand starting at position 587 of SEQ ID NO: 1564086
gaaagagucugcuuagauu

SEQ ID NO: 1854140 - RNA, 19 nt, Artificial Sequence
  Description of Artificial Sequence: Synthetic oligonucleotide
  Antisense strand to SEQ ID NO: 1854139
aaucuaagcagacucuuuc

SEQ ID NO: 1854141 - RNA, 19 nt, Artificial Sequence
  Description of Artificial Sequence: Synthetic oligonucleotide
  Sense strand starting at position 667 of SEQ ID NO: 1564086
aucuuaaaguagucagagu

SEQ ID NO: 1854142 - RNA, 19 nt, Artificial Sequence
  Description of Artificial Sequence: Synthetic oligonucleotide
  Antisense strand to SEQ ID NO: 1854141
acucugacuacuuuaagau

SEQ ID NO: 1854143 - RNA, 19 nt, Artificial Sequence
  Description of Artificial Sequence: Synthetic oligonucleotide
  Sense strand starting at position 668 of SEQ ID NO: 1564086
ucuuaaaguagucagaguu

SEQ ID NO: 1854144 - RNA, 19 nt, Artificial Sequence
  Description of Artificial Sequence: Synthetic oligonucleotide
  Antisense strand to SEQ ID NO: 1854143
aacucugacuacuuuaaga

SEQ ID NO: 1854145 - RNA, 19 nt, Artificial Sequence
  Description of Artificial Sequence: Synthetic oligonucleotide
  Sense strand starting at position 678 of SEQ ID NO: 1564086
gucagaguuacugggacaa

SEQ ID NO: 1854146 - RNA, 19 nt, Artificial Sequence
  Description of Artificial Sequence: Synthetic oligonucleotide
  Antisense strand to SEQ ID NO: 1854145
uugucccaguaacucugac

SEQ ID NO: 1854147 - RNA, 19 nt, Artificial Sequence
  Description of Artificial Sequence: Synthetic oligonucleotide
  Sense strand starting at position 691 of SEQ ID NO: 1564086
ggacaaguugcagacuauu

SEQ ID NO: 1854148 - RNA, 19 nt, Artificial Sequence
  Description of Artificial Sequence: Synthetic oligonucleotide
  Antisense strand to SEQ ID NO: 1854147
aauagucugcaacuugucc

SEQ ID NO: 1854149 - RNA, 19 nt, Artificial Sequence
  Description of Artificial Sequence: Synthetic oligonucleotide
  Sense strand starting at position 733 of SEQ ID NO: 1564086
acagacaacugguuuacau

SEQ ID NO: 1854150 - RNA, 19 nt, Artificial Sequence
  Description of Artificial Sequence: Synthetic oligonucleotide
  Antisense strand to SEQ ID NO: 1854149
auguaaaccaguugucugu

SEQ ID NO: 1854151 - RNA, 19 nt, Artificial Sequence
  Description of Artificial Sequence: Synthetic oligonucleotide
  Sense strand starting at position 783 of SEQ ID NO: 1564086
gcagaaugaccuuggaauu

SEQ ID NO: 1854152 - RNA, 19 nt, Artificial Sequence
  Description of Artificial Sequence: Synthetic oligonucleotide
  Antisense strand to SEQ ID NO: 1854151
aauuccaaggucauucugc

SEQ ID NO: 1854153 - RNA, 19 nt, Artificial Sequence
  Description of Artificial Sequence: Synthetic oligonucleotide
  Sense strand starting at position 796 of SEQ ID NO: 1564086
ggaauuauauugucaccag

SEQ ID NO: 1854154 - RNA, 19 nt, Artificial Sequence
  Description of Artificial Sequence: Synthetic oligonucleotide
  Antisense strand to SEQ ID NO: 1854153
cuggugacaauauaauucc

SEQ ID NO: 1854155 - RNA, 19 nt, Artificial Sequence
  Description of Artificial Sequence: Synthetic oligonucleotide
  Sense strand starting at position 800 of SEQ ID NO: 1564086
uuauauugucaccagucuu

SEQ ID NO: 1854156 - RNA, 19 nt, Artificial Sequence
  Description of Artificial Sequence: Synthetic oligonucleotide
  Antisense strand to SEQ ID NO: 1854155
aagacuggugacaauauaa

SEQ ID NO: 1854157 - RNA, 19 nt, Artificial Sequence
  Description of Artificial Sequence: Synthetic oligonucleotide
  Sense strand starting at position 828 of SEQ ID NO: 1564086
ugagaaaugugacuaagua

SEQ ID NO: 1854158 - RNA, 19 nt, Artificial Sequence
  Description of Artificial Sequence: Synthetic oligonucleotide
  Antisense strand to SEQ ID NO: 1854157
uacuuagucacauuucuca

SEQ ID NO: 1854159 - RNA, 19 nt, Artificial Sequence
  Description of Artificial Sequence: Synthetic oligonucleotide
  Sense strand starting at position 851 of SEQ ID NO: 1564086
aagucaucagccugggaaa

SEQ ID NO: 1854160 - RNA, 19 nt, Artificial Sequence
  Description of Artificial Sequence: Synthetic oligonucleotide
  Antisense strand to SEQ ID NO: 1854159
uuucccaggcugaugacuu

SEQ ID NO: 1854161 - RNA, 19 nt, Artificial Sequence
  Description of Artificial Sequence: Synthetic oligonucleotide
  Sense strand starting at position 852 of SEQ ID NO: 1564086
agucaucagccugggaaac

SEQ ID NO: 1854162 - RNA, 19 nt, Artificial Sequence
  Description of Artificial Sequence: Synthetic oligonucleotide
  Antisense strand to SEQ ID NO: 1854161
guuucccaggcugaugacu

SEQ ID NO: 1854163 - RNA, 19 nt, Artificial Sequence
  Description of Artificial Sequence: Synthetic oligonucleotide
  Sense strand starting at position 853 of SEQ ID NO: 1564086
gucaucagccugggaaaca

SEQ ID NO: 1854164 - RNA, 19 nt, Artificial Sequence
  Description of Artificial Sequence: Synthetic oligonucleotide
  Antisense strand to SEQ ID NO: 1854163
uguuucccaggcugaugac

SEQ ID NO: 1854165 - RNA, 19 nt, Artificial Sequence
  Description of Artificial Sequence: Synthetic oligonucleotide
  Sense strand starting at position 1003 of SEQ ID NO: 1564086
ccgugaaaccaagaauucu

SEQ ID NO: 1854166 - RNA, 19 nt, Artificial Sequence
  Description of Artificial Sequence: Synthetic oligonucleotide
  Antisense strand to SEQ ID NO: 1854165
agaauucuugguuucacgg

SEQ ID NO: 1854167 - RNA, 19 nt, Artificial Sequence
  Description of Artificial Sequence: Synthetic oligonucleotide
  Sense strand starting at position 1162 of SEQ ID NO: 1564086
cuaacaucuggaugaaccu

SEQ ID NO: 1854168 - RNA, 19 nt, Artificial Sequence
  Description of Artificial Sequence: Synthetic oligonucleotide
  Antisense strand to SEQ ID NO: 1854167
agguucauccagauguuag

SEQ ID NO: 1854169 - RNA, 19 nt, Artificial Sequence
  Description of Artificial Sequence: Synthetic oligonucleotide
  Sense strand starting at position 1196 of SEQ ID NO: 1564086
gcagauggguacuugagaa

SEQ ID NO: 1854170 - RNA, 19 nt, Artificial Sequence
  Description of Artificial Sequence: Synthetic oligonucleotide
  Antisense strand to SEQ ID NO: 1854169
uucucaaguacccaucugc

SEQ ID NO: 1854171 - RNA, 19 nt, Artificial Sequence
  Description of Artificial Sequence: Synthetic oligonucleotide
  Sense strand starting at position 1380 of SEQ ID NO: 1564086
uccugacucucaguuggau

SEQ ID NO: 1854172 - RNA, 19 nt, Artificial Sequence
  Description of Artificial Sequence: Synthetic oligonucleotide
  Antisense strand to SEQ ID NO: 1854171
auccaacugagagucagga

SEQ ID NO: 1854173 - RNA, 19 nt, Artificial Sequence
  Description of Artificial Sequence: Synthetic oligonucleotide
  Sense strand starting at position 1383 of SEQ ID NO: 1564086
ugacucucaguuggauuau

SEQ ID NO: 1854174 - RNA, 19 nt, Artificial Sequence
  Description of Artificial Sequence: Synthetic oligonucleotide
  Antisense strand to SEQ ID NO: 1854173
auaauccaacugagaguca

SEQ ID NO: 1854175 - RNA, 19 nt, Artificial Sequence
  Description of Artificial Sequence: Synthetic oligonucleotide
  Sense strand starting at position 1545 of SEQ ID NO: 1564086
cgucaauagcauuccgguu

SEQ ID NO: 1854176 - RNA, 19 nt, Artificial Sequence
  Description of Artificial Sequence: Synthetic oligonucleotide
  Antisense strand to SEQ ID NO: 1854175
aaccggaaugcuauugacg

SEQ ID NO: 1854177 - RNA, 19 nt, Artificial Sequence
  Description of Artificial Sequence: Synthetic oligonucleotide
  Sense strand starting at position 1663 of SEQ ID NO: 1564086
auagauuucugagacccau

SEQ ID NO: 1854178 - RNA, 19 nt, Artificial Sequence
  Description of Artificial Sequence: Synthetic oligonucleotide
  Antisense strand to SEQ ID NO: 1854177
augggucucagaaaucuau

SEQ ID NO: 1854179 - RNA, 19 nt, Artificial Sequence
  Description of Artificial Sequence: Synthetic oligonucleotide
  Sense strand starting at position 1718 of SEQ ID NO: 1564086
uuagaaggcuccucacaga

SEQ ID NO: 1854180 - RNA, 19 nt, Artificial Sequence
  Description of Artificial Sequence: Synthetic oligonucleotide
  Antisense strand to SEQ ID NO: 1854179
ucugugaggagccuucuaa

SEQ ID NO: 1854181 - RNA, 19 nt, Artificial Sequence
  Description of Artificial Sequence: Synthetic oligonucleotide
  Sense strand starting at position 1884 of SEQ ID NO: 1564086
aaugaaugucaaugguuga

SEQ ID NO: 1854182 - RNA, 19 nt, Artificial Sequence
  Description of Artificial Sequence: Synthetic oligonucleotide
  Antisense strand to SEQ ID NO: 1854181
ucaaccauugacauucauu

SEQ ID NO: 1854183 - RNA, 19 nt, Artificial Sequence
  Description of Artificial Sequence: Synthetic oligonucleotide
  Sense strand starting at position 1885 of SEQ ID NO: 1564086
augaaugucaaugguugaa

SEQ ID NO: 1854184 - RNA, 19 nt, Artificial Sequence
  Description of Artificial Sequence: Synthetic oligonucleotide
  Antisense strand to SEQ ID NO: 1854183
uucaaccauugacauucau

SEQ ID NO: 1854185 - RNA, 19 nt, Artificial Sequence
  Description of Artificial Sequence: Synthetic oligonucleotide
  Sense strand starting at position 1887 of SEQ ID NO: 1564086
gaaugucaaugguugaaua

SEQ ID NO: 1854186 - RNA, 19 nt, Artificial Sequence
  Description of Artificial Sequence: Synthetic oligonucleotide
  Antisense strand to SEQ ID NO: 1854185
uauucaaccauugacauuc

SEQ ID NO: 1854187 - RNA, 19 nt, Artificial Sequence
  Description of Artificial Sequence: Synthetic oligonucleotide
  Sense strand starting at position 2166 of SEQ ID NO: 1564086
gauucaguucgcgaggaag

SEQ ID NO: 1854188 - RNA, 19 nt, Artificial Sequence
  Description of Artificial Sequence: Synthetic oligonucleotide
  Antisense strand to SEQ ID NO: 1854187
cuuccucgcgaacugaauc

SEQ ID NO: 1854189 - RNA, 19 nt, Artificial Sequence
  Description of Artificial Sequence: Synthetic oligonucleotide
  Sense strand starting at position 2169 of SEQ ID NO: 1564086
ucaguucgcgaggaagaua

SEQ ID NO: 1854190 - RNA, 19 nt, Artificial Sequence
  Description of Artificial Sequence: Synthetic oligonucleotide
  Antisense strand to SEQ ID NO: 1854189
uaucuuccucgcgaacuga

SEQ ID NO: 1854191 - RNA, 19 nt, Artificial Sequence
  Description of Artificial Sequence: Synthetic oligonucleotide
  Sense strand starting at position 2641 of SEQ ID NO: 1564086
acuaacauucucgaauugu

SEQ ID NO: 1854192 - RNA, 19 nt, Artificial Sequence
  Description of Artificial Sequence: Synthetic oligonucleotide
  Antisense strand to SEQ ID NO: 1854191
acaauucgagaauguuagu

SEQ ID NO: 1854193 - RNA, 19 nt, Artificial Sequence
  Description of Artificial Sequence: Synthetic oligonucleotide
  Sense strand starting at position 2774 of SEQ ID NO: 1564086
ugcauugcuguguuacuuu

SEQ ID NO: 1854194 - RNA, 19 nt, Artificial Sequence
  Description of Artificial Sequence: Synthetic oligonucleotide
  Antisense strand to SEQ ID NO: 1854193
aaaguaacacagcaaugca

SEQ ID NO: 1854195 - RNA, 19 nt, Artificial Sequence
  Description of Artificial Sequence: Synthetic oligonucleotide
  Sense strand starting at position 2949 of SEQ ID NO: 1564086
cagggcaaguuauuaauau

SEQ ID NO: 1854196 - RNA, 19 nt, Artificial Sequence
  Description of Artificial Sequence: Synthetic oligonucleotide
  Antisense strand to SEQ ID NO: 1854195
auauuaauaacuugcccug

SEQ ID NO: 1854197 - RNA, 19 nt, Artificial Sequence
  Description of Artificial Sequence: Synthetic oligonucleotide
  Sense strand starting at position 3067 of SEQ ID NO: 1564086
agcacagugcuagacauaa

SEQ ID NO: 1854198 - RNA, 19 nt, Artificial Sequence
  Description of Artificial Sequence: Synthetic oligonucleotide
  Antisense strand to SEQ ID NO: 1854197
uuaugucuagcacugugcu

SEQ ID NO: 1854199 - RNA, 19 nt, Artificial Sequence
  Description of Artificial Sequence: Synthetic oligonucleotide
  Sense strand starting at position 3881 of SEQ ID NO: 1564086
aguugaugaagugauugua

SEQ ID NO: 1854200 - RNA, 19 nt, Artificial Sequence
  Description of Artificial Sequence: Synthetic oligonucleotide
  Antisense strand to SEQ ID NO: 1854199
uacaaucacuucaucaacu

SEQ ID NO: 1854201 - RNA, 19 nt, Artificial Sequence
  Description of Artificial Sequence: Synthetic oligonucleotide
  Sense strand starting at position 3949 of SEQ ID NO: 1564086
cacuguuaaggaugcauaa

SEQ ID NO: 1854202 - RNA, 19 nt, Artificial Sequence
  Description of Artificial Sequence: Synthetic oligonucleotide
  Antisense strand to SEQ ID NO: 1854201
uuaugcauccuuaacagug

SEQ ID NO: 1854203 - RNA, 19 nt, Artificial Sequence
  Description of Artificial Sequence: Synthetic oligonucleotide
  Sense strand starting at position 3959 of SEQ ID NO: 1564086
gaugcauaacuagguugaa

SEQ ID NO: 1854204 - RNA, 19 nt, Artificial Sequence
  Description of Artificial Sequence: Synthetic oligonucleotide
  Antisense strand to SEQ ID NO: 1854203
uucaaccuaguuaugcauc

SEQ ID NO: 1854205 - RNA, 19 nt, Artificial Sequence
  Description of Artificial Sequence: Synthetic oligonucleotide
  Sense strand starting at position 3960 of SEQ ID NO: 1564086
augcauaacuagguugaaa

SEQ ID NO: 1854206 - RNA, 19 nt, Artificial Sequence
  Description of Artificial Sequence: Synthetic oligonucleotide
  Antisense strand to SEQ ID NO: 1854205
uuucaaccuaguuaugcau

SEQ ID NO: 1854207 - RNA, 19 nt, Artificial Sequence
  Description of Artificial Sequence: Synthetic oligonucleotide
  Sense strand starting at position 144 of SEQ ID NO: 1564087
cugcucuauggucauaaac

SEQ ID NO: 1854208 - RNA, 19 nt, Artificial Sequence
  Description of Artificial Sequence: Synthetic oligonucleotide
  Antisense strand to SEQ ID NO: 1854207
guuuaugaccauagagcag

SEQ ID NO: 1854209 - RNA, 19 nt, Artificial Sequence
  Description of Artificial Sequence: Synthetic oligonucleotide
  Sense strand starting at position 169 of SEQ ID NO: 1564087
uuauccuuucuggaguuga

SEQ ID NO: 1854210 - RNA, 19 nt, Artificial Sequence
  Description of Artificial Sequence: Synthetic oligonucleotide
  Antisense strand to SEQ ID NO: 1854209
ucaacuccagaaaggauaa

SEQ ID NO: 1854211 - RNA, 19 nt, Artificial Sequence
  Description of Artificial Sequence: Synthetic oligonucleotide
  Sense strand starting at position 329 of SEQ ID NO: 1564087
uguauauuggagugaggac

SEQ ID NO: 1854212 - RNA, 19 nt, Artificial Sequence
  Description of Artificial Sequence: Synthetic oligonucleotide
  Antisense strand to SEQ ID NO: 1854211
guccucacuccaauauaca

SEQ ID NO: 1854213 - RNA, 19 nt, Artificial Sequence
  Description of Artificial Sequence: Synthetic oligonucleotide
  Sense strand starting at position 420 of SEQ ID NO: 1564087
gaaacuuuauggcccagga

SEQ ID NO: 1854214 - RNA, 19 nt, Artificial Sequence
  Description of Artificial Sequence: Synthetic oligonucleotide
  Antisense strand to SEQ ID NO: 1854213
uccugggccauaaaguuuc

SEQ ID NO: 1854215 - RNA, 19 nt, Artificial Sequence
  Description of Artificial Sequence: Synthetic oligonucleotide
  Sense strand starting at position 424 of SEQ ID NO: 1564087
cuuuauggcccaggaaauu

SEQ ID NO: 1854216 - RNA, 19 nt, Artificial Sequence
  Description of Artificial Sequence: Synthetic oligonucleotide
  Antisense strand to SEQ ID NO: 1854215
aauuuccugggccauaaag

SEQ ID NO: 1854217 - RNA, 19 nt, Artificial Sequence
  Description of Artificial Sequence: Synthetic oligonucleotide
  Sense strand starting at position 451 of SEQ ID NO: 1564087
ucuugaaaguuguuuagaa

SEQ ID NO: 1854218 - RNA, 19 nt, Artificial Sequence
  Description of Artificial Sequence: Synthetic oligonucleotide
  Antisense strand to SEQ ID NO: 1854217
uucuaaacaacuuucaaga

SEQ ID NO: 1854219 - RNA, 19 nt, Artificial Sequence
  Description of Artificial Sequence: Synthetic oligonucleotide
  Sense strand starting at position 452 of SEQ ID NO: 1564087
cuugaaaguuguuuagaaa

SEQ ID NO: 1854220 - RNA, 19 nt, Artificial Sequence
  Description of Artificial Sequence: Synthetic oligonucleotide
  Antisense strand to SEQ ID NO: 1854219
uuucuaaacaacuuucaag

SEQ ID NO: 1854221 - RNA, 19 nt, Artificial Sequence
  Description of Artificial Sequence: Synthetic oligonucleotide
  Sense strand starting at position 551 of SEQ ID NO: 1564087
ggcaauuugucaguggguu

SEQ ID NO: 1854222 - RNA, 19 nt, Artificial Sequence
  Description of Artificial Sequence: Synthetic oligonucleotide
  Antisense strand to SEQ ID NO: 1854221
aacccacugacaaauugcc

SEQ ID NO: 1854223 - RNA, 19 nt, Artificial Sequence
  Description of Artificial Sequence: Synthetic oligonucleotide
  Sense strand starting at position 552 of SEQ ID NO: 1564087
gcaauuugucaguggguuu

SEQ ID NO: 1854224 - RNA, 19 nt, Artificial Sequence
  Description of Artificial Sequence: Synthetic oligonucleotide
  Antisense strand to SEQ ID NO: 1854223
aaacccacugacaaauugc

SEQ ID NO: 1854225 - RNA, 19 nt, Artificial Sequence
  Description of Artificial Sequence: Synthetic oligonucleotide
  Sense strand starting at position 622 of SEQ ID NO: 1564087
acaaaugaagccuguccaa

SEQ ID NO: 1854226 - RNA, 19 nt, Artificial Sequence
  Description of Artificial Sequence: Synthetic oligonucleotide
  Antisense strand to SEQ ID NO: 1854225
uuggacaggcuucauuugu

SEQ ID NO: 1854227 - RNA, 19 nt, Artificial Sequence
  Description of Artificial Sequence: Synthetic oligonucleotide
  Sense strand starting at position 657 of SEQ ID NO: 1564087
uuugcaguccucuuuguuu

SEQ ID NO: 1854228 - RNA, 19 nt, Artificial Sequence
  Description of Artificial Sequence: Synthetic oligonucleotide
  Antisense strand to SEQ ID NO: 1854227
aaacaaagaggacugcaaa

SEQ ID NO: 1854229 - RNA, 19 nt, Artificial Sequence
  Description of Artificial Sequence: Synthetic oligonucleotide
  Sense strand starting at position 744 of SEQ ID NO: 1564087
gggucuuccaggcauaacu

SEQ ID NO: 1854230 - RNA, 19 nt, Artificial Sequence
  Description of Artificial Sequence: Synthetic oligonucleotide
  Antisense strand to SEQ ID NO: 1854229
aguuaugccuggaagaccc

SEQ ID NO: 1854231 - RNA, 19 nt, Artificial Sequence
  Description of Artificial Sequence: Synthetic oligonucleotide
  Sense strand starting at position 1158 of SEQ ID NO: 1564087
ugucuuauaaauugggaag

SEQ ID NO: 1854232 - RNA, 19 nt, Artificial Sequence
  Description of Artificial Sequence: Synthetic oligonucleotide
  Antisense strand to SEQ ID NO: 1854231
cuucccaauuuauaagaca

SEQ ID NO: 1854233 - RNA, 19 nt, Artificial Sequence
  Description of Artificial Sequence: Synthetic oligonucleotide
  Sense strand starting at position 1217 of SEQ ID NO: 1564087
gaggguugucugcaggauu

SEQ ID NO: 1854234 - RNA, 19 nt, Artificial Sequence
  Description of Artificial Sequence: Synthetic oligonucleotide
  Antisense strand to SEQ ID NO: 1854233
aauccugcagacaacccuc

SEQ ID NO: 1854235 - RNA, 19 nt, Artificial Sequence
  Description of Artificial Sequence: Synthetic oligonucleotide
  Sense strand starting at position 1247 of SEQ ID NO: 1564087
gggccauuuccuuggcaua

SEQ ID NO: 1854236 - RNA, 19 nt, Artificial Sequence
  Description of Artificial Sequence: Synthetic oligonucleotide
  Antisense strand to SEQ ID NO: 1854235
uaugccaaggaaauggccc

SEQ ID NO: 1854237 - RNA, 19 nt, Artificial Sequence
  Description of Artificial Sequence: Synthetic oligonucleotide
  Sense strand starting at position 1248 of SEQ ID NO: 1564087
ggccauuuccuuggcauaa

SEQ ID NO: 1854238 - RNA, 19 nt, Artificial Sequence
  Description of Artificial Sequence: Synthetic oligonucleotide
  Antisense strand to SEQ ID NO: 1854237
uuaugccaaggaaauggcc

SEQ ID NO: 1854239 - RNA, 19 nt, Artificial Sequence
  Description of Artificial Sequence: Synthetic oligonucleotide
  Sense strand starting at position 1681 of SEQ ID NO: 1564087
uagaguacaucuguuagga

SEQ ID NO: 1854240 - RNA, 19 nt, Artificial Sequence
  Description of Artificial Sequence: Synthetic oligonucleotide
  Antisense strand to SEQ ID NO: 1854239
uccuaacagauguacucua

SEQ ID NO: 1854241 - RNA, 19 nt, Artificial Sequence
  Description of Artificial Sequence: Synthetic oligonucleotide
  Sense strand starting at position 1779 of SEQ ID NO: 1564087
ggcuguggucuugaagaau

SEQ ID NO: 1854242 - RNA, 19 nt, Artificial Sequence
  Description of Artificial Sequence: Synthetic oligonucleotide
  Antisense strand to SEQ ID NO: 1854241
auucuucaagaccacagcc

SEQ ID NO: 1854243 - RNA, 19 nt, Artificial Sequence
  Description of Artificial Sequence: Synthetic oligonucleotide
  Sense strand starting at position 1782 of SEQ ID NO: 1564087
uguggucuugaagaauacu

SEQ ID NO: 1854244 - RNA, 19 nt, Artificial Sequence
  Description of Artificial Sequence: Synthetic oligonucleotide
  Antisense strand to SEQ ID NO: 1854243
aguauucuucaagaccaca

SEQ ID NO: 1854245 - RNA, 19 nt, Artificial Sequence
  Description of Artificial Sequence: Synthetic oligonucleotide
  Sense strand starting at position 2047 of SEQ ID NO: 1564087
cgccacccugauuaugaaa

SEQ ID NO: 1854246 - RNA, 19 nt, Artificial Sequence
  Description of Artificial Sequence: Synthetic oligonucleotide
  Antisense strand to SEQ ID NO: 1854245
uuucauaaucaggguggcg

SEQ ID NO: 1854247 - RNA, 19 nt, Artificial Sequence
  Description of Artificial Sequence: Synthetic oligonucleotide
  Sense strand starting at position 2118 of SEQ ID NO: 1564087
ggcuuaagacugcaugaac

SEQ ID NO: 1854248 - RNA, 19 nt, Artificial Sequence
  Description of Artificial Sequence: Synthetic oligonucleotide
  Antisense strand to SEQ ID NO: 1854247
guucaugcagucuuaagcc

SEQ ID NO: 1854249 - RNA, 19 nt, Artificial Sequence
  Description of Artificial Sequence: Synthetic oligonucleotide
  Sense strand starting at position 2665 of SEQ ID NO: 1564087
gcugucauagaaggacaau

SEQ ID NO: 1854250 - RNA, 19 nt, Artificial Sequence
  Description of Artificial Sequence: Synthetic oligonucleotide
  Antisense strand to SEQ ID NO: 1854249
auuguccuucuaugacagc

SEQ ID NO: 1854251 - RNA, 19 nt, Artificial Sequence
  Description of Artificial Sequence: Synthetic oligonucleotide
  Sense strand starting at position 2725 of SEQ ID NO: 1564087
uucugaugucuuuacauau

SEQ ID NO: 1854252 - RNA, 19 nt, Artificial Sequence
  Description of Artificial Sequence: Synthetic oligonucleotide
  Antisense strand to SEQ ID NO: 1854251
auauguaaagacaucagaa

SEQ ID NO: 1854253 - RNA, 19 nt, Artificial Sequence
  Description of Artificial Sequence: Synthetic oligonucleotide
  Sense strand starting at position 2977 of SEQ ID NO: 1564087
gugagaacacucgacuuac

SEQ ID NO: 1854254 - RNA, 19 nt, Artificial Sequence
  Description of Artificial Sequence: Synthetic oligonucleotide
  Antisense strand to SEQ ID NO: 1854253
guaagucgaguguucucac

SEQ ID NO: 1854255 - RNA, 19 nt, Artificial Sequence
  Description of Artificial Sequence: Synthetic oligonucleotide
  Sense strand starting at position 3056 of SEQ ID NO: 1564087
gagauugauuucuacugga

SEQ ID NO: 1854256 - RNA, 19 nt, Artificial Sequence
  Description of Artificial Sequence: Synthetic oligonucleotide
  Antisense strand to SEQ ID NO: 1854255
uccaguagaaaucaaucuc

SEQ ID NO: 1854257 - RNA, 19 nt, Artificial Sequence
  Description of Artificial Sequence: Synthetic oligonucleotide
  Sense strand starting at position 3085 of SEQ ID NO: 1564087
ugaaauaaguaggacauuu

SEQ ID NO: 1854258 - RNA, 19 nt, Artificial Sequence
  Description of Artificial Sequence: Synthetic oligonucleotide
  Antisense strand to SEQ ID NO: 1854257
aaauguccuacuuauuuca

SEQ ID NO: 1854259 - RNA, 19 nt, Artificial Sequence
  Description of Artificial Sequence: Synthetic oligonucleotide
  Sense strand starting at position 3093 of SEQ ID NO: 1564087
guaggacauuuccaaggga

SEQ ID NO: 1854260 - RNA, 19 nt, Artificial Sequence
  Description of Artificial Sequence: Synthetic oligonucleotide
  Antisense strand to SEQ ID NO: 1854259
ucccuuggaaauguccuac

SEQ ID NO: 1854261 - RNA, 19 nt, Artificial Sequence
  Description of Artificial Sequence: Synthetic oligonucleotide
  Sense strand starting at position 3115 of SEQ ID NO: 1564087
ugaucuaaugcugauugua

SEQ ID NO: 1854262 - RNA, 19 nt, Artificial Sequence
  Description of Artificial Sequence: Synthetic oligonucleotide
  Antisense strand to SEQ ID NO: 1854261
uacaaucagcauuagauca

SEQ ID NO: 1854263 - RNA, 19 nt, Artificial Sequence
  Description of Artificial Sequence: Synthetic oligonucleotide
  Sense strand starting at position 3268 of SEQ ID NO: 1564087
cuguauuucucccugaugu

SEQ ID NO: 1854264 - RNA, 19 nt, Artificial Sequence
  Description of Artificial Sequence: Synthetic oligonucleotide
  Antisense strand to SEQ ID NO: 1854263
acaucagggagaaauacag

SEQ ID NO: 1854265 - RNA, 19 nt, Artificial Sequence
  Description of Artificial Sequence: Synthetic oligonucleotide
  Sense strand starting at position 3269 of SEQ ID NO: 1564087
uguauuucucccugauguu

SEQ ID NO: 1854266 - RNA, 19 nt, Artificial Sequence
  Description of Artificial Sequence: Synthetic oligonucleotide
  Antisense strand to SEQ ID NO: 1854265
aacaucagggagaaauaca

SEQ ID NO: 1854267 - RNA, 19 nt, Artificial Sequence
  Description of Artificial Sequence: Synthetic oligonucleotide
  Sense strand starting at position 3312 of SEQ ID NO: 1564087
uuauuuacauuggagaaca

SEQ ID NO: 1854268 - RNA, 19 nt, Artificial Sequence
  Description of Artificial Sequence: Synthetic oligonucleotide
  Antisense strand to SEQ ID NO: 1854267
uguucuccaauguaaauaa

SEQ ID NO: 1854269 - RNA, 19 nt, Artificial Sequence
  Description of Artificial Sequence: Synthetic oligonucleotide
  Sense strand starting at position 3394 of SEQ ID NO: 1564087
gugucuuugcugucuugua

SEQ ID NO: 1854270 - RNA, 19 nt, Artificial Sequence
  Description of Artificial Sequence: Synthetic oligonucleotide
  Antisense strand to SEQ ID NO: 1854269
uacaagacagcaaagacac

SEQ ID NO: 1854271 - RNA, 19 nt, Artificial Sequence
  Description of Artificial Sequence: Synthetic oligonucleotide
  Sense strand starting at position 3396 of SEQ ID NO: 1564087
gucuuugcugucuuguaua

SEQ ID NO: 1854272 - RNA, 19 nt, Artificial Sequence
  Description of Artificial Sequence: Synthetic oligonucleotide
  Antisense strand to SEQ ID NO: 1854271
uauacaagacagcaaagac

SEQ ID NO: 1854273 - RNA, 19 nt, Artificial Sequence
  Description of Artificial Sequence: Synthetic oligonucleotide
  Sense strand starting at position 3477 of SEQ ID NO: 1564087
uaacucacugguuggagua

SEQ ID NO: 1854274 - RNA, 19 nt, Artificial Sequence
  Description of Artificial Sequence: Synthetic oligonucleotide
  Antisense strand to SEQ ID NO: 1854273
uacuccaaccagugaguua

SEQ ID NO: 1854275 - RNA, 19 nt, Artificial Sequence
  Description of Artificial Sequence: Synthetic oligonucleotide
  Sense strand starting at position 3478 of SEQ ID NO: 1564087
aacucacugguuggaguaa

SEQ ID NO: 1854276 - RNA, 19 nt, Artificial Sequence
  Description of Artificial Sequence: Synthetic oligonucleotide
  Antisense strand to SEQ ID NO: 1854275
uuacuccaaccagugaguu

SEQ ID NO: 1854277 - RNA, 19 nt, Artificial Sequence
  Description of Artificial Sequence: Synthetic oligonucleotide
  Sense strand starting at position 3707 of SEQ ID NO: 1564087
gcaagaauagugcaaugaa

SEQ ID NO: 1854278 - RNA, 19 nt, Artificial Sequence
  Description of Artificial Sequence: Synthetic oligonucleotide
  Antisense strand to SEQ ID NO: 1854277
uucauugcacuauucuugc

SEQ ID NO: 1854279 - RNA, 19 nt, Artificial Sequence
  Description of Artificial Sequence: Synthetic oligonucleotide
  Sense strand starting at position 3710 of SEQ ID NO: 1564087
agaauagugcaaugaacac

SEQ ID NO: 1854280 - RNA, 19 nt, Artificial Sequence
  Description of Artificial Sequence: Synthetic oligonucleotide
  Antisense strand to SEQ ID NO: 1854279
guguucauugcacuauucu

SEQ ID NO: 1854281 - RNA, 19 nt, Artificial Sequence
  Description of Artificial Sequence: Synthetic oligonucleotide
  Sense strand starting at position 3781 of SEQ ID NO: 1564087
ucucuuucucuggacagau

SEQ ID NO: 1854282 - RNA, 19 nt, Artificial Sequence
  Description of Artificial Sequence: Synthetic oligonucleotide
  Antisense strand to SEQ ID NO: 1854281
aucuguccagagaaagaga

SEQ ID NO: 1854283 - RNA, 19 nt, Artificial Sequence
  Description of Artificial Sequence: Synthetic oligonucleotide
  Sense strand starting at position 3815 of SEQ ID NO: 1564087
ugagucauuugagaaucaa

SEQ ID NO: 1854284 - RNA, 19 nt, Artificial Sequence
  Description of Artificial Sequence: Synthetic oligonucleotide
  Antisense strand to SEQ ID NO: 1854283
uugauucucaaaugacuca

SEQ ID NO: 1854285 - RNA, 19 nt, Artificial Sequence
  Description of Artificial Sequence: Synthetic oligonucleotide
  Sense strand starting at position 3935 of SEQ ID NO: 1564087
gucaaaucucuccaauugu

SEQ ID NO: 1854286 - RNA, 19 nt, Artificial Sequence
  Description of Artificial Sequence: Synthetic oligonucleotide
  Antisense strand to SEQ ID NO: 1854285
acaauuggagagauuugac

SEQ ID NO: 1854287 - RNA, 19 nt, Artificial Sequence
  Description of Artificial Sequence: Synthetic oligonucleotide
  Sense strand starting at position 46 of SEQ ID NO: 1564088
guaaauuggcacuauucuu

SEQ ID NO: 1854288 - RNA, 19 nt, Artificial Sequence
  Description of Artificial Sequence: Synthetic oligonucleotide
  Antisense strand to SEQ ID NO: 1854287
aagaauagugccaauuuac

SEQ ID NO: 1854289 - RNA, 19 nt, Artificial Sequence
  Description of Artificial Sequence: Synthetic oligonucleotide
  Sense strand starting at position 97 of SEQ ID NO: 1564088
ucuuaucauccagggaaca

SEQ ID NO: 1854290 - RNA, 19 nt, Artificial Sequence
  Description of Artificial Sequence: Synthetic oligonucleotide
  Antisense strand to SEQ ID NO: 1854289
uguucccuggaugauaaga

SEQ ID NO: 1854291 - RNA, 19 nt, Artificial Sequence
  Description of Artificial Sequence: Synthetic oligonucleotide
  Sense strand starting at position 174 of SEQ ID NO: 1564088
cugggaaaguaccuuuaca

SEQ ID NO: 1854292 - RNA, 19 nt, Artificial Sequence
  Description of Artificial Sequence: Synthetic oligonucleotide
  Antisense strand to SEQ ID NO: 1854291
uguaaagguacuuucccag

SEQ ID NO: 1854293 - RNA, 19 nt, Artificial Sequence
  Description of Artificial Sequence: Synthetic oligonucleotide
  Sense strand starting at position 194 of SEQ ID NO: 1564088
acaaacuugguguacaauu

SEQ ID NO: 1854294 - RNA, 19 nt, Artificial Sequence
  Description of Artificial Sequence: Synthetic oligonucleotide
  Antisense strand to SEQ ID NO: 1854293
aauuguacaccaaguuugu

SEQ ID NO: 1854295 - RNA, 19 nt, Artificial Sequence
  Description of Artificial Sequence: Synthetic oligonucleotide
  Sense strand starting at position 219 of SEQ ID NO: 1564088
gugugaccagccuaagauc

SEQ ID NO: 1854296 - RNA, 19 nt, Artificial Sequence
  Description of Artificial Sequence: Synthetic oligonucleotide
  Antisense strand to SEQ ID NO: 1854295
gaucuuaggcuggucacac

SEQ ID NO: 1854297 - RNA, 19 nt, Artificial Sequence
  Description of Artificial Sequence: Synthetic oligonucleotide
  Sense strand starting at position 227 of SEQ ID NO: 1564088
agccuaagaucuguuuaau

SEQ ID NO: 1854298 - RNA, 19 nt, Artificial Sequence
  Description of Artificial Sequence: Synthetic oligonucleotide
  Antisense strand to SEQ ID NO: 1854297
auuaaacagaucuuaggcu

SEQ ID NO: 1854299 - RNA, 19 nt, Artificial Sequence
  Description of Artificial Sequence: Synthetic oligonucleotide
  Sense strand starting at position 288 of SEQ ID NO: 1564088
uaaagaggguuuguaaacu

SEQ ID NO: 1854300 - RNA, 19 nt, Artificial Sequence
  Description of Artificial Sequence: Synthetic oligonucleotide
  Antisense strand to SEQ ID NO: 1854299
aguuuacaaacccucuuua

SEQ ID NO: 1854301 - RNA, 19 nt, Artificial Sequence
  Description of Artificial Sequence: Synthetic oligonucleotide
  Sense strand starting at position 310 of SEQ ID NO: 1564088
gccaauuauccuggauacu

SEQ ID NO: 1854302 - RNA, 19 nt, Artificial Sequence
  Description of Artificial Sequence: Synthetic oligonucleotide
  Antisense strand to SEQ ID NO: 1854301
aguauccaggauaauuggc

SEQ ID NO: 1854303 - RNA, 19 nt, Artificial Sequence
  Description of Artificial Sequence: Synthetic oligonucleotide
  Sense strand starting at position 385 of SEQ ID NO: 1564088
agcagugugauauaguauu

SEQ ID NO: 1854304 - RNA, 19 nt, Artificial Sequence
  Description of Artificial Sequence: Synthetic oligonucleotide
  Antisense strand to SEQ ID NO: 1854303
aauacuauaucacacugcu

SEQ ID NO: 1854305 - RNA, 19 nt, Artificial Sequence
  Description of Artificial Sequence: Synthetic oligonucleotide
  Sense strand starting at position 395 of SEQ ID NO: 1564088
uauaguauucgugugugca

SEQ ID NO: 1854306 - RNA, 19 nt, Artificial Sequence
  Description of Artificial Sequence: Synthetic oligonucleotide
  Antisense strand to SEQ ID NO: 1854305
ugcacacacgaauacuaua

SEQ ID NO: 1854307 - RNA, 19 nt, Artificial Sequence
  Description of Artificial Sequence: Synthetic oligonucleotide
  Sense strand starting at position 409 of SEQ ID NO: 1564088
gugcaaucucuggaaucug

SEQ ID NO: 1854308 - RNA, 19 nt, Artificial Sequence
  Description of Artificial Sequence: Synthetic oligonucleotide
  Antisense strand to SEQ ID NO: 1854307
cagauuccagagauugcac

SEQ ID NO: 1854309 - RNA, 19 nt, Artificial Sequence
  Description of Artificial Sequence: Synthetic oligonucleotide
  Sense strand starting at position 455 of SEQ ID NO: 1564088
gcuaguuauaccugggaga

SEQ ID NO: 1854310 - RNA, 19 nt, Artificial Sequence
  Description of Artificial Sequence: Synthetic oligonucleotide
  Antisense strand to SEQ ID NO: 1854309
ucucccagguauaacuagc

SEQ ID NO: 1854311 - RNA, 19 nt, Artificial Sequence
  Description of Artificial Sequence: Synthetic oligonucleotide
  Sense strand starting at position 456 of SEQ ID NO: 1564088
cuaguuauaccugggagag

SEQ ID NO: 1854312 - RNA, 19 nt, Artificial Sequence
  Description of Artificial Sequence: Synthetic oligonucleotide
  Antisense strand to SEQ ID NO: 1854311
cucucccagguauaacuag

SEQ ID NO: 1854313 - RNA, 19 nt, Artificial Sequence
  Description of Artificial Sequence: Synthetic oligonucleotide
  Sense strand starting at position 457 of SEQ ID NO: 1564088
uaguuauaccugggagagc

SEQ ID NO: 1854314 - RNA, 19 nt, Artificial Sequence
  Description of Artificial Sequence: Synthetic oligonucleotide
  Antisense strand to SEQ ID NO: 1854313
gcucucccagguauaacua

SEQ ID NO: 1854315 - RNA, 19 nt, Artificial Sequence
  Description of Artificial Sequence: Synthetic oligonucleotide
  Sense strand starting at position 640 of SEQ ID NO: 1564088
aaacaaacuugugggauuu

SEQ ID NO: 1854316 - RNA, 19 nt, Artificial Sequence
  Description of Artificial Sequence: Synthetic oligonucleotide
  Antisense strand to SEQ ID NO: 1854315
aaaucccacaaguuuguuu

SEQ ID NO: 1854317 - RNA, 19 nt, Artificial Sequence
  Description of Artificial Sequence: Synthetic oligonucleotide
  Sense strand starting at position 666 of SEQ ID NO: 1564088
augggcauucucuauauua

SEQ ID NO: 1854318 - RNA, 19 nt, Artificial Sequence
  Description of Artificial Sequence: Synthetic oligonucleotide
  Antisense strand to SEQ ID NO: 1854317
uaauauagagaaugcccau

SEQ ID NO: 1854319 - RNA, 19 nt, Artificial Sequence
  Description of Artificial Sequence: Synthetic oligonucleotide
  Sense strand starting at position 668 of SEQ ID NO: 1564088
gggcauucucuauauuaaa

SEQ ID NO: 1854320 - RNA, 19 nt, Artificial Sequence
  Description of Artificial Sequence: Synthetic oligonucleotide
  Antisense strand to SEQ ID NO: 1854319
uuuaauauagagaaugccc

SEQ ID NO: 1854321 - RNA, 19 nt, Artificial Sequence
  Description of Artificial Sequence: Synthetic oligonucleotide
  Sense strand starting at position 812 of SEQ ID NO: 1564088
cugguuaacuggucgaaau

SEQ ID NO: 1854322 - RNA, 19 nt, Artificial Sequence
  Description of Artificial Sequence: Synthetic oligonucleotide
  Antisense strand to SEQ ID NO: 1854321
auuucgaccaguuaaccag

SEQ ID NO: 1854323 - RNA, 19 nt, Artificial Sequence
  Description of Artificial Sequence: Synthetic oligonucleotide
  Sense strand starting at position 813 of SEQ ID NO: 1564088
ugguuaacuggucgaaaug

SEQ ID NO: 1854324 - RNA, 19 nt, Artificial Sequence
  Description of Artificial Sequence: Synthetic oligonucleotide
  Antisense strand to SEQ ID NO: 1854323
cauuucgaccaguuaacca

SEQ ID NO: 1854325 - RNA, 19 nt, Artificial Sequence
  Description of Artificial Sequence: Synthetic oligonucleotide
  Sense strand starting at position 814 of SEQ ID NO: 1564088
gguuaacuggucgaaauga

SEQ ID NO: 1854326 - RNA, 19 nt, Artificial Sequence
  Description of Artificial Sequence: Synthetic oligonucleotide
  Antisense strand to SEQ ID NO: 1854325
ucauuucgaccaguuaacc

SEQ ID NO: 1854327 - RNA, 19 nt, Artificial Sequence
  Description of Artificial Sequence: Synthetic oligonucleotide
  Sense strand starting at position 903 of SEQ ID NO: 1564088
uuuguuauuccugaaguuu

SEQ ID NO: 1854328 - RNA, 19 nt, Artificial Sequence
  Description of Artificial Sequence: Synthetic oligonucleotide
  Antisense strand to SEQ ID NO: 1854327
aaacuucaggaauaacaaa

SEQ ID NO: 1854329 - RNA, 19 nt, Artificial Sequence
  Description of Artificial Sequence: Synthetic oligonucleotide
  Sense strand starting at position 1676 of SEQ ID NO: 1564088
auggcuucgcgugcaaauu

SEQ ID NO: 1854330 - RNA, 19 nt, Artificial Sequence
  Description of Artificial Sequence: Synthetic oligonucleotide
  Antisense strand to SEQ ID NO: 1854329
aauuugcacgcgaagccau

SEQ ID NO: 1854331 - RNA, 19 nt, Artificial Sequence
  Description of Artificial Sequence: Synthetic oligonucleotide
  Sense strand starting at position 1807 of SEQ ID NO: 1564088
agagaaauauaucacaaga

SEQ ID NO: 1854332 - RNA, 19 nt, Artificial Sequence
  Description of Artificial Sequence: Synthetic oligonucleotide
  Antisense strand to SEQ ID NO: 1854331
ucuugugauauauuucucu

SEQ ID NO: 1854333 - RNA, 19 nt, Artificial Sequence
  Description of Artificial Sequence: Synthetic oligonucleotide
  Sense strand starting at position 1824 of SEQ ID NO: 1564088
gauauauuugccugucagc

SEQ ID NO: 1854334 - RNA, 19 nt, Artificial Sequence
  Description of Artificial Sequence: Synthetic oligonucleotide
  Antisense strand to SEQ ID NO: 1854333
gcugacaggcaaauauauc

SEQ ID NO: 1854335 - RNA, 19 nt, Artificial Sequence
  Description of Artificial Sequence: Synthetic oligonucleotide
  Sense strand starting at position 2072 of SEQ ID NO: 1564088
acgcgaaagcggucagcuu

SEQ ID NO: 1854336 - RNA, 19 nt, Artificial Sequence
  Description of Artificial Sequence: Synthetic oligonucleotide
  Antisense strand to SEQ ID NO: 1854335
aagcugaccgcuuucgcgu

SEQ ID NO: 1854337 - RNA, 19 nt, Artificial Sequence
  Description of Artificial Sequence: Synthetic oligonucleotide
  Sense strand starting at position 2334 of SEQ ID NO: 1564088
gcuuuaauuucgcccggga

SEQ ID NO: 1854338 - RNA, 19 nt, Artificial Sequence
  Description of Artificial Sequence: Synthetic oligonucleotide
  Antisense strand to SEQ ID NO: 1854337
ucccgggcgaaauuaaagc

SEQ ID NO: 1854339 - RNA, 19 nt, Artificial Sequence
  Description of Artificial Sequence: Synthetic oligonucleotide
  Sense strand starting at position 2336 of SEQ ID NO: 1564088
uuuaauuucgcccgggaaa

SEQ ID NO: 1854340 - RNA, 19 nt, Artificial Sequence
  Description of Artificial Sequence: Synthetic oligonucleotide
  Antisense strand to SEQ ID NO: 1854339
uuucccgggcgaaauuaaa

SEQ ID NO: 1854341 - RNA, 19 nt, Artificial Sequence
  Description of Artificial Sequence: Synthetic oligonucleotide
  Sense strand starting at position 2338 of SEQ ID NO: 1564088
uaauuucgcccgggaaagu

SEQ ID NO: 1854342 - RNA, 19 nt, Artificial Sequence
  Description of Artificial Sequence: Synthetic oligonucleotide
  Antisense strand to SEQ ID NO: 1854341
acuuucccgggcgaaauua

SEQ ID NO: 1854343 - RNA, 19 nt, Artificial Sequence
  Description of Artificial Sequence: Synthetic oligonucleotide
  Sense strand starting at position 2411 of SEQ ID NO: 1564088
uaggguucccugggaaagu

SEQ ID NO: 1854344 - RNA, 19 nt, Artificial Sequence
  Description of Artificial Sequence: Synthetic oligonucleotide
  Antisense strand to SEQ ID NO: 1854343
acuuucccagggaacccua

SEQ ID NO: 1854345 - RNA, 19 nt, Artificial Sequence
  Description of Artificial Sequence: Synthetic oligonucleotide
  Sense strand starting at position 2792 of SEQ ID NO: 1564088
gagggacucuuccuugagu

SEQ ID NO: 1854346 - RNA, 19 nt, Artificial Sequence
  Description of Artificial Sequence: Synthetic oligonucleotide
  Antisense strand to SEQ ID NO: 1854345
acucaaggaagagucccuc

SEQ ID NO: 1854347 - RNA, 19 nt, Artificial Sequence
  Description of Artificial Sequence: Synthetic oligonucleotide
  Sense strand starting at position 3132 of SEQ ID NO: 1564088
gggagcucuucccugggau

SEQ ID NO: 1854348 - RNA, 19 nt, Artificial Sequence
  Description of Artificial Sequence: Synthetic oligonucleotide
  Antisense strand to SEQ ID NO: 1854347
aucccagggaagagcuccc

SEQ ID NO: 1854349 - RNA, 19 nt, Artificial Sequence
  Description of Artificial Sequence: Synthetic oligonucleotide
  Sense strand starting at position 3133 of SEQ ID NO: 1564088
ggagcucuucccugggauu

SEQ ID NO: 1854350 - RNA, 19 nt, Artificial Sequence
  Description of Artificial Sequence: Synthetic oligonucleotide
  Antisense strand to SEQ ID NO: 1854349
aaucccagggaagagcucc

SEQ ID NO: 1854351 - RNA, 19 nt, Artificial Sequence
  Description of Artificial Sequence: Synthetic oligonucleotide
  Sense strand starting at position 3165 of SEQ ID NO: 1564088
cagccauagccucagaugu

SEQ ID NO: 1854352 - RNA, 19 nt, Artificial Sequence
  Description of Artificial Sequence: Synthetic oligonucleotide
  Antisense strand to SEQ ID NO: 1854351
acaucugaggcuauggcug

SEQ ID NO: 1854353 - RNA, 19 nt, Artificial Sequence
  Description of Artificial Sequence: Synthetic oligonucleotide
  Sense strand starting at position 3201 of SEQ ID NO: 1564088
uccagaaauguuugaaggu

SEQ ID NO: 1854354 - RNA, 19 nt, Artificial Sequence
  Description of Artificial Sequence: Synthetic oligonucleotide
  Antisense strand to SEQ ID NO: 1854353
accuucaaacauuucugga

SEQ ID NO: 1854355 - RNA, 19 nt, Artificial Sequence
  Description of Artificial Sequence: Synthetic oligonucleotide
  Sense strand starting at position 3643 of SEQ ID NO: 1564088
gucauuuaaccaugucuuu

SEQ ID NO: 1854356 - RNA, 19 nt, Artificial Sequence
  Description of Artificial Sequence: Synthetic oligonucleotide
  Antisense strand to SEQ ID NO: 1854355
aaagacaugguuaaaugac

SEQ ID NO: 1854357 - RNA, 19 nt, Artificial Sequence
  Description of Artificial Sequence: Synthetic oligonucleotide
  Sense strand starting at position 3664 of SEQ ID NO: 1564088
ggaaguucccuuugagguc

SEQ ID NO: 1854358 - RNA, 19 nt, Artificial Sequence
  Description of Artificial Sequence: Synthetic oligonucleotide
  Antisense strand to SEQ ID NO: 1854357
gaccucaaagggaacuucc

SEQ ID NO: 1854359 - RNA, 19 nt, Artificial Sequence
  Description of Artificial Sequence: Synthetic oligonucleotide
  Sense strand starting at position 3776 of SEQ ID NO: 1564088
ggcauauauguacauguau

SEQ ID NO: 1854360 - RNA, 19 nt, Artificial Sequence
  Description of Artificial Sequence: Synthetic oligonucleotide
  Antisense strand to SEQ ID NO: 1854359
auacauguacauauaugcc

SEQ ID NO: 1854361 - RNA, 19 nt, Artificial Sequence
  Description of Artificial Sequence: Synthetic oligonucleotide
  Sense strand starting at position 3911 of SEQ ID NO: 1564088
gcuagagcucuuuauuauu

SEQ ID NO: 1854362 - RNA, 19 nt, Artificial Sequence
  Description of Artificial Sequence: Synthetic oligonucleotide
  Antisense strand to SEQ ID NO: 1854361
aauaauaaagagcucuagc

SEQ ID NO: 1854363 - RNA, 19 nt, Artificial Sequence
  Description of Artificial Sequence: Synthetic oligonucleotide
  Sense strand starting at position 3956 of SEQ ID NO: 1564088
augccaugacgauaauauu

SEQ ID NO: 1854364 - RNA, 19 nt, Artificial Sequence
  Description of Artificial Sequence: Synthetic oligonucleotide
  Antisense strand to SEQ ID NO: 1854363
aauauuaucgucauggcau

SEQ ID NO: 1854365 - RNA, 19 nt, Artificial Sequence
  Description of Artificial Sequence: Synthetic oligonucleotide
  Sense strand starting at position 3962 of SEQ ID NO: 1564088
ugacgauaauauucuaagu

SEQ ID NO: 1854366 - RNA, 19 nt, Artificial Sequence
  Description of Artificial Sequence: Synthetic oligonucleotide
  Antisense strand to SEQ ID NO: 1854365
acuuagaauauuaucguca

SEQ ID NO: 1854367 - RNA, 19 nt, Artificial Sequence
  Description of Artificial Sequence: Synthetic oligonucleotide
  Sense strand starting at position 199 of SEQ ID NO: 1564089
cacagaaucuggguaauug

SEQ ID NO: 1854368 - RNA, 19 nt, Artificial Sequence
  Description of Artificial Sequence: Synthetic oligonucleotide
  Antisense strand to SEQ ID NO: 1854367
caauuacccagauucugug

SEQ ID NO: 1854369 - RNA, 19 nt, Artificial Sequence
  Description of Artificial Sequence: Synthetic oligonucleotide
  Sense strand starting at position 210 of SEQ ID NO: 1564089
gguaauugaagcugggaaa

SEQ ID NO: 1854370 - RNA, 19 nt, Artificial Sequence
  Description of Artificial Sequence: Synthetic oligonucleotide
  Antisense strand to SEQ ID NO: 1854369
uuucccagcuucaauuacc

SEQ ID NO: 1854371 - RNA, 19 nt, Artificial Sequence
  Description of Artificial Sequence: Synthetic oligonucleotide
  Sense strand starting at position 260 of SEQ ID NO: 1564089
cuagguacgucuuccugau

SEQ ID NO: 1854372 - RNA, 19 nt, Artificial Sequence
  Description of Artificial Sequence: Synthetic oligonucleotide
  Antisense strand to SEQ ID NO: 1854371
aucaggaagacguaccuag

SEQ ID NO: 1854373 - RNA, 19 nt, Artificial Sequence
  Description of Artificial Sequence: Synthetic oligonucleotide
  Sense strand starting at position 346 of SEQ ID NO: 1564089
ugguuugaggccuagcagu

SEQ ID NO: 1854374 - RNA, 19 nt, Artificial Sequence
  Description of Artificial Sequence: Synthetic oligonucleotide
  Antisense strand to SEQ ID NO: 1854373
acugcuaggccucaaacca

SEQ ID NO: 1854375 - RNA, 19 nt, Artificial Sequence
  Description of Artificial Sequence: Synthetic oligonucleotide
  Sense strand starting at position 577 of SEQ ID NO: 1564089
ggagaauacagccggaagu

SEQ ID NO: 1854376 - RNA, 19 nt, Artificial Sequence
  Description of Artificial Sequence: Synthetic oligonucleotide
  Antisense strand to SEQ ID NO: 1854375
acuuccggcuguauucucc

SEQ ID NO: 1854377 - RNA, 19 nt, Artificial Sequence
  Description of Artificial Sequence: Synthetic oligonucleotide
  Sense strand starting at position 673 of SEQ ID NO: 1564089
ggccuccaucucugagcua

SEQ ID NO: 1854378 - RNA, 19 nt, Artificial Sequence
  Description of Artificial Sequence: Synthetic oligonucleotide
  Antisense strand to SEQ ID NO: 1854377
uagcucagagauggaggcc

SEQ ID NO: 1854379 - RNA, 19 nt, Artificial Sequence
  Description of Artificial Sequence: Synthetic oligonucleotide
  Sense strand starting at position 814 of SEQ ID NO: 1564089
auuggauguguaggauaua

SEQ ID NO: 1854380 - RNA, 19 nt, Artificial Sequence
  Description of Artificial Sequence: Synthetic oligonucleotide
  Antisense strand to SEQ ID NO: 1854379
uauauccuacacauccaau

SEQ ID NO: 1854381 - RNA, 19 nt, Artificial Sequence
  Description of Artificial Sequence: Synthetic oligonucleotide
  Sense strand starting at position 817 of SEQ ID NO: 1564089
ggauguguaggauauacuu

SEQ ID NO: 1854382 - RNA, 19 nt, Artificial Sequence
  Description of Artificial Sequence: Synthetic oligonucleotide
  Antisense strand to SEQ ID NO: 1854381
aaguauauccuacacaucc

SEQ ID NO: 1854383 - RNA, 19 nt, Artificial Sequence
  Description of Artificial Sequence: Synthetic oligonucleotide
  Sense strand starting at position 823 of SEQ ID NO: 1564089
guaggauauacuugcugau

SEQ ID NO: 1854384 - RNA, 19 nt, Artificial Sequence
  Description of Artificial Sequence: Synthetic oligonucleotide
  Antisense strand to SEQ ID NO: 1854383
aucagcaaguauauccuac

SEQ ID NO: 1854385 - RNA, 19 nt, Artificial Sequence
  Description of Artificial Sequence: Synthetic oligonucleotide
  Sense strand starting at position 825 of SEQ ID NO: 1564089
aggauauacuugcugauug

SEQ ID NO: 1854386 - RNA, 19 nt, Artificial Sequence
  Description of Artificial Sequence: Synthetic oligonucleotide
  Antisense strand to SEQ ID NO: 1854385
caaucagcaaguauauccu

SEQ ID NO: 1854387 - RNA, 19 nt, Artificial Sequence
  Description of Artificial Sequence: Synthetic oligonucleotide
  Sense strand starting at position 836 of SEQ ID NO: 1564089
gcugauugucugggagaau

SEQ ID NO: 1854388 - RNA, 19 nt, Artificial Sequence
  Description of Artificial Sequence: Synthetic oligonucleotide
  Antisense strand to SEQ ID NO: 1854387
auucucccagacaaucagc

SEQ ID NO: 1854389 - RNA, 19 nt, Artificial Sequence
  Description of Artificial Sequence: Synthetic oligonucleotide
  Sense strand starting at position 1332 of SEQ ID NO: 1564089
gggcccuuugagugagaug

SEQ ID NO: 1854390 - RNA, 19 nt, Artificial Sequence
  Description of Artificial Sequence: Synthetic oligonucleotide
  Antisense strand to SEQ ID NO: 1854389
caucucacucaaagggccc

SEQ ID NO: 1854391 - RNA, 19 nt, Artificial Sequence
  Description of Artificial Sequence: Synthetic oligonucleotide
  Sense strand starting at position 1407 of SEQ ID NO: 1564089
gauaguuaaguacaagcuu

SEQ ID NO: 1854392 - RNA, 19 nt, Artificial Sequence
  Description of Artificial Sequence: Synthetic oligonucleotide
  Antisense strand to SEQ ID NO: 1854391
aagcuuguacuuaacuauc

SEQ ID NO: 1854393 - RNA, 19 nt, Artificial Sequence
  Description of Artificial Sequence: Synthetic oligonucleotide
  Sense strand starting at position 1505 of SEQ ID NO: 1564089
cccauucuucuaggguuga

SEQ ID NO: 1854394 - RNA, 19 nt, Artificial Sequence
  Description of Artificial Sequence: Synthetic oligonucleotide
  Antisense strand to SEQ ID NO: 1854393
ucaacccuagaagaauggg

SEQ ID NO: 1854395 - RNA, 19 nt, Artificial Sequence
  Description of Artificial Sequence: Synthetic oligonucleotide
  Sense strand starting at position 1518 of SEQ ID NO: 1564089
gguugaauugcaugacucu

SEQ ID NO: 1854396 - RNA, 19 nt, Artificial Sequence
  Description of Artificial Sequence: Synthetic oligonucleotide
  Antisense strand to SEQ ID NO: 1854395
agagucaugcaauucaacc

SEQ ID NO: 1854397 - RNA, 19 nt, Artificial Sequence
  Description of Artificial Sequence: Synthetic oligonucleotide
  Sense strand starting at position 1519 of SEQ ID NO: 1564089
guugaauugcaugacucua

SEQ ID NO: 1854398 - RNA, 19 nt, Artificial Sequence
  Description of Artificial Sequence: Synthetic oligonucleotide
  Antisense strand to SEQ ID NO: 1854397
uagagucaugcaauucaac

SEQ ID NO: 1854399 - RNA, 19 nt, Artificial Sequence
  Description of Artificial Sequence: Synthetic oligonucleotide
  Sense strand starting at position 1521 of SEQ ID NO: 1564089
ugaauugcaugacucuaga

SEQ ID NO: 1854400 - RNA, 19 nt, Artificial Sequence
  Description of Artificial Sequence: Synthetic oligonucleotide
  Antisense strand to SEQ ID NO: 1854399
ucuagagucaugcaauuca

SEQ ID NO: 1854401 - RNA, 19 nt, Artificial Sequence
  Description of Artificial Sequence: Synthetic oligonucleotide
  Sense strand starting at position 1532 of SEQ ID NO: 1564089
acucuagauuucuaaggau

SEQ ID NO: 1854402 - RNA, 19 nt, Artificial Sequence
  Description of Artificial Sequence: Synthetic oligonucleotide
  Antisense strand to SEQ ID NO: 1854401
auccuuagaaaucuagagu

SEQ ID NO: 1854403 - RNA, 19 nt, Artificial Sequence
  Description of Artificial Sequence: Synthetic oligonucleotide
  Sense strand starting at position 1535 of SEQ ID NO: 1564089
cuagauuucuaaggaucua

SEQ ID NO: 1854404 - RNA, 19 nt, Artificial Sequence
  Description of Artificial Sequence: Synthetic oligonucleotide
  Antisense strand to SEQ ID NO: 1854403
uagauccuuagaaaucuag

SEQ ID NO: 1854405 - RNA, 19 nt, Artificial Sequence
  Description of Artificial Sequence: Synthetic oligonucleotide
  Sense strand starting at position 1547 of SEQ ID NO: 1564089
ggaucuauucuguaacucu

SEQ ID NO: 1854406 - RNA, 19 nt, Artificial Sequence
  Description of Artificial Sequence: Synthetic oligonucleotide
  Antisense strand to SEQ ID NO: 1854405
agaguuacagaauagaucc

SEQ ID NO: 1854407 - RNA, 19 nt, Artificial Sequence
  Description of Artificial Sequence: Synthetic oligonucleotide
  Sense strand starting at position 1558 of SEQ ID NO: 1564089
guaacucuguugcuccaga

SEQ ID NO: 1854408 - RNA, 19 nt, Artificial Sequence
  Description of Artificial Sequence: Synthetic oligonucleotide
  Antisense strand to SEQ ID NO: 1854407
ucuggagcaacagaguuac

SEQ ID NO: 1854409 - RNA, 19 nt, Artificial Sequence
  Description of Artificial Sequence: Synthetic oligonucleotide
  Sense strand starting at position 1691 of SEQ ID NO: 1564089
ccaagagucuuggaaggga

SEQ ID NO: 1854410 - RNA, 19 nt, Artificial Sequence
  Description of Artificial Sequence: Synthetic oligonucleotide
  Antisense strand to SEQ ID NO: 1854409
ucccuuccaagacucuugg

SEQ ID NO: 1854411 - RNA, 19 nt, Artificial Sequence
  Description of Artificial Sequence: Synthetic oligonucleotide
  Sense strand starting at position 2116 of SEQ ID NO: 1564089
guugaacagucagagaaag

SEQ ID NO: 1854412 - RNA, 19 nt, Artificial Sequence
  Description of Artificial Sequence: Synthetic oligonucleotide
  Antisense strand to SEQ ID NO: 1854411
cuuucucugacuguucaac

SEQ ID NO: 1854413 - RNA, 19 nt, Artificial Sequence
  Description of Artificial Sequence: Synthetic oligonucleotide
  Sense strand starting at position 2196 of SEQ ID NO: 1564089
ggacaaucagcucgacauu

SEQ ID NO: 1854414 - RNA, 19 nt, Artificial Sequence
  Description of Artificial Sequence: Synthetic oligonucleotide
  Antisense strand to SEQ ID NO: 1854413
aaugucgagcugauugucc

SEQ ID NO: 1854415 - RNA, 19 nt, Artificial Sequence
  Description of Artificial Sequence: Synthetic oligonucleotide
  Sense strand starting at position 2211 of SEQ ID NO: 1564089
cauuauauggcguacccaa

SEQ ID NO: 1854416 - RNA, 19 nt, Artificial Sequence
  Description of Artificial Sequence: Synthetic oligonucleotide
  Antisense strand to SEQ ID NO: 1854415
uuggguacgccauauaaug

SEQ ID NO: 1854417 - RNA, 19 nt, Artificial Sequence
  Description of Artificial Sequence: Synthetic oligonucleotide
  Sense strand starting at position 2464 of SEQ ID NO: 1564089
accuauagccauugucacu

SEQ ID NO: 1854418 - RNA, 19 nt, Artificial Sequence
  Description of Artificial Sequence: Synthetic oligonucleotide
  Antisense strand to SEQ ID NO: 1854417
agugacaauggcuauaggu

SEQ ID NO: 1854419 - RNA, 19 nt, Artificial Sequence
  Description of Artificial Sequence: Synthetic oligonucleotide
  Sense strand starting at position 2470 of SEQ ID NO: 1564089
agccauugucacuauggua

SEQ ID NO: 1854420 - RNA, 19 nt, Artificial Sequence
  Description of Artificial Sequence: Synthetic oligonucleotide
  Antisense strand to SEQ ID NO: 1854419
uaccauagugacaauggcu

SEQ ID NO: 1854421 - RNA, 19 nt, Artificial Sequence
  Description of Artificial Sequence: Synthetic oligonucleotide
  Sense strand starting at position 2485 of SEQ ID NO: 1564089
gguaaucaccucuacaguu

SEQ ID NO: 1854422 - RNA, 19 nt, Artificial Sequence
  Description of Artificial Sequence: Synthetic oligonucleotide
  Antisense strand to SEQ ID NO: 1854421
aacuguagaggugauuacc

SEQ ID NO: 1854423 - RNA, 19 nt, Artificial Sequence
  Description of Artificial Sequence: Synthetic oligonucleotide
  Sense strand starting at position 2729 of SEQ ID NO: 1564089
agccaucaucacuagagca

SEQ ID NO: 1854424 - RNA, 19 nt, Artificial Sequence
  Description of Artificial Sequence: Synthetic oligonucleotide
  Antisense strand to SEQ ID NO: 1854423
ugcucuagugaugauggcu

SEQ ID NO: 1854425 - RNA, 19 nt, Artificial Sequence
  Description of Artificial Sequence: Synthetic oligonucleotide
  Sense strand starting at position 2731 of SEQ ID NO: 1564089
ccaucaucacuagagcagu

SEQ ID NO: 1854426 - RNA, 19 nt, Artificial Sequence
  Description of Artificial Sequence: Synthetic oligonucleotide
  Antisense strand to SEQ ID NO: 1854425
acugcucuagugaugaugg

SEQ ID NO: 1854427 - RNA, 19 nt, Artificial Sequence
  Description of Artificial Sequence: Synthetic oligonucleotide
  Sense strand starting at position 2770 of SEQ ID NO: 1564089
cucagccaucaugaguaua

SEQ ID NO: 1854428 - RNA, 19 nt, Artificial Sequence
  Description of Artificial Sequence: Synthetic oligonucleotide
  Antisense strand to SEQ ID NO: 1854427
uauacucaugauggcugag

SEQ ID NO: 1854429 - RNA, 19 nt, Artificial Sequence
  Description of Artificial Sequence: Synthetic oligonucleotide
  Sense strand starting at position 2839 of SEQ ID NO: 1564089
gcaaguauccaacaggcau

SEQ ID NO: 1854430 - RNA, 19 nt, Artificial Sequence
  Description of Artificial Sequence: Synthetic oligonucleotide
  Antisense strand to SEQ ID NO: 1854429
augccuguuggauacuugc

SEQ ID NO: 1854431 - RNA, 19 nt, Artificial Sequence
  Description of Artificial Sequence: Synthetic oligonucleotide
  Sense strand starting at position 2947 of SEQ ID NO: 1564089
acuuguauuugucauacaa

SEQ ID NO: 1854432 - RNA, 19 nt, Artificial Sequence
  Description of Artificial Sequence: Synthetic oligonucleotide
  Antisense strand to SEQ ID NO: 1854431
uuguaugacaaauacaagu

SEQ ID NO: 1854433 - RNA, 19 nt, Artificial Sequence
  Description of Artificial Sequence: Synthetic oligonucleotide
  Sense strand starting at position 3270 of SEQ ID NO: 1564089
aguuuauuguagcuccauu

SEQ ID NO: 1854434 - RNA, 19 nt, Artificial Sequence
  Description of Artificial Sequence: Synthetic oligonucleotide
  Antisense strand to SEQ ID NO: 1854433
aauggagcuacaauaaacu

SEQ ID NO: 1854435 - RNA, 19 nt, Artificial Sequence
  Description of Artificial Sequence: Synthetic oligonucleotide
  Sense strand starting at position 3686 of SEQ ID NO: 1564089
guaucaagauugucucaug

SEQ ID NO: 1854436 - RNA, 19 nt, Artificial Sequence
  Description of Artificial Sequence: Synthetic oligonucleotide
  Antisense strand to SEQ ID NO: 1854435
caugagacaaucuugauac

SEQ ID NO: 1854437 - RNA, 19 nt, Artificial Sequence
  Description of Artificial Sequence: Synthetic oligonucleotide
  Sense strand starting at position 3696 of SEQ ID NO: 1564089
ugucucaugcuaugaaaua

SEQ ID NO: 1854438 - RNA, 19 nt, Artificial Sequence
  Description of Artificial Sequence: Synthetic oligonucleotide
  Antisense strand to SEQ ID NO: 1854437
uauuucauagcaugagaca

SEQ ID NO: 1854439 - RNA, 19 nt, Artificial Sequence
  Description of Artificial Sequence: Synthetic oligonucleotide
  Sense strand starting at position 3759 of SEQ ID NO: 1564089
uguggaugugccgugcuua

SEQ ID NO: 1854440 - RNA, 19 nt, Artificial Sequence
  Description of Artificial Sequence: Synthetic oligonucleotide
  Antisense strand to SEQ ID NO: 1854439
uaagcacggcacauccaca

SEQ ID NO: 1854441 - RNA, 19 nt, Artificial Sequence
  Description of Artificial Sequence: Synthetic oligonucleotide
  Sense strand starting at position 3799 of SEQ ID NO: 1564089
gaacuuggguuggcuuaaa

SEQ ID NO: 1854442 - RNA, 19 nt, Artificial Sequence
  Description of Artificial Sequence: Synthetic oligonucleotide
  Antisense strand to SEQ ID NO: 1854441
uuuaagccaacccaaguuc

SEQ ID NO: 1854443 - RNA, 19 nt, Artificial Sequence
  Description of Artificial Sequence: Synthetic oligonucleotide
  Sense strand starting at position 3943 of SEQ ID NO: 1564089
uucugugguacuugugaaa

SEQ ID NO: 1854444 - RNA, 19 nt, Artificial Sequence
  Description of Artificial Sequence: Synthetic oligonucleotide
  Antisense strand to SEQ ID NO: 1854443
uuucacaaguaccacagaa

SEQ ID NO: 1854445 - RNA, 19 nt, Artificial Sequence
  Description of Artificial Sequence: Synthetic oligonucleotide
  Sense strand starting at position 3955 of SEQ ID NO: 1564089
ugugaaauacuaggcuugu

SEQ ID NO: 1854446 - RNA, 19 nt, Artificial Sequence
  Description of Artificial Sequence: Synthetic oligonucleotide
  Antisense strand to SEQ ID NO: 1854445
acaagccuaguauuucaca

SEQ ID NO: 1854447 - RNA, 19 nt, Artificial Sequence
  Description of Artificial Sequence: Synthetic oligonucleotide
  Sense strand starting at position 4 of SEQ ID NO: 1564090
ggaugaucucacuguucug

SEQ ID NO: 1854448 - RNA, 19 nt, Artificial Sequence
  Description of Artificial Sequence: Synthetic oligonucleotide
  Antisense strand to SEQ ID NO: 1854447
cagaacagugagaucaucc

SEQ ID NO: 1854449 - RNA, 19 nt, Artificial Sequence
  Description of Artificial Sequence: Synthetic oligonucleotide
  Sense strand starting at position 7 of SEQ ID NO: 1564090
ugaucucacuguucugaga

SEQ ID NO: 1854450 - RNA, 19 nt, Artificial Sequence
  Description of Artificial Sequence: Synthetic oligonucleotide
  Antisense strand to SEQ ID NO: 1854449
ucucagaacagugagauca

SEQ ID NO: 1854451 - RNA, 19 nt, Artificial Sequence
  Description of Artificial Sequence: Synthetic oligonucleotide
  Sense strand starting at position 15 of SEQ ID NO: 1564090
cuguucugagaacauguau

SEQ ID NO: 1854452 - RNA, 19 nt, Artificial Sequence
  Description of Artificial Sequence: Synthetic oligonucleotide
  Antisense strand to SEQ ID NO: 1854451
auacauguucucagaacag

SEQ ID NO: 1854453 - RNA, 19 nt, Artificial Sequence
  Description of Artificial Sequence: Synthetic oligonucleotide
  Sense strand starting at position 207 of SEQ ID NO: 1564090
cugguauguugacuuggga

SEQ ID NO: 1854454 - RNA, 19 nt, Artificial Sequence
  Description of Artificial Sequence: Synthetic oligonucleotide
  Antisense strand to SEQ ID NO: 1854453
ucccaagucaacauaccag

SEQ ID NO: 1854455 - RNA, 19 nt, Artificial Sequence
  Description of Artificial Sequence: Synthetic oligonucleotide
  Sense strand starting at position 210 of SEQ ID NO: 1564090
guauguugacuugggaaua

SEQ ID NO: 1854456 - RNA, 19 nt, Artificial Sequence
  Description of Artificial Sequence: Synthetic oligonucleotide
  Antisense strand to SEQ ID NO: 1854455
uauucccaagucaacauac

SEQ ID NO: 1854457 - RNA, 19 nt, Artificial Sequence
  Description of Artificial Sequence: Synthetic oligonucleotide
  Sense strand starting at position 220 of SEQ ID NO: 1564090
uugggaauacgucagguuu

SEQ ID NO: 1854458 - RNA, 19 nt, Artificial Sequence
  Description of Artificial Sequence: Synthetic oligonucleotide
  Antisense strand to SEQ ID NO: 1854457
aaaccugacguauucccaa

SEQ ID NO: 1854459 - RNA, 19 nt, Artificial Sequence
  Description of Artificial Sequence: Synthetic oligonucleotide
  Sense strand starting at position 411 of SEQ ID NO: 1564090
acagguauuacguaacaug

SEQ ID NO: 1854460 - RNA, 19 nt, Artificial Sequence
  Description of Artificial Sequence: Synthetic oligonucleotide
  Antisense strand to SEQ ID NO: 1854459
cauguuacguaauaccugu

SEQ ID NO: 1854461 - RNA, 19 nt, Artificial Sequence
  Description of Artificial Sequence: Synthetic oligonucleotide
  Sense strand starting at position 470 of SEQ ID NO: 1564090
uuucuuccagccugaggaa

SEQ ID NO: 1854462 - RNA, 19 nt, Artificial Sequence
  Description of Artificial Sequence: Synthetic oligonucleotide
  Antisense strand to SEQ ID NO: 1854461
uuccucaggcuggaagaaa

SEQ ID NO: 1854463 - RNA, 19 nt, Artificial Sequence
  Description of Artificial Sequence: Synthetic oligonucleotide
  Sense strand starting at position 607 of SEQ ID NO: 1564090
uuaacuggugucuacuauu

SEQ ID NO: 1854464 - RNA, 19 nt, Artificial Sequence
  Description of Artificial Sequence: Synthetic oligonucleotide
  Antisense strand to SEQ ID NO: 1854463
aauaguagacaccaguuaa

SEQ ID NO: 1854465 - RNA, 19 nt, Artificial Sequence
  Description of Artificial Sequence: Synthetic oligonucleotide
  Sense strand starting at position 688 of SEQ ID NO: 1564090
acaggaagcgaguaucaua

SEQ ID NO: 1854466 - RNA, 19 nt, Artificial Sequence
  Description of Artificial Sequence: Synthetic oligonucleotide
  Antisense strand to SEQ ID NO: 1854465
uaugauacucgcuuccugu

SEQ ID NO: 1854467 - RNA, 19 nt, Artificial Sequence
  Description of Artificial Sequence: Synthetic oligonucleotide
  Sense strand starting at position 724 of SEQ ID NO: 1564090
cguguuugaagugugugau

SEQ ID NO: 1854468 - RNA, 19 nt, Artificial Sequence
  Description of Artificial Sequence: Synthetic oligonucleotide
  Antisense strand to SEQ ID NO: 1854467
aucacacacuucaaacacg

SEQ ID NO: 1854469 - RNA, 19 nt, Artificial Sequence
  Description of Artificial Sequence: Synthetic oligonucleotide
  Sense strand starting at position 923 of SEQ ID NO: 1564090
uuacguuagggucaaacaa

SEQ ID NO: 1854470 - RNA, 19 nt, Artificial Sequence
  Description of Artificial Sequence: Synthetic oligonucleotide
  Antisense strand to SEQ ID NO: 1854469
uuguuugacccuaacguaa

SEQ ID NO: 1854471 - RNA, 19 nt, Artificial Sequence
  Description of Artificial Sequence: Synthetic oligonucleotide
  Sense strand starting at position 1100 of SEQ ID NO: 1564090
uuaagugcagcauaucuaa

SEQ ID NO: 1854472 - RNA, 19 nt, Artificial Sequence
  Description of Artificial Sequence: Synthetic oligonucleotide
  Antisense strand to SEQ ID NO: 1854471
uuagauaugcugcacuuaa

SEQ ID NO: 1854473 - RNA, 19 nt, Artificial Sequence
  Description of Artificial Sequence: Synthetic oligonucleotide
  Sense strand starting at position 1103 of SEQ ID NO: 1564090
agugcagcauaucuaauuu

SEQ ID NO: 1854474 - RNA, 19 nt, Artificial Sequence
  Description of Artificial Sequence: Synthetic oligonucleotide
  Antisense strand to SEQ ID NO: 1854473
aaauuagauaugcugcacu

SEQ ID NO: 1854475 - RNA, 19 nt, Artificial Sequence
  Description of Artificial Sequence: Synthetic oligonucleotide
  Sense strand starting at position 1168 of SEQ ID NO: 1564090
ccaaguucucaguaacuuc

SEQ ID NO: 1854476 - RNA, 19 nt, Artificial Sequence
  Description of Artificial Sequence: Synthetic oligonucleotide
  Antisense strand to SEQ ID NO: 1854475
gaaguuacugagaacuugg

SEQ ID NO: 1854477 - RNA, 19 nt, Artificial Sequence
  Description of Artificial Sequence: Synthetic oligonucleotide
  Sense strand starting at position 1350 of SEQ ID NO: 1564090
ucuagcagaucugcaagaa

SEQ ID NO: 1854478 - RNA, 19 nt, Artificial Sequence
  Description of Artificial Sequence: Synthetic oligonucleotide
  Antisense strand to SEQ ID NO: 1854477
uucuugcagaucugcuaga

SEQ ID NO: 1854479 - RNA, 19 nt, Artificial Sequence
  Description of Artificial Sequence: Synthetic oligonucleotide
  Sense strand starting at position 1381 of SEQ ID NO: 1564090
gcgguaauggccuuggcga

SEQ ID NO: 1854480 - RNA, 19 nt, Artificial Sequence
  Description of Artificial Sequence: Synthetic oligonucleotide
  Antisense strand to SEQ ID NO: 1854479
ucgccaaggccauuaccgc

SEQ ID NO: 1854481 - RNA, 19 nt, Artificial Sequence
  Description of Artificial Sequence: Synthetic oligonucleotide
  Sense strand starting at position 2346 of SEQ ID NO: 1564090
gagcucuggccuuaggaga

SEQ ID NO: 1854482 - RNA, 19 nt, Artificial Sequence
  Description of Artificial Sequence: Synthetic oligonucleotide
  Antisense strand to SEQ ID NO: 1854481
ucuccuaaggccagagcuc

SEQ ID NO: 1854483 - RNA, 19 nt, Artificial Sequence
  Description of Artificial Sequence: Synthetic oligonucleotide
  Sense strand starting at position 2392 of SEQ ID NO: 1564090
caaagugugauccgggaga

SEQ ID NO: 1854484 - RNA, 19 nt, Artificial Sequence
  Description of Artificial Sequence: Synthetic oligonucleotide
  Antisense strand to SEQ ID NO: 1854483
ucucccggaucacacuuug

SEQ ID NO: 1854485 - RNA, 19 nt, Artificial Sequence
  Description of Artificial Sequence: Synthetic oligonucleotide
  Sense strand starting at position 2422 of SEQ ID NO: 1564090
ccaagauccuuucuagagu

SEQ ID NO: 1854486 - RNA, 19 nt, Artificial Sequence
  Description of Artificial Sequence: Synthetic oligonucleotide
  Antisense strand to SEQ ID NO: 1854485
acucuagaaaggaucuugg

SEQ ID NO: 1854487 - RNA, 19 nt, Artificial Sequence
  Description of Artificial Sequence: Synthetic oligonucleotide
  Sense strand starting at position 2434 of SEQ ID NO: 1564090
cuagaguuucggugggaga

SEQ ID NO: 1854488 - RNA, 19 nt, Artificial Sequence
  Description of Artificial Sequence: Synthetic oligonucleotide
  Antisense strand to SEQ ID NO: 1854487
ucucccaccgaaacucuag

SEQ ID NO: 1854489 - RNA, 19 nt, Artificial Sequence
  Description of Artificial Sequence: Synthetic oligonucleotide
  Sense strand starting at position 2435 of SEQ ID NO: 1564090
uagaguuucggugggagaa

SEQ ID NO: 1854490 - RNA, 19 nt, Artificial Sequence
  Description of Artificial Sequence: Synthetic oligonucleotide
  Antisense strand to SEQ ID NO: 1854489
uucucccaccgaaacucua

SEQ ID NO: 1854491 - RNA, 19 nt, Artificial Sequence
  Description of Artificial Sequence: Synthetic oligonucleotide
  Sense strand starting at position 2436 of SEQ ID NO: 1564090
agaguuucggugggagaac

SEQ ID NO: 1854492 - RNA, 19 nt, Artificial Sequence
  Description of Artificial Sequence: Synthetic oligonucleotide
  Antisense strand to SEQ ID NO: 1854491
guucucccaccgaaacucu

SEQ ID NO: 1854493 - RNA, 19 nt, Artificial Sequence
  Description of Artificial Sequence: Synthetic oligonucleotide
  Sense strand starting at position 2514 of SEQ ID NO: 1564090
cgaccugaugucuaaugau

SEQ ID NO: 1854494 - RNA, 19 nt, Artificial Sequence
  Description of Artificial Sequence: Synthetic oligonucleotide
  Antisense strand to SEQ ID NO: 1854493
aucauuagacaucaggucg

SEQ ID NO: 1854495 - RNA, 19 nt, Artificial Sequence
  Description of Artificial Sequence: Synthetic oligonucleotide
  Sense strand starting at position 2529 of SEQ ID NO: 1564090
ugaugacacugcucuuaug

SEQ ID NO: 1854496 - RNA, 19 nt, Artificial Sequence
  Description of Artificial Sequence: Synthetic oligonucleotide
  Antisense strand to SEQ ID NO: 1854495
cauaagagcagugucauca

SEQ ID NO: 1854497 - RNA, 19 nt, Artificial Sequence
  Description of Artificial Sequence: Synthetic oligonucleotide
  Sense strand starting at position 2576 of SEQ ID NO: 1564090
uuuagaauuuccuaaggua

SEQ ID NO: 1854498 - RNA, 19 nt, Artificial Sequence
  Description of Artificial Sequence: Synthetic oligonucleotide
  Antisense strand to SEQ ID NO: 1854497
uaccuuaggaaauucuaaa

SEQ ID NO: 1854499 - RNA, 19 nt, Artificial Sequence
  Description of Artificial Sequence: Synthetic oligonucleotide
  Sense strand starting at position 2887 of SEQ ID NO: 1564090
gaguuugauguguaacuga

SEQ ID NO: 1854500 - RNA, 19 nt, Artificial Sequence
  Description of Artificial Sequence: Synthetic oligonucleotide
  Antisense strand to SEQ ID NO: 1854499
ucaguuacacaucaaacuc

SEQ ID NO: 1854501 - RNA, 19 nt, Artificial Sequence
  Description of Artificial Sequence: Synthetic oligonucleotide
  Sense strand starting at position 2894 of SEQ ID NO: 1564090
auguguaacugauugugaa

SEQ ID NO: 1854502 - RNA, 19 nt, Artificial Sequence
  Description of Artificial Sequence: Synthetic oligonucleotide
  Antisense strand to SEQ ID NO: 1854501
uucacaaucaguuacacau

SEQ ID NO: 1854503 - RNA, 19 nt, Artificial Sequence
  Description of Artificial Sequence: Synthetic oligonucleotide
  Sense strand starting at position 3066 of SEQ ID NO: 1564090
uguuguaaucccuacuuga

SEQ ID NO: 1854504 - RNA, 19 nt, Artificial Sequence
  Description of Artificial Sequence: Synthetic oligonucleotide
  Antisense strand to SEQ ID NO: 1854503
ucaaguagggauuacaaca

SEQ ID NO: 1854505 - RNA, 19 nt, Artificial Sequence
  Description of Artificial Sequence: Synthetic oligonucleotide
  Sense strand starting at position 3158 of SEQ ID NO: 1564090
cauugcucuggugacuaaa

SEQ ID NO: 1854506 - RNA, 19 nt, Artificial Sequence
  Description of Artificial Sequence: Synthetic oligonucleotide
  Antisense strand to SEQ ID NO: 1854505
uuuagucaccagagcaaug

SEQ ID NO: 1854507 - RNA, 19 nt, Artificial Sequence
  Description of Artificial Sequence: Synthetic oligonucleotide
  Sense strand starting at position 3217 of SEQ ID NO: 1564090
aagguaaggucuuuggauu

SEQ ID NO: 1854508 - RNA, 19 nt, Artificial Sequence
  Description of Artificial Sequence: Synthetic oligonucleotide
  Antisense strand to SEQ ID NO: 1854507
aauccaaagaccuuaccuu

SEQ ID NO: 1854509 - RNA, 19 nt, Artificial Sequence
  Description of Artificial Sequence: Synthetic oligonucleotide
  Sense strand starting at position 3218 of SEQ ID NO: 1564090
agguaaggucuuuggauuc

SEQ ID NO: 1854510 - RNA, 19 nt, Artificial Sequence
  Description of Artificial Sequence: Synthetic oligonucleotide
  Antisense strand to SEQ ID NO: 1854509
gaauccaaagaccuuaccu

SEQ ID NO: 1854511 - RNA, 19 nt, Artificial Sequence
  Description of Artificial Sequence: Synthetic oligonucleotide
  Sense strand starting at position 3225 of SEQ ID NO: 1564090
gucuuuggauucuuugaua

SEQ ID NO: 1854512 - RNA, 19 nt, Artificial Sequence
  Description of Artificial Sequence: Synthetic oligonucleotide
  Antisense strand to SEQ ID NO: 1854511
uaucaaagaauccaaagac

SEQ ID NO: 1854513 - RNA, 19 nt, Artificial Sequence
  Description of Artificial Sequence: Synthetic oligonucleotide
  Sense strand starting at position 3507 of SEQ ID NO: 1564090
auuuacuguuaccaggaaa

SEQ ID NO: 1854514 - RNA, 19 nt, Artificial Sequence
  Description of Artificial Sequence: Synthetic oligonucleotide
  Antisense strand to SEQ ID NO: 1854513
uuuccugguaacaguaaau

SEQ ID NO: 1854515 - RNA, 19 nt, Artificial Sequence
  Description of Artificial Sequence: Synthetic oligonucleotide
  Sense strand starting at position 3510 of SEQ ID NO: 1564090
uacuguuaccaggaaaugu

SEQ ID NO: 1854516 - RNA, 19 nt, Artificial Sequence
  Description of Artificial Sequence: Synthetic oligonucleotide
  Antisense strand to SEQ ID NO: 1854515
acauuuccugguaacagua

SEQ ID NO: 1854517 - RNA, 19 nt, Artificial Sequence
  Description of Artificial Sequence: Synthetic oligonucleotide
  Sense strand starting at position 3593 of SEQ ID NO: 1564090
auccaugaggucuagccaa

SEQ ID NO: 1854518 - RNA, 19 nt, Artificial Sequence
  Description of Artificial Sequence: Synthetic oligonucleotide
  Antisense strand to SEQ ID NO: 1854517
uuggcuagaccucauggau

SEQ ID NO: 1854519 - RNA, 19 nt, Artificial Sequence
  Description of Artificial Sequence: Synthetic oligonucleotide
  Sense strand starting at position 3622 of SEQ ID NO: 1564090
aaagacuaguagcuguaau

SEQ ID NO: 1854520 - RNA, 19 nt, Artificial Sequence
  Description of Artificial Sequence: Synthetic oligonucleotide
  Antisense strand to SEQ ID NO: 1854519
auuacagcuacuagucuuu

SEQ ID NO: 1854521 - RNA, 19 nt, Artificial Sequence
  Description of Artificial Sequence: Synthetic oligonucleotide
  Sense strand starting at position 3646 of SEQ ID NO: 1564090
aguugagaaucagugguuu

SEQ ID NO: 1854522 - RNA, 19 nt, Artificial Sequence
  Description of Artificial Sequence: Synthetic oligonucleotide
  Antisense strand to SEQ ID NO: 1854521
aaaccacugauucucaacu

SEQ ID NO: 1854523 - RNA, 19 nt, Artificial Sequence
  Description of Artificial Sequence: Synthetic oligonucleotide
  Sense strand starting at position 3712 of SEQ ID NO: 1564090
gacucaggauccguggaau

SEQ ID NO: 1854524 - RNA, 19 nt, Artificial Sequence
  Description of Artificial Sequence: Synthetic oligonucleotide
  Antisense strand to SEQ ID NO: 1854523
auuccacggauccugaguc

SEQ ID NO: 1854525 - RNA, 19 nt, Artificial Sequence
  Description of Artificial Sequence: Synthetic oligonucleotide
  Sense strand starting at position 3808 of SEQ ID NO: 1564090
gagaaucacuuguugaaug

SEQ ID NO: 1854526 - RNA, 19 nt, Artificial Sequence
  Description of Artificial Sequence: Synthetic oligonucleotide
  Antisense strand to SEQ ID NO: 1854525
cauucaacaagugauucuc

SEQ ID NO: 1854527 - RNA, 19 nt, Artificial Sequence
  Description of Artificial Sequence: Synthetic oligonucleotide
  Sense strand starting at position 236 of SEQ ID NO: 1564091
guaacuaccagagguuaug

SEQ ID NO: 1854528 - RNA, 19 nt, Artificial Sequence
  Description of Artificial Sequence: Synthetic oligonucleotide
  Antisense strand to SEQ ID NO: 1854527
cauaaccucugguaguuac

SEQ ID NO: 1854529 - RNA, 19 nt, Artificial Sequence
  Description of Artificial Sequence: Synthetic oligonucleotide
  Sense strand starting at position 394 of SEQ ID NO: 1564091
gccucugcaugucuuauuu

SEQ ID NO: 1854530 - RNA, 19 nt, Artificial Sequence
  Description of Artificial Sequence: Synthetic oligonucleotide
  Antisense strand to SEQ ID NO: 1854529
aaauaagacaugcagaggc

SEQ ID NO: 1854531 - RNA, 19 nt, Artificial Sequence
  Description of Artificial Sequence: Synthetic oligonucleotide
  Sense strand starting at position 413 of SEQ ID NO: 1564091
gaaaguaauccaugcuugu

SEQ ID NO: 1854532 - RNA, 19 nt, Artificial Sequence
  Description of Artificial Sequence: Synthetic oligonucleotide
  Antisense strand to SEQ ID NO: 1854531
acaagcauggauuacuuuc

SEQ ID NO: 1854533 - RNA, 19 nt, Artificial Sequence
  Description of Artificial Sequence: Synthetic oligonucleotide
  Sense strand starting at position 584 of SEQ ID NO: 1564091
ggcucaugccuguuugguu

SEQ ID NO: 1854534 - RNA, 19 nt, Artificial Sequence
  Description of Artificial Sequence: Synthetic oligonucleotide
  Antisense strand to SEQ ID NO: 1854533
aaccaaacaggcaugagcc

SEQ ID NO: 1854535 - RNA, 19 nt, Artificial Sequence
  Description of Artificial Sequence: Synthetic oligonucleotide
  Sense strand starting at position 858 of SEQ ID NO: 1564091
caucacugguuggcuuaua

SEQ ID NO: 1854536 - RNA, 19 nt, Artificial Sequence
  Description of Artificial Sequence: Synthetic oligonucleotide
  Antisense strand to SEQ ID NO: 1854535
uauaagccaaccagugaug

SEQ ID NO: 1854537 - RNA, 19 nt, Artificial Sequence
  Description of Artificial Sequence: Synthetic oligonucleotide
  Sense strand starting at position 868 of SEQ ID NO: 1564091
uggcuuauaccugauuggu

SEQ ID NO: 1854538 - RNA, 19 nt, Artificial Sequence
  Description of Artificial Sequence: Synthetic oligonucleotide
  Antisense strand to SEQ ID NO: 1854537
accaaucagguauaagcca

SEQ ID NO: 1854539 - RNA, 19 nt, Artificial Sequence
  Description of Artificial Sequence: Synthetic oligonucleotide
  Sense strand starting at position 1203 of SEQ ID NO: 1564091
ugggcuuggcuggauuaua

SEQ ID NO: 1854540 - RNA, 19 nt, Artificial Sequence
  Description of Artificial Sequence: Synthetic oligonucleotide
  Antisense strand to SEQ ID NO: 1854539
uauaauccagccaagccca

SEQ ID NO: 1854541 - RNA, 19 nt, Artificial Sequence
  Description of Artificial Sequence: Synthetic oligonucleotide
  Sense strand starting at position 1219 of SEQ ID NO: 1564091
auaccuguuugguuggaau

SEQ ID NO: 1854542 - RNA, 19 nt, Artificial Sequence
  Description of Artificial Sequence: Synthetic oligonucleotide
  Antisense strand to SEQ ID NO: 1854541
auuccaaccaaacagguau

SEQ ID NO: 1854543 - RNA, 19 nt, Artificial Sequence
  Description of Artificial Sequence: Synthetic oligonucleotide
  Sense strand starting at position 1221 of SEQ ID NO: 1564091
accuguuugguuggaaucu

SEQ ID NO: 1854544 - RNA, 19 nt, Artificial Sequence
  Description of Artificial Sequence: Synthetic oligonucleotide
  Antisense strand to SEQ ID NO: 1854543
agauuccaaccaaacaggu

SEQ ID NO: 1854545 - RNA, 19 nt, Artificial Sequence
  Description of Artificial Sequence: Synthetic oligonucleotide
  Sense strand starting at position 1227 of SEQ ID NO: 1564091
uugguuggaaucugauaaa

SEQ ID NO: 1854546 - RNA, 19 nt, Artificial Sequence
  Description of Artificial Sequence: Synthetic oligonucleotide
  Antisense strand to SEQ ID NO: 1854545
uuuaucagauuccaaccaa

SEQ ID NO: 1854547 - RNA, 19 nt, Artificial Sequence
  Description of Artificial Sequence: Synthetic oligonucleotide
  Sense strand starting at position 1239 of SEQ ID NO: 1564091
ugauaaacuugauugguuu

SEQ ID NO: 1854548 - RNA, 19 nt, Artificial Sequence
  Description of Artificial Sequence: Synthetic oligonucleotide
  Antisense strand to SEQ ID NO: 1854547
aaaccaaucaaguuuauca

SEQ ID NO: 1854549 - RNA, 19 nt, Artificial Sequence
  Description of Artificial Sequence: Synthetic oligonucleotide
  Sense strand starting at position 1284 of SEQ ID NO: 1564091
guucuuacaugauuggcua

SEQ ID NO: 1854550 - RNA, 19 nt, Artificial Sequence
  Description of Artificial Sequence: Synthetic oligonucleotide
  Antisense strand to SEQ ID NO: 1854549
uagccaaucauguaagaac

SEQ ID NO: 1854551 - RNA, 19 nt, Artificial Sequence
  Description of Artificial Sequence: Synthetic oligonucleotide
  Sense strand starting at position 1463 of SEQ ID NO: 1564091
ggcucaguccuguuugcca

SEQ ID NO: 1854552 - RNA, 19 nt, Artificial Sequence
  Description of Artificial Sequence: Synthetic oligonucleotide
  Antisense strand to SEQ ID NO: 1854551
uggcaaacaggacugagcc

SEQ ID NO: 1854553 - RNA, 19 nt, Artificial Sequence
  Description of Artificial Sequence: Synthetic oligonucleotide
  Sense strand starting at position 1621 of SEQ ID NO: 1564091
auuugccucaugcgugauu

SEQ ID NO: 1854554 - RNA, 19 nt, Artificial Sequence
  Description of Artificial Sequence: Synthetic oligonucleotide
  Antisense strand to SEQ ID NO: 1854553
aaucacgcaugaggcaaau

SEQ ID NO: 1854555 - RNA, 19 nt, Artificial Sequence
  Description of Artificial Sequence: Synthetic oligonucleotide
  Sense strand starting at position 1771 of SEQ ID NO: 1564091
gguuguuucaugucggguu

SEQ ID NO: 1854556 - RNA, 19 nt, Artificial Sequence
  Description of Artificial Sequence: Synthetic oligonucleotide
  Antisense strand to SEQ ID NO: 1854555
aacccgacaugaaacaacc

SEQ ID NO: 1854557 - RNA, 19 nt, Artificial Sequence
  Description of Artificial Sequence: Synthetic oligonucleotide
  Sense strand starting at position 1775 of SEQ ID NO: 1564091
guuucaugucggguugguu

SEQ ID NO: 1854558 - RNA, 19 nt, Artificial Sequence
  Description of Artificial Sequence: Synthetic oligonucleotide
  Antisense strand to SEQ ID NO: 1854557
aaccaacccgacaugaaac

SEQ ID NO: 1854559 - RNA, 19 nt, Artificial Sequence
  Description of Artificial Sequence: Synthetic oligonucleotide
  Sense strand starting at position 1812 of SEQ ID NO: 1564091
accugauugccucaugcca

SEQ ID NO: 1854560 - RNA, 19 nt, Artificial Sequence
  Description of Artificial Sequence: Synthetic oligonucleotide
  Antisense strand to SEQ ID NO: 1854559
uggcaugaggcaaucaggu

SEQ ID NO: 1854561 - RNA, 19 nt, Artificial Sequence
  Description of Artificial Sequence: Synthetic oligonucleotide
  Sense strand starting at position 1940 of SEQ ID NO: 1564091
gguuuaugccugcuugguu

SEQ ID NO: 1854562 - RNA, 19 nt, Artificial Sequence
  Description of Artificial Sequence: Synthetic oligonucleotide
  Antisense strand to SEQ ID NO: 1854561
aaccaagcaggcauaaacc

SEQ ID NO: 1854563 - RNA, 19 nt, Artificial Sequence
  Description of Artificial Sequence: Synthetic oligonucleotide
  Sense strand starting at position 1953 of SEQ ID NO: 1564091
uugguucgagucugauaaa

SEQ ID NO: 1854564 - RNA, 19 nt, Artificial Sequence
  Description of Artificial Sequence: Synthetic oligonucleotide
  Antisense strand to SEQ ID NO: 1854563
uuuaucagacucgaaccaa

SEQ ID NO: 1854565 - RNA, 19 nt, Artificial Sequence
  Description of Artificial Sequence: Synthetic oligonucleotide
  Sense strand starting at position 2073 of SEQ ID NO: 1564091
gauggcugucuugauggaa

SEQ ID NO: 1854566 - RNA, 19 nt, Artificial Sequence
  Description of Artificial Sequence: Synthetic oligonucleotide
  Antisense strand to SEQ ID NO: 1854565
uuccaucaagacagccauc

SEQ ID NO: 1854567 - RNA, 19 nt, Artificial Sequence
  Description of Artificial Sequence: Synthetic oligonucleotide
  Sense strand starting at position 2077 of SEQ ID NO: 1564091
gcugucuugauggaacaga

SEQ ID NO: 1854568 - RNA, 19 nt, Artificial Sequence
  Description of Artificial Sequence: Synthetic oligonucleotide
  Antisense strand to SEQ ID NO: 1854567
ucuguuccaucaagacagc

SEQ ID NO: 1854569 - RNA, 19 nt, Artificial Sequence
  Description of Artificial Sequence: Synthetic oligonucleotide
  Sense strand starting at position 2154 of SEQ ID NO: 1564091
auucgcccacuuugagaua

SEQ ID NO: 1854570 - RNA, 19 nt, Artificial Sequence
  Description of Artificial Sequence: Synthetic oligonucleotide
  Antisense strand to SEQ ID NO: 1854569
uaucucaaagugggcgaau

SEQ ID NO: 1854571 - RNA, 19 nt, Artificial Sequence
  Description of Artificial Sequence: Synthetic oligonucleotide
  Sense strand starting at position 2175 of SEQ ID NO: 1564091
ccucuaucaaggugggaau

SEQ ID NO: 1854572 - RNA, 19 nt, Artificial Sequence
  Description of Artificial Sequence: Synthetic oligonucleotide
  Antisense strand to SEQ ID NO: 1854571
auucccaccuugauagagg

SEQ ID NO: 1854573 - RNA, 19 nt, Artificial Sequence
  Description of Artificial Sequence: Synthetic oligonucleotide
  Sense strand starting at position 2176 of SEQ ID NO: 1564091
cucuaucaaggugggaauu

SEQ ID NO: 1854574 - RNA, 19 nt, Artificial Sequence
  Description of Artificial Sequence: Synthetic oligonucleotide
  Antisense strand to SEQ ID NO: 1854573
aauucccaccuugauagag

SEQ ID NO: 1854575 - RNA, 19 nt, Artificial Sequence
  Description of Artificial Sequence: Synthetic oligonucleotide
  Sense strand starting at position 2686 of SEQ ID NO: 1564091
ggaaacuaguugucccgau

SEQ ID NO: 1854576 - RNA, 19 nt, Artificial Sequence
  Description of Artificial Sequence: Synthetic oligonucleotide
  Antisense strand to SEQ ID NO: 1854575
aucgggacaacuaguuucc

SEQ ID NO: 1854577 - RNA, 19 nt, Artificial Sequence
  Description of Artificial Sequence: Synthetic oligonucleotide
  Sense strand starting at position 2690 of SEQ ID NO: 1564091
acuaguugucccgaugaag

SEQ ID NO: 1854578 - RNA, 19 nt, Artificial Sequence
  Description of Artificial Sequence: Synthetic oligonucleotide
  Antisense strand to SEQ ID NO: 1854577
cuucaucgggacaacuagu

SEQ ID NO: 1854579 - RNA, 19 nt, Artificial Sequence
  Description of Artificial Sequence: Synthetic oligonucleotide
  Sense strand starting at position 2701 of SEQ ID NO: 1564091
cgaugaagugcucaagucu

SEQ ID NO: 1854580 - RNA, 19 nt, Artificial Sequence
  Description of Artificial Sequence: Synthetic oligonucleotide
  Antisense strand to SEQ ID NO: 1854579
agacuugagcacuucaucg

SEQ ID NO: 1854581 - RNA, 19 nt, Artificial Sequence
  Description of Artificial Sequence: Synthetic oligonucleotide
  Sense strand starting at position 2712 of SEQ ID NO: 1564091
ucaagucucgaaugcagau

SEQ ID NO: 1854582 - RNA, 19 nt, Artificial Sequence
  Description of Artificial Sequence: Synthetic oligonucleotide
  Antisense strand to SEQ ID NO: 1854581
aucugcauucgagacuuga

SEQ ID NO: 1854583 - RNA, 19 nt, Artificial Sequence
  Description of Artificial Sequence: Synthetic oligonucleotide
  Sense strand starting at position 3219 of SEQ ID NO: 1564091
gguggagagccugaauuca

SEQ ID NO: 1854584 - RNA, 19 nt, Artificial Sequence
  Description of Artificial Sequence: Synthetic oligonucleotide
  Antisense strand to SEQ ID NO: 1854583
ugaauucaggcucuccacc

SEQ ID NO: 1854585 - RNA, 19 nt, Artificial Sequence
  Description of Artificial Sequence: Synthetic oligonucleotide
  Sense strand starting at position 3243 of SEQ ID NO: 1564091
agaucuaucuuuccaggcu

SEQ ID NO: 1854586 - RNA, 19 nt, Artificial Sequence
  Description of Artificial Sequence: Synthetic oligonucleotide
  Antisense strand to SEQ ID NO: 1854585
agccuggaaagauagaucu

SEQ ID NO: 1854587 - RNA, 19 nt, Artificial Sequence
  Description of Artificial Sequence: Synthetic oligonucleotide
  Sense strand starting at position 3477 of SEQ ID NO: 1564091
gagaacuuuggaugaggcu

SEQ ID NO: 1854588 - RNA, 19 nt, Artificial Sequence
  Description of Artificial Sequence: Synthetic oligonucleotide
  Antisense strand to SEQ ID NO: 1854587
agccucauccaaaguucuc

SEQ ID NO: 1854589 - RNA, 19 nt, Artificial Sequence
  Description of Artificial Sequence: Synthetic oligonucleotide
  Sense strand starting at position 3483 of SEQ ID NO: 1564091
uuuggaugaggcuguucua

SEQ ID NO: 1854590 - RNA, 19 nt, Artificial Sequence
  Description of Artificial Sequence: Synthetic oligonucleotide
  Antisense strand to SEQ ID NO: 1854589
uagaacagccucauccaaa

SEQ ID NO: 1854591 - RNA, 19 nt, Artificial Sequence
  Description of Artificial Sequence: Synthetic oligonucleotide
  Sense strand starting at position 3486 of SEQ ID NO: 1564091
ggaugaggcuguucuaagu

SEQ ID NO: 1854592 - RNA, 19 nt, Artificial Sequence
  Description of Artificial Sequence: Synthetic oligonucleotide
  Antisense strand to SEQ ID NO: 1854591
acuuagaacagccucaucc

SEQ ID NO: 1854593 - RNA, 19 nt, Artificial Sequence
  Description of Artificial Sequence: Synthetic oligonucleotide
  Sense strand starting at position 3521 of SEQ ID NO: 1564091
ggcuuuacauauguauuau

SEQ ID NO: 1854594 - RNA, 19 nt, Artificial Sequence
  Description of Artificial Sequence: Synthetic oligonucleotide
  Antisense strand to SEQ ID NO: 1854593
auaauacauauguaaagcc

SEQ ID NO: 1854595 - RNA, 19 nt, Artificial Sequence
  Description of Artificial Sequence: Synthetic oligonucleotide
  Sense strand starting at position 3726 of SEQ ID NO: 1564091
cuaugcuagcucuaaauug

SEQ ID NO: 1854596 - RNA, 19 nt, Artificial Sequence
  Description of Artificial Sequence: Synthetic oligonucleotide
  Antisense strand to SEQ ID NO: 1854595
caauuuagagcuagcauag

SEQ ID NO: 1854597 - RNA, 19 nt, Artificial Sequence
  Description of Artificial Sequence: Synthetic oligonucleotide
  Sense strand starting at position 3736 of SEQ ID NO: 1564091
ucuaaauuguaccuagaga

SEQ ID NO: 1854598 - RNA, 19 nt, Artificial Sequence
  Description of Artificial Sequence: Synthetic oligonucleotide
  Antisense strand to SEQ ID NO: 1854597
ucucuagguacaauuuaga

SEQ ID NO: 1854599 - RNA, 19 nt, Artificial Sequence
  Description of Artificial Sequence: Synthetic oligonucleotide
  Sense strand starting at position 3782 of SEQ ID NO: 1564091
agucacaucgcggaacuau

SEQ ID NO: 1854600 - RNA, 19 nt, Artificial Sequence
  Description of Artificial Sequence: Synthetic oligonucleotide
  Antisense strand to SEQ ID NO: 1854599
auaguuccgcgaugugacu

SEQ ID NO: 1854601 - RNA, 19 nt, Artificial Sequence
  Description of Artificial Sequence: Synthetic oligonucleotide
  Sense strand starting at position 3813 of SEQ ID NO: 1564091
acaaauuagauguaugugu

SEQ ID NO: 1854602 - RNA, 19 nt, Artificial Sequence
  Description of Artificial Sequence: Synthetic oligonucleotide
  Antisense strand to SEQ ID NO: 1854601
acacauacaucuaauuugu

SEQ ID NO: 1854603 - RNA, 19 nt, Artificial Sequence
  Description of Artificial Sequence: Synthetic oligonucleotide
  Sense strand starting at position 3881 of SEQ ID NO: 1564091
ugaauuauuucuguggugu

SEQ ID NO: 1854604 - RNA, 19 nt, Artificial Sequence
  Description of Artificial Sequence: Synthetic oligonucleotide
  Antisense strand to SEQ ID NO: 1854603
acaccacagaaauaauuca

SEQ ID NO: 1854605 - RNA, 19 nt, Artificial Sequence
  Description of Artificial Sequence: Synthetic oligonucleotide
  Sense strand starting at position 3882 of SEQ ID NO: 1564091
gaauuauuucugugguguc

SEQ ID NO: 1854606 - RNA, 19 nt, Artificial Sequence
  Description of Artificial Sequence: Synthetic oligonucleotide
  Antisense strand to SEQ ID NO: 1854605
gacaccacagaaauaauuc

SEQ ID NO: 1854607 - RNA, 19 nt, Artificial Sequence
  Description of Artificial Sequence: Synthetic oligonucleotide
  Sense strand starting at position 161 of SEQ ID NO: 1564092
ccaugacuacacugugcaa

SEQ ID NO: 1854608 - RNA, 19 nt, Artificial Sequence
  Description of Artificial Sequence: Synthetic oligonucleotide
  Antisense strand to SEQ ID NO: 1854607
uugcacaguguagucaugg

SEQ ID NO: 1854609 - RNA, 19 nt, Artificial Sequence
  Description of Artificial Sequence: Synthetic oligonucleotide
  Sense strand starting at position 348 of SEQ ID NO: 1564092
gcccaaccaugacuagauu

SEQ ID NO: 1854610 - RNA, 19 nt, Artificial Sequence
  Description of Artificial Sequence: Synthetic oligonucleotide
  Antisense strand to SEQ ID NO: 1854609
aaucuagucaugguugggc

SEQ ID NO: 1854611 - RNA, 19 nt, Artificial Sequence
  Description of Artificial Sequence: Synthetic oligonucleotide
  Sense strand starting at position 357 of SEQ ID NO: 1564092
ugacuagauugugcgaaau

SEQ ID NO: 1854612 - RNA, 19 nt, Artificial Sequence
  Description of Artificial Sequence: Synthetic oligonucleotide
  Antisense strand to SEQ ID NO: 1854611
auuucgcacaaucuaguca

SEQ ID NO: 1854613 - RNA, 19 nt, Artificial Sequence
  Description of Artificial Sequence: Synthetic oligonucleotide
  Sense strand starting at position 359 of SEQ ID NO: 1564092
acuagauugugcgaaauua

SEQ ID NO: 1854614 - RNA, 19 nt, Artificial Sequence
  Description of Artificial Sequence: Synthetic oligonucleotide
  Antisense strand to SEQ ID NO: 1854613
uaauuucgcacaaucuagu

SEQ ID NO: 1854615 - RNA, 19 nt, Artificial Sequence
  Description of Artificial Sequence: Synthetic oligonucleotide
  Sense strand starting at position 499 of SEQ ID NO: 1564092
uucgucccacaagauuaau

SEQ ID NO: 1854616 - RNA, 19 nt, Artificial Sequence
  Description of Artificial Sequence: Synthetic oligonucleotide
  Antisense strand to SEQ ID NO: 1854615
auuaaucuugugggacgaa

SEQ ID NO: 1854617 - RNA, 19 nt, Artificial Sequence
  Description of Artificial Sequence: Synthetic oligonucleotide
  Sense strand starting at position 731 of SEQ ID NO: 1564092
cguaaauauucgcuccgga

SEQ ID NO: 1854618 - RNA, 19 nt, Artificial Sequence
  Description of Artificial Sequence: Synthetic oligonucleotide
  Antisense strand to SEQ ID NO: 1854617
uccggagcgaauauuuacg

SEQ ID NO: 1854619 - RNA, 19 nt, Artificial Sequence
  Description of Artificial Sequence: Synthetic oligonucleotide
  Sense strand starting at position 1020 of SEQ ID NO: 1564092
cggcaaagcugcuuggaaa

SEQ ID NO: 1854620 - RNA, 19 nt, Artificial Sequence
  Description of Artificial Sequence: Synthetic oligonucleotide
  Antisense strand to SEQ ID NO: 1854619
uuuccaagcagcuuugccg

SEQ ID NO: 1854621 - RNA, 19 nt, Artificial Sequence
  Description of Artificial Sequence: Synthetic oligonucleotide
  Sense strand starting at position 1311 of SEQ ID NO: 1564092
ugcacagucugucucuaaa

SEQ ID NO: 1854622 - RNA, 19 nt, Artificial Sequence
  Description of Artificial Sequence: Synthetic oligonucleotide
  Antisense strand to SEQ ID NO: 1854621
uuuagagacagacugugca

SEQ ID NO: 1854623 - RNA, 19 nt, Artificial Sequence
  Description of Artificial Sequence: Synthetic oligonucleotide
  Sense strand starting at position 1314 of SEQ ID NO: 1564092
acagucugucucuaaauca

SEQ ID NO: 1854624 - RNA, 19 nt, Artificial Sequence
  Description of Artificial Sequence: Synthetic oligonucleotide
  Antisense strand to SEQ ID NO: 1854623
ugauuuagagacagacugu

SEQ ID NO: 1854625 - RNA, 19 nt, Artificial Sequence
  Description of Artificial Sequence: Synthetic oligonucleotide
  Sense strand starting at position 1388 of SEQ ID NO: 1564092
aggaaaucaacucgggagu

SEQ ID NO: 1854626 - RNA, 19 nt, Artificial Sequence
  Description of Artificial Sequence: Synthetic oligonucleotide
  Antisense strand to SEQ ID NO: 1854625
acucccgaguugauuuccu

SEQ ID NO: 1854627 - RNA, 19 nt, Artificial Sequence
  Description of Artificial Sequence: Synthetic oligonucleotide
  Sense strand starting at position 1389 of SEQ ID NO: 1564092
ggaaaucaacucgggaguu

SEQ ID NO: 1854628 - RNA, 19 nt, Artificial Sequence
  Description of Artificial Sequence: Synthetic oligonucleotide
  Antisense strand to SEQ ID NO: 1854627
aacucccgaguugauuucc

SEQ ID NO: 1854629 - RNA, 19 nt, Artificial Sequence
  Description of Artificial Sequence: Synthetic oligonucleotide
  Sense strand starting at position 1390 of SEQ ID NO: 1564092
gaaaucaacucgggaguuu

SEQ ID NO: 1854630 - RNA, 19 nt, Artificial Sequence
  Description of Artificial Sequence: Synthetic oligonucleotide
  Antisense strand to SEQ ID NO: 1854629
aaacucccgaguugauuuc

SEQ ID NO: 1854631 - RNA, 19 nt, Artificial Sequence
  Description of Artificial Sequence: Synthetic oligonucleotide
  Sense strand starting at position 1405 of SEQ ID NO: 1564092
guuugucaauucuuuaaac

SEQ ID NO: 1854632 - RNA, 19 nt, Artificial Sequence
  Description of Artificial Sequence: Synthetic oligonucleotide
  Antisense strand to SEQ ID NO: 1854631
guuuaaagaauugacaaac

SEQ ID NO: 1854633 - RNA, 19 nt, Artificial Sequence
  Description of Artificial Sequence: Synthetic oligonucleotide
  Sense strand starting at position 1715 of SEQ ID NO: 1564092
cguguauucccgugacgga

SEQ ID NO: 1854634 - RNA, 19 nt, Artificial Sequence
  Description of Artificial Sequence: Synthetic oligonucleotide
  Antisense strand to SEQ ID NO: 1854633
uccgucacgggaauacacg

SEQ ID NO: 1854635 - RNA, 19 nt, Artificial Sequence
  Description of Artificial Sequence: Synthetic oligonucleotide
  Sense strand starting at position 1716 of SEQ ID NO: 1564092
guguauucccgugacggaa

SEQ ID NO: 1854636 - RNA, 19 nt, Artificial Sequence
  Description of Artificial Sequence: Synthetic oligonucleotide
  Antisense strand to SEQ ID NO: 1854635
uuccgucacgggaauacac

SEQ ID NO: 1854637 - RNA, 19 nt, Artificial Sequence
  Description of Artificial Sequence: Synthetic oligonucleotide
  Sense strand starting at position 2122 of SEQ ID NO: 1564092
gcgggaauuugcuaaggag

SEQ ID NO: 1854638 - RNA, 19 nt, Artificial Sequence
  Description of Artificial Sequence: Synthetic oligonucleotide
  Antisense strand to SEQ ID NO: 1854637
cuccuuagcaaauucccgc

SEQ ID NO: 1854639 - RNA, 19 nt, Artificial Sequence
  Description of Artificial Sequence: Synthetic oligonucleotide
  Sense strand starting at position 2125 of SEQ ID NO: 1564092
ggaauuugcuaaggagaug

SEQ ID NO: 1854640 - RNA, 19 nt, Artificial Sequence
  Description of Artificial Sequence: Synthetic oligonucleotide
  Antisense strand to SEQ ID NO: 1854639
caucuccuuagcaaauucc

SEQ ID NO: 1854641 - RNA, 19 nt, Artificial Sequence
  Description of Artificial Sequence: Synthetic oligonucleotide
  Sense strand starting at position 2164 of SEQ ID NO: 1564092
gcgggaauuugcugaggag

SEQ ID NO: 1854642 - RNA, 19 nt, Artificial Sequence
  Description of Artificial Sequence: Synthetic oligonucleotide
  Antisense strand to SEQ ID NO: 1854641
cuccucagcaaauucccgc

SEQ ID NO: 1854643 - RNA, 19 nt, Artificial Sequence
  Description of Artificial Sequence: Synthetic oligonucleotide
  Sense strand starting at position 2167 of SEQ ID NO: 1564092
ggaauuugcugaggagaua

SEQ ID NO: 1854644 - RNA, 19 nt, Artificial Sequence
  Description of Artificial Sequence: Synthetic oligonucleotide
  Antisense strand to SEQ ID NO: 1854643
uaucuccucagcaaauucc

SEQ ID NO: 1854645 - RNA, 19 nt, Artificial Sequence
  Description of Artificial Sequence: Synthetic oligonucleotide
  Sense strand starting at position 2209 of SEQ ID NO: 1564092
ggaauuugcugaggagaug

SEQ ID NO: 1854646 - RNA, 19 nt, Artificial Sequence
  Description of Artificial Sequence: Synthetic oligonucleotide
  Antisense strand to SEQ ID NO: 1854645
caucuccucagcaaauucc

SEQ ID NO: 1854647 - RNA, 19 nt, Artificial Sequence
  Description of Artificial Sequence: Synthetic oligonucleotide
  Sense strand starting at position 2263 of SEQ ID NO: 1564092
ucgcaagacccgcaggauu

SEQ ID NO: 1854648 - RNA, 19 nt, Artificial Sequence
  Description of Artificial Sequence: Synthetic oligonucleotide
  Antisense strand to SEQ ID NO: 1854647
aauccugcgggucuugcga

SEQ ID NO: 1854649 - RNA, 19 nt, Artificial Sequence
  Description of Artificial Sequence: Synthetic oligonucleotide
  Sense strand starting at position 2367 of SEQ ID NO: 1564092
ucuaguggcguuguaguua

SEQ ID NO: 1854650 - RNA, 19 nt, Artificial Sequence
  Description of Artificial Sequence: Synthetic oligonucleotide
  Antisense strand to SEQ ID NO: 1854649
uaacuacaacgccacuaga

SEQ ID NO: 1854651 - RNA, 19 nt, Artificial Sequence
  Description of Artificial Sequence: Synthetic oligonucleotide
  Sense strand starting at position 2479 of SEQ ID NO: 1564092
cagagacgucgucguaaac

SEQ ID NO: 1854652 - RNA, 19 nt, Artificial Sequence
  Description of Artificial Sequence: Synthetic oligonucleotide
  Antisense strand to SEQ ID NO: 1854651
guuuacgacgacgucucug

SEQ ID NO: 1854653 - RNA, 19 nt, Artificial Sequence
  Description of Artificial Sequence: Synthetic oligonucleotide
  Sense strand starting at position 2516 of SEQ ID NO: 1564092
gccagugauugacuuggaa

SEQ ID NO: 1854654 - RNA, 19 nt, Artificial Sequence
  Description of Artificial Sequence: Synthetic oligonucleotide
  Antisense strand to SEQ ID NO: 1854653
uuccaagucaaucacuggc

SEQ ID NO: 1854655 - RNA, 19 nt, Artificial Sequence
  Description of Artificial Sequence: Synthetic oligonucleotide
  Sense strand starting at position 2520 of SEQ ID NO: 1564092
gugauugacuuggaaugag

SEQ ID NO: 1854656 - RNA, 19 nt, Artificial Sequence
  Description of Artificial Sequence: Synthetic oligonucleotide
  Antisense strand to SEQ ID NO: 1854655
cucauuccaagucaaucac

SEQ ID NO: 1854657 - RNA, 19 nt, Artificial Sequence
  Description of Artificial Sequence: Synthetic oligonucleotide
  Sense strand starting at position 2615 of SEQ ID NO: 1564092
gcaagauauuuccagucuc

SEQ ID NO: 1854658 - RNA, 19 nt, Artificial Sequence
  Description of Artificial Sequence: Synthetic oligonucleotide
  Antisense strand to SEQ ID NO: 1854657
gagacuggaaauaucuugc

SEQ ID NO: 1854659 - RNA, 19 nt, Artificial Sequence
  Description of Artificial Sequence: Synthetic oligonucleotide
  Sense strand starting at position 2828 of SEQ ID NO: 1564092
caguaccuggcauagaauu

SEQ ID NO: 1854660 - RNA, 19 nt, Artificial Sequence
  Description of Artificial Sequence: Synthetic oligonucleotide
  Antisense strand to SEQ ID NO: 1854659
aauucuaugccagguacug

SEQ ID NO: 1854661 - RNA, 19 nt, Artificial Sequence
  Description of Artificial Sequence: Synthetic oligonucleotide
  Sense strand starting at position 2854 of SEQ ID NO: 1564092
uguaauaaaggcuauguga

SEQ ID NO: 1854662 - RNA, 19 nt, Artificial Sequence
  Description of Artificial Sequence: Synthetic oligonucleotide
  Antisense strand to SEQ ID NO: 1854661
ucacauagccuuuauuaca

SEQ ID NO: 1854663 - RNA, 19 nt, Artificial Sequence
  Description of Artificial Sequence: Synthetic oligonucleotide
  Sense strand starting at position 2881 of SEQ ID NO: 1564092
aguggcauauagucuuaca

SEQ ID NO: 1854664 - RNA, 19 nt, Artificial Sequence
  Description of Artificial Sequence: Synthetic oligonucleotide
  Antisense strand to SEQ ID NO: 1854663
uguaagacuauaugccacu

SEQ ID NO: 1854665 - RNA, 19 nt, Artificial Sequence
  Description of Artificial Sequence: Synthetic oligonucleotide
  Sense strand starting at position 2884 of SEQ ID NO: 1564092
ggcauauagucuuacauac

SEQ ID NO: 1854666 - RNA, 19 nt, Artificial Sequence
  Description of Artificial Sequence: Synthetic oligonucleotide
  Antisense strand to SEQ ID NO: 1854665
guauguaagacuauaugcc

SEQ ID NO: 1854667 - RNA, 19 nt, Artificial Sequence
  Description of Artificial Sequence: Synthetic oligonucleotide
  Sense strand starting at position 2930 of SEQ ID NO: 1564092
ggagacacagucugaguaa

SEQ ID NO: 1854668 - RNA, 19 nt, Artificial Sequence
  Description of Artificial Sequence: Synthetic oligonucleotide
  Antisense strand to SEQ ID NO: 1854667
uuacucagacugugucucc

SEQ ID NO: 1854669 - RNA, 19 nt, Artificial Sequence
  Description of Artificial Sequence: Synthetic oligonucleotide
  Sense strand starting at position 2931 of SEQ ID NO: 1564092
gagacacagucugaguaau

SEQ ID NO: 1854670 - RNA, 19 nt, Artificial Sequence
  Description of Artificial Sequence: Synthetic oligonucleotide
  Antisense strand to SEQ ID NO: 1854669
auuacucagacugugucuc

SEQ ID NO: 1854671 - RNA, 19 nt, Artificial Sequence
  Description of Artificial Sequence: Synthetic oligonucleotide
  Sense strand starting at position 2933 of SEQ ID NO: 1564092
gacacagucugaguaauua

SEQ ID NO: 1854672 - RNA, 19 nt, Artificial Sequence
  Description of Artificial Sequence: Synthetic oligonucleotide
  Antisense strand to SEQ ID NO: 1854671
uaauuacucagacuguguc

SEQ ID NO: 1854673 - RNA, 19 nt, Artificial Sequence
  Description of Artificial Sequence: Synthetic oligonucleotide
  Sense strand starting at position 3029 of SEQ ID NO: 1564092
uauacuggacguuggaaau

SEQ ID NO: 1854674 - RNA, 19 nt, Artificial Sequence
  Description of Artificial Sequence: Synthetic oligonucleotide
  Antisense strand to SEQ ID NO: 1854673
auuuccaacguccaguaua

SEQ ID NO: 1854675 - RNA, 19 nt, Artificial Sequence
  Description of Artificial Sequence: Synthetic oligonucleotide
  Sense strand starting at position 3035 of SEQ ID NO: 1564092
ggacguuggaaauguauca

SEQ ID NO: 1854676 - RNA, 19 nt, Artificial Sequence
  Description of Artificial Sequence: Synthetic oligonucleotide
  Antisense strand to SEQ ID NO: 1854675
ugauacauuuccaacgucc

SEQ ID NO: 1854677 - RNA, 19 nt, Artificial Sequence
  Description of Artificial Sequence: Synthetic oligonucleotide
  Sense strand starting at position 3379 of SEQ ID NO: 1564092
auguccuguugccuguaaa

SEQ ID NO: 1854678 - RNA, 19 nt, Artificial Sequence
  Description of Artificial Sequence: Synthetic oligonucleotide
  Antisense strand to SEQ ID NO: 1854677
uuuacaggcaacaggacau

SEQ ID NO: 1854679 - RNA, 19 nt, Artificial Sequence
  Description of Artificial Sequence: Synthetic oligonucleotide
  Sense strand starting at position 3417 of SEQ ID NO: 1564092
agaaaucaauuacguaaca

SEQ ID NO: 1854680 - RNA, 19 nt, Artificial Sequence
  Description of Artificial Sequence: Synthetic oligonucleotide
  Antisense strand to SEQ ID NO: 1854679
uguuacguaauugauuucu

SEQ ID NO: 1854681 - RNA, 19 nt, Artificial Sequence
  Description of Artificial Sequence: Synthetic oligonucleotide
  Sense strand starting at position 3422 of SEQ ID NO: 1564092
ucaauuacguaacagugaa

SEQ ID NO: 1854682 - RNA, 19 nt, Artificial Sequence
  Description of Artificial Sequence: Synthetic oligonucleotide
  Antisense strand to SEQ ID NO: 1854681
uucacuguuacguaauuga

SEQ ID NO: 1854683 - RNA, 19 nt, Artificial Sequence
  Description of Artificial Sequence: Synthetic oligonucleotide
  Sense strand starting at position 3442 of SEQ ID NO: 1564092
agagaaaccgguuguuuaa

SEQ ID NO: 1854684 - RNA, 19 nt, Artificial Sequence
  Description of Artificial Sequence: Synthetic oligonucleotide
  Antisense strand to SEQ ID NO: 1854683
uuaaacaaccgguuucucu

SEQ ID NO: 1854685 - RNA, 19 nt, Artificial Sequence
  Description of Artificial Sequence: Synthetic oligonucleotide
  Sense strand starting at position 3444 of SEQ ID NO: 1564092
agaaaccgguuguuuaauu

SEQ ID NO: 1854686 - RNA, 19 nt, Artificial Sequence
  Description of Artificial Sequence: Synthetic oligonucleotide
  Antisense strand to SEQ ID NO: 1854685
aauuaaacaaccgguuucu

SEQ ID NO: 1854687 - RNA, 19 nt, Artificial Sequence
  Description of Artificial Sequence: Synthetic oligonucleotide
  Sense strand starting at position 63 of SEQ ID NO: 1564093
acguuaugacacuaucaac

SEQ ID NO: 1854688 - RNA, 19 nt, Artificial Sequence
  Description of Artificial Sequence: Synthetic oligonucleotide
  Antisense strand to SEQ ID NO: 1854687
guugauagugucauaacgu

SEQ ID NO: 1854689 - RNA, 19 nt, Artificial Sequence
  Description of Artificial Sequence: Synthetic oligonucleotide
  Sense strand starting at position 97 of SEQ ID NO: 1564093
cauauaaugcaguagaguu

SEQ ID NO: 1854690 - RNA, 19 nt, Artificial Sequence
  Description of Artificial Sequence: Synthetic oligonucleotide
  Antisense strand to SEQ ID NO: 1854689
aacucuacugcauuauaug

SEQ ID NO: 1854691 - RNA, 19 nt, Artificial Sequence
  Description of Artificial Sequence: Synthetic oligonucleotide
  Sense strand starting at position 201 of SEQ ID NO: 1564093
ggcugcaugauguauauau

SEQ ID NO: 1854692 - RNA, 19 nt, Artificial Sequence
  Description of Artificial Sequence: Synthetic oligonucleotide
  Antisense strand to SEQ ID NO: 1854691
auauauacaucaugcagcc

SEQ ID NO: 1854693 - RNA, 19 nt, Artificial Sequence
  Description of Artificial Sequence: Synthetic oligonucleotide
  Sense strand starting at position 243 of SEQ ID NO: 1564093
gccaguuuaaaugguguuu

SEQ ID NO: 1854694 - RNA, 19 nt, Artificial Sequence
  Description of Artificial Sequence: Synthetic oligonucleotide
  Antisense strand to SEQ ID NO: 1854693
aaacaccauuuaaacuggc

SEQ ID NO: 1854695 - RNA, 19 nt, Artificial Sequence
  Description of Artificial Sequence: Synthetic oligonucleotide
  Sense strand starting at position 317 of SEQ ID NO: 1564093
gcaucaggugaauacucau

SEQ ID NO: 1854696 - RNA, 19 nt, Artificial Sequence
  Description of Artificial Sequence: Synthetic oligonucleotide
  Antisense strand to SEQ ID NO: 1854695
augaguauucaccugaugc

SEQ ID NO: 1854697 - RNA, 19 nt, Artificial Sequence
  Description of Artificial Sequence: Synthetic oligonucleotide
  Sense strand starting at position 323 of SEQ ID NO: 1564093
ggugaauacucauaaacuc

SEQ ID NO: 1854698 - RNA, 19 nt, Artificial Sequence
  Description of Artificial Sequence: Synthetic oligonucleotide
  Antisense strand to SEQ ID NO: 1854697
gaguuuaugaguauucacc

SEQ ID NO: 1854699 - RNA, 19 nt, Artificial Sequence
  Description of Artificial Sequence: Synthetic oligonucleotide
  Sense strand starting at position 445 of SEQ ID NO: 1564093
gcacauucguaauuggaaa

SEQ ID NO: 1854700 - RNA, 19 nt, Artificial Sequence
  Description of Artificial Sequence: Synthetic oligonucleotide
  Antisense strand to SEQ ID NO: 1854699
uuuccaauuacgaaugugc

SEQ ID NO: 1854701 - RNA, 19 nt, Artificial Sequence
  Description of Artificial Sequence: Synthetic oligonucleotide
  Sense strand starting at position 525 of SEQ ID NO: 1564093
acauuucccucgcuguuau

SEQ ID NO: 1854702 - RNA, 19 nt, Artificial Sequence
  Description of Artificial Sequence: Synthetic oligonucleotide
  Antisense strand to SEQ ID NO: 1854701
auaacagcgagggaaaugu

SEQ ID NO: 1854703 - RNA, 19 nt, Artificial Sequence
  Description of Artificial Sequence: Synthetic oligonucleotide
  Sense strand starting at position 554 of SEQ ID NO: 1564093
uaaauaugcguuuaugaac

SEQ ID NO: 1854704 - RNA, 19 nt, Artificial Sequence
  Description of Artificial Sequence: Synthetic oligonucleotide
  Antisense strand to SEQ ID NO: 1854703
guucauaaacgcauauuua

SEQ ID NO: 1854705 - RNA, 19 nt, Artificial Sequence
  Description of Artificial Sequence: Synthetic oligonucleotide
  Sense strand starting at position 561 of SEQ ID NO: 1564093
gcguuuaugaaccauuguu

SEQ ID NO: 1854706 - RNA, 19 nt, Artificial Sequence
  Description of Artificial Sequence: Synthetic oligonucleotide
  Antisense strand to SEQ ID NO: 1854705
aacaaugguucauaaacgc

SEQ ID NO: 1854707 - RNA, 19 nt, Artificial Sequence
  Description of Artificial Sequence: Synthetic oligonucleotide
  Sense strand starting at position 602 of SEQ ID NO: 1564093
gcagcuguacuccauaaau

SEQ ID NO: 1854708 - RNA, 19 nt, Artificial Sequence
  Description of Artificial Sequence: Synthetic oligonucleotide
  Antisense strand to SEQ ID NO: 1854707
auuuauggaguacagcugc

SEQ ID NO: 1854709 - RNA, 19 nt, Artificial Sequence
  Description of Artificial Sequence: Synthetic oligonucleotide
  Sense strand starting at position 604 of SEQ ID NO: 1564093
agcuguacuccauaaaugu

SEQ ID NO: 1854710 - RNA, 19 nt, Artificial Sequence
  Description of Artificial Sequence: Synthetic oligonucleotide
  Antisense strand to SEQ ID NO: 1854709
acauuuauggaguacagcu

SEQ ID NO: 1854711 - RNA, 19 nt, Artificial Sequence
  Description of Artificial Sequence: Synthetic oligonucleotide
  Sense strand starting at position 613 of SEQ ID NO: 1564093
ccauaaauguuguacaucu

SEQ ID NO: 1854712 - RNA, 19 nt, Artificial Sequence
  Description of Artificial Sequence: Synthetic oligonucleotide
  Antisense strand to SEQ ID NO: 1854711
agauguacaacauuuaugg

SEQ ID NO: 1854713 - RNA, 19 nt, Artificial Sequence
  Description of Artificial Sequence: Synthetic oligonucleotide
  Sense strand starting at position 886 of SEQ ID NO: 1564093
gcaaucacacuuugugaug

SEQ ID NO: 1854714 - RNA, 19 nt, Artificial Sequence
  Description of Artificial Sequence: Synthetic oligonucleotide
  Antisense strand to SEQ ID NO: 1854713
caucacaaagugugauugc

SEQ ID NO: 1854715 - RNA, 19 nt, Artificial Sequence
  Description of Artificial Sequence: Synthetic oligonucleotide
  Sense strand starting at position 895 of SEQ ID NO: 1564093
cuuugugaugcuugacaaa

SEQ ID NO: 1854716 - RNA, 19 nt, Artificial Sequence
  Description of Artificial Sequence: Synthetic oligonucleotide
  Antisense strand to SEQ ID NO: 1854715
uuugucaagcaucacaaag

SEQ ID NO: 1854717 - RNA, 19 nt, Artificial Sequence
  Description of Artificial Sequence: Synthetic oligonucleotide
  Sense strand starting at position 954 of SEQ ID NO: 1564093
gggagccuguaaguaaaua

SEQ ID NO: 1854718 - RNA, 19 nt, Artificial Sequence
  Description of Artificial Sequence: Synthetic oligonucleotide
  Antisense strand to SEQ ID NO: 1854717
uauuuacuuacaggcuccc

SEQ ID NO: 1854719 - RNA, 19 nt, Artificial Sequence
  Description of Artificial Sequence: Synthetic oligonucleotide
  Sense strand starting at position 972 of SEQ ID NO: 1564093
acuugugcugcccaaacau

SEQ ID NO: 1854720 - RNA, 19 nt, Artificial Sequence
  Description of Artificial Sequence: Synthetic oligonucleotide
  Antisense strand to SEQ ID NO: 1854719
auguuugggcagcacaagu

SEQ ID NO: 1854721 - RNA, 19 nt, Artificial Sequence
  Description of Artificial Sequence: Synthetic oligonucleotide
  Sense strand starting at position 1021 of SEQ ID NO: 1564093
ggcccaggaagcuaucuau

SEQ ID NO: 1854722 - RNA, 19 nt, Artificial Sequence
  Description of Artificial Sequence: Synthetic oligonucleotide
  Antisense strand to SEQ ID NO: 1854721
auagauagcuuccugggcc

SEQ ID NO: 1854723 - RNA, 19 nt, Artificial Sequence
  Description of Artificial Sequence: Synthetic oligonucleotide
  Sense strand starting at position 1024 of SEQ ID NO: 1564093
ccaggaagcuaucuaugua

SEQ ID NO: 1854724 - RNA, 19 nt, Artificial Sequence
  Description of Artificial Sequence: Synthetic oligonucleotide
  Antisense strand to SEQ ID NO: 1854723
uacauagauagcuuccugg

SEQ ID NO: 1854725 - RNA, 19 nt, Artificial Sequence
  Description of Artificial Sequence: Synthetic oligonucleotide
  Sense strand starting at position 1027 of SEQ ID NO: 1564093
ggaagcuaucuauguacaa

SEQ ID NO: 1854726 - RNA, 19 nt, Artificial Sequence
  Description of Artificial Sequence: Synthetic oligonucleotide
  Antisense strand to SEQ ID NO: 1854725
uuguacauagauagcuucc

SEQ ID NO: 1854727 - RNA, 19 nt, Artificial Sequence
  Description of Artificial Sequence: Synthetic oligonucleotide
  Sense strand starting at position 1161 of SEQ ID NO: 1564093
uuucgagacuguuucuaag

SEQ ID NO: 1854728 - RNA, 19 nt, Artificial Sequence
  Description of Artificial Sequence: Synthetic oligonucleotide
  Antisense strand to SEQ ID NO: 1854727
cuuagaaacagucucgaaa

SEQ ID NO: 1854729 - RNA, 19 nt, Artificial Sequence
  Description of Artificial Sequence: Synthetic oligonucleotide
  Sense strand starting at position 1163 of SEQ ID NO: 1564093
ucgagacuguuucuaagug

SEQ ID NO: 1854730 - RNA, 19 nt, Artificial Sequence
  Description of Artificial Sequence: Synthetic oligonucleotide
  Antisense strand to SEQ ID NO: 1854729
cacuuagaaacagucucga

SEQ ID NO: 1854731 - RNA, 19 nt, Artificial Sequence
  Description of Artificial Sequence: Synthetic oligonucleotide
  Sense strand starting at position 1725 of SEQ ID NO: 1564093
ggacauaggcgggaucgua

SEQ ID NO: 1854732 - RNA, 19 nt, Artificial Sequence
  Description of Artificial Sequence: Synthetic oligonucleotide
  Antisense strand to SEQ ID NO: 1854731
uacgaucccgccuaugucc

SEQ ID NO: 1854733 - RNA, 19 nt, Artificial Sequence
  Description of Artificial Sequence: Synthetic oligonucleotide
  Sense strand starting at position 1869 of SEQ ID NO: 1564093
uccagucucgucggugaaa

SEQ ID NO: 1854734 - RNA, 19 nt, Artificial Sequence
  Description of Artificial Sequence: Synthetic oligonucleotide
  Antisense strand to SEQ ID NO: 1854733
uuucaccgacgagacugga

SEQ ID NO: 1854735 - RNA, 19 nt, Artificial Sequence
  Description of Artificial Sequence: Synthetic oligonucleotide
  Sense strand starting at position 2436 of SEQ ID NO: 1564093
gcagcauaguccuugaaac

SEQ ID NO: 1854736 - RNA, 19 nt, Artificial Sequence
  Description of Artificial Sequence: Synthetic oligonucleotide
  Antisense strand to SEQ ID NO: 1854735
guuucaaggacuaugcugc

SEQ ID NO: 1854737 - RNA, 19 nt, Artificial Sequence
  Description of Artificial Sequence: Synthetic oligonucleotide
  Sense strand starting at position 2438 of SEQ ID NO: 1564093
agcauaguccuugaaacug

SEQ ID NO: 1854738 - RNA, 19 nt, Artificial Sequence
  Description of Artificial Sequence: Synthetic oligonucleotide
  Antisense strand to SEQ ID NO: 1854737
caguuucaaggacuaugcu

SEQ ID NO: 1854739 - RNA, 19 nt, Artificial Sequence
  Description of Artificial Sequence: Synthetic oligonucleotide
  Sense strand starting at position 2516 of SEQ ID NO: 1564093
ggauuucguucuuccucua

SEQ ID NO: 1854740 - RNA, 19 nt, Artificial Sequence
  Description of Artificial Sequence: Synthetic oligonucleotide
  Antisense strand to SEQ ID NO: 1854739
uagaggaagaacgaaaucc

SEQ ID NO: 1854741 - RNA, 19 nt, Artificial Sequence
  Description of Artificial Sequence: Synthetic oligonucleotide
  Sense strand starting at position 2577 of SEQ ID NO: 1564093
ggaaaucacuugcuuacug

SEQ ID NO: 1854742 - RNA, 19 nt, Artificial Sequence
  Description of Artificial Sequence: Synthetic oligonucleotide
  Antisense strand to SEQ ID NO: 1854741
caguaagcaagugauuucc

SEQ ID NO: 1854743 - RNA, 19 nt, Artificial Sequence
  Description of Artificial Sequence: Synthetic oligonucleotide
  Sense strand starting at position 2725 of SEQ ID NO: 1564093
gugaaucucucagcacaaa

SEQ ID NO: 1854744 - RNA, 19 nt, Artificial Sequence
  Description of Artificial Sequence: Synthetic oligonucleotide
  Antisense strand to SEQ ID NO: 1854743
uuugugcugagagauucac

SEQ ID NO: 1854745 - RNA, 19 nt, Artificial Sequence
  Description of Artificial Sequence: Synthetic oligonucleotide
  Sense strand starting at position 2782 of SEQ ID NO: 1564093
ucguucucagguuagguau

SEQ ID NO: 1854746 - RNA, 19 nt, Artificial Sequence
  Description of Artificial Sequence: Synthetic oligonucleotide
  Antisense strand to SEQ ID NO: 1854745
auaccuaaccugagaacga

SEQ ID NO: 1854747 - RNA, 19 nt, Artificial Sequence
  Description of Artificial Sequence: Synthetic oligonucleotide
  Sense strand starting at position 2914 of SEQ ID NO: 1564093
uugcaucugugaucaccua

SEQ ID NO: 1854748 - RNA, 19 nt, Artificial Sequence
  Description of Artificial Sequence: Synthetic oligonucleotide
  Antisense strand to SEQ ID NO: 1854747
uaggugaucacagaugcaa

SEQ ID NO: 1854749 - RNA, 19 nt, Artificial Sequence
  Description of Artificial Sequence: Synthetic oligonucleotide
  Sense strand starting at position 2915 of SEQ ID NO: 1564093
ugcaucugugaucaccuaa

SEQ ID NO: 1854750 - RNA, 19 nt, Artificial Sequence
  Description of Artificial Sequence: Synthetic oligonucleotide
  Antisense strand to SEQ ID NO: 1854749
uuaggugaucacagaugca

SEQ ID NO: 1854751 - RNA, 19 nt, Artificial Sequence
  Description of Artificial Sequence: Synthetic oligonucleotide
  Sense strand starting at position 3011 of SEQ ID NO: 1564093
uguggaauauauccauugu

SEQ ID NO: 1854752 - RNA, 19 nt, Artificial Sequence
  Description of Artificial Sequence: Synthetic oligonucleotide
  Antisense strand to SEQ ID NO: 1854751
acaauggauauauuccaca

SEQ ID NO: 1854753 - RNA, 19 nt, Artificial Sequence
  Description of Artificial Sequence: Synthetic oligonucleotide
  Sense strand starting at position 3059 of SEQ ID NO: 1564093
cagcuucugcaguauuaag

SEQ ID NO: 1854754 - RNA, 19 nt, Artificial Sequence
  Description of Artificial Sequence: Synthetic oligonucleotide
  Antisense strand to SEQ ID NO: 1854753
cuuaauacugcagaagcug

SEQ ID NO: 1854755 - RNA, 19 nt, Artificial Sequence
  Description of Artificial Sequence: Synthetic oligonucleotide
  Sense strand starting at position 3112 of SEQ ID NO: 1564093
gcaaguggcacagaaucaa

SEQ ID NO: 1854756 - RNA, 19 nt, Artificial Sequence
  Description of Artificial Sequence: Synthetic oligonucleotide
  Antisense strand to SEQ ID NO: 1854755
uugauucugugccacuugc

SEQ ID NO: 1854757 - RNA, 19 nt, Artificial Sequence
  Description of Artificial Sequence: Synthetic oligonucleotide
  Sense strand starting at position 3213 of SEQ ID NO: 1564093
agacuagguugaugauaug

SEQ ID NO: 1854758 - RNA, 19 nt, Artificial Sequence
  Description of Artificial Sequence: Synthetic oligonucleotide
  Antisense strand to SEQ ID NO: 1854757
cauaucaucaaccuagucu

SEQ ID NO: 1854759 - RNA, 19 nt, Artificial Sequence
  Description of Artificial Sequence: Synthetic oligonucleotide
  Sense strand starting at position 3216 of SEQ ID NO: 1564093
cuagguugaugauaugcaa

SEQ ID NO: 1854760 - RNA, 19 nt, Artificial Sequence
  Description of Artificial Sequence: Synthetic oligonucleotide
  Antisense strand to SEQ ID NO: 1854759
uugcauaucaucaaccuag

SEQ ID NO: 1854761 - RNA, 19 nt, Artificial Sequence
  Description of Artificial Sequence: Synthetic oligonucleotide
  Sense strand starting at position 3219 of SEQ ID NO: 1564093
gguugaugauaugcaaaua

SEQ ID NO: 1854762 - RNA, 19 nt, Artificial Sequence
  Description of Artificial Sequence: Synthetic oligonucleotide
  Antisense strand to SEQ ID NO: 1854761
uauuugcauaucaucaacc

SEQ ID NO: 1854763 - RNA, 19 nt, Artificial Sequence
  Description of Artificial Sequence: Synthetic oligonucleotide
  Sense strand starting at position 3245 of SEQ ID NO: 1564093
gagauuugguccuaucaau

SEQ ID NO: 1854764 - RNA, 19 nt, Artificial Sequence
  Description of Artificial Sequence: Synthetic oligonucleotide
  Antisense strand to SEQ ID NO: 1854763
auugauaggaccaaaucuc

SEQ ID NO: 1854765 - RNA, 19 nt, Artificial Sequence
  Description of Artificial Sequence: Synthetic oligonucleotide
  Sense strand starting at position 3955 of SEQ ID NO: 1564093
ggagaucuuuaacagaaag

SEQ ID NO: 1854766 - RNA, 19 nt, Artificial Sequence
  Description of Artificial Sequence: Synthetic oligonucleotide
  Antisense strand to SEQ ID NO: 1854765
cuuucuguuaaagaucucc

SEQ ID NO: 1854767 - RNA, 19 nt, Artificial Sequence
  Description of Artificial Sequence: Synthetic oligonucleotide
  Sense strand starting at position 111 of SEQ ID NO: 1564094
caacgagagugccaaucuu

SEQ ID NO: 1854768 - RNA, 19 nt, Artificial Sequence
  Description of Artificial Sequence: Synthetic oligonucleotide
  Antisense strand to SEQ ID NO: 1854767
aagauuggcacucucguug

SEQ ID NO: 1854769 - RNA, 19 nt, Artificial Sequence
  Description of Artificial Sequence: Synthetic oligonucleotide
  Sense strand starting at position 151 of SEQ ID NO: 1564094
auugcaucaucacagagaa

SEQ ID NO: 1854770 - RNA, 19 nt, Artificial Sequence
  Description of Artificial Sequence: Synthetic oligonucleotide
  Antisense strand to SEQ ID NO: 1854769
uucucugugaugaugcaau

SEQ ID NO: 1854771 - RNA, 19 nt, Artificial Sequence
  Description of Artificial Sequence: Synthetic oligonucleotide
  Sense strand starting at position 208 of SEQ ID NO: 1564094
gcauaaagugcucugugcu

SEQ ID NO: 1854772 - RNA, 19 nt, Artificial Sequence
  Description of Artificial Sequence: Synthetic oligonucleotide
  Antisense strand to SEQ ID NO: 1854771
agcacagagcacuuuaugc

SEQ ID NO: 1854773 - RNA, 19 nt, Artificial Sequence
  Description of Artificial Sequence: Synthetic oligonucleotide
  Sense strand starting at position 209 of SEQ ID NO: 1564094
cauaaagugcucugugcua

SEQ ID NO: 1854774 - RNA, 19 nt, Artificial Sequence
  Description of Artificial Sequence: Synthetic oligonucleotide
  Antisense strand to SEQ ID NO: 1854773
uagcacagagcacuuuaug

SEQ ID NO: 1854775 - RNA, 19 nt, Artificial Sequence
  Description of Artificial Sequence: Synthetic oligonucleotide
  Sense strand starting at position 243 of SEQ ID NO: 1564094
ggaggagguuccgaagaaa

SEQ ID NO: 1854776 - RNA, 19 nt, Artificial Sequence
  Description of Artificial Sequence: Synthetic oligonucleotide
  Antisense strand to SEQ ID NO: 1854775
uuucuucggaaccuccucc

SEQ ID NO: 1854777 - RNA, 19 nt, Artificial Sequence
  Description of Artificial Sequence: Synthetic oligonucleotide
  Sense strand starting at position 401 of SEQ ID NO: 1564094
aguugcauugcaugaacua

SEQ ID NO: 1854778 - RNA, 19 nt, Artificial Sequence
  Description of Artificial Sequence: Synthetic oligonucleotide
  Antisense strand to SEQ ID NO: 1854777
uaguucaugcaaugcaacu

SEQ ID NO: 1854779 - RNA, 19 nt, Artificial Sequence
  Description of Artificial Sequence: Synthetic oligonucleotide
  Sense strand starting at position 402 of SEQ ID NO: 1564094
guugcauugcaugaacuau

SEQ ID NO: 1854780 - RNA, 19 nt, Artificial Sequence
  Description of Artificial Sequence: Synthetic oligonucleotide
  Antisense strand to SEQ ID NO: 1854779
auaguucaugcaaugcaac

SEQ ID NO: 1854781 - RNA, 19 nt, Artificial Sequence
  Description of Artificial Sequence: Synthetic oligonucleotide
  Sense strand starting at position 429 of SEQ ID NO: 1564094
auaaguaagcuacaagguu

SEQ ID NO: 1854782 - RNA, 19 nt, Artificial Sequence
  Description of Artificial Sequence: Synthetic oligonucleotide
  Antisense strand to SEQ ID NO: 1854781
aaccuuguagcuuacuuau

SEQ ID NO: 1854783 - RNA, 19 nt, Artificial Sequence
  Description of Artificial Sequence: Synthetic oligonucleotide
  Sense strand starting at position 484 of SEQ ID NO: 1564094
aguaguauguggugucaug

SEQ ID NO: 1854784 - RNA, 19 nt, Artificial Sequence
  Description of Artificial Sequence: Synthetic oligonucleotide
  Antisense strand to SEQ ID NO: 1854783
caugacaccacauacuacu

SEQ ID NO: 1854785 - RNA, 19 nt, Artificial Sequence
  Description of Artificial Sequence: Synthetic oligonucleotide
  Sense strand starting at position 789 of SEQ ID NO: 1564094
uugcgagucucacacuuau

SEQ ID NO: 1854786 - RNA, 19 nt, Artificial Sequence
  Description of Artificial Sequence: Synthetic oligonucleotide
  Antisense strand to SEQ ID NO: 1854785
auaagugugagacucgcaa

SEQ ID NO: 1854787 - RNA, 19 nt, Artificial Sequence
  Description of Artificial Sequence: Synthetic oligonucleotide
  Sense strand starting at position 808 of SEQ ID NO: 1564094
uuuccugagucuccauaga

SEQ ID NO: 1854788 - RNA, 19 nt, Artificial Sequence
  Description of Artificial Sequence: Synthetic oligonucleotide
  Antisense strand to SEQ ID NO: 1854787
ucuauggagacucaggaaa

SEQ ID NO: 1854789 - RNA, 19 nt, Artificial Sequence
  Description of Artificial Sequence: Synthetic oligonucleotide
  Sense strand starting at position 1059 of SEQ ID NO: 1564094
cgcggacuucuuuggguca

SEQ ID NO: 1854790 - RNA, 19 nt, Artificial Sequence
  Description of Artificial Sequence: Synthetic oligonucleotide
  Antisense strand to SEQ ID NO: 1854789
ugacccaaagaaguccgcg

SEQ ID NO: 1854791 - RNA, 19 nt, Artificial Sequence
  Description of Artificial Sequence: Synthetic oligonucleotide
  Sense strand starting at position 1061 of SEQ ID NO: 1564094
cggacuucuuugggucaca

SEQ ID NO: 1854792 - RNA, 19 nt, Artificial Sequence
  Description of Artificial Sequence: Synthetic oligonucleotide
  Antisense strand to SEQ ID NO: 1854791
ugugacccaaagaaguccg

SEQ ID NO: 1854793 - RNA, 19 nt, Artificial Sequence
  Description of Artificial Sequence: Synthetic oligonucleotide
  Sense strand starting at position 1168 of SEQ ID NO: 1564094
cgcagucacauauguaaug

SEQ ID NO: 1854794 - RNA, 19 nt, Artificial Sequence
  Description of Artificial Sequence: Synthetic oligonucleotide
  Antisense strand to SEQ ID NO: 1854793
cauuacauaugugacugcg

SEQ ID NO: 1854795 - RNA, 19 nt, Artificial Sequence
  Description of Artificial Sequence: Synthetic oligonucleotide
  Sense strand starting at position 1817 of SEQ ID NO: 1564094
aagagaaaguguuacacuu

SEQ ID NO: 1854796 - RNA, 19 nt, Artificial Sequence
  Description of Artificial Sequence: Synthetic oligonucleotide
  Antisense strand to SEQ ID NO: 1854795
aaguguaacacuuucucuu

SEQ ID NO: 1854797 - RNA, 19 nt, Artificial Sequence
  Description of Artificial Sequence: Synthetic oligonucleotide
  Sense strand starting at position 2012 of SEQ ID NO: 1564094
gccauaggcuucuacgaag

SEQ ID NO: 1854798 - RNA, 19 nt, Artificial Sequence
  Description of Artificial Sequence: Synthetic oligonucleotide
  Antisense strand to SEQ ID NO: 1854797
cuucguagaagccuauggc

SEQ ID NO: 1854799 - RNA, 19 nt, Artificial Sequence
  Description of Artificial Sequence: Synthetic oligonucleotide
  Sense strand starting at position 2253 of SEQ ID NO: 1564094
cuuccuuuccaccgagauc

SEQ ID NO: 1854800 - RNA, 19 nt, Artificial Sequence
  Description of Artificial Sequence: Synthetic oligonucleotide
  Antisense strand to SEQ ID NO: 1854799
gaucucgguggaaaggaag

SEQ ID NO: 1854801 - RNA, 19 nt, Artificial Sequence
  Description of Artificial Sequence: Synthetic oligonucleotide
  Sense strand starting at position 2264 of SEQ ID NO: 1564094
ccgagaucccaaggugcuu

SEQ ID NO: 1854802 - RNA, 19 nt, Artificial Sequence
  Description of Artificial Sequence: Synthetic oligonucleotide
  Antisense strand to SEQ ID NO: 1854801
aagcaccuugggaucucgg

SEQ ID NO: 1854803 - RNA, 19 nt, Artificial Sequence
  Description of Artificial Sequence: Synthetic oligonucleotide
  Sense strand starting at position 2536 of SEQ ID NO: 1564094
ggugcugugggcuguaauu

SEQ ID NO: 1854804 - RNA, 19 nt, Artificial Sequence
  Description of Artificial Sequence: Synthetic oligonucleotide
  Antisense strand to SEQ ID NO: 1854803
aauuacagcccacagcacc

SEQ ID NO: 1854805 - RNA, 19 nt, Artificial Sequence
  Description of Artificial Sequence: Synthetic oligonucleotide
  Sense strand starting at position 2547 of SEQ ID NO: 1564094
cuguaauuucguggagcca

SEQ ID NO: 1854806 - RNA, 19 nt, Artificial Sequence
  Description of Artificial Sequence: Synthetic oligonucleotide
  Antisense strand to SEQ ID NO: 1854805
uggcuccacgaaauuacag

SEQ ID NO: 1854807 - RNA, 19 nt, Artificial Sequence
  Description of Artificial Sequence: Synthetic oligonucleotide
  Sense strand starting at position 2817 of SEQ ID NO: 1564094
gagagaacuuccgaaggca

SEQ ID NO: 1854808 - RNA, 19 nt, Artificial Sequence
  Description of Artificial Sequence: Synthetic oligonucleotide
  Antisense strand to SEQ ID NO: 1854807
ugccuucggaaguucucuc

SEQ ID NO: 1854809 - RNA, 19 nt, Artificial Sequence
  Description of Artificial Sequence: Synthetic oligonucleotide
  Sense strand starting at position 2983 of SEQ ID NO: 1564094
gcagauuuggcaugcccga

SEQ ID NO: 1854810 - RNA, 19 nt, Artificial Sequence
  Description of Artificial Sequence: Synthetic oligonucleotide
  Antisense strand to SEQ ID NO: 1854809
ucgggcaugccaaaucugc

SEQ ID NO: 1854811 - RNA, 19 nt, Artificial Sequence
  Description of Artificial Sequence: Synthetic oligonucleotide
  Sense strand starting at position 3274 of SEQ ID NO: 1564094
ccuggucucggagaaguca

SEQ ID NO: 1854812 - RNA, 19 nt, Artificial Sequence
  Description of Artificial Sequence: Synthetic oligonucleotide
  Antisense strand to SEQ ID NO: 1854811
ugacuucuccgagaccagg

SEQ ID NO: 1854813 - RNA, 19 nt, Artificial Sequence
  Description of Artificial Sequence: Synthetic oligonucleotide
  Sense strand starting at position 3377 of SEQ ID NO: 1564094
cgggaagcccuuuauguau

SEQ ID NO: 1854814 - RNA, 19 nt, Artificial Sequence
  Description of Artificial Sequence: Synthetic oligonucleotide
  Antisense strand to SEQ ID NO: 1854813
auacauaaagggcuucccg

SEQ ID NO: 1854815 - RNA, 19 nt, Artificial Sequence
  Description of Artificial Sequence: Synthetic oligonucleotide
  Sense strand starting at position 3558 of SEQ ID NO: 1564094
uaaggacagucaugaagag

SEQ ID NO: 1854816 - RNA, 19 nt, Artificial Sequence
  Description of Artificial Sequence: Synthetic oligonucleotide
  Antisense strand to SEQ ID NO: 1854815
cucuucaugacuguccuua

SEQ ID NO: 1854817 - RNA, 19 nt, Artificial Sequence
  Description of Artificial Sequence: Synthetic oligonucleotide
  Sense strand starting at position 3811 of SEQ ID NO: 1564094
ggaccagugcuauaucuga

SEQ ID NO: 1854818 - RNA, 19 nt, Artificial Sequence
  Description of Artificial Sequence: Synthetic oligonucleotide
  Antisense strand to SEQ ID NO: 1854817
ucagauauagcacuggucc

SEQ ID NO: 1854819 - RNA, 19 nt, Artificial Sequence
  Description of Artificial Sequence: Synthetic oligonucleotide
  Sense strand starting at position 3816 of SEQ ID NO: 1564094
agugcuauaucugaggaac

SEQ ID NO: 1854820 - RNA, 19 nt, Artificial Sequence
  Description of Artificial Sequence: Synthetic oligonucleotide
  Antisense strand to SEQ ID NO: 1854819
guuccucagauauagcacu

SEQ ID NO: 1854821 - RNA, 19 nt, Artificial Sequence
  Description of Artificial Sequence: Synthetic oligonucleotide
  Sense strand starting at position 3818 of SEQ ID NO: 1564094
ugcuauaucugaggaacca

SEQ ID NO: 1854822 - RNA, 19 nt, Artificial Sequence
  Description of Artificial Sequence: Synthetic oligonucleotide
  Antisense strand to SEQ ID NO: 1854821
ugguuccucagauauagca

SEQ ID NO: 1854823 - RNA, 19 nt, Artificial Sequence
  Description of Artificial Sequence: Synthetic oligonucleotide
  Sense strand starting at position 3915 of SEQ ID NO: 1564094
agggcucuucccuggcaaa

SEQ ID NO: 1854824 - RNA, 19 nt, Artificial Sequence
  Description of Artificial Sequence: Synthetic oligonucleotide
  Antisense strand to SEQ ID NO: 1854823
uuugccagggaagagcccu

SEQ ID NO: 1854825 - RNA, 19 nt, Artificial Sequence
  Description of Artificial Sequence: Synthetic oligonucleotide
  Sense strand starting at position 159 of SEQ ID NO: 1564095
gugaaccuccgguacagau

SEQ ID NO: 1854826 - RNA, 19 nt, Artificial Sequence
  Description of Artificial Sequence: Synthetic oligonucleotide
  Antisense strand to SEQ ID NO: 1854825
aucuguaccggagguucac

SEQ ID NO: 1854827 - RNA, 19 nt, Artificial Sequence
  Description of Artificial Sequence: Synthetic oligonucleotide
  Sense strand starting at position 191 of SEQ ID NO: 1564095
agcauuaauggaugacauc

SEQ ID NO: 1854828 - RNA, 19 nt, Artificial Sequence
  Description of Artificial Sequence: Synthetic oligonucleotide
  Antisense strand to SEQ ID NO: 1854827
gaugucauccauuaaugcu

SEQ ID NO: 1854829 - RNA, 19 nt, Artificial Sequence
  Description of Artificial Sequence: Synthetic oligonucleotide
  Sense strand starting at position 379 of SEQ ID NO: 1564095
gggagcuuaguuggaugaa

SEQ ID NO: 1854830 - RNA, 19 nt, Artificial Sequence
  Description of Artificial Sequence: Synthetic oligonucleotide
  Antisense strand to SEQ ID NO: 1854829
uucauccaacuaagcuccc

SEQ ID NO: 1854831 - RNA, 19 nt, Artificial Sequence
  Description of Artificial Sequence: Synthetic oligonucleotide
  Sense strand starting at position 382 of SEQ ID NO: 1564095
agcuuaguuggaugaaaca

SEQ ID NO: 1854832 - RNA, 19 nt, Artificial Sequence
  Description of Artificial Sequence: Synthetic oligonucleotide
  Antisense strand to SEQ ID NO: 1854831
uguuucauccaacuaagcu

SEQ ID NO: 1854833 - RNA, 19 nt, Artificial Sequence
  Description of Artificial Sequence: Synthetic oligonucleotide
  Sense strand starting at position 569 of SEQ ID NO: 1564095
gaaauaaugccauggacug

SEQ ID NO: 1854834 - RNA, 19 nt, Artificial Sequence
  Description of Artificial Sequence: Synthetic oligonucleotide
  Antisense strand to SEQ ID NO: 1854833
caguccauggcauuauuuc

SEQ ID NO: 1854835 - RNA, 19 nt, Artificial Sequence
  Description of Artificial Sequence: Synthetic oligonucleotide
  Sense strand starting at position 570 of SEQ ID NO: 1564095
aaauaaugccauggacugu

SEQ ID NO: 1854836 - RNA, 19 nt, Artificial Sequence
  Description of Artificial Sequence: Synthetic oligonucleotide
  Antisense strand to SEQ ID NO: 1854835
acaguccauggcauuauuu

SEQ ID NO: 1854837 - RNA, 19 nt, Artificial Sequence
  Description of Artificial Sequence: Synthetic oligonucleotide
  Sense strand starting at position 596 of SEQ ID NO: 1564095
auguuauagcaacauuaug

SEQ ID NO: 1854838 - RNA, 19 nt, Artificial Sequence
  Description of Artificial Sequence: Synthetic oligonucleotide
  Antisense strand to SEQ ID NO: 1854837
cauaauguugcuauaacau

SEQ ID NO: 1854839 - RNA, 19 nt, Artificial Sequence
  Description of Artificial Sequence: Synthetic oligonucleotide
  Sense strand starting at position 616 of SEQ ID NO: 1564095
aaacgcugugaguaaauua

SEQ ID NO: 1854840 - RNA, 19 nt, Artificial Sequence
  Description of Artificial Sequence: Synthetic oligonucleotide
  Antisense strand to SEQ ID NO: 1854839
uaauuuacucacagcguuu

SEQ ID NO: 1854841 - RNA, 19 nt, Artificial Sequence
  Description of Artificial Sequence: Synthetic oligonucleotide
  Sense strand starting at position 693 of SEQ ID NO: 1564095
ggauauucuuagguuaaac

SEQ ID NO: 1854842 - RNA, 19 nt, Artificial Sequence
  Description of Artificial Sequence: Synthetic oligonucleotide
  Antisense strand to SEQ ID NO: 1854841
guuuaaccuaagaauaucc

SEQ ID NO: 1854843 - RNA, 19 nt, Artificial Sequence
  Description of Artificial Sequence: Synthetic oligonucleotide
  Sense strand starting at position 909 of SEQ ID NO: 1564095
aggucaugagcugaaauuc

SEQ ID NO: 1854844 - RNA, 19 nt, Artificial Sequence
  Description of Artificial Sequence: Synthetic oligonucleotide
  Antisense strand to SEQ ID NO: 1854843
gaauuucagcucaugaccu

SEQ ID NO: 1854845 - RNA, 19 nt, Artificial Sequence
  Description of Artificial Sequence: Synthetic oligonucleotide
  Sense strand starting at position 1139 of SEQ ID NO: 1564095
aagguucucugauccugaa

SEQ ID NO: 1854846 - RNA, 19 nt, Artificial Sequence
  Description of Artificial Sequence: Synthetic oligonucleotide
  Antisense strand to SEQ ID NO: 1854845
uucaggaucagagaaccuu

SEQ ID NO: 1854847 - RNA, 19 nt, Artificial Sequence
  Description of Artificial Sequence: Synthetic oligonucleotide
  Sense strand starting at position 1178 of SEQ ID NO: 1564095
aaagaagucagguguggaa

SEQ ID NO: 1854848 - RNA, 19 nt, Artificial Sequence
  Description of Artificial Sequence: Synthetic oligonucleotide
  Antisense strand to SEQ ID NO: 1854847
uuccacaccugacuucuuu

SEQ ID NO: 1854849 - RNA, 19 nt, Artificial Sequence
  Description of Artificial Sequence: Synthetic oligonucleotide
  Sense strand starting at position 1180 of SEQ ID NO: 1564095
agaagucagguguggaaau

SEQ ID NO: 1854850 - RNA, 19 nt, Artificial Sequence
  Description of Artificial Sequence: Synthetic oligonucleotide
  Antisense strand to SEQ ID NO: 1854849
auuuccacaccugacuucu

SEQ ID NO: 1854851 - RNA, 19 nt, Artificial Sequence
  Description of Artificial Sequence: Synthetic oligonucleotide
  Sense strand starting at position 1191 of SEQ ID NO: 1564095
guggaaauccaaugaaagu

SEQ ID NO: 1854852 - RNA, 19 nt, Artificial Sequence
  Description of Artificial Sequence: Synthetic oligonucleotide
  Antisense strand to SEQ ID NO: 1854851
acuuucauuggauuuccac

SEQ ID NO: 1854853 - RNA, 19 nt, Artificial Sequence
  Description of Artificial Sequence: Synthetic oligonucleotide
  Sense strand starting at position 1344 of SEQ ID NO: 1564095
cugagcuccuagccauuua

SEQ ID NO: 1854854 - RNA, 19 nt, Artificial Sequence
  Description of Artificial Sequence: Synthetic oligonucleotide
  Antisense strand to SEQ ID NO: 1854853
uaaauggcuaggagcucag

SEQ ID NO: 1854855 - RNA, 19 nt, Artificial Sequence
  Description of Artificial Sequence: Synthetic oligonucleotide
  Sense strand starting at position 1508 of SEQ ID NO: 1564095
ucacaucacugucuauaga

SEQ ID NO: 1854856 - RNA, 19 nt, Artificial Sequence
  Description of Artificial Sequence: Synthetic oligonucleotide
  Antisense strand to SEQ ID NO: 1854855
ucuauagacagugauguga

SEQ ID NO: 1854857 - RNA, 19 nt, Artificial Sequence
  Description of Artificial Sequence: Synthetic oligonucleotide
  Sense strand starting at position 1536 of SEQ ID NO: 1564095
gccagauaccugggaauaa

SEQ ID NO: 1854858 - RNA, 19 nt, Artificial Sequence
  Description of Artificial Sequence: Synthetic oligonucleotide
  Antisense strand to SEQ ID NO: 1854857
uuauucccagguaucuggc

SEQ ID NO: 1854859 - RNA, 19 nt, Artificial Sequence
  Description of Artificial Sequence: Synthetic oligonucleotide
  Sense strand starting at position 1592 of SEQ ID NO: 1564095
gaagcaugaugucuuauga

SEQ ID NO: 1854860 - RNA, 19 nt, Artificial Sequence
  Description of Artificial Sequence: Synthetic oligonucleotide
  Antisense strand to SEQ ID NO: 1854859
ucauaagacaucaugcuuc

SEQ ID NO: 1854861 - RNA, 19 nt, Artificial Sequence
  Description of Artificial Sequence: Synthetic oligonucleotide
  Sense strand starting at position 1772 of SEQ ID NO: 1564095
uccauaucaucaucagagu

SEQ ID NO: 1854862 - RNA, 19 nt, Artificial Sequence
  Description of Artificial Sequence: Synthetic oligonucleotide
  Antisense strand to SEQ ID NO: 1854861
acucugaugaugauaugga

SEQ ID NO: 1854863 - RNA, 19 nt, Artificial Sequence
  Description of Artificial Sequence: Synthetic oligonucleotide
  Sense strand starting at position 2079 of SEQ ID NO: 1564095
cagcauuaacccugggaug

SEQ ID NO: 1854864 - RNA, 19 nt, Artificial Sequence
  Description of Artificial Sequence: Synthetic oligonucleotide
  Antisense strand to SEQ ID NO: 1854863
caucccaggguuaaugcug

SEQ ID NO: 1854865 - RNA, 19 nt, Artificial Sequence
  Description of Artificial Sequence: Synthetic oligonucleotide
  Sense strand starting at position 2156 of SEQ ID NO: 1564095
agguuugaacuuugaguga

SEQ ID NO: 1854866 - RNA, 19 nt, Artificial Sequence
  Description of Artificial Sequence: Synthetic oligonucleotide
  Antisense strand to SEQ ID NO: 1854865
ucacucaaaguucaaaccu

SEQ ID NO: 1854867 - RNA, 19 nt, Artificial Sequence
  Description of Artificial Sequence: Synthetic oligonucleotide
  Sense strand starting at position 2161 of SEQ ID NO: 1564095
ugaacuuugagugauugcu

SEQ ID NO: 1854868 - RNA, 19 nt, Artificial Sequence
  Description of Artificial Sequence: Synthetic oligonucleotide
  Antisense strand to SEQ ID NO: 1854867
agcaaucacucaaaguuca

SEQ ID NO: 1854869 - RNA, 19 nt, Artificial Sequence
  Description of Artificial Sequence: Synthetic oligonucleotide
  Sense strand starting at position 2393 of SEQ ID NO: 1564095
gggugauccuuucuaauag

SEQ ID NO: 1854870 - RNA, 19 nt, Artificial Sequence
  Description of Artificial Sequence: Synthetic oligonucleotide
  Antisense strand to SEQ ID NO: 1854869
cuauuagaaaggaucaccc

SEQ ID NO: 1854871 - RNA, 19 nt, Artificial Sequence
  Description of Artificial Sequence: Synthetic oligonucleotide
  Sense strand starting at position 2405 of SEQ ID NO: 1564095
cuaauagguucuguagaaa

SEQ ID NO: 1854872 - RNA, 19 nt, Artificial Sequence
  Description of Artificial Sequence: Synthetic oligonucleotide
  Antisense strand to SEQ ID NO: 1854871
uuucuacagaaccuauuag

SEQ ID NO: 1854873 - RNA, 19 nt, Artificial Sequence
  Description of Artificial Sequence: Synthetic oligonucleotide
  Sense strand starting at position 2429 of SEQ ID NO: 1564095
caugcauucgcagaggaaa

SEQ ID NO: 1854874 - RNA, 19 nt, Artificial Sequence
  Description of Artificial Sequence: Synthetic oligonucleotide
  Antisense strand to SEQ ID NO: 1854873
uuuccucugcgaaugcaug

SEQ ID NO: 1854875 - RNA, 19 nt, Artificial Sequence
  Description of Artificial Sequence: Synthetic oligonucleotide
  Sense strand starting at position 2618 of SEQ ID NO: 1564095
uccacuguccaguauuaau

SEQ ID NO: 1854876 - RNA, 19 nt, Artificial Sequence
  Description of Artificial Sequence: Synthetic oligonucleotide
  Antisense strand to SEQ ID NO: 1854875
auuaauacuggacagugga

SEQ ID NO: 1854877 - RNA, 19 nt, Artificial Sequence
  Description of Artificial Sequence: Synthetic oligonucleotide
  Sense strand starting at position 2785 of SEQ ID NO: 1564095
uccugcuucugaguauuua

SEQ ID NO: 1854878 - RNA, 19 nt, Artificial Sequence
  Description of Artificial Sequence: Synthetic oligonucleotide
  Antisense strand to SEQ ID NO: 1854877
uaaauacucagaagcagga

SEQ ID NO: 1854879 - RNA, 19 nt, Artificial Sequence
  Description of Artificial Sequence: Synthetic oligonucleotide
  Sense strand starting at position 3136 of SEQ ID NO: 1564095
cugguugguaaauaucagu

SEQ ID NO: 1854880 - RNA, 19 nt, Artificial Sequence
  Description of Artificial Sequence: Synthetic oligonucleotide
  Antisense strand to SEQ ID NO: 1854879
acugauauuuaccaaccag

SEQ ID NO: 1854881 - RNA, 19 nt, Artificial Sequence
  Description of Artificial Sequence: Synthetic oligonucleotide
  Sense strand starting at position 3141 of SEQ ID NO: 1564095
ugguaaauaucaguccuga

SEQ ID NO: 1854882 - RNA, 19 nt, Artificial Sequence
  Description of Artificial Sequence: Synthetic oligonucleotide
  Antisense strand to SEQ ID NO: 1854881
ucaggacugauauuuacca

SEQ ID NO: 1854883 - RNA, 19 nt, Artificial Sequence
  Description of Artificial Sequence: Synthetic oligonucleotide
  Sense strand starting at position 3219 of SEQ ID NO: 1564095
cacaaaugugauggucacu

SEQ ID NO: 1854884 - RNA, 19 nt, Artificial Sequence
  Description of Artificial Sequence: Synthetic oligonucleotide
  Antisense strand to SEQ ID NO: 1854883
agugaccaucacauuugug

SEQ ID NO: 1854885 - RNA, 19 nt, Artificial Sequence
  Description of Artificial Sequence: Synthetic oligonucleotide
  Sense strand starting at position 3222 of SEQ ID NO: 1564095
aaaugugauggucacuagu

SEQ ID NO: 1854886 - RNA, 19 nt, Artificial Sequence
  Description of Artificial Sequence: Synthetic oligonucleotide
  Antisense strand to SEQ ID NO: 1854885
acuagugaccaucacauuu

SEQ ID NO: 1854887 - RNA, 19 nt, Artificial Sequence
  Description of Artificial Sequence: Synthetic oligonucleotide
  Sense strand starting at position 3225 of SEQ ID NO: 1564095
ugugauggucacuaguaca

SEQ ID NO: 1854888 - RNA, 19 nt, Artificial Sequence
  Description of Artificial Sequence: Synthetic oligonucleotide
  Antisense strand to SEQ ID NO: 1854887
uguacuagugaccaucaca

SEQ ID NO: 1854889 - RNA, 19 nt, Artificial Sequence
  Description of Artificial Sequence: Synthetic oligonucleotide
  Sense strand starting at position 3468 of SEQ ID NO: 1564095
gcuuaucuccgacauaaga

SEQ ID NO: 1854890 - RNA, 19 nt, Artificial Sequence
  Description of Artificial Sequence: Synthetic oligonucleotide
  Antisense strand to SEQ ID NO: 1854889
ucuuaugucggagauaagc

SEQ ID NO: 1854891 - RNA, 19 nt, Artificial Sequence
  Description of Artificial Sequence: Synthetic oligonucleotide
  Sense strand starting at position 3529 of SEQ ID NO: 1564095
uggcaucacaggcauuaga

SEQ ID NO: 1854892 - RNA, 19 nt, Artificial Sequence
  Description of Artificial Sequence: Synthetic oligonucleotide
  Antisense strand to SEQ ID NO: 1854891
ucuaaugccugugaugcca

SEQ ID NO: 1854893 - RNA, 19 nt, Artificial Sequence
  Description of Artificial Sequence: Synthetic oligonucleotide
  Sense strand starting at position 3571 of SEQ ID NO: 1564095
uguuguaacuguguaauuu

SEQ ID NO: 1854894 - RNA, 19 nt, Artificial Sequence
  Description of Artificial Sequence: Synthetic oligonucleotide
  Antisense strand to SEQ ID NO: 1854893
aaauuacacaguuacaaca

SEQ ID NO: 1854895 - RNA, 19 nt, Artificial Sequence
  Description of Artificial Sequence: Synthetic oligonucleotide
  Sense strand starting at position 3590 of SEQ ID NO: 1564095
gggacaaguuaccuaguau

SEQ ID NO: 1854896 - RNA, 19 nt, Artificial Sequence
  Description of Artificial Sequence: Synthetic oligonucleotide
  Antisense strand to SEQ ID NO: 1854895
auacuagguaacuuguccc

SEQ ID NO: 1854897 - RNA, 19 nt, Artificial Sequence
  Description of Artificial Sequence: Synthetic oligonucleotide
  Sense strand starting at position 3886 of SEQ ID NO: 1564095
auugauugagaagguguaa

SEQ ID NO: 1854898 - RNA, 19 nt, Artificial Sequence
  Description of Artificial Sequence: Synthetic oligonucleotide
  Antisense strand to SEQ ID NO: 1854897
uuacaccuucucaaucaau

SEQ ID NO: 1854899 - RNA, 19 nt, Artificial Sequence
  Description of Artificial Sequence: Synthetic oligonucleotide
  Sense strand starting at position 3955 of SEQ ID NO: 1564095
gcuagaguagcacauugaa

SEQ ID NO: 1854900 - RNA, 19 nt, Artificial Sequence
  Description of Artificial Sequence: Synthetic oligonucleotide
  Antisense strand to SEQ ID NO: 1854899
uucaaugugcuacucuagc

SEQ ID NO: 1854901 - RNA, 19 nt, Artificial Sequence
  Description of Artificial Sequence: Synthetic oligonucleotide
  Sense strand starting at position 3958 of SEQ ID NO: 1564095
agaguagcacauugaauaa

SEQ ID NO: 1854902 - RNA, 19 nt, Artificial Sequence
  Description of Artificial Sequence: Synthetic oligonucleotide
  Antisense strand to SEQ ID NO: 1854901
uuauucaaugugcuacucu

SEQ ID NO: 1854903 - RNA, 19 nt, Artificial Sequence
  Description of Artificial Sequence: Synthetic oligonucleotide
  Sense strand starting at position 3975 of SEQ ID NO: 1564095
aaagacucucuaggaaguu

SEQ ID NO: 1854904 - RNA, 19 nt, Artificial Sequence
  Description of Artificial Sequence: Synthetic oligonucleotide
  Antisense strand to SEQ ID NO: 1854903
aacuuccuagagagucuuu

SEQ ID NO: 1854905 - RNA, 19 nt, Artificial Sequence
  Description of Artificial Sequence: Synthetic oligonucleotide
  Sense strand starting at position 241 of SEQ ID NO: 1564096
ccagcaucaggauaaucuu

SEQ ID NO: 1854906 - RNA, 19 nt, Artificial Sequence
  Description of Artificial Sequence: Synthetic oligonucleotide
  Antisense strand to SEQ ID NO: 1854905
aagauuauccugaugcugg

SEQ ID NO: 1854907 - RNA, 19 nt, Artificial Sequence
  Description of Artificial Sequence: Synthetic oligonucleotide
  Sense strand starting at position 301 of SEQ ID NO: 1564096
uuaucagaugcugaacuua

SEQ ID NO: 1854908 - RNA, 19 nt, Artificial Sequence
  Description of Artificial Sequence: Synthetic oligonucleotide
  Antisense strand to SEQ ID NO: 1854907
uaaguucagcaucugauaa

SEQ ID NO: 1854909 - RNA, 19 nt, Artificial Sequence
  Description of Artificial Sequence: Synthetic oligonucleotide
  Sense strand starting at position 343 of SEQ ID NO: 1564096
gguuucugucuagaaccua

SEQ ID NO: 1854910 - RNA, 19 nt, Artificial Sequence
  Description of Artificial Sequence: Synthetic oligonucleotide
  Antisense strand to SEQ ID NO: 1854909
uagguucuagacagaaacc

SEQ ID NO: 1854911 - RNA, 19 nt, Artificial Sequence
  Description of Artificial Sequence: Synthetic oligonucleotide
  Sense strand starting at position 408 of SEQ ID NO: 1564096
acaauaaugccugagcuag

SEQ ID NO: 1854912 - RNA, 19 nt, Artificial Sequence
  Description of Artificial Sequence: Synthetic oligonucleotide
  Antisense strand to SEQ ID NO: 1854911
cuagcucaggcauuauugu

SEQ ID NO: 1854913 - RNA, 19 nt, Artificial Sequence
  Description of Artificial Sequence: Synthetic oligonucleotide
  Sense strand starting at position 598 of SEQ ID NO: 1564096
cuuacaauccuaugaggua

SEQ ID NO: 1854914 - RNA, 19 nt, Artificial Sequence
  Description of Artificial Sequence: Synthetic oligonucleotide
  Antisense strand to SEQ ID NO: 1854913
uaccucauaggauuguaag

SEQ ID NO: 1854915 - RNA, 19 nt, Artificial Sequence
  Description of Artificial Sequence: Synthetic oligonucleotide
  Sense strand starting at position 607 of SEQ ID NO: 1564096
cuaugagguaggcaguaau

SEQ ID NO: 1854916 - RNA, 19 nt, Artificial Sequence
  Description of Artificial Sequence: Synthetic oligonucleotide
  Antisense strand to SEQ ID NO: 1854915
auuacugccuaccucauag

SEQ ID NO: 1854917 - RNA, 19 nt, Artificial Sequence
  Description of Artificial Sequence: Synthetic oligonucleotide
  Sense strand starting at position 610 of SEQ ID NO: 1564096
ugagguaggcaguaauaug

SEQ ID NO: 1854918 - RNA, 19 nt, Artificial Sequence
  Description of Artificial Sequence: Synthetic oligonucleotide
  Antisense strand to SEQ ID NO: 1854917
cauauuacugccuaccuca

SEQ ID NO: 1854919 - RNA, 19 nt, Artificial Sequence
  Description of Artificial Sequence: Synthetic oligonucleotide
  Sense strand starting at position 748 of SEQ ID NO: 1564096
agcaaagacgcagaugaau

SEQ ID NO: 1854920 - RNA, 19 nt, Artificial Sequence
  Description of Artificial Sequence: Synthetic oligonucleotide
  Antisense strand to SEQ ID NO: 1854919
auucaucugcgucuuugcu

SEQ ID NO: 1854921 - RNA, 19 nt, Artificial Sequence
  Description of Artificial Sequence: Synthetic oligonucleotide
  Sense strand starting at position 790 of SEQ ID NO: 1564096
augagacaugccuaggcaa

SEQ ID NO: 1854922 - RNA, 19 nt, Artificial Sequence
  Description of Artificial Sequence: Synthetic oligonucleotide
  Antisense strand to SEQ ID NO: 1854921
uugccuaggcaugucucau

SEQ ID NO: 1854923 - RNA, 19 nt, Artificial Sequence
  Description of Artificial Sequence: Synthetic oligonucleotide
  Sense strand starting at position 820 of SEQ ID NO: 1564096
gaaucauaacaaggguguu

SEQ ID NO: 1854924 - RNA, 19 nt, Artificial Sequence
  Description of Artificial Sequence: Synthetic oligonucleotide
  Antisense strand to SEQ ID NO: 1854923
aacacccuuguuaugauuc

SEQ ID NO: 1854925 - RNA, 19 nt, Artificial Sequence
  Description of Artificial Sequence: Synthetic oligonucleotide
  Sense strand starting at position 874 of SEQ ID NO: 1564096
aacguuuaucaagaagggu

SEQ ID NO: 1854926 - RNA, 19 nt, Artificial Sequence
  Description of Artificial Sequence: Synthetic oligonucleotide
  Antisense strand to SEQ ID NO: 1854925
acccuucuugauaaacguu

SEQ ID NO: 1854927 - RNA, 19 nt, Artificial Sequence
  Description of Artificial Sequence: Synthetic oligonucleotide
  Sense strand starting at position 1087 of SEQ ID NO: 1564096
cuuccuuugggaugacacu

SEQ ID NO: 1854928 - RNA, 19 nt, Artificial Sequence
  Description of Artificial Sequence: Synthetic oligonucleotide
  Antisense strand to SEQ ID NO: 1854927
agugucaucccaaaggaag

SEQ ID NO: 1854929 - RNA, 19 nt, Artificial Sequence
  Description of Artificial Sequence: Synthetic oligonucleotide
  Sense strand starting at position 1186 of SEQ ID NO: 1564096
ggucuuucccggagcgaag

SEQ ID NO: 1854930 - RNA, 19 nt, Artificial Sequence
  Description of Artificial Sequence: Synthetic oligonucleotide
  Antisense strand to SEQ ID NO: 1854929
cuucgcuccgggaaagacc

SEQ ID NO: 1854931 - RNA, 19 nt, Artificial Sequence
  Description of Artificial Sequence: Synthetic oligonucleotide
  Sense strand starting at position 1318 of SEQ ID NO: 1564096
gagggauugaggcgaaagu

SEQ ID NO: 1854932 - RNA, 19 nt, Artificial Sequence
  Description of Artificial Sequence: Synthetic oligonucleotide
  Antisense strand to SEQ ID NO: 1854931
acuuucgccucaaucccuc

SEQ ID NO: 1854933 - RNA, 19 nt, Artificial Sequence
  Description of Artificial Sequence: Synthetic oligonucleotide
  Sense strand starting at position 2007 of SEQ ID NO: 1564096
uguucuugcgguuuacuca

SEQ ID NO: 1854934 - RNA, 19 nt, Artificial Sequence
  Description of Artificial Sequence: Synthetic oligonucleotide
  Antisense strand to SEQ ID NO: 1854933
ugaguaaaccgcaagaaca

SEQ ID NO: 1854935 - RNA, 19 nt, Artificial Sequence
  Description of Artificial Sequence: Synthetic oligonucleotide
  Sense strand starting at position 2036 of SEQ ID NO: 1564096
ggaauaacuuagcucaacu

SEQ ID NO: 1854936 - RNA, 19 nt, Artificial Sequence
  Description of Artificial Sequence: Synthetic oligonucleotide
  Antisense strand to SEQ ID NO: 1854935
aguugagcuaaguuauucc

SEQ ID NO: 1854937 - RNA, 19 nt, Artificial Sequence
  Description of Artificial Sequence: Synthetic oligonucleotide
  Sense strand starting at position 2057 of SEQ ID NO: 1564096
cccauaaggaguugaugau

SEQ ID NO: 1854938 - RNA, 19 nt, Artificial Sequence
  Description of Artificial Sequence: Synthetic oligonucleotide
  Antisense strand to SEQ ID NO: 1854937
aucaucaacuccuuauggg

SEQ ID NO: 1854939 - RNA, 19 nt, Artificial Sequence
  Description of Artificial Sequence: Synthetic oligonucleotide
  Sense strand starting at position 2151 of SEQ ID NO: 1564096
gaccaagagcucugagaac

SEQ ID NO: 1854940 - RNA, 19 nt, Artificial Sequence
  Description of Artificial Sequence: Synthetic oligonucleotide
  Antisense strand to SEQ ID NO: 1854939
guucucagagcucuugguc

SEQ ID NO: 1854941 - RNA, 19 nt, Artificial Sequence
  Description of Artificial Sequence: Synthetic oligonucleotide
  Sense strand starting at position 2260 of SEQ ID NO: 1564096
aacagugaacucugggcaa

SEQ ID NO: 1854942 - RNA, 19 nt, Artificial Sequence
  Description of Artificial Sequence: Synthetic oligonucleotide
  Antisense strand to SEQ ID NO: 1854941
uugcccagaguucacuguu

SEQ ID NO: 1854943 - RNA, 19 nt, Artificial Sequence
  Description of Artificial Sequence: Synthetic oligonucleotide
  Sense strand starting at position 2325 of SEQ ID NO: 1564096
agucuugauccugagcaaa

SEQ ID NO: 1854944 - RNA, 19 nt, Artificial Sequence
  Description of Artificial Sequence: Synthetic oligonucleotide
  Antisense strand to SEQ ID NO: 1854943
uuugcucaggaucaagacu

SEQ ID NO: 1854945 - RNA, 19 nt, Artificial Sequence
  Description of Artificial Sequence: Synthetic oligonucleotide
  Sense strand starting at position 2327 of SEQ ID NO: 1564096
ucuugauccugagcaaaua

SEQ ID NO: 1854946 - RNA, 19 nt, Artificial Sequence
  Description of Artificial Sequence: Synthetic oligonucleotide
  Antisense strand to SEQ ID NO: 1854945
uauuugcucaggaucaaga

SEQ ID NO: 1854947 - RNA, 19 nt, Artificial Sequence
  Description of Artificial Sequence: Synthetic oligonucleotide
  Sense strand starting at position 2328 of SEQ ID NO: 1564096
cuugauccugagcaaauau

SEQ ID NO: 1854948 - RNA, 19 nt, Artificial Sequence
  Description of Artificial Sequence: Synthetic oligonucleotide
  Antisense strand to SEQ ID NO: 1854947
auauuugcucaggaucaag

SEQ ID NO: 1854949 - RNA, 19 nt, Artificial Sequence
  Description of Artificial Sequence: Synthetic oligonucleotide
  Sense strand starting at position 2415 of SEQ ID NO: 1564096
auccaaagauguuccagau

SEQ ID NO: 1854950 - RNA, 19 nt, Artificial Sequence
  Description of Artificial Sequence: Synthetic oligonucleotide
  Antisense strand to SEQ ID NO: 1854949
aucuggaacaucuuuggau

SEQ ID NO: 1854951 - RNA, 19 nt, Artificial Sequence
  Description of Artificial Sequence: Synthetic oligonucleotide
  Sense strand starting at position 2441 of SEQ ID NO: 1564096
uuugaugggcuuuagauga

SEQ ID NO: 1854952 - RNA, 19 nt, Artificial Sequence
  Description of Artificial Sequence: Synthetic oligonucleotide
  Antisense strand to SEQ ID NO: 1854951
ucaucuaaagcccaucaaa

SEQ ID NO: 1854953 - RNA, 19 nt, Artificial Sequence
  Description of Artificial Sequence: Synthetic oligonucleotide
  Sense strand starting at position 2445 of SEQ ID NO: 1564096
augggcuuuagaugagacu

SEQ ID NO: 1854954 - RNA, 19 nt, Artificial Sequence
  Description of Artificial Sequence: Synthetic oligonucleotide
  Antisense strand to SEQ ID NO: 1854953
agucucaucuaaagcccau

SEQ ID NO: 1854955 - RNA, 19 nt, Artificial Sequence
  Description of Artificial Sequence: Synthetic oligonucleotide
  Sense strand starting at position 2451 of SEQ ID NO: 1564096
uuuagaugagacugugaau

SEQ ID NO: 1854956 - RNA, 19 nt, Artificial Sequence
  Description of Artificial Sequence: Synthetic oligonucleotide
  Antisense strand to SEQ ID NO: 1854955
auucacagucucaucuaaa

SEQ ID NO: 1854957 - RNA, 19 nt, Artificial Sequence
  Description of Artificial Sequence: Synthetic oligonucleotide
  Sense strand starting at position 2497 of SEQ ID NO: 1564096
ggauuuguaugugcccuuu

SEQ ID NO: 1854958 - RNA, 19 nt, Artificial Sequence
  Description of Artificial Sequence: Synthetic oligonucleotide
  Antisense strand to SEQ ID NO: 1854957
aaagggcacauacaaaucc

SEQ ID NO: 1854959 - RNA, 19 nt, Artificial Sequence
  Description of Artificial Sequence: Synthetic oligonucleotide
  Sense strand starting at position 2628 of SEQ ID NO: 1564096
uauuucuucgauugaggcu

SEQ ID NO: 1854960 - RNA, 19 nt, Artificial Sequence
  Description of Artificial Sequence: Synthetic oligonucleotide
  Antisense strand to SEQ ID NO: 1854959
agccucaaucgaagaaaua

SEQ ID NO: 1854961 - RNA, 19 nt, Artificial Sequence
  Description of Artificial Sequence: Synthetic oligonucleotide
  Sense strand starting at position 2730 of SEQ ID NO: 1564096
gguaauauuuccgcaaagc

SEQ ID NO: 1854962 - RNA, 19 nt, Artificial Sequence
  Description of Artificial Sequence: Synthetic oligonucleotide
  Antisense strand to SEQ ID NO: 1854961
gcuuugcggaaauauuacc

SEQ ID NO: 1854963 - RNA, 19 nt, Artificial Sequence
  Description of Artificial Sequence: Synthetic oligonucleotide
  Sense strand starting at position 2731 of SEQ ID NO: 1564096
guaauauuuccgcaaagcu

SEQ ID NO: 1854964 - RNA, 19 nt, Artificial Sequence
  Description of Artificial Sequence: Synthetic oligonucleotide
  Antisense strand to SEQ ID NO: 1854963
agcuuugcggaaauauuac

SEQ ID NO: 1854965 - RNA, 19 nt, Artificial Sequence
  Description of Artificial Sequence: Synthetic oligonucleotide
  Sense strand starting at position 2810 of SEQ ID NO: 1564096
guaccuuuagauuauguaa

SEQ ID NO: 1854966 - RNA, 19 nt, Artificial Sequence
  Description of Artificial Sequence: Synthetic oligonucleotide
  Antisense strand to SEQ ID NO: 1854965
uuacauaaucuaaagguac

SEQ ID NO: 1854967 - RNA, 19 nt, Artificial Sequence
  Description of Artificial Sequence: Synthetic oligonucleotide
  Sense strand starting at position 2904 of SEQ ID NO: 1564096
guucuuugagaauauggca

SEQ ID NO: 1854968 - RNA, 19 nt, Artificial Sequence
  Description of Artificial Sequence: Synthetic oligonucleotide
  Antisense strand to SEQ ID NO: 1854967
ugccauauucucaaagaac

SEQ ID NO: 1854969 - RNA, 19 nt, Artificial Sequence
  Description of Artificial Sequence: Synthetic oligonucleotide
  Sense strand starting at position 2938 of SEQ ID NO: 1564096
uagcgagaacgacacuuaa

SEQ ID NO: 1854970 - RNA, 19 nt, Artificial Sequence
  Description of Artificial Sequence: Synthetic oligonucleotide
  Antisense strand to SEQ ID NO: 1854969
uuaagugucguucucgcua

SEQ ID NO: 1854971 - RNA, 19 nt, Artificial Sequence
  Description of Artificial Sequence: Synthetic oligonucleotide
  Sense strand starting at position 2965 of SEQ ID NO: 1564096
augucuuaccaauggauug

SEQ ID NO: 1854972 - RNA, 19 nt, Artificial Sequence
  Description of Artificial Sequence: Synthetic oligonucleotide
  Antisense strand to SEQ ID NO: 1854971
caauccauugguaagacau

SEQ ID NO: 1854973 - RNA, 19 nt, Artificial Sequence
  Description of Artificial Sequence: Synthetic oligonucleotide
  Sense strand starting at position 3083 of SEQ ID NO: 1564096
uuucuucuugauugaagag

SEQ ID NO: 1854974 - RNA, 19 nt, Artificial Sequence
  Description of Artificial Sequence: Synthetic oligonucleotide
  Antisense strand to SEQ ID NO: 1854973
cucuucaaucaagaagaaa

SEQ ID NO: 1854975 - RNA, 19 nt, Artificial Sequence
  Description of Artificial Sequence: Synthetic oligonucleotide
  Sense strand starting at position 3114 of SEQ ID NO: 1564096
guaugcaaaguauaaacau

SEQ ID NO: 1854976 - RNA, 19 nt, Artificial Sequence
  Description of Artificial Sequence: Synthetic oligonucleotide
  Antisense strand to SEQ ID NO: 1854975
auguuuauacuuugcauac

SEQ ID NO: 1854977 - RNA, 19 nt, Artificial Sequence
  Description of Artificial Sequence: Synthetic oligonucleotide
  Sense strand starting at position 3312 of SEQ ID NO: 1564096
cugauauaugaaugcauac

SEQ ID NO: 1854978 - RNA, 19 nt, Artificial Sequence
  Description of Artificial Sequence: Synthetic oligonucleotide
  Antisense strand to SEQ ID NO: 1854977
guaugcauucauauaucag

SEQ ID NO: 1854979 - RNA, 19 nt, Artificial Sequence
  Description of Artificial Sequence: Synthetic oligonucleotide
  Sense strand starting at position 3336 of SEQ ID NO: 1564096
cauuaaggauuugaaaggu

SEQ ID NO: 1854980 - RNA, 19 nt, Artificial Sequence
  Description of Artificial Sequence: Synthetic oligonucleotide
  Antisense strand to SEQ ID NO: 1854979
accuuucaaauccuuaaug

SEQ ID NO: 1854981 - RNA, 19 nt, Artificial Sequence
  Description of Artificial Sequence: Synthetic oligonucleotide
  Sense strand starting at position 3372 of SEQ ID NO: 1564096
ccauauauugagcaggcaa

SEQ ID NO: 1854982 - RNA, 19 nt, Artificial Sequence
  Description of Artificial Sequence: Synthetic oligonucleotide
  Antisense strand to SEQ ID NO: 1854981
uugccugcucaauauaugg

SEQ ID NO: 1854983 - RNA, 19 nt, Artificial Sequence
  Description of Artificial Sequence: Synthetic oligonucleotide
  Sense strand starting at position 3495 of SEQ ID NO: 1564096
ugaggugaacugugagaac

SEQ ID NO: 1854984 - RNA, 19 nt, Artificial Sequence
  Description of Artificial Sequence: Synthetic oligonucleotide
  Antisense strand to SEQ ID NO: 1854983
guucucacaguucaccuca

SEQ ID NO: 1854985 - RNA, 19 nt, Artificial Sequence
  Description of Artificial Sequence: Synthetic oligonucleotide
  Sense strand starting at position 35 of SEQ ID NO: 1564097
gaaagcaguuucuuguuga

SEQ ID NO: 1854986 - RNA, 19 nt, Artificial Sequence
  Description of Artificial Sequence: Synthetic oligonucleotide
  Antisense strand to SEQ ID NO: 1854985
ucaacaagaaacugcuuuc

SEQ ID NO: 1854987 - RNA, 19 nt, Artificial Sequence
  Description of Artificial Sequence: Synthetic oligonucleotide
  Sense strand starting at position 38 of SEQ ID NO: 1564097
agcaguuucuuguugaauc

SEQ ID NO: 1854988 - RNA, 19 nt, Artificial Sequence
  Description of Artificial Sequence: Synthetic oligonucleotide
  Antisense strand to SEQ ID NO: 1854987
gauucaacaagaaacugcu

SEQ ID NO: 1854989 - RNA, 19 nt, Artificial Sequence
  Description of Artificial Sequence: Synthetic oligonucleotide
  Sense strand starting at position 199 of SEQ ID NO: 1564097
caauuauuggauugaguug

SEQ ID NO: 1854990 - RNA, 19 nt, Artificial Sequence
  Description of Artificial Sequence: Synthetic oligonucleotide
  Antisense strand to SEQ ID NO: 1854989
caacucaauccaauaauug

SEQ ID NO: 1854991 - RNA, 19 nt, Artificial Sequence
  Description of Artificial Sequence: Synthetic oligonucleotide
  Sense strand starting at position 204 of SEQ ID NO: 1564097
auuggauugaguugagacu

SEQ ID NO: 1854992 - RNA, 19 nt, Artificial Sequence
  Description of Artificial Sequence: Synthetic oligonucleotide
  Antisense strand to SEQ ID NO: 1854991
agucucaacucaauccaau

SEQ ID NO: 1854993 - RNA, 19 nt, Artificial Sequence
  Description of Artificial Sequence: Synthetic oligonucleotide
  Sense strand starting at position 433 of SEQ ID NO: 1564097
auaucaagguucuugugau

SEQ ID NO: 1854994 - RNA, 19 nt, Artificial Sequence
  Description of Artificial Sequence: Synthetic oligonucleotide
  Antisense strand to SEQ ID NO: 1854993
aucacaagaaccuugauau

SEQ ID NO: 1854995 - RNA, 19 nt, Artificial Sequence
  Description of Artificial Sequence: Synthetic oligonucleotide
  Sense strand starting at position 437 of SEQ ID NO: 1564097
caagguucuugugauuuaa

SEQ ID NO: 1854996 - RNA, 19 nt, Artificial Sequence
  Description of Artificial Sequence: Synthetic oligonucleotide
  Antisense strand to SEQ ID NO: 1854995
uuaaaucacaagaaccuug

SEQ ID NO: 1854997 - RNA, 19 nt, Artificial Sequence
  Description of Artificial Sequence: Synthetic oligonucleotide
  Sense strand starting at position 480 of SEQ ID NO: 1564097
uccucucagguguaaauaa

SEQ ID NO: 1854998 - RNA, 19 nt, Artificial Sequence
  Description of Artificial Sequence: Synthetic oligonucleotide
  Antisense strand to SEQ ID NO: 1854997
uuauuuacaccugagagga

SEQ ID NO: 1854999 - RNA, 19 nt, Artificial Sequence
  Description of Artificial Sequence: Synthetic oligonucleotide
  Sense strand starting at position 619 of SEQ ID NO: 1564097
ugccuuucucuugaguugu

SEQ ID NO: 1855000 - RNA, 19 nt, Artificial Sequence
  Description of Artificial Sequence: Synthetic oligonucleotide
  Antisense strand to SEQ ID NO: 1854999
acaacucaagagaaaggca

SEQ ID NO: 1855001 - RNA, 19 nt, Artificial Sequence
  Description of Artificial Sequence: Synthetic oligonucleotide
  Sense strand starting at position 621 of SEQ ID NO: 1564097
ccuuucucuugaguuguaa

SEQ ID NO: 1855002 - RNA, 19 nt, Artificial Sequence
  Description of Artificial Sequence: Synthetic oligonucleotide
  Antisense strand to SEQ ID NO: 1855001
uuacaacucaagagaaagg

SEQ ID NO: 1855003 - RNA, 19 nt, Artificial Sequence
  Description of Artificial Sequence: Synthetic oligonucleotide
  Sense strand starting at position 696 of SEQ ID NO: 1564097
ucauauucucccgacagcu

SEQ ID NO: 1855004 - RNA, 19 nt, Artificial Sequence
  Description of Artificial Sequence: Synthetic oligonucleotide
  Antisense strand to SEQ ID NO: 1855003
agcugucgggagaauauga

SEQ ID NO: 1855005 - RNA, 19 nt, Artificial Sequence
  Description of Artificial Sequence: Synthetic oligonucleotide
  Sense strand starting at position 966 of SEQ ID NO: 1564097
acgucauuguuaccaacuu

SEQ ID NO: 1855006 - RNA, 19 nt, Artificial Sequence
  Description of Artificial Sequence: Synthetic oligonucleotide
  Antisense strand to SEQ ID NO: 1855005
aaguugguaacaaugacgu

SEQ ID NO: 1855007 - RNA, 19 nt, Artificial Sequence
  Description of Artificial Sequence: Synthetic oligonucleotide
  Sense strand starting at position 1173 of SEQ ID NO: 1564097
cuccuugucucaguacuua

SEQ ID NO: 1855008 - RNA, 19 nt, Artificial Sequence
  Description of Artificial Sequence: Synthetic oligonucleotide
  Antisense strand to SEQ ID NO: 1855007
uaaguacugagacaaggag

SEQ ID NO: 1855009 - RNA, 19 nt, Artificial Sequence
  Description of Artificial Sequence: Synthetic oligonucleotide
  Sense strand starting at position 1185 of SEQ ID NO: 1564097
guacuuagggcguauucau

SEQ ID NO: 1855010 - RNA, 19 nt, Artificial Sequence
  Description of Artificial Sequence: Synthetic oligonucleotide
  Antisense strand to SEQ ID NO: 1855009
augaauacgcccuaaguac

SEQ ID NO: 1855011 - RNA, 19 nt, Artificial Sequence
  Description of Artificial Sequence: Synthetic oligonucleotide
  Sense strand starting at position 1192 of SEQ ID NO: 1564097
gggcguauucaucaaaugu

SEQ ID NO: 1855012 - RNA, 19 nt, Artificial Sequence
  Description of Artificial Sequence: Synthetic oligonucleotide
  Antisense strand to SEQ ID NO: 1855011
acauuugaugaauacgccc

SEQ ID NO: 1855013 - RNA, 19 nt, Artificial Sequence
  Description of Artificial Sequence: Synthetic oligonucleotide
  Sense strand starting at position 1216 of SEQ ID NO: 1564097
ucuugaaacucaccagugu

SEQ ID NO: 1855014 - RNA, 19 nt, Artificial Sequence
  Description of Artificial Sequence: Synthetic oligonucleotide
  Antisense strand to SEQ ID NO: 1855013
acacuggugaguuucaaga

SEQ ID NO: 1855015 - RNA, 19 nt, Artificial Sequence
  Description of Artificial Sequence: Synthetic oligonucleotide
  Sense strand starting at position 1360 of SEQ ID NO: 1564097
agcugaacucuauguggaa

SEQ ID NO: 1855016 - RNA, 19 nt, Artificial Sequence
  Description of Artificial Sequence: Synthetic oligonucleotide
  Antisense strand to SEQ ID NO: 1855015
uuccacauagaguucagcu

SEQ ID NO: 1855017 - RNA, 19 nt, Artificial Sequence
  Description of Artificial Sequence: Synthetic oligonucleotide
  Sense strand starting at position 1361 of SEQ ID NO: 1564097
gcugaacucuauguggaaa

SEQ ID NO: 1855018 - RNA, 19 nt, Artificial Sequence
  Description of Artificial Sequence: Synthetic oligonucleotide
  Antisense strand to SEQ ID NO: 1855017
uuuccacauagaguucagc

SEQ ID NO: 1855019 - RNA, 19 nt, Artificial Sequence
  Description of Artificial Sequence: Synthetic oligonucleotide
  Sense strand starting at position 1442 of SEQ ID NO: 1564097
augcaugagucuuccaaag

SEQ ID NO: 1855020 - RNA, 19 nt, Artificial Sequence
  Description of Artificial Sequence: Synthetic oligonucleotide
  Antisense strand to SEQ ID NO: 1855019
cuuuggaagacucaugcau

SEQ ID NO: 1855021 - RNA, 19 nt, Artificial Sequence
  Description of Artificial Sequence: Synthetic oligonucleotide
  Sense strand starting at position 1509 of SEQ ID NO: 1564097
gaggacugguguguaggaa

SEQ ID NO: 1855022 - RNA, 19 nt, Artificial Sequence
  Description of Artificial Sequence: Synthetic oligonucleotide
  Antisense strand to SEQ ID NO: 1855021
uuccuacacaccaguccuc

SEQ ID NO: 1855023 - RNA, 19 nt, Artificial Sequence
  Description of Artificial Sequence: Synthetic oligonucleotide
  Sense strand starting at position 2043 of SEQ ID NO: 1564097
gaagacagauccugaaaga

SEQ ID NO: 1855024 - RNA, 19 nt, Artificial Sequence
  Description of Artificial Sequence: Synthetic oligonucleotide
  Antisense strand to SEQ ID NO: 1855023
ucuuucaggaucugucuuc

SEQ ID NO: 1855025 - RNA, 19 nt, Artificial Sequence
  Description of Artificial Sequence: Synthetic oligonucleotide
  Sense strand starting at position 2060 of SEQ ID NO: 1564097
gagcaagcuguauguugaa

SEQ ID NO: 1855026 - RNA, 19 nt, Artificial Sequence
  Description of Artificial Sequence: Synthetic oligonucleotide
  Antisense strand to SEQ ID NO: 1855025
uucaacauacagcuugcuc

SEQ ID NO: 1855027 - RNA, 19 nt, Artificial Sequence
  Description of Artificial Sequence: Synthetic oligonucleotide
  Sense strand starting at position 2111 of SEQ ID NO: 1564097
gauuccuauuacguaguga

SEQ ID NO: 1855028 - RNA, 19 nt, Artificial Sequence
  Description of Artificial Sequence: Synthetic oligonucleotide
  Antisense strand to SEQ ID NO: 1855027
ucacuacguaauaggaauc

SEQ ID NO: 1855029 - RNA, 19 nt, Artificial Sequence
  Description of Artificial Sequence: Synthetic oligonucleotide
  Sense strand starting at position 2142 of SEQ ID NO: 1564097
uagcucguuguaggaauua

SEQ ID NO: 1855030 - RNA, 19 nt, Artificial Sequence
  Description of Artificial Sequence: Synthetic oligonucleotide
  Antisense strand to SEQ ID NO: 1855029
uaauuccuacaacgagcua

SEQ ID NO: 1855031 - RNA, 19 nt, Artificial Sequence
  Description of Artificial Sequence: Synthetic oligonucleotide
  Sense strand starting at position 2174 of SEQ ID NO: 1564097
ugagcaaugcugcagaguu

SEQ ID NO: 1855032 - RNA, 19 nt, Artificial Sequence
  Description of Artificial Sequence: Synthetic oligonucleotide
  Antisense strand to SEQ ID NO: 1855031
aacucugcagcauugcuca

SEQ ID NO: 1855033 - RNA, 19 nt, Artificial Sequence
  Description of Artificial Sequence: Synthetic oligonucleotide
  Sense strand starting at position 2280 of SEQ ID NO: 1564097
ccugcuuccgugggaauuu

SEQ ID NO: 1855034 - RNA, 19 nt, Artificial Sequence
  Description of Artificial Sequence: Synthetic oligonucleotide
  Antisense strand to SEQ ID NO: 1855033
aaauucccacggaagcagg

SEQ ID NO: 1855035 - RNA, 19 nt, Artificial Sequence
  Description of Artificial Sequence: Synthetic oligonucleotide
  Sense strand starting at position 2474 of SEQ ID NO: 1564097
gguuauuuguagcucuaag

SEQ ID NO: 1855036 - RNA, 19 nt, Artificial Sequence
  Description of Artificial Sequence: Synthetic oligonucleotide
  Antisense strand to SEQ ID NO: 1855035
cuuagagcuacaaauaacc

SEQ ID NO: 1855037 - RNA, 19 nt, Artificial Sequence
  Description of Artificial Sequence: Synthetic oligonucleotide
  Sense strand starting at position 2506 of SEQ ID NO: 1564097
aguuaauaauguccagaga

SEQ ID NO: 1855038 - RNA, 19 nt, Artificial Sequence
  Description of Artificial Sequence: Synthetic oligonucleotide
  Antisense strand to SEQ ID NO: 1855037
ucucuggacauuauuaacu

SEQ ID NO: 1855039 - RNA, 19 nt, Artificial Sequence
  Description of Artificial Sequence: Synthetic oligonucleotide
  Sense strand starting at position 2553 of SEQ ID NO: 1564097
agguucccagauuauguua

SEQ ID NO: 1855040 - RNA, 19 nt, Artificial Sequence
  Description of Artificial Sequence: Synthetic oligonucleotide
  Antisense strand to SEQ ID NO: 1855039
uaacauaaucugggaaccu

SEQ ID NO: 1855041 - RNA, 19 nt, Artificial Sequence
  Description of Artificial Sequence: Synthetic oligonucleotide
  Sense strand starting at position 2593 of SEQ ID NO: 1564097
uugcaagaugaaugagagu

SEQ ID NO: 1855042 - RNA, 19 nt, Artificial Sequence
  Description of Artificial Sequence: Synthetic oligonucleotide
  Antisense strand to SEQ ID NO: 1855041
acucucauucaucuugcaa

SEQ ID NO: 1855043 - RNA, 19 nt, Artificial Sequence
  Description of Artificial Sequence: Synthetic oligonucleotide
  Sense strand starting at position 2695 of SEQ ID NO: 1564097
uaggcucagugcuuacaau

SEQ ID NO: 1855044 - RNA, 19 nt, Artificial Sequence
  Description of Artificial Sequence: Synthetic oligonucleotide
  Antisense strand to SEQ ID NO: 1855043
auuguaagcacugagccua

SEQ ID NO: 1855045 - RNA, 19 nt, Artificial Sequence
  Description of Artificial Sequence: Synthetic oligonucleotide
  Sense strand starting at position 2696 of SEQ ID NO: 1564097
aggcucagugcuuacaaua

SEQ ID NO: 1855046 - RNA, 19 nt, Artificial Sequence
  Description of Artificial Sequence: Synthetic oligonucleotide
  Antisense strand to SEQ ID NO: 1855045
uauuguaagcacugagccu

SEQ ID NO: 1855047 - RNA, 19 nt, Artificial Sequence
  Description of Artificial Sequence: Synthetic oligonucleotide
  Sense strand starting at position 2789 of SEQ ID NO: 1564097
cuuuacauguuguccuuaa

SEQ ID NO: 1855048 - RNA, 19 nt, Artificial Sequence
  Description of Artificial Sequence: Synthetic oligonucleotide
  Antisense strand to SEQ ID NO: 1855047
uuaaggacaacauguaaag

SEQ ID NO: 1855049 - RNA, 19 nt, Artificial Sequence
  Description of Artificial Sequence: Synthetic oligonucleotide
  Sense strand starting at position 2790 of SEQ ID NO: 1564097
uuuacauguuguccuuaaa

SEQ ID NO: 1855050 - RNA, 19 nt, Artificial Sequence
  Description of Artificial Sequence: Synthetic oligonucleotide
  Antisense strand to SEQ ID NO: 1855049
uuuaaggacaacauguaaa

SEQ ID NO: 1855051 - RNA, 19 nt, Artificial Sequence
  Description of Artificial Sequence: Synthetic oligonucleotide
  Sense strand starting at position 2815 of SEQ ID NO: 1564097
ucaagagguggguacuauu

SEQ ID NO: 1855052 - RNA, 19 nt, Artificial Sequence
  Description of Artificial Sequence: Synthetic oligonucleotide
  Antisense strand to SEQ ID NO: 1855051
aauaguacccaccucuuga

SEQ ID NO: 1855053 - RNA, 19 nt, Artificial Sequence
  Description of Artificial Sequence: Synthetic oligonucleotide
  Sense strand starting at position 2887 of SEQ ID NO: 1564097
aucauaugguuaguacauu

SEQ ID NO: 1855054 - RNA, 19 nt, Artificial Sequence
  Description of Artificial Sequence: Synthetic oligonucleotide
  Antisense strand to SEQ ID NO: 1855053
aauguacuaaccauaugau

SEQ ID NO: 1855055 - RNA, 19 nt, Artificial Sequence
  Description of Artificial Sequence: Synthetic oligonucleotide
  Sense strand starting at position 2897 of SEQ ID NO: 1564097
uaguacauuccagaguuag

SEQ ID NO: 1855056 - RNA, 19 nt, Artificial Sequence
  Description of Artificial Sequence: Synthetic oligonucleotide
  Antisense strand to SEQ ID NO: 1855055
cuaacucuggaauguacua

SEQ ID NO: 1855057 - RNA, 19 nt, Artificial Sequence
  Description of Artificial Sequence: Synthetic oligonucleotide
  Sense strand starting at position 3324 of SEQ ID NO: 1564097
ccagucuaucacugggaca

SEQ ID NO: 1855058 - RNA, 19 nt, Artificial Sequence
  Description of Artificial Sequence: Synthetic oligonucleotide
  Antisense strand to SEQ ID NO: 1855057
ugucccagugauagacugg

SEQ ID NO: 1855059 - RNA, 19 nt, Artificial Sequence
  Description of Artificial Sequence: Synthetic oligonucleotide
  Sense strand starting at position 3326 of SEQ ID NO: 1564097
agucuaucacugggacauu

SEQ ID NO: 1855060 - RNA, 19 nt, Artificial Sequence
  Description of Artificial Sequence: Synthetic oligonucleotide
  Antisense strand to SEQ ID NO: 1855059
aaugucccagugauagacu

SEQ ID NO: 1855061 - RNA, 19 nt, Artificial Sequence
  Description of Artificial Sequence: Synthetic oligonucleotide
  Sense strand starting at position 3327 of SEQ ID NO: 1564097
gucuaucacugggacauuu

SEQ ID NO: 1855062 - RNA, 19 nt, Artificial Sequence
  Description of Artificial Sequence: Synthetic oligonucleotide
  Antisense strand to SEQ ID NO: 1855061
aaaugucccagugauagac

SEQ ID NO: 1855063 - RNA, 19 nt, Artificial Sequence
  Description of Artificial Sequence: Synthetic oligonucleotide
  Sense strand starting at position 3974 of SEQ ID NO: 1564097
ucaugaaucuuugcccaug

SEQ ID NO: 1855064 - RNA, 19 nt, Artificial Sequence
  Description of Artificial Sequence: Synthetic oligonucleotide
  Antisense strand to SEQ ID NO: 1855063
caugggcaaagauucauga

SEQ ID NO: 1855065 - RNA, 19 nt, Artificial Sequence
  Description of Artificial Sequence: Synthetic oligonucleotide
  Sense strand starting at position 4 of SEQ ID NO: 1564098
ggaacacuaucaucgguaa

SEQ ID NO: 1855066 - RNA, 19 nt, Artificial Sequence
  Description of Artificial Sequence: Synthetic oligonucleotide
  Antisense strand to SEQ ID NO: 1855065
uuaccgaugauaguguucc

SEQ ID NO: 1855067 - RNA, 19 nt, Artificial Sequence
  Description of Artificial Sequence: Synthetic oligonucleotide
  Sense strand starting at position 5 of SEQ ID NO: 1564098
gaacacuaucaucgguaau

SEQ ID NO: 1855068 - RNA, 19 nt, Artificial Sequence
  Description of Artificial Sequence: Synthetic oligonucleotide
  Antisense strand to SEQ ID NO: 1855067
auuaccgaugauaguguuc

SEQ ID NO: 1855069 - RNA, 19 nt, Artificial Sequence
  Description of Artificial Sequence: Synthetic oligonucleotide
  Sense strand starting at position 7 of SEQ ID NO: 1564098
acacuaucaucgguaauua

SEQ ID NO: 1855070 - RNA, 19 nt, Artificial Sequence
  Description of Artificial Sequence: Synthetic oligonucleotide
  Antisense strand to SEQ ID NO: 1855069
uaauuaccgaugauagugu

SEQ ID NO: 1855071 - RNA, 19 nt, Artificial Sequence
  Description of Artificial Sequence: Synthetic oligonucleotide
  Sense strand starting at position 615 of SEQ ID NO: 1564098
cucccucuggcugaauaua

SEQ ID NO: 1855072 - RNA, 19 nt, Artificial Sequence
  Description of Artificial Sequence: Synthetic oligonucleotide
  Antisense strand to SEQ ID NO: 1855071
uauauucagccagagggag

SEQ ID NO: 1855073 - RNA, 19 nt, Artificial Sequence
  Description of Artificial Sequence: Synthetic oligonucleotide
  Sense strand starting at position 754 of SEQ ID NO: 1564098
uuaaacguuagcuaugaga

SEQ ID NO: 1855074 - RNA, 19 nt, Artificial Sequence
  Description of Artificial Sequence: Synthetic oligonucleotide
  Antisense strand to SEQ ID NO: 1855073
ucucauagcuaacguuuaa

SEQ ID NO: 1855075 - RNA, 19 nt, Artificial Sequence
  Description of Artificial Sequence: Synthetic oligonucleotide
  Sense strand starting at position 756 of SEQ ID NO: 1564098
aaacguuagcuaugagaca

SEQ ID NO: 1855076 - RNA, 19 nt, Artificial Sequence
  Description of Artificial Sequence: Synthetic oligonucleotide
  Antisense strand to SEQ ID NO: 1855075
ugucucauagcuaacguuu

SEQ ID NO: 1855077 - RNA, 19 nt, Artificial Sequence
  Description of Artificial Sequence: Synthetic oligonucleotide
  Sense strand starting at position 827 of SEQ ID NO: 1564098
ucaccuggccaugacuaaa

SEQ ID NO: 1855078 - RNA, 19 nt, Artificial Sequence
  Description of Artificial Sequence: Synthetic oligonucleotide
  Antisense strand to SEQ ID NO: 1855077
uuuagucauggccagguga

SEQ ID NO: 1855079 - RNA, 19 nt, Artificial Sequence
  Description of Artificial Sequence: Synthetic oligonucleotide
  Sense strand starting at position 1144 of SEQ ID NO: 1564098
uggagagaucuugguuagc

SEQ ID NO: 1855080 - RNA, 19 nt, Artificial Sequence
  Description of Artificial Sequence: Synthetic oligonucleotide
  Antisense strand to SEQ ID NO: 1855079
gcuaaccaagaucucucca

SEQ ID NO: 1855081 - RNA, 19 nt, Artificial Sequence
  Description of Artificial Sequence: Synthetic oligonucleotide
  Sense strand starting at position 1146 of SEQ ID NO: 1564098
gagagaucuugguuagcag

SEQ ID NO: 1855082 - RNA, 19 nt, Artificial Sequence
  Description of Artificial Sequence: Synthetic oligonucleotide
  Antisense strand to SEQ ID NO: 1855081
cugcuaaccaagaucucuc

SEQ ID NO: 1855083 - RNA, 19 nt, Artificial Sequence
  Description of Artificial Sequence: Synthetic oligonucleotide
  Sense strand starting at position 1236 of SEQ ID NO: 1564098
gacagugcucuugacagac

SEQ ID NO: 1855084 - RNA, 19 nt, Artificial Sequence
  Description of Artificial Sequence: Synthetic oligonucleotide
  Antisense strand to SEQ ID NO: 1855083
gucugucaagagcacuguc

SEQ ID NO: 1855085 - RNA, 19 nt, Artificial Sequence
  Description of Artificial Sequence: Synthetic oligonucleotide
  Sense strand starting at position 1416 of SEQ ID NO: 1564098
gguaccucacugcagaaau

SEQ ID NO: 1855086 - RNA, 19 nt, Artificial Sequence
  Description of Artificial Sequence: Synthetic oligonucleotide
  Antisense strand to SEQ ID NO: 1855085
auuucugcagugagguacc

SEQ ID NO: 1855087 - RNA, 19 nt, Artificial Sequence
  Description of Artificial Sequence: Synthetic oligonucleotide
  Sense strand starting at position 1506 of SEQ ID NO: 1564098
ugucgauagugaucagaga

SEQ ID NO: 1855088 - RNA, 19 nt, Artificial Sequence
  Description of Artificial Sequence: Synthetic oligonucleotide
  Antisense strand to SEQ ID NO: 1855087
ucucugaucacuaucgaca

SEQ ID NO: 1855089 - RNA, 19 nt, Artificial Sequence
  Description of Artificial Sequence: Synthetic oligonucleotide
  Sense strand starting at position 1507 of SEQ ID NO: 1564098
gucgauagugaucagagag

SEQ ID NO: 1855090 - RNA, 19 nt, Artificial Sequence
  Description of Artificial Sequence: Synthetic oligonucleotide
  Antisense strand to SEQ ID NO: 1855089
cucucugaucacuaucgac

SEQ ID NO: 1855091 - RNA, 19 nt, Artificial Sequence
  Description of Artificial Sequence: Synthetic oligonucleotide
  Sense strand starting at position 1637 of SEQ ID NO: 1564098
agaaauacccuucggcuau

SEQ ID NO: 1855092 - RNA, 19 nt, Artificial Sequence
  Description of Artificial Sequence: Synthetic oligonucleotide
  Antisense strand to SEQ ID NO: 1855091
auagccgaaggguauuucu

SEQ ID NO: 1855093 - RNA, 19 nt, Artificial Sequence
  Description of Artificial Sequence: Synthetic oligonucleotide
  Sense strand starting at position 1814 of SEQ ID NO: 1564098
acagauguauggccuacuu

SEQ ID NO: 1855094 - RNA, 19 nt, Artificial Sequence
  Description of Artificial Sequence: Synthetic oligonucleotide
  Antisense strand to SEQ ID NO: 1855093
aaguaggccauacaucugu

SEQ ID NO: 1855095 - RNA, 19 nt, Artificial Sequence
  Description of Artificial Sequence: Synthetic oligonucleotide
  Sense strand starting at position 1816 of SEQ ID NO: 1564098
agauguauggccuacuuac

SEQ ID NO: 1855096 - RNA, 19 nt, Artificial Sequence
  Description of Artificial Sequence: Synthetic oligonucleotide
  Antisense strand to SEQ ID NO: 1855095
guaaguaggccauacaucu

SEQ ID NO: 1855097 - RNA, 19 nt, Artificial Sequence
  Description of Artificial Sequence: Synthetic oligonucleotide
  Sense strand starting at position 1885 of SEQ ID NO: 1564098
uucugugaaguaugaaaug

SEQ ID NO: 1855098 - RNA, 19 nt, Artificial Sequence
  Description of Artificial Sequence: Synthetic oligonucleotide
  Antisense strand to SEQ ID NO: 1855097
cauuucauacuucacagaa

SEQ ID NO: 1855099 - RNA, 19 nt, Artificial Sequence
  Description of Artificial Sequence: Synthetic oligonucleotide
  Sense strand starting at position 1890 of SEQ ID NO: 1564098
ugaaguaugaaaugguaau

SEQ ID NO: 1855100 - RNA, 19 nt, Artificial Sequence
  Description of Artificial Sequence: Synthetic oligonucleotide
  Antisense strand to SEQ ID NO: 1855099
auuaccauuucauacuuca

SEQ ID NO: 1855101 - RNA, 19 nt, Artificial Sequence
  Description of Artificial Sequence: Synthetic oligonucleotide
  Sense strand starting at position 1904 of SEQ ID NO: 1564098
guaauuucuggcugugucu

SEQ ID NO: 1855102 - RNA, 19 nt, Artificial Sequence
  Description of Artificial Sequence: Synthetic oligonucleotide
  Antisense strand to SEQ ID NO: 1855101
agacacagccagaaauuac

SEQ ID NO: 1855103 - RNA, 19 nt, Artificial Sequence
  Description of Artificial Sequence: Synthetic oligonucleotide
  Sense strand starting at position 2077 of SEQ ID NO: 1564098
gcacuuauuucugucgcaa

SEQ ID NO: 1855104 - RNA, 19 nt, Artificial Sequence
  Description of Artificial Sequence: Synthetic oligonucleotide
  Antisense strand to SEQ ID NO: 1855103
uugcgacagaaauaagugc

SEQ ID NO: 1855105 - RNA, 19 nt, Artificial Sequence
  Description of Artificial Sequence: Synthetic oligonucleotide
  Sense strand starting at position 2122 of SEQ ID NO: 1564098
ggcacuugagaguguggaa

SEQ ID NO: 1855106 - RNA, 19 nt, Artificial Sequence
  Description of Artificial Sequence: Synthetic oligonucleotide
  Antisense strand to SEQ ID NO: 1855105
uuccacacucucaagugcc

SEQ ID NO: 1855107 - RNA, 19 nt, Artificial Sequence
  Description of Artificial Sequence: Synthetic oligonucleotide
  Sense strand starting at position 2131 of SEQ ID NO: 1564098
gaguguggaaccuguauga

SEQ ID NO: 1855108 - RNA, 19 nt, Artificial Sequence
  Description of Artificial Sequence: Synthetic oligonucleotide
  Antisense strand to SEQ ID NO: 1855107
ucauacagguuccacacuc

SEQ ID NO: 1855109 - RNA, 19 nt, Artificial Sequence
  Description of Artificial Sequence: Synthetic oligonucleotide
  Sense strand starting at position 2247 of SEQ ID NO: 1564098
uggagauuauuugagacag

SEQ ID NO: 1855110 - RNA, 19 nt, Artificial Sequence
  Description of Artificial Sequence: Synthetic oligonucleotide
  Antisense strand to SEQ ID NO: 1855109
cugucucaaauaaucucca

SEQ ID NO: 1855111 - RNA, 19 nt, Artificial Sequence
  Description of Artificial Sequence: Synthetic oligonucleotide
  Sense strand starting at position 2249 of SEQ ID NO: 1564098
gagauuauuugagacagcu

SEQ ID NO: 1855112 - RNA, 19 nt, Artificial Sequence
  Description of Artificial Sequence: Synthetic oligonucleotide
  Antisense strand to SEQ ID NO: 1855111
agcugucucaaauaaucuc

SEQ ID NO: 1855113 - RNA, 19 nt, Artificial Sequence
  Description of Artificial Sequence: Synthetic oligonucleotide
  Sense strand starting at position 2395 of SEQ ID NO: 1564098
ggacaaaccucgcccugaa

SEQ ID NO: 1855114 - RNA, 19 nt, Artificial Sequence
  Description of Artificial Sequence: Synthetic oligonucleotide
  Antisense strand to SEQ ID NO: 1855113
uucagggcgagguuugucc

SEQ ID NO: 1855115 - RNA, 19 nt, Artificial Sequence
  Description of Artificial Sequence: Synthetic oligonucleotide
  Sense strand starting at position 2545 of SEQ ID NO: 1564098
ggcucagugaagcaugaau

SEQ ID NO: 1855116 - RNA, 19 nt, Artificial Sequence
  Description of Artificial Sequence: Synthetic oligonucleotide
  Antisense strand to SEQ ID NO: 1855115
auucaugcuucacugagcc

SEQ ID NO: 1855117 - RNA, 19 nt, Artificial Sequence
  Description of Artificial Sequence: Synthetic oligonucleotide
  Sense strand starting at position 2547 of SEQ ID NO: 1564098
cucagugaagcaugaauua

SEQ ID NO: 1855118 - RNA, 19 nt, Artificial Sequence
  Description of Artificial Sequence: Synthetic oligonucleotide
  Antisense strand to SEQ ID NO: 1855117
uaauucaugcuucacugag

SEQ ID NO: 1855119 - RNA, 19 nt, Artificial Sequence
  Description of Artificial Sequence: Synthetic oligonucleotide
  Sense strand starting at position 2706 of SEQ ID NO: 1564098
auuuacuucuagucguaua

SEQ ID NO: 1855120 - RNA, 19 nt, Artificial Sequence
  Description of Artificial Sequence: Synthetic oligonucleotide
  Antisense strand to SEQ ID NO: 1855119
uauacgacuagaaguaaau

SEQ ID NO: 1855121 - RNA, 19 nt, Artificial Sequence
  Description of Artificial Sequence: Synthetic oligonucleotide
  Sense strand starting at position 2757 of SEQ ID NO: 1564098
uuucgaauguuacucaaau

SEQ ID NO: 1855122 - RNA, 19 nt, Artificial Sequence
  Description of Artificial Sequence: Synthetic oligonucleotide
  Antisense strand to SEQ ID NO: 1855121
auuugaguaacauucgaaa

SEQ ID NO: 1855123 - RNA, 19 nt, Artificial Sequence
  Description of Artificial Sequence: Synthetic oligonucleotide
  Sense strand starting at position 2758 of SEQ ID NO: 1564098
uucgaauguuacucaaauc

SEQ ID NO: 1855124 - RNA, 19 nt, Artificial Sequence
  Description of Artificial Sequence: Synthetic oligonucleotide
  Antisense strand to SEQ ID NO: 1855123
gauuugaguaacauucgaa

SEQ ID NO: 1855125 - RNA, 19 nt, Artificial Sequence
  Description of Artificial Sequence: Synthetic oligonucleotide
  Sense strand starting at position 2855 of SEQ ID NO: 1564098
agcgaacuucuugaccaaa

SEQ ID NO: 1855126 - RNA, 19 nt, Artificial Sequence
  Description of Artificial Sequence: Synthetic oligonucleotide
  Antisense strand to SEQ ID NO: 1855125
uuuggucaagaaguucgcu

SEQ ID NO: 1855127 - RNA, 19 nt, Artificial Sequence
  Description of Artificial Sequence: Synthetic oligonucleotide
  Sense strand starting at position 2857 of SEQ ID NO: 1564098
cgaacuucuugaccaaauu

SEQ ID NO: 1855128 - RNA, 19 nt, Artificial Sequence
  Description of Artificial Sequence: Synthetic oligonucleotide
  Antisense strand to SEQ ID NO: 1855127
aauuuggucaagaaguucg

SEQ ID NO: 1855129 - RNA, 19 nt, Artificial Sequence
  Description of Artificial Sequence: Synthetic oligonucleotide
  Sense strand starting at position 2883 of SEQ ID NO: 1564098
ccuccugaauuagugagau

SEQ ID NO: 1855130 - RNA, 19 nt, Artificial Sequence
  Description of Artificial Sequence: Synthetic oligonucleotide
  Antisense strand to SEQ ID NO: 1855129
aucucacuaauucaggagg

SEQ ID NO: 1855131 - RNA, 19 nt, Artificial Sequence
  Description of Artificial Sequence: Synthetic oligonucleotide
  Sense strand starting at position 2891 of SEQ ID NO: 1564098
auuagugagaucugaauug

SEQ ID NO: 1855132 - RNA, 19 nt, Artificial Sequence
  Description of Artificial Sequence: Synthetic oligonucleotide
  Antisense strand to SEQ ID NO: 1855131
caauucagaucucacuaau

SEQ ID NO: 1855133 - RNA, 19 nt, Artificial Sequence
  Description of Artificial Sequence: Synthetic oligonucleotide
  Sense strand starting at position 2973 of SEQ ID NO: 1564098
gccuauugagaucaacgau

SEQ ID NO: 1855134 - RNA, 19 nt, Artificial Sequence
  Description of Artificial Sequence: Synthetic oligonucleotide
  Antisense strand to SEQ ID NO: 1855133
aucguugaucucaauaggc

SEQ ID NO: 1855135 - RNA, 19 nt, Artificial Sequence
  Description of Artificial Sequence: Synthetic oligonucleotide
  Sense strand starting at position 3641 of SEQ ID NO: 1564098
ucaagugugcugggaggaa

SEQ ID NO: 1855136 - RNA, 19 nt, Artificial Sequence
  Description of Artificial Sequence: Synthetic oligonucleotide
  Antisense strand to SEQ ID NO: 1855135
uuccucccagcacacuuga

SEQ ID NO: 1855137 - RNA, 19 nt, Artificial Sequence
  Description of Artificial Sequence: Synthetic oligonucleotide
  Sense strand starting at position 3708 of SEQ ID NO: 1564098
uugggagacuccuuaaagu

SEQ ID NO: 1855138 - RNA, 19 nt, Artificial Sequence
  Description of Artificial Sequence: Synthetic oligonucleotide
  Antisense strand to SEQ ID NO: 1855137
acuuuaaggagucucccaa

SEQ ID NO: 1855139 - RNA, 19 nt, Artificial Sequence
  Description of Artificial Sequence: Synthetic oligonucleotide
  Sense strand starting at position 3875 of SEQ ID NO: 1564098
gauugugaagauggucaca

SEQ ID NO: 1855140 - RNA, 19 nt, Artificial Sequence
  Description of Artificial Sequence: Synthetic oligonucleotide
  Antisense strand to SEQ ID NO: 1855139
ugugaccaucuucacaauc

SEQ ID NO: 1855141 - RNA, 19 nt, Artificial Sequence
  Description of Artificial Sequence: Synthetic oligonucleotide
  Sense strand starting at position 3877 of SEQ ID NO: 1564098
uugugaagauggucacaca

SEQ ID NO: 1855142 - RNA, 19 nt, Artificial Sequence
  Description of Artificial Sequence: Synthetic oligonucleotide
  Antisense strand to SEQ ID NO: 1855141
ugugugaccaucuucacaa

SEQ ID NO: 1855143 - RNA, 19 nt, Artificial Sequence
  Description of Artificial Sequence: Synthetic oligonucleotide
  Sense strand starting at position 3924 of SEQ ID NO: 1564098
cugggauacucauuagguc

SEQ ID NO: 1855144 - RNA, 19 nt, Artificial Sequence
  Description of Artificial Sequence: Synthetic oligonucleotide
  Antisense strand to SEQ ID NO: 1855143
gaccuaaugaguaucccag

SEQ ID NO: 1855145 - RNA, 19 nt, Artificial Sequence
  Description of Artificial Sequence: Synthetic oligonucleotide
  Sense strand starting at position 684 of SEQ ID NO: 1564099
agcuaucuuucccuaggaa

SEQ ID NO: 1855146 - RNA, 19 nt, Artificial Sequence
  Description of Artificial Sequence: Synthetic oligonucleotide
  Antisense strand to SEQ ID NO: 1855145
uuccuagggaaagauagcu

SEQ ID NO: 1855147 - RNA, 19 nt, Artificial Sequence
  Description of Artificial Sequence: Synthetic oligonucleotide
  Sense strand starting at position 711 of SEQ ID NO: 1564099
caagccauugccgaugaau

SEQ ID NO: 1855148 - RNA, 19 nt, Artificial Sequence
  Description of Artificial Sequence: Synthetic oligonucleotide
  Antisense strand to SEQ ID NO: 1855147
auucaucggcaauggcuug

SEQ ID NO: 1855149 - RNA, 19 nt, Artificial Sequence
  Description of Artificial Sequence: Synthetic oligonucleotide
  Sense strand starting at position 714 of SEQ ID NO: 1564099
gccauugccgaugaauaua

SEQ ID NO: 1855150 - RNA, 19 nt, Artificial Sequence
  Description of Artificial Sequence: Synthetic oligonucleotide
  Antisense strand to SEQ ID NO: 1855149
uauauucaucggcaauggc

SEQ ID NO: 1855151 - RNA, 19 nt, Artificial Sequence
  Description of Artificial Sequence: Synthetic oligonucleotide
  Sense strand starting at position 756 of SEQ ID NO: 1564099
cggcacucuccucauauau

SEQ ID NO: 1855152 - RNA, 19 nt, Artificial Sequence
  Description of Artificial Sequence: Synthetic oligonucleotide
  Antisense strand to SEQ ID NO: 1855151
auauaugaggagagugccg

SEQ ID NO: 1855153 - RNA, 19 nt, Artificial Sequence
  Description of Artificial Sequence: Synthetic oligonucleotide
  Sense strand starting at position 1057 of SEQ ID NO: 1564099
ugguuuauuuagggaauuu

SEQ ID NO: 1855154 - RNA, 19 nt, Artificial Sequence
  Description of Artificial Sequence: Synthetic oligonucleotide
  Antisense strand to SEQ ID NO: 1855153
aaauucccuaaauaaacca

SEQ ID NO: 1855155 - RNA, 19 nt, Artificial Sequence
  Description of Artificial Sequence: Synthetic oligonucleotide
  Sense strand starting at position 1202 of SEQ ID NO: 1564099
cuccauacaugaguacaua

SEQ ID NO: 1855156 - RNA, 19 nt, Artificial Sequence
  Description of Artificial Sequence: Synthetic oligonucleotide
  Antisense strand to SEQ ID NO: 1855155
uauguacucauguauggag

SEQ ID NO: 1855157 - RNA, 19 nt, Artificial Sequence
  Description of Artificial Sequence: Synthetic oligonucleotide
  Sense strand starting at position 1445 of SEQ ID NO: 1564099
gcacaaacaucuguaauug

SEQ ID NO: 1855158 - RNA, 19 nt, Artificial Sequence
  Description of Artificial Sequence: Synthetic oligonucleotide
  Antisense strand to SEQ ID NO: 1855157
caauuacagauguuugugc

SEQ ID NO: 1855159 - RNA, 19 nt, Artificial Sequence
  Description of Artificial Sequence: Synthetic oligonucleotide
  Sense strand starting at position 1463 of SEQ ID NO: 1564099
gcuaaacaucucugugaca

SEQ ID NO: 1855160 - RNA, 19 nt, Artificial Sequence
  Description of Artificial Sequence: Synthetic oligonucleotide
  Antisense strand to SEQ ID NO: 1855159
ugucacagagauguuuagc

SEQ ID NO: 1855161 - RNA, 19 nt, Artificial Sequence
  Description of Artificial Sequence: Synthetic oligonucleotide
  Sense strand starting at position 1475 of SEQ ID NO: 1564099
ugugacaugguguaacagu

SEQ ID NO: 1855162 - RNA, 19 nt, Artificial Sequence
  Description of Artificial Sequence: Synthetic oligonucleotide
  Antisense strand to SEQ ID NO: 1855161
acuguuacaccaugucaca

SEQ ID NO: 1855163 - RNA, 19 nt, Artificial Sequence
  Description of Artificial Sequence: Synthetic oligonucleotide
  Sense strand starting at position 1490 of SEQ ID NO: 1564099
caguuaccgcuugugcaaa

SEQ ID NO: 1855164 - RNA, 19 nt, Artificial Sequence
  Description of Artificial Sequence: Synthetic oligonucleotide
  Antisense strand to SEQ ID NO: 1855163
uuugcacaagcgguaacug

SEQ ID NO: 1855165 - RNA, 19 nt, Artificial Sequence
  Description of Artificial Sequence: Synthetic oligonucleotide
  Sense strand starting at position 1502 of SEQ ID NO: 1564099
gugcaaacugcccaucuaa

SEQ ID NO: 1855166 - RNA, 19 nt, Artificial Sequence
  Description of Artificial Sequence: Synthetic oligonucleotide
  Antisense strand to SEQ ID NO: 1855165
uuagaugggcaguuugcac

SEQ ID NO: 1855167 - RNA, 19 nt, Artificial Sequence
  Description of Artificial Sequence: Synthetic oligonucleotide
  Sense strand starting at position 1626 of SEQ ID NO: 1564099
gcuaaauagcuccagagug

SEQ ID NO: 1855168 - RNA, 19 nt, Artificial Sequence
  Description of Artificial Sequence: Synthetic oligonucleotide
  Antisense strand to SEQ ID NO: 1855167
cacucuggagcuauuuagc

SEQ ID NO: 1855169 - RNA, 19 nt, Artificial Sequence
  Description of Artificial Sequence: Synthetic oligonucleotide
  Sense strand starting at position 1631 of SEQ ID NO: 1564099
auagcuccagagugacauu

SEQ ID NO: 1855170 - RNA, 19 nt, Artificial Sequence
  Description of Artificial Sequence: Synthetic oligonucleotide
  Antisense strand to SEQ ID NO: 1855169
aaugucacucuggagcuau

SEQ ID NO: 1855171 - RNA, 19 nt, Artificial Sequence
  Description of Artificial Sequence: Synthetic oligonucleotide
  Sense strand starting at position 1658 of SEQ ID NO: 1564099
gcaaauaauccguauacuu

SEQ ID NO: 1855172 - RNA, 19 nt, Artificial Sequence
  Description of Artificial Sequence: Synthetic oligonucleotide
  Antisense strand to SEQ ID NO: 1855171
aaguauacggauuauuugc

SEQ ID NO: 1855173 - RNA, 19 nt, Artificial Sequence
  Description of Artificial Sequence: Synthetic oligonucleotide
  Sense strand starting at position 1665 of SEQ ID NO: 1564099
auccguauacuugauaggu

SEQ ID NO: 1855174 - RNA, 19 nt, Artificial Sequence
  Description of Artificial Sequence: Synthetic oligonucleotide
  Antisense strand to SEQ ID NO: 1855173
accuaucaaguauacggau

SEQ ID NO: 1855175 - RNA, 19 nt, Artificial Sequence
  Description of Artificial Sequence: Synthetic oligonucleotide
  Sense strand starting at position 2065 of SEQ ID NO: 1564099
ggguggcuucgagagaagu

SEQ ID NO: 1855176 - RNA, 19 nt, Artificial Sequence
  Description of Artificial Sequence: Synthetic oligonucleotide
  Antisense strand to SEQ ID NO: 1855175
acuucucucgaagccaccc

SEQ ID NO: 1855177 - RNA, 19 nt, Artificial Sequence
  Description of Artificial Sequence: Synthetic oligonucleotide
  Sense strand starting at position 2181 of SEQ ID NO: 1564099
uuuggcaagaccuagugau

SEQ ID NO: 1855178 - RNA, 19 nt, Artificial Sequence
  Description of Artificial Sequence: Synthetic oligonucleotide
  Antisense strand to SEQ ID NO: 1855177
aucacuaggucuugccaaa

SEQ ID NO: 1855179 - RNA, 19 nt, Artificial Sequence
  Description of Artificial Sequence: Synthetic oligonucleotide
  Sense strand starting at position 2281 of SEQ ID NO: 1564099
ucuagaauauagucuguau

SEQ ID NO: 1855180 - RNA, 19 nt, Artificial Sequence
  Description of Artificial Sequence: Synthetic oligonucleotide
  Antisense strand to SEQ ID NO: 1855179
auacagacuauauucuaga

SEQ ID NO: 1855181 - RNA, 19 nt, Artificial Sequence
  Description of Artificial Sequence: Synthetic oligonucleotide
  Sense strand starting at position 2284 of SEQ ID NO: 1564099
agaauauagucuguauaug

SEQ ID NO: 1855182 - RNA, 19 nt, Artificial Sequence
  Description of Artificial Sequence: Synthetic oligonucleotide
  Antisense strand to SEQ ID NO: 1855181
cauauacagacuauauucu

SEQ ID NO: 1855183 - RNA, 19 nt, Artificial Sequence
  Description of Artificial Sequence: Synthetic oligonucleotide
  Sense strand starting at position 2497 of SEQ ID NO: 1564099
auccuaacagguugaaaug

SEQ ID NO: 1855184 - RNA, 19 nt, Artificial Sequence
  Description of Artificial Sequence: Synthetic oligonucleotide
  Antisense strand to SEQ ID NO: 1855183
cauuucaaccuguuaggau

SEQ ID NO: 1855185 - RNA, 19 nt, Artificial Sequence
  Description of Artificial Sequence: Synthetic oligonucleotide
  Sense strand starting at position 2664 of SEQ ID NO: 1564099
cuuugugauccugaacaac

SEQ ID NO: 1855186 - RNA, 19 nt, Artificial Sequence
  Description of Artificial Sequence: Synthetic oligonucleotide
  Antisense strand to SEQ ID NO: 1855185
guuguucaggaucacaaag

SEQ ID NO: 1855187 - RNA, 19 nt, Artificial Sequence
  Description of Artificial Sequence: Synthetic oligonucleotide
  Sense strand starting at position 2863 of SEQ ID NO: 1564099
ccaaguaaacaguauccuu

SEQ ID NO: 1855188 - RNA, 19 nt, Artificial Sequence
  Description of Artificial Sequence: Synthetic oligonucleotide
  Antisense strand to SEQ ID NO: 1855187
aaggauacuguuuacuugg

SEQ ID NO: 1855189 - RNA, 19 nt, Artificial Sequence
  Description of Artificial Sequence: Synthetic oligonucleotide
  Sense strand starting at position 2901 of SEQ ID NO: 1564099
augcuuagacuuugaugac

SEQ ID NO: 1855190 - RNA, 19 nt, Artificial Sequence
  Description of Artificial Sequence: Synthetic oligonucleotide
  Antisense strand to SEQ ID NO: 1855189
gucaucaaagucuaagcau

SEQ ID NO: 1855191 - RNA, 19 nt, Artificial Sequence
  Description of Artificial Sequence: Synthetic oligonucleotide
  Sense strand starting at position 3042 of SEQ ID NO: 1564099
cugucccaguccucaagaa

SEQ ID NO: 1855192 - RNA, 19 nt, Artificial Sequence
  Description of Artificial Sequence: Synthetic oligonucleotide
  Antisense strand to SEQ ID NO: 1855191
uucuugaggacugggacag

SEQ ID NO: 1855193 - RNA, 19 nt, Artificial Sequence
  Description of Artificial Sequence: Synthetic oligonucleotide
  Sense strand starting at position 3043 of SEQ ID NO: 1564099
ugucccaguccucaagaaa

SEQ ID NO: 1855194 - RNA, 19 nt, Artificial Sequence
  Description of Artificial Sequence: Synthetic oligonucleotide
  Antisense strand to SEQ ID NO: 1855193
uuucuugaggacugggaca

SEQ ID NO: 1855195 - RNA, 19 nt, Artificial Sequence
  Description of Artificial Sequence: Synthetic oligonucleotide
  Sense strand starting at position 3062 of SEQ ID NO: 1564099
uuuacaaucuccuugggua

SEQ ID NO: 1855196 - RNA, 19 nt, Artificial Sequence
  Description of Artificial Sequence: Synthetic oligonucleotide
  Antisense strand to SEQ ID NO: 1855195
uacccaaggagauuguaaa

SEQ ID NO: 1855197 - RNA, 19 nt, Artificial Sequence
  Description of Artificial Sequence: Synthetic oligonucleotide
  Sense strand starting at position 3063 of SEQ ID NO: 1564099
uuacaaucuccuuggguaa

SEQ ID NO: 1855198 - RNA, 19 nt, Artificial Sequence
  Description of Artificial Sequence: Synthetic oligonucleotide
  Antisense strand to SEQ ID NO: 1855197
uuacccaaggagauuguaa

SEQ ID NO: 1855199 - RNA, 19 nt, Artificial Sequence
  Description of Artificial Sequence: Synthetic oligonucleotide
  Sense strand starting at position 3126 of SEQ ID NO: 1564099
aggugaugucacuagguag

SEQ ID NO: 1855200 - RNA, 19 nt, Artificial Sequence
  Description of Artificial Sequence: Synthetic oligonucleotide
  Antisense strand to SEQ ID NO: 1855199
cuaccuagugacaucaccu

SEQ ID NO: 1855201 - RNA, 19 nt, Artificial Sequence
  Description of Artificial Sequence: Synthetic oligonucleotide
  Sense strand starting at position 3129 of SEQ ID NO: 1564099
ugaugucacuagguaguaa

SEQ ID NO: 1855202 - RNA, 19 nt, Artificial Sequence
  Description of Artificial Sequence: Synthetic oligonucleotide
  Antisense strand to SEQ ID NO: 1855201
uuacuaccuagugacauca

SEQ ID NO: 1855203 - RNA, 19 nt, Artificial Sequence
  Description of Artificial Sequence: Synthetic oligonucleotide
  Sense strand starting at position 3160 of SEQ ID NO: 1564099
auacaagugcuacagaauu

SEQ ID NO: 1855204 - RNA, 19 nt, Artificial Sequence
  Description of Artificial Sequence: Synthetic oligonucleotide
  Antisense strand to SEQ ID NO: 1855203
aauucuguagcacuuguau

SEQ ID NO: 1855205 - RNA, 19 nt, Artificial Sequence
  Description of Artificial Sequence: Synthetic oligonucleotide
  Sense strand starting at position 3397 of SEQ ID NO: 1564099
agaacuuucgagcggagaa

SEQ ID NO: 1855206 - RNA, 19 nt, Artificial Sequence
  Description of Artificial Sequence: Synthetic oligonucleotide
  Antisense strand to SEQ ID NO: 1855205
uucuccgcucgaaaguucu

SEQ ID NO: 1855207 - RNA, 19 nt, Artificial Sequence
  Description of Artificial Sequence: Synthetic oligonucleotide
  Sense strand starting at position 3398 of SEQ ID NO: 1564099
gaacuuucgagcggagaaa

SEQ ID NO: 1855208 - RNA, 19 nt, Artificial Sequence
  Description of Artificial Sequence: Synthetic oligonucleotide
  Antisense strand to SEQ ID NO: 1855207
uuucuccgcucgaaaguuc

SEQ ID NO: 1855209 - RNA, 19 nt, Artificial Sequence
  Description of Artificial Sequence: Synthetic oligonucleotide
  Sense strand starting at position 3407 of SEQ ID NO: 1564099
agcggagaaaccugacuaa

SEQ ID NO: 1855210 - RNA, 19 nt, Artificial Sequence
  Description of Artificial Sequence: Synthetic oligonucleotide
  Antisense strand to SEQ ID NO: 1855209
uuagucagguuucuccgcu

SEQ ID NO: 1855211 - RNA, 19 nt, Artificial Sequence
  Description of Artificial Sequence: Synthetic oligonucleotide
  Sense strand starting at position 3451 of SEQ ID NO: 1564099
gguuaacaucuauagcgau

SEQ ID NO: 1855212 - RNA, 19 nt, Artificial Sequence
  Description of Artificial Sequence: Synthetic oligonucleotide
  Antisense strand to SEQ ID NO: 1855211
aucgcuauagauguuaacc

SEQ ID NO: 1855213 - RNA, 19 nt, Artificial Sequence
  Description of Artificial Sequence: Synthetic oligonucleotide
  Sense strand starting at position 3457 of SEQ ID NO: 1564099
caucuauagcgauaaguau

SEQ ID NO: 1855214 - RNA, 19 nt, Artificial Sequence
  Description of Artificial Sequence: Synthetic oligonucleotide
  Antisense strand to SEQ ID NO: 1855213
auacuuaucgcuauagaug

SEQ ID NO: 1855215 - RNA, 19 nt, Artificial Sequence
  Description of Artificial Sequence: Synthetic oligonucleotide
  Sense strand starting at position 3463 of SEQ ID NO: 1564099
uagcgauaaguauggaauu

SEQ ID NO: 1855216 - RNA, 19 nt, Artificial Sequence
  Description of Artificial Sequence: Synthetic oligonucleotide
  Antisense strand to SEQ ID NO: 1855215
aauuccauacuuaucgcua

SEQ ID NO: 1855217 - RNA, 19 nt, Artificial Sequence
  Description of Artificial Sequence: Synthetic oligonucleotide
  Sense strand starting at position 3465 of SEQ ID NO: 1564099
gcgauaaguauggaauuaa

SEQ ID NO: 1855218 - RNA, 19 nt, Artificial Sequence
  Description of Artificial Sequence: Synthetic oligonucleotide
  Antisense strand to SEQ ID NO: 1855217
uuaauuccauacuuaucgc

SEQ ID NO: 1855219 - RNA, 19 nt, Artificial Sequence
  Description of Artificial Sequence: Synthetic oligonucleotide
  Sense strand starting at position 3736 of SEQ ID NO: 1564099
ugaauaaagcauggauguu

SEQ ID NO: 1855220 - RNA, 19 nt, Artificial Sequence
  Description of Artificial Sequence: Synthetic oligonucleotide
  Antisense strand to SEQ ID NO: 1855219
aacauccaugcuuuauuca

SEQ ID NO: 1855221 - RNA, 19 nt, Artificial Sequence
  Description of Artificial Sequence: Synthetic oligonucleotide
  Sense strand starting at position 3745 of SEQ ID NO: 1564099
cauggauguuagucaauaa

SEQ ID NO: 1855222 - RNA, 19 nt, Artificial Sequence
  Description of Artificial Sequence: Synthetic oligonucleotide
  Antisense strand to SEQ ID NO: 1855221
uuauugacuaacauccaug

SEQ ID NO: 1855223 - RNA, 19 nt, Artificial Sequence
  Description of Artificial Sequence: Synthetic oligonucleotide
  Sense strand starting at position 3765 of SEQ ID NO: 1564099
gauaauaugggccaggcau

SEQ ID NO: 1855224 - RNA, 19 nt, Artificial Sequence
  Description of Artificial Sequence: Synthetic oligonucleotide
  Antisense strand to SEQ ID NO: 1855223
augccuggcccauauuauc

SEQ ID NO: 1855225 - RNA, 19 nt, Artificial Sequence
  Description of Artificial Sequence: Synthetic oligonucleotide
  Sense strand starting at position 88 of SEQ ID NO: 1564100
uuugguuaccucgggagaa

SEQ ID NO: 1855226 - RNA, 19 nt, Artificial Sequence
  Description of Artificial Sequence: Synthetic oligonucleotide
  Antisense strand to SEQ ID NO: 1855225
uucucccgagguaaccaaa

SEQ ID NO: 1855227 - RNA, 19 nt, Artificial Sequence
  Description of Artificial Sequence: Synthetic oligonucleotide
  Sense strand starting at position 90 of SEQ ID NO: 1564100
ugguuaccucgggagaaau

SEQ ID NO: 1855228 - RNA, 19 nt, Artificial Sequence
  Description of Artificial Sequence: Synthetic oligonucleotide
  Antisense strand to SEQ ID NO: 1855227
auuucucccgagguaacca

SEQ ID NO: 1855229 - RNA, 19 nt, Artificial Sequence
  Description of Artificial Sequence: Synthetic oligonucleotide
  Sense strand starting at position 116 of SEQ ID NO: 1564100
uuacuaaaguggccuguaa

SEQ ID NO: 1855230 - RNA, 19 nt, Artificial Sequence
  Description of Artificial Sequence: Synthetic oligonucleotide
  Antisense strand to SEQ ID NO: 1855229
uuacaggccacuuuaguaa

SEQ ID NO: 1855231 - RNA, 19 nt, Artificial Sequence
  Description of Artificial Sequence: Synthetic oligonucleotide
  Sense strand starting at position 120 of SEQ ID NO: 1564100
uaaaguggccuguaagguu

SEQ ID NO: 1855232 - RNA, 19 nt, Artificial Sequence
  Description of Artificial Sequence: Synthetic oligonucleotide
  Antisense strand to SEQ ID NO: 1855231
aaccuuacaggccacuuua

SEQ ID NO: 1855233 - RNA, 19 nt, Artificial Sequence
  Description of Artificial Sequence: Synthetic oligonucleotide
  Sense strand starting at position 127 of SEQ ID NO: 1564100
gccuguaagguuuaaagua

SEQ ID NO: 1855234 - RNA, 19 nt, Artificial Sequence
  Description of Artificial Sequence: Synthetic oligonucleotide
  Antisense strand to SEQ ID NO: 1855233
uacuuuaaaccuuacaggc

SEQ ID NO: 1855235 - RNA, 19 nt, Artificial Sequence
  Description of Artificial Sequence: Synthetic oligonucleotide
  Sense strand starting at position 143 of SEQ ID NO: 1564100
guauauacuucugccaaug

SEQ ID NO: 1855236 - RNA, 19 nt, Artificial Sequence
  Description of Artificial Sequence: Synthetic oligonucleotide
  Antisense strand to SEQ ID NO: 1855235
cauuggcagaaguauauac

SEQ ID NO: 1855237 - RNA, 19 nt, Artificial Sequence
  Description of Artificial Sequence: Synthetic oligonucleotide
  Sense strand starting at position 189 of SEQ ID NO: 1564100
aaacaagagugagcuaagu

SEQ ID NO: 1855238 - RNA, 19 nt, Artificial Sequence
  Description of Artificial Sequence: Synthetic oligonucleotide
  Antisense strand to SEQ ID NO: 1855237
acuuagcucacucuuguuu

SEQ ID NO: 1855239 - RNA, 19 nt, Artificial Sequence
  Description of Artificial Sequence: Synthetic oligonucleotide
  Sense strand starting at position 191 of SEQ ID NO: 1564100
acaagagugagcuaagugu

SEQ ID NO: 1855240 - RNA, 19 nt, Artificial Sequence
  Description of Artificial Sequence: Synthetic oligonucleotide
  Antisense strand to SEQ ID NO: 1855239
acacuuagcucacucuugu

SEQ ID NO: 1855241 - RNA, 19 nt, Artificial Sequence
  Description of Artificial Sequence: Synthetic oligonucleotide
  Sense strand starting at position 195 of SEQ ID NO: 1564100
gagugagcuaaguguucug

SEQ ID NO: 1855242 - RNA, 19 nt, Artificial Sequence
  Description of Artificial Sequence: Synthetic oligonucleotide
  Antisense strand to SEQ ID NO: 1855241
cagaacacuuagcucacuc

SEQ ID NO: 1855243 - RNA, 19 nt, Artificial Sequence
  Description of Artificial Sequence: Synthetic oligonucleotide
  Sense strand starting at position 335 of SEQ ID NO: 1564100
ggucacagagcuuacagua

SEQ ID NO: 1855244 - RNA, 19 nt, Artificial Sequence
  Description of Artificial Sequence: Synthetic oligonucleotide
  Antisense strand to SEQ ID NO: 1855243
uacuguaagcucugugacc

SEQ ID NO: 1855245 - RNA, 19 nt, Artificial Sequence
  Description of Artificial Sequence: Synthetic oligonucleotide
  Sense strand starting at position 359 of SEQ ID NO: 1564100
gauaacuguuacgcacaaa

SEQ ID NO: 1855246 - RNA, 19 nt, Artificial Sequence
  Description of Artificial Sequence: Synthetic oligonucleotide
  Antisense strand to SEQ ID NO: 1855245
uuugugcguaacaguuauc

SEQ ID NO: 1855247 - RNA, 19 nt, Artificial Sequence
  Description of Artificial Sequence: Synthetic oligonucleotide
  Sense strand starting at position 401 of SEQ ID NO: 1564100
aaagguguuguaugagaaa

SEQ ID NO: 1855248 - RNA, 19 nt, Artificial Sequence
  Description of Artificial Sequence: Synthetic oligonucleotide
  Antisense strand to SEQ ID NO: 1855247
uuucucauacaacaccuuu

SEQ ID NO: 1855249 - RNA, 19 nt, Artificial Sequence
  Description of Artificial Sequence: Synthetic oligonucleotide
  Sense strand starting at position 619 of SEQ ID NO: 1564100
ucugaacauccugacuagu

SEQ ID NO: 1855250 - RNA, 19 nt, Artificial Sequence
  Description of Artificial Sequence: Synthetic oligonucleotide
  Antisense strand to SEQ ID NO: 1855249
acuagucaggauguucaga

SEQ ID NO: 1855251 - RNA, 19 nt, Artificial Sequence
  Description of Artificial Sequence: Synthetic oligonucleotide
  Sense strand starting at position 621 of SEQ ID NO: 1564100
ugaacauccugacuagugu

SEQ ID NO: 1855252 - RNA, 19 nt, Artificial Sequence
  Description of Artificial Sequence: Synthetic oligonucleotide
  Antisense strand to SEQ ID NO: 1855251
acacuagucaggauguuca

SEQ ID NO: 1855253 - RNA, 19 nt, Artificial Sequence
  Description of Artificial Sequence: Synthetic oligonucleotide
  Sense strand starting at position 622 of SEQ ID NO: 1564100
gaacauccugacuagugua

SEQ ID NO: 1855254 - RNA, 19 nt, Artificial Sequence
  Description of Artificial Sequence: Synthetic oligonucleotide
  Antisense strand to SEQ ID NO: 1855253
uacacuagucaggauguuc

SEQ ID NO: 1855255 - RNA, 19 nt, Artificial Sequence
  Description of Artificial Sequence: Synthetic oligonucleotide
  Sense strand starting at position 662 of SEQ ID NO: 1564100
acagaaaggucucacuuua

SEQ ID NO: 1855256 - RNA, 19 nt, Artificial Sequence
  Description of Artificial Sequence: Synthetic oligonucleotide
  Antisense strand to SEQ ID NO: 1855255
uaaagugagaccuuucugu

SEQ ID NO: 1855257 - RNA, 19 nt, Artificial Sequence
  Description of Artificial Sequence: Synthetic oligonucleotide
  Sense strand starting at position 669 of SEQ ID NO: 1564100
ggucucacuuuauuaugau

SEQ ID NO: 1855258 - RNA, 19 nt, Artificial Sequence
  Description of Artificial Sequence: Synthetic oligonucleotide
  Antisense strand to SEQ ID NO: 1855257
aucauaauaaagugagacc

SEQ ID NO: 1855259 - RNA, 19 nt, Artificial Sequence
  Description of Artificial Sequence: Synthetic oligonucleotide
  Sense strand starting at position 767 of SEQ ID NO: 1564100
ggcugucagcaagaacauu

SEQ ID NO: 1855260 - RNA, 19 nt, Artificial Sequence
  Description of Artificial Sequence: Synthetic oligonucleotide
  Antisense strand to SEQ ID NO: 1855259
aauguucuugcugacagcc

SEQ ID NO: 1855261 - RNA, 19 nt, Artificial Sequence
  Description of Artificial Sequence: Synthetic oligonucleotide
  Sense strand starting at position 779 of SEQ ID NO: 1564100
gaacauuaccuggguagac

SEQ ID NO: 1855262 - RNA, 19 nt, Artificial Sequence
  Description of Artificial Sequence: Synthetic oligonucleotide
  Antisense strand to SEQ ID NO: 1855261
gucuacccagguaauguuc

SEQ ID NO: 1855263 - RNA, 19 nt, Artificial Sequence
  Description of Artificial Sequence: Synthetic oligonucleotide
  Sense strand starting at position 821 of SEQ ID NO: 1564100
ucauaagugccuugccaau

SEQ ID NO: 1855264 - RNA, 19 nt, Artificial Sequence
  Description of Artificial Sequence: Synthetic oligonucleotide
  Antisense strand to SEQ ID NO: 1855263
auuggcaaggcacuuauga

SEQ ID NO: 1855265 - RNA, 19 nt, Artificial Sequence
  Description of Artificial Sequence: Synthetic oligonucleotide
  Sense strand starting at position 823 of SEQ ID NO: 1564100
auaagugccuugccaauaa

SEQ ID NO: 1855266 - RNA, 19 nt, Artificial Sequence
  Description of Artificial Sequence: Synthetic oligonucleotide
  Antisense strand to SEQ ID NO: 1855265
uuauuggcaaggcacuuau

SEQ ID NO: 1855267 - RNA, 19 nt, Artificial Sequence
  Description of Artificial Sequence: Synthetic oligonucleotide
  Sense strand starting at position 859 of SEQ ID NO: 1564100
gcagcaaggugguuccaau

SEQ ID NO: 1855268 - RNA, 19 nt, Artificial Sequence
  Description of Artificial Sequence: Synthetic oligonucleotide
  Antisense strand to SEQ ID NO: 1855267
auuggaaccaccuugcugc

SEQ ID NO: 1855269 - RNA, 19 nt, Artificial Sequence
  Description of Artificial Sequence: Synthetic oligonucleotide
  Sense strand starting at position 927 of SEQ ID NO: 1564100
gcuacuucgaacugauguu

SEQ ID NO: 1855270 - RNA, 19 nt, Artificial Sequence
  Description of Artificial Sequence: Synthetic oligonucleotide
  Antisense strand to SEQ ID NO: 1855269
aacaucaguucgaaguagc

SEQ ID NO: 1855271 - RNA, 19 nt, Artificial Sequence
  Description of Artificial Sequence: Synthetic oligonucleotide
  Sense strand starting at position 937 of SEQ ID NO: 1564100
acugauguuuacucaguaa

SEQ ID NO: 1855272 - RNA, 19 nt, Artificial Sequence
  Description of Artificial Sequence: Synthetic oligonucleotide
  Antisense strand to SEQ ID NO: 1855271
uuacugaguaaacaucagu

SEQ ID NO: 1855273 - RNA, 19 nt, Artificial Sequence
  Description of Artificial Sequence: Synthetic oligonucleotide
  Sense strand starting at position 941 of SEQ ID NO: 1564100
auguuuacucaguaaauca

SEQ ID NO: 1855274 - RNA, 19 nt, Artificial Sequence
  Description of Artificial Sequence: Synthetic oligonucleotide
  Antisense strand to SEQ ID NO: 1855273
ugauuuacugaguaaacau

SEQ ID NO: 1855275 - RNA, 19 nt, Artificial Sequence
  Description of Artificial Sequence: Synthetic oligonucleotide
  Sense strand starting at position 1511 of SEQ ID NO: 1564100
ggcgcaagugggagugaau

SEQ ID NO: 1855276 - RNA, 19 nt, Artificial Sequence
  Description of Artificial Sequence: Synthetic oligonucleotide
  Antisense strand to SEQ ID NO: 1855275
auucacucccacuugcgcc

SEQ ID NO: 1855277 - RNA, 19 nt, Artificial Sequence
  Description of Artificial Sequence: Synthetic oligonucleotide
  Sense strand starting at position 1960 of SEQ ID NO: 1564100
gcgaguggaaauugcgaaa

SEQ ID NO: 1855278 - RNA, 19 nt, Artificial Sequence
  Description of Artificial Sequence: Synthetic oligonucleotide
  Antisense strand to SEQ ID NO: 1855277
uuucgcaauuuccacucgc

SEQ ID NO: 1855279 - RNA, 19 nt, Artificial Sequence
  Description of Artificial Sequence: Synthetic oligonucleotide
  Sense strand starting at position 2517 of SEQ ID NO: 1564100
ggcaaucuggaaugaguuu

SEQ ID NO: 1855280 - RNA, 19 nt, Artificial Sequence
  Description of Artificial Sequence: Synthetic oligonucleotide
  Antisense strand to SEQ ID NO: 1855279
aaacucauuccagauugcc

SEQ ID NO: 1855281 - RNA, 19 nt, Artificial Sequence
  Description of Artificial Sequence: Synthetic oligonucleotide
  Sense strand starting at position 2634 of SEQ ID NO: 1564100
gcgaguuccgcacagagga

SEQ ID NO: 1855282 - RNA, 19 nt, Artificial Sequence
  Description of Artificial Sequence: Synthetic oligonucleotide
  Antisense strand to SEQ ID NO: 1855281
uccucugugcggaacucgc

SEQ ID NO: 1855283 - RNA, 19 nt, Artificial Sequence
  Description of Artificial Sequence: Synthetic oligonucleotide
  Sense strand starting at position 2767 of SEQ ID NO: 1564100
ucggguguucaggaauguu

SEQ ID NO: 1855284 - RNA, 19 nt, Artificial Sequence
  Description of Artificial Sequence: Synthetic oligonucleotide
  Antisense strand to SEQ ID NO: 1855283
aacauuccugaacacccga

SEQ ID NO: 1855285 - RNA, 19 nt, Artificial Sequence
  Description of Artificial Sequence: Synthetic oligonucleotide
  Sense strand starting at position 2775 of SEQ ID NO: 1564100
ucaggaauguucccgagcu

SEQ ID NO: 1855286 - RNA, 19 nt, Artificial Sequence
  Description of Artificial Sequence: Synthetic oligonucleotide
  Antisense strand to SEQ ID NO: 1855285
agcucgggaacauuccuga

SEQ ID NO: 1855287 - RNA, 19 nt, Artificial Sequence
  Description of Artificial Sequence: Synthetic oligonucleotide
  Sense strand starting at position 2777 of SEQ ID NO: 1564100
aggaauguucccgagcucu

SEQ ID NO: 1855288 - RNA, 19 nt, Artificial Sequence
  Description of Artificial Sequence: Synthetic oligonucleotide
  Antisense strand to SEQ ID NO: 1855287
agagcucgggaacauuccu

SEQ ID NO: 1855289 - RNA, 19 nt, Artificial Sequence
  Description of Artificial Sequence: Synthetic oligonucleotide
  Sense strand starting at position 2803 of SEQ ID NO: 1564100
ccaggaauccgcugagaug

SEQ ID NO: 1855290 - RNA, 19 nt, Artificial Sequence
  Description of Artificial Sequence: Synthetic oligonucleotide
  Antisense strand to SEQ ID NO: 1855289
caucucagcggauuccugg

SEQ ID NO: 1855291 - RNA, 19 nt, Artificial Sequence
  Description of Artificial Sequence: Synthetic oligonucleotide
  Sense strand starting at position 2845 of SEQ ID NO: 1564100
gcauuauugugccuuacug

SEQ ID NO: 1855292 - RNA, 19 nt, Artificial Sequence
  Description of Artificial Sequence: Synthetic oligonucleotide
  Antisense strand to SEQ ID NO: 1855291
caguaaggcacaauaaugc

SEQ ID NO: 1855293 - RNA, 19 nt, Artificial Sequence
  Description of Artificial Sequence: Synthetic oligonucleotide
  Sense strand starting at position 2912 of SEQ ID NO: 1564100
cagggaauccgugggcauu

SEQ ID NO: 1855294 - RNA, 19 nt, Artificial Sequence
  Description of Artificial Sequence: Synthetic oligonucleotide
  Antisense strand to SEQ ID NO: 1855293
aaugcccacggauucccug

SEQ ID NO: 1855295 - RNA, 19 nt, Artificial Sequence
  Description of Artificial Sequence: Synthetic oligonucleotide
  Sense strand starting at position 2925 of SEQ ID NO: 1564100
ggcauucgugggcaauuca

SEQ ID NO: 1855296 - RNA, 19 nt, Artificial Sequence
  Description of Artificial Sequence: Synthetic oligonucleotide
  Antisense strand to SEQ ID NO: 1855295
ugaauugcccacgaaugcc

SEQ ID NO: 1855297 - RNA, 19 nt, Artificial Sequence
  Description of Artificial Sequence: Synthetic oligonucleotide
  Sense strand starting at position 3323 of SEQ ID NO: 1564100
ccucaaagucagggucuua

SEQ ID NO: 1855298 - RNA, 19 nt, Artificial Sequence
  Description of Artificial Sequence: Synthetic oligonucleotide
  Antisense strand to SEQ ID NO: 1855297
uaagacccugacuuugagg

SEQ ID NO: 1855299 - RNA, 19 nt, Artificial Sequence
  Description of Artificial Sequence: Synthetic oligonucleotide
  Sense strand starting at position 3385 of SEQ ID NO: 1564100
gugugucaaaccgaucgaa

SEQ ID NO: 1855300 - RNA, 19 nt, Artificial Sequence
  Description of Artificial Sequence: Synthetic oligonucleotide
  Antisense strand to SEQ ID NO: 1855299
uucgaucgguuugacacac

SEQ ID NO: 1855301 - RNA, 19 nt, Artificial Sequence
  Description of Artificial Sequence: Synthetic oligonucleotide
  Sense strand starting at position 3388 of SEQ ID NO: 1564100
ugucaaaccgaucgaaaua

SEQ ID NO: 1855302 - RNA, 19 nt, Artificial Sequence
  Description of Artificial Sequence: Synthetic oligonucleotide
  Antisense strand to SEQ ID NO: 1855301
uauuucgaucgguuugaca

SEQ ID NO: 1855303 - RNA, 19 nt, Artificial Sequence
  Description of Artificial Sequence: Synthetic oligonucleotide
  Sense strand starting at position 3458 of SEQ ID NO: 1564100
guccuagugucaucaauau

SEQ ID NO: 1855304 - RNA, 19 nt, Artificial Sequence
  Description of Artificial Sequence: Synthetic oligonucleotide
  Antisense strand to SEQ ID NO: 1855303
auauugaugacacuaggac

SEQ ID NO: 1855305 - RNA, 19 nt, Artificial Sequence
  Description of Artificial Sequence: Synthetic oligonucleotide
  Sense strand starting at position 48 of SEQ ID NO: 1564102
aagagaaggugcgcucuua

SEQ ID NO: 1855306 - RNA, 19 nt, Artificial Sequence
  Description of Artificial Sequence: Synthetic oligonucleotide
  Antisense strand to SEQ ID NO: 1855305
uaagagcgcaccuucucuu

SEQ ID NO: 1855307 - RNA, 19 nt, Artificial Sequence
  Description of Artificial Sequence: Synthetic oligonucleotide
  Sense strand starting at position 109 of SEQ ID NO: 1564102
aagugaguuguacaguauu

SEQ ID NO: 1855308 - RNA, 19 nt, Artificial Sequence
  Description of Artificial Sequence: Synthetic oligonucleotide
  Antisense strand to SEQ ID NO: 1855307
aauacuguacaacucacuu

SEQ ID NO: 1855309 - RNA, 19 nt, Artificial Sequence
  Description of Artificial Sequence: Synthetic oligonucleotide
  Sense strand starting at position 112 of SEQ ID NO: 1564102
ugaguuguacaguauucca

SEQ ID NO: 1855310 - RNA, 19 nt, Artificial Sequence
  Description of Artificial Sequence: Synthetic oligonucleotide
  Antisense strand to SEQ ID NO: 1855309
uggaauacuguacaacuca

SEQ ID NO: 1855311 - RNA, 19 nt, Artificial Sequence
  Description of Artificial Sequence: Synthetic oligonucleotide
  Sense strand starting at position 120 of SEQ ID NO: 1564102
acaguauuccagggcucua

SEQ ID NO: 1855312 - RNA, 19 nt, Artificial Sequence
  Description of Artificial Sequence: Synthetic oligonucleotide
  Antisense strand to SEQ ID NO: 1855311
uagagcccuggaauacugu

SEQ ID NO: 1855313 - RNA, 19 nt, Artificial Sequence
  Description of Artificial Sequence: Synthetic oligonucleotide
  Sense strand starting at position 125 of SEQ ID NO: 1564102
auuccagggcucuaauaug

SEQ ID NO: 1855314 - RNA, 19 nt, Artificial Sequence
  Description of Artificial Sequence: Synthetic oligonucleotide
  Antisense strand to SEQ ID NO: 1855313
cauauuagagcccuggaau

SEQ ID NO: 1855315 - RNA, 19 nt, Artificial Sequence
  Description of Artificial Sequence: Synthetic oligonucleotide
  Sense strand starting at position 131 of SEQ ID NO: 1564102
gggcucuaauauguaacua

SEQ ID NO: 1855316 - RNA, 19 nt, Artificial Sequence
  Description of Artificial Sequence: Synthetic oligonucleotide
  Antisense strand to SEQ ID NO: 1855315
uaguuacauauuagagccc

SEQ ID NO: 1855317 - RNA, 19 nt, Artificial Sequence
  Description of Artificial Sequence: Synthetic oligonucleotide
  Sense strand starting at position 542 of SEQ ID NO: 1564102
cuuuaugacuguccaccau

SEQ ID NO: 1855318 - RNA, 19 nt, Artificial Sequence
  Description of Artificial Sequence: Synthetic oligonucleotide
  Antisense strand to SEQ ID NO: 1855317
augguggacagucauaaag

SEQ ID NO: 1855319 - RNA, 19 nt, Artificial Sequence
  Description of Artificial Sequence: Synthetic oligonucleotide
  Sense strand starting at position 566 of SEQ ID NO: 1564102
caaagaagccagugugaua

SEQ ID NO: 1855320 - RNA, 19 nt, Artificial Sequence
  Description of Artificial Sequence: Synthetic oligonucleotide
  Antisense strand to SEQ ID NO: 1855319
uaucacacuggcuucuuug

SEQ ID NO: 1855321 - RNA, 19 nt, Artificial Sequence
  Description of Artificial Sequence: Synthetic oligonucleotide
  Sense strand starting at position 618 of SEQ ID NO: 1564102
gcaaccucuuuccugaguu

SEQ ID NO: 1855322 - RNA, 19 nt, Artificial Sequence
  Description of Artificial Sequence: Synthetic oligonucleotide
  Antisense strand to SEQ ID NO: 1855321
aacucaggaaagagguugc

SEQ ID NO: 1855323 - RNA, 19 nt, Artificial Sequence
  Description of Artificial Sequence: Synthetic oligonucleotide
  Sense strand starting at position 876 of SEQ ID NO: 1564102
gcuucuagucgccaagaau

SEQ ID NO: 1855324 - RNA, 19 nt, Artificial Sequence
  Description of Artificial Sequence: Synthetic oligonucleotide
  Antisense strand to SEQ ID NO: 1855323
auucuuggcgacuagaagc

SEQ ID NO: 1855325 - RNA, 19 nt, Artificial Sequence
  Description of Artificial Sequence: Synthetic oligonucleotide
  Sense strand starting at position 885 of SEQ ID NO: 1564102
cgccaagaaucuuuacauu

SEQ ID NO: 1855326 - RNA, 19 nt, Artificial Sequence
  Description of Artificial Sequence: Synthetic oligonucleotide
  Antisense strand to SEQ ID NO: 1855325
aauguaaagauucuuggcg

SEQ ID NO: 1855327 - RNA, 19 nt, Artificial Sequence
  Description of Artificial Sequence: Synthetic oligonucleotide
  Sense strand starting at position 911 of SEQ ID NO: 1564102
gaacuucguccacacgaaa

SEQ ID NO: 1855328 - RNA, 19 nt, Artificial Sequence
  Description of Artificial Sequence: Synthetic oligonucleotide
  Antisense strand to SEQ ID NO: 1855327
uuucguguggacgaaguuc

SEQ ID NO: 1855329 - RNA, 19 nt, Artificial Sequence
  Description of Artificial Sequence: Synthetic oligonucleotide
  Sense strand starting at position 922 of SEQ ID NO: 1564102
acacgaaagguccgacuca

SEQ ID NO: 1855330 - RNA, 19 nt, Artificial Sequence
  Description of Artificial Sequence: Synthetic oligonucleotide
  Antisense strand to SEQ ID NO: 1855329
ugagucggaccuuucgugu

SEQ ID NO: 1855331 - RNA, 19 nt, Artificial Sequence
  Description of Artificial Sequence: Synthetic oligonucleotide
  Sense strand starting at position 988 of SEQ ID NO: 1564102
gggugacuggacuguuguu

SEQ ID NO: 1855332 - RNA, 19 nt, Artificial Sequence
  Description of Artificial Sequence: Synthetic oligonucleotide
  Antisense strand to SEQ ID NO: 1855331
aacaacaguccagucaccc

SEQ ID NO: 1855333 - RNA, 19 nt, Artificial Sequence
  Description of Artificial Sequence: Synthetic oligonucleotide
  Sense strand starting at position 1041 of SEQ ID NO: 1564102
acugguaaguuuccagaug

SEQ ID NO: 1855334 - RNA, 19 nt, Artificial Sequence
  Description of Artificial Sequence: Synthetic oligonucleotide
  Antisense strand to SEQ ID NO: 1855333
caucuggaaacuuaccagu

SEQ ID NO: 1855335 - RNA, 19 nt, Artificial Sequence
  Description of Artificial Sequence: Synthetic oligonucleotide
  Sense strand starting at position 1249 of SEQ ID NO: 1564102
agccgaaagucaguaaaca

SEQ ID NO: 1855336 - RNA, 19 nt, Artificial Sequence
  Description of Artificial Sequence: Synthetic oligonucleotide
  Antisense strand to SEQ ID NO: 1855335
uguuuacugacuuucggcu

SEQ ID NO: 1855337 - RNA, 19 nt, Artificial Sequence
  Description of Artificial Sequence: Synthetic oligonucleotide
  Sense strand starting at position 1250 of SEQ ID NO: 1564102
gccgaaagucaguaaacau

SEQ ID NO: 1855338 - RNA, 19 nt, Artificial Sequence
  Description of Artificial Sequence: Synthetic oligonucleotide
  Antisense strand to SEQ ID NO: 1855337
auguuuacugacuuucggc

SEQ ID NO: 1855339 - RNA, 19 nt, Artificial Sequence
  Description of Artificial Sequence: Synthetic oligonucleotide
  Sense strand starting at position 1739 of SEQ ID NO: 1564102
cgccuuaccuuggugauga

SEQ ID NO: 1855340 - RNA, 19 nt, Artificial Sequence
  Description of Artificial Sequence: Synthetic oligonucleotide
  Antisense strand to SEQ ID NO: 1855339
ucaucaccaagguaaggcg

SEQ ID NO: 1855341 - RNA, 19 nt, Artificial Sequence
  Description of Artificial Sequence: Synthetic oligonucleotide
  Sense strand starting at position 1999 of SEQ ID NO: 1564102
agaacuugcgccguaacuu

SEQ ID NO: 1855342 - RNA, 19 nt, Artificial Sequence
  Description of Artificial Sequence: Synthetic oligonucleotide
  Antisense strand to SEQ ID NO: 1855341
aaguuacggcgcaaguucu

SEQ ID NO: 1855343 - RNA, 19 nt, Artificial Sequence
  Description of Artificial Sequence: Synthetic oligonucleotide
  Sense strand starting at position 2919 of SEQ ID NO: 1564102
aaagccguugcgucuagau

SEQ ID NO: 1855344 - RNA, 19 nt, Artificial Sequence
  Description of Artificial Sequence: Synthetic oligonucleotide
  Antisense strand to SEQ ID NO: 1855343
aucuagacgcaacggcuuu

SEQ ID NO: 1855345 - RNA, 19 nt, Artificial Sequence
  Description of Artificial Sequence: Synthetic oligonucleotide
  Sense strand starting at position 2975 of SEQ ID NO: 1564102
ucaaguuucccagguuuac

SEQ ID NO: 1855346 - RNA, 19 nt, Artificial Sequence
  Description of Artificial Sequence: Synthetic oligonucleotide
  Antisense strand to SEQ ID NO: 1855345
guaaaccugggaaacuuga

SEQ ID NO: 1855347 - RNA, 19 nt, Artificial Sequence
  Description of Artificial Sequence: Synthetic oligonucleotide
  Sense strand starting at position 3014 of SEQ ID NO: 1564102
gaggucugggauuggugaa

SEQ ID NO: 1855348 - RNA, 19 nt, Artificial Sequence
  Description of Artificial Sequence: Synthetic oligonucleotide
  Antisense strand to SEQ ID NO: 1855347
uucaccaaucccagaccuc

SEQ ID NO: 1855349 - RNA, 19 nt, Artificial Sequence
  Description of Artificial Sequence: Synthetic oligonucleotide
  Sense strand starting at position 3015 of SEQ ID NO: 1564102
aggucugggauuggugaaa

SEQ ID NO: 1855350 - RNA, 19 nt, Artificial Sequence
  Description of Artificial Sequence: Synthetic oligonucleotide
  Antisense strand to SEQ ID NO: 1855349
uuucaccaaucccagaccu

SEQ ID NO: 1855351 - RNA, 19 nt, Artificial Sequence
  Description of Artificial Sequence: Synthetic oligonucleotide
  Sense strand starting at position 3026 of SEQ ID NO: 1564102
uggugaaaguuugcggaca

SEQ ID NO: 1855352 - RNA, 19 nt, Artificial Sequence
  Description of Artificial Sequence: Synthetic oligonucleotide
  Antisense strand to SEQ ID NO: 1855351
uguccgcaaacuuucacca

SEQ ID NO: 1855353 - RNA, 19 nt, Artificial Sequence
  Description of Artificial Sequence: Synthetic oligonucleotide
  Sense strand starting at position 3083 of SEQ ID NO: 1564102
augaaacucuggucuaaag

SEQ ID NO: 1855354 - RNA, 19 nt, Artificial Sequence
  Description of Artificial Sequence: Synthetic oligonucleotide
  Antisense strand to SEQ ID NO: 1855353
cuuuagaccagaguuucau

SEQ ID NO: 1855355 - RNA, 19 nt, Artificial Sequence
  Description of Artificial Sequence: Synthetic oligonucleotide
  Sense strand starting at position 3117 of SEQ ID NO: 1564102
guauuuacaugcuuugcaa

SEQ ID NO: 1855356 - RNA, 19 nt, Artificial Sequence
  Description of Artificial Sequence: Synthetic oligonucleotide
  Antisense strand to SEQ ID NO: 1855355
uugcaaagcauguaaauac

SEQ ID NO: 1855357 - RNA, 19 nt, Artificial Sequence
  Description of Artificial Sequence: Synthetic oligonucleotide
  Sense strand starting at position 3391 of SEQ ID NO: 1564102
ucucaugcagccgauuaaa

SEQ ID NO: 1855358 - RNA, 19 nt, Artificial Sequence
  Description of Artificial Sequence: Synthetic oligonucleotide
  Antisense strand to SEQ ID NO: 1855357
uuuaaucggcugcaugaga

SEQ ID NO: 1855359 - RNA, 19 nt, Artificial Sequence
  Description of Artificial Sequence: Synthetic oligonucleotide
  Sense strand starting at position 3492 of SEQ ID NO: 1564102
ucugaaugccuuuaguuag

SEQ ID NO: 1855360 - RNA, 19 nt, Artificial Sequence
  Description of Artificial Sequence: Synthetic oligonucleotide
  Antisense strand to SEQ ID NO: 1855359
cuaacuaaaggcauucaga

SEQ ID NO: 1855361 - RNA, 19 nt, Artificial Sequence
  Description of Artificial Sequence: Synthetic oligonucleotide
  Sense strand starting at position 3495 of SEQ ID NO: 1564102
gaaugccuuuaguuagaag

SEQ ID NO: 1855362 - RNA, 19 nt, Artificial Sequence
  Description of Artificial Sequence: Synthetic oligonucleotide
  Antisense strand to SEQ ID NO: 1855361
cuucuaacuaaaggcauuc

SEQ ID NO: 1855363 - RNA, 19 nt, Artificial Sequence
  Description of Artificial Sequence: Synthetic oligonucleotide
  Sense strand starting at position 3539 of SEQ ID NO: 1564102
agauuaaacgaaggcuuaa

SEQ ID NO: 1855364 - RNA, 19 nt, Artificial Sequence
  Description of Artificial Sequence: Synthetic oligonucleotide
  Antisense strand to SEQ ID NO: 1855363
uuaagccuucguuuaaucu

SEQ ID NO: 1855365 - RNA, 19 nt, Artificial Sequence
  Description of Artificial Sequence: Synthetic oligonucleotide
  Sense strand starting at position 3574 of SEQ ID NO: 1564102
aaucaagucgaguguaucu

SEQ ID NO: 1855366 - RNA, 19 nt, Artificial Sequence
  Description of Artificial Sequence: Synthetic oligonucleotide
  Antisense strand to SEQ ID NO: 1855365
agauacacucgacuugauu

SEQ ID NO: 1855367 - RNA, 19 nt, Artificial Sequence
  Description of Artificial Sequence: Synthetic oligonucleotide
  Sense strand starting at position 3579 of SEQ ID NO: 1564102
agucgaguguaucuucacu

SEQ ID NO: 1855368 - RNA, 19 nt, Artificial Sequence
  Description of Artificial Sequence: Synthetic oligonucleotide
  Antisense strand to SEQ ID NO: 1855367
agugaagauacacucgacu

SEQ ID NO: 1855369 - RNA, 19 nt, Artificial Sequence
  Description of Artificial Sequence: Synthetic oligonucleotide
  Sense strand starting at position 3618 of SEQ ID NO: 1564102
ugccaaguugauuaagcua

SEQ ID NO: 1855370 - RNA, 19 nt, Artificial Sequence
  Description of Artificial Sequence: Synthetic oligonucleotide
  Antisense strand to SEQ ID NO: 1855369
uagcuuaaucaacuuggca

SEQ ID NO: 1855371 - RNA, 19 nt, Artificial Sequence
  Description of Artificial Sequence: Synthetic oligonucleotide
  Sense strand starting at position 3632 of SEQ ID NO: 1564102
agcuaaauugcacagaacu

SEQ ID NO: 1855372 - RNA, 19 nt, Artificial Sequence
  Description of Artificial Sequence: Synthetic oligonucleotide
  Antisense strand to SEQ ID NO: 1855371
aguucugugcaauuuagcu

SEQ ID NO: 1855373 - RNA, 19 nt, Artificial Sequence
  Description of Artificial Sequence: Synthetic oligonucleotide
  Sense strand starting at position 3646 of SEQ ID NO: 1564102
gaacuaaaugcacgugaaa

SEQ ID NO: 1855374 - RNA, 19 nt, Artificial Sequence
  Description of Artificial Sequence: Synthetic oligonucleotide
  Antisense strand to SEQ ID NO: 1855373
uuucacgugcauuuaguuc

SEQ ID NO: 1855375 - RNA, 19 nt, Artificial Sequence
  Description of Artificial Sequence: Synthetic oligonucleotide
  Sense strand starting at position 3691 of SEQ ID NO: 1564102
uuguaucaauguccauauu

SEQ ID NO: 1855376 - RNA, 19 nt, Artificial Sequence
  Description of Artificial Sequence: Synthetic oligonucleotide
  Antisense strand to SEQ ID NO: 1855375
aauauggacauugauacaa

SEQ ID NO: 1855377 - RNA, 19 nt, Artificial Sequence
  Description of Artificial Sequence: Synthetic oligonucleotide
  Sense strand starting at position 3704 of SEQ ID NO: 1564102
cauauuccagguugugaca

SEQ ID NO: 1855378 - RNA, 19 nt, Artificial Sequence
  Description of Artificial Sequence: Synthetic oligonucleotide
  Antisense strand to SEQ ID NO: 1855377
ugucacaaccuggaauaug

SEQ ID NO: 1855379 - RNA, 19 nt, Artificial Sequence
  Description of Artificial Sequence: Synthetic oligonucleotide
  Sense strand starting at position 3741 of SEQ ID NO: 1564102
acguguugccauuggaaca

SEQ ID NO: 1855380 - RNA, 19 nt, Artificial Sequence
  Description of Artificial Sequence: Synthetic oligonucleotide
  Antisense strand to SEQ ID NO: 1855379
uguuccaauggcaacacgu

SEQ ID NO: 1855381 - RNA, 19 nt, Artificial Sequence
  Description of Artificial Sequence: Synthetic oligonucleotide
  Sense strand starting at position 3783 of SEQ ID NO: 1564102
acaggacuucccuguauua

SEQ ID NO: 1855382 - RNA, 19 nt, Artificial Sequence
  Description of Artificial Sequence: Synthetic oligonucleotide
  Antisense strand to SEQ ID NO: 1855381
uaauacagggaaguccugu

SEQ ID NO: 1855383 - RNA, 19 nt, Artificial Sequence
  Description of Artificial Sequence: Synthetic oligonucleotide
  Sense strand starting at position 3785 of SEQ ID NO: 1564102
aggacuucccuguauuauu

SEQ ID NO: 1855384 - RNA, 19 nt, Artificial Sequence
  Description of Artificial Sequence: Synthetic oligonucleotide
  Antisense strand to SEQ ID NO: 1855383
aauaauacagggaaguccu

SEQ ID NO: 1855385 - RNA, 19 nt, Artificial Sequence
  Description of Artificial Sequence: Synthetic oligonucleotide
  Sense strand starting at position 24 of SEQ ID NO: 1564103
ggugcuucucaagaugggu

SEQ ID NO: 1855386 - RNA, 19 nt, Artificial Sequence
  Description of Artificial Sequence: Synthetic oligonucleotide
  Antisense strand to SEQ ID NO: 1855385
acccaucuugagaagcacc

SEQ ID NO: 1855387 - RNA, 19 nt, Artificial Sequence
  Description of Artificial Sequence: Synthetic oligonucleotide
  Sense strand starting at position 172 of SEQ ID NO: 1564103
cauugugaccuugguggaa

SEQ ID NO: 1855388 - RNA, 19 nt, Artificial Sequence
  Description of Artificial Sequence: Synthetic oligonucleotide
  Antisense strand to SEQ ID NO: 1855387
uuccaccaaggucacaaug

SEQ ID NO: 1855389 - RNA, 19 nt, Artificial Sequence
  Description of Artificial Sequence: Synthetic oligonucleotide
  Sense strand starting at position 344 of SEQ ID NO: 1564103
ggguugugacaguggauga

SEQ ID NO: 1855390 - RNA, 19 nt, Artificial Sequence
  Description of Artificial Sequence: Synthetic oligonucleotide
  Antisense strand to SEQ ID NO: 1855389
ucauccacugucacaaccc

SEQ ID NO: 1855391 - RNA, 19 nt, Artificial Sequence
  Description of Artificial Sequence: Synthetic oligonucleotide
  Sense strand starting at position 380 of SEQ ID NO: 1564103
gguuaaaguacaugacaag

SEQ ID NO: 1855392 - RNA, 19 nt, Artificial Sequence
  Description of Artificial Sequence: Synthetic oligonucleotide
  Antisense strand to SEQ ID NO: 1855391
cuugucauguacuuuaacc

SEQ ID NO: 1855393 - RNA, 19 nt, Artificial Sequence
  Description of Artificial Sequence: Synthetic oligonucleotide
  Sense strand starting at position 381 of SEQ ID NO: 1564103
guuaaaguacaugacaagu

SEQ ID NO: 1855394 - RNA, 19 nt, Artificial Sequence
  Description of Artificial Sequence: Synthetic oligonucleotide
  Antisense strand to SEQ ID NO: 1855393
acuugucauguacuuuaac

SEQ ID NO: 1855395 - RNA, 19 nt, Artificial Sequence
  Description of Artificial Sequence: Synthetic oligonucleotide
  Sense strand starting at position 408 of SEQ ID NO: 1564103
aagggugcuggaugaagau

SEQ ID NO: 1855396 - RNA, 19 nt, Artificial Sequence
  Description of Artificial Sequence: Synthetic oligonucleotide
  Antisense strand to SEQ ID NO: 1855395
aucuucauccagcacccuu

SEQ ID NO: 1855397 - RNA, 19 nt, Artificial Sequence
  Description of Artificial Sequence: Synthetic oligonucleotide
  Sense strand starting at position 418 of SEQ ID NO: 1564103
gaugaagaucugggcuagu

SEQ ID NO: 1855398 - RNA, 19 nt, Artificial Sequence
  Description of Artificial Sequence: Synthetic oligonucleotide
  Antisense strand to SEQ ID NO: 1855397
acuagcccagaucuucauc

SEQ ID NO: 1855399 - RNA, 19 nt, Artificial Sequence
  Description of Artificial Sequence: Synthetic oligonucleotide
  Sense strand starting at position 505 of SEQ ID NO: 1564103
uccucaaucugauugguac

SEQ ID NO: 1855400 - RNA, 19 nt, Artificial Sequence
  Description of Artificial Sequence: Synthetic oligonucleotide
  Antisense strand to SEQ ID NO: 1855399
guaccaaucagauugagga

SEQ ID NO: 1855401 - RNA, 19 nt, Artificial Sequence
  Description of Artificial Sequence: Synthetic oligonucleotide
  Sense strand starting at position 506 of SEQ ID NO: 1564103
ccucaaucugauugguaca

SEQ ID NO: 1855402 - RNA, 19 nt, Artificial Sequence
  Description of Artificial Sequence: Synthetic oligonucleotide
  Antisense strand to SEQ ID NO: 1855401
uguaccaaucagauugagg

SEQ ID NO: 1855403 - RNA, 19 nt, Artificial Sequence
  Description of Artificial Sequence: Synthetic oligonucleotide
  Sense strand starting at position 673 of SEQ ID NO: 1564103
ucugcugagaugugaccaa

SEQ ID NO: 1855404 - RNA, 19 nt, Artificial Sequence
  Description of Artificial Sequence: Synthetic oligonucleotide
  Antisense strand to SEQ ID NO: 1855403
uuggucacaucucagcaga

SEQ ID NO: 1855405 - RNA, 19 nt, Artificial Sequence
  Description of Artificial Sequence: Synthetic oligonucleotide
  Sense strand starting at position 677 of SEQ ID NO: 1564103
cugagaugugaccaauguu

SEQ ID NO: 1855406 - RNA, 19 nt, Artificial Sequence
  Description of Artificial Sequence: Synthetic oligonucleotide
  Antisense strand to SEQ ID NO: 1855405
aacauuggucacaucucag

SEQ ID NO: 1855407 - RNA, 19 nt, Artificial Sequence
  Description of Artificial Sequence: Synthetic oligonucleotide
  Sense strand starting at position 680 of SEQ ID NO: 1564103
agaugugaccaauguugaa

SEQ ID NO: 1855408 - RNA, 19 nt, Artificial Sequence
  Description of Artificial Sequence: Synthetic oligonucleotide
  Antisense strand to SEQ ID NO: 1855407
uucaacauuggucacaucu

SEQ ID NO: 1855409 - RNA, 19 nt, Artificial Sequence
  Description of Artificial Sequence: Synthetic oligonucleotide
  Sense strand starting at position 724 of SEQ ID NO: 1564103
gauauuugcucccugcuga

SEQ ID NO: 1855410 - RNA, 19 nt, Artificial Sequence
  Description of Artificial Sequence: Synthetic oligonucleotide
  Antisense strand to SEQ ID NO: 1855409
ucagcagggagcaaauauc

SEQ ID NO: 1855411 - RNA, 19 nt, Artificial Sequence
  Description of Artificial Sequence: Synthetic oligonucleotide
  Sense strand starting at position 725 of SEQ ID NO: 1564103
auauuugcucccugcugaa

SEQ ID NO: 1855412 - RNA, 19 nt, Artificial Sequence
  Description of Artificial Sequence: Synthetic oligonucleotide
  Antisense strand to SEQ ID NO: 1855411
uucagcagggagcaaauau

SEQ ID NO: 1855413 - RNA, 19 nt, Artificial Sequence
  Description of Artificial Sequence: Synthetic oligonucleotide
  Sense strand starting at position 794 of SEQ ID NO: 1564103
gccauuuaagcggguugga

SEQ ID NO: 1855414 - RNA, 19 nt, Artificial Sequence
  Description of Artificial Sequence: Synthetic oligonucleotide
  Antisense strand to SEQ ID NO: 1855413
uccaacccgcuuaaauggc

SEQ ID NO: 1855415 - RNA, 19 nt, Artificial Sequence
  Description of Artificial Sequence: Synthetic oligonucleotide
  Sense strand starting at position 862 of SEQ ID NO: 1564103
uggaauaaaguucguaaag

SEQ ID NO: 1855416 - RNA, 19 nt, Artificial Sequence
  Description of Artificial Sequence: Synthetic oligonucleotide
  Antisense strand to SEQ ID NO: 1855415
cuuuacgaacuuuauucca

SEQ ID NO: 1855417 - RNA, 19 nt, Artificial Sequence
  Description of Artificial Sequence: Synthetic oligonucleotide
  Sense strand starting at position 863 of SEQ ID NO: 1564103
ggaauaaaguucguaaagu

SEQ ID NO: 1855418 - RNA, 19 nt, Artificial Sequence
  Description of Artificial Sequence: Synthetic oligonucleotide
  Antisense strand to SEQ ID NO: 1855417
acuuuacgaacuuuauucc

SEQ ID NO: 1855419 - RNA, 19 nt, Artificial Sequence
  Description of Artificial Sequence: Synthetic oligonucleotide
  Sense strand starting at position 2488 of SEQ ID NO: 1564103
cugauuagcgcguucaugu

SEQ ID NO: 1855420 - RNA, 19 nt, Artificial Sequence
  Description of Artificial Sequence: Synthetic oligonucleotide
  Antisense strand to SEQ ID NO: 1855419
acaugaacgcgcuaaucag

SEQ ID NO: 1855421 - RNA, 19 nt, Artificial Sequence
  Description of Artificial Sequence: Synthetic oligonucleotide
  Sense strand starting at position 2489 of SEQ ID NO: 1564103
ugauuagcgcguucauguu

SEQ ID NO: 1855422 - RNA, 19 nt, Artificial Sequence
  Description of Artificial Sequence: Synthetic oligonucleotide
  Antisense strand to SEQ ID NO: 1855421
aacaugaacgcgcuaauca

SEQ ID NO: 1855423 - RNA, 19 nt, Artificial Sequence
  Description of Artificial Sequence: Synthetic oligonucleotide
  Sense strand starting at position 2698 of SEQ ID NO: 1564103
cccagagcauaguuuaaau

SEQ ID NO: 1855424 - RNA, 19 nt, Artificial Sequence
  Description of Artificial Sequence: Synthetic oligonucleotide
  Antisense strand to SEQ ID NO: 1855423
auuuaaacuaugcucuggg

SEQ ID NO: 1855425 - RNA, 19 nt, Artificial Sequence
  Description of Artificial Sequence: Synthetic oligonucleotide
  Sense strand starting at position 2864 of SEQ ID NO: 1564103
gccagcaaucagcaaacuu

SEQ ID NO: 1855426 - RNA, 19 nt, Artificial Sequence
  Description of Artificial Sequence: Synthetic oligonucleotide
  Antisense strand to SEQ ID NO: 1855425
aaguuugcugauugcuggc

SEQ ID NO: 1855427 - RNA, 19 nt, Artificial Sequence
  Description of Artificial Sequence: Synthetic oligonucleotide
  Sense strand starting at position 2933 of SEQ ID NO: 1564103
ugauaagcuggccaauuaa

SEQ ID NO: 1855428 - RNA, 19 nt, Artificial Sequence
  Description of Artificial Sequence: Synthetic oligonucleotide
  Antisense strand to SEQ ID NO: 1855427
uuaauuggccagcuuauca

SEQ ID NO: 1855429 - RNA, 19 nt, Artificial Sequence
  Description of Artificial Sequence: Synthetic oligonucleotide
  Sense strand starting at position 3089 of SEQ ID NO: 1564103
gcgaauuuguuacugaauc

SEQ ID NO: 1855430 - RNA, 19 nt, Artificial Sequence
  Description of Artificial Sequence: Synthetic oligonucleotide
  Antisense strand to SEQ ID NO: 1855429
gauucaguaacaaauucgc

SEQ ID NO: 1855431 - RNA, 19 nt, Artificial Sequence
  Description of Artificial Sequence: Synthetic oligonucleotide
  Sense strand starting at position 3352 of SEQ ID NO: 1564103
agcuuucugcggucaaggu

SEQ ID NO: 1855432 - RNA, 19 nt, Artificial Sequence
  Description of Artificial Sequence: Synthetic oligonucleotide
  Antisense strand to SEQ ID NO: 1855431
accuugaccgcagaaagcu

SEQ ID NO: 1855433 - RNA, 19 nt, Artificial Sequence
  Description of Artificial Sequence: Synthetic oligonucleotide
  Sense strand starting at position 3449 of SEQ ID NO: 1564103
acugaaaugucucucaaag

SEQ ID NO: 1855434 - RNA, 19 nt, Artificial Sequence
  Description of Artificial Sequence: Synthetic oligonucleotide
  Antisense strand to SEQ ID NO: 1855433
cuuugagagacauuucagu

SEQ ID NO: 1855435 - RNA, 19 nt, Artificial Sequence
  Description of Artificial Sequence: Synthetic oligonucleotide
  Sense strand starting at position 3506 of SEQ ID NO: 1564103
cuggacugucugcauauau

SEQ ID NO: 1855436 - RNA, 19 nt, Artificial Sequence
  Description of Artificial Sequence: Synthetic oligonucleotide
  Antisense strand to SEQ ID NO: 1855435
auauaugcagacaguccag

SEQ ID NO: 1855437 - RNA, 19 nt, Artificial Sequence
  Description of Artificial Sequence: Synthetic oligonucleotide
  Sense strand starting at position 3554 of SEQ ID NO: 1564103
uggcaauuuagguguuuau

SEQ ID NO: 1855438 - RNA, 19 nt, Artificial Sequence
  Description of Artificial Sequence: Synthetic oligonucleotide
  Antisense strand to SEQ ID NO: 1855437
auaaacaccuaaauugcca

SEQ ID NO: 1855439 - RNA, 19 nt, Artificial Sequence
  Description of Artificial Sequence: Synthetic oligonucleotide
  Sense strand starting at position 3588 of SEQ ID NO: 1564103
aguccuuagagaugaugca

SEQ ID NO: 1855440 - RNA, 19 nt, Artificial Sequence
  Description of Artificial Sequence: Synthetic oligonucleotide
  Antisense strand to SEQ ID NO: 1855439
ugcaucaucucuaaggacu

SEQ ID NO: 1855441 - RNA, 19 nt, Artificial Sequence
  Description of Artificial Sequence: Synthetic oligonucleotide
  Sense strand starting at position 3610 of SEQ ID NO: 1564103
gggaaaccauccucgaucu

SEQ ID NO: 1855442 - RNA, 19 nt, Artificial Sequence
  Description of Artificial Sequence: Synthetic oligonucleotide
  Antisense strand to SEQ ID NO: 1855441
agaucgaggaugguuuccc

SEQ ID NO: 1855443 - RNA, 19 nt, Artificial Sequence
  Description of Artificial Sequence: Synthetic oligonucleotide
  Sense strand starting at position 3611 of SEQ ID NO: 1564103
ggaaaccauccucgaucuu

SEQ ID NO: 1855444 - RNA, 19 nt, Artificial Sequence
  Description of Artificial Sequence: Synthetic oligonucleotide
  Antisense strand to SEQ ID NO: 1855443
aagaucgaggaugguuucc

SEQ ID NO: 1855445 - RNA, 19 nt, Artificial Sequence
  Description of Artificial Sequence: Synthetic oligonucleotide
  Sense strand starting at position 3817 of SEQ ID NO: 1564103
augauuguaacuugguaga

SEQ ID NO: 1855446 - RNA, 19 nt, Artificial Sequence
  Description of Artificial Sequence: Synthetic oligonucleotide
  Antisense strand to SEQ ID NO: 1855445
ucuaccaaguuacaaucau

SEQ ID NO: 1855447 - RNA, 19 nt, Artificial Sequence
  Description of Artificial Sequence: Synthetic oligonucleotide
  Sense strand starting at position 3819 of SEQ ID NO: 1564103
gauuguaacuugguagaau

SEQ ID NO: 1855448 - RNA, 19 nt, Artificial Sequence
  Description of Artificial Sequence: Synthetic oligonucleotide
  Antisense strand to SEQ ID NO: 1855447
auucuaccaaguuacaauc

SEQ ID NO: 1855449 - RNA, 19 nt, Artificial Sequence
  Description of Artificial Sequence: Synthetic oligonucleotide
  Sense strand starting at position 3842 of SEQ ID NO: 1564103
cguguuucagucccagcau

SEQ ID NO: 1855450 - RNA, 19 nt, Artificial Sequence
  Description of Artificial Sequence: Synthetic oligonucleotide
  Antisense strand to SEQ ID NO: 1855449
augcugggacugaaacacg

SEQ ID NO: 1855451 - RNA, 19 nt, Artificial Sequence
  Description of Artificial Sequence: Synthetic oligonucleotide
  Sense strand starting at position 3854 of SEQ ID NO: 1564103
ccagcauaucuguaaaguu

SEQ ID NO: 1855452 - RNA, 19 nt, Artificial Sequence
  Description of Artificial Sequence: Synthetic oligonucleotide
  Antisense strand to SEQ ID NO: 1855451
aacuuuacagauaugcugg

SEQ ID NO: 1855453 - RNA, 19 nt, Artificial Sequence
  Description of Artificial Sequence: Synthetic oligonucleotide
  Sense strand starting at position 3891 of SEQ ID NO: 1564103
gucaucacucaaggacuau

SEQ ID NO: 1855454 - RNA, 19 nt, Artificial Sequence
  Description of Artificial Sequence: Synthetic oligonucleotide
  Antisense strand to SEQ ID NO: 1855453
auaguccuugagugaugac

SEQ ID NO: 1855455 - RNA, 19 nt, Artificial Sequence
  Description of Artificial Sequence: Synthetic oligonucleotide
  Sense strand starting at position 3909 of SEQ ID NO: 1564103
uuagaauuaugugucuaga

SEQ ID NO: 1855456 - RNA, 19 nt, Artificial Sequence
  Description of Artificial Sequence: Synthetic oligonucleotide
  Antisense strand to SEQ ID NO: 1855455
ucuagacacauaauucuaa

SEQ ID NO: 1855457 - RNA, 19 nt, Artificial Sequence
  Description of Artificial Sequence: Synthetic oligonucleotide
  Sense strand starting at position 3911 of SEQ ID NO: 1564103
agaauuaugugucuagacu

SEQ ID NO: 1855458 - RNA, 19 nt, Artificial Sequence
  Description of Artificial Sequence: Synthetic oligonucleotide
  Antisense strand to SEQ ID NO: 1855457
agucuagacacauaauucu

SEQ ID NO: 1855459 - RNA, 19 nt, Artificial Sequence
  Description of Artificial Sequence: Synthetic oligonucleotide
  Sense strand starting at position 3912 of SEQ ID NO: 1564103
gaauuaugugucuagacua

SEQ ID NO: 1855460 - RNA, 19 nt, Artificial Sequence
  Description of Artificial Sequence: Synthetic oligonucleotide
  Antisense strand to SEQ ID NO: 1855459
uagucuagacacauaauuc

SEQ ID NO: 1855461 - RNA, 19 nt, Artificial Sequence
  Description of Artificial Sequence: Synthetic oligonucleotide
  Sense strand starting at position 3938 of SEQ ID NO: 1564103
gacguuuggaagcaguaga

SEQ ID NO: 1855462 - RNA, 19 nt, Artificial Sequence
  Description of Artificial Sequence: Synthetic oligonucleotide
  Antisense strand to SEQ ID NO: 1855461
ucuacugcuuccaaacguc

SEQ ID NO: 1855463 - RNA, 19 nt, Artificial Sequence
  Description of Artificial Sequence: Synthetic oligonucleotide
  Sense strand starting at position 3980 of SEQ ID NO: 1564103
ucacuaacuagauggguga

SEQ ID NO: 1855464 - RNA, 19 nt, Artificial Sequence
  Description of Artificial Sequence: Synthetic oligonucleotide
  Antisense strand to SEQ ID NO: 1855463
ucacccaucuaguuaguga

SEQ ID NO: 1855465 - RNA, 19 nt, Artificial Sequence
  Description of Artificial Sequence: Synthetic oligonucleotide
  Sense strand starting at position 1 of SEQ ID NO: 1564104
ccucacuguccucaggaaa

SEQ ID NO: 1855466 - RNA, 19 nt, Artificial Sequence
  Description of Artificial Sequence: Synthetic oligonucleotide
  Antisense strand to SEQ ID NO: 1855465
uuuccugaggacagugagg

SEQ ID NO: 1855467 - RNA, 19 nt, Artificial Sequence
  Description of Artificial Sequence: Synthetic oligonucleotide
  Sense strand starting at position 225 of SEQ ID NO: 1564104
cugcccuuguccugcauua

SEQ ID NO: 1855468 - RNA, 19 nt, Artificial Sequence
  Description of Artificial Sequence: Synthetic oligonucleotide
  Antisense strand to SEQ ID NO: 1855467
uaaugcaggacaagggcag

SEQ ID NO: 1855469 - RNA, 19 nt, Artificial Sequence
  Description of Artificial Sequence: Synthetic oligonucleotide
  Sense strand starting at position 227 of SEQ ID NO: 1564104
gcccuuguccugcauuaac

SEQ ID NO: 1855470 - RNA, 19 nt, Artificial Sequence
  Description of Artificial Sequence: Synthetic oligonucleotide
  Antisense strand to SEQ ID NO: 1855469
guuaaugcaggacaagggc

SEQ ID NO: 1855471 - RNA, 19 nt, Artificial Sequence
  Description of Artificial Sequence: Synthetic oligonucleotide
  Sense strand starting at position 321 of SEQ ID NO: 1564104
uuggguuguccugagaagg

SEQ ID NO: 1855472 - RNA, 19 nt, Artificial Sequence
  Description of Artificial Sequence: Synthetic oligonucleotide
  Antisense strand to SEQ ID NO: 1855471
ccuucucaggacaacccaa

SEQ ID NO: 1855473 - RNA, 19 nt, Artificial Sequence
  Description of Artificial Sequence: Synthetic oligonucleotide
  Sense strand starting at position 365 of SEQ ID NO: 1564104
gcugucuuccuugauggca

SEQ ID NO: 1855474 - RNA, 19 nt, Artificial Sequence
  Description of Artificial Sequence: Synthetic oligonucleotide
  Antisense strand to SEQ ID NO: 1855473
ugccaucaaggaagacagc

SEQ ID NO: 1855475 - RNA, 19 nt, Artificial Sequence
  Description of Artificial Sequence: Synthetic oligonucleotide
  Sense strand starting at position 385 of SEQ ID NO: 1564104
ggcugucccugaggaggua

SEQ ID NO: 1855476 - RNA, 19 nt, Artificial Sequence
  Description of Artificial Sequence: Synthetic oligonucleotide
  Antisense strand to SEQ ID NO: 1855475
uaccuccucagggacagcc

SEQ ID NO: 1855477 - RNA, 19 nt, Artificial Sequence
  Description of Artificial Sequence: Synthetic oligonucleotide
  Sense strand starting at position 520 of SEQ ID NO: 1564104
gcccacugcuaagaguaaa

SEQ ID NO: 1855478 - RNA, 19 nt, Artificial Sequence
  Description of Artificial Sequence: Synthetic oligonucleotide
  Antisense strand to SEQ ID NO: 1855477
uuuacucuuagcagugggc

SEQ ID NO: 1855479 - RNA, 19 nt, Artificial Sequence
  Description of Artificial Sequence: Synthetic oligonucleotide
  Sense strand starting at position 575 of SEQ ID NO: 1564104
agaggcaaugccuagugau

SEQ ID NO: 1855480 - RNA, 19 nt, Artificial Sequence
  Description of Artificial Sequence: Synthetic oligonucleotide
  Antisense strand to SEQ ID NO: 1855479
aucacuaggcauugccucu

SEQ ID NO: 1855481 - RNA, 19 nt, Artificial Sequence
  Description of Artificial Sequence: Synthetic oligonucleotide
  Sense strand starting at position 643 of SEQ ID NO: 1564104
ccuacagugacucgaugaa

SEQ ID NO: 1855482 - RNA, 19 nt, Artificial Sequence
  Description of Artificial Sequence: Synthetic oligonucleotide
  Antisense strand to SEQ ID NO: 1855481
uucaucgagucacuguagg

SEQ ID NO: 1855483 - RNA, 19 nt, Artificial Sequence
  Description of Artificial Sequence: Synthetic oligonucleotide
  Sense strand starting at position 813 of SEQ ID NO: 1564104
cugcguuacaucugagagg

SEQ ID NO: 1855484 - RNA, 19 nt, Artificial Sequence
  Description of Artificial Sequence: Synthetic oligonucleotide
  Antisense strand to SEQ ID NO: 1855483
ccucucagauguaacgcag

SEQ ID NO: 1855485 - RNA, 19 nt, Artificial Sequence
  Description of Artificial Sequence: Synthetic oligonucleotide
  Sense strand starting at position 884 of SEQ ID NO: 1564104
gccucaaacucaguggaau

SEQ ID NO: 1855486 - RNA, 19 nt, Artificial Sequence
  Description of Artificial Sequence: Synthetic oligonucleotide
  Antisense strand to SEQ ID NO: 1855485
auuccacugaguuugaggc

SEQ ID NO: 1855487 - RNA, 19 nt, Artificial Sequence
  Description of Artificial Sequence: Synthetic oligonucleotide
  Sense strand starting at position 885 of SEQ ID NO: 1564104
ccucaaacucaguggaauu

SEQ ID NO: 1855488 - RNA, 19 nt, Artificial Sequence
  Description of Artificial Sequence: Synthetic oligonucleotide
  Antisense strand to SEQ ID NO: 1855487
aauuccacugaguuugagg

SEQ ID NO: 1855489 - RNA, 19 nt, Artificial Sequence
  Description of Artificial Sequence: Synthetic oligonucleotide
  Sense strand starting at position 896 of SEQ ID NO: 1564104
guggaauuaugaguguuuc

SEQ ID NO: 1855490 - RNA, 19 nt, Artificial Sequence
  Description of Artificial Sequence: Synthetic oligonucleotide
  Antisense strand to SEQ ID NO: 1855489
gaaacacucauaauuccac

SEQ ID NO: 1855491 - RNA, 19 nt, Artificial Sequence
  Description of Artificial Sequence: Synthetic oligonucleotide
  Sense strand starting at position 897 of SEQ ID NO: 1564104
uggaauuaugaguguuucu

SEQ ID NO: 1855492 - RNA, 19 nt, Artificial Sequence
  Description of Artificial Sequence: Synthetic oligonucleotide
  Antisense strand to SEQ ID NO: 1855491
agaaacacucauaauucca

SEQ ID NO: 1855493 - RNA, 19 nt, Artificial Sequence
  Description of Artificial Sequence: Synthetic oligonucleotide
  Sense strand starting at position 1031 of SEQ ID NO: 1564104
cugucaguugccucaugca

SEQ ID NO: 1855494 - RNA, 19 nt, Artificial Sequence
  Description of Artificial Sequence: Synthetic oligonucleotide
  Antisense strand to SEQ ID NO: 1855493
ugcaugaggcaacugacag

SEQ ID NO: 1855495 - RNA, 19 nt, Artificial Sequence
  Description of Artificial Sequence: Synthetic oligonucleotide
  Sense strand starting at position 1230 of SEQ ID NO: 1564104
gcuugaaguucgggucacu

SEQ ID NO: 1855496 - RNA, 19 nt, Artificial Sequence
  Description of Artificial Sequence: Synthetic oligonucleotide
  Antisense strand to SEQ ID NO: 1855495
agugacccgaacuucaagc

SEQ ID NO: 1855497 - RNA, 19 nt, Artificial Sequence
  Description of Artificial Sequence: Synthetic oligonucleotide
  Sense strand starting at position 1264 of SEQ ID NO: 1564104
gguccagccaugugucuua

SEQ ID NO: 1855498 - RNA, 19 nt, Artificial Sequence
  Description of Artificial Sequence: Synthetic oligonucleotide
  Antisense strand to SEQ ID NO: 1855497
uaagacacauggcuggacc

SEQ ID NO: 1855499 - RNA, 19 nt, Artificial Sequence
  Description of Artificial Sequence: Synthetic oligonucleotide
  Sense strand starting at position 1271 of SEQ ID NO: 1564104
ccaugugucuuaccucuga

SEQ ID NO: 1855500 - RNA, 19 nt, Artificial Sequence
  Description of Artificial Sequence: Synthetic oligonucleotide
  Antisense strand to SEQ ID NO: 1855499
ucagagguaagacacaugg

SEQ ID NO: 1855501 - RNA, 19 nt, Artificial Sequence
  Description of Artificial Sequence: Synthetic oligonucleotide
  Sense strand starting at position 1275 of SEQ ID NO: 1564104
gugucuuaccucugaagag

SEQ ID NO: 1855502 - RNA, 19 nt, Artificial Sequence
  Description of Artificial Sequence: Synthetic oligonucleotide
  Antisense strand to SEQ ID NO: 1855501
cucuucagagguaagacac

SEQ ID NO: 1855503 - RNA, 19 nt, Artificial Sequence
  Description of Artificial Sequence: Synthetic oligonucleotide
  Sense strand starting at position 1508 of SEQ ID NO: 1564104
gacagaguuugagcagaug

SEQ ID NO: 1855504 - RNA, 19 nt, Artificial Sequence
  Description of Artificial Sequence: Synthetic oligonucleotide
  Antisense strand to SEQ ID NO: 1855503
caucugcucaaacucuguc

SEQ ID NO: 1855505 - RNA, 19 nt, Artificial Sequence
  Description of Artificial Sequence: Synthetic oligonucleotide
  Sense strand starting at position 2082 of SEQ ID NO: 1564104
uugugacgucucugggagu

SEQ ID NO: 1855506 - RNA, 19 nt, Artificial Sequence
  Description of Artificial Sequence: Synthetic oligonucleotide
  Antisense strand to SEQ ID NO: 1855505
acucccagagacgucacaa

SEQ ID NO: 1855507 - RNA, 19 nt, Artificial Sequence
  Description of Artificial Sequence: Synthetic oligonucleotide
  Sense strand starting at position 2084 of SEQ ID NO: 1564104
gugacgucucugggaguga

SEQ ID NO: 1855508 - RNA, 19 nt, Artificial Sequence
  Description of Artificial Sequence: Synthetic oligonucleotide
  Antisense strand to SEQ ID NO: 1855507
ucacucccagagacgucac

SEQ ID NO: 1855509 - RNA, 19 nt, Artificial Sequence
  Description of Artificial Sequence: Synthetic oligonucleotide
  Sense strand starting at position 2176 of SEQ ID NO: 1564104
aucugaagcuguugugauc

SEQ ID NO: 1855510 - RNA, 19 nt, Artificial Sequence
  Description of Artificial Sequence: Synthetic oligonucleotide
  Antisense strand to SEQ ID NO: 1855509
gaucacaacagcuucagau

SEQ ID NO: 1855511 - RNA, 19 nt, Artificial Sequence
  Description of Artificial Sequence: Synthetic oligonucleotide
  Sense strand starting at position 2391 of SEQ ID NO: 1564104
cggaguuccuccuuucguu

SEQ ID NO: 1855512 - RNA, 19 nt, Artificial Sequence
  Description of Artificial Sequence: Synthetic oligonucleotide
  Antisense strand to SEQ ID NO: 1855511
aacgaaaggaggaacuccg

SEQ ID NO: 1855513 - RNA, 19 nt, Artificial Sequence
  Description of Artificial Sequence: Synthetic oligonucleotide
  Sense strand starting at position 2748 of SEQ ID NO: 1564104
cggcguaggccaguuucua

SEQ ID NO: 1855514 - RNA, 19 nt, Artificial Sequence
  Description of Artificial Sequence: Synthetic oligonucleotide
  Antisense strand to SEQ ID NO: 1855513
uagaaacuggccuacgccg

SEQ ID NO: 1855515 - RNA, 19 nt, Artificial Sequence
  Description of Artificial Sequence: Synthetic oligonucleotide
  Sense strand starting at position 2749 of SEQ ID NO: 1564104
ggcguaggccaguuucuau

SEQ ID NO: 1855516 - RNA, 19 nt, Artificial Sequence
  Description of Artificial Sequence: Synthetic oligonucleotide
  Antisense strand to SEQ ID NO: 1855515
auagaaacuggccuacgcc

SEQ ID NO: 1855517 - RNA, 19 nt, Artificial Sequence
  Description of Artificial Sequence: Synthetic oligonucleotide
  Sense strand starting at position 2758 of SEQ ID NO: 1564104
caguuucuauacuguggaa

SEQ ID NO: 1855518 - RNA, 19 nt, Artificial Sequence
  Description of Artificial Sequence: Synthetic oligonucleotide
  Antisense strand to SEQ ID NO: 1855517
uuccacaguauagaaacug

SEQ ID NO: 1855519 - RNA, 19 nt, Artificial Sequence
  Description of Artificial Sequence: Synthetic oligonucleotide
  Sense strand starting at position 2760 of SEQ ID NO: 1564104
guuucuauacuguggaaca

SEQ ID NO: 1855520 - RNA, 19 nt, Artificial Sequence
  Description of Artificial Sequence: Synthetic oligonucleotide
  Antisense strand to SEQ ID NO: 1855519
uguuccacaguauagaaac

SEQ ID NO: 1855521 - RNA, 19 nt, Artificial Sequence
  Description of Artificial Sequence: Synthetic oligonucleotide
  Sense strand starting at position 2761 of SEQ ID NO: 1564104
uuucuauacuguggaacau

SEQ ID NO: 1855522 - RNA, 19 nt, Artificial Sequence
  Description of Artificial Sequence: Synthetic oligonucleotide
  Antisense strand to SEQ ID NO: 1855521
auguuccacaguauagaaa

SEQ ID NO: 1855523 - RNA, 19 nt, Artificial Sequence
  Description of Artificial Sequence: Synthetic oligonucleotide
  Sense strand starting at position 2762 of SEQ ID NO: 1564104
uucuauacuguggaacauu

SEQ ID NO: 1855524 - RNA, 19 nt, Artificial Sequence
  Description of Artificial Sequence: Synthetic oligonucleotide
  Antisense strand to SEQ ID NO: 1855523
aauguuccacaguauagaa

SEQ ID NO: 1855525 - RNA, 19 nt, Artificial Sequence
  Description of Artificial Sequence: Synthetic oligonucleotide
  Sense strand starting at position 2826 of SEQ ID NO: 1564104
ugcagaggcuuugugguaa

SEQ ID NO: 1855526 - RNA, 19 nt, Artificial Sequence
  Description of Artificial Sequence: Synthetic oligonucleotide
  Antisense strand to SEQ ID NO: 1855525
uuaccacaaagccucugca

SEQ ID NO: 1855527 - RNA, 19 nt, Artificial Sequence
  Description of Artificial Sequence: Synthetic oligonucleotide
  Sense strand starting at position 2830 of SEQ ID NO: 1564104
gaggcuuugugguaaagga

SEQ ID NO: 1855528 - RNA, 19 nt, Artificial Sequence
  Description of Artificial Sequence: Synthetic oligonucleotide
  Antisense strand to SEQ ID NO: 1855527
uccuuuaccacaaagccuc

SEQ ID NO: 1855529 - RNA, 19 nt, Artificial Sequence
  Description of Artificial Sequence: Synthetic oligonucleotide
  Sense strand starting at position 2946 of SEQ ID NO: 1564104
gggaucauauguucccaaa

SEQ ID NO: 1855530 - RNA, 19 nt, Artificial Sequence
  Description of Artificial Sequence: Synthetic oligonucleotide
  Antisense strand to SEQ ID NO: 1855529
uuugggaacauaugauccc

SEQ ID NO: 1855531 - RNA, 19 nt, Artificial Sequence
  Description of Artificial Sequence: Synthetic oligonucleotide
  Sense strand starting at position 2962 of SEQ ID NO: 1564104
aaagcuuauuggugcaacu

SEQ ID NO: 1855532 - RNA, 19 nt, Artificial Sequence
  Description of Artificial Sequence: Synthetic oligonucleotide
  Antisense strand to SEQ ID NO: 1855531
aguugcaccaauaagcuuu

SEQ ID NO: 1855533 - RNA, 19 nt, Artificial Sequence
  Description of Artificial Sequence: Synthetic oligonucleotide
  Sense strand starting at position 2981 of SEQ ID NO: 1564104
ggaaucaaucugcacacuu

SEQ ID NO: 1855534 - RNA, 19 nt, Artificial Sequence
  Description of Artificial Sequence: Synthetic oligonucleotide
  Antisense strand to SEQ ID NO: 1855533
aagugugcagauugauucc

SEQ ID NO: 1855535 - RNA, 19 nt, Artificial Sequence
  Description of Artificial Sequence: Synthetic oligonucleotide
  Sense strand starting at position 3007 of SEQ ID NO: 1564104
uugucaagacugugaugga

SEQ ID NO: 1855536 - RNA, 19 nt, Artificial Sequence
  Description of Artificial Sequence: Synthetic oligonucleotide
  Antisense strand to SEQ ID NO: 1855535
uccaucacagucuugacaa

SEQ ID NO: 1855537 - RNA, 19 nt, Artificial Sequence
  Description of Artificial Sequence: Synthetic oligonucleotide
  Sense strand starting at position 3018 of SEQ ID NO: 1564104
gugauggagucggagguau

SEQ ID NO: 1855538 - RNA, 19 nt, Artificial Sequence
  Description of Artificial Sequence: Synthetic oligonucleotide
  Antisense strand to SEQ ID NO: 1855537
auaccuccgacuccaucac

SEQ ID NO: 1855539 - RNA, 19 nt, Artificial Sequence
  Description of Artificial Sequence: Synthetic oligonucleotide
  Sense strand starting at position 3062 of SEQ ID NO: 1564104
caugguugcagauguggaa

SEQ ID NO: 1855540 - RNA, 19 nt, Artificial Sequence
  Description of Artificial Sequence: Synthetic oligonucleotide
  Antisense strand to SEQ ID NO: 1855539
uuccacaucugcaaccaug

SEQ ID NO: 1855541 - RNA, 19 nt, Artificial Sequence
  Description of Artificial Sequence: Synthetic oligonucleotide
  Sense strand starting at position 3366 of SEQ ID NO: 1564104
ucaaauucgugaccucaaa

SEQ ID NO: 1855542 - RNA, 19 nt, Artificial Sequence
  Description of Artificial Sequence: Synthetic oligonucleotide
  Antisense strand to SEQ ID NO: 1855541
uuugaggucacgaauuuga

SEQ ID NO: 1855543 - RNA, 19 nt, Artificial Sequence
  Description of Artificial Sequence: Synthetic oligonucleotide
  Sense strand starting at position 217 of SEQ ID NO: 1564105
cacauauucugaguuguga

SEQ ID NO: 1855544 - RNA, 19 nt, Artificial Sequence
  Description of Artificial Sequence: Synthetic oligonucleotide
  Antisense strand to SEQ ID NO: 1855543
ucacaacucagaauaugug

SEQ ID NO: 1855545 - RNA, 19 nt, Artificial Sequence
  Description of Artificial Sequence: Synthetic oligonucleotide
  Sense strand starting at position 221 of SEQ ID NO: 1564105
uauucugaguugugaacuu

SEQ ID NO: 1855546 - RNA, 19 nt, Artificial Sequence
  Description of Artificial Sequence: Synthetic oligonucleotide
  Antisense strand to SEQ ID NO: 1855545
aaguucacaacucagaaua

SEQ ID NO: 1855547 - RNA, 19 nt, Artificial Sequence
  Description of Artificial Sequence: Synthetic oligonucleotide
  Sense strand starting at position 285 of SEQ ID NO: 1564105
gagcaagccuugccagaga

SEQ ID NO: 1855548 - RNA, 19 nt, Artificial Sequence
  Description of Artificial Sequence: Synthetic oligonucleotide
  Antisense strand to SEQ ID NO: 1855547
ucucuggcaaggcuugcuc

SEQ ID NO: 1855549 - RNA, 19 nt, Artificial Sequence
  Description of Artificial Sequence: Synthetic oligonucleotide
  Sense strand starting at position 375 of SEQ ID NO: 1564105
cugggaaagcgagaugguu

SEQ ID NO: 1855550 - RNA, 19 nt, Artificial Sequence
  Description of Artificial Sequence: Synthetic oligonucleotide
  Antisense strand to SEQ ID NO: 1855549
aaccaucucgcuuucccag

SEQ ID NO: 1855551 - RNA, 19 nt, Artificial Sequence
  Description of Artificial Sequence: Synthetic oligonucleotide
  Sense strand starting at position 383 of SEQ ID NO: 1564105
gcgagaugguuccucugac

SEQ ID NO: 1855552 - RNA, 19 nt, Artificial Sequence
  Description of Artificial Sequence: Synthetic oligonucleotide
  Antisense strand to SEQ ID NO: 1855551
gucagaggaaccaucucgc

SEQ ID NO: 1855553 - RNA, 19 nt, Artificial Sequence
  Description of Artificial Sequence: Synthetic oligonucleotide
  Sense strand starting at position 384 of SEQ ID NO: 1564105
cgagaugguuccucugacu

SEQ ID NO: 1855554 - RNA, 19 nt, Artificial Sequence
  Description of Artificial Sequence: Synthetic oligonucleotide
  Antisense strand to SEQ ID NO: 1855553
agucagaggaaccaucucg

SEQ ID NO: 1855555 - RNA, 19 nt, Artificial Sequence
  Description of Artificial Sequence: Synthetic oligonucleotide
  Sense strand starting at position 387 of SEQ ID NO: 1564105
gaugguuccucugacuucu

SEQ ID NO: 1855556 - RNA, 19 nt, Artificial Sequence
  Description of Artificial Sequence: Synthetic oligonucleotide
  Antisense strand to SEQ ID NO: 1855555
agaagucagaggaaccauc

SEQ ID NO: 1855557 - RNA, 19 nt, Artificial Sequence
  Description of Artificial Sequence: Synthetic oligonucleotide
  Sense strand starting at position 490 of SEQ ID NO: 1564105
cccaacucugucugagauc

SEQ ID NO: 1855558 - RNA, 19 nt, Artificial Sequence
  Description of Artificial Sequence: Synthetic oligonucleotide
  Antisense strand to SEQ ID NO: 1855557
gaucucagacagaguuggg

SEQ ID NO: 1855559 - RNA, 19 nt, Artificial Sequence
  Description of Artificial Sequence: Synthetic oligonucleotide
  Sense strand starting at position 491 of SEQ ID NO: 1564105
ccaacucugucugagauca

SEQ ID NO: 1855560 - RNA, 19 nt, Artificial Sequence
  Description of Artificial Sequence: Synthetic oligonucleotide
  Antisense strand to SEQ ID NO: 1855559
ugaucucagacagaguugg

SEQ ID NO: 1855561 - RNA, 19 nt, Artificial Sequence
  Description of Artificial Sequence: Synthetic oligonucleotide
  Sense strand starting at position 493 of SEQ ID NO: 1564105
aacucugucugagaucaag

SEQ ID NO: 1855562 - RNA, 19 nt, Artificial Sequence
  Description of Artificial Sequence: Synthetic oligonucleotide
  Antisense strand to SEQ ID NO: 1855561
cuugaucucagacagaguu

SEQ ID NO: 1855563 - RNA, 19 nt, Artificial Sequence
  Description of Artificial Sequence: Synthetic oligonucleotide
  Sense strand starting at position 881 of SEQ ID NO: 1564105
guguuugacucuucgcuca

SEQ ID NO: 1855564 - RNA, 19 nt, Artificial Sequence
  Description of Artificial Sequence: Synthetic oligonucleotide
  Antisense strand to SEQ ID NO: 1855563
ugagcgaagagucaaacac

SEQ ID NO: 1855565 - RNA, 19 nt, Artificial Sequence
  Description of Artificial Sequence: Synthetic oligonucleotide
  Sense strand starting at position 883 of SEQ ID NO: 1564105
guuugacucuucgcucaua

SEQ ID NO: 1855566 - RNA, 19 nt, Artificial Sequence
  Description of Artificial Sequence: Synthetic oligonucleotide
  Antisense strand to SEQ ID NO: 1855565
uaugagcgaagagucaaac

SEQ ID NO: 1855567 - RNA, 19 nt, Artificial Sequence
  Description of Artificial Sequence: Synthetic oligonucleotide
  Sense strand starting at position 894 of SEQ ID NO: 1564105
cgcucauagucaucaggau

SEQ ID NO: 1855568 - RNA, 19 nt, Artificial Sequence
  Description of Artificial Sequence: Synthetic oligonucleotide
  Antisense strand to SEQ ID NO: 1855567
auccugaugacuaugagcg

SEQ ID NO: 1855569 - RNA, 19 nt, Artificial Sequence
  Description of Artificial Sequence: Synthetic oligonucleotide
  Sense strand starting at position 895 of SEQ ID NO: 1564105
gcucauagucaucaggauu

SEQ ID NO: 1855570 - RNA, 19 nt, Artificial Sequence
  Description of Artificial Sequence: Synthetic oligonucleotide
  Antisense strand to SEQ ID NO: 1855569
aauccugaugacuaugagc

SEQ ID NO: 1855571 - RNA, 19 nt, Artificial Sequence
  Description of Artificial Sequence: Synthetic oligonucleotide
  Sense strand starting at position 1131 of SEQ ID NO: 1564105
uuagauuugucccagggca

SEQ ID NO: 1855572 - RNA, 19 nt, Artificial Sequence
  Description of Artificial Sequence: Synthetic oligonucleotide
  Antisense strand to SEQ ID NO: 1855571
ugcccugggacaaaucuaa

SEQ ID NO: 1855573 - RNA, 19 nt, Artificial Sequence
  Description of Artificial Sequence: Synthetic oligonucleotide
  Sense strand starting at position 1157 of SEQ ID NO: 1564105
guccauugcuugccaagga

SEQ ID NO: 1855574 - RNA, 19 nt, Artificial Sequence
  Description of Artificial Sequence: Synthetic oligonucleotide
  Antisense strand to SEQ ID NO: 1855573
uccuuggcaagcaauggac

SEQ ID NO: 1855575 - RNA, 19 nt, Artificial Sequence
  Description of Artificial Sequence: Synthetic oligonucleotide
  Sense strand starting at position 1158 of SEQ ID NO: 1564105
uccauugcuugccaaggau

SEQ ID NO: 1855576 - RNA, 19 nt, Artificial Sequence
  Description of Artificial Sequence: Synthetic oligonucleotide
  Antisense strand to SEQ ID NO: 1855575
auccuuggcaagcaaugga

SEQ ID NO: 1855577 - RNA, 19 nt, Artificial Sequence
  Description of Artificial Sequence: Synthetic oligonucleotide
  Sense strand starting at position 1161 of SEQ ID NO: 1564105
auugcuugccaaggaucaa

SEQ ID NO: 1855578 - RNA, 19 nt, Artificial Sequence
  Description of Artificial Sequence: Synthetic oligonucleotide
  Antisense strand to SEQ ID NO: 1855577
uugauccuuggcaagcaau

SEQ ID NO: 1855579 - RNA, 19 nt, Artificial Sequence
  Description of Artificial Sequence: Synthetic oligonucleotide
  Sense strand starting at position 2635 of SEQ ID NO: 1564105
cccgcucuucccggcaaau

SEQ ID NO: 1855580 - RNA, 19 nt, Artificial Sequence
  Description of Artificial Sequence: Synthetic oligonucleotide
  Antisense strand to SEQ ID NO: 1855579
auuugccgggaagagcggg

SEQ ID NO: 1855581 - RNA, 19 nt, Artificial Sequence
  Description of Artificial Sequence: Synthetic oligonucleotide
  Sense strand starting at position 2928 of SEQ ID NO: 1564105
gacaaucugucccggacuu

SEQ ID NO: 1855582 - RNA, 19 nt, Artificial Sequence
  Description of Artificial Sequence: Synthetic oligonucleotide
  Antisense strand to SEQ ID NO: 1855581
aaguccgggacagauuguc

SEQ ID NO: 1855583 - RNA, 19 nt, Artificial Sequence
  Description of Artificial Sequence: Synthetic oligonucleotide
  Sense strand starting at position 2929 of SEQ ID NO: 1564105
acaaucugucccggacuua

SEQ ID NO: 1855584 - RNA, 19 nt, Artificial Sequence
  Description of Artificial Sequence: Synthetic oligonucleotide
  Antisense strand to SEQ ID NO: 1855583
uaaguccgggacagauugu

SEQ ID NO: 1855585 - RNA, 19 nt, Artificial Sequence
  Description of Artificial Sequence: Synthetic oligonucleotide
  Sense strand starting at position 3353 of SEQ ID NO: 1564105
ggucuacgcgucuaaugca

SEQ ID NO: 1855586 - RNA, 19 nt, Artificial Sequence
  Description of Artificial Sequence: Synthetic oligonucleotide
  Antisense strand to SEQ ID NO: 1855585
ugcauuagacgcguagacc

SEQ ID NO: 1855587 - RNA, 19 nt, Artificial Sequence
  Description of Artificial Sequence: Synthetic oligonucleotide
  Sense strand starting at position 3358 of SEQ ID NO: 1564105
acgcgucuaaugcacuaaa

SEQ ID NO: 1855588 - RNA, 19 nt, Artificial Sequence
  Description of Artificial Sequence: Synthetic oligonucleotide
  Antisense strand to SEQ ID NO: 1855587
uuuagugcauuagacgcgu

SEQ ID NO: 1855589 - RNA, 19 nt, Artificial Sequence
  Description of Artificial Sequence: Synthetic oligonucleotide
  Sense strand starting at position 3361 of SEQ ID NO: 1564105
cgucuaaugcacuaaacgu

SEQ ID NO: 1855590 - RNA, 19 nt, Artificial Sequence
  Description of Artificial Sequence: Synthetic oligonucleotide
  Antisense strand to SEQ ID NO: 1855589
acguuuagugcauuagacg

SEQ ID NO: 1855591 - RNA, 19 nt, Artificial Sequence
  Description of Artificial Sequence: Synthetic oligonucleotide
  Sense strand starting at position 3379 of SEQ ID NO: 1564105
ugaagucguggugucguua

SEQ ID NO: 1855592 - RNA, 19 nt, Artificial Sequence
  Description of Artificial Sequence: Synthetic oligonucleotide
  Antisense strand to SEQ ID NO: 1855591
uaacgacaccacgacuuca

SEQ ID NO: 1855593 - RNA, 19 nt, Artificial Sequence
  Description of Artificial Sequence: Synthetic oligonucleotide
  Sense strand starting at position 3383 of SEQ ID NO: 1564105
gucguggugucguuaccaa

SEQ ID NO: 1855594 - RNA, 19 nt, Artificial Sequence
  Description of Artificial Sequence: Synthetic oligonucleotide
  Antisense strand to SEQ ID NO: 1855593
uugguaacgacaccacgac

SEQ ID NO: 1855595 - RNA, 19 nt, Artificial Sequence
  Description of Artificial Sequence: Synthetic oligonucleotide
  Sense strand starting at position 3525 of SEQ ID NO: 1564105
ugcgcuagaugccuguaaa

SEQ ID NO: 1855596 - RNA, 19 nt, Artificial Sequence
  Description of Artificial Sequence: Synthetic oligonucleotide
  Antisense strand to SEQ ID NO: 1855595
uuuacaggcaucuagcgca

SEQ ID NO: 1855597 - RNA, 19 nt, Artificial Sequence
  Description of Artificial Sequence: Synthetic oligonucleotide
  Sense strand starting at position 3526 of SEQ ID NO: 1564105
gcgcuagaugccuguaaau

SEQ ID NO: 1855598 - RNA, 19 nt, Artificial Sequence
  Description of Artificial Sequence: Synthetic oligonucleotide
  Antisense strand to SEQ ID NO: 1855597
auuuacaggcaucuagcgc

SEQ ID NO: 1855599 - RNA, 19 nt, Artificial Sequence
  Description of Artificial Sequence: Synthetic oligonucleotide
  Sense strand starting at position 3528 of SEQ ID NO: 1564105
gcuagaugccuguaaauac

SEQ ID NO: 1855600 - RNA, 19 nt, Artificial Sequence
  Description of Artificial Sequence: Synthetic oligonucleotide
  Antisense strand to SEQ ID NO: 1855599
guauuuacaggcaucuagc

SEQ ID NO: 1855601 - RNA, 19 nt, Artificial Sequence
  Description of Artificial Sequence: Synthetic oligonucleotide
  Sense strand starting at position 3612 of SEQ ID NO: 1564105
gcugccauaugagaggaau

SEQ ID NO: 1855602 - RNA, 19 nt, Artificial Sequence
  Description of Artificial Sequence: Synthetic oligonucleotide
  Antisense strand to SEQ ID NO: 1855601
auuccucucauauggcagc

SEQ ID NO: 1855603 - RNA, 19 nt, Artificial Sequence
  Description of Artificial Sequence: Synthetic oligonucleotide
  Sense strand starting at position 3614 of SEQ ID NO: 1564105
ugccauaugagaggaauca

SEQ ID NO: 1855604 - RNA, 19 nt, Artificial Sequence
  Description of Artificial Sequence: Synthetic oligonucleotide
  Antisense strand to SEQ ID NO: 1855603
ugauuccucucauauggca

SEQ ID NO: 1855605 - RNA, 19 nt, Artificial Sequence
  Description of Artificial Sequence: Synthetic oligonucleotide
  Sense strand starting at position 3673 of SEQ ID NO: 1564105
aaggcauugcccgaacaga

SEQ ID NO: 1855606 - RNA, 19 nt, Artificial Sequence
  Description of Artificial Sequence: Synthetic oligonucleotide
  Antisense strand to SEQ ID NO: 1855605
ucuguucgggcaaugccuu

SEQ ID NO: 1855607 - RNA, 19 nt, Artificial Sequence
  Description of Artificial Sequence: Synthetic oligonucleotide
  Sense strand starting at position 3698 of SEQ ID NO: 1564105
cccuuauugcccuaagguu

SEQ ID NO: 1855608 - RNA, 19 nt, Artificial Sequence
  Description of Artificial Sequence: Synthetic oligonucleotide
  Antisense strand to SEQ ID NO: 1855607
aaccuuagggcaauaaggg

SEQ ID NO: 1855609 - RNA, 19 nt, Artificial Sequence
  Description of Artificial Sequence: Synthetic oligonucleotide
  Sense strand starting at position 3705 of SEQ ID NO: 1564105
ugcccuaagguuuauuauu

SEQ ID NO: 1855610 - RNA, 19 nt, Artificial Sequence
  Description of Artificial Sequence: Synthetic oligonucleotide
  Antisense strand to SEQ ID NO: 1855609
aauaauaaaccuuagggca

SEQ ID NO: 1855611 - RNA, 19 nt, Artificial Sequence
  Description of Artificial Sequence: Synthetic oligonucleotide
  Sense strand starting at position 3770 of SEQ ID NO: 1564105
uuauuagccuaagaucaug

SEQ ID NO: 1855612 - RNA, 19 nt, Artificial Sequence
  Description of Artificial Sequence: Synthetic oligonucleotide
  Antisense strand to SEQ ID NO: 1855611
caugaucuuaggcuaauaa

SEQ ID NO: 1855613 - RNA, 19 nt, Artificial Sequence
  Description of Artificial Sequence: Synthetic oligonucleotide
  Sense strand starting at position 3815 of SEQ ID NO: 1564105
caaggcaggucuccauaua

SEQ ID NO: 1855614 - RNA, 19 nt, Artificial Sequence
  Description of Artificial Sequence: Synthetic oligonucleotide
  Antisense strand to SEQ ID NO: 1855613
uauauggagaccugccuug

SEQ ID NO: 1855615 - RNA, 19 nt, Artificial Sequence
  Description of Artificial Sequence: Synthetic oligonucleotide
  Sense strand starting at position 3816 of SEQ ID NO: 1564105
aaggcaggucuccauauaa

SEQ ID NO: 1855616 - RNA, 19 nt, Artificial Sequence
  Description of Artificial Sequence: Synthetic oligonucleotide
  Antisense strand to SEQ ID NO: 1855615
uuauauggagaccugccuu

SEQ ID NO: 1855617 - RNA, 19 nt, Artificial Sequence
  Description of Artificial Sequence: Synthetic oligonucleotide
  Sense strand starting at position 3826 of SEQ ID NO: 1564105
uccauauaacgagaagcuu

SEQ ID NO: 1855618 - RNA, 19 nt, Artificial Sequence
  Description of Artificial Sequence: Synthetic oligonucleotide
  Antisense strand to SEQ ID NO: 1855617
aagcuucucguuauaugga

SEQ ID NO: 1855619 - RNA, 19 nt, Artificial Sequence
  Description of Artificial Sequence: Synthetic oligonucleotide
  Sense strand starting at position 3914 of SEQ ID NO: 1564105
gcaggaucugacugcacua

SEQ ID NO: 1855620 - RNA, 19 nt, Artificial Sequence
  Description of Artificial Sequence: Synthetic oligonucleotide
  Antisense strand to SEQ ID NO: 1855619
uagugcagucagauccugc

SEQ ID NO: 1855621 - RNA, 19 nt, Artificial Sequence
  Description of Artificial Sequence: Synthetic oligonucleotide
  Sense strand starting at position 3962 of SEQ ID NO: 1564105
ucaagaugggccuggaauu

SEQ ID NO: 1855622 - RNA, 19 nt, Artificial Sequence
  Description of Artificial Sequence: Synthetic oligonucleotide
  Antisense strand to SEQ ID NO: 1855621
aauuccaggcccaucuuga

SEQ ID NO: 1855623 - RNA, 19 nt, Artificial Sequence
  Description of Artificial Sequence: Synthetic oligonucleotide
  Sense strand starting at position 118 of SEQ ID NO: 1564106
aguagucauaucuaaggua

SEQ ID NO: 1855624 - RNA, 19 nt, Artificial Sequence
  Description of Artificial Sequence: Synthetic oligonucleotide
  Antisense strand to SEQ ID NO: 1855623
uaccuuagauaugacuacu

SEQ ID NO: 1855625 - RNA, 19 nt, Artificial Sequence
  Description of Artificial Sequence: Synthetic oligonucleotide
  Sense strand starting at position 232 of SEQ ID NO: 1564106
cggagaauuugauagacua

SEQ ID NO: 1855626 - RNA, 19 nt, Artificial Sequence
  Description of Artificial Sequence: Synthetic oligonucleotide
  Antisense strand to SEQ ID NO: 1855625
uagucuaucaaauucuccg

SEQ ID NO: 1855627 - RNA, 19 nt, Artificial Sequence
  Description of Artificial Sequence: Synthetic oligonucleotide
  Sense strand starting at position 283 of SEQ ID NO: 1564106
guuacauugcccuauacua

SEQ ID NO: 1855628 - RNA, 19 nt, Artificial Sequence
  Description of Artificial Sequence: Synthetic oligonucleotide
  Antisense strand to SEQ ID NO: 1855627
uaguauagggcaauguaac

SEQ ID NO: 1855629 - RNA, 19 nt, Artificial Sequence
  Description of Artificial Sequence: Synthetic oligonucleotide
  Sense strand starting at position 449 of SEQ ID NO: 1564106
aaugcacuuuggguauaau

SEQ ID NO: 1855630 - RNA, 19 nt, Artificial Sequence
  Description of Artificial Sequence: Synthetic oligonucleotide
  Antisense strand to SEQ ID NO: 1855629
auuauacccaaagugcauu

SEQ ID NO: 1855631 - RNA, 19 nt, Artificial Sequence
  Description of Artificial Sequence: Synthetic oligonucleotide
  Sense strand starting at position 452 of SEQ ID NO: 1564106
gcacuuuggguauaaucau

SEQ ID NO: 1855632 - RNA, 19 nt, Artificial Sequence
  Description of Artificial Sequence: Synthetic oligonucleotide
  Antisense strand to SEQ ID NO: 1855631
augauuauacccaaagugc

SEQ ID NO: 1855633 - RNA, 19 nt, Artificial Sequence
  Description of Artificial Sequence: Synthetic oligonucleotide
  Sense strand starting at position 458 of SEQ ID NO: 1564106
uggguauaaucauauuuga

SEQ ID NO: 1855634 - RNA, 19 nt, Artificial Sequence
  Description of Artificial Sequence: Synthetic oligonucleotide
  Antisense strand to SEQ ID NO: 1855633
ucaaauaugauuauaccca

SEQ ID NO: 1855635 - RNA, 19 nt, Artificial Sequence
  Description of Artificial Sequence: Synthetic oligonucleotide
  Sense strand starting at position 481 of SEQ ID NO: 1564106
cacagauauucguucuagc

SEQ ID NO: 1855636 - RNA, 19 nt, Artificial Sequence
  Description of Artificial Sequence: Synthetic oligonucleotide
  Antisense strand to SEQ ID NO: 1855635
gcuagaacgaauaucugug

SEQ ID NO: 1855637 - RNA, 19 nt, Artificial Sequence
  Description of Artificial Sequence: Synthetic oligonucleotide
  Sense strand starting at position 617 of SEQ ID NO: 1564106
aucaaaguagugcguuaga

SEQ ID NO: 1855638 - RNA, 19 nt, Artificial Sequence
  Description of Artificial Sequence: Synthetic oligonucleotide
  Antisense strand to SEQ ID NO: 1855637
ucuaacgcacuacuuugau

SEQ ID NO: 1855639 - RNA, 19 nt, Artificial Sequence
  Description of Artificial Sequence: Synthetic oligonucleotide
  Sense strand starting at position 620 of SEQ ID NO: 1564106
aaaguagugcguuagagaa

SEQ ID NO: 1855640 - RNA, 19 nt, Artificial Sequence
  Description of Artificial Sequence: Synthetic oligonucleotide
  Antisense strand to SEQ ID NO: 1855639
uucucuaacgcacuacuuu

SEQ ID NO: 1855641 - RNA, 19 nt, Artificial Sequence
  Description of Artificial Sequence: Synthetic oligonucleotide
  Sense strand starting at position 645 of SEQ ID NO: 1564106
aguacuaaacuguguagua

SEQ ID NO: 1855642 - RNA, 19 nt, Artificial Sequence
  Description of Artificial Sequence: Synthetic oligonucleotide
  Antisense strand to SEQ ID NO: 1855641
uacuacacaguuuaguacu

SEQ ID NO: 1855643 - RNA, 19 nt, Artificial Sequence
  Description of Artificial Sequence: Synthetic oligonucleotide
  Sense strand starting at position 646 of SEQ ID NO: 1564106
guacuaaacuguguaguac

SEQ ID NO: 1855644 - RNA, 19 nt, Artificial Sequence
  Description of Artificial Sequence: Synthetic oligonucleotide
  Antisense strand to SEQ ID NO: 1855643
guacuacacaguuuaguac

SEQ ID NO: 1855645 - RNA, 19 nt, Artificial Sequence
  Description of Artificial Sequence: Synthetic oligonucleotide
  Sense strand starting at position 703 of SEQ ID NO: 1564106
ccagcaugggauugacuaa

SEQ ID NO: 1855646 - RNA, 19 nt, Artificial Sequence
  Description of Artificial Sequence: Synthetic oligonucleotide
  Antisense strand to SEQ ID NO: 1855645
uuagucaaucccaugcugg

SEQ ID NO: 1855647 - RNA, 19 nt, Artificial Sequence
  Description of Artificial Sequence: Synthetic oligonucleotide
  Sense strand starting at position 914 of SEQ ID NO: 1564106
agagaauucccuuguugac

SEQ ID NO: 1855648 - RNA, 19 nt, Artificial Sequence
  Description of Artificial Sequence: Synthetic oligonucleotide
  Antisense strand to SEQ ID NO: 1855647
gucaacaagggaauucucu

SEQ ID NO: 1855649 - RNA, 19 nt, Artificial Sequence
  Description of Artificial Sequence: Synthetic oligonucleotide
  Sense strand starting at position 932 of SEQ ID NO: 1564106
cugaaacaguaucagacaa

SEQ ID NO: 1855650 - RNA, 19 nt, Artificial Sequence
  Description of Artificial Sequence: Synthetic oligonucleotide
  Antisense strand to SEQ ID NO: 1855649
uugucugauacuguuucag

SEQ ID NO: 1855651 - RNA, 19 nt, Artificial Sequence
  Description of Artificial Sequence: Synthetic oligonucleotide
  Sense strand starting at position 934 of SEQ ID NO: 1564106
gaaacaguaucagacaaga

SEQ ID NO: 1855652 - RNA, 19 nt, Artificial Sequence
  Description of Artificial Sequence: Synthetic oligonucleotide
  Antisense strand to SEQ ID NO: 1855651
ucuugucugauacuguuuc

SEQ ID NO: 1855653 - RNA, 19 nt, Artificial Sequence
  Description of Artificial Sequence: Synthetic oligonucleotide
  Sense strand starting at position 943 of SEQ ID NO: 1564106
ucagacaagaagugugaua

SEQ ID NO: 1855654 - RNA, 19 nt, Artificial Sequence
  Description of Artificial Sequence: Synthetic oligonucleotide
  Antisense strand to SEQ ID NO: 1855653
uaucacacuucuugucuga

SEQ ID NO: 1855655 - RNA, 19 nt, Artificial Sequence
  Description of Artificial Sequence: Synthetic oligonucleotide
  Sense strand starting at position 948 of SEQ ID NO: 1564106
caagaagugugauaaggag

SEQ ID NO: 1855656 - RNA, 19 nt, Artificial Sequence
  Description of Artificial Sequence: Synthetic oligonucleotide
  Antisense strand to SEQ ID NO: 1855655
cuccuuaucacacuucuug

SEQ ID NO: 1855657 - RNA, 19 nt, Artificial Sequence
  Description of Artificial Sequence: Synthetic oligonucleotide
  Sense strand starting at position 955 of SEQ ID NO: 1564106
ugugauaaggagcauguua

SEQ ID NO: 1855658 - RNA, 19 nt, Artificial Sequence
  Description of Artificial Sequence: Synthetic oligonucleotide
  Antisense strand to SEQ ID NO: 1855657
uaacaugcuccuuaucaca

SEQ ID NO: 1855659 - RNA, 19 nt, Artificial Sequence
  Description of Artificial Sequence: Synthetic oligonucleotide
  Sense strand starting at position 957 of SEQ ID NO: 1564106
ugauaaggagcauguuaug

SEQ ID NO: 1855660 - RNA, 19 nt, Artificial Sequence
  Description of Artificial Sequence: Synthetic oligonucleotide
  Antisense strand to SEQ ID NO: 1855659
cauaacaugcuccuuauca

SEQ ID NO: 1855661 - RNA, 19 nt, Artificial Sequence
  Description of Artificial Sequence: Synthetic oligonucleotide
  Sense strand starting at position 963 of SEQ ID NO: 1564106
ggagcauguuauguugaaa

SEQ ID NO: 1855662 - RNA, 19 nt, Artificial Sequence
  Description of Artificial Sequence: Synthetic oligonucleotide
  Antisense strand to SEQ ID NO: 1855661
uuucaacauaacaugcucc

SEQ ID NO: 1855663 - RNA, 19 nt, Artificial Sequence
  Description of Artificial Sequence: Synthetic oligonucleotide
  Sense strand starting at position 1043 of SEQ ID NO: 1564106
guguuuaacaacgaaguga

SEQ ID NO: 1855664 - RNA, 19 nt, Artificial Sequence
  Description of Artificial Sequence: Synthetic oligonucleotide
  Antisense strand to SEQ ID NO: 1855663
ucacuucguuguuaaacac

SEQ ID NO: 1855665 - RNA, 19 nt, Artificial Sequence
  Description of Artificial Sequence: Synthetic oligonucleotide
  Sense strand starting at position 1227 of SEQ ID NO: 1564106
caaagaacucgaugaugua

SEQ ID NO: 1855666 - RNA, 19 nt, Artificial Sequence
  Description of Artificial Sequence: Synthetic oligonucleotide
  Antisense strand to SEQ ID NO: 1855665
uacaucaucgaguucuuug

SEQ ID NO: 1855667 - RNA, 19 nt, Artificial Sequence
  Description of Artificial Sequence: Synthetic oligonucleotide
  Sense strand starting at position 1269 of SEQ ID NO: 1564106
ucaugauaacgcuaggcau

SEQ ID NO: 1855668 - RNA, 19 nt, Artificial Sequence
  Description of Artificial Sequence: Synthetic oligonucleotide
  Antisense strand to SEQ ID NO: 1855667
augccuagcguuaucauga

SEQ ID NO: 1855669 - RNA, 19 nt, Artificial Sequence
  Description of Artificial Sequence: Synthetic oligonucleotide
  Sense strand starting at position 1319 of SEQ ID NO: 1564106
aggaaucacugacaggaaa

SEQ ID NO: 1855670 - RNA, 19 nt, Artificial Sequence
  Description of Artificial Sequence: Synthetic oligonucleotide
  Antisense strand to SEQ ID NO: 1855669
uuuccugucagugauuccu

SEQ ID NO: 1855671 - RNA, 19 nt, Artificial Sequence
  Description of Artificial Sequence: Synthetic oligonucleotide
  Sense strand starting at position 1338 of SEQ ID NO: 1564106
ccauaaaugucccugcugu

SEQ ID NO: 1855672 - RNA, 19 nt, Artificial Sequence
  Description of Artificial Sequence: Synthetic oligonucleotide
  Antisense strand to SEQ ID NO: 1855671
acagcagggacauuuaugg

SEQ ID NO: 1855673 - RNA, 19 nt, Artificial Sequence
  Description of Artificial Sequence: Synthetic oligonucleotide
  Sense strand starting at position 1353 of SEQ ID NO: 1564106
cuguuauccugucugagaa

SEQ ID NO: 1855674 - RNA, 19 nt, Artificial Sequence
  Description of Artificial Sequence: Synthetic oligonucleotide
  Antisense strand to SEQ ID NO: 1855673
uucucagacaggauaacag

SEQ ID NO: 1855675 - RNA, 19 nt, Artificial Sequence
  Description of Artificial Sequence: Synthetic oligonucleotide
  Sense strand starting at position 1382 of SEQ ID NO: 1564106
guugauaacagcugucaug

SEQ ID NO: 1855676 - RNA, 19 nt, Artificial Sequence
  Description of Artificial Sequence: Synthetic oligonucleotide
  Antisense strand to SEQ ID NO: 1855675
caugacagcuguuaucaac

SEQ ID NO: 1855677 - RNA, 19 nt, Artificial Sequence
  Description of Artificial Sequence: Synthetic oligonucleotide
  Sense strand starting at position 2187 of SEQ ID NO: 1564106
cagcuaaggcgugagaauu

SEQ ID NO: 1855678 - RNA, 19 nt, Artificial Sequence
  Description of Artificial Sequence: Synthetic oligonucleotide
  Antisense strand to SEQ ID NO: 1855677
aauucucacgccuuagcug

SEQ ID NO: 1855679 - RNA, 19 nt, Artificial Sequence
  Description of Artificial Sequence: Synthetic oligonucleotide
  Sense strand starting at position 2321 of SEQ ID NO: 1564106
guaucagggcuugaggagu

SEQ ID NO: 1855680 - RNA, 19 nt, Artificial Sequence
  Description of Artificial Sequence: Synthetic oligonucleotide
  Antisense strand to SEQ ID NO: 1855679
acuccucaagcccugauac

SEQ ID NO: 1855681 - RNA, 19 nt, Artificial Sequence
  Description of Artificial Sequence: Synthetic oligonucleotide
  Sense strand starting at position 2921 of SEQ ID NO: 1564106
ccuacuggacgucagacau

SEQ ID NO: 1855682 - RNA, 19 nt, Artificial Sequence
  Description of Artificial Sequence: Synthetic oligonucleotide
  Antisense strand to SEQ ID NO: 1855681
augucugacguccaguagg

SEQ ID NO: 1855683 - RNA, 19 nt, Artificial Sequence
  Description of Artificial Sequence: Synthetic oligonucleotide
  Sense strand starting at position 2931 of SEQ ID NO: 1564106
gucagacauuaaccaguga

SEQ ID NO: 1855684 - RNA, 19 nt, Artificial Sequence
  Description of Artificial Sequence: Synthetic oligonucleotide
  Antisense strand to SEQ ID NO: 1855683
ucacugguuaaugucugac

SEQ ID NO: 1855685 - RNA, 19 nt, Artificial Sequence
  Description of Artificial Sequence: Synthetic oligonucleotide
  Sense strand starting at position 3191 of SEQ ID NO: 1564106
gggugauuccauuagccaa

SEQ ID NO: 1855686 - RNA, 19 nt, Artificial Sequence
  Description of Artificial Sequence: Synthetic oligonucleotide
  Antisense strand to SEQ ID NO: 1855685
uuggcuaauggaaucaccc

SEQ ID NO: 1855687 - RNA, 19 nt, Artificial Sequence
  Description of Artificial Sequence: Synthetic oligonucleotide
  Sense strand starting at position 3210 of SEQ ID NO: 1564106
ugugcuaugacguccgauu

SEQ ID NO: 1855688 - RNA, 19 nt, Artificial Sequence
  Description of Artificial Sequence: Synthetic oligonucleotide
  Antisense strand to SEQ ID NO: 1855687
aaucggacgucauagcaca

SEQ ID NO: 1855689 - RNA, 19 nt, Artificial Sequence
  Description of Artificial Sequence: Synthetic oligonucleotide
  Sense strand starting at position 3271 of SEQ ID NO: 1564106
cccuaaucacgcgagagua

SEQ ID NO: 1855690 - RNA, 19 nt, Artificial Sequence
  Description of Artificial Sequence: Synthetic oligonucleotide
  Antisense strand to SEQ ID NO: 1855689
uacucucgcgugauuaggg

SEQ ID NO: 1855691 - RNA, 19 nt, Artificial Sequence
  Description of Artificial Sequence: Synthetic oligonucleotide
  Sense strand starting at position 3300 of SEQ ID NO: 1564106
ggguuuauugcuuaugugu

SEQ ID NO: 1855692 - RNA, 19 nt, Artificial Sequence
  Description of Artificial Sequence: Synthetic oligonucleotide
  Antisense strand to SEQ ID NO: 1855691
acacauaagcaauaaaccc

SEQ ID NO: 1855693 - RNA, 19 nt, Artificial Sequence
  Description of Artificial Sequence: Synthetic oligonucleotide
  Sense strand starting at position 3380 of SEQ ID NO: 1564106
ggaacuauguucuuccaaa

SEQ ID NO: 1855694 - RNA, 19 nt, Artificial Sequence
  Description of Artificial Sequence: Synthetic oligonucleotide
  Antisense strand to SEQ ID NO: 1855693
uuuggaagaacauaguucc

SEQ ID NO: 1855695 - RNA, 19 nt, Artificial Sequence
  Description of Artificial Sequence: Synthetic oligonucleotide
  Sense strand starting at position 3800 of SEQ ID NO: 1564106
acgauaauauuagcugaca

SEQ ID NO: 1855696 - RNA, 19 nt, Artificial Sequence
  Description of Artificial Sequence: Synthetic oligonucleotide
  Antisense strand to SEQ ID NO: 1855695
ugucagcuaauauuaucgu

SEQ ID NO: 1855697 - RNA, 19 nt, Artificial Sequence
  Description of Artificial Sequence: Synthetic oligonucleotide
  Sense strand starting at position 3801 of SEQ ID NO: 1564106
cgauaauauuagcugacau

SEQ ID NO: 1855698 - RNA, 19 nt, Artificial Sequence
  Description of Artificial Sequence: Synthetic oligonucleotide
  Antisense strand to SEQ ID NO: 1855697
augucagcuaauauuaucg

SEQ ID NO: 1855699 - RNA, 19 nt, Artificial Sequence
  Description of Artificial Sequence: Synthetic oligonucleotide
  Sense strand starting at position 3844 of SEQ ID NO: 1564106
gggugaugccaagagcuuu

SEQ ID NO: 1855700 - RNA, 19 nt, Artificial Sequence
  Description of Artificial Sequence: Synthetic oligonucleotide
  Antisense strand to SEQ ID NO: 1855699
aaagcucuuggcaucaccc

SEQ ID NO: 1855701 - RNA, 19 nt, Artificial Sequence
  Description of Artificial Sequence: Synthetic oligonucleotide
  Sense strand starting at position 3906 of SEQ ID NO: 1564106
cccuuugacgguugagaac

SEQ ID NO: 1855702 - RNA, 19 nt, Artificial Sequence
  Description of Artificial Sequence: Synthetic oligonucleotide
  Antisense strand to SEQ ID NO: 1855701
guucucaaccgucaaaggg

SEQ ID NO: 1855703 - RNA, 19 nt, Artificial Sequence
  Description of Artificial Sequence: Synthetic oligonucleotide
  Sense strand starting at position 3 of SEQ ID NO: 1564107
gacuuaauguagccugacu

SEQ ID NO: 1855704 - RNA, 19 nt, Artificial Sequence
  Description of Artificial Sequence: Synthetic oligonucleotide
  Antisense strand to SEQ ID NO: 1855703
agucaggcuacauuaaguc

SEQ ID NO: 1855705 - RNA, 19 nt, Artificial Sequence
  Description of Artificial Sequence: Synthetic oligonucleotide
  Sense strand starting at position 5 of SEQ ID NO: 1564107
cuuaauguagccugacuaa

SEQ ID NO: 1855706 - RNA, 19 nt, Artificial Sequence
  Description of Artificial Sequence: Synthetic oligonucleotide
  Antisense strand to SEQ ID NO: 1855705
uuagucaggcuacauuaag

SEQ ID NO: 1855707 - RNA, 19 nt, Artificial Sequence
  Description of Artificial Sequence: Synthetic oligonucleotide
  Sense strand starting at position 16 of SEQ ID NO: 1564107
cugacuaaauuagugucaa

SEQ ID NO: 1855708 - RNA, 19 nt, Artificial Sequence
  Description of Artificial Sequence: Synthetic oligonucleotide
  Antisense strand to SEQ ID NO: 1855707
uugacacuaauuuagucag

SEQ ID NO: 1855709 - RNA, 19 nt, Artificial Sequence
  Description of Artificial Sequence: Synthetic oligonucleotide
  Sense strand starting at position 48 of SEQ ID NO: 1564107
ggcagcaugauguaacaga

SEQ ID NO: 1855710 - RNA, 19 nt, Artificial Sequence
  Description of Artificial Sequence: Synthetic oligonucleotide
  Antisense strand to SEQ ID NO: 1855709
ucuguuacaucaugcugcc

SEQ ID NO: 1855711 - RNA, 19 nt, Artificial Sequence
  Description of Artificial Sequence: Synthetic oligonucleotide
  Sense strand starting at position 252 of SEQ ID NO: 1564107
gcagaagagccacaauacu

SEQ ID NO: 1855712 - RNA, 19 nt, Artificial Sequence
  Description of Artificial Sequence: Synthetic oligonucleotide
  Antisense strand to SEQ ID NO: 1855711
aguauuguggcucuucugc

SEQ ID NO: 1855713 - RNA, 19 nt, Artificial Sequence
  Description of Artificial Sequence: Synthetic oligonucleotide
  Sense strand starting at position 339 of SEQ ID NO: 1564107
ccacacuacuuuguagaga

SEQ ID NO: 1855714 - RNA, 19 nt, Artificial Sequence
  Description of Artificial Sequence: Synthetic oligonucleotide
  Antisense strand to SEQ ID NO: 1855713
ucucuacaaaguagugugg

SEQ ID NO: 1855715 - RNA, 19 nt, Artificial Sequence
  Description of Artificial Sequence: Synthetic oligonucleotide
  Sense strand starting at position 386 of SEQ ID NO: 1564107
cauuaagacucagaggaga

SEQ ID NO: 1855716 - RNA, 19 nt, Artificial Sequence
  Description of Artificial Sequence: Synthetic oligonucleotide
  Antisense strand to SEQ ID NO: 1855715
ucuccucugagucuuaaug

SEQ ID NO: 1855717 - RNA, 19 nt, Artificial Sequence
  Description of Artificial Sequence: Synthetic oligonucleotide
  Sense strand starting at position 472 of SEQ ID NO: 1564107
acuaaaugucaugguccca

SEQ ID NO: 1855718 - RNA, 19 nt, Artificial Sequence
  Description of Artificial Sequence: Synthetic oligonucleotide
  Antisense strand to SEQ ID NO: 1855717
ugggaccaugacauuuagu

SEQ ID NO: 1855719 - RNA, 19 nt, Artificial Sequence
  Description of Artificial Sequence: Synthetic oligonucleotide
  Sense strand starting at position 557 of SEQ ID NO: 1564107
ggccuagaggccuagguaa

SEQ ID NO: 1855720 - RNA, 19 nt, Artificial Sequence
  Description of Artificial Sequence: Synthetic oligonucleotide
  Antisense strand to SEQ ID NO: 1855719
uuaccuaggccucuaggcc

SEQ ID NO: 1855721 - RNA, 19 nt, Artificial Sequence
  Description of Artificial Sequence: Synthetic oligonucleotide
  Sense strand starting at position 559 of SEQ ID NO: 1564107
ccuagaggccuagguaaua

SEQ ID NO: 1855722 - RNA, 19 nt, Artificial Sequence
  Description of Artificial Sequence: Synthetic oligonucleotide
  Antisense strand to SEQ ID NO: 1855721
uauuaccuaggccucuagg

SEQ ID NO: 1855723 - RNA, 19 nt, Artificial Sequence
  Description of Artificial Sequence: Synthetic oligonucleotide
  Sense strand starting at position 668 of SEQ ID NO: 1564107
acuauuagccgccaagacu

SEQ ID NO: 1855724 - RNA, 19 nt, Artificial Sequence
  Description of Artificial Sequence: Synthetic oligonucleotide
  Antisense strand to SEQ ID NO: 1855723
agucuuggcggcuaauagu

SEQ ID NO: 1855725 - RNA, 19 nt, Artificial Sequence
  Description of Artificial Sequence: Synthetic oligonucleotide
  Sense strand starting at position 740 of SEQ ID NO: 1564107
gagccaaggcgauaucaaa

SEQ ID NO: 1855726 - RNA, 19 nt, Artificial Sequence
  Description of Artificial Sequence: Synthetic oligonucleotide
  Antisense strand to SEQ ID NO: 1855725
uuugauaucgccuuggcuc

SEQ ID NO: 1855727 - RNA, 19 nt, Artificial Sequence
  Description of Artificial Sequence: Synthetic oligonucleotide
  Sense strand starting at position 747 of SEQ ID NO: 1564107
ggcgauaucaaagaugcca

SEQ ID NO: 1855728 - RNA, 19 nt, Artificial Sequence
  Description of Artificial Sequence: Synthetic oligonucleotide
  Antisense strand to SEQ ID NO: 1855727
uggcaucuuugauaucgcc

SEQ ID NO: 1855729 - RNA, 19 nt, Artificial Sequence
  Description of Artificial Sequence: Synthetic oligonucleotide
  Sense strand starting at position 764 of SEQ ID NO: 1564107
cacugugcccacugaauga

SEQ ID NO: 1855730 - RNA, 19 nt, Artificial Sequence
  Description of Artificial Sequence: Synthetic oligonucleotide
  Antisense strand to SEQ ID NO: 1855729
ucauucagugggcacagug

SEQ ID NO: 1855731 - RNA, 19 nt, Artificial Sequence
  Description of Artificial Sequence: Synthetic oligonucleotide
  Sense strand starting at position 1276 of SEQ ID NO: 1564107
ggacucaucucucuggaga

SEQ ID NO: 1855732 - RNA, 19 nt, Artificial Sequence
  Description of Artificial Sequence: Synthetic oligonucleotide
  Antisense strand to SEQ ID NO: 1855731
ucuccagagagaugagucc

SEQ ID NO: 1855733 - RNA, 19 nt, Artificial Sequence
  Description of Artificial Sequence: Synthetic oligonucleotide
  Sense strand starting at position 1277 of SEQ ID NO: 1564107
gacucaucucucuggagag

SEQ ID NO: 1855734 - RNA, 19 nt, Artificial Sequence
  Description of Artificial Sequence: Synthetic oligonucleotide
  Antisense strand to SEQ ID NO: 1855733
cucuccagagagaugaguc

SEQ ID NO: 1855735 - RNA, 19 nt, Artificial Sequence
  Description of Artificial Sequence: Synthetic oligonucleotide
  Sense strand starting at position 2093 of SEQ ID NO: 1564107
gcggauaucaugggcauag

SEQ ID NO: 1855736 - RNA, 19 nt, Artificial Sequence
  Description of Artificial Sequence: Synthetic oligonucleotide
  Antisense strand to SEQ ID NO: 1855735
cuaugcccaugauauccgc

SEQ ID NO: 1855737 - RNA, 19 nt, Artificial Sequence
  Description of Artificial Sequence: Synthetic oligonucleotide
  Sense strand starting at position 2094 of SEQ ID NO: 1564107
cggauaucaugggcauagu

SEQ ID NO: 1855738 - RNA, 19 nt, Artificial Sequence
  Description of Artificial Sequence: Synthetic oligonucleotide
  Antisense strand to SEQ ID NO: 1855737
acuaugcccaugauauccg

SEQ ID NO: 1855739 - RNA, 19 nt, Artificial Sequence
  Description of Artificial Sequence: Synthetic oligonucleotide
  Sense strand starting at position 2481 of SEQ ID NO: 1564107
uacguauguccucauugac

SEQ ID NO: 1855740 - RNA, 19 nt, Artificial Sequence
  Description of Artificial Sequence: Synthetic oligonucleotide
  Antisense strand to SEQ ID NO: 1855739
gucaaugaggacauacgua

SEQ ID NO: 1855741 - RNA, 19 nt, Artificial Sequence
  Description of Artificial Sequence: Synthetic oligonucleotide
  Sense strand starting at position 2484 of SEQ ID NO: 1564107
guauguccucauugacaga

SEQ ID NO: 1855742 - RNA, 19 nt, Artificial Sequence
  Description of Artificial Sequence: Synthetic oligonucleotide
  Antisense strand to SEQ ID NO: 1855741
ucugucaaugaggacauac

SEQ ID NO: 1855743 - RNA, 19 nt, Artificial Sequence
  Description of Artificial Sequence: Synthetic oligonucleotide
  Sense strand starting at position 2535 of SEQ ID NO: 1564107
ucuugaaccuguguaagau

SEQ ID NO: 1855744 - RNA, 19 nt, Artificial Sequence
  Description of Artificial Sequence: Synthetic oligonucleotide
  Antisense strand to SEQ ID NO: 1855743
aucuuacacagguucaaga

SEQ ID NO: 1855745 - RNA, 19 nt, Artificial Sequence
  Description of Artificial Sequence: Synthetic oligonucleotide
  Sense strand starting at position 2536 of SEQ ID NO: 1564107
cuugaaccuguguaagauu

SEQ ID NO: 1855746 - RNA, 19 nt, Artificial Sequence
  Description of Artificial Sequence: Synthetic oligonucleotide
  Antisense strand to SEQ ID NO: 1855745
aaucuuacacagguucaag

SEQ ID NO: 1855747 - RNA, 19 nt, Artificial Sequence
  Description of Artificial Sequence: Synthetic oligonucleotide
  Sense strand starting at position 2681 of SEQ ID NO: 1564107
caaugacugguauggguaa

SEQ ID NO: 1855748 - RNA, 19 nt, Artificial Sequence
  Description of Artificial Sequence: Synthetic oligonucleotide
  Antisense strand to SEQ ID NO: 1855747
uuacccauaccagucauug

SEQ ID NO: 1855749 - RNA, 19 nt, Artificial Sequence
  Description of Artificial Sequence: Synthetic oligonucleotide
  Sense strand starting at position 2694 of SEQ ID NO: 1564107
ggguaagcaguuuauaugu

SEQ ID NO: 1855750 - RNA, 19 nt, Artificial Sequence
  Description of Artificial Sequence: Synthetic oligonucleotide
  Antisense strand to SEQ ID NO: 1855749
acauauaaacugcuuaccc

SEQ ID NO: 1855751 - RNA, 19 nt, Artificial Sequence
  Description of Artificial Sequence: Synthetic oligonucleotide
  Sense strand starting at position 2713 of SEQ ID NO: 1564107
guuaguucugauuagguau

SEQ ID NO: 1855752 - RNA, 19 nt, Artificial Sequence
  Description of Artificial Sequence: Synthetic oligonucleotide
  Antisense strand to SEQ ID NO: 1855751
auaccuaaucagaacuaac

SEQ ID NO: 1855753 - RNA, 19 nt, Artificial Sequence
  Description of Artificial Sequence: Synthetic oligonucleotide
  Sense strand starting at position 2811 of SEQ ID NO: 1564107
ugaaaucuagggcgguuua

SEQ ID NO: 1855754 - RNA, 19 nt, Artificial Sequence
  Description of Artificial Sequence: Synthetic oligonucleotide
  Antisense strand to SEQ ID NO: 1855753
uaaaccgcccuagauuuca

SEQ ID NO: 1855755 - RNA, 19 nt, Artificial Sequence
  Description of Artificial Sequence: Synthetic oligonucleotide
  Sense strand starting at position 2812 of SEQ ID NO: 1564107
gaaaucuagggcgguuuau

SEQ ID NO: 1855756 - RNA, 19 nt, Artificial Sequence
  Description of Artificial Sequence: Synthetic oligonucleotide
  Antisense strand to SEQ ID NO: 1855755
auaaaccgcccuagauuuc

SEQ ID NO: 1855757 - RNA, 19 nt, Artificial Sequence
  Description of Artificial Sequence: Synthetic oligonucleotide
  Sense strand starting at position 2827 of SEQ ID NO: 1564107
uuaugucaguuuccacuaa

SEQ ID NO: 1855758 - RNA, 19 nt, Artificial Sequence
  Description of Artificial Sequence: Synthetic oligonucleotide
  Antisense strand to SEQ ID NO: 1855757
uuaguggaaacugacauaa

SEQ ID NO: 1855759 - RNA, 19 nt, Artificial Sequence
  Description of Artificial Sequence: Synthetic oligonucleotide
  Sense strand starting at position 2905 of SEQ ID NO: 1564107
gguucuguaagcuaagaga

SEQ ID NO: 1855760 - RNA, 19 nt, Artificial Sequence
  Description of Artificial Sequence: Synthetic oligonucleotide
  Antisense strand to SEQ ID NO: 1855759
ucucuuagcuuacagaacc

SEQ ID NO: 1855761 - RNA, 19 nt, Artificial Sequence
  Description of Artificial Sequence: Synthetic oligonucleotide
  Sense strand starting at position 2958 of SEQ ID NO: 1564107
gccagaauccgaggauucu

SEQ ID NO: 1855762 - RNA, 19 nt, Artificial Sequence
  Description of Artificial Sequence: Synthetic oligonucleotide
  Antisense strand to SEQ ID NO: 1855761
agaauccucggauucuggc

SEQ ID NO: 1855763 - RNA, 19 nt, Artificial Sequence
  Description of Artificial Sequence: Synthetic oligonucleotide
  Sense strand starting at position 2964 of SEQ ID NO: 1564107
auccgaggauucuuuaauc

SEQ ID NO: 1855764 - RNA, 19 nt, Artificial Sequence
  Description of Artificial Sequence: Synthetic oligonucleotide
  Antisense strand to SEQ ID NO: 1855763
gauuaaagaauccucggau

SEQ ID NO: 1855765 - RNA, 19 nt, Artificial Sequence
  Description of Artificial Sequence: Synthetic oligonucleotide
  Sense strand starting at position 3094 of SEQ ID NO: 1564107
caagauguuccggguacau

SEQ ID NO: 1855766 - RNA, 19 nt, Artificial Sequence
  Description of Artificial Sequence: Synthetic oligonucleotide
  Antisense strand to SEQ ID NO: 1855765
auguacccggaacaucuug

SEQ ID NO: 1855767 - RNA, 19 nt, Artificial Sequence
  Description of Artificial Sequence: Synthetic oligonucleotide
  Sense strand starting at position 3096 of SEQ ID NO: 1564107
agauguuccggguacauag

SEQ ID NO: 1855768 - RNA, 19 nt, Artificial Sequence
  Description of Artificial Sequence: Synthetic oligonucleotide
  Antisense strand to SEQ ID NO: 1855767
cuauguacccggaacaucu

SEQ ID NO: 1855769 - RNA, 19 nt, Artificial Sequence
  Description of Artificial Sequence: Synthetic oligonucleotide
  Sense strand starting at position 3123 of SEQ ID NO: 1564107
aggcuuguauaguuauuua

SEQ ID NO: 1855770 - RNA, 19 nt, Artificial Sequence
  Description of Artificial Sequence: Synthetic oligonucleotide
  Antisense strand to SEQ ID NO: 1855769
uaaauaacuauacaagccu

SEQ ID NO: 1855771 - RNA, 19 nt, Artificial Sequence
  Description of Artificial Sequence: Synthetic oligonucleotide
  Sense strand starting at position 3215 of SEQ ID NO: 1564107
cugucaaucucacuugagu

SEQ ID NO: 1855772 - RNA, 19 nt, Artificial Sequence
  Description of Artificial Sequence: Synthetic oligonucleotide
  Antisense strand to SEQ ID NO: 1855771
acucaagugagauugacag

SEQ ID NO: 1855773 - RNA, 19 nt, Artificial Sequence
  Description of Artificial Sequence: Synthetic oligonucleotide
  Sense strand starting at position 3223 of SEQ ID NO: 1564107
cucacuugaguaugacauu

SEQ ID NO: 1855774 - RNA, 19 nt, Artificial Sequence
  Description of Artificial Sequence: Synthetic oligonucleotide
  Antisense strand to SEQ ID NO: 1855773
aaugucauacucaagugag

SEQ ID NO: 1855775 - RNA, 19 nt, Artificial Sequence
  Description of Artificial Sequence: Synthetic oligonucleotide
  Sense strand starting at position 3374 of SEQ ID NO: 1564107
gcuugagaaagauguauga

SEQ ID NO: 1855776 - RNA, 19 nt, Artificial Sequence
  Description of Artificial Sequence: Synthetic oligonucleotide
  Antisense strand to SEQ ID NO: 1855775
ucauacaucuuucucaagc

SEQ ID NO: 1855777 - RNA, 19 nt, Artificial Sequence
  Description of Artificial Sequence: Synthetic oligonucleotide
  Sense strand starting at position 3384 of SEQ ID NO: 1564107
gauguaugacucugaagac

SEQ ID NO: 1855778 - RNA, 19 nt, Artificial Sequence
  Description of Artificial Sequence: Synthetic oligonucleotide
  Antisense strand to SEQ ID NO: 1855777
gucuucagagucauacauc

SEQ ID NO: 1855779 - RNA, 19 nt, Artificial Sequence
  Description of Artificial Sequence: Synthetic oligonucleotide
  Sense strand starting at position 3466 of SEQ ID NO: 1564107
ggguacugguacuuccuaa

SEQ ID NO: 1855780 - RNA, 19 nt, Artificial Sequence
  Description of Artificial Sequence: Synthetic oligonucleotide
  Antisense strand to SEQ ID NO: 1855779
uuaggaaguaccaguaccc

SEQ ID NO: 1855781 - RNA, 19 nt, Artificial Sequence
  Description of Artificial Sequence: Synthetic oligonucleotide
  Sense strand starting at position 3575 of SEQ ID NO: 1564107
gagauugggucagccaagu

SEQ ID NO: 1855782 - RNA, 19 nt, Artificial Sequence
  Description of Artificial Sequence: Synthetic oligonucleotide
  Antisense strand to SEQ ID NO: 1855781
acuuggcugacccaaucuc

SEQ ID NO: 1855783 - RNA, 19 nt, Artificial Sequence
  Description of Artificial Sequence: Synthetic oligonucleotide
  Sense strand starting at position 17 of SEQ ID NO: 1564108
ccggaagcauuccugggaa

SEQ ID NO: 1855784 - RNA, 19 nt, Artificial Sequence
  Description of Artificial Sequence: Synthetic oligonucleotide
  Antisense strand to SEQ ID NO: 1855783
uucccaggaaugcuuccgg

SEQ ID NO: 1855785 - RNA, 19 nt, Artificial Sequence
  Description of Artificial Sequence: Synthetic oligonucleotide
  Sense strand starting at position 19 of SEQ ID NO: 1564108
ggaagcauuccugggaaua

SEQ ID NO: 1855786 - RNA, 19 nt, Artificial Sequence
  Description of Artificial Sequence: Synthetic oligonucleotide
  Antisense strand to SEQ ID NO: 1855785
uauucccaggaaugcuucc

SEQ ID NO: 1855787 - RNA, 19 nt, Artificial Sequence
  Description of Artificial Sequence: Synthetic oligonucleotide
  Sense strand starting at position 20 of SEQ ID NO: 1564108
gaagcauuccugggaauag

SEQ ID NO: 1855788 - RNA, 19 nt, Artificial Sequence
  Description of Artificial Sequence: Synthetic oligonucleotide
  Antisense strand to SEQ ID NO: 1855787
cuauucccaggaaugcuuc

SEQ ID NO: 1855789 - RNA, 19 nt, Artificial Sequence
  Description of Artificial Sequence: Synthetic oligonucleotide
  Sense strand starting at position 100 of SEQ ID NO: 1564108
acacgucaucuguacacaa

SEQ ID NO: 1855790 - RNA, 19 nt, Artificial Sequence
  Description of Artificial Sequence: Synthetic oligonucleotide
  Antisense strand to SEQ ID NO: 1855789
uuguguacagaugacgugu

SEQ ID NO: 1855791 - RNA, 19 nt, Artificial Sequence
  Description of Artificial Sequence: Synthetic oligonucleotide
  Sense strand starting at position 117 of SEQ ID NO: 1564108
aaggguugcauuggaugau

SEQ ID NO: 1855792 - RNA, 19 nt, Artificial Sequence
  Description of Artificial Sequence: Synthetic oligonucleotide
  Antisense strand to SEQ ID NO: 1855791
aucauccaaugcaacccuu

SEQ ID NO: 1855793 - RNA, 19 nt, Artificial Sequence
  Description of Artificial Sequence: Synthetic oligonucleotide
  Sense strand starting at position 218 of SEQ ID NO: 1564108
cuaagaacacaacguuaaa

SEQ ID NO: 1855794 - RNA, 19 nt, Artificial Sequence
  Description of Artificial Sequence: Synthetic oligonucleotide
  Antisense strand to SEQ ID NO: 1855793
uuuaacguuguguucuuag

SEQ ID NO: 1855795 - RNA, 19 nt, Artificial Sequence
  Description of Artificial Sequence: Synthetic oligonucleotide
  Sense strand starting at position 804 of SEQ ID NO: 1564108
uuaugccaucucgaucaau

SEQ ID NO: 1855796 - RNA, 19 nt, Artificial Sequence
  Description of Artificial Sequence: Synthetic oligonucleotide
  Antisense strand to SEQ ID NO: 1855795
auugaucgagauggcauaa

SEQ ID NO: 1855797 - RNA, 19 nt, Artificial Sequence
  Description of Artificial Sequence: Synthetic oligonucleotide
  Sense strand starting at position 817 of SEQ ID NO: 1564108
aucaaugcccuuuaaggua

SEQ ID NO: 1855798 - RNA, 19 nt, Artificial Sequence
  Description of Artificial Sequence: Synthetic oligonucleotide
  Antisense strand to SEQ ID NO: 1855797
uaccuuaaagggcauugau

SEQ ID NO: 1855799 - RNA, 19 nt, Artificial Sequence
  Description of Artificial Sequence: Synthetic oligonucleotide
  Sense strand starting at position 914 of SEQ ID NO: 1564108
agaggugaucugcaccagu

SEQ ID NO: 1855800 - RNA, 19 nt, Artificial Sequence
  Description of Artificial Sequence: Synthetic oligonucleotide
  Antisense strand to SEQ ID NO: 1855799
acuggugcagaucaccucu

SEQ ID NO: 1855801 - RNA, 19 nt, Artificial Sequence
  Description of Artificial Sequence: Synthetic oligonucleotide
  Sense strand starting at position 1002 of SEQ ID NO: 1564108
ggagaaaggucauuaccuc

SEQ ID NO: 1855802 - RNA, 19 nt, Artificial Sequence
  Description of Artificial Sequence: Synthetic oligonucleotide
  Antisense strand to SEQ ID NO: 1855801
gagguaaugaccuuucucc

SEQ ID NO: 1855803 - RNA, 19 nt, Artificial Sequence
  Description of Artificial Sequence: Synthetic oligonucleotide
  Sense strand starting at position 1409 of SEQ ID NO: 1564108
ugaggucuucgguaagaac

SEQ ID NO: 1855804 - RNA, 19 nt, Artificial Sequence
  Description of Artificial Sequence: Synthetic oligonucleotide
  Antisense strand to SEQ ID NO: 1855803
guucuuaccgaagaccuca

SEQ ID NO: 1855805 - RNA, 19 nt, Artificial Sequence
  Description of Artificial Sequence: Synthetic oligonucleotide
  Sense strand starting at position 2296 of SEQ ID NO: 1564108
gugagacgcauuugcuaca

SEQ ID NO: 1855806 - RNA, 19 nt, Artificial Sequence
  Description of Artificial Sequence: Synthetic oligonucleotide
  Antisense strand to SEQ ID NO: 1855805
uguagcaaaugcgucucac

SEQ ID NO: 1855807 - RNA, 19 nt, Artificial Sequence
  Description of Artificial Sequence: Synthetic oligonucleotide
  Sense strand starting at position 2354 of SEQ ID NO: 1564108
uagucaaugcgauacuuua

SEQ ID NO: 1855808 - RNA, 19 nt, Artificial Sequence
  Description of Artificial Sequence: Synthetic oligonucleotide
  Antisense strand to SEQ ID NO: 1855807
uaaaguaucgcauugacua

SEQ ID NO: 1855809 - RNA, 19 nt, Artificial Sequence
  Description of Artificial Sequence: Synthetic oligonucleotide
  Sense strand starting at position 2498 of SEQ ID NO: 1564108
ugggauccugucuguauuu

SEQ ID NO: 1855810 - RNA, 19 nt, Artificial Sequence
  Description of Artificial Sequence: Synthetic oligonucleotide
  Antisense strand to SEQ ID NO: 1855809
aaauacagacaggauccca

SEQ ID NO: 1855811 - RNA, 19 nt, Artificial Sequence
  Description of Artificial Sequence: Synthetic oligonucleotide
  Sense strand starting at position 2594 of SEQ ID NO: 1564108
gucuuaauuacugaguugu

SEQ ID NO: 1855812 - RNA, 19 nt, Artificial Sequence
  Description of Artificial Sequence: Synthetic oligonucleotide
  Antisense strand to SEQ ID NO: 1855811
acaacucaguaauuaagac

SEQ ID NO: 1855813 - RNA, 19 nt, Artificial Sequence
  Description of Artificial Sequence: Synthetic oligonucleotide
  Sense strand starting at position 2622 of SEQ ID NO: 1564108
aggugaaugccucacucuu

SEQ ID NO: 1855814 - RNA, 19 nt, Artificial Sequence
  Description of Artificial Sequence: Synthetic oligonucleotide
  Antisense strand to SEQ ID NO: 1855813
aagagugaggcauucaccu

SEQ ID NO: 1855815 - RNA, 19 nt, Artificial Sequence
  Description of Artificial Sequence: Synthetic oligonucleotide
  Sense strand starting at position 2672 of SEQ ID NO: 1564108
agugaaaccagacgaaauu

SEQ ID NO: 1855816 - RNA, 19 nt, Artificial Sequence
  Description of Artificial Sequence: Synthetic oligonucleotide
  Antisense strand to SEQ ID NO: 1855815
aauuucgucugguuucacu

SEQ ID NO: 1855817 - RNA, 19 nt, Artificial Sequence
  Description of Artificial Sequence: Synthetic oligonucleotide
  Sense strand starting at position 2740 of SEQ ID NO: 1564108
gcaaauacaguucgacaaa

SEQ ID NO: 1855818 - RNA, 19 nt, Artificial Sequence
  Description of Artificial Sequence: Synthetic oligonucleotide
  Antisense strand to SEQ ID NO: 1855817
uuugucgaacuguauuugc

SEQ ID NO: 1855819 - RNA, 19 nt, Artificial Sequence
  Description of Artificial Sequence: Synthetic oligonucleotide
  Sense strand starting at position 2757 of SEQ ID NO: 1564108
aagaucuugccaggaauug

SEQ ID NO: 1855820 - RNA, 19 nt, Artificial Sequence
  Description of Artificial Sequence: Synthetic oligonucleotide
  Antisense strand to SEQ ID NO: 1855819
caauuccuggcaagaucuu

SEQ ID NO: 1855821 - RNA, 19 nt, Artificial Sequence
  Description of Artificial Sequence: Synthetic oligonucleotide
  Sense strand starting at position 2767 of SEQ ID NO: 1564108
caggaauuggccugggaga

SEQ ID NO: 1855822 - RNA, 19 nt, Artificial Sequence
  Description of Artificial Sequence: Synthetic oligonucleotide
  Antisense strand to SEQ ID NO: 1855821
ucucccaggccaauuccug

SEQ ID NO: 1855823 - RNA, 19 nt, Artificial Sequence
  Description of Artificial Sequence: Synthetic oligonucleotide
  Sense strand starting at position 2769 of SEQ ID NO: 1564108
ggaauuggccugggagagu

SEQ ID NO: 1855824 - RNA, 19 nt, Artificial Sequence
  Description of Artificial Sequence: Synthetic oligonucleotide
  Antisense strand to SEQ ID NO: 1855823
acucucccaggccaauucc

SEQ ID NO: 1855825 - RNA, 19 nt, Artificial Sequence
  Description of Artificial Sequence: Synthetic oligonucleotide
  Sense strand starting at position 2875 of SEQ ID NO: 1564108
gguuaagaacuacguuaac

SEQ ID NO: 1855826 - RNA, 19 nt, Artificial Sequence
  Description of Artificial Sequence: Synthetic oligonucleotide
  Antisense strand to SEQ ID NO: 1855825
guuaacguaguucuuaacc

SEQ ID NO: 1855827 - RNA, 19 nt, Artificial Sequence
  Description of Artificial Sequence: Synthetic oligonucleotide
  Sense strand starting at position 2916 of SEQ ID NO: 1564108
uaaagugcccuuggauuga

SEQ ID NO: 1855828 - RNA, 19 nt, Artificial Sequence
  Description of Artificial Sequence: Synthetic oligonucleotide
  Antisense strand to SEQ ID NO: 1855827
ucaauccaagggcacuuua

SEQ ID NO: 1855829 - RNA, 19 nt, Artificial Sequence
  Description of Artificial Sequence: Synthetic oligonucleotide
  Sense strand starting at position 3038 of SEQ ID NO: 1564108
uggguaagcauuugccaca

SEQ ID NO: 1855830 - RNA, 19 nt, Artificial Sequence
  Description of Artificial Sequence: Synthetic oligonucleotide
  Antisense strand to SEQ ID NO: 1855829
uguggcaaaugcuuaccca

SEQ ID NO: 1855831 - RNA, 19 nt, Artificial Sequence
  Description of Artificial Sequence: Synthetic oligonucleotide
  Sense strand starting at position 3113 of SEQ ID NO: 1564108
gagcaaauaguguaaucac

SEQ ID NO: 1855832 - RNA, 19 nt, Artificial Sequence
  Description of Artificial Sequence: Synthetic oligonucleotide
  Antisense strand to SEQ ID NO: 1855831
gugauuacacuauuugcuc

SEQ ID NO: 1855833 - RNA, 19 nt, Artificial Sequence
  Description of Artificial Sequence: Synthetic oligonucleotide
  Sense strand starting at position 3139 of SEQ ID NO: 1564108
gugucugaauaaucauaac

SEQ ID NO: 1855834 - RNA, 19 nt, Artificial Sequence
  Description of Artificial Sequence: Synthetic oligonucleotide
  Antisense strand to SEQ ID NO: 1855833
guuaugauuauucagacac

SEQ ID NO: 1855835 - RNA, 19 nt, Artificial Sequence
  Description of Artificial Sequence: Synthetic oligonucleotide
  Sense strand starting at position 3207 of SEQ ID NO: 1564108
accuuaugugcccagacuu

SEQ ID NO: 1855836 - RNA, 19 nt, Artificial Sequence
  Description of Artificial Sequence: Synthetic oligonucleotide
  Antisense strand to SEQ ID NO: 1855835
aagucugggcacauaaggu

SEQ ID NO: 1855837 - RNA, 19 nt, Artificial Sequence
  Description of Artificial Sequence: Synthetic oligonucleotide
  Sense strand starting at position 3369 of SEQ ID NO: 1564108
uuaggcccuuccucugaaa

SEQ ID NO: 1855838 - RNA, 19 nt, Artificial Sequence
  Description of Artificial Sequence: Synthetic oligonucleotide
  Antisense strand to SEQ ID NO: 1855837
uuucagaggaagggccuaa

SEQ ID NO: 1855839 - RNA, 19 nt, Artificial Sequence
  Description of Artificial Sequence: Synthetic oligonucleotide
  Sense strand starting at position 3485 of SEQ ID NO: 1564108
uuuguugauccugggagaa

SEQ ID NO: 1855840 - RNA, 19 nt, Artificial Sequence
  Description of Artificial Sequence: Synthetic oligonucleotide
  Antisense strand to SEQ ID NO: 1855839
uucucccaggaucaacaaa

SEQ ID NO: 1855841 - RNA, 19 nt, Artificial Sequence
  Description of Artificial Sequence: Synthetic oligonucleotide
  Sense strand starting at position 3500 of SEQ ID NO: 1564108
agaaaucuuugaccugugu

SEQ ID NO: 1855842 - RNA, 19 nt, Artificial Sequence
  Description of Artificial Sequence: Synthetic oligonucleotide
  Antisense strand to SEQ ID NO: 1855841
acacaggucaaagauuucu

SEQ ID NO: 1855843 - RNA, 19 nt, Artificial Sequence
  Description of Artificial Sequence: Synthetic oligonucleotide
  Sense strand starting at position 3509 of SEQ ID NO: 1564108
ugaccuguguuagugaaag

SEQ ID NO: 1855844 - RNA, 19 nt, Artificial Sequence
  Description of Artificial Sequence: Synthetic oligonucleotide
  Antisense strand to SEQ ID NO: 1855843
cuuucacuaacacagguca

SEQ ID NO: 1855845 - RNA, 19 nt, Artificial Sequence
  Description of Artificial Sequence: Synthetic oligonucleotide
  Sense strand starting at position 3535 of SEQ ID NO: 1564108
uguuucucagcugauuaua

SEQ ID NO: 1855846 - RNA, 19 nt, Artificial Sequence
  Description of Artificial Sequence: Synthetic oligonucleotide
  Antisense strand to SEQ ID NO: 1855845
uauaaucagcugagaaaca

SEQ ID NO: 1855847 - RNA, 19 nt, Artificial Sequence
  Description of Artificial Sequence: Synthetic oligonucleotide
  Sense strand starting at position 3582 of SEQ ID NO: 1564108
aguuucagagaaugguaga

SEQ ID NO: 1855848 - RNA, 19 nt, Artificial Sequence
  Description of Artificial Sequence: Synthetic oligonucleotide
  Antisense strand to SEQ ID NO: 1855847
ucuaccauucucugaaacu

SEQ ID NO: 1855849 - RNA, 19 nt, Artificial Sequence
  Description of Artificial Sequence: Synthetic oligonucleotide
  Sense strand starting at position 3595 of SEQ ID NO: 1564108
gguagaguauauccuccaa

SEQ ID NO: 1855850 - RNA, 19 nt, Artificial Sequence
  Description of Artificial Sequence: Synthetic oligonucleotide
  Antisense strand to SEQ ID NO: 1855849
uuggaggauauacucuacc

SEQ ID NO: 1855851 - RNA, 19 nt, Artificial Sequence
  Description of Artificial Sequence: Synthetic oligonucleotide
  Sense strand starting at position 3675 of SEQ ID NO: 1564108
gggcuuuauuuggagagag

SEQ ID NO: 1855852 - RNA, 19 nt, Artificial Sequence
  Description of Artificial Sequence: Synthetic oligonucleotide
  Antisense strand to SEQ ID NO: 1855851
cucucuccaaauaaagccc

SEQ ID NO: 1855853 - RNA, 19 nt, Artificial Sequence
  Description of Artificial Sequence: Synthetic oligonucleotide
  Sense strand starting at position 3737 of SEQ ID NO: 1564108
guuugaacucuugacauuc

SEQ ID NO: 1855854 - RNA, 19 nt, Artificial Sequence
  Description of Artificial Sequence: Synthetic oligonucleotide
  Antisense strand to SEQ ID NO: 1855853
gaaugucaagaguucaaac

SEQ ID NO: 1855855 - RNA, 19 nt, Artificial Sequence
  Description of Artificial Sequence: Synthetic oligonucleotide
  Sense strand starting at position 3747 of SEQ ID NO: 1564108
uugacauucugauuaaugc

SEQ ID NO: 1855856 - RNA, 19 nt, Artificial Sequence
  Description of Artificial Sequence: Synthetic oligonucleotide
  Antisense strand to SEQ ID NO: 1855855
gcauuaaucagaaugucaa

SEQ ID NO: 1855857 - RNA, 19 nt, Artificial Sequence
  Description of Artificial Sequence: Synthetic oligonucleotide
  Sense strand starting at position 3748 of SEQ ID NO: 1564108
ugacauucugauuaaugca

SEQ ID NO: 1855858 - RNA, 19 nt, Artificial Sequence
  Description of Artificial Sequence: Synthetic oligonucleotide
  Antisense strand to SEQ ID NO: 1855857
ugcauuaaucagaauguca

SEQ ID NO: 1855859 - RNA, 19 nt, Artificial Sequence
  Description of Artificial Sequence: Synthetic oligonucleotide
  Sense strand starting at position 3883 of SEQ ID NO: 1564108
acuguauucuauuccagag

SEQ ID NO: 1855860 - RNA, 19 nt, Artificial Sequence
  Description of Artificial Sequence: Synthetic oligonucleotide
  Antisense strand to SEQ ID NO: 1855859
cucuggaauagaauacagu

SEQ ID NO: 1855861 - RNA, 19 nt, Artificial Sequence
  Description of Artificial Sequence: Synthetic oligonucleotide
  Sense strand starting at position 3975 of SEQ ID NO: 1564108
ucagucuuuggguaacuaa

SEQ ID NO: 1855862 - RNA, 19 nt, Artificial Sequence
  Description of Artificial Sequence: Synthetic oligonucleotide
  Antisense strand to SEQ ID NO: 1855861
uuaguuacccaaagacuga

SEQ ID NO: 1855863 - RNA, 19 nt, Artificial Sequence
  Description of Artificial Sequence: Synthetic oligonucleotide
  Sense strand starting at position 83 of SEQ ID NO: 1564109
ucagacaugccugacguuu

SEQ ID NO: 1855864 - RNA, 19 nt, Artificial Sequence
  Description of Artificial Sequence: Synthetic oligonucleotide
  Antisense strand to SEQ ID NO: 1855863
aaacgucaggcaugucuga

SEQ ID NO: 1855865 - RNA, 19 nt, Artificial Sequence
  Description of Artificial Sequence: Synthetic oligonucleotide
  Sense strand starting at position 224 of SEQ ID NO: 1564109
cggguucuaagagauucca

SEQ ID NO: 1855866 - RNA, 19 nt, Artificial Sequence
  Description of Artificial Sequence: Synthetic oligonucleotide
  Antisense strand to SEQ ID NO: 1855865
uggaaucucuuagaacccg

SEQ ID NO: 1855867 - RNA, 19 nt, Artificial Sequence
  Description of Artificial Sequence: Synthetic oligonucleotide
  Sense strand starting at position 274 of SEQ ID NO: 1564109
cguuuagaccuauaguucu

SEQ ID NO: 1855868 - RNA, 19 nt, Artificial Sequence
  Description of Artificial Sequence: Synthetic oligonucleotide
  Antisense strand to SEQ ID NO: 1855867
agaacuauaggucuaaacg

SEQ ID NO: 1855869 - RNA, 19 nt, Artificial Sequence
  Description of Artificial Sequence: Synthetic oligonucleotide
  Sense strand starting at position 281 of SEQ ID NO: 1564109
accuauaguucuccaagua

SEQ ID NO: 1855870 - RNA, 19 nt, Artificial Sequence
  Description of Artificial Sequence: Synthetic oligonucleotide
  Antisense strand to SEQ ID NO: 1855869
uacuuggagaacuauaggu

SEQ ID NO: 1855871 - RNA, 19 nt, Artificial Sequence
  Description of Artificial Sequence: Synthetic oligonucleotide
  Sense strand starting at position 282 of SEQ ID NO: 1564109
ccuauaguucuccaaguau

SEQ ID NO: 1855872 - RNA, 19 nt, Artificial Sequence
  Description of Artificial Sequence: Synthetic oligonucleotide
  Antisense strand to SEQ ID NO: 1855871
auacuuggagaacuauagg

SEQ ID NO: 1855873 - RNA, 19 nt, Artificial Sequence
  Description of Artificial Sequence: Synthetic oligonucleotide
  Sense strand starting at position 393 of SEQ ID NO: 1564109
guggaugggaccuagcaau

SEQ ID NO: 1855874 - RNA, 19 nt, Artificial Sequence
  Description of Artificial Sequence: Synthetic oligonucleotide
  Antisense strand to SEQ ID NO: 1855873
auugcuaggucccauccac

SEQ ID NO: 1855875 - RNA, 19 nt, Artificial Sequence
  Description of Artificial Sequence: Synthetic oligonucleotide
  Sense strand starting at position 467 of SEQ ID NO: 1564109
acugacuuagacugcuaua

SEQ ID NO: 1855876 - RNA, 19 nt, Artificial Sequence
  Description of Artificial Sequence: Synthetic oligonucleotide
  Antisense strand to SEQ ID NO: 1855875
uauagcagucuaagucagu

SEQ ID NO: 1855877 - RNA, 19 nt, Artificial Sequence
  Description of Artificial Sequence: Synthetic oligonucleotide
  Sense strand starting at position 529 of SEQ ID NO: 1564109
gagaaauauugcuuaggau

SEQ ID NO: 1855878 - RNA, 19 nt, Artificial Sequence
  Description of Artificial Sequence: Synthetic oligonucleotide
  Antisense strand to SEQ ID NO: 1855877
auccuaagcaauauuucuc

SEQ ID NO: 1855879 - RNA, 19 nt, Artificial Sequence
  Description of Artificial Sequence: Synthetic oligonucleotide
  Sense strand starting at position 686 of SEQ ID NO: 1564109
ucccauugugaugggcaaa

SEQ ID NO: 1855880 - RNA, 19 nt, Artificial Sequence
  Description of Artificial Sequence: Synthetic oligonucleotide
  Antisense strand to SEQ ID NO: 1855879
uuugcccaucacaauggga

SEQ ID NO: 1855881 - RNA, 19 nt, Artificial Sequence
  Description of Artificial Sequence: Synthetic oligonucleotide
  Sense strand starting at position 687 of SEQ ID NO: 1564109
cccauugugaugggcaaau

SEQ ID NO: 1855882 - RNA, 19 nt, Artificial Sequence
  Description of Artificial Sequence: Synthetic oligonucleotide
  Antisense strand to SEQ ID NO: 1855881
auuugcccaucacaauggg

SEQ ID NO: 1855883 - RNA, 19 nt, Artificial Sequence
  Description of Artificial Sequence: Synthetic oligonucleotide
  Sense strand starting at position 1192 of SEQ ID NO: 1564109
guuaaaucaccgcaucaaa

SEQ ID NO: 1855884 - RNA, 19 nt, Artificial Sequence
  Description of Artificial Sequence: Synthetic oligonucleotide
  Antisense strand to SEQ ID NO: 1855883
uuugaugcggugauuuaac

SEQ ID NO: 1855885 - RNA, 19 nt, Artificial Sequence
  Description of Artificial Sequence: Synthetic oligonucleotide
  Sense strand starting at position 1224 of SEQ ID NO: 1564109
ucucaacucccagaugagu

SEQ ID NO: 1855886 - RNA, 19 nt, Artificial Sequence
  Description of Artificial Sequence: Synthetic oligonucleotide
  Antisense strand to SEQ ID NO: 1855885
acucaucugggaguugaga

SEQ ID NO: 1855887 - RNA, 19 nt, Artificial Sequence
  Description of Artificial Sequence: Synthetic oligonucleotide
  Sense strand starting at position 1337 of SEQ ID NO: 1564109
gcuguaaaugucgaggaaa

SEQ ID NO: 1855888 - RNA, 19 nt, Artificial Sequence
  Description of Artificial Sequence: Synthetic oligonucleotide
  Antisense strand to SEQ ID NO: 1855887
uuuccucgacauuuacagc

SEQ ID NO: 1855889 - RNA, 19 nt, Artificial Sequence
  Description of Artificial Sequence: Synthetic oligonucleotide
  Sense strand starting at position 1405 of SEQ ID NO: 1564109
agagcagguacuugguauu

SEQ ID NO: 1855890 - RNA, 19 nt, Artificial Sequence
  Description of Artificial Sequence: Synthetic oligonucleotide
  Antisense strand to SEQ ID NO: 1855889
aauaccaaguaccugcucu

SEQ ID NO: 1855891 - RNA, 19 nt, Artificial Sequence
  Description of Artificial Sequence: Synthetic oligonucleotide
  Sense strand starting at position 1472 of SEQ ID NO: 1564109
ggaccuagaucuuuccaau

SEQ ID NO: 1855892 - RNA, 19 nt, Artificial Sequence
  Description of Artificial Sequence: Synthetic oligonucleotide
  Antisense strand to SEQ ID NO: 1855891
auuggaaagaucuaggucc

SEQ ID NO: 1855893 - RNA, 19 nt, Artificial Sequence
  Description of Artificial Sequence: Synthetic oligonucleotide
  Sense strand starting at position 1504 of SEQ ID NO: 1564109
ugagaugugacucagaugu

SEQ ID NO: 1855894 - RNA, 19 nt, Artificial Sequence
  Description of Artificial Sequence: Synthetic oligonucleotide
  Antisense strand to SEQ ID NO: 1855893
acaucugagucacaucuca

SEQ ID NO: 1855895 - RNA, 19 nt, Artificial Sequence
  Description of Artificial Sequence: Synthetic oligonucleotide
  Sense strand starting at position 1633 of SEQ ID NO: 1564109
ucacacaucucagugucaa

SEQ ID NO: 1855896 - RNA, 19 nt, Artificial Sequence
  Description of Artificial Sequence: Synthetic oligonucleotide
  Antisense strand to SEQ ID NO: 1855895
uugacacugagauguguga

SEQ ID NO: 1855897 - RNA, 19 nt, Artificial Sequence
  Description of Artificial Sequence: Synthetic oligonucleotide
  Sense strand starting at position 2088 of SEQ ID NO: 1564109
aggcgacuaaucugguaua

SEQ ID NO: 1855898 - RNA, 19 nt, Artificial Sequence
  Description of Artificial Sequence: Synthetic oligonucleotide
  Antisense strand to SEQ ID NO: 1855897
uauaccagauuagucgccu

SEQ ID NO: 1855899 - RNA, 19 nt, Artificial Sequence
  Description of Artificial Sequence: Synthetic oligonucleotide
  Sense strand starting at position 2367 of SEQ ID NO: 1564109
ucuuuagcugcauauguaa

SEQ ID NO: 1855900 - RNA, 19 nt, Artificial Sequence
  Description of Artificial Sequence: Synthetic oligonucleotide
  Antisense strand to SEQ ID NO: 1855899
uuacauaugcagcuaaaga

SEQ ID NO: 1855901 - RNA, 19 nt, Artificial Sequence
  Description of Artificial Sequence: Synthetic oligonucleotide
  Sense strand starting at position 2406 of SEQ ID NO: 1564109
ugagcucccgcguucgaau

SEQ ID NO: 1855902 - RNA, 19 nt, Artificial Sequence
  Description of Artificial Sequence: Synthetic oligonucleotide
  Antisense strand to SEQ ID NO: 1855901
auucgaacgcgggagcuca

SEQ ID NO: 1855903 - RNA, 19 nt, Artificial Sequence
  Description of Artificial Sequence: Synthetic oligonucleotide
  Sense strand starting at position 2519 of SEQ ID NO: 1564109
aguacuuaccuccagaguu

SEQ ID NO: 1855904 - RNA, 19 nt, Artificial Sequence
  Description of Artificial Sequence: Synthetic oligonucleotide
  Antisense strand to SEQ ID NO: 1855903
aacucuggagguaaguacu

SEQ ID NO: 1855905 - RNA, 19 nt, Artificial Sequence
  Description of Artificial Sequence: Synthetic oligonucleotide
  Sense strand starting at position 2582 of SEQ ID NO: 1564109
auugccuaucaugaaguua

SEQ ID NO: 1855906 - RNA, 19 nt, Artificial Sequence
  Description of Artificial Sequence: Synthetic oligonucleotide
  Antisense strand to SEQ ID NO: 1855905
uaacuucaugauaggcaau

SEQ ID NO: 1855907 - RNA, 19 nt, Artificial Sequence
  Description of Artificial Sequence: Synthetic oligonucleotide
  Sense strand starting at position 2590 of SEQ ID NO: 1564109
ucaugaaguuaagcaguau

SEQ ID NO: 1855908 - RNA, 19 nt, Artificial Sequence
  Description of Artificial Sequence: Synthetic oligonucleotide
  Antisense strand to SEQ ID NO: 1855907
auacugcuuaacuucauga

SEQ ID NO: 1855909 - RNA, 19 nt, Artificial Sequence
  Description of Artificial Sequence: Synthetic oligonucleotide
  Sense strand starting at position 2594 of SEQ ID NO: 1564109
gaaguuaagcaguauauug

SEQ ID NO: 1855910 - RNA, 19 nt, Artificial Sequence
  Description of Artificial Sequence: Synthetic oligonucleotide
  Antisense strand to SEQ ID NO: 1855909
caauauacugcuuaacuuc

SEQ ID NO: 1855911 - RNA, 19 nt, Artificial Sequence
  Description of Artificial Sequence: Synthetic oligonucleotide
  Sense strand starting at position 2596 of SEQ ID NO: 1564109
aguuaagcaguauauugaa

SEQ ID NO: 1855912 - RNA, 19 nt, Artificial Sequence
  Description of Artificial Sequence: Synthetic oligonucleotide
  Antisense strand to SEQ ID NO: 1855911
uucaauauacugcuuaacu

SEQ ID NO: 1855913 - RNA, 19 nt, Artificial Sequence
  Description of Artificial Sequence: Synthetic oligonucleotide
  Sense strand starting at position 2627 of SEQ ID NO: 1564109
augauugaauuugaucuca

SEQ ID NO: 1855914 - RNA, 19 nt, Artificial Sequence
  Description of Artificial Sequence: Synthetic oligonucleotide
  Antisense strand to SEQ ID NO: 1855913
ugagaucaaauucaaucau

SEQ ID NO: 1855915 - RNA, 19 nt, Artificial Sequence
  Description of Artificial Sequence: Synthetic oligonucleotide
  Sense strand starting at position 2645 of SEQ ID NO: 1564109
accuaagaccucuggcuaa

SEQ ID NO: 1855916 - RNA, 19 nt, Artificial Sequence
  Description of Artificial Sequence: Synthetic oligonucleotide
  Antisense strand to SEQ ID NO: 1855915
uuagccagaggucuuaggu

SEQ ID NO: 1855917 - RNA, 19 nt, Artificial Sequence
  Description of Artificial Sequence: Synthetic oligonucleotide
  Sense strand starting at position 2732 of SEQ ID NO: 1564109
gcuguaauaccugauucua

SEQ ID NO: 1855918 - RNA, 19 nt, Artificial Sequence
  Description of Artificial Sequence: Synthetic oligonucleotide
  Antisense strand to SEQ ID NO: 1855917
uagaaucagguauuacagc

SEQ ID NO: 1855919 - RNA, 19 nt, Artificial Sequence
  Description of Artificial Sequence: Synthetic oligonucleotide
  Sense strand starting at position 2793 of SEQ ID NO: 1564109
agaagaguauauuaaagag

SEQ ID NO: 1855920 - RNA, 19 nt, Artificial Sequence
  Description of Artificial Sequence: Synthetic oligonucleotide
  Antisense strand to SEQ ID NO: 1855919
cucuuuaauauacucuucu

SEQ ID NO: 1855921 - RNA, 19 nt, Artificial Sequence
  Description of Artificial Sequence: Synthetic oligonucleotide
  Sense strand starting at position 2803 of SEQ ID NO: 1564109
auuaaagagucucuuugua

SEQ ID NO: 1855922 - RNA, 19 nt, Artificial Sequence
  Description of Artificial Sequence: Synthetic oligonucleotide
  Antisense strand to SEQ ID NO: 1855921
uacaaagagacucuuuaau

SEQ ID NO: 1855923 - RNA, 19 nt, Artificial Sequence
  Description of Artificial Sequence: Synthetic oligonucleotide
  Sense strand starting at position 3087 of SEQ ID NO: 1564109
agaugugucuugguauuuc

SEQ ID NO: 1855924 - RNA, 19 nt, Artificial Sequence
  Description of Artificial Sequence: Synthetic oligonucleotide
  Antisense strand to SEQ ID NO: 1855923
gaaauaccaagacacaucu

SEQ ID NO: 1855925 - RNA, 19 nt, Artificial Sequence
  Description of Artificial Sequence: Synthetic oligonucleotide
  Sense strand starting at position 3091 of SEQ ID NO: 1564109
gugucuugguauuucucaa

SEQ ID NO: 1855926 - RNA, 19 nt, Artificial Sequence
  Description of Artificial Sequence: Synthetic oligonucleotide
  Antisense strand to SEQ ID NO: 1855925
uugagaaauaccaagacac

SEQ ID NO: 1855927 - RNA, 19 nt, Artificial Sequence
  Description of Artificial Sequence: Synthetic oligonucleotide
  Sense strand starting at position 3175 of SEQ ID NO: 1564109
ccaagaauugccugaaugc

SEQ ID NO: 1855928 - RNA, 19 nt, Artificial Sequence
  Description of Artificial Sequence: Synthetic oligonucleotide
  Antisense strand to SEQ ID NO: 1855927
gcauucaggcaauucuugg

SEQ ID NO: 1855929 - RNA, 19 nt, Artificial Sequence
  Description of Artificial Sequence: Synthetic oligonucleotide
  Sense strand starting at position 3245 of SEQ ID NO: 1564109
aggcaaagaucucucccuu

SEQ ID NO: 1855930 - RNA, 19 nt, Artificial Sequence
  Description of Artificial Sequence: Synthetic oligonucleotide
  Antisense strand to SEQ ID NO: 1855929
aagggagagaucuuugccu

SEQ ID NO: 1855931 - RNA, 19 nt, Artificial Sequence
  Description of Artificial Sequence: Synthetic oligonucleotide
  Sense strand starting at position 3280 of SEQ ID NO: 1564109
ggaggugacuauaguagga

SEQ ID NO: 1855932 - RNA, 19 nt, Artificial Sequence
  Description of Artificial Sequence: Synthetic oligonucleotide
  Antisense strand to SEQ ID NO: 1855931
uccuacuauagucaccucc

SEQ ID NO: 1855933 - RNA, 19 nt, Artificial Sequence
  Description of Artificial Sequence: Synthetic oligonucleotide
  Sense strand starting at position 3414 of SEQ ID NO: 1564109
uucuguaaagcuuggauau

SEQ ID NO: 1855934 - RNA, 19 nt, Artificial Sequence
  Description of Artificial Sequence: Synthetic oligonucleotide
  Antisense strand to SEQ ID NO: 1855933
auauccaagcuuuacagaa

SEQ ID NO: 1855935 - RNA, 19 nt, Artificial Sequence
  Description of Artificial Sequence: Synthetic oligonucleotide
  Sense strand starting at position 3415 of SEQ ID NO: 1564109
ucuguaaagcuuggauauu

SEQ ID NO: 1855936 - RNA, 19 nt, Artificial Sequence
  Description of Artificial Sequence: Synthetic oligonucleotide
  Antisense strand to SEQ ID NO: 1855935
aauauccaagcuuuacaga

SEQ ID NO: 1855937 - RNA, 19 nt, Artificial Sequence
  Description of Artificial Sequence: Synthetic oligonucleotide
  Sense strand starting at position 3759 of SEQ ID NO: 1564109
gaagguaaaucaccagguu

SEQ ID NO: 1855938 - RNA, 19 nt, Artificial Sequence
  Description of Artificial Sequence: Synthetic oligonucleotide
  Antisense strand to SEQ ID NO: 1855937
aaccuggugauuuaccuuc

SEQ ID NO: 1855939 - RNA, 19 nt, Artificial Sequence
  Description of Artificial Sequence: Synthetic oligonucleotide
  Sense strand starting at position 3775 of SEQ ID NO: 1564109
guuugcugaagguaaauga

SEQ ID NO: 1855940 - RNA, 19 nt, Artificial Sequence
  Description of Artificial Sequence: Synthetic oligonucleotide
  Antisense strand to SEQ ID NO: 1855939
ucauuuaccuucagcaaac

SEQ ID NO: 1855941 - RNA, 19 nt, Artificial Sequence
  Description of Artificial Sequence: Synthetic oligonucleotide
  Sense strand starting at position 3899 of SEQ ID NO: 1564109
guuugaauugcagacaaau

SEQ ID NO: 1855942 - RNA, 19 nt, Artificial Sequence
  Description of Artificial Sequence: Synthetic oligonucleotide
  Antisense strand to SEQ ID NO: 1855941
auuugucugcaauucaaac

SEQ ID NO: 1855943 - RNA, 19 nt, Artificial Sequence
  Description of Artificial Sequence: Synthetic oligonucleotide
  Sense strand starting at position 276 of SEQ ID NO: 1564111
cuggaauccuuacugaggu

SEQ ID NO: 1855944 - RNA, 19 nt, Artificial Sequence
  Description of Artificial Sequence: Synthetic oligonucleotide
  Antisense strand to SEQ ID NO: 1855943
accucaguaaggauuccag

SEQ ID NO: 1855945 - RNA, 19 nt, Artificial Sequence
  Description of Artificial Sequence: Synthetic oligonucleotide
  Sense strand starting at position 297 of SEQ ID NO: 1564111
cagguaauggcugaggcaa

SEQ ID NO: 1855946 - RNA, 19 nt, Artificial Sequence
  Description of Artificial Sequence: Synthetic oligonucleotide
  Antisense strand to SEQ ID NO: 1855945
uugccucagccauuaccug

SEQ ID NO: 1855947 - RNA, 19 nt, Artificial Sequence
  Description of Artificial Sequence: Synthetic oligonucleotide
  Sense strand starting at position 416 of SEQ ID NO: 1564111
uaugccuaucacuggguua

SEQ ID NO: 1855948 - RNA, 19 nt, Artificial Sequence
  Description of Artificial Sequence: Synthetic oligonucleotide
  Antisense strand to SEQ ID NO: 1855947
uaacccagugauaggcaua

SEQ ID NO: 1855949 - RNA, 19 nt, Artificial Sequence
  Description of Artificial Sequence: Synthetic oligonucleotide
  Sense strand starting at position 418 of SEQ ID NO: 1564111
ugccuaucacuggguuaag

SEQ ID NO: 1855950 - RNA, 19 nt, Artificial Sequence
  Description of Artificial Sequence: Synthetic oligonucleotide
  Antisense strand to SEQ ID NO: 1855949
cuuaacccagugauaggca

SEQ ID NO: 1855951 - RNA, 19 nt, Artificial Sequence
  Description of Artificial Sequence: Synthetic oligonucleotide
  Sense strand starting at position 435 of SEQ ID NO: 1564111
agggauuucuauggauuac

SEQ ID NO: 1855952 - RNA, 19 nt, Artificial Sequence
  Description of Artificial Sequence: Synthetic oligonucleotide
  Antisense strand to SEQ ID NO: 1855951
guaauccauagaaaucccu

SEQ ID NO: 1855953 - RNA, 19 nt, Artificial Sequence
  Description of Artificial Sequence: Synthetic oligonucleotide
  Sense strand starting at position 460 of SEQ ID NO: 1564111
agacucauaucacugucau

SEQ ID NO: 1855954 - RNA, 19 nt, Artificial Sequence
  Description of Artificial Sequence: Synthetic oligonucleotide
  Antisense strand to SEQ ID NO: 1855953
augacagugauaugagucu

SEQ ID NO: 1855955 - RNA, 19 nt, Artificial Sequence
  Description of Artificial Sequence: Synthetic oligonucleotide
  Sense strand starting at position 513 of SEQ ID NO: 1564111
uuagcaaacugagaauuua

SEQ ID NO: 1855956 - RNA, 19 nt, Artificial Sequence
  Description of Artificial Sequence: Synthetic oligonucleotide
  Antisense strand to SEQ ID NO: 1855955
uaaauucucaguuugcuaa

SEQ ID NO: 1855957 - RNA, 19 nt, Artificial Sequence
  Description of Artificial Sequence: Synthetic oligonucleotide
  Sense strand starting at position 533 of SEQ ID NO: 1564111
augaaaugaugcuccuguu

SEQ ID NO: 1855958 - RNA, 19 nt, Artificial Sequence
  Description of Artificial Sequence: Synthetic oligonucleotide
  Antisense strand to SEQ ID NO: 1855957
aacaggagcaucauuucau

SEQ ID NO: 1855959 - RNA, 19 nt, Artificial Sequence
  Description of Artificial Sequence: Synthetic oligonucleotide
  Sense strand starting at position 539 of SEQ ID NO: 1564111
ugaugcuccuguuuaauga

SEQ ID NO: 1855960 - RNA, 19 nt, Artificial Sequence
  Description of Artificial Sequence: Synthetic oligonucleotide
  Antisense strand to SEQ ID NO: 1855959
ucauuaaacaggagcauca

SEQ ID NO: 1855961 - RNA, 19 nt, Artificial Sequence
  Description of Artificial Sequence: Synthetic oligonucleotide
  Sense strand starting at position 596 of SEQ ID NO: 1564111
gaaugaggccacuguauga

SEQ ID NO: 1855962 - RNA, 19 nt, Artificial Sequence
  Description of Artificial Sequence: Synthetic oligonucleotide
  Antisense strand to SEQ ID NO: 1855961
ucauacaguggccucauuc

SEQ ID NO: 1855963 - RNA, 19 nt, Artificial Sequence
  Description of Artificial Sequence: Synthetic oligonucleotide
  Sense strand starting at position 686 of SEQ ID NO: 1564111
gccuacaucccauauggaa

SEQ ID NO: 1855964 - RNA, 19 nt, Artificial Sequence
  Description of Artificial Sequence: Synthetic oligonucleotide
  Antisense strand to SEQ ID NO: 1855963
uuccauaugggauguaggc

SEQ ID NO: 1855965 - RNA, 19 nt, Artificial Sequence
  Description of Artificial Sequence: Synthetic oligonucleotide
  Sense strand starting at position 711 of SEQ ID NO: 1564111
uccucauacccagaauggu

SEQ ID NO: 1855966 - RNA, 19 nt, Artificial Sequence
  Description of Artificial Sequence: Synthetic oligonucleotide
  Antisense strand to SEQ ID NO: 1855965
accauucuggguaugagga

SEQ ID NO: 1855967 - RNA, 19 nt, Artificial Sequence
  Description of Artificial Sequence: Synthetic oligonucleotide
  Sense strand starting at position 720 of SEQ ID NO: 1564111
ccagaauggucucuccaac

SEQ ID NO: 1855968 - RNA, 19 nt, Artificial Sequence
  Description of Artificial Sequence: Synthetic oligonucleotide
  Antisense strand to SEQ ID NO: 1855967
guuggagagaccauucugg

SEQ ID NO: 1855969 - RNA, 19 nt, Artificial Sequence
  Description of Artificial Sequence: Synthetic oligonucleotide
  Sense strand starting at position 753 of SEQ ID NO: 1564111
acaacugguuccucucgaa

SEQ ID NO: 1855970 - RNA, 19 nt, Artificial Sequence
  Description of Artificial Sequence: Synthetic oligonucleotide
  Antisense strand to SEQ ID NO: 1855969
uucgagaggaaccaguugu

SEQ ID NO: 1855971 - RNA, 19 nt, Artificial Sequence
  Description of Artificial Sequence: Synthetic oligonucleotide
  Sense strand starting at position 829 of SEQ ID NO: 1564111
cuguaucaggaaugguuau

SEQ ID NO: 1855972 - RNA, 19 nt, Artificial Sequence
  Description of Artificial Sequence: Synthetic oligonucleotide
  Antisense strand to SEQ ID NO: 1855971
auaaccauuccugauacag

SEQ ID NO: 1855973 - RNA, 19 nt, Artificial Sequence
  Description of Artificial Sequence: Synthetic oligonucleotide
  Sense strand starting at position 884 of SEQ ID NO: 1564111
ggaaauacuucccugcacu

SEQ ID NO: 1855974 - RNA, 19 nt, Artificial Sequence
  Description of Artificial Sequence: Synthetic oligonucleotide
  Antisense strand to SEQ ID NO: 1855973
agugcagggaaguauuucc

SEQ ID NO: 1855975 - RNA, 19 nt, Artificial Sequence
  Description of Artificial Sequence: Synthetic oligonucleotide
  Sense strand starting at position 1022 of SEQ ID NO: 1564111
acguucuuucuccaccaua

SEQ ID NO: 1855976 - RNA, 19 nt, Artificial Sequence
  Description of Artificial Sequence: Synthetic oligonucleotide
  Antisense strand to SEQ ID NO: 1855975
uaugguggagaaagaacgu

SEQ ID NO: 1855977 - RNA, 19 nt, Artificial Sequence
  Description of Artificial Sequence: Synthetic oligonucleotide
  Sense strand starting at position 1281 of SEQ ID NO: 1564111
gcagaauggucucuuccac

SEQ ID NO: 1855978 - RNA, 19 nt, Artificial Sequence
  Description of Artificial Sequence: Synthetic oligonucleotide
  Antisense strand to SEQ ID NO: 1855977
guggaagagaccauucugc

SEQ ID NO: 1855979 - RNA, 19 nt, Artificial Sequence
  Description of Artificial Sequence: Synthetic oligonucleotide
  Sense strand starting at position 1287 of SEQ ID NO: 1564111
uggucucuuccacacggaa

SEQ ID NO: 1855980 - RNA, 19 nt, Artificial Sequence
  Description of Artificial Sequence: Synthetic oligonucleotide
  Antisense strand to SEQ ID NO: 1855979
uuccguguggaagagacca

SEQ ID NO: 1855981 - RNA, 19 nt, Artificial Sequence
  Description of Artificial Sequence: Synthetic oligonucleotide
  Sense strand starting at position 1387 of SEQ ID NO: 1564111
ucuccauaugcggaaggau

SEQ ID NO: 1855982 - RNA, 19 nt, Artificial Sequence
  Description of Artificial Sequence: Synthetic oligonucleotide
  Antisense strand to SEQ ID NO: 1855981
auccuuccgcauauggaga

SEQ ID NO: 1855983 - RNA, 19 nt, Artificial Sequence
  Description of Artificial Sequence: Synthetic oligonucleotide
  Sense strand starting at position 2000 of SEQ ID NO: 1564111
ucuugucuccuagacucau

SEQ ID NO: 1855984 - RNA, 19 nt, Artificial Sequence
  Description of Artificial Sequence: Synthetic oligonucleotide
  Antisense strand to SEQ ID NO: 1855983
augagucuaggagacaaga

SEQ ID NO: 1855985 - RNA, 19 nt, Artificial Sequence
  Description of Artificial Sequence: Synthetic oligonucleotide
  Sense strand starting at position 2231 of SEQ ID NO: 1564111
ucaggugcgagucaggaau

SEQ ID NO: 1855986 - RNA, 19 nt, Artificial Sequence
  Description of Artificial Sequence: Synthetic oligonucleotide
  Antisense strand to SEQ ID NO: 1855985
auuccugacucgcaccuga

SEQ ID NO: 1855987 - RNA, 19 nt, Artificial Sequence
  Description of Artificial Sequence: Synthetic oligonucleotide
  Sense strand starting at position 2237 of SEQ ID NO: 1564111
gcgagucaggaauguuaag

SEQ ID NO: 1855988 - RNA, 19 nt, Artificial Sequence
  Description of Artificial Sequence: Synthetic oligonucleotide
  Antisense strand to SEQ ID NO: 1855987
cuuaacauuccugacucgc

SEQ ID NO: 1855989 - RNA, 19 nt, Artificial Sequence
  Description of Artificial Sequence: Synthetic oligonucleotide
  Sense strand starting at position 2330 of SEQ ID NO: 1564111
acaagugagucaccacuga

SEQ ID NO: 1855990 - RNA, 19 nt, Artificial Sequence
  Description of Artificial Sequence: Synthetic oligonucleotide
  Antisense strand to SEQ ID NO: 1855989
ucaguggugacucacuugu

SEQ ID NO: 1855991 - RNA, 19 nt, Artificial Sequence
  Description of Artificial Sequence: Synthetic oligonucleotide
  Sense strand starting at position 2334 of SEQ ID NO: 1564111
gugagucaccacugaggau

SEQ ID NO: 1855992 - RNA, 19 nt, Artificial Sequence
  Description of Artificial Sequence: Synthetic oligonucleotide
  Antisense strand to SEQ ID NO: 1855991
auccucaguggugacucac

SEQ ID NO: 1855993 - RNA, 19 nt, Artificial Sequence
  Description of Artificial Sequence: Synthetic oligonucleotide
  Sense strand starting at position 2713 of SEQ ID NO: 1564111
agguaagucaaguguugaa

SEQ ID NO: 1855994 - RNA, 19 nt, Artificial Sequence
  Description of Artificial Sequence: Synthetic oligonucleotide
  Antisense strand to SEQ ID NO: 1855993
uucaacacuugacuuaccu

SEQ ID NO: 1855995 - RNA, 19 nt, Artificial Sequence
  Description of Artificial Sequence: Synthetic oligonucleotide
  Sense strand starting at position 2748 of SEQ ID NO: 1564111
uggguauguaaggguaaag

SEQ ID NO: 1855996 - RNA, 19 nt, Artificial Sequence
  Description of Artificial Sequence: Synthetic oligonucleotide
  Antisense strand to SEQ ID NO: 1855995
cuuuacccuuacauaccca

SEQ ID NO: 1855997 - RNA, 19 nt, Artificial Sequence
  Description of Artificial Sequence: Synthetic oligonucleotide
  Sense strand starting at position 3077 of SEQ ID NO: 1564111
guguguggugcagcuucaa

SEQ ID NO: 1855998 - RNA, 19 nt, Artificial Sequence
  Description of Artificial Sequence: Synthetic oligonucleotide
  Antisense strand to SEQ ID NO: 1855997
uugaagcugcaccacacac

SEQ ID NO: 1855999 - RNA, 19 nt, Artificial Sequence
  Description of Artificial Sequence: Synthetic oligonucleotide
  Sense strand starting at position 3100 of SEQ ID NO: 1564111
ccuuaaagcucuuuaggau

SEQ ID NO: 1856000 - RNA, 19 nt, Artificial Sequence
  Description of Artificial Sequence: Synthetic oligonucleotide
  Antisense strand to SEQ ID NO: 1855999
auccuaaagagcuuuaagg

SEQ ID NO: 1856001 - RNA, 19 nt, Artificial Sequence
  Description of Artificial Sequence: Synthetic oligonucleotide
  Sense strand starting at position 3101 of SEQ ID NO: 1564111
cuuaaagcucuuuaggaug

SEQ ID NO: 1856002 - RNA, 19 nt, Artificial Sequence
  Description of Artificial Sequence: Synthetic oligonucleotide
  Antisense strand to SEQ ID NO: 1856001
cauccuaaagagcuuuaag

SEQ ID NO: 1856003 - RNA, 19 nt, Artificial Sequence
  Description of Artificial Sequence: Synthetic oligonucleotide
  Sense strand starting at position 3129 of SEQ ID NO: 1564111
gacuguggcuuccugagga

SEQ ID NO: 1856004 - RNA, 19 nt, Artificial Sequence
  Description of Artificial Sequence: Synthetic oligonucleotide
  Antisense strand to SEQ ID NO: 1856003
uccucaggaagccacaguc

SEQ ID NO: 1856005 - RNA, 19 nt, Artificial Sequence
  Description of Artificial Sequence: Synthetic oligonucleotide
  Sense strand starting at position 3213 of SEQ ID NO: 1564111
uggccagccgcuucugauu

SEQ ID NO: 1856006 - RNA, 19 nt, Artificial Sequence
  Description of Artificial Sequence: Synthetic oligonucleotide
  Antisense strand to SEQ ID NO: 1856005
aaucagaagcggcuggcca

SEQ ID NO: 1856007 - RNA, 19 nt, Artificial Sequence
  Description of Artificial Sequence: Synthetic oligonucleotide
  Sense strand starting at position 3273 of SEQ ID NO: 1564111
uuaaauaauccaggcagga

SEQ ID NO: 1856008 - RNA, 19 nt, Artificial Sequence
  Description of Artificial Sequence: Synthetic oligonucleotide
  Antisense strand to SEQ ID NO: 1856007
uccugccuggauuauuuaa

SEQ ID NO: 1856009 - RNA, 19 nt, Artificial Sequence
  Description of Artificial Sequence: Synthetic oligonucleotide
  Sense strand starting at position 3324 of SEQ ID NO: 1564111
cccacaauacgugauuauu

SEQ ID NO: 1856010 - RNA, 19 nt, Artificial Sequence
  Description of Artificial Sequence: Synthetic oligonucleotide
  Antisense strand to SEQ ID NO: 1856009
aauaaucacguauuguggg

SEQ ID NO: 1856011 - RNA, 19 nt, Artificial Sequence
  Description of Artificial Sequence: Synthetic oligonucleotide
  Sense strand starting at position 3534 of SEQ ID NO: 1564111
gaaguaagguucuucucac

SEQ ID NO: 1856012 - RNA, 19 nt, Artificial Sequence
  Description of Artificial Sequence: Synthetic oligonucleotide
  Antisense strand to SEQ ID NO: 1856011
gugagaagaaccuuacuuc

SEQ ID NO: 1856013 - RNA, 19 nt, Artificial Sequence
  Description of Artificial Sequence: Synthetic oligonucleotide
  Sense strand starting at position 3541 of SEQ ID NO: 1564111
gguucuucucaccagaaua

SEQ ID NO: 1856014 - RNA, 19 nt, Artificial Sequence
  Description of Artificial Sequence: Synthetic oligonucleotide
  Antisense strand to SEQ ID NO: 1856013
uauucuggugagaagaacc

SEQ ID NO: 1856015 - RNA, 19 nt, Artificial Sequence
  Description of Artificial Sequence: Synthetic oligonucleotide
  Sense strand starting at position 3716 of SEQ ID NO: 1564111
gggaaagggucccuuuacu

SEQ ID NO: 1856016 - RNA, 19 nt, Artificial Sequence
  Description of Artificial Sequence: Synthetic oligonucleotide
  Antisense strand to SEQ ID NO: 1856015
aguaaagggacccuuuccc

SEQ ID NO: 1856017 - RNA, 19 nt, Artificial Sequence
  Description of Artificial Sequence: Synthetic oligonucleotide
  Sense strand starting at position 3834 of SEQ ID NO: 1564111
ggugacacaucaucagaau

SEQ ID NO: 1856018 - RNA, 19 nt, Artificial Sequence
  Description of Artificial Sequence: Synthetic oligonucleotide
  Antisense strand to SEQ ID NO: 1856017
auucugaugaugugucacc

SEQ ID NO: 1856019 - RNA, 19 nt, Artificial Sequence
  Description of Artificial Sequence: Synthetic oligonucleotide
  Sense strand starting at position 3959 of SEQ ID NO: 1564111
gaggaaggcuccuuuguag

SEQ ID NO: 1856020 - RNA, 19 nt, Artificial Sequence
  Description of Artificial Sequence: Synthetic oligonucleotide
  Antisense strand to SEQ ID NO: 1856019
cuacaaaggagccuuccuc

SEQ ID NO: 1856021 - RNA, 19 nt, Artificial Sequence
  Description of Artificial Sequence: Synthetic oligonucleotide
  Sense strand starting at position 3962 of SEQ ID NO: 1564111
gaaggcuccuuuguaggau

SEQ ID NO: 1856022 - RNA, 19 nt, Artificial Sequence
  Description of Artificial Sequence: Synthetic oligonucleotide
  Antisense strand to SEQ ID NO: 1856021
auccuacaaaggagccuuc

SEQ ID NO: 1856023 - RNA, 19 nt, Artificial Sequence
  Description of Artificial Sequence: Synthetic oligonucleotide
  Sense strand starting at position 316 of SEQ ID NO: 1564112
cugccacgacucugaauau

SEQ ID NO: 1856024 - RNA, 19 nt, Artificial Sequence
  Description of Artificial Sequence: Synthetic oligonucleotide
  Antisense strand to SEQ ID NO: 1856023
auauucagagucguggcag

SEQ ID NO: 1856025 - RNA, 19 nt, Artificial Sequence
  Description of Artificial Sequence: Synthetic oligonucleotide
  Sense strand starting at position 464 of SEQ ID NO: 1564112
acacucaucuucuggcaga

SEQ ID NO: 1856026 - RNA, 19 nt, Artificial Sequence
  Description of Artificial Sequence: Synthetic oligonucleotide
  Antisense strand to SEQ ID NO: 1856025
ucugccagaagaugagugu

SEQ ID NO: 1856027 - RNA, 19 nt, Artificial Sequence
  Description of Artificial Sequence: Synthetic oligonucleotide
  Sense strand starting at position 467 of SEQ ID NO: 1564112
cucaucuucuggcagaagu

SEQ ID NO: 1856028 - RNA, 19 nt, Artificial Sequence
  Description of Artificial Sequence: Synthetic oligonucleotide
  Antisense strand to SEQ ID NO: 1856027
acuucugccagaagaugag

SEQ ID NO: 1856029 - RNA, 19 nt, Artificial Sequence
  Description of Artificial Sequence: Synthetic oligonucleotide
  Sense strand starting at position 469 of SEQ ID NO: 1564112
caucuucuggcagaaguca

SEQ ID NO: 1856030 - RNA, 19 nt, Artificial Sequence
  Description of Artificial Sequence: Synthetic oligonucleotide
  Antisense strand to SEQ ID NO: 1856029
ugacuucugccagaagaug

SEQ ID NO: 1856031 - RNA, 19 nt, Artificial Sequence
  Description of Artificial Sequence: Synthetic oligonucleotide
  Sense strand starting at position 480 of SEQ ID NO: 1564112
agaagucaauuuggagaca

SEQ ID NO: 1856032 - RNA, 19 nt, Artificial Sequence
  Description of Artificial Sequence: Synthetic oligonucleotide
  Antisense strand to SEQ ID NO: 1856031
ugucuccaaauugacuucu

SEQ ID NO: 1856033 - RNA, 19 nt, Artificial Sequence
  Description of Artificial Sequence: Synthetic oligonucleotide
  Sense strand starting at position 509 of SEQ ID NO: 1564112
ugagaaacuuccuaggugu

SEQ ID NO: 1856034 - RNA, 19 nt, Artificial Sequence
  Description of Artificial Sequence: Synthetic oligonucleotide
  Antisense strand to SEQ ID NO: 1856033
acaccuaggaaguuucuca

SEQ ID NO: 1856035 - RNA, 19 nt, Artificial Sequence
  Description of Artificial Sequence: Synthetic oligonucleotide
  Sense strand starting at position 564 of SEQ ID NO: 1564112
ucauuucccuccggaggaa

SEQ ID NO: 1856036 - RNA, 19 nt, Artificial Sequence
  Description of Artificial Sequence: Synthetic oligonucleotide
  Antisense strand to SEQ ID NO: 1856035
uuccuccggagggaaauga

SEQ ID NO: 1856037 - RNA, 19 nt, Artificial Sequence
  Description of Artificial Sequence: Synthetic oligonucleotide
  Sense strand starting at position 582 of SEQ ID NO: 1564112
agagcuauuucugagaccu

SEQ ID NO: 1856038 - RNA, 19 nt, Artificial Sequence
  Description of Artificial Sequence: Synthetic oligonucleotide
  Antisense strand to SEQ ID NO: 1856037
aggucucagaaauagcucu

SEQ ID NO: 1856039 - RNA, 19 nt, Artificial Sequence
  Description of Artificial Sequence: Synthetic oligonucleotide
  Sense strand starting at position 584 of SEQ ID NO: 1564112
agcuauuucugagaccuuc

SEQ ID NO: 1856040 - RNA, 19 nt, Artificial Sequence
  Description of Artificial Sequence: Synthetic oligonucleotide
  Antisense strand to SEQ ID NO: 1856039
gaaggucucagaaauagcu

SEQ ID NO: 1856041 - RNA, 19 nt, Artificial Sequence
  Description of Artificial Sequence: Synthetic oligonucleotide
  Sense strand starting at position 692 of SEQ ID NO: 1564112
gguacagcgucucugaaga

SEQ ID NO: 1856042 - RNA, 19 nt, Artificial Sequence
  Description of Artificial Sequence: Synthetic oligonucleotide
  Antisense strand to SEQ ID NO: 1856041
ucuucagagacgcuguacc

SEQ ID NO: 1856043 - RNA, 19 nt, Artificial Sequence
  Description of Artificial Sequence: Synthetic oligonucleotide
  Sense strand starting at position 694 of SEQ ID NO: 1564112
uacagcgucucugaagaaa

SEQ ID NO: 1856044 - RNA, 19 nt, Artificial Sequence
  Description of Artificial Sequence: Synthetic oligonucleotide
  Antisense strand to SEQ ID NO: 1856043
uuucuucagagacgcugua

SEQ ID NO: 1856045 - RNA, 19 nt, Artificial Sequence
  Description of Artificial Sequence: Synthetic oligonucleotide
  Sense strand starting at position 727 of SEQ ID NO: 1564112
cgcgcuuacuccuugggaa

SEQ ID NO: 1856046 - RNA, 19 nt, Artificial Sequence
  Description of Artificial Sequence: Synthetic oligonucleotide
  Antisense strand to SEQ ID NO: 1856045
uucccaaggaguaagcgcg

SEQ ID NO: 1856047 - RNA, 19 nt, Artificial Sequence
  Description of Artificial Sequence: Synthetic oligonucleotide
  Sense strand starting at position 728 of SEQ ID NO: 1564112
gcgcuuacuccuugggaag

SEQ ID NO: 1856048 - RNA, 19 nt, Artificial Sequence
  Description of Artificial Sequence: Synthetic oligonucleotide
  Antisense strand to SEQ ID NO: 1856047
cuucccaaggaguaagcgc

SEQ ID NO: 1856049 - RNA, 19 nt, Artificial Sequence
  Description of Artificial Sequence: Synthetic oligonucleotide
  Sense strand starting at position 730 of SEQ ID NO: 1564112
gcuuacuccuugggaagga

SEQ ID NO: 1856050 - RNA, 19 nt, Artificial Sequence
  Description of Artificial Sequence: Synthetic oligonucleotide
  Antisense strand to SEQ ID NO: 1856049
uccuucccaaggaguaagc

SEQ ID NO: 1856051 - RNA, 19 nt, Artificial Sequence
  Description of Artificial Sequence: Synthetic oligonucleotide
  Sense strand starting at position 1288 of SEQ ID NO: 1564112
cgguuuguuuguguguuga

SEQ ID NO: 1856052 - RNA, 19 nt, Artificial Sequence
  Description of Artificial Sequence: Synthetic oligonucleotide
  Antisense strand to SEQ ID NO: 1856051
ucaacacacaaacaaaccg

SEQ ID NO: 1856053 - RNA, 19 nt, Artificial Sequence
  Description of Artificial Sequence: Synthetic oligonucleotide
  Sense strand starting at position 1290 of SEQ ID NO: 1564112
guuuguuuguguguugaug

SEQ ID NO: 1856054 - RNA, 19 nt, Artificial Sequence
  Description of Artificial Sequence: Synthetic oligonucleotide
  Antisense strand to SEQ ID NO: 1856053
caucaacacacaaacaaac

SEQ ID NO: 1856055 - RNA, 19 nt, Artificial Sequence
  Description of Artificial Sequence: Synthetic oligonucleotide
  Sense strand starting at position 1323 of SEQ ID NO: 1564112
cugaaagauugagggugua

SEQ ID NO: 1856056 - RNA, 19 nt, Artificial Sequence
  Description of Artificial Sequence: Synthetic oligonucleotide
  Antisense strand to SEQ ID NO: 1856055
uacacccucaaucuuucag

SEQ ID NO: 1856057 - RNA, 19 nt, Artificial Sequence
  Description of Artificial Sequence: Synthetic oligonucleotide
  Sense strand starting at position 1631 of SEQ ID NO: 1564112
uagggauaggcucguggaa

SEQ ID NO: 1856058 - RNA, 19 nt, Artificial Sequence
  Description of Artificial Sequence: Synthetic oligonucleotide
  Antisense strand to SEQ ID NO: 1856057
uuccacgagccuaucccua

SEQ ID NO: 1856059 - RNA, 19 nt, Artificial Sequence
  Description of Artificial Sequence: Synthetic oligonucleotide
  Sense strand starting at position 1633 of SEQ ID NO: 1564112
gggauaggcucguggaaac

SEQ ID NO: 1856060 - RNA, 19 nt, Artificial Sequence
  Description of Artificial Sequence: Synthetic oligonucleotide
  Antisense strand to SEQ ID NO: 1856059
guuuccacgagccuauccc

SEQ ID NO: 1856061 - RNA, 19 nt, Artificial Sequence
  Description of Artificial Sequence: Synthetic oligonucleotide
  Sense strand starting at position 1670 of SEQ ID NO: 1564112
ggcaauugggcucagucau

SEQ ID NO: 1856062 - RNA, 19 nt, Artificial Sequence
  Description of Artificial Sequence: Synthetic oligonucleotide
  Antisense strand to SEQ ID NO: 1856061
augacugagcccaauugcc

SEQ ID NO: 1856063 - RNA, 19 nt, Artificial Sequence
  Description of Artificial Sequence: Synthetic oligonucleotide
  Sense strand starting at position 2095 of SEQ ID NO: 1564112
uguccaagcccugagaagu

SEQ ID NO: 1856064 - RNA, 19 nt, Artificial Sequence
  Description of Artificial Sequence: Synthetic oligonucleotide
  Antisense strand to SEQ ID NO: 1856063
acuucucagggcuuggaca

SEQ ID NO: 1856065 - RNA, 19 nt, Artificial Sequence
  Description of Artificial Sequence: Synthetic oligonucleotide
  Sense strand starting at position 2132 of SEQ ID NO: 1564112
gucugucuucuaugggagu

SEQ ID NO: 1856066 - RNA, 19 nt, Artificial Sequence
  Description of Artificial Sequence: Synthetic oligonucleotide
  Antisense strand to SEQ ID NO: 1856065
acucccauagaagacagac

SEQ ID NO: 1856067 - RNA, 19 nt, Artificial Sequence
  Description of Artificial Sequence: Synthetic oligonucleotide
  Sense strand starting at position 2639 of SEQ ID NO: 1564112
agagcaauggcucauggga

SEQ ID NO: 1856068 - RNA, 19 nt, Artificial Sequence
  Description of Artificial Sequence: Synthetic oligonucleotide
  Antisense strand to SEQ ID NO: 1856067
ucccaugagccauugcucu

SEQ ID NO: 1856069 - RNA, 19 nt, Artificial Sequence
  Description of Artificial Sequence: Synthetic oligonucleotide
  Sense strand starting at position 2641 of SEQ ID NO: 1564112
agcaauggcucaugggaca

SEQ ID NO: 1856070 - RNA, 19 nt, Artificial Sequence
  Description of Artificial Sequence: Synthetic oligonucleotide
  Antisense strand to SEQ ID NO: 1856069
ugucccaugagccauugcu

SEQ ID NO: 1856071 - RNA, 19 nt, Artificial Sequence
  Description of Artificial Sequence: Synthetic oligonucleotide
  Sense strand starting at position 2680 of SEQ ID NO: 1564112
gagugacgauagucuuaca

SEQ ID NO: 1856072 - RNA, 19 nt, Artificial Sequence
  Description of Artificial Sequence: Synthetic oligonucleotide
  Antisense strand to SEQ ID NO: 1856071
uguaagacuaucgucacuc

SEQ ID NO: 1856073 - RNA, 19 nt, Artificial Sequence
  Description of Artificial Sequence: Synthetic oligonucleotide
  Sense strand starting at position 2685 of SEQ ID NO: 1564112
acgauagucuuacagcuau

SEQ ID NO: 1856074 - RNA, 19 nt, Artificial Sequence
  Description of Artificial Sequence: Synthetic oligonucleotide
  Antisense strand to SEQ ID NO: 1856073
auagcuguaagacuaucgu

SEQ ID NO: 1856075 - RNA, 19 nt, Artificial Sequence
  Description of Artificial Sequence: Synthetic oligonucleotide
  Sense strand starting at position 3021 of SEQ ID NO: 1564112
aaugauaucucuguguaug

SEQ ID NO: 1856076 - RNA, 19 nt, Artificial Sequence
  Description of Artificial Sequence: Synthetic oligonucleotide
  Antisense strand to SEQ ID NO: 1856075
cauacacagagauaucauu

SEQ ID NO: 1856077 - RNA, 19 nt, Artificial Sequence
  Description of Artificial Sequence: Synthetic oligonucleotide
  Sense strand starting at position 3022 of SEQ ID NO: 1564112
augauaucucuguguaugu

SEQ ID NO: 1856078 - RNA, 19 nt, Artificial Sequence
  Description of Artificial Sequence: Synthetic oligonucleotide
  Antisense strand to SEQ ID NO: 1856077
acauacacagagauaucau

SEQ ID NO: 1856079 - RNA, 19 nt, Artificial Sequence
  Description of Artificial Sequence: Synthetic oligonucleotide
  Sense strand starting at position 3024 of SEQ ID NO: 1564112
gauaucucuguguauguga

SEQ ID NO: 1856080 - RNA, 19 nt, Artificial Sequence
  Description of Artificial Sequence: Synthetic oligonucleotide
  Antisense strand to SEQ ID NO: 1856079
ucacauacacagagauauc

SEQ ID NO: 1856081 - RNA, 19 nt, Artificial Sequence
  Description of Artificial Sequence: Synthetic oligonucleotide
  Sense strand starting at position 3104 of SEQ ID NO: 1564112
cucauaggcugacaugauu

SEQ ID NO: 1856082 - RNA, 19 nt, Artificial Sequence
  Description of Artificial Sequence: Synthetic oligonucleotide
  Antisense strand to SEQ ID NO: 1856081
aaucaugucagccuaugag

SEQ ID NO: 1856083 - RNA, 19 nt, Artificial Sequence
  Description of Artificial Sequence: Synthetic oligonucleotide
  Sense strand starting at position 3330 of SEQ ID NO: 1564112
acgcuuacuaucguugcaa

SEQ ID NO: 1856084 - RNA, 19 nt, Artificial Sequence
  Description of Artificial Sequence: Synthetic oligonucleotide
  Antisense strand to SEQ ID NO: 1856083
uugcaacgauaguaagcgu

SEQ ID NO: 1856085 - RNA, 19 nt, Artificial Sequence
  Description of Artificial Sequence: Synthetic oligonucleotide
  Sense strand starting at position 3331 of SEQ ID NO: 1564112
cgcuuacuaucguugcaaa

SEQ ID NO: 1856086 - RNA, 19 nt, Artificial Sequence
  Description of Artificial Sequence: Synthetic oligonucleotide
  Antisense strand to SEQ ID NO: 1856085
uuugcaacgauaguaagcg

SEQ ID NO: 1856087 - RNA, 19 nt, Artificial Sequence
  Description of Artificial Sequence: Synthetic oligonucleotide
  Sense strand starting at position 3332 of SEQ ID NO: 1564112
gcuuacuaucguugcaaag

SEQ ID NO: 1856088 - RNA, 19 nt, Artificial Sequence
  Description of Artificial Sequence: Synthetic oligonucleotide
  Antisense strand to SEQ ID NO: 1856087
cuuugcaacgauaguaagc

SEQ ID NO: 1856089 - RNA, 19 nt, Artificial Sequence
  Description of Artificial Sequence: Synthetic oligonucleotide
  Sense strand starting at position 3334 of SEQ ID NO: 1564112
uuacuaucguugcaaagaa

SEQ ID NO: 1856090 - RNA, 19 nt, Artificial Sequence
  Description of Artificial Sequence: Synthetic oligonucleotide
  Antisense strand to SEQ ID NO: 1856089
uucuuugcaacgauaguaa

SEQ ID NO: 1856091 - RNA, 19 nt, Artificial Sequence
  Description of Artificial Sequence: Synthetic oligonucleotide
  Sense strand starting at position 3503 of SEQ ID NO: 1564112
aagaaagauacgugcgcau

SEQ ID NO: 1856092 - RNA, 19 nt, Artificial Sequence
  Description of Artificial Sequence: Synthetic oligonucleotide
  Antisense strand to SEQ ID NO: 1856091
augcgcacguaucuuucuu

SEQ ID NO: 1856093 - RNA, 19 nt, Artificial Sequence
  Description of Artificial Sequence: Synthetic oligonucleotide
  Sense strand starting at position 3505 of SEQ ID NO: 1564112
gaaagauacgugcgcauag

SEQ ID NO: 1856094 - RNA, 19 nt, Artificial Sequence
  Description of Artificial Sequence: Synthetic oligonucleotide
  Antisense strand to SEQ ID NO: 1856093
cuaugcgcacguaucuuuc

SEQ ID NO: 1856095 - RNA, 19 nt, Artificial Sequence
  Description of Artificial Sequence: Synthetic oligonucleotide
  Sense strand starting at position 3506 of SEQ ID NO: 1564112
aaagauacgugcgcauaga

SEQ ID NO: 1856096 - RNA, 19 nt, Artificial Sequence
  Description of Artificial Sequence: Synthetic oligonucleotide
  Antisense strand to SEQ ID NO: 1856095
ucuaugcgcacguaucuuu

SEQ ID NO: 1856097 - RNA, 19 nt, Artificial Sequence
  Description of Artificial Sequence: Synthetic oligonucleotide
  Sense strand starting at position 3507 of SEQ ID NO: 1564112
aagauacgugcgcauagau

SEQ ID NO: 1856098 - RNA, 19 nt, Artificial Sequence
  Description of Artificial Sequence: Synthetic oligonucleotide
  Antisense strand to SEQ ID NO: 1856097
aucuaugcgcacguaucuu

SEQ ID NO: 1856099 - RNA, 19 nt, Artificial Sequence
  Description of Artificial Sequence: Synthetic oligonucleotide
  Sense strand starting at position 3539 of SEQ ID NO: 1564112
ggacaaguacucugacaca

SEQ ID NO: 1856100 - RNA, 19 nt, Artificial Sequence
  Description of Artificial Sequence: Synthetic oligonucleotide
  Antisense strand to SEQ ID NO: 1856099
ugugucagaguacuugucc

SEQ ID NO: 1856101 - RNA, 19 nt, Artificial Sequence
  Description of Artificial Sequence: Synthetic oligonucleotide
  Sense strand starting at position 3751 of SEQ ID NO: 1564112
agugaaucaugaggucagu

SEQ ID NO: 1856102 - RNA, 19 nt, Artificial Sequence
  Description of Artificial Sequence: Synthetic oligonucleotide
  Antisense strand to SEQ ID NO: 1856101
acugaccucaugauucacu

SEQ ID NO: 1856103 - RNA, 19 nt, Artificial Sequence
  Description of Artificial Sequence: Synthetic oligonucleotide
  Sense strand starting at position 329 of SEQ ID NO: 1564113
uaugucauaguugaagauu

SEQ ID NO: 1856104 - RNA, 19 nt, Artificial Sequence
  Description of Artificial Sequence: Synthetic oligonucleotide
  Antisense strand to SEQ ID NO: 1856103
aaucuucaacuaugacaua

SEQ ID NO: 1856105 - RNA, 19 nt, Artificial Sequence
  Description of Artificial Sequence: Synthetic oligonucleotide
  Sense strand starting at position 338 of SEQ ID NO: 1564113
guugaagauuaugugagau

SEQ ID NO: 1856106 - RNA, 19 nt, Artificial Sequence
  Description of Artificial Sequence: Synthetic oligonucleotide
  Antisense strand to SEQ ID NO: 1856105
aucucacauaaucuucaac

SEQ ID NO: 1856107 - RNA, 19 nt, Artificial Sequence
  Description of Artificial Sequence: Synthetic oligonucleotide
  Sense strand starting at position 399 of SEQ ID NO: 1564113
ucaaguuuauaccugagga

SEQ ID NO: 1856108 - RNA, 19 nt, Artificial Sequence
  Description of Artificial Sequence: Synthetic oligonucleotide
  Antisense strand to SEQ ID NO: 1856107
uccucagguauaaacuuga

SEQ ID NO: 1856109 - RNA, 19 nt, Artificial Sequence
  Description of Artificial Sequence: Synthetic oligonucleotide
  Sense strand starting at position 420 of SEQ ID NO: 1564113
uugugaaacuagguuucua

SEQ ID NO: 1856110 - RNA, 19 nt, Artificial Sequence
  Description of Artificial Sequence: Synthetic oligonucleotide
  Antisense strand to SEQ ID NO: 1856109
uagaaaccuaguuucacaa

SEQ ID NO: 1856111 - RNA, 19 nt, Artificial Sequence
  Description of Artificial Sequence: Synthetic oligonucleotide
  Sense strand starting at position 445 of SEQ ID NO: 1564113
gcugguaacccagacuaau

SEQ ID NO: 1856112 - RNA, 19 nt, Artificial Sequence
  Description of Artificial Sequence: Synthetic oligonucleotide
  Antisense strand to SEQ ID NO: 1856111
auuagucuggguuaccagc

SEQ ID NO: 1856113 - RNA, 19 nt, Artificial Sequence
  Description of Artificial Sequence: Synthetic oligonucleotide
  Sense strand starting at position 988 of SEQ ID NO: 1564113
agcaaaguucuguagguag

SEQ ID NO: 1856114 - RNA, 19 nt, Artificial Sequence
  Description of Artificial Sequence: Synthetic oligonucleotide
  Antisense strand to SEQ ID NO: 1856113
cuaccuacagaacuuugcu

SEQ ID NO: 1856115 - RNA, 19 nt, Artificial Sequence
  Description of Artificial Sequence: Synthetic oligonucleotide
  Sense strand starting at position 991 of SEQ ID NO: 1564113
aaaguucuguagguagaua

SEQ ID NO: 1856116 - RNA, 19 nt, Artificial Sequence
  Description of Artificial Sequence: Synthetic oligonucleotide
  Antisense strand to SEQ ID NO: 1856115
uaucuaccuacagaacuuu

SEQ ID NO: 1856117 - RNA, 19 nt, Artificial Sequence
  Description of Artificial Sequence: Synthetic oligonucleotide
  Sense strand starting at position 996 of SEQ ID NO: 1564113
ucuguagguagauauguuu

SEQ ID NO: 1856118 - RNA, 19 nt, Artificial Sequence
  Description of Artificial Sequence: Synthetic oligonucleotide
  Antisense strand to SEQ ID NO: 1856117
aaacauaucuaccuacaga

SEQ ID NO: 1856119 - RNA, 19 nt, Artificial Sequence
  Description of Artificial Sequence: Synthetic oligonucleotide
  Sense strand starting at position 1002 of SEQ ID NO: 1564113
gguagauauguuuauuacu

SEQ ID NO: 1856120 - RNA, 19 nt, Artificial Sequence
  Description of Artificial Sequence: Synthetic oligonucleotide
  Antisense strand to SEQ ID NO: 1856119
aguaauaaacauaucuacc

SEQ ID NO: 1856121 - RNA, 19 nt, Artificial Sequence
  Description of Artificial Sequence: Synthetic oligonucleotide
  Sense strand starting at position 1068 of SEQ ID NO: 1564113
agcagugugagacacaaau

SEQ ID NO: 1856122 - RNA, 19 nt, Artificial Sequence
  Description of Artificial Sequence: Synthetic oligonucleotide
  Antisense strand to SEQ ID NO: 1856121
auuugugucucacacugcu

SEQ ID NO: 1856123 - RNA, 19 nt, Artificial Sequence
  Description of Artificial Sequence: Synthetic oligonucleotide
  Sense strand starting at position 1216 of SEQ ID NO: 1564113
gauauuguagcagaucuuu

SEQ ID NO: 1856124 - RNA, 19 nt, Artificial Sequence
  Description of Artificial Sequence: Synthetic oligonucleotide
  Antisense strand to SEQ ID NO: 1856123
aaagaucugcuacaauauc

SEQ ID NO: 1856125 - RNA, 19 nt, Artificial Sequence
  Description of Artificial Sequence: Synthetic oligonucleotide
  Sense strand starting at position 1228 of SEQ ID NO: 1564113
gaucuuugagcaggaucaa

SEQ ID NO: 1856126 - RNA, 19 nt, Artificial Sequence
  Description of Artificial Sequence: Synthetic oligonucleotide
  Antisense strand to SEQ ID NO: 1856125
uugauccugcucaaagauc

SEQ ID NO: 1856127 - RNA, 19 nt, Artificial Sequence
  Description of Artificial Sequence: Synthetic oligonucleotide
  Sense strand starting at position 1289 of SEQ ID NO: 1564113
uucuuauggcuugauagua

SEQ ID NO: 1856128 - RNA, 19 nt, Artificial Sequence
  Description of Artificial Sequence: Synthetic oligonucleotide
  Antisense strand to SEQ ID NO: 1856127
uacuaucaagccauaagaa

SEQ ID NO: 1856129 - RNA, 19 nt, Artificial Sequence
  Description of Artificial Sequence: Synthetic oligonucleotide
  Sense strand starting at position 1298 of SEQ ID NO: 1564113
cuugauaguauuggaugua

SEQ ID NO: 1856130 - RNA, 19 nt, Artificial Sequence
  Description of Artificial Sequence: Synthetic oligonucleotide
  Antisense strand to SEQ ID NO: 1856129
uacauccaauacuaucaag

SEQ ID NO: 1856131 - RNA, 19 nt, Artificial Sequence
  Description of Artificial Sequence: Synthetic oligonucleotide
  Sense strand starting at position 1301 of SEQ ID NO: 1564113
gauaguauuggauguauca

SEQ ID NO: 1856132 - RNA, 19 nt, Artificial Sequence
  Description of Artificial Sequence: Synthetic oligonucleotide
  Antisense strand to SEQ ID NO: 1856131
ugauacauccaauacuauc

SEQ ID NO: 1856133 - RNA, 19 nt, Artificial Sequence
  Description of Artificial Sequence: Synthetic oligonucleotide
  Sense strand starting at position 1311 of SEQ ID NO: 1564113
gauguaucaaguuaagggu

SEQ ID NO: 1856134 - RNA, 19 nt, Artificial Sequence
  Description of Artificial Sequence: Synthetic oligonucleotide
  Antisense strand to SEQ ID NO: 1856133
acccuuaacuugauacauc

SEQ ID NO: 1856135 - RNA, 19 nt, Artificial Sequence
  Description of Artificial Sequence: Synthetic oligonucleotide
  Sense strand starting at position 1317 of SEQ ID NO: 1564113
ucaaguuaaggguaguuua

SEQ ID NO: 1856136 - RNA, 19 nt, Artificial Sequence
  Description of Artificial Sequence: Synthetic oligonucleotide
  Antisense strand to SEQ ID NO: 1856135
uaaacuacccuuaacuuga

SEQ ID NO: 1856137 - RNA, 19 nt, Artificial Sequence
  Description of Artificial Sequence: Synthetic oligonucleotide
  Sense strand starting at position 1382 of SEQ ID NO: 1564113
guagaauaauaugcagaga

SEQ ID NO: 1856138 - RNA, 19 nt, Artificial Sequence
  Description of Artificial Sequence: Synthetic oligonucleotide
  Antisense strand to SEQ ID NO: 1856137
ucucugcauauuauucuac

SEQ ID NO: 1856139 - RNA, 19 nt, Artificial Sequence
  Description of Artificial Sequence: Synthetic oligonucleotide
  Sense strand starting at position 1505 of SEQ ID NO: 1564113
gguucuuugggucaauuaa

SEQ ID NO: 1856140 - RNA, 19 nt, Artificial Sequence
  Description of Artificial Sequence: Synthetic oligonucleotide
  Antisense strand to SEQ ID NO: 1856139
uuaauugacccaaagaacc

SEQ ID NO: 1856141 - RNA, 19 nt, Artificial Sequence
  Description of Artificial Sequence: Synthetic oligonucleotide
  Sense strand starting at position 1515 of SEQ ID NO: 1564113
gucaauuaagaacagugua

SEQ ID NO: 1856142 - RNA, 19 nt, Artificial Sequence
  Description of Artificial Sequence: Synthetic oligonucleotide
  Antisense strand to SEQ ID NO: 1856141
uacacuguucuuaauugac

SEQ ID NO: 1856143 - RNA, 19 nt, Artificial Sequence
  Description of Artificial Sequence: Synthetic oligonucleotide
  Sense strand starting at position 1665 of SEQ ID NO: 1564113
uucucuacucuauagguau

SEQ ID NO: 1856144 - RNA, 19 nt, Artificial Sequence
  Description of Artificial Sequence: Synthetic oligonucleotide
  Antisense strand to SEQ ID NO: 1856143
auaccuauagaguagagaa

SEQ ID NO: 1856145 - RNA, 19 nt, Artificial Sequence
  Description of Artificial Sequence: Synthetic oligonucleotide
  Sense strand starting at position 1678 of SEQ ID NO: 1564113
agguauaucucagucacac

SEQ ID NO: 1856146 - RNA, 19 nt, Artificial Sequence
  Description of Artificial Sequence: Synthetic oligonucleotide
  Antisense strand to SEQ ID NO: 1856145
gugugacugagauauaccu

SEQ ID NO: 1856147 - RNA, 19 nt, Artificial Sequence
  Description of Artificial Sequence: Synthetic oligonucleotide
  Sense strand starting at position 2037 of SEQ ID NO: 1564113
aguagugucaauuaccgga

SEQ ID NO: 1856148 - RNA, 19 nt, Artificial Sequence
  Description of Artificial Sequence: Synthetic oligonucleotide
  Antisense strand to SEQ ID NO: 1856147
uccgguaauugacacuacu

SEQ ID NO: 1856149 - RNA, 19 nt, Artificial Sequence
  Description of Artificial Sequence: Synthetic oligonucleotide
  Sense strand starting at position 2084 of SEQ ID NO: 1564113
cccagauaagccuacaugu

SEQ ID NO: 1856150 - RNA, 19 nt, Artificial Sequence
  Description of Artificial Sequence: Synthetic oligonucleotide
  Antisense strand to SEQ ID NO: 1856149
acauguaggcuuaucuggg

SEQ ID NO: 1856151 - RNA, 19 nt, Artificial Sequence
  Description of Artificial Sequence: Synthetic oligonucleotide
  Sense strand starting at position 2195 of SEQ ID NO: 1564113
uguguagguacguuugcaa

SEQ ID NO: 1856152 - RNA, 19 nt, Artificial Sequence
  Description of Artificial Sequence: Synthetic oligonucleotide
  Antisense strand to SEQ ID NO: 1856151
uugcaaacguaccuacaca

SEQ ID NO: 1856153 - RNA, 19 nt, Artificial Sequence
  Description of Artificial Sequence: Synthetic oligonucleotide
  Sense strand starting at position 2621 of SEQ ID NO: 1564113
acaaauuauugagcagguu

SEQ ID NO: 1856154 - RNA, 19 nt, Artificial Sequence
  Description of Artificial Sequence: Synthetic oligonucleotide
  Antisense strand to SEQ ID NO: 1856153
aaccugcucaauaauuugu

SEQ ID NO: 1856155 - RNA, 19 nt, Artificial Sequence
  Description of Artificial Sequence: Synthetic oligonucleotide
  Sense strand starting at position 2622 of SEQ ID NO: 1564113
caaauuauugagcagguuu

SEQ ID NO: 1856156 - RNA, 19 nt, Artificial Sequence
  Description of Artificial Sequence: Synthetic oligonucleotide
  Antisense strand to SEQ ID NO: 1856155
aaaccugcucaauaauuug

SEQ ID NO: 1856157 - RNA, 19 nt, Artificial Sequence
  Description of Artificial Sequence: Synthetic oligonucleotide
  Sense strand starting at position 2664 of SEQ ID NO: 1564113
aggagcacacucuguaaga

SEQ ID NO: 1856158 - RNA, 19 nt, Artificial Sequence
  Description of Artificial Sequence: Synthetic oligonucleotide
  Antisense strand to SEQ ID NO: 1856157
ucuuacagagugugcuccu

SEQ ID NO: 1856159 - RNA, 19 nt, Artificial Sequence
  Description of Artificial Sequence: Synthetic oligonucleotide
  Sense strand starting at position 2665 of SEQ ID NO: 1564113
ggagcacacucuguaagaa

SEQ ID NO: 1856160 - RNA, 19 nt, Artificial Sequence
  Description of Artificial Sequence: Synthetic oligonucleotide
  Antisense strand to SEQ ID NO: 1856159
uucuuacagagugugcucc

SEQ ID NO: 1856161 - RNA, 19 nt, Artificial Sequence
  Description of Artificial Sequence: Synthetic oligonucleotide
  Sense strand starting at position 2836 of SEQ ID NO: 1564113
gguucuaugaagcaaagca

SEQ ID NO: 1856162 - RNA, 19 nt, Artificial Sequence
  Description of Artificial Sequence: Synthetic oligonucleotide
  Antisense strand to SEQ ID NO: 1856161
ugcuuugcuucauagaacc

SEQ ID NO: 1856163 - RNA, 19 nt, Artificial Sequence
  Description of Artificial Sequence: Synthetic oligonucleotide
  Sense strand starting at position 2886 of SEQ ID NO: 1564113
aggcaaauucuguacccua

SEQ ID NO: 1856164 - RNA, 19 nt, Artificial Sequence
  Description of Artificial Sequence: Synthetic oligonucleotide
  Antisense strand to SEQ ID NO: 1856163
uaggguacagaauuugccu

SEQ ID NO: 1856165 - RNA, 19 nt, Artificial Sequence
  Description of Artificial Sequence: Synthetic oligonucleotide
  Sense strand starting at position 2922 of SEQ ID NO: 1564113
cuccacugacugcaagaau

SEQ ID NO: 1856166 - RNA, 19 nt, Artificial Sequence
  Description of Artificial Sequence: Synthetic oligonucleotide
  Antisense strand to SEQ ID NO: 1856165
auucuugcagucaguggag

SEQ ID NO: 1856167 - RNA, 19 nt, Artificial Sequence
  Description of Artificial Sequence: Synthetic oligonucleotide
  Sense strand starting at position 2998 of SEQ ID NO: 1564113
guccaugaaagauguagga

SEQ ID NO: 1856168 - RNA, 19 nt, Artificial Sequence
  Description of Artificial Sequence: Synthetic oligonucleotide
  Antisense strand to SEQ ID NO: 1856167
uccuacaucuuucauggac

SEQ ID NO: 1856169 - RNA, 19 nt, Artificial Sequence
  Description of Artificial Sequence: Synthetic oligonucleotide
  Sense strand starting at position 3160 of SEQ ID NO: 1564113
cuauuaguacuguacacua

SEQ ID NO: 1856170 - RNA, 19 nt, Artificial Sequence
  Description of Artificial Sequence: Synthetic oligonucleotide
  Antisense strand to SEQ ID NO: 1856169
uaguguacaguacuaauag

SEQ ID NO: 1856171 - RNA, 19 nt, Artificial Sequence
  Description of Artificial Sequence: Synthetic oligonucleotide
  Sense strand starting at position 3398 of SEQ ID NO: 1564113
ugggaaucacaagguguau

SEQ ID NO: 1856172 - RNA, 19 nt, Artificial Sequence
  Description of Artificial Sequence: Synthetic oligonucleotide
  Antisense strand to SEQ ID NO: 1856171
auacaccuugugauuccca

SEQ ID NO: 1856173 - RNA, 19 nt, Artificial Sequence
  Description of Artificial Sequence: Synthetic oligonucleotide
  Sense strand starting at position 3400 of SEQ ID NO: 1564113
ggaaucacaagguguauua

SEQ ID NO: 1856174 - RNA, 19 nt, Artificial Sequence
  Description of Artificial Sequence: Synthetic oligonucleotide
  Antisense strand to SEQ ID NO: 1856173
uaauacaccuugugauucc

SEQ ID NO: 1856175 - RNA, 19 nt, Artificial Sequence
  Description of Artificial Sequence: Synthetic oligonucleotide
  Sense strand starting at position 3436 of SEQ ID NO: 1564113
uaugaagaauugcucgaga

SEQ ID NO: 1856176 - RNA, 19 nt, Artificial Sequence
  Description of Artificial Sequence: Synthetic oligonucleotide
  Antisense strand to SEQ ID NO: 1856175
ucucgagcaauucuucaua

SEQ ID NO: 1856177 - RNA, 19 nt, Artificial Sequence
  Description of Artificial Sequence: Synthetic oligonucleotide
  Sense strand starting at position 3438 of SEQ ID NO: 1564113
ugaagaauugcucgagacu

SEQ ID NO: 1856178 - RNA, 19 nt, Artificial Sequence
  Description of Artificial Sequence: Synthetic oligonucleotide
  Antisense strand to SEQ ID NO: 1856177
agucucgagcaauucuuca

SEQ ID NO: 1856179 - RNA, 19 nt, Artificial Sequence
  Description of Artificial Sequence: Synthetic oligonucleotide
  Sense strand starting at position 3867 of SEQ ID NO: 1564113
uggagcauuuaacacauaa

SEQ ID NO: 1856180 - RNA, 19 nt, Artificial Sequence
  Description of Artificial Sequence: Synthetic oligonucleotide
  Antisense strand to SEQ ID NO: 1856179
uuauguguuaaaugcucca

SEQ ID NO: 1856181 - RNA, 19 nt, Artificial Sequence
  Description of Artificial Sequence: Synthetic oligonucleotide
  Sense strand starting at position 3936 of SEQ ID NO: 1564113
guaggauuauucccauuac

SEQ ID NO: 1856182 - RNA, 19 nt, Artificial Sequence
  Description of Artificial Sequence: Synthetic oligonucleotide
  Antisense strand to SEQ ID NO: 1856181
guaaugggaauaauccuac

SEQ ID NO: 1856183 - RNA, 19 nt, Artificial Sequence
  Description of Artificial Sequence: Synthetic oligonucleotide
  Sense strand starting at position 84 of SEQ ID NO: 1564114
guggguugaguguguugaa

SEQ ID NO: 1856184 - RNA, 19 nt, Artificial Sequence
  Description of Artificial Sequence: Synthetic oligonucleotide
  Antisense strand to SEQ ID NO: 1856183
uucaacacacucaacccac

SEQ ID NO: 1856185 - RNA, 19 nt, Artificial Sequence
  Description of Artificial Sequence: Synthetic oligonucleotide
  Sense strand starting at position 87 of SEQ ID NO: 1564114
gguugaguguguugaagag

SEQ ID NO: 1856186 - RNA, 19 nt, Artificial Sequence
  Description of Artificial Sequence: Synthetic oligonucleotide
  Antisense strand to SEQ ID NO: 1856185
cucuucaacacacucaacc

SEQ ID NO: 1856187 - RNA, 19 nt, Artificial Sequence
  Description of Artificial Sequence: Synthetic oligonucleotide
  Sense strand starting at position 240 of SEQ ID NO: 1564114
ugucccuagugcugcaauu

SEQ ID NO: 1856188 - RNA, 19 nt, Artificial Sequence
  Description of Artificial Sequence: Synthetic oligonucleotide
  Antisense strand to SEQ ID NO: 1856187
aauugcagcacuagggaca

SEQ ID NO: 1856189 - RNA, 19 nt, Artificial Sequence
  Description of Artificial Sequence: Synthetic oligonucleotide
  Sense strand starting at position 382 of SEQ ID NO: 1564114
cugcaagugugaggucuaa

SEQ ID NO: 1856190 - RNA, 19 nt, Artificial Sequence
  Description of Artificial Sequence: Synthetic oligonucleotide
  Antisense strand to SEQ ID NO: 1856189
uuagaccucacacuugcag

SEQ ID NO: 1856191 - RNA, 19 nt, Artificial Sequence
  Description of Artificial Sequence: Synthetic oligonucleotide
  Sense strand starting at position 386 of SEQ ID NO: 1564114
aagugugaggucuaaggca

SEQ ID NO: 1856192 - RNA, 19 nt, Artificial Sequence
  Description of Artificial Sequence: Synthetic oligonucleotide
  Antisense strand to SEQ ID NO: 1856191
ugccuuagaccucacacuu

SEQ ID NO: 1856193 - RNA, 19 nt, Artificial Sequence
  Description of Artificial Sequence: Synthetic oligonucleotide
  Sense strand starting at position 434 of SEQ ID NO: 1564114
gugggauggcgaugugcaa

SEQ ID NO: 1856194 - RNA, 19 nt, Artificial Sequence
  Description of Artificial Sequence: Synthetic oligonucleotide
  Antisense strand to SEQ ID NO: 1856193
uugcacaucgccaucccac

SEQ ID NO: 1856195 - RNA, 19 nt, Artificial Sequence
  Description of Artificial Sequence: Synthetic oligonucleotide
  Sense strand starting at position 511 of SEQ ID NO: 1564114
ucaggcucugcaggagaua

SEQ ID NO: 1856196 - RNA, 19 nt, Artificial Sequence
  Description of Artificial Sequence: Synthetic oligonucleotide
  Antisense strand to SEQ ID NO: 1856195
uaucuccugcagagccuga

SEQ ID NO: 1856197 - RNA, 19 nt, Artificial Sequence
  Description of Artificial Sequence: Synthetic oligonucleotide
  Sense strand starting at position 2919 of SEQ ID NO: 1564114
augagcaagccucgacuuu

SEQ ID NO: 1856198 - RNA, 19 nt, Artificial Sequence
  Description of Artificial Sequence: Synthetic oligonucleotide
  Antisense strand to SEQ ID NO: 1856197
aaagucgaggcuugcucau

SEQ ID NO: 1856199 - RNA, 19 nt, Artificial Sequence
  Description of Artificial Sequence: Synthetic oligonucleotide
  Sense strand starting at position 2928 of SEQ ID NO: 1564114
ccucgacuuugucaucaag

SEQ ID NO: 1856200 - RNA, 19 nt, Artificial Sequence
  Description of Artificial Sequence: Synthetic oligonucleotide
  Antisense strand to SEQ ID NO: 1856199
cuugaugacaaagucgagg

SEQ ID NO: 1856201 - RNA, 19 nt, Artificial Sequence
  Description of Artificial Sequence: Synthetic oligonucleotide
  Sense strand starting at position 2931 of SEQ ID NO: 1564114
cgacuuugucaucaaggca

SEQ ID NO: 1856202 - RNA, 19 nt, Artificial Sequence
  Description of Artificial Sequence: Synthetic oligonucleotide
  Antisense strand to SEQ ID NO: 1856201
ugccuugaugacaaagucg

SEQ ID NO: 1856203 - RNA, 19 nt, Artificial Sequence
  Description of Artificial Sequence: Synthetic oligonucleotide
  Sense strand starting at position 3214 of SEQ ID NO: 1564114
cugagcagcuuguuuagaa

SEQ ID NO: 1856204 - RNA, 19 nt, Artificial Sequence
  Description of Artificial Sequence: Synthetic oligonucleotide
  Antisense strand to SEQ ID NO: 1856203
uucuaaacaagcugcucag

SEQ ID NO: 1856205 - RNA, 19 nt, Artificial Sequence
  Description of Artificial Sequence: Synthetic oligonucleotide
  Sense strand starting at position 3215 of SEQ ID NO: 1564114
ugagcagcuuguuuagaau

SEQ ID NO: 1856206 - RNA, 19 nt, Artificial Sequence
  Description of Artificial Sequence: Synthetic oligonucleotide
  Antisense strand to SEQ ID NO: 1856205
auucuaaacaagcugcuca

SEQ ID NO: 1856207 - RNA, 19 nt, Artificial Sequence
  Description of Artificial Sequence: Synthetic oligonucleotide
  Sense strand starting at position 3364 of SEQ ID NO: 1564114
uggcucaucccguuaagcu

SEQ ID NO: 1856208 - RNA, 19 nt, Artificial Sequence
  Description of Artificial Sequence: Synthetic oligonucleotide
  Antisense strand to SEQ ID NO: 1856207
agcuuaacgggaugagcca

SEQ ID NO: 1856209 - RNA, 19 nt, Artificial Sequence
  Description of Artificial Sequence: Synthetic oligonucleotide
  Sense strand starting at position 3365 of SEQ ID NO: 1564114
ggcucaucccguuaagcua

SEQ ID NO: 1856210 - RNA, 19 nt, Artificial Sequence
  Description of Artificial Sequence: Synthetic oligonucleotide
  Antisense strand to SEQ ID NO: 1856209
uagcuuaacgggaugagcc

SEQ ID NO: 1856211 - RNA, 19 nt, Artificial Sequence
  Description of Artificial Sequence: Synthetic oligonucleotide
  Sense strand starting at position 3398 of SEQ ID NO: 1564114
cguccagcuuuaggaagaa

SEQ ID NO: 1856212 - RNA, 19 nt, Artificial Sequence
  Description of Artificial Sequence: Synthetic oligonucleotide
  Antisense strand to SEQ ID NO: 1856211
uucuuccuaaagcuggacg

SEQ ID NO: 1856213 - RNA, 19 nt, Artificial Sequence
  Description of Artificial Sequence: Synthetic oligonucleotide
  Sense strand starting at position 3438 of SEQ ID NO: 1564114
gauugagcuugcuggguga

SEQ ID NO: 1856214 - RNA, 19 nt, Artificial Sequence
  Description of Artificial Sequence: Synthetic oligonucleotide
  Antisense strand to SEQ ID NO: 1856213
ucacccagcaagcucaauc

SEQ ID NO: 1856215 - RNA, 19 nt, Artificial Sequence
  Description of Artificial Sequence: Synthetic oligonucleotide
  Sense strand starting at position 3662 of SEQ ID NO: 1564114
gcauuagagaagugacuca

SEQ ID NO: 1856216 - RNA, 19 nt, Artificial Sequence
  Description of Artificial Sequence: Synthetic oligonucleotide
  Antisense strand to SEQ ID NO: 1856215
ugagucacuucucuaaugc

SEQ ID NO: 1856217 - RNA, 19 nt, Artificial Sequence
  Description of Artificial Sequence: Synthetic oligonucleotide
  Sense strand starting at position 3761 of SEQ ID NO: 1564114
cccauugccuuugagagaa

SEQ ID NO: 1856218 - RNA, 19 nt, Artificial Sequence
  Description of Artificial Sequence: Synthetic oligonucleotide
  Antisense strand to SEQ ID NO: 1856217
uucucucaaaggcaauggg

SEQ ID NO: 1856219 - RNA, 19 nt, Artificial Sequence
  Description of Artificial Sequence: Synthetic oligonucleotide
  Sense strand starting at position 3937 of SEQ ID NO: 1564114
gggagacuuucagauguug

SEQ ID NO: 1856220 - RNA, 19 nt, Artificial Sequence
  Description of Artificial Sequence: Synthetic oligonucleotide
  Antisense strand to SEQ ID NO: 1856219
caacaucugaaagucuccc

SEQ ID NO: 1856221 - RNA, 19 nt, Artificial Sequence
  Description of Artificial Sequence: Synthetic oligonucleotide
  Sense strand starting at position 3946 of SEQ ID NO: 1564114
ucagauguugcuugucaaa

SEQ ID NO: 1856222 - RNA, 19 nt, Artificial Sequence
  Description of Artificial Sequence: Synthetic oligonucleotide
  Antisense strand to SEQ ID NO: 1856221
uuugacaagcaacaucuga

SEQ ID NO: 1856223 - RNA, 19 nt, Artificial Sequence
  Description of Artificial Sequence: Synthetic oligonucleotide
  Sense strand starting at position 3948 of SEQ ID NO: 1564114
agauguugcuugucaaagg

SEQ ID NO: 1856224 - RNA, 19 nt, Artificial Sequence
  Description of Artificial Sequence: Synthetic oligonucleotide
  Antisense strand to SEQ ID NO: 1856223
ccuuugacaagcaacaucu

SEQ ID NO: 1856225 - RNA, 19 nt, Artificial Sequence
  Description of Artificial Sequence: Synthetic oligonucleotide
  Sense strand starting at position 1298 of SEQ ID NO: 1564115
guggguugaguguguugaa

SEQ ID NO: 1856226 - RNA, 19 nt, Artificial Sequence
  Description of Artificial Sequence: Synthetic oligonucleotide
  Antisense strand to SEQ ID NO: 1856225
uucaacacacucaacccac

SEQ ID NO: 1856227 - RNA, 19 nt, Artificial Sequence
  Description of Artificial Sequence: Synthetic oligonucleotide
  Sense strand starting at position 1301 of SEQ ID NO: 1564115
gguugaguguguugaagag

SEQ ID NO: 1856228 - RNA, 19 nt, Artificial Sequence
  Description of Artificial Sequence: Synthetic oligonucleotide
  Antisense strand to SEQ ID NO: 1856227
cucuucaacacacucaacc

SEQ ID NO: 1856229 - RNA, 19 nt, Artificial Sequence
  Description of Artificial Sequence: Synthetic oligonucleotide
  Sense strand starting at position 1454 of SEQ ID NO: 1564115
ugucccuagugcugcaauu

SEQ ID NO: 1856230 - RNA, 19 nt, Artificial Sequence
  Description of Artificial Sequence: Synthetic oligonucleotide
  Antisense strand to SEQ ID NO: 1856229
aauugcagcacuagggaca

SEQ ID NO: 1856231 - RNA, 19 nt, Artificial Sequence
  Description of Artificial Sequence: Synthetic oligonucleotide
  Sense strand starting at position 1596 of SEQ ID NO: 1564115
cugcaagugugaggucuaa

SEQ ID NO: 1856232 - RNA, 19 nt, Artificial Sequence
  Description of Artificial Sequence: Synthetic oligonucleotide
  Antisense strand to SEQ ID NO: 1856231
uuagaccucacacuugcag

SEQ ID NO: 1856233 - RNA, 19 nt, Artificial Sequence
  Description of Artificial Sequence: Synthetic oligonucleotide
  Sense strand starting at position 1600 of SEQ ID NO: 1564115
aagugugaggucuaaggca

SEQ ID NO: 1856234 - RNA, 19 nt, Artificial Sequence
  Description of Artificial Sequence: Synthetic oligonucleotide
  Antisense strand to SEQ ID NO: 1856233
ugccuuagaccucacacuu

SEQ ID NO: 1856235 - RNA, 19 nt, Artificial Sequence
  Description of Artificial Sequence: Synthetic oligonucleotide
  Sense strand starting at position 1648 of SEQ ID NO: 1564115
gugggauggcgaugugcaa

SEQ ID NO: 1856236 - RNA, 19 nt, Artificial Sequence
  Description of Artificial Sequence: Synthetic oligonucleotide
  Antisense strand to SEQ ID NO: 1856235
uugcacaucgccaucccac

SEQ ID NO: 1856237 - RNA, 19 nt, Artificial Sequence
  Description of Artificial Sequence: Synthetic oligonucleotide
  Sense strand starting at position 1725 of SEQ ID NO: 1564115
ucaggcucugcaggagaua

SEQ ID NO: 1856238 - RNA, 19 nt, Artificial Sequence
  Description of Artificial Sequence: Synthetic oligonucleotide
  Antisense strand to SEQ ID NO: 1856237
uaucuccugcagagccuga

SEQ ID NO: 1856239 - RNA, 19 nt, Artificial Sequence
  Description of Artificial Sequence: Synthetic oligonucleotide
  Sense strand starting at position 562 of SEQ ID NO: 1564116
gugacauagcuguagagau

SEQ ID NO: 1856240 - RNA, 19 nt, Artificial Sequence
  Description of Artificial Sequence: Synthetic oligonucleotide
  Antisense strand to SEQ ID NO: 1856239
aucucuacagcuaugucac

SEQ ID NO: 1856241 - RNA, 19 nt, Artificial Sequence
  Description of Artificial Sequence: Synthetic oligonucleotide
  Sense strand starting at position 840 of SEQ ID NO: 1564116
uugaccaaaucugcgaaau

SEQ ID NO: 1856242 - RNA, 19 nt, Artificial Sequence
  Description of Artificial Sequence: Synthetic oligonucleotide
  Antisense strand to SEQ ID NO: 1856241
auuucgcagauuuggucaa

SEQ ID NO: 1856243 - RNA, 19 nt, Artificial Sequence
  Description of Artificial Sequence: Synthetic oligonucleotide
  Sense strand starting at position 841 of SEQ ID NO: 1564116
ugaccaaaucugcgaaaug

SEQ ID NO: 1856244 - RNA, 19 nt, Artificial Sequence
  Description of Artificial Sequence: Synthetic oligonucleotide
  Antisense strand to SEQ ID NO: 1856243
cauuucgcagauuugguca

SEQ ID NO: 1856245 - RNA, 19 nt, Artificial Sequence
  Description of Artificial Sequence: Synthetic oligonucleotide
  Sense strand starting at position 869 of SEQ ID NO: 1564116
gcauccuagcaggaauuga

SEQ ID NO: 1856246 - RNA, 19 nt, Artificial Sequence
  Description of Artificial Sequence: Synthetic oligonucleotide
  Antisense strand to SEQ ID NO: 1856245
ucaauuccugcuaggaugc

SEQ ID NO: 1856247 - RNA, 19 nt, Artificial Sequence
  Description of Artificial Sequence: Synthetic oligonucleotide
  Sense strand starting at position 929 of SEQ ID NO: 1564116
agggcucauuaucccuaaa

SEQ ID NO: 1856248 - RNA, 19 nt, Artificial Sequence
  Description of Artificial Sequence: Synthetic oligonucleotide
  Antisense strand to SEQ ID NO: 1856247
uuuagggauaaugagcccu

SEQ ID NO: 1856249 - RNA, 19 nt, Artificial Sequence
  Description of Artificial Sequence: Synthetic oligonucleotide
  Sense strand starting at position 1114 of SEQ ID NO: 1564116
ucagaaauggcacgugaaa

SEQ ID NO: 1856250 - RNA, 19 nt, Artificial Sequence
  Description of Artificial Sequence: Synthetic oligonucleotide
  Antisense strand to SEQ ID NO: 1856249
uuucacgugccauuucuga

SEQ ID NO: 1856251 - RNA, 19 nt, Artificial Sequence
  Description of Artificial Sequence: Synthetic oligonucleotide
  Sense strand starting at position 1156 of SEQ ID NO: 1564116
cgccuaguaagugcucaau

SEQ ID NO: 1856252 - RNA, 19 nt, Artificial Sequence
  Description of Artificial Sequence: Synthetic oligonucleotide
  Antisense strand to SEQ ID NO: 1856251
auugagcacuuacuaggcg

SEQ ID NO: 1856253 - RNA, 19 nt, Artificial Sequence
  Description of Artificial Sequence: Synthetic oligonucleotide
  Sense strand starting at position 1242 of SEQ ID NO: 1564116
gaaaccuaaugugucaguu

SEQ ID NO: 1856254 - RNA, 19 nt, Artificial Sequence
  Description of Artificial Sequence: Synthetic oligonucleotide
  Antisense strand to SEQ ID NO: 1856253
aacugacacauuagguuuc

SEQ ID NO: 1856255 - RNA, 19 nt, Artificial Sequence
  Description of Artificial Sequence: Synthetic oligonucleotide
  Sense strand starting at position 1266 of SEQ ID NO: 1564116
gccuguggcuauuugggaa

SEQ ID NO: 1856256 - RNA, 19 nt, Artificial Sequence
  Description of Artificial Sequence: Synthetic oligonucleotide
  Antisense strand to SEQ ID NO: 1856255
uucccaaauagccacaggc

SEQ ID NO: 1856257 - RNA, 19 nt, Artificial Sequence
  Description of Artificial Sequence: Synthetic oligonucleotide
  Sense strand starting at position 1530 of SEQ ID NO: 1564116
ggcuucgacaucuaaagau

SEQ ID NO: 1856258 - RNA, 19 nt, Artificial Sequence
  Description of Artificial Sequence: Synthetic oligonucleotide
  Antisense strand to SEQ ID NO: 1856257
aucuuuagaugucgaagcc

SEQ ID NO: 1856259 - RNA, 19 nt, Artificial Sequence
  Description of Artificial Sequence: Synthetic oligonucleotide
  Sense strand starting at position 1539 of SEQ ID NO: 1564116
aucuaaagauuuggagaug

SEQ ID NO: 1856260 - RNA, 19 nt, Artificial Sequence
  Description of Artificial Sequence: Synthetic oligonucleotide
  Antisense strand to SEQ ID NO: 1856259
caucuccaaaucuuuagau

SEQ ID NO: 1856261 - RNA, 19 nt, Artificial Sequence
  Description of Artificial Sequence: Synthetic oligonucleotide
  Sense strand starting at position 1584 of SEQ ID NO: 1564116
ccgagauugcucgcacucu

SEQ ID NO: 1856262 - RNA, 19 nt, Artificial Sequence
  Description of Artificial Sequence: Synthetic oligonucleotide
  Antisense strand to SEQ ID NO: 1856261
agagugcgagcaaucucgg

SEQ ID NO: 1856263 - RNA, 19 nt, Artificial Sequence
  Description of Artificial Sequence: Synthetic oligonucleotide
  Sense strand starting at position 1672 of SEQ ID NO: 1564116
cuagaaaugguuuggagcu

SEQ ID NO: 1856264 - RNA, 19 nt, Artificial Sequence
  Description of Artificial Sequence: Synthetic oligonucleotide
  Antisense strand to SEQ ID NO: 1856263
agcuccaaaccauuucuag

SEQ ID NO: 1856265 - RNA, 19 nt, Artificial Sequence
  Description of Artificial Sequence: Synthetic oligonucleotide
  Sense strand starting at position 2304 of SEQ ID NO: 1564116
cccuguuaggaccagugau

SEQ ID NO: 1856266 - RNA, 19 nt, Artificial Sequence
  Description of Artificial Sequence: Synthetic oligonucleotide
  Antisense strand to SEQ ID NO: 1856265
aucacugguccuaacaggg

SEQ ID NO: 1856267 - RNA, 19 nt, Artificial Sequence
  Description of Artificial Sequence: Synthetic oligonucleotide
  Sense strand starting at position 2316 of SEQ ID NO: 1564116
cagugauucugggcaggaa

SEQ ID NO: 1856268 - RNA, 19 nt, Artificial Sequence
  Description of Artificial Sequence: Synthetic oligonucleotide
  Antisense strand to SEQ ID NO: 1856267
uuccugcccagaaucacug

SEQ ID NO: 1856269 - RNA, 19 nt, Artificial Sequence
  Description of Artificial Sequence: Synthetic oligonucleotide
  Sense strand starting at position 2317 of SEQ ID NO: 1564116
agugauucugggcaggaau

SEQ ID NO: 1856270 - RNA, 19 nt, Artificial Sequence
  Description of Artificial Sequence: Synthetic oligonucleotide
  Antisense strand to SEQ ID NO: 1856269
auuccugcccagaaucacu

SEQ ID NO: 1856271 - RNA, 19 nt, Artificial Sequence
  Description of Artificial Sequence: Synthetic oligonucleotide
  Sense strand starting at position 2475 of SEQ ID NO: 1564116
agcuuucuugucuacacau

SEQ ID NO: 1856272 - RNA, 19 nt, Artificial Sequence
  Description of Artificial Sequence: Synthetic oligonucleotide
  Antisense strand to SEQ ID NO: 1856271
auguguagacaagaaagcu

SEQ ID NO: 1856273 - RNA, 19 nt, Artificial Sequence
  Description of Artificial Sequence: Synthetic oligonucleotide
  Sense strand starting at position 2753 of SEQ ID NO: 1564116
agaggcaugacuuguuuga

SEQ ID NO: 1856274 - RNA, 19 nt, Artificial Sequence
  Description of Artificial Sequence: Synthetic oligonucleotide
  Antisense strand to SEQ ID NO: 1856273
ucaaacaagucaugccucu

SEQ ID NO: 1856275 - RNA, 19 nt, Artificial Sequence
  Description of Artificial Sequence: Synthetic oligonucleotide
  Sense strand starting at position 2755 of SEQ ID NO: 1564116
aggcaugacuuguuugaca

SEQ ID NO: 1856276 - RNA, 19 nt, Artificial Sequence
  Description of Artificial Sequence: Synthetic oligonucleotide
  Antisense strand to SEQ ID NO: 1856275
ugucaaacaagucaugccu

SEQ ID NO: 1856277 - RNA, 19 nt, Artificial Sequence
  Description of Artificial Sequence: Synthetic oligonucleotide
  Sense strand starting at position 2790 of SEQ ID NO: 1564116
guugaccaccuuugauaaa

SEQ ID NO: 1856278 - RNA, 19 nt, Artificial Sequence
  Description of Artificial Sequence: Synthetic oligonucleotide
  Antisense strand to SEQ ID NO: 1856277
uuuaucaaagguggucaac

SEQ ID NO: 1856279 - RNA, 19 nt, Artificial Sequence
  Description of Artificial Sequence: Synthetic oligonucleotide
  Sense strand starting at position 2977 of SEQ ID NO: 1564116
aucuacgaaugaucacauu

SEQ ID NO: 1856280 - RNA, 19 nt, Artificial Sequence
  Description of Artificial Sequence: Synthetic oligonucleotide
  Antisense strand to SEQ ID NO: 1856279
aaugugaucauucguagau

SEQ ID NO: 1856281 - RNA, 19 nt, Artificial Sequence
  Description of Artificial Sequence: Synthetic oligonucleotide
  Sense strand starting at position 2983 of SEQ ID NO: 1564116
gaaugaucacauuggguca

SEQ ID NO: 1856282 - RNA, 19 nt, Artificial Sequence
  Description of Artificial Sequence: Synthetic oligonucleotide
  Antisense strand to SEQ ID NO: 1856281
ugacccaaugugaucauuc

SEQ ID NO: 1856283 - RNA, 19 nt, Artificial Sequence
  Description of Artificial Sequence: Synthetic oligonucleotide
  Sense strand starting at position 2986 of SEQ ID NO: 1564116
ugaucacauugggucagau

SEQ ID NO: 1856284 - RNA, 19 nt, Artificial Sequence
  Description of Artificial Sequence: Synthetic oligonucleotide
  Antisense strand to SEQ ID NO: 1856283
aucugacccaaugugauca

SEQ ID NO: 1856285 - RNA, 19 nt, Artificial Sequence
  Description of Artificial Sequence: Synthetic oligonucleotide
  Sense strand starting at position 3045 of SEQ ID NO: 1564116
agcaccaaagguugugaaa

SEQ ID NO: 1856286 - RNA, 19 nt, Artificial Sequence
  Description of Artificial Sequence: Synthetic oligonucleotide
  Antisense strand to SEQ ID NO: 1856285
uuucacaaccuuuggugcu

SEQ ID NO: 1856287 - RNA, 19 nt, Artificial Sequence
  Description of Artificial Sequence: Synthetic oligonucleotide
  Sense strand starting at position 3329 of SEQ ID NO: 1564116
guccuaaucuaacuaggga

SEQ ID NO: 1856288 - RNA, 19 nt, Artificial Sequence
  Description of Artificial Sequence: Synthetic oligonucleotide
  Antisense strand to SEQ ID NO: 1856287
ucccuaguuagauuaggac

SEQ ID NO: 1856289 - RNA, 19 nt, Artificial Sequence
  Description of Artificial Sequence: Synthetic oligonucleotide
  Sense strand starting at position 3380 of SEQ ID NO: 1564116
uuacauagacguuaggagu

SEQ ID NO: 1856290 - RNA, 19 nt, Artificial Sequence
  Description of Artificial Sequence: Synthetic oligonucleotide
  Antisense strand to SEQ ID NO: 1856289
acuccuaacgucuauguaa

SEQ ID NO: 1856291 - RNA, 19 nt, Artificial Sequence
  Description of Artificial Sequence: Synthetic oligonucleotide
  Sense strand starting at position 3407 of SEQ ID NO: 1564116
uggaauugcaccuagguua

SEQ ID NO: 1856292 - RNA, 19 nt, Artificial Sequence
  Description of Artificial Sequence: Synthetic oligonucleotide
  Antisense strand to SEQ ID NO: 1856291
uaaccuaggugcaauucca

SEQ ID NO: 1856293 - RNA, 19 nt, Artificial Sequence
  Description of Artificial Sequence: Synthetic oligonucleotide
  Sense strand starting at position 3580 of SEQ ID NO: 1564116
gauacauauuuggaacgau

SEQ ID NO: 1856294 - RNA, 19 nt, Artificial Sequence
  Description of Artificial Sequence: Synthetic oligonucleotide
  Antisense strand to SEQ ID NO: 1856293
aucguuccaaauauguauc

SEQ ID NO: 1856295 - RNA, 19 nt, Artificial Sequence
  Description of Artificial Sequence: Synthetic oligonucleotide
  Sense strand starting at position 3588 of SEQ ID NO: 1564116
uuuggaacgauauauuagu

SEQ ID NO: 1856296 - RNA, 19 nt, Artificial Sequence
  Description of Artificial Sequence: Synthetic oligonucleotide
  Antisense strand to SEQ ID NO: 1856295
acuaauauaucguuccaaa

SEQ ID NO: 1856297 - RNA, 19 nt, Artificial Sequence
  Description of Artificial Sequence: Synthetic oligonucleotide
  Sense strand starting at position 3611 of SEQ ID NO: 1564116
augaucugguugcuuagau

SEQ ID NO: 1856298 - RNA, 19 nt, Artificial Sequence
  Description of Artificial Sequence: Synthetic oligonucleotide
  Antisense strand to SEQ ID NO: 1856297
aucuaagcaaccagaucau

SEQ ID NO: 1856299 - RNA, 19 nt, Artificial Sequence
  Description of Artificial Sequence: Synthetic oligonucleotide
  Sense strand starting at position 3618 of SEQ ID NO: 1564116
gguugcuuagauuagguga

SEQ ID NO: 1856300 - RNA, 19 nt, Artificial Sequence
  Description of Artificial Sequence: Synthetic oligonucleotide
  Antisense strand to SEQ ID NO: 1856299
ucaccuaaucuaagcaacc

SEQ ID NO: 1856301 - RNA, 19 nt, Artificial Sequence
  Description of Artificial Sequence: Synthetic oligonucleotide
  Sense strand starting at position 3629 of SEQ ID NO: 1564116
uuaggugauugauuggauu

SEQ ID NO: 1856302 - RNA, 19 nt, Artificial Sequence
  Description of Artificial Sequence: Synthetic oligonucleotide
  Antisense strand to SEQ ID NO: 1856301
aauccaaucaaucaccuaa

SEQ ID NO: 1856303 - RNA, 19 nt, Artificial Sequence
  Description of Artificial Sequence: Synthetic oligonucleotide
  Sense strand starting at position 3631 of SEQ ID NO: 1564116
aggugauugauuggauuau

SEQ ID NO: 1856304 - RNA, 19 nt, Artificial Sequence
  Description of Artificial Sequence: Synthetic oligonucleotide
  Antisense strand to SEQ ID NO: 1856303
auaauccaaucaaucaccu

SEQ ID NO: 1856305 - RNA, 19 nt, Artificial Sequence
  Description of Artificial Sequence: Synthetic oligonucleotide
  Sense strand starting at position 3654 of SEQ ID NO: 1564116
uugauuauuuaucacagag

SEQ ID NO: 1856306 - RNA, 19 nt, Artificial Sequence
  Description of Artificial Sequence: Synthetic oligonucleotide
  Antisense strand to SEQ ID NO: 1856305
cucugugauaaauaaucaa

SEQ ID NO: 1856307 - RNA, 19 nt, Artificial Sequence
  Description of Artificial Sequence: Synthetic oligonucleotide
  Sense strand starting at position 3749 of SEQ ID NO: 1564116
guguauccaucacuacaau

SEQ ID NO: 1856308 - RNA, 19 nt, Artificial Sequence
  Description of Artificial Sequence: Synthetic oligonucleotide
  Antisense strand to SEQ ID NO: 1856307
auuguagugauggauacac

SEQ ID NO: 1856309 - RNA, 19 nt, Artificial Sequence
  Description of Artificial Sequence: Synthetic oligonucleotide
  Sense strand starting at position 3898 of SEQ ID NO: 1564116
ccuagauguuggucaaagg

SEQ ID NO: 1856310 - RNA, 19 nt, Artificial Sequence
  Description of Artificial Sequence: Synthetic oligonucleotide
  Antisense strand to SEQ ID NO: 1856309
ccuuugaccaacaucuagg

SEQ ID NO: 1856311 - RNA, 19 nt, Artificial Sequence
  Description of Artificial Sequence: Synthetic oligonucleotide
  Sense strand starting at position 3908 of SEQ ID NO: 1564116
ggucaaaggauguagaguu

SEQ ID NO: 1856312 - RNA, 19 nt, Artificial Sequence
  Description of Artificial Sequence: Synthetic oligonucleotide
  Antisense strand to SEQ ID NO: 1856311
aacucuacauccuuugacc

SEQ ID NO: 1856313 - RNA, 19 nt, Artificial Sequence
  Description of Artificial Sequence: Synthetic oligonucleotide
  Sense strand starting at position 3967 of SEQ ID NO: 1564116
cagcauggucauuauaguu

SEQ ID NO: 1856314 - RNA, 19 nt, Artificial Sequence
  Description of Artificial Sequence: Synthetic oligonucleotide
  Antisense strand to SEQ ID NO: 1856313
aacuauaaugaccaugcug

SEQ ID NO: 1856315 - RNA, 19 nt, Artificial Sequence
  Description of Artificial Sequence: Synthetic oligonucleotide
  Sense strand starting at position 3972 of SEQ ID NO: 1564116
uggucauuauaguuauaac

SEQ ID NO: 1856316 - RNA, 19 nt, Artificial Sequence
  Description of Artificial Sequence: Synthetic oligonucleotide
  Antisense strand to SEQ ID NO: 1856315
guuauaacuauaaugacca

SEQ ID NO: 1856317 - RNA, 19 nt, Artificial Sequence
  Description of Artificial Sequence: Synthetic oligonucleotide
  Sense strand starting at position 3983 of SEQ ID NO: 1564116
guuauaacacuguauuaug

SEQ ID NO: 1856318 - RNA, 19 nt, Artificial Sequence
  Description of Artificial Sequence: Synthetic oligonucleotide
  Antisense strand to SEQ ID NO: 1856317
cauaauacaguguuauaac

SEQ ID NO: 1856319 - RNA, 19 nt, Artificial Sequence
  Description of Artificial Sequence: Synthetic oligonucleotide
  Sense strand starting at position 13 of SEQ ID NO: 1564117
auaugaccugccuauaagu

SEQ ID NO: 1856320 - RNA, 19 nt, Artificial Sequence
  Description of Artificial Sequence: Synthetic oligonucleotide
  Antisense strand to SEQ ID NO: 1856319
acuuauaggcaggucauau

SEQ ID NO: 1856321 - RNA, 19 nt, Artificial Sequence
  Description of Artificial Sequence: Synthetic oligonucleotide
  Sense strand starting at position 15 of SEQ ID NO: 1564117
augaccugccuauaaguga

SEQ ID NO: 1856322 - RNA, 19 nt, Artificial Sequence
  Description of Artificial Sequence: Synthetic oligonucleotide
  Antisense strand to SEQ ID NO: 1856321
ucacuuauaggcaggucau

SEQ ID NO: 1856323 - RNA, 19 nt, Artificial Sequence
  Description of Artificial Sequence: Synthetic oligonucleotide
  Sense strand starting at position 22 of SEQ ID NO: 1564117
gccuauaagugacuugaag

SEQ ID NO: 1856324 - RNA, 19 nt, Artificial Sequence
  Description of Artificial Sequence: Synthetic oligonucleotide
  Antisense strand to SEQ ID NO: 1856323
cuucaagucacuuauaggc

SEQ ID NO: 1856325 - RNA, 19 nt, Artificial Sequence
  Description of Artificial Sequence: Synthetic oligonucleotide
  Sense strand starting at position 101 of SEQ ID NO: 1564117
auguuuguugaggauagua

SEQ ID NO: 1856326 - RNA, 19 nt, Artificial Sequence
  Description of Artificial Sequence: Synthetic oligonucleotide
  Antisense strand to SEQ ID NO: 1856325
uacuauccucaacaaacau

SEQ ID NO: 1856327 - RNA, 19 nt, Artificial Sequence
  Description of Artificial Sequence: Synthetic oligonucleotide
  Sense strand starting at position 103 of SEQ ID NO: 1564117
guuuguugaggauaguaaa

SEQ ID NO: 1856328 - RNA, 19 nt, Artificial Sequence
  Description of Artificial Sequence: Synthetic oligonucleotide
  Antisense strand to SEQ ID NO: 1856327
uuuacuauccucaacaaac

SEQ ID NO: 1856329 - RNA, 19 nt, Artificial Sequence
  Description of Artificial Sequence: Synthetic oligonucleotide
  Sense strand starting at position 128 of SEQ ID NO: 1564117
acacacuguuaugcagaaa

SEQ ID NO: 1856330 - RNA, 19 nt, Artificial Sequence
  Description of Artificial Sequence: Synthetic oligonucleotide
  Antisense strand to SEQ ID NO: 1856329
uuucugcauaacagugugu

SEQ ID NO: 1856331 - RNA, 19 nt, Artificial Sequence
  Description of Artificial Sequence: Synthetic oligonucleotide
  Sense strand starting at position 251 of SEQ ID NO: 1564117
cuaggaaucuuagugagca

SEQ ID NO: 1856332 - RNA, 19 nt, Artificial Sequence
  Description of Artificial Sequence: Synthetic oligonucleotide
  Antisense strand to SEQ ID NO: 1856331
ugcucacuaagauuccuag

SEQ ID NO: 1856333 - RNA, 19 nt, Artificial Sequence
  Description of Artificial Sequence: Synthetic oligonucleotide
  Sense strand starting at position 255 of SEQ ID NO: 1564117
gaaucuuagugagcagaga

SEQ ID NO: 1856334 - RNA, 19 nt, Artificial Sequence
  Description of Artificial Sequence: Synthetic oligonucleotide
  Antisense strand to SEQ ID NO: 1856333
ucucugcucacuaagauuc

SEQ ID NO: 1856335 - RNA, 19 nt, Artificial Sequence
  Description of Artificial Sequence: Synthetic oligonucleotide
  Sense strand starting at position 365 of SEQ ID NO: 1564117
cuugcuauccuugagagau

SEQ ID NO: 1856336 - RNA, 19 nt, Artificial Sequence
  Description of Artificial Sequence: Synthetic oligonucleotide
  Antisense strand to SEQ ID NO: 1856335
aucucucaaggauagcaag

SEQ ID NO: 1856337 - RNA, 19 nt, Artificial Sequence
  Description of Artificial Sequence: Synthetic oligonucleotide
  Sense strand starting at position 504 of SEQ ID NO: 1564117
guuuaacugcuccaaauga

SEQ ID NO: 1856338 - RNA, 19 nt, Artificial Sequence
  Description of Artificial Sequence: Synthetic oligonucleotide
  Antisense strand to SEQ ID NO: 1856337
ucauuuggagcaguuaaac

SEQ ID NO: 1856339 - RNA, 19 nt, Artificial Sequence
  Description of Artificial Sequence: Synthetic oligonucleotide
  Sense strand starting at position 556 of SEQ ID NO: 1564117
auuguuuguccgcccucau

SEQ ID NO: 1856340 - RNA, 19 nt, Artificial Sequence
  Description of Artificial Sequence: Synthetic oligonucleotide
  Antisense strand to SEQ ID NO: 1856339
augagggcggacaaacaau

SEQ ID NO: 1856341 - RNA, 19 nt, Artificial Sequence
  Description of Artificial Sequence: Synthetic oligonucleotide
  Sense strand starting at position 771 of SEQ ID NO: 1564117
auucuacaaucggucaaua

SEQ ID NO: 1856342 - RNA, 19 nt, Artificial Sequence
  Description of Artificial Sequence: Synthetic oligonucleotide
  Antisense strand to SEQ ID NO: 1856341
uauugaccgauuguagaau

SEQ ID NO: 1856343 - RNA, 19 nt, Artificial Sequence
  Description of Artificial Sequence: Synthetic oligonucleotide
  Sense strand starting at position 773 of SEQ ID NO: 1564117
ucuacaaucggucaauaac

SEQ ID NO: 1856344 - RNA, 19 nt, Artificial Sequence
  Description of Artificial Sequence: Synthetic oligonucleotide
  Antisense strand to SEQ ID NO: 1856343
guuauugaccgauuguaga

SEQ ID NO: 1856345 - RNA, 19 nt, Artificial Sequence
  Description of Artificial Sequence: Synthetic oligonucleotide
  Sense strand starting at position 782 of SEQ ID NO: 1564117
ggucaauaaccucaugcca

SEQ ID NO: 1856346 - RNA, 19 nt, Artificial Sequence
  Description of Artificial Sequence: Synthetic oligonucleotide
  Antisense strand to SEQ ID NO: 1856345
uggcaugagguuauugacc

SEQ ID NO: 1856347 - RNA, 19 nt, Artificial Sequence
  Description of Artificial Sequence: Synthetic oligonucleotide
  Sense strand starting at position 852 of SEQ ID NO: 1564117
cugaacuguccugaucauc

SEQ ID NO: 1856348 - RNA, 19 nt, Artificial Sequence
  Description of Artificial Sequence: Synthetic oligonucleotide
  Antisense strand to SEQ ID NO: 1856347
gaugaucaggacaguucag

SEQ ID NO: 1856349 - RNA, 19 nt, Artificial Sequence
  Description of Artificial Sequence: Synthetic oligonucleotide
  Sense strand starting at position 862 of SEQ ID NO: 1564117
cugaucaucguauaguaca

SEQ ID NO: 1856350 - RNA, 19 nt, Artificial Sequence
  Description of Artificial Sequence: Synthetic oligonucleotide
  Antisense strand to SEQ ID NO: 1856349
uguacuauacgaugaucag

SEQ ID NO: 1856351 - RNA, 19 nt, Artificial Sequence
  Description of Artificial Sequence: Synthetic oligonucleotide
  Sense strand starting at position 985 of SEQ ID NO: 1564117
caauaaaugggaugucauu

SEQ ID NO: 1856352 - RNA, 19 nt, Artificial Sequence
  Description of Artificial Sequence: Synthetic oligonucleotide
  Antisense strand to SEQ ID NO: 1856351
aaugacaucccauuuauug

SEQ ID NO: 1856353 - RNA, 19 nt, Artificial Sequence
  Description of Artificial Sequence: Synthetic oligonucleotide
  Sense strand starting at position 1112 of SEQ ID NO: 1564117
gagcuagguguugaguaaa

SEQ ID NO: 1856354 - RNA, 19 nt, Artificial Sequence
  Description of Artificial Sequence: Synthetic oligonucleotide
  Antisense strand to SEQ ID NO: 1856353
uuuacucaacaccuagcuc

SEQ ID NO: 1856355 - RNA, 19 nt, Artificial Sequence
  Description of Artificial Sequence: Synthetic oligonucleotide
  Sense strand starting at position 1115 of SEQ ID NO: 1564117
cuagguguugaguaaaggu

SEQ ID NO: 1856356 - RNA, 19 nt, Artificial Sequence
  Description of Artificial Sequence: Synthetic oligonucleotide
  Antisense strand to SEQ ID NO: 1856355
accuuuacucaacaccuag

SEQ ID NO: 1856357 - RNA, 19 nt, Artificial Sequence
  Description of Artificial Sequence: Synthetic oligonucleotide
  Sense strand starting at position 1156 of SEQ ID NO: 1564117
ccagauucugggcaguaga

SEQ ID NO: 1856358 - RNA, 19 nt, Artificial Sequence
  Description of Artificial Sequence: Synthetic oligonucleotide
  Antisense strand to SEQ ID NO: 1856357
ucuacugcccagaaucugg

SEQ ID NO: 1856359 - RNA, 19 nt, Artificial Sequence
  Description of Artificial Sequence: Synthetic oligonucleotide
  Sense strand starting at position 1159 of SEQ ID NO: 1564117
gauucugggcaguagagau

SEQ ID NO: 1856360 - RNA, 19 nt, Artificial Sequence
  Description of Artificial Sequence: Synthetic oligonucleotide
  Antisense strand to SEQ ID NO: 1856359
aucucuacugcccagaauc

SEQ ID NO: 1856361 - RNA, 19 nt, Artificial Sequence
  Description of Artificial Sequence: Synthetic oligonucleotide
  Sense strand starting at position 1219 of SEQ ID NO: 1564117
agagaaauggaucgcaaug

SEQ ID NO: 1856362 - RNA, 19 nt, Artificial Sequence
  Description of Artificial Sequence: Synthetic oligonucleotide
  Antisense strand to SEQ ID NO: 1856361
cauugcgauccauuucucu

SEQ ID NO: 1856363 - RNA, 19 nt, Artificial Sequence
  Description of Artificial Sequence: Synthetic oligonucleotide
  Sense strand starting at position 1586 of SEQ ID NO: 1564117
gguugaggaacuugccaua

SEQ ID NO: 1856364 - RNA, 19 nt, Artificial Sequence
  Description of Artificial Sequence: Synthetic oligonucleotide
  Antisense strand to SEQ ID NO: 1856363
uauggcaaguuccucaacc

SEQ ID NO: 1856365 - RNA, 19 nt, Artificial Sequence
  Description of Artificial Sequence: Synthetic oligonucleotide
  Sense strand starting at position 2165 of SEQ ID NO: 1564117
acugccuuuggcuaaagaa

SEQ ID NO: 1856366 - RNA, 19 nt, Artificial Sequence
  Description of Artificial Sequence: Synthetic oligonucleotide
  Antisense strand to SEQ ID NO: 1856365
uucuuuagccaaaggcagu

SEQ ID NO: 1856367 - RNA, 19 nt, Artificial Sequence
  Description of Artificial Sequence: Synthetic oligonucleotide
  Sense strand starting at position 2178 of SEQ ID NO: 1564117
aaagaaacaucggcucagu

SEQ ID NO: 1856368 - RNA, 19 nt, Artificial Sequence
  Description of Artificial Sequence: Synthetic oligonucleotide
  Antisense strand to SEQ ID NO: 1856367
acugagccgauguuucuuu

SEQ ID NO: 1856369 - RNA, 19 nt, Artificial Sequence
  Description of Artificial Sequence: Synthetic oligonucleotide
  Sense strand starting at position 2315 of SEQ ID NO: 1564117
gucucuuaacaggauaagu

SEQ ID NO: 1856370 - RNA, 19 nt, Artificial Sequence
  Description of Artificial Sequence: Synthetic oligonucleotide
  Antisense strand to SEQ ID NO: 1856369
acuuauccuguuaagagac

SEQ ID NO: 1856371 - RNA, 19 nt, Artificial Sequence
  Description of Artificial Sequence: Synthetic oligonucleotide
  Sense strand starting at position 2614 of SEQ ID NO: 1564117
ucgguuugugcuuagauuu

SEQ ID NO: 1856372 - RNA, 19 nt, Artificial Sequence
  Description of Artificial Sequence: Synthetic oligonucleotide
  Antisense strand to SEQ ID NO: 1856371
aaaucuaagcacaaaccga

SEQ ID NO: 1856373 - RNA, 19 nt, Artificial Sequence
  Description of Artificial Sequence: Synthetic oligonucleotide
  Sense strand starting at position 2684 of SEQ ID NO: 1564117
guggauuucuccuucuccu

SEQ ID NO: 1856374 - RNA, 19 nt, Artificial Sequence
  Description of Artificial Sequence: Synthetic oligonucleotide
  Antisense strand to SEQ ID NO: 1856373
aggagaaggagaaauccac

SEQ ID NO: 1856375 - RNA, 19 nt, Artificial Sequence
  Description of Artificial Sequence: Synthetic oligonucleotide
  Sense strand starting at position 2784 of SEQ ID NO: 1564117
uuuaguauuccucaggaca

SEQ ID NO: 1856376 - RNA, 19 nt, Artificial Sequence
  Description of Artificial Sequence: Synthetic oligonucleotide
  Antisense strand to SEQ ID NO: 1856375
uguccugaggaauacuaaa

SEQ ID NO: 1856377 - RNA, 19 nt, Artificial Sequence
  Description of Artificial Sequence: Synthetic oligonucleotide
  Sense strand starting at position 2787 of SEQ ID NO: 1564117
aguauuccucaggacagua

SEQ ID NO: 1856378 - RNA, 19 nt, Artificial Sequence
  Description of Artificial Sequence: Synthetic oligonucleotide
  Antisense strand to SEQ ID NO: 1856377
uacuguccugaggaauacu

SEQ ID NO: 1856379 - RNA, 19 nt, Artificial Sequence
  Description of Artificial Sequence: Synthetic oligonucleotide
  Sense strand starting at position 2887 of SEQ ID NO: 1564117
ugagaacagugacuuccua

SEQ ID NO: 1856380 - RNA, 19 nt, Artificial Sequence
  Description of Artificial Sequence: Synthetic oligonucleotide
  Antisense strand to SEQ ID NO: 1856379
uaggaagucacuguucuca

SEQ ID NO: 1856381 - RNA, 19 nt, Artificial Sequence
  Description of Artificial Sequence: Synthetic oligonucleotide
  Sense strand starting at position 2920 of SEQ ID NO: 1564117
cuccgaucgcuccuuaguu

SEQ ID NO: 1856382 - RNA, 19 nt, Artificial Sequence
  Description of Artificial Sequence: Synthetic oligonucleotide
  Antisense strand to SEQ ID NO: 1856381
aacuaaggagcgaucggag

SEQ ID NO: 1856383 - RNA, 19 nt, Artificial Sequence
  Description of Artificial Sequence: Synthetic oligonucleotide
  Sense strand starting at position 3098 of SEQ ID NO: 1564117
augagcucauuugaaauga

SEQ ID NO: 1856384 - RNA, 19 nt, Artificial Sequence
  Description of Artificial Sequence: Synthetic oligonucleotide
  Antisense strand to SEQ ID NO: 1856383
ucauuucaaaugagcucau

SEQ ID NO: 1856385 - RNA, 19 nt, Artificial Sequence
  Description of Artificial Sequence: Synthetic oligonucleotide
  Sense strand starting at position 3467 of SEQ ID NO: 1564117
gugucuucccaagaaaccu

SEQ ID NO: 1856386 - RNA, 19 nt, Artificial Sequence
  Description of Artificial Sequence: Synthetic oligonucleotide
  Antisense strand to SEQ ID NO: 1856385
agguuucuugggaagacac

SEQ ID NO: 1856387 - RNA, 19 nt, Artificial Sequence
  Description of Artificial Sequence: Synthetic oligonucleotide
  Sense strand starting at position 3575 of SEQ ID NO: 1564117
aggugaggauccuucccau

SEQ ID NO: 1856388 - RNA, 19 nt, Artificial Sequence
  Description of Artificial Sequence: Synthetic oligonucleotide
  Antisense strand to SEQ ID NO: 1856387
augggaaggauccucaccu

SEQ ID NO: 1856389 - RNA, 19 nt, Artificial Sequence
  Description of Artificial Sequence: Synthetic oligonucleotide
  Sense strand starting at position 3578 of SEQ ID NO: 1564117
ugaggauccuucccauucu

SEQ ID NO: 1856390 - RNA, 19 nt, Artificial Sequence
  Description of Artificial Sequence: Synthetic oligonucleotide
  Antisense strand to SEQ ID NO: 1856389
agaaugggaaggauccuca

SEQ ID NO: 1856391 - RNA, 19 nt, Artificial Sequence
  Description of Artificial Sequence: Synthetic oligonucleotide
  Sense strand starting at position 3739 of SEQ ID NO: 1564117
gauugcuucccugaccaga

SEQ ID NO: 1856392 - RNA, 19 nt, Artificial Sequence
  Description of Artificial Sequence: Synthetic oligonucleotide
  Antisense strand to SEQ ID NO: 1856391
ucuggucagggaagcaauc

SEQ ID NO: 1856393 - RNA, 19 nt, Artificial Sequence
  Description of Artificial Sequence: Synthetic oligonucleotide
  Sense strand starting at position 3842 of SEQ ID NO: 1564117
acucgaguucuaggaggaa

SEQ ID NO: 1856394 - RNA, 19 nt, Artificial Sequence
  Description of Artificial Sequence: Synthetic oligonucleotide
  Antisense strand to SEQ ID NO: 1856393
uuccuccuagaacucgagu

SEQ ID NO: 1856395 - RNA, 19 nt, Artificial Sequence
  Description of Artificial Sequence: Synthetic oligonucleotide
  Sense strand starting at position 3845 of SEQ ID NO: 1564117
cgaguucuaggaggaaucu

SEQ ID NO: 1856396 - RNA, 19 nt, Artificial Sequence
  Description of Artificial Sequence: Synthetic oligonucleotide
  Antisense strand to SEQ ID NO: 1856395
agauuccuccuagaacucg

SEQ ID NO: 1856397 - RNA, 19 nt, Artificial Sequence
  Description of Artificial Sequence: Synthetic oligonucleotide
  Sense strand starting at position 3857 of SEQ ID NO: 1564117
ggaaucuugaaaugguagu

SEQ ID NO: 1856398 - RNA, 19 nt, Artificial Sequence
  Description of Artificial Sequence: Synthetic oligonucleotide
  Antisense strand to SEQ ID NO: 1856397
acuaccauuucaagauucc

SEQ ID NO: 1856399 - RNA, 19 nt, Artificial Sequence
  Description of Artificial Sequence: Synthetic oligonucleotide
  Sense strand starting at position 10 of SEQ ID NO: 1564118
auaugaccugccuauaagu

SEQ ID NO: 1856400 - RNA, 19 nt, Artificial Sequence
  Description of Artificial Sequence: Synthetic oligonucleotide
  Antisense strand to SEQ ID NO: 1856399
acuuauaggcaggucauau

SEQ ID NO: 1856401 - RNA, 19 nt, Artificial Sequence
  Description of Artificial Sequence: Synthetic oligonucleotide
  Sense strand starting at position 12 of SEQ ID NO: 1564118
augaccugccuauaaguga

SEQ ID NO: 1856402 - RNA, 19 nt, Artificial Sequence
  Description of Artificial Sequence: Synthetic oligonucleotide
  Antisense strand to SEQ ID NO: 1856401
ucacuuauaggcaggucau

SEQ ID NO: 1856403 - RNA, 19 nt, Artificial Sequence
  Description of Artificial Sequence: Synthetic oligonucleotide
  Sense strand starting at position 19 of SEQ ID NO: 1564118
gccuauaagugacuugaag

SEQ ID NO: 1856404 - RNA, 19 nt, Artificial Sequence
  Description of Artificial Sequence: Synthetic oligonucleotide
  Antisense strand to SEQ ID NO: 1856403
cuucaagucacuuauaggc

SEQ ID NO: 1856405 - RNA, 19 nt, Artificial Sequence
  Description of Artificial Sequence: Synthetic oligonucleotide
  Sense strand starting at position 98 of SEQ ID NO: 1564118
auguuuguugaggauagua

SEQ ID NO: 1856406 - RNA, 19 nt, Artificial Sequence
  Description of Artificial Sequence: Synthetic oligonucleotide
  Antisense strand to SEQ ID NO: 1856405
uacuauccucaacaaacau

SEQ ID NO: 1856407 - RNA, 19 nt, Artificial Sequence
  Description of Artificial Sequence: Synthetic oligonucleotide
  Sense strand starting at position 100 of SEQ ID NO: 1564118
guuuguugaggauaguaaa

SEQ ID NO: 1856408 - RNA, 19 nt, Artificial Sequence
  Description of Artificial Sequence: Synthetic oligonucleotide
  Antisense strand to SEQ ID NO: 1856407
uuuacuauccucaacaaac

SEQ ID NO: 1856409 - RNA, 19 nt, Artificial Sequence
  Description of Artificial Sequence: Synthetic oligonucleotide
  Sense strand starting at position 125 of SEQ ID NO: 1564118
acacacuguuaugcagaaa

SEQ ID NO: 1856410 - RNA, 19 nt, Artificial Sequence
  Description of Artificial Sequence: Synthetic oligonucleotide
  Antisense strand to SEQ ID NO: 1856409
uuucugcauaacagugugu

SEQ ID NO: 1856411 - RNA, 19 nt, Artificial Sequence
  Description of Artificial Sequence: Synthetic oligonucleotide
  Sense strand starting at position 248 of SEQ ID NO: 1564118
cuaggaaucuuagugagca

SEQ ID NO: 1856412 - RNA, 19 nt, Artificial Sequence
  Description of Artificial Sequence: Synthetic oligonucleotide
  Antisense strand to SEQ ID NO: 1856411
ugcucacuaagauuccuag

SEQ ID NO: 1856413 - RNA, 19 nt, Artificial Sequence
  Description of Artificial Sequence: Synthetic oligonucleotide
  Sense strand starting at position 252 of SEQ ID NO: 1564118
gaaucuuagugagcagaga

SEQ ID NO: 1856414 - RNA, 19 nt, Artificial Sequence
  Description of Artificial Sequence: Synthetic oligonucleotide
  Antisense strand to SEQ ID NO: 1856413
ucucugcucacuaagauuc

SEQ ID NO: 1856415 - RNA, 19 nt, Artificial Sequence
  Description of Artificial Sequence: Synthetic oligonucleotide
  Sense strand starting at position 362 of SEQ ID NO: 1564118
cuugcuauccuugagagau

SEQ ID NO: 1856416 - RNA, 19 nt, Artificial Sequence
  Description of Artificial Sequence: Synthetic oligonucleotide
  Antisense strand to SEQ ID NO: 1856415
aucucucaaggauagcaag

SEQ ID NO: 1856417 - RNA, 19 nt, Artificial Sequence
  Description of Artificial Sequence: Synthetic oligonucleotide
  Sense strand starting at position 501 of SEQ ID NO: 1564118
guuuaacugcuccaaauga

SEQ ID NO: 1856418 - RNA, 19 nt, Artificial Sequence
  Description of Artificial Sequence: Synthetic oligonucleotide
  Antisense strand to SEQ ID NO: 1856417
ucauuuggagcaguuaaac

SEQ ID NO: 1856419 - RNA, 19 nt, Artificial Sequence
  Description of Artificial Sequence: Synthetic oligonucleotide
  Sense strand starting at position 553 of SEQ ID NO: 1564118
auuguuuguccgcccucau

SEQ ID NO: 1856420 - RNA, 19 nt, Artificial Sequence
  Description of Artificial Sequence: Synthetic oligonucleotide
  Antisense strand to SEQ ID NO: 1856419
augagggcggacaaacaau

SEQ ID NO: 1856421 - RNA, 19 nt, Artificial Sequence
  Description of Artificial Sequence: Synthetic oligonucleotide
  Sense strand starting at position 768 of SEQ ID NO: 1564118
auucuacaaucggucaaua

SEQ ID NO: 1856422 - RNA, 19 nt, Artificial Sequence
  Description of Artificial Sequence: Synthetic oligonucleotide
  Antisense strand to SEQ ID NO: 1856421
uauugaccgauuguagaau

SEQ ID NO: 1856423 - RNA, 19 nt, Artificial Sequence
  Description of Artificial Sequence: Synthetic oligonucleotide
  Sense strand starting at position 770 of SEQ ID NO: 1564118
ucuacaaucggucaauaac

SEQ ID NO: 1856424 - RNA, 19 nt, Artificial Sequence
  Description of Artificial Sequence: Synthetic oligonucleotide
  Antisense strand to SEQ ID NO: 1856423
guuauugaccgauuguaga

SEQ ID NO: 1856425 - RNA, 19 nt, Artificial Sequence
  Description of Artificial Sequence: Synthetic oligonucleotide
  Sense strand starting at position 779 of SEQ ID NO: 1564118
ggucaauaaccucaugcca

SEQ ID NO: 1856426 - RNA, 19 nt, Artificial Sequence
  Description of Artificial Sequence: Synthetic oligonucleotide
  Antisense strand to SEQ ID NO: 1856425
uggcaugagguuauugacc

SEQ ID NO: 1856427 - RNA, 19 nt, Artificial Sequence
  Description of Artificial Sequence: Synthetic oligonucleotide
  Sense strand starting at position 849 of SEQ ID NO: 1564118
cugaacuguccugaucauc

SEQ ID NO: 1856428 - RNA, 19 nt, Artificial Sequence
  Description of Artificial Sequence: Synthetic oligonucleotide
  Antisense strand to SEQ ID NO: 1856427
gaugaucaggacaguucag

SEQ ID NO: 1856429 - RNA, 19 nt, Artificial Sequence
  Description of Artificial Sequence: Synthetic oligonucleotide
  Sense strand starting at position 859 of SEQ ID NO: 1564118
cugaucaucguauaguaca

SEQ ID NO: 1856430 - RNA, 19 nt, Artificial Sequence
  Description of Artificial Sequence: Synthetic oligonucleotide
  Antisense strand to SEQ ID NO: 1856429
uguacuauacgaugaucag

SEQ ID NO: 1856431 - RNA, 19 nt, Artificial Sequence
  Description of Artificial Sequence: Synthetic oligonucleotide
  Sense strand starting at position 982 of SEQ ID NO: 1564118
caauaaaugggaugucauu

SEQ ID NO: 1856432 - RNA, 19 nt, Artificial Sequence
  Description of Artificial Sequence: Synthetic oligonucleotide
  Antisense strand to SEQ ID NO: 1856431
aaugacaucccauuuauug

SEQ ID NO: 1856433 - RNA, 19 nt, Artificial Sequence
  Description of Artificial Sequence: Synthetic oligonucleotide
  Sense strand starting at position 1109 of SEQ ID NO: 1564118
gagcuagguguugaguaaa

SEQ ID NO: 1856434 - RNA, 19 nt, Artificial Sequence
  Description of Artificial Sequence: Synthetic oligonucleotide
  Antisense strand to SEQ ID NO: 1856433
uuuacucaacaccuagcuc

SEQ ID NO: 1856435 - RNA, 19 nt, Artificial Sequence
  Description of Artificial Sequence: Synthetic oligonucleotide
  Sense strand starting at position 1112 of SEQ ID NO: 1564118
cuagguguugaguaaaggu

SEQ ID NO: 1856436 - RNA, 19 nt, Artificial Sequence
  Description of Artificial Sequence: Synthetic oligonucleotide
  Antisense strand to SEQ ID NO: 1856435
accuuuacucaacaccuag

SEQ ID NO: 1856437 - RNA, 19 nt, Artificial Sequence
  Description of Artificial Sequence: Synthetic oligonucleotide
  Sense strand starting at position 1153 of SEQ ID NO: 1564118
ccagauucugggcaguaga

SEQ ID NO: 1856438 - RNA, 19 nt, Artificial Sequence
  Description of Artificial Sequence: Synthetic oligonucleotide
  Antisense strand to SEQ ID NO: 1856437
ucuacugcccagaaucugg

SEQ ID NO: 1856439 - RNA, 19 nt, Artificial Sequence
  Description of Artificial Sequence: Synthetic oligonucleotide
  Sense strand starting at position 1156 of SEQ ID NO: 1564118
gauucugggcaguagagau

SEQ ID NO: 1856440 - RNA, 19 nt, Artificial Sequence
  Description of Artificial Sequence: Synthetic oligonucleotide
  Antisense strand to SEQ ID NO: 1856439
aucucuacugcccagaauc

SEQ ID NO: 1856441 - RNA, 19 nt, Artificial Sequence
  Description of Artificial Sequence: Synthetic oligonucleotide
  Sense strand starting at position 1216 of SEQ ID NO: 1564118
agagaaauggaucgcaaug

SEQ ID NO: 1856442 - RNA, 19 nt, Artificial Sequence
  Description of Artificial Sequence: Synthetic oligonucleotide
  Antisense strand to SEQ ID NO: 1856441
cauugcgauccauuucucu

SEQ ID NO: 1856443 - RNA, 19 nt, Artificial Sequence
  Description of Artificial Sequence: Synthetic oligonucleotide
  Sense strand starting at position 1583 of SEQ ID NO: 1564118
gguugaggaacuugccaua

SEQ ID NO: 1856444 - RNA, 19 nt, Artificial Sequence
  Description of Artificial Sequence: Synthetic oligonucleotide
  Antisense strand to SEQ ID NO: 1856443
uauggcaaguuccucaacc

SEQ ID NO: 1856445 - RNA, 19 nt, Artificial Sequence
  Description of Artificial Sequence: Synthetic oligonucleotide
  Sense strand starting at position 2162 of SEQ ID NO: 1564118
acugccuuuggcuaaagaa

SEQ ID NO: 1856446 - RNA, 19 nt, Artificial Sequence
  Description of Artificial Sequence: Synthetic oligonucleotide
  Antisense strand to SEQ ID NO: 1856445
uucuuuagccaaaggcagu

SEQ ID NO: 1856447 - RNA, 19 nt, Artificial Sequence
  Description of Artificial Sequence: Synthetic oligonucleotide
  Sense strand starting at position 2175 of SEQ ID NO: 1564118
aaagaaacaucggcucagu

SEQ ID NO: 1856448 - RNA, 19 nt, Artificial Sequence
  Description of Artificial Sequence: Synthetic oligonucleotide
  Antisense strand to SEQ ID NO: 1856447
acugagccgauguuucuuu

SEQ ID NO: 1856449 - RNA, 19 nt, Artificial Sequence
  Description of Artificial Sequence: Synthetic oligonucleotide
  Sense strand starting at position 2312 of SEQ ID NO: 1564118
gucucuuaacaggauaagu

SEQ ID NO: 1856450 - RNA, 19 nt, Artificial Sequence
  Description of Artificial Sequence: Synthetic oligonucleotide
  Antisense strand to SEQ ID NO: 1856449
acuuauccuguuaagagac

SEQ ID NO: 1856451 - RNA, 19 nt, Artificial Sequence
  Description of Artificial Sequence: Synthetic oligonucleotide
  Sense strand starting at position 2611 of SEQ ID NO: 1564118
ucgguuugugcuuagauuu

SEQ ID NO: 1856452 - RNA, 19 nt, Artificial Sequence
  Description of Artificial Sequence: Synthetic oligonucleotide
  Antisense strand to SEQ ID NO: 1856451
aaaucuaagcacaaaccga

SEQ ID NO: 1856453 - RNA, 19 nt, Artificial Sequence
  Description of Artificial Sequence: Synthetic oligonucleotide
  Sense strand starting at position 2681 of SEQ ID NO: 1564118
guggauuucuccuucuccu

SEQ ID NO: 1856454 - RNA, 19 nt, Artificial Sequence
  Description of Artificial Sequence: Synthetic oligonucleotide
  Antisense strand to SEQ ID NO: 1856453
aggagaaggagaaauccac

SEQ ID NO: 1856455 - RNA, 19 nt, Artificial Sequence
  Description of Artificial Sequence: Synthetic oligonucleotide
  Sense strand starting at position 2781 of SEQ ID NO: 1564118
uuuaguauuccucaggaca

SEQ ID NO: 1856456 - RNA, 19 nt, Artificial Sequence
  Description of Artificial Sequence: Synthetic oligonucleotide
  Antisense strand to SEQ ID NO: 1856455
uguccugaggaauacuaaa

SEQ ID NO: 1856457 - RNA, 19 nt, Artificial Sequence
  Description of Artificial Sequence: Synthetic oligonucleotide
  Sense strand starting at position 2784 of SEQ ID NO: 1564118
aguauuccucaggacagua

SEQ ID NO: 1856458 - RNA, 19 nt, Artificial Sequence
  Description of Artificial Sequence: Synthetic oligonucleotide
  Antisense strand to SEQ ID NO: 1856457
uacuguccugaggaauacu

SEQ ID NO: 1856459 - RNA, 19 nt, Artificial Sequence
  Description of Artificial Sequence: Synthetic oligonucleotide
  Sense strand starting at position 2884 of SEQ ID NO: 1564118
ugagaacagugacuuccua

SEQ ID NO: 1856460 - RNA, 19 nt, Artificial Sequence
  Description of Artificial Sequence: Synthetic oligonucleotide
  Antisense strand to SEQ ID NO: 1856459
uaggaagucacuguucuca

SEQ ID NO: 1856461 - RNA, 19 nt, Artificial Sequence
  Description of Artificial Sequence: Synthetic oligonucleotide
  Sense strand starting at position 2917 of SEQ ID NO: 1564118
cuccgaucgcuccuuaguu

SEQ ID NO: 1856462 - RNA, 19 nt, Artificial Sequence
  Description of Artificial Sequence: Synthetic oligonucleotide
  Antisense strand to SEQ ID NO: 1856461
aacuaaggagcgaucggag

SEQ ID NO: 1856463 - RNA, 19 nt, Artificial Sequence
  Description of Artificial Sequence: Synthetic oligonucleotide
  Sense strand starting at position 3095 of SEQ ID NO: 1564118
augagcucauuugaaauga

SEQ ID NO: 1856464 - RNA, 19 nt, Artificial Sequence
  Description of Artificial Sequence: Synthetic oligonucleotide
  Antisense strand to SEQ ID NO: 1856463
ucauuucaaaugagcucau

SEQ ID NO: 1856465 - RNA, 19 nt, Artificial Sequence
  Description of Artificial Sequence: Synthetic oligonucleotide
  Sense strand starting at position 3464 of SEQ ID NO: 1564118
gugucuucccaagaaaccu

SEQ ID NO: 1856466 - RNA, 19 nt, Artificial Sequence
  Description of Artificial Sequence: Synthetic oligonucleotide
  Antisense strand to SEQ ID NO: 1856465
agguuucuugggaagacac

SEQ ID NO: 1856467 - RNA, 19 nt, Artificial Sequence
  Description of Artificial Sequence: Synthetic oligonucleotide
  Sense strand starting at position 3572 of SEQ ID NO: 1564118
aggugaggauccuucccau

SEQ ID NO: 1856468 - RNA, 19 nt, Artificial Sequence
  Description of Artificial Sequence: Synthetic oligonucleotide
  Antisense strand to SEQ ID NO: 1856467
augggaaggauccucaccu

SEQ ID NO: 1856469 - RNA, 19 nt, Artificial Sequence
  Description of Artificial Sequence: Synthetic oligonucleotide
  Sense strand starting at position 3575 of SEQ ID NO: 1564118
ugaggauccuucccauucu

SEQ ID NO: 1856470 - RNA, 19 nt, Artificial Sequence
  Description of Artificial Sequence: Synthetic oligonucleotide
  Antisense strand to SEQ ID NO: 1856469
agaaugggaaggauccuca

SEQ ID NO: 1856471 - RNA, 19 nt, Artificial Sequence
  Description of Artificial Sequence: Synthetic oligonucleotide
  Sense strand starting at position 3736 of SEQ ID NO: 1564118
gauugcuucccugaccaga

SEQ ID NO: 1856472 - RNA, 19 nt, Artificial Sequence
  Description of Artificial Sequence: Synthetic oligonucleotide
  Antisense strand to SEQ ID NO: 1856471
ucuggucagggaagcaauc

SEQ ID NO: 1856473 - RNA, 19 nt, Artificial Sequence
  Description of Artificial Sequence: Synthetic oligonucleotide
  Sense strand starting at position 3839 of SEQ ID NO: 1564118
acucgaguucuaggaggaa

SEQ ID NO: 1856474 - RNA, 19 nt, Artificial Sequence
  Description of Artificial Sequence: Synthetic oligonucleotide
  Antisense strand to SEQ ID NO: 1856473
uuccuccuagaacucgagu

SEQ ID NO: 1856475 - RNA, 19 nt, Artificial Sequence
  Description of Artificial Sequence: Synthetic oligonucleotide
  Sense strand starting at position 3842 of SEQ ID NO: 1564118
cgaguucuaggaggaaucu

SEQ ID NO: 1856476 - RNA, 19 nt, Artificial Sequence
  Description of Artificial Sequence: Synthetic oligonucleotide
  Antisense strand to SEQ ID NO: 1856475
agauuccuccuagaacucg

SEQ ID NO: 1856477 - RNA, 19 nt, Artificial Sequence
  Description of Artificial Sequence: Synthetic oligonucleotide
  Sense strand starting at position 3854 of SEQ ID NO: 1564118
ggaaucuugaaaugguagu

SEQ ID NO: 1856478 - RNA, 19 nt, Artificial Sequence
  Description of Artificial Sequence: Synthetic oligonucleotide
  Antisense strand to SEQ ID NO: 1856477
acuaccauuucaagauucc

SEQ ID NO: 1856479 - RNA, 19 nt, Artificial Sequence
  Description of Artificial Sequence: Synthetic oligonucleotide
  Sense strand starting at position 13 of SEQ ID NO: 1564119
cugucugucuucucaggaa

SEQ ID NO: 1856480 - RNA, 19 nt, Artificial Sequence
  Description of Artificial Sequence: Synthetic oligonucleotide
  Antisense strand to SEQ ID NO: 1856479
uuccugagaagacagacag

SEQ ID NO: 1856481 - RNA, 19 nt, Artificial Sequence
  Description of Artificial Sequence: Synthetic oligonucleotide
  Sense strand starting at position 17 of SEQ ID NO: 1564119
cugucuucucaggaaaccu

SEQ ID NO: 1856482 - RNA, 19 nt, Artificial Sequence
  Description of Artificial Sequence: Synthetic oligonucleotide
  Antisense strand to SEQ ID NO: 1856481
agguuuccugagaagacag

SEQ ID NO: 1856483 - RNA, 19 nt, Artificial Sequence
  Description of Artificial Sequence: Synthetic oligonucleotide
  Sense strand starting at position 184 of SEQ ID NO: 1564119
ucaagaucuguguagguca

SEQ ID NO: 1856484 - RNA, 19 nt, Artificial Sequence
  Description of Artificial Sequence: Synthetic oligonucleotide
  Antisense strand to SEQ ID NO: 1856483
ugaccuacacagaucuuga

SEQ ID NO: 1856485 - RNA, 19 nt, Artificial Sequence
  Description of Artificial Sequence: Synthetic oligonucleotide
  Sense strand starting at position 187 of SEQ ID NO: 1564119
agaucuguguaggucacua

SEQ ID NO: 1856486 - RNA, 19 nt, Artificial Sequence
  Description of Artificial Sequence: Synthetic oligonucleotide
  Antisense strand to SEQ ID NO: 1856485
uagugaccuacacagaucu

SEQ ID NO: 1856487 - RNA, 19 nt, Artificial Sequence
  Description of Artificial Sequence: Synthetic oligonucleotide
  Sense strand starting at position 410 of SEQ ID NO: 1564119
agaaaucccucaguauaug

SEQ ID NO: 1856488 - RNA, 19 nt, Artificial Sequence
  Description of Artificial Sequence: Synthetic oligonucleotide
  Antisense strand to SEQ ID NO: 1856487
cauauacugagggauuucu

SEQ ID NO: 1856489 - RNA, 19 nt, Artificial Sequence
  Description of Artificial Sequence: Synthetic oligonucleotide
  Sense strand starting at position 416 of SEQ ID NO: 1564119
cccucaguauaugugauaa

SEQ ID NO: 1856490 - RNA, 19 nt, Artificial Sequence
  Description of Artificial Sequence: Synthetic oligonucleotide
  Antisense strand to SEQ ID NO: 1856489
uuaucacauauacugaggg

SEQ ID NO: 1856491 - RNA, 19 nt, Artificial Sequence
  Description of Artificial Sequence: Synthetic oligonucleotide
  Sense strand starting at position 464 of SEQ ID NO: 1564119
ugaaguggcucgucuauuu

SEQ ID NO: 1856492 - RNA, 19 nt, Artificial Sequence
  Description of Artificial Sequence: Synthetic oligonucleotide
  Antisense strand to SEQ ID NO: 1856491
aaauagacgagccacuuca

SEQ ID NO: 1856493 - RNA, 19 nt, Artificial Sequence
  Description of Artificial Sequence: Synthetic oligonucleotide
  Sense strand starting at position 475 of SEQ ID NO: 1564119
gucuauuucgugugaggau

SEQ ID NO: 1856494 - RNA, 19 nt, Artificial Sequence
  Description of Artificial Sequence: Synthetic oligonucleotide
  Antisense strand to SEQ ID NO: 1856493
auccucacacgaaauagac

SEQ ID NO: 1856495 - RNA, 19 nt, Artificial Sequence
  Description of Artificial Sequence: Synthetic oligonucleotide
  Sense strand starting at position 606 of SEQ ID NO: 1564119
agggaugacucagauuaug

SEQ ID NO: 1856496 - RNA, 19 nt, Artificial Sequence
  Description of Artificial Sequence: Synthetic oligonucleotide
  Antisense strand to SEQ ID NO: 1856495
cauaaucugagucaucccu

SEQ ID NO: 1856497 - RNA, 19 nt, Artificial Sequence
  Description of Artificial Sequence: Synthetic oligonucleotide
  Sense strand starting at position 614 of SEQ ID NO: 1564119
cucagauuauggcugacau

SEQ ID NO: 1856498 - RNA, 19 nt, Artificial Sequence
  Description of Artificial Sequence: Synthetic oligonucleotide
  Antisense strand to SEQ ID NO: 1856497
augucagccauaaucugag

SEQ ID NO: 1856499 - RNA, 19 nt, Artificial Sequence
  Description of Artificial Sequence: Synthetic oligonucleotide
  Sense strand starting at position 615 of SEQ ID NO: 1564119
ucagauuauggcugacauc

SEQ ID NO: 1856500 - RNA, 19 nt, Artificial Sequence
  Description of Artificial Sequence: Synthetic oligonucleotide
  Antisense strand to SEQ ID NO: 1856499
gaugucagccauaaucuga

SEQ ID NO: 1856501 - RNA, 19 nt, Artificial Sequence
  Description of Artificial Sequence: Synthetic oligonucleotide
  Sense strand starting at position 624 of SEQ ID NO: 1564119
ggcugacauccauguaaua

SEQ ID NO: 1856502 - RNA, 19 nt, Artificial Sequence
  Description of Artificial Sequence: Synthetic oligonucleotide
  Antisense strand to SEQ ID NO: 1856501
uauuacauggaugucagcc

SEQ ID NO: 1856503 - RNA, 19 nt, Artificial Sequence
  Description of Artificial Sequence: Synthetic oligonucleotide
  Sense strand starting at position 646 of SEQ ID NO: 1564119
ggagauuuguacugaccac

SEQ ID NO: 1856504 - RNA, 19 nt, Artificial Sequence
  Description of Artificial Sequence: Synthetic oligonucleotide
  Antisense strand to SEQ ID NO: 1856503
guggucaguacaaaucucc

SEQ ID NO: 1856505 - RNA, 19 nt, Artificial Sequence
  Description of Artificial Sequence: Synthetic oligonucleotide
  Sense strand starting at position 659 of SEQ ID NO: 1564119
gaccacugugcauguaaca

SEQ ID NO: 1856506 - RNA, 19 nt, Artificial Sequence
  Description of Artificial Sequence: Synthetic oligonucleotide
  Antisense strand to SEQ ID NO: 1856505
uguuacaugcacagugguc

SEQ ID NO: 1856507 - RNA, 19 nt, Artificial Sequence
  Description of Artificial Sequence: Synthetic oligonucleotide
  Sense strand starting at position 738 of SEQ ID NO: 1564119
gauggcugacuccggaauu

SEQ ID NO: 1856508 - RNA, 19 nt, Artificial Sequence
  Description of Artificial Sequence: Synthetic oligonucleotide
  Antisense strand to SEQ ID NO: 1856507
aauuccggagucagccauc

SEQ ID NO: 1856509 - RNA, 19 nt, Artificial Sequence
  Description of Artificial Sequence: Synthetic oligonucleotide
  Sense strand starting at position 785 of SEQ ID NO: 1564119
ucggaaauguaucucaaac

SEQ ID NO: 1856510 - RNA, 19 nt, Artificial Sequence
  Description of Artificial Sequence: Synthetic oligonucleotide
  Antisense strand to SEQ ID NO: 1856509
guuugagauacauuuccga

SEQ ID NO: 1856511 - RNA, 19 nt, Artificial Sequence
  Description of Artificial Sequence: Synthetic oligonucleotide
  Sense strand starting at position 837 of SEQ ID NO: 1564119
cuccucuucguuugagaaa

SEQ ID NO: 1856512 - RNA, 19 nt, Artificial Sequence
  Description of Artificial Sequence: Synthetic oligonucleotide
  Antisense strand to SEQ ID NO: 1856511
uuucucaaacgaagaggag

SEQ ID NO: 1856513 - RNA, 19 nt, Artificial Sequence
  Description of Artificial Sequence: Synthetic oligonucleotide
  Sense strand starting at position 856 of SEQ ID NO: 1564119
gcaaguaacuggguauaac

SEQ ID NO: 1856514 - RNA, 19 nt, Artificial Sequence
  Description of Artificial Sequence: Synthetic oligonucleotide
  Antisense strand to SEQ ID NO: 1856513
guuauacccaguuacuugc

SEQ ID NO: 1856515 - RNA, 19 nt, Artificial Sequence
  Description of Artificial Sequence: Synthetic oligonucleotide
  Sense strand starting at position 1239 of SEQ ID NO: 1564119
ggguaagagguuugcaaca

SEQ ID NO: 1856516 - RNA, 19 nt, Artificial Sequence
  Description of Artificial Sequence: Synthetic oligonucleotide
  Antisense strand to SEQ ID NO: 1856515
uguugcaaaccucuuaccc

SEQ ID NO: 1856517 - RNA, 19 nt, Artificial Sequence
  Description of Artificial Sequence: Synthetic oligonucleotide
  Sense strand starting at position 1309 of SEQ ID NO: 1564119
cuggguucccaaugcagaa

SEQ ID NO: 1856518 - RNA, 19 nt, Artificial Sequence
  Description of Artificial Sequence: Synthetic oligonucleotide
  Antisense strand to SEQ ID NO: 1856517
uucugcauugggaacccag

SEQ ID NO: 1856519 - RNA, 19 nt, Artificial Sequence
  Description of Artificial Sequence: Synthetic oligonucleotide
  Sense strand starting at position 1382 of SEQ ID NO: 1564119
gacaguugaccuugggaac

SEQ ID NO: 1856520 - RNA, 19 nt, Artificial Sequence
  Description of Artificial Sequence: Synthetic oligonucleotide
  Antisense strand to SEQ ID NO: 1856519
guucccaaggucaacuguc

SEQ ID NO: 1856521 - RNA, 19 nt, Artificial Sequence
  Description of Artificial Sequence: Synthetic oligonucleotide
  Sense strand starting at position 1523 of SEQ ID NO: 1564119
gggugcucaccauagauca

SEQ ID NO: 1856522 - RNA, 19 nt, Artificial Sequence
  Description of Artificial Sequence: Synthetic oligonucleotide
  Antisense strand to SEQ ID NO: 1856521
ugaucuauggugagcaccc

SEQ ID NO: 1856523 - RNA, 19 nt, Artificial Sequence
  Description of Artificial Sequence: Synthetic oligonucleotide
  Sense strand starting at position 2839 of SEQ ID NO: 1564119
cguggacucugaaggauga

SEQ ID NO: 1856524 - RNA, 19 nt, Artificial Sequence
  Description of Artificial Sequence: Synthetic oligonucleotide
  Antisense strand to SEQ ID NO: 1856523
ucauccuucagaguccacg

SEQ ID NO: 1856525 - RNA, 19 nt, Artificial Sequence
  Description of Artificial Sequence: Synthetic oligonucleotide
  Sense strand starting at position 2866 of SEQ ID NO: 1564119
ggaacaaauucucaggaaa

SEQ ID NO: 1856526 - RNA, 19 nt, Artificial Sequence
  Description of Artificial Sequence: Synthetic oligonucleotide
  Antisense strand to SEQ ID NO: 1856525
uuuccugagaauuuguucc

SEQ ID NO: 1856527 - RNA, 19 nt, Artificial Sequence
  Description of Artificial Sequence: Synthetic oligonucleotide
  Sense strand starting at position 2909 of SEQ ID NO: 1564119
uccucuggucaaggaagaa

SEQ ID NO: 1856528 - RNA, 19 nt, Artificial Sequence
  Description of Artificial Sequence: Synthetic oligonucleotide
  Antisense strand to SEQ ID NO: 1856527
uucuuccuugaccagagga

SEQ ID NO: 1856529 - RNA, 19 nt, Artificial Sequence
  Description of Artificial Sequence: Synthetic oligonucleotide
  Sense strand starting at position 2934 of SEQ ID NO: 1564119
ucagauuaaucacugaguu

SEQ ID NO: 1856530 - RNA, 19 nt, Artificial Sequence
  Description of Artificial Sequence: Synthetic oligonucleotide
  Antisense strand to SEQ ID NO: 1856529
aacucagugauuaaucuga

SEQ ID NO: 1856531 - RNA, 19 nt, Artificial Sequence
  Description of Artificial Sequence: Synthetic oligonucleotide
  Sense strand starting at position 3069 of SEQ ID NO: 1564119
ggugaugcuuaaccaaaug

SEQ ID NO: 1856532 - RNA, 19 nt, Artificial Sequence
  Description of Artificial Sequence: Synthetic oligonucleotide
  Antisense strand to SEQ ID NO: 1856531
cauuugguuaagcaucacc

SEQ ID NO: 1856533 - RNA, 19 nt, Artificial Sequence
  Description of Artificial Sequence: Synthetic oligonucleotide
  Sense strand starting at position 3159 of SEQ ID NO: 1564119
aggugagcacucugccaaa

SEQ ID NO: 1856534 - RNA, 19 nt, Artificial Sequence
  Description of Artificial Sequence: Synthetic oligonucleotide
  Antisense strand to SEQ ID NO: 1856533
uuuggcagagugcucaccu

SEQ ID NO: 1856535 - RNA, 19 nt, Artificial Sequence
  Description of Artificial Sequence: Synthetic oligonucleotide
  Sense strand starting at position 3182 of SEQ ID NO: 1564119
uuuagugguuucuuuaaag

SEQ ID NO: 1856536 - RNA, 19 nt, Artificial Sequence
  Description of Artificial Sequence: Synthetic oligonucleotide
  Antisense strand to SEQ ID NO: 1856535
cuuuaaagaaaccacuaaa

SEQ ID NO: 1856537 - RNA, 19 nt, Artificial Sequence
  Description of Artificial Sequence: Synthetic oligonucleotide
  Sense strand starting at position 3189 of SEQ ID NO: 1564119
guuucuuuaaagcagggaa

SEQ ID NO: 1856538 - RNA, 19 nt, Artificial Sequence
  Description of Artificial Sequence: Synthetic oligonucleotide
  Antisense strand to SEQ ID NO: 1856537
uucccugcuuuaaagaaac

SEQ ID NO: 1856539 - RNA, 19 nt, Artificial Sequence
  Description of Artificial Sequence: Synthetic oligonucleotide
  Sense strand starting at position 3191 of SEQ ID NO: 1564119
uucuuuaaagcagggaaau

SEQ ID NO: 1856540 - RNA, 19 nt, Artificial Sequence
  Description of Artificial Sequence: Synthetic oligonucleotide
  Antisense strand to SEQ ID NO: 1856539
auuucccugcuuuaaagaa

SEQ ID NO: 1856541 - RNA, 19 nt, Artificial Sequence
  Description of Artificial Sequence: Synthetic oligonucleotide
  Sense strand starting at position 3192 of SEQ ID NO: 1564119
ucuuuaaagcagggaaauc

SEQ ID NO: 1856542 - RNA, 19 nt, Artificial Sequence
  Description of Artificial Sequence: Synthetic oligonucleotide
  Antisense strand to SEQ ID NO: 1856541
gauuucccugcuuuaaaga

SEQ ID NO: 1856543 - RNA, 19 nt, Artificial Sequence
  Description of Artificial Sequence: Synthetic oligonucleotide
  Sense strand starting at position 3270 of SEQ ID NO: 1564119
ugcaaacauccguauaccu

SEQ ID NO: 1856544 - RNA, 19 nt, Artificial Sequence
  Description of Artificial Sequence: Synthetic oligonucleotide
  Antisense strand to SEQ ID NO: 1856543
agguauacggauguuugca

SEQ ID NO: 1856545 - RNA, 19 nt, Artificial Sequence
  Description of Artificial Sequence: Synthetic oligonucleotide
  Sense strand starting at position 3343 of SEQ ID NO: 1564119
cacuguguuggucauaaua

SEQ ID NO: 1856546 - RNA, 19 nt, Artificial Sequence
  Description of Artificial Sequence: Synthetic oligonucleotide
  Antisense strand to SEQ ID NO: 1856545
uauuaugaccaacacagug

SEQ ID NO: 1856547 - RNA, 19 nt, Artificial Sequence
  Description of Artificial Sequence: Synthetic oligonucleotide
  Sense strand starting at position 3379 of SEQ ID NO: 1564119
cccaguacucaaggacaga

SEQ ID NO: 1856548 - RNA, 19 nt, Artificial Sequence
  Description of Artificial Sequence: Synthetic oligonucleotide
  Antisense strand to SEQ ID NO: 1856547
ucuguccuugaguacuggg

SEQ ID NO: 1856549 - RNA, 19 nt, Artificial Sequence
  Description of Artificial Sequence: Synthetic oligonucleotide
  Sense strand starting at position 3440 of SEQ ID NO: 1564119
aguacagacuucuuaguau

SEQ ID NO: 1856550 - RNA, 19 nt, Artificial Sequence
  Description of Artificial Sequence: Synthetic oligonucleotide
  Antisense strand to SEQ ID NO: 1856549
auacuaagaagucuguacu

SEQ ID NO: 1856551 - RNA, 19 nt, Artificial Sequence
  Description of Artificial Sequence: Synthetic oligonucleotide
  Sense strand starting at position 3455 of SEQ ID NO: 1564119
guauuuguggcggauugua

SEQ ID NO: 1856552 - RNA, 19 nt, Artificial Sequence
  Description of Artificial Sequence: Synthetic oligonucleotide
  Antisense strand to SEQ ID NO: 1856551
uacaauccgccacaaauac

SEQ ID NO: 1856553 - RNA, 19 nt, Artificial Sequence
  Description of Artificial Sequence: Synthetic oligonucleotide
  Sense strand starting at position 3576 of SEQ ID NO: 1564119
cuuugugacucccucaaag

SEQ ID NO: 1856554 - RNA, 19 nt, Artificial Sequence
  Description of Artificial Sequence: Synthetic oligonucleotide
  Antisense strand to SEQ ID NO: 1856553
cuuugagggagucacaaag

SEQ ID NO: 1856555 - RNA, 19 nt, Artificial Sequence
  Description of Artificial Sequence: Synthetic oligonucleotide
  Sense strand starting at position 3610 of SEQ ID NO: 1564119
uggagauuaugugauuugu

SEQ ID NO: 1856556 - RNA, 19 nt, Artificial Sequence
  Description of Artificial Sequence: Synthetic oligonucleotide
  Antisense strand to SEQ ID NO: 1856555
acaaaucacauaaucucca

SEQ ID NO: 1856557 - RNA, 19 nt, Artificial Sequence
  Description of Artificial Sequence: Synthetic oligonucleotide
  Sense strand starting at position 3625 of SEQ ID NO: 1564119
uugugaggcuaggucauaa

SEQ ID NO: 1856558 - RNA, 19 nt, Artificial Sequence
  Description of Artificial Sequence: Synthetic oligonucleotide
  Antisense strand to SEQ ID NO: 1856557
uuaugaccuagccucacaa

SEQ ID NO: 1856559 - RNA, 19 nt, Artificial Sequence
  Description of Artificial Sequence: Synthetic oligonucleotide
  Sense strand starting at position 124 of SEQ ID NO: 1564120
uugcaauugcaucauuaga

SEQ ID NO: 1856560 - RNA, 19 nt, Artificial Sequence
  Description of Artificial Sequence: Synthetic oligonucleotide
  Antisense strand to SEQ ID NO: 1856559
ucuaaugaugcaauugcaa

SEQ ID NO: 1856561 - RNA, 19 nt, Artificial Sequence
  Description of Artificial Sequence: Synthetic oligonucleotide
  Sense strand starting at position 126 of SEQ ID NO: 1564120
gcaauugcaucauuagaug

SEQ ID NO: 1856562 - RNA, 19 nt, Artificial Sequence
  Description of Artificial Sequence: Synthetic oligonucleotide
  Antisense strand to SEQ ID NO: 1856561
caucuaaugaugcaauugc

SEQ ID NO: 1856563 - RNA, 19 nt, Artificial Sequence
  Description of Artificial Sequence: Synthetic oligonucleotide
  Sense strand starting at position 132 of SEQ ID NO: 1564120
gcaucauuagauggaagca

SEQ ID NO: 1856564 - RNA, 19 nt, Artificial Sequence
  Description of Artificial Sequence: Synthetic oligonucleotide
  Antisense strand to SEQ ID NO: 1856563
ugcuuccaucuaaugaugc

SEQ ID NO: 1856565 - RNA, 19 nt, Artificial Sequence
  Description of Artificial Sequence: Synthetic oligonucleotide
  Sense strand starting at position 197 of SEQ ID NO: 1564120
aggcauuuguuucuaugua

SEQ ID NO: 1856566 - RNA, 19 nt, Artificial Sequence
  Description of Artificial Sequence: Synthetic oligonucleotide
  Antisense strand to SEQ ID NO: 1856565
uacauagaaacaaaugccu

SEQ ID NO: 1856567 - RNA, 19 nt, Artificial Sequence
  Description of Artificial Sequence: Synthetic oligonucleotide
  Sense strand starting at position 366 of SEQ ID NO: 1564120
gaggucauuucuuaaccag

SEQ ID NO: 1856568 - RNA, 19 nt, Artificial Sequence
  Description of Artificial Sequence: Synthetic oligonucleotide
  Antisense strand to SEQ ID NO: 1856567
cugguuaagaaaugaccuc

SEQ ID NO: 1856569 - RNA, 19 nt, Artificial Sequence
  Description of Artificial Sequence: Synthetic oligonucleotide
  Sense strand starting at position 373 of SEQ ID NO: 1564120
uuucuuaaccagggaaagu

SEQ ID NO: 1856570 - RNA, 19 nt, Artificial Sequence
  Description of Artificial Sequence: Synthetic oligonucleotide
  Antisense strand to SEQ ID NO: 1856569
acuuucccugguuaagaaa

SEQ ID NO: 1856571 - RNA, 19 nt, Artificial Sequence
  Description of Artificial Sequence: Synthetic oligonucleotide
  Sense strand starting at position 389 of SEQ ID NO: 1564120
agugcugacuuacucaaga

SEQ ID NO: 1856572 - RNA, 19 nt, Artificial Sequence
  Description of Artificial Sequence: Synthetic oligonucleotide
  Antisense strand to SEQ ID NO: 1856571
ucuugaguaagucagcacu

SEQ ID NO: 1856573 - RNA, 19 nt, Artificial Sequence
  Description of Artificial Sequence: Synthetic oligonucleotide
  Sense strand starting at position 594 of SEQ ID NO: 1564120
ucgguucucagauacagua

SEQ ID NO: 1856574 - RNA, 19 nt, Artificial Sequence
  Description of Artificial Sequence: Synthetic oligonucleotide
  Antisense strand to SEQ ID NO: 1856573
uacuguaucugagaaccga

SEQ ID NO: 1856575 - RNA, 19 nt, Artificial Sequence
  Description of Artificial Sequence: Synthetic oligonucleotide
  Sense strand starting at position 768 of SEQ ID NO: 1564120
ggguaaucuaacuguggga

SEQ ID NO: 1856576 - RNA, 19 nt, Artificial Sequence
  Description of Artificial Sequence: Synthetic oligonucleotide
  Antisense strand to SEQ ID NO: 1856575
ucccacaguuagauuaccc

SEQ ID NO: 1856577 - RNA, 19 nt, Artificial Sequence
  Description of Artificial Sequence: Synthetic oligonucleotide
  Sense strand starting at position 770 of SEQ ID NO: 1564120
guaaucuaacugugggaag

SEQ ID NO: 1856578 - RNA, 19 nt, Artificial Sequence
  Description of Artificial Sequence: Synthetic oligonucleotide
  Antisense strand to SEQ ID NO: 1856577
cuucccacaguuagauuac

SEQ ID NO: 1856579 - RNA, 19 nt, Artificial Sequence
  Description of Artificial Sequence: Synthetic oligonucleotide
  Sense strand starting at position 1015 of SEQ ID NO: 1564120
gggaaaggcggucauuaaa

SEQ ID NO: 1856580 - RNA, 19 nt, Artificial Sequence
  Description of Artificial Sequence: Synthetic oligonucleotide
  Antisense strand to SEQ ID NO: 1856579
uuuaaugaccgccuuuccc

SEQ ID NO: 1856581 - RNA, 19 nt, Artificial Sequence
  Description of Artificial Sequence: Synthetic oligonucleotide
  Sense strand starting at position 2350 of SEQ ID NO: 1564120
gugaaauaagaauggcaca

SEQ ID NO: 1856582 - RNA, 19 nt, Artificial Sequence
  Description of Artificial Sequence: Synthetic oligonucleotide
  Antisense strand to SEQ ID NO: 1856581
ugugccauucuuauuucac

SEQ ID NO: 1856583 - RNA, 19 nt, Artificial Sequence
  Description of Artificial Sequence: Synthetic oligonucleotide
  Sense strand starting at position 2398 of SEQ ID NO: 1564120
agacuacuggguggaaguu

SEQ ID NO: 1856584 - RNA, 19 nt, Artificial Sequence
  Description of Artificial Sequence: Synthetic oligonucleotide
  Antisense strand to SEQ ID NO: 1856583
aacuuccacccaguagucu

SEQ ID NO: 1856585 - RNA, 19 nt, Artificial Sequence
  Description of Artificial Sequence: Synthetic oligonucleotide
  Sense strand starting at position 2408 of SEQ ID NO: 1564120
guggaaguuaacgacaagu

SEQ ID NO: 1856586 - RNA, 19 nt, Artificial Sequence
  Description of Artificial Sequence: Synthetic oligonucleotide
  Antisense strand to SEQ ID NO: 1856585
acuugucguuaacuuccac

SEQ ID NO: 1856587 - RNA, 19 nt, Artificial Sequence
  Description of Artificial Sequence: Synthetic oligonucleotide
  Sense strand starting at position 2501 of SEQ ID NO: 1564120
uugggaguucgcaggcaga

SEQ ID NO: 1856588 - RNA, 19 nt, Artificial Sequence
  Description of Artificial Sequence: Synthetic oligonucleotide
  Antisense strand to SEQ ID NO: 1856587
ucugccugcgaacucccaa

SEQ ID NO: 1856589 - RNA, 19 nt, Artificial Sequence
  Description of Artificial Sequence: Synthetic oligonucleotide
  Sense strand starting at position 2582 of SEQ ID NO: 1564120
ugaguugugcaaguguguu

SEQ ID NO: 1856590 - RNA, 19 nt, Artificial Sequence
  Description of Artificial Sequence: Synthetic oligonucleotide
  Antisense strand to SEQ ID NO: 1856589
aacacacuugcacaacuca

SEQ ID NO: 1856591 - RNA, 19 nt, Artificial Sequence
  Description of Artificial Sequence: Synthetic oligonucleotide
  Sense strand starting at position 2872 of SEQ ID NO: 1564120
ucuacucuuccagaguauu

SEQ ID NO: 1856592 - RNA, 19 nt, Artificial Sequence
  Description of Artificial Sequence: Synthetic oligonucleotide
  Antisense strand to SEQ ID NO: 1856591
aauacucuggaagaguaga

SEQ ID NO: 1856593 - RNA, 19 nt, Artificial Sequence
  Description of Artificial Sequence: Synthetic oligonucleotide
  Sense strand starting at position 2875 of SEQ ID NO: 1564120
acucuuccagaguauucga

SEQ ID NO: 1856594 - RNA, 19 nt, Artificial Sequence
  Description of Artificial Sequence: Synthetic oligonucleotide
  Antisense strand to SEQ ID NO: 1856593
ucgaauacucuggaagagu

SEQ ID NO: 1856595 - RNA, 19 nt, Artificial Sequence
  Description of Artificial Sequence: Synthetic oligonucleotide
  Sense strand starting at position 2878 of SEQ ID NO: 1564120
cuuccagaguauucgagau

SEQ ID NO: 1856596 - RNA, 19 nt, Artificial Sequence
  Description of Artificial Sequence: Synthetic oligonucleotide
  Antisense strand to SEQ ID NO: 1856595
aucucgaauacucuggaag

SEQ ID NO: 1856597 - RNA, 19 nt, Artificial Sequence
  Description of Artificial Sequence: Synthetic oligonucleotide
  Sense strand starting at position 2884 of SEQ ID NO: 1564120
gaguauucgagauaaaguu

SEQ ID NO: 1856598 - RNA, 19 nt, Artificial Sequence
  Description of Artificial Sequence: Synthetic oligonucleotide
  Antisense strand to SEQ ID NO: 1856597
aacuuuaucucgaauacuc

SEQ ID NO: 1856599 - RNA, 19 nt, Artificial Sequence
  Description of Artificial Sequence: Synthetic oligonucleotide
  Sense strand starting at position 2897 of SEQ ID NO: 1564120
aaaguugcaguuugauaaa

SEQ ID NO: 1856600 - RNA, 19 nt, Artificial Sequence
  Description of Artificial Sequence: Synthetic oligonucleotide
  Antisense strand to SEQ ID NO: 1856599
uuuaucaaacugcaacuuu

SEQ ID NO: 1856601 - RNA, 19 nt, Artificial Sequence
  Description of Artificial Sequence: Synthetic oligonucleotide
  Sense strand starting at position 2931 of SEQ ID NO: 1564120
gggaguucauuugaugaca

SEQ ID NO: 1856602 - RNA, 19 nt, Artificial Sequence
  Description of Artificial Sequence: Synthetic oligonucleotide
  Antisense strand to SEQ ID NO: 1856601
ugucaucaaaugaacuccc

SEQ ID NO: 1856603 - RNA, 19 nt, Artificial Sequence
  Description of Artificial Sequence: Synthetic oligonucleotide
  Sense strand starting at position 2963 of SEQ ID NO: 1564120
cccuccauccuguaggaga

SEQ ID NO: 1856604 - RNA, 19 nt, Artificial Sequence
  Description of Artificial Sequence: Synthetic oligonucleotide
  Antisense strand to SEQ ID NO: 1856603
ucuccuacaggauggaggg

SEQ ID NO: 1856605 - RNA, 19 nt, Artificial Sequence
  Description of Artificial Sequence: Synthetic oligonucleotide
  Sense strand starting at position 2974 of SEQ ID NO: 1564120
guaggagaacgucauuaau

SEQ ID NO: 1856606 - RNA, 19 nt, Artificial Sequence
  Description of Artificial Sequence: Synthetic oligonucleotide
  Antisense strand to SEQ ID NO: 1856605
auuaaugacguucuccuac

SEQ ID NO: 1856607 - RNA, 19 nt, Artificial Sequence
  Description of Artificial Sequence: Synthetic oligonucleotide
  Sense strand starting at position 2976 of SEQ ID NO: 1564120
aggagaacgucauuaauuc

SEQ ID NO: 1856608 - RNA, 19 nt, Artificial Sequence
  Description of Artificial Sequence: Synthetic oligonucleotide
  Antisense strand to SEQ ID NO: 1856607
gaauuaaugacguucuccu

SEQ ID NO: 1856609 - RNA, 19 nt, Artificial Sequence
  Description of Artificial Sequence: Synthetic oligonucleotide
  Sense strand starting at position 3160 of SEQ ID NO: 1564120
auuugucuguuuccauauu

SEQ ID NO: 1856610 - RNA, 19 nt, Artificial Sequence
  Description of Artificial Sequence: Synthetic oligonucleotide
  Antisense strand to SEQ ID NO: 1856609
aauauggaaacagacaaau

SEQ ID NO: 1856611 - RNA, 19 nt, Artificial Sequence
  Description of Artificial Sequence: Synthetic oligonucleotide
  Sense strand starting at position 3371 of SEQ ID NO: 1564120
cuuuaauaauagucggaag

SEQ ID NO: 1856612 - RNA, 19 nt, Artificial Sequence
  Description of Artificial Sequence: Synthetic oligonucleotide
  Antisense strand to SEQ ID NO: 1856611
cuuccgacuauuauuaaag

SEQ ID NO: 1856613 - RNA, 19 nt, Artificial Sequence
  Description of Artificial Sequence: Synthetic oligonucleotide
  Sense strand starting at position 3372 of SEQ ID NO: 1564120
uuuaauaauagucggaaga

SEQ ID NO: 1856614 - RNA, 19 nt, Artificial Sequence
  Description of Artificial Sequence: Synthetic oligonucleotide
  Antisense strand to SEQ ID NO: 1856613
ucuuccgacuauuauuaaa

SEQ ID NO: 1856615 - RNA, 19 nt, Artificial Sequence
  Description of Artificial Sequence: Synthetic oligonucleotide
  Sense strand starting at position 3373 of SEQ ID NO: 1564120
uuaauaauagucggaagaa

SEQ ID NO: 1856616 - RNA, 19 nt, Artificial Sequence
  Description of Artificial Sequence: Synthetic oligonucleotide
  Antisense strand to SEQ ID NO: 1856615
uucuuccgacuauuauuaa

SEQ ID NO: 1856617 - RNA, 19 nt, Artificial Sequence
  Description of Artificial Sequence: Synthetic oligonucleotide
  Sense strand starting at position 3398 of SEQ ID NO: 1564120
ucguaucuucggaguugua

SEQ ID NO: 1856618 - RNA, 19 nt, Artificial Sequence
  Description of Artificial Sequence: Synthetic oligonucleotide
  Antisense strand to SEQ ID NO: 1856617
uacaacuccgaagauacga

SEQ ID NO: 1856619 - RNA, 19 nt, Artificial Sequence
  Description of Artificial Sequence: Synthetic oligonucleotide
  Sense strand starting at position 3410 of SEQ ID NO: 1564120
aguuguaagggucauuacu

SEQ ID NO: 1856620 - RNA, 19 nt, Artificial Sequence
  Description of Artificial Sequence: Synthetic oligonucleotide
  Antisense strand to SEQ ID NO: 1856619
aguaaugacccuuacaacu

SEQ ID NO: 1856621 - RNA, 19 nt, Artificial Sequence
  Description of Artificial Sequence: Synthetic oligonucleotide
  Sense strand starting at position 3487 of SEQ ID NO: 1564120
gcaacuucggaauaacaua

SEQ ID NO: 1856622 - RNA, 19 nt, Artificial Sequence
  Description of Artificial Sequence: Synthetic oligonucleotide
  Antisense strand to SEQ ID NO: 1856621
uauguuauuccgaaguugc

SEQ ID NO: 1856623 - RNA, 19 nt, Artificial Sequence
  Description of Artificial Sequence: Synthetic oligonucleotide
  Sense strand starting at position 3525 of SEQ ID NO: 1564120
ggcaguguauguacgguua

SEQ ID NO: 1856624 - RNA, 19 nt, Artificial Sequence
  Description of Artificial Sequence: Synthetic oligonucleotide
  Antisense strand to SEQ ID NO: 1856623
uaaccguacauacacugcc

SEQ ID NO: 1856625 - RNA, 19 nt, Artificial Sequence
  Description of Artificial Sequence: Synthetic oligonucleotide
  Sense strand starting at position 3537 of SEQ ID NO: 1564120
acgguuauauauccagaag

SEQ ID NO: 1856626 - RNA, 19 nt, Artificial Sequence
  Description of Artificial Sequence: Synthetic oligonucleotide
  Antisense strand to SEQ ID NO: 1856625
cuucuggauauauaaccgu

SEQ ID NO: 1856627 - RNA, 19 nt, Artificial Sequence
  Description of Artificial Sequence: Synthetic oligonucleotide
  Sense strand starting at position 3538 of SEQ ID NO: 1564120
cgguuauauauccagaagc

SEQ ID NO: 1856628 - RNA, 19 nt, Artificial Sequence
  Description of Artificial Sequence: Synthetic oligonucleotide
  Antisense strand to SEQ ID NO: 1856627
gcuucuggauauauaaccg

SEQ ID NO: 1856629 - RNA, 19 nt, Artificial Sequence
  Description of Artificial Sequence: Synthetic oligonucleotide
  Sense strand starting at position 3540 of SEQ ID NO: 1564120
guuauauauccagaagcau

SEQ ID NO: 1856630 - RNA, 19 nt, Artificial Sequence
  Description of Artificial Sequence: Synthetic oligonucleotide
  Antisense strand to SEQ ID NO: 1856629
augcuucuggauauauaac

SEQ ID NO: 1856631 - RNA, 19 nt, Artificial Sequence
  Description of Artificial Sequence: Synthetic oligonucleotide
  Sense strand starting at position 3578 of SEQ ID NO: 1564120
ucuguauuaguguaaacau

SEQ ID NO: 1856632 - RNA, 19 nt, Artificial Sequence
  Description of Artificial Sequence: Synthetic oligonucleotide
  Antisense strand to SEQ ID NO: 1856631
auguuuacacuaauacaga

SEQ ID NO: 1856633 - RNA, 19 nt, Artificial Sequence
  Description of Artificial Sequence: Synthetic oligonucleotide
  Sense strand starting at position 3596 of SEQ ID NO: 1564120
uccaaugugcuguuugcua

SEQ ID NO: 1856634 - RNA, 19 nt, Artificial Sequence
  Description of Artificial Sequence: Synthetic oligonucleotide
  Antisense strand to SEQ ID NO: 1856633
uagcaaacagcacauugga

SEQ ID NO: 1856635 - RNA, 19 nt, Artificial Sequence
  Description of Artificial Sequence: Synthetic oligonucleotide
  Sense strand starting at position 3628 of SEQ ID NO: 1564120
gugcacugagcacaucaua

SEQ ID NO: 1856636 - RNA, 19 nt, Artificial Sequence
  Description of Artificial Sequence: Synthetic oligonucleotide
  Antisense strand to SEQ ID NO: 1856635
uaugaugugcucagugcac

SEQ ID NO: 1856637 - RNA, 19 nt, Artificial Sequence
  Description of Artificial Sequence: Synthetic oligonucleotide
  Sense strand starting at position 3693 of SEQ ID NO: 1564120
cguauuucugacuguguca

SEQ ID NO: 1856638 - RNA, 19 nt, Artificial Sequence
  Description of Artificial Sequence: Synthetic oligonucleotide
  Antisense strand to SEQ ID NO: 1856637
ugacacagucagaaauacg

SEQ ID NO: 1856639 - RNA, 19 nt, Artificial Sequence
  Description of Artificial Sequence: Synthetic oligonucleotide
  Sense strand starting at position 1336 of SEQ ID NO: 1564121
ucgcaaucgcuuuaggaaa

SEQ ID NO: 1856640 - RNA, 19 nt, Artificial Sequence
  Description of Artificial Sequence: Synthetic oligonucleotide
  Antisense strand to SEQ ID NO: 1856639
uuuccuaaagcgauugcga

SEQ ID NO: 1856641 - RNA, 19 nt, Artificial Sequence
  Description of Artificial Sequence: Synthetic oligonucleotide
  Sense strand starting at position 2329 of SEQ ID NO: 1564121
gaugcucucugugcagaga

SEQ ID NO: 1856642 - RNA, 19 nt, Artificial Sequence
  Description of Artificial Sequence: Synthetic oligonucleotide
  Antisense strand to SEQ ID NO: 1856641
ucucugcacagagagcauc

SEQ ID NO: 1856643 - RNA, 19 nt, Artificial Sequence
  Description of Artificial Sequence: Synthetic oligonucleotide
  Sense strand starting at position 2451 of SEQ ID NO: 1564121
auuccuuucugggugguga

SEQ ID NO: 1856644 - RNA, 19 nt, Artificial Sequence
  Description of Artificial Sequence: Synthetic oligonucleotide
  Antisense strand to SEQ ID NO: 1856643
ucaccacccagaaaggaau

SEQ ID NO: 1856645 - RNA, 19 nt, Artificial Sequence
  Description of Artificial Sequence: Synthetic oligonucleotide
  Sense strand starting at position 2484 of SEQ ID NO: 1564121
uugccuggacucugaaagu

SEQ ID NO: 1856646 - RNA, 19 nt, Artificial Sequence
  Description of Artificial Sequence: Synthetic oligonucleotide
  Antisense strand to SEQ ID NO: 1856645
acuuucagaguccaggcaa

SEQ ID NO: 1856647 - RNA, 19 nt, Artificial Sequence
  Description of Artificial Sequence: Synthetic oligonucleotide
  Sense strand starting at position 2493 of SEQ ID NO: 1564121
cucugaaagucagcucaau

SEQ ID NO: 1856648 - RNA, 19 nt, Artificial Sequence
  Description of Artificial Sequence: Synthetic oligonucleotide
  Antisense strand to SEQ ID NO: 1856647
auugagcugacuuucagag

SEQ ID NO: 1856649 - RNA, 19 nt, Artificial Sequence
  Description of Artificial Sequence: Synthetic oligonucleotide
  Sense strand starting at position 2504 of SEQ ID NO: 1564121
agcucaauguuagcuuaua

SEQ ID NO: 1856650 - RNA, 19 nt, Artificial Sequence
  Description of Artificial Sequence: Synthetic oligonucleotide
  Antisense strand to SEQ ID NO: 1856649
uauaagcuaacauugagcu

SEQ ID NO: 1856651 - RNA, 19 nt, Artificial Sequence
  Description of Artificial Sequence: Synthetic oligonucleotide
  Sense strand starting at position 2505 of SEQ ID NO: 1564121
gcucaauguuagcuuauag

SEQ ID NO: 1856652 - RNA, 19 nt, Artificial Sequence
  Description of Artificial Sequence: Synthetic oligonucleotide
  Antisense strand to SEQ ID NO: 1856651
cuauaagcuaacauugagc

SEQ ID NO: 1856653 - RNA, 19 nt, Artificial Sequence
  Description of Artificial Sequence: Synthetic oligonucleotide
  Sense strand starting at position 2553 of SEQ ID NO: 1564121
cucccugagguuuauacuu

SEQ ID NO: 1856654 - RNA, 19 nt, Artificial Sequence
  Description of Artificial Sequence: Synthetic oligonucleotide
  Antisense strand to SEQ ID NO: 1856653
aaguauaaaccucagggag

SEQ ID NO: 1856655 - RNA, 19 nt, Artificial Sequence
  Description of Artificial Sequence: Synthetic oligonucleotide
  Sense strand starting at position 2558 of SEQ ID NO: 1564121
ugagguuuauacuuagcca

SEQ ID NO: 1856656 - RNA, 19 nt, Artificial Sequence
  Description of Artificial Sequence: Synthetic oligonucleotide
  Antisense strand to SEQ ID NO: 1856655
uggcuaaguauaaaccuca

SEQ ID NO: 1856657 - RNA, 19 nt, Artificial Sequence
  Description of Artificial Sequence: Synthetic oligonucleotide
  Sense strand starting at position 2561 of SEQ ID NO: 1564121
gguuuauacuuagccagau

SEQ ID NO: 1856658 - RNA, 19 nt, Artificial Sequence
  Description of Artificial Sequence: Synthetic oligonucleotide
  Antisense strand to SEQ ID NO: 1856657
aucuggcuaaguauaaacc

SEQ ID NO: 1856659 - RNA, 19 nt, Artificial Sequence
  Description of Artificial Sequence: Synthetic oligonucleotide
  Sense strand starting at position 2562 of SEQ ID NO: 1564121
guuuauacuuagccagaua

SEQ ID NO: 1856660 - RNA, 19 nt, Artificial Sequence
  Description of Artificial Sequence: Synthetic oligonucleotide
  Antisense strand to SEQ ID NO: 1856659
uaucuggcuaaguauaaac

SEQ ID NO: 1856661 - RNA, 19 nt, Artificial Sequence
  Description of Artificial Sequence: Synthetic oligonucleotide
  Sense strand starting at position 2577 of SEQ ID NO: 1564121
gauaaugagguuuaaacgu

SEQ ID NO: 1856662 - RNA, 19 nt, Artificial Sequence
  Description of Artificial Sequence: Synthetic oligonucleotide
  Antisense strand to SEQ ID NO: 1856661
acguuuaaaccucauuauc

SEQ ID NO: 1856663 - RNA, 19 nt, Artificial Sequence
  Description of Artificial Sequence: Synthetic oligonucleotide
  Sense strand starting at position 2583 of SEQ ID NO: 1564121
gagguuuaaacgugcacuu

SEQ ID NO: 1856664 - RNA, 19 nt, Artificial Sequence
  Description of Artificial Sequence: Synthetic oligonucleotide
  Antisense strand to SEQ ID NO: 1856663
aagugcacguuuaaaccuc

SEQ ID NO: 1856665 - RNA, 19 nt, Artificial Sequence
  Description of Artificial Sequence: Synthetic oligonucleotide
  Sense strand starting at position 2585 of SEQ ID NO: 1564121
gguuuaaacgugcacuucu

SEQ ID NO: 1856666 - RNA, 19 nt, Artificial Sequence
  Description of Artificial Sequence: Synthetic oligonucleotide
  Antisense strand to SEQ ID NO: 1856665
agaagugcacguuuaaacc

SEQ ID NO: 1856667 - RNA, 19 nt, Artificial Sequence
  Description of Artificial Sequence: Synthetic oligonucleotide
  Sense strand starting at position 2596 of SEQ ID NO: 1564121
gcacuucuugccuggagga

SEQ ID NO: 1856668 - RNA, 19 nt, Artificial Sequence
  Description of Artificial Sequence: Synthetic oligonucleotide
  Antisense strand to SEQ ID NO: 1856667
uccuccaggcaagaagugc

SEQ ID NO: 1856669 - RNA, 19 nt, Artificial Sequence
  Description of Artificial Sequence: Synthetic oligonucleotide
  Sense strand starting at position 2597 of SEQ ID NO: 1564121
cacuucuugccuggaggaa

SEQ ID NO: 1856670 - RNA, 19 nt, Artificial Sequence
  Description of Artificial Sequence: Synthetic oligonucleotide
  Antisense strand to SEQ ID NO: 1856669
uuccuccaggcaagaagug

SEQ ID NO: 1856671 - RNA, 19 nt, Artificial Sequence
  Description of Artificial Sequence: Synthetic oligonucleotide
  Sense strand starting at position 2784 of SEQ ID NO: 1564121
aaggaauccuggccugaga

SEQ ID NO: 1856672 - RNA, 19 nt, Artificial Sequence
  Description of Artificial Sequence: Synthetic oligonucleotide
  Antisense strand to SEQ ID NO: 1856671
ucucaggccaggauuccuu

SEQ ID NO: 1856673 - RNA, 19 nt, Artificial Sequence
  Description of Artificial Sequence: Synthetic oligonucleotide
  Sense strand starting at position 2805 of SEQ ID NO: 1564121
gagcuuaccuggguucuga

SEQ ID NO: 1856674 - RNA, 19 nt, Artificial Sequence
  Description of Artificial Sequence: Synthetic oligonucleotide
  Antisense strand to SEQ ID NO: 1856673
ucagaacccagguaagcuc

SEQ ID NO: 1856675 - RNA, 19 nt, Artificial Sequence
  Description of Artificial Sequence: Synthetic oligonucleotide
  Sense strand starting at position 2940 of SEQ ID NO: 1564121
auagccuuuccagagcauu

SEQ ID NO: 1856676 - RNA, 19 nt, Artificial Sequence
  Description of Artificial Sequence: Synthetic oligonucleotide
  Antisense strand to SEQ ID NO: 1856675
aaugcucuggaaaggcuau

SEQ ID NO: 1856677 - RNA, 19 nt, Artificial Sequence
  Description of Artificial Sequence: Synthetic oligonucleotide
  Sense strand starting at position 2946 of SEQ ID NO: 1564121
uuuccagagcauugcuaau

SEQ ID NO: 1856678 - RNA, 19 nt, Artificial Sequence
  Description of Artificial Sequence: Synthetic oligonucleotide
  Antisense strand to SEQ ID NO: 1856677
auuagcaaugcucuggaaa

SEQ ID NO: 1856679 - RNA, 19 nt, Artificial Sequence
  Description of Artificial Sequence: Synthetic oligonucleotide
  Sense strand starting at position 3020 of SEQ ID NO: 1564121
gcuccuuggacccaagagu

SEQ ID NO: 1856680 - RNA, 19 nt, Artificial Sequence
  Description of Artificial Sequence: Synthetic oligonucleotide
  Antisense strand to SEQ ID NO: 1856679
acucuuggguccaaggagc

SEQ ID NO: 1856681 - RNA, 19 nt, Artificial Sequence
  Description of Artificial Sequence: Synthetic oligonucleotide
  Sense strand starting at position 3029 of SEQ ID NO: 1564121
acccaagagucuuccauug

SEQ ID NO: 1856682 - RNA, 19 nt, Artificial Sequence
  Description of Artificial Sequence: Synthetic oligonucleotide
  Antisense strand to SEQ ID NO: 1856681
caauggaagacucuugggu

SEQ ID NO: 1856683 - RNA, 19 nt, Artificial Sequence
  Description of Artificial Sequence: Synthetic oligonucleotide
  Sense strand starting at position 3034 of SEQ ID NO: 1564121
agagucuuccauuguggaa

SEQ ID NO: 1856684 - RNA, 19 nt, Artificial Sequence
  Description of Artificial Sequence: Synthetic oligonucleotide
  Antisense strand to SEQ ID NO: 1856683
uuccacaauggaagacucu

SEQ ID NO: 1856685 - RNA, 19 nt, Artificial Sequence
  Description of Artificial Sequence: Synthetic oligonucleotide
  Sense strand starting at position 3038 of SEQ ID NO: 1564121
ucuuccauuguggaaucaa

SEQ ID NO: 1856686 - RNA, 19 nt, Artificial Sequence
  Description of Artificial Sequence: Synthetic oligonucleotide
  Antisense strand to SEQ ID NO: 1856685
uugauuccacaauggaaga

SEQ ID NO: 1856687 - RNA, 19 nt, Artificial Sequence
  Description of Artificial Sequence: Synthetic oligonucleotide
  Sense strand starting at position 3066 of SEQ ID NO: 1564121
gguaaauaaugucugcugu

SEQ ID NO: 1856688 - RNA, 19 nt, Artificial Sequence
  Description of Artificial Sequence: Synthetic oligonucleotide
  Antisense strand to SEQ ID NO: 1856687
acagcagacauuauuuacc

SEQ ID NO: 1856689 - RNA, 19 nt, Artificial Sequence
  Description of Artificial Sequence: Synthetic oligonucleotide
  Sense strand starting at position 3067 of SEQ ID NO: 1564121
guaaauaaugucugcuguu

SEQ ID NO: 1856690 - RNA, 19 nt, Artificial Sequence
  Description of Artificial Sequence: Synthetic oligonucleotide
  Antisense strand to SEQ ID NO: 1856689
aacagcagacauuauuuac

SEQ ID NO: 1856691 - RNA, 19 nt, Artificial Sequence
  Description of Artificial Sequence: Synthetic oligonucleotide
  Sense strand starting at position 3172 of SEQ ID NO: 1564121
aaaugaugugccuguccca

SEQ ID NO: 1856692 - RNA, 19 nt, Artificial Sequence
  Description of Artificial Sequence: Synthetic oligonucleotide
  Antisense strand to SEQ ID NO: 1856691
ugggacaggcacaucauuu

SEQ ID NO: 1856693 - RNA, 19 nt, Artificial Sequence
  Description of Artificial Sequence: Synthetic oligonucleotide
  Sense strand starting at position 3313 of SEQ ID NO: 1564121
uuguuaagccuagguucua

SEQ ID NO: 1856694 - RNA, 19 nt, Artificial Sequence
  Description of Artificial Sequence: Synthetic oligonucleotide
  Antisense strand to SEQ ID NO: 1856693
uagaaccuaggcuuaacaa

SEQ ID NO: 1856695 - RNA, 19 nt, Artificial Sequence
  Description of Artificial Sequence: Synthetic oligonucleotide
  Sense strand starting at position 3329 of SEQ ID NO: 1564121
cuaggauuguucccuuuau

SEQ ID NO: 1856696 - RNA, 19 nt, Artificial Sequence
  Description of Artificial Sequence: Synthetic oligonucleotide
  Antisense strand to SEQ ID NO: 1856695
auaaagggaacaauccuag

SEQ ID NO: 1856697 - RNA, 19 nt, Artificial Sequence
  Description of Artificial Sequence: Synthetic oligonucleotide
  Sense strand starting at position 3352 of SEQ ID NO: 1564121
gcuccuuucucuccgggaa

SEQ ID NO: 1856698 - RNA, 19 nt, Artificial Sequence
  Description of Artificial Sequence: Synthetic oligonucleotide
  Antisense strand to SEQ ID NO: 1856697
uucccggagagaaaggagc

SEQ ID NO: 1856699 - RNA, 19 nt, Artificial Sequence
  Description of Artificial Sequence: Synthetic oligonucleotide
  Sense strand starting at position 3416 of SEQ ID NO: 1564121
uggugaucugugcauuauu

SEQ ID NO: 1856700 - RNA, 19 nt, Artificial Sequence
  Description of Artificial Sequence: Synthetic oligonucleotide
  Antisense strand to SEQ ID NO: 1856699
aauaaugcacagaucacca

SEQ ID NO: 1856701 - RNA, 19 nt, Artificial Sequence
  Description of Artificial Sequence: Synthetic oligonucleotide
  Sense strand starting at position 3517 of SEQ ID NO: 1564121
uugcuuggcguuuagcaaa

SEQ ID NO: 1856702 - RNA, 19 nt, Artificial Sequence
  Description of Artificial Sequence: Synthetic oligonucleotide
  Antisense strand to SEQ ID NO: 1856701
uuugcuaaacgccaagcaa

SEQ ID NO: 1856703 - RNA, 19 nt, Artificial Sequence
  Description of Artificial Sequence: Synthetic oligonucleotide
  Sense strand starting at position 3643 of SEQ ID NO: 1564121
uugcaauugcaucauuaga

SEQ ID NO: 1856704 - RNA, 19 nt, Artificial Sequence
  Description of Artificial Sequence: Synthetic oligonucleotide
  Antisense strand to SEQ ID NO: 1856703
ucuaaugaugcaauugcaa

SEQ ID NO: 1856705 - RNA, 19 nt, Artificial Sequence
  Description of Artificial Sequence: Synthetic oligonucleotide
  Sense strand starting at position 3645 of SEQ ID NO: 1564121
gcaauugcaucauuagaug

SEQ ID NO: 1856706 - RNA, 19 nt, Artificial Sequence
  Description of Artificial Sequence: Synthetic oligonucleotide
  Antisense strand to SEQ ID NO: 1856705
caucuaaugaugcaauugc

SEQ ID NO: 1856707 - RNA, 19 nt, Artificial Sequence
  Description of Artificial Sequence: Synthetic oligonucleotide
  Sense strand starting at position 3648 of SEQ ID NO: 1564121
auugcaucauuagauggaa

SEQ ID NO: 1856708 - RNA, 19 nt, Artificial Sequence
  Description of Artificial Sequence: Synthetic oligonucleotide
  Antisense strand to SEQ ID NO: 1856707
uuccaucuaaugaugcaau

SEQ ID NO: 1856709 - RNA, 19 nt, Artificial Sequence
  Description of Artificial Sequence: Synthetic oligonucleotide
  Sense strand starting at position 3651 of SEQ ID NO: 1564121
gcaucauuagauggaagca

SEQ ID NO: 1856710 - RNA, 19 nt, Artificial Sequence
  Description of Artificial Sequence: Synthetic oligonucleotide
  Antisense strand to SEQ ID NO: 1856709
ugcuuccaucuaaugaugc

SEQ ID NO: 1856711 - RNA, 19 nt, Artificial Sequence
  Description of Artificial Sequence: Synthetic oligonucleotide
  Sense strand starting at position 3716 of SEQ ID NO: 1564121
aggcauuuguuucuaugua

SEQ ID NO: 1856712 - RNA, 19 nt, Artificial Sequence
  Description of Artificial Sequence: Synthetic oligonucleotide
  Antisense strand to SEQ ID NO: 1856711
uacauagaaacaaaugccu

SEQ ID NO: 1856713 - RNA, 19 nt, Artificial Sequence
  Description of Artificial Sequence: Synthetic oligonucleotide
  Sense strand starting at position 3885 of SEQ ID NO: 1564121
gaggucauuucuuaaccag

SEQ ID NO: 1856714 - RNA, 19 nt, Artificial Sequence
  Description of Artificial Sequence: Synthetic oligonucleotide
  Antisense strand to SEQ ID NO: 1856713
cugguuaagaaaugaccuc

SEQ ID NO: 1856715 - RNA, 19 nt, Artificial Sequence
  Description of Artificial Sequence: Synthetic oligonucleotide
  Sense strand starting at position 3892 of SEQ ID NO: 1564121
uuucuuaaccagggaaagu

SEQ ID NO: 1856716 - RNA, 19 nt, Artificial Sequence
  Description of Artificial Sequence: Synthetic oligonucleotide
  Antisense strand to SEQ ID NO: 1856715
acuuucccugguuaagaaa

SEQ ID NO: 1856717 - RNA, 19 nt, Artificial Sequence
  Description of Artificial Sequence: Synthetic oligonucleotide
  Sense strand starting at position 3908 of SEQ ID NO: 1564121
agugcugacuuacucaaga

SEQ ID NO: 1856718 - RNA, 19 nt, Artificial Sequence
  Description of Artificial Sequence: Synthetic oligonucleotide
  Antisense strand to SEQ ID NO: 1856717
ucuugaguaagucagcacu

SEQ ID NO: 1856719 - RNA, 19 nt, Artificial Sequence
  Description of Artificial Sequence: Synthetic oligonucleotide
  Sense strand starting at position 382 of SEQ ID NO: 1564122
acccgagaccuguacaacu

SEQ ID NO: 1856720 - RNA, 19 nt, Artificial Sequence
  Description of Artificial Sequence: Synthetic oligonucleotide
  Antisense strand to SEQ ID NO: 1856719
aguuguacaggucucgggu

SEQ ID NO: 1856721 - RNA, 19 nt, Artificial Sequence
  Description of Artificial Sequence: Synthetic oligonucleotide
  Sense strand starting at position 830 of SEQ ID NO: 1564122
cacgaugguaucuauguga

SEQ ID NO: 1856722 - RNA, 19 nt, Artificial Sequence
  Description of Artificial Sequence: Synthetic oligonucleotide
  Antisense strand to SEQ ID NO: 1856721
ucacauagauaccaucgug

SEQ ID NO: 1856723 - RNA, 19 nt, Artificial Sequence
  Description of Artificial Sequence: Synthetic oligonucleotide
  Sense strand starting at position 833 of SEQ ID NO: 1564122
gaugguaucuaugugauuc

SEQ ID NO: 1856724 - RNA, 19 nt, Artificial Sequence
  Description of Artificial Sequence: Synthetic oligonucleotide
  Antisense strand to SEQ ID NO: 1856723
gaaucacauagauaccauc

SEQ ID NO: 1856725 - RNA, 19 nt, Artificial Sequence
  Description of Artificial Sequence: Synthetic oligonucleotide
  Sense strand starting at position 1529 of SEQ ID NO: 1564122
cgcggaauugaauaauuac

SEQ ID NO: 1856726 - RNA, 19 nt, Artificial Sequence
  Description of Artificial Sequence: Synthetic oligonucleotide
  Antisense strand to SEQ ID NO: 1856725
guaauuauucaauuccgcg

SEQ ID NO: 1856727 - RNA, 19 nt, Artificial Sequence
  Description of Artificial Sequence: Synthetic oligonucleotide
  Sense strand starting at position 1695 of SEQ ID NO: 1564122
gaaggagccuucuugggaa

SEQ ID NO: 1856728 - RNA, 19 nt, Artificial Sequence
  Description of Artificial Sequence: Synthetic oligonucleotide
  Antisense strand to SEQ ID NO: 1856727
uucccaagaaggcuccuuc

SEQ ID NO: 1856729 - RNA, 19 nt, Artificial Sequence
  Description of Artificial Sequence: Synthetic oligonucleotide
  Sense strand starting at position 1785 of SEQ ID NO: 1564122
ggcgaaagugugaggcuuu

SEQ ID NO: 1856730 - RNA, 19 nt, Artificial Sequence
  Description of Artificial Sequence: Synthetic oligonucleotide
  Antisense strand to SEQ ID NO: 1856729
aaagccucacacuuucgcc

SEQ ID NO: 1856731 - RNA, 19 nt, Artificial Sequence
  Description of Artificial Sequence: Synthetic oligonucleotide
  Sense strand starting at position 1796 of SEQ ID NO: 1564122
gaggcuuuagccuaaagug

SEQ ID NO: 1856732 - RNA, 19 nt, Artificial Sequence
  Description of Artificial Sequence: Synthetic oligonucleotide
  Antisense strand to SEQ ID NO: 1856731
cacuuuaggcuaaagccuc

SEQ ID NO: 1856733 - RNA, 19 nt, Artificial Sequence
  Description of Artificial Sequence: Synthetic oligonucleotide
  Sense strand starting at position 1889 of SEQ ID NO: 1564122
auggguuaagccggaugau

SEQ ID NO: 1856734 - RNA, 19 nt, Artificial Sequence
  Description of Artificial Sequence: Synthetic oligonucleotide
  Antisense strand to SEQ ID NO: 1856733
aucauccggcuuaacccau

SEQ ID NO: 1856735 - RNA, 19 nt, Artificial Sequence
  Description of Artificial Sequence: Synthetic oligonucleotide
  Sense strand starting at position 2304 of SEQ ID NO: 1564122
ccucauuguguauaccaaa

SEQ ID NO: 1856736 - RNA, 19 nt, Artificial Sequence
  Description of Artificial Sequence: Synthetic oligonucleotide
  Antisense strand to SEQ ID NO: 1856735
uuugguauacacaaugagg

SEQ ID NO: 1856737 - RNA, 19 nt, Artificial Sequence
  Description of Artificial Sequence: Synthetic oligonucleotide
  Sense strand starting at position 2411 of SEQ ID NO: 1564122
gugcuuccacaagagauaa

SEQ ID NO: 1856738 - RNA, 19 nt, Artificial Sequence
  Description of Artificial Sequence: Synthetic oligonucleotide
  Antisense strand to SEQ ID NO: 1856737
uuaucucuuguggaagcac

SEQ ID NO: 1856739 - RNA, 19 nt, Artificial Sequence
  Description of Artificial Sequence: Synthetic oligonucleotide
  Sense strand starting at position 2428 of SEQ ID NO: 1564122
aagaaauauucugaggaag

SEQ ID NO: 1856740 - RNA, 19 nt, Artificial Sequence
  Description of Artificial Sequence: Synthetic oligonucleotide
  Antisense strand to SEQ ID NO: 1856739
cuuccucagaauauuucuu

SEQ ID NO: 1856741 - RNA, 19 nt, Artificial Sequence
  Description of Artificial Sequence: Synthetic oligonucleotide
  Sense strand starting at position 2535 of SEQ ID NO: 1564122
agaggaguuggcuaucaug

SEQ ID NO: 1856742 - RNA, 19 nt, Artificial Sequence
  Description of Artificial Sequence: Synthetic oligonucleotide
  Antisense strand to SEQ ID NO: 1856741
caugauagccaacuccucu

SEQ ID NO: 1856743 - RNA, 19 nt, Artificial Sequence
  Description of Artificial Sequence: Synthetic oligonucleotide
  Sense strand starting at position 2544 of SEQ ID NO: 1564122
ggcuaucauguauguauuu

SEQ ID NO: 1856744 - RNA, 19 nt, Artificial Sequence
  Description of Artificial Sequence: Synthetic oligonucleotide
  Antisense strand to SEQ ID NO: 1856743
aaauacauacaugauagcc

SEQ ID NO: 1856745 - RNA, 19 nt, Artificial Sequence
  Description of Artificial Sequence: Synthetic oligonucleotide
  Sense strand starting at position 2636 of SEQ ID NO: 1564122
guaggagcuuggcuaagaa

SEQ ID NO: 1856746 - RNA, 19 nt, Artificial Sequence
  Description of Artificial Sequence: Synthetic oligonucleotide
  Antisense strand to SEQ ID NO: 1856745
uucuuagccaagcuccuac

SEQ ID NO: 1856747 - RNA, 19 nt, Artificial Sequence
  Description of Artificial Sequence: Synthetic oligonucleotide
  Sense strand starting at position 2681 of SEQ ID NO: 1564122
gugggaauaaacuagcuuu

SEQ ID NO: 1856748 - RNA, 19 nt, Artificial Sequence
  Description of Artificial Sequence: Synthetic oligonucleotide
  Antisense strand to SEQ ID NO: 1856747
aaagcuaguuuauucccac

SEQ ID NO: 1856749 - RNA, 19 nt, Artificial Sequence
  Description of Artificial Sequence: Synthetic oligonucleotide
  Sense strand starting at position 2687 of SEQ ID NO: 1564122
auaaacuagcuuuagguaa

SEQ ID NO: 1856750 - RNA, 19 nt, Artificial Sequence
  Description of Artificial Sequence: Synthetic oligonucleotide
  Antisense strand to SEQ ID NO: 1856749
uuaccuaaagcuaguuuau

SEQ ID NO: 1856751 - RNA, 19 nt, Artificial Sequence
  Description of Artificial Sequence: Synthetic oligonucleotide
  Sense strand starting at position 2805 of SEQ ID NO: 1564122
caguguguugcccaauuua

SEQ ID NO: 1856752 - RNA, 19 nt, Artificial Sequence
  Description of Artificial Sequence: Synthetic oligonucleotide
  Antisense strand to SEQ ID NO: 1856751
uaaauugggcaacacacug

SEQ ID NO: 1856753 - RNA, 19 nt, Artificial Sequence
  Description of Artificial Sequence: Synthetic oligonucleotide
  Sense strand starting at position 2840 of SEQ ID NO: 1564122
cggcucuagccacaauaga

SEQ ID NO: 1856754 - RNA, 19 nt, Artificial Sequence
  Description of Artificial Sequence: Synthetic oligonucleotide
  Antisense strand to SEQ ID NO: 1856753
ucuauuguggcuagagccg

SEQ ID NO: 1856755 - RNA, 19 nt, Artificial Sequence
  Description of Artificial Sequence: Synthetic oligonucleotide
  Sense strand starting at position 2981 of SEQ ID NO: 1564122
uaccauaauugguugaugu

SEQ ID NO: 1856756 - RNA, 19 nt, Artificial Sequence
  Description of Artificial Sequence: Synthetic oligonucleotide
  Antisense strand to SEQ ID NO: 1856755
acaucaaccaauuauggua

SEQ ID NO: 1856757 - RNA, 19 nt, Artificial Sequence
  Description of Artificial Sequence: Synthetic oligonucleotide
  Sense strand starting at position 2982 of SEQ ID NO: 1564122
accauaauugguugauguu

SEQ ID NO: 1856758 - RNA, 19 nt, Artificial Sequence
  Description of Artificial Sequence: Synthetic oligonucleotide
  Antisense strand to SEQ ID NO: 1856757
aacaucaaccaauuauggu

SEQ ID NO: 1856759 - RNA, 19 nt, Artificial Sequence
  Description of Artificial Sequence: Synthetic oligonucleotide
  Sense strand starting at position 2983 of SEQ ID NO: 1564122
ccauaauugguugauguuu

SEQ ID NO: 1856760 - RNA, 19 nt, Artificial Sequence
  Description of Artificial Sequence: Synthetic oligonucleotide
  Antisense strand to SEQ ID NO: 1856759
aaacaucaaccaauuaugg

SEQ ID NO: 1856761 - RNA, 19 nt, Artificial Sequence
  Description of Artificial Sequence: Synthetic oligonucleotide
  Sense strand starting at position 3058 of SEQ ID NO: 1564122
ugugaauaauggucuaccu

SEQ ID NO: 1856762 - RNA, 19 nt, Artificial Sequence
  Description of Artificial Sequence: Synthetic oligonucleotide
  Antisense strand to SEQ ID NO: 1856761
agguagaccauuauucaca

SEQ ID NO: 1856763 - RNA, 19 nt, Artificial Sequence
  Description of Artificial Sequence: Synthetic oligonucleotide
  Sense strand starting at position 3074 of SEQ ID NO: 1564122
ccuucuguaucaucuauag

SEQ ID NO: 1856764 - RNA, 19 nt, Artificial Sequence
  Description of Artificial Sequence: Synthetic oligonucleotide
  Antisense strand to SEQ ID NO: 1856763
cuauagaugauacagaagg

SEQ ID NO: 1856765 - RNA, 19 nt, Artificial Sequence
  Description of Artificial Sequence: Synthetic oligonucleotide
  Sense strand starting at position 3078 of SEQ ID NO: 1564122
cuguaucaucuauaguagu

SEQ ID NO: 1856766 - RNA, 19 nt, Artificial Sequence
  Description of Artificial Sequence: Synthetic oligonucleotide
  Antisense strand to SEQ ID NO: 1856765
acuacuauagaugauacag

SEQ ID NO: 1856767 - RNA, 19 nt, Artificial Sequence
  Description of Artificial Sequence: Synthetic oligonucleotide
  Sense strand starting at position 3141 of SEQ ID NO: 1564122
ugggacuuccgucagguua

SEQ ID NO: 1856768 - RNA, 19 nt, Artificial Sequence
  Description of Artificial Sequence: Synthetic oligonucleotide
  Antisense strand to SEQ ID NO: 1856767
uaaccugacggaaguccca

SEQ ID NO: 1856769 - RNA, 19 nt, Artificial Sequence
  Description of Artificial Sequence: Synthetic oligonucleotide
  Sense strand starting at position 3194 of SEQ ID NO: 1564122
uacagagaugcacguacaa

SEQ ID NO: 1856770 - RNA, 19 nt, Artificial Sequence
  Description of Artificial Sequence: Synthetic oligonucleotide
  Antisense strand to SEQ ID NO: 1856769
uuguacgugcaucucugua

SEQ ID NO: 1856771 - RNA, 19 nt, Artificial Sequence
  Description of Artificial Sequence: Synthetic oligonucleotide
  Sense strand starting at position 3279 of SEQ ID NO: 1564122
ugugucguucaugaagaac

SEQ ID NO: 1856772 - RNA, 19 nt, Artificial Sequence
  Description of Artificial Sequence: Synthetic oligonucleotide
  Antisense strand to SEQ ID NO: 1856771
guucuucaugaacgacaca

SEQ ID NO: 1856773 - RNA, 19 nt, Artificial Sequence
  Description of Artificial Sequence: Synthetic oligonucleotide
  Sense strand starting at position 3367 of SEQ ID NO: 1564122
gacagaaauugggcagcau

SEQ ID NO: 1856774 - RNA, 19 nt, Artificial Sequence
  Description of Artificial Sequence: Synthetic oligonucleotide
  Antisense strand to SEQ ID NO: 1856773
augcugcccaauuucuguc

SEQ ID NO: 1856775 - RNA, 19 nt, Artificial Sequence
  Description of Artificial Sequence: Synthetic oligonucleotide
  Sense strand starting at position 3368 of SEQ ID NO: 1564122
acagaaauugggcagcauu

SEQ ID NO: 1856776 - RNA, 19 nt, Artificial Sequence
  Description of Artificial Sequence: Synthetic oligonucleotide
  Antisense strand to SEQ ID NO: 1856775
aaugcugcccaauuucugu

SEQ ID NO: 1856777 - RNA, 19 nt, Artificial Sequence
  Description of Artificial Sequence: Synthetic oligonucleotide
  Sense strand starting at position 3455 of SEQ ID NO: 1564122
ucuauaacagcguauguaa

SEQ ID NO: 1856778 - RNA, 19 nt, Artificial Sequence
  Description of Artificial Sequence: Synthetic oligonucleotide
  Antisense strand to SEQ ID NO: 1856777
uuacauacgcuguuauaga

SEQ ID NO: 1856779 - RNA, 19 nt, Artificial Sequence
  Description of Artificial Sequence: Synthetic oligonucleotide
  Sense strand starting at position 3489 of SEQ ID NO: 1564122
uagcaaagugaaugauguu

SEQ ID NO: 1856780 - RNA, 19 nt, Artificial Sequence
  Description of Artificial Sequence: Synthetic oligonucleotide
  Antisense strand to SEQ ID NO: 1856779
aacaucauucacuuugcua

SEQ ID NO: 1856781 - RNA, 19 nt, Artificial Sequence
  Description of Artificial Sequence: Synthetic oligonucleotide
  Sense strand starting at position 3490 of SEQ ID NO: 1564122
agcaaagugaaugauguuu

SEQ ID NO: 1856782 - RNA, 19 nt, Artificial Sequence
  Description of Artificial Sequence: Synthetic oligonucleotide
  Antisense strand to SEQ ID NO: 1856781
aaacaucauucacuuugcu

SEQ ID NO: 1856783 - RNA, 19 nt, Artificial Sequence
  Description of Artificial Sequence: Synthetic oligonucleotide
  Sense strand starting at position 3518 of SEQ ID NO: 1564122
guaacagcugcagaauguu

SEQ ID NO: 1856784 - RNA, 19 nt, Artificial Sequence
  Description of Artificial Sequence: Synthetic oligonucleotide
  Antisense strand to SEQ ID NO: 1856783
aacauucugcagcuguuac

SEQ ID NO: 1856785 - RNA, 19 nt, Artificial Sequence
  Description of Artificial Sequence: Synthetic oligonucleotide
  Sense strand starting at position 3618 of SEQ ID NO: 1564122
gcaguuugaaaguaguaau

SEQ ID NO: 1856786 - RNA, 19 nt, Artificial Sequence
  Description of Artificial Sequence: Synthetic oligonucleotide
  Antisense strand to SEQ ID NO: 1856785
auuacuacuuucaaacugc

SEQ ID NO: 1856787 - RNA, 19 nt, Artificial Sequence
  Description of Artificial Sequence: Synthetic oligonucleotide
  Sense strand starting at position 3698 of SEQ ID NO: 1564122
uuauccagauaggugaaau

SEQ ID NO: 1856788 - RNA, 19 nt, Artificial Sequence
  Description of Artificial Sequence: Synthetic oligonucleotide
  Antisense strand to SEQ ID NO: 1856787
auuucaccuaucuggauaa

SEQ ID NO: 1856789 - RNA, 19 nt, Artificial Sequence
  Description of Artificial Sequence: Synthetic oligonucleotide
  Sense strand starting at position 3745 of SEQ ID NO: 1564122
gagucaauagaaugagcaa

SEQ ID NO: 1856790 - RNA, 19 nt, Artificial Sequence
  Description of Artificial Sequence: Synthetic oligonucleotide
  Antisense strand to SEQ ID NO: 1856789
uugcucauucuauugacuc

SEQ ID NO: 1856791 - RNA, 19 nt, Artificial Sequence
  Description of Artificial Sequence: Synthetic oligonucleotide
  Sense strand starting at position 3806 of SEQ ID NO: 1564122
aggccagauuuggacagua

SEQ ID NO: 1856792 - RNA, 19 nt, Artificial Sequence
  Description of Artificial Sequence: Synthetic oligonucleotide
  Antisense strand to SEQ ID NO: 1856791
uacuguccaaaucuggccu

SEQ ID NO: 1856793 - RNA, 19 nt, Artificial Sequence
  Description of Artificial Sequence: Synthetic oligonucleotide
  Sense strand starting at position 3861 of SEQ ID NO: 1564122
uuuagaaacuguucugaga

SEQ ID NO: 1856794 - RNA, 19 nt, Artificial Sequence
  Description of Artificial Sequence: Synthetic oligonucleotide
  Antisense strand to SEQ ID NO: 1856793
ucucagaacaguuucuaaa

SEQ ID NO: 1856795 - RNA, 19 nt, Artificial Sequence
  Description of Artificial Sequence: Synthetic oligonucleotide
  Sense strand starting at position 3872 of SEQ ID NO: 1564122
uucugagacuuggcuauau

SEQ ID NO: 1856796 - RNA, 19 nt, Artificial Sequence
  Description of Artificial Sequence: Synthetic oligonucleotide
  Antisense strand to SEQ ID NO: 1856795
auauagccaagucucagaa

SEQ ID NO: 1856797 - RNA, 19 nt, Artificial Sequence
  Description of Artificial Sequence: Synthetic oligonucleotide
  Sense strand starting at position 3955 of SEQ ID NO: 1564122
guagcuagaucaucgauaa

SEQ ID NO: 1856798 - RNA, 19 nt, Artificial Sequence
  Description of Artificial Sequence: Synthetic oligonucleotide
  Antisense strand to SEQ ID NO: 1856797
uuaucgaugaucuagcuac

SEQ ID NO: 1856799 - RNA, 19 nt, Artificial Sequence
  Description of Artificial Sequence: Synthetic oligonucleotide
  Sense strand starting at position 67 of SEQ ID NO: 1564123
aaagaagugucgcacagaa

SEQ ID NO: 1856800 - RNA, 19 nt, Artificial Sequence
  Description of Artificial Sequence: Synthetic oligonucleotide
  Antisense strand to SEQ ID NO: 1856799
uucugugcgacacuucuuu

SEQ ID NO: 1856801 - RNA, 19 nt, Artificial Sequence
  Description of Artificial Sequence: Synthetic oligonucleotide
  Sense strand starting at position 69 of SEQ ID NO: 1564123
agaagugucgcacagaaac

SEQ ID NO: 1856802 - RNA, 19 nt, Artificial Sequence
  Description of Artificial Sequence: Synthetic oligonucleotide
  Antisense strand to SEQ ID NO: 1856801
guuucugugcgacacuucu

SEQ ID NO: 1856803 - RNA, 19 nt, Artificial Sequence
  Description of Artificial Sequence: Synthetic oligonucleotide
  Sense strand starting at position 108 of SEQ ID NO: 1564123
cgaggaaucagcuaguggu

SEQ ID NO: 1856804 - RNA, 19 nt, Artificial Sequence
  Description of Artificial Sequence: Synthetic oligonucleotide
  Antisense strand to SEQ ID NO: 1856803
accacuagcugauuccucg

SEQ ID NO: 1856805 - RNA, 19 nt, Artificial Sequence
  Description of Artificial Sequence: Synthetic oligonucleotide
  Sense strand starting at position 239 of SEQ ID NO: 1564123
gccauauagacgugcauuu

SEQ ID NO: 1856806 - RNA, 19 nt, Artificial Sequence
  Description of Artificial Sequence: Synthetic oligonucleotide
  Antisense strand to SEQ ID NO: 1856805
aaaugcacgucuauauggc

SEQ ID NO: 1856807 - RNA, 19 nt, Artificial Sequence
  Description of Artificial Sequence: Synthetic oligonucleotide
  Sense strand starting at position 374 of SEQ ID NO: 1564123
ccuuguuaugaaugugguu

SEQ ID NO: 1856808 - RNA, 19 nt, Artificial Sequence
  Description of Artificial Sequence: Synthetic oligonucleotide
  Antisense strand to SEQ ID NO: 1856807
aaccacauucauaacaagg

SEQ ID NO: 1856809 - RNA, 19 nt, Artificial Sequence
  Description of Artificial Sequence: Synthetic oligonucleotide
  Sense strand starting at position 415 of SEQ ID NO: 1564123
uugagucauuucuuguuac

SEQ ID NO: 1856810 - RNA, 19 nt, Artificial Sequence
  Description of Artificial Sequence: Synthetic oligonucleotide
  Antisense strand to SEQ ID NO: 1856809
guaacaagaaaugacucaa

SEQ ID NO: 1856811 - RNA, 19 nt, Artificial Sequence
  Description of Artificial Sequence: Synthetic oligonucleotide
  Sense strand starting at position 416 of SEQ ID NO: 1564123
ugagucauuucuuguuacu

SEQ ID NO: 1856812 - RNA, 19 nt, Artificial Sequence
  Description of Artificial Sequence: Synthetic oligonucleotide
  Antisense strand to SEQ ID NO: 1856811
aguaacaagaaaugacuca

SEQ ID NO: 1856813 - RNA, 19 nt, Artificial Sequence
  Description of Artificial Sequence: Synthetic oligonucleotide
  Sense strand starting at position 419 of SEQ ID NO: 1564123
gucauuucuuguuacuaaa

SEQ ID NO: 1856814 - RNA, 19 nt, Artificial Sequence
  Description of Artificial Sequence: Synthetic oligonucleotide
  Antisense strand to SEQ ID NO: 1856813
uuuaguaacaagaaaugac

SEQ ID NO: 1856815 - RNA, 19 nt, Artificial Sequence
  Description of Artificial Sequence: Synthetic oligonucleotide
  Sense strand starting at position 596 of SEQ ID NO: 1564123
ggugauugcuacuuuaagu

SEQ ID NO: 1856816 - RNA, 19 nt, Artificial Sequence
  Description of Artificial Sequence: Synthetic oligonucleotide
  Antisense strand to SEQ ID NO: 1856815
acuuaaaguagcaaucacc

SEQ ID NO: 1856817 - RNA, 19 nt, Artificial Sequence
  Description of Artificial Sequence: Synthetic oligonucleotide
  Sense strand starting at position 636 of SEQ ID NO: 1564123
uaguaagagccaggaaguu

SEQ ID NO: 1856818 - RNA, 19 nt, Artificial Sequence
  Description of Artificial Sequence: Synthetic oligonucleotide
  Antisense strand to SEQ ID NO: 1856817
aacuuccuggcucuuacua

SEQ ID NO: 1856819 - RNA, 19 nt, Artificial Sequence
  Description of Artificial Sequence: Synthetic oligonucleotide
  Sense strand starting at position 844 of SEQ ID NO: 1564123
cacugaauguaugcgaaua

SEQ ID NO: 1856820 - RNA, 19 nt, Artificial Sequence
  Description of Artificial Sequence: Synthetic oligonucleotide
  Antisense strand to SEQ ID NO: 1856819
uauucgcauacauucagug

SEQ ID NO: 1856821 - RNA, 19 nt, Artificial Sequence
  Description of Artificial Sequence: Synthetic oligonucleotide
  Sense strand starting at position 845 of SEQ ID NO: 1564123
acugaauguaugcgaauaa

SEQ ID NO: 1856822 - RNA, 19 nt, Artificial Sequence
  Description of Artificial Sequence: Synthetic oligonucleotide
  Antisense strand to SEQ ID NO: 1856821
uuauucgcauacauucagu

SEQ ID NO: 1856823 - RNA, 19 nt, Artificial Sequence
  Description of Artificial Sequence: Synthetic oligonucleotide
  Sense strand starting at position 846 of SEQ ID NO: 1564123
cugaauguaugcgaauaaa

SEQ ID NO: 1856824 - RNA, 19 nt, Artificial Sequence
  Description of Artificial Sequence: Synthetic oligonucleotide
  Antisense strand to SEQ ID NO: 1856823
uuuauucgcauacauucag

SEQ ID NO: 1856825 - RNA, 19 nt, Artificial Sequence
  Description of Artificial Sequence: Synthetic oligonucleotide
  Sense strand starting at position 1245 of SEQ ID NO: 1564123
gaagagguucgcggagaga

SEQ ID NO: 1856826 - RNA, 19 nt, Artificial Sequence
  Description of Artificial Sequence: Synthetic oligonucleotide
  Antisense strand to SEQ ID NO: 1856825
ucucuccgcgaaccucuuc

SEQ ID NO: 1856827 - RNA, 19 nt, Artificial Sequence
  Description of Artificial Sequence: Synthetic oligonucleotide
  Sense strand starting at position 1825 of SEQ ID NO: 1564123
cggcucuuccucugguauu

SEQ ID NO: 1856828 - RNA, 19 nt, Artificial Sequence
  Description of Artificial Sequence: Synthetic oligonucleotide
  Antisense strand to SEQ ID NO: 1856827
aauaccagaggaagagccg

SEQ ID NO: 1856829 - RNA, 19 nt, Artificial Sequence
  Description of Artificial Sequence: Synthetic oligonucleotide
  Sense strand starting at position 1860 of SEQ ID NO: 1564123
gcuagcaaucuccgaccaa

SEQ ID NO: 1856830 - RNA, 19 nt, Artificial Sequence
  Description of Artificial Sequence: Synthetic oligonucleotide
  Antisense strand to SEQ ID NO: 1856829
uuggucggagauugcuagc

SEQ ID NO: 1856831 - RNA, 19 nt, Artificial Sequence
  Description of Artificial Sequence: Synthetic oligonucleotide
  Sense strand starting at position 1986 of SEQ ID NO: 1564123
acccgagaccuguacaacu

SEQ ID NO: 1856832 - RNA, 19 nt, Artificial Sequence
  Description of Artificial Sequence: Synthetic oligonucleotide
  Antisense strand to SEQ ID NO: 1856831
aguuguacaggucucgggu

SEQ ID NO: 1856833 - RNA, 19 nt, Artificial Sequence
  Description of Artificial Sequence: Synthetic oligonucleotide
  Sense strand starting at position 2425 of SEQ ID NO: 1564123
ugcuguuuccacgauggua

SEQ ID NO: 1856834 - RNA, 19 nt, Artificial Sequence
  Description of Artificial Sequence: Synthetic oligonucleotide
  Antisense strand to SEQ ID NO: 1856833
uaccaucguggaaacagca

SEQ ID NO: 1856835 - RNA, 19 nt, Artificial Sequence
  Description of Artificial Sequence: Synthetic oligonucleotide
  Sense strand starting at position 2434 of SEQ ID NO: 1564123
cacgaugguaucuauguga

SEQ ID NO: 1856836 - RNA, 19 nt, Artificial Sequence
  Description of Artificial Sequence: Synthetic oligonucleotide
  Antisense strand to SEQ ID NO: 1856835
ucacauagauaccaucgug

SEQ ID NO: 1856837 - RNA, 19 nt, Artificial Sequence
  Description of Artificial Sequence: Synthetic oligonucleotide
  Sense strand starting at position 2437 of SEQ ID NO: 1564123
gaugguaucuaugugauuc

SEQ ID NO: 1856838 - RNA, 19 nt, Artificial Sequence
  Description of Artificial Sequence: Synthetic oligonucleotide
  Antisense strand to SEQ ID NO: 1856837
gaaucacauagauaccauc

SEQ ID NO: 1856839 - RNA, 19 nt, Artificial Sequence
  Description of Artificial Sequence: Synthetic oligonucleotide
  Sense strand starting at position 2441 of SEQ ID NO: 1564123
guaucuaugugauuccgga

SEQ ID NO: 1856840 - RNA, 19 nt, Artificial Sequence
  Description of Artificial Sequence: Synthetic oligonucleotide
  Antisense strand to SEQ ID NO: 1856839
uccggaaucacauagauac

SEQ ID NO: 1856841 - RNA, 19 nt, Artificial Sequence
  Description of Artificial Sequence: Synthetic oligonucleotide
  Sense strand starting at position 3028 of SEQ ID NO: 1564123
gggcauuccuuugagagag

SEQ ID NO: 1856842 - RNA, 19 nt, Artificial Sequence
  Description of Artificial Sequence: Synthetic oligonucleotide
  Antisense strand to SEQ ID NO: 1856841
cucucucaaaggaaugccc

SEQ ID NO: 1856843 - RNA, 19 nt, Artificial Sequence
  Description of Artificial Sequence: Synthetic oligonucleotide
  Sense strand starting at position 3125 of SEQ ID NO: 1564123
cgagucuacgcggaauuga

SEQ ID NO: 1856844 - RNA, 19 nt, Artificial Sequence
  Description of Artificial Sequence: Synthetic oligonucleotide
  Antisense strand to SEQ ID NO: 1856843
ucaauuccgcguagacucg

SEQ ID NO: 1856845 - RNA, 19 nt, Artificial Sequence
  Description of Artificial Sequence: Synthetic oligonucleotide
  Sense strand starting at position 3133 of SEQ ID NO: 1564123
cgcggaauugaauaauuac

SEQ ID NO: 1856846 - RNA, 19 nt, Artificial Sequence
  Description of Artificial Sequence: Synthetic oligonucleotide
  Antisense strand to SEQ ID NO: 1856845
guaauuauucaauuccgcg

SEQ ID NO: 1856847 - RNA, 19 nt, Artificial Sequence
  Description of Artificial Sequence: Synthetic oligonucleotide
  Sense strand starting at position 3225 of SEQ ID NO: 1564123
acgguaccuuuggcuaauu

SEQ ID NO: 1856848 - RNA, 19 nt, Artificial Sequence
  Description of Artificial Sequence: Synthetic oligonucleotide
  Antisense strand to SEQ ID NO: 1856847
aauuagccaaagguaccgu

SEQ ID NO: 1856849 - RNA, 19 nt, Artificial Sequence
  Description of Artificial Sequence: Synthetic oligonucleotide
  Sense strand starting at position 3299 of SEQ ID NO: 1564123
gaaggagccuucuugggaa

SEQ ID NO: 1856850 - RNA, 19 nt, Artificial Sequence
  Description of Artificial Sequence: Synthetic oligonucleotide
  Antisense strand to SEQ ID NO: 1856849
uucccaagaaggcuccuuc

SEQ ID NO: 1856851 - RNA, 19 nt, Artificial Sequence
  Description of Artificial Sequence: Synthetic oligonucleotide
  Sense strand starting at position 3303 of SEQ ID NO: 1564123
gagccuucuugggaaccaa

SEQ ID NO: 1856852 - RNA, 19 nt, Artificial Sequence
  Description of Artificial Sequence: Synthetic oligonucleotide
  Antisense strand to SEQ ID NO: 1856851
uugguucccaagaaggcuc

SEQ ID NO: 1856853 - RNA, 19 nt, Artificial Sequence
  Description of Artificial Sequence: Synthetic oligonucleotide
  Sense strand starting at position 3389 of SEQ ID NO: 1564123
ggcgaaagugugaggcuuu

SEQ ID NO: 1856854 - RNA, 19 nt, Artificial Sequence
  Description of Artificial Sequence: Synthetic oligonucleotide
  Antisense strand to SEQ ID NO: 1856853
aaagccucacacuuucgcc

SEQ ID NO: 1856855 - RNA, 19 nt, Artificial Sequence
  Description of Artificial Sequence: Synthetic oligonucleotide
  Sense strand starting at position 3400 of SEQ ID NO: 1564123
gaggcuuuagccuaaagug

SEQ ID NO: 1856856 - RNA, 19 nt, Artificial Sequence
  Description of Artificial Sequence: Synthetic oligonucleotide
  Antisense strand to SEQ ID NO: 1856855
cacuuuaggcuaaagccuc

SEQ ID NO: 1856857 - RNA, 19 nt, Artificial Sequence
  Description of Artificial Sequence: Synthetic oligonucleotide
  Sense strand starting at position 3408 of SEQ ID NO: 1564123
agccuaaagugagacuauu

SEQ ID NO: 1856858 - RNA, 19 nt, Artificial Sequence
  Description of Artificial Sequence: Synthetic oligonucleotide
  Antisense strand to SEQ ID NO: 1856857
aauagucucacuuuaggcu

SEQ ID NO: 1856859 - RNA, 19 nt, Artificial Sequence
  Description of Artificial Sequence: Synthetic oligonucleotide
  Sense strand starting at position 3447 of SEQ ID NO: 1564123
ggguuaauuauccgcaccu

SEQ ID NO: 1856860 - RNA, 19 nt, Artificial Sequence
  Description of Artificial Sequence: Synthetic oligonucleotide
  Antisense strand to SEQ ID NO: 1856859
aggugcggauaauuaaccc

SEQ ID NO: 1856861 - RNA, 19 nt, Artificial Sequence
  Description of Artificial Sequence: Synthetic oligonucleotide
  Sense strand starting at position 3448 of SEQ ID NO: 1564123
gguuaauuauccgcaccuu

SEQ ID NO: 1856862 - RNA, 19 nt, Artificial Sequence
  Description of Artificial Sequence: Synthetic oligonucleotide
  Antisense strand to SEQ ID NO: 1856861
aaggugcggauaauuaacc

SEQ ID NO: 1856863 - RNA, 19 nt, Artificial Sequence
  Description of Artificial Sequence: Synthetic oligonucleotide
  Sense strand starting at position 3449 of SEQ ID NO: 1564123
guuaauuauccgcaccuua

SEQ ID NO: 1856864 - RNA, 19 nt, Artificial Sequence
  Description of Artificial Sequence: Synthetic oligonucleotide
  Antisense strand to SEQ ID NO: 1856863
uaaggugcggauaauuaac

SEQ ID NO: 1856865 - RNA, 19 nt, Artificial Sequence
  Description of Artificial Sequence: Synthetic oligonucleotide
  Sense strand starting at position 3493 of SEQ ID NO: 1564123
auggguuaagccggaugau

SEQ ID NO: 1856866 - RNA, 19 nt, Artificial Sequence
  Description of Artificial Sequence: Synthetic oligonucleotide
  Antisense strand to SEQ ID NO: 1856865
aucauccggcuuaacccau

SEQ ID NO: 1856867 - RNA, 19 nt, Artificial Sequence
  Description of Artificial Sequence: Synthetic oligonucleotide
  Sense strand starting at position 3496 of SEQ ID NO: 1564123
gguuaagccggaugaucuu

SEQ ID NO: 1856868 - RNA, 19 nt, Artificial Sequence
  Description of Artificial Sequence: Synthetic oligonucleotide
  Antisense strand to SEQ ID NO: 1856867
aagaucauccggcuuaacc

SEQ ID NO: 1856869 - RNA, 19 nt, Artificial Sequence
  Description of Artificial Sequence: Synthetic oligonucleotide
  Sense strand starting at position 3741 of SEQ ID NO: 1564123
ggugguaguugggagacau

SEQ ID NO: 1856870 - RNA, 19 nt, Artificial Sequence
  Description of Artificial Sequence: Synthetic oligonucleotide
  Antisense strand to SEQ ID NO: 1856869
augucucccaacuaccacc

SEQ ID NO: 1856871 - RNA, 19 nt, Artificial Sequence
  Description of Artificial Sequence: Synthetic oligonucleotide
  Sense strand starting at position 3908 of SEQ ID NO: 1564123
ccucauuguguauaccaaa

SEQ ID NO: 1856872 - RNA, 19 nt, Artificial Sequence
  Description of Artificial Sequence: Synthetic oligonucleotide
  Antisense strand to SEQ ID NO: 1856871
uuugguauacacaaugagg

SEQ ID NO: 1856873 - RNA, 19 nt, Artificial Sequence
  Description of Artificial Sequence: Synthetic oligonucleotide
  Sense strand starting at position 3929 of SEQ ID NO: 1564123
ggcuuuagcagcugaaucu

SEQ ID NO: 1856874 - RNA, 19 nt, Artificial Sequence
  Description of Artificial Sequence: Synthetic oligonucleotide
  Antisense strand to SEQ ID NO: 1856873
agauucagcugcuaaagcc

SEQ ID NO: 1856875 - RNA, 19 nt, Artificial Sequence
  Description of Artificial Sequence: Synthetic oligonucleotide
  Sense strand starting at position 3936 of SEQ ID NO: 1564123
gcagcugaaucugaaauau

SEQ ID NO: 1856876 - RNA, 19 nt, Artificial Sequence
  Description of Artificial Sequence: Synthetic oligonucleotide
  Antisense strand to SEQ ID NO: 1856875
auauuucagauucagcugc

SEQ ID NO: 1856877 - RNA, 19 nt, Artificial Sequence
  Description of Artificial Sequence: Synthetic oligonucleotide
  Sense strand starting at position 3964 of SEQ ID NO: 1564123
gcaaauccaacguguggau

SEQ ID NO: 1856878 - RNA, 19 nt, Artificial Sequence
  Description of Artificial Sequence: Synthetic oligonucleotide
  Antisense strand to SEQ ID NO: 1856877
auccacacguuggauuugc

SEQ ID NO: 1856879 - RNA, 19 nt, Artificial Sequence
  Description of Artificial Sequence: Synthetic oligonucleotide
  Sense strand starting at position 143 of SEQ ID NO: 1564124
cacugaauguaugcgaaua

SEQ ID NO: 1856880 - RNA, 19 nt, Artificial Sequence
  Description of Artificial Sequence: Synthetic oligonucleotide
  Antisense strand to SEQ ID NO: 1856879
uauucgcauacauucagug

SEQ ID NO: 1856881 - RNA, 19 nt, Artificial Sequence
  Description of Artificial Sequence: Synthetic oligonucleotide
  Sense strand starting at position 144 of SEQ ID NO: 1564124
acugaauguaugcgaauaa

SEQ ID NO: 1856882 - RNA, 19 nt, Artificial Sequence
  Description of Artificial Sequence: Synthetic oligonucleotide
  Antisense strand to SEQ ID NO: 1856881
uuauucgcauacauucagu

SEQ ID NO: 1856883 - RNA, 19 nt, Artificial Sequence
  Description of Artificial Sequence: Synthetic oligonucleotide
  Sense strand starting at position 544 of SEQ ID NO: 1564124
gaagagguucgcggagaga

SEQ ID NO: 1856884 - RNA, 19 nt, Artificial Sequence
  Description of Artificial Sequence: Synthetic oligonucleotide
  Antisense strand to SEQ ID NO: 1856883
ucucuccgcgaaccucuuc

SEQ ID NO: 1856885 - RNA, 19 nt, Artificial Sequence
  Description of Artificial Sequence: Synthetic oligonucleotide
  Sense strand starting at position 1159 of SEQ ID NO: 1564124
gcuagcaaucuccgaccaa

SEQ ID NO: 1856886 - RNA, 19 nt, Artificial Sequence
  Description of Artificial Sequence: Synthetic oligonucleotide
  Antisense strand to SEQ ID NO: 1856885
uuggucggagauugcuagc

SEQ ID NO: 1856887 - RNA, 19 nt, Artificial Sequence
  Description of Artificial Sequence: Synthetic oligonucleotide
  Sense strand starting at position 1285 of SEQ ID NO: 1564124
acccgagaccuguacaacu

SEQ ID NO: 1856888 - RNA, 19 nt, Artificial Sequence
  Description of Artificial Sequence: Synthetic oligonucleotide
  Antisense strand to SEQ ID NO: 1856887
aguuguacaggucucgggu

SEQ ID NO: 1856889 - RNA, 19 nt, Artificial Sequence
  Description of Artificial Sequence: Synthetic oligonucleotide
  Sense strand starting at position 1724 of SEQ ID NO: 1564124
ugcuguuuccacgauggua

SEQ ID NO: 1856890 - RNA, 19 nt, Artificial Sequence
  Description of Artificial Sequence: Synthetic oligonucleotide
  Antisense strand to SEQ ID NO: 1856889
uaccaucguggaaacagca

SEQ ID NO: 1856891 - RNA, 19 nt, Artificial Sequence
  Description of Artificial Sequence: Synthetic oligonucleotide
  Sense strand starting at position 1733 of SEQ ID NO: 1564124
cacgaugguaucuauguga

SEQ ID NO: 1856892 - RNA, 19 nt, Artificial Sequence
  Description of Artificial Sequence: Synthetic oligonucleotide
  Antisense strand to SEQ ID NO: 1856891
ucacauagauaccaucgug

SEQ ID NO: 1856893 - RNA, 19 nt, Artificial Sequence
  Description of Artificial Sequence: Synthetic oligonucleotide
  Sense strand starting at position 1736 of SEQ ID NO: 1564124
gaugguaucuaugugauuc

SEQ ID NO: 1856894 - RNA, 19 nt, Artificial Sequence
  Description of Artificial Sequence: Synthetic oligonucleotide
  Antisense strand to SEQ ID NO: 1856893
gaaucacauagauaccauc

SEQ ID NO: 1856895 - RNA, 19 nt, Artificial Sequence
  Description of Artificial Sequence: Synthetic oligonucleotide
  Sense strand starting at position 1740 of SEQ ID NO: 1564124
guaucuaugugauuccgga

SEQ ID NO: 1856896 - RNA, 19 nt, Artificial Sequence
  Description of Artificial Sequence: Synthetic oligonucleotide
  Antisense strand to SEQ ID NO: 1856895
uccggaaucacauagauac

SEQ ID NO: 1856897 - RNA, 19 nt, Artificial Sequence
  Description of Artificial Sequence: Synthetic oligonucleotide
  Sense strand starting at position 2424 of SEQ ID NO: 1564124
cgagucuacgcggaauuga

SEQ ID NO: 1856898 - RNA, 19 nt, Artificial Sequence
  Description of Artificial Sequence: Synthetic oligonucleotide
  Antisense strand to SEQ ID NO: 1856897
ucaauuccgcguagacucg

SEQ ID NO: 1856899 - RNA, 19 nt, Artificial Sequence
  Description of Artificial Sequence: Synthetic oligonucleotide
  Sense strand starting at position 2432 of SEQ ID NO: 1564124
cgcggaauugaauaauuac

SEQ ID NO: 1856900 - RNA, 19 nt, Artificial Sequence
  Description of Artificial Sequence: Synthetic oligonucleotide
  Antisense strand to SEQ ID NO: 1856899
guaauuauucaauuccgcg

SEQ ID NO: 1856901 - RNA, 19 nt, Artificial Sequence
  Description of Artificial Sequence: Synthetic oligonucleotide
  Sense strand starting at position 2524 of SEQ ID NO: 1564124
acgguaccuuuggcuaauu

SEQ ID NO: 1856902 - RNA, 19 nt, Artificial Sequence
  Description of Artificial Sequence: Synthetic oligonucleotide
  Antisense strand to SEQ ID NO: 1856901
aauuagccaaagguaccgu

SEQ ID NO: 1856903 - RNA, 19 nt, Artificial Sequence
  Description of Artificial Sequence: Synthetic oligonucleotide
  Sense strand starting at position 2598 of SEQ ID NO: 1564124
gaaggagccuucuugggaa

SEQ ID NO: 1856904 - RNA, 19 nt, Artificial Sequence
  Description of Artificial Sequence: Synthetic oligonucleotide
  Antisense strand to SEQ ID NO: 1856903
uucccaagaaggcuccuuc

SEQ ID NO: 1856905 - RNA, 19 nt, Artificial Sequence
  Description of Artificial Sequence: Synthetic oligonucleotide
  Sense strand starting at position 2688 of SEQ ID NO: 1564124
ggcgaaagugugaggcuuu

SEQ ID NO: 1856906 - RNA, 19 nt, Artificial Sequence
  Description of Artificial Sequence: Synthetic oligonucleotide
  Antisense strand to SEQ ID NO: 1856905
aaagccucacacuuucgcc

SEQ ID NO: 1856907 - RNA, 19 nt, Artificial Sequence
  Description of Artificial Sequence: Synthetic oligonucleotide
  Sense strand starting at position 2699 of SEQ ID NO: 1564124
gaggcuuuagccuaaagug

SEQ ID NO: 1856908 - RNA, 19 nt, Artificial Sequence
  Description of Artificial Sequence: Synthetic oligonucleotide
  Antisense strand to SEQ ID NO: 1856907
cacuuuaggcuaaagccuc

SEQ ID NO: 1856909 - RNA, 19 nt, Artificial Sequence
  Description of Artificial Sequence: Synthetic oligonucleotide
  Sense strand starting at position 2748 of SEQ ID NO: 1564124
guuaauuauccgcaccuua

SEQ ID NO: 1856910 - RNA, 19 nt, Artificial Sequence
  Description of Artificial Sequence: Synthetic oligonucleotide
  Antisense strand to SEQ ID NO: 1856909
uaaggugcggauaauuaac

SEQ ID NO: 1856911 - RNA, 19 nt, Artificial Sequence
  Description of Artificial Sequence: Synthetic oligonucleotide
  Sense strand starting at position 2792 of SEQ ID NO: 1564124
auggguuaagccggaugau

SEQ ID NO: 1856912 - RNA, 19 nt, Artificial Sequence
  Description of Artificial Sequence: Synthetic oligonucleotide
  Antisense strand to SEQ ID NO: 1856911
aucauccggcuuaacccau

SEQ ID NO: 1856913 - RNA, 19 nt, Artificial Sequence
  Description of Artificial Sequence: Synthetic oligonucleotide
  Sense strand starting at position 2795 of SEQ ID NO: 1564124
gguuaagccggaugaucuu

SEQ ID NO: 1856914 - RNA, 19 nt, Artificial Sequence
  Description of Artificial Sequence: Synthetic oligonucleotide
  Antisense strand to SEQ ID NO: 1856913
aagaucauccggcuuaacc

SEQ ID NO: 1856915 - RNA, 19 nt, Artificial Sequence
  Description of Artificial Sequence: Synthetic oligonucleotide
  Sense strand starting at position 3207 of SEQ ID NO: 1564124
ccucauuguguauaccaaa

SEQ ID NO: 1856916 - RNA, 19 nt, Artificial Sequence
  Description of Artificial Sequence: Synthetic oligonucleotide
  Antisense strand to SEQ ID NO: 1856915
uuugguauacacaaugagg

SEQ ID NO: 1856917 - RNA, 19 nt, Artificial Sequence
  Description of Artificial Sequence: Synthetic oligonucleotide
  Sense strand starting at position 3263 of SEQ ID NO: 1564124
gcaaauccaacguguggau

SEQ ID NO: 1856918 - RNA, 19 nt, Artificial Sequence
  Description of Artificial Sequence: Synthetic oligonucleotide
  Antisense strand to SEQ ID NO: 1856917
auccacacguuggauuugc

SEQ ID NO: 1856919 - RNA, 19 nt, Artificial Sequence
  Description of Artificial Sequence: Synthetic oligonucleotide
  Sense strand starting at position 3314 of SEQ ID NO: 1564124
gugcuuccacaagagauaa

SEQ ID NO: 1856920 - RNA, 19 nt, Artificial Sequence
  Description of Artificial Sequence: Synthetic oligonucleotide
  Antisense strand to SEQ ID NO: 1856919
uuaucucuuguggaagcac

SEQ ID NO: 1856921 - RNA, 19 nt, Artificial Sequence
  Description of Artificial Sequence: Synthetic oligonucleotide
  Sense strand starting at position 3331 of SEQ ID NO: 1564124
aagaaauauucugaggaag

SEQ ID NO: 1856922 - RNA, 19 nt, Artificial Sequence
  Description of Artificial Sequence: Synthetic oligonucleotide
  Antisense strand to SEQ ID NO: 1856921
cuuccucagaauauuucuu

SEQ ID NO: 1856923 - RNA, 19 nt, Artificial Sequence
  Description of Artificial Sequence: Synthetic oligonucleotide
  Sense strand starting at position 3333 of SEQ ID NO: 1564124
gaaauauucugaggaaggg

SEQ ID NO: 1856924 - RNA, 19 nt, Artificial Sequence
  Description of Artificial Sequence: Synthetic oligonucleotide
  Antisense strand to SEQ ID NO: 1856923
cccuuccucagaauauuuc

SEQ ID NO: 1856925 - RNA, 19 nt, Artificial Sequence
  Description of Artificial Sequence: Synthetic oligonucleotide
  Sense strand starting at position 3438 of SEQ ID NO: 1564124
agaggaguuggcuaucaug

SEQ ID NO: 1856926 - RNA, 19 nt, Artificial Sequence
  Description of Artificial Sequence: Synthetic oligonucleotide
  Antisense strand to SEQ ID NO: 1856925
caugauagccaacuccucu

SEQ ID NO: 1856927 - RNA, 19 nt, Artificial Sequence
  Description of Artificial Sequence: Synthetic oligonucleotide
  Sense strand starting at position 3447 of SEQ ID NO: 1564124
ggcuaucauguauguauuu

SEQ ID NO: 1856928 - RNA, 19 nt, Artificial Sequence
  Description of Artificial Sequence: Synthetic oligonucleotide
  Antisense strand to SEQ ID NO: 1856927
aaauacauacaugauagcc

SEQ ID NO: 1856929 - RNA, 19 nt, Artificial Sequence
  Description of Artificial Sequence: Synthetic oligonucleotide
  Sense strand starting at position 3539 of SEQ ID NO: 1564124
guaggagcuuggcuaagaa

SEQ ID NO: 1856930 - RNA, 19 nt, Artificial Sequence
  Description of Artificial Sequence: Synthetic oligonucleotide
  Antisense strand to SEQ ID NO: 1856929
uucuuagccaagcuccuac

SEQ ID NO: 1856931 - RNA, 19 nt, Artificial Sequence
  Description of Artificial Sequence: Synthetic oligonucleotide
  Sense strand starting at position 3584 of SEQ ID NO: 1564124
gugggaauaaacuagcuuu

SEQ ID NO: 1856932 - RNA, 19 nt, Artificial Sequence
  Description of Artificial Sequence: Synthetic oligonucleotide
  Antisense strand to SEQ ID NO: 1856931
aaagcuaguuuauucccac

SEQ ID NO: 1856933 - RNA, 19 nt, Artificial Sequence
  Description of Artificial Sequence: Synthetic oligonucleotide
  Sense strand starting at position 3590 of SEQ ID NO: 1564124
auaaacuagcuuuagguaa

SEQ ID NO: 1856934 - RNA, 19 nt, Artificial Sequence
  Description of Artificial Sequence: Synthetic oligonucleotide
  Antisense strand to SEQ ID NO: 1856933
uuaccuaaagcuaguuuau

SEQ ID NO: 1856935 - RNA, 19 nt, Artificial Sequence
  Description of Artificial Sequence: Synthetic oligonucleotide
  Sense strand starting at position 3633 of SEQ ID NO: 1564124
guauuucccuaggacucuu

SEQ ID NO: 1856936 - RNA, 19 nt, Artificial Sequence
  Description of Artificial Sequence: Synthetic oligonucleotide
  Antisense strand to SEQ ID NO: 1856935
aagaguccuagggaaauac

SEQ ID NO: 1856937 - RNA, 19 nt, Artificial Sequence
  Description of Artificial Sequence: Synthetic oligonucleotide
  Sense strand starting at position 3645 of SEQ ID NO: 1564124
gacucuugguagccuauua

SEQ ID NO: 1856938 - RNA, 19 nt, Artificial Sequence
  Description of Artificial Sequence: Synthetic oligonucleotide
  Antisense strand to SEQ ID NO: 1856937
uaauaggcuaccaagaguc

SEQ ID NO: 1856939 - RNA, 19 nt, Artificial Sequence
  Description of Artificial Sequence: Synthetic oligonucleotide
  Sense strand starting at position 3708 of SEQ ID NO: 1564124
caguguguugcccaauuua

SEQ ID NO: 1856940 - RNA, 19 nt, Artificial Sequence
  Description of Artificial Sequence: Synthetic oligonucleotide
  Antisense strand to SEQ ID NO: 1856939
uaaauugggcaacacacug

SEQ ID NO: 1856941 - RNA, 19 nt, Artificial Sequence
  Description of Artificial Sequence: Synthetic oligonucleotide
  Sense strand starting at position 3743 of SEQ ID NO: 1564124
cggcucuagccacaauaga

SEQ ID NO: 1856942 - RNA, 19 nt, Artificial Sequence
  Description of Artificial Sequence: Synthetic oligonucleotide
  Antisense strand to SEQ ID NO: 1856941
ucuauuguggcuagagccg

SEQ ID NO: 1856943 - RNA, 19 nt, Artificial Sequence
  Description of Artificial Sequence: Synthetic oligonucleotide
  Sense strand starting at position 3775 of SEQ ID NO: 1564124
ccagaaauguucuugcuua

SEQ ID NO: 1856944 - RNA, 19 nt, Artificial Sequence
  Description of Artificial Sequence: Synthetic oligonucleotide
  Antisense strand to SEQ ID NO: 1856943
uaagcaagaacauuucugg

SEQ ID NO: 1856945 - RNA, 19 nt, Artificial Sequence
  Description of Artificial Sequence: Synthetic oligonucleotide
  Sense strand starting at position 3884 of SEQ ID NO: 1564124
uaccauaauugguugaugu

SEQ ID NO: 1856946 - RNA, 19 nt, Artificial Sequence
  Description of Artificial Sequence: Synthetic oligonucleotide
  Antisense strand to SEQ ID NO: 1856945
acaucaaccaauuauggua

SEQ ID NO: 1856947 - RNA, 19 nt, Artificial Sequence
  Description of Artificial Sequence: Synthetic oligonucleotide
  Sense strand starting at position 3885 of SEQ ID NO: 1564124
accauaauugguugauguu

SEQ ID NO: 1856948 - RNA, 19 nt, Artificial Sequence
  Description of Artificial Sequence: Synthetic oligonucleotide
  Antisense strand to SEQ ID NO: 1856947
aacaucaaccaauuauggu

SEQ ID NO: 1856949 - RNA, 19 nt, Artificial Sequence
  Description of Artificial Sequence: Synthetic oligonucleotide
  Sense strand starting at position 3886 of SEQ ID NO: 1564124
ccauaauugguugauguuu

SEQ ID NO: 1856950 - RNA, 19 nt, Artificial Sequence
  Description of Artificial Sequence: Synthetic oligonucleotide
  Antisense strand to SEQ ID NO: 1856949
aaacaucaaccaauuaugg

SEQ ID NO: 1856951 - RNA, 19 nt, Artificial Sequence
  Description of Artificial Sequence: Synthetic oligonucleotide
  Sense strand starting at position 3961 of SEQ ID NO: 1564124
ugugaauaauggucuaccu

SEQ ID NO: 1856952 - RNA, 19 nt, Artificial Sequence
  Description of Artificial Sequence: Synthetic oligonucleotide
  Antisense strand to SEQ ID NO: 1856951
agguagaccauuauucaca

SEQ ID NO: 1856953 - RNA, 19 nt, Artificial Sequence
  Description of Artificial Sequence: Synthetic oligonucleotide
  Sense strand starting at position 3971 of SEQ ID NO: 1564124
ggucuaccuucuguaucau

SEQ ID NO: 1856954 - RNA, 19 nt, Artificial Sequence
  Description of Artificial Sequence: Synthetic oligonucleotide
  Antisense strand to SEQ ID NO: 1856953
augauacagaagguagacc

SEQ ID NO: 1856955 - RNA, 19 nt, Artificial Sequence
  Description of Artificial Sequence: Synthetic oligonucleotide
  Sense strand starting at position 3977 of SEQ ID NO: 1564124
ccuucuguaucaucuauag

SEQ ID NO: 1856956 - RNA, 19 nt, Artificial Sequence
  Description of Artificial Sequence: Synthetic oligonucleotide
  Antisense strand to SEQ ID NO: 1856955
cuauagaugauacagaagg

SEQ ID NO: 1856957 - RNA, 19 nt, Artificial Sequence
  Description of Artificial Sequence: Synthetic oligonucleotide
  Sense strand starting at position 3981 of SEQ ID NO: 1564124
cuguaucaucuauaguagu

SEQ ID NO: 1856958 - RNA, 19 nt, Artificial Sequence
  Description of Artificial Sequence: Synthetic oligonucleotide
  Antisense strand to SEQ ID NO: 1856957
acuacuauagaugauacag

SEQ ID NO: 1856959 - RNA, 19 nt, Artificial Sequence
  Description of Artificial Sequence: Synthetic oligonucleotide
  Sense strand starting at position 7 of SEQ ID NO: 1564125
acaaauauguaggcaucaa

SEQ ID NO: 1856960 - RNA, 19 nt, Artificial Sequence
  Description of Artificial Sequence: Synthetic oligonucleotide
  Antisense strand to SEQ ID NO: 1856959
uugaugccuacauauuugu

SEQ ID NO: 1856961 - RNA, 19 nt, Artificial Sequence
  Description of Artificial Sequence: Synthetic oligonucleotide
  Sense strand starting at position 22 of SEQ ID NO: 1564125
ucaacucaguguuuauauu

SEQ ID NO: 1856962 - RNA, 19 nt, Artificial Sequence
  Description of Artificial Sequence: Synthetic oligonucleotide
  Antisense strand to SEQ ID NO: 1856961
aauauaaacacugaguuga

SEQ ID NO: 1856963 - RNA, 19 nt, Artificial Sequence
  Description of Artificial Sequence: Synthetic oligonucleotide
  Sense strand starting at position 168 of SEQ ID NO: 1564125
ugcccaguccagggaauaa

SEQ ID NO: 1856964 - RNA, 19 nt, Artificial Sequence
  Description of Artificial Sequence: Synthetic oligonucleotide
  Antisense strand to SEQ ID NO: 1856963
uuauucccuggacugggca

SEQ ID NO: 1856965 - RNA, 19 nt, Artificial Sequence
  Description of Artificial Sequence: Synthetic oligonucleotide
  Sense strand starting at position 225 of SEQ ID NO: 1564125
uuauauugaugcuugguau

SEQ ID NO: 1856966 - RNA, 19 nt, Artificial Sequence
  Description of Artificial Sequence: Synthetic oligonucleotide
  Antisense strand to SEQ ID NO: 1856965
auaccaagcaucaauauaa

SEQ ID NO: 1856967 - RNA, 19 nt, Artificial Sequence
  Description of Artificial Sequence: Synthetic oligonucleotide
  Sense strand starting at position 228 of SEQ ID NO: 1564125
uauugaugcuugguauuac

SEQ ID NO: 1856968 - RNA, 19 nt, Artificial Sequence
  Description of Artificial Sequence: Synthetic oligonucleotide
  Antisense strand to SEQ ID NO: 1856967
guaauaccaagcaucaaua

SEQ ID NO: 1856969 - RNA, 19 nt, Artificial Sequence
  Description of Artificial Sequence: Synthetic oligonucleotide
  Sense strand starting at position 268 of SEQ ID NO: 1564125
uugucuuacuaauccaagu

SEQ ID NO: 1856970 - RNA, 19 nt, Artificial Sequence
  Description of Artificial Sequence: Synthetic oligonucleotide
  Antisense strand to SEQ ID NO: 1856969
acuuggauuaguaagacaa

SEQ ID NO: 1856971 - RNA, 19 nt, Artificial Sequence
  Description of Artificial Sequence: Synthetic oligonucleotide
  Sense strand starting at position 353 of SEQ ID NO: 1564125
uuuagucaaccuuguaaua

SEQ ID NO: 1856972 - RNA, 19 nt, Artificial Sequence
  Description of Artificial Sequence: Synthetic oligonucleotide
  Antisense strand to SEQ ID NO: 1856971
uauuacaagguugacuaaa

SEQ ID NO: 1856973 - RNA, 19 nt, Artificial Sequence
  Description of Artificial Sequence: Synthetic oligonucleotide
  Sense strand starting at position 386 of SEQ ID NO: 1564125
agaagcaacugcuaaauuu

SEQ ID NO: 1856974 - RNA, 19 nt, Artificial Sequence
  Description of Artificial Sequence: Synthetic oligonucleotide
  Antisense strand to SEQ ID NO: 1856973
aaauuuagcaguugcuucu

SEQ ID NO: 1856975 - RNA, 19 nt, Artificial Sequence
  Description of Artificial Sequence: Synthetic oligonucleotide
  Sense strand starting at position 543 of SEQ ID NO: 1564125
cgauaugacuacucguaaa

SEQ ID NO: 1856976 - RNA, 19 nt, Artificial Sequence
  Description of Artificial Sequence: Synthetic oligonucleotide
  Antisense strand to SEQ ID NO: 1856975
uuuacgaguagucauaucg

SEQ ID NO: 1856977 - RNA, 19 nt, Artificial Sequence
  Description of Artificial Sequence: Synthetic oligonucleotide
  Sense strand starting at position 691 of SEQ ID NO: 1564125
cgaaaugugccuuauggag

SEQ ID NO: 1856978 - RNA, 19 nt, Artificial Sequence
  Description of Artificial Sequence: Synthetic oligonucleotide
  Antisense strand to SEQ ID NO: 1856977
cuccauaaggcacauuucg

SEQ ID NO: 1856979 - RNA, 19 nt, Artificial Sequence
  Description of Artificial Sequence: Synthetic oligonucleotide
  Sense strand starting at position 697 of SEQ ID NO: 1564125
gugccuuauggagauaaua

SEQ ID NO: 1856980 - RNA, 19 nt, Artificial Sequence
  Description of Artificial Sequence: Synthetic oligonucleotide
  Antisense strand to SEQ ID NO: 1856979
uauuaucuccauaaggcac

SEQ ID NO: 1856981 - RNA, 19 nt, Artificial Sequence
  Description of Artificial Sequence: Synthetic oligonucleotide
  Sense strand starting at position 724 of SEQ ID NO: 1564125
cuggauuggcuuuaauaug

SEQ ID NO: 1856982 - RNA, 19 nt, Artificial Sequence
  Description of Artificial Sequence: Synthetic oligonucleotide
  Antisense strand to SEQ ID NO: 1856981
cauauuaaagccaauccag

SEQ ID NO: 1856983 - RNA, 19 nt, Artificial Sequence
  Description of Artificial Sequence: Synthetic oligonucleotide
  Sense strand starting at position 894 of SEQ ID NO: 1564125
gccggauugagggaccauu

SEQ ID NO: 1856984 - RNA, 19 nt, Artificial Sequence
  Description of Artificial Sequence: Synthetic oligonucleotide
  Antisense strand to SEQ ID NO: 1856983
aauggucccucaauccggc

SEQ ID NO: 1856985 - RNA, 19 nt, Artificial Sequence
  Description of Artificial Sequence: Synthetic oligonucleotide
  Sense strand starting at position 969 of SEQ ID NO: 1564125
ggugcagauguuggaaauu

SEQ ID NO: 1856986 - RNA, 19 nt, Artificial Sequence
  Description of Artificial Sequence: Synthetic oligonucleotide
  Antisense strand to SEQ ID NO: 1856985
aauuuccaacaucugcacc

SEQ ID NO: 1856987 - RNA, 19 nt, Artificial Sequence
  Description of Artificial Sequence: Synthetic oligonucleotide
  Sense strand starting at position 1134 of SEQ ID NO: 1564125
cgacauugccaaugaaaga

SEQ ID NO: 1856988 - RNA, 19 nt, Artificial Sequence
  Description of Artificial Sequence: Synthetic oligonucleotide
  Antisense strand to SEQ ID NO: 1856987
ucuuucauuggcaaugucg

SEQ ID NO: 1856989 - RNA, 19 nt, Artificial Sequence
  Description of Artificial Sequence: Synthetic oligonucleotide
  Sense strand starting at position 1154 of SEQ ID NO: 1564125
agaaaugucuucccuguca

SEQ ID NO: 1856990 - RNA, 19 nt, Artificial Sequence
  Description of Artificial Sequence: Synthetic oligonucleotide
  Antisense strand to SEQ ID NO: 1856989
ugacagggaagacauuucu

SEQ ID NO: 1856991 - RNA, 19 nt, Artificial Sequence
  Description of Artificial Sequence: Synthetic oligonucleotide
  Sense strand starting at position 1610 of SEQ ID NO: 1564125
cgccgaaaggucaggguuu

SEQ ID NO: 1856992 - RNA, 19 nt, Artificial Sequence
  Description of Artificial Sequence: Synthetic oligonucleotide
  Antisense strand to SEQ ID NO: 1856991
aaacccugaccuuucggcg

SEQ ID NO: 1856993 - RNA, 19 nt, Artificial Sequence
  Description of Artificial Sequence: Synthetic oligonucleotide
  Sense strand starting at position 1788 of SEQ ID NO: 1564125
guccucuaugaccacgaua

SEQ ID NO: 1856994 - RNA, 19 nt, Artificial Sequence
  Description of Artificial Sequence: Synthetic oligonucleotide
  Antisense strand to SEQ ID NO: 1856993
uaucguggucauagaggac

SEQ ID NO: 1856995 - RNA, 19 nt, Artificial Sequence
  Description of Artificial Sequence: Synthetic oligonucleotide
  Sense strand starting at position 1790 of SEQ ID NO: 1564125
ccucuaugaccacgauagu

SEQ ID NO: 1856996 - RNA, 19 nt, Artificial Sequence
  Description of Artificial Sequence: Synthetic oligonucleotide
  Antisense strand to SEQ ID NO: 1856995
acuaucguggucauagagg

SEQ ID NO: 1856997 - RNA, 19 nt, Artificial Sequence
  Description of Artificial Sequence: Synthetic oligonucleotide
  Sense strand starting at position 2501 of SEQ ID NO: 1564125
agaagcacuccuugaaucu

SEQ ID NO: 1856998 - RNA, 19 nt, Artificial Sequence
  Description of Artificial Sequence: Synthetic oligonucleotide
  Antisense strand to SEQ ID NO: 1856997
agauucaaggagugcuucu

SEQ ID NO: 1856999 - RNA, 19 nt, Artificial Sequence
  Description of Artificial Sequence: Synthetic oligonucleotide
  Sense strand starting at position 2511 of SEQ ID NO: 1564125
cuugaaucucuugauugca

SEQ ID NO: 1857000 - RNA, 19 nt, Artificial Sequence
  Description of Artificial Sequence: Synthetic oligonucleotide
  Antisense strand to SEQ ID NO: 1856999
ugcaaucaagagauucaag

SEQ ID NO: 1857001 - RNA, 19 nt, Artificial Sequence
  Description of Artificial Sequence: Synthetic oligonucleotide
  Sense strand starting at position 2553 of SEQ ID NO: 1564125
ggcaaagucugacucucaa

SEQ ID NO: 1857002 - RNA, 19 nt, Artificial Sequence
  Description of Artificial Sequence: Synthetic oligonucleotide
  Antisense strand to SEQ ID NO: 1857001
uugagagucagacuuugcc

SEQ ID NO: 1857003 - RNA, 19 nt, Artificial Sequence
  Description of Artificial Sequence: Synthetic oligonucleotide
  Sense strand starting at position 2575 of SEQ ID NO: 1564125
uuacguauauuugcucuau

SEQ ID NO: 1857004 - RNA, 19 nt, Artificial Sequence
  Description of Artificial Sequence: Synthetic oligonucleotide
  Antisense strand to SEQ ID NO: 1857003
auagagcaaauauacguaa

SEQ ID NO: 1857005 - RNA, 19 nt, Artificial Sequence
  Description of Artificial Sequence: Synthetic oligonucleotide
  Sense strand starting at position 2708 of SEQ ID NO: 1564125
gugguaggcacucaauauu

SEQ ID NO: 1857006 - RNA, 19 nt, Artificial Sequence
  Description of Artificial Sequence: Synthetic oligonucleotide
  Antisense strand to SEQ ID NO: 1857005
aauauugagugccuaccac

SEQ ID NO: 1857007 - RNA, 19 nt, Artificial Sequence
  Description of Artificial Sequence: Synthetic oligonucleotide
  Sense strand starting at position 2733 of SEQ ID NO: 1564125
ugaaaugaauuacugugau

SEQ ID NO: 1857008 - RNA, 19 nt, Artificial Sequence
  Description of Artificial Sequence: Synthetic oligonucleotide
  Antisense strand to SEQ ID NO: 1857007
aucacaguaauucauuuca

SEQ ID NO: 1857009 - RNA, 19 nt, Artificial Sequence
  Description of Artificial Sequence: Synthetic oligonucleotide
  Sense strand starting at position 2833 of SEQ ID NO: 1564125
aucauuucgugauacagaa

SEQ ID NO: 1857010 - RNA, 19 nt, Artificial Sequence
  Description of Artificial Sequence: Synthetic oligonucleotide
  Antisense strand to SEQ ID NO: 1857009
uucuguaucacgaaaugau

SEQ ID NO: 1857011 - RNA, 19 nt, Artificial Sequence
  Description of Artificial Sequence: Synthetic oligonucleotide
  Sense strand starting at position 2848 of SEQ ID NO: 1564125
agaaucaaucaguguccau

SEQ ID NO: 1857012 - RNA, 19 nt, Artificial Sequence
  Description of Artificial Sequence: Synthetic oligonucleotide
  Antisense strand to SEQ ID NO: 1857011
auggacacugauugauucu

SEQ ID NO: 1857013 - RNA, 19 nt, Artificial Sequence
  Description of Artificial Sequence: Synthetic oligonucleotide
  Sense strand starting at position 2869 of SEQ ID NO: 1564125
gcaggugaaugguuaagga

SEQ ID NO: 1857014 - RNA, 19 nt, Artificial Sequence
  Description of Artificial Sequence: Synthetic oligonucleotide
  Antisense strand to SEQ ID NO: 1857013
uccuuaaccauucaccugc

SEQ ID NO: 1857015 - RNA, 19 nt, Artificial Sequence
  Description of Artificial Sequence: Synthetic oligonucleotide
  Sense strand starting at position 2888 of SEQ ID NO: 1564125
aaauguggucuguauacac

SEQ ID NO: 1857016 - RNA, 19 nt, Artificial Sequence
  Description of Artificial Sequence: Synthetic oligonucleotide
  Antisense strand to SEQ ID NO: 1857015
guguauacagaccacauuu

SEQ ID NO: 1857017 - RNA, 19 nt, Artificial Sequence
  Description of Artificial Sequence: Synthetic oligonucleotide
  Sense strand starting at position 3137 of SEQ ID NO: 1564125
aggucaguuaaugaguaca

SEQ ID NO: 1857018 - RNA, 19 nt, Artificial Sequence
  Description of Artificial Sequence: Synthetic oligonucleotide
  Antisense strand to SEQ ID NO: 1857017
uguacucauuaacugaccu

SEQ ID NO: 1857019 - RNA, 19 nt, Artificial Sequence
  Description of Artificial Sequence: Synthetic oligonucleotide
  Sense strand starting at position 3139 of SEQ ID NO: 1564125
gucaguuaaugaguacaaa

SEQ ID NO: 1857020 - RNA, 19 nt, Artificial Sequence
  Description of Artificial Sequence: Synthetic oligonucleotide
  Antisense strand to SEQ ID NO: 1857019
uuuguacucauuaacugac

SEQ ID NO: 1857021 - RNA, 19 nt, Artificial Sequence
  Description of Artificial Sequence: Synthetic oligonucleotide
  Sense strand starting at position 3381 of SEQ ID NO: 1564125
guugcagcuauugaaagau

SEQ ID NO: 1857022 - RNA, 19 nt, Artificial Sequence
  Description of Artificial Sequence: Synthetic oligonucleotide
  Antisense strand to SEQ ID NO: 1857021
aucuuucaauagcugcaac

SEQ ID NO: 1857023 - RNA, 19 nt, Artificial Sequence
  Description of Artificial Sequence: Synthetic oligonucleotide
  Sense strand starting at position 3499 of SEQ ID NO: 1564125
cuguauuucucauugucag

SEQ ID NO: 1857024 - RNA, 19 nt, Artificial Sequence
  Description of Artificial Sequence: Synthetic oligonucleotide
  Antisense strand to SEQ ID NO: 1857023
cugacaaugagaaauacag

SEQ ID NO: 1857025 - RNA, 19 nt, Artificial Sequence
  Description of Artificial Sequence: Synthetic oligonucleotide
  Sense strand starting at position 3500 of SEQ ID NO: 1564125
uguauuucucauugucagu

SEQ ID NO: 1857026 - RNA, 19 nt, Artificial Sequence
  Description of Artificial Sequence: Synthetic oligonucleotide
  Antisense strand to SEQ ID NO: 1857025
acugacaaugagaaauaca

SEQ ID NO: 1857027 - RNA, 19 nt, Artificial Sequence
  Description of Artificial Sequence: Synthetic oligonucleotide
  Sense strand starting at position 3510 of SEQ ID NO: 1564125
auugucaguguacauuauu

SEQ ID NO: 1857028 - RNA, 19 nt, Artificial Sequence
  Description of Artificial Sequence: Synthetic oligonucleotide
  Antisense strand to SEQ ID NO: 1857027
aauaauguacacugacaau

SEQ ID NO: 1857029 - RNA, 19 nt, Artificial Sequence
  Description of Artificial Sequence: Synthetic oligonucleotide
  Sense strand starting at position 3561 of SEQ ID NO: 1564125
gaggaaaucugggaaacac

SEQ ID NO: 1857030 - RNA, 19 nt, Artificial Sequence
  Description of Artificial Sequence: Synthetic oligonucleotide
  Antisense strand to SEQ ID NO: 1857029
guguuucccagauuuccuc

SEQ ID NO: 1857031 - RNA, 19 nt, Artificial Sequence
  Description of Artificial Sequence: Synthetic oligonucleotide
  Sense strand starting at position 3664 of SEQ ID NO: 1564125
auauuuguacguuggcaau

SEQ ID NO: 1857032 - RNA, 19 nt, Artificial Sequence
  Description of Artificial Sequence: Synthetic oligonucleotide
  Antisense strand to SEQ ID NO: 1857031
auugccaacguacaaauau

SEQ ID NO: 1857033 - RNA, 19 nt, Artificial Sequence
  Description of Artificial Sequence: Synthetic oligonucleotide
  Sense strand starting at position 3758 of SEQ ID NO: 1564125
gcuggaaaggucgaugcuu

SEQ ID NO: 1857034 - RNA, 19 nt, Artificial Sequence
  Description of Artificial Sequence: Synthetic oligonucleotide
  Antisense strand to SEQ ID NO: 1857033
aagcaucgaccuuuccagc

SEQ ID NO: 1857035 - RNA, 19 nt, Artificial Sequence
  Description of Artificial Sequence: Synthetic oligonucleotide
  Sense strand starting at position 3852 of SEQ ID NO: 1564125
augugcuauccuuauuugu

SEQ ID NO: 1857036 - RNA, 19 nt, Artificial Sequence
  Description of Artificial Sequence: Synthetic oligonucleotide
  Antisense strand to SEQ ID NO: 1857035
acaaauaaggauagcacau

SEQ ID NO: 1857037 - RNA, 19 nt, Artificial Sequence
  Description of Artificial Sequence: Synthetic oligonucleotide
  Sense strand starting at position 3854 of SEQ ID NO: 1564125
gugcuauccuuauuuguaa

SEQ ID NO: 1857038 - RNA, 19 nt, Artificial Sequence
  Description of Artificial Sequence: Synthetic oligonucleotide
  Antisense strand to SEQ ID NO: 1857037
uuacaaauaaggauagcac

SEQ ID NO: 1857039 - RNA, 19 nt, Artificial Sequence
  Description of Artificial Sequence: Synthetic oligonucleotide
  Sense strand starting at position 113 of SEQ ID NO: 1564126
caaggaaugucugcuuuag

SEQ ID NO: 1857040 - RNA, 19 nt, Artificial Sequence
  Description of Artificial Sequence: Synthetic oligonucleotide
  Antisense strand to SEQ ID NO: 1857039
cuaaagcagacauuccuug

SEQ ID NO: 1857041 - RNA, 19 nt, Artificial Sequence
  Description of Artificial Sequence: Synthetic oligonucleotide
  Sense strand starting at position 117 of SEQ ID NO: 1564126
gaaugucugcuuuagggua

SEQ ID NO: 1857042 - RNA, 19 nt, Artificial Sequence
  Description of Artificial Sequence: Synthetic oligonucleotide
  Antisense strand to SEQ ID NO: 1857041
uacccuaaagcagacauuc

SEQ ID NO: 1857043 - RNA, 19 nt, Artificial Sequence
  Description of Artificial Sequence: Synthetic oligonucleotide
  Sense strand starting at position 200 of SEQ ID NO: 1564126
guaccaagugucuacggua

SEQ ID NO: 1857044 - RNA, 19 nt, Artificial Sequence
  Description of Artificial Sequence: Synthetic oligonucleotide
  Antisense strand to SEQ ID NO: 1857043
uaccguagacacuugguac

SEQ ID NO: 1857045 - RNA, 19 nt, Artificial Sequence
  Description of Artificial Sequence: Synthetic oligonucleotide
  Sense strand starting at position 253 of SEQ ID NO: 1564126
aaaggaauggcuuguagag

SEQ ID NO: 1857046 - RNA, 19 nt, Artificial Sequence
  Description of Artificial Sequence: Synthetic oligonucleotide
  Antisense strand to SEQ ID NO: 1857045
cucuacaagccauuccuuu

SEQ ID NO: 1857047 - RNA, 19 nt, Artificial Sequence
  Description of Artificial Sequence: Synthetic oligonucleotide
  Sense strand starting at position 268 of SEQ ID NO: 1564126
agaggugggccuugaagaa

SEQ ID NO: 1857048 - RNA, 19 nt, Artificial Sequence
  Description of Artificial Sequence: Synthetic oligonucleotide
  Antisense strand to SEQ ID NO: 1857047
uucuucaaggcccaccucu

SEQ ID NO: 1857049 - RNA, 19 nt, Artificial Sequence
  Description of Artificial Sequence: Synthetic oligonucleotide
  Sense strand starting at position 568 of SEQ ID NO: 1564126
uguuaucuagcagguagau

SEQ ID NO: 1857050 - RNA, 19 nt, Artificial Sequence
  Description of Artificial Sequence: Synthetic oligonucleotide
  Antisense strand to SEQ ID NO: 1857049
aucuaccugcuagauaaca

SEQ ID NO: 1857051 - RNA, 19 nt, Artificial Sequence
  Description of Artificial Sequence: Synthetic oligonucleotide
  Sense strand starting at position 639 of SEQ ID NO: 1564126
aggauuaucucgcuggaaa

SEQ ID NO: 1857052 - RNA, 19 nt, Artificial Sequence
  Description of Artificial Sequence: Synthetic oligonucleotide
  Antisense strand to SEQ ID NO: 1857051
uuuccagcgagauaauccu

SEQ ID NO: 1857053 - RNA, 19 nt, Artificial Sequence
  Description of Artificial Sequence: Synthetic oligonucleotide
  Sense strand starting at position 640 of SEQ ID NO: 1564126
ggauuaucucgcuggaaau

SEQ ID NO: 1857054 - RNA, 19 nt, Artificial Sequence
  Description of Artificial Sequence: Synthetic oligonucleotide
  Antisense strand to SEQ ID NO: 1857053
auuuccagcgagauaaucc

SEQ ID NO: 1857055 - RNA, 19 nt, Artificial Sequence
  Description of Artificial Sequence: Synthetic oligonucleotide
  Sense strand starting at position 641 of SEQ ID NO: 1564126
gauuaucucgcuggaaaug

SEQ ID NO: 1857056 - RNA, 19 nt, Artificial Sequence
  Description of Artificial Sequence: Synthetic oligonucleotide
  Antisense strand to SEQ ID NO: 1857055
cauuuccagcgagauaauc

SEQ ID NO: 1857057 - RNA, 19 nt, Artificial Sequence
  Description of Artificial Sequence: Synthetic oligonucleotide
  Sense strand starting at position 642 of SEQ ID NO: 1564126
auuaucucgcuggaaaugu

SEQ ID NO: 1857058 - RNA, 19 nt, Artificial Sequence
  Description of Artificial Sequence: Synthetic oligonucleotide
  Antisense strand to SEQ ID NO: 1857057
acauuuccagcgagauaau

SEQ ID NO: 1857059 - RNA, 19 nt, Artificial Sequence
  Description of Artificial Sequence: Synthetic oligonucleotide
  Sense strand starting at position 683 of SEQ ID NO: 1564126
cucagucuccaggaaaggu

SEQ ID NO: 1857060 - RNA, 19 nt, Artificial Sequence
  Description of Artificial Sequence: Synthetic oligonucleotide
  Antisense strand to SEQ ID NO: 1857059
accuuuccuggagacugag

SEQ ID NO: 1857061 - RNA, 19 nt, Artificial Sequence
  Description of Artificial Sequence: Synthetic oligonucleotide
  Sense strand starting at position 692 of SEQ ID NO: 1564126
caggaaagguacucaguau

SEQ ID NO: 1857062 - RNA, 19 nt, Artificial Sequence
  Description of Artificial Sequence: Synthetic oligonucleotide
  Antisense strand to SEQ ID NO: 1857061
auacugaguaccuuuccug

SEQ ID NO: 1857063 - RNA, 19 nt, Artificial Sequence
  Description of Artificial Sequence: Synthetic oligonucleotide
  Sense strand starting at position 730 of SEQ ID NO: 1564126
agccucuuaggcuaggaua

SEQ ID NO: 1857064 - RNA, 19 nt, Artificial Sequence
  Description of Artificial Sequence: Synthetic oligonucleotide
  Antisense strand to SEQ ID NO: 1857063
uauccuagccuaagaggcu

SEQ ID NO: 1857065 - RNA, 19 nt, Artificial Sequence
  Description of Artificial Sequence: Synthetic oligonucleotide
  Sense strand starting at position 814 of SEQ ID NO: 1564126
agaggaauccacgguguau

SEQ ID NO: 1857066 - RNA, 19 nt, Artificial Sequence
  Description of Artificial Sequence: Synthetic oligonucleotide
  Antisense strand to SEQ ID NO: 1857065
auacaccguggauuccucu

SEQ ID NO: 1857067 - RNA, 19 nt, Artificial Sequence
  Description of Artificial Sequence: Synthetic oligonucleotide
  Sense strand starting at position 831 of SEQ ID NO: 1564126
aucguuuagaguugggaag

SEQ ID NO: 1857068 - RNA, 19 nt, Artificial Sequence
  Description of Artificial Sequence: Synthetic oligonucleotide
  Antisense strand to SEQ ID NO: 1857067
cuucccaacucuaaacgau

SEQ ID NO: 1857069 - RNA, 19 nt, Artificial Sequence
  Description of Artificial Sequence: Synthetic oligonucleotide
  Sense strand starting at position 832 of SEQ ID NO: 1564126
ucguuuagaguugggaaga

SEQ ID NO: 1857070 - RNA, 19 nt, Artificial Sequence
  Description of Artificial Sequence: Synthetic oligonucleotide
  Antisense strand to SEQ ID NO: 1857069
ucuucccaacucuaaacga

SEQ ID NO: 1857071 - RNA, 19 nt, Artificial Sequence
  Description of Artificial Sequence: Synthetic oligonucleotide
  Sense strand starting at position 919 of SEQ ID NO: 1564126
cugucucauuuccuguaua

SEQ ID NO: 1857072 - RNA, 19 nt, Artificial Sequence
  Description of Artificial Sequence: Synthetic oligonucleotide
  Antisense strand to SEQ ID NO: 1857071
uauacaggaaaugagacag

SEQ ID NO: 1857073 - RNA, 19 nt, Artificial Sequence
  Description of Artificial Sequence: Synthetic oligonucleotide
  Sense strand starting at position 993 of SEQ ID NO: 1564126
gaauauaaguucccuguga

SEQ ID NO: 1857074 - RNA, 19 nt, Artificial Sequence
  Description of Artificial Sequence: Synthetic oligonucleotide
  Antisense strand to SEQ ID NO: 1857073
ucacagggaacuuauauuc

SEQ ID NO: 1857075 - RNA, 19 nt, Artificial Sequence
  Description of Artificial Sequence: Synthetic oligonucleotide
  Sense strand starting at position 994 of SEQ ID NO: 1564126
aauauaaguucccugugag

SEQ ID NO: 1857076 - RNA, 19 nt, Artificial Sequence
  Description of Artificial Sequence: Synthetic oligonucleotide
  Antisense strand to SEQ ID NO: 1857075
cucacagggaacuuauauu

SEQ ID NO: 1857077 - RNA, 19 nt, Artificial Sequence
  Description of Artificial Sequence: Synthetic oligonucleotide
  Sense strand starting at position 1009 of SEQ ID NO: 1564126
ugagcauggaguugguuua

SEQ ID NO: 1857078 - RNA, 19 nt, Artificial Sequence
  Description of Artificial Sequence: Synthetic oligonucleotide
  Antisense strand to SEQ ID NO: 1857077
uaaaccaacuccaugcuca

SEQ ID NO: 1857079 - RNA, 19 nt, Artificial Sequence
  Description of Artificial Sequence: Synthetic oligonucleotide
  Sense strand starting at position 1010 of SEQ ID NO: 1564126
gagcauggaguugguuuau

SEQ ID NO: 1857080 - RNA, 19 nt, Artificial Sequence
  Description of Artificial Sequence: Synthetic oligonucleotide
  Antisense strand to SEQ ID NO: 1857079
auaaaccaacuccaugcuc

SEQ ID NO: 1857081 - RNA, 19 nt, Artificial Sequence
  Description of Artificial Sequence: Synthetic oligonucleotide
  Sense strand starting at position 1016 of SEQ ID NO: 1564126
ggaguugguuuauucuauu

SEQ ID NO: 1857082 - RNA, 19 nt, Artificial Sequence
  Description of Artificial Sequence: Synthetic oligonucleotide
  Antisense strand to SEQ ID NO: 1857081
aauagaauaaaccaacucc

SEQ ID NO: 1857083 - RNA, 19 nt, Artificial Sequence
  Description of Artificial Sequence: Synthetic oligonucleotide
  Sense strand starting at position 1158 of SEQ ID NO: 1564126
ggcaacuaccucugacaua

SEQ ID NO: 1857084 - RNA, 19 nt, Artificial Sequence
  Description of Artificial Sequence: Synthetic oligonucleotide
  Antisense strand to SEQ ID NO: 1857083
uaugucagagguaguugcc

SEQ ID NO: 1857085 - RNA, 19 nt, Artificial Sequence
  Description of Artificial Sequence: Synthetic oligonucleotide
  Sense strand starting at position 1271 of SEQ ID NO: 1564126
ggaguuggaguguaccaau

SEQ ID NO: 1857086 - RNA, 19 nt, Artificial Sequence
  Description of Artificial Sequence: Synthetic oligonucleotide
  Antisense strand to SEQ ID NO: 1857085
auugguacacuccaacucc

SEQ ID NO: 1857087 - RNA, 19 nt, Artificial Sequence
  Description of Artificial Sequence: Synthetic oligonucleotide
  Sense strand starting at position 1767 of SEQ ID NO: 1564126
agccauuggguccaaugau

SEQ ID NO: 1857088 - RNA, 19 nt, Artificial Sequence
  Description of Artificial Sequence: Synthetic oligonucleotide
  Antisense strand to SEQ ID NO: 1857087
aucauuggacccaauggcu

SEQ ID NO: 1857089 - RNA, 19 nt, Artificial Sequence
  Description of Artificial Sequence: Synthetic oligonucleotide
  Sense strand starting at position 1797 of SEQ ID NO: 1564126
ucugaaaugguccgauaau

SEQ ID NO: 1857090 - RNA, 19 nt, Artificial Sequence
  Description of Artificial Sequence: Synthetic oligonucleotide
  Antisense strand to SEQ ID NO: 1857089
auuaucggaccauuucaga

SEQ ID NO: 1857091 - RNA, 19 nt, Artificial Sequence
  Description of Artificial Sequence: Synthetic oligonucleotide
  Sense strand starting at position 1809 of SEQ ID NO: 1564126
cgauaaucugucgacccuu

SEQ ID NO: 1857092 - RNA, 19 nt, Artificial Sequence
  Description of Artificial Sequence: Synthetic oligonucleotide
  Antisense strand to SEQ ID NO: 1857091
aagggucgacagauuaucg

SEQ ID NO: 1857093 - RNA, 19 nt, Artificial Sequence
  Description of Artificial Sequence: Synthetic oligonucleotide
  Sense strand starting at position 1971 of SEQ ID NO: 1564126
ggcaaaugucgcgagaaua

SEQ ID NO: 1857094 - RNA, 19 nt, Artificial Sequence
  Description of Artificial Sequence: Synthetic oligonucleotide
  Antisense strand to SEQ ID NO: 1857093
uauucucgcgacauuugcc

SEQ ID NO: 1857095 - RNA, 19 nt, Artificial Sequence
  Description of Artificial Sequence: Synthetic oligonucleotide
  Sense strand starting at position 1984 of SEQ ID NO: 1564126
agaauacguccaggccuaa

SEQ ID NO: 1857096 - RNA, 19 nt, Artificial Sequence
  Description of Artificial Sequence: Synthetic oligonucleotide
  Antisense strand to SEQ ID NO: 1857095
uuaggccuggacguauucu

SEQ ID NO: 1857097 - RNA, 19 nt, Artificial Sequence
  Description of Artificial Sequence: Synthetic oligonucleotide
  Sense strand starting at position 2403 of SEQ ID NO: 1564126
aguguuaggugagcucaga

SEQ ID NO: 1857098 - RNA, 19 nt, Artificial Sequence
  Description of Artificial Sequence: Synthetic oligonucleotide
  Antisense strand to SEQ ID NO: 1857097
ucugagcucaccuaacacu

SEQ ID NO: 1857099 - RNA, 19 nt, Artificial Sequence
  Description of Artificial Sequence: Synthetic oligonucleotide
  Sense strand starting at position 2527 of SEQ ID NO: 1564126
aaggcuacggccugagaua

SEQ ID NO: 1857100 - RNA, 19 nt, Artificial Sequence
  Description of Artificial Sequence: Synthetic oligonucleotide
  Antisense strand to SEQ ID NO: 1857099
uaucucaggccguagccuu

SEQ ID NO: 1857101 - RNA, 19 nt, Artificial Sequence
  Description of Artificial Sequence: Synthetic oligonucleotide
  Sense strand starting at position 2571 of SEQ ID NO: 1564126
uguuguaccaagcagaguu

SEQ ID NO: 1857102 - RNA, 19 nt, Artificial Sequence
  Description of Artificial Sequence: Synthetic oligonucleotide
  Antisense strand to SEQ ID NO: 1857101
aacucugcuugguacaaca

SEQ ID NO: 1857103 - RNA, 19 nt, Artificial Sequence
  Description of Artificial Sequence: Synthetic oligonucleotide
  Sense strand starting at position 2842 of SEQ ID NO: 1564126
uuagcaauccaagaagcuu

SEQ ID NO: 1857104 - RNA, 19 nt, Artificial Sequence
  Description of Artificial Sequence: Synthetic oligonucleotide
  Antisense strand to SEQ ID NO: 1857103
aagcuucuuggauugcuaa

SEQ ID NO: 1857105 - RNA, 19 nt, Artificial Sequence
  Description of Artificial Sequence: Synthetic oligonucleotide
  Sense strand starting at position 2898 of SEQ ID NO: 1564126
acuguaauggcaggugaaa

SEQ ID NO: 1857106 - RNA, 19 nt, Artificial Sequence
  Description of Artificial Sequence: Synthetic oligonucleotide
  Antisense strand to SEQ ID NO: 1857105
uuucaccugccauuacagu

SEQ ID NO: 1857107 - RNA, 19 nt, Artificial Sequence
  Description of Artificial Sequence: Synthetic oligonucleotide
  Sense strand starting at position 2960 of SEQ ID NO: 1564126
ggaucuggugguugccaua

SEQ ID NO: 1857108 - RNA, 19 nt, Artificial Sequence
  Description of Artificial Sequence: Synthetic oligonucleotide
  Antisense strand to SEQ ID NO: 1857107
uauggcaaccaccagaucc

SEQ ID NO: 1857109 - RNA, 19 nt, Artificial Sequence
  Description of Artificial Sequence: Synthetic oligonucleotide
  Sense strand starting at position 3360 of SEQ ID NO: 1564126
ggaggaagcuugguagaug

SEQ ID NO: 1857110 - RNA, 19 nt, Artificial Sequence
  Description of Artificial Sequence: Synthetic oligonucleotide
  Antisense strand to SEQ ID NO: 1857109
caucuaccaagcuuccucc

SEQ ID NO: 1857111 - RNA, 19 nt, Artificial Sequence
  Description of Artificial Sequence: Synthetic oligonucleotide
  Sense strand starting at position 3390 of SEQ ID NO: 1564126
gggagccauaaaugaaguu

SEQ ID NO: 1857112 - RNA, 19 nt, Artificial Sequence
  Description of Artificial Sequence: Synthetic oligonucleotide
  Antisense strand to SEQ ID NO: 1857111
aacuucauuuauggcuccc

SEQ ID NO: 1857113 - RNA, 19 nt, Artificial Sequence
  Description of Artificial Sequence: Synthetic oligonucleotide
  Sense strand starting at position 3402 of SEQ ID NO: 1564126
ugaaguucagcugggagaa

SEQ ID NO: 1857114 - RNA, 19 nt, Artificial Sequence
  Description of Artificial Sequence: Synthetic oligonucleotide
  Antisense strand to SEQ ID NO: 1857113
uucucccagcugaacuuca

SEQ ID NO: 1857115 - RNA, 19 nt, Artificial Sequence
  Description of Artificial Sequence: Synthetic oligonucleotide
  Sense strand starting at position 3477 of SEQ ID NO: 1564126
gggaaauacuguucccuuu

SEQ ID NO: 1857116 - RNA, 19 nt, Artificial Sequence
  Description of Artificial Sequence: Synthetic oligonucleotide
  Antisense strand to SEQ ID NO: 1857115
aaagggaacaguauuuccc

SEQ ID NO: 1857117 - RNA, 19 nt, Artificial Sequence
  Description of Artificial Sequence: Synthetic oligonucleotide
  Sense strand starting at position 3508 of SEQ ID NO: 1564126
uggugagccuggguaacau

SEQ ID NO: 1857118 - RNA, 19 nt, Artificial Sequence
  Description of Artificial Sequence: Synthetic oligonucleotide
  Antisense strand to SEQ ID NO: 1857117
auguuacccaggcucacca

SEQ ID NO: 1857119 - RNA, 19 nt, Artificial Sequence
  Description of Artificial Sequence: Synthetic oligonucleotide
  Sense strand starting at position 318 of SEQ ID NO: 1564127
aggaaaucauaguuugugu

SEQ ID NO: 1857120 - RNA, 19 nt, Artificial Sequence
  Description of Artificial Sequence: Synthetic oligonucleotide
  Antisense strand to SEQ ID NO: 1857119
acacaaacuaugauuuccu

SEQ ID NO: 1857121 - RNA, 19 nt, Artificial Sequence
  Description of Artificial Sequence: Synthetic oligonucleotide
  Sense strand starting at position 320 of SEQ ID NO: 1564127
gaaaucauaguuuguguga

SEQ ID NO: 1857122 - RNA, 19 nt, Artificial Sequence
  Description of Artificial Sequence: Synthetic oligonucleotide
  Antisense strand to SEQ ID NO: 1857121
ucacacaaacuaugauuuc

SEQ ID NO: 1857123 - RNA, 19 nt, Artificial Sequence
  Description of Artificial Sequence: Synthetic oligonucleotide
  Sense strand starting at position 321 of SEQ ID NO: 1564127
aaaucauaguuugugugau

SEQ ID NO: 1857124 - RNA, 19 nt, Artificial Sequence
  Description of Artificial Sequence: Synthetic oligonucleotide
  Antisense strand to SEQ ID NO: 1857123
aucacacaaacuaugauuu

SEQ ID NO: 1857125 - RNA, 19 nt, Artificial Sequence
  Description of Artificial Sequence: Synthetic oligonucleotide
  Sense strand starting at position 323 of SEQ ID NO: 1564127
aucauaguuugugugauca

SEQ ID NO: 1857126 - RNA, 19 nt, Artificial Sequence
  Description of Artificial Sequence: Synthetic oligonucleotide
  Antisense strand to SEQ ID NO: 1857125
ugaucacacaaacuaugau

SEQ ID NO: 1857127 - RNA, 19 nt, Artificial Sequence
  Description of Artificial Sequence: Synthetic oligonucleotide
  Sense strand starting at position 327 of SEQ ID NO: 1564127
uaguuugugugaucaccca

SEQ ID NO: 1857128 - RNA, 19 nt, Artificial Sequence
  Description of Artificial Sequence: Synthetic oligonucleotide
  Antisense strand to SEQ ID NO: 1857127
ugggugaucacacaaacua

SEQ ID NO: 1857129 - RNA, 19 nt, Artificial Sequence
  Description of Artificial Sequence: Synthetic oligonucleotide
  Sense strand starting at position 2030 of SEQ ID NO: 1564127
guggccuagagucaguuua

SEQ ID NO: 1857130 - RNA, 19 nt, Artificial Sequence
  Description of Artificial Sequence: Synthetic oligonucleotide
  Antisense strand to SEQ ID NO: 1857129
uaaacugacucuaggccac

SEQ ID NO: 1857131 - RNA, 19 nt, Artificial Sequence
  Description of Artificial Sequence: Synthetic oligonucleotide
  Sense strand starting at position 2038 of SEQ ID NO: 1564127
gagucaguuuagccuaacu

SEQ ID NO: 1857132 - RNA, 19 nt, Artificial Sequence
  Description of Artificial Sequence: Synthetic oligonucleotide
  Antisense strand to SEQ ID NO: 1857131
aguuaggcuaaacugacuc

SEQ ID NO: 1857133 - RNA, 19 nt, Artificial Sequence
  Description of Artificial Sequence: Synthetic oligonucleotide
  Sense strand starting at position 2040 of SEQ ID NO: 1564127
gucaguuuagccuaacugu

SEQ ID NO: 1857134 - RNA, 19 nt, Artificial Sequence
  Description of Artificial Sequence: Synthetic oligonucleotide
  Antisense strand to SEQ ID NO: 1857133
acaguuaggcuaaacugac

SEQ ID NO: 1857135 - RNA, 19 nt, Artificial Sequence
  Description of Artificial Sequence: Synthetic oligonucleotide
  Sense strand starting at position 2242 of SEQ ID NO: 1564127
gcaugaucuugagcaacuc

SEQ ID NO: 1857136 - RNA, 19 nt, Artificial Sequence
  Description of Artificial Sequence: Synthetic oligonucleotide
  Antisense strand to SEQ ID NO: 1857135
gaguugcucaagaucaugc

SEQ ID NO: 1857137 - RNA, 19 nt, Artificial Sequence
  Description of Artificial Sequence: Synthetic oligonucleotide
  Sense strand starting at position 2285 of SEQ ID NO: 1564127
gucucaucccuuuaggaac

SEQ ID NO: 1857138 - RNA, 19 nt, Artificial Sequence
  Description of Artificial Sequence: Synthetic oligonucleotide
  Antisense strand to SEQ ID NO: 1857137
guuccuaaagggaugagac

SEQ ID NO: 1857139 - RNA, 19 nt, Artificial Sequence
  Description of Artificial Sequence: Synthetic oligonucleotide
  Sense strand starting at position 2315 of SEQ ID NO: 1564127
cucaacucuugagcuagua

SEQ ID NO: 1857140 - RNA, 19 nt, Artificial Sequence
  Description of Artificial Sequence: Synthetic oligonucleotide
  Antisense strand to SEQ ID NO: 1857139
uacuagcucaagaguugag

SEQ ID NO: 1857141 - RNA, 19 nt, Artificial Sequence
  Description of Artificial Sequence: Synthetic oligonucleotide
  Sense strand starting at position 2376 of SEQ ID NO: 1564127
ugcauucugcuugaauaau

SEQ ID NO: 1857142 - RNA, 19 nt, Artificial Sequence
  Description of Artificial Sequence: Synthetic oligonucleotide
  Antisense strand to SEQ ID NO: 1857141
auuauucaagcagaaugca

SEQ ID NO: 1857143 - RNA, 19 nt, Artificial Sequence
  Description of Artificial Sequence: Synthetic oligonucleotide
  Sense strand starting at position 2430 of SEQ ID NO: 1564127
guauucuucugauuggaaa

SEQ ID NO: 1857144 - RNA, 19 nt, Artificial Sequence
  Description of Artificial Sequence: Synthetic oligonucleotide
  Antisense strand to SEQ ID NO: 1857143
uuuccaaucagaagaauac

SEQ ID NO: 1857145 - RNA, 19 nt, Artificial Sequence
  Description of Artificial Sequence: Synthetic oligonucleotide
  Sense strand starting at position 2507 of SEQ ID NO: 1564127
gcaaauucccugcauagcu

SEQ ID NO: 1857146 - RNA, 19 nt, Artificial Sequence
  Description of Artificial Sequence: Synthetic oligonucleotide
  Antisense strand to SEQ ID NO: 1857145
agcuaugcagggaauuugc

SEQ ID NO: 1857147 - RNA, 19 nt, Artificial Sequence
  Description of Artificial Sequence: Synthetic oligonucleotide
  Sense strand starting at position 2581 of SEQ ID NO: 1564127
ucccgacuuuauguauuga

SEQ ID NO: 1857148 - RNA, 19 nt, Artificial Sequence
  Description of Artificial Sequence: Synthetic oligonucleotide
  Antisense strand to SEQ ID NO: 1857147
ucaauacauaaagucggga

SEQ ID NO: 1857149 - RNA, 19 nt, Artificial Sequence
  Description of Artificial Sequence: Synthetic oligonucleotide
  Sense strand starting at position 2652 of SEQ ID NO: 1564127
acugaauagugaucuaugu

SEQ ID NO: 1857150 - RNA, 19 nt, Artificial Sequence
  Description of Artificial Sequence: Synthetic oligonucleotide
  Antisense strand to SEQ ID NO: 1857149
acauagaucacuauucagu

SEQ ID NO: 1857151 - RNA, 19 nt, Artificial Sequence
  Description of Artificial Sequence: Synthetic oligonucleotide
  Sense strand starting at position 2668 of SEQ ID NO: 1564127
uguacauguugacuaauag

SEQ ID NO: 1857152 - RNA, 19 nt, Artificial Sequence
  Description of Artificial Sequence: Synthetic oligonucleotide
  Antisense strand to SEQ ID NO: 1857151
cuauuagucaacauguaca

SEQ ID NO: 1857153 - RNA, 19 nt, Artificial Sequence
  Description of Artificial Sequence: Synthetic oligonucleotide
  Sense strand starting at position 2669 of SEQ ID NO: 1564127
guacauguugacuaauagu

SEQ ID NO: 1857154 - RNA, 19 nt, Artificial Sequence
  Description of Artificial Sequence: Synthetic oligonucleotide
  Antisense strand to SEQ ID NO: 1857153
acuauuagucaacauguac

SEQ ID NO: 1857155 - RNA, 19 nt, Artificial Sequence
  Description of Artificial Sequence: Synthetic oligonucleotide
  Sense strand starting at position 2678 of SEQ ID NO: 1564127
gacuaauaguggucaauaa

SEQ ID NO: 1857156 - RNA, 19 nt, Artificial Sequence
  Description of Artificial Sequence: Synthetic oligonucleotide
  Antisense strand to SEQ ID NO: 1857155
uuauugaccacuauuaguc

SEQ ID NO: 1857157 - RNA, 19 nt, Artificial Sequence
  Description of Artificial Sequence: Synthetic oligonucleotide
  Sense strand starting at position 2722 of SEQ ID NO: 1564127
ggacauucugaauguuucu

SEQ ID NO: 1857158 - RNA, 19 nt, Artificial Sequence
  Description of Artificial Sequence: Synthetic oligonucleotide
  Antisense strand to SEQ ID NO: 1857157
agaaacauucagaaugucc

SEQ ID NO: 1857159 - RNA, 19 nt, Artificial Sequence
  Description of Artificial Sequence: Synthetic oligonucleotide
  Sense strand starting at position 2727 of SEQ ID NO: 1564127
uucugaauguuucuaguuu

SEQ ID NO: 1857160 - RNA, 19 nt, Artificial Sequence
  Description of Artificial Sequence: Synthetic oligonucleotide
  Antisense strand to SEQ ID NO: 1857159
aaacuagaaacauucagaa

SEQ ID NO: 1857161 - RNA, 19 nt, Artificial Sequence
  Description of Artificial Sequence: Synthetic oligonucleotide
  Sense strand starting at position 2768 of SEQ ID NO: 1564127
agugaacaucacuguacau

SEQ ID NO: 1857162 - RNA, 19 nt, Artificial Sequence
  Description of Artificial Sequence: Synthetic oligonucleotide
  Antisense strand to SEQ ID NO: 1857161
auguacagugauguucacu

SEQ ID NO: 1857163 - RNA, 19 nt, Artificial Sequence
  Description of Artificial Sequence: Synthetic oligonucleotide
  Sense strand starting at position 2799 of SEQ ID NO: 1564127
guggcagaacaguaggaau

SEQ ID NO: 1857164 - RNA, 19 nt, Artificial Sequence
  Description of Artificial Sequence: Synthetic oligonucleotide
  Antisense strand to SEQ ID NO: 1857163
auuccuacuguucugccac

SEQ ID NO: 1857165 - RNA, 19 nt, Artificial Sequence
  Description of Artificial Sequence: Synthetic oligonucleotide
  Sense strand starting at position 2919 of SEQ ID NO: 1564127
uuuagagaucagggcucua

SEQ ID NO: 1857166 - RNA, 19 nt, Artificial Sequence
  Description of Artificial Sequence: Synthetic oligonucleotide
  Antisense strand to SEQ ID NO: 1857165
uagagcccugaucucuaaa

SEQ ID NO: 1857167 - RNA, 19 nt, Artificial Sequence
  Description of Artificial Sequence: Synthetic oligonucleotide
  Sense strand starting at position 2924 of SEQ ID NO: 1564127
agaucagggcucuauguua

SEQ ID NO: 1857168 - RNA, 19 nt, Artificial Sequence
  Description of Artificial Sequence: Synthetic oligonucleotide
  Antisense strand to SEQ ID NO: 1857167
uaacauagagcccugaucu

SEQ ID NO: 1857169 - RNA, 19 nt, Artificial Sequence
  Description of Artificial Sequence: Synthetic oligonucleotide
  Sense strand starting at position 2935 of SEQ ID NO: 1564127
cuauguuaccuugaguguu

SEQ ID NO: 1857170 - RNA, 19 nt, Artificial Sequence
  Description of Artificial Sequence: Synthetic oligonucleotide
  Antisense strand to SEQ ID NO: 1857169
aacacucaagguaacauag

SEQ ID NO: 1857171 - RNA, 19 nt, Artificial Sequence
  Description of Artificial Sequence: Synthetic oligonucleotide
  Sense strand starting at position 2937 of SEQ ID NO: 1564127
auguuaccuugaguguuaa

SEQ ID NO: 1857172 - RNA, 19 nt, Artificial Sequence
  Description of Artificial Sequence: Synthetic oligonucleotide
  Antisense strand to SEQ ID NO: 1857171
uuaacacucaagguaacau

SEQ ID NO: 1857173 - RNA, 19 nt, Artificial Sequence
  Description of Artificial Sequence: Synthetic oligonucleotide
  Sense strand starting at position 2938 of SEQ ID NO: 1564127
uguuaccuugaguguuaac

SEQ ID NO: 1857174 - RNA, 19 nt, Artificial Sequence
  Description of Artificial Sequence: Synthetic oligonucleotide
  Antisense strand to SEQ ID NO: 1857173
guuaacacucaagguaaca

SEQ ID NO: 1857175 - RNA, 19 nt, Artificial Sequence
  Description of Artificial Sequence: Synthetic oligonucleotide
  Sense strand starting at position 3022 of SEQ ID NO: 1564127
auuuaauugucagugcagu

SEQ ID NO: 1857176 - RNA, 19 nt, Artificial Sequence
  Description of Artificial Sequence: Synthetic oligonucleotide
  Antisense strand to SEQ ID NO: 1857175
acugcacugacaauuaaau

SEQ ID NO: 1857177 - RNA, 19 nt, Artificial Sequence
  Description of Artificial Sequence: Synthetic oligonucleotide
  Sense strand starting at position 3196 of SEQ ID NO: 1564127
guuugcguauauuuauaag

SEQ ID NO: 1857178 - RNA, 19 nt, Artificial Sequence
  Description of Artificial Sequence: Synthetic oligonucleotide
  Antisense strand to SEQ ID NO: 1857177
cuuauaaauauacgcaaac

SEQ ID NO: 1857179 - RNA, 19 nt, Artificial Sequence
  Description of Artificial Sequence: Synthetic oligonucleotide
  Sense strand starting at position 3221 of SEQ ID NO: 1564127
cauguauacgcacauagau

SEQ ID NO: 1857180 - RNA, 19 nt, Artificial Sequence
  Description of Artificial Sequence: Synthetic oligonucleotide
  Antisense strand to SEQ ID NO: 1857179
aucuaugugcguauacaug

SEQ ID NO: 1857181 - RNA, 19 nt, Artificial Sequence
  Description of Artificial Sequence: Synthetic oligonucleotide
  Sense strand starting at position 3682 of SEQ ID NO: 1564127
guguguuauuccuuaugga

SEQ ID NO: 1857182 - RNA, 19 nt, Artificial Sequence
  Description of Artificial Sequence: Synthetic oligonucleotide
  Antisense strand to SEQ ID NO: 1857181
uccauaaggaauaacacac

SEQ ID NO: 1857183 - RNA, 19 nt, Artificial Sequence
  Description of Artificial Sequence: Synthetic oligonucleotide
  Sense strand starting at position 3683 of SEQ ID NO: 1564127
uguguuauuccuuauggau

SEQ ID NO: 1857184 - RNA, 19 nt, Artificial Sequence
  Description of Artificial Sequence: Synthetic oligonucleotide
  Antisense strand to SEQ ID NO: 1857183
auccauaaggaauaacaca

SEQ ID NO: 1857185 - RNA, 19 nt, Artificial Sequence
  Description of Artificial Sequence: Synthetic oligonucleotide
  Sense strand starting at position 3764 of SEQ ID NO: 1564127
auaagcaaugcugagauua

SEQ ID NO: 1857186 - RNA, 19 nt, Artificial Sequence
  Description of Artificial Sequence: Synthetic oligonucleotide
  Antisense strand to SEQ ID NO: 1857185
uaaucucagcauugcuuau

SEQ ID NO: 1857187 - RNA, 19 nt, Artificial Sequence
  Description of Artificial Sequence: Synthetic oligonucleotide
  Sense strand starting at position 3790 of SEQ ID NO: 1564127
gcaugcacaucauuguaca

SEQ ID NO: 1857188 - RNA, 19 nt, Artificial Sequence
  Description of Artificial Sequence: Synthetic oligonucleotide
  Antisense strand to SEQ ID NO: 1857187
uguacaaugaugugcaugc

SEQ ID NO: 1857189 - RNA, 19 nt, Artificial Sequence
  Description of Artificial Sequence: Synthetic oligonucleotide
  Sense strand starting at position 3802 of SEQ ID NO: 1564127
uuguacaccuuucugauau

SEQ ID NO: 1857190 - RNA, 19 nt, Artificial Sequence
  Description of Artificial Sequence: Synthetic oligonucleotide
  Antisense strand to SEQ ID NO: 1857189
auaucagaaagguguacaa

SEQ ID NO: 1857191 - RNA, 19 nt, Artificial Sequence
  Description of Artificial Sequence: Synthetic oligonucleotide
  Sense strand starting at position 3804 of SEQ ID NO: 1564127
guacaccuuucugauauuu

SEQ ID NO: 1857192 - RNA, 19 nt, Artificial Sequence
  Description of Artificial Sequence: Synthetic oligonucleotide
  Antisense strand to SEQ ID NO: 1857191
aaauaucagaaagguguac

SEQ ID NO: 1857193 - RNA, 19 nt, Artificial Sequence
  Description of Artificial Sequence: Synthetic oligonucleotide
  Sense strand starting at position 3844 of SEQ ID NO: 1564127
guggaauucuuagcucaaa

SEQ ID NO: 1857194 - RNA, 19 nt, Artificial Sequence
  Description of Artificial Sequence: Synthetic oligonucleotide
  Antisense strand to SEQ ID NO: 1857193
uuugagcuaagaauuccac

SEQ ID NO: 1857195 - RNA, 19 nt, Artificial Sequence
  Description of Artificial Sequence: Synthetic oligonucleotide
  Sense strand starting at position 3845 of SEQ ID NO: 1564127
uggaauucuuagcucaaag

SEQ ID NO: 1857196 - RNA, 19 nt, Artificial Sequence
  Description of Artificial Sequence: Synthetic oligonucleotide
  Antisense strand to SEQ ID NO: 1857195
cuuugagcuaagaauucca

SEQ ID NO: 1857197 - RNA, 19 nt, Artificial Sequence
  Description of Artificial Sequence: Synthetic oligonucleotide
  Sense strand starting at position 3883 of SEQ ID NO: 1564127
ugauacguauugucaaacu

SEQ ID NO: 1857198 - RNA, 19 nt, Artificial Sequence
  Description of Artificial Sequence: Synthetic oligonucleotide
  Antisense strand to SEQ ID NO: 1857197
aguuugacaauacguauca

SEQ ID NO: 1857199 - RNA, 19 nt, Artificial Sequence
  Description of Artificial Sequence: Synthetic oligonucleotide
  Sense strand starting at position 136 of SEQ ID NO: 1564128
auaaacaucuguguugaua

SEQ ID NO: 1857200 - RNA, 19 nt, Artificial Sequence
  Description of Artificial Sequence: Synthetic oligonucleotide
  Antisense strand to SEQ ID NO: 1857199
uaucaacacagauguuuau

SEQ ID NO: 1857201 - RNA, 19 nt, Artificial Sequence
  Description of Artificial Sequence: Synthetic oligonucleotide
  Sense strand starting at position 182 of SEQ ID NO: 1564128
uccucuuaggcuugaauaa

SEQ ID NO: 1857202 - RNA, 19 nt, Artificial Sequence
  Description of Artificial Sequence: Synthetic oligonucleotide
  Antisense strand to SEQ ID NO: 1857201
uuauucaagccuaagagga

SEQ ID NO: 1857203 - RNA, 19 nt, Artificial Sequence
  Description of Artificial Sequence: Synthetic oligonucleotide
  Sense strand starting at position 183 of SEQ ID NO: 1564128
ccucuuaggcuugaauaau

SEQ ID NO: 1857204 - RNA, 19 nt, Artificial Sequence
  Description of Artificial Sequence: Synthetic oligonucleotide
  Antisense strand to SEQ ID NO: 1857203
auuauucaagccuaagagg

SEQ ID NO: 1857205 - RNA, 19 nt, Artificial Sequence
  Description of Artificial Sequence: Synthetic oligonucleotide
  Sense strand starting at position 421 of SEQ ID NO: 1564128
aaauucuauguguggauau

SEQ ID NO: 1857206 - RNA, 19 nt, Artificial Sequence
  Description of Artificial Sequence: Synthetic oligonucleotide
  Antisense strand to SEQ ID NO: 1857205
auauccacacauagaauuu

SEQ ID NO: 1857207 - RNA, 19 nt, Artificial Sequence
  Description of Artificial Sequence: Synthetic oligonucleotide
  Sense strand starting at position 602 of SEQ ID NO: 1564128
cagcauauacgacagacau

SEQ ID NO: 1857208 - RNA, 19 nt, Artificial Sequence
  Description of Artificial Sequence: Synthetic oligonucleotide
  Antisense strand to SEQ ID NO: 1857207
augucugucguauaugcug

SEQ ID NO: 1857209 - RNA, 19 nt, Artificial Sequence
  Description of Artificial Sequence: Synthetic oligonucleotide
  Sense strand starting at position 630 of SEQ ID NO: 1564128
auuguuaacguacaaagaa

SEQ ID NO: 1857210 - RNA, 19 nt, Artificial Sequence
  Description of Artificial Sequence: Synthetic oligonucleotide
  Antisense strand to SEQ ID NO: 1857209
uucuuuguacguuaacaau

SEQ ID NO: 1857211 - RNA, 19 nt, Artificial Sequence
  Description of Artificial Sequence: Synthetic oligonucleotide
  Sense strand starting at position 1097 of SEQ ID NO: 1564128
aggauacugucucuacaaa

SEQ ID NO: 1857212 - RNA, 19 nt, Artificial Sequence
  Description of Artificial Sequence: Synthetic oligonucleotide
  Antisense strand to SEQ ID NO: 1857211
uuuguagagacaguauccu

SEQ ID NO: 1857213 - RNA, 19 nt, Artificial Sequence
  Description of Artificial Sequence: Synthetic oligonucleotide
  Sense strand starting at position 1301 of SEQ ID NO: 1564128
uugaucauucugugaccca

SEQ ID NO: 1857214 - RNA, 19 nt, Artificial Sequence
  Description of Artificial Sequence: Synthetic oligonucleotide
  Antisense strand to SEQ ID NO: 1857213
ugggucacagaaugaucaa

SEQ ID NO: 1857215 - RNA, 19 nt, Artificial Sequence
  Description of Artificial Sequence: Synthetic oligonucleotide
  Sense strand starting at position 1602 of SEQ ID NO: 1564128
gguggaguaacaugcauga

SEQ ID NO: 1857216 - RNA, 19 nt, Artificial Sequence
  Description of Artificial Sequence: Synthetic oligonucleotide
  Antisense strand to SEQ ID NO: 1857215
ucaugcauguuacuccacc

SEQ ID NO: 1857217 - RNA, 19 nt, Artificial Sequence
  Description of Artificial Sequence: Synthetic oligonucleotide
  Sense strand starting at position 1606 of SEQ ID NO: 1564128
gaguaacaugcaugagaag

SEQ ID NO: 1857218 - RNA, 19 nt, Artificial Sequence
  Description of Artificial Sequence: Synthetic oligonucleotide
  Antisense strand to SEQ ID NO: 1857217
cuucucaugcauguuacuc

SEQ ID NO: 1857219 - RNA, 19 nt, Artificial Sequence
  Description of Artificial Sequence: Synthetic oligonucleotide
  Sense strand starting at position 1660 of SEQ ID NO: 1564128
uuucuaggauuuggagaag

SEQ ID NO: 1857220 - RNA, 19 nt, Artificial Sequence
  Description of Artificial Sequence: Synthetic oligonucleotide
  Antisense strand to SEQ ID NO: 1857219
cuucuccaaauccuagaaa

SEQ ID NO: 1857221 - RNA, 19 nt, Artificial Sequence
  Description of Artificial Sequence: Synthetic oligonucleotide
  Sense strand starting at position 1816 of SEQ ID NO: 1564128
aaagaauauggcugucaua

SEQ ID NO: 1857222 - RNA, 19 nt, Artificial Sequence
  Description of Artificial Sequence: Synthetic oligonucleotide
  Antisense strand to SEQ ID NO: 1857221
uaugacagccauauucuuu

SEQ ID NO: 1857223 - RNA, 19 nt, Artificial Sequence
  Description of Artificial Sequence: Synthetic oligonucleotide
  Sense strand starting at position 1834 of SEQ ID NO: 1564128
auaaguuaacuuuagcuga

SEQ ID NO: 1857224 - RNA, 19 nt, Artificial Sequence
  Description of Artificial Sequence: Synthetic oligonucleotide
  Antisense strand to SEQ ID NO: 1857223
ucagcuaaaguuaacuuau

SEQ ID NO: 1857225 - RNA, 19 nt, Artificial Sequence
  Description of Artificial Sequence: Synthetic oligonucleotide
  Sense strand starting at position 1973 of SEQ ID NO: 1564128
aucugaaagcuugacugua

SEQ ID NO: 1857226 - RNA, 19 nt, Artificial Sequence
  Description of Artificial Sequence: Synthetic oligonucleotide
  Antisense strand to SEQ ID NO: 1857225
uacagucaagcuuucagau

SEQ ID NO: 1857227 - RNA, 19 nt, Artificial Sequence
  Description of Artificial Sequence: Synthetic oligonucleotide
  Sense strand starting at position 1985 of SEQ ID NO: 1564128
gacuguacuggaggaucua

SEQ ID NO: 1857228 - RNA, 19 nt, Artificial Sequence
  Description of Artificial Sequence: Synthetic oligonucleotide
  Antisense strand to SEQ ID NO: 1857227
uagauccuccaguacaguc

SEQ ID NO: 1857229 - RNA, 19 nt, Artificial Sequence
  Description of Artificial Sequence: Synthetic oligonucleotide
  Sense strand starting at position 2015 of SEQ ID NO: 1564128
gugcacucacaugacuauu

SEQ ID NO: 1857230 - RNA, 19 nt, Artificial Sequence
  Description of Artificial Sequence: Synthetic oligonucleotide
  Antisense strand to SEQ ID NO: 1857229
aauagucaugugagugcac

SEQ ID NO: 1857231 - RNA, 19 nt, Artificial Sequence
  Description of Artificial Sequence: Synthetic oligonucleotide
  Sense strand starting at position 2023 of SEQ ID NO: 1564128
acaugacuauugcuaggau

SEQ ID NO: 1857232 - RNA, 19 nt, Artificial Sequence
  Description of Artificial Sequence: Synthetic oligonucleotide
  Antisense strand to SEQ ID NO: 1857231
auccuagcaauagucaugu

SEQ ID NO: 1857233 - RNA, 19 nt, Artificial Sequence
  Description of Artificial Sequence: Synthetic oligonucleotide
  Sense strand starting at position 2026 of SEQ ID NO: 1564128
ugacuauugcuaggaugac

SEQ ID NO: 1857234 - RNA, 19 nt, Artificial Sequence
  Description of Artificial Sequence: Synthetic oligonucleotide
  Antisense strand to SEQ ID NO: 1857233
gucauccuagcaauaguca

SEQ ID NO: 1857235 - RNA, 19 nt, Artificial Sequence
  Description of Artificial Sequence: Synthetic oligonucleotide
  Sense strand starting at position 2085 of SEQ ID NO: 1564128
gggaguuugaucuaugcag

SEQ ID NO: 1857236 - RNA, 19 nt, Artificial Sequence
  Description of Artificial Sequence: Synthetic oligonucleotide
  Antisense strand to SEQ ID NO: 1857235
cugcauagaucaaacuccc

SEQ ID NO: 1857237 - RNA, 19 nt, Artificial Sequence
  Description of Artificial Sequence: Synthetic oligonucleotide
  Sense strand starting at position 2310 of SEQ ID NO: 1564128
guggguccacuagaauguu

SEQ ID NO: 1857238 - RNA, 19 nt, Artificial Sequence
  Description of Artificial Sequence: Synthetic oligonucleotide
  Antisense strand to SEQ ID NO: 1857237
aacauucuaguggacccac

SEQ ID NO: 1857239 - RNA, 19 nt, Artificial Sequence
  Description of Artificial Sequence: Synthetic oligonucleotide
  Sense strand starting at position 2313 of SEQ ID NO: 1564128
gguccacuagaauguuaug

SEQ ID NO: 1857240 - RNA, 19 nt, Artificial Sequence
  Description of Artificial Sequence: Synthetic oligonucleotide
  Antisense strand to SEQ ID NO: 1857239
cauaacauucuaguggacc

SEQ ID NO: 1857241 - RNA, 19 nt, Artificial Sequence
  Description of Artificial Sequence: Synthetic oligonucleotide
  Sense strand starting at position 2369 of SEQ ID NO: 1564128
gcacauaguguuuacaaug

SEQ ID NO: 1857242 - RNA, 19 nt, Artificial Sequence
  Description of Artificial Sequence: Synthetic oligonucleotide
  Antisense strand to SEQ ID NO: 1857241
cauuguaaacacuaugugc

SEQ ID NO: 1857243 - RNA, 19 nt, Artificial Sequence
  Description of Artificial Sequence: Synthetic oligonucleotide
  Sense strand starting at position 2912 of SEQ ID NO: 1564128
gcuguucuccuggauugag

SEQ ID NO: 1857244 - RNA, 19 nt, Artificial Sequence
  Description of Artificial Sequence: Synthetic oligonucleotide
  Antisense strand to SEQ ID NO: 1857243
cucaauccaggagaacagc

SEQ ID NO: 1857245 - RNA, 19 nt, Artificial Sequence
  Description of Artificial Sequence: Synthetic oligonucleotide
  Sense strand starting at position 2929 of SEQ ID NO: 1564128
aggcuccauuucugauuua

SEQ ID NO: 1857246 - RNA, 19 nt, Artificial Sequence
  Description of Artificial Sequence: Synthetic oligonucleotide
  Antisense strand to SEQ ID NO: 1857245
uaaaucagaaauggagccu

SEQ ID NO: 1857247 - RNA, 19 nt, Artificial Sequence
  Description of Artificial Sequence: Synthetic oligonucleotide
  Sense strand starting at position 2930 of SEQ ID NO: 1564128
ggcuccauuucugauuuau

SEQ ID NO: 1857248 - RNA, 19 nt, Artificial Sequence
  Description of Artificial Sequence: Synthetic oligonucleotide
  Antisense strand to SEQ ID NO: 1857247
auaaaucagaaauggagcc

SEQ ID NO: 1857249 - RNA, 19 nt, Artificial Sequence
  Description of Artificial Sequence: Synthetic oligonucleotide
  Sense strand starting at position 3120 of SEQ ID NO: 1564128
aaggcauuuguuuguaugu

SEQ ID NO: 1857250 - RNA, 19 nt, Artificial Sequence
  Description of Artificial Sequence: Synthetic oligonucleotide
  Antisense strand to SEQ ID NO: 1857249
acauacaaacaaaugccuu

SEQ ID NO: 1857251 - RNA, 19 nt, Artificial Sequence
  Description of Artificial Sequence: Synthetic oligonucleotide
  Sense strand starting at position 3125 of SEQ ID NO: 1564128
auuuguuuguaugugucaa

SEQ ID NO: 1857252 - RNA, 19 nt, Artificial Sequence
  Description of Artificial Sequence: Synthetic oligonucleotide
  Antisense strand to SEQ ID NO: 1857251
uugacacauacaaacaaau

SEQ ID NO: 1857253 - RNA, 19 nt, Artificial Sequence
  Description of Artificial Sequence: Synthetic oligonucleotide
  Sense strand starting at position 3189 of SEQ ID NO: 1564128
gagcuaguuccaugaacau

SEQ ID NO: 1857254 - RNA, 19 nt, Artificial Sequence
  Description of Artificial Sequence: Synthetic oligonucleotide
  Antisense strand to SEQ ID NO: 1857253
auguucauggaacuagcuc

SEQ ID NO: 1857255 - RNA, 19 nt, Artificial Sequence
  Description of Artificial Sequence: Synthetic oligonucleotide
  Sense strand starting at position 3198 of SEQ ID NO: 1564128
ccaugaacauuugagaaau

SEQ ID NO: 1857256 - RNA, 19 nt, Artificial Sequence
  Description of Artificial Sequence: Synthetic oligonucleotide
  Antisense strand to SEQ ID NO: 1857255
auuucucaaauguucaugg

SEQ ID NO: 1857257 - RNA, 19 nt, Artificial Sequence
  Description of Artificial Sequence: Synthetic oligonucleotide
  Sense strand starting at position 3223 of SEQ ID NO: 1564128
guauauagucaaugggaaa

SEQ ID NO: 1857258 - RNA, 19 nt, Artificial Sequence
  Description of Artificial Sequence: Synthetic oligonucleotide
  Antisense strand to SEQ ID NO: 1857257
uuucccauugacuauauac

SEQ ID NO: 1857259 - RNA, 19 nt, Artificial Sequence
  Description of Artificial Sequence: Synthetic oligonucleotide
  Sense strand starting at position 3404 of SEQ ID NO: 1564128
ccugcaucauuuguggauu

SEQ ID NO: 1857260 - RNA, 19 nt, Artificial Sequence
  Description of Artificial Sequence: Synthetic oligonucleotide
  Antisense strand to SEQ ID NO: 1857259
aauccacaaaugaugcagg

SEQ ID NO: 1857261 - RNA, 19 nt, Artificial Sequence
  Description of Artificial Sequence: Synthetic oligonucleotide
  Sense strand starting at position 3416 of SEQ ID NO: 1564128
guggauugugacuauacug

SEQ ID NO: 1857262 - RNA, 19 nt, Artificial Sequence
  Description of Artificial Sequence: Synthetic oligonucleotide
  Antisense strand to SEQ ID NO: 1857261
caguauagucacaauccac

SEQ ID NO: 1857263 - RNA, 19 nt, Artificial Sequence
  Description of Artificial Sequence: Synthetic oligonucleotide
  Sense strand starting at position 3443 of SEQ ID NO: 1564128
auguuauaguuuccaaaga

SEQ ID NO: 1857264 - RNA, 19 nt, Artificial Sequence
  Description of Artificial Sequence: Synthetic oligonucleotide
  Antisense strand to SEQ ID NO: 1857263
ucuuuggaaacuauaacau

SEQ ID NO: 1857265 - RNA, 19 nt, Artificial Sequence
  Description of Artificial Sequence: Synthetic oligonucleotide
  Sense strand starting at position 3562 of SEQ ID NO: 1564128
auauuaggaucuccuguuu

SEQ ID NO: 1857266 - RNA, 19 nt, Artificial Sequence
  Description of Artificial Sequence: Synthetic oligonucleotide
  Antisense strand to SEQ ID NO: 1857265
aaacaggagauccuaauau

SEQ ID NO: 1857267 - RNA, 19 nt, Artificial Sequence
  Description of Artificial Sequence: Synthetic oligonucleotide
  Sense strand starting at position 3665 of SEQ ID NO: 1564128
ggagauucuguguagucau

SEQ ID NO: 1857268 - RNA, 19 nt, Artificial Sequence
  Description of Artificial Sequence: Synthetic oligonucleotide
  Antisense strand to SEQ ID NO: 1857267
augacuacacagaaucucc

SEQ ID NO: 1857269 - RNA, 19 nt, Artificial Sequence
  Description of Artificial Sequence: Synthetic oligonucleotide
  Sense strand starting at position 3867 of SEQ ID NO: 1564128
ucagucacgguauauaauu

SEQ ID NO: 1857270 - RNA, 19 nt, Artificial Sequence
  Description of Artificial Sequence: Synthetic oligonucleotide
  Antisense strand to SEQ ID NO: 1857269
aauuauauaccgugacuga

SEQ ID NO: 1857271 - RNA, 19 nt, Artificial Sequence
  Description of Artificial Sequence: Synthetic oligonucleotide
  Sense strand starting at position 3939 of SEQ ID NO: 1564128
agaguaaacugagugcauu

SEQ ID NO: 1857272 - RNA, 19 nt, Artificial Sequence
  Description of Artificial Sequence: Synthetic oligonucleotide
  Antisense strand to SEQ ID NO: 1857271
aaugcacucaguuuacucu

SEQ ID NO: 1857273 - RNA, 19 nt, Artificial Sequence
  Description of Artificial Sequence: Synthetic oligonucleotide
  Sense strand starting at position 3942 of SEQ ID NO: 1564128
guaaacugagugcauuauu

SEQ ID NO: 1857274 - RNA, 19 nt, Artificial Sequence
  Description of Artificial Sequence: Synthetic oligonucleotide
  Antisense strand to SEQ ID NO: 1857273
aauaaugcacucaguuuac

SEQ ID NO: 1857275 - RNA, 19 nt, Artificial Sequence
  Description of Artificial Sequence: Synthetic oligonucleotide
  Sense strand starting at position 3945 of SEQ ID NO: 1564128
aacugagugcauuauuaga

SEQ ID NO: 1857276 - RNA, 19 nt, Artificial Sequence
  Description of Artificial Sequence: Synthetic oligonucleotide
  Antisense strand to SEQ ID NO: 1857275
ucuaauaaugcacucaguu

SEQ ID NO: 1857277 - RNA, 19 nt, Artificial Sequence
  Description of Artificial Sequence: Synthetic oligonucleotide
  Sense strand starting at position 3947 of SEQ ID NO: 1564128
cugagugcauuauuagaau

SEQ ID NO: 1857278 - RNA, 19 nt, Artificial Sequence
  Description of Artificial Sequence: Synthetic oligonucleotide
  Antisense strand to SEQ ID NO: 1857277
auucuaauaaugcacucag

SEQ ID NO: 1857279 - RNA, 19 nt, Artificial Sequence
  Description of Artificial Sequence: Synthetic oligonucleotide
  Sense strand starting at position 1 of SEQ ID NO: 1564129
aguuuaauaucacuuggga

SEQ ID NO: 1857280 - RNA, 19 nt, Artificial Sequence
  Description of Artificial Sequence: Synthetic oligonucleotide
  Antisense strand to SEQ ID NO: 1857279
ucccaagugauauuaaacu

SEQ ID NO: 1857281 - RNA, 19 nt, Artificial Sequence
  Description of Artificial Sequence: Synthetic oligonucleotide
  Sense strand starting at position 116 of SEQ ID NO: 1564129
gucaaugaaugauuguuau

SEQ ID NO: 1857282 - RNA, 19 nt, Artificial Sequence
  Description of Artificial Sequence: Synthetic oligonucleotide
  Antisense strand to SEQ ID NO: 1857281
auaacaaucauucauugac

SEQ ID NO: 1857283 - RNA, 19 nt, Artificial Sequence
  Description of Artificial Sequence: Synthetic oligonucleotide
  Sense strand starting at position 213 of SEQ ID NO: 1564129
accucugagccucaagaau

SEQ ID NO: 1857284 - RNA, 19 nt, Artificial Sequence
  Description of Artificial Sequence: Synthetic oligonucleotide
  Antisense strand to SEQ ID NO: 1857283
auucuugaggcucagaggu

SEQ ID NO: 1857285 - RNA, 19 nt, Artificial Sequence
  Description of Artificial Sequence: Synthetic oligonucleotide
  Sense strand starting at position 293 of SEQ ID NO: 1564129
gcaugucaaucuuugaaag

SEQ ID NO: 1857286 - RNA, 19 nt, Artificial Sequence
  Description of Artificial Sequence: Synthetic oligonucleotide
  Antisense strand to SEQ ID NO: 1857285
cuuucaaagauugacaugc

SEQ ID NO: 1857287 - RNA, 19 nt, Artificial Sequence
  Description of Artificial Sequence: Synthetic oligonucleotide
  Sense strand starting at position 320 of SEQ ID NO: 1564129
auagaaagcuggucagauc

SEQ ID NO: 1857288 - RNA, 19 nt, Artificial Sequence
  Description of Artificial Sequence: Synthetic oligonucleotide
  Antisense strand to SEQ ID NO: 1857287
gaucugaccagcuuucuau

SEQ ID NO: 1857289 - RNA, 19 nt, Artificial Sequence
  Description of Artificial Sequence: Synthetic oligonucleotide
  Sense strand starting at position 492 of SEQ ID NO: 1564129
caccucuaucagggaugua

SEQ ID NO: 1857290 - RNA, 19 nt, Artificial Sequence
  Description of Artificial Sequence: Synthetic oligonucleotide
  Antisense strand to SEQ ID NO: 1857289
uacaucccugauagaggug

SEQ ID NO: 1857291 - RNA, 19 nt, Artificial Sequence
  Description of Artificial Sequence: Synthetic oligonucleotide
  Sense strand starting at position 626 of SEQ ID NO: 1564129
agagguacucuuuacagca

SEQ ID NO: 1857292 - RNA, 19 nt, Artificial Sequence
  Description of Artificial Sequence: Synthetic oligonucleotide
  Antisense strand to SEQ ID NO: 1857291
ugcuguaaagaguaccucu

SEQ ID NO: 1857293 - RNA, 19 nt, Artificial Sequence
  Description of Artificial Sequence: Synthetic oligonucleotide
  Sense strand starting at position 691 of SEQ ID NO: 1564129
aaaguuugacaaggcauau

SEQ ID NO: 1857294 - RNA, 19 nt, Artificial Sequence
  Description of Artificial Sequence: Synthetic oligonucleotide
  Antisense strand to SEQ ID NO: 1857293
auaugccuugucaaacuuu

SEQ ID NO: 1857295 - RNA, 19 nt, Artificial Sequence
  Description of Artificial Sequence: Synthetic oligonucleotide
  Sense strand starting at position 798 of SEQ ID NO: 1564129
gaccauuaauggucuguau

SEQ ID NO: 1857296 - RNA, 19 nt, Artificial Sequence
  Description of Artificial Sequence: Synthetic oligonucleotide
  Antisense strand to SEQ ID NO: 1857295
auacagaccauuaaugguc

SEQ ID NO: 1857297 - RNA, 19 nt, Artificial Sequence
  Description of Artificial Sequence: Synthetic oligonucleotide
  Sense strand starting at position 818 of SEQ ID NO: 1564129
cugagucaccuaugauaua

SEQ ID NO: 1857298 - RNA, 19 nt, Artificial Sequence
  Description of Artificial Sequence: Synthetic oligonucleotide
  Antisense strand to SEQ ID NO: 1857297
uauaucauaggugacucag

SEQ ID NO: 1857299 - RNA, 19 nt, Artificial Sequence
  Description of Artificial Sequence: Synthetic oligonucleotide
  Sense strand starting at position 1002 of SEQ ID NO: 1564129
ggucgaauaaguggguaaa

SEQ ID NO: 1857300 - RNA, 19 nt, Artificial Sequence
  Description of Artificial Sequence: Synthetic oligonucleotide
  Antisense strand to SEQ ID NO: 1857299
uuuacccacuuauucgacc

SEQ ID NO: 1857301 - RNA, 19 nt, Artificial Sequence
  Description of Artificial Sequence: Synthetic oligonucleotide
  Sense strand starting at position 1005 of SEQ ID NO: 1564129
cgaauaaguggguaaagcu

SEQ ID NO: 1857302 - RNA, 19 nt, Artificial Sequence
  Description of Artificial Sequence: Synthetic oligonucleotide
  Antisense strand to SEQ ID NO: 1857301
agcuuuacccacuuauucg

SEQ ID NO: 1857303 - RNA, 19 nt, Artificial Sequence
  Description of Artificial Sequence: Synthetic oligonucleotide
  Sense strand starting at position 1068 of SEQ ID NO: 1564129
uccugagaaggguguagaa

SEQ ID NO: 1857304 - RNA, 19 nt, Artificial Sequence
  Description of Artificial Sequence: Synthetic oligonucleotide
  Antisense strand to SEQ ID NO: 1857303
uucuacacccuucucagga

SEQ ID NO: 1857305 - RNA, 19 nt, Artificial Sequence
  Description of Artificial Sequence: Synthetic oligonucleotide
  Sense strand starting at position 1239 of SEQ ID NO: 1564129
ggaauacugugaccaaagu

SEQ ID NO: 1857306 - RNA, 19 nt, Artificial Sequence
  Description of Artificial Sequence: Synthetic oligonucleotide
  Antisense strand to SEQ ID NO: 1857305
acuuuggucacaguauucc

SEQ ID NO: 1857307 - RNA, 19 nt, Artificial Sequence
  Description of Artificial Sequence: Synthetic oligonucleotide
  Sense strand starting at position 1272 of SEQ ID NO: 1564129
augguucuaucauugauag

SEQ ID NO: 1857308 - RNA, 19 nt, Artificial Sequence
  Description of Artificial Sequence: Synthetic oligonucleotide
  Antisense strand to SEQ ID NO: 1857307
cuaucaaugauagaaccau

SEQ ID NO: 1857309 - RNA, 19 nt, Artificial Sequence
  Description of Artificial Sequence: Synthetic oligonucleotide
  Sense strand starting at position 1273 of SEQ ID NO: 1564129
ugguucuaucauugauaga

SEQ ID NO: 1857310 - RNA, 19 nt, Artificial Sequence
  Description of Artificial Sequence: Synthetic oligonucleotide
  Antisense strand to SEQ ID NO: 1857309
ucuaucaaugauagaacca

SEQ ID NO: 1857311 - RNA, 19 nt, Artificial Sequence
  Description of Artificial Sequence: Synthetic oligonucleotide
  Sense strand starting at position 1284 of SEQ ID NO: 1564129
uugauagaacguuaucauu

SEQ ID NO: 1857312 - RNA, 19 nt, Artificial Sequence
  Description of Artificial Sequence: Synthetic oligonucleotide
  Antisense strand to SEQ ID NO: 1857311
aaugauaacguucuaucaa

SEQ ID NO: 1857313 - RNA, 19 nt, Artificial Sequence
  Description of Artificial Sequence: Synthetic oligonucleotide
  Sense strand starting at position 1286 of SEQ ID NO: 1564129
gauagaacguuaucauuga

SEQ ID NO: 1857314 - RNA, 19 nt, Artificial Sequence
  Description of Artificial Sequence: Synthetic oligonucleotide
  Antisense strand to SEQ ID NO: 1857313
ucaaugauaacguucuauc

SEQ ID NO: 1857315 - RNA, 19 nt, Artificial Sequence
  Description of Artificial Sequence: Synthetic oligonucleotide
  Sense strand starting at position 1290 of SEQ ID NO: 1564129
gaacguuaucauugagacc

SEQ ID NO: 1857316 - RNA, 19 nt, Artificial Sequence
  Description of Artificial Sequence: Synthetic oligonucleotide
  Antisense strand to SEQ ID NO: 1857315
ggucucaaugauaacguuc

SEQ ID NO: 1857317 - RNA, 19 nt, Artificial Sequence
  Description of Artificial Sequence: Synthetic oligonucleotide
  Sense strand starting at position 1543 of SEQ ID NO: 1564129
guugccacuaucgaugaaa

SEQ ID NO: 1857318 - RNA, 19 nt, Artificial Sequence
  Description of Artificial Sequence: Synthetic oligonucleotide
  Antisense strand to SEQ ID NO: 1857317
uuucaucgauaguggcaac

SEQ ID NO: 1857319 - RNA, 19 nt, Artificial Sequence
  Description of Artificial Sequence: Synthetic oligonucleotide
  Sense strand starting at position 1683 of SEQ ID NO: 1564129
guuacaagccuacaaaguu

SEQ ID NO: 1857320 - RNA, 19 nt, Artificial Sequence
  Description of Artificial Sequence: Synthetic oligonucleotide
  Antisense strand to SEQ ID NO: 1857319
aacuuuguaggcuuguaac

SEQ ID NO: 1857321 - RNA, 19 nt, Artificial Sequence
  Description of Artificial Sequence: Synthetic oligonucleotide
  Sense strand starting at position 1713 of SEQ ID NO: 1564129
cuucgaguuagguaucaag

SEQ ID NO: 1857322 - RNA, 19 nt, Artificial Sequence
  Description of Artificial Sequence: Synthetic oligonucleotide
  Antisense strand to SEQ ID NO: 1857321
cuugauaccuaacucgaag

SEQ ID NO: 1857323 - RNA, 19 nt, Artificial Sequence
  Description of Artificial Sequence: Synthetic oligonucleotide
  Sense strand starting at position 1795 of SEQ ID NO: 1564129
uuguuuacugccuaaggga

SEQ ID NO: 1857324 - RNA, 19 nt, Artificial Sequence
  Description of Artificial Sequence: Synthetic oligonucleotide
  Antisense strand to SEQ ID NO: 1857323
ucccuuaggcaguaaacaa

SEQ ID NO: 1857325 - RNA, 19 nt, Artificial Sequence
  Description of Artificial Sequence: Synthetic oligonucleotide
  Sense strand starting at position 2187 of SEQ ID NO: 1564129
cauauauucugagugggua

SEQ ID NO: 1857326 - RNA, 19 nt, Artificial Sequence
  Description of Artificial Sequence: Synthetic oligonucleotide
  Antisense strand to SEQ ID NO: 1857325
uacccacucagaauauaug

SEQ ID NO: 1857327 - RNA, 19 nt, Artificial Sequence
  Description of Artificial Sequence: Synthetic oligonucleotide
  Sense strand starting at position 2188 of SEQ ID NO: 1564129
auauauucugaguggguau

SEQ ID NO: 1857328 - RNA, 19 nt, Artificial Sequence
  Description of Artificial Sequence: Synthetic oligonucleotide
  Antisense strand to SEQ ID NO: 1857327
auacccacucagaauauau

SEQ ID NO: 1857329 - RNA, 19 nt, Artificial Sequence
  Description of Artificial Sequence: Synthetic oligonucleotide
  Sense strand starting at position 2416 of SEQ ID NO: 1564129
ugaugauaauuauccuagu

SEQ ID NO: 1857330 - RNA, 19 nt, Artificial Sequence
  Description of Artificial Sequence: Synthetic oligonucleotide
  Antisense strand to SEQ ID NO: 1857329
acuaggauaauuaucauca

SEQ ID NO: 1857331 - RNA, 19 nt, Artificial Sequence
  Description of Artificial Sequence: Synthetic oligonucleotide
  Sense strand starting at position 2563 of SEQ ID NO: 1564129
gaccuuagaguacgugaga

SEQ ID NO: 1857332 - RNA, 19 nt, Artificial Sequence
  Description of Artificial Sequence: Synthetic oligonucleotide
  Antisense strand to SEQ ID NO: 1857331
ucucacguacucuaagguc

SEQ ID NO: 1857333 - RNA, 19 nt, Artificial Sequence
  Description of Artificial Sequence: Synthetic oligonucleotide
  Sense strand starting at position 2566 of SEQ ID NO: 1564129
cuuagaguacgugagacaa

SEQ ID NO: 1857334 - RNA, 19 nt, Artificial Sequence
  Description of Artificial Sequence: Synthetic oligonucleotide
  Antisense strand to SEQ ID NO: 1857333
uugucucacguacucuaag

SEQ ID NO: 1857335 - RNA, 19 nt, Artificial Sequence
  Description of Artificial Sequence: Synthetic oligonucleotide
  Sense strand starting at position 2813 of SEQ ID NO: 1564129
ggaagugagcuccaugucu

SEQ ID NO: 1857336 - RNA, 19 nt, Artificial Sequence
  Description of Artificial Sequence: Synthetic oligonucleotide
  Antisense strand to SEQ ID NO: 1857335
agacauggagcucacuucc

SEQ ID NO: 1857337 - RNA, 19 nt, Artificial Sequence
  Description of Artificial Sequence: Synthetic oligonucleotide
  Sense strand starting at position 2971 of SEQ ID NO: 1564129
augcauuccagauggaagu

SEQ ID NO: 1857338 - RNA, 19 nt, Artificial Sequence
  Description of Artificial Sequence: Synthetic oligonucleotide
  Antisense strand to SEQ ID NO: 1857337
acuuccaucuggaaugcau

SEQ ID NO: 1857339 - RNA, 19 nt, Artificial Sequence
  Description of Artificial Sequence: Synthetic oligonucleotide
  Sense strand starting at position 2972 of SEQ ID NO: 1564129
ugcauuccagauggaagua

SEQ ID NO: 1857340 - RNA, 19 nt, Artificial Sequence
  Description of Artificial Sequence: Synthetic oligonucleotide
  Antisense strand to SEQ ID NO: 1857339
uacuuccaucuggaaugca

SEQ ID NO: 1857341 - RNA, 19 nt, Artificial Sequence
  Description of Artificial Sequence: Synthetic oligonucleotide
  Sense strand starting at position 3022 of SEQ ID NO: 1564129
accaacuuucugggaguuu

SEQ ID NO: 1857342 - RNA, 19 nt, Artificial Sequence
  Description of Artificial Sequence: Synthetic oligonucleotide
  Antisense strand to SEQ ID NO: 1857341
aaacucccagaaaguuggu

SEQ ID NO: 1857343 - RNA, 19 nt, Artificial Sequence
  Description of Artificial Sequence: Synthetic oligonucleotide
  Sense strand starting at position 3033 of SEQ ID NO: 1564129
gggaguuuaggaggucaac

SEQ ID NO: 1857344 - RNA, 19 nt, Artificial Sequence
  Description of Artificial Sequence: Synthetic oligonucleotide
  Antisense strand to SEQ ID NO: 1857343
guugaccuccuaaacuccc

SEQ ID NO: 1857345 - RNA, 19 nt, Artificial Sequence
  Description of Artificial Sequence: Synthetic oligonucleotide
  Sense strand starting at position 3201 of SEQ ID NO: 1564129
gaauauagugagcaccuua

SEQ ID NO: 1857346 - RNA, 19 nt, Artificial Sequence
  Description of Artificial Sequence: Synthetic oligonucleotide
  Antisense strand to SEQ ID NO: 1857345
uaaggugcucacuauauuc

SEQ ID NO: 1857347 - RNA, 19 nt, Artificial Sequence
  Description of Artificial Sequence: Synthetic oligonucleotide
  Sense strand starting at position 3391 of SEQ ID NO: 1564129
gguguauauguugaggaaa

SEQ ID NO: 1857348 - RNA, 19 nt, Artificial Sequence
  Description of Artificial Sequence: Synthetic oligonucleotide
  Antisense strand to SEQ ID NO: 1857347
uuuccucaacauauacacc

SEQ ID NO: 1857349 - RNA, 19 nt, Artificial Sequence
  Description of Artificial Sequence: Synthetic oligonucleotide
  Sense strand starting at position 3509 of SEQ ID NO: 1564129
uuggucauaagucacagua

SEQ ID NO: 1857350 - RNA, 19 nt, Artificial Sequence
  Description of Artificial Sequence: Synthetic oligonucleotide
  Antisense strand to SEQ ID NO: 1857349
uacugugacuuaugaccaa

SEQ ID NO: 1857351 - RNA, 19 nt, Artificial Sequence
  Description of Artificial Sequence: Synthetic oligonucleotide
  Sense strand starting at position 3745 of SEQ ID NO: 1564129
agccucaaccaaugggaau

SEQ ID NO: 1857352 - RNA, 19 nt, Artificial Sequence
  Description of Artificial Sequence: Synthetic oligonucleotide
  Antisense strand to SEQ ID NO: 1857351
auucccauugguugaggcu

SEQ ID NO: 1857353 - RNA, 19 nt, Artificial Sequence
  Description of Artificial Sequence: Synthetic oligonucleotide
  Sense strand starting at position 3762 of SEQ ID NO: 1564129
auggaaguugagugauaga

SEQ ID NO: 1857354 - RNA, 19 nt, Artificial Sequence
  Description of Artificial Sequence: Synthetic oligonucleotide
  Antisense strand to SEQ ID NO: 1857353
ucuaucacucaacuuccau

SEQ ID NO: 1857355 - RNA, 19 nt, Artificial Sequence
  Description of Artificial Sequence: Synthetic oligonucleotide
  Sense strand starting at position 3816 of SEQ ID NO: 1564129
ugaggugugaucuacaguu

SEQ ID NO: 1857356 - RNA, 19 nt, Artificial Sequence
  Description of Artificial Sequence: Synthetic oligonucleotide
  Antisense strand to SEQ ID NO: 1857355
aacuguagaucacaccuca

SEQ ID NO: 1857357 - RNA, 19 nt, Artificial Sequence
  Description of Artificial Sequence: Synthetic oligonucleotide
  Sense strand starting at position 3818 of SEQ ID NO: 1564129
aggugugaucuacaguuuc

SEQ ID NO: 1857358 - RNA, 19 nt, Artificial Sequence
  Description of Artificial Sequence: Synthetic oligonucleotide
  Antisense strand to SEQ ID NO: 1857357
gaaacuguagaucacaccu

SEQ ID NO: 1857359 - RNA, 19 nt, Artificial Sequence
  Description of Artificial Sequence: Synthetic oligonucleotide
  Sense strand starting at position 5 of SEQ ID NO: 1564130
uaagaaaugugggaacuaa

SEQ ID NO: 1857360 - RNA, 19 nt, Artificial Sequence
  Description of Artificial Sequence: Synthetic oligonucleotide
  Antisense strand to SEQ ID NO: 1857359
uuaguucccacauuucuua

SEQ ID NO: 1857361 - RNA, 19 nt, Artificial Sequence
  Description of Artificial Sequence: Synthetic oligonucleotide
  Sense strand starting at position 298 of SEQ ID NO: 1564130
ccuuuaaauuugcgggaga

SEQ ID NO: 1857362 - RNA, 19 nt, Artificial Sequence
  Description of Artificial Sequence: Synthetic oligonucleotide
  Antisense strand to SEQ ID NO: 1857361
ucucccgcaaauuuaaagg

SEQ ID NO: 1857363 - RNA, 19 nt, Artificial Sequence
  Description of Artificial Sequence: Synthetic oligonucleotide
  Sense strand starting at position 299 of SEQ ID NO: 1564130
cuuuaaauuugcgggagaa

SEQ ID NO: 1857364 - RNA, 19 nt, Artificial Sequence
  Description of Artificial Sequence: Synthetic oligonucleotide
  Antisense strand to SEQ ID NO: 1857363
uucucccgcaaauuuaaag

SEQ ID NO: 1857365 - RNA, 19 nt, Artificial Sequence
  Description of Artificial Sequence: Synthetic oligonucleotide
  Sense strand starting at position 1105 of SEQ ID NO: 1564130
cgcagucggcugagaauuc

SEQ ID NO: 1857366 - RNA, 19 nt, Artificial Sequence
  Description of Artificial Sequence: Synthetic oligonucleotide
  Antisense strand to SEQ ID NO: 1857365
gaauucucagccgacugcg

SEQ ID NO: 1857367 - RNA, 19 nt, Artificial Sequence
  Description of Artificial Sequence: Synthetic oligonucleotide
  Sense strand starting at position 2083 of SEQ ID NO: 1564130
aggucaccuuagguuuaaa

SEQ ID NO: 1857368 - RNA, 19 nt, Artificial Sequence
  Description of Artificial Sequence: Synthetic oligonucleotide
  Antisense strand to SEQ ID NO: 1857367
uuuaaaccuaaggugaccu

SEQ ID NO: 1857369 - RNA, 19 nt, Artificial Sequence
  Description of Artificial Sequence: Synthetic oligonucleotide
  Sense strand starting at position 2229 of SEQ ID NO: 1564130
aagaguacugccugccuuu

SEQ ID NO: 1857370 - RNA, 19 nt, Artificial Sequence
  Description of Artificial Sequence: Synthetic oligonucleotide
  Antisense strand to SEQ ID NO: 1857369
aaaggcaggcaguacucuu

SEQ ID NO: 1857371 - RNA, 19 nt, Artificial Sequence
  Description of Artificial Sequence: Synthetic oligonucleotide
  Sense strand starting at position 2249 of SEQ ID NO: 1564130
cuuacaaugcugcaguuaa

SEQ ID NO: 1857372 - RNA, 19 nt, Artificial Sequence
  Description of Artificial Sequence: Synthetic oligonucleotide
  Antisense strand to SEQ ID NO: 1857371
uuaacugcagcauuguaag

SEQ ID NO: 1857373 - RNA, 19 nt, Artificial Sequence
  Description of Artificial Sequence: Synthetic oligonucleotide
  Sense strand starting at position 2273 of SEQ ID NO: 1564130
uucggauuauuaccauuau

SEQ ID NO: 1857374 - RNA, 19 nt, Artificial Sequence
  Description of Artificial Sequence: Synthetic oligonucleotide
  Antisense strand to SEQ ID NO: 1857373
auaaugguaauaauccgaa

SEQ ID NO: 1857375 - RNA, 19 nt, Artificial Sequence
  Description of Artificial Sequence: Synthetic oligonucleotide
  Sense strand starting at position 2296 of SEQ ID NO: 1564130
aagggucugcuuugcauuu

SEQ ID NO: 1857376 - RNA, 19 nt, Artificial Sequence
  Description of Artificial Sequence: Synthetic oligonucleotide
  Antisense strand to SEQ ID NO: 1857375
aaaugcaaagcagacccuu

SEQ ID NO: 1857377 - RNA, 19 nt, Artificial Sequence
  Description of Artificial Sequence: Synthetic oligonucleotide
  Sense strand starting at position 2305 of SEQ ID NO: 1564130
cuuugcauuugaggacuga

SEQ ID NO: 1857378 - RNA, 19 nt, Artificial Sequence
  Description of Artificial Sequence: Synthetic oligonucleotide
  Antisense strand to SEQ ID NO: 1857377
ucaguccucaaaugcaaag

SEQ ID NO: 1857379 - RNA, 19 nt, Artificial Sequence
  Description of Artificial Sequence: Synthetic oligonucleotide
  Sense strand starting at position 2324 of SEQ ID NO: 1564130
auagaaagcgcuugggcau

SEQ ID NO: 1857380 - RNA, 19 nt, Artificial Sequence
  Description of Artificial Sequence: Synthetic oligonucleotide
  Antisense strand to SEQ ID NO: 1857379
augcccaagcgcuuucuau

SEQ ID NO: 1857381 - RNA, 19 nt, Artificial Sequence
  Description of Artificial Sequence: Synthetic oligonucleotide
  Sense strand starting at position 2339 of SEQ ID NO: 1564130
gcauuuacguuauccacag

SEQ ID NO: 1857382 - RNA, 19 nt, Artificial Sequence
  Description of Artificial Sequence: Synthetic oligonucleotide
  Antisense strand to SEQ ID NO: 1857381
cuguggauaacguaaaugc

SEQ ID NO: 1857383 - RNA, 19 nt, Artificial Sequence
  Description of Artificial Sequence: Synthetic oligonucleotide
  Sense strand starting at position 2343 of SEQ ID NO: 1564130
uuacguuauccacaguuuc

SEQ ID NO: 1857384 - RNA, 19 nt, Artificial Sequence
  Description of Artificial Sequence: Synthetic oligonucleotide
  Antisense strand to SEQ ID NO: 1857383
gaaacuguggauaacguaa

SEQ ID NO: 1857385 - RNA, 19 nt, Artificial Sequence
  Description of Artificial Sequence: Synthetic oligonucleotide
  Sense strand starting at position 2394 of SEQ ID NO: 1564130
aggacagcauuguuguuaa

SEQ ID NO: 1857386 - RNA, 19 nt, Artificial Sequence
  Description of Artificial Sequence: Synthetic oligonucleotide
  Antisense strand to SEQ ID NO: 1857385
uuaacaacaaugcuguccu

SEQ ID NO: 1857387 - RNA, 19 nt, Artificial Sequence
  Description of Artificial Sequence: Synthetic oligonucleotide
  Sense strand starting at position 2397 of SEQ ID NO: 1564130
acagcauuguuguuaauau

SEQ ID NO: 1857388 - RNA, 19 nt, Artificial Sequence
  Description of Artificial Sequence: Synthetic oligonucleotide
  Antisense strand to SEQ ID NO: 1857387
auauuaacaacaaugcugu

SEQ ID NO: 1857389 - RNA, 19 nt, Artificial Sequence
  Description of Artificial Sequence: Synthetic oligonucleotide
  Sense strand starting at position 2454 of SEQ ID NO: 1564130
gcaggacuccuccaucacu

SEQ ID NO: 1857390 - RNA, 19 nt, Artificial Sequence
  Description of Artificial Sequence: Synthetic oligonucleotide
  Antisense strand to SEQ ID NO: 1857389
agugauggaggaguccugc

SEQ ID NO: 1857391 - RNA, 19 nt, Artificial Sequence
  Description of Artificial Sequence: Synthetic oligonucleotide
  Sense strand starting at position 2608 of SEQ ID NO: 1564130
acaauaucccugggcaaau

SEQ ID NO: 1857392 - RNA, 19 nt, Artificial Sequence
  Description of Artificial Sequence: Synthetic oligonucleotide
  Antisense strand to SEQ ID NO: 1857391
auuugcccagggauauugu

SEQ ID NO: 1857393 - RNA, 19 nt, Artificial Sequence
  Description of Artificial Sequence: Synthetic oligonucleotide
  Sense strand starting at position 2668 of SEQ ID NO: 1564130
caggaauugcuguaauggu

SEQ ID NO: 1857394 - RNA, 19 nt, Artificial Sequence
  Description of Artificial Sequence: Synthetic oligonucleotide
  Antisense strand to SEQ ID NO: 1857393
accauuacagcaauuccug

SEQ ID NO: 1857395 - RNA, 19 nt, Artificial Sequence
  Description of Artificial Sequence: Synthetic oligonucleotide
  Sense strand starting at position 2675 of SEQ ID NO: 1564130
ugcuguaaugguuagacaa

SEQ ID NO: 1857396 - RNA, 19 nt, Artificial Sequence
  Description of Artificial Sequence: Synthetic oligonucleotide
  Antisense strand to SEQ ID NO: 1857395
uugucuaaccauuacagca

SEQ ID NO: 1857397 - RNA, 19 nt, Artificial Sequence
  Description of Artificial Sequence: Synthetic oligonucleotide
  Sense strand starting at position 2854 of SEQ ID NO: 1564130
agaccuuucucuguuaaga

SEQ ID NO: 1857398 - RNA, 19 nt, Artificial Sequence
  Description of Artificial Sequence: Synthetic oligonucleotide
  Antisense strand to SEQ ID NO: 1857397
ucuuaacagagaaaggucu

SEQ ID NO: 1857399 - RNA, 19 nt, Artificial Sequence
  Description of Artificial Sequence: Synthetic oligonucleotide
  Sense strand starting at position 2921 of SEQ ID NO: 1564130
accuguuuguuauucugca

SEQ ID NO: 1857400 - RNA, 19 nt, Artificial Sequence
  Description of Artificial Sequence: Synthetic oligonucleotide
  Antisense strand to SEQ ID NO: 1857399
ugcagaauaacaaacaggu

SEQ ID NO: 1857401 - RNA, 19 nt, Artificial Sequence
  Description of Artificial Sequence: Synthetic oligonucleotide
  Sense strand starting at position 2926 of SEQ ID NO: 1564130
uuuguuauucugcaugucu

SEQ ID NO: 1857402 - RNA, 19 nt, Artificial Sequence
  Description of Artificial Sequence: Synthetic oligonucleotide
  Antisense strand to SEQ ID NO: 1857401
agacaugcagaauaacaaa

SEQ ID NO: 1857403 - RNA, 19 nt, Artificial Sequence
  Description of Artificial Sequence: Synthetic oligonucleotide
  Sense strand starting at position 3032 of SEQ ID NO: 1564130
ucuuucuuccugggauguu

SEQ ID NO: 1857404 - RNA, 19 nt, Artificial Sequence
  Description of Artificial Sequence: Synthetic oligonucleotide
  Antisense strand to SEQ ID NO: 1857403
aacaucccaggaagaaaga

SEQ ID NO: 1857405 - RNA, 19 nt, Artificial Sequence
  Description of Artificial Sequence: Synthetic oligonucleotide
  Sense strand starting at position 3073 of SEQ ID NO: 1564130
ggagucaggucacugacaa

SEQ ID NO: 1857406 - RNA, 19 nt, Artificial Sequence
  Description of Artificial Sequence: Synthetic oligonucleotide
  Antisense strand to SEQ ID NO: 1857405
uugucagugaccugacucc

SEQ ID NO: 1857407 - RNA, 19 nt, Artificial Sequence
  Description of Artificial Sequence: Synthetic oligonucleotide
  Sense strand starting at position 3074 of SEQ ID NO: 1564130
gagucaggucacugacaau

SEQ ID NO: 1857408 - RNA, 19 nt, Artificial Sequence
  Description of Artificial Sequence: Synthetic oligonucleotide
  Antisense strand to SEQ ID NO: 1857407
auugucagugaccugacuc

SEQ ID NO: 1857409 - RNA, 19 nt, Artificial Sequence
  Description of Artificial Sequence: Synthetic oligonucleotide
  Sense strand starting at position 3077 of SEQ ID NO: 1564130
ucaggucacugacaauaga

SEQ ID NO: 1857410 - RNA, 19 nt, Artificial Sequence
  Description of Artificial Sequence: Synthetic oligonucleotide
  Antisense strand to SEQ ID NO: 1857409
ucuauugucagugaccuga

SEQ ID NO: 1857411 - RNA, 19 nt, Artificial Sequence
  Description of Artificial Sequence: Synthetic oligonucleotide
  Sense strand starting at position 3088 of SEQ ID NO: 1564130
acaauagaguugucuuugu

SEQ ID NO: 1857412 - RNA, 19 nt, Artificial Sequence
  Description of Artificial Sequence: Synthetic oligonucleotide
  Antisense strand to SEQ ID NO: 1857411
acaaagacaacucuauugu

SEQ ID NO: 1857413 - RNA, 19 nt, Artificial Sequence
  Description of Artificial Sequence: Synthetic oligonucleotide
  Sense strand starting at position 3092 of SEQ ID NO: 1564130
uagaguugucuuuguccug

SEQ ID NO: 1857414 - RNA, 19 nt, Artificial Sequence
  Description of Artificial Sequence: Synthetic oligonucleotide
  Antisense strand to SEQ ID NO: 1857413
caggacaaagacaacucua

SEQ ID NO: 1857415 - RNA, 19 nt, Artificial Sequence
  Description of Artificial Sequence: Synthetic oligonucleotide
  Sense strand starting at position 3098 of SEQ ID NO: 1564130
ugucuuuguccugcauguu

SEQ ID NO: 1857416 - RNA, 19 nt, Artificial Sequence
  Description of Artificial Sequence: Synthetic oligonucleotide
  Antisense strand to SEQ ID NO: 1857415
aacaugcaggacaaagaca

SEQ ID NO: 1857417 - RNA, 19 nt, Artificial Sequence
  Description of Artificial Sequence: Synthetic oligonucleotide
  Sense strand starting at position 3195 of SEQ ID NO: 1564130
cccugcacuugguuuaauu

SEQ ID NO: 1857418 - RNA, 19 nt, Artificial Sequence
  Description of Artificial Sequence: Synthetic oligonucleotide
  Antisense strand to SEQ ID NO: 1857417
aauuaaaccaagugcaggg

SEQ ID NO: 1857419 - RNA, 19 nt, Artificial Sequence
  Description of Artificial Sequence: Synthetic oligonucleotide
  Sense strand starting at position 3231 of SEQ ID NO: 1564130
ugaaauucuuaacucucga

SEQ ID NO: 1857420 - RNA, 19 nt, Artificial Sequence
  Description of Artificial Sequence: Synthetic oligonucleotide
  Antisense strand to SEQ ID NO: 1857419
ucgagaguuaagaauuuca

SEQ ID NO: 1857421 - RNA, 19 nt, Artificial Sequence
  Description of Artificial Sequence: Synthetic oligonucleotide
  Sense strand starting at position 3385 of SEQ ID NO: 1564130
ccuuguuuccugcaaggua

SEQ ID NO: 1857422 - RNA, 19 nt, Artificial Sequence
  Description of Artificial Sequence: Synthetic oligonucleotide
  Antisense strand to SEQ ID NO: 1857421
uaccuugcaggaaacaagg

SEQ ID NO: 1857423 - RNA, 19 nt, Artificial Sequence
  Description of Artificial Sequence: Synthetic oligonucleotide
  Sense strand starting at position 3824 of SEQ ID NO: 1564130
agaguuaaauuggccucaa

SEQ ID NO: 1857424 - RNA, 19 nt, Artificial Sequence
  Description of Artificial Sequence: Synthetic oligonucleotide
  Antisense strand to SEQ ID NO: 1857423
uugaggccaauuuaacucu

SEQ ID NO: 1857425 - RNA, 19 nt, Artificial Sequence
  Description of Artificial Sequence: Synthetic oligonucleotide
  Sense strand starting at position 3825 of SEQ ID NO: 1564130
gaguuaaauuggccucaau

SEQ ID NO: 1857426 - RNA, 19 nt, Artificial Sequence
  Description of Artificial Sequence: Synthetic oligonucleotide
  Antisense strand to SEQ ID NO: 1857425
auugaggccaauuuaacuc

SEQ ID NO: 1857427 - RNA, 19 nt, Artificial Sequence
  Description of Artificial Sequence: Synthetic oligonucleotide
  Sense strand starting at position 3828 of SEQ ID NO: 1564130
uuaaauuggccucaauaug

SEQ ID NO: 1857428 - RNA, 19 nt, Artificial Sequence
  Description of Artificial Sequence: Synthetic oligonucleotide
  Antisense strand to SEQ ID NO: 1857427
cauauugaggccaauuuaa

SEQ ID NO: 1857429 - RNA, 19 nt, Artificial Sequence
  Description of Artificial Sequence: Synthetic oligonucleotide
  Sense strand starting at position 3849 of SEQ ID NO: 1564130
accuacauuguugggauaa

SEQ ID NO: 1857430 - RNA, 19 nt, Artificial Sequence
  Description of Artificial Sequence: Synthetic oligonucleotide
  Antisense strand to SEQ ID NO: 1857429
uuaucccaacaauguaggu

SEQ ID NO: 1857431 - RNA, 19 nt, Artificial Sequence
  Description of Artificial Sequence: Synthetic oligonucleotide
  Sense strand starting at position 3874 of SEQ ID NO: 1564130
gaguuauugcaaggauguu

SEQ ID NO: 1857432 - RNA, 19 nt, Artificial Sequence
  Description of Artificial Sequence: Synthetic oligonucleotide
  Antisense strand to SEQ ID NO: 1857431
aacauccuugcaauaacuc

SEQ ID NO: 1857433 - RNA, 19 nt, Artificial Sequence
  Description of Artificial Sequence: Synthetic oligonucleotide
  Sense strand starting at position 3880 of SEQ ID NO: 1564130
uugcaaggauguucccaau

SEQ ID NO: 1857434 - RNA, 19 nt, Artificial Sequence
  Description of Artificial Sequence: Synthetic oligonucleotide
  Antisense strand to SEQ ID NO: 1857433
auugggaacauccuugcaa

SEQ ID NO: 1857435 - RNA, 19 nt, Artificial Sequence
  Description of Artificial Sequence: Synthetic oligonucleotide
  Sense strand starting at position 3951 of SEQ ID NO: 1564130
cuccaauugggccgugagu

SEQ ID NO: 1857436 - RNA, 19 nt, Artificial Sequence
  Description of Artificial Sequence: Synthetic oligonucleotide
  Antisense strand to SEQ ID NO: 1857435
acucacggcccaauuggag

SEQ ID NO: 1857437 - RNA, 19 nt, Artificial Sequence
  Description of Artificial Sequence: Synthetic oligonucleotide
  Sense strand starting at position 3982 of SEQ ID NO: 1564130
ucaggaacauguucucauu

SEQ ID NO: 1857438 - RNA, 19 nt, Artificial Sequence
  Description of Artificial Sequence: Synthetic oligonucleotide
  Antisense strand to SEQ ID NO: 1857437
aaugagaacauguuccuga

SEQ ID NO: 1857439 - RNA, 19 nt, Artificial Sequence
  Description of Artificial Sequence: Synthetic oligonucleotide
  Sense strand starting at position 949 of SEQ ID NO: 1564131
ggagcaaauaggugguuaa

SEQ ID NO: 1857440 - RNA, 19 nt, Artificial Sequence
  Description of Artificial Sequence: Synthetic oligonucleotide
  Antisense strand to SEQ ID NO: 1857439
uuaaccaccuauuugcucc

SEQ ID NO: 1857441 - RNA, 19 nt, Artificial Sequence
  Description of Artificial Sequence: Synthetic oligonucleotide
  Sense strand starting at position 950 of SEQ ID NO: 1564131
gagcaaauaggugguuaau

SEQ ID NO: 1857442 - RNA, 19 nt, Artificial Sequence
  Description of Artificial Sequence: Synthetic oligonucleotide
  Antisense strand to SEQ ID NO: 1857441
auuaaccaccuauuugcuc

SEQ ID NO: 1857443 - RNA, 19 nt, Artificial Sequence
  Description of Artificial Sequence: Synthetic oligonucleotide
  Sense strand starting at position 952 of SEQ ID NO: 1564131
gcaaauaggugguuaauag

SEQ ID NO: 1857444 - RNA, 19 nt, Artificial Sequence
  Description of Artificial Sequence: Synthetic oligonucleotide
  Antisense strand to SEQ ID NO: 1857443
cuauuaaccaccuauuugc

SEQ ID NO: 1857445 - RNA, 19 nt, Artificial Sequence
  Description of Artificial Sequence: Synthetic oligonucleotide
  Sense strand starting at position 953 of SEQ ID NO: 1564131
caaauaggugguuaauagu

SEQ ID NO: 1857446 - RNA, 19 nt, Artificial Sequence
  Description of Artificial Sequence: Synthetic oligonucleotide
  Antisense strand to SEQ ID NO: 1857445
acuauuaaccaccuauuug

SEQ ID NO: 1857447 - RNA, 19 nt, Artificial Sequence
  Description of Artificial Sequence: Synthetic oligonucleotide
  Sense strand starting at position 1056 of SEQ ID NO: 1564131
aguagaguccugggaguag

SEQ ID NO: 1857448 - RNA, 19 nt, Artificial Sequence
  Description of Artificial Sequence: Synthetic oligonucleotide
  Antisense strand to SEQ ID NO: 1857447
cuacucccaggacucuacu

SEQ ID NO: 1857449 - RNA, 19 nt, Artificial Sequence
  Description of Artificial Sequence: Synthetic oligonucleotide
  Sense strand starting at position 1166 of SEQ ID NO: 1564131
aaauguuguagcuagagag

SEQ ID NO: 1857450 - RNA, 19 nt, Artificial Sequence
  Description of Artificial Sequence: Synthetic oligonucleotide
  Antisense strand to SEQ ID NO: 1857449
cucucuagcuacaacauuu

SEQ ID NO: 1857451 - RNA, 19 nt, Artificial Sequence
  Description of Artificial Sequence: Synthetic oligonucleotide
  Sense strand starting at position 1180 of SEQ ID NO: 1564131
gagagccaugcauagucaa

SEQ ID NO: 1857452 - RNA, 19 nt, Artificial Sequence
  Description of Artificial Sequence: Synthetic oligonucleotide
  Antisense strand to SEQ ID NO: 1857451
uugacuaugcauggcucuc

SEQ ID NO: 1857453 - RNA, 19 nt, Artificial Sequence
  Description of Artificial Sequence: Synthetic oligonucleotide
  Sense strand starting at position 1271 of SEQ ID NO: 1564131
guuaaauauauaggugagu

SEQ ID NO: 1857454 - RNA, 19 nt, Artificial Sequence
  Description of Artificial Sequence: Synthetic oligonucleotide
  Antisense strand to SEQ ID NO: 1857453
acucaccuauauauuuaac

SEQ ID NO: 1857455 - RNA, 19 nt, Artificial Sequence
  Description of Artificial Sequence: Synthetic oligonucleotide
  Sense strand starting at position 1276 of SEQ ID NO: 1564131
auauauaggugagugacaa

SEQ ID NO: 1857456 - RNA, 19 nt, Artificial Sequence
  Description of Artificial Sequence: Synthetic oligonucleotide
  Antisense strand to SEQ ID NO: 1857455
uugucacucaccuauauau

SEQ ID NO: 1857457 - RNA, 19 nt, Artificial Sequence
  Description of Artificial Sequence: Synthetic oligonucleotide
  Sense strand starting at position 1321 of SEQ ID NO: 1564131
aggagaauugugcaaguua

SEQ ID NO: 1857458 - RNA, 19 nt, Artificial Sequence
  Description of Artificial Sequence: Synthetic oligonucleotide
  Antisense strand to SEQ ID NO: 1857457
uaacuugcacaauucuccu

SEQ ID NO: 1857459 - RNA, 19 nt, Artificial Sequence
  Description of Artificial Sequence: Synthetic oligonucleotide
  Sense strand starting at position 1437 of SEQ ID NO: 1564131
aguccuuugcauuaauaag

SEQ ID NO: 1857460 - RNA, 19 nt, Artificial Sequence
  Description of Artificial Sequence: Synthetic oligonucleotide
  Antisense strand to SEQ ID NO: 1857459
cuuauuaaugcaaaggacu

SEQ ID NO: 1857461 - RNA, 19 nt, Artificial Sequence
  Description of Artificial Sequence: Synthetic oligonucleotide
  Sense strand starting at position 1536 of SEQ ID NO: 1564131
ggcacagaaguucagaguu

SEQ ID NO: 1857462 - RNA, 19 nt, Artificial Sequence
  Description of Artificial Sequence: Synthetic oligonucleotide
  Antisense strand to SEQ ID NO: 1857461
aacucugaacuucugugcc

SEQ ID NO: 1857463 - RNA, 19 nt, Artificial Sequence
  Description of Artificial Sequence: Synthetic oligonucleotide
  Sense strand starting at position 1558 of SEQ ID NO: 1564131
aagugauguugggugaaac

SEQ ID NO: 1857464 - RNA, 19 nt, Artificial Sequence
  Description of Artificial Sequence: Synthetic oligonucleotide
  Antisense strand to SEQ ID NO: 1857463
guuucacccaacaucacuu

SEQ ID NO: 1857465 - RNA, 19 nt, Artificial Sequence
  Description of Artificial Sequence: Synthetic oligonucleotide
  Sense strand starting at position 1559 of SEQ ID NO: 1564131
agugauguugggugaaaca

SEQ ID NO: 1857466 - RNA, 19 nt, Artificial Sequence
  Description of Artificial Sequence: Synthetic oligonucleotide
  Antisense strand to SEQ ID NO: 1857465
uguuucacccaacaucacu

SEQ ID NO: 1857467 - RNA, 19 nt, Artificial Sequence
  Description of Artificial Sequence: Synthetic oligonucleotide
  Sense strand starting at position 1647 of SEQ ID NO: 1564131
caaagaguagcugagucaa

SEQ ID NO: 1857468 - RNA, 19 nt, Artificial Sequence
  Description of Artificial Sequence: Synthetic oligonucleotide
  Antisense strand to SEQ ID NO: 1857467
uugacucagcuacucuuug

SEQ ID NO: 1857469 - RNA, 19 nt, Artificial Sequence
  Description of Artificial Sequence: Synthetic oligonucleotide
  Sense strand starting at position 1649 of SEQ ID NO: 1564131
aagaguagcugagucaaau

SEQ ID NO: 1857470 - RNA, 19 nt, Artificial Sequence
  Description of Artificial Sequence: Synthetic oligonucleotide
  Antisense strand to SEQ ID NO: 1857469
auuugacucagcuacucuu

SEQ ID NO: 1857471 - RNA, 19 nt, Artificial Sequence
  Description of Artificial Sequence: Synthetic oligonucleotide
  Sense strand starting at position 1658 of SEQ ID NO: 1564131
ugagucaaaucucuugaca

SEQ ID NO: 1857472 - RNA, 19 nt, Artificial Sequence
  Description of Artificial Sequence: Synthetic oligonucleotide
  Antisense strand to SEQ ID NO: 1857471
ugucaagagauuugacuca

SEQ ID NO: 1857473 - RNA, 19 nt, Artificial Sequence
  Description of Artificial Sequence: Synthetic oligonucleotide
  Sense strand starting at position 1722 of SEQ ID NO: 1564131
uuuccuugaccacagugau

SEQ ID NO: 1857474 - RNA, 19 nt, Artificial Sequence
  Description of Artificial Sequence: Synthetic oligonucleotide
  Antisense strand to SEQ ID NO: 1857473
aucacuguggucaaggaaa

SEQ ID NO: 1857475 - RNA, 19 nt, Artificial Sequence
  Description of Artificial Sequence: Synthetic oligonucleotide
  Sense strand starting at position 1768 of SEQ ID NO: 1564131
ggcggugagaaauggagau

SEQ ID NO: 1857476 - RNA, 19 nt, Artificial Sequence
  Description of Artificial Sequence: Synthetic oligonucleotide
  Antisense strand to SEQ ID NO: 1857475
aucuccauuucucaccgcc

SEQ ID NO: 1857477 - RNA, 19 nt, Artificial Sequence
  Description of Artificial Sequence: Synthetic oligonucleotide
  Sense strand starting at position 1794 of SEQ ID NO: 1564131
cuuuaaauuguauggaauc

SEQ ID NO: 1857478 - RNA, 19 nt, Artificial Sequence
  Description of Artificial Sequence: Synthetic oligonucleotide
  Antisense strand to SEQ ID NO: 1857477
gauuccauacaauuuaaag

SEQ ID NO: 1857479 - RNA, 19 nt, Artificial Sequence
  Description of Artificial Sequence: Synthetic oligonucleotide
  Sense strand starting at position 2069 of SEQ ID NO: 1564131
gggagggucugguuguaaa

SEQ ID NO: 1857480 - RNA, 19 nt, Artificial Sequence
  Description of Artificial Sequence: Synthetic oligonucleotide
  Antisense strand to SEQ ID NO: 1857479
uuuacaaccagacccuccc

SEQ ID NO: 1857481 - RNA, 19 nt, Artificial Sequence
  Description of Artificial Sequence: Synthetic oligonucleotide
  Sense strand starting at position 2090 of SEQ ID NO: 1564131
cagguaguagacuggugaa

SEQ ID NO: 1857482 - RNA, 19 nt, Artificial Sequence
  Description of Artificial Sequence: Synthetic oligonucleotide
  Antisense strand to SEQ ID NO: 1857481
uucaccagucuacuaccug

SEQ ID NO: 1857483 - RNA, 19 nt, Artificial Sequence
  Description of Artificial Sequence: Synthetic oligonucleotide
  Sense strand starting at position 2221 of SEQ ID NO: 1564131
gccuauuaccauuagugau

SEQ ID NO: 1857484 - RNA, 19 nt, Artificial Sequence
  Description of Artificial Sequence: Synthetic oligonucleotide
  Antisense strand to SEQ ID NO: 1857483
aucacuaaugguaauaggc

SEQ ID NO: 1857485 - RNA, 19 nt, Artificial Sequence
  Description of Artificial Sequence: Synthetic oligonucleotide
  Sense strand starting at position 2231 of SEQ ID NO: 1564131
auuagugauuuguucccuu

SEQ ID NO: 1857486 - RNA, 19 nt, Artificial Sequence
  Description of Artificial Sequence: Synthetic oligonucleotide
  Antisense strand to SEQ ID NO: 1857485
aagggaacaaaucacuaau

SEQ ID NO: 1857487 - RNA, 19 nt, Artificial Sequence
  Description of Artificial Sequence: Synthetic oligonucleotide
  Sense strand starting at position 2234 of SEQ ID NO: 1564131
agugauuuguucccuucuu

SEQ ID NO: 1857488 - RNA, 19 nt, Artificial Sequence
  Description of Artificial Sequence: Synthetic oligonucleotide
  Antisense strand to SEQ ID NO: 1857487
aagaagggaacaaaucacu

SEQ ID NO: 1857489 - RNA, 19 nt, Artificial Sequence
  Description of Artificial Sequence: Synthetic oligonucleotide
  Sense strand starting at position 2235 of SEQ ID NO: 1564131
gugauuuguucccuucuug

SEQ ID NO: 1857490 - RNA, 19 nt, Artificial Sequence
  Description of Artificial Sequence: Synthetic oligonucleotide
  Antisense strand to SEQ ID NO: 1857489
caagaagggaacaaaucac

SEQ ID NO: 1857491 - RNA, 19 nt, Artificial Sequence
  Description of Artificial Sequence: Synthetic oligonucleotide
  Sense strand starting at position 2281 of SEQ ID NO: 1564131
gggauagucuacuuuaaac

SEQ ID NO: 1857492 - RNA, 19 nt, Artificial Sequence
  Description of Artificial Sequence: Synthetic oligonucleotide
  Antisense strand to SEQ ID NO: 1857491
guuuaaaguagacuauccc

SEQ ID NO: 1857493 - RNA, 19 nt, Artificial Sequence
  Description of Artificial Sequence: Synthetic oligonucleotide
  Sense strand starting at position 2371 of SEQ ID NO: 1564131
acuuaaguuggugauugua

SEQ ID NO: 1857494 - RNA, 19 nt, Artificial Sequence
  Description of Artificial Sequence: Synthetic oligonucleotide
  Antisense strand to SEQ ID NO: 1857493
uacaaucaccaacuuaagu

SEQ ID NO: 1857495 - RNA, 19 nt, Artificial Sequence
  Description of Artificial Sequence: Synthetic oligonucleotide
  Sense strand starting at position 2374 of SEQ ID NO: 1564131
uaaguuggugauuguauuu

SEQ ID NO: 1857496 - RNA, 19 nt, Artificial Sequence
  Description of Artificial Sequence: Synthetic oligonucleotide
  Antisense strand to SEQ ID NO: 1857495
aaauacaaucaccaacuua

SEQ ID NO: 1857497 - RNA, 19 nt, Artificial Sequence
  Description of Artificial Sequence: Synthetic oligonucleotide
  Sense strand starting at position 2463 of SEQ ID NO: 1564131
gugugagugucuaugcaug

SEQ ID NO: 1857498 - RNA, 19 nt, Artificial Sequence
  Description of Artificial Sequence: Synthetic oligonucleotide
  Antisense strand to SEQ ID NO: 1857497
caugcauagacacucacac

SEQ ID NO: 1857499 - RNA, 19 nt, Artificial Sequence
  Description of Artificial Sequence: Synthetic oligonucleotide
  Sense strand starting at position 2747 of SEQ ID NO: 1564131
auaucuguaguguacugau

SEQ ID NO: 1857500 - RNA, 19 nt, Artificial Sequence
  Description of Artificial Sequence: Synthetic oligonucleotide
  Antisense strand to SEQ ID NO: 1857499
aucaguacacuacagauau

SEQ ID NO: 1857501 - RNA, 19 nt, Artificial Sequence
  Description of Artificial Sequence: Synthetic oligonucleotide
  Sense strand starting at position 2854 of SEQ ID NO: 1564131
augccucucagaggagaau

SEQ ID NO: 1857502 - RNA, 19 nt, Artificial Sequence
  Description of Artificial Sequence: Synthetic oligonucleotide
  Antisense strand to SEQ ID NO: 1857501
auucuccucugagaggcau

SEQ ID NO: 1857503 - RNA, 19 nt, Artificial Sequence
  Description of Artificial Sequence: Synthetic oligonucleotide
  Sense strand starting at position 2881 of SEQ ID NO: 1564131
ccuguaugucaccauaaag

SEQ ID NO: 1857504 - RNA, 19 nt, Artificial Sequence
  Description of Artificial Sequence: Synthetic oligonucleotide
  Antisense strand to SEQ ID NO: 1857503
cuuuauggugacauacagg

SEQ ID NO: 1857505 - RNA, 19 nt, Artificial Sequence
  Description of Artificial Sequence: Synthetic oligonucleotide
  Sense strand starting at position 3070 of SEQ ID NO: 1564131
guaucuuaacuaugagaac

SEQ ID NO: 1857506 - RNA, 19 nt, Artificial Sequence
  Description of Artificial Sequence: Synthetic oligonucleotide
  Antisense strand to SEQ ID NO: 1857505
guucucauaguuaagauac

SEQ ID NO: 1857507 - RNA, 19 nt, Artificial Sequence
  Description of Artificial Sequence: Synthetic oligonucleotide
  Sense strand starting at position 3348 of SEQ ID NO: 1564131
uaauuucuagcaugguguu

SEQ ID NO: 1857508 - RNA, 19 nt, Artificial Sequence
  Description of Artificial Sequence: Synthetic oligonucleotide
  Antisense strand to SEQ ID NO: 1857507
aacaccaugcuagaaauua

SEQ ID NO: 1857509 - RNA, 19 nt, Artificial Sequence
  Description of Artificial Sequence: Synthetic oligonucleotide
  Sense strand starting at position 3458 of SEQ ID NO: 1564131
ugaagaacugugcacucaa

SEQ ID NO: 1857510 - RNA, 19 nt, Artificial Sequence
  Description of Artificial Sequence: Synthetic oligonucleotide
  Antisense strand to SEQ ID NO: 1857509
uugagugcacaguucuuca

SEQ ID NO: 1857511 - RNA, 19 nt, Artificial Sequence
  Description of Artificial Sequence: Synthetic oligonucleotide
  Sense strand starting at position 3589 of SEQ ID NO: 1564131
agcuucuaccuuugaagag

SEQ ID NO: 1857512 - RNA, 19 nt, Artificial Sequence
  Description of Artificial Sequence: Synthetic oligonucleotide
  Antisense strand to SEQ ID NO: 1857511
cucuucaaagguagaagcu

SEQ ID NO: 1857513 - RNA, 19 nt, Artificial Sequence
  Description of Artificial Sequence: Synthetic oligonucleotide
  Sense strand starting at position 3671 of SEQ ID NO: 1564131
cucugaauuucugcugcau

SEQ ID NO: 1857514 - RNA, 19 nt, Artificial Sequence
  Description of Artificial Sequence: Synthetic oligonucleotide
  Antisense strand to SEQ ID NO: 1857513
augcagcagaaauucagag

SEQ ID NO: 1857515 - RNA, 19 nt, Artificial Sequence
  Description of Artificial Sequence: Synthetic oligonucleotide
  Sense strand starting at position 3770 of SEQ ID NO: 1564131
cugugcugggaacauaaua

SEQ ID NO: 1857516 - RNA, 19 nt, Artificial Sequence
  Description of Artificial Sequence: Synthetic oligonucleotide
  Antisense strand to SEQ ID NO: 1857515
uauuauguucccagcacag

SEQ ID NO: 1857517 - RNA, 19 nt, Artificial Sequence
  Description of Artificial Sequence: Synthetic oligonucleotide
  Sense strand starting at position 3957 of SEQ ID NO: 1564131
gcaagauaaugaguuagau

SEQ ID NO: 1857518 - RNA, 19 nt, Artificial Sequence
  Description of Artificial Sequence: Synthetic oligonucleotide
  Antisense strand to SEQ ID NO: 1857517
aucuaacucauuaucuugc

SEQ ID NO: 1857519 - RNA, 19 nt, Artificial Sequence
  Description of Artificial Sequence: Synthetic oligonucleotide
  Sense strand starting at position 205 of SEQ ID NO: 1564132
aagacucuuggguaaugca

SEQ ID NO: 1857520 - RNA, 19 nt, Artificial Sequence
  Description of Artificial Sequence: Synthetic oligonucleotide
  Antisense strand to SEQ ID NO: 1857519
ugcauuacccaagagucuu

SEQ ID NO: 1857521 - RNA, 19 nt, Artificial Sequence
  Description of Artificial Sequence: Synthetic oligonucleotide
  Sense strand starting at position 214 of SEQ ID NO: 1564132
ggguaaugcauugaauguc

SEQ ID NO: 1857522 - RNA, 19 nt, Artificial Sequence
  Description of Artificial Sequence: Synthetic oligonucleotide
  Antisense strand to SEQ ID NO: 1857521
gacauucaaugcauuaccc

SEQ ID NO: 1857523 - RNA, 19 nt, Artificial Sequence
  Description of Artificial Sequence: Synthetic oligonucleotide
  Sense strand starting at position 220 of SEQ ID NO: 1564132
ugcauugaaugucuccaaa

SEQ ID NO: 1857524 - RNA, 19 nt, Artificial Sequence
  Description of Artificial Sequence: Synthetic oligonucleotide
  Antisense strand to SEQ ID NO: 1857523
uuuggagacauucaaugca

SEQ ID NO: 1857525 - RNA, 19 nt, Artificial Sequence
  Description of Artificial Sequence: Synthetic oligonucleotide
  Sense strand starting at position 331 of SEQ ID NO: 1564132
ucauauucugaaggaccua

SEQ ID NO: 1857526 - RNA, 19 nt, Artificial Sequence
  Description of Artificial Sequence: Synthetic oligonucleotide
  Antisense strand to SEQ ID NO: 1857525
uagguccuucagaauauga

SEQ ID NO: 1857527 - RNA, 19 nt, Artificial Sequence
  Description of Artificial Sequence: Synthetic oligonucleotide
  Sense strand starting at position 393 of SEQ ID NO: 1564132
auagacaaguguuucucau

SEQ ID NO: 1857528 - RNA, 19 nt, Artificial Sequence
  Description of Artificial Sequence: Synthetic oligonucleotide
  Antisense strand to SEQ ID NO: 1857527
augagaaacacuugucuau

SEQ ID NO: 1857529 - RNA, 19 nt, Artificial Sequence
  Description of Artificial Sequence: Synthetic oligonucleotide
  Sense strand starting at position 750 of SEQ ID NO: 1564132
ggcuaagcacuagagagua

SEQ ID NO: 1857530 - RNA, 19 nt, Artificial Sequence
  Description of Artificial Sequence: Synthetic oligonucleotide
  Antisense strand to SEQ ID NO: 1857529
uacucucuagugcuuagcc

SEQ ID NO: 1857531 - RNA, 19 nt, Artificial Sequence
  Description of Artificial Sequence: Synthetic oligonucleotide
  Sense strand starting at position 763 of SEQ ID NO: 1564132
agaguaaaguccucuauca

SEQ ID NO: 1857532 - RNA, 19 nt, Artificial Sequence
  Description of Artificial Sequence: Synthetic oligonucleotide
  Antisense strand to SEQ ID NO: 1857531
ugauagaggacuuuacucu

SEQ ID NO: 1857533 - RNA, 19 nt, Artificial Sequence
  Description of Artificial Sequence: Synthetic oligonucleotide
  Sense strand starting at position 765 of SEQ ID NO: 1564132
aguaaaguccucuaucaug

SEQ ID NO: 1857534 - RNA, 19 nt, Artificial Sequence
  Description of Artificial Sequence: Synthetic oligonucleotide
  Antisense strand to SEQ ID NO: 1857533
caugauagaggacuuuacu

SEQ ID NO: 1857535 - RNA, 19 nt, Artificial Sequence
  Description of Artificial Sequence: Synthetic oligonucleotide
  Sense strand starting at position 826 of SEQ ID NO: 1564132
guauuaaaguaacuacaga

SEQ ID NO: 1857536 - RNA, 19 nt, Artificial Sequence
  Description of Artificial Sequence: Synthetic oligonucleotide
  Antisense strand to SEQ ID NO: 1857535
ucuguaguuacuuuaauac

SEQ ID NO: 1857537 - RNA, 19 nt, Artificial Sequence
  Description of Artificial Sequence: Synthetic oligonucleotide
  Sense strand starting at position 908 of SEQ ID NO: 1564132
guaccuaaacgagagucaa

SEQ ID NO: 1857538 - RNA, 19 nt, Artificial Sequence
  Description of Artificial Sequence: Synthetic oligonucleotide
  Antisense strand to SEQ ID NO: 1857537
uugacucucguuuagguac

SEQ ID NO: 1857539 - RNA, 19 nt, Artificial Sequence
  Description of Artificial Sequence: Synthetic oligonucleotide
  Sense strand starting at position 978 of SEQ ID NO: 1564132
gaaugaaagcagugacuga

SEQ ID NO: 1857540 - RNA, 19 nt, Artificial Sequence
  Description of Artificial Sequence: Synthetic oligonucleotide
  Antisense strand to SEQ ID NO: 1857539
ucagucacugcuuucauuc

SEQ ID NO: 1857541 - RNA, 19 nt, Artificial Sequence
  Description of Artificial Sequence: Synthetic oligonucleotide
  Sense strand starting at position 1092 of SEQ ID NO: 1564132
gcugauccgacacaaguua

SEQ ID NO: 1857542 - RNA, 19 nt, Artificial Sequence
  Description of Artificial Sequence: Synthetic oligonucleotide
  Antisense strand to SEQ ID NO: 1857541
uaacuugugucggaucagc

SEQ ID NO: 1857543 - RNA, 19 nt, Artificial Sequence
  Description of Artificial Sequence: Synthetic oligonucleotide
  Sense strand starting at position 1220 of SEQ ID NO: 1564132
uccauuaucccagggagac

SEQ ID NO: 1857544 - RNA, 19 nt, Artificial Sequence
  Description of Artificial Sequence: Synthetic oligonucleotide
  Antisense strand to SEQ ID NO: 1857543
gucucccugggauaaugga

SEQ ID NO: 1857545 - RNA, 19 nt, Artificial Sequence
  Description of Artificial Sequence: Synthetic oligonucleotide
  Sense strand starting at position 1289 of SEQ ID NO: 1564132
aaccuaguuuaguuaugga

SEQ ID NO: 1857546 - RNA, 19 nt, Artificial Sequence
  Description of Artificial Sequence: Synthetic oligonucleotide
  Antisense strand to SEQ ID NO: 1857545
uccauaacuaaacuagguu

SEQ ID NO: 1857547 - RNA, 19 nt, Artificial Sequence
  Description of Artificial Sequence: Synthetic oligonucleotide
  Sense strand starting at position 1294 of SEQ ID NO: 1564132
aguuuaguuauggagcuca

SEQ ID NO: 1857548 - RNA, 19 nt, Artificial Sequence
  Description of Artificial Sequence: Synthetic oligonucleotide
  Antisense strand to SEQ ID NO: 1857547
ugagcuccauaacuaaacu

SEQ ID NO: 1857549 - RNA, 19 nt, Artificial Sequence
  Description of Artificial Sequence: Synthetic oligonucleotide
  Sense strand starting at position 1313 of SEQ ID NO: 1564132
gcgauauaucgccuuggcu

SEQ ID NO: 1857550 - RNA, 19 nt, Artificial Sequence
  Description of Artificial Sequence: Synthetic oligonucleotide
  Antisense strand to SEQ ID NO: 1857549
agccaaggcgauauaucgc

SEQ ID NO: 1857551 - RNA, 19 nt, Artificial Sequence
  Description of Artificial Sequence: Synthetic oligonucleotide
  Sense strand starting at position 1314 of SEQ ID NO: 1564132
cgauauaucgccuuggcuu

SEQ ID NO: 1857552 - RNA, 19 nt, Artificial Sequence
  Description of Artificial Sequence: Synthetic oligonucleotide
  Antisense strand to SEQ ID NO: 1857551
aagccaaggcgauauaucg

SEQ ID NO: 1857553 - RNA, 19 nt, Artificial Sequence
  Description of Artificial Sequence: Synthetic oligonucleotide
  Sense strand starting at position 1491 of SEQ ID NO: 1564132
cgaugucucccucaggagu

SEQ ID NO: 1857554 - RNA, 19 nt, Artificial Sequence
  Description of Artificial Sequence: Synthetic oligonucleotide
  Antisense strand to SEQ ID NO: 1857553
acuccugagggagacaucg

SEQ ID NO: 1857555 - RNA, 19 nt, Artificial Sequence
  Description of Artificial Sequence: Synthetic oligonucleotide
  Sense strand starting at position 1747 of SEQ ID NO: 1564132
gaggauuaaagaugucgau

SEQ ID NO: 1857556 - RNA, 19 nt, Artificial Sequence
  Description of Artificial Sequence: Synthetic oligonucleotide
  Antisense strand to SEQ ID NO: 1857555
aucgacaucuuuaauccuc

SEQ ID NO: 1857557 - RNA, 19 nt, Artificial Sequence
  Description of Artificial Sequence: Synthetic oligonucleotide
  Sense strand starting at position 1756 of SEQ ID NO: 1564132
agaugucgaucuccaggaa

SEQ ID NO: 1857558 - RNA, 19 nt, Artificial Sequence
  Description of Artificial Sequence: Synthetic oligonucleotide
  Antisense strand to SEQ ID NO: 1857557
uuccuggagaucgacaucu

SEQ ID NO: 1857559 - RNA, 19 nt, Artificial Sequence
  Description of Artificial Sequence: Synthetic oligonucleotide
  Sense strand starting at position 1760 of SEQ ID NO: 1564132
gucgaucuccaggaaguua

SEQ ID NO: 1857560 - RNA, 19 nt, Artificial Sequence
  Description of Artificial Sequence: Synthetic oligonucleotide
  Antisense strand to SEQ ID NO: 1857559
uaacuuccuggagaucgac

SEQ ID NO: 1857561 - RNA, 19 nt, Artificial Sequence
  Description of Artificial Sequence: Synthetic oligonucleotide
  Sense strand starting at position 2202 of SEQ ID NO: 1564132
aauugucucguaccgugua

SEQ ID NO: 1857562 - RNA, 19 nt, Artificial Sequence
  Description of Artificial Sequence: Synthetic oligonucleotide
  Antisense strand to SEQ ID NO: 1857561
uacacgguacgagacaauu

SEQ ID NO: 1857563 - RNA, 19 nt, Artificial Sequence
  Description of Artificial Sequence: Synthetic oligonucleotide
  Sense strand starting at position 2571 of SEQ ID NO: 1564132
gcaaauugaggguacuuau

SEQ ID NO: 1857564 - RNA, 19 nt, Artificial Sequence
  Description of Artificial Sequence: Synthetic oligonucleotide
  Antisense strand to SEQ ID NO: 1857563
auaaguacccucaauuugc

SEQ ID NO: 1857565 - RNA, 19 nt, Artificial Sequence
  Description of Artificial Sequence: Synthetic oligonucleotide
  Sense strand starting at position 2646 of SEQ ID NO: 1564132
gcuugcaacccauaaugga

SEQ ID NO: 1857566 - RNA, 19 nt, Artificial Sequence
  Description of Artificial Sequence: Synthetic oligonucleotide
  Antisense strand to SEQ ID NO: 1857565
uccauuauggguugcaagc

SEQ ID NO: 1857567 - RNA, 19 nt, Artificial Sequence
  Description of Artificial Sequence: Synthetic oligonucleotide
  Sense strand starting at position 2745 of SEQ ID NO: 1564132
ggguagacugggugaugau

SEQ ID NO: 1857568 - RNA, 19 nt, Artificial Sequence
  Description of Artificial Sequence: Synthetic oligonucleotide
  Antisense strand to SEQ ID NO: 1857567
aucaucacccagucuaccc

SEQ ID NO: 1857569 - RNA, 19 nt, Artificial Sequence
  Description of Artificial Sequence: Synthetic oligonucleotide
  Sense strand starting at position 2754 of SEQ ID NO: 1564132
gggugaugauuucagguca

SEQ ID NO: 1857570 - RNA, 19 nt, Artificial Sequence
  Description of Artificial Sequence: Synthetic oligonucleotide
  Antisense strand to SEQ ID NO: 1857569
ugaccugaaaucaucaccc

SEQ ID NO: 1857571 - RNA, 19 nt, Artificial Sequence
  Description of Artificial Sequence: Synthetic oligonucleotide
  Sense strand starting at position 3114 of SEQ ID NO: 1564132
ggaaacaucugaguuuaac

SEQ ID NO: 1857572 - RNA, 19 nt, Artificial Sequence
  Description of Artificial Sequence: Synthetic oligonucleotide
  Antisense strand to SEQ ID NO: 1857571
guuaaacucagauguuucc

SEQ ID NO: 1857573 - RNA, 19 nt, Artificial Sequence
  Description of Artificial Sequence: Synthetic oligonucleotide
  Sense strand starting at position 3561 of SEQ ID NO: 1564132
aaguccuugcgauaagaaa

SEQ ID NO: 1857574 - RNA, 19 nt, Artificial Sequence
  Description of Artificial Sequence: Synthetic oligonucleotide
  Antisense strand to SEQ ID NO: 1857573
uuucuuaucgcaaggacuu

SEQ ID NO: 1857575 - RNA, 19 nt, Artificial Sequence
  Description of Artificial Sequence: Synthetic oligonucleotide
  Sense strand starting at position 3595 of SEQ ID NO: 1564132
aggcauuuaucgccaauuc

SEQ ID NO: 1857576 - RNA, 19 nt, Artificial Sequence
  Description of Artificial Sequence: Synthetic oligonucleotide
  Antisense strand to SEQ ID NO: 1857575
gaauuggcgauaaaugccu

SEQ ID NO: 1857577 - RNA, 19 nt, Artificial Sequence
  Description of Artificial Sequence: Synthetic oligonucleotide
  Sense strand starting at position 3617 of SEQ ID NO: 1564132
cugugugauggaaguguuu

SEQ ID NO: 1857578 - RNA, 19 nt, Artificial Sequence
  Description of Artificial Sequence: Synthetic oligonucleotide
  Antisense strand to SEQ ID NO: 1857577
aaacacuuccaucacacag

SEQ ID NO: 1857579 - RNA, 19 nt, Artificial Sequence
  Description of Artificial Sequence: Synthetic oligonucleotide
  Sense strand starting at position 3629 of SEQ ID NO: 1564132
aguguuuagaaagguagac

SEQ ID NO: 1857580 - RNA, 19 nt, Artificial Sequence
  Description of Artificial Sequence: Synthetic oligonucleotide
  Antisense strand to SEQ ID NO: 1857579
gucuaccuuucuaaacacu

SEQ ID NO: 1857581 - RNA, 19 nt, Artificial Sequence
  Description of Artificial Sequence: Synthetic oligonucleotide
  Sense strand starting at position 3667 of SEQ ID NO: 1564132
aaaggaugauccgcuuaua

SEQ ID NO: 1857582 - RNA, 19 nt, Artificial Sequence
  Description of Artificial Sequence: Synthetic oligonucleotide
  Antisense strand to SEQ ID NO: 1857581
uauaagcggaucauccuuu

SEQ ID NO: 1857583 - RNA, 19 nt, Artificial Sequence
  Description of Artificial Sequence: Synthetic oligonucleotide
  Sense strand starting at position 3670 of SEQ ID NO: 1564132
ggaugauccgcuuauauua

SEQ ID NO: 1857584 - RNA, 19 nt, Artificial Sequence
  Description of Artificial Sequence: Synthetic oligonucleotide
  Antisense strand to SEQ ID NO: 1857583
uaauauaagcggaucaucc

SEQ ID NO: 1857585 - RNA, 19 nt, Artificial Sequence
  Description of Artificial Sequence: Synthetic oligonucleotide
  Sense strand starting at position 3689 of SEQ ID NO: 1564132
aguaaaggaucucugacuu

SEQ ID NO: 1857586 - RNA, 19 nt, Artificial Sequence
  Description of Artificial Sequence: Synthetic oligonucleotide
  Antisense strand to SEQ ID NO: 1857585
aagucagagauccuuuacu

SEQ ID NO: 1857587 - RNA, 19 nt, Artificial Sequence
  Description of Artificial Sequence: Synthetic oligonucleotide
  Sense strand starting at position 3867 of SEQ ID NO: 1564132
cuccgaaucaaguggugau

SEQ ID NO: 1857588 - RNA, 19 nt, Artificial Sequence
  Description of Artificial Sequence: Synthetic oligonucleotide
  Antisense strand to SEQ ID NO: 1857587
aucaccacuugauucggag

SEQ ID NO: 1857589 - RNA, 19 nt, Artificial Sequence
  Description of Artificial Sequence: Synthetic oligonucleotide
  Sense strand starting at position 3943 of SEQ ID NO: 1564132
cgacuuguacgugauuaga

SEQ ID NO: 1857590 - RNA, 19 nt, Artificial Sequence
  Description of Artificial Sequence: Synthetic oligonucleotide
  Antisense strand to SEQ ID NO: 1857589
ucuaaucacguacaagucg

SEQ ID NO: 1857591 - RNA, 19 nt, Artificial Sequence
  Description of Artificial Sequence: Synthetic oligonucleotide
  Sense strand starting at position 3945 of SEQ ID NO: 1564132
acuuguacgugauuagaua

SEQ ID NO: 1857592 - RNA, 19 nt, Artificial Sequence
  Description of Artificial Sequence: Synthetic oligonucleotide
  Antisense strand to SEQ ID NO: 1857591
uaucuaaucacguacaagu

SEQ ID NO: 1857593 - RNA, 19 nt, Artificial Sequence
  Description of Artificial Sequence: Synthetic oligonucleotide
  Sense strand starting at position 3946 of SEQ ID NO: 1564132
cuuguacgugauuagauau

SEQ ID NO: 1857594 - RNA, 19 nt, Artificial Sequence
  Description of Artificial Sequence: Synthetic oligonucleotide
  Antisense strand to SEQ ID NO: 1857593
auaucuaaucacguacaag

SEQ ID NO: 1857595 - RNA, 19 nt, Artificial Sequence
  Description of Artificial Sequence: Synthetic oligonucleotide
  Sense strand starting at position 3956 of SEQ ID NO: 1564132
auuagauauggugguagua

SEQ ID NO: 1857596 - RNA, 19 nt, Artificial Sequence
  Description of Artificial Sequence: Synthetic oligonucleotide
  Antisense strand to SEQ ID NO: 1857595
uacuaccaccauaucuaau

SEQ ID NO: 1857597 - RNA, 19 nt, Artificial Sequence
  Description of Artificial Sequence: Synthetic oligonucleotide
  Sense strand starting at position 3975 of SEQ ID NO: 1564132
uaguguagggcuuaaaugu

SEQ ID NO: 1857598 - RNA, 19 nt, Artificial Sequence
  Description of Artificial Sequence: Synthetic oligonucleotide
  Antisense strand to SEQ ID NO: 1857597
acauuuaagcccuacacua

SEQ ID NO: 1857599 - RNA, 19 nt, Artificial Sequence
  Description of Artificial Sequence: Synthetic oligonucleotide
  Sense strand starting at position 23 of SEQ ID NO: 1564133
gggugugucucauuagagg

SEQ ID NO: 1857600 - RNA, 19 nt, Artificial Sequence
  Description of Artificial Sequence: Synthetic oligonucleotide
  Antisense strand to SEQ ID NO: 1857599
ccucuaaugagacacaccc

SEQ ID NO: 1857601 - RNA, 19 nt, Artificial Sequence
  Description of Artificial Sequence: Synthetic oligonucleotide
  Sense strand starting at position 41 of SEQ ID NO: 1564133
gccacaaaucaagguaaau

SEQ ID NO: 1857602 - RNA, 19 nt, Artificial Sequence
  Description of Artificial Sequence: Synthetic oligonucleotide
  Antisense strand to SEQ ID NO: 1857601
auuuaccuugauuuguggc

SEQ ID NO: 1857603 - RNA, 19 nt, Artificial Sequence
  Description of Artificial Sequence: Synthetic oligonucleotide
  Sense strand starting at position 62 of SEQ ID NO: 1564133
caugacugaccguggaaau

SEQ ID NO: 1857604 - RNA, 19 nt, Artificial Sequence
  Description of Artificial Sequence: Synthetic oligonucleotide
  Antisense strand to SEQ ID NO: 1857603
auuuccacggucagucaug

SEQ ID NO: 1857605 - RNA, 19 nt, Artificial Sequence
  Description of Artificial Sequence: Synthetic oligonucleotide
  Sense strand starting at position 63 of SEQ ID NO: 1564133
augacugaccguggaaaua

SEQ ID NO: 1857606 - RNA, 19 nt, Artificial Sequence
  Description of Artificial Sequence: Synthetic oligonucleotide
  Antisense strand to SEQ ID NO: 1857605
uauuuccacggucagucau

SEQ ID NO: 1857607 - RNA, 19 nt, Artificial Sequence
  Description of Artificial Sequence: Synthetic oligonucleotide
  Sense strand starting at position 73 of SEQ ID NO: 1564133
guggaaauaucagaaaugu

SEQ ID NO: 1857608 - RNA, 19 nt, Artificial Sequence
  Description of Artificial Sequence: Synthetic oligonucleotide
  Antisense strand to SEQ ID NO: 1857607
acauuucugauauuuccac

SEQ ID NO: 1857609 - RNA, 19 nt, Artificial Sequence
  Description of Artificial Sequence: Synthetic oligonucleotide
  Sense strand starting at position 138 of SEQ ID NO: 1564133
ugacaacucuucuaggaug

SEQ ID NO: 1857610 - RNA, 19 nt, Artificial Sequence
  Description of Artificial Sequence: Synthetic oligonucleotide
  Antisense strand to SEQ ID NO: 1857609
cauccuagaagaguuguca

SEQ ID NO: 1857611 - RNA, 19 nt, Artificial Sequence
  Description of Artificial Sequence: Synthetic oligonucleotide
  Sense strand starting at position 197 of SEQ ID NO: 1564133
agaggugaacuguauguuu

SEQ ID NO: 1857612 - RNA, 19 nt, Artificial Sequence
  Description of Artificial Sequence: Synthetic oligonucleotide
  Antisense strand to SEQ ID NO: 1857611
aaacauacaguucaccucu

SEQ ID NO: 1857613 - RNA, 19 nt, Artificial Sequence
  Description of Artificial Sequence: Synthetic oligonucleotide
  Sense strand starting at position 199 of SEQ ID NO: 1564133
aggugaacuguauguuucu

SEQ ID NO: 1857614 - RNA, 19 nt, Artificial Sequence
  Description of Artificial Sequence: Synthetic oligonucleotide
  Antisense strand to SEQ ID NO: 1857613
agaaacauacaguucaccu

SEQ ID NO: 1857615 - RNA, 19 nt, Artificial Sequence
  Description of Artificial Sequence: Synthetic oligonucleotide
  Sense strand starting at position 206 of SEQ ID NO: 1564133
cuguauguuucuccucaga

SEQ ID NO: 1857616 - RNA, 19 nt, Artificial Sequence
  Description of Artificial Sequence: Synthetic oligonucleotide
  Antisense strand to SEQ ID NO: 1857615
ucugaggagaaacauacag

SEQ ID NO: 1857617 - RNA, 19 nt, Artificial Sequence
  Description of Artificial Sequence: Synthetic oligonucleotide
  Sense strand starting at position 208 of SEQ ID NO: 1564133
guauguuucuccucagauc

SEQ ID NO: 1857618 - RNA, 19 nt, Artificial Sequence
  Description of Artificial Sequence: Synthetic oligonucleotide
  Antisense strand to SEQ ID NO: 1857617
gaucugaggagaaacauac

SEQ ID NO: 1857619 - RNA, 19 nt, Artificial Sequence
  Description of Artificial Sequence: Synthetic oligonucleotide
  Sense strand starting at position 260 of SEQ ID NO: 1564133
ggccauuuguucugagaag

SEQ ID NO: 1857620 - RNA, 19 nt, Artificial Sequence
  Description of Artificial Sequence: Synthetic oligonucleotide
  Antisense strand to SEQ ID NO: 1857619
cuucucagaacaaauggcc

SEQ ID NO: 1857621 - RNA, 19 nt, Artificial Sequence
  Description of Artificial Sequence: Synthetic oligonucleotide
  Sense strand starting at position 261 of SEQ ID NO: 1564133
gccauuuguucugagaagg

SEQ ID NO: 1857622 - RNA, 19 nt, Artificial Sequence
  Description of Artificial Sequence: Synthetic oligonucleotide
  Antisense strand to SEQ ID NO: 1857621
ccuucucagaacaaauggc

SEQ ID NO: 1857623 - RNA, 19 nt, Artificial Sequence
  Description of Artificial Sequence: Synthetic oligonucleotide
  Sense strand starting at position 354 of SEQ ID NO: 1564133
guuucuuccuuugugguua

SEQ ID NO: 1857624 - RNA, 19 nt, Artificial Sequence
  Description of Artificial Sequence: Synthetic oligonucleotide
  Antisense strand to SEQ ID NO: 1857623
uaaccacaaaggaagaaac

SEQ ID NO: 1857625 - RNA, 19 nt, Artificial Sequence
  Description of Artificial Sequence: Synthetic oligonucleotide
  Sense strand starting at position 358 of SEQ ID NO: 1564133
cuuccuuugugguuaguaa

SEQ ID NO: 1857626 - RNA, 19 nt, Artificial Sequence
  Description of Artificial Sequence: Synthetic oligonucleotide
  Antisense strand to SEQ ID NO: 1857625
uuacuaaccacaaaggaag

SEQ ID NO: 1857627 - RNA, 19 nt, Artificial Sequence
  Description of Artificial Sequence: Synthetic oligonucleotide
  Sense strand starting at position 398 of SEQ ID NO: 1564133
aaaggacagccuugucaug

SEQ ID NO: 1857628 - RNA, 19 nt, Artificial Sequence
  Description of Artificial Sequence: Synthetic oligonucleotide
  Antisense strand to SEQ ID NO: 1857627
caugacaaggcuguccuuu

SEQ ID NO: 1857629 - RNA, 19 nt, Artificial Sequence
  Description of Artificial Sequence: Synthetic oligonucleotide
  Sense strand starting at position 2161 of SEQ ID NO: 1564133
gggugugagcuccagccaa

SEQ ID NO: 1857630 - RNA, 19 nt, Artificial Sequence
  Description of Artificial Sequence: Synthetic oligonucleotide
  Antisense strand to SEQ ID NO: 1857629
uuggcuggagcucacaccc

SEQ ID NO: 1857631 - RNA, 19 nt, Artificial Sequence
  Description of Artificial Sequence: Synthetic oligonucleotide
  Sense strand starting at position 2527 of SEQ ID NO: 1564133
gcacuuugucccggaguug

SEQ ID NO: 1857632 - RNA, 19 nt, Artificial Sequence
  Description of Artificial Sequence: Synthetic oligonucleotide
  Antisense strand to SEQ ID NO: 1857631
caacuccgggacaaagugc

SEQ ID NO: 1857633 - RNA, 19 nt, Artificial Sequence
  Description of Artificial Sequence: Synthetic oligonucleotide
  Sense strand starting at position 2849 of SEQ ID NO: 1564133
cccuguucucuuuagagau

SEQ ID NO: 1857634 - RNA, 19 nt, Artificial Sequence
  Description of Artificial Sequence: Synthetic oligonucleotide
  Antisense strand to SEQ ID NO: 1857633
aucucuaaagagaacaggg

SEQ ID NO: 1857635 - RNA, 19 nt, Artificial Sequence
  Description of Artificial Sequence: Synthetic oligonucleotide
  Sense strand starting at position 2990 of SEQ ID NO: 1564133
uuaguaaauagugguucuu

SEQ ID NO: 1857636 - RNA, 19 nt, Artificial Sequence
  Description of Artificial Sequence: Synthetic oligonucleotide
  Antisense strand to SEQ ID NO: 1857635
aagaaccacuauuuacuaa

SEQ ID NO: 1857637 - RNA, 19 nt, Artificial Sequence
  Description of Artificial Sequence: Synthetic oligonucleotide
  Sense strand starting at position 3034 of SEQ ID NO: 1564133
gagcucagucagugagcaa

SEQ ID NO: 1857638 - RNA, 19 nt, Artificial Sequence
  Description of Artificial Sequence: Synthetic oligonucleotide
  Antisense strand to SEQ ID NO: 1857637
uugcucacugacugagcuc

SEQ ID NO: 1857639 - RNA, 19 nt, Artificial Sequence
  Description of Artificial Sequence: Synthetic oligonucleotide
  Sense strand starting at position 3095 of SEQ ID NO: 1564133
caugauggagguuguguua

SEQ ID NO: 1857640 - RNA, 19 nt, Artificial Sequence
  Description of Artificial Sequence: Synthetic oligonucleotide
  Antisense strand to SEQ ID NO: 1857639
uaacacaaccuccaucaug

SEQ ID NO: 1857641 - RNA, 19 nt, Artificial Sequence
  Description of Artificial Sequence: Synthetic oligonucleotide
  Sense strand starting at position 3228 of SEQ ID NO: 1564133
gcagcagugauagaaggua

SEQ ID NO: 1857642 - RNA, 19 nt, Artificial Sequence
  Description of Artificial Sequence: Synthetic oligonucleotide
  Antisense strand to SEQ ID NO: 1857641
uaccuucuaucacugcugc

SEQ ID NO: 1857643 - RNA, 19 nt, Artificial Sequence
  Description of Artificial Sequence: Synthetic oligonucleotide
  Sense strand starting at position 3280 of SEQ ID NO: 1564133
uggaacaaguccuaaauau

SEQ ID NO: 1857644 - RNA, 19 nt, Artificial Sequence
  Description of Artificial Sequence: Synthetic oligonucleotide
  Antisense strand to SEQ ID NO: 1857643
auauuuaggacuuguucca

SEQ ID NO: 1857645 - RNA, 19 nt, Artificial Sequence
  Description of Artificial Sequence: Synthetic oligonucleotide
  Sense strand starting at position 3370 of SEQ ID NO: 1564133
gugcuuguugcguuauaua

SEQ ID NO: 1857646 - RNA, 19 nt, Artificial Sequence
  Description of Artificial Sequence: Synthetic oligonucleotide
  Antisense strand to SEQ ID NO: 1857645
uauauaacgcaacaagcac

SEQ ID NO: 1857647 - RNA, 19 nt, Artificial Sequence
  Description of Artificial Sequence: Synthetic oligonucleotide
  Sense strand starting at position 3375 of SEQ ID NO: 1564133
uguugcguuauauauguua

SEQ ID NO: 1857648 - RNA, 19 nt, Artificial Sequence
  Description of Artificial Sequence: Synthetic oligonucleotide
  Antisense strand to SEQ ID NO: 1857647
uaacauauauaacgcaaca

SEQ ID NO: 1857649 - RNA, 19 nt, Artificial Sequence
  Description of Artificial Sequence: Synthetic oligonucleotide
  Sense strand starting at position 3378 of SEQ ID NO: 1564133
ugcguuauauauguuaacu

SEQ ID NO: 1857650 - RNA, 19 nt, Artificial Sequence
  Description of Artificial Sequence: Synthetic oligonucleotide
  Antisense strand to SEQ ID NO: 1857649
aguuaacauauauaacgca

SEQ ID NO: 1857651 - RNA, 19 nt, Artificial Sequence
  Description of Artificial Sequence: Synthetic oligonucleotide
  Sense strand starting at position 3416 of SEQ ID NO: 1564133
ccucaagugcugggaauca

SEQ ID NO: 1857652 - RNA, 19 nt, Artificial Sequence
  Description of Artificial Sequence: Synthetic oligonucleotide
  Antisense strand to SEQ ID NO: 1857651
ugauucccagcacuugagg

SEQ ID NO: 1857653 - RNA, 19 nt, Artificial Sequence
  Description of Artificial Sequence: Synthetic oligonucleotide
  Sense strand starting at position 3444 of SEQ ID NO: 1564133
ccaguuugcagagagguua

SEQ ID NO: 1857654 - RNA, 19 nt, Artificial Sequence
  Description of Artificial Sequence: Synthetic oligonucleotide
  Antisense strand to SEQ ID NO: 1857653
uaaccucucugcaaacugg

SEQ ID NO: 1857655 - RNA, 19 nt, Artificial Sequence
  Description of Artificial Sequence: Synthetic oligonucleotide
  Sense strand starting at position 3503 of SEQ ID NO: 1564133
aggucugugcgacaccaua

SEQ ID NO: 1857656 - RNA, 19 nt, Artificial Sequence
  Description of Artificial Sequence: Synthetic oligonucleotide
  Antisense strand to SEQ ID NO: 1857655
uauggugucgcacagaccu

SEQ ID NO: 1857657 - RNA, 19 nt, Artificial Sequence
  Description of Artificial Sequence: Synthetic oligonucleotide
  Sense strand starting at position 3611 of SEQ ID NO: 1564133
agacuuguaacgugagcgu

SEQ ID NO: 1857658 - RNA, 19 nt, Artificial Sequence
  Description of Artificial Sequence: Synthetic oligonucleotide
  Antisense strand to SEQ ID NO: 1857657
acgcucacguuacaagucu

SEQ ID NO: 1857659 - RNA, 19 nt, Artificial Sequence
  Description of Artificial Sequence: Synthetic oligonucleotide
  Sense strand starting at position 3620 of SEQ ID NO: 1564133
acgugagcguaucuauaac

SEQ ID NO: 1857660 - RNA, 19 nt, Artificial Sequence
  Description of Artificial Sequence: Synthetic oligonucleotide
  Antisense strand to SEQ ID NO: 1857659
guuauagauacgcucacgu

SEQ ID NO: 1857661 - RNA, 19 nt, Artificial Sequence
  Description of Artificial Sequence: Synthetic oligonucleotide
  Sense strand starting at position 3657 of SEQ ID NO: 1564133
aagagcuucuauguaguga

SEQ ID NO: 1857662 - RNA, 19 nt, Artificial Sequence
  Description of Artificial Sequence: Synthetic oligonucleotide
  Antisense strand to SEQ ID NO: 1857661
ucacuacauagaagcucuu

SEQ ID NO: 1857663 - RNA, 19 nt, Artificial Sequence
  Description of Artificial Sequence: Synthetic oligonucleotide
  Sense strand starting at position 3658 of SEQ ID NO: 1564133
agagcuucuauguagugaa

SEQ ID NO: 1857664 - RNA, 19 nt, Artificial Sequence
  Description of Artificial Sequence: Synthetic oligonucleotide
  Antisense strand to SEQ ID NO: 1857663
uucacuacauagaagcucu

SEQ ID NO: 1857665 - RNA, 19 nt, Artificial Sequence
  Description of Artificial Sequence: Synthetic oligonucleotide
  Sense strand starting at position 3716 of SEQ ID NO: 1564133
gcaagccuccucugauuau

SEQ ID NO: 1857666 - RNA, 19 nt, Artificial Sequence
  Description of Artificial Sequence: Synthetic oligonucleotide
  Antisense strand to SEQ ID NO: 1857665
auaaucagaggaggcuugc

SEQ ID NO: 1857667 - RNA, 19 nt, Artificial Sequence
  Description of Artificial Sequence: Synthetic oligonucleotide
  Sense strand starting at position 3767 of SEQ ID NO: 1564133
cccuguguuucugcuacuu

SEQ ID NO: 1857668 - RNA, 19 nt, Artificial Sequence
  Description of Artificial Sequence: Synthetic oligonucleotide
  Antisense strand to SEQ ID NO: 1857667
aaguagcagaaacacaggg

SEQ ID NO: 1857669 - RNA, 19 nt, Artificial Sequence
  Description of Artificial Sequence: Synthetic oligonucleotide
  Sense strand starting at position 3794 of SEQ ID NO: 1564133
ccaagacugccuuguguua

SEQ ID NO: 1857670 - RNA, 19 nt, Artificial Sequence
  Description of Artificial Sequence: Synthetic oligonucleotide
  Antisense strand to SEQ ID NO: 1857669
uaacacaaggcagucuugg

SEQ ID NO: 1857671 - RNA, 19 nt, Artificial Sequence
  Description of Artificial Sequence: Synthetic oligonucleotide
  Sense strand starting at position 3847 of SEQ ID NO: 1564133
acuauaaacucuuggacag

SEQ ID NO: 1857672 - RNA, 19 nt, Artificial Sequence
  Description of Artificial Sequence: Synthetic oligonucleotide
  Antisense strand to SEQ ID NO: 1857671
cuguccaagaguuuauagu

SEQ ID NO: 1857673 - RNA, 19 nt, Artificial Sequence
  Description of Artificial Sequence: Synthetic oligonucleotide
  Sense strand starting at position 3857 of SEQ ID NO: 1564133
cuuggacagcuaugucaua

SEQ ID NO: 1857674 - RNA, 19 nt, Artificial Sequence
  Description of Artificial Sequence: Synthetic oligonucleotide
  Antisense strand to SEQ ID NO: 1857673
uaugacauagcuguccaag

SEQ ID NO: 1857675 - RNA, 19 nt, Artificial Sequence
  Description of Artificial Sequence: Synthetic oligonucleotide
  Sense strand starting at position 3870 of SEQ ID NO: 1564133
gucauacuauccuugugca

SEQ ID NO: 1857676 - RNA, 19 nt, Artificial Sequence
  Description of Artificial Sequence: Synthetic oligonucleotide
  Antisense strand to SEQ ID NO: 1857675
ugcacaaggauaguaugac

SEQ ID NO: 1857677 - RNA, 19 nt, Artificial Sequence
  Description of Artificial Sequence: Synthetic oligonucleotide
  Sense strand starting at position 3889 of SEQ ID NO: 1564133
ccuaguaguuauccaagaa

SEQ ID NO: 1857678 - RNA, 19 nt, Artificial Sequence
  Description of Artificial Sequence: Synthetic oligonucleotide
  Antisense strand to SEQ ID NO: 1857677
uucuuggauaacuacuagg

SEQ ID NO: 1857679 - RNA, 19 nt, Artificial Sequence
  Description of Artificial Sequence: Synthetic oligonucleotide
  Sense strand starting at position 23 of SEQ ID NO: 1564134
aacacauuagcgcgaagaa

SEQ ID NO: 1857680 - RNA, 19 nt, Artificial Sequence
  Description of Artificial Sequence: Synthetic oligonucleotide
  Antisense strand to SEQ ID NO: 1857679
uucuucgcgcuaauguguu

SEQ ID NO: 1857681 - RNA, 19 nt, Artificial Sequence
  Description of Artificial Sequence: Synthetic oligonucleotide
  Sense strand starting at position 24 of SEQ ID NO: 1564134
acacauuagcgcgaagaaa

SEQ ID NO: 1857682 - RNA, 19 nt, Artificial Sequence
  Description of Artificial Sequence: Synthetic oligonucleotide
  Antisense strand to SEQ ID NO: 1857681
uuucuucgcgcuaaugugu

SEQ ID NO: 1857683 - RNA, 19 nt, Artificial Sequence
  Description of Artificial Sequence: Synthetic oligonucleotide
  Sense strand starting at position 74 of SEQ ID NO: 1564134
ucaacaugauuggacagaa

SEQ ID NO: 1857684 - RNA, 19 nt, Artificial Sequence
  Description of Artificial Sequence: Synthetic oligonucleotide
  Antisense strand to SEQ ID NO: 1857683
uucuguccaaucauguuga

SEQ ID NO: 1857685 - RNA, 19 nt, Artificial Sequence
  Description of Artificial Sequence: Synthetic oligonucleotide
  Sense strand starting at position 131 of SEQ ID NO: 1564134
cgcacaccuggcuauaaau

SEQ ID NO: 1857686 - RNA, 19 nt, Artificial Sequence
  Description of Artificial Sequence: Synthetic oligonucleotide
  Antisense strand to SEQ ID NO: 1857685
auuuauagccaggugugcg

SEQ ID NO: 1857687 - RNA, 19 nt, Artificial Sequence
  Description of Artificial Sequence: Synthetic oligonucleotide
  Sense strand starting at position 467 of SEQ ID NO: 1564134
uucgcugcuccugacuuau

SEQ ID NO: 1857688 - RNA, 19 nt, Artificial Sequence
  Description of Artificial Sequence: Synthetic oligonucleotide
  Antisense strand to SEQ ID NO: 1857687
auaagucaggagcagcgaa

SEQ ID NO: 1857689 - RNA, 19 nt, Artificial Sequence
  Description of Artificial Sequence: Synthetic oligonucleotide
  Sense strand starting at position 469 of SEQ ID NO: 1564134
cgcugcuccugacuuauuu

SEQ ID NO: 1857690 - RNA, 19 nt, Artificial Sequence
  Description of Artificial Sequence: Synthetic oligonucleotide
  Antisense strand to SEQ ID NO: 1857689
aaauaagucaggagcagcg

SEQ ID NO: 1857691 - RNA, 19 nt, Artificial Sequence
  Description of Artificial Sequence: Synthetic oligonucleotide
  Sense strand starting at position 1328 of SEQ ID NO: 1564134
gggaguacuuaucuuucuu

SEQ ID NO: 1857692 - RNA, 19 nt, Artificial Sequence
  Description of Artificial Sequence: Synthetic oligonucleotide
  Antisense strand to SEQ ID NO: 1857691
aagaaagauaaguacuccc

SEQ ID NO: 1857693 - RNA, 19 nt, Artificial Sequence
  Description of Artificial Sequence: Synthetic oligonucleotide
  Sense strand starting at position 1422 of SEQ ID NO: 1564134
cuuggccucgucgaugaau

SEQ ID NO: 1857694 - RNA, 19 nt, Artificial Sequence
  Description of Artificial Sequence: Synthetic oligonucleotide
  Antisense strand to SEQ ID NO: 1857693
auucaucgacgaggccaag

SEQ ID NO: 1857695 - RNA, 19 nt, Artificial Sequence
  Description of Artificial Sequence: Synthetic oligonucleotide
  Sense strand starting at position 1484 of SEQ ID NO: 1564134
agcgcuugcugaucucaga

SEQ ID NO: 1857696 - RNA, 19 nt, Artificial Sequence
  Description of Artificial Sequence: Synthetic oligonucleotide
  Antisense strand to SEQ ID NO: 1857695
ucugagaucagcaagcgcu

SEQ ID NO: 1857697 - RNA, 19 nt, Artificial Sequence
  Description of Artificial Sequence: Synthetic oligonucleotide
  Sense strand starting at position 1972 of SEQ ID NO: 1564134
ccugaugaguucucucgaa

SEQ ID NO: 1857698 - RNA, 19 nt, Artificial Sequence
  Description of Artificial Sequence: Synthetic oligonucleotide
  Antisense strand to SEQ ID NO: 1857697
uucgagagaacucaucagg

SEQ ID NO: 1857699 - RNA, 19 nt, Artificial Sequence
  Description of Artificial Sequence: Synthetic oligonucleotide
  Sense strand starting at position 1976 of SEQ ID NO: 1564134
augaguucucucgaacagg

SEQ ID NO: 1857700 - RNA, 19 nt, Artificial Sequence
  Description of Artificial Sequence: Synthetic oligonucleotide
  Antisense strand to SEQ ID NO: 1857699
ccuguucgagagaacucau

SEQ ID NO: 1857701 - RNA, 19 nt, Artificial Sequence
  Description of Artificial Sequence: Synthetic oligonucleotide
  Sense strand starting at position 2032 of SEQ ID NO: 1564134
uuauauaccugcucggauu

SEQ ID NO: 1857702 - RNA, 19 nt, Artificial Sequence
  Description of Artificial Sequence: Synthetic oligonucleotide
  Antisense strand to SEQ ID NO: 1857701
aauccgagcagguauauaa

SEQ ID NO: 1857703 - RNA, 19 nt, Artificial Sequence
  Description of Artificial Sequence: Synthetic oligonucleotide
  Sense strand starting at position 2211 of SEQ ID NO: 1564134
ggccuagugacgugguaag

SEQ ID NO: 1857704 - RNA, 19 nt, Artificial Sequence
  Description of Artificial Sequence: Synthetic oligonucleotide
  Antisense strand to SEQ ID NO: 1857703
cuuaccacgucacuaggcc

SEQ ID NO: 1857705 - RNA, 19 nt, Artificial Sequence
  Description of Artificial Sequence: Synthetic oligonucleotide
  Sense strand starting at position 2221 of SEQ ID NO: 1564134
cgugguaagaguuacuuag

SEQ ID NO: 1857706 - RNA, 19 nt, Artificial Sequence
  Description of Artificial Sequence: Synthetic oligonucleotide
  Antisense strand to SEQ ID NO: 1857705
cuaaguaacucuuaccacg

SEQ ID NO: 1857707 - RNA, 19 nt, Artificial Sequence
  Description of Artificial Sequence: Synthetic oligonucleotide
  Sense strand starting at position 2223 of SEQ ID NO: 1564134
ugguaagaguuacuuagga

SEQ ID NO: 1857708 - RNA, 19 nt, Artificial Sequence
  Description of Artificial Sequence: Synthetic oligonucleotide
  Antisense strand to SEQ ID NO: 1857707
uccuaaguaacucuuacca

SEQ ID NO: 1857709 - RNA, 19 nt, Artificial Sequence
  Description of Artificial Sequence: Synthetic oligonucleotide
  Sense strand starting at position 2569 of SEQ ID NO: 1564134
cuggcugcgucuccaagaa

SEQ ID NO: 1857710 - RNA, 19 nt, Artificial Sequence
  Description of Artificial Sequence: Synthetic oligonucleotide
  Antisense strand to SEQ ID NO: 1857709
uucuuggagacgcagccag

SEQ ID NO: 1857711 - RNA, 19 nt, Artificial Sequence
  Description of Artificial Sequence: Synthetic oligonucleotide
  Sense strand starting at position 2585 of SEQ ID NO: 1564134
gaagcucucccuggaauug

SEQ ID NO: 1857712 - RNA, 19 nt, Artificial Sequence
  Description of Artificial Sequence: Synthetic oligonucleotide
  Antisense strand to SEQ ID NO: 1857711
caauuccagggagagcuuc

SEQ ID NO: 1857713 - RNA, 19 nt, Artificial Sequence
  Description of Artificial Sequence: Synthetic oligonucleotide
  Sense strand starting at position 2607 of SEQ ID NO: 1564134
gcugguuguccagaucuuu

SEQ ID NO: 1857714 - RNA, 19 nt, Artificial Sequence
  Description of Artificial Sequence: Synthetic oligonucleotide
  Antisense strand to SEQ ID NO: 1857713
aaagaucuggacaaccagc

SEQ ID NO: 1857715 - RNA, 19 nt, Artificial Sequence
  Description of Artificial Sequence: Synthetic oligonucleotide
  Sense strand starting at position 2612 of SEQ ID NO: 1564134
uuguccagaucuuucucua

SEQ ID NO: 1857716 - RNA, 19 nt, Artificial Sequence
  Description of Artificial Sequence: Synthetic oligonucleotide
  Antisense strand to SEQ ID NO: 1857715
uagagaaagaucuggacaa

SEQ ID NO: 1857717 - RNA, 19 nt, Artificial Sequence
  Description of Artificial Sequence: Synthetic oligonucleotide
  Sense strand starting at position 2794 of SEQ ID NO: 1564134
caaggugguguggaaagua

SEQ ID NO: 1857718 - RNA, 19 nt, Artificial Sequence
  Description of Artificial Sequence: Synthetic oligonucleotide
  Antisense strand to SEQ ID NO: 1857717
uacuuuccacaccaccuug

SEQ ID NO: 1857719 - RNA, 19 nt, Artificial Sequence
  Description of Artificial Sequence: Synthetic oligonucleotide
  Sense strand starting at position 2803 of SEQ ID NO: 1564134
guggaaaguauguguggga

SEQ ID NO: 1857720 - RNA, 19 nt, Artificial Sequence
  Description of Artificial Sequence: Synthetic oligonucleotide
  Antisense strand to SEQ ID NO: 1857719
ucccacacauacuuuccac

SEQ ID NO: 1857721 - RNA, 19 nt, Artificial Sequence
  Description of Artificial Sequence: Synthetic oligonucleotide
  Sense strand starting at position 2807 of SEQ ID NO: 1564134
aaaguaugugugggacgua

SEQ ID NO: 1857722 - RNA, 19 nt, Artificial Sequence
  Description of Artificial Sequence: Synthetic oligonucleotide
  Antisense strand to SEQ ID NO: 1857721
uacgucccacacauacuuu

SEQ ID NO: 1857723 - RNA, 19 nt, Artificial Sequence
  Description of Artificial Sequence: Synthetic oligonucleotide
  Sense strand starting at position 2977 of SEQ ID NO: 1564134
agccucucagagugaaaga

SEQ ID NO: 1857724 - RNA, 19 nt, Artificial Sequence
  Description of Artificial Sequence: Synthetic oligonucleotide
  Antisense strand to SEQ ID NO: 1857723
ucuuucacucugagaggcu

SEQ ID NO: 1857725 - RNA, 19 nt, Artificial Sequence
  Description of Artificial Sequence: Synthetic oligonucleotide
  Sense strand starting at position 3181 of SEQ ID NO: 1564134
uuuagagacuuccugagau

SEQ ID NO: 1857726 - RNA, 19 nt, Artificial Sequence
  Description of Artificial Sequence: Synthetic oligonucleotide
  Antisense strand to SEQ ID NO: 1857725
aucucaggaagucucuaaa

SEQ ID NO: 1857727 - RNA, 19 nt, Artificial Sequence
  Description of Artificial Sequence: Synthetic oligonucleotide
  Sense strand starting at position 3313 of SEQ ID NO: 1564134
uggcacagcguuugaaacu

SEQ ID NO: 1857728 - RNA, 19 nt, Artificial Sequence
  Description of Artificial Sequence: Synthetic oligonucleotide
  Antisense strand to SEQ ID NO: 1857727
aguuucaaacgcugugcca

SEQ ID NO: 1857729 - RNA, 19 nt, Artificial Sequence
  Description of Artificial Sequence: Synthetic oligonucleotide
  Sense strand starting at position 3470 of SEQ ID NO: 1564134
cggaaagcauaaucuuaag

SEQ ID NO: 1857730 - RNA, 19 nt, Artificial Sequence
  Description of Artificial Sequence: Synthetic oligonucleotide
  Antisense strand to SEQ ID NO: 1857729
cuuaagauuaugcuuuccg

SEQ ID NO: 1857731 - RNA, 19 nt, Artificial Sequence
  Description of Artificial Sequence: Synthetic oligonucleotide
  Sense strand starting at position 3523 of SEQ ID NO: 1564134
uagcgucuuagcguuaaug

SEQ ID NO: 1857732 - RNA, 19 nt, Artificial Sequence
  Description of Artificial Sequence: Synthetic oligonucleotide
  Antisense strand to SEQ ID NO: 1857731
cauuaacgcuaagacgcua

SEQ ID NO: 1857733 - RNA, 19 nt, Artificial Sequence
  Description of Artificial Sequence: Synthetic oligonucleotide
  Sense strand starting at position 3611 of SEQ ID NO: 1564134
acgccucuucggcuuguua

SEQ ID NO: 1857734 - RNA, 19 nt, Artificial Sequence
  Description of Artificial Sequence: Synthetic oligonucleotide
  Antisense strand to SEQ ID NO: 1857733
uaacaagccgaagaggcgu

SEQ ID NO: 1857735 - RNA, 19 nt, Artificial Sequence
  Description of Artificial Sequence: Synthetic oligonucleotide
  Sense strand starting at position 3717 of SEQ ID NO: 1564134
ucggcaucaucucucggaa

SEQ ID NO: 1857736 - RNA, 19 nt, Artificial Sequence
  Description of Artificial Sequence: Synthetic oligonucleotide
  Antisense strand to SEQ ID NO: 1857735
uuccgagagaugaugccga

SEQ ID NO: 1857737 - RNA, 19 nt, Artificial Sequence
  Description of Artificial Sequence: Synthetic oligonucleotide
  Sense strand starting at position 3720 of SEQ ID NO: 1564134
gcaucaucucucggaaguu

SEQ ID NO: 1857738 - RNA, 19 nt, Artificial Sequence
  Description of Artificial Sequence: Synthetic oligonucleotide
  Antisense strand to SEQ ID NO: 1857737
aacuuccgagagaugaugc

SEQ ID NO: 1857739 - RNA, 19 nt, Artificial Sequence
  Description of Artificial Sequence: Synthetic oligonucleotide
  Sense strand starting at position 3760 of SEQ ID NO: 1564134
uuaaguuuguguuccacuu

SEQ ID NO: 1857740 - RNA, 19 nt, Artificial Sequence
  Description of Artificial Sequence: Synthetic oligonucleotide
  Antisense strand to SEQ ID NO: 1857739
aaguggaacacaaacuuaa

SEQ ID NO: 1857741 - RNA, 19 nt, Artificial Sequence
  Description of Artificial Sequence: Synthetic oligonucleotide
  Sense strand starting at position 3775 of SEQ ID NO: 1564134
acuugaucugaguauucug

SEQ ID NO: 1857742 - RNA, 19 nt, Artificial Sequence
  Description of Artificial Sequence: Synthetic oligonucleotide
  Antisense strand to SEQ ID NO: 1857741
cagaauacucagaucaagu

SEQ ID NO: 1857743 - RNA, 19 nt, Artificial Sequence
  Description of Artificial Sequence: Synthetic oligonucleotide
  Sense strand starting at position 3782 of SEQ ID NO: 1564134
cugaguauucugcagccaa

SEQ ID NO: 1857744 - RNA, 19 nt, Artificial Sequence
  Description of Artificial Sequence: Synthetic oligonucleotide
  Antisense strand to SEQ ID NO: 1857743
uuggcugcagaauacucag

SEQ ID NO: 1857745 - RNA, 19 nt, Artificial Sequence
  Description of Artificial Sequence: Synthetic oligonucleotide
  Sense strand starting at position 3807 of SEQ ID NO: 1564134
cagucaacuggauggguau

SEQ ID NO: 1857746 - RNA, 19 nt, Artificial Sequence
  Description of Artificial Sequence: Synthetic oligonucleotide
  Antisense strand to SEQ ID NO: 1857745
auacccauccaguugacug

SEQ ID NO: 1857747 - RNA, 19 nt, Artificial Sequence
  Description of Artificial Sequence: Synthetic oligonucleotide
  Sense strand starting at position 3808 of SEQ ID NO: 1564134
agucaacuggauggguaua

SEQ ID NO: 1857748 - RNA, 19 nt, Artificial Sequence
  Description of Artificial Sequence: Synthetic oligonucleotide
  Antisense strand to SEQ ID NO: 1857747
uauacccauccaguugacu

SEQ ID NO: 1857749 - RNA, 19 nt, Artificial Sequence
  Description of Artificial Sequence: Synthetic oligonucleotide
  Sense strand starting at position 3862 of SEQ ID NO: 1564134
gaaggcuucuguguguaga

SEQ ID NO: 1857750 - RNA, 19 nt, Artificial Sequence
  Description of Artificial Sequence: Synthetic oligonucleotide
  Antisense strand to SEQ ID NO: 1857749
ucuacacacagaagccuuc

SEQ ID NO: 1857751 - RNA, 19 nt, Artificial Sequence
  Description of Artificial Sequence: Synthetic oligonucleotide
  Sense strand starting at position 3863 of SEQ ID NO: 1564134
aaggcuucuguguguagau

SEQ ID NO: 1857752 - RNA, 19 nt, Artificial Sequence
  Description of Artificial Sequence: Synthetic oligonucleotide
  Antisense strand to SEQ ID NO: 1857751
aucuacacacagaagccuu

SEQ ID NO: 1857753 - RNA, 19 nt, Artificial Sequence
  Description of Artificial Sequence: Synthetic oligonucleotide
  Sense strand starting at position 3864 of SEQ ID NO: 1564134
aggcuucuguguguagaua

SEQ ID NO: 1857754 - RNA, 19 nt, Artificial Sequence
  Description of Artificial Sequence: Synthetic oligonucleotide
  Antisense strand to SEQ ID NO: 1857753
uaucuacacacagaagccu

SEQ ID NO: 1857755 - RNA, 19 nt, Artificial Sequence
  Description of Artificial Sequence: Synthetic oligonucleotide
  Sense strand starting at position 3940 of SEQ ID NO: 1564134
uagcgaacgugagcugaua

SEQ ID NO: 1857756 - RNA, 19 nt, Artificial Sequence
  Description of Artificial Sequence: Synthetic oligonucleotide
  Antisense strand to SEQ ID NO: 1857755
uaucagcucacguucgcua

SEQ ID NO: 1857757 - RNA, 19 nt, Artificial Sequence
  Description of Artificial Sequence: Synthetic oligonucleotide
  Sense strand starting at position 3951 of SEQ ID NO: 1564134
agcugauaaguacgucuca

SEQ ID NO: 1857758 - RNA, 19 nt, Artificial Sequence
  Description of Artificial Sequence: Synthetic oligonucleotide
  Antisense strand to SEQ ID NO: 1857757
ugagacguacuuaucagcu

SEQ ID NO: 1857759 - RNA, 19 nt, Artificial Sequence
  Description of Artificial Sequence: Synthetic oligonucleotide
  Sense strand starting at position 416 of SEQ ID NO: 1564135
aggauuugaucuggcugca

SEQ ID NO: 1857760 - RNA, 19 nt, Artificial Sequence
  Description of Artificial Sequence: Synthetic oligonucleotide
  Antisense strand to SEQ ID NO: 1857759
ugcagccagaucaaauccu

SEQ ID NO: 1857761 - RNA, 19 nt, Artificial Sequence
  Description of Artificial Sequence: Synthetic oligonucleotide
  Sense strand starting at position 2017 of SEQ ID NO: 1564135
gcgaaauugccgccugcua

SEQ ID NO: 1857762 - RNA, 19 nt, Artificial Sequence
  Description of Artificial Sequence: Synthetic oligonucleotide
  Antisense strand to SEQ ID NO: 1857761
uagcaggcggcaauuucgc

SEQ ID NO: 1857763 - RNA, 19 nt, Artificial Sequence
  Description of Artificial Sequence: Synthetic oligonucleotide
  Sense strand starting at position 2019 of SEQ ID NO: 1564135
gaaauugccgccugcuaga

SEQ ID NO: 1857764 - RNA, 19 nt, Artificial Sequence
  Description of Artificial Sequence: Synthetic oligonucleotide
  Antisense strand to SEQ ID NO: 1857763
ucuagcaggcggcaauuuc

SEQ ID NO: 1857765 - RNA, 19 nt, Artificial Sequence
  Description of Artificial Sequence: Synthetic oligonucleotide
  Sense strand starting at position 2106 of SEQ ID NO: 1564135
gagugccugccucugcaua

SEQ ID NO: 1857766 - RNA, 19 nt, Artificial Sequence
  Description of Artificial Sequence: Synthetic oligonucleotide
  Antisense strand to SEQ ID NO: 1857765
uaugcagaggcaggcacuc

SEQ ID NO: 1857767 - RNA, 19 nt, Artificial Sequence
  Description of Artificial Sequence: Synthetic oligonucleotide
  Sense strand starting at position 2454 of SEQ ID NO: 1564135
gggucgugggcugagugau

SEQ ID NO: 1857768 - RNA, 19 nt, Artificial Sequence
  Description of Artificial Sequence: Synthetic oligonucleotide
  Antisense strand to SEQ ID NO: 1857767
aucacucagcccacgaccc

SEQ ID NO: 1857769 - RNA, 19 nt, Artificial Sequence
  Description of Artificial Sequence: Synthetic oligonucleotide
  Sense strand starting at position 2474 of SEQ ID NO: 1564135
gggaguucugugggaugag

SEQ ID NO: 1857770 - RNA, 19 nt, Artificial Sequence
  Description of Artificial Sequence: Synthetic oligonucleotide
  Antisense strand to SEQ ID NO: 1857769
cucaucccacagaacuccc

SEQ ID NO: 1857771 - RNA, 19 nt, Artificial Sequence
  Description of Artificial Sequence: Synthetic oligonucleotide
  Sense strand starting at position 2475 of SEQ ID NO: 1564135
ggaguucugugggaugagu

SEQ ID NO: 1857772 - RNA, 19 nt, Artificial Sequence
  Description of Artificial Sequence: Synthetic oligonucleotide
  Antisense strand to SEQ ID NO: 1857771
acucaucccacagaacucc

SEQ ID NO: 1857773 - RNA, 19 nt, Artificial Sequence
  Description of Artificial Sequence: Synthetic oligonucleotide
  Sense strand starting at position 2486 of SEQ ID NO: 1564135
ggaugagugaagugggagu

SEQ ID NO: 1857774 - RNA, 19 nt, Artificial Sequence
  Description of Artificial Sequence: Synthetic oligonucleotide
  Antisense strand to SEQ ID NO: 1857773
acucccacuucacucaucc

SEQ ID NO: 1857775 - RNA, 19 nt, Artificial Sequence
  Description of Artificial Sequence: Synthetic oligonucleotide
  Sense strand starting at position 2746 of SEQ ID NO: 1564135
gugugaaugcuccggccga

SEQ ID NO: 1857776 - RNA, 19 nt, Artificial Sequence
  Description of Artificial Sequence: Synthetic oligonucleotide
  Antisense strand to SEQ ID NO: 1857775
ucggccggagcauucacac

SEQ ID NO: 1857777 - RNA, 19 nt, Artificial Sequence
  Description of Artificial Sequence: Synthetic oligonucleotide
  Sense strand starting at position 3211 of SEQ ID NO: 1564135
aaacguuuaguugagauac

SEQ ID NO: 1857778 - RNA, 19 nt, Artificial Sequence
  Description of Artificial Sequence: Synthetic oligonucleotide
  Antisense strand to SEQ ID NO: 1857777
guaucucaacuaaacguuu

SEQ ID NO: 1857779 - RNA, 19 nt, Artificial Sequence
  Description of Artificial Sequence: Synthetic oligonucleotide
  Sense strand starting at position 3213 of SEQ ID NO: 1564135
acguuuaguugagauacau

SEQ ID NO: 1857780 - RNA, 19 nt, Artificial Sequence
  Description of Artificial Sequence: Synthetic oligonucleotide
  Antisense strand to SEQ ID NO: 1857779
auguaucucaacuaaacgu

SEQ ID NO: 1857781 - RNA, 19 nt, Artificial Sequence
  Description of Artificial Sequence: Synthetic oligonucleotide
  Sense strand starting at position 3252 of SEQ ID NO: 1564135
acuguacaguuccauauaa

SEQ ID NO: 1857782 - RNA, 19 nt, Artificial Sequence
  Description of Artificial Sequence: Synthetic oligonucleotide
  Antisense strand to SEQ ID NO: 1857781
uuauauggaacuguacagu

SEQ ID NO: 1857783 - RNA, 19 nt, Artificial Sequence
  Description of Artificial Sequence: Synthetic oligonucleotide
  Sense strand starting at position 3315 of SEQ ID NO: 1564135
uuauuaaucccuuaugggu

SEQ ID NO: 1857784 - RNA, 19 nt, Artificial Sequence
  Description of Artificial Sequence: Synthetic oligonucleotide
  Antisense strand to SEQ ID NO: 1857783
acccauaagggauuaauaa

SEQ ID NO: 1857785 - RNA, 19 nt, Artificial Sequence
  Description of Artificial Sequence: Synthetic oligonucleotide
  Sense strand starting at position 3324 of SEQ ID NO: 1564135
ccuuaugggucauagagga

SEQ ID NO: 1857786 - RNA, 19 nt, Artificial Sequence
  Description of Artificial Sequence: Synthetic oligonucleotide
  Antisense strand to SEQ ID NO: 1857785
uccucuaugacccauaagg

SEQ ID NO: 1857787 - RNA, 19 nt, Artificial Sequence
  Description of Artificial Sequence: Synthetic oligonucleotide
  Sense strand starting at position 3332 of SEQ ID NO: 1564135
gucauagaggaucguuuaa

SEQ ID NO: 1857788 - RNA, 19 nt, Artificial Sequence
  Description of Artificial Sequence: Synthetic oligonucleotide
  Antisense strand to SEQ ID NO: 1857787
uuaaacgauccucuaugac

SEQ ID NO: 1857789 - RNA, 19 nt, Artificial Sequence
  Description of Artificial Sequence: Synthetic oligonucleotide
  Sense strand starting at position 3334 of SEQ ID NO: 1564135
cauagaggaucguuuaagu

SEQ ID NO: 1857790 - RNA, 19 nt, Artificial Sequence
  Description of Artificial Sequence: Synthetic oligonucleotide
  Antisense strand to SEQ ID NO: 1857789
acuuaaacgauccucuaug

SEQ ID NO: 1857791 - RNA, 19 nt, Artificial Sequence
  Description of Artificial Sequence: Synthetic oligonucleotide
  Sense strand starting at position 3342 of SEQ ID NO: 1564135
aucguuuaaguuuggcauu

SEQ ID NO: 1857792 - RNA, 19 nt, Artificial Sequence
  Description of Artificial Sequence: Synthetic oligonucleotide
  Antisense strand to SEQ ID NO: 1857791
aaugccaaacuuaaacgau

SEQ ID NO: 1857793 - RNA, 19 nt, Artificial Sequence
  Description of Artificial Sequence: Synthetic oligonucleotide
  Sense strand starting at position 3344 of SEQ ID NO: 1564135
cguuuaaguuuggcauuau

SEQ ID NO: 1857794 - RNA, 19 nt, Artificial Sequence
  Description of Artificial Sequence: Synthetic oligonucleotide
  Antisense strand to SEQ ID NO: 1857793
auaaugccaaacuuaaacg

SEQ ID NO: 1857795 - RNA, 19 nt, Artificial Sequence
  Description of Artificial Sequence: Synthetic oligonucleotide
  Sense strand starting at position 3345 of SEQ ID NO: 1564135
guuuaaguuuggcauuauu

SEQ ID NO: 1857796 - RNA, 19 nt, Artificial Sequence
  Description of Artificial Sequence: Synthetic oligonucleotide
  Antisense strand to SEQ ID NO: 1857795
aauaaugccaaacuuaaac

SEQ ID NO: 1857797 - RNA, 19 nt, Artificial Sequence
  Description of Artificial Sequence: Synthetic oligonucleotide
  Sense strand starting at position 3348 of SEQ ID NO: 1564135
uaaguuuggcauuauugaa

SEQ ID NO: 1857798 - RNA, 19 nt, Artificial Sequence
  Description of Artificial Sequence: Synthetic oligonucleotide
  Antisense strand to SEQ ID NO: 1857797
uucaauaaugccaaacuua

SEQ ID NO: 1857799 - RNA, 19 nt, Artificial Sequence
  Description of Artificial Sequence: Synthetic oligonucleotide
  Sense strand starting at position 3381 of SEQ ID NO: 1564135
guggguacgugcagagaaa

SEQ ID NO: 1857800 - RNA, 19 nt, Artificial Sequence
  Description of Artificial Sequence: Synthetic oligonucleotide
  Antisense strand to SEQ ID NO: 1857799
uuucucugcacguacccac

SEQ ID NO: 1857801 - RNA, 19 nt, Artificial Sequence
  Description of Artificial Sequence: Synthetic oligonucleotide
  Sense strand starting at position 3382 of SEQ ID NO: 1564135
uggguacgugcagagaaau

SEQ ID NO: 1857802 - RNA, 19 nt, Artificial Sequence
  Description of Artificial Sequence: Synthetic oligonucleotide
  Antisense strand to SEQ ID NO: 1857801
auuucucugcacguaccca

SEQ ID NO: 1857803 - RNA, 19 nt, Artificial Sequence
  Description of Artificial Sequence: Synthetic oligonucleotide
  Sense strand starting at position 3448 of SEQ ID NO: 1564135
uacacuuuaugggucagua

SEQ ID NO: 1857804 - RNA, 19 nt, Artificial Sequence
  Description of Artificial Sequence: Synthetic oligonucleotide
  Antisense strand to SEQ ID NO: 1857803
uacugacccauaaagugua

SEQ ID NO: 1857805 - RNA, 19 nt, Artificial Sequence
  Description of Artificial Sequence: Synthetic oligonucleotide
  Sense strand starting at position 3450 of SEQ ID NO: 1564135
cacuuuaugggucaguaca

SEQ ID NO: 1857806 - RNA, 19 nt, Artificial Sequence
  Description of Artificial Sequence: Synthetic oligonucleotide
  Antisense strand to SEQ ID NO: 1857805
uguacugacccauaaagug

SEQ ID NO: 1857807 - RNA, 19 nt, Artificial Sequence
  Description of Artificial Sequence: Synthetic oligonucleotide
  Sense strand starting at position 3452 of SEQ ID NO: 1564135
cuuuaugggucaguacaca

SEQ ID NO: 1857808 - RNA, 19 nt, Artificial Sequence
  Description of Artificial Sequence: Synthetic oligonucleotide
  Antisense strand to SEQ ID NO: 1857807
uguguacugacccauaaag

SEQ ID NO: 1857809 - RNA, 19 nt, Artificial Sequence
  Description of Artificial Sequence: Synthetic oligonucleotide
  Sense strand starting at position 3602 of SEQ ID NO: 1564135
gggauugcuaggcagcuaa

SEQ ID NO: 1857810 - RNA, 19 nt, Artificial Sequence
  Description of Artificial Sequence: Synthetic oligonucleotide
  Antisense strand to SEQ ID NO: 1857809
uuagcugccuagcaauccc

SEQ ID NO: 1857811 - RNA, 19 nt, Artificial Sequence
  Description of Artificial Sequence: Synthetic oligonucleotide
  Sense strand starting at position 3615 of SEQ ID NO: 1564135
agcuaauucugggcacuga

SEQ ID NO: 1857812 - RNA, 19 nt, Artificial Sequence
  Description of Artificial Sequence: Synthetic oligonucleotide
  Antisense strand to SEQ ID NO: 1857811
ucagugcccagaauuagcu

SEQ ID NO: 1857813 - RNA, 19 nt, Artificial Sequence
  Description of Artificial Sequence: Synthetic oligonucleotide
  Sense strand starting at position 3616 of SEQ ID NO: 1564135
gcuaauucugggcacugaa

SEQ ID NO: 1857814 - RNA, 19 nt, Artificial Sequence
  Description of Artificial Sequence: Synthetic oligonucleotide
  Antisense strand to SEQ ID NO: 1857813
uucagugcccagaauuagc

SEQ ID NO: 1857815 - RNA, 19 nt, Artificial Sequence
  Description of Artificial Sequence: Synthetic oligonucleotide
  Sense strand starting at position 3619 of SEQ ID NO: 1564135
aauucugggcacugaaagu

SEQ ID NO: 1857816 - RNA, 19 nt, Artificial Sequence
  Description of Artificial Sequence: Synthetic oligonucleotide
  Antisense strand to SEQ ID NO: 1857815
acuuucagugcccagaauu

SEQ ID NO: 1857817 - RNA, 19 nt, Artificial Sequence
  Description of Artificial Sequence: Synthetic oligonucleotide
  Sense strand starting at position 3741 of SEQ ID NO: 1564135
agguaaguauguugucugu

SEQ ID NO: 1857818 - RNA, 19 nt, Artificial Sequence
  Description of Artificial Sequence: Synthetic oligonucleotide
  Antisense strand to SEQ ID NO: 1857817
acagacaacauacuuaccu

SEQ ID NO: 1857819 - RNA, 19 nt, Artificial Sequence
  Description of Artificial Sequence: Synthetic oligonucleotide
  Sense strand starting at position 3743 of SEQ ID NO: 1564135
guaaguauguugucuguuu

SEQ ID NO: 1857820 - RNA, 19 nt, Artificial Sequence
  Description of Artificial Sequence: Synthetic oligonucleotide
  Antisense strand to SEQ ID NO: 1857819
aaacagacaacauacuuac

SEQ ID NO: 1857821 - RNA, 19 nt, Artificial Sequence
  Description of Artificial Sequence: Synthetic oligonucleotide
  Sense strand starting at position 3781 of SEQ ID NO: 1564135
uguggaugugacgaaauau

SEQ ID NO: 1857822 - RNA, 19 nt, Artificial Sequence
  Description of Artificial Sequence: Synthetic oligonucleotide
  Antisense strand to SEQ ID NO: 1857821
auauuucgucacauccaca

SEQ ID NO: 1857823 - RNA, 19 nt, Artificial Sequence
  Description of Artificial Sequence: Synthetic oligonucleotide
  Sense strand starting at position 3789 of SEQ ID NO: 1564135
ugacgaaauauguggaaau

SEQ ID NO: 1857824 - RNA, 19 nt, Artificial Sequence
  Description of Artificial Sequence: Synthetic oligonucleotide
  Antisense strand to SEQ ID NO: 1857823
auuuccacauauuucguca

SEQ ID NO: 1857825 - RNA, 19 nt, Artificial Sequence
  Description of Artificial Sequence: Synthetic oligonucleotide
  Sense strand starting at position 3790 of SEQ ID NO: 1564135
gacgaaauauguggaaauc

SEQ ID NO: 1857826 - RNA, 19 nt, Artificial Sequence
  Description of Artificial Sequence: Synthetic oligonucleotide
  Antisense strand to SEQ ID NO: 1857825
gauuuccacauauuucguc

SEQ ID NO: 1857827 - RNA, 19 nt, Artificial Sequence
  Description of Artificial Sequence: Synthetic oligonucleotide
  Sense strand starting at position 3799 of SEQ ID NO: 1564135
uguggaaaucccugccaua

SEQ ID NO: 1857828 - RNA, 19 nt, Artificial Sequence
  Description of Artificial Sequence: Synthetic oligonucleotide
  Antisense strand to SEQ ID NO: 1857827
uauggcagggauuuccaca

SEQ ID NO: 1857829 - RNA, 19 nt, Artificial Sequence
  Description of Artificial Sequence: Synthetic oligonucleotide
  Sense strand starting at position 3879 of SEQ ID NO: 1564135
gccaaauuagaauguagag

SEQ ID NO: 1857830 - RNA, 19 nt, Artificial Sequence
  Description of Artificial Sequence: Synthetic oligonucleotide
  Antisense strand to SEQ ID NO: 1857829
cucuacauucuaauuuggc

SEQ ID NO: 1857831 - RNA, 19 nt, Artificial Sequence
  Description of Artificial Sequence: Synthetic oligonucleotide
  Sense strand starting at position 3915 of SEQ ID NO: 1564135
uguaacagauauugauguu

SEQ ID NO: 1857832 - RNA, 19 nt, Artificial Sequence
  Description of Artificial Sequence: Synthetic oligonucleotide
  Antisense strand to SEQ ID NO: 1857831
aacaucaauaucuguuaca

SEQ ID NO: 1857833 - RNA, 19 nt, Artificial Sequence
  Description of Artificial Sequence: Synthetic oligonucleotide
  Sense strand starting at position 3924 of SEQ ID NO: 1564135
uauugauguugggcuguca

SEQ ID NO: 1857834 - RNA, 19 nt, Artificial Sequence
  Description of Artificial Sequence: Synthetic oligonucleotide
  Antisense strand to SEQ ID NO: 1857833
ugacagcccaacaucaaua

SEQ ID NO: 1857835 - RNA, 19 nt, Artificial Sequence
  Description of Artificial Sequence: Synthetic oligonucleotide
  Sense strand starting at position 3936 of SEQ ID NO: 1564135
gcugucaguuucucuuuga

SEQ ID NO: 1857836 - RNA, 19 nt, Artificial Sequence
  Description of Artificial Sequence: Synthetic oligonucleotide
  Antisense strand to SEQ ID NO: 1857835
ucaaagagaaacugacagc

SEQ ID NO: 1857837 - RNA, 19 nt, Artificial Sequence
  Description of Artificial Sequence: Synthetic oligonucleotide
  Sense strand starting at position 3952 of SEQ ID NO: 1564135
ugagccuucugguagccaa

SEQ ID NO: 1857838 - RNA, 19 nt, Artificial Sequence
  Description of Artificial Sequence: Synthetic oligonucleotide
  Antisense strand to SEQ ID NO: 1857837
uuggcuaccagaaggcuca

SEQ ID NO: 1857839 - RNA, 19 nt, Artificial Sequence
  Description of Artificial Sequence: Synthetic oligonucleotide
  Sense strand starting at position 2016 of SEQ ID NO: 1564136
ugcgaaacacuuugaugaa

SEQ ID NO: 1857840 - RNA, 19 nt, Artificial Sequence
  Description of Artificial Sequence: Synthetic oligonucleotide
  Antisense strand to SEQ ID NO: 1857839
uucaucaaaguguuucgca

SEQ ID NO: 1857841 - RNA, 19 nt, Artificial Sequence
  Description of Artificial Sequence: Synthetic oligonucleotide
  Sense strand starting at position 2017 of SEQ ID NO: 1564136
gcgaaacacuuugaugaaa

SEQ ID NO: 1857842 - RNA, 19 nt, Artificial Sequence
  Description of Artificial Sequence: Synthetic oligonucleotide
  Antisense strand to SEQ ID NO: 1857841
uuucaucaaaguguuucgc

SEQ ID NO: 1857843 - RNA, 19 nt, Artificial Sequence
  Description of Artificial Sequence: Synthetic oligonucleotide
  Sense strand starting at position 2060 of SEQ ID NO: 1564136
gaaagcugauugugcaaau

SEQ ID NO: 1857844 - RNA, 19 nt, Artificial Sequence
  Description of Artificial Sequence: Synthetic oligonucleotide
  Antisense strand to SEQ ID NO: 1857843
auuugcacaaucagcuuuc

SEQ ID NO: 1857845 - RNA, 19 nt, Artificial Sequence
  Description of Artificial Sequence: Synthetic oligonucleotide
  Sense strand starting at position 2293 of SEQ ID NO: 1564136
ccaauaugauguguuuaaa

SEQ ID NO: 1857846 - RNA, 19 nt, Artificial Sequence
  Description of Artificial Sequence: Synthetic oligonucleotide
  Antisense strand to SEQ ID NO: 1857845
uuuaaacacaucauauugg

SEQ ID NO: 1857847 - RNA, 19 nt, Artificial Sequence
  Description of Artificial Sequence: Synthetic oligonucleotide
  Sense strand starting at position 2326 of SEQ ID NO: 1564136
cugacaaggugauuauuau

SEQ ID NO: 1857848 - RNA, 19 nt, Artificial Sequence
  Description of Artificial Sequence: Synthetic oligonucleotide
  Antisense strand to SEQ ID NO: 1857847
auaauaaucaccuugucag

SEQ ID NO: 1857849 - RNA, 19 nt, Artificial Sequence
  Description of Artificial Sequence: Synthetic oligonucleotide
  Sense strand starting at position 2730 of SEQ ID NO: 1564136
gcuguaaacuaggcagaga

SEQ ID NO: 1857850 - RNA, 19 nt, Artificial Sequence
  Description of Artificial Sequence: Synthetic oligonucleotide
  Antisense strand to SEQ ID NO: 1857849
ucucugccuaguuuacagc

SEQ ID NO: 1857851 - RNA, 19 nt, Artificial Sequence
  Description of Artificial Sequence: Synthetic oligonucleotide
  Sense strand starting at position 2772 of SEQ ID NO: 1564136
agaauauugcaguguugcu

SEQ ID NO: 1857852 - RNA, 19 nt, Artificial Sequence
  Description of Artificial Sequence: Synthetic oligonucleotide
  Antisense strand to SEQ ID NO: 1857851
agcaacacugcaauauucu

SEQ ID NO: 1857853 - RNA, 19 nt, Artificial Sequence
  Description of Artificial Sequence: Synthetic oligonucleotide
  Sense strand starting at position 2777 of SEQ ID NO: 1564136
auugcaguguugcuauaaa

SEQ ID NO: 1857854 - RNA, 19 nt, Artificial Sequence
  Description of Artificial Sequence: Synthetic oligonucleotide
  Antisense strand to SEQ ID NO: 1857853
uuuauagcaacacugcaau

SEQ ID NO: 1857855 - RNA, 19 nt, Artificial Sequence
  Description of Artificial Sequence: Synthetic oligonucleotide
  Sense strand starting at position 3051 of SEQ ID NO: 1564136
augcccggucccuauaaau

SEQ ID NO: 1857856 - RNA, 19 nt, Artificial Sequence
  Description of Artificial Sequence: Synthetic oligonucleotide
  Antisense strand to SEQ ID NO: 1857855
auuuauagggaccgggcau

SEQ ID NO: 1857857 - RNA, 19 nt, Artificial Sequence
  Description of Artificial Sequence: Synthetic oligonucleotide
  Sense strand starting at position 3115 of SEQ ID NO: 1564136
cgaggaagaugaugucacu

SEQ ID NO: 1857858 - RNA, 19 nt, Artificial Sequence
  Description of Artificial Sequence: Synthetic oligonucleotide
  Antisense strand to SEQ ID NO: 1857857
agugacaucaucuuccucg

SEQ ID NO: 1857859 - RNA, 19 nt, Artificial Sequence
  Description of Artificial Sequence: Synthetic oligonucleotide
  Sense strand starting at position 3186 of SEQ ID NO: 1564136
gcaccugcuugucacagaa

SEQ ID NO: 1857860 - RNA, 19 nt, Artificial Sequence
  Description of Artificial Sequence: Synthetic oligonucleotide
  Antisense strand to SEQ ID NO: 1857859
uucugugacaagcaggugc

SEQ ID NO: 1857861 - RNA, 19 nt, Artificial Sequence
  Description of Artificial Sequence: Synthetic oligonucleotide
  Sense strand starting at position 3259 of SEQ ID NO: 1564136
cuccaauuacuuggugaac

SEQ ID NO: 1857862 - RNA, 19 nt, Artificial Sequence
  Description of Artificial Sequence: Synthetic oligonucleotide
  Antisense strand to SEQ ID NO: 1857861
guucaccaaguaauuggag

SEQ ID NO: 1857863 - RNA, 19 nt, Artificial Sequence
  Description of Artificial Sequence: Synthetic oligonucleotide
  Sense strand starting at position 3260 of SEQ ID NO: 1564136
uccaauuacuuggugaacu

SEQ ID NO: 1857864 - RNA, 19 nt, Artificial Sequence
  Description of Artificial Sequence: Synthetic oligonucleotide
  Antisense strand to SEQ ID NO: 1857863
aguucaccaaguaauugga

SEQ ID NO: 1857865 - RNA, 19 nt, Artificial Sequence
  Description of Artificial Sequence: Synthetic oligonucleotide
  Sense strand starting at position 3261 of SEQ ID NO: 1564136
ccaauuacuuggugaacuu

SEQ ID NO: 1857866 - RNA, 19 nt, Artificial Sequence
  Description of Artificial Sequence: Synthetic oligonucleotide
  Antisense strand to SEQ ID NO: 1857865
aaguucaccaaguaauugg

SEQ ID NO: 1857867 - RNA, 19 nt, Artificial Sequence
  Description of Artificial Sequence: Synthetic oligonucleotide
  Sense strand starting at position 3280 of SEQ ID NO: 1564136
agggcuugccugggaguau

SEQ ID NO: 1857868 - RNA, 19 nt, Artificial Sequence
  Description of Artificial Sequence: Synthetic oligonucleotide
  Antisense strand to SEQ ID NO: 1857867
auacucccaggcaagcccu

SEQ ID NO: 1857869 - RNA, 19 nt, Artificial Sequence
  Description of Artificial Sequence: Synthetic oligonucleotide
  Sense strand starting at position 3281 of SEQ ID NO: 1564136
gggcuugccugggaguauu

SEQ ID NO: 1857870 - RNA, 19 nt, Artificial Sequence
  Description of Artificial Sequence: Synthetic oligonucleotide
  Antisense strand to SEQ ID NO: 1857869
aauacucccaggcaagccc

SEQ ID NO: 1857871 - RNA, 19 nt, Artificial Sequence
  Description of Artificial Sequence: Synthetic oligonucleotide
  Sense strand starting at position 3449 of SEQ ID NO: 1564136
gugucauggugcgaucuca

SEQ ID NO: 1857872 - RNA, 19 nt, Artificial Sequence
  Description of Artificial Sequence: Synthetic oligonucleotide
  Antisense strand to SEQ ID NO: 1857871
ugagaucgcaccaugacac

SEQ ID NO: 1857873 - RNA, 19 nt, Artificial Sequence
  Description of Artificial Sequence: Synthetic oligonucleotide
  Sense strand starting at position 3852 of SEQ ID NO: 1564137
aggauuugaucuggcugca

SEQ ID NO: 1857874 - RNA, 19 nt, Artificial Sequence
  Description of Artificial Sequence: Synthetic oligonucleotide
  Antisense strand to SEQ ID NO: 1857873
ugcagccagaucaaauccu

SEQ ID NO: 1857875 - RNA, 19 nt, Artificial Sequence
  Description of Artificial Sequence: Synthetic oligonucleotide
  Sense strand starting at position 384 of SEQ ID NO: 1564139
acccuuugcggauaucaac

SEQ ID NO: 1857876 - RNA, 19 nt, Artificial Sequence
  Description of Artificial Sequence: Synthetic oligonucleotide
  Antisense strand to SEQ ID NO: 1857875
guugauauccgcaaagggu

SEQ ID NO: 1857877 - RNA, 19 nt, Artificial Sequence
  Description of Artificial Sequence: Synthetic oligonucleotide
  Sense strand starting at position 1092 of SEQ ID NO: 1564139
gcaguuccucuggagaugu

SEQ ID NO: 1857878 - RNA, 19 nt, Artificial Sequence
  Description of Artificial Sequence: Synthetic oligonucleotide
  Antisense strand to SEQ ID NO: 1857877
acaucuccagaggaacugc

SEQ ID NO: 1857879 - RNA, 19 nt, Artificial Sequence
  Description of Artificial Sequence: Synthetic oligonucleotide
  Sense strand starting at position 1292 of SEQ ID NO: 1564139
gggacuucaugagaagaag

SEQ ID NO: 1857880 - RNA, 19 nt, Artificial Sequence
  Description of Artificial Sequence: Synthetic oligonucleotide
  Antisense strand to SEQ ID NO: 1857879
cuucuucucaugaaguccc

SEQ ID NO: 1857881 - RNA, 19 nt, Artificial Sequence
  Description of Artificial Sequence: Synthetic oligonucleotide
  Sense strand starting at position 2411 of SEQ ID NO: 1564139
acgcuaguguggcuacauu

SEQ ID NO: 1857882 - RNA, 19 nt, Artificial Sequence
  Description of Artificial Sequence: Synthetic oligonucleotide
  Antisense strand to SEQ ID NO: 1857881
aauguagccacacuagcgu

SEQ ID NO: 1857883 - RNA, 19 nt, Artificial Sequence
  Description of Artificial Sequence: Synthetic oligonucleotide
  Sense strand starting at position 2508 of SEQ ID NO: 1564139
ugggcuacugcugagauga

SEQ ID NO: 1857884 - RNA, 19 nt, Artificial Sequence
  Description of Artificial Sequence: Synthetic oligonucleotide
  Antisense strand to SEQ ID NO: 1857883
ucaucucagcaguagccca

SEQ ID NO: 1857885 - RNA, 19 nt, Artificial Sequence
  Description of Artificial Sequence: Synthetic oligonucleotide
  Sense strand starting at position 2510 of SEQ ID NO: 1564139
ggcuacugcugagaugaau

SEQ ID NO: 1857886 - RNA, 19 nt, Artificial Sequence
  Description of Artificial Sequence: Synthetic oligonucleotide
  Antisense strand to SEQ ID NO: 1857885
auucaucucagcaguagcc

SEQ ID NO: 1857887 - RNA, 19 nt, Artificial Sequence
  Description of Artificial Sequence: Synthetic oligonucleotide
  Sense strand starting at position 2594 of SEQ ID NO: 1564139
gaaaguagcuuggacacuu

SEQ ID NO: 1857888 - RNA, 19 nt, Artificial Sequence
  Description of Artificial Sequence: Synthetic oligonucleotide
  Antisense strand to SEQ ID NO: 1857887
aaguguccaagcuacuuuc

SEQ ID NO: 1857889 - RNA, 19 nt, Artificial Sequence
  Description of Artificial Sequence: Synthetic oligonucleotide
  Sense strand starting at position 2602 of SEQ ID NO: 1564139
cuuggacacuuagaaaugu

SEQ ID NO: 1857890 - RNA, 19 nt, Artificial Sequence
  Description of Artificial Sequence: Synthetic oligonucleotide
  Antisense strand to SEQ ID NO: 1857889
acauuucuaaguguccaag

SEQ ID NO: 1857891 - RNA, 19 nt, Artificial Sequence
  Description of Artificial Sequence: Synthetic oligonucleotide
  Sense strand starting at position 2871 of SEQ ID NO: 1564139
ggugcuuugagaugcaaau

SEQ ID NO: 1857892 - RNA, 19 nt, Artificial Sequence
  Description of Artificial Sequence: Synthetic oligonucleotide
  Antisense strand to SEQ ID NO: 1857891
auuugcaucucaaagcacc

SEQ ID NO: 1857893 - RNA, 19 nt, Artificial Sequence
  Description of Artificial Sequence: Synthetic oligonucleotide
  Sense strand starting at position 3331 of SEQ ID NO: 1564139
gcaugaggguucuaaagcu

SEQ ID NO: 1857894 - RNA, 19 nt, Artificial Sequence
  Description of Artificial Sequence: Synthetic oligonucleotide
  Antisense strand to SEQ ID NO: 1857893
agcuuuagaacccucaugc

SEQ ID NO: 1857895 - RNA, 19 nt, Artificial Sequence
  Description of Artificial Sequence: Synthetic oligonucleotide
  Sense strand starting at position 3649 of SEQ ID NO: 1564139
agaauaaguucuuguagau

SEQ ID NO: 1857896 - RNA, 19 nt, Artificial Sequence
  Description of Artificial Sequence: Synthetic oligonucleotide
  Antisense strand to SEQ ID NO: 1857895
aucuacaagaacuuauucu

SEQ ID NO: 1857897 - RNA, 19 nt, Artificial Sequence
  Description of Artificial Sequence: Synthetic oligonucleotide
  Sense strand starting at position 3659 of SEQ ID NO: 1564139
cuuguagauuaucuuguca

SEQ ID NO: 1857898 - RNA, 19 nt, Artificial Sequence
  Description of Artificial Sequence: Synthetic oligonucleotide
  Antisense strand to SEQ ID NO: 1857897
ugacaagauaaucuacaag

SEQ ID NO: 1857899 - RNA, 19 nt, Artificial Sequence
  Description of Artificial Sequence: Synthetic oligonucleotide
  Sense strand starting at position 3661 of SEQ ID NO: 1564139
uguagauuaucuugucaua

SEQ ID NO: 1857900 - RNA, 19 nt, Artificial Sequence
  Description of Artificial Sequence: Synthetic oligonucleotide
  Antisense strand to SEQ ID NO: 1857899
uaugacaagauaaucuaca

SEQ ID NO: 1857901 - RNA, 19 nt, Artificial Sequence
  Description of Artificial Sequence: Synthetic oligonucleotide
  Sense strand starting at position 3871 of SEQ ID NO: 1564139
aagcaaugugaaggaaguu

SEQ ID NO: 1857902 - RNA, 19 nt, Artificial Sequence
  Description of Artificial Sequence: Synthetic oligonucleotide
  Antisense strand to SEQ ID NO: 1857901
aacuuccuucacauugcuu

SEQ ID NO: 1857903 - RNA, 19 nt, Artificial Sequence
  Description of Artificial Sequence: Synthetic oligonucleotide
  Sense strand starting at position 3940 of SEQ ID NO: 1564139
gagcaagaaucuuguauag

SEQ ID NO: 1857904 - RNA, 19 nt, Artificial Sequence
  Description of Artificial Sequence: Synthetic oligonucleotide
  Antisense strand to SEQ ID NO: 1857903
cuauacaagauucuugcuc

SEQ ID NO: 1857905 - RNA, 19 nt, Artificial Sequence
  Description of Artificial Sequence: Synthetic oligonucleotide
  Sense strand starting at position 3942 of SEQ ID NO: 1564139
gcaagaaucuuguauagua

SEQ ID NO: 1857906 - RNA, 19 nt, Artificial Sequence
  Description of Artificial Sequence: Synthetic oligonucleotide
  Antisense strand to SEQ ID NO: 1857905
uacuauacaagauucuugc

SEQ ID NO: 1857907 - RNA, 19 nt, Artificial Sequence
  Description of Artificial Sequence: Synthetic oligonucleotide
  Sense strand starting at position 356 of SEQ ID NO: 1564140
uucccaagucauggcgauu

SEQ ID NO: 1857908 - RNA, 19 nt, Artificial Sequence
  Description of Artificial Sequence: Synthetic oligonucleotide
  Antisense strand to SEQ ID NO: 1857907
aaucgccaugacuugggaa

SEQ ID NO: 1857909 - RNA, 19 nt, Artificial Sequence
  Description of Artificial Sequence: Synthetic oligonucleotide
  Sense strand starting at position 385 of SEQ ID NO: 1564140
acccuuugcggauaucaac

SEQ ID NO: 1857910 - RNA, 19 nt, Artificial Sequence
  Description of Artificial Sequence: Synthetic oligonucleotide
  Antisense strand to SEQ ID NO: 1857909
guugauauccgcaaagggu

SEQ ID NO: 1857911 - RNA, 19 nt, Artificial Sequence
  Description of Artificial Sequence: Synthetic oligonucleotide
  Sense strand starting at position 432 of SEQ ID NO: 1564140
aaagacugcugaggucauu

SEQ ID NO: 1857912 - RNA, 19 nt, Artificial Sequence
  Description of Artificial Sequence: Synthetic oligonucleotide
  Antisense strand to SEQ ID NO: 1857911
aaugaccucagcagucuuu

SEQ ID NO: 1857913 - RNA, 19 nt, Artificial Sequence
  Description of Artificial Sequence: Synthetic oligonucleotide
  Sense strand starting at position 435 of SEQ ID NO: 1564140
gacugcugaggucauuaaa

SEQ ID NO: 1857914 - RNA, 19 nt, Artificial Sequence
  Description of Artificial Sequence: Synthetic oligonucleotide
  Antisense strand to SEQ ID NO: 1857913
uuuaaugaccucagcaguc

SEQ ID NO: 1857915 - RNA, 19 nt, Artificial Sequence
  Description of Artificial Sequence: Synthetic oligonucleotide
  Sense strand starting at position 1218 of SEQ ID NO: 1564140
ggcaucuguuaagaaagca

SEQ ID NO: 1857916 - RNA, 19 nt, Artificial Sequence
  Description of Artificial Sequence: Synthetic oligonucleotide
  Antisense strand to SEQ ID NO: 1857915
ugcuuucuuaacagaugcc

SEQ ID NO: 1857917 - RNA, 19 nt, Artificial Sequence
  Description of Artificial Sequence: Synthetic oligonucleotide
  Sense strand starting at position 1293 of SEQ ID NO: 1564140
gggacuucaugagaagaag

SEQ ID NO: 1857918 - RNA, 19 nt, Artificial Sequence
  Description of Artificial Sequence: Synthetic oligonucleotide
  Antisense strand to SEQ ID NO: 1857917
cuucuucucaugaaguccc

SEQ ID NO: 1857919 - RNA, 19 nt, Artificial Sequence
  Description of Artificial Sequence: Synthetic oligonucleotide
  Sense strand starting at position 2554 of SEQ ID NO: 1564140
guccguguaguucaaguuu

SEQ ID NO: 1857920 - RNA, 19 nt, Artificial Sequence
  Description of Artificial Sequence: Synthetic oligonucleotide
  Antisense strand to SEQ ID NO: 1857919
aaacuugaacuacacggac

SEQ ID NO: 1857921 - RNA, 19 nt, Artificial Sequence
  Description of Artificial Sequence: Synthetic oligonucleotide
  Sense strand starting at position 3168 of SEQ ID NO: 1564140
ugacgaugcuucuuguaug

SEQ ID NO: 1857922 - RNA, 19 nt, Artificial Sequence
  Description of Artificial Sequence: Synthetic oligonucleotide
  Antisense strand to SEQ ID NO: 1857921
cauacaagaagcaucguca

SEQ ID NO: 1857923 - RNA, 19 nt, Artificial Sequence
  Description of Artificial Sequence: Synthetic oligonucleotide
  Sense strand starting at position 3169 of SEQ ID NO: 1564140
gacgaugcuucuuguauga

SEQ ID NO: 1857924 - RNA, 19 nt, Artificial Sequence
  Description of Artificial Sequence: Synthetic oligonucleotide
  Antisense strand to SEQ ID NO: 1857923
ucauacaagaagcaucguc

SEQ ID NO: 1857925 - RNA, 19 nt, Artificial Sequence
  Description of Artificial Sequence: Synthetic oligonucleotide
  Sense strand starting at position 3171 of SEQ ID NO: 1564140
cgaugcuucuuguaugauu

SEQ ID NO: 1857926 - RNA, 19 nt, Artificial Sequence
  Description of Artificial Sequence: Synthetic oligonucleotide
  Antisense strand to SEQ ID NO: 1857925
aaucauacaagaagcaucg

SEQ ID NO: 1857927 - RNA, 19 nt, Artificial Sequence
  Description of Artificial Sequence: Synthetic oligonucleotide
  Sense strand starting at position 3847 of SEQ ID NO: 1564140
ugaagaugaggcuguaauu

SEQ ID NO: 1857928 - RNA, 19 nt, Artificial Sequence
  Description of Artificial Sequence: Synthetic oligonucleotide
  Antisense strand to SEQ ID NO: 1857927
aauuacagccucaucuuca

SEQ ID NO: 1857929 - RNA, 19 nt, Artificial Sequence
  Description of Artificial Sequence: Synthetic oligonucleotide
  Sense strand starting at position 384 of SEQ ID NO: 1564141
acccuuugcggauaucaac

SEQ ID NO: 1857930 - RNA, 19 nt, Artificial Sequence
  Description of Artificial Sequence: Synthetic oligonucleotide
  Antisense strand to SEQ ID NO: 1857929
guugauauccgcaaagggu

SEQ ID NO: 1857931 - RNA, 19 nt, Artificial Sequence
  Description of Artificial Sequence: Synthetic oligonucleotide
  Sense strand starting at position 1092 of SEQ ID NO: 1564141
gcaguuccucuggagaugu

SEQ ID NO: 1857932 - RNA, 19 nt, Artificial Sequence
  Description of Artificial Sequence: Synthetic oligonucleotide
  Antisense strand to SEQ ID NO: 1857931
acaucuccagaggaacugc

SEQ ID NO: 1857933 - RNA, 19 nt, Artificial Sequence
  Description of Artificial Sequence: Synthetic oligonucleotide
  Sense strand starting at position 1292 of SEQ ID NO: 1564141
gggacuucaugagaagaag

SEQ ID NO: 1857934 - RNA, 19 nt, Artificial Sequence
  Description of Artificial Sequence: Synthetic oligonucleotide
  Antisense strand to SEQ ID NO: 1857933
cuucuucucaugaaguccc

SEQ ID NO: 1857935 - RNA, 19 nt, Artificial Sequence
  Description of Artificial Sequence: Synthetic oligonucleotide
  Sense strand starting at position 2411 of SEQ ID NO: 1564141
acgcuaguguggcuacauu

SEQ ID NO: 1857936 - RNA, 19 nt, Artificial Sequence
  Description of Artificial Sequence: Synthetic oligonucleotide
  Antisense strand to SEQ ID NO: 1857935
aauguagccacacuagcgu

SEQ ID NO: 1857937 - RNA, 19 nt, Artificial Sequence
  Description of Artificial Sequence: Synthetic oligonucleotide
  Sense strand starting at position 2508 of SEQ ID NO: 1564141
ugggcuacugcugagauga

SEQ ID NO: 1857938 - RNA, 19 nt, Artificial Sequence
  Description of Artificial Sequence: Synthetic oligonucleotide
  Antisense strand to SEQ ID NO: 1857937
ucaucucagcaguagccca

SEQ ID NO: 1857939 - RNA, 19 nt, Artificial Sequence
  Description of Artificial Sequence: Synthetic oligonucleotide
  Sense strand starting at position 2510 of SEQ ID NO: 1564141
ggcuacugcugagaugaau

SEQ ID NO: 1857940 - RNA, 19 nt, Artificial Sequence
  Description of Artificial Sequence: Synthetic oligonucleotide
  Antisense strand to SEQ ID NO: 1857939
auucaucucagcaguagcc

SEQ ID NO: 1857941 - RNA, 19 nt, Artificial Sequence
  Description of Artificial Sequence: Synthetic oligonucleotide
  Sense strand starting at position 2594 of SEQ ID NO: 1564141
gaaaguagcuuggacacuu

SEQ ID NO: 1857942 - RNA, 19 nt, Artificial Sequence
  Description of Artificial Sequence: Synthetic oligonucleotide
  Antisense strand to SEQ ID NO: 1857941
aaguguccaagcuacuuuc

SEQ ID NO: 1857943 - RNA, 19 nt, Artificial Sequence
  Description of Artificial Sequence: Synthetic oligonucleotide
  Sense strand starting at position 2602 of SEQ ID NO: 1564141
cuuggacacuuagaaaugu

SEQ ID NO: 1857944 - RNA, 19 nt, Artificial Sequence
  Description of Artificial Sequence: Synthetic oligonucleotide
  Antisense strand to SEQ ID NO: 1857943
acauuucuaaguguccaag

SEQ ID NO: 1857945 - RNA, 19 nt, Artificial Sequence
  Description of Artificial Sequence: Synthetic oligonucleotide
  Sense strand starting at position 2871 of SEQ ID NO: 1564141
ggugcuuugagaugcaaau

SEQ ID NO: 1857946 - RNA, 19 nt, Artificial Sequence
  Description of Artificial Sequence: Synthetic oligonucleotide
  Antisense strand to SEQ ID NO: 1857945
auuugcaucucaaagcacc

SEQ ID NO: 1857947 - RNA, 19 nt, Artificial Sequence
  Description of Artificial Sequence: Synthetic oligonucleotide
  Sense strand starting at position 3331 of SEQ ID NO: 1564141
gcaugaggguucuaaagcu

SEQ ID NO: 1857948 - RNA, 19 nt, Artificial Sequence
  Description of Artificial Sequence: Synthetic oligonucleotide
  Antisense strand to SEQ ID NO: 1857947
agcuuuagaacccucaugc

SEQ ID NO: 1857949 - RNA, 19 nt, Artificial Sequence
  Description of Artificial Sequence: Synthetic oligonucleotide
  Sense strand starting at position 3649 of SEQ ID NO: 1564141
agaauaaguucuuguagau

SEQ ID NO: 1857950 - RNA, 19 nt, Artificial Sequence
  Description of Artificial Sequence: Synthetic oligonucleotide
  Antisense strand to SEQ ID NO: 1857949
aucuacaagaacuuauucu

SEQ ID NO: 1857951 - RNA, 19 nt, Artificial Sequence
  Description of Artificial Sequence: Synthetic oligonucleotide
  Sense strand starting at position 3659 of SEQ ID NO: 1564141
cuuguagauuaucuuguca

SEQ ID NO: 1857952 - RNA, 19 nt, Artificial Sequence
  Description of Artificial Sequence: Synthetic oligonucleotide
  Antisense strand to SEQ ID NO: 1857951
ugacaagauaaucuacaag

SEQ ID NO: 1857953 - RNA, 19 nt, Artificial Sequence
  Description of Artificial Sequence: Synthetic oligonucleotide
  Sense strand starting at position 3661 of SEQ ID NO: 1564141
uguagauuaucuugucaua

SEQ ID NO: 1857954 - RNA, 19 nt, Artificial Sequence
  Description of Artificial Sequence: Synthetic oligonucleotide
  Antisense strand to SEQ ID NO: 1857953
uaugacaagauaaucuaca

SEQ ID NO: 1857955 - RNA, 19 nt, Artificial Sequence
  Description of Artificial Sequence: Synthetic oligonucleotide
  Sense strand starting at position 3871 of SEQ ID NO: 1564141
aagcaaugugaaggaaguu

SEQ ID NO: 1857956 - RNA, 19 nt, Artificial Sequence
  Description of Artificial Sequence: Synthetic oligonucleotide
  Antisense strand to SEQ ID NO: 1857955
aacuuccuucacauugcuu

SEQ ID NO: 1857957 - RNA, 19 nt, Artificial Sequence
  Description of Artificial Sequence: Synthetic oligonucleotide
  Sense strand starting at position 3940 of SEQ ID NO: 1564141
gagcaagaaucuuguauag

SEQ ID NO: 1857958 - RNA, 19 nt, Artificial Sequence
  Description of Artificial Sequence: Synthetic oligonucleotide
  Antisense strand to SEQ ID NO: 1857957
cuauacaagauucuugcuc

SEQ ID NO: 1857959 - RNA, 19 nt, Artificial Sequence
  Description of Artificial Sequence: Synthetic oligonucleotide
  Sense strand starting at position 3942 of SEQ ID NO: 1564141
gcaagaaucuuguauagua

SEQ ID NO: 1857960 - RNA, 19 nt, Artificial Sequence
  Description of Artificial Sequence: Synthetic oligonucleotide
  Antisense strand to SEQ ID NO: 1857959
uacuauacaagauucuugc

SEQ ID NO: 1857961 - RNA, 19 nt, Artificial Sequence
  Description of Artificial Sequence: Synthetic oligonucleotide
  Sense strand starting at position 356 of SEQ ID NO: 1564142
uucccaagucauggcgauu

SEQ ID NO: 1857962 - RNA, 19 nt, Artificial Sequence
  Description of Artificial Sequence: Synthetic oligonucleotide
  Antisense strand to SEQ ID NO: 1857961
aaucgccaugacuugggaa

SEQ ID NO: 1857963 - RNA, 19 nt, Artificial Sequence
  Description of Artificial Sequence: Synthetic oligonucleotide
  Sense strand starting at position 385 of SEQ ID NO: 1564142
acccuuugcggauaucaac

SEQ ID NO: 1857964 - RNA, 19 nt, Artificial Sequence
  Description of Artificial Sequence: Synthetic oligonucleotide
  Antisense strand to SEQ ID NO: 1857963
guugauauccgcaaagggu

SEQ ID NO: 1857965 - RNA, 19 nt, Artificial Sequence
  Description of Artificial Sequence: Synthetic oligonucleotide
  Sense strand starting at position 432 of SEQ ID NO: 1564142
aaagacugcugaggucauu

SEQ ID NO: 1857966 - RNA, 19 nt, Artificial Sequence
  Description of Artificial Sequence: Synthetic oligonucleotide
  Antisense strand to SEQ ID NO: 1857965
aaugaccucagcagucuuu

SEQ ID NO: 1857967 - RNA, 19 nt, Artificial Sequence
  Description of Artificial Sequence: Synthetic oligonucleotide
  Sense strand starting at position 435 of SEQ ID NO: 1564142
gacugcugaggucauuaaa

SEQ ID NO: 1857968 - RNA, 19 nt, Artificial Sequence
  Description of Artificial Sequence: Synthetic oligonucleotide
  Antisense strand to SEQ ID NO: 1857967
uuuaaugaccucagcaguc

SEQ ID NO: 1857969 - RNA, 19 nt, Artificial Sequence
  Description of Artificial Sequence: Synthetic oligonucleotide
  Sense strand starting at position 1218 of SEQ ID NO: 1564142
ggcaucuguuaagaaagca

SEQ ID NO: 1857970 - RNA, 19 nt, Artificial Sequence
  Description of Artificial Sequence: Synthetic oligonucleotide
  Antisense strand to SEQ ID NO: 1857969
ugcuuucuuaacagaugcc

SEQ ID NO: 1857971 - RNA, 19 nt, Artificial Sequence
  Description of Artificial Sequence: Synthetic oligonucleotide
  Sense strand starting at position 1293 of SEQ ID NO: 1564142
gggacuucaugagaagaag

SEQ ID NO: 1857972 - RNA, 19 nt, Artificial Sequence
  Description of Artificial Sequence: Synthetic oligonucleotide
  Antisense strand to SEQ ID NO: 1857971
cuucuucucaugaaguccc

SEQ ID NO: 1857973 - RNA, 19 nt, Artificial Sequence
  Description of Artificial Sequence: Synthetic oligonucleotide
  Sense strand starting at position 2554 of SEQ ID NO: 1564142
guccguguaguucaaguuu

SEQ ID NO: 1857974 - RNA, 19 nt, Artificial Sequence
  Description of Artificial Sequence: Synthetic oligonucleotide
  Antisense strand to SEQ ID NO: 1857973
aaacuugaacuacacggac

SEQ ID NO: 1857975 - RNA, 19 nt, Artificial Sequence
  Description of Artificial Sequence: Synthetic oligonucleotide
  Sense strand starting at position 3168 of SEQ ID NO: 1564142
ugacgaugcuucuuguaug

SEQ ID NO: 1857976 - RNA, 19 nt, Artificial Sequence
  Description of Artificial Sequence: Synthetic oligonucleotide
  Antisense strand to SEQ ID NO: 1857975
cauacaagaagcaucguca

SEQ ID NO: 1857977 - RNA, 19 nt, Artificial Sequence
  Description of Artificial Sequence: Synthetic oligonucleotide
  Sense strand starting at position 3169 of SEQ ID NO: 1564142
gacgaugcuucuuguauga

SEQ ID NO: 1857978 - RNA, 19 nt, Artificial Sequence
  Description of Artificial Sequence: Synthetic oligonucleotide
  Antisense strand to SEQ ID NO: 1857977
ucauacaagaagcaucguc

SEQ ID NO: 1857979 - RNA, 19 nt, Artificial Sequence
  Description of Artificial Sequence: Synthetic oligonucleotide
  Sense strand starting at position 3171 of SEQ ID NO: 1564142
cgaugcuucuuguaugauu

SEQ ID NO: 1857980 - RNA, 19 nt, Artificial Sequence
  Description of Artificial Sequence: Synthetic oligonucleotide
  Antisense strand to SEQ ID NO: 1857979
aaucauacaagaagcaucg

SEQ ID NO: 1857981 - RNA, 19 nt, Artificial Sequence
  Description of Artificial Sequence: Synthetic oligonucleotide
  Sense strand starting at position 3847 of SEQ ID NO: 1564142
ugaagaugaggcuguaauu

SEQ ID NO: 1857982 - RNA, 19 nt, Artificial Sequence
  Description of Artificial Sequence: Synthetic oligonucleotide
  Antisense strand to SEQ ID NO: 1857981
aauuacagccucaucuuca

SEQ ID NO: 1857983 - RNA, 19 nt, Artificial Sequence
  Description of Artificial Sequence: Synthetic oligonucleotide
  Sense strand starting at position 298 of SEQ ID NO: 1564143
uucccaagucguggcgauu

SEQ ID NO: 1857984 - RNA, 19 nt, Artificial Sequence
  Description of Artificial Sequence: Synthetic oligonucleotide
  Antisense strand to SEQ ID NO: 1857983
aaucgccacgacuugggaa

SEQ ID NO: 1857985 - RNA, 19 nt, Artificial Sequence
  Description of Artificial Sequence: Synthetic oligonucleotide
  Sense strand starting at position 376 of SEQ ID NO: 1564143
cacugcugagguuauuaaa

SEQ ID NO: 1857986 - RNA, 19 nt, Artificial Sequence
  Description of Artificial Sequence: Synthetic oligonucleotide
  Antisense strand to SEQ ID NO: 1857985
uuuaauaaccucagcagug

SEQ ID NO: 1857987 - RNA, 19 nt, Artificial Sequence
  Description of Artificial Sequence: Synthetic oligonucleotide
  Sense strand starting at position 536 of SEQ ID NO: 1564143
acagaacauuuacgcuuua

SEQ ID NO: 1857988 - RNA, 19 nt, Artificial Sequence
  Description of Artificial Sequence: Synthetic oligonucleotide
  Antisense strand to SEQ ID NO: 1857987
uaaagcguaaauguucugu

SEQ ID NO: 1857989 - RNA, 19 nt, Artificial Sequence
  Description of Artificial Sequence: Synthetic oligonucleotide
  Sense strand starting at position 2976 of SEQ ID NO: 1564143
acuucuguagcauacaaga

SEQ ID NO: 1857990 - RNA, 19 nt, Artificial Sequence
  Description of Artificial Sequence: Synthetic oligonucleotide
  Antisense strand to SEQ ID NO: 1857989
ucuuguaugcuacagaagu

SEQ ID NO: 1857991 - RNA, 19 nt, Artificial Sequence
  Description of Artificial Sequence: Synthetic oligonucleotide
  Sense strand starting at position 3043 of SEQ ID NO: 1564143
guauaagaguuucccauaa

SEQ ID NO: 1857992 - RNA, 19 nt, Artificial Sequence
  Description of Artificial Sequence: Synthetic oligonucleotide
  Antisense strand to SEQ ID NO: 1857991
uuaugggaaacucuuauac

SEQ ID NO: 1857993 - RNA, 19 nt, Artificial Sequence
  Description of Artificial Sequence: Synthetic oligonucleotide
  Sense strand starting at position 3131 of SEQ ID NO: 1564143
gaugaugcuucuuguauga

SEQ ID NO: 1857994 - RNA, 19 nt, Artificial Sequence
  Description of Artificial Sequence: Synthetic oligonucleotide
  Antisense strand to SEQ ID NO: 1857993
ucauacaagaagcaucauc

SEQ ID NO: 1857995 - RNA, 19 nt, Artificial Sequence
  Description of Artificial Sequence: Synthetic oligonucleotide
  Sense strand starting at position 3133 of SEQ ID NO: 1564143
ugaugcuucuuguaugauu

SEQ ID NO: 1857996 - RNA, 19 nt, Artificial Sequence
  Description of Artificial Sequence: Synthetic oligonucleotide
  Antisense strand to SEQ ID NO: 1857995
aaucauacaagaagcauca

SEQ ID NO: 1857997 - RNA, 19 nt, Artificial Sequence
  Description of Artificial Sequence: Synthetic oligonucleotide
  Sense strand starting at position 349 of SEQ ID NO: 1564144
ucacacuuugcggauauca

SEQ ID NO: 1857998 - RNA, 19 nt, Artificial Sequence
  Description of Artificial Sequence: Synthetic oligonucleotide
  Antisense strand to SEQ ID NO: 1857997
ugauauccgcaaaguguga

SEQ ID NO: 1857999 - RNA, 19 nt, Artificial Sequence
  Description of Artificial Sequence: Synthetic oligonucleotide
  Sense strand starting at position 351 of SEQ ID NO: 1564144
acacuuugcggauaucaac

SEQ ID NO: 1858000 - RNA, 19 nt, Artificial Sequence
  Description of Artificial Sequence: Synthetic oligonucleotide
  Antisense strand to SEQ ID NO: 1857999
guugauauccgcaaagugu

SEQ ID NO: 1858001 - RNA, 19 nt, Artificial Sequence
  Description of Artificial Sequence: Synthetic oligonucleotide
  Sense strand starting at position 558 of SEQ ID NO: 1564144
acagaacauuuacgcuuua

SEQ ID NO: 1858002 - RNA, 19 nt, Artificial Sequence
  Description of Artificial Sequence: Synthetic oligonucleotide
  Antisense strand to SEQ ID NO: 1858001
uaaagcguaaauguucugu

SEQ ID NO: 1858003 - RNA, 19 nt, Artificial Sequence
  Description of Artificial Sequence: Synthetic oligonucleotide
  Sense strand starting at position 2392 of SEQ ID NO: 1564144
acauuuauuuauuggcaga

SEQ ID NO: 1858004 - RNA, 19 nt, Artificial Sequence
  Description of Artificial Sequence: Synthetic oligonucleotide
  Antisense strand to SEQ ID NO: 1858003
ucugccaauaaauaaaugu

SEQ ID NO: 1858005 - RNA, 19 nt, Artificial Sequence
  Description of Artificial Sequence: Synthetic oligonucleotide
  Sense strand starting at position 2395 of SEQ ID NO: 1564144
uuuauuuauuggcagagau

SEQ ID NO: 1858006 - RNA, 19 nt, Artificial Sequence
  Description of Artificial Sequence: Synthetic oligonucleotide
  Antisense strand to SEQ ID NO: 1858005
aucucugccaauaaauaaa

SEQ ID NO: 1858007 - RNA, 19 nt, Artificial Sequence
  Description of Artificial Sequence: Synthetic oligonucleotide
  Sense strand starting at position 2399 of SEQ ID NO: 1564144
uuuauuggcagagauguga

SEQ ID NO: 1858008 - RNA, 19 nt, Artificial Sequence
  Description of Artificial Sequence: Synthetic oligonucleotide
  Antisense strand to SEQ ID NO: 1858007
ucacaucucugccaauaaa

SEQ ID NO: 1858009 - RNA, 19 nt, Artificial Sequence
  Description of Artificial Sequence: Synthetic oligonucleotide
  Sense strand starting at position 2985 of SEQ ID NO: 1564144
acuucuguagcauacaaga

SEQ ID NO: 1858010 - RNA, 19 nt, Artificial Sequence
  Description of Artificial Sequence: Synthetic oligonucleotide
  Antisense strand to SEQ ID NO: 1858009
ucuuguaugcuacagaagu

SEQ ID NO: 1858011 - RNA, 19 nt, Artificial Sequence
  Description of Artificial Sequence: Synthetic oligonucleotide
  Sense strand starting at position 3052 of SEQ ID NO: 1564144
guauaagaguuucccauaa

SEQ ID NO: 1858012 - RNA, 19 nt, Artificial Sequence
  Description of Artificial Sequence: Synthetic oligonucleotide
  Antisense strand to SEQ ID NO: 1858011
uuaugggaaacucuuauac

SEQ ID NO: 1858013 - RNA, 19 nt, Artificial Sequence
  Description of Artificial Sequence: Synthetic oligonucleotide
  Sense strand starting at position 3446 of SEQ ID NO: 1564144
ggaugcggcaaaugaaauu

SEQ ID NO: 1858014 - RNA, 19 nt, Artificial Sequence
  Description of Artificial Sequence: Synthetic oligonucleotide
  Antisense strand to SEQ ID NO: 1858013
aauuucauuugccgcaucc

SEQ ID NO: 1858015 - RNA, 19 nt, Artificial Sequence
  Description of Artificial Sequence: Synthetic oligonucleotide
  Sense strand starting at position 3549 of SEQ ID NO: 1564144
ugcauuaaggagugaguua

SEQ ID NO: 1858016 - RNA, 19 nt, Artificial Sequence
  Description of Artificial Sequence: Synthetic oligonucleotide
  Antisense strand to SEQ ID NO: 1858015
uaacucacuccuuaaugca

SEQ ID NO: 1858017 - RNA, 19 nt, Artificial Sequence
  Description of Artificial Sequence: Synthetic oligonucleotide
  Sense strand starting at position 3550 of SEQ ID NO: 1564144
gcauuaaggagugaguuaa

SEQ ID NO: 1858018 - RNA, 19 nt, Artificial Sequence
  Description of Artificial Sequence: Synthetic oligonucleotide
  Antisense strand to SEQ ID NO: 1858017
uuaacucacuccuuaaugc

SEQ ID NO: 1858019 - RNA, 19 nt, Artificial Sequence
  Description of Artificial Sequence: Synthetic oligonucleotide
  Sense strand starting at position 3706 of SEQ ID NO: 1564144
gcccaccuguuccacgaua

SEQ ID NO: 1858020 - RNA, 19 nt, Artificial Sequence
  Description of Artificial Sequence: Synthetic oligonucleotide
  Antisense strand to SEQ ID NO: 1858019
uaucguggaacaggugggc

SEQ ID NO: 1858021 - RNA, 19 nt, Artificial Sequence
  Description of Artificial Sequence: Synthetic oligonucleotide
  Sense strand starting at position 3708 of SEQ ID NO: 1564144
ccaccuguuccacgauagu

SEQ ID NO: 1858022 - RNA, 19 nt, Artificial Sequence
  Description of Artificial Sequence: Synthetic oligonucleotide
  Antisense strand to SEQ ID NO: 1858021
acuaucguggaacaggugg

SEQ ID NO: 1858023 - RNA, 19 nt, Artificial Sequence
  Description of Artificial Sequence: Synthetic oligonucleotide
  Sense strand starting at position 3825 of SEQ ID NO: 1564144
ggcuguaauugaugucagu

SEQ ID NO: 1858024 - RNA, 19 nt, Artificial Sequence
  Description of Artificial Sequence: Synthetic oligonucleotide
  Antisense strand to SEQ ID NO: 1858023
acugacaucaauuacagcc

SEQ ID NO: 1858025 - RNA, 19 nt, Artificial Sequence
  Description of Artificial Sequence: Synthetic oligonucleotide
  Sense strand starting at position 3828 of SEQ ID NO: 1564144
uguaauugaugucaguguu

SEQ ID NO: 1858026 - RNA, 19 nt, Artificial Sequence
  Description of Artificial Sequence: Synthetic oligonucleotide
  Antisense strand to SEQ ID NO: 1858025
aacacugacaucaauuaca

SEQ ID NO: 1858027 - RNA, 19 nt, Artificial Sequence
  Description of Artificial Sequence: Synthetic oligonucleotide
  Sense strand starting at position 3831 of SEQ ID NO: 1564144
aauugaugucaguguuuaa

SEQ ID NO: 1858028 - RNA, 19 nt, Artificial Sequence
  Description of Artificial Sequence: Synthetic oligonucleotide
  Antisense strand to SEQ ID NO: 1858027
uuaaacacugacaucaauu

SEQ ID NO: 1858029 - RNA, 19 nt, Artificial Sequence
  Description of Artificial Sequence: Synthetic oligonucleotide
  Sense strand starting at position 3834 of SEQ ID NO: 1564144
ugaugucaguguuuaagau

SEQ ID NO: 1858030 - RNA, 19 nt, Artificial Sequence
  Description of Artificial Sequence: Synthetic oligonucleotide
  Antisense strand to SEQ ID NO: 1858029
aucuuaaacacugacauca

SEQ ID NO: 1858031 - RNA, 19 nt, Artificial Sequence
  Description of Artificial Sequence: Synthetic oligonucleotide
  Sense strand starting at position 3835 of SEQ ID NO: 1564144
gaugucaguguuuaagaua

SEQ ID NO: 1858032 - RNA, 19 nt, Artificial Sequence
  Description of Artificial Sequence: Synthetic oligonucleotide
  Antisense strand to SEQ ID NO: 1858031
uaucuuaaacacugacauc

SEQ ID NO: 1858033 - RNA, 19 nt, Artificial Sequence
  Description of Artificial Sequence: Synthetic oligonucleotide
  Sense strand starting at position 113 of SEQ ID NO: 1564145
ucacacuucgcggauauca

SEQ ID NO: 1858034 - RNA, 19 nt, Artificial Sequence
  Description of Artificial Sequence: Synthetic oligonucleotide
  Antisense strand to SEQ ID NO: 1858033
ugauauccgcgaaguguga

SEQ ID NO: 1858035 - RNA, 19 nt, Artificial Sequence
  Description of Artificial Sequence: Synthetic oligonucleotide
  Sense strand starting at position 684 of SEQ ID NO: 1564145
acuuuauugucauugccca

SEQ ID NO: 1858036 - RNA, 19 nt, Artificial Sequence
  Description of Artificial Sequence: Synthetic oligonucleotide
  Antisense strand to SEQ ID NO: 1858035
ugggcaaugacaauaaagu

SEQ ID NO: 1858037 - RNA, 19 nt, Artificial Sequence
  Description of Artificial Sequence: Synthetic oligonucleotide
  Sense strand starting at position 689 of SEQ ID NO: 1564145
auugucauugcccaagguu

SEQ ID NO: 1858038 - RNA, 19 nt, Artificial Sequence
  Description of Artificial Sequence: Synthetic oligonucleotide
  Antisense strand to SEQ ID NO: 1858037
aaccuugggcaaugacaau

SEQ ID NO: 1858039 - RNA, 19 nt, Artificial Sequence
  Description of Artificial Sequence: Synthetic oligonucleotide
  Sense strand starting at position 2272 of SEQ ID NO: 1564145
uacccaauguccguguagu

SEQ ID NO: 1858040 - RNA, 19 nt, Artificial Sequence
  Description of Artificial Sequence: Synthetic oligonucleotide
  Antisense strand to SEQ ID NO: 1858039
acuacacggacauugggua

SEQ ID NO: 1858041 - RNA, 19 nt, Artificial Sequence
  Description of Artificial Sequence: Synthetic oligonucleotide
  Sense strand starting at position 2273 of SEQ ID NO: 1564145
acccaauguccguguaguu

SEQ ID NO: 1858042 - RNA, 19 nt, Artificial Sequence
  Description of Artificial Sequence: Synthetic oligonucleotide
  Antisense strand to SEQ ID NO: 1858041
aacuacacggacauugggu

SEQ ID NO: 1858043 - RNA, 19 nt, Artificial Sequence
  Description of Artificial Sequence: Synthetic oligonucleotide
  Sense strand starting at position 2280 of SEQ ID NO: 1564145
guccguguaguucaaguuu

SEQ ID NO: 1858044 - RNA, 19 nt, Artificial Sequence
  Description of Artificial Sequence: Synthetic oligonucleotide
  Antisense strand to SEQ ID NO: 1858043
aaacuugaacuacacggac

SEQ ID NO: 1858045 - RNA, 19 nt, Artificial Sequence
  Description of Artificial Sequence: Synthetic oligonucleotide
  Sense strand starting at position 2695 of SEQ ID NO: 1564145
caggacggccauuauuaaa

SEQ ID NO: 1858046 - RNA, 19 nt, Artificial Sequence
  Description of Artificial Sequence: Synthetic oligonucleotide
  Antisense strand to SEQ ID NO: 1858045
uuuaauaauggccguccug

SEQ ID NO: 1858047 - RNA, 19 nt, Artificial Sequence
  Description of Artificial Sequence: Synthetic oligonucleotide
  Sense strand starting at position 3306 of SEQ ID NO: 1564145
gcaugaaggagugaguuaa

SEQ ID NO: 1858048 - RNA, 19 nt, Artificial Sequence
  Description of Artificial Sequence: Synthetic oligonucleotide
  Antisense strand to SEQ ID NO: 1858047
uuaacucacuccuucaugc

SEQ ID NO: 1858049 - RNA, 19 nt, Artificial Sequence
  Description of Artificial Sequence: Synthetic oligonucleotide
  Sense strand starting at position 3310 of SEQ ID NO: 1564145
gaaggagugaguuaaugcu

SEQ ID NO: 1858050 - RNA, 19 nt, Artificial Sequence
  Description of Artificial Sequence: Synthetic oligonucleotide
  Antisense strand to SEQ ID NO: 1858049
agcauuaacucacuccuuc

SEQ ID NO: 1858051 - RNA, 19 nt, Artificial Sequence
  Description of Artificial Sequence: Synthetic oligonucleotide
  Sense strand starting at position 3591 of SEQ ID NO: 1564145
gcugucaguguuuaagaua

SEQ ID NO: 1858052 - RNA, 19 nt, Artificial Sequence
  Description of Artificial Sequence: Synthetic oligonucleotide
  Antisense strand to SEQ ID NO: 1858051
uaucuuaaacacugacagc

SEQ ID NO: 1858053 - RNA, 19 nt, Artificial Sequence
  Description of Artificial Sequence: Synthetic oligonucleotide
  Sense strand starting at position 3744 of SEQ ID NO: 1564145
cuaagcaauccagaaguuu

SEQ ID NO: 1858054 - RNA, 19 nt, Artificial Sequence
  Description of Artificial Sequence: Synthetic oligonucleotide
  Antisense strand to SEQ ID NO: 1858053
aaacuucuggauugcuuag

SEQ ID NO: 1858055 - RNA, 19 nt, Artificial Sequence
  Description of Artificial Sequence: Synthetic oligonucleotide
  Sense strand starting at position 3810 of SEQ ID NO: 1564145
gccaguuaccaauaagcaa

SEQ ID NO: 1858056 - RNA, 19 nt, Artificial Sequence
  Description of Artificial Sequence: Synthetic oligonucleotide
  Antisense strand to SEQ ID NO: 1858055
uugcuuauugguaacuggc

SEQ ID NO: 1858057 - RNA, 19 nt, Artificial Sequence
  Description of Artificial Sequence: Synthetic oligonucleotide
  Sense strand starting at position 3841 of SEQ ID NO: 1564145
ucugcaguguacggaauau

SEQ ID NO: 1858058 - RNA, 19 nt, Artificial Sequence
  Description of Artificial Sequence: Synthetic oligonucleotide
  Antisense strand to SEQ ID NO: 1858057
auauuccguacacugcaga

SEQ ID NO: 1858059 - RNA, 19 nt, Artificial Sequence
  Description of Artificial Sequence: Synthetic oligonucleotide
  Sense strand starting at position 3850 of SEQ ID NO: 1564145
uacggaauauuauguugga

SEQ ID NO: 1858060 - RNA, 19 nt, Artificial Sequence
  Description of Artificial Sequence: Synthetic oligonucleotide
  Antisense strand to SEQ ID NO: 1858059
uccaacauaauauuccgua

SEQ ID NO: 1858061 - RNA, 19 nt, Artificial Sequence
  Description of Artificial Sequence: Synthetic oligonucleotide
  Sense strand starting at position 3851 of SEQ ID NO: 1564145
acggaauauuauguuggaa

SEQ ID NO: 1858062 - RNA, 19 nt, Artificial Sequence
  Description of Artificial Sequence: Synthetic oligonucleotide
  Antisense strand to SEQ ID NO: 1858061
uuccaacauaauauuccgu

SEQ ID NO: 1858063 - RNA, 19 nt, Artificial Sequence
  Description of Artificial Sequence: Synthetic oligonucleotide
  Sense strand starting at position 3853 of SEQ ID NO: 1564145
ggaauauuauguuggaaga

SEQ ID NO: 1858064 - RNA, 19 nt, Artificial Sequence
  Description of Artificial Sequence: Synthetic oligonucleotide
  Antisense strand to SEQ ID NO: 1858063
ucuuccaacauaauauucc

SEQ ID NO: 1858065 - RNA, 19 nt, Artificial Sequence
  Description of Artificial Sequence: Synthetic oligonucleotide
  Sense strand starting at position 140 of SEQ ID NO: 1564146
uucccuaugucccuggaua

SEQ ID NO: 1858066 - RNA, 19 nt, Artificial Sequence
  Description of Artificial Sequence: Synthetic oligonucleotide
  Antisense strand to SEQ ID NO: 1858065
uauccagggacauagggaa

SEQ ID NO: 1858067 - RNA, 19 nt, Artificial Sequence
  Description of Artificial Sequence: Synthetic oligonucleotide
  Sense strand starting at position 142 of SEQ ID NO: 1564146
cccuaugucccuggauagu

SEQ ID NO: 1858068 - RNA, 19 nt, Artificial Sequence
  Description of Artificial Sequence: Synthetic oligonucleotide
  Antisense strand to SEQ ID NO: 1858067
acuauccagggacauaggg

SEQ ID NO: 1858069 - RNA, 19 nt, Artificial Sequence
  Description of Artificial Sequence: Synthetic oligonucleotide
  Sense strand starting at position 152 of SEQ ID NO: 1564146
cuggauagucuaugccaau

SEQ ID NO: 1858070 - RNA, 19 nt, Artificial Sequence
  Description of Artificial Sequence: Synthetic oligonucleotide
  Antisense strand to SEQ ID NO: 1858069
auuggcauagacuauccag

SEQ ID NO: 1858071 - RNA, 19 nt, Artificial Sequence
  Description of Artificial Sequence: Synthetic oligonucleotide
  Sense strand starting at position 153 of SEQ ID NO: 1564146
uggauagucuaugccaauu

SEQ ID NO: 1858072 - RNA, 19 nt, Artificial Sequence
  Description of Artificial Sequence: Synthetic oligonucleotide
  Antisense strand to SEQ ID NO: 1858071
aauuggcauagacuaucca

SEQ ID NO: 1858073 - RNA, 19 nt, Artificial Sequence
  Description of Artificial Sequence: Synthetic oligonucleotide
  Sense strand starting at position 188 of SEQ ID NO: 1564146
gagguaugacuuuagggca

SEQ ID NO: 1858074 - RNA, 19 nt, Artificial Sequence
  Description of Artificial Sequence: Synthetic oligonucleotide
  Antisense strand to SEQ ID NO: 1858073
ugcccuaaagucauaccuc

SEQ ID NO: 1858075 - RNA, 19 nt, Artificial Sequence
  Description of Artificial Sequence: Synthetic oligonucleotide
  Sense strand starting at position 377 of SEQ ID NO: 1564146
cuuguuuguccacacaaau

SEQ ID NO: 1858076 - RNA, 19 nt, Artificial Sequence
  Description of Artificial Sequence: Synthetic oligonucleotide
  Antisense strand to SEQ ID NO: 1858075
auuuguguggacaaacaag

SEQ ID NO: 1858077 - RNA, 19 nt, Artificial Sequence
  Description of Artificial Sequence: Synthetic oligonucleotide
  Sense strand starting at position 428 of SEQ ID NO: 1564146
ccacauaaaccuggucgaa

SEQ ID NO: 1858078 - RNA, 19 nt, Artificial Sequence
  Description of Artificial Sequence: Synthetic oligonucleotide
  Antisense strand to SEQ ID NO: 1858077
uucgaccagguuuaugugg

SEQ ID NO: 1858079 - RNA, 19 nt, Artificial Sequence
  Description of Artificial Sequence: Synthetic oligonucleotide
  Sense strand starting at position 760 of SEQ ID NO: 1564146
aguggcuauuaguuacaaa

SEQ ID NO: 1858080 - RNA, 19 nt, Artificial Sequence
  Description of Artificial Sequence: Synthetic oligonucleotide
  Antisense strand to SEQ ID NO: 1858079
uuuguaacuaauagccacu

SEQ ID NO: 1858081 - RNA, 19 nt, Artificial Sequence
  Description of Artificial Sequence: Synthetic oligonucleotide
  Sense strand starting at position 876 of SEQ ID NO: 1564146
agcuauugaacuuggagga

SEQ ID NO: 1858082 - RNA, 19 nt, Artificial Sequence
  Description of Artificial Sequence: Synthetic oligonucleotide
  Antisense strand to SEQ ID NO: 1858081
uccuccaaguucaauagcu

SEQ ID NO: 1858083 - RNA, 19 nt, Artificial Sequence
  Description of Artificial Sequence: Synthetic oligonucleotide
  Sense strand starting at position 877 of SEQ ID NO: 1564146
gcuauugaacuuggaggaa

SEQ ID NO: 1858084 - RNA, 19 nt, Artificial Sequence
  Description of Artificial Sequence: Synthetic oligonucleotide
  Antisense strand to SEQ ID NO: 1858083
uuccuccaaguucaauagc

SEQ ID NO: 1858085 - RNA, 19 nt, Artificial Sequence
  Description of Artificial Sequence: Synthetic oligonucleotide
  Sense strand starting at position 908 of SEQ ID NO: 1564146
aacaaaguguuuguggaga

SEQ ID NO: 1858086 - RNA, 19 nt, Artificial Sequence
  Description of Artificial Sequence: Synthetic oligonucleotide
  Antisense strand to SEQ ID NO: 1858085
ucuccacaaacacuuuguu

SEQ ID NO: 1858087 - RNA, 19 nt, Artificial Sequence
  Description of Artificial Sequence: Synthetic oligonucleotide
  Sense strand starting at position 913 of SEQ ID NO: 1564146
aguguuuguggagaauuca

SEQ ID NO: 1858088 - RNA, 19 nt, Artificial Sequence
  Description of Artificial Sequence: Synthetic oligonucleotide
  Antisense strand to SEQ ID NO: 1858087
ugaauucuccacaaacacu

SEQ ID NO: 1858089 - RNA, 19 nt, Artificial Sequence
  Description of Artificial Sequence: Synthetic oligonucleotide
  Sense strand starting at position 974 of SEQ ID NO: 1564146
cguuaaccgccauaaucua

SEQ ID NO: 1858090 - RNA, 19 nt, Artificial Sequence
  Description of Artificial Sequence: Synthetic oligonucleotide
  Antisense strand to SEQ ID NO: 1858089
uagauuauggcgguuaacg

SEQ ID NO: 1858091 - RNA, 19 nt, Artificial Sequence
  Description of Artificial Sequence: Synthetic oligonucleotide
  Sense strand starting at position 1097 of SEQ ID NO: 1564146
cuguacaucucauucuagu

SEQ ID NO: 1858092 - RNA, 19 nt, Artificial Sequence
  Description of Artificial Sequence: Synthetic oligonucleotide
  Antisense strand to SEQ ID NO: 1858091
acuagaaugagauguacag

SEQ ID NO: 1858093 - RNA, 19 nt, Artificial Sequence
  Description of Artificial Sequence: Synthetic oligonucleotide
  Sense strand starting at position 1189 of SEQ ID NO: 1564146
cuuccuccuccugauagua

SEQ ID NO: 1858094 - RNA, 19 nt, Artificial Sequence
  Description of Artificial Sequence: Synthetic oligonucleotide
  Antisense strand to SEQ ID NO: 1858093
uacuaucaggaggaggaag

SEQ ID NO: 1858095 - RNA, 19 nt, Artificial Sequence
  Description of Artificial Sequence: Synthetic oligonucleotide
  Sense strand starting at position 1204 of SEQ ID NO: 1564146
aguacauuuggccgaugua

SEQ ID NO: 1858096 - RNA, 19 nt, Artificial Sequence
  Description of Artificial Sequence: Synthetic oligonucleotide
  Antisense strand to SEQ ID NO: 1858095
uacaucggccaaauguacu

SEQ ID NO: 1858097 - RNA, 19 nt, Artificial Sequence
  Description of Artificial Sequence: Synthetic oligonucleotide
  Sense strand starting at position 1205 of SEQ ID NO: 1564146
guacauuuggccgauguau

SEQ ID NO: 1858098 - RNA, 19 nt, Artificial Sequence
  Description of Artificial Sequence: Synthetic oligonucleotide
  Antisense strand to SEQ ID NO: 1858097
auacaucggccaaauguac

SEQ ID NO: 1858099 - RNA, 19 nt, Artificial Sequence
  Description of Artificial Sequence: Synthetic oligonucleotide
  Sense strand starting at position 1207 of SEQ ID NO: 1564146
acauuuggccgauguauac

SEQ ID NO: 1858100 - RNA, 19 nt, Artificial Sequence
  Description of Artificial Sequence: Synthetic oligonucleotide
  Antisense strand to SEQ ID NO: 1858099
guauacaucggccaaaugu

SEQ ID NO: 1858101 - RNA, 19 nt, Artificial Sequence
  Description of Artificial Sequence: Synthetic oligonucleotide
  Sense strand starting at position 1244 of SEQ ID NO: 1564146
uuaucucccgaaggcuaaa

SEQ ID NO: 1858102 - RNA, 19 nt, Artificial Sequence
  Description of Artificial Sequence: Synthetic oligonucleotide
  Antisense strand to SEQ ID NO: 1858101
uuuagccuucgggagauaa

SEQ ID NO: 1858103 - RNA, 19 nt, Artificial Sequence
  Description of Artificial Sequence: Synthetic oligonucleotide
  Sense strand starting at position 1467 of SEQ ID NO: 1564146
gcaagaaugugaguccaaa

SEQ ID NO: 1858104 - RNA, 19 nt, Artificial Sequence
  Description of Artificial Sequence: Synthetic oligonucleotide
  Antisense strand to SEQ ID NO: 1858103
uuuggacucacauucuugc

SEQ ID NO: 1858105 - RNA, 19 nt, Artificial Sequence
  Description of Artificial Sequence: Synthetic oligonucleotide
  Sense strand starting at position 2036 of SEQ ID NO: 1564146
ucuuguagacuccagacuu

SEQ ID NO: 1858106 - RNA, 19 nt, Artificial Sequence
  Description of Artificial Sequence: Synthetic oligonucleotide
  Antisense strand to SEQ ID NO: 1858105
aagucuggagucuacaaga

SEQ ID NO: 1858107 - RNA, 19 nt, Artificial Sequence
  Description of Artificial Sequence: Synthetic oligonucleotide
  Sense strand starting at position 2052 of SEQ ID NO: 1564146
cuugcacagcuguauugaa

SEQ ID NO: 1858108 - RNA, 19 nt, Artificial Sequence
  Description of Artificial Sequence: Synthetic oligonucleotide
  Antisense strand to SEQ ID NO: 1858107
uucaauacagcugugcaag

SEQ ID NO: 1858109 - RNA, 19 nt, Artificial Sequence
  Description of Artificial Sequence: Synthetic oligonucleotide
  Sense strand starting at position 2411 of SEQ ID NO: 1564146
cagccauuccuaugaagug

SEQ ID NO: 1858110 - RNA, 19 nt, Artificial Sequence
  Description of Artificial Sequence: Synthetic oligonucleotide
  Antisense strand to SEQ ID NO: 1858109
cacuucauaggaauggcug

SEQ ID NO: 1858111 - RNA, 19 nt, Artificial Sequence
  Description of Artificial Sequence: Synthetic oligonucleotide
  Sense strand starting at position 2513 of SEQ ID NO: 1564146
auguaauuauugguggaga

SEQ ID NO: 1858112 - RNA, 19 nt, Artificial Sequence
  Description of Artificial Sequence: Synthetic oligonucleotide
  Antisense strand to SEQ ID NO: 1858111
ucuccaccaauaauuacau

SEQ ID NO: 1858113 - RNA, 19 nt, Artificial Sequence
  Description of Artificial Sequence: Synthetic oligonucleotide
  Sense strand starting at position 2515 of SEQ ID NO: 1564146
guaauuauugguggagaug

SEQ ID NO: 1858114 - RNA, 19 nt, Artificial Sequence
  Description of Artificial Sequence: Synthetic oligonucleotide
  Antisense strand to SEQ ID NO: 1858113
caucuccaccaauaauuac

SEQ ID NO: 1858115 - RNA, 19 nt, Artificial Sequence
  Description of Artificial Sequence: Synthetic oligonucleotide
  Sense strand starting at position 2776 of SEQ ID NO: 1564146
guagucucccaacaugaau

SEQ ID NO: 1858116 - RNA, 19 nt, Artificial Sequence
  Description of Artificial Sequence: Synthetic oligonucleotide
  Antisense strand to SEQ ID NO: 1858115
auucauguugggagacuac

SEQ ID NO: 1858117 - RNA, 19 nt, Artificial Sequence
  Description of Artificial Sequence: Synthetic oligonucleotide
  Sense strand starting at position 2942 of SEQ ID NO: 1564146
ugguguuaagccuggagau

SEQ ID NO: 1858118 - RNA, 19 nt, Artificial Sequence
  Description of Artificial Sequence: Synthetic oligonucleotide
  Antisense strand to SEQ ID NO: 1858117
aucuccaggcuuaacacca

SEQ ID NO: 1858119 - RNA, 19 nt, Artificial Sequence
  Description of Artificial Sequence: Synthetic oligonucleotide
  Sense strand starting at position 2943 of SEQ ID NO: 1564146
gguguuaagccuggagaug

SEQ ID NO: 1858120 - RNA, 19 nt, Artificial Sequence
  Description of Artificial Sequence: Synthetic oligonucleotide
  Antisense strand to SEQ ID NO: 1858119
caucuccaggcuuaacacc

SEQ ID NO: 1858121 - RNA, 19 nt, Artificial Sequence
  Description of Artificial Sequence: Synthetic oligonucleotide
  Sense strand starting at position 3046 of SEQ ID NO: 1564146
agaaguaugcugcaggguu

SEQ ID NO: 1858122 - RNA, 19 nt, Artificial Sequence
  Description of Artificial Sequence: Synthetic oligonucleotide
  Antisense strand to SEQ ID NO: 1858121
aacccugcagcauacuucu

SEQ ID NO: 1858123 - RNA, 19 nt, Artificial Sequence
  Description of Artificial Sequence: Synthetic oligonucleotide
  Sense strand starting at position 3184 of SEQ ID NO: 1564146
agacgaagguugcuuagaa

SEQ ID NO: 1858124 - RNA, 19 nt, Artificial Sequence
  Description of Artificial Sequence: Synthetic oligonucleotide
  Antisense strand to SEQ ID NO: 1858123
uucuaagcaaccuucgucu

SEQ ID NO: 1858125 - RNA, 19 nt, Artificial Sequence
  Description of Artificial Sequence: Synthetic oligonucleotide
  Sense strand starting at position 3185 of SEQ ID NO: 1564146
gacgaagguugcuuagaau

SEQ ID NO: 1858126 - RNA, 19 nt, Artificial Sequence
  Description of Artificial Sequence: Synthetic oligonucleotide
  Antisense strand to SEQ ID NO: 1858125
auucuaagcaaccuucguc

SEQ ID NO: 1858127 - RNA, 19 nt, Artificial Sequence
  Description of Artificial Sequence: Synthetic oligonucleotide
  Sense strand starting at position 3255 of SEQ ID NO: 1564146
gauuccugacaagguguuu

SEQ ID NO: 1858128 - RNA, 19 nt, Artificial Sequence
  Description of Artificial Sequence: Synthetic oligonucleotide
  Antisense strand to SEQ ID NO: 1858127
aaacaccuugucaggaauc

SEQ ID NO: 1858129 - RNA, 19 nt, Artificial Sequence
  Description of Artificial Sequence: Synthetic oligonucleotide
  Sense strand starting at position 3313 of SEQ ID NO: 1564146
ccaggucacuuauugauga

SEQ ID NO: 1858130 - RNA, 19 nt, Artificial Sequence
  Description of Artificial Sequence: Synthetic oligonucleotide
  Antisense strand to SEQ ID NO: 1858129
ucaucaauaagugaccugg

SEQ ID NO: 1858131 - RNA, 19 nt, Artificial Sequence
  Description of Artificial Sequence: Synthetic oligonucleotide
  Sense strand starting at position 3378 of SEQ ID NO: 1564146
aaaggugaagggugucauu

SEQ ID NO: 1858132 - RNA, 19 nt, Artificial Sequence
  Description of Artificial Sequence: Synthetic oligonucleotide
  Antisense strand to SEQ ID NO: 1858131
aaugacacccuucaccuuu

SEQ ID NO: 1858133 - RNA, 19 nt, Artificial Sequence
  Description of Artificial Sequence: Synthetic oligonucleotide
  Sense strand starting at position 3435 of SEQ ID NO: 1564146
auguaaaugcuguaggcaa

SEQ ID NO: 1858134 - RNA, 19 nt, Artificial Sequence
  Description of Artificial Sequence: Synthetic oligonucleotide
  Antisense strand to SEQ ID NO: 1858133
uugccuacagcauuuacau

SEQ ID NO: 1858135 - RNA, 19 nt, Artificial Sequence
  Description of Artificial Sequence: Synthetic oligonucleotide
  Sense strand starting at position 3437 of SEQ ID NO: 1564146
guaaaugcuguaggcaaga

SEQ ID NO: 1858136 - RNA, 19 nt, Artificial Sequence
  Description of Artificial Sequence: Synthetic oligonucleotide
  Antisense strand to SEQ ID NO: 1858135
ucuugccuacagcauuuac

SEQ ID NO: 1858137 - RNA, 19 nt, Artificial Sequence
  Description of Artificial Sequence: Synthetic oligonucleotide
  Sense strand starting at position 3550 of SEQ ID NO: 1564146
ggagaauaucacugggcca

SEQ ID NO: 1858138 - RNA, 19 nt, Artificial Sequence
  Description of Artificial Sequence: Synthetic oligonucleotide
  Antisense strand to SEQ ID NO: 1858137
uggcccagugauauucucc

SEQ ID NO: 1858139 - RNA, 19 nt, Artificial Sequence
  Description of Artificial Sequence: Synthetic oligonucleotide
  Sense strand starting at position 3594 of SEQ ID NO: 1564146
gcaugaguagugggagaga

SEQ ID NO: 1858140 - RNA, 19 nt, Artificial Sequence
  Description of Artificial Sequence: Synthetic oligonucleotide
  Antisense strand to SEQ ID NO: 1858139
ucucucccacuacucaugc

SEQ ID NO: 1858141 - RNA, 19 nt, Artificial Sequence
  Description of Artificial Sequence: Synthetic oligonucleotide
  Sense strand starting at position 3912 of SEQ ID NO: 1564146
aucuauuguguuuguacaa

SEQ ID NO: 1858142 - RNA, 19 nt, Artificial Sequence
  Description of Artificial Sequence: Synthetic oligonucleotide
  Antisense strand to SEQ ID NO: 1858141
uuguacaaacacaauagau

SEQ ID NO: 1858143 - RNA, 19 nt, Artificial Sequence
  Description of Artificial Sequence: Synthetic oligonucleotide
  Sense strand starting at position 3945 of SEQ ID NO: 1564146
auaaauuggcuuugagaua

SEQ ID NO: 1858144 - RNA, 19 nt, Artificial Sequence
  Description of Artificial Sequence: Synthetic oligonucleotide
  Antisense strand to SEQ ID NO: 1858143
uaucucaaagccaauuuau

SEQ ID NO: 1858145 - RNA, 19 nt, Artificial Sequence
  Description of Artificial Sequence: Synthetic oligonucleotide
  Sense strand starting at position 83 of SEQ ID NO: 1564147
cugaauaguccaggccaau

SEQ ID NO: 1858146 - RNA, 19 nt, Artificial Sequence
  Description of Artificial Sequence: Synthetic oligonucleotide
  Antisense strand to SEQ ID NO: 1858145
auuggccuggacuauucag

SEQ ID NO: 1858147 - RNA, 19 nt, Artificial Sequence
  Description of Artificial Sequence: Synthetic oligonucleotide
  Sense strand starting at position 94 of SEQ ID NO: 1564147
aggccaauuugucacacua

SEQ ID NO: 1858148 - RNA, 19 nt, Artificial Sequence
  Description of Artificial Sequence: Synthetic oligonucleotide
  Antisense strand to SEQ ID NO: 1858147
uagugugacaaauuggccu

SEQ ID NO: 1858149 - RNA, 19 nt, Artificial Sequence
  Description of Artificial Sequence: Synthetic oligonucleotide
  Sense strand starting at position 185 of SEQ ID NO: 1564147
ccucucuaucugugggaua

SEQ ID NO: 1858150 - RNA, 19 nt, Artificial Sequence
  Description of Artificial Sequence: Synthetic oligonucleotide
  Antisense strand to SEQ ID NO: 1858149
uaucccacagauagagagg

SEQ ID NO: 1858151 - RNA, 19 nt, Artificial Sequence
  Description of Artificial Sequence: Synthetic oligonucleotide
  Sense strand starting at position 187 of SEQ ID NO: 1564147
ucucuaucugugggauauu

SEQ ID NO: 1858152 - RNA, 19 nt, Artificial Sequence
  Description of Artificial Sequence: Synthetic oligonucleotide
  Antisense strand to SEQ ID NO: 1858151
aauaucccacagauagaga

SEQ ID NO: 1858153 - RNA, 19 nt, Artificial Sequence
  Description of Artificial Sequence: Synthetic oligonucleotide
  Sense strand starting at position 190 of SEQ ID NO: 1564147
cuaucugugggauauucua

SEQ ID NO: 1858154 - RNA, 19 nt, Artificial Sequence
  Description of Artificial Sequence: Synthetic oligonucleotide
  Antisense strand to SEQ ID NO: 1858153
uagaauaucccacagauag

SEQ ID NO: 1858155 - RNA, 19 nt, Artificial Sequence
  Description of Artificial Sequence: Synthetic oligonucleotide
  Sense strand starting at position 297 of SEQ ID NO: 1564147
uguuaaauuuguuugucca

SEQ ID NO: 1858156 - RNA, 19 nt, Artificial Sequence
  Description of Artificial Sequence: Synthetic oligonucleotide
  Antisense strand to SEQ ID NO: 1858155
uggacaaacaaauuuaaca

SEQ ID NO: 1858157 - RNA, 19 nt, Artificial Sequence
  Description of Artificial Sequence: Synthetic oligonucleotide
  Sense strand starting at position 298 of SEQ ID NO: 1564147
guuaaauuuguuuguccac

SEQ ID NO: 1858158 - RNA, 19 nt, Artificial Sequence
  Description of Artificial Sequence: Synthetic oligonucleotide
  Antisense strand to SEQ ID NO: 1858157
guggacaaacaaauuuaac

SEQ ID NO: 1858159 - RNA, 19 nt, Artificial Sequence
  Description of Artificial Sequence: Synthetic oligonucleotide
  Sense strand starting at position 304 of SEQ ID NO: 1564147
uuuguuuguccacacaaau

SEQ ID NO: 1858160 - RNA, 19 nt, Artificial Sequence
  Description of Artificial Sequence: Synthetic oligonucleotide
  Antisense strand to SEQ ID NO: 1858159
auuuguguggacaaacaaa

SEQ ID NO: 1858161 - RNA, 19 nt, Artificial Sequence
  Description of Artificial Sequence: Synthetic oligonucleotide
  Sense strand starting at position 424 of SEQ ID NO: 1564147
auaaucuugcucggcuaau

SEQ ID NO: 1858162 - RNA, 19 nt, Artificial Sequence
  Description of Artificial Sequence: Synthetic oligonucleotide
  Antisense strand to SEQ ID NO: 1858161
auuagccgagcaagauuau

SEQ ID NO: 1858163 - RNA, 19 nt, Artificial Sequence
  Description of Artificial Sequence: Synthetic oligonucleotide
  Sense strand starting at position 845 of SEQ ID NO: 1564147
aggguuugugcagaauuca

SEQ ID NO: 1858164 - RNA, 19 nt, Artificial Sequence
  Description of Artificial Sequence: Synthetic oligonucleotide
  Antisense strand to SEQ ID NO: 1858163
ugaauucugcacaaacccu

SEQ ID NO: 1858165 - RNA, 19 nt, Artificial Sequence
  Description of Artificial Sequence: Synthetic oligonucleotide
  Sense strand starting at position 1091 of SEQ ID NO: 1564147
cuguacaucucauucuagu

SEQ ID NO: 1858166 - RNA, 19 nt, Artificial Sequence
  Description of Artificial Sequence: Synthetic oligonucleotide
  Antisense strand to SEQ ID NO: 1858165
acuagaaugagauguacag

SEQ ID NO: 1858167 - RNA, 19 nt, Artificial Sequence
  Description of Artificial Sequence: Synthetic oligonucleotide
  Sense strand starting at position 1134 of SEQ ID NO: 1564147
ugcacucagcacugggaua

SEQ ID NO: 1858168 - RNA, 19 nt, Artificial Sequence
  Description of Artificial Sequence: Synthetic oligonucleotide
  Antisense strand to SEQ ID NO: 1858167
uaucccagugcugagugca

SEQ ID NO: 1858169 - RNA, 19 nt, Artificial Sequence
  Description of Artificial Sequence: Synthetic oligonucleotide
  Sense strand starting at position 1183 of SEQ ID NO: 1564147
cuuccuccuccugauagua

SEQ ID NO: 1858170 - RNA, 19 nt, Artificial Sequence
  Description of Artificial Sequence: Synthetic oligonucleotide
  Antisense strand to SEQ ID NO: 1858169
uacuaucaggaggaggaag

SEQ ID NO: 1858171 - RNA, 19 nt, Artificial Sequence
  Description of Artificial Sequence: Synthetic oligonucleotide
  Sense strand starting at position 1198 of SEQ ID NO: 1564147
aguacauuuggccgaugua

SEQ ID NO: 1858172 - RNA, 19 nt, Artificial Sequence
  Description of Artificial Sequence: Synthetic oligonucleotide
  Antisense strand to SEQ ID NO: 1858171
uacaucggccaaauguacu

SEQ ID NO: 1858173 - RNA, 19 nt, Artificial Sequence
  Description of Artificial Sequence: Synthetic oligonucleotide
  Sense strand starting at position 1199 of SEQ ID NO: 1564147
guacauuuggccgauguau

SEQ ID NO: 1858174 - RNA, 19 nt, Artificial Sequence
  Description of Artificial Sequence: Synthetic oligonucleotide
  Antisense strand to SEQ ID NO: 1858173
auacaucggccaaauguac

SEQ ID NO: 1858175 - RNA, 19 nt, Artificial Sequence
  Description of Artificial Sequence: Synthetic oligonucleotide
  Sense strand starting at position 1201 of SEQ ID NO: 1564147
acauuuggccgauguauac

SEQ ID NO: 1858176 - RNA, 19 nt, Artificial Sequence
  Description of Artificial Sequence: Synthetic oligonucleotide
  Antisense strand to SEQ ID NO: 1858175
guauacaucggccaaaugu

SEQ ID NO: 1858177 - RNA, 19 nt, Artificial Sequence
  Description of Artificial Sequence: Synthetic oligonucleotide
  Sense strand starting at position 1506 of SEQ ID NO: 1564147
uuugcagaccuugaucaaa

SEQ ID NO: 1858178 - RNA, 19 nt, Artificial Sequence
  Description of Artificial Sequence: Synthetic oligonucleotide
  Antisense strand to SEQ ID NO: 1858177
uuugaucaaggucugcaaa

SEQ ID NO: 1858179 - RNA, 19 nt, Artificial Sequence
  Description of Artificial Sequence: Synthetic oligonucleotide
  Sense strand starting at position 1508 of SEQ ID NO: 1564147
ugcagaccuugaucaaagu

SEQ ID NO: 1858180 - RNA, 19 nt, Artificial Sequence
  Description of Artificial Sequence: Synthetic oligonucleotide
  Antisense strand to SEQ ID NO: 1858179
acuuugaucaaggucugca

SEQ ID NO: 1858181 - RNA, 19 nt, Artificial Sequence
  Description of Artificial Sequence: Synthetic oligonucleotide
  Sense strand starting at position 1620 of SEQ ID NO: 1564147
ugguaucuugcugggcaaa

SEQ ID NO: 1858182 - RNA, 19 nt, Artificial Sequence
  Description of Artificial Sequence: Synthetic oligonucleotide
  Antisense strand to SEQ ID NO: 1858181
uuugcccagcaagauacca

SEQ ID NO: 1858183 - RNA, 19 nt, Artificial Sequence
  Description of Artificial Sequence: Synthetic oligonucleotide
  Sense strand starting at position 1997 of SEQ ID NO: 1564147
ccaugauucugcuugguug

SEQ ID NO: 1858184 - RNA, 19 nt, Artificial Sequence
  Description of Artificial Sequence: Synthetic oligonucleotide
  Antisense strand to SEQ ID NO: 1858183
caaccaagcagaaucaugg

SEQ ID NO: 1858185 - RNA, 19 nt, Artificial Sequence
  Description of Artificial Sequence: Synthetic oligonucleotide
  Sense strand starting at position 1999 of SEQ ID NO: 1564147
augauucugcuugguugua

SEQ ID NO: 1858186 - RNA, 19 nt, Artificial Sequence
  Description of Artificial Sequence: Synthetic oligonucleotide
  Antisense strand to SEQ ID NO: 1858185
uacaaccaagcagaaucau

SEQ ID NO: 1858187 - RNA, 19 nt, Artificial Sequence
  Description of Artificial Sequence: Synthetic oligonucleotide
  Sense strand starting at position 2001 of SEQ ID NO: 1564147
gauucugcuugguuguaga

SEQ ID NO: 1858188 - RNA, 19 nt, Artificial Sequence
  Description of Artificial Sequence: Synthetic oligonucleotide
  Antisense strand to SEQ ID NO: 1858187
ucuacaaccaagcagaauc

SEQ ID NO: 1858189 - RNA, 19 nt, Artificial Sequence
  Description of Artificial Sequence: Synthetic oligonucleotide
  Sense strand starting at position 2066 of SEQ ID NO: 1564147
ugaagcuugccaggaggau

SEQ ID NO: 1858190 - RNA, 19 nt, Artificial Sequence
  Description of Artificial Sequence: Synthetic oligonucleotide
  Antisense strand to SEQ ID NO: 1858189
auccuccuggcaagcuuca

SEQ ID NO: 1858191 - RNA, 19 nt, Artificial Sequence
  Description of Artificial Sequence: Synthetic oligonucleotide
  Sense strand starting at position 2141 of SEQ ID NO: 1564147
acucuugagcuuuguuuga

SEQ ID NO: 1858192 - RNA, 19 nt, Artificial Sequence
  Description of Artificial Sequence: Synthetic oligonucleotide
  Antisense strand to SEQ ID NO: 1858191
ucaaacaaagcucaagagu

SEQ ID NO: 1858193 - RNA, 19 nt, Artificial Sequence
  Description of Artificial Sequence: Synthetic oligonucleotide
  Sense strand starting at position 2143 of SEQ ID NO: 1564147
ucuugagcuuuguuugauc

SEQ ID NO: 1858194 - RNA, 19 nt, Artificial Sequence
  Description of Artificial Sequence: Synthetic oligonucleotide
  Antisense strand to SEQ ID NO: 1858193
gaucaaacaaagcucaaga

SEQ ID NO: 1858195 - RNA, 19 nt, Artificial Sequence
  Description of Artificial Sequence: Synthetic oligonucleotide
  Sense strand starting at position 2333 of SEQ ID NO: 1564147
cugcucauuucuccauguu

SEQ ID NO: 1858196 - RNA, 19 nt, Artificial Sequence
  Description of Artificial Sequence: Synthetic oligonucleotide
  Antisense strand to SEQ ID NO: 1858195
aacauggagaaaugagcag

SEQ ID NO: 1858197 - RNA, 19 nt, Artificial Sequence
  Description of Artificial Sequence: Synthetic oligonucleotide
  Sense strand starting at position 2334 of SEQ ID NO: 1564147
ugcucauuucuccauguuu

SEQ ID NO: 1858198 - RNA, 19 nt, Artificial Sequence
  Description of Artificial Sequence: Synthetic oligonucleotide
  Antisense strand to SEQ ID NO: 1858197
aaacauggagaaaugagca

SEQ ID NO: 1858199 - RNA, 19 nt, Artificial Sequence
  Description of Artificial Sequence: Synthetic oligonucleotide
  Sense strand starting at position 2724 of SEQ ID NO: 1564147
cauguauccuagucuuguu

SEQ ID NO: 1858200 - RNA, 19 nt, Artificial Sequence
  Description of Artificial Sequence: Synthetic oligonucleotide
  Antisense strand to SEQ ID NO: 1858199
aacaagacuaggauacaug

SEQ ID NO: 1858201 - RNA, 19 nt, Artificial Sequence
  Description of Artificial Sequence: Synthetic oligonucleotide
  Sense strand starting at position 2893 of SEQ ID NO: 1564147
ccaguaugggcacaguuau

SEQ ID NO: 1858202 - RNA, 19 nt, Artificial Sequence
  Description of Artificial Sequence: Synthetic oligonucleotide
  Antisense strand to SEQ ID NO: 1858201
auaacugugcccauacugg

SEQ ID NO: 1858203 - RNA, 19 nt, Artificial Sequence
  Description of Artificial Sequence: Synthetic oligonucleotide
  Sense strand starting at position 2921 of SEQ ID NO: 1564147
uggagauuguguccagugu

SEQ ID NO: 1858204 - RNA, 19 nt, Artificial Sequence
  Description of Artificial Sequence: Synthetic oligonucleotide
  Antisense strand to SEQ ID NO: 1858203
acacuggacacaaucucca

SEQ ID NO: 1858205 - RNA, 19 nt, Artificial Sequence
  Description of Artificial Sequence: Synthetic oligonucleotide
  Sense strand starting at position 2922 of SEQ ID NO: 1564147
ggagauuguguccagugua

SEQ ID NO: 1858206 - RNA, 19 nt, Artificial Sequence
  Description of Artificial Sequence: Synthetic oligonucleotide
  Antisense strand to SEQ ID NO: 1858205
uacacuggacacaaucucc

SEQ ID NO: 1858207 - RNA, 19 nt, Artificial Sequence
  Description of Artificial Sequence: Synthetic oligonucleotide
  Sense strand starting at position 2997 of SEQ ID NO: 1564147
aagacuaccugagaguaua

SEQ ID NO: 1858208 - RNA, 19 nt, Artificial Sequence
  Description of Artificial Sequence: Synthetic oligonucleotide
  Antisense strand to SEQ ID NO: 1858207
uauacucucagguagucuu

SEQ ID NO: 1858209 - RNA, 19 nt, Artificial Sequence
  Description of Artificial Sequence: Synthetic oligonucleotide
  Sense strand starting at position 3005 of SEQ ID NO: 1564147
cugagaguauauguagaaa

SEQ ID NO: 1858210 - RNA, 19 nt, Artificial Sequence
  Description of Artificial Sequence: Synthetic oligonucleotide
  Antisense strand to SEQ ID NO: 1858209
uuucuacauauacucucag

SEQ ID NO: 1858211 - RNA, 19 nt, Artificial Sequence
  Description of Artificial Sequence: Synthetic oligonucleotide
  Sense strand starting at position 3117 of SEQ ID NO: 1564147
agcaguuacauaugagaag

SEQ ID NO: 1858212 - RNA, 19 nt, Artificial Sequence
  Description of Artificial Sequence: Synthetic oligonucleotide
  Antisense strand to SEQ ID NO: 1858211
cuucucauauguaacugcu

SEQ ID NO: 1858213 - RNA, 19 nt, Artificial Sequence
  Description of Artificial Sequence: Synthetic oligonucleotide
  Sense strand starting at position 3403 of SEQ ID NO: 1564147
ggcaguuauuuccaauuuc

SEQ ID NO: 1858214 - RNA, 19 nt, Artificial Sequence
  Description of Artificial Sequence: Synthetic oligonucleotide
  Antisense strand to SEQ ID NO: 1858213
gaaauuggaaauaacugcc

SEQ ID NO: 1858215 - RNA, 19 nt, Artificial Sequence
  Description of Artificial Sequence: Synthetic oligonucleotide
  Sense strand starting at position 3596 of SEQ ID NO: 1564147
guguaaugugguaguguau

SEQ ID NO: 1858216 - RNA, 19 nt, Artificial Sequence
  Description of Artificial Sequence: Synthetic oligonucleotide
  Antisense strand to SEQ ID NO: 1858215
auacacuaccacauuacac

SEQ ID NO: 1858217 - RNA, 19 nt, Artificial Sequence
  Description of Artificial Sequence: Synthetic oligonucleotide
  Sense strand starting at position 3663 of SEQ ID NO: 1564147
ccauguacguaucuuugaa

SEQ ID NO: 1858218 - RNA, 19 nt, Artificial Sequence
  Description of Artificial Sequence: Synthetic oligonucleotide
  Antisense strand to SEQ ID NO: 1858217
uucaaagauacguacaugg

SEQ ID NO: 1858219 - RNA, 19 nt, Artificial Sequence
  Description of Artificial Sequence: Synthetic oligonucleotide
  Sense strand starting at position 3665 of SEQ ID NO: 1564147
auguacguaucuuugaaac

SEQ ID NO: 1858220 - RNA, 19 nt, Artificial Sequence
  Description of Artificial Sequence: Synthetic oligonucleotide
  Antisense strand to SEQ ID NO: 1858219
guuucaaagauacguacau

SEQ ID NO: 1858221 - RNA, 19 nt, Artificial Sequence
  Description of Artificial Sequence: Synthetic oligonucleotide
  Sense strand starting at position 3764 of SEQ ID NO: 1564147
gaaggcauggcccaggauu

SEQ ID NO: 1858222 - RNA, 19 nt, Artificial Sequence
  Description of Artificial Sequence: Synthetic oligonucleotide
  Antisense strand to SEQ ID NO: 1858221
aauccugggccaugccuuc

SEQ ID NO: 1858223 - RNA, 19 nt, Artificial Sequence
  Description of Artificial Sequence: Synthetic oligonucleotide
  Sense strand starting at position 3776 of SEQ ID NO: 1564147
caggauuucucccacaggu

SEQ ID NO: 1858224 - RNA, 19 nt, Artificial Sequence
  Description of Artificial Sequence: Synthetic oligonucleotide
  Antisense strand to SEQ ID NO: 1858223
accugugggagaaauccug

SEQ ID NO: 1858225 - RNA, 19 nt, Artificial Sequence
  Description of Artificial Sequence: Synthetic oligonucleotide
  Sense strand starting at position 1 of SEQ ID NO: 1564148
cugaauaguccaugccaau

SEQ ID NO: 1858226 - RNA, 19 nt, Artificial Sequence
  Description of Artificial Sequence: Synthetic oligonucleotide
  Antisense strand to SEQ ID NO: 1858225
auuggcauggacuauucag

SEQ ID NO: 1858227 - RNA, 19 nt, Artificial Sequence
  Description of Artificial Sequence: Synthetic oligonucleotide
  Sense strand starting at position 12 of SEQ ID NO: 1564148
augccaauucgucauacua

SEQ ID NO: 1858228 - RNA, 19 nt, Artificial Sequence
  Description of Artificial Sequence: Synthetic oligonucleotide
  Antisense strand to SEQ ID NO: 1858227
uaguaugacgaauuggcau

SEQ ID NO: 1858229 - RNA, 19 nt, Artificial Sequence
  Description of Artificial Sequence: Synthetic oligonucleotide
  Sense strand starting at position 20 of SEQ ID NO: 1564148
ucgucauacuaauccagga

SEQ ID NO: 1858230 - RNA, 19 nt, Artificial Sequence
  Description of Artificial Sequence: Synthetic oligonucleotide
  Antisense strand to SEQ ID NO: 1858229
uccuggauuaguaugacga

SEQ ID NO: 1858231 - RNA, 19 nt, Artificial Sequence
  Description of Artificial Sequence: Synthetic oligonucleotide
  Sense strand starting at position 24 of SEQ ID NO: 1564148
cauacuaauccaggaggua

SEQ ID NO: 1858232 - RNA, 19 nt, Artificial Sequence
  Description of Artificial Sequence: Synthetic oligonucleotide
  Antisense strand to SEQ ID NO: 1858231
uaccuccuggauuaguaug

SEQ ID NO: 1858233 - RNA, 19 nt, Artificial Sequence
  Description of Artificial Sequence: Synthetic oligonucleotide
  Sense strand starting at position 101 of SEQ ID NO: 1564148
guccucuuugucuguggga

SEQ ID NO: 1858234 - RNA, 19 nt, Artificial Sequence
  Description of Artificial Sequence: Synthetic oligonucleotide
  Antisense strand to SEQ ID NO: 1858233
ucccacagacaaagaggac

SEQ ID NO: 1858235 - RNA, 19 nt, Artificial Sequence
  Description of Artificial Sequence: Synthetic oligonucleotide
  Sense strand starting at position 102 of SEQ ID NO: 1564148
uccucuuugucugugggau

SEQ ID NO: 1858236 - RNA, 19 nt, Artificial Sequence
  Description of Artificial Sequence: Synthetic oligonucleotide
  Antisense strand to SEQ ID NO: 1858235
aucccacagacaaagagga

SEQ ID NO: 1858237 - RNA, 19 nt, Artificial Sequence
  Description of Artificial Sequence: Synthetic oligonucleotide
  Sense strand starting at position 103 of SEQ ID NO: 1564148
ccucuuugucugugggaua

SEQ ID NO: 1858238 - RNA, 19 nt, Artificial Sequence
  Description of Artificial Sequence: Synthetic oligonucleotide
  Antisense strand to SEQ ID NO: 1858237
uaucccacagacaaagagg

SEQ ID NO: 1858239 - RNA, 19 nt, Artificial Sequence
  Description of Artificial Sequence: Synthetic oligonucleotide
  Sense strand starting at position 108 of SEQ ID NO: 1564148
uugucugugggauacucua

SEQ ID NO: 1858240 - RNA, 19 nt, Artificial Sequence
  Description of Artificial Sequence: Synthetic oligonucleotide
  Antisense strand to SEQ ID NO: 1858239
uagaguaucccacagacaa

SEQ ID NO: 1858241 - RNA, 19 nt, Artificial Sequence
  Description of Artificial Sequence: Synthetic oligonucleotide
  Sense strand starting at position 219 of SEQ ID NO: 1564148
uguuaaacuuguuugucca

SEQ ID NO: 1858242 - RNA, 19 nt, Artificial Sequence
  Description of Artificial Sequence: Synthetic oligonucleotide
  Antisense strand to SEQ ID NO: 1858241
uggacaaacaaguuuaaca

SEQ ID NO: 1858243 - RNA, 19 nt, Artificial Sequence
  Description of Artificial Sequence: Synthetic oligonucleotide
  Sense strand starting at position 226 of SEQ ID NO: 1564148
cuuguuuguccacacaaau

SEQ ID NO: 1858244 - RNA, 19 nt, Artificial Sequence
  Description of Artificial Sequence: Synthetic oligonucleotide
  Antisense strand to SEQ ID NO: 1858243
auuuguguggacaaacaag

SEQ ID NO: 1858245 - RNA, 19 nt, Artificial Sequence
  Description of Artificial Sequence: Synthetic oligonucleotide
  Sense strand starting at position 1018 of SEQ ID NO: 1564148
auucuaguguuagcagaag

SEQ ID NO: 1858246 - RNA, 19 nt, Artificial Sequence
  Description of Artificial Sequence: Synthetic oligonucleotide
  Antisense strand to SEQ ID NO: 1858245
cuucugcuaacacuagaau

SEQ ID NO: 1858247 - RNA, 19 nt, Artificial Sequence
  Description of Artificial Sequence: Synthetic oligonucleotide
  Sense strand starting at position 1050 of SEQ ID NO: 1564148
ugcagucagcacugagaua

SEQ ID NO: 1858248 - RNA, 19 nt, Artificial Sequence
  Description of Artificial Sequence: Synthetic oligonucleotide
  Antisense strand to SEQ ID NO: 1858247
uaucucagugcugacugca

SEQ ID NO: 1858249 - RNA, 19 nt, Artificial Sequence
  Description of Artificial Sequence: Synthetic oligonucleotide
  Sense strand starting at position 1115 of SEQ ID NO: 1564148
cuacaauuggcccauguau

SEQ ID NO: 1858250 - RNA, 19 nt, Artificial Sequence
  Description of Artificial Sequence: Synthetic oligonucleotide
  Antisense strand to SEQ ID NO: 1858249
auacaugggccaauuguag

SEQ ID NO: 1858251 - RNA, 19 nt, Artificial Sequence
  Description of Artificial Sequence: Synthetic oligonucleotide
  Sense strand starting at position 1117 of SEQ ID NO: 1564148
acaauuggcccauguauau

SEQ ID NO: 1858252 - RNA, 19 nt, Artificial Sequence
  Description of Artificial Sequence: Synthetic oligonucleotide
  Antisense strand to SEQ ID NO: 1858251
auauacaugggccaauugu

SEQ ID NO: 1858253 - RNA, 19 nt, Artificial Sequence
  Description of Artificial Sequence: Synthetic oligonucleotide
  Sense strand starting at position 1887 of SEQ ID NO: 1564148
cccauuggugcuggaaguu

SEQ ID NO: 1858254 - RNA, 19 nt, Artificial Sequence
  Description of Artificial Sequence: Synthetic oligonucleotide
  Antisense strand to SEQ ID NO: 1858253
aacuuccagcaccaauggg

SEQ ID NO: 1858255 - RNA, 19 nt, Artificial Sequence
  Description of Artificial Sequence: Synthetic oligonucleotide
  Sense strand starting at position 1900 of SEQ ID NO: 1564148
gaaguuggcuguuccauga

SEQ ID NO: 1858256 - RNA, 19 nt, Artificial Sequence
  Description of Artificial Sequence: Synthetic oligonucleotide
  Antisense strand to SEQ ID NO: 1858255
ucauggaacagccaacuuc

SEQ ID NO: 1858257 - RNA, 19 nt, Artificial Sequence
  Description of Artificial Sequence: Synthetic oligonucleotide
  Sense strand starting at position 1904 of SEQ ID NO: 1564148
uuggcuguuccaugauucu

SEQ ID NO: 1858258 - RNA, 19 nt, Artificial Sequence
  Description of Artificial Sequence: Synthetic oligonucleotide
  Antisense strand to SEQ ID NO: 1858257
agaaucauggaacagccaa

SEQ ID NO: 1858259 - RNA, 19 nt, Artificial Sequence
  Description of Artificial Sequence: Synthetic oligonucleotide
  Sense strand starting at position 1915 of SEQ ID NO: 1564148
augauucugguugguugua

SEQ ID NO: 1858260 - RNA, 19 nt, Artificial Sequence
  Description of Artificial Sequence: Synthetic oligonucleotide
  Antisense strand to SEQ ID NO: 1858259
uacaaccaaccagaaucau

SEQ ID NO: 1858261 - RNA, 19 nt, Artificial Sequence
  Description of Artificial Sequence: Synthetic oligonucleotide
  Sense strand starting at position 1917 of SEQ ID NO: 1564148
gauucugguugguuguaga

SEQ ID NO: 1858262 - RNA, 19 nt, Artificial Sequence
  Description of Artificial Sequence: Synthetic oligonucleotide
  Antisense strand to SEQ ID NO: 1858261
ucuacaaccaaccagaauc

SEQ ID NO: 1858263 - RNA, 19 nt, Artificial Sequence
  Description of Artificial Sequence: Synthetic oligonucleotide
  Sense strand starting at position 1967 of SEQ ID NO: 1564148
cuuccacagcuauguugaa

SEQ ID NO: 1858264 - RNA, 19 nt, Artificial Sequence
  Description of Artificial Sequence: Synthetic oligonucleotide
  Antisense strand to SEQ ID NO: 1858263
uucaacauagcuguggaag

SEQ ID NO: 1858265 - RNA, 19 nt, Artificial Sequence
  Description of Artificial Sequence: Synthetic oligonucleotide
  Sense strand starting at position 2198 of SEQ ID NO: 1564148
gcgguuguuguuucagcau

SEQ ID NO: 1858266 - RNA, 19 nt, Artificial Sequence
  Description of Artificial Sequence: Synthetic oligonucleotide
  Antisense strand to SEQ ID NO: 1858265
augcugaaacaacaaccgc

SEQ ID NO: 1858267 - RNA, 19 nt, Artificial Sequence
  Description of Artificial Sequence: Synthetic oligonucleotide
  Sense strand starting at position 2326 of SEQ ID NO: 1564148
cagccauuccuaugaagug

SEQ ID NO: 1858268 - RNA, 19 nt, Artificial Sequence
  Description of Artificial Sequence: Synthetic oligonucleotide
  Antisense strand to SEQ ID NO: 1858267
cacuucauaggaauggcug

SEQ ID NO: 1858269 - RNA, 19 nt, Artificial Sequence
  Description of Artificial Sequence: Synthetic oligonucleotide
  Sense strand starting at position 2660 of SEQ ID NO: 1564148
uucuuuacuguguauccua

SEQ ID NO: 1858270 - RNA, 19 nt, Artificial Sequence
  Description of Artificial Sequence: Synthetic oligonucleotide
  Antisense strand to SEQ ID NO: 1858269
uaggauacacaguaaagaa

SEQ ID NO: 1858271 - RNA, 19 nt, Artificial Sequence
  Description of Artificial Sequence: Synthetic oligonucleotide
  Sense strand starting at position 2717 of SEQ ID NO: 1564148
guagucucccaacaugaau

SEQ ID NO: 1858272 - RNA, 19 nt, Artificial Sequence
  Description of Artificial Sequence: Synthetic oligonucleotide
  Antisense strand to SEQ ID NO: 1858271
auucauguugggagacuac

SEQ ID NO: 1858273 - RNA, 19 nt, Artificial Sequence
  Description of Artificial Sequence: Synthetic oligonucleotide
  Sense strand starting at position 2777 of SEQ ID NO: 1564148
gcuggaaguuguucucagu

SEQ ID NO: 1858274 - RNA, 19 nt, Artificial Sequence
  Description of Artificial Sequence: Synthetic oligonucleotide
  Antisense strand to SEQ ID NO: 1858273
acugagaacaacuuccagc

SEQ ID NO: 1858275 - RNA, 19 nt, Artificial Sequence
  Description of Artificial Sequence: Synthetic oligonucleotide
  Sense strand starting at position 2783 of SEQ ID NO: 1564148
aguuguucucaguguuuac

SEQ ID NO: 1858276 - RNA, 19 nt, Artificial Sequence
  Description of Artificial Sequence: Synthetic oligonucleotide
  Antisense strand to SEQ ID NO: 1858275
guaaacacugagaacaacu

SEQ ID NO: 1858277 - RNA, 19 nt, Artificial Sequence
  Description of Artificial Sequence: Synthetic oligonucleotide
  Sense strand starting at position 2837 of SEQ ID NO: 1564148
ccaguaugggcauaguuau

SEQ ID NO: 1858278 - RNA, 19 nt, Artificial Sequence
  Description of Artificial Sequence: Synthetic oligonucleotide
  Antisense strand to SEQ ID NO: 1858277
auaacuaugcccauacugg

SEQ ID NO: 1858279 - RNA, 19 nt, Artificial Sequence
  Description of Artificial Sequence: Synthetic oligonucleotide
  Sense strand starting at position 2866 of SEQ ID NO: 1564148
gaagauuguguccagugca

SEQ ID NO: 1858280 - RNA, 19 nt, Artificial Sequence
  Description of Artificial Sequence: Synthetic oligonucleotide
  Antisense strand to SEQ ID NO: 1858279
ugcacuggacacaaucuuc

SEQ ID NO: 1858281 - RNA, 19 nt, Artificial Sequence
  Description of Artificial Sequence: Synthetic oligonucleotide
  Sense strand starting at position 3064 of SEQ ID NO: 1564148
ggcaguguuucagcuaaug

SEQ ID NO: 1858282 - RNA, 19 nt, Artificial Sequence
  Description of Artificial Sequence: Synthetic oligonucleotide
  Antisense strand to SEQ ID NO: 1858281
cauuagcugaaacacugcc

SEQ ID NO: 1858283 - RNA, 19 nt, Artificial Sequence
  Description of Artificial Sequence: Synthetic oligonucleotide
  Sense strand starting at position 3165 of SEQ ID NO: 1564148
auauuaaagucuuagggau

SEQ ID NO: 1858284 - RNA, 19 nt, Artificial Sequence
  Description of Artificial Sequence: Synthetic oligonucleotide
  Antisense strand to SEQ ID NO: 1858283
aucccuaagacuuuaauau

SEQ ID NO: 1858285 - RNA, 19 nt, Artificial Sequence
  Description of Artificial Sequence: Synthetic oligonucleotide
  Sense strand starting at position 3167 of SEQ ID NO: 1564148
auuaaagucuuagggauaa

SEQ ID NO: 1858286 - RNA, 19 nt, Artificial Sequence
  Description of Artificial Sequence: Synthetic oligonucleotide
  Antisense strand to SEQ ID NO: 1858285
uuaucccuaagacuuuaau

SEQ ID NO: 1858287 - RNA, 19 nt, Artificial Sequence
  Description of Artificial Sequence: Synthetic oligonucleotide
  Sense strand starting at position 3309 of SEQ ID NO: 1564148
aguggcaguuauuccaaau

SEQ ID NO: 1858288 - RNA, 19 nt, Artificial Sequence
  Description of Artificial Sequence: Synthetic oligonucleotide
  Antisense strand to SEQ ID NO: 1858287
auuuggaauaacugccacu

SEQ ID NO: 1858289 - RNA, 19 nt, Artificial Sequence
  Description of Artificial Sequence: Synthetic oligonucleotide
  Sense strand starting at position 3504 of SEQ ID NO: 1564148
guguaaugugguaguguac

SEQ ID NO: 1858290 - RNA, 19 nt, Artificial Sequence
  Description of Artificial Sequence: Synthetic oligonucleotide
  Antisense strand to SEQ ID NO: 1858289
guacacuaccacauuacac

SEQ ID NO: 1858291 - RNA, 19 nt, Artificial Sequence
  Description of Artificial Sequence: Synthetic oligonucleotide
  Sense strand starting at position 3700 of SEQ ID NO: 1564148
gguugacacuuguccauuc

SEQ ID NO: 1858292 - RNA, 19 nt, Artificial Sequence
  Description of Artificial Sequence: Synthetic oligonucleotide
  Antisense strand to SEQ ID NO: 1858291
gaauggacaagugucaacc

SEQ ID NO: 1858293 - RNA, 19 nt, Artificial Sequence
  Description of Artificial Sequence: Synthetic oligonucleotide
  Sense strand starting at position 3709 of SEQ ID NO: 1564148
uuguccauucucuauagga

SEQ ID NO: 1858294 - RNA, 19 nt, Artificial Sequence
  Description of Artificial Sequence: Synthetic oligonucleotide
  Antisense strand to SEQ ID NO: 1858293
uccuauagagaauggacaa

SEQ ID NO: 1858295 - RNA, 19 nt, Artificial Sequence
  Description of Artificial Sequence: Synthetic oligonucleotide
  Sense strand starting at position 3807 of SEQ ID NO: 1564148
guucgucaagcucacauau

SEQ ID NO: 1858296 - RNA, 19 nt, Artificial Sequence
  Description of Artificial Sequence: Synthetic oligonucleotide
  Antisense strand to SEQ ID NO: 1858295
auaugugagcuugacgaac

SEQ ID NO: 1858297 - RNA, 19 nt, Artificial Sequence
  Description of Artificial Sequence: Synthetic oligonucleotide
  Sense strand starting at position 3970 of SEQ ID NO: 1564148
gugaauuccagauguuguc

SEQ ID NO: 1858298 - RNA, 19 nt, Artificial Sequence
  Description of Artificial Sequence: Synthetic oligonucleotide
  Antisense strand to SEQ ID NO: 1858297
gacaacaucuggaauucac

SEQ ID NO: 1858299 - RNA, 19 nt, Artificial Sequence
  Description of Artificial Sequence: Synthetic oligonucleotide
  Sense strand starting at position 3976 of SEQ ID NO: 1564148
uccagauguugucuacaga

SEQ ID NO: 1858300 - RNA, 19 nt, Artificial Sequence
  Description of Artificial Sequence: Synthetic oligonucleotide
  Antisense strand to SEQ ID NO: 1858299
ucuguagacaacaucugga

SEQ ID NO: 1858301 - RNA, 19 nt, Artificial Sequence
  Description of Artificial Sequence: Synthetic oligonucleotide
  Sense strand starting at position 3977 of SEQ ID NO: 1564148
ccagauguugucuacagau

SEQ ID NO: 1858302 - RNA, 19 nt, Artificial Sequence
  Description of Artificial Sequence: Synthetic oligonucleotide
  Antisense strand to SEQ ID NO: 1858301
aucuguagacaacaucugg

SEQ ID NO: 1858303 - RNA, 19 nt, Artificial Sequence
  Description of Artificial Sequence: Synthetic oligonucleotide
  Sense strand starting at position 3979 of SEQ ID NO: 1564148
agauguugucuacagauua

SEQ ID NO: 1858304 - RNA, 19 nt, Artificial Sequence
  Description of Artificial Sequence: Synthetic oligonucleotide
  Antisense strand to SEQ ID NO: 1858303
uaaucuguagacaacaucu

SEQ ID NO: 1858305 - RNA, 19 nt, Artificial Sequence
  Description of Artificial Sequence: Synthetic oligonucleotide
  Sense strand starting at position 83 of SEQ ID NO: 1564149
uugucuguggaauauucua

SEQ ID NO: 1858306 - RNA, 19 nt, Artificial Sequence
  Description of Artificial Sequence: Synthetic oligonucleotide
  Antisense strand to SEQ ID NO: 1858305
uagaauauuccacagacaa

SEQ ID NO: 1858307 - RNA, 19 nt, Artificial Sequence
  Description of Artificial Sequence: Synthetic oligonucleotide
  Sense strand starting at position 745 of SEQ ID NO: 1564149
aggguuugugcagaauuca

SEQ ID NO: 1858308 - RNA, 19 nt, Artificial Sequence
  Description of Artificial Sequence: Synthetic oligonucleotide
  Antisense strand to SEQ ID NO: 1858307
ugaauucugcacaaacccu

SEQ ID NO: 1858309 - RNA, 19 nt, Artificial Sequence
  Description of Artificial Sequence: Synthetic oligonucleotide
  Sense strand starting at position 892 of SEQ ID NO: 1564149
uguguuucagucuaaacgu

SEQ ID NO: 1858310 - RNA, 19 nt, Artificial Sequence
  Description of Artificial Sequence: Synthetic oligonucleotide
  Antisense strand to SEQ ID NO: 1858309
acguuuagacugaaacaca

SEQ ID NO: 1858311 - RNA, 19 nt, Artificial Sequence
  Description of Artificial Sequence: Synthetic oligonucleotide
  Sense strand starting at position 1099 of SEQ ID NO: 1564149
cuacaauuggcccauguau

SEQ ID NO: 1858312 - RNA, 19 nt, Artificial Sequence
  Description of Artificial Sequence: Synthetic oligonucleotide
  Antisense strand to SEQ ID NO: 1858311
auacaugggccaauuguag

SEQ ID NO: 1858313 - RNA, 19 nt, Artificial Sequence
  Description of Artificial Sequence: Synthetic oligonucleotide
  Sense strand starting at position 1361 of SEQ ID NO: 1564149
gcaagaauaucagucuaaa

SEQ ID NO: 1858314 - RNA, 19 nt, Artificial Sequence
  Description of Artificial Sequence: Synthetic oligonucleotide
  Antisense strand to SEQ ID NO: 1858313
uuuagacugauauucuugc

SEQ ID NO: 1858315 - RNA, 19 nt, Artificial Sequence
  Description of Artificial Sequence: Synthetic oligonucleotide
  Sense strand starting at position 1428 of SEQ ID NO: 1564149
ugaaacauuccacgggagu

SEQ ID NO: 1858316 - RNA, 19 nt, Artificial Sequence
  Description of Artificial Sequence: Synthetic oligonucleotide
  Antisense strand to SEQ ID NO: 1858315
acucccguggaauguuuca

SEQ ID NO: 1858317 - RNA, 19 nt, Artificial Sequence
  Description of Artificial Sequence: Synthetic oligonucleotide
  Sense strand starting at position 1429 of SEQ ID NO: 1564149
gaaacauuccacgggaguu

SEQ ID NO: 1858318 - RNA, 19 nt, Artificial Sequence
  Description of Artificial Sequence: Synthetic oligonucleotide
  Antisense strand to SEQ ID NO: 1858317
aacucccguggaauguuuc

SEQ ID NO: 1858319 - RNA, 19 nt, Artificial Sequence
  Description of Artificial Sequence: Synthetic oligonucleotide
  Sense strand starting at position 1441 of SEQ ID NO: 1564149
gggaguucuggccgugaga

SEQ ID NO: 1858320 - RNA, 19 nt, Artificial Sequence
  Description of Artificial Sequence: Synthetic oligonucleotide
  Antisense strand to SEQ ID NO: 1858319
ucucacggccagaacuccc

SEQ ID NO: 1858321 - RNA, 19 nt, Artificial Sequence
  Description of Artificial Sequence: Synthetic oligonucleotide
  Sense strand starting at position 1443 of SEQ ID NO: 1564149
gaguucuggccgugagaaa

SEQ ID NO: 1858322 - RNA, 19 nt, Artificial Sequence
  Description of Artificial Sequence: Synthetic oligonucleotide
  Antisense strand to SEQ ID NO: 1858321
uuucucacggccagaacuc

SEQ ID NO: 1858323 - RNA, 19 nt, Artificial Sequence
  Description of Artificial Sequence: Synthetic oligonucleotide
  Sense strand starting at position 2001 of SEQ ID NO: 1564149
uugcccacccuguauauau

SEQ ID NO: 1858324 - RNA, 19 nt, Artificial Sequence
  Description of Artificial Sequence: Synthetic oligonucleotide
  Antisense strand to SEQ ID NO: 1858323
auauauacagggugggcaa

SEQ ID NO: 1858325 - RNA, 19 nt, Artificial Sequence
  Description of Artificial Sequence: Synthetic oligonucleotide
  Sense strand starting at position 2131 of SEQ ID NO: 1564149
cugacaacucccuggguuu

SEQ ID NO: 1858326 - RNA, 19 nt, Artificial Sequence
  Description of Artificial Sequence: Synthetic oligonucleotide
  Antisense strand to SEQ ID NO: 1858325
aaacccagggaguugucag

SEQ ID NO: 1858327 - RNA, 19 nt, Artificial Sequence
  Description of Artificial Sequence: Synthetic oligonucleotide
  Sense strand starting at position 2403 of SEQ ID NO: 1564149
aagcuaguguggcuacauu

SEQ ID NO: 1858328 - RNA, 19 nt, Artificial Sequence
  Description of Artificial Sequence: Synthetic oligonucleotide
  Antisense strand to SEQ ID NO: 1858327
aauguagccacacuagcuu

SEQ ID NO: 1858329 - RNA, 19 nt, Artificial Sequence
  Description of Artificial Sequence: Synthetic oligonucleotide
  Sense strand starting at position 2417 of SEQ ID NO: 1564149
acauuuaauuauuggugga

SEQ ID NO: 1858330 - RNA, 19 nt, Artificial Sequence
  Description of Artificial Sequence: Synthetic oligonucleotide
  Antisense strand to SEQ ID NO: 1858329
uccaccaauaauuaaaugu

SEQ ID NO: 1858331 - RNA, 19 nt, Artificial Sequence
  Description of Artificial Sequence: Synthetic oligonucleotide
  Sense strand starting at position 2421 of SEQ ID NO: 1564149
uuaauuauugguggagaug

SEQ ID NO: 1858332 - RNA, 19 nt, Artificial Sequence
  Description of Artificial Sequence: Synthetic oligonucleotide
  Antisense strand to SEQ ID NO: 1858331
caucuccaccaauaauuaa

SEQ ID NO: 1858333 - RNA, 19 nt, Artificial Sequence
  Description of Artificial Sequence: Synthetic oligonucleotide
  Sense strand starting at position 2501 of SEQ ID NO: 1564149
agguuucugccaggcaaau

SEQ ID NO: 1858334 - RNA, 19 nt, Artificial Sequence
  Description of Artificial Sequence: Synthetic oligonucleotide
  Antisense strand to SEQ ID NO: 1858333
auuugccuggcagaaaccu

SEQ ID NO: 1858335 - RNA, 19 nt, Artificial Sequence
  Description of Artificial Sequence: Synthetic oligonucleotide
  Sense strand starting at position 2735 of SEQ ID NO: 1564149
uacacaugugcuggaaguu

SEQ ID NO: 1858336 - RNA, 19 nt, Artificial Sequence
  Description of Artificial Sequence: Synthetic oligonucleotide
  Antisense strand to SEQ ID NO: 1858335
aacuuccagcacaugugua

SEQ ID NO: 1858337 - RNA, 19 nt, Artificial Sequence
  Description of Artificial Sequence: Synthetic oligonucleotide
  Sense strand starting at position 2753 of SEQ ID NO: 1564149
uguucugaguguuuacaug

SEQ ID NO: 1858338 - RNA, 19 nt, Artificial Sequence
  Description of Artificial Sequence: Synthetic oligonucleotide
  Antisense strand to SEQ ID NO: 1858337
cauguaaacacucagaaca

SEQ ID NO: 1858339 - RNA, 19 nt, Artificial Sequence
  Description of Artificial Sequence: Synthetic oligonucleotide
  Sense strand starting at position 2762 of SEQ ID NO: 1564149
uguuuacaugcagaauacu

SEQ ID NO: 1858340 - RNA, 19 nt, Artificial Sequence
  Description of Artificial Sequence: Synthetic oligonucleotide
  Antisense strand to SEQ ID NO: 1858339
aguauucugcauguaaaca

SEQ ID NO: 1858341 - RNA, 19 nt, Artificial Sequence
  Description of Artificial Sequence: Synthetic oligonucleotide
  Sense strand starting at position 2802 of SEQ ID NO: 1564149
cagugugggcauuguuaca

SEQ ID NO: 1858342 - RNA, 19 nt, Artificial Sequence
  Description of Artificial Sequence: Synthetic oligonucleotide
  Antisense strand to SEQ ID NO: 1858341
uguaacaaugcccacacug

SEQ ID NO: 1858343 - RNA, 19 nt, Artificial Sequence
  Description of Artificial Sequence: Synthetic oligonucleotide
  Sense strand starting at position 2830 of SEQ ID NO: 1564149
ggagauuguguccagugca

SEQ ID NO: 1858344 - RNA, 19 nt, Artificial Sequence
  Description of Artificial Sequence: Synthetic oligonucleotide
  Antisense strand to SEQ ID NO: 1858343
ugcacuggacacaaucucc

SEQ ID NO: 1858345 - RNA, 19 nt, Artificial Sequence
  Description of Artificial Sequence: Synthetic oligonucleotide
  Sense strand starting at position 2860 of SEQ ID NO: 1564149
aaaggcauuuaguguggaa

SEQ ID NO: 1858346 - RNA, 19 nt, Artificial Sequence
  Description of Artificial Sequence: Synthetic oligonucleotide
  Antisense strand to SEQ ID NO: 1858345
uuccacacuaaaugccuuu

SEQ ID NO: 1858347 - RNA, 19 nt, Artificial Sequence
  Description of Artificial Sequence: Synthetic oligonucleotide
  Sense strand starting at position 2914 of SEQ ID NO: 1564149
augagagccuguguagaaa

SEQ ID NO: 1858348 - RNA, 19 nt, Artificial Sequence
  Description of Artificial Sequence: Synthetic oligonucleotide
  Antisense strand to SEQ ID NO: 1858347
uuucuacacaggcucucau

SEQ ID NO: 1858349 - RNA, 19 nt, Artificial Sequence
  Description of Artificial Sequence: Synthetic oligonucleotide
  Sense strand starting at position 2976 of SEQ ID NO: 1564149
ugagauuagcaagauugca

SEQ ID NO: 1858350 - RNA, 19 nt, Artificial Sequence
  Description of Artificial Sequence: Synthetic oligonucleotide
  Antisense strand to SEQ ID NO: 1858349
ugcaaucuugcuaaucuca

SEQ ID NO: 1858351 - RNA, 19 nt, Artificial Sequence
  Description of Artificial Sequence: Synthetic oligonucleotide
  Sense strand starting at position 3103 of SEQ ID NO: 1564149
gucgacugguaguuaauuu

SEQ ID NO: 1858352 - RNA, 19 nt, Artificial Sequence
  Description of Artificial Sequence: Synthetic oligonucleotide
  Antisense strand to SEQ ID NO: 1858351
aaauuaacuaccagucgac

SEQ ID NO: 1858353 - RNA, 19 nt, Artificial Sequence
  Description of Artificial Sequence: Synthetic oligonucleotide
  Sense strand starting at position 3186 of SEQ ID NO: 1564149
agggauaaaucugaacaaa

SEQ ID NO: 1858354 - RNA, 19 nt, Artificial Sequence
  Description of Artificial Sequence: Synthetic oligonucleotide
  Antisense strand to SEQ ID NO: 1858353
uuuguucagauuuaucccu

SEQ ID NO: 1858355 - RNA, 19 nt, Artificial Sequence
  Description of Artificial Sequence: Synthetic oligonucleotide
  Sense strand starting at position 3269 of SEQ ID NO: 1564149
cgagauguauacuuugauu

SEQ ID NO: 1858356 - RNA, 19 nt, Artificial Sequence
  Description of Artificial Sequence: Synthetic oligonucleotide
  Antisense strand to SEQ ID NO: 1858355
aaucaaaguauacaucucg

SEQ ID NO: 1858357 - RNA, 19 nt, Artificial Sequence
  Description of Artificial Sequence: Synthetic oligonucleotide
  Sense strand starting at position 3316 of SEQ ID NO: 1564149
gucaguuauuuccaaauuc

SEQ ID NO: 1858358 - RNA, 19 nt, Artificial Sequence
  Description of Artificial Sequence: Synthetic oligonucleotide
  Antisense strand to SEQ ID NO: 1858357
gaauuuggaaauaacugac

SEQ ID NO: 1858359 - RNA, 19 nt, Artificial Sequence
  Description of Artificial Sequence: Synthetic oligonucleotide
  Sense strand starting at position 3467 of SEQ ID NO: 1564149
aaagcucuggauuguauua

SEQ ID NO: 1858360 - RNA, 19 nt, Artificial Sequence
  Description of Artificial Sequence: Synthetic oligonucleotide
  Antisense strand to SEQ ID NO: 1858359
uaauacaauccagagcuuu

SEQ ID NO: 1858361 - RNA, 19 nt, Artificial Sequence
  Description of Artificial Sequence: Synthetic oligonucleotide
  Sense strand starting at position 3480 of SEQ ID NO: 1564149
guauuaaugucaguguucu

SEQ ID NO: 1858362 - RNA, 19 nt, Artificial Sequence
  Description of Artificial Sequence: Synthetic oligonucleotide
  Antisense strand to SEQ ID NO: 1858361
agaacacugacauuaauac

SEQ ID NO: 1858363 - RNA, 19 nt, Artificial Sequence
  Description of Artificial Sequence: Synthetic oligonucleotide
  Sense strand starting at position 3547 of SEQ ID NO: 1564149
agaggcugguugaaggaua

SEQ ID NO: 1858364 - RNA, 19 nt, Artificial Sequence
  Description of Artificial Sequence: Synthetic oligonucleotide
  Antisense strand to SEQ ID NO: 1858363
uauccuucaaccagccucu

SEQ ID NO: 1858365 - RNA, 19 nt, Artificial Sequence
  Description of Artificial Sequence: Synthetic oligonucleotide
  Sense strand starting at position 3588 of SEQ ID NO: 1564149
cuuugaaacuucuugugaa

SEQ ID NO: 1858366 - RNA, 19 nt, Artificial Sequence
  Description of Artificial Sequence: Synthetic oligonucleotide
  Antisense strand to SEQ ID NO: 1858365
uucacaagaaguuucaaag

SEQ ID NO: 1858367 - RNA, 19 nt, Artificial Sequence
  Description of Artificial Sequence: Synthetic oligonucleotide
  Sense strand starting at position 3715 of SEQ ID NO: 1564149
uguccaauucucuauagga

SEQ ID NO: 1858368 - RNA, 19 nt, Artificial Sequence
  Description of Artificial Sequence: Synthetic oligonucleotide
  Antisense strand to SEQ ID NO: 1858367
uccuauagagaauuggaca

SEQ ID NO: 1858369 - RNA, 19 nt, Artificial Sequence
  Description of Artificial Sequence: Synthetic oligonucleotide
  Sense strand starting at position 3806 of SEQ ID NO: 1564149
gcucaucgagcucacauau

SEQ ID NO: 1858370 - RNA, 19 nt, Artificial Sequence
  Description of Artificial Sequence: Synthetic oligonucleotide
  Antisense strand to SEQ ID NO: 1858369
auaugugagcucgaugagc

SEQ ID NO: 1858371 - RNA, 19 nt, Artificial Sequence
  Description of Artificial Sequence: Synthetic oligonucleotide
  Sense strand starting at position 3897 of SEQ ID NO: 1564149
auagcauucccaugaguuc

SEQ ID NO: 1858372 - RNA, 19 nt, Artificial Sequence
  Description of Artificial Sequence: Synthetic oligonucleotide
  Antisense strand to SEQ ID NO: 1858371
gaacucaugggaaugcuau

SEQ ID NO: 1858373 - RNA, 19 nt, Artificial Sequence
  Description of Artificial Sequence: Synthetic oligonucleotide
  Sense strand starting at position 3934 of SEQ ID NO: 1564149
ccagaagaacauuguuauu

SEQ ID NO: 1858374 - RNA, 19 nt, Artificial Sequence
  Description of Artificial Sequence: Synthetic oligonucleotide
  Antisense strand to SEQ ID NO: 1858373
aauaacaauguucuucugg

SEQ ID NO: 1858375 - RNA, 19 nt, Artificial Sequence
  Description of Artificial Sequence: Synthetic oligonucleotide
  Sense strand starting at position 3939 of SEQ ID NO: 1564149
agaacauuguuauuaaggu

SEQ ID NO: 1858376 - RNA, 19 nt, Artificial Sequence
  Description of Artificial Sequence: Synthetic oligonucleotide
  Antisense strand to SEQ ID NO: 1858375
accuuaauaacaauguucu

SEQ ID NO: 1858377 - RNA, 19 nt, Artificial Sequence
  Description of Artificial Sequence: Synthetic oligonucleotide
  Sense strand starting at position 3970 of SEQ ID NO: 1564149
uagugaaucccagauguug

SEQ ID NO: 1858378 - RNA, 19 nt, Artificial Sequence
  Description of Artificial Sequence: Synthetic oligonucleotide
  Antisense strand to SEQ ID NO: 1858377
caacaucugggauucacua

SEQ ID NO: 1858379 - RNA, 19 nt, Artificial Sequence
  Description of Artificial Sequence: Synthetic oligonucleotide
  Sense strand starting at position 3972 of SEQ ID NO: 1564149
gugaaucccagauguuguc

SEQ ID NO: 1858380 - RNA, 19 nt, Artificial Sequence
  Description of Artificial Sequence: Synthetic oligonucleotide
  Antisense strand to SEQ ID NO: 1858379
gacaacaucugggauucac

SEQ ID NO: 1858381 - RNA, 19 nt, Artificial Sequence
  Description of Artificial Sequence: Synthetic oligonucleotide
  Sense strand starting at position 3978 of SEQ ID NO: 1564149
cccagauguugucuagaga

SEQ ID NO: 1858382 - RNA, 19 nt, Artificial Sequence
  Description of Artificial Sequence: Synthetic oligonucleotide
  Antisense strand to SEQ ID NO: 1858381
ucucuagacaacaucuggg

SEQ ID NO: 1858383 - RNA, 19 nt, Artificial Sequence
  Description of Artificial Sequence: Synthetic oligonucleotide
  Sense strand starting at position 3979 of SEQ ID NO: 1564149
ccagauguugucuagagau

SEQ ID NO: 1858384 - RNA, 19 nt, Artificial Sequence
  Description of Artificial Sequence: Synthetic oligonucleotide
  Antisense strand to SEQ ID NO: 1858383
aucucuagacaacaucugg

SEQ ID NO: 1858385 - RNA, 19 nt, Artificial Sequence
  Description of Artificial Sequence: Synthetic oligonucleotide
  Sense strand starting at position 183 of SEQ ID NO: 1564150
ucuccacugcuuugaaaug

SEQ ID NO: 1858386 - RNA, 19 nt, Artificial Sequence
  Description of Artificial Sequence: Synthetic oligonucleotide
  Antisense strand to SEQ ID NO: 1858385
cauuucaaagcaguggaga

SEQ ID NO: 1858387 - RNA, 19 nt, Artificial Sequence
  Description of Artificial Sequence: Synthetic oligonucleotide
  Sense strand starting at position 426 of SEQ ID NO: 1564150
cuguauugugcuuuguguu

SEQ ID NO: 1858388 - RNA, 19 nt, Artificial Sequence
  Description of Artificial Sequence: Synthetic oligonucleotide
  Antisense strand to SEQ ID NO: 1858387
aacacaaagcacaauacag

SEQ ID NO: 1858389 - RNA, 19 nt, Artificial Sequence
  Description of Artificial Sequence: Synthetic oligonucleotide
  Sense strand starting at position 558 of SEQ ID NO: 1564150
gguacaguugcaugaacau

SEQ ID NO: 1858390 - RNA, 19 nt, Artificial Sequence
  Description of Artificial Sequence: Synthetic oligonucleotide
  Antisense strand to SEQ ID NO: 1858389
auguucaugcaacuguacc

SEQ ID NO: 1858391 - RNA, 19 nt, Artificial Sequence
  Description of Artificial Sequence: Synthetic oligonucleotide
  Sense strand starting at position 590 of SEQ ID NO: 1564150
cuuccugugggaggaaauu

SEQ ID NO: 1858392 - RNA, 19 nt, Artificial Sequence
  Description of Artificial Sequence: Synthetic oligonucleotide
  Antisense strand to SEQ ID NO: 1858391
aauuuccucccacaggaag

SEQ ID NO: 1858393 - RNA, 19 nt, Artificial Sequence
  Description of Artificial Sequence: Synthetic oligonucleotide
  Sense strand starting at position 681 of SEQ ID NO: 1564150
cugugagucuguccaccaa

SEQ ID NO: 1858394 - RNA, 19 nt, Artificial Sequence
  Description of Artificial Sequence: Synthetic oligonucleotide
  Antisense strand to SEQ ID NO: 1858393
uugguggacagacucacag

SEQ ID NO: 1858395 - RNA, 19 nt, Artificial Sequence
  Description of Artificial Sequence: Synthetic oligonucleotide
  Sense strand starting at position 857 of SEQ ID NO: 1564150
uugguuucuccauguuuaa

SEQ ID NO: 1858396 - RNA, 19 nt, Artificial Sequence
  Description of Artificial Sequence: Synthetic oligonucleotide
  Antisense strand to SEQ ID NO: 1858395
uuaaacauggagaaaccaa

SEQ ID NO: 1858397 - RNA, 19 nt, Artificial Sequence
  Description of Artificial Sequence: Synthetic oligonucleotide
  Sense strand starting at position 860 of SEQ ID NO: 1564150
guuucuccauguuuaauua

SEQ ID NO: 1858398 - RNA, 19 nt, Artificial Sequence
  Description of Artificial Sequence: Synthetic oligonucleotide
  Antisense strand to SEQ ID NO: 1858397
uaauuaaacauggagaaac

SEQ ID NO: 1858399 - RNA, 19 nt, Artificial Sequence
  Description of Artificial Sequence: Synthetic oligonucleotide
  Sense strand starting at position 909 of SEQ ID NO: 1564150
agaugagucugggucuucu

SEQ ID NO: 1858400 - RNA, 19 nt, Artificial Sequence
  Description of Artificial Sequence: Synthetic oligonucleotide
  Antisense strand to SEQ ID NO: 1858399
agaagacccagacucaucu

SEQ ID NO: 1858401 - RNA, 19 nt, Artificial Sequence
  Description of Artificial Sequence: Synthetic oligonucleotide
  Sense strand starting at position 919 of SEQ ID NO: 1564150
gggucuucuuccuccauca

SEQ ID NO: 1858402 - RNA, 19 nt, Artificial Sequence
  Description of Artificial Sequence: Synthetic oligonucleotide
  Antisense strand to SEQ ID NO: 1858401
ugauggaggaagaagaccc

SEQ ID NO: 1858403 - RNA, 19 nt, Artificial Sequence
  Description of Artificial Sequence: Synthetic oligonucleotide
  Sense strand starting at position 1051 of SEQ ID NO: 1564150
uuugaagauucugcagaug

SEQ ID NO: 1858404 - RNA, 19 nt, Artificial Sequence
  Description of Artificial Sequence: Synthetic oligonucleotide
  Antisense strand to SEQ ID NO: 1858403
caucugcagaaucuucaaa

SEQ ID NO: 1858405 - RNA, 19 nt, Artificial Sequence
  Description of Artificial Sequence: Synthetic oligonucleotide
  Sense strand starting at position 1056 of SEQ ID NO: 1564150
agauucugcagaugagucu

SEQ ID NO: 1858406 - RNA, 19 nt, Artificial Sequence
  Description of Artificial Sequence: Synthetic oligonucleotide
  Antisense strand to SEQ ID NO: 1858405
agacucaucugcagaaucu

SEQ ID NO: 1858407 - RNA, 19 nt, Artificial Sequence
  Description of Artificial Sequence: Synthetic oligonucleotide
  Sense strand starting at position 1146 of SEQ ID NO: 1564150
cuggucauucucgaguuga

SEQ ID NO: 1858408 - RNA, 19 nt, Artificial Sequence
  Description of Artificial Sequence: Synthetic oligonucleotide
  Antisense strand to SEQ ID NO: 1858407
ucaacucgagaaugaccag

SEQ ID NO: 1858409 - RNA, 19 nt, Artificial Sequence
  Description of Artificial Sequence: Synthetic oligonucleotide
  Sense strand starting at position 1156 of SEQ ID NO: 1564150
ucgaguugauuugaaugua

SEQ ID NO: 1858410 - RNA, 19 nt, Artificial Sequence
  Description of Artificial Sequence: Synthetic oligonucleotide
  Antisense strand to SEQ ID NO: 1858409
uacauucaaaucaacucga

SEQ ID NO: 1858411 - RNA, 19 nt, Artificial Sequence
  Description of Artificial Sequence: Synthetic oligonucleotide
  Sense strand starting at position 1180 of SEQ ID NO: 1564150
uuagucuuccuguagcaca

SEQ ID NO: 1858412 - RNA, 19 nt, Artificial Sequence
  Description of Artificial Sequence: Synthetic oligonucleotide
  Antisense strand to SEQ ID NO: 1858411
ugugcuacaggaagacuaa

SEQ ID NO: 1858413 - RNA, 19 nt, Artificial Sequence
  Description of Artificial Sequence: Synthetic oligonucleotide
  Sense strand starting at position 1271 of SEQ ID NO: 1564150
gugucuccugcaucuguua

SEQ ID NO: 1858414 - RNA, 19 nt, Artificial Sequence
  Description of Artificial Sequence: Synthetic oligonucleotide
  Antisense strand to SEQ ID NO: 1858413
uaacagaugcaggagacac

SEQ ID NO: 1858415 - RNA, 19 nt, Artificial Sequence
  Description of Artificial Sequence: Synthetic oligonucleotide
  Sense strand starting at position 1274 of SEQ ID NO: 1564150
ucuccugcaucuguuaaga

SEQ ID NO: 1858416 - RNA, 19 nt, Artificial Sequence
  Description of Artificial Sequence: Synthetic oligonucleotide
  Antisense strand to SEQ ID NO: 1858415
ucuuaacagaugcaggaga

SEQ ID NO: 1858417 - RNA, 19 nt, Artificial Sequence
  Description of Artificial Sequence: Synthetic oligonucleotide
  Sense strand starting at position 2035 of SEQ ID NO: 1564150
ucuuguagaguccagacuu

SEQ ID NO: 1858418 - RNA, 19 nt, Artificial Sequence
  Description of Artificial Sequence: Synthetic oligonucleotide
  Antisense strand to SEQ ID NO: 1858417
aagucuggacucuacaaga

SEQ ID NO: 1858419 - RNA, 19 nt, Artificial Sequence
  Description of Artificial Sequence: Synthetic oligonucleotide
  Sense strand starting at position 2367 of SEQ ID NO: 1564150
auggaagugagagguugau

SEQ ID NO: 1858420 - RNA, 19 nt, Artificial Sequence
  Description of Artificial Sequence: Synthetic oligonucleotide
  Antisense strand to SEQ ID NO: 1858419
aucaaccucucacuuccau

SEQ ID NO: 1858421 - RNA, 19 nt, Artificial Sequence
  Description of Artificial Sequence: Synthetic oligonucleotide
  Sense strand starting at position 2676 of SEQ ID NO: 1564150
auggccucagucugucaaa

SEQ ID NO: 1858422 - RNA, 19 nt, Artificial Sequence
  Description of Artificial Sequence: Synthetic oligonucleotide
  Antisense strand to SEQ ID NO: 1858421
uuugacagacugaggccau

SEQ ID NO: 1858423 - RNA, 19 nt, Artificial Sequence
  Description of Artificial Sequence: Synthetic oligonucleotide
  Sense strand starting at position 2833 of SEQ ID NO: 1564150
ggaaguuguccugaguauu

SEQ ID NO: 1858424 - RNA, 19 nt, Artificial Sequence
  Description of Artificial Sequence: Synthetic oligonucleotide
  Antisense strand to SEQ ID NO: 1858423
aauacucaggacaacuucc

SEQ ID NO: 1858425 - RNA, 19 nt, Artificial Sequence
  Description of Artificial Sequence: Synthetic oligonucleotide
  Sense strand starting at position 2875 of SEQ ID NO: 1564150
agacuaauaugugcaagaa

SEQ ID NO: 1858426 - RNA, 19 nt, Artificial Sequence
  Description of Artificial Sequence: Synthetic oligonucleotide
  Antisense strand to SEQ ID NO: 1858425
uucuugcacauauuagucu

SEQ ID NO: 1858427 - RNA, 19 nt, Artificial Sequence
  Description of Artificial Sequence: Synthetic oligonucleotide
  Sense strand starting at position 2906 of SEQ ID NO: 1564150
uaagcuuugcacuggagau

SEQ ID NO: 1858428 - RNA, 19 nt, Artificial Sequence
  Description of Artificial Sequence: Synthetic oligonucleotide
  Antisense strand to SEQ ID NO: 1858427
aucuccagugcaaagcuua

SEQ ID NO: 1858429 - RNA, 19 nt, Artificial Sequence
  Description of Artificial Sequence: Synthetic oligonucleotide
  Sense strand starting at position 2919 of SEQ ID NO: 1564150
ggagauuguguccagugac

SEQ ID NO: 1858430 - RNA, 19 nt, Artificial Sequence
  Description of Artificial Sequence: Synthetic oligonucleotide
  Antisense strand to SEQ ID NO: 1858429
gucacuggacacaaucucc

SEQ ID NO: 1858431 - RNA, 19 nt, Artificial Sequence
  Description of Artificial Sequence: Synthetic oligonucleotide
  Sense strand starting at position 2922 of SEQ ID NO: 1564150
gauuguguccagugacaaa

SEQ ID NO: 1858432 - RNA, 19 nt, Artificial Sequence
  Description of Artificial Sequence: Synthetic oligonucleotide
  Antisense strand to SEQ ID NO: 1858431
uuugucacuggacacaauc

SEQ ID NO: 1858433 - RNA, 19 nt, Artificial Sequence
  Description of Artificial Sequence: Synthetic oligonucleotide
  Sense strand starting at position 2997 of SEQ ID NO: 1564150
augagaguguauguagaaa

SEQ ID NO: 1858434 - RNA, 19 nt, Artificial Sequence
  Description of Artificial Sequence: Synthetic oligonucleotide
  Antisense strand to SEQ ID NO: 1858433
uuucuacauacacucucau

SEQ ID NO: 1858435 - RNA, 19 nt, Artificial Sequence
  Description of Artificial Sequence: Synthetic oligonucleotide
  Sense strand starting at position 3065 of SEQ ID NO: 1564150
agaguaagcgaucaacaua

SEQ ID NO: 1858436 - RNA, 19 nt, Artificial Sequence
  Description of Artificial Sequence: Synthetic oligonucleotide
  Antisense strand to SEQ ID NO: 1858435
uauguugaucgcuuacucu

SEQ ID NO: 1858437 - RNA, 19 nt, Artificial Sequence
  Description of Artificial Sequence: Synthetic oligonucleotide
  Sense strand starting at position 3068 of SEQ ID NO: 1564150
guaagcgaucaacauauaa

SEQ ID NO: 1858438 - RNA, 19 nt, Artificial Sequence
  Description of Artificial Sequence: Synthetic oligonucleotide
  Antisense strand to SEQ ID NO: 1858437
uuauauguugaucgcuuac

SEQ ID NO: 1858439 - RNA, 19 nt, Artificial Sequence
  Description of Artificial Sequence: Synthetic oligonucleotide
  Sense strand starting at position 3098 of SEQ ID NO: 1564150
guuuaucuaguagaaguua

SEQ ID NO: 1858440 - RNA, 19 nt, Artificial Sequence
  Description of Artificial Sequence: Synthetic oligonucleotide
  Antisense strand to SEQ ID NO: 1858439
uaacuucuacuagauaaac

SEQ ID NO: 1858441 - RNA, 19 nt, Artificial Sequence
  Description of Artificial Sequence: Synthetic oligonucleotide
  Sense strand starting at position 3144 of SEQ ID NO: 1564150
accuauagucaucauguca

SEQ ID NO: 1858442 - RNA, 19 nt, Artificial Sequence
  Description of Artificial Sequence: Synthetic oligonucleotide
  Antisense strand to SEQ ID NO: 1858441
ugacaugaugacuauaggu

SEQ ID NO: 1858443 - RNA, 19 nt, Artificial Sequence
  Description of Artificial Sequence: Synthetic oligonucleotide
  Sense strand starting at position 3186 of SEQ ID NO: 1564150
accggaaaguauucccauu

SEQ ID NO: 1858444 - RNA, 19 nt, Artificial Sequence
  Description of Artificial Sequence: Synthetic oligonucleotide
  Antisense strand to SEQ ID NO: 1858443
aaugggaauacuuuccggu

SEQ ID NO: 1858445 - RNA, 19 nt, Artificial Sequence
  Description of Artificial Sequence: Synthetic oligonucleotide
  Sense strand starting at position 3255 of SEQ ID NO: 1564150
uuggcauuaagacgugaaa

SEQ ID NO: 1858446 - RNA, 19 nt, Artificial Sequence
  Description of Artificial Sequence: Synthetic oligonucleotide
  Antisense strand to SEQ ID NO: 1858445
uuucacgucuuaaugccaa

SEQ ID NO: 1858447 - RNA, 19 nt, Artificial Sequence
  Description of Artificial Sequence: Synthetic oligonucleotide
  Sense strand starting at position 3257 of SEQ ID NO: 1564150
ggcauuaagacgugaaaga

SEQ ID NO: 1858448 - RNA, 19 nt, Artificial Sequence
  Description of Artificial Sequence: Synthetic oligonucleotide
  Antisense strand to SEQ ID NO: 1858447
ucuuucacgucuuaaugcc

SEQ ID NO: 1858449 - RNA, 19 nt, Artificial Sequence
  Description of Artificial Sequence: Synthetic oligonucleotide
  Sense strand starting at position 3266 of SEQ ID NO: 1564150
acgugaaagaguuauacau

SEQ ID NO: 1858450 - RNA, 19 nt, Artificial Sequence
  Description of Artificial Sequence: Synthetic oligonucleotide
  Antisense strand to SEQ ID NO: 1858449
auguauaacucuuucacgu

SEQ ID NO: 1858451 - RNA, 19 nt, Artificial Sequence
  Description of Artificial Sequence: Synthetic oligonucleotide
  Sense strand starting at position 3273 of SEQ ID NO: 1564150
agaguuauacaucauaagc

SEQ ID NO: 1858452 - RNA, 19 nt, Artificial Sequence
  Description of Artificial Sequence: Synthetic oligonucleotide
  Antisense strand to SEQ ID NO: 1858451
gcuuaugauguauaacucu

SEQ ID NO: 1858453 - RNA, 19 nt, Artificial Sequence
  Description of Artificial Sequence: Synthetic oligonucleotide
  Sense strand starting at position 3337 of SEQ ID NO: 1564150
guaacacaucuggaaagcu

SEQ ID NO: 1858454 - RNA, 19 nt, Artificial Sequence
  Description of Artificial Sequence: Synthetic oligonucleotide
  Antisense strand to SEQ ID NO: 1858453
agcuuuccagauguguuac

SEQ ID NO: 1858455 - RNA, 19 nt, Artificial Sequence
  Description of Artificial Sequence: Synthetic oligonucleotide
  Sense strand starting at position 3721 of SEQ ID NO: 1564150
cuuccacagucuuugugau

SEQ ID NO: 1858456 - RNA, 19 nt, Artificial Sequence
  Description of Artificial Sequence: Synthetic oligonucleotide
  Antisense strand to SEQ ID NO: 1858455
aucacaaagacuguggaag

SEQ ID NO: 1858457 - RNA, 19 nt, Artificial Sequence
  Description of Artificial Sequence: Synthetic oligonucleotide
  Sense strand starting at position 3768 of SEQ ID NO: 1564150
uauuaaauaguguaggcau

SEQ ID NO: 1858458 - RNA, 19 nt, Artificial Sequence
  Description of Artificial Sequence: Synthetic oligonucleotide
  Antisense strand to SEQ ID NO: 1858457
augccuacacuauuuaaua

SEQ ID NO: 1858459 - RNA, 19 nt, Artificial Sequence
  Description of Artificial Sequence: Synthetic oligonucleotide
  Sense strand starting at position 3780 of SEQ ID NO: 1564150
uaggcauucugagcauauc

SEQ ID NO: 1858460 - RNA, 19 nt, Artificial Sequence
  Description of Artificial Sequence: Synthetic oligonucleotide
  Antisense strand to SEQ ID NO: 1858459
gauaugcucagaaugccua

SEQ ID NO: 1858461 - RNA, 19 nt, Artificial Sequence
  Description of Artificial Sequence: Synthetic oligonucleotide
  Sense strand starting at position 3781 of SEQ ID NO: 1564150
aggcauucugagcauauca

SEQ ID NO: 1858462 - RNA, 19 nt, Artificial Sequence
  Description of Artificial Sequence: Synthetic oligonucleotide
  Antisense strand to SEQ ID NO: 1858461
ugauaugcucagaaugccu

SEQ ID NO: 1858463 - RNA, 19 nt, Artificial Sequence
  Description of Artificial Sequence: Synthetic oligonucleotide
  Sense strand starting at position 3783 of SEQ ID NO: 1564150
gcauucugagcauaucaac

SEQ ID NO: 1858464 - RNA, 19 nt, Artificial Sequence
  Description of Artificial Sequence: Synthetic oligonucleotide
  Antisense strand to SEQ ID NO: 1858463
guugauaugcucagaaugc

SEQ ID NO: 1858465 - RNA, 19 nt, Artificial Sequence
  Description of Artificial Sequence: Synthetic oligonucleotide
  Sense strand starting at position 269 of SEQ ID NO: 1564151
uugguuuccacuuggugaa

SEQ ID NO: 1858466 - RNA, 19 nt, Artificial Sequence
  Description of Artificial Sequence: Synthetic oligonucleotide
  Antisense strand to SEQ ID NO: 1858465
uucaccaaguggaaaccaa

SEQ ID NO: 1858467 - RNA, 19 nt, Artificial Sequence
  Description of Artificial Sequence: Synthetic oligonucleotide
  Sense strand starting at position 270 of SEQ ID NO: 1564151
ugguuuccacuuggugaau

SEQ ID NO: 1858468 - RNA, 19 nt, Artificial Sequence
  Description of Artificial Sequence: Synthetic oligonucleotide
  Antisense strand to SEQ ID NO: 1858467
auucaccaaguggaaacca

SEQ ID NO: 1858469 - RNA, 19 nt, Artificial Sequence
  Description of Artificial Sequence: Synthetic oligonucleotide
  Sense strand starting at position 1903 of SEQ ID NO: 1564151
acaagacuacaguguuagu

SEQ ID NO: 1858470 - RNA, 19 nt, Artificial Sequence
  Description of Artificial Sequence: Synthetic oligonucleotide
  Antisense strand to SEQ ID NO: 1858469
acuaacacuguagucuugu

SEQ ID NO: 1858471 - RNA, 19 nt, Artificial Sequence
  Description of Artificial Sequence: Synthetic oligonucleotide
  Sense strand starting at position 2174 of SEQ ID NO: 1564151
auagaaauaccauguguau

SEQ ID NO: 1858472 - RNA, 19 nt, Artificial Sequence
  Description of Artificial Sequence: Synthetic oligonucleotide
  Antisense strand to SEQ ID NO: 1858471
auacacaugguauuucuau

SEQ ID NO: 1858473 - RNA, 19 nt, Artificial Sequence
  Description of Artificial Sequence: Synthetic oligonucleotide
  Sense strand starting at position 2189 of SEQ ID NO: 1564151
guauacauuuauggagaca

SEQ ID NO: 1858474 - RNA, 19 nt, Artificial Sequence
  Description of Artificial Sequence: Synthetic oligonucleotide
  Antisense strand to SEQ ID NO: 1858473
ugucuccauaaauguauac

SEQ ID NO: 1858475 - RNA, 19 nt, Artificial Sequence
  Description of Artificial Sequence: Synthetic oligonucleotide
  Sense strand starting at position 2203 of SEQ ID NO: 1564151
agacaugaauccuuuacga

SEQ ID NO: 1858476 - RNA, 19 nt, Artificial Sequence
  Description of Artificial Sequence: Synthetic oligonucleotide
  Antisense strand to SEQ ID NO: 1858475
ucguaaaggauucaugucu

SEQ ID NO: 1858477 - RNA, 19 nt, Artificial Sequence
  Description of Artificial Sequence: Synthetic oligonucleotide
  Sense strand starting at position 2224 of SEQ ID NO: 1564151
auaugcaaauguguaugua

SEQ ID NO: 1858478 - RNA, 19 nt, Artificial Sequence
  Description of Artificial Sequence: Synthetic oligonucleotide
  Antisense strand to SEQ ID NO: 1858477
uacauacacauuugcauau

SEQ ID NO: 1858479 - RNA, 19 nt, Artificial Sequence
  Description of Artificial Sequence: Synthetic oligonucleotide
  Sense strand starting at position 2286 of SEQ ID NO: 1564151
cuaugaauucuguguacag

SEQ ID NO: 1858480 - RNA, 19 nt, Artificial Sequence
  Description of Artificial Sequence: Synthetic oligonucleotide
  Antisense strand to SEQ ID NO: 1858479
cuguacacagaauucauag

SEQ ID NO: 1858481 - RNA, 19 nt, Artificial Sequence
  Description of Artificial Sequence: Synthetic oligonucleotide
  Sense strand starting at position 2287 of SEQ ID NO: 1564151
uaugaauucuguguacagu

SEQ ID NO: 1858482 - RNA, 19 nt, Artificial Sequence
  Description of Artificial Sequence: Synthetic oligonucleotide
  Antisense strand to SEQ ID NO: 1858481
acuguacacagaauucaua

SEQ ID NO: 1858483 - RNA, 19 nt, Artificial Sequence
  Description of Artificial Sequence: Synthetic oligonucleotide
  Sense strand starting at position 2288 of SEQ ID NO: 1564151
augaauucuguguacaguu

SEQ ID NO: 1858484 - RNA, 19 nt, Artificial Sequence
  Description of Artificial Sequence: Synthetic oligonucleotide
  Antisense strand to SEQ ID NO: 1858483
aacuguacacagaauucau

SEQ ID NO: 1858485 - RNA, 19 nt, Artificial Sequence
  Description of Artificial Sequence: Synthetic oligonucleotide
  Sense strand starting at position 2298 of SEQ ID NO: 1564151
uguacaguuccagaaauuc

SEQ ID NO: 1858486 - RNA, 19 nt, Artificial Sequence
  Description of Artificial Sequence: Synthetic oligonucleotide
  Antisense strand to SEQ ID NO: 1858485
gaauuucuggaacuguaca

SEQ ID NO: 1858487 - RNA, 19 nt, Artificial Sequence
  Description of Artificial Sequence: Synthetic oligonucleotide
  Sense strand starting at position 2417 of SEQ ID NO: 1564151
uuaaguguuucuccaaagc

SEQ ID NO: 1858488 - RNA, 19 nt, Artificial Sequence
  Description of Artificial Sequence: Synthetic oligonucleotide
  Antisense strand to SEQ ID NO: 1858487
gcuuuggagaaacacuuaa

SEQ ID NO: 1858489 - RNA, 19 nt, Artificial Sequence
  Description of Artificial Sequence: Synthetic oligonucleotide
  Sense strand starting at position 2432 of SEQ ID NO: 1564151
aagcauuauguaggcauau

SEQ ID NO: 1858490 - RNA, 19 nt, Artificial Sequence
  Description of Artificial Sequence: Synthetic oligonucleotide
  Antisense strand to SEQ ID NO: 1858489
auaugccuacauaaugcuu

SEQ ID NO: 1858491 - RNA, 19 nt, Artificial Sequence
  Description of Artificial Sequence: Synthetic oligonucleotide
  Sense strand starting at position 2433 of SEQ ID NO: 1564151
agcauuauguaggcauauu

SEQ ID NO: 1858492 - RNA, 19 nt, Artificial Sequence
  Description of Artificial Sequence: Synthetic oligonucleotide
  Antisense strand to SEQ ID NO: 1858491
aauaugccuacauaaugcu

SEQ ID NO: 1858493 - RNA, 19 nt, Artificial Sequence
  Description of Artificial Sequence: Synthetic oligonucleotide
  Sense strand starting at position 2459 of SEQ ID NO: 1564151
uggagaccuugcuuugaag

SEQ ID NO: 1858494 - RNA, 19 nt, Artificial Sequence
  Description of Artificial Sequence: Synthetic oligonucleotide
  Antisense strand to SEQ ID NO: 1858493
cuucaaagcaaggucucca

SEQ ID NO: 1858495 - RNA, 19 nt, Artificial Sequence
  Description of Artificial Sequence: Synthetic oligonucleotide
  Sense strand starting at position 2461 of SEQ ID NO: 1564151
gagaccuugcuuugaagaa

SEQ ID NO: 1858496 - RNA, 19 nt, Artificial Sequence
  Description of Artificial Sequence: Synthetic oligonucleotide
  Antisense strand to SEQ ID NO: 1858495
uucuucaaagcaaggucuc

SEQ ID NO: 1858497 - RNA, 19 nt, Artificial Sequence
  Description of Artificial Sequence: Synthetic oligonucleotide
  Sense strand starting at position 2465 of SEQ ID NO: 1564151
ccuugcuuugaagaaguau

SEQ ID NO: 1858498 - RNA, 19 nt, Artificial Sequence
  Description of Artificial Sequence: Synthetic oligonucleotide
  Antisense strand to SEQ ID NO: 1858497
auacuucuucaaagcaagg

SEQ ID NO: 1858499 - RNA, 19 nt, Artificial Sequence
  Description of Artificial Sequence: Synthetic oligonucleotide
  Sense strand starting at position 2474 of SEQ ID NO: 1564151
gaagaaguauuggcuuauu

SEQ ID NO: 1858500 - RNA, 19 nt, Artificial Sequence
  Description of Artificial Sequence: Synthetic oligonucleotide
  Antisense strand to SEQ ID NO: 1858499
aauaagccaauacuucuuc

SEQ ID NO: 1858501 - RNA, 19 nt, Artificial Sequence
  Description of Artificial Sequence: Synthetic oligonucleotide
  Sense strand starting at position 2696 of SEQ ID NO: 1564151
aaaccaaauggguguacaa

SEQ ID NO: 1858502 - RNA, 19 nt, Artificial Sequence
  Description of Artificial Sequence: Synthetic oligonucleotide
  Antisense strand to SEQ ID NO: 1858501
uuguacacccauuugguuu

SEQ ID NO: 1858503 - RNA, 19 nt, Artificial Sequence
  Description of Artificial Sequence: Synthetic oligonucleotide
  Sense strand starting at position 2720 of SEQ ID NO: 1564151
acaauauguuggcuaacau

SEQ ID NO: 1858504 - RNA, 19 nt, Artificial Sequence
  Description of Artificial Sequence: Synthetic oligonucleotide
  Antisense strand to SEQ ID NO: 1858503
auguuagccaacauauugu

SEQ ID NO: 1858505 - RNA, 19 nt, Artificial Sequence
  Description of Artificial Sequence: Synthetic oligonucleotide
  Sense strand starting at position 2765 of SEQ ID NO: 1564151
aaucuuaaucuauggugga

SEQ ID NO: 1858506 - RNA, 19 nt, Artificial Sequence
  Description of Artificial Sequence: Synthetic oligonucleotide
  Antisense strand to SEQ ID NO: 1858505
uccaccauagauuaagauu

SEQ ID NO: 1858507 - RNA, 19 nt, Artificial Sequence
  Description of Artificial Sequence: Synthetic oligonucleotide
  Sense strand starting at position 2769 of SEQ ID NO: 1564151
uuaaucuaugguggaauaa

SEQ ID NO: 1858508 - RNA, 19 nt, Artificial Sequence
  Description of Artificial Sequence: Synthetic oligonucleotide
  Antisense strand to SEQ ID NO: 1858507
uuauuccaccauagauuaa

SEQ ID NO: 1858509 - RNA, 19 nt, Artificial Sequence
  Description of Artificial Sequence: Synthetic oligonucleotide
  Sense strand starting at position 2875 of SEQ ID NO: 1564151
ugaucagugcugcaaauaa

SEQ ID NO: 1858510 - RNA, 19 nt, Artificial Sequence
  Description of Artificial Sequence: Synthetic oligonucleotide
  Antisense strand to SEQ ID NO: 1858509
uuauuugcagcacugauca

SEQ ID NO: 1858511 - RNA, 19 nt, Artificial Sequence
  Description of Artificial Sequence: Synthetic oligonucleotide
  Sense strand starting at position 2905 of SEQ ID NO: 1564151
cagauagcucguugauaug

SEQ ID NO: 1858512 - RNA, 19 nt, Artificial Sequence
  Description of Artificial Sequence: Synthetic oligonucleotide
  Antisense strand to SEQ ID NO: 1858511
cauaucaacgagcuaucug

SEQ ID NO: 1858513 - RNA, 19 nt, Artificial Sequence
  Description of Artificial Sequence: Synthetic oligonucleotide
  Sense strand starting at position 3050 of SEQ ID NO: 1564151
acgagcaauuuacaaggau

SEQ ID NO: 1858514 - RNA, 19 nt, Artificial Sequence
  Description of Artificial Sequence: Synthetic oligonucleotide
  Antisense strand to SEQ ID NO: 1858513
auccuuguaaauugcucgu

SEQ ID NO: 1858515 - RNA, 19 nt, Artificial Sequence
  Description of Artificial Sequence: Synthetic oligonucleotide
  Sense strand starting at position 3174 of SEQ ID NO: 1564151
uuaccugaugauuagcgau

SEQ ID NO: 1858516 - RNA, 19 nt, Artificial Sequence
  Description of Artificial Sequence: Synthetic oligonucleotide
  Antisense strand to SEQ ID NO: 1858515
aucgcuaaucaucagguaa

SEQ ID NO: 1858517 - RNA, 19 nt, Artificial Sequence
  Description of Artificial Sequence: Synthetic oligonucleotide
  Sense strand starting at position 3184 of SEQ ID NO: 1564151
auuagcgauuuagaauacu

SEQ ID NO: 1858518 - RNA, 19 nt, Artificial Sequence
  Description of Artificial Sequence: Synthetic oligonucleotide
  Antisense strand to SEQ ID NO: 1858517
aguauucuaaaucgcuaau

SEQ ID NO: 1858519 - RNA, 19 nt, Artificial Sequence
  Description of Artificial Sequence: Synthetic oligonucleotide
  Sense strand starting at position 3241 of SEQ ID NO: 1564151
agaaaugucuacucagcuc

SEQ ID NO: 1858520 - RNA, 19 nt, Artificial Sequence
  Description of Artificial Sequence: Synthetic oligonucleotide
  Antisense strand to SEQ ID NO: 1858519
gagcugaguagacauuucu

SEQ ID NO: 1858521 - RNA, 19 nt, Artificial Sequence
  Description of Artificial Sequence: Synthetic oligonucleotide
  Sense strand starting at position 3294 of SEQ ID NO: 1564151
uuacuauugaguuguugga

SEQ ID NO: 1858522 - RNA, 19 nt, Artificial Sequence
  Description of Artificial Sequence: Synthetic oligonucleotide
  Antisense strand to SEQ ID NO: 1858521
uccaacaacucaauaguaa

SEQ ID NO: 1858523 - RNA, 19 nt, Artificial Sequence
  Description of Artificial Sequence: Synthetic oligonucleotide
  Sense strand starting at position 3296 of SEQ ID NO: 1564151
acuauugaguuguuggaau

SEQ ID NO: 1858524 - RNA, 19 nt, Artificial Sequence
  Description of Artificial Sequence: Synthetic oligonucleotide
  Antisense strand to SEQ ID NO: 1858523
auuccaacaacucaauagu

SEQ ID NO: 1858525 - RNA, 19 nt, Artificial Sequence
  Description of Artificial Sequence: Synthetic oligonucleotide
  Sense strand starting at position 3307 of SEQ ID NO: 1564151
guuggaauuucuuacauau

SEQ ID NO: 1858526 - RNA, 19 nt, Artificial Sequence
  Description of Artificial Sequence: Synthetic oligonucleotide
  Antisense strand to SEQ ID NO: 1858525
auauguaagaaauuccaac

SEQ ID NO: 1858527 - RNA, 19 nt, Artificial Sequence
  Description of Artificial Sequence: Synthetic oligonucleotide
  Sense strand starting at position 3332 of SEQ ID NO: 1564151
uauuaaucccgucaguuga

SEQ ID NO: 1858528 - RNA, 19 nt, Artificial Sequence
  Description of Artificial Sequence: Synthetic oligonucleotide
  Antisense strand to SEQ ID NO: 1858527
ucaacugacgggauuaaua

SEQ ID NO: 1858529 - RNA, 19 nt, Artificial Sequence
  Description of Artificial Sequence: Synthetic oligonucleotide
  Sense strand starting at position 3334 of SEQ ID NO: 1564151
uuaaucccgucaguugaau

SEQ ID NO: 1858530 - RNA, 19 nt, Artificial Sequence
  Description of Artificial Sequence: Synthetic oligonucleotide
  Antisense strand to SEQ ID NO: 1858529
auucaacugacgggauuaa

SEQ ID NO: 1858531 - RNA, 19 nt, Artificial Sequence
  Description of Artificial Sequence: Synthetic oligonucleotide
  Sense strand starting at position 3343 of SEQ ID NO: 1564151
ucaguugaauacuuuguaa

SEQ ID NO: 1858532 - RNA, 19 nt, Artificial Sequence
  Description of Artificial Sequence: Synthetic oligonucleotide
  Antisense strand to SEQ ID NO: 1858531
uuacaaaguauucaacuga

SEQ ID NO: 1858533 - RNA, 19 nt, Artificial Sequence
  Description of Artificial Sequence: Synthetic oligonucleotide
  Sense strand starting at position 3487 of SEQ ID NO: 1564151
ucaagaaaucguugcucag

SEQ ID NO: 1858534 - RNA, 19 nt, Artificial Sequence
  Description of Artificial Sequence: Synthetic oligonucleotide
  Antisense strand to SEQ ID NO: 1858533
cugagcaacgauuucuuga

SEQ ID NO: 1858535 - RNA, 19 nt, Artificial Sequence
  Description of Artificial Sequence: Synthetic oligonucleotide
  Sense strand starting at position 3489 of SEQ ID NO: 1564151
aagaaaucguugcucagac

SEQ ID NO: 1858536 - RNA, 19 nt, Artificial Sequence
  Description of Artificial Sequence: Synthetic oligonucleotide
  Antisense strand to SEQ ID NO: 1858535
gucugagcaacgauuucuu

SEQ ID NO: 1858537 - RNA, 19 nt, Artificial Sequence
  Description of Artificial Sequence: Synthetic oligonucleotide
  Sense strand starting at position 3491 of SEQ ID NO: 1564151
gaaaucguugcucagacca

SEQ ID NO: 1858538 - RNA, 19 nt, Artificial Sequence
  Description of Artificial Sequence: Synthetic oligonucleotide
  Antisense strand to SEQ ID NO: 1858537
uggucugagcaacgauuuc

SEQ ID NO: 1858539 - RNA, 19 nt, Artificial Sequence
  Description of Artificial Sequence: Synthetic oligonucleotide
  Sense strand starting at position 3505 of SEQ ID NO: 1564151
gaccaauguccugaagcuu

SEQ ID NO: 1858540 - RNA, 19 nt, Artificial Sequence
  Description of Artificial Sequence: Synthetic oligonucleotide
  Antisense strand to SEQ ID NO: 1858539
aagcuucaggacauugguc

SEQ ID NO: 1858541 - RNA, 19 nt, Artificial Sequence
  Description of Artificial Sequence: Synthetic oligonucleotide
  Sense strand starting at position 3613 of SEQ ID NO: 1564151
agagauagauaugucuagu

SEQ ID NO: 1858542 - RNA, 19 nt, Artificial Sequence
  Description of Artificial Sequence: Synthetic oligonucleotide
  Antisense strand to SEQ ID NO: 1858541
acuagacauaucuaucucu

SEQ ID NO: 1858543 - RNA, 19 nt, Artificial Sequence
  Description of Artificial Sequence: Synthetic oligonucleotide
  Sense strand starting at position 3616 of SEQ ID NO: 1564151
gauagauaugucuaguuuc

SEQ ID NO: 1858544 - RNA, 19 nt, Artificial Sequence
  Description of Artificial Sequence: Synthetic oligonucleotide
  Antisense strand to SEQ ID NO: 1858543
gaaacuagacauaucuauc

SEQ ID NO: 1858545 - RNA, 19 nt, Artificial Sequence
  Description of Artificial Sequence: Synthetic oligonucleotide
  Sense strand starting at position 11 of SEQ ID NO: 1564152
cucaauuuauucuguguau

SEQ ID NO: 1858546 - RNA, 19 nt, Artificial Sequence
  Description of Artificial Sequence: Synthetic oligonucleotide
  Antisense strand to SEQ ID NO: 1858545
auacacagaauaaauugag

SEQ ID NO: 1858547 - RNA, 19 nt, Artificial Sequence
  Description of Artificial Sequence: Synthetic oligonucleotide
  Sense strand starting at position 40 of SEQ ID NO: 1564152
gccacaagcucucugauag

SEQ ID NO: 1858548 - RNA, 19 nt, Artificial Sequence
  Description of Artificial Sequence: Synthetic oligonucleotide
  Antisense strand to SEQ ID NO: 1858547
cuaucagagagcuuguggc

SEQ ID NO: 1858549 - RNA, 19 nt, Artificial Sequence
  Description of Artificial Sequence: Synthetic oligonucleotide
  Sense strand starting at position 131 of SEQ ID NO: 1564152
gcaugucauguacacacaa

SEQ ID NO: 1858550 - RNA, 19 nt, Artificial Sequence
  Description of Artificial Sequence: Synthetic oligonucleotide
  Antisense strand to SEQ ID NO: 1858549
uuguguguacaugacaugc

SEQ ID NO: 1858551 - RNA, 19 nt, Artificial Sequence
  Description of Artificial Sequence: Synthetic oligonucleotide
  Sense strand starting at position 380 of SEQ ID NO: 1564152
uuggcuuccacuuggugaa

SEQ ID NO: 1858552 - RNA, 19 nt, Artificial Sequence
  Description of Artificial Sequence: Synthetic oligonucleotide
  Antisense strand to SEQ ID NO: 1858551
uucaccaaguggaagccaa

SEQ ID NO: 1858553 - RNA, 19 nt, Artificial Sequence
  Description of Artificial Sequence: Synthetic oligonucleotide
  Sense strand starting at position 381 of SEQ ID NO: 1564152
uggcuuccacuuggugaau

SEQ ID NO: 1858554 - RNA, 19 nt, Artificial Sequence
  Description of Artificial Sequence: Synthetic oligonucleotide
  Antisense strand to SEQ ID NO: 1858553
auucaccaaguggaagcca

SEQ ID NO: 1858555 - RNA, 19 nt, Artificial Sequence
  Description of Artificial Sequence: Synthetic oligonucleotide
  Sense strand starting at position 1827 of SEQ ID NO: 1564152
gaggguaggauccguagau

SEQ ID NO: 1858556 - RNA, 19 nt, Artificial Sequence
  Description of Artificial Sequence: Synthetic oligonucleotide
  Antisense strand to SEQ ID NO: 1858555
aucuacggauccuacccuc

SEQ ID NO: 1858557 - RNA, 19 nt, Artificial Sequence
  Description of Artificial Sequence: Synthetic oligonucleotide
  Sense strand starting at position 1829 of SEQ ID NO: 1564152
ggguaggauccguagauga

SEQ ID NO: 1858558 - RNA, 19 nt, Artificial Sequence
  Description of Artificial Sequence: Synthetic oligonucleotide
  Antisense strand to SEQ ID NO: 1858557
ucaucuacggauccuaccc

SEQ ID NO: 1858559 - RNA, 19 nt, Artificial Sequence
  Description of Artificial Sequence: Synthetic oligonucleotide
  Sense strand starting at position 2143 of SEQ ID NO: 1564152
uuuccaaauccggaguagu

SEQ ID NO: 1858560 - RNA, 19 nt, Artificial Sequence
  Description of Artificial Sequence: Synthetic oligonucleotide
  Antisense strand to SEQ ID NO: 1858559
acuacuccggauuuggaaa

SEQ ID NO: 1858561 - RNA, 19 nt, Artificial Sequence
  Description of Artificial Sequence: Synthetic oligonucleotide
  Sense strand starting at position 2330 of SEQ ID NO: 1564152
gucccaugcccuuauggau

SEQ ID NO: 1858562 - RNA, 19 nt, Artificial Sequence
  Description of Artificial Sequence: Synthetic oligonucleotide
  Antisense strand to SEQ ID NO: 1858561
auccauaagggcaugggac

SEQ ID NO: 1858563 - RNA, 19 nt, Artificial Sequence
  Description of Artificial Sequence: Synthetic oligonucleotide
  Sense strand starting at position 2362 of SEQ ID NO: 1564152
guaaauaugucuuuccucu

SEQ ID NO: 1858564 - RNA, 19 nt, Artificial Sequence
  Description of Artificial Sequence: Synthetic oligonucleotide
  Antisense strand to SEQ ID NO: 1858563
agaggaaagacauauuuac

SEQ ID NO: 1858565 - RNA, 19 nt, Artificial Sequence
  Description of Artificial Sequence: Synthetic oligonucleotide
  Sense strand starting at position 2418 of SEQ ID NO: 1564152
uaugguaagucugccauuu

SEQ ID NO: 1858566 - RNA, 19 nt, Artificial Sequence
  Description of Artificial Sequence: Synthetic oligonucleotide
  Antisense strand to SEQ ID NO: 1858565
aaauggcagacuuaccaua

SEQ ID NO: 1858567 - RNA, 19 nt, Artificial Sequence
  Description of Artificial Sequence: Synthetic oligonucleotide
  Sense strand starting at position 2465 of SEQ ID NO: 1564152
acugauauuuccuggcauu

SEQ ID NO: 1858568 - RNA, 19 nt, Artificial Sequence
  Description of Artificial Sequence: Synthetic oligonucleotide
  Antisense strand to SEQ ID NO: 1858567
aaugccaggaaauaucagu

SEQ ID NO: 1858569 - RNA, 19 nt, Artificial Sequence
  Description of Artificial Sequence: Synthetic oligonucleotide
  Sense strand starting at position 2527 of SEQ ID NO: 1564152
gcaagauaauugcauguac

SEQ ID NO: 1858570 - RNA, 19 nt, Artificial Sequence
  Description of Artificial Sequence: Synthetic oligonucleotide
  Antisense strand to SEQ ID NO: 1858569
guacaugcaauuaucuugc

SEQ ID NO: 1858571 - RNA, 19 nt, Artificial Sequence
  Description of Artificial Sequence: Synthetic oligonucleotide
  Sense strand starting at position 2548 of SEQ ID NO: 1564152
cgugaacacuaucuacauu

SEQ ID NO: 1858572 - RNA, 19 nt, Artificial Sequence
  Description of Artificial Sequence: Synthetic oligonucleotide
  Antisense strand to SEQ ID NO: 1858571
aauguagauaguguucacg

SEQ ID NO: 1858573 - RNA, 19 nt, Artificial Sequence
  Description of Artificial Sequence: Synthetic oligonucleotide
  Sense strand starting at position 2781 of SEQ ID NO: 1564152
uugagcaccuguuacauau

SEQ ID NO: 1858574 - RNA, 19 nt, Artificial Sequence
  Description of Artificial Sequence: Synthetic oligonucleotide
  Antisense strand to SEQ ID NO: 1858573
auauguaacaggugcucaa

SEQ ID NO: 1858575 - RNA, 19 nt, Artificial Sequence
  Description of Artificial Sequence: Synthetic oligonucleotide
  Sense strand starting at position 2862 of SEQ ID NO: 1564152
cugggcauuugacauaaua

SEQ ID NO: 1858576 - RNA, 19 nt, Artificial Sequence
  Description of Artificial Sequence: Synthetic oligonucleotide
  Antisense strand to SEQ ID NO: 1858575
uauuaugucaaaugcccag

SEQ ID NO: 1858577 - RNA, 19 nt, Artificial Sequence
  Description of Artificial Sequence: Synthetic oligonucleotide
  Sense strand starting at position 2899 of SEQ ID NO: 1564152
aucagaucuauguaucgga

SEQ ID NO: 1858578 - RNA, 19 nt, Artificial Sequence
  Description of Artificial Sequence: Synthetic oligonucleotide
  Antisense strand to SEQ ID NO: 1858577
uccgauacauagaucugau

SEQ ID NO: 1858579 - RNA, 19 nt, Artificial Sequence
  Description of Artificial Sequence: Synthetic oligonucleotide
  Sense strand starting at position 2902 of SEQ ID NO: 1564152
agaucuauguaucggaaua

SEQ ID NO: 1858580 - RNA, 19 nt, Artificial Sequence
  Description of Artificial Sequence: Synthetic oligonucleotide
  Antisense strand to SEQ ID NO: 1858579
uauuccgauacauagaucu

SEQ ID NO: 1858581 - RNA, 19 nt, Artificial Sequence
  Description of Artificial Sequence: Synthetic oligonucleotide
  Sense strand starting at position 2904 of SEQ ID NO: 1564152
aucuauguaucggaauaga

SEQ ID NO: 1858582 - RNA, 19 nt, Artificial Sequence
  Description of Artificial Sequence: Synthetic oligonucleotide
  Antisense strand to SEQ ID NO: 1858581
ucuauuccgauacauagau

SEQ ID NO: 1858583 - RNA, 19 nt, Artificial Sequence
  Description of Artificial Sequence: Synthetic oligonucleotide
  Sense strand starting at position 2981 of SEQ ID NO: 1564152
guggagaaacguuggguau

SEQ ID NO: 1858584 - RNA, 19 nt, Artificial Sequence
  Description of Artificial Sequence: Synthetic oligonucleotide
  Antisense strand to SEQ ID NO: 1858583
auacccaacguuucuccac

SEQ ID NO: 1858585 - RNA, 19 nt, Artificial Sequence
  Description of Artificial Sequence: Synthetic oligonucleotide
  Sense strand starting at position 2982 of SEQ ID NO: 1564152
uggagaaacguuggguauu

SEQ ID NO: 1858586 - RNA, 19 nt, Artificial Sequence
  Description of Artificial Sequence: Synthetic oligonucleotide
  Antisense strand to SEQ ID NO: 1858585
aauacccaacguuucucca

SEQ ID NO: 1858587 - RNA, 19 nt, Artificial Sequence
  Description of Artificial Sequence: Synthetic oligonucleotide
  Sense strand starting at position 2983 of SEQ ID NO: 1564152
ggagaaacguuggguauuc

SEQ ID NO: 1858588 - RNA, 19 nt, Artificial Sequence
  Description of Artificial Sequence: Synthetic oligonucleotide
  Antisense strand to SEQ ID NO: 1858587
gaauacccaacguuucucc

SEQ ID NO: 1858589 - RNA, 19 nt, Artificial Sequence
  Description of Artificial Sequence: Synthetic oligonucleotide
  Sense strand starting at position 2984 of SEQ ID NO: 1564152
gagaaacguuggguauucu

SEQ ID NO: 1858590 - RNA, 19 nt, Artificial Sequence
  Description of Artificial Sequence: Synthetic oligonucleotide
  Antisense strand to SEQ ID NO: 1858589
agaauacccaacguuucuc

SEQ ID NO: 1858591 - RNA, 19 nt, Artificial Sequence
  Description of Artificial Sequence: Synthetic oligonucleotide
  Sense strand starting at position 2988 of SEQ ID NO: 1564152
aacguuggguauucuuuaa

SEQ ID NO: 1858592 - RNA, 19 nt, Artificial Sequence
  Description of Artificial Sequence: Synthetic oligonucleotide
  Antisense strand to SEQ ID NO: 1858591
uuaaagaauacccaacguu

SEQ ID NO: 1858593 - RNA, 19 nt, Artificial Sequence
  Description of Artificial Sequence: Synthetic oligonucleotide
  Sense strand starting at position 2995 of SEQ ID NO: 1564152
gguauucuuuaaggaaugu

SEQ ID NO: 1858594 - RNA, 19 nt, Artificial Sequence
  Description of Artificial Sequence: Synthetic oligonucleotide
  Antisense strand to SEQ ID NO: 1858593
acauuccuuaaagaauacc

SEQ ID NO: 1858595 - RNA, 19 nt, Artificial Sequence
  Description of Artificial Sequence: Synthetic oligonucleotide
  Sense strand starting at position 2999 of SEQ ID NO: 1564152
uucuuuaaggaauguugaa

SEQ ID NO: 1858596 - RNA, 19 nt, Artificial Sequence
  Description of Artificial Sequence: Synthetic oligonucleotide
  Antisense strand to SEQ ID NO: 1858595
uucaacauuccuuaaagaa

SEQ ID NO: 1858597 - RNA, 19 nt, Artificial Sequence
  Description of Artificial Sequence: Synthetic oligonucleotide
  Sense strand starting at position 3036 of SEQ ID NO: 1564152
ugagaaagguuguauacua

SEQ ID NO: 1858598 - RNA, 19 nt, Artificial Sequence
  Description of Artificial Sequence: Synthetic oligonucleotide
  Antisense strand to SEQ ID NO: 1858597
uaguauacaaccuuucuca

SEQ ID NO: 1858599 - RNA, 19 nt, Artificial Sequence
  Description of Artificial Sequence: Synthetic oligonucleotide
  Sense strand starting at position 3041 of SEQ ID NO: 1564152
aagguuguauacuaauguu

SEQ ID NO: 1858600 - RNA, 19 nt, Artificial Sequence
  Description of Artificial Sequence: Synthetic oligonucleotide
  Antisense strand to SEQ ID NO: 1858599
aacauuaguauacaaccuu

SEQ ID NO: 1858601 - RNA, 19 nt, Artificial Sequence
  Description of Artificial Sequence: Synthetic oligonucleotide
  Sense strand starting at position 3049 of SEQ ID NO: 1564152
auacuaauguuguaccagu

SEQ ID NO: 1858602 - RNA, 19 nt, Artificial Sequence
  Description of Artificial Sequence: Synthetic oligonucleotide
  Antisense strand to SEQ ID NO: 1858601
acugguacaacauuaguau

SEQ ID NO: 1858603 - RNA, 19 nt, Artificial Sequence
  Description of Artificial Sequence: Synthetic oligonucleotide
  Sense strand starting at position 3058 of SEQ ID NO: 1564152
uuguaccaguaucaauauu

SEQ ID NO: 1858604 - RNA, 19 nt, Artificial Sequence
  Description of Artificial Sequence: Synthetic oligonucleotide
  Antisense strand to SEQ ID NO: 1858603
aauauugauacugguacaa

SEQ ID NO: 1858605 - RNA, 19 nt, Artificial Sequence
  Description of Artificial Sequence: Synthetic oligonucleotide
  Sense strand starting at position 3161 of SEQ ID NO: 1564152
gcuuaaugguaucuuucuu

SEQ ID NO: 1858606 - RNA, 19 nt, Artificial Sequence
  Description of Artificial Sequence: Synthetic oligonucleotide
  Antisense strand to SEQ ID NO: 1858605
aagaaagauaccauuaagc

SEQ ID NO: 1858607 - RNA, 19 nt, Artificial Sequence
  Description of Artificial Sequence: Synthetic oligonucleotide
  Sense strand starting at position 3182 of SEQ ID NO: 1564152
ucagauacuuaugguauuu

SEQ ID NO: 1858608 - RNA, 19 nt, Artificial Sequence
  Description of Artificial Sequence: Synthetic oligonucleotide
  Antisense strand to SEQ ID NO: 1858607
aaauaccauaaguaucuga

SEQ ID NO: 1858609 - RNA, 19 nt, Artificial Sequence
  Description of Artificial Sequence: Synthetic oligonucleotide
  Sense strand starting at position 3184 of SEQ ID NO: 1564152
agauacuuaugguauuuga

SEQ ID NO: 1858610 - RNA, 19 nt, Artificial Sequence
  Description of Artificial Sequence: Synthetic oligonucleotide
  Antisense strand to SEQ ID NO: 1858609
ucaaauaccauaaguaucu

SEQ ID NO: 1858611 - RNA, 19 nt, Artificial Sequence
  Description of Artificial Sequence: Synthetic oligonucleotide
  Sense strand starting at position 3209 of SEQ ID NO: 1564152
ggaugagucggauguuaac

SEQ ID NO: 1858612 - RNA, 19 nt, Artificial Sequence
  Description of Artificial Sequence: Synthetic oligonucleotide
  Antisense strand to SEQ ID NO: 1858611
guuaacauccgacucaucc

SEQ ID NO: 1858613 - RNA, 19 nt, Artificial Sequence
  Description of Artificial Sequence: Synthetic oligonucleotide
  Sense strand starting at position 3212 of SEQ ID NO: 1564152
ugagucggauguuaacaga

SEQ ID NO: 1858614 - RNA, 19 nt, Artificial Sequence
  Description of Artificial Sequence: Synthetic oligonucleotide
  Antisense strand to SEQ ID NO: 1858613
ucuguuaacauccgacuca

SEQ ID NO: 1858615 - RNA, 19 nt, Artificial Sequence
  Description of Artificial Sequence: Synthetic oligonucleotide
  Sense strand starting at position 3215 of SEQ ID NO: 1564152
gucggauguuaacagaaca

SEQ ID NO: 1858616 - RNA, 19 nt, Artificial Sequence
  Description of Artificial Sequence: Synthetic oligonucleotide
  Antisense strand to SEQ ID NO: 1858615
uguucuguuaacauccgac

SEQ ID NO: 1858617 - RNA, 19 nt, Artificial Sequence
  Description of Artificial Sequence: Synthetic oligonucleotide
  Sense strand starting at position 3295 of SEQ ID NO: 1564152
cagucaaaguaugaaagaa

SEQ ID NO: 1858618 - RNA, 19 nt, Artificial Sequence
  Description of Artificial Sequence: Synthetic oligonucleotide
  Antisense strand to SEQ ID NO: 1858617
uucuuucauacuuugacug

SEQ ID NO: 1858619 - RNA, 19 nt, Artificial Sequence
  Description of Artificial Sequence: Synthetic oligonucleotide
  Sense strand starting at position 3356 of SEQ ID NO: 1564152
auaucuagugcugaugcaa

SEQ ID NO: 1858620 - RNA, 19 nt, Artificial Sequence
  Description of Artificial Sequence: Synthetic oligonucleotide
  Antisense strand to SEQ ID NO: 1858619
uugcaucagcacuagauau

SEQ ID NO: 1858621 - RNA, 19 nt, Artificial Sequence
  Description of Artificial Sequence: Synthetic oligonucleotide
  Sense strand starting at position 3364 of SEQ ID NO: 1564152
ugcugaugcaagugaaagu

SEQ ID NO: 1858622 - RNA, 19 nt, Artificial Sequence
  Description of Artificial Sequence: Synthetic oligonucleotide
  Antisense strand to SEQ ID NO: 1858621
acuuucacuugcaucagca

SEQ ID NO: 1858623 - RNA, 19 nt, Artificial Sequence
  Description of Artificial Sequence: Synthetic oligonucleotide
  Sense strand starting at position 3365 of SEQ ID NO: 1564152
gcugaugcaagugaaaguu

SEQ ID NO: 1858624 - RNA, 19 nt, Artificial Sequence
  Description of Artificial Sequence: Synthetic oligonucleotide
  Antisense strand to SEQ ID NO: 1858623
aacuuucacuugcaucagc

SEQ ID NO: 1858625 - RNA, 19 nt, Artificial Sequence
  Description of Artificial Sequence: Synthetic oligonucleotide
  Sense strand starting at position 1 of SEQ ID NO: 1564153
cucaauuuauucuguguau

SEQ ID NO: 1858626 - RNA, 19 nt, Artificial Sequence
  Description of Artificial Sequence: Synthetic oligonucleotide
  Antisense strand to SEQ ID NO: 1858625
auacacagaauaaauugag

SEQ ID NO: 1858627 - RNA, 19 nt, Artificial Sequence
  Description of Artificial Sequence: Synthetic oligonucleotide
  Sense strand starting at position 30 of SEQ ID NO: 1564153
gccacaagcucucugauag

SEQ ID NO: 1858628 - RNA, 19 nt, Artificial Sequence
  Description of Artificial Sequence: Synthetic oligonucleotide
  Antisense strand to SEQ ID NO: 1858627
cuaucagagagcuuguggc

SEQ ID NO: 1858629 - RNA, 19 nt, Artificial Sequence
  Description of Artificial Sequence: Synthetic oligonucleotide
  Sense strand starting at position 121 of SEQ ID NO: 1564153
gcaugucauguacacacaa

SEQ ID NO: 1858630 - RNA, 19 nt, Artificial Sequence
  Description of Artificial Sequence: Synthetic oligonucleotide
  Antisense strand to SEQ ID NO: 1858629
uuguguguacaugacaugc

SEQ ID NO: 1858631 - RNA, 19 nt, Artificial Sequence
  Description of Artificial Sequence: Synthetic oligonucleotide
  Sense strand starting at position 370 of SEQ ID NO: 1564153
uuggcuuccacuuggugaa

SEQ ID NO: 1858632 - RNA, 19 nt, Artificial Sequence
  Description of Artificial Sequence: Synthetic oligonucleotide
  Antisense strand to SEQ ID NO: 1858631
uucaccaaguggaagccaa

SEQ ID NO: 1858633 - RNA, 19 nt, Artificial Sequence
  Description of Artificial Sequence: Synthetic oligonucleotide
  Sense strand starting at position 371 of SEQ ID NO: 1564153
uggcuuccacuuggugaau

SEQ ID NO: 1858634 - RNA, 19 nt, Artificial Sequence
  Description of Artificial Sequence: Synthetic oligonucleotide
  Antisense strand to SEQ ID NO: 1858633
auucaccaaguggaagcca

SEQ ID NO: 1858635 - RNA, 19 nt, Artificial Sequence
  Description of Artificial Sequence: Synthetic oligonucleotide
  Sense strand starting at position 1817 of SEQ ID NO: 1564153
gaggguaggauccguagau

SEQ ID NO: 1858636 - RNA, 19 nt, Artificial Sequence
  Description of Artificial Sequence: Synthetic oligonucleotide
  Antisense strand to SEQ ID NO: 1858635
aucuacggauccuacccuc

SEQ ID NO: 1858637 - RNA, 19 nt, Artificial Sequence
  Description of Artificial Sequence: Synthetic oligonucleotide
  Sense strand starting at position 1819 of SEQ ID NO: 1564153
ggguaggauccguagauga

SEQ ID NO: 1858638 - RNA, 19 nt, Artificial Sequence
  Description of Artificial Sequence: Synthetic oligonucleotide
  Antisense strand to SEQ ID NO: 1858637
ucaucuacggauccuaccc

SEQ ID NO: 1858639 - RNA, 19 nt, Artificial Sequence
  Description of Artificial Sequence: Synthetic oligonucleotide
  Sense strand starting at position 2133 of SEQ ID NO: 1564153
uuuccaaauccggaguagu

SEQ ID NO: 1858640 - RNA, 19 nt, Artificial Sequence
  Description of Artificial Sequence: Synthetic oligonucleotide
  Antisense strand to SEQ ID NO: 1858639
acuacuccggauuuggaaa

SEQ ID NO: 1858641 - RNA, 19 nt, Artificial Sequence
  Description of Artificial Sequence: Synthetic oligonucleotide
  Sense strand starting at position 2320 of SEQ ID NO: 1564153
gucccaugcccuuauggau

SEQ ID NO: 1858642 - RNA, 19 nt, Artificial Sequence
  Description of Artificial Sequence: Synthetic oligonucleotide
  Antisense strand to SEQ ID NO: 1858641
auccauaagggcaugggac

SEQ ID NO: 1858643 - RNA, 19 nt, Artificial Sequence
  Description of Artificial Sequence: Synthetic oligonucleotide
  Sense strand starting at position 2352 of SEQ ID NO: 1564153
guaaauaugucuuuccucu

SEQ ID NO: 1858644 - RNA, 19 nt, Artificial Sequence
  Description of Artificial Sequence: Synthetic oligonucleotide
  Antisense strand to SEQ ID NO: 1858643
agaggaaagacauauuuac

SEQ ID NO: 1858645 - RNA, 19 nt, Artificial Sequence
  Description of Artificial Sequence: Synthetic oligonucleotide
  Sense strand starting at position 2408 of SEQ ID NO: 1564153
uaugguaagucugccauuu

SEQ ID NO: 1858646 - RNA, 19 nt, Artificial Sequence
  Description of Artificial Sequence: Synthetic oligonucleotide
  Antisense strand to SEQ ID NO: 1858645
aaauggcagacuuaccaua

SEQ ID NO: 1858647 - RNA, 19 nt, Artificial Sequence
  Description of Artificial Sequence: Synthetic oligonucleotide
  Sense strand starting at position 2455 of SEQ ID NO: 1564153
acugauauuuccuggcauu

SEQ ID NO: 1858648 - RNA, 19 nt, Artificial Sequence
  Description of Artificial Sequence: Synthetic oligonucleotide
  Antisense strand to SEQ ID NO: 1858647
aaugccaggaaauaucagu

SEQ ID NO: 1858649 - RNA, 19 nt, Artificial Sequence
  Description of Artificial Sequence: Synthetic oligonucleotide
  Sense strand starting at position 2517 of SEQ ID NO: 1564153
gcaagauaauugcauguac

SEQ ID NO: 1858650 - RNA, 19 nt, Artificial Sequence
  Description of Artificial Sequence: Synthetic oligonucleotide
  Antisense strand to SEQ ID NO: 1858649
guacaugcaauuaucuugc

SEQ ID NO: 1858651 - RNA, 19 nt, Artificial Sequence
  Description of Artificial Sequence: Synthetic oligonucleotide
  Sense strand starting at position 2538 of SEQ ID NO: 1564153
cgugaacacuaucuacauu

SEQ ID NO: 1858652 - RNA, 19 nt, Artificial Sequence
  Description of Artificial Sequence: Synthetic oligonucleotide
  Antisense strand to SEQ ID NO: 1858651
aauguagauaguguucacg

SEQ ID NO: 1858653 - RNA, 19 nt, Artificial Sequence
  Description of Artificial Sequence: Synthetic oligonucleotide
  Sense strand starting at position 2771 of SEQ ID NO: 1564153
uugagcaccuguuacauau

SEQ ID NO: 1858654 - RNA, 19 nt, Artificial Sequence
  Description of Artificial Sequence: Synthetic oligonucleotide
  Antisense strand to SEQ ID NO: 1858653
auauguaacaggugcucaa

SEQ ID NO: 1858655 - RNA, 19 nt, Artificial Sequence
  Description of Artificial Sequence: Synthetic oligonucleotide
  Sense strand starting at position 2852 of SEQ ID NO: 1564153
cugggcauuugacauaaua

SEQ ID NO: 1858656 - RNA, 19 nt, Artificial Sequence
  Description of Artificial Sequence: Synthetic oligonucleotide
  Antisense strand to SEQ ID NO: 1858655
uauuaugucaaaugcccag

SEQ ID NO: 1858657 - RNA, 19 nt, Artificial Sequence
  Description of Artificial Sequence: Synthetic oligonucleotide
  Sense strand starting at position 2889 of SEQ ID NO: 1564153
aucagaucuauguaucgga

SEQ ID NO: 1858658 - RNA, 19 nt, Artificial Sequence
  Description of Artificial Sequence: Synthetic oligonucleotide
  Antisense strand to SEQ ID NO: 1858657
uccgauacauagaucugau

SEQ ID NO: 1858659 - RNA, 19 nt, Artificial Sequence
  Description of Artificial Sequence: Synthetic oligonucleotide
  Sense strand starting at position 2892 of SEQ ID NO: 1564153
agaucuauguaucggaaua

SEQ ID NO: 1858660 - RNA, 19 nt, Artificial Sequence
  Description of Artificial Sequence: Synthetic oligonucleotide
  Antisense strand to SEQ ID NO: 1858659
uauuccgauacauagaucu

SEQ ID NO: 1858661 - RNA, 19 nt, Artificial Sequence
  Description of Artificial Sequence: Synthetic oligonucleotide
  Sense strand starting at position 2894 of SEQ ID NO: 1564153
aucuauguaucggaauaga

SEQ ID NO: 1858662 - RNA, 19 nt, Artificial Sequence
  Description of Artificial Sequence: Synthetic oligonucleotide
  Antisense strand to SEQ ID NO: 1858661
ucuauuccgauacauagau

SEQ ID NO: 1858663 - RNA, 19 nt, Artificial Sequence
  Description of Artificial Sequence: Synthetic oligonucleotide
  Sense strand starting at position 2971 of SEQ ID NO: 1564153
guggagaaacguuggguau

SEQ ID NO: 1858664 - RNA, 19 nt, Artificial Sequence
  Description of Artificial Sequence: Synthetic oligonucleotide
  Antisense strand to SEQ ID NO: 1858663
auacccaacguuucuccac

SEQ ID NO: 1858665 - RNA, 19 nt, Artificial Sequence
  Description of Artificial Sequence: Synthetic oligonucleotide
  Sense strand starting at position 2972 of SEQ ID NO: 1564153
uggagaaacguuggguauu

SEQ ID NO: 1858666 - RNA, 19 nt, Artificial Sequence
  Description of Artificial Sequence: Synthetic oligonucleotide
  Antisense strand to SEQ ID NO: 1858665
aauacccaacguuucucca

SEQ ID NO: 1858667 - RNA, 19 nt, Artificial Sequence
  Description of Artificial Sequence: Synthetic oligonucleotide
  Sense strand starting at position 2973 of SEQ ID NO: 1564153
ggagaaacguuggguauuc

SEQ ID NO: 1858668 - RNA, 19 nt, Artificial Sequence
  Description of Artificial Sequence: Synthetic oligonucleotide
  Antisense strand to SEQ ID NO: 1858667
gaauacccaacguuucucc

SEQ ID NO: 1858669 - RNA, 19 nt, Artificial Sequence
  Description of Artificial Sequence: Synthetic oligonucleotide
  Sense strand starting at position 2974 of SEQ ID NO: 1564153
gagaaacguuggguauucu

SEQ ID NO: 1858670 - RNA, 19 nt, Artificial Sequence
  Description of Artificial Sequence: Synthetic oligonucleotide
  Antisense strand to SEQ ID NO: 1858669
agaauacccaacguuucuc

SEQ ID NO: 1858671 - RNA, 19 nt, Artificial Sequence
  Description of Artificial Sequence: Synthetic oligonucleotide
  Sense strand starting at position 2978 of SEQ ID NO: 1564153
aacguuggguauucuuuaa

SEQ ID NO: 1858672 - RNA, 19 nt, Artificial Sequence
  Description of Artificial Sequence: Synthetic oligonucleotide
  Antisense strand to SEQ ID NO: 1858671
uuaaagaauacccaacguu

SEQ ID NO: 1858673 - RNA, 19 nt, Artificial Sequence
  Description of Artificial Sequence: Synthetic oligonucleotide
  Sense strand starting at position 2985 of SEQ ID NO: 1564153
gguauucuuuaaggaaugu

SEQ ID NO: 1858674 - RNA, 19 nt, Artificial Sequence
  Description of Artificial Sequence: Synthetic oligonucleotide
  Antisense strand to SEQ ID NO: 1858673
acauuccuuaaagaauacc

SEQ ID NO: 1858675 - RNA, 19 nt, Artificial Sequence
  Description of Artificial Sequence: Synthetic oligonucleotide
  Sense strand starting at position 2989 of SEQ ID NO: 1564153
uucuuuaaggaauguugaa

SEQ ID NO: 1858676 - RNA, 19 nt, Artificial Sequence
  Description of Artificial Sequence: Synthetic oligonucleotide
  Antisense strand to SEQ ID NO: 1858675
uucaacauuccuuaaagaa

SEQ ID NO: 1858677 - RNA, 19 nt, Artificial Sequence
  Description of Artificial Sequence: Synthetic oligonucleotide
  Sense strand starting at position 3026 of SEQ ID NO: 1564153
ugagaaagguuguauacua

SEQ ID NO: 1858678 - RNA, 19 nt, Artificial Sequence
  Description of Artificial Sequence: Synthetic oligonucleotide
  Antisense strand to SEQ ID NO: 1858677
uaguauacaaccuuucuca

SEQ ID NO: 1858679 - RNA, 19 nt, Artificial Sequence
  Description of Artificial Sequence: Synthetic oligonucleotide
  Sense strand starting at position 3031 of SEQ ID NO: 1564153
aagguuguauacuaauguu

SEQ ID NO: 1858680 - RNA, 19 nt, Artificial Sequence
  Description of Artificial Sequence: Synthetic oligonucleotide
  Antisense strand to SEQ ID NO: 1858679
aacauuaguauacaaccuu

SEQ ID NO: 1858681 - RNA, 19 nt, Artificial Sequence
  Description of Artificial Sequence: Synthetic oligonucleotide
  Sense strand starting at position 3039 of SEQ ID NO: 1564153
auacuaauguuguaccagu

SEQ ID NO: 1858682 - RNA, 19 nt, Artificial Sequence
  Description of Artificial Sequence: Synthetic oligonucleotide
  Antisense strand to SEQ ID NO: 1858681
acugguacaacauuaguau

SEQ ID NO: 1858683 - RNA, 19 nt, Artificial Sequence
  Description of Artificial Sequence: Synthetic oligonucleotide
  Sense strand starting at position 3048 of SEQ ID NO: 1564153
uuguaccaguaucaauauu

SEQ ID NO: 1858684 - RNA, 19 nt, Artificial Sequence
  Description of Artificial Sequence: Synthetic oligonucleotide
  Antisense strand to SEQ ID NO: 1858683
aauauugauacugguacaa

SEQ ID NO: 1858685 - RNA, 19 nt, Artificial Sequence
  Description of Artificial Sequence: Synthetic oligonucleotide
  Sense strand starting at position 3151 of SEQ ID NO: 1564153
gcuuaaugguaucuuucuu

SEQ ID NO: 1858686 - RNA, 19 nt, Artificial Sequence
  Description of Artificial Sequence: Synthetic oligonucleotide
  Antisense strand to SEQ ID NO: 1858685
aagaaagauaccauuaagc

SEQ ID NO: 1858687 - RNA, 19 nt, Artificial Sequence
  Description of Artificial Sequence: Synthetic oligonucleotide
  Sense strand starting at position 3172 of SEQ ID NO: 1564153
ucagauacuuaugguauuu

SEQ ID NO: 1858688 - RNA, 19 nt, Artificial Sequence
  Description of Artificial Sequence: Synthetic oligonucleotide
  Antisense strand to SEQ ID NO: 1858687
aaauaccauaaguaucuga

SEQ ID NO: 1858689 - RNA, 19 nt, Artificial Sequence
  Description of Artificial Sequence: Synthetic oligonucleotide
  Sense strand starting at position 3174 of SEQ ID NO: 1564153
agauacuuaugguauuuga

SEQ ID NO: 1858690 - RNA, 19 nt, Artificial Sequence
  Description of Artificial Sequence: Synthetic oligonucleotide
  Antisense strand to SEQ ID NO: 1858689
ucaaauaccauaaguaucu

SEQ ID NO: 1858691 - RNA, 19 nt, Artificial Sequence
  Description of Artificial Sequence: Synthetic oligonucleotide
  Sense strand starting at position 3199 of SEQ ID NO: 1564153
ggaugagucggauguuaac

SEQ ID NO: 1858692 - RNA, 19 nt, Artificial Sequence
  Description of Artificial Sequence: Synthetic oligonucleotide
  Antisense strand to SEQ ID NO: 1858691
guuaacauccgacucaucc

SEQ ID NO: 1858693 - RNA, 19 nt, Artificial Sequence
  Description of Artificial Sequence: Synthetic oligonucleotide
  Sense strand starting at position 3202 of SEQ ID NO: 1564153
ugagucggauguuaacaga

SEQ ID NO: 1858694 - RNA, 19 nt, Artificial Sequence
  Description of Artificial Sequence: Synthetic oligonucleotide
  Antisense strand to SEQ ID NO: 1858693
ucuguuaacauccgacuca

SEQ ID NO: 1858695 - RNA, 19 nt, Artificial Sequence
  Description of Artificial Sequence: Synthetic oligonucleotide
  Sense strand starting at position 3205 of SEQ ID NO: 1564153
gucggauguuaacagaaca

SEQ ID NO: 1858696 - RNA, 19 nt, Artificial Sequence
  Description of Artificial Sequence: Synthetic oligonucleotide
  Antisense strand to SEQ ID NO: 1858695
uguucuguuaacauccgac

SEQ ID NO: 1858697 - RNA, 19 nt, Artificial Sequence
  Description of Artificial Sequence: Synthetic oligonucleotide
  Sense strand starting at position 3285 of SEQ ID NO: 1564153
cagucaaaguaugaaagaa

SEQ ID NO: 1858698 - RNA, 19 nt, Artificial Sequence
  Description of Artificial Sequence: Synthetic oligonucleotide
  Antisense strand to SEQ ID NO: 1858697
uucuuucauacuuugacug

SEQ ID NO: 1858699 - RNA, 19 nt, Artificial Sequence
  Description of Artificial Sequence: Synthetic oligonucleotide
  Sense strand starting at position 3346 of SEQ ID NO: 1564153
auaucuagugcugaugcaa

SEQ ID NO: 1858700 - RNA, 19 nt, Artificial Sequence
  Description of Artificial Sequence: Synthetic oligonucleotide
  Antisense strand to SEQ ID NO: 1858699
uugcaucagcacuagauau

SEQ ID NO: 1858701 - RNA, 19 nt, Artificial Sequence
  Description of Artificial Sequence: Synthetic oligonucleotide
  Sense strand starting at position 3354 of SEQ ID NO: 1564153
ugcugaugcaagugaaagu

SEQ ID NO: 1858702 - RNA, 19 nt, Artificial Sequence
  Description of Artificial Sequence: Synthetic oligonucleotide
  Antisense strand to SEQ ID NO: 1858701
acuuucacuugcaucagca

SEQ ID NO: 1858703 - RNA, 19 nt, Artificial Sequence
  Description of Artificial Sequence: Synthetic oligonucleotide
  Sense strand starting at position 3355 of SEQ ID NO: 1564153
gcugaugcaagugaaaguu

SEQ ID NO: 1858704 - RNA, 19 nt, Artificial Sequence
  Description of Artificial Sequence: Synthetic oligonucleotide
  Antisense strand to SEQ ID NO: 1858703
aacuuucacuugcaucagc

SEQ ID NO: 1858705 - RNA, 19 nt, Artificial Sequence
  Description of Artificial Sequence: Synthetic oligonucleotide
  Sense strand starting at position 6 of SEQ ID NO: 1564154
gccuaugguuagguacuaa

SEQ ID NO: 1858706 - RNA, 19 nt, Artificial Sequence
  Description of Artificial Sequence: Synthetic oligonucleotide
  Antisense strand to SEQ ID NO: 1858705
uuaguaccuaaccauaggc

SEQ ID NO: 1858707 - RNA, 19 nt, Artificial Sequence
  Description of Artificial Sequence: Synthetic oligonucleotide
  Sense strand starting at position 56 of SEQ ID NO: 1564154
acaguugagcaauagguga

SEQ ID NO: 1858708 - RNA, 19 nt, Artificial Sequence
  Description of Artificial Sequence: Synthetic oligonucleotide
  Antisense strand to SEQ ID NO: 1858707
ucaccuauugcucaacugu

SEQ ID NO: 1858709 - RNA, 19 nt, Artificial Sequence
  Description of Artificial Sequence: Synthetic oligonucleotide
  Sense strand starting at position 58 of SEQ ID NO: 1564154
aguugagcaauaggugaaa

SEQ ID NO: 1858710 - RNA, 19 nt, Artificial Sequence
  Description of Artificial Sequence: Synthetic oligonucleotide
  Antisense strand to SEQ ID NO: 1858709
uuucaccuauugcucaacu

SEQ ID NO: 1858711 - RNA, 19 nt, Artificial Sequence
  Description of Artificial Sequence: Synthetic oligonucleotide
  Sense strand starting at position 60 of SEQ ID NO: 1564154
uugagcaauaggugaaaga

SEQ ID NO: 1858712 - RNA, 19 nt, Artificial Sequence
  Description of Artificial Sequence: Synthetic oligonucleotide
  Antisense strand to SEQ ID NO: 1858711
ucuuucaccuauugcucaa

SEQ ID NO: 1858713 - RNA, 19 nt, Artificial Sequence
  Description of Artificial Sequence: Synthetic oligonucleotide
  Sense strand starting at position 235 of SEQ ID NO: 1564154
gccagucacaugggauauc

SEQ ID NO: 1858714 - RNA, 19 nt, Artificial Sequence
  Description of Artificial Sequence: Synthetic oligonucleotide
  Antisense strand to SEQ ID NO: 1858713
gauaucccaugugacuggc

SEQ ID NO: 1858715 - RNA, 19 nt, Artificial Sequence
  Description of Artificial Sequence: Synthetic oligonucleotide
  Sense strand starting at position 245 of SEQ ID NO: 1564154
ugggauaucucagcaagcu

SEQ ID NO: 1858716 - RNA, 19 nt, Artificial Sequence
  Description of Artificial Sequence: Synthetic oligonucleotide
  Antisense strand to SEQ ID NO: 1858715
agcuugcugagauauccca

SEQ ID NO: 1858717 - RNA, 19 nt, Artificial Sequence
  Description of Artificial Sequence: Synthetic oligonucleotide
  Sense strand starting at position 246 of SEQ ID NO: 1564154
gggauaucucagcaagcuu

SEQ ID NO: 1858718 - RNA, 19 nt, Artificial Sequence
  Description of Artificial Sequence: Synthetic oligonucleotide
  Antisense strand to SEQ ID NO: 1858717
aagcuugcugagauauccc

SEQ ID NO: 1858719 - RNA, 19 nt, Artificial Sequence
  Description of Artificial Sequence: Synthetic oligonucleotide
  Sense strand starting at position 365 of SEQ ID NO: 1564154
ugagccaauggaugucaga

SEQ ID NO: 1858720 - RNA, 19 nt, Artificial Sequence
  Description of Artificial Sequence: Synthetic oligonucleotide
  Antisense strand to SEQ ID NO: 1858719
ucugacauccauuggcuca

SEQ ID NO: 1858721 - RNA, 19 nt, Artificial Sequence
  Description of Artificial Sequence: Synthetic oligonucleotide
  Sense strand starting at position 404 of SEQ ID NO: 1564154
aguuaaauugcggagagga

SEQ ID NO: 1858722 - RNA, 19 nt, Artificial Sequence
  Description of Artificial Sequence: Synthetic oligonucleotide
  Antisense strand to SEQ ID NO: 1858721
uccucuccgcaauuuaacu

SEQ ID NO: 1858723 - RNA, 19 nt, Artificial Sequence
  Description of Artificial Sequence: Synthetic oligonucleotide
  Sense strand starting at position 554 of SEQ ID NO: 1564154
ucaagacuuucugugucua

SEQ ID NO: 1858724 - RNA, 19 nt, Artificial Sequence
  Description of Artificial Sequence: Synthetic oligonucleotide
  Antisense strand to SEQ ID NO: 1858723
uagacacagaaagucuuga

SEQ ID NO: 1858725 - RNA, 19 nt, Artificial Sequence
  Description of Artificial Sequence: Synthetic oligonucleotide
  Sense strand starting at position 558 of SEQ ID NO: 1564154
gacuuucugugucuacaga

SEQ ID NO: 1858726 - RNA, 19 nt, Artificial Sequence
  Description of Artificial Sequence: Synthetic oligonucleotide
  Antisense strand to SEQ ID NO: 1858725
ucuguagacacagaaaguc

SEQ ID NO: 1858727 - RNA, 19 nt, Artificial Sequence
  Description of Artificial Sequence: Synthetic oligonucleotide
  Sense strand starting at position 690 of SEQ ID NO: 1564154
uugcuucuaccugaugaau

SEQ ID NO: 1858728 - RNA, 19 nt, Artificial Sequence
  Description of Artificial Sequence: Synthetic oligonucleotide
  Antisense strand to SEQ ID NO: 1858727
auucaucagguagaagcaa

SEQ ID NO: 1858729 - RNA, 19 nt, Artificial Sequence
  Description of Artificial Sequence: Synthetic oligonucleotide
  Sense strand starting at position 702 of SEQ ID NO: 1564154
gaugaaugaccaugccagu

SEQ ID NO: 1858730 - RNA, 19 nt, Artificial Sequence
  Description of Artificial Sequence: Synthetic oligonucleotide
  Antisense strand to SEQ ID NO: 1858729
acuggcauggucauucauc

SEQ ID NO: 1858731 - RNA, 19 nt, Artificial Sequence
  Description of Artificial Sequence: Synthetic oligonucleotide
  Sense strand starting at position 741 of SEQ ID NO: 1564154
uggcguauuccaccuguuu

SEQ ID NO: 1858732 - RNA, 19 nt, Artificial Sequence
  Description of Artificial Sequence: Synthetic oligonucleotide
  Antisense strand to SEQ ID NO: 1858731
aaacagguggaauacgcca

SEQ ID NO: 1858733 - RNA, 19 nt, Artificial Sequence
  Description of Artificial Sequence: Synthetic oligonucleotide
  Sense strand starting at position 794 of SEQ ID NO: 1564154
cucucugccagaggagaau

SEQ ID NO: 1858734 - RNA, 19 nt, Artificial Sequence
  Description of Artificial Sequence: Synthetic oligonucleotide
  Antisense strand to SEQ ID NO: 1858733
auucuccucuggcagagag

SEQ ID NO: 1858735 - RNA, 19 nt, Artificial Sequence
  Description of Artificial Sequence: Synthetic oligonucleotide
  Sense strand starting at position 855 of SEQ ID NO: 1564154
caucuaagagcugguacau

SEQ ID NO: 1858736 - RNA, 19 nt, Artificial Sequence
  Description of Artificial Sequence: Synthetic oligonucleotide
  Antisense strand to SEQ ID NO: 1858735
auguaccagcucuuagaug

SEQ ID NO: 1858737 - RNA, 19 nt, Artificial Sequence
  Description of Artificial Sequence: Synthetic oligonucleotide
  Sense strand starting at position 964 of SEQ ID NO: 1564154
ggaaccuuccucugucuca

SEQ ID NO: 1858738 - RNA, 19 nt, Artificial Sequence
  Description of Artificial Sequence: Synthetic oligonucleotide
  Antisense strand to SEQ ID NO: 1858737
ugagacagaggaagguucc

SEQ ID NO: 1858739 - RNA, 19 nt, Artificial Sequence
  Description of Artificial Sequence: Synthetic oligonucleotide
  Sense strand starting at position 1024 of SEQ ID NO: 1564154
guguguaucacugauucua

SEQ ID NO: 1858740 - RNA, 19 nt, Artificial Sequence
  Description of Artificial Sequence: Synthetic oligonucleotide
  Antisense strand to SEQ ID NO: 1858739
uagaaucagugauacacac

SEQ ID NO: 1858741 - RNA, 19 nt, Artificial Sequence
  Description of Artificial Sequence: Synthetic oligonucleotide
  Sense strand starting at position 1026 of SEQ ID NO: 1564154
guguaucacugauucuaga

SEQ ID NO: 1858742 - RNA, 19 nt, Artificial Sequence
  Description of Artificial Sequence: Synthetic oligonucleotide
  Antisense strand to SEQ ID NO: 1858741
ucuagaaucagugauacac

SEQ ID NO: 1858743 - RNA, 19 nt, Artificial Sequence
  Description of Artificial Sequence: Synthetic oligonucleotide
  Sense strand starting at position 1160 of SEQ ID NO: 1564154
acagguaccugauccagaa

SEQ ID NO: 1858744 - RNA, 19 nt, Artificial Sequence
  Description of Artificial Sequence: Synthetic oligonucleotide
  Antisense strand to SEQ ID NO: 1858743
uucuggaucagguaccugu

SEQ ID NO: 1858745 - RNA, 19 nt, Artificial Sequence
  Description of Artificial Sequence: Synthetic oligonucleotide
  Sense strand starting at position 1452 of SEQ ID NO: 1564154
gcauaacacggagagcuuu

SEQ ID NO: 1858746 - RNA, 19 nt, Artificial Sequence
  Description of Artificial Sequence: Synthetic oligonucleotide
  Antisense strand to SEQ ID NO: 1858745
aaagcucuccguguuaugc

SEQ ID NO: 1858747 - RNA, 19 nt, Artificial Sequence
  Description of Artificial Sequence: Synthetic oligonucleotide
  Sense strand starting at position 1610 of SEQ ID NO: 1564154
ggugaaauacgaagcguuu

SEQ ID NO: 1858748 - RNA, 19 nt, Artificial Sequence
  Description of Artificial Sequence: Synthetic oligonucleotide
  Antisense strand to SEQ ID NO: 1858747
aaacgcuucguauuucacc

SEQ ID NO: 1858749 - RNA, 19 nt, Artificial Sequence
  Description of Artificial Sequence: Synthetic oligonucleotide
  Sense strand starting at position 1806 of SEQ ID NO: 1564154
ggaugauccauaggcaaug

SEQ ID NO: 1858750 - RNA, 19 nt, Artificial Sequence
  Description of Artificial Sequence: Synthetic oligonucleotide
  Antisense strand to SEQ ID NO: 1858749
cauugccuauggaucaucc

SEQ ID NO: 1858751 - RNA, 19 nt, Artificial Sequence
  Description of Artificial Sequence: Synthetic oligonucleotide
  Sense strand starting at position 1818 of SEQ ID NO: 1564154
ggcaaugagugucucuaag

SEQ ID NO: 1858752 - RNA, 19 nt, Artificial Sequence
  Description of Artificial Sequence: Synthetic oligonucleotide
  Antisense strand to SEQ ID NO: 1858751
cuuagagacacucauugcc

SEQ ID NO: 1858753 - RNA, 19 nt, Artificial Sequence
  Description of Artificial Sequence: Synthetic oligonucleotide
  Sense strand starting at position 1820 of SEQ ID NO: 1564154
caaugagugucucuaagag

SEQ ID NO: 1858754 - RNA, 19 nt, Artificial Sequence
  Description of Artificial Sequence: Synthetic oligonucleotide
  Antisense strand to SEQ ID NO: 1858753
cucuuagagacacucauug

SEQ ID NO: 1858755 - RNA, 19 nt, Artificial Sequence
  Description of Artificial Sequence: Synthetic oligonucleotide
  Sense strand starting at position 2380 of SEQ ID NO: 1564154
ugacccaaucuacguaauu

SEQ ID NO: 1858756 - RNA, 19 nt, Artificial Sequence
  Description of Artificial Sequence: Synthetic oligonucleotide
  Antisense strand to SEQ ID NO: 1858755
aauuacguagauuggguca

SEQ ID NO: 1858757 - RNA, 19 nt, Artificial Sequence
  Description of Artificial Sequence: Synthetic oligonucleotide
  Sense strand starting at position 2551 of SEQ ID NO: 1564154
cagggcucacagugaaaua

SEQ ID NO: 1858758 - RNA, 19 nt, Artificial Sequence
  Description of Artificial Sequence: Synthetic oligonucleotide
  Antisense strand to SEQ ID NO: 1858757
uauuucacugugagcccug

SEQ ID NO: 1858759 - RNA, 19 nt, Artificial Sequence
  Description of Artificial Sequence: Synthetic oligonucleotide
  Sense strand starting at position 2602 of SEQ ID NO: 1564154
ucuuacaaagcuuggauaa

SEQ ID NO: 1858760 - RNA, 19 nt, Artificial Sequence
  Description of Artificial Sequence: Synthetic oligonucleotide
  Antisense strand to SEQ ID NO: 1858759
uuauccaagcuuuguaaga

SEQ ID NO: 1858761 - RNA, 19 nt, Artificial Sequence
  Description of Artificial Sequence: Synthetic oligonucleotide
  Sense strand starting at position 2603 of SEQ ID NO: 1564154
cuuacaaagcuuggauaau

SEQ ID NO: 1858762 - RNA, 19 nt, Artificial Sequence
  Description of Artificial Sequence: Synthetic oligonucleotide
  Antisense strand to SEQ ID NO: 1858761
auuauccaagcuuuguaag

SEQ ID NO: 1858763 - RNA, 19 nt, Artificial Sequence
  Description of Artificial Sequence: Synthetic oligonucleotide
  Sense strand starting at position 2770 of SEQ ID NO: 1564154
ucagacguuuaauuguuaa

SEQ ID NO: 1858764 - RNA, 19 nt, Artificial Sequence
  Description of Artificial Sequence: Synthetic oligonucleotide
  Antisense strand to SEQ ID NO: 1858763
uuaacaauuaaacgucuga

SEQ ID NO: 1858765 - RNA, 19 nt, Artificial Sequence
  Description of Artificial Sequence: Synthetic oligonucleotide
  Sense strand starting at position 2880 of SEQ ID NO: 1564154
acaggaauuugugagauca

SEQ ID NO: 1858766 - RNA, 19 nt, Artificial Sequence
  Description of Artificial Sequence: Synthetic oligonucleotide
  Antisense strand to SEQ ID NO: 1858765
ugaucucacaaauuccugu

SEQ ID NO: 1858767 - RNA, 19 nt, Artificial Sequence
  Description of Artificial Sequence: Synthetic oligonucleotide
  Sense strand starting at position 2882 of SEQ ID NO: 1564154
aggaauuugugagaucaua

SEQ ID NO: 1858768 - RNA, 19 nt, Artificial Sequence
  Description of Artificial Sequence: Synthetic oligonucleotide
  Antisense strand to SEQ ID NO: 1858767
uaugaucucacaaauuccu

SEQ ID NO: 1858769 - RNA, 19 nt, Artificial Sequence
  Description of Artificial Sequence: Synthetic oligonucleotide
  Sense strand starting at position 3103 of SEQ ID NO: 1564154
aaaugaauuguuuguagca

SEQ ID NO: 1858770 - RNA, 19 nt, Artificial Sequence
  Description of Artificial Sequence: Synthetic oligonucleotide
  Antisense strand to SEQ ID NO: 1858769
ugcuacaaacaauucauuu

SEQ ID NO: 1858771 - RNA, 19 nt, Artificial Sequence
  Description of Artificial Sequence: Synthetic oligonucleotide
  Sense strand starting at position 3394 of SEQ ID NO: 1564154
uuauguauggugugaugaa

SEQ ID NO: 1858772 - RNA, 19 nt, Artificial Sequence
  Description of Artificial Sequence: Synthetic oligonucleotide
  Antisense strand to SEQ ID NO: 1858771
uucaucacaccauacauaa

SEQ ID NO: 1858773 - RNA, 19 nt, Artificial Sequence
  Description of Artificial Sequence: Synthetic oligonucleotide
  Sense strand starting at position 3458 of SEQ ID NO: 1564154
gcaccuucuguugaagaga

SEQ ID NO: 1858774 - RNA, 19 nt, Artificial Sequence
  Description of Artificial Sequence: Synthetic oligonucleotide
  Antisense strand to SEQ ID NO: 1858773
ucucuucaacagaaggugc

SEQ ID NO: 1858775 - RNA, 19 nt, Artificial Sequence
  Description of Artificial Sequence: Synthetic oligonucleotide
  Sense strand starting at position 3530 of SEQ ID NO: 1564154
acagauguauaggcuuaua

SEQ ID NO: 1858776 - RNA, 19 nt, Artificial Sequence
  Description of Artificial Sequence: Synthetic oligonucleotide
  Antisense strand to SEQ ID NO: 1858775
uauaagccuauacaucugu

SEQ ID NO: 1858777 - RNA, 19 nt, Artificial Sequence
  Description of Artificial Sequence: Synthetic oligonucleotide
  Sense strand starting at position 3533 of SEQ ID NO: 1564154
gauguauaggcuuauaucu

SEQ ID NO: 1858778 - RNA, 19 nt, Artificial Sequence
  Description of Artificial Sequence: Synthetic oligonucleotide
  Antisense strand to SEQ ID NO: 1858777
agauauaagccuauacauc

SEQ ID NO: 1858779 - RNA, 19 nt, Artificial Sequence
  Description of Artificial Sequence: Synthetic oligonucleotide
  Sense strand starting at position 3541 of SEQ ID NO: 1564154
ggcuuauaucuggacucuu

SEQ ID NO: 1858780 - RNA, 19 nt, Artificial Sequence
  Description of Artificial Sequence: Synthetic oligonucleotide
  Antisense strand to SEQ ID NO: 1858779
aagaguccagauauaagcc

SEQ ID NO: 1858781 - RNA, 19 nt, Artificial Sequence
  Description of Artificial Sequence: Synthetic oligonucleotide
  Sense strand starting at position 3666 of SEQ ID NO: 1564154
caguaagugugauuucucu

SEQ ID NO: 1858782 - RNA, 19 nt, Artificial Sequence
  Description of Artificial Sequence: Synthetic oligonucleotide
  Antisense strand to SEQ ID NO: 1858781
agagaaaucacacuuacug

SEQ ID NO: 1858783 - RNA, 19 nt, Artificial Sequence
  Description of Artificial Sequence: Synthetic oligonucleotide
  Sense strand starting at position 3699 of SEQ ID NO: 1564154
gauuguauuggcuacucau

SEQ ID NO: 1858784 - RNA, 19 nt, Artificial Sequence
  Description of Artificial Sequence: Synthetic oligonucleotide
  Antisense strand to SEQ ID NO: 1858783
augaguagccaauacaauc

SEQ ID NO: 1858785 - RNA, 19 nt, Artificial Sequence
  Description of Artificial Sequence: Synthetic oligonucleotide
  Sense strand starting at position 85 of SEQ ID NO: 1564155
ucaauaacgaaaugguuga

SEQ ID NO: 1858786 - RNA, 19 nt, Artificial Sequence
  Description of Artificial Sequence: Synthetic oligonucleotide
  Antisense strand to SEQ ID NO: 1858785
ucaaccauuucguuauuga

SEQ ID NO: 1858787 - RNA, 19 nt, Artificial Sequence
  Description of Artificial Sequence: Synthetic oligonucleotide
  Sense strand starting at position 170 of SEQ ID NO: 1564155
gcaagagugcaagagagua

SEQ ID NO: 1858788 - RNA, 19 nt, Artificial Sequence
  Description of Artificial Sequence: Synthetic oligonucleotide
  Antisense strand to SEQ ID NO: 1858787
uacucucuugcacucuugc

SEQ ID NO: 1858789 - RNA, 19 nt, Artificial Sequence
  Description of Artificial Sequence: Synthetic oligonucleotide
  Sense strand starting at position 314 of SEQ ID NO: 1564155
auacuuucugcaugaagau

SEQ ID NO: 1858790 - RNA, 19 nt, Artificial Sequence
  Description of Artificial Sequence: Synthetic oligonucleotide
  Antisense strand to SEQ ID NO: 1858789
aucuucaugcagaaaguau

SEQ ID NO: 1858791 - RNA, 19 nt, Artificial Sequence
  Description of Artificial Sequence: Synthetic oligonucleotide
  Sense strand starting at position 425 of SEQ ID NO: 1564155
guggguuuacaccauuaau

SEQ ID NO: 1858792 - RNA, 19 nt, Artificial Sequence
  Description of Artificial Sequence: Synthetic oligonucleotide
  Antisense strand to SEQ ID NO: 1858791
auuaaugguguaaacccac

SEQ ID NO: 1858793 - RNA, 19 nt, Artificial Sequence
  Description of Artificial Sequence: Synthetic oligonucleotide
  Sense strand starting at position 574 of SEQ ID NO: 1564155
uugugaaacuagucaaggu

SEQ ID NO: 1858794 - RNA, 19 nt, Artificial Sequence
  Description of Artificial Sequence: Synthetic oligonucleotide
  Antisense strand to SEQ ID NO: 1858793
accuugacuaguuucacaa

SEQ ID NO: 1858795 - RNA, 19 nt, Artificial Sequence
  Description of Artificial Sequence: Synthetic oligonucleotide
  Sense strand starting at position 575 of SEQ ID NO: 1564155
ugugaaacuagucaaggua

SEQ ID NO: 1858796 - RNA, 19 nt, Artificial Sequence
  Description of Artificial Sequence: Synthetic oligonucleotide
  Antisense strand to SEQ ID NO: 1858795
uaccuugacuaguuucaca

SEQ ID NO: 1858797 - RNA, 19 nt, Artificial Sequence
  Description of Artificial Sequence: Synthetic oligonucleotide
  Sense strand starting at position 593 of SEQ ID NO: 1564155
aagauuuguuggcacaaua

SEQ ID NO: 1858798 - RNA, 19 nt, Artificial Sequence
  Description of Artificial Sequence: Synthetic oligonucleotide
  Antisense strand to SEQ ID NO: 1858797
uauugugccaacaaaucuu

SEQ ID NO: 1858799 - RNA, 19 nt, Artificial Sequence
  Description of Artificial Sequence: Synthetic oligonucleotide
  Sense strand starting at position 907 of SEQ ID NO: 1564155
ccuguucugcuguagggaa

SEQ ID NO: 1858800 - RNA, 19 nt, Artificial Sequence
  Description of Artificial Sequence: Synthetic oligonucleotide
  Antisense strand to SEQ ID NO: 1858799
uucccuacagcagaacagg

SEQ ID NO: 1858801 - RNA, 19 nt, Artificial Sequence
  Description of Artificial Sequence: Synthetic oligonucleotide
  Sense strand starting at position 923 of SEQ ID NO: 1564155
gaaauaguaguuggaaucu

SEQ ID NO: 1858802 - RNA, 19 nt, Artificial Sequence
  Description of Artificial Sequence: Synthetic oligonucleotide
  Antisense strand to SEQ ID NO: 1858801
agauuccaacuacuauuuc

SEQ ID NO: 1858803 - RNA, 19 nt, Artificial Sequence
  Description of Artificial Sequence: Synthetic oligonucleotide
  Sense strand starting at position 929 of SEQ ID NO: 1564155
guaguuggaaucuggaaua

SEQ ID NO: 1858804 - RNA, 19 nt, Artificial Sequence
  Description of Artificial Sequence: Synthetic oligonucleotide
  Antisense strand to SEQ ID NO: 1858803
uauuccagauuccaacuac

SEQ ID NO: 1858805 - RNA, 19 nt, Artificial Sequence
  Description of Artificial Sequence: Synthetic oligonucleotide
  Sense strand starting at position 941 of SEQ ID NO: 1564155
uggaauaaugcguaaguca

SEQ ID NO: 1858806 - RNA, 19 nt, Artificial Sequence
  Description of Artificial Sequence: Synthetic oligonucleotide
  Antisense strand to SEQ ID NO: 1858805
ugacuuacgcauuauucca

SEQ ID NO: 1858807 - RNA, 19 nt, Artificial Sequence
  Description of Artificial Sequence: Synthetic oligonucleotide
  Sense strand starting at position 960 of SEQ ID NO: 1564155
ccaucuuuguagucaucaa

SEQ ID NO: 1858808 - RNA, 19 nt, Artificial Sequence
  Description of Artificial Sequence: Synthetic oligonucleotide
  Antisense strand to SEQ ID NO: 1858807
uugaugacuacaaagaugg

SEQ ID NO: 1858809 - RNA, 19 nt, Artificial Sequence
  Description of Artificial Sequence: Synthetic oligonucleotide
  Sense strand starting at position 1199 of SEQ ID NO: 1564155
ucucuuaucgcggugcagu

SEQ ID NO: 1858810 - RNA, 19 nt, Artificial Sequence
  Description of Artificial Sequence: Synthetic oligonucleotide
  Antisense strand to SEQ ID NO: 1858809
acugcaccgcgauaagaga

SEQ ID NO: 1858811 - RNA, 19 nt, Artificial Sequence
  Description of Artificial Sequence: Synthetic oligonucleotide
  Sense strand starting at position 1363 of SEQ ID NO: 1564155
uguuccuacgagugaggaa

SEQ ID NO: 1858812 - RNA, 19 nt, Artificial Sequence
  Description of Artificial Sequence: Synthetic oligonucleotide
  Antisense strand to SEQ ID NO: 1858811
uuccucacucguaggaaca

SEQ ID NO: 1858813 - RNA, 19 nt, Artificial Sequence
  Description of Artificial Sequence: Synthetic oligonucleotide
  Sense strand starting at position 1364 of SEQ ID NO: 1564155
guuccuacgagugaggaaa

SEQ ID NO: 1858814 - RNA, 19 nt, Artificial Sequence
  Description of Artificial Sequence: Synthetic oligonucleotide
  Antisense strand to SEQ ID NO: 1858813
uuuccucacucguaggaac

SEQ ID NO: 1858815 - RNA, 19 nt, Artificial Sequence
  Description of Artificial Sequence: Synthetic oligonucleotide
  Sense strand starting at position 1476 of SEQ ID NO: 1564155
gacauagcucagggauuaa

SEQ ID NO: 1858816 - RNA, 19 nt, Artificial Sequence
  Description of Artificial Sequence: Synthetic oligonucleotide
  Antisense strand to SEQ ID NO: 1858815
uuaaucccugagcuauguc

SEQ ID NO: 1858817 - RNA, 19 nt, Artificial Sequence
  Description of Artificial Sequence: Synthetic oligonucleotide
  Sense strand starting at position 1521 of SEQ ID NO: 1564155
ggucgauuaaacugacaaa

SEQ ID NO: 1858818 - RNA, 19 nt, Artificial Sequence
  Description of Artificial Sequence: Synthetic oligonucleotide
  Antisense strand to SEQ ID NO: 1858817
uuugucaguuuaaucgacc

SEQ ID NO: 1858819 - RNA, 19 nt, Artificial Sequence
  Description of Artificial Sequence: Synthetic oligonucleotide
  Sense strand starting at position 2115 of SEQ ID NO: 1564155
gcccguguucaguuuguau

SEQ ID NO: 1858820 - RNA, 19 nt, Artificial Sequence
  Description of Artificial Sequence: Synthetic oligonucleotide
  Antisense strand to SEQ ID NO: 1858819
auacaaacugaacacgggc

SEQ ID NO: 1858821 - RNA, 19 nt, Artificial Sequence
  Description of Artificial Sequence: Synthetic oligonucleotide
  Sense strand starting at position 2334 of SEQ ID NO: 1564155
ccagaaagaguuugugcau

SEQ ID NO: 1858822 - RNA, 19 nt, Artificial Sequence
  Description of Artificial Sequence: Synthetic oligonucleotide
  Antisense strand to SEQ ID NO: 1858821
augcacaaacucuuucugg

SEQ ID NO: 1858823 - RNA, 19 nt, Artificial Sequence
  Description of Artificial Sequence: Synthetic oligonucleotide
  Sense strand starting at position 2335 of SEQ ID NO: 1564155
cagaaagaguuugugcaua

SEQ ID NO: 1858824 - RNA, 19 nt, Artificial Sequence
  Description of Artificial Sequence: Synthetic oligonucleotide
  Antisense strand to SEQ ID NO: 1858823
uaugcacaaacucuuucug

SEQ ID NO: 1858825 - RNA, 19 nt, Artificial Sequence
  Description of Artificial Sequence: Synthetic oligonucleotide
  Sense strand starting at position 2337 of SEQ ID NO: 1564155
gaaagaguuugugcauaca

SEQ ID NO: 1858826 - RNA, 19 nt, Artificial Sequence
  Description of Artificial Sequence: Synthetic oligonucleotide
  Antisense strand to SEQ ID NO: 1858825
uguaugcacaaacucuuuc

SEQ ID NO: 1858827 - RNA, 19 nt, Artificial Sequence
  Description of Artificial Sequence: Synthetic oligonucleotide
  Sense strand starting at position 2947 of SEQ ID NO: 1564155
acaauauuguggucuuaau

SEQ ID NO: 1858828 - RNA, 19 nt, Artificial Sequence
  Description of Artificial Sequence: Synthetic oligonucleotide
  Antisense strand to SEQ ID NO: 1858827
auuaagaccacaauauugu

SEQ ID NO: 1858829 - RNA, 19 nt, Artificial Sequence
  Description of Artificial Sequence: Synthetic oligonucleotide
  Sense strand starting at position 3112 of SEQ ID NO: 1564155
auuaaaugagaaugucugu

SEQ ID NO: 1858830 - RNA, 19 nt, Artificial Sequence
  Description of Artificial Sequence: Synthetic oligonucleotide
  Antisense strand to SEQ ID NO: 1858829
acagacauucucauuuaau

SEQ ID NO: 1858831 - RNA, 19 nt, Artificial Sequence
  Description of Artificial Sequence: Synthetic oligonucleotide
  Sense strand starting at position 3117 of SEQ ID NO: 1564155
augagaaugucuguaaagc

SEQ ID NO: 1858832 - RNA, 19 nt, Artificial Sequence
  Description of Artificial Sequence: Synthetic oligonucleotide
  Antisense strand to SEQ ID NO: 1858831
gcuuuacagacauucucau

SEQ ID NO: 1858833 - RNA, 19 nt, Artificial Sequence
  Description of Artificial Sequence: Synthetic oligonucleotide
  Sense strand starting at position 3118 of SEQ ID NO: 1564155
ugagaaugucuguaaagcu

SEQ ID NO: 1858834 - RNA, 19 nt, Artificial Sequence
  Description of Artificial Sequence: Synthetic oligonucleotide
  Antisense strand to SEQ ID NO: 1858833
agcuuuacagacauucuca

SEQ ID NO: 1858835 - RNA, 19 nt, Artificial Sequence
  Description of Artificial Sequence: Synthetic oligonucleotide
  Sense strand starting at position 3174 of SEQ ID NO: 1564155
uccagaagagucuaggguu

SEQ ID NO: 1858836 - RNA, 19 nt, Artificial Sequence
  Description of Artificial Sequence: Synthetic oligonucleotide
  Antisense strand to SEQ ID NO: 1858835
aacccuagacucuucugga

SEQ ID NO: 1858837 - RNA, 19 nt, Artificial Sequence
  Description of Artificial Sequence: Synthetic oligonucleotide
  Sense strand starting at position 3234 of SEQ ID NO: 1564155
gcgucauauaaucaugagu

SEQ ID NO: 1858838 - RNA, 19 nt, Artificial Sequence
  Description of Artificial Sequence: Synthetic oligonucleotide
  Antisense strand to SEQ ID NO: 1858837
acucaugauuauaugacgc

SEQ ID NO: 1858839 - RNA, 19 nt, Artificial Sequence
  Description of Artificial Sequence: Synthetic oligonucleotide
  Sense strand starting at position 3337 of SEQ ID NO: 1564155
cuuccaagucagugacaga

SEQ ID NO: 1858840 - RNA, 19 nt, Artificial Sequence
  Description of Artificial Sequence: Synthetic oligonucleotide
  Antisense strand to SEQ ID NO: 1858839
ucugucacugacuuggaag

SEQ ID NO: 1858841 - RNA, 19 nt, Artificial Sequence
  Description of Artificial Sequence: Synthetic oligonucleotide
  Sense strand starting at position 3376 of SEQ ID NO: 1564155
uuuaauagcuggucacaca

SEQ ID NO: 1858842 - RNA, 19 nt, Artificial Sequence
  Description of Artificial Sequence: Synthetic oligonucleotide
  Antisense strand to SEQ ID NO: 1858841
ugugugaccagcuauuaaa

SEQ ID NO: 1858843 - RNA, 19 nt, Artificial Sequence
  Description of Artificial Sequence: Synthetic oligonucleotide
  Sense strand starting at position 3420 of SEQ ID NO: 1564155
ccauguuucccaggcaaag

SEQ ID NO: 1858844 - RNA, 19 nt, Artificial Sequence
  Description of Artificial Sequence: Synthetic oligonucleotide
  Antisense strand to SEQ ID NO: 1858843
cuuugccugggaaacaugg

SEQ ID NO: 1858845 - RNA, 19 nt, Artificial Sequence
  Description of Artificial Sequence: Synthetic oligonucleotide
  Sense strand starting at position 3450 of SEQ ID NO: 1564155
ugggauaauucuuuaaugc

SEQ ID NO: 1858846 - RNA, 19 nt, Artificial Sequence
  Description of Artificial Sequence: Synthetic oligonucleotide
  Antisense strand to SEQ ID NO: 1858845
gcauuaaagaauuauccca

SEQ ID NO: 1858847 - RNA, 19 nt, Artificial Sequence
  Description of Artificial Sequence: Synthetic oligonucleotide
  Sense strand starting at position 3451 of SEQ ID NO: 1564155
gggauaauucuuuaaugcc

SEQ ID NO: 1858848 - RNA, 19 nt, Artificial Sequence
  Description of Artificial Sequence: Synthetic oligonucleotide
  Antisense strand to SEQ ID NO: 1858847
ggcauuaaagaauuauccc

SEQ ID NO: 1858849 - RNA, 19 nt, Artificial Sequence
  Description of Artificial Sequence: Synthetic oligonucleotide
  Sense strand starting at position 3467 of SEQ ID NO: 1564155
gccauauuacaagauagua

SEQ ID NO: 1858850 - RNA, 19 nt, Artificial Sequence
  Description of Artificial Sequence: Synthetic oligonucleotide
  Antisense strand to SEQ ID NO: 1858849
uacuaucuuguaauauggc

SEQ ID NO: 1858851 - RNA, 19 nt, Artificial Sequence
  Description of Artificial Sequence: Synthetic oligonucleotide
  Sense strand starting at position 3543 of SEQ ID NO: 1564155
gacaucgugguguauauau

SEQ ID NO: 1858852 - RNA, 19 nt, Artificial Sequence
  Description of Artificial Sequence: Synthetic oligonucleotide
  Antisense strand to SEQ ID NO: 1858851
auauauacaccacgauguc

SEQ ID NO: 1858853 - RNA, 19 nt, Artificial Sequence
  Description of Artificial Sequence: Synthetic oligonucleotide
  Sense strand starting at position 3606 of SEQ ID NO: 1564155
aggugaacguauguaaaug

SEQ ID NO: 1858854 - RNA, 19 nt, Artificial Sequence
  Description of Artificial Sequence: Synthetic oligonucleotide
  Antisense strand to SEQ ID NO: 1858853
cauuuacauacguucaccu

SEQ ID NO: 1858855 - RNA, 19 nt, Artificial Sequence
  Description of Artificial Sequence: Synthetic oligonucleotide
  Sense strand starting at position 3607 of SEQ ID NO: 1564155
ggugaacguauguaaaugu

SEQ ID NO: 1858856 - RNA, 19 nt, Artificial Sequence
  Description of Artificial Sequence: Synthetic oligonucleotide
  Antisense strand to SEQ ID NO: 1858855
acauuuacauacguucacc

SEQ ID NO: 1858857 - RNA, 19 nt, Artificial Sequence
  Description of Artificial Sequence: Synthetic oligonucleotide
  Sense strand starting at position 3622 of SEQ ID NO: 1564155
auguuaugccauuauguuc

SEQ ID NO: 1858858 - RNA, 19 nt, Artificial Sequence
  Description of Artificial Sequence: Synthetic oligonucleotide
  Antisense strand to SEQ ID NO: 1858857
gaacauaauggcauaacau

SEQ ID NO: 1858859 - RNA, 19 nt, Artificial Sequence
  Description of Artificial Sequence: Synthetic oligonucleotide
  Sense strand starting at position 3706 of SEQ ID NO: 1564155
gcaguugacacaugaaaga

SEQ ID NO: 1858860 - RNA, 19 nt, Artificial Sequence
  Description of Artificial Sequence: Synthetic oligonucleotide
  Antisense strand to SEQ ID NO: 1858859
ucuuucaugugucaacugc

SEQ ID NO: 1858861 - RNA, 19 nt, Artificial Sequence
  Description of Artificial Sequence: Synthetic oligonucleotide
  Sense strand starting at position 3794 of SEQ ID NO: 1564155
agggaauucuugcuuacaa

SEQ ID NO: 1858862 - RNA, 19 nt, Artificial Sequence
  Description of Artificial Sequence: Synthetic oligonucleotide
  Antisense strand to SEQ ID NO: 1858861
uuguaagcaagaauucccu

SEQ ID NO: 1858863 - RNA, 19 nt, Artificial Sequence
  Description of Artificial Sequence: Synthetic oligonucleotide
  Sense strand starting at position 3795 of SEQ ID NO: 1564155
gggaauucuugcuuacaac

SEQ ID NO: 1858864 - RNA, 19 nt, Artificial Sequence
  Description of Artificial Sequence: Synthetic oligonucleotide
  Antisense strand to SEQ ID NO: 1858863
guuguaagcaagaauuccc

SEQ ID NO: 1858865 - RNA, 19 nt, Artificial Sequence
  Description of Artificial Sequence: Synthetic oligonucleotide
  Sense strand starting at position 363 of SEQ ID NO: 1564157
caccauuaugcugguguca

SEQ ID NO: 1858866 - RNA, 19 nt, Artificial Sequence
  Description of Artificial Sequence: Synthetic oligonucleotide
  Antisense strand to SEQ ID NO: 1858865
ugacaccagcauaauggug

SEQ ID NO: 1858867 - RNA, 19 nt, Artificial Sequence
  Description of Artificial Sequence: Synthetic oligonucleotide
  Sense strand starting at position 365 of SEQ ID NO: 1564157
ccauuaugcuggugucauc

SEQ ID NO: 1858868 - RNA, 19 nt, Artificial Sequence
  Description of Artificial Sequence: Synthetic oligonucleotide
  Antisense strand to SEQ ID NO: 1858867
gaugacaccagcauaaugg

SEQ ID NO: 1858869 - RNA, 19 nt, Artificial Sequence
  Description of Artificial Sequence: Synthetic oligonucleotide
  Sense strand starting at position 374 of SEQ ID NO: 1564157
uggugucaucaucgauagu

SEQ ID NO: 1858870 - RNA, 19 nt, Artificial Sequence
  Description of Artificial Sequence: Synthetic oligonucleotide
  Antisense strand to SEQ ID NO: 1858869
acuaucgaugaugacacca

SEQ ID NO: 1858871 - RNA, 19 nt, Artificial Sequence
  Description of Artificial Sequence: Synthetic oligonucleotide
  Sense strand starting at position 375 of SEQ ID NO: 1564157
ggugucaucaucgauagug

SEQ ID NO: 1858872 - RNA, 19 nt, Artificial Sequence
  Description of Artificial Sequence: Synthetic oligonucleotide
  Antisense strand to SEQ ID NO: 1858871
cacuaucgaugaugacacc

SEQ ID NO: 1858873 - RNA, 19 nt, Artificial Sequence
  Description of Artificial Sequence: Synthetic oligonucleotide
  Sense strand starting at position 501 of SEQ ID NO: 1564157
ccaugcuaguuaugccaua

SEQ ID NO: 1858874 - RNA, 19 nt, Artificial Sequence
  Description of Artificial Sequence: Synthetic oligonucleotide
  Antisense strand to SEQ ID NO: 1858873
uauggcauaacuagcaugg

SEQ ID NO: 1858875 - RNA, 19 nt, Artificial Sequence
  Description of Artificial Sequence: Synthetic oligonucleotide
  Sense strand starting at position 581 of SEQ ID NO: 1564157
ggauaauagcaacguccau

SEQ ID NO: 1858876 - RNA, 19 nt, Artificial Sequence
  Description of Artificial Sequence: Synthetic oligonucleotide
  Antisense strand to SEQ ID NO: 1858875
auggacguugcuauuaucc

SEQ ID NO: 1858877 - RNA, 19 nt, Artificial Sequence
  Description of Artificial Sequence: Synthetic oligonucleotide
  Sense strand starting at position 672 of SEQ ID NO: 1564157
ucccguuacugggagggau

SEQ ID NO: 1858878 - RNA, 19 nt, Artificial Sequence
  Description of Artificial Sequence: Synthetic oligonucleotide
  Antisense strand to SEQ ID NO: 1858877
aucccucccaguaacggga

SEQ ID NO: 1858879 - RNA, 19 nt, Artificial Sequence
  Description of Artificial Sequence: Synthetic oligonucleotide
  Sense strand starting at position 1159 of SEQ ID NO: 1564157
ggaggugccucacacauuu

SEQ ID NO: 1858880 - RNA, 19 nt, Artificial Sequence
  Description of Artificial Sequence: Synthetic oligonucleotide
  Antisense strand to SEQ ID NO: 1858879
aaaugugugaggcaccucc

SEQ ID NO: 1858881 - RNA, 19 nt, Artificial Sequence
  Description of Artificial Sequence: Synthetic oligonucleotide
  Sense strand starting at position 1249 of SEQ ID NO: 1564157
agcgcuugcgccugcaaua

SEQ ID NO: 1858882 - RNA, 19 nt, Artificial Sequence
  Description of Artificial Sequence: Synthetic oligonucleotide
  Antisense strand to SEQ ID NO: 1858881
uauugcaggcgcaagcgcu

SEQ ID NO: 1858883 - RNA, 19 nt, Artificial Sequence
  Description of Artificial Sequence: Synthetic oligonucleotide
  Sense strand starting at position 2378 of SEQ ID NO: 1564157
uucucauucccaugggaac

SEQ ID NO: 1858884 - RNA, 19 nt, Artificial Sequence
  Description of Artificial Sequence: Synthetic oligonucleotide
  Antisense strand to SEQ ID NO: 1858883
guucccaugggaaugagaa

SEQ ID NO: 1858885 - RNA, 19 nt, Artificial Sequence
  Description of Artificial Sequence: Synthetic oligonucleotide
  Sense strand starting at position 2423 of SEQ ID NO: 1564157
uccugcuucuucuauguuu

SEQ ID NO: 1858886 - RNA, 19 nt, Artificial Sequence
  Description of Artificial Sequence: Synthetic oligonucleotide
  Antisense strand to SEQ ID NO: 1858885
aaacauagaagaagcagga

SEQ ID NO: 1858887 - RNA, 19 nt, Artificial Sequence
  Description of Artificial Sequence: Synthetic oligonucleotide
  Sense strand starting at position 2652 of SEQ ID NO: 1564157
gcuccauagccagacauga

SEQ ID NO: 1858888 - RNA, 19 nt, Artificial Sequence
  Description of Artificial Sequence: Synthetic oligonucleotide
  Antisense strand to SEQ ID NO: 1858887
ucaugucuggcuauggagc

SEQ ID NO: 1858889 - RNA, 19 nt, Artificial Sequence
  Description of Artificial Sequence: Synthetic oligonucleotide
  Sense strand starting at position 2920 of SEQ ID NO: 1564157
uggugucuguaggcuuaau

SEQ ID NO: 1858890 - RNA, 19 nt, Artificial Sequence
  Description of Artificial Sequence: Synthetic oligonucleotide
  Antisense strand to SEQ ID NO: 1858889
auuaagccuacagacacca

SEQ ID NO: 1858891 - RNA, 19 nt, Artificial Sequence
  Description of Artificial Sequence: Synthetic oligonucleotide
  Sense strand starting at position 2938 of SEQ ID NO: 1564157
uguggagcuugggugauau

SEQ ID NO: 1858892 - RNA, 19 nt, Artificial Sequence
  Description of Artificial Sequence: Synthetic oligonucleotide
  Antisense strand to SEQ ID NO: 1858891
auaucacccaagcuccaca

SEQ ID NO: 1858893 - RNA, 19 nt, Artificial Sequence
  Description of Artificial Sequence: Synthetic oligonucleotide
  Sense strand starting at position 2975 of SEQ ID NO: 1564157
cugagcuucugcucagcaa

SEQ ID NO: 1858894 - RNA, 19 nt, Artificial Sequence
  Description of Artificial Sequence: Synthetic oligonucleotide
  Antisense strand to SEQ ID NO: 1858893
uugcugagcagaagcucag

SEQ ID NO: 1858895 - RNA, 19 nt, Artificial Sequence
  Description of Artificial Sequence: Synthetic oligonucleotide
  Sense strand starting at position 2976 of SEQ ID NO: 1564157
ugagcuucugcucagcaaa

SEQ ID NO: 1858896 - RNA, 19 nt, Artificial Sequence
  Description of Artificial Sequence: Synthetic oligonucleotide
  Antisense strand to SEQ ID NO: 1858895
uuugcugagcagaagcuca

SEQ ID NO: 1858897 - RNA, 19 nt, Artificial Sequence
  Description of Artificial Sequence: Synthetic oligonucleotide
  Sense strand starting at position 3106 of SEQ ID NO: 1564157
gaggguguuugucccaaga

SEQ ID NO: 1858898 - RNA, 19 nt, Artificial Sequence
  Description of Artificial Sequence: Synthetic oligonucleotide
  Antisense strand to SEQ ID NO: 1858897
ucuugggacaaacacccuc

SEQ ID NO: 1858899 - RNA, 19 nt, Artificial Sequence
  Description of Artificial Sequence: Synthetic oligonucleotide
  Sense strand starting at position 3108 of SEQ ID NO: 1564157
ggguguuugucccaagaua

SEQ ID NO: 1858900 - RNA, 19 nt, Artificial Sequence
  Description of Artificial Sequence: Synthetic oligonucleotide
  Antisense strand to SEQ ID NO: 1858899
uaucuugggacaaacaccc

SEQ ID NO: 1858901 - RNA, 19 nt, Artificial Sequence
  Description of Artificial Sequence: Synthetic oligonucleotide
  Sense strand starting at position 3119 of SEQ ID NO: 1564157
ccaagauauuggugcagug

SEQ ID NO: 1858902 - RNA, 19 nt, Artificial Sequence
  Description of Artificial Sequence: Synthetic oligonucleotide
  Antisense strand to SEQ ID NO: 1858901
cacugcaccaauaucuugg

SEQ ID NO: 1858903 - RNA, 19 nt, Artificial Sequence
  Description of Artificial Sequence: Synthetic oligonucleotide
  Sense strand starting at position 3569 of SEQ ID NO: 1564157
uugcuugaacuccgggaaa

SEQ ID NO: 1858904 - RNA, 19 nt, Artificial Sequence
  Description of Artificial Sequence: Synthetic oligonucleotide
  Antisense strand to SEQ ID NO: 1858903
uuucccggaguucaagcaa

SEQ ID NO: 1858905 - RNA, 19 nt, Artificial Sequence
  Description of Artificial Sequence: Synthetic oligonucleotide
  Sense strand starting at position 14 of SEQ ID NO: 1564158
ucauuuguggucugagcag

SEQ ID NO: 1858906 - RNA, 19 nt, Artificial Sequence
  Description of Artificial Sequence: Synthetic oligonucleotide
  Antisense strand to SEQ ID NO: 1858905
cugcucagaccacaaauga

SEQ ID NO: 1858907 - RNA, 19 nt, Artificial Sequence
  Description of Artificial Sequence: Synthetic oligonucleotide
  Sense strand starting at position 161 of SEQ ID NO: 1564158
gguagugaaugcccaaacu

SEQ ID NO: 1858908 - RNA, 19 nt, Artificial Sequence
  Description of Artificial Sequence: Synthetic oligonucleotide
  Antisense strand to SEQ ID NO: 1858907
aguuugggcauucacuacc

SEQ ID NO: 1858909 - RNA, 19 nt, Artificial Sequence
  Description of Artificial Sequence: Synthetic oligonucleotide
  Sense strand starting at position 221 of SEQ ID NO: 1564158
guacuauauaaagguggaa

SEQ ID NO: 1858910 - RNA, 19 nt, Artificial Sequence
  Description of Artificial Sequence: Synthetic oligonucleotide
  Antisense strand to SEQ ID NO: 1858909
uuccaccuuuauauaguac

SEQ ID NO: 1858911 - RNA, 19 nt, Artificial Sequence
  Description of Artificial Sequence: Synthetic oligonucleotide
  Sense strand starting at position 608 of SEQ ID NO: 1564158
acuuaagagucagcucaaa

SEQ ID NO: 1858912 - RNA, 19 nt, Artificial Sequence
  Description of Artificial Sequence: Synthetic oligonucleotide
  Antisense strand to SEQ ID NO: 1858911
uuugagcugacucuuaagu

SEQ ID NO: 1858913 - RNA, 19 nt, Artificial Sequence
  Description of Artificial Sequence: Synthetic oligonucleotide
  Sense strand starting at position 676 of SEQ ID NO: 1564158
uuauuuaggugcgugcaga

SEQ ID NO: 1858914 - RNA, 19 nt, Artificial Sequence
  Description of Artificial Sequence: Synthetic oligonucleotide
  Antisense strand to SEQ ID NO: 1858913
ucugcacgcaccuaaauaa

SEQ ID NO: 1858915 - RNA, 19 nt, Artificial Sequence
  Description of Artificial Sequence: Synthetic oligonucleotide
  Sense strand starting at position 726 of SEQ ID NO: 1564158
agcacacugcuagaaagau

SEQ ID NO: 1858916 - RNA, 19 nt, Artificial Sequence
  Description of Artificial Sequence: Synthetic oligonucleotide
  Antisense strand to SEQ ID NO: 1858915
aucuuucuagcagugugcu

SEQ ID NO: 1858917 - RNA, 19 nt, Artificial Sequence
  Description of Artificial Sequence: Synthetic oligonucleotide
  Sense strand starting at position 990 of SEQ ID NO: 1564158
ggaaguuagcuggagcuuu

SEQ ID NO: 1858918 - RNA, 19 nt, Artificial Sequence
  Description of Artificial Sequence: Synthetic oligonucleotide
  Antisense strand to SEQ ID NO: 1858917
aaagcuccagcuaacuucc

SEQ ID NO: 1858919 - RNA, 19 nt, Artificial Sequence
  Description of Artificial Sequence: Synthetic oligonucleotide
  Sense strand starting at position 1198 of SEQ ID NO: 1564158
uggcaauucuuccucagag

SEQ ID NO: 1858920 - RNA, 19 nt, Artificial Sequence
  Description of Artificial Sequence: Synthetic oligonucleotide
  Antisense strand to SEQ ID NO: 1858919
cucugaggaagaauugcca

SEQ ID NO: 1858921 - RNA, 19 nt, Artificial Sequence
  Description of Artificial Sequence: Synthetic oligonucleotide
  Sense strand starting at position 1199 of SEQ ID NO: 1564158
ggcaauucuuccucagagg

SEQ ID NO: 1858922 - RNA, 19 nt, Artificial Sequence
  Description of Artificial Sequence: Synthetic oligonucleotide
  Antisense strand to SEQ ID NO: 1858921
ccucugaggaagaauugcc

SEQ ID NO: 1858923 - RNA, 19 nt, Artificial Sequence
  Description of Artificial Sequence: Synthetic oligonucleotide
  Sense strand starting at position 1649 of SEQ ID NO: 1564158
aggaguucugcgcaaacaa

SEQ ID NO: 1858924 - RNA, 19 nt, Artificial Sequence
  Description of Artificial Sequence: Synthetic oligonucleotide
  Antisense strand to SEQ ID NO: 1858923
uuguuugcgcagaacuccu

SEQ ID NO: 1858925 - RNA, 19 nt, Artificial Sequence
  Description of Artificial Sequence: Synthetic oligonucleotide
  Sense strand starting at position 2149 of SEQ ID NO: 1564158
gcgaaauauccugaaguag

SEQ ID NO: 1858926 - RNA, 19 nt, Artificial Sequence
  Description of Artificial Sequence: Synthetic oligonucleotide
  Antisense strand to SEQ ID NO: 1858925
cuacuucaggauauuucgc

SEQ ID NO: 1858927 - RNA, 19 nt, Artificial Sequence
  Description of Artificial Sequence: Synthetic oligonucleotide
  Sense strand starting at position 2257 of SEQ ID NO: 1564158
ggauaccaucugugcagaa

SEQ ID NO: 1858928 - RNA, 19 nt, Artificial Sequence
  Description of Artificial Sequence: Synthetic oligonucleotide
  Antisense strand to SEQ ID NO: 1858927
uucugcacagaugguaucc

SEQ ID NO: 1858929 - RNA, 19 nt, Artificial Sequence
  Description of Artificial Sequence: Synthetic oligonucleotide
  Sense strand starting at position 2258 of SEQ ID NO: 1564158
gauaccaucugugcagaaa

SEQ ID NO: 1858930 - RNA, 19 nt, Artificial Sequence
  Description of Artificial Sequence: Synthetic oligonucleotide
  Antisense strand to SEQ ID NO: 1858929
uuucugcacagaugguauc

SEQ ID NO: 1858931 - RNA, 19 nt, Artificial Sequence
  Description of Artificial Sequence: Synthetic oligonucleotide
  Sense strand starting at position 2433 of SEQ ID NO: 1564158
cuuagaaacuugcccagau

SEQ ID NO: 1858932 - RNA, 19 nt, Artificial Sequence
  Description of Artificial Sequence: Synthetic oligonucleotide
  Antisense strand to SEQ ID NO: 1858931
aucugggcaaguuucuaag

SEQ ID NO: 1858933 - RNA, 19 nt, Artificial Sequence
  Description of Artificial Sequence: Synthetic oligonucleotide
  Sense strand starting at position 2434 of SEQ ID NO: 1564158
uuagaaacuugcccagauu

SEQ ID NO: 1858934 - RNA, 19 nt, Artificial Sequence
  Description of Artificial Sequence: Synthetic oligonucleotide
  Antisense strand to SEQ ID NO: 1858933
aaucugggcaaguuucuaa

SEQ ID NO: 1858935 - RNA, 19 nt, Artificial Sequence
  Description of Artificial Sequence: Synthetic oligonucleotide
  Sense strand starting at position 2507 of SEQ ID NO: 1564158
cgucaaaguccauacuaca

SEQ ID NO: 1858936 - RNA, 19 nt, Artificial Sequence
  Description of Artificial Sequence: Synthetic oligonucleotide
  Antisense strand to SEQ ID NO: 1858935
uguaguauggacuuugacg

SEQ ID NO: 1858937 - RNA, 19 nt, Artificial Sequence
  Description of Artificial Sequence: Synthetic oligonucleotide
  Sense strand starting at position 2661 of SEQ ID NO: 1564158
acagaaaguucucugucuc

SEQ ID NO: 1858938 - RNA, 19 nt, Artificial Sequence
  Description of Artificial Sequence: Synthetic oligonucleotide
  Antisense strand to SEQ ID NO: 1858937
gagacagagaacuuucugu

SEQ ID NO: 1858939 - RNA, 19 nt, Artificial Sequence
  Description of Artificial Sequence: Synthetic oligonucleotide
  Sense strand starting at position 2714 of SEQ ID NO: 1564158
gcagccagauuuccucauu

SEQ ID NO: 1858940 - RNA, 19 nt, Artificial Sequence
  Description of Artificial Sequence: Synthetic oligonucleotide
  Antisense strand to SEQ ID NO: 1858939
aaugaggaaaucuggcugc

SEQ ID NO: 1858941 - RNA, 19 nt, Artificial Sequence
  Description of Artificial Sequence: Synthetic oligonucleotide
  Sense strand starting at position 2726 of SEQ ID NO: 1564158
ccucauuuccuggguuguu

SEQ ID NO: 1858942 - RNA, 19 nt, Artificial Sequence
  Description of Artificial Sequence: Synthetic oligonucleotide
  Antisense strand to SEQ ID NO: 1858941
aacaacccaggaaaugagg

SEQ ID NO: 1858943 - RNA, 19 nt, Artificial Sequence
  Description of Artificial Sequence: Synthetic oligonucleotide
  Sense strand starting at position 2928 of SEQ ID NO: 1564158
uuguuaaaucaguaaggca

SEQ ID NO: 1858944 - RNA, 19 nt, Artificial Sequence
  Description of Artificial Sequence: Synthetic oligonucleotide
  Antisense strand to SEQ ID NO: 1858943
ugccuuacugauuuaacaa

SEQ ID NO: 1858945 - RNA, 19 nt, Artificial Sequence
  Description of Artificial Sequence: Synthetic oligonucleotide
  Sense strand starting at position 3098 of SEQ ID NO: 1564158
ggagcuuugcgucuuggca

SEQ ID NO: 1858946 - RNA, 19 nt, Artificial Sequence
  Description of Artificial Sequence: Synthetic oligonucleotide
  Antisense strand to SEQ ID NO: 1858945
ugccaagacgcaaagcucc

SEQ ID NO: 1858947 - RNA, 19 nt, Artificial Sequence
  Description of Artificial Sequence: Synthetic oligonucleotide
  Sense strand starting at position 3164 of SEQ ID NO: 1564158
uggucugauagcuaggcua

SEQ ID NO: 1858948 - RNA, 19 nt, Artificial Sequence
  Description of Artificial Sequence: Synthetic oligonucleotide
  Antisense strand to SEQ ID NO: 1858947
uagccuagcuaucagacca

SEQ ID NO: 1858949 - RNA, 19 nt, Artificial Sequence
  Description of Artificial Sequence: Synthetic oligonucleotide
  Sense strand starting at position 3167 of SEQ ID NO: 1564158
ucugauagcuaggcuaaga

SEQ ID NO: 1858950 - RNA, 19 nt, Artificial Sequence
  Description of Artificial Sequence: Synthetic oligonucleotide
  Antisense strand to SEQ ID NO: 1858949
ucuuagccuagcuaucaga

SEQ ID NO: 1858951 - RNA, 19 nt, Artificial Sequence
  Description of Artificial Sequence: Synthetic oligonucleotide
  Sense strand starting at position 3202 of SEQ ID NO: 1564158
ccuagaaguucugaauuug

SEQ ID NO: 1858952 - RNA, 19 nt, Artificial Sequence
  Description of Artificial Sequence: Synthetic oligonucleotide
  Antisense strand to SEQ ID NO: 1858951
caaauucagaacuucuagg

SEQ ID NO: 1858953 - RNA, 19 nt, Artificial Sequence
  Description of Artificial Sequence: Synthetic oligonucleotide
  Sense strand starting at position 3412 of SEQ ID NO: 1564158
uucuguggccuccaucaga

SEQ ID NO: 1858954 - RNA, 19 nt, Artificial Sequence
  Description of Artificial Sequence: Synthetic oligonucleotide
  Antisense strand to SEQ ID NO: 1858953
ucugauggaggccacagaa

SEQ ID NO: 1858955 - RNA, 19 nt, Artificial Sequence
  Description of Artificial Sequence: Synthetic oligonucleotide
  Sense strand starting at position 3432 of SEQ ID NO: 1564158
cagacuuuccagggaguca

SEQ ID NO: 1858956 - RNA, 19 nt, Artificial Sequence
  Description of Artificial Sequence: Synthetic oligonucleotide
  Antisense strand to SEQ ID NO: 1858955
ugacucccuggaaagucug

SEQ ID NO: 1858957 - RNA, 19 nt, Artificial Sequence
  Description of Artificial Sequence: Synthetic oligonucleotide
  Sense strand starting at position 3541 of SEQ ID NO: 1564158
aggaaugugaccuggaguu

SEQ ID NO: 1858958 - RNA, 19 nt, Artificial Sequence
  Description of Artificial Sequence: Synthetic oligonucleotide
  Antisense strand to SEQ ID NO: 1858957
aacuccaggucacauuccu

SEQ ID NO: 1858959 - RNA, 19 nt, Artificial Sequence
  Description of Artificial Sequence: Synthetic oligonucleotide
  Sense strand starting at position 3543 of SEQ ID NO: 1564158
gaaugugaccuggaguuug

SEQ ID NO: 1858960 - RNA, 19 nt, Artificial Sequence
  Description of Artificial Sequence: Synthetic oligonucleotide
  Antisense strand to SEQ ID NO: 1858959
caaacuccaggucacauuc

SEQ ID NO: 1858961 - RNA, 19 nt, Artificial Sequence
  Description of Artificial Sequence: Synthetic oligonucleotide
  Sense strand starting at position 3551 of SEQ ID NO: 1564158
ccuggaguuugaccagaug

SEQ ID NO: 1858962 - RNA, 19 nt, Artificial Sequence
  Description of Artificial Sequence: Synthetic oligonucleotide
  Antisense strand to SEQ ID NO: 1858961
caucuggucaaacuccagg

SEQ ID NO: 1858963 - RNA, 19 nt, Artificial Sequence
  Description of Artificial Sequence: Synthetic oligonucleotide
  Sense strand starting at position 3554 of SEQ ID NO: 1564158
ggaguuugaccagaugcau

SEQ ID NO: 1858964 - RNA, 19 nt, Artificial Sequence
  Description of Artificial Sequence: Synthetic oligonucleotide
  Antisense strand to SEQ ID NO: 1858963
augcaucuggucaaacucc

SEQ ID NO: 1858965 - RNA, 19 nt, Artificial Sequence
  Description of Artificial Sequence: Synthetic oligonucleotide
  Sense strand starting at position 3596 of SEQ ID NO: 1564158
uaagcuccacgguauaagu

SEQ ID NO: 1858966 - RNA, 19 nt, Artificial Sequence
  Description of Artificial Sequence: Synthetic oligonucleotide
  Antisense strand to SEQ ID NO: 1858965
acuuauaccguggagcuua

SEQ ID NO: 1858967 - RNA, 19 nt, Artificial Sequence
  Description of Artificial Sequence: Synthetic oligonucleotide
  Sense strand starting at position 3631 of SEQ ID NO: 1564158
aauucuagaccaggaguuu

SEQ ID NO: 1858968 - RNA, 19 nt, Artificial Sequence
  Description of Artificial Sequence: Synthetic oligonucleotide
  Antisense strand to SEQ ID NO: 1858967
aaacuccuggucuagaauu

SEQ ID NO: 1858969 - RNA, 19 nt, Artificial Sequence
  Description of Artificial Sequence: Synthetic oligonucleotide
  Sense strand starting at position 3717 of SEQ ID NO: 1564158
cguugagagaugcaucgau

SEQ ID NO: 1858970 - RNA, 19 nt, Artificial Sequence
  Description of Artificial Sequence: Synthetic oligonucleotide
  Antisense strand to SEQ ID NO: 1858969
aucgaugcaucucucaacg

SEQ ID NO: 1858971 - RNA, 19 nt, Artificial Sequence
  Description of Artificial Sequence: Synthetic oligonucleotide
  Sense strand starting at position 3730 of SEQ ID NO: 1564158
aucgauggccucuaugcaa

SEQ ID NO: 1858972 - RNA, 19 nt, Artificial Sequence
  Description of Artificial Sequence: Synthetic oligonucleotide
  Antisense strand to SEQ ID NO: 1858971
uugcauagaggccaucgau

SEQ ID NO: 1858973 - RNA, 19 nt, Artificial Sequence
  Description of Artificial Sequence: Synthetic oligonucleotide
  Sense strand starting at position 3847 of SEQ ID NO: 1564158
gagaacuacuucuuuaggu

SEQ ID NO: 1858974 - RNA, 19 nt, Artificial Sequence
  Description of Artificial Sequence: Synthetic oligonucleotide
  Antisense strand to SEQ ID NO: 1858973
accuaaagaaguaguucuc

SEQ ID NO: 1858975 - RNA, 19 nt, Artificial Sequence
  Description of Artificial Sequence: Synthetic oligonucleotide
  Sense strand starting at position 3856 of SEQ ID NO: 1564158
uucuuuaggucuguaaaca

SEQ ID NO: 1858976 - RNA, 19 nt, Artificial Sequence
  Description of Artificial Sequence: Synthetic oligonucleotide
  Antisense strand to SEQ ID NO: 1858975
uguuuacagaccuaaagaa

SEQ ID NO: 1858977 - RNA, 19 nt, Artificial Sequence
  Description of Artificial Sequence: Synthetic oligonucleotide
  Sense strand starting at position 3857 of SEQ ID NO: 1564158
ucuuuaggucuguaaacaa

SEQ ID NO: 1858978 - RNA, 19 nt, Artificial Sequence
  Description of Artificial Sequence: Synthetic oligonucleotide
  Antisense strand to SEQ ID NO: 1858977
uuguuuacagaccuaaaga

SEQ ID NO: 1858979 - RNA, 19 nt, Artificial Sequence
  Description of Artificial Sequence: Synthetic oligonucleotide
  Sense strand starting at position 3864 of SEQ ID NO: 1564158
gucuguaaacaaggguuaa

SEQ ID NO: 1858980 - RNA, 19 nt, Artificial Sequence
  Description of Artificial Sequence: Synthetic oligonucleotide
  Antisense strand to SEQ ID NO: 1858979
uuaacccuuguuuacagac

SEQ ID NO: 1858981 - RNA, 19 nt, Artificial Sequence
  Description of Artificial Sequence: Synthetic oligonucleotide
  Sense strand starting at position 3981 of SEQ ID NO: 1564158
uucuauuacugggcugaga

SEQ ID NO: 1858982 - RNA, 19 nt, Artificial Sequence
  Description of Artificial Sequence: Synthetic oligonucleotide
  Antisense strand to SEQ ID NO: 1858981
ucucagcccaguaauagaa

SEQ ID NO: 1858983 - RNA, 19 nt, Artificial Sequence
  Description of Artificial Sequence: Synthetic oligonucleotide
  Sense strand starting at position 3983 of SEQ ID NO: 1564158
cuauuacugggcugagaag

SEQ ID NO: 1858984 - RNA, 19 nt, Artificial Sequence
  Description of Artificial Sequence: Synthetic oligonucleotide
  Antisense strand to SEQ ID NO: 1858983
cuucucagcccaguaauag

SEQ ID NO: 1858985 - RNA, 19 nt, Artificial Sequence
  Description of Artificial Sequence: Synthetic oligonucleotide
  Sense strand starting at position 55 of SEQ ID NO: 1564159
auaacaagacucuguuugu

SEQ ID NO: 1858986 - RNA, 19 nt, Artificial Sequence
  Description of Artificial Sequence: Synthetic oligonucleotide
  Antisense strand to SEQ ID NO: 1858985
acaaacagagucuuguuau

SEQ ID NO: 1858987 - RNA, 19 nt, Artificial Sequence
  Description of Artificial Sequence: Synthetic oligonucleotide
  Sense strand starting at position 58 of SEQ ID NO: 1564159
acaagacucuguuuguuau

SEQ ID NO: 1858988 - RNA, 19 nt, Artificial Sequence
  Description of Artificial Sequence: Synthetic oligonucleotide
  Antisense strand to SEQ ID NO: 1858987
auaacaaacagagucuugu

SEQ ID NO: 1858989 - RNA, 19 nt, Artificial Sequence
  Description of Artificial Sequence: Synthetic oligonucleotide
  Sense strand starting at position 71 of SEQ ID NO: 1564159
uguuauuuauggucccuuu

SEQ ID NO: 1858990 - RNA, 19 nt, Artificial Sequence
  Description of Artificial Sequence: Synthetic oligonucleotide
  Antisense strand to SEQ ID NO: 1858989
aaagggaccauaaauaaca

SEQ ID NO: 1858991 - RNA, 19 nt, Artificial Sequence
  Description of Artificial Sequence: Synthetic oligonucleotide
  Sense strand starting at position 308 of SEQ ID NO: 1564159
cugggaaagcguuagcaua

SEQ ID NO: 1858992 - RNA, 19 nt, Artificial Sequence
  Description of Artificial Sequence: Synthetic oligonucleotide
  Antisense strand to SEQ ID NO: 1858991
uaugcuaacgcuuucccag

SEQ ID NO: 1858993 - RNA, 19 nt, Artificial Sequence
  Description of Artificial Sequence: Synthetic oligonucleotide
  Sense strand starting at position 320 of SEQ ID NO: 1564159
uagcauauguggucuaaga

SEQ ID NO: 1858994 - RNA, 19 nt, Artificial Sequence
  Description of Artificial Sequence: Synthetic oligonucleotide
  Antisense strand to SEQ ID NO: 1858993
ucuuagaccacauaugcua

SEQ ID NO: 1858995 - RNA, 19 nt, Artificial Sequence
  Description of Artificial Sequence: Synthetic oligonucleotide
  Sense strand starting at position 322 of SEQ ID NO: 1564159
gcauauguggucuaagaau

SEQ ID NO: 1858996 - RNA, 19 nt, Artificial Sequence
  Description of Artificial Sequence: Synthetic oligonucleotide
  Antisense strand to SEQ ID NO: 1858995
auucuuagaccacauaugc

SEQ ID NO: 1858997 - RNA, 19 nt, Artificial Sequence
  Description of Artificial Sequence: Synthetic oligonucleotide
  Sense strand starting at position 331 of SEQ ID NO: 1564159
gucuaagaauuugaacacu

SEQ ID NO: 1858998 - RNA, 19 nt, Artificial Sequence
  Description of Artificial Sequence: Synthetic oligonucleotide
  Antisense strand to SEQ ID NO: 1858997
aguguucaaauucuuagac

SEQ ID NO: 1858999 - RNA, 19 nt, Artificial Sequence
  Description of Artificial Sequence: Synthetic oligonucleotide
  Sense strand starting at position 485 of SEQ ID NO: 1564159
auugauuauugucugucau

SEQ ID NO: 1859000 - RNA, 19 nt, Artificial Sequence
  Description of Artificial Sequence: Synthetic oligonucleotide
  Antisense strand to SEQ ID NO: 1858999
augacagacaauaaucaau

SEQ ID NO: 1859001 - RNA, 19 nt, Artificial Sequence
  Description of Artificial Sequence: Synthetic oligonucleotide
  Sense strand starting at position 486 of SEQ ID NO: 1564159
uugauuauugucugucaua

SEQ ID NO: 1859002 - RNA, 19 nt, Artificial Sequence
  Description of Artificial Sequence: Synthetic oligonucleotide
  Antisense strand to SEQ ID NO: 1859001
uaugacagacaauaaucaa

SEQ ID NO: 1859003 - RNA, 19 nt, Artificial Sequence
  Description of Artificial Sequence: Synthetic oligonucleotide
  Sense strand starting at position 487 of SEQ ID NO: 1564159
ugauuauugucugucauau

SEQ ID NO: 1859004 - RNA, 19 nt, Artificial Sequence
  Description of Artificial Sequence: Synthetic oligonucleotide
  Antisense strand to SEQ ID NO: 1859003
auaugacagacaauaauca

SEQ ID NO: 1859005 - RNA, 19 nt, Artificial Sequence
  Description of Artificial Sequence: Synthetic oligonucleotide
  Sense strand starting at position 493 of SEQ ID NO: 1564159
uugucugucauauagggaa

SEQ ID NO: 1859006 - RNA, 19 nt, Artificial Sequence
  Description of Artificial Sequence: Synthetic oligonucleotide
  Antisense strand to SEQ ID NO: 1859005
uucccuauaugacagacaa

SEQ ID NO: 1859007 - RNA, 19 nt, Artificial Sequence
  Description of Artificial Sequence: Synthetic oligonucleotide
  Sense strand starting at position 495 of SEQ ID NO: 1564159
gucugucauauagggaagu

SEQ ID NO: 1859008 - RNA, 19 nt, Artificial Sequence
  Description of Artificial Sequence: Synthetic oligonucleotide
  Antisense strand to SEQ ID NO: 1859007
acuucccuauaugacagac

SEQ ID NO: 1859009 - RNA, 19 nt, Artificial Sequence
  Description of Artificial Sequence: Synthetic oligonucleotide
  Sense strand starting at position 546 of SEQ ID NO: 1564159
uuguauuggacaggacuga

SEQ ID NO: 1859010 - RNA, 19 nt, Artificial Sequence
  Description of Artificial Sequence: Synthetic oligonucleotide
  Antisense strand to SEQ ID NO: 1859009
ucaguccuguccaauacaa

SEQ ID NO: 1859011 - RNA, 19 nt, Artificial Sequence
  Description of Artificial Sequence: Synthetic oligonucleotide
  Sense strand starting at position 800 of SEQ ID NO: 1564159
cccuaaugggacgagaguu

SEQ ID NO: 1859012 - RNA, 19 nt, Artificial Sequence
  Description of Artificial Sequence: Synthetic oligonucleotide
  Antisense strand to SEQ ID NO: 1859011
aacucucgucccauuaggg

SEQ ID NO: 1859013 - RNA, 19 nt, Artificial Sequence
  Description of Artificial Sequence: Synthetic oligonucleotide
  Sense strand starting at position 833 of SEQ ID NO: 1564159
gggcaaauacuuuguaaau

SEQ ID NO: 1859014 - RNA, 19 nt, Artificial Sequence
  Description of Artificial Sequence: Synthetic oligonucleotide
  Antisense strand to SEQ ID NO: 1859013
auuuacaaaguauuugccc

SEQ ID NO: 1859015 - RNA, 19 nt, Artificial Sequence
  Description of Artificial Sequence: Synthetic oligonucleotide
  Sense strand starting at position 870 of SEQ ID NO: 1564159
ugcccauugguauaaauug

SEQ ID NO: 1859016 - RNA, 19 nt, Artificial Sequence
  Description of Artificial Sequence: Synthetic oligonucleotide
  Antisense strand to SEQ ID NO: 1859015
caauuuauaccaaugggca

SEQ ID NO: 1859017 - RNA, 19 nt, Artificial Sequence
  Description of Artificial Sequence: Synthetic oligonucleotide
  Sense strand starting at position 990 of SEQ ID NO: 1564159
gguagauucuggccagagu

SEQ ID NO: 1859018 - RNA, 19 nt, Artificial Sequence
  Description of Artificial Sequence: Synthetic oligonucleotide
  Antisense strand to SEQ ID NO: 1859017
acucuggccagaaucuacc

SEQ ID NO: 1859019 - RNA, 19 nt, Artificial Sequence
  Description of Artificial Sequence: Synthetic oligonucleotide
  Sense strand starting at position 1411 of SEQ ID NO: 1564159
auacuugacucaccagagu

SEQ ID NO: 1859020 - RNA, 19 nt, Artificial Sequence
  Description of Artificial Sequence: Synthetic oligonucleotide
  Antisense strand to SEQ ID NO: 1859019
acucuggugagucaaguau

SEQ ID NO: 1859021 - RNA, 19 nt, Artificial Sequence
  Description of Artificial Sequence: Synthetic oligonucleotide
  Sense strand starting at position 1447 of SEQ ID NO: 1564159
ugcugugggcugagaaguu

SEQ ID NO: 1859022 - RNA, 19 nt, Artificial Sequence
  Description of Artificial Sequence: Synthetic oligonucleotide
  Antisense strand to SEQ ID NO: 1859021
aacuucucagcccacagca

SEQ ID NO: 1859023 - RNA, 19 nt, Artificial Sequence
  Description of Artificial Sequence: Synthetic oligonucleotide
  Sense strand starting at position 1457 of SEQ ID NO: 1564159
ugagaaguugcugggaaca

SEQ ID NO: 1859024 - RNA, 19 nt, Artificial Sequence
  Description of Artificial Sequence: Synthetic oligonucleotide
  Antisense strand to SEQ ID NO: 1859023
uguucccagcaacuucuca

SEQ ID NO: 1859025 - RNA, 19 nt, Artificial Sequence
  Description of Artificial Sequence: Synthetic oligonucleotide
  Sense strand starting at position 1632 of SEQ ID NO: 1564159
ggguuaguugcagaucuua

SEQ ID NO: 1859026 - RNA, 19 nt, Artificial Sequence
  Description of Artificial Sequence: Synthetic oligonucleotide
  Antisense strand to SEQ ID NO: 1859025
uaagaucugcaacuaaccc

SEQ ID NO: 1859027 - RNA, 19 nt, Artificial Sequence
  Description of Artificial Sequence: Synthetic oligonucleotide
  Sense strand starting at position 2041 of SEQ ID NO: 1564159
auguguugcacugaagaac

SEQ ID NO: 1859028 - RNA, 19 nt, Artificial Sequence
  Description of Artificial Sequence: Synthetic oligonucleotide
  Antisense strand to SEQ ID NO: 1859027
guucuucagugcaacacau

SEQ ID NO: 1859029 - RNA, 19 nt, Artificial Sequence
  Description of Artificial Sequence: Synthetic oligonucleotide
  Sense strand starting at position 2139 of SEQ ID NO: 1564159
ggaagacuguagcugacuu

SEQ ID NO: 1859030 - RNA, 19 nt, Artificial Sequence
  Description of Artificial Sequence: Synthetic oligonucleotide
  Antisense strand to SEQ ID NO: 1859029
aagucagcuacagucuucc

SEQ ID NO: 1859031 - RNA, 19 nt, Artificial Sequence
  Description of Artificial Sequence: Synthetic oligonucleotide
  Sense strand starting at position 2146 of SEQ ID NO: 1564159
uguagcugacuuugacauu

SEQ ID NO: 1859032 - RNA, 19 nt, Artificial Sequence
  Description of Artificial Sequence: Synthetic oligonucleotide
  Antisense strand to SEQ ID NO: 1859031
aaugucaaagucagcuaca

SEQ ID NO: 1859033 - RNA, 19 nt, Artificial Sequence
  Description of Artificial Sequence: Synthetic oligonucleotide
  Sense strand starting at position 2211 of SEQ ID NO: 1564159
ucuugcaaucuauauggua

SEQ ID NO: 1859034 - RNA, 19 nt, Artificial Sequence
  Description of Artificial Sequence: Synthetic oligonucleotide
  Antisense strand to SEQ ID NO: 1859033
uaccauauagauugcaaga

SEQ ID NO: 1859035 - RNA, 19 nt, Artificial Sequence
  Description of Artificial Sequence: Synthetic oligonucleotide
  Sense strand starting at position 2224 of SEQ ID NO: 1564159
augguaucacgucagauac

SEQ ID NO: 1859036 - RNA, 19 nt, Artificial Sequence
  Description of Artificial Sequence: Synthetic oligonucleotide
  Antisense strand to SEQ ID NO: 1859035
guaucugacgugauaccau

SEQ ID NO: 1859037 - RNA, 19 nt, Artificial Sequence
  Description of Artificial Sequence: Synthetic oligonucleotide
  Sense strand starting at position 2348 of SEQ ID NO: 1564159
uacuucuugcccgaaggau

SEQ ID NO: 1859038 - RNA, 19 nt, Artificial Sequence
  Description of Artificial Sequence: Synthetic oligonucleotide
  Antisense strand to SEQ ID NO: 1859037
auccuucgggcaagaagua

SEQ ID NO: 1859039 - RNA, 19 nt, Artificial Sequence
  Description of Artificial Sequence: Synthetic oligonucleotide
  Sense strand starting at position 2454 of SEQ ID NO: 1564159
cccaguggucucugaugga

SEQ ID NO: 1859040 - RNA, 19 nt, Artificial Sequence
  Description of Artificial Sequence: Synthetic oligonucleotide
  Antisense strand to SEQ ID NO: 1859039
uccaucagagaccacuggg

SEQ ID NO: 1859041 - RNA, 19 nt, Artificial Sequence
  Description of Artificial Sequence: Synthetic oligonucleotide
  Sense strand starting at position 2805 of SEQ ID NO: 1564159
uguaauagcuacguaaaga

SEQ ID NO: 1859042 - RNA, 19 nt, Artificial Sequence
  Description of Artificial Sequence: Synthetic oligonucleotide
  Antisense strand to SEQ ID NO: 1859041
ucuuuacguagcuauuaca

SEQ ID NO: 1859043 - RNA, 19 nt, Artificial Sequence
  Description of Artificial Sequence: Synthetic oligonucleotide
  Sense strand starting at position 2806 of SEQ ID NO: 1564159
guaauagcuacguaaagaa

SEQ ID NO: 1859044 - RNA, 19 nt, Artificial Sequence
  Description of Artificial Sequence: Synthetic oligonucleotide
  Antisense strand to SEQ ID NO: 1859043
uucuuuacguagcuauuac

SEQ ID NO: 1859045 - RNA, 19 nt, Artificial Sequence
  Description of Artificial Sequence: Synthetic oligonucleotide
  Sense strand starting at position 3302 of SEQ ID NO: 1564159
cuagguauuugagaaacau

SEQ ID NO: 1859046 - RNA, 19 nt, Artificial Sequence
  Description of Artificial Sequence: Synthetic oligonucleotide
  Antisense strand to SEQ ID NO: 1859045
auguuucucaaauaccuag

SEQ ID NO: 1859047 - RNA, 19 nt, Artificial Sequence
  Description of Artificial Sequence: Synthetic oligonucleotide
  Sense strand starting at position 3413 of SEQ ID NO: 1564159
agggaaucuuuacugguca

SEQ ID NO: 1859048 - RNA, 19 nt, Artificial Sequence
  Description of Artificial Sequence: Synthetic oligonucleotide
  Antisense strand to SEQ ID NO: 1859047
ugaccaguaaagauucccu

SEQ ID NO: 1859049 - RNA, 19 nt, Artificial Sequence
  Description of Artificial Sequence: Synthetic oligonucleotide
  Sense strand starting at position 3420 of SEQ ID NO: 1564159
cuuuacuggucaucuacua

SEQ ID NO: 1859050 - RNA, 19 nt, Artificial Sequence
  Description of Artificial Sequence: Synthetic oligonucleotide
  Antisense strand to SEQ ID NO: 1859049
uaguagaugaccaguaaag

SEQ ID NO: 1859051 - RNA, 19 nt, Artificial Sequence
  Description of Artificial Sequence: Synthetic oligonucleotide
  Sense strand starting at position 3427 of SEQ ID NO: 1564159
ggucaucuacuauaagcua

SEQ ID NO: 1859052 - RNA, 19 nt, Artificial Sequence
  Description of Artificial Sequence: Synthetic oligonucleotide
  Antisense strand to SEQ ID NO: 1859051
uagcuuauaguagaugacc

SEQ ID NO: 1859053 - RNA, 19 nt, Artificial Sequence
  Description of Artificial Sequence: Synthetic oligonucleotide
  Sense strand starting at position 3457 of SEQ ID NO: 1564159
uacaguggugagcaaguaa

SEQ ID NO: 1859054 - RNA, 19 nt, Artificial Sequence
  Description of Artificial Sequence: Synthetic oligonucleotide
  Antisense strand to SEQ ID NO: 1859053
uuacuugcucaccacugua

SEQ ID NO: 1859055 - RNA, 19 nt, Artificial Sequence
  Description of Artificial Sequence: Synthetic oligonucleotide
  Sense strand starting at position 3471 of SEQ ID NO: 1564159
aguaaugugugauucuuga

SEQ ID NO: 1859056 - RNA, 19 nt, Artificial Sequence
  Description of Artificial Sequence: Synthetic oligonucleotide
  Antisense strand to SEQ ID NO: 1859055
ucaagaaucacacauuacu

SEQ ID NO: 1859057 - RNA, 19 nt, Artificial Sequence
  Description of Artificial Sequence: Synthetic oligonucleotide
  Sense strand starting at position 3478 of SEQ ID NO: 1564159
ugugauucuugaucuuaug

SEQ ID NO: 1859058 - RNA, 19 nt, Artificial Sequence
  Description of Artificial Sequence: Synthetic oligonucleotide
  Antisense strand to SEQ ID NO: 1859057
cauaagaucaagaaucaca

SEQ ID NO: 1859059 - RNA, 19 nt, Artificial Sequence
  Description of Artificial Sequence: Synthetic oligonucleotide
  Sense strand starting at position 3516 of SEQ ID NO: 1564159
cagaguuuauguuuaguag

SEQ ID NO: 1859060 - RNA, 19 nt, Artificial Sequence
  Description of Artificial Sequence: Synthetic oligonucleotide
  Antisense strand to SEQ ID NO: 1859059
cuacuaaacauaaacucug

SEQ ID NO: 1859061 - RNA, 19 nt, Artificial Sequence
  Description of Artificial Sequence: Synthetic oligonucleotide
  Sense strand starting at position 3581 of SEQ ID NO: 1564159
accguaauagacugccaaa

SEQ ID NO: 1859062 - RNA, 19 nt, Artificial Sequence
  Description of Artificial Sequence: Synthetic oligonucleotide
  Antisense strand to SEQ ID NO: 1859061
uuuggcagucuauuacggu

SEQ ID NO: 1859063 - RNA, 19 nt, Artificial Sequence
  Description of Artificial Sequence: Synthetic oligonucleotide
  Sense strand starting at position 3825 of SEQ ID NO: 1564159
uaaacucgugugugagaaa

SEQ ID NO: 1859064 - RNA, 19 nt, Artificial Sequence
  Description of Artificial Sequence: Synthetic oligonucleotide
  Antisense strand to SEQ ID NO: 1859063
uuucucacacacgaguuua

SEQ ID NO: 1859065 - RNA, 19 nt, Artificial Sequence
  Description of Artificial Sequence: Synthetic oligonucleotide
  Sense strand starting at position 29 of SEQ ID NO: 1564160
gggagagaugccuggguaa

SEQ ID NO: 1859066 - RNA, 19 nt, Artificial Sequence
  Description of Artificial Sequence: Synthetic oligonucleotide
  Antisense strand to SEQ ID NO: 1859065
uuacccaggcaucucuccc

SEQ ID NO: 1859067 - RNA, 19 nt, Artificial Sequence
  Description of Artificial Sequence: Synthetic oligonucleotide
  Sense strand starting at position 31 of SEQ ID NO: 1564160
gagagaugccuggguaagg

SEQ ID NO: 1859068 - RNA, 19 nt, Artificial Sequence
  Description of Artificial Sequence: Synthetic oligonucleotide
  Antisense strand to SEQ ID NO: 1859067
ccuuacccaggcaucucuc

SEQ ID NO: 1859069 - RNA, 19 nt, Artificial Sequence
  Description of Artificial Sequence: Synthetic oligonucleotide
  Sense strand starting at position 164 of SEQ ID NO: 1564160
auccaagugcucggucaca

SEQ ID NO: 1859070 - RNA, 19 nt, Artificial Sequence
  Description of Artificial Sequence: Synthetic oligonucleotide
  Antisense strand to SEQ ID NO: 1859069
ugugaccgagcacuuggau

SEQ ID NO: 1859071 - RNA, 19 nt, Artificial Sequence
  Description of Artificial Sequence: Synthetic oligonucleotide
  Sense strand starting at position 201 of SEQ ID NO: 1564160
gcgggauggcugugaagga

SEQ ID NO: 1859072 - RNA, 19 nt, Artificial Sequence
  Description of Artificial Sequence: Synthetic oligonucleotide
  Antisense strand to SEQ ID NO: 1859071
uccuucacagccaucccgc

SEQ ID NO: 1859073 - RNA, 19 nt, Artificial Sequence
  Description of Artificial Sequence: Synthetic oligonucleotide
  Sense strand starting at position 202 of SEQ ID NO: 1564160
cgggauggcugugaaggaa

SEQ ID NO: 1859074 - RNA, 19 nt, Artificial Sequence
  Description of Artificial Sequence: Synthetic oligonucleotide
  Antisense strand to SEQ ID NO: 1859073
uuccuucacagccaucccg

SEQ ID NO: 1859075 - RNA, 19 nt, Artificial Sequence
  Description of Artificial Sequence: Synthetic oligonucleotide
  Sense strand starting at position 381 of SEQ ID NO: 1564160
ggacgaguuacugaaggca

SEQ ID NO: 1859076 - RNA, 19 nt, Artificial Sequence
  Description of Artificial Sequence: Synthetic oligonucleotide
  Antisense strand to SEQ ID NO: 1859075
ugccuucaguaacucgucc

SEQ ID NO: 1859077 - RNA, 19 nt, Artificial Sequence
  Description of Artificial Sequence: Synthetic oligonucleotide
  Sense strand starting at position 394 of SEQ ID NO: 1564160
aaggcauccucagcagaga

SEQ ID NO: 1859078 - RNA, 19 nt, Artificial Sequence
  Description of Artificial Sequence: Synthetic oligonucleotide
  Antisense strand to SEQ ID NO: 1859077
ucucugcugaggaugccuu

SEQ ID NO: 1859079 - RNA, 19 nt, Artificial Sequence
  Description of Artificial Sequence: Synthetic oligonucleotide
  Sense strand starting at position 397 of SEQ ID NO: 1564160
gcauccucagcagagacau

SEQ ID NO: 1859080 - RNA, 19 nt, Artificial Sequence
  Description of Artificial Sequence: Synthetic oligonucleotide
  Antisense strand to SEQ ID NO: 1859079
augucucugcugaggaugc

SEQ ID NO: 1859081 - RNA, 19 nt, Artificial Sequence
  Description of Artificial Sequence: Synthetic oligonucleotide
  Sense strand starting at position 516 of SEQ ID NO: 1564160
gcguuuccugaagaaguaa

SEQ ID NO: 1859082 - RNA, 19 nt, Artificial Sequence
  Description of Artificial Sequence: Synthetic oligonucleotide
  Antisense strand to SEQ ID NO: 1859081
uuacuucuucaggaaacgc

SEQ ID NO: 1859083 - RNA, 19 nt, Artificial Sequence
  Description of Artificial Sequence: Synthetic oligonucleotide
  Sense strand starting at position 539 of SEQ ID NO: 1564160
gagagacucugguuccaga

SEQ ID NO: 1859084 - RNA, 19 nt, Artificial Sequence
  Description of Artificial Sequence: Synthetic oligonucleotide
  Antisense strand to SEQ ID NO: 1859083
ucuggaaccagagucucuc

SEQ ID NO: 1859085 - RNA, 19 nt, Artificial Sequence
  Description of Artificial Sequence: Synthetic oligonucleotide
  Sense strand starting at position 564 of SEQ ID NO: 1564160
acuuguuagcugugagaga

SEQ ID NO: 1859086 - RNA, 19 nt, Artificial Sequence
  Description of Artificial Sequence: Synthetic oligonucleotide
  Antisense strand to SEQ ID NO: 1859085
ucucucacagcuaacaagu

SEQ ID NO: 1859087 - RNA, 19 nt, Artificial Sequence
  Description of Artificial Sequence: Synthetic oligonucleotide
  Sense strand starting at position 836 of SEQ ID NO: 1564160
uucuguguccugccuaagu

SEQ ID NO: 1859088 - RNA, 19 nt, Artificial Sequence
  Description of Artificial Sequence: Synthetic oligonucleotide
  Antisense strand to SEQ ID NO: 1859087
acuuaggcaggacacagaa

SEQ ID NO: 1859089 - RNA, 19 nt, Artificial Sequence
  Description of Artificial Sequence: Synthetic oligonucleotide
  Sense strand starting at position 904 of SEQ ID NO: 1564160
aggcuuguccucuggauac

SEQ ID NO: 1859090 - RNA, 19 nt, Artificial Sequence
  Description of Artificial Sequence: Synthetic oligonucleotide
  Antisense strand to SEQ ID NO: 1859089
guauccagaggacaagccu

SEQ ID NO: 1859091 - RNA, 19 nt, Artificial Sequence
  Description of Artificial Sequence: Synthetic oligonucleotide
  Sense strand starting at position 906 of SEQ ID NO: 1564160
gcuuguccucuggauacgu

SEQ ID NO: 1859092 - RNA, 19 nt, Artificial Sequence
  Description of Artificial Sequence: Synthetic oligonucleotide
  Antisense strand to SEQ ID NO: 1859091
acguauccagaggacaagc

SEQ ID NO: 1859093 - RNA, 19 nt, Artificial Sequence
  Description of Artificial Sequence: Synthetic oligonucleotide
  Sense strand starting at position 915 of SEQ ID NO: 1564160
cuggauacgucccugacua

SEQ ID NO: 1859094 - RNA, 19 nt, Artificial Sequence
  Description of Artificial Sequence: Synthetic oligonucleotide
  Antisense strand to SEQ ID NO: 1859093
uagucagggacguauccag

SEQ ID NO: 1859095 - RNA, 19 nt, Artificial Sequence
  Description of Artificial Sequence: Synthetic oligonucleotide
  Sense strand starting at position 916 of SEQ ID NO: 1564160
uggauacgucccugacuau

SEQ ID NO: 1859096 - RNA, 19 nt, Artificial Sequence
  Description of Artificial Sequence: Synthetic oligonucleotide
  Antisense strand to SEQ ID NO: 1859095
auagucagggacguaucca

SEQ ID NO: 1859097 - RNA, 19 nt, Artificial Sequence
  Description of Artificial Sequence: Synthetic oligonucleotide
  Sense strand starting at position 917 of SEQ ID NO: 1564160
ggauacgucccugacuaua

SEQ ID NO: 1859098 - RNA, 19 nt, Artificial Sequence
  Description of Artificial Sequence: Synthetic oligonucleotide
  Antisense strand to SEQ ID NO: 1859097
uauagucagggacguaucc

SEQ ID NO: 1859099 - RNA, 19 nt, Artificial Sequence
  Description of Artificial Sequence: Synthetic oligonucleotide
  Sense strand starting at position 919 of SEQ ID NO: 1564160
auacgucccugacuauagu

SEQ ID NO: 1859100 - RNA, 19 nt, Artificial Sequence
  Description of Artificial Sequence: Synthetic oligonucleotide
  Antisense strand to SEQ ID NO: 1859099
acuauagucagggacguau

SEQ ID NO: 1859101 - RNA, 19 nt, Artificial Sequence
  Description of Artificial Sequence: Synthetic oligonucleotide
  Sense strand starting at position 2462 of SEQ ID NO: 1564160
gcugucaccuccuuagugu

SEQ ID NO: 1859102 - RNA, 19 nt, Artificial Sequence
  Description of Artificial Sequence: Synthetic oligonucleotide
  Antisense strand to SEQ ID NO: 1859101
acacuaaggaggugacagc

SEQ ID NO: 1859103 - RNA, 19 nt, Artificial Sequence
  Description of Artificial Sequence: Synthetic oligonucleotide
  Sense strand starting at position 2469 of SEQ ID NO: 1564160
ccuccuuaguguccuugaa

SEQ ID NO: 1859104 - RNA, 19 nt, Artificial Sequence
  Description of Artificial Sequence: Synthetic oligonucleotide
  Antisense strand to SEQ ID NO: 1859103
uucaaggacacuaaggagg

SEQ ID NO: 1859105 - RNA, 19 nt, Artificial Sequence
  Description of Artificial Sequence: Synthetic oligonucleotide
  Sense strand starting at position 2473 of SEQ ID NO: 1564160
cuuaguguccuugaaggag

SEQ ID NO: 1859106 - RNA, 19 nt, Artificial Sequence
  Description of Artificial Sequence: Synthetic oligonucleotide
  Antisense strand to SEQ ID NO: 1859105
cuccuucaaggacacuaag

SEQ ID NO: 1859107 - RNA, 19 nt, Artificial Sequence
  Description of Artificial Sequence: Synthetic oligonucleotide
  Sense strand starting at position 2499 of SEQ ID NO: 1564160
gaggcagucacucacguau

SEQ ID NO: 1859108 - RNA, 19 nt, Artificial Sequence
  Description of Artificial Sequence: Synthetic oligonucleotide
  Antisense strand to SEQ ID NO: 1859107
auacgugagugacugccuc

SEQ ID NO: 1859109 - RNA, 19 nt, Artificial Sequence
  Description of Artificial Sequence: Synthetic oligonucleotide
  Sense strand starting at position 2605 of SEQ ID NO: 1564160
caccuaucccgguggcaaa

SEQ ID NO: 1859110 - RNA, 19 nt, Artificial Sequence
  Description of Artificial Sequence: Synthetic oligonucleotide
  Antisense strand to SEQ ID NO: 1859109
uuugccaccgggauaggug

SEQ ID NO: 1859111 - RNA, 19 nt, Artificial Sequence
  Description of Artificial Sequence: Synthetic oligonucleotide
  Sense strand starting at position 2767 of SEQ ID NO: 1564160
ugcguauucagguccgagu

SEQ ID NO: 1859112 - RNA, 19 nt, Artificial Sequence
  Description of Artificial Sequence: Synthetic oligonucleotide
  Antisense strand to SEQ ID NO: 1859111
acucggaccugaauacgca

SEQ ID NO: 1859113 - RNA, 19 nt, Artificial Sequence
  Description of Artificial Sequence: Synthetic oligonucleotide
  Sense strand starting at position 2778 of SEQ ID NO: 1564160
guccgagucuucuuuccuu

SEQ ID NO: 1859114 - RNA, 19 nt, Artificial Sequence
  Description of Artificial Sequence: Synthetic oligonucleotide
  Antisense strand to SEQ ID NO: 1859113
aaggaaagaagacucggac

SEQ ID NO: 1859115 - RNA, 19 nt, Artificial Sequence
  Description of Artificial Sequence: Synthetic oligonucleotide
  Sense strand starting at position 2781 of SEQ ID NO: 1564160
cgagucuucuuuccuuaca

SEQ ID NO: 1859116 - RNA, 19 nt, Artificial Sequence
  Description of Artificial Sequence: Synthetic oligonucleotide
  Antisense strand to SEQ ID NO: 1859115
uguaaggaaagaagacucg

SEQ ID NO: 1859117 - RNA, 19 nt, Artificial Sequence
  Description of Artificial Sequence: Synthetic oligonucleotide
  Sense strand starting at position 2812 of SEQ ID NO: 1564160
gagguuaauuuagguccua

SEQ ID NO: 1859118 - RNA, 19 nt, Artificial Sequence
  Description of Artificial Sequence: Synthetic oligonucleotide
  Antisense strand to SEQ ID NO: 1859117
uaggaccuaaauuaaccuc

SEQ ID NO: 1859119 - RNA, 19 nt, Artificial Sequence
  Description of Artificial Sequence: Synthetic oligonucleotide
  Sense strand starting at position 3034 of SEQ ID NO: 1564160
uccagaacuccgugacuuu

SEQ ID NO: 1859120 - RNA, 19 nt, Artificial Sequence
  Description of Artificial Sequence: Synthetic oligonucleotide
  Antisense strand to SEQ ID NO: 1859119
aaagucacggaguucugga

SEQ ID NO: 1859121 - RNA, 19 nt, Artificial Sequence
  Description of Artificial Sequence: Synthetic oligonucleotide
  Sense strand starting at position 3068 of SEQ ID NO: 1564160
ggacaucucuacuugccau

SEQ ID NO: 1859122 - RNA, 19 nt, Artificial Sequence
  Description of Artificial Sequence: Synthetic oligonucleotide
  Antisense strand to SEQ ID NO: 1859121
auggcaaguagagaugucc

SEQ ID NO: 1859123 - RNA, 19 nt, Artificial Sequence
  Description of Artificial Sequence: Synthetic oligonucleotide
  Sense strand starting at position 3111 of SEQ ID NO: 1564160
gagacugcuugugccuaau

SEQ ID NO: 1859124 - RNA, 19 nt, Artificial Sequence
  Description of Artificial Sequence: Synthetic oligonucleotide
  Antisense strand to SEQ ID NO: 1859123
auuaggcacaagcagucuc

SEQ ID NO: 1859125 - RNA, 19 nt, Artificial Sequence
  Description of Artificial Sequence: Synthetic oligonucleotide
  Sense strand starting at position 3113 of SEQ ID NO: 1564160
gacugcuugugccuaauga

SEQ ID NO: 1859126 - RNA, 19 nt, Artificial Sequence
  Description of Artificial Sequence: Synthetic oligonucleotide
  Antisense strand to SEQ ID NO: 1859125
ucauuaggcacaagcaguc

SEQ ID NO: 1859127 - RNA, 19 nt, Artificial Sequence
  Description of Artificial Sequence: Synthetic oligonucleotide
  Sense strand starting at position 3114 of SEQ ID NO: 1564160
acugcuugugccuaaugaa

SEQ ID NO: 1859128 - RNA, 19 nt, Artificial Sequence
  Description of Artificial Sequence: Synthetic oligonucleotide
  Antisense strand to SEQ ID NO: 1859127
uucauuaggcacaagcagu

SEQ ID NO: 1859129 - RNA, 19 nt, Artificial Sequence
  Description of Artificial Sequence: Synthetic oligonucleotide
  Sense strand starting at position 3342 of SEQ ID NO: 1564160
agugccuugcccugagacu

SEQ ID NO: 1859130 - RNA, 19 nt, Artificial Sequence
  Description of Artificial Sequence: Synthetic oligonucleotide
  Antisense strand to SEQ ID NO: 1859129
agucucagggcaaggcacu

SEQ ID NO: 1859131 - RNA, 19 nt, Artificial Sequence
  Description of Artificial Sequence: Synthetic oligonucleotide
  Sense strand starting at position 3400 of SEQ ID NO: 1564160
ggucuugaaucccacugau

SEQ ID NO: 1859132 - RNA, 19 nt, Artificial Sequence
  Description of Artificial Sequence: Synthetic oligonucleotide
  Antisense strand to SEQ ID NO: 1859131
aucagugggauucaagacc

SEQ ID NO: 1859133 - RNA, 19 nt, Artificial Sequence
  Description of Artificial Sequence: Synthetic oligonucleotide
  Sense strand starting at position 3465 of SEQ ID NO: 1564160
acagaaauaugccaaagac

SEQ ID NO: 1859134 - RNA, 19 nt, Artificial Sequence
  Description of Artificial Sequence: Synthetic oligonucleotide
  Antisense strand to SEQ ID NO: 1859133
gucuuuggcauauuucugu

SEQ ID NO: 1859135 - RNA, 19 nt, Artificial Sequence
  Description of Artificial Sequence: Synthetic oligonucleotide
  Sense strand starting at position 3516 of SEQ ID NO: 1564160
ggauguucuuucuuuccau

SEQ ID NO: 1859136 - RNA, 19 nt, Artificial Sequence
  Description of Artificial Sequence: Synthetic oligonucleotide
  Antisense strand to SEQ ID NO: 1859135
auggaaagaaagaacaucc

SEQ ID NO: 1859137 - RNA, 19 nt, Artificial Sequence
  Description of Artificial Sequence: Synthetic oligonucleotide
  Sense strand starting at position 3519 of SEQ ID NO: 1564160
uguucuuucuuuccaugga

SEQ ID NO: 1859138 - RNA, 19 nt, Artificial Sequence
  Description of Artificial Sequence: Synthetic oligonucleotide
  Antisense strand to SEQ ID NO: 1859137
uccauggaaagaaagaaca

SEQ ID NO: 1859139 - RNA, 19 nt, Artificial Sequence
  Description of Artificial Sequence: Synthetic oligonucleotide
  Sense strand starting at position 3560 of SEQ ID NO: 1564160
gcgggaggcguguacauau

SEQ ID NO: 1859140 - RNA, 19 nt, Artificial Sequence
  Description of Artificial Sequence: Synthetic oligonucleotide
  Antisense strand to SEQ ID NO: 1859139
auauguacacgccucccgc

SEQ ID NO: 1859141 - RNA, 19 nt, Artificial Sequence
  Description of Artificial Sequence: Synthetic oligonucleotide
  Sense strand starting at position 3592 of SEQ ID NO: 1564160
acacuuggcuccuuugauu

SEQ ID NO: 1859142 - RNA, 19 nt, Artificial Sequence
  Description of Artificial Sequence: Synthetic oligonucleotide
  Antisense strand to SEQ ID NO: 1859141
aaucaaaggagccaagugu

SEQ ID NO: 1859143 - RNA, 19 nt, Artificial Sequence
  Description of Artificial Sequence: Synthetic oligonucleotide
  Sense strand starting at position 3650 of SEQ ID NO: 1564160
uugcgaccuccugaaggaa

SEQ ID NO: 1859144 - RNA, 19 nt, Artificial Sequence
  Description of Artificial Sequence: Synthetic oligonucleotide
  Antisense strand to SEQ ID NO: 1859143
uuccuucaggaggucgcaa

SEQ ID NO: 1859145 - RNA, 19 nt, Artificial Sequence
  Description of Artificial Sequence: Synthetic oligonucleotide
  Sense strand starting at position 107 of SEQ ID NO: 1564161
ggacgaguuacugaaggca

SEQ ID NO: 1859146 - RNA, 19 nt, Artificial Sequence
  Description of Artificial Sequence: Synthetic oligonucleotide
  Antisense strand to SEQ ID NO: 1859145
ugccuucaguaacucgucc

SEQ ID NO: 1859147 - RNA, 19 nt, Artificial Sequence
  Description of Artificial Sequence: Synthetic oligonucleotide
  Sense strand starting at position 120 of SEQ ID NO: 1564161
aaggcauccucagcagaga

SEQ ID NO: 1859148 - RNA, 19 nt, Artificial Sequence
  Description of Artificial Sequence: Synthetic oligonucleotide
  Antisense strand to SEQ ID NO: 1859147
ucucugcugaggaugccuu

SEQ ID NO: 1859149 - RNA, 19 nt, Artificial Sequence
  Description of Artificial Sequence: Synthetic oligonucleotide
  Sense strand starting at position 123 of SEQ ID NO: 1564161
gcauccucagcagagacau

SEQ ID NO: 1859150 - RNA, 19 nt, Artificial Sequence
  Description of Artificial Sequence: Synthetic oligonucleotide
  Antisense strand to SEQ ID NO: 1859149
augucucugcugaggaugc

SEQ ID NO: 1859151 - RNA, 19 nt, Artificial Sequence
  Description of Artificial Sequence: Synthetic oligonucleotide
  Sense strand starting at position 242 of SEQ ID NO: 1564161
gcguuuccugaagaaguaa

SEQ ID NO: 1859152 - RNA, 19 nt, Artificial Sequence
  Description of Artificial Sequence: Synthetic oligonucleotide
  Antisense strand to SEQ ID NO: 1859151
uuacuucuucaggaaacgc

SEQ ID NO: 1859153 - RNA, 19 nt, Artificial Sequence
  Description of Artificial Sequence: Synthetic oligonucleotide
  Sense strand starting at position 265 of SEQ ID NO: 1564161
gagagacucugguuccaga

SEQ ID NO: 1859154 - RNA, 19 nt, Artificial Sequence
  Description of Artificial Sequence: Synthetic oligonucleotide
  Antisense strand to SEQ ID NO: 1859153
ucuggaaccagagucucuc

SEQ ID NO: 1859155 - RNA, 19 nt, Artificial Sequence
  Description of Artificial Sequence: Synthetic oligonucleotide
  Sense strand starting at position 290 of SEQ ID NO: 1564161
acuuguuagcugugagaga

SEQ ID NO: 1859156 - RNA, 19 nt, Artificial Sequence
  Description of Artificial Sequence: Synthetic oligonucleotide
  Antisense strand to SEQ ID NO: 1859155
ucucucacagcuaacaagu

SEQ ID NO: 1859157 - RNA, 19 nt, Artificial Sequence
  Description of Artificial Sequence: Synthetic oligonucleotide
  Sense strand starting at position 562 of SEQ ID NO: 1564161
uucuguguccugccuaagu

SEQ ID NO: 1859158 - RNA, 19 nt, Artificial Sequence
  Description of Artificial Sequence: Synthetic oligonucleotide
  Antisense strand to SEQ ID NO: 1859157
acuuaggcaggacacagaa

SEQ ID NO: 1859159 - RNA, 19 nt, Artificial Sequence
  Description of Artificial Sequence: Synthetic oligonucleotide
  Sense strand starting at position 630 of SEQ ID NO: 1564161
aggcuuguccucuggauac

SEQ ID NO: 1859160 - RNA, 19 nt, Artificial Sequence
  Description of Artificial Sequence: Synthetic oligonucleotide
  Antisense strand to SEQ ID NO: 1859159
guauccagaggacaagccu

SEQ ID NO: 1859161 - RNA, 19 nt, Artificial Sequence
  Description of Artificial Sequence: Synthetic oligonucleotide
  Sense strand starting at position 632 of SEQ ID NO: 1564161
gcuuguccucuggauacgu

SEQ ID NO: 1859162 - RNA, 19 nt, Artificial Sequence
  Description of Artificial Sequence: Synthetic oligonucleotide
  Antisense strand to SEQ ID NO: 1859161
acguauccagaggacaagc

SEQ ID NO: 1859163 - RNA, 19 nt, Artificial Sequence
  Description of Artificial Sequence: Synthetic oligonucleotide
  Sense strand starting at position 641 of SEQ ID NO: 1564161
cuggauacgucccugacua

SEQ ID NO: 1859164 - RNA, 19 nt, Artificial Sequence
  Description of Artificial Sequence: Synthetic oligonucleotide
  Antisense strand to SEQ ID NO: 1859163
uagucagggacguauccag

SEQ ID NO: 1859165 - RNA, 19 nt, Artificial Sequence
  Description of Artificial Sequence: Synthetic oligonucleotide
  Sense strand starting at position 642 of SEQ ID NO: 1564161
uggauacgucccugacuau

SEQ ID NO: 1859166 - RNA, 19 nt, Artificial Sequence
  Description of Artificial Sequence: Synthetic oligonucleotide
  Antisense strand to SEQ ID NO: 1859165
auagucagggacguaucca

SEQ ID NO: 1859167 - RNA, 19 nt, Artificial Sequence
  Description of Artificial Sequence: Synthetic oligonucleotide
  Sense strand starting at position 643 of SEQ ID NO: 1564161
ggauacgucccugacuaua

SEQ ID NO: 1859168 - RNA, 19 nt, Artificial Sequence
  Description of Artificial Sequence: Synthetic oligonucleotide
  Antisense strand to SEQ ID NO: 1859167
uauagucagggacguaucc

SEQ ID NO: 1859169 - RNA, 19 nt, Artificial Sequence
  Description of Artificial Sequence: Synthetic oligonucleotide
  Sense strand starting at position 645 of SEQ ID NO: 1564161
auacgucccugacuauagu

SEQ ID NO: 1859170 - RNA, 19 nt, Artificial Sequence
  Description of Artificial Sequence: Synthetic oligonucleotide
  Antisense strand to SEQ ID NO: 1859169
acuauagucagggacguau

SEQ ID NO: 1859171 - RNA, 19 nt, Artificial Sequence
  Description of Artificial Sequence: Synthetic oligonucleotide
  Sense strand starting at position 2195 of SEQ ID NO: 1564161
ccuccuuaguguccuugaa

SEQ ID NO: 1859172 - RNA, 19 nt, Artificial Sequence
  Description of Artificial Sequence: Synthetic oligonucleotide
  Antisense strand to SEQ ID NO: 1859171
uucaaggacacuaaggagg

SEQ ID NO: 1859173 - RNA, 19 nt, Artificial Sequence
  Description of Artificial Sequence: Synthetic oligonucleotide
  Sense strand starting at position 2199 of SEQ ID NO: 1564161
cuuaguguccuugaaggag

SEQ ID NO: 1859174 - RNA, 19 nt, Artificial Sequence
  Description of Artificial Sequence: Synthetic oligonucleotide
  Antisense strand to SEQ ID NO: 1859173
cuccuucaaggacacuaag

SEQ ID NO: 1859175 - RNA, 19 nt, Artificial Sequence
  Description of Artificial Sequence: Synthetic oligonucleotide
  Sense strand starting at position 2225 of SEQ ID NO: 1564161
gaggcagucacucacguau

SEQ ID NO: 1859176 - RNA, 19 nt, Artificial Sequence
  Description of Artificial Sequence: Synthetic oligonucleotide
  Antisense strand to SEQ ID NO: 1859175
auacgugagugacugccuc

SEQ ID NO: 1859177 - RNA, 19 nt, Artificial Sequence
  Description of Artificial Sequence: Synthetic oligonucleotide
  Sense strand starting at position 2331 of SEQ ID NO: 1564161
caccuaucccgguggcaaa

SEQ ID NO: 1859178 - RNA, 19 nt, Artificial Sequence
  Description of Artificial Sequence: Synthetic oligonucleotide
  Antisense strand to SEQ ID NO: 1859177
uuugccaccgggauaggug

SEQ ID NO: 1859179 - RNA, 19 nt, Artificial Sequence
  Description of Artificial Sequence: Synthetic oligonucleotide
  Sense strand starting at position 2493 of SEQ ID NO: 1564161
ugcguauucagguccgagu

SEQ ID NO: 1859180 - RNA, 19 nt, Artificial Sequence
  Description of Artificial Sequence: Synthetic oligonucleotide
  Antisense strand to SEQ ID NO: 1859179
acucggaccugaauacgca

SEQ ID NO: 1859181 - RNA, 19 nt, Artificial Sequence
  Description of Artificial Sequence: Synthetic oligonucleotide
  Sense strand starting at position 2504 of SEQ ID NO: 1564161
guccgagucuucuuuccuu

SEQ ID NO: 1859182 - RNA, 19 nt, Artificial Sequence
  Description of Artificial Sequence: Synthetic oligonucleotide
  Antisense strand to SEQ ID NO: 1859181
aaggaaagaagacucggac

SEQ ID NO: 1859183 - RNA, 19 nt, Artificial Sequence
  Description of Artificial Sequence: Synthetic oligonucleotide
  Sense strand starting at position 2507 of SEQ ID NO: 1564161
cgagucuucuuuccuuaca

SEQ ID NO: 1859184 - RNA, 19 nt, Artificial Sequence
  Description of Artificial Sequence: Synthetic oligonucleotide
  Antisense strand to SEQ ID NO: 1859183
uguaaggaaagaagacucg

SEQ ID NO: 1859185 - RNA, 19 nt, Artificial Sequence
  Description of Artificial Sequence: Synthetic oligonucleotide
  Sense strand starting at position 2538 of SEQ ID NO: 1564161
gagguuaauuuagguccua

SEQ ID NO: 1859186 - RNA, 19 nt, Artificial Sequence
  Description of Artificial Sequence: Synthetic oligonucleotide
  Antisense strand to SEQ ID NO: 1859185
uaggaccuaaauuaaccuc

SEQ ID NO: 1859187 - RNA, 19 nt, Artificial Sequence
  Description of Artificial Sequence: Synthetic oligonucleotide
  Sense strand starting at position 2760 of SEQ ID NO: 1564161
uccagaacuccgugacuuu

SEQ ID NO: 1859188 - RNA, 19 nt, Artificial Sequence
  Description of Artificial Sequence: Synthetic oligonucleotide
  Antisense strand to SEQ ID NO: 1859187
aaagucacggaguucugga

SEQ ID NO: 1859189 - RNA, 19 nt, Artificial Sequence
  Description of Artificial Sequence: Synthetic oligonucleotide
  Sense strand starting at position 2794 of SEQ ID NO: 1564161
ggacaucucuacuugccau

SEQ ID NO: 1859190 - RNA, 19 nt, Artificial Sequence
  Description of Artificial Sequence: Synthetic oligonucleotide
  Antisense strand to SEQ ID NO: 1859189
auggcaaguagagaugucc

SEQ ID NO: 1859191 - RNA, 19 nt, Artificial Sequence
  Description of Artificial Sequence: Synthetic oligonucleotide
  Sense strand starting at position 2837 of SEQ ID NO: 1564161
gagacugcuugugccuaau

SEQ ID NO: 1859192 - RNA, 19 nt, Artificial Sequence
  Description of Artificial Sequence: Synthetic oligonucleotide
  Antisense strand to SEQ ID NO: 1859191
auuaggcacaagcagucuc

SEQ ID NO: 1859193 - RNA, 19 nt, Artificial Sequence
  Description of Artificial Sequence: Synthetic oligonucleotide
  Sense strand starting at position 2839 of SEQ ID NO: 1564161
gacugcuugugccuaauga

SEQ ID NO: 1859194 - RNA, 19 nt, Artificial Sequence
  Description of Artificial Sequence: Synthetic oligonucleotide
  Antisense strand to SEQ ID NO: 1859193
ucauuaggcacaagcaguc

SEQ ID NO: 1859195 - RNA, 19 nt, Artificial Sequence
  Description of Artificial Sequence: Synthetic oligonucleotide
  Sense strand starting at position 2840 of SEQ ID NO: 1564161
acugcuugugccuaaugaa

SEQ ID NO: 1859196 - RNA, 19 nt, Artificial Sequence
  Description of Artificial Sequence: Synthetic oligonucleotide
  Antisense strand to SEQ ID NO: 1859195
uucauuaggcacaagcagu

SEQ ID NO: 1859197 - RNA, 19 nt, Artificial Sequence
  Description of Artificial Sequence: Synthetic oligonucleotide
  Sense strand starting at position 3068 of SEQ ID NO: 1564161
agugccuugcccugagacu

SEQ ID NO: 1859198 - RNA, 19 nt, Artificial Sequence
  Description of Artificial Sequence: Synthetic oligonucleotide
  Antisense strand to SEQ ID NO: 1859197
agucucagggcaaggcacu

SEQ ID NO: 1859199 - RNA, 19 nt, Artificial Sequence
  Description of Artificial Sequence: Synthetic oligonucleotide
  Sense strand starting at position 3191 of SEQ ID NO: 1564161
acagaaauaugccaaagac

SEQ ID NO: 1859200 - RNA, 19 nt, Artificial Sequence
  Description of Artificial Sequence: Synthetic oligonucleotide
  Antisense strand to SEQ ID NO: 1859199
gucuuuggcauauuucugu

SEQ ID NO: 1859201 - RNA, 19 nt, Artificial Sequence
  Description of Artificial Sequence: Synthetic oligonucleotide
  Sense strand starting at position 3242 of SEQ ID NO: 1564161
ggauguucuuucuuuccau

SEQ ID NO: 1859202 - RNA, 19 nt, Artificial Sequence
  Description of Artificial Sequence: Synthetic oligonucleotide
  Antisense strand to SEQ ID NO: 1859201
auggaaagaaagaacaucc

SEQ ID NO: 1859203 - RNA, 19 nt, Artificial Sequence
  Description of Artificial Sequence: Synthetic oligonucleotide
  Sense strand starting at position 3245 of SEQ ID NO: 1564161
uguucuuucuuuccaugga

SEQ ID NO: 1859204 - RNA, 19 nt, Artificial Sequence
  Description of Artificial Sequence: Synthetic oligonucleotide
  Antisense strand to SEQ ID NO: 1859203
uccauggaaagaaagaaca

SEQ ID NO: 1859205 - RNA, 19 nt, Artificial Sequence
  Description of Artificial Sequence: Synthetic oligonucleotide
  Sense strand starting at position 3286 of SEQ ID NO: 1564161
gcgggaggcguguacauau

SEQ ID NO: 1859206 - RNA, 19 nt, Artificial Sequence
  Description of Artificial Sequence: Synthetic oligonucleotide
  Antisense strand to SEQ ID NO: 1859205
auauguacacgccucccgc

SEQ ID NO: 1859207 - RNA, 19 nt, Artificial Sequence
  Description of Artificial Sequence: Synthetic oligonucleotide
  Sense strand starting at position 3318 of SEQ ID NO: 1564161
acacuuggcuccuuugauu

SEQ ID NO: 1859208 - RNA, 19 nt, Artificial Sequence
  Description of Artificial Sequence: Synthetic oligonucleotide
  Antisense strand to SEQ ID NO: 1859207
aaucaaaggagccaagugu

SEQ ID NO: 1859209 - RNA, 19 nt, Artificial Sequence
  Description of Artificial Sequence: Synthetic oligonucleotide
  Sense strand starting at position 3376 of SEQ ID NO: 1564161
uugcgaccuccugaaggaa

SEQ ID NO: 1859210 - RNA, 19 nt, Artificial Sequence
  Description of Artificial Sequence: Synthetic oligonucleotide
  Antisense strand to SEQ ID NO: 1859209
uuccuucaggaggucgcaa

SEQ ID NO: 1859211 - RNA, 19 nt, Artificial Sequence
  Description of Artificial Sequence: Synthetic oligonucleotide
  Sense strand starting at position 3750 of SEQ ID NO: 1564161
ccaacagucacggaaagua

SEQ ID NO: 1859212 - RNA, 19 nt, Artificial Sequence
  Description of Artificial Sequence: Synthetic oligonucleotide
  Antisense strand to SEQ ID NO: 1859211
uacuuuccgugacuguugg

SEQ ID NO: 1859213 - RNA, 19 nt, Artificial Sequence
  Description of Artificial Sequence: Synthetic oligonucleotide
  Sense strand starting at position 3771 of SEQ ID NO: 1564161
uaccuccguucugugaauu

SEQ ID NO: 1859214 - RNA, 19 nt, Artificial Sequence
  Description of Artificial Sequence: Synthetic oligonucleotide
  Antisense strand to SEQ ID NO: 1859213
aauucacagaacggaggua

SEQ ID NO: 1859215 - RNA, 19 nt, Artificial Sequence
  Description of Artificial Sequence: Synthetic oligonucleotide
  Sense strand starting at position 3772 of SEQ ID NO: 1564161
accuccguucugugaauuu

SEQ ID NO: 1859216 - RNA, 19 nt, Artificial Sequence
  Description of Artificial Sequence: Synthetic oligonucleotide
  Antisense strand to SEQ ID NO: 1859215
aaauucacagaacggaggu

SEQ ID NO: 1859217 - RNA, 19 nt, Artificial Sequence
  Description of Artificial Sequence: Synthetic oligonucleotide
  Sense strand starting at position 3781 of SEQ ID NO: 1564161
cugugaauuucagaugagg

SEQ ID NO: 1859218 - RNA, 19 nt, Artificial Sequence
  Description of Artificial Sequence: Synthetic oligonucleotide
  Antisense strand to SEQ ID NO: 1859217
ccucaucugaaauucacag

SEQ ID NO: 1859219 - RNA, 19 nt, Artificial Sequence
  Description of Artificial Sequence: Synthetic oligonucleotide
  Sense strand starting at position 3895 of SEQ ID NO: 1564161
caggaaauguuccuuaugu

SEQ ID NO: 1859220 - RNA, 19 nt, Artificial Sequence
  Description of Artificial Sequence: Synthetic oligonucleotide
  Antisense strand to SEQ ID NO: 1859219
acauaaggaacauuuccug

SEQ ID NO: 1859221 - RNA, 19 nt, Artificial Sequence
  Description of Artificial Sequence: Synthetic oligonucleotide
  Sense strand starting at position 3896 of SEQ ID NO: 1564161
aggaaauguuccuuaugug

SEQ ID NO: 1859222 - RNA, 19 nt, Artificial Sequence
  Description of Artificial Sequence: Synthetic oligonucleotide
  Antisense strand to SEQ ID NO: 1859221
cacauaaggaacauuuccu

SEQ ID NO: 1859223 - RNA, 19 nt, Artificial Sequence
  Description of Artificial Sequence: Synthetic oligonucleotide
  Sense strand starting at position 3897 of SEQ ID NO: 1564161
ggaaauguuccuuaugugc

SEQ ID NO: 1859224 - RNA, 19 nt, Artificial Sequence
  Description of Artificial Sequence: Synthetic oligonucleotide
  Antisense strand to SEQ ID NO: 1859223
gcacauaaggaacauuucc

SEQ ID NO: 1859225 - RNA, 19 nt, Artificial Sequence
  Description of Artificial Sequence: Synthetic oligonucleotide
  Sense strand starting at position 144 of SEQ ID NO: 1564162
gggagagaugccuggguaa

SEQ ID NO: 1859226 - RNA, 19 nt, Artificial Sequence
  Description of Artificial Sequence: Synthetic oligonucleotide
  Antisense strand to SEQ ID NO: 1859225
uuacccaggcaucucuccc

SEQ ID NO: 1859227 - RNA, 19 nt, Artificial Sequence
  Description of Artificial Sequence: Synthetic oligonucleotide
  Sense strand starting at position 146 of SEQ ID NO: 1564162
gagagaugccuggguaagg

SEQ ID NO: 1859228 - RNA, 19 nt, Artificial Sequence
  Description of Artificial Sequence: Synthetic oligonucleotide
  Antisense strand to SEQ ID NO: 1859227
ccuuacccaggcaucucuc

SEQ ID NO: 1859229 - RNA, 19 nt, Artificial Sequence
  Description of Artificial Sequence: Synthetic oligonucleotide
  Sense strand starting at position 279 of SEQ ID NO: 1564162
auccaagugcucggucaca

SEQ ID NO: 1859230 - RNA, 19 nt, Artificial Sequence
  Description of Artificial Sequence: Synthetic oligonucleotide
  Antisense strand to SEQ ID NO: 1859229
ugugaccgagcacuuggau

SEQ ID NO: 1859231 - RNA, 19 nt, Artificial Sequence
  Description of Artificial Sequence: Synthetic oligonucleotide
  Sense strand starting at position 316 of SEQ ID NO: 1564162
gcgggauggcugugaagga

SEQ ID NO: 1859232 - RNA, 19 nt, Artificial Sequence
  Description of Artificial Sequence: Synthetic oligonucleotide
  Antisense strand to SEQ ID NO: 1859231
uccuucacagccaucccgc

SEQ ID NO: 1859233 - RNA, 19 nt, Artificial Sequence
  Description of Artificial Sequence: Synthetic oligonucleotide
  Sense strand starting at position 317 of SEQ ID NO: 1564162
cgggauggcugugaaggaa

SEQ ID NO: 1859234 - RNA, 19 nt, Artificial Sequence
  Description of Artificial Sequence: Synthetic oligonucleotide
  Antisense strand to SEQ ID NO: 1859233
uuccuucacagccaucccg

SEQ ID NO: 1859235 - RNA, 19 nt, Artificial Sequence
  Description of Artificial Sequence: Synthetic oligonucleotide
  Sense strand starting at position 496 of SEQ ID NO: 1564162
ggacgaguuacugaaggca

SEQ ID NO: 1859236 - RNA, 19 nt, Artificial Sequence
  Description of Artificial Sequence: Synthetic oligonucleotide
  Antisense strand to SEQ ID NO: 1859235
ugccuucaguaacucgucc

SEQ ID NO: 1859237 - RNA, 19 nt, Artificial Sequence
  Description of Artificial Sequence: Synthetic oligonucleotide
  Sense strand starting at position 509 of SEQ ID NO: 1564162
aaggcauccucagcagaga

SEQ ID NO: 1859238 - RNA, 19 nt, Artificial Sequence
  Description of Artificial Sequence: Synthetic oligonucleotide
  Antisense strand to SEQ ID NO: 1859237
ucucugcugaggaugccuu

SEQ ID NO: 1859239 - RNA, 19 nt, Artificial Sequence
  Description of Artificial Sequence: Synthetic oligonucleotide
  Sense strand starting at position 512 of SEQ ID NO: 1564162
gcauccucagcagagacau

SEQ ID NO: 1859240 - RNA, 19 nt, Artificial Sequence
  Description of Artificial Sequence: Synthetic oligonucleotide
  Antisense strand to SEQ ID NO: 1859239
augucucugcugaggaugc

SEQ ID NO: 1859241 - RNA, 19 nt, Artificial Sequence
  Description of Artificial Sequence: Synthetic oligonucleotide
  Sense strand starting at position 631 of SEQ ID NO: 1564162
gcguuuccugaagaaguaa

SEQ ID NO: 1859242 - RNA, 19 nt, Artificial Sequence
  Description of Artificial Sequence: Synthetic oligonucleotide
  Antisense strand to SEQ ID NO: 1859241
uuacuucuucaggaaacgc

SEQ ID NO: 1859243 - RNA, 19 nt, Artificial Sequence
  Description of Artificial Sequence: Synthetic oligonucleotide
  Sense strand starting at position 654 of SEQ ID NO: 1564162
gagagacucugguuccaga

SEQ ID NO: 1859244 - RNA, 19 nt, Artificial Sequence
  Description of Artificial Sequence: Synthetic oligonucleotide
  Antisense strand to SEQ ID NO: 1859243
ucuggaaccagagucucuc

SEQ ID NO: 1859245 - RNA, 19 nt, Artificial Sequence
  Description of Artificial Sequence: Synthetic oligonucleotide
  Sense strand starting at position 679 of SEQ ID NO: 1564162
acuuguuagcugugagaga

SEQ ID NO: 1859246 - RNA, 19 nt, Artificial Sequence
  Description of Artificial Sequence: Synthetic oligonucleotide
  Antisense strand to SEQ ID NO: 1859245
ucucucacagcuaacaagu

SEQ ID NO: 1859247 - RNA, 19 nt, Artificial Sequence
  Description of Artificial Sequence: Synthetic oligonucleotide
  Sense strand starting at position 951 of SEQ ID NO: 1564162
uucuguguccugccuaagu

SEQ ID NO: 1859248 - RNA, 19 nt, Artificial Sequence
  Description of Artificial Sequence: Synthetic oligonucleotide
  Antisense strand to SEQ ID NO: 1859247
acuuaggcaggacacagaa

SEQ ID NO: 1859249 - RNA, 19 nt, Artificial Sequence
  Description of Artificial Sequence: Synthetic oligonucleotide
  Sense strand starting at position 1019 of SEQ ID NO: 1564162
aggcuuguccucuggauac

SEQ ID NO: 1859250 - RNA, 19 nt, Artificial Sequence
  Description of Artificial Sequence: Synthetic oligonucleotide
  Antisense strand to SEQ ID NO: 1859249
guauccagaggacaagccu

SEQ ID NO: 1859251 - RNA, 19 nt, Artificial Sequence
  Description of Artificial Sequence: Synthetic oligonucleotide
  Sense strand starting at position 1021 of SEQ ID NO: 1564162
gcuuguccucuggauacgu

SEQ ID NO: 1859252 - RNA, 19 nt, Artificial Sequence
  Description of Artificial Sequence: Synthetic oligonucleotide
  Antisense strand to SEQ ID NO: 1859251
acguauccagaggacaagc

SEQ ID NO: 1859253 - RNA, 19 nt, Artificial Sequence
  Description of Artificial Sequence: Synthetic oligonucleotide
  Sense strand starting at position 1030 of SEQ ID NO: 1564162
cuggauacgucccugacua

SEQ ID NO: 1859254 - RNA, 19 nt, Artificial Sequence
  Description of Artificial Sequence: Synthetic oligonucleotide
  Antisense strand to SEQ ID NO: 1859253
uagucagggacguauccag

SEQ ID NO: 1859255 - RNA, 19 nt, Artificial Sequence
  Description of Artificial Sequence: Synthetic oligonucleotide
  Sense strand starting at position 1031 of SEQ ID NO: 1564162
uggauacgucccugacuau

SEQ ID NO: 1859256 - RNA, 19 nt, Artificial Sequence
  Description of Artificial Sequence: Synthetic oligonucleotide
  Antisense strand to SEQ ID NO: 1859255
auagucagggacguaucca

SEQ ID NO: 1859257 - RNA, 19 nt, Artificial Sequence
  Description of Artificial Sequence: Synthetic oligonucleotide
  Sense strand starting at position 1032 of SEQ ID NO: 1564162
ggauacgucccugacuaua

SEQ ID NO: 1859258 - RNA, 19 nt, Artificial Sequence
  Description of Artificial Sequence: Synthetic oligonucleotide
  Antisense strand to SEQ ID NO: 1859257
uauagucagggacguaucc

SEQ ID NO: 1859259 - RNA, 19 nt, Artificial Sequence
  Description of Artificial Sequence: Synthetic oligonucleotide
  Sense strand starting at position 1034 of SEQ ID NO: 1564162
auacgucccugacuauagu

SEQ ID NO: 1859260 - RNA, 19 nt, Artificial Sequence
  Description of Artificial Sequence: Synthetic oligonucleotide
  Antisense strand to SEQ ID NO: 1859259
acuauagucagggacguau

SEQ ID NO: 1859261 - RNA, 19 nt, Artificial Sequence
  Description of Artificial Sequence: Synthetic oligonucleotide
  Sense strand starting at position 2577 of SEQ ID NO: 1564162
gcugucaccuccuuagugu

SEQ ID NO: 1859262 - RNA, 19 nt, Artificial Sequence
  Description of Artificial Sequence: Synthetic oligonucleotide
  Antisense strand to SEQ ID NO: 1859261
acacuaaggaggugacagc

SEQ ID NO: 1859263 - RNA, 19 nt, Artificial Sequence
  Description of Artificial Sequence: Synthetic oligonucleotide
  Sense strand starting at position 2584 of SEQ ID NO: 1564162
ccuccuuaguguccuugaa

SEQ ID NO: 1859264 - RNA, 19 nt, Artificial Sequence
  Description of Artificial Sequence: Synthetic oligonucleotide
  Antisense strand to SEQ ID NO: 1859263
uucaaggacacuaaggagg

SEQ ID NO: 1859265 - RNA, 19 nt, Artificial Sequence
  Description of Artificial Sequence: Synthetic oligonucleotide
  Sense strand starting at position 2588 of SEQ ID NO: 1564162
cuuaguguccuugaaggag

SEQ ID NO: 1859266 - RNA, 19 nt, Artificial Sequence
  Description of Artificial Sequence: Synthetic oligonucleotide
  Antisense strand to SEQ ID NO: 1859265
cuccuucaaggacacuaag

SEQ ID NO: 1859267 - RNA, 19 nt, Artificial Sequence
  Description of Artificial Sequence: Synthetic oligonucleotide
  Sense strand starting at position 2614 of SEQ ID NO: 1564162
gaggcagucacucacguau

SEQ ID NO: 1859268 - RNA, 19 nt, Artificial Sequence
  Description of Artificial Sequence: Synthetic oligonucleotide
  Antisense strand to SEQ ID NO: 1859267
auacgugagugacugccuc

SEQ ID NO: 1859269 - RNA, 19 nt, Artificial Sequence
  Description of Artificial Sequence: Synthetic oligonucleotide
  Sense strand starting at position 2720 of SEQ ID NO: 1564162
caccuaucccgguggcaaa

SEQ ID NO: 1859270 - RNA, 19 nt, Artificial Sequence
  Description of Artificial Sequence: Synthetic oligonucleotide
  Antisense strand to SEQ ID NO: 1859269
uuugccaccgggauaggug

SEQ ID NO: 1859271 - RNA, 19 nt, Artificial Sequence
  Description of Artificial Sequence: Synthetic oligonucleotide
  Sense strand starting at position 2882 of SEQ ID NO: 1564162
ugcguauucagguccgagu

SEQ ID NO: 1859272 - RNA, 19 nt, Artificial Sequence
  Description of Artificial Sequence: Synthetic oligonucleotide
  Antisense strand to SEQ ID NO: 1859271
acucggaccugaauacgca

SEQ ID NO: 1859273 - RNA, 19 nt, Artificial Sequence
  Description of Artificial Sequence: Synthetic oligonucleotide
  Sense strand starting at position 2893 of SEQ ID NO: 1564162
guccgagucuucuuuccuu

SEQ ID NO: 1859274 - RNA, 19 nt, Artificial Sequence
  Description of Artificial Sequence: Synthetic oligonucleotide
  Antisense strand to SEQ ID NO: 1859273
aaggaaagaagacucggac

SEQ ID NO: 1859275 - RNA, 19 nt, Artificial Sequence
  Description of Artificial Sequence: Synthetic oligonucleotide
  Sense strand starting at position 2896 of SEQ ID NO: 1564162
cgagucuucuuuccuuaca

SEQ ID NO: 1859276 - RNA, 19 nt, Artificial Sequence
  Description of Artificial Sequence: Synthetic oligonucleotide
  Antisense strand to SEQ ID NO: 1859275
uguaaggaaagaagacucg

SEQ ID NO: 1859277 - RNA, 19 nt, Artificial Sequence
  Description of Artificial Sequence: Synthetic oligonucleotide
  Sense strand starting at position 2927 of SEQ ID NO: 1564162
gagguuaauuuagguccua

SEQ ID NO: 1859278 - RNA, 19 nt, Artificial Sequence
  Description of Artificial Sequence: Synthetic oligonucleotide
  Antisense strand to SEQ ID NO: 1859277
uaggaccuaaauuaaccuc

SEQ ID NO: 1859279 - RNA, 19 nt, Artificial Sequence
  Description of Artificial Sequence: Synthetic oligonucleotide
  Sense strand starting at position 3149 of SEQ ID NO: 1564162
uccagaacuccgugacuuu

SEQ ID NO: 1859280 - RNA, 19 nt, Artificial Sequence
  Description of Artificial Sequence: Synthetic oligonucleotide
  Antisense strand to SEQ ID NO: 1859279
aaagucacggaguucugga

SEQ ID NO: 1859281 - RNA, 19 nt, Artificial Sequence
  Description of Artificial Sequence: Synthetic oligonucleotide
  Sense strand starting at position 3183 of SEQ ID NO: 1564162
ggacaucucuacuugccau

SEQ ID NO: 1859282 - RNA, 19 nt, Artificial Sequence
  Description of Artificial Sequence: Synthetic oligonucleotide
  Antisense strand to SEQ ID NO: 1859281
auggcaaguagagaugucc

SEQ ID NO: 1859283 - RNA, 19 nt, Artificial Sequence
  Description of Artificial Sequence: Synthetic oligonucleotide
  Sense strand starting at position 3226 of SEQ ID NO: 1564162
gagacugcuugugccuaau

SEQ ID NO: 1859284 - RNA, 19 nt, Artificial Sequence
  Description of Artificial Sequence: Synthetic oligonucleotide
  Antisense strand to SEQ ID NO: 1859283
auuaggcacaagcagucuc

SEQ ID NO: 1859285 - RNA, 19 nt, Artificial Sequence
  Description of Artificial Sequence: Synthetic oligonucleotide
  Sense strand starting at position 3228 of SEQ ID NO: 1564162
gacugcuugugccuaauga

SEQ ID NO: 1859286 - RNA, 19 nt, Artificial Sequence
  Description of Artificial Sequence: Synthetic oligonucleotide
  Antisense strand to SEQ ID NO: 1859285
ucauuaggcacaagcaguc

SEQ ID NO: 1859287 - RNA, 19 nt, Artificial Sequence
  Description of Artificial Sequence: Synthetic oligonucleotide
  Sense strand starting at position 3229 of SEQ ID NO: 1564162
acugcuugugccuaaugaa

SEQ ID NO: 1859288 - RNA, 19 nt, Artificial Sequence
  Description of Artificial Sequence: Synthetic oligonucleotide
  Antisense strand to SEQ ID NO: 1859287
uucauuaggcacaagcagu

SEQ ID NO: 1859289 - RNA, 19 nt, Artificial Sequence
  Description of Artificial Sequence: Synthetic oligonucleotide
  Sense strand starting at position 3457 of SEQ ID NO: 1564162
agugccuugcccugagacu

SEQ ID NO: 1859290 - RNA, 19 nt, Artificial Sequence
  Description of Artificial Sequence: Synthetic oligonucleotide
  Antisense strand to SEQ ID NO: 1859289
agucucagggcaaggcacu

SEQ ID NO: 1859291 - RNA, 19 nt, Artificial Sequence
  Description of Artificial Sequence: Synthetic oligonucleotide
  Sense strand starting at position 3515 of SEQ ID NO: 1564162
ggucuugaaucccacugau

SEQ ID NO: 1859292 - RNA, 19 nt, Artificial Sequence
  Description of Artificial Sequence: Synthetic oligonucleotide
  Antisense strand to SEQ ID NO: 1859291
aucagugggauucaagacc

SEQ ID NO: 1859293 - RNA, 19 nt, Artificial Sequence
  Description of Artificial Sequence: Synthetic oligonucleotide
  Sense strand starting at position 3580 of SEQ ID NO: 1564162
acagaaauaugccaaagac

SEQ ID NO: 1859294 - RNA, 19 nt, Artificial Sequence
  Description of Artificial Sequence: Synthetic oligonucleotide
  Antisense strand to SEQ ID NO: 1859293
gucuuuggcauauuucugu

SEQ ID NO: 1859295 - RNA, 19 nt, Artificial Sequence
  Description of Artificial Sequence: Synthetic oligonucleotide
  Sense strand starting at position 3631 of SEQ ID NO: 1564162
ggauguucuuucuuuccau

SEQ ID NO: 1859296 - RNA, 19 nt, Artificial Sequence
  Description of Artificial Sequence: Synthetic oligonucleotide
  Antisense strand to SEQ ID NO: 1859295
auggaaagaaagaacaucc

SEQ ID NO: 1859297 - RNA, 19 nt, Artificial Sequence
  Description of Artificial Sequence: Synthetic oligonucleotide
  Sense strand starting at position 3634 of SEQ ID NO: 1564162
uguucuuucuuuccaugga

SEQ ID NO: 1859298 - RNA, 19 nt, Artificial Sequence
  Description of Artificial Sequence: Synthetic oligonucleotide
  Antisense strand to SEQ ID NO: 1859297
uccauggaaagaaagaaca

SEQ ID NO: 1859299 - RNA, 19 nt, Artificial Sequence
  Description of Artificial Sequence: Synthetic oligonucleotide
  Sense strand starting at position 3675 of SEQ ID NO: 1564162
gcgggaggcguguacauau

SEQ ID NO: 1859300 - RNA, 19 nt, Artificial Sequence
  Description of Artificial Sequence: Synthetic oligonucleotide
  Antisense strand to SEQ ID NO: 1859299
auauguacacgccucccgc

SEQ ID NO: 1859301 - RNA, 19 nt, Artificial Sequence
  Description of Artificial Sequence: Synthetic oligonucleotide
  Sense strand starting at position 3707 of SEQ ID NO: 1564162
acacuuggcuccuuugauu

SEQ ID NO: 1859302 - RNA, 19 nt, Artificial Sequence
  Description of Artificial Sequence: Synthetic oligonucleotide
  Antisense strand to SEQ ID NO: 1859301
aaucaaaggagccaagugu

SEQ ID NO: 1859303 - RNA, 19 nt, Artificial Sequence
  Description of Artificial Sequence: Synthetic oligonucleotide
  Sense strand starting at position 3765 of SEQ ID NO: 1564162
uugcgaccuccugaaggaa

SEQ ID NO: 1859304 - RNA, 19 nt, Artificial Sequence
  Description of Artificial Sequence: Synthetic oligonucleotide
  Antisense strand to SEQ ID NO: 1859303
uuccuucaggaggucgcaa

SEQ ID NO: 1859305 - RNA, 19 nt, Artificial Sequence
  Description of Artificial Sequence: Synthetic oligonucleotide
  Sense strand starting at position 84 of SEQ ID NO: 1564163
ggagcagucucaccugcaa

SEQ ID NO: 1859306 - RNA, 19 nt, Artificial Sequence
  Description of Artificial Sequence: Synthetic oligonucleotide
  Antisense strand to SEQ ID NO: 1859305
uugcaggugagacugcucc

SEQ ID NO: 1859307 - RNA, 19 nt, Artificial Sequence
  Description of Artificial Sequence: Synthetic oligonucleotide
  Sense strand starting at position 88 of SEQ ID NO: 1564163
cagucucaccugcaagaga

SEQ ID NO: 1859308 - RNA, 19 nt, Artificial Sequence
  Description of Artificial Sequence: Synthetic oligonucleotide
  Antisense strand to SEQ ID NO: 1859307
ucucuugcaggugagacug

SEQ ID NO: 1859309 - RNA, 19 nt, Artificial Sequence
  Description of Artificial Sequence: Synthetic oligonucleotide
  Sense strand starting at position 220 of SEQ ID NO: 1564163
cuuaccuguccauggguaa

SEQ ID NO: 1859310 - RNA, 19 nt, Artificial Sequence
  Description of Artificial Sequence: Synthetic oligonucleotide
  Antisense strand to SEQ ID NO: 1859309
uuacccauggacagguaag

SEQ ID NO: 1859311 - RNA, 19 nt, Artificial Sequence
  Description of Artificial Sequence: Synthetic oligonucleotide
  Sense strand starting at position 420 of SEQ ID NO: 1564163
ggacgugacuguguaauuu

SEQ ID NO: 1859312 - RNA, 19 nt, Artificial Sequence
  Description of Artificial Sequence: Synthetic oligonucleotide
  Antisense strand to SEQ ID NO: 1859311
aaauuacacagucacgucc

SEQ ID NO: 1859313 - RNA, 19 nt, Artificial Sequence
  Description of Artificial Sequence: Synthetic oligonucleotide
  Sense strand starting at position 497 of SEQ ID NO: 1564163
ccagacauaacguggucuu

SEQ ID NO: 1859314 - RNA, 19 nt, Artificial Sequence
  Description of Artificial Sequence: Synthetic oligonucleotide
  Antisense strand to SEQ ID NO: 1859313
aagaccacguuaugucugg

SEQ ID NO: 1859315 - RNA, 19 nt, Artificial Sequence
  Description of Artificial Sequence: Synthetic oligonucleotide
  Sense strand starting at position 498 of SEQ ID NO: 1564163
cagacauaacguggucuuu

SEQ ID NO: 1859316 - RNA, 19 nt, Artificial Sequence
  Description of Artificial Sequence: Synthetic oligonucleotide
  Antisense strand to SEQ ID NO: 1859315
aaagaccacguuaugucug

SEQ ID NO: 1859317 - RNA, 19 nt, Artificial Sequence
  Description of Artificial Sequence: Synthetic oligonucleotide
  Sense strand starting at position 500 of SEQ ID NO: 1564163
gacauaacguggucuuucu

SEQ ID NO: 1859318 - RNA, 19 nt, Artificial Sequence
  Description of Artificial Sequence: Synthetic oligonucleotide
  Antisense strand to SEQ ID NO: 1859317
agaaagaccacguuauguc

SEQ ID NO: 1859319 - RNA, 19 nt, Artificial Sequence
  Description of Artificial Sequence: Synthetic oligonucleotide
  Sense strand starting at position 509 of SEQ ID NO: 1564163
uggucuuucuggugaugga

SEQ ID NO: 1859320 - RNA, 19 nt, Artificial Sequence
  Description of Artificial Sequence: Synthetic oligonucleotide
  Antisense strand to SEQ ID NO: 1859319
uccaucaccagaaagacca

SEQ ID NO: 1859321 - RNA, 19 nt, Artificial Sequence
  Description of Artificial Sequence: Synthetic oligonucleotide
  Sense strand starting at position 510 of SEQ ID NO: 1564163
ggucuuucuggugauggau

SEQ ID NO: 1859322 - RNA, 19 nt, Artificial Sequence
  Description of Artificial Sequence: Synthetic oligonucleotide
  Antisense strand to SEQ ID NO: 1859321
auccaucaccagaaagacc

SEQ ID NO: 1859323 - RNA, 19 nt, Artificial Sequence
  Description of Artificial Sequence: Synthetic oligonucleotide
  Sense strand starting at position 590 of SEQ ID NO: 1564163
ugaacagauuuagaagcua

SEQ ID NO: 1859324 - RNA, 19 nt, Artificial Sequence
  Description of Artificial Sequence: Synthetic oligonucleotide
  Antisense strand to SEQ ID NO: 1859323
uagcuucuaaaucuguuca

SEQ ID NO: 1859325 - RNA, 19 nt, Artificial Sequence
  Description of Artificial Sequence: Synthetic oligonucleotide
  Sense strand starting at position 601 of SEQ ID NO: 1564163
agaagcuauuacuggguua

SEQ ID NO: 1859326 - RNA, 19 nt, Artificial Sequence
  Description of Artificial Sequence: Synthetic oligonucleotide
  Antisense strand to SEQ ID NO: 1859325
uaacccaguaauagcuucu

SEQ ID NO: 1859327 - RNA, 19 nt, Artificial Sequence
  Description of Artificial Sequence: Synthetic oligonucleotide
  Sense strand starting at position 603 of SEQ ID NO: 1564163
aagcuauuacuggguuauu

SEQ ID NO: 1859328 - RNA, 19 nt, Artificial Sequence
  Description of Artificial Sequence: Synthetic oligonucleotide
  Antisense strand to SEQ ID NO: 1859327
aauaacccaguaauagcuu

SEQ ID NO: 1859329 - RNA, 19 nt, Artificial Sequence
  Description of Artificial Sequence: Synthetic oligonucleotide
  Sense strand starting at position 612 of SEQ ID NO: 1564163
cuggguuauuuguaaauua

SEQ ID NO: 1859330 - RNA, 19 nt, Artificial Sequence
  Description of Artificial Sequence: Synthetic oligonucleotide
  Antisense strand to SEQ ID NO: 1859329
uaauuuacaaauaacccag

SEQ ID NO: 1859331 - RNA, 19 nt, Artificial Sequence
  Description of Artificial Sequence: Synthetic oligonucleotide
  Sense strand starting at position 643 of SEQ ID NO: 1564163
gagcuagaaucucugagau

SEQ ID NO: 1859332 - RNA, 19 nt, Artificial Sequence
  Description of Artificial Sequence: Synthetic oligonucleotide
  Antisense strand to SEQ ID NO: 1859331
aucucagagauucuagcuc

SEQ ID NO: 1859333 - RNA, 19 nt, Artificial Sequence
  Description of Artificial Sequence: Synthetic oligonucleotide
  Sense strand starting at position 645 of SEQ ID NO: 1564163
gcuagaaucucugagauua

SEQ ID NO: 1859334 - RNA, 19 nt, Artificial Sequence
  Description of Artificial Sequence: Synthetic oligonucleotide
  Antisense strand to SEQ ID NO: 1859333
uaaucucagagauucuagc

SEQ ID NO: 1859335 - RNA, 19 nt, Artificial Sequence
  Description of Artificial Sequence: Synthetic oligonucleotide
  Sense strand starting at position 2132 of SEQ ID NO: 1564163
ggcagaaacucugacuuuc

SEQ ID NO: 1859336 - RNA, 19 nt, Artificial Sequence
  Description of Artificial Sequence: Synthetic oligonucleotide
  Antisense strand to SEQ ID NO: 1859335
gaaagucagaguuucugcc

SEQ ID NO: 1859337 - RNA, 19 nt, Artificial Sequence
  Description of Artificial Sequence: Synthetic oligonucleotide
  Sense strand starting at position 2140 of SEQ ID NO: 1564163
cucugacuuucccgccuaa

SEQ ID NO: 1859338 - RNA, 19 nt, Artificial Sequence
  Description of Artificial Sequence: Synthetic oligonucleotide
  Antisense strand to SEQ ID NO: 1859337
uuaggcgggaaagucagag

SEQ ID NO: 1859339 - RNA, 19 nt, Artificial Sequence
  Description of Artificial Sequence: Synthetic oligonucleotide
  Sense strand starting at position 2215 of SEQ ID NO: 1564163
uuuggagucuucccaaauc

SEQ ID NO: 1859340 - RNA, 19 nt, Artificial Sequence
  Description of Artificial Sequence: Synthetic oligonucleotide
  Antisense strand to SEQ ID NO: 1859339
gauuugggaagacuccaaa

SEQ ID NO: 1859341 - RNA, 19 nt, Artificial Sequence
  Description of Artificial Sequence: Synthetic oligonucleotide
  Sense strand starting at position 2226 of SEQ ID NO: 1564163
cccaaaucagaguacgcau

SEQ ID NO: 1859342 - RNA, 19 nt, Artificial Sequence
  Description of Artificial Sequence: Synthetic oligonucleotide
  Antisense strand to SEQ ID NO: 1859341
augcguacucugauuuggg

SEQ ID NO: 1859343 - RNA, 19 nt, Artificial Sequence
  Description of Artificial Sequence: Synthetic oligonucleotide
  Sense strand starting at position 2291 of SEQ ID NO: 1564163
gguggugcauuguuaucca

SEQ ID NO: 1859344 - RNA, 19 nt, Artificial Sequence
  Description of Artificial Sequence: Synthetic oligonucleotide
  Antisense strand to SEQ ID NO: 1859343
uggauaacaaugcaccacc

SEQ ID NO: 1859345 - RNA, 19 nt, Artificial Sequence
  Description of Artificial Sequence: Synthetic oligonucleotide
  Sense strand starting at position 2294 of SEQ ID NO: 1564163
ggugcauuguuauccaguu

SEQ ID NO: 1859346 - RNA, 19 nt, Artificial Sequence
  Description of Artificial Sequence: Synthetic oligonucleotide
  Antisense strand to SEQ ID NO: 1859345
aacuggauaacaaugcacc

SEQ ID NO: 1859347 - RNA, 19 nt, Artificial Sequence
  Description of Artificial Sequence: Synthetic oligonucleotide
  Sense strand starting at position 2295 of SEQ ID NO: 1564163
gugcauuguuauccaguuu

SEQ ID NO: 1859348 - RNA, 19 nt, Artificial Sequence
  Description of Artificial Sequence: Synthetic oligonucleotide
  Antisense strand to SEQ ID NO: 1859347
aaacuggauaacaaugcac

SEQ ID NO: 1859349 - RNA, 19 nt, Artificial Sequence
  Description of Artificial Sequence: Synthetic oligonucleotide
  Sense strand starting at position 2878 of SEQ ID NO: 1564163
agaacaaucugggauacau

SEQ ID NO: 1859350 - RNA, 19 nt, Artificial Sequence
  Description of Artificial Sequence: Synthetic oligonucleotide
  Antisense strand to SEQ ID NO: 1859349
auguaucccagauuguucu

SEQ ID NO: 1859351 - RNA, 19 nt, Artificial Sequence
  Description of Artificial Sequence: Synthetic oligonucleotide
  Sense strand starting at position 3196 of SEQ ID NO: 1564163
cuaagauccucccaggauu

SEQ ID NO: 1859352 - RNA, 19 nt, Artificial Sequence
  Description of Artificial Sequence: Synthetic oligonucleotide
  Antisense strand to SEQ ID NO: 1859351
aauccugggaggaucuuag

SEQ ID NO: 1859353 - RNA, 19 nt, Artificial Sequence
  Description of Artificial Sequence: Synthetic oligonucleotide
  Sense strand starting at position 3339 of SEQ ID NO: 1564163
guaugcagauguugagacu

SEQ ID NO: 1859354 - RNA, 19 nt, Artificial Sequence
  Description of Artificial Sequence: Synthetic oligonucleotide
  Antisense strand to SEQ ID NO: 1859353
agucucaacaucugcauac

SEQ ID NO: 1859355 - RNA, 19 nt, Artificial Sequence
  Description of Artificial Sequence: Synthetic oligonucleotide
  Sense strand starting at position 3373 of SEQ ID NO: 1564163
uaagcagucugcucaaagu

SEQ ID NO: 1859356 - RNA, 19 nt, Artificial Sequence
  Description of Artificial Sequence: Synthetic oligonucleotide
  Antisense strand to SEQ ID NO: 1859355
acuuugagcagacugcuua

SEQ ID NO: 1859357 - RNA, 19 nt, Artificial Sequence
  Description of Artificial Sequence: Synthetic oligonucleotide
  Sense strand starting at position 3519 of SEQ ID NO: 1564163
cuauguugucccugcugau

SEQ ID NO: 1859358 - RNA, 19 nt, Artificial Sequence
  Description of Artificial Sequence: Synthetic oligonucleotide
  Antisense strand to SEQ ID NO: 1859357
aucagcagggacaacauag

SEQ ID NO: 1859359 - RNA, 19 nt, Artificial Sequence
  Description of Artificial Sequence: Synthetic oligonucleotide
  Sense strand starting at position 3653 of SEQ ID NO: 1564163
ucuauauugccucgacuac

SEQ ID NO: 1859360 - RNA, 19 nt, Artificial Sequence
  Description of Artificial Sequence: Synthetic oligonucleotide
  Antisense strand to SEQ ID NO: 1859359
guagucgaggcaauauaga

SEQ ID NO: 1859361 - RNA, 19 nt, Artificial Sequence
  Description of Artificial Sequence: Synthetic oligonucleotide
  Sense strand starting at position 3654 of SEQ ID NO: 1564163
cuauauugccucgacuacu

SEQ ID NO: 1859362 - RNA, 19 nt, Artificial Sequence
  Description of Artificial Sequence: Synthetic oligonucleotide
  Antisense strand to SEQ ID NO: 1859361
aguagucgaggcaauauag

SEQ ID NO: 1859363 - RNA, 19 nt, Artificial Sequence
  Description of Artificial Sequence: Synthetic oligonucleotide
  Sense strand starting at position 3664 of SEQ ID NO: 1564163
ucgacuacuuguugaauga

SEQ ID NO: 1859364 - RNA, 19 nt, Artificial Sequence
  Description of Artificial Sequence: Synthetic oligonucleotide
  Antisense strand to SEQ ID NO: 1859363
ucauucaacaaguagucga

SEQ ID NO: 1859365 - RNA, 19 nt, Artificial Sequence
  Description of Artificial Sequence: Synthetic oligonucleotide
  Sense strand starting at position 3665 of SEQ ID NO: 1564163
cgacuacuuguugaaugaa

SEQ ID NO: 1859366 - RNA, 19 nt, Artificial Sequence
  Description of Artificial Sequence: Synthetic oligonucleotide
  Antisense strand to SEQ ID NO: 1859365
uucauucaacaaguagucg

SEQ ID NO: 1859367 - RNA, 19 nt, Artificial Sequence
  Description of Artificial Sequence: Synthetic oligonucleotide
  Sense strand starting at position 3753 of SEQ ID NO: 1564163
cccucugacugcuguaaca

SEQ ID NO: 1859368 - RNA, 19 nt, Artificial Sequence
  Description of Artificial Sequence: Synthetic oligonucleotide
  Antisense strand to SEQ ID NO: 1859367
uguuacagcagucagaggg

SEQ ID NO: 1859369 - RNA, 19 nt, Artificial Sequence
  Description of Artificial Sequence: Synthetic oligonucleotide
  Sense strand starting at position 3755 of SEQ ID NO: 1564163
cucugacugcuguaacaaa

SEQ ID NO: 1859370 - RNA, 19 nt, Artificial Sequence
  Description of Artificial Sequence: Synthetic oligonucleotide
  Antisense strand to SEQ ID NO: 1859369
uuuguuacagcagucagag

SEQ ID NO: 1859371 - RNA, 19 nt, Artificial Sequence
  Description of Artificial Sequence: Synthetic oligonucleotide
  Sense strand starting at position 954 of SEQ ID NO: 1564164
gagauaacauggucucuuu

SEQ ID NO: 1859372 - RNA, 19 nt, Artificial Sequence
  Description of Artificial Sequence: Synthetic oligonucleotide
  Antisense strand to SEQ ID NO: 1859371
aaagagaccauguuaucuc

SEQ ID NO: 1859373 - RNA, 19 nt, Artificial Sequence
  Description of Artificial Sequence: Synthetic oligonucleotide
  Sense strand starting at position 964 of SEQ ID NO: 1564164
ggucucuuuggcgauggau

SEQ ID NO: 1859374 - RNA, 19 nt, Artificial Sequence
  Description of Artificial Sequence: Synthetic oligonucleotide
  Antisense strand to SEQ ID NO: 1859373
auccaucgccaaagagacc

SEQ ID NO: 1859375 - RNA, 19 nt, Artificial Sequence
  Description of Artificial Sequence: Synthetic oligonucleotide
  Sense strand starting at position 1055 of SEQ ID NO: 1564164
gaggcuauuacucggugau

SEQ ID NO: 1859376 - RNA, 19 nt, Artificial Sequence
  Description of Artificial Sequence: Synthetic oligonucleotide
  Antisense strand to SEQ ID NO: 1859375
aucaccgaguaauagccuc

SEQ ID NO: 1859377 - RNA, 19 nt, Artificial Sequence
  Description of Artificial Sequence: Synthetic oligonucleotide
  Sense strand starting at position 1057 of SEQ ID NO: 1564164
ggcuauuacucggugauuu

SEQ ID NO: 1859378 - RNA, 19 nt, Artificial Sequence
  Description of Artificial Sequence: Synthetic oligonucleotide
  Antisense strand to SEQ ID NO: 1859377
aaaucaccgaguaauagcc

SEQ ID NO: 1859379 - RNA, 19 nt, Artificial Sequence
  Description of Artificial Sequence: Synthetic oligonucleotide
  Sense strand starting at position 1058 of SEQ ID NO: 1564164
gcuauuacucggugauuug

SEQ ID NO: 1859380 - RNA, 19 nt, Artificial Sequence
  Description of Artificial Sequence: Synthetic oligonucleotide
  Antisense strand to SEQ ID NO: 1859379
caaaucaccgaguaauagc

SEQ ID NO: 1859381 - RNA, 19 nt, Artificial Sequence
  Description of Artificial Sequence: Synthetic oligonucleotide
  Sense strand starting at position 2167 of SEQ ID NO: 1564164
auccuugggcagugacaua

SEQ ID NO: 1859382 - RNA, 19 nt, Artificial Sequence
  Description of Artificial Sequence: Synthetic oligonucleotide
  Antisense strand to SEQ ID NO: 1859381
uaugucacugcccaaggau

SEQ ID NO: 1859383 - RNA, 19 nt, Artificial Sequence
  Description of Artificial Sequence: Synthetic oligonucleotide
  Sense strand starting at position 2361 of SEQ ID NO: 1564164
acuugaaagacacgauguu

SEQ ID NO: 1859384 - RNA, 19 nt, Artificial Sequence
  Description of Artificial Sequence: Synthetic oligonucleotide
  Antisense strand to SEQ ID NO: 1859383
aacaucgugucuuucaagu

SEQ ID NO: 1859385 - RNA, 19 nt, Artificial Sequence
  Description of Artificial Sequence: Synthetic oligonucleotide
  Sense strand starting at position 2362 of SEQ ID NO: 1564164
cuugaaagacacgauguuu

SEQ ID NO: 1859386 - RNA, 19 nt, Artificial Sequence
  Description of Artificial Sequence: Synthetic oligonucleotide
  Antisense strand to SEQ ID NO: 1859385
aaacaucgugucuuucaag

SEQ ID NO: 1859387 - RNA, 19 nt, Artificial Sequence
  Description of Artificial Sequence: Synthetic oligonucleotide
  Sense strand starting at position 2400 of SEQ ID NO: 1564164
ggagguuugcuauacuuag

SEQ ID NO: 1859388 - RNA, 19 nt, Artificial Sequence
  Description of Artificial Sequence: Synthetic oligonucleotide
  Antisense strand to SEQ ID NO: 1859387
cuaaguauagcaaaccucc

SEQ ID NO: 1859389 - RNA, 19 nt, Artificial Sequence
  Description of Artificial Sequence: Synthetic oligonucleotide
  Sense strand starting at position 2507 of SEQ ID NO: 1564164
agggaaucuuaaguauggu

SEQ ID NO: 1859390 - RNA, 19 nt, Artificial Sequence
  Description of Artificial Sequence: Synthetic oligonucleotide
  Antisense strand to SEQ ID NO: 1859389
accauacuuaagauucccu

SEQ ID NO: 1859391 - RNA, 19 nt, Artificial Sequence
  Description of Artificial Sequence: Synthetic oligonucleotide
  Sense strand starting at position 3353 of SEQ ID NO: 1564164
ucuguuguucuuguuguua

SEQ ID NO: 1859392 - RNA, 19 nt, Artificial Sequence
  Description of Artificial Sequence: Synthetic oligonucleotide
  Antisense strand to SEQ ID NO: 1859391
uaacaacaagaacaacaga

SEQ ID NO: 1859393 - RNA, 19 nt, Artificial Sequence
  Description of Artificial Sequence: Synthetic oligonucleotide
  Sense strand starting at position 94 of SEQ ID NO: 1564165
gugcuagaucugggaacug

SEQ ID NO: 1859394 - RNA, 19 nt, Artificial Sequence
  Description of Artificial Sequence: Synthetic oligonucleotide
  Antisense strand to SEQ ID NO: 1859393
caguucccagaucuagcac

SEQ ID NO: 1859395 - RNA, 19 nt, Artificial Sequence
  Description of Artificial Sequence: Synthetic oligonucleotide
  Sense strand starting at position 119 of SEQ ID NO: 1564165
auaauccuuccugguugau

SEQ ID NO: 1859396 - RNA, 19 nt, Artificial Sequence
  Description of Artificial Sequence: Synthetic oligonucleotide
  Antisense strand to SEQ ID NO: 1859395
aucaaccaggaaggauuau

SEQ ID NO: 1859397 - RNA, 19 nt, Artificial Sequence
  Description of Artificial Sequence: Synthetic oligonucleotide
  Sense strand starting at position 531 of SEQ ID NO: 1564165
ggagcagucugaccugcaa

SEQ ID NO: 1859398 - RNA, 19 nt, Artificial Sequence
  Description of Artificial Sequence: Synthetic oligonucleotide
  Antisense strand to SEQ ID NO: 1859397
uugcaggucagacugcucc

SEQ ID NO: 1859399 - RNA, 19 nt, Artificial Sequence
  Description of Artificial Sequence: Synthetic oligonucleotide
  Sense strand starting at position 533 of SEQ ID NO: 1564165
agcagucugaccugcaaga

SEQ ID NO: 1859400 - RNA, 19 nt, Artificial Sequence
  Description of Artificial Sequence: Synthetic oligonucleotide
  Antisense strand to SEQ ID NO: 1859399
ucuugcaggucagacugcu

SEQ ID NO: 1859401 - RNA, 19 nt, Artificial Sequence
  Description of Artificial Sequence: Synthetic oligonucleotide
  Sense strand starting at position 535 of SEQ ID NO: 1564165
cagucugaccugcaagaga

SEQ ID NO: 1859402 - RNA, 19 nt, Artificial Sequence
  Description of Artificial Sequence: Synthetic oligonucleotide
  Antisense strand to SEQ ID NO: 1859401
ucucuugcaggucagacug

SEQ ID NO: 1859403 - RNA, 19 nt, Artificial Sequence
  Description of Artificial Sequence: Synthetic oligonucleotide
  Sense strand starting at position 549 of SEQ ID NO: 1564165
agagaaauagccugagucu

SEQ ID NO: 1859404 - RNA, 19 nt, Artificial Sequence
  Description of Artificial Sequence: Synthetic oligonucleotide
  Antisense strand to SEQ ID NO: 1859403
agacucaggcuauuucucu

SEQ ID NO: 1859405 - RNA, 19 nt, Artificial Sequence
  Description of Artificial Sequence: Synthetic oligonucleotide
  Sense strand starting at position 550 of SEQ ID NO: 1564165
gagaaauagccugagucuu

SEQ ID NO: 1859406 - RNA, 19 nt, Artificial Sequence
  Description of Artificial Sequence: Synthetic oligonucleotide
  Antisense strand to SEQ ID NO: 1859405
aagacucaggcuauuucuc

SEQ ID NO: 1859407 - RNA, 19 nt, Artificial Sequence
  Description of Artificial Sequence: Synthetic oligonucleotide
  Sense strand starting at position 552 of SEQ ID NO: 1564165
gaaauagccugagucuuuc

SEQ ID NO: 1859408 - RNA, 19 nt, Artificial Sequence
  Description of Artificial Sequence: Synthetic oligonucleotide
  Antisense strand to SEQ ID NO: 1859407
gaaagacucaggcuauuuc

SEQ ID NO: 1859409 - RNA, 19 nt, Artificial Sequence
  Description of Artificial Sequence: Synthetic oligonucleotide
  Sense strand starting at position 671 of SEQ ID NO: 1564165
ucugucccugaguaaggau

SEQ ID NO: 1859410 - RNA, 19 nt, Artificial Sequence
  Description of Artificial Sequence: Synthetic oligonucleotide
  Antisense strand to SEQ ID NO: 1859409
auccuuacucagggacaga

SEQ ID NO: 1859411 - RNA, 19 nt, Artificial Sequence
  Description of Artificial Sequence: Synthetic oligonucleotide
  Sense strand starting at position 754 of SEQ ID NO: 1564165
acagguuuccuaugggcaa

SEQ ID NO: 1859412 - RNA, 19 nt, Artificial Sequence
  Description of Artificial Sequence: Synthetic oligonucleotide
  Antisense strand to SEQ ID NO: 1859411
uugcccauaggaaaccugu

SEQ ID NO: 1859413 - RNA, 19 nt, Artificial Sequence
  Description of Artificial Sequence: Synthetic oligonucleotide
  Sense strand starting at position 938 of SEQ ID NO: 1564165
aagggaaguuagucccaga

SEQ ID NO: 1859414 - RNA, 19 nt, Artificial Sequence
  Description of Artificial Sequence: Synthetic oligonucleotide
  Antisense strand to SEQ ID NO: 1859413
ucugggacuaacuucccuu

SEQ ID NO: 1859415 - RNA, 19 nt, Artificial Sequence
  Description of Artificial Sequence: Synthetic oligonucleotide
  Sense strand starting at position 955 of SEQ ID NO: 1564165
gagauaacauggucucuuu

SEQ ID NO: 1859416 - RNA, 19 nt, Artificial Sequence
  Description of Artificial Sequence: Synthetic oligonucleotide
  Antisense strand to SEQ ID NO: 1859415
aaagagaccauguuaucuc

SEQ ID NO: 1859417 - RNA, 19 nt, Artificial Sequence
  Description of Artificial Sequence: Synthetic oligonucleotide
  Sense strand starting at position 965 of SEQ ID NO: 1564165
ggucucuuuggcgauggau

SEQ ID NO: 1859418 - RNA, 19 nt, Artificial Sequence
  Description of Artificial Sequence: Synthetic oligonucleotide
  Antisense strand to SEQ ID NO: 1859417
auccaucgccaaagagacc

SEQ ID NO: 1859419 - RNA, 19 nt, Artificial Sequence
  Description of Artificial Sequence: Synthetic oligonucleotide
  Sense strand starting at position 1024 of SEQ ID NO: 1564165
agaaaugagcaucgcuaau

SEQ ID NO: 1859420 - RNA, 19 nt, Artificial Sequence
  Description of Artificial Sequence: Synthetic oligonucleotide
  Antisense strand to SEQ ID NO: 1859419
auuagcgaugcucauuucu

SEQ ID NO: 1859421 - RNA, 19 nt, Artificial Sequence
  Description of Artificial Sequence: Synthetic oligonucleotide
  Sense strand starting at position 1714 of SEQ ID NO: 1564165
acuacagaguuccuaggaa

SEQ ID NO: 1859422 - RNA, 19 nt, Artificial Sequence
  Description of Artificial Sequence: Synthetic oligonucleotide
  Antisense strand to SEQ ID NO: 1859421
uuccuaggaacucuguagu

SEQ ID NO: 1859423 - RNA, 19 nt, Artificial Sequence
  Description of Artificial Sequence: Synthetic oligonucleotide
  Sense strand starting at position 1752 of SEQ ID NO: 1564165
guuagaaacugacaggaaa

SEQ ID NO: 1859424 - RNA, 19 nt, Artificial Sequence
  Description of Artificial Sequence: Synthetic oligonucleotide
  Antisense strand to SEQ ID NO: 1859423
uuuccugucaguuucuaac

SEQ ID NO: 1859425 - RNA, 19 nt, Artificial Sequence
  Description of Artificial Sequence: Synthetic oligonucleotide
  Sense strand starting at position 2168 of SEQ ID NO: 1564165
auccuugggcagugacaua

SEQ ID NO: 1859426 - RNA, 19 nt, Artificial Sequence
  Description of Artificial Sequence: Synthetic oligonucleotide
  Antisense strand to SEQ ID NO: 1859425
uaugucacugcccaaggau

SEQ ID NO: 1859427 - RNA, 19 nt, Artificial Sequence
  Description of Artificial Sequence: Synthetic oligonucleotide
  Sense strand starting at position 2317 of SEQ ID NO: 1564165
gucugaacugugggaagaa

SEQ ID NO: 1859428 - RNA, 19 nt, Artificial Sequence
  Description of Artificial Sequence: Synthetic oligonucleotide
  Antisense strand to SEQ ID NO: 1859427
uucuucccacaguucagac

SEQ ID NO: 1859429 - RNA, 19 nt, Artificial Sequence
  Description of Artificial Sequence: Synthetic oligonucleotide
  Sense strand starting at position 2362 of SEQ ID NO: 1564165
acuugaaagacacgauguu

SEQ ID NO: 1859430 - RNA, 19 nt, Artificial Sequence
  Description of Artificial Sequence: Synthetic oligonucleotide
  Antisense strand to SEQ ID NO: 1859429
aacaucgugucuuucaagu

SEQ ID NO: 1859431 - RNA, 19 nt, Artificial Sequence
  Description of Artificial Sequence: Synthetic oligonucleotide
  Sense strand starting at position 2363 of SEQ ID NO: 1564165
cuugaaagacacgauguuu

SEQ ID NO: 1859432 - RNA, 19 nt, Artificial Sequence
  Description of Artificial Sequence: Synthetic oligonucleotide
  Antisense strand to SEQ ID NO: 1859431
aaacaucgugucuuucaag

SEQ ID NO: 1859433 - RNA, 19 nt, Artificial Sequence
  Description of Artificial Sequence: Synthetic oligonucleotide
  Sense strand starting at position 2401 of SEQ ID NO: 1564165
ggagguuugcuauacuuag

SEQ ID NO: 1859434 - RNA, 19 nt, Artificial Sequence
  Description of Artificial Sequence: Synthetic oligonucleotide
  Antisense strand to SEQ ID NO: 1859433
cuaaguauagcaaaccucc

SEQ ID NO: 1859435 - RNA, 19 nt, Artificial Sequence
  Description of Artificial Sequence: Synthetic oligonucleotide
  Sense strand starting at position 2508 of SEQ ID NO: 1564165
agggaaucuuaaguauggu

SEQ ID NO: 1859436 - RNA, 19 nt, Artificial Sequence
  Description of Artificial Sequence: Synthetic oligonucleotide
  Antisense strand to SEQ ID NO: 1859435
accauacuuaagauucccu

SEQ ID NO: 1859437 - RNA, 19 nt, Artificial Sequence
  Description of Artificial Sequence: Synthetic oligonucleotide
  Sense strand starting at position 2547 of SEQ ID NO: 1564165
accuguagcccugaagaga

SEQ ID NO: 1859438 - RNA, 19 nt, Artificial Sequence
  Description of Artificial Sequence: Synthetic oligonucleotide
  Antisense strand to SEQ ID NO: 1859437
ucucuucagggcuacaggu

SEQ ID NO: 1859439 - RNA, 19 nt, Artificial Sequence
  Description of Artificial Sequence: Synthetic oligonucleotide
  Sense strand starting at position 2595 of SEQ ID NO: 1564165
ugugguauugguuacaucu

SEQ ID NO: 1859440 - RNA, 19 nt, Artificial Sequence
  Description of Artificial Sequence: Synthetic oligonucleotide
  Antisense strand to SEQ ID NO: 1859439
agauguaaccaauaccaca

SEQ ID NO: 1859441 - RNA, 19 nt, Artificial Sequence
  Description of Artificial Sequence: Synthetic oligonucleotide
  Sense strand starting at position 3773 of SEQ ID NO: 1564165
agcugaaucuccguaagaa

SEQ ID NO: 1859442 - RNA, 19 nt, Artificial Sequence
  Description of Artificial Sequence: Synthetic oligonucleotide
  Antisense strand to SEQ ID NO: 1859441
uucuuacggagauucagcu

SEQ ID NO: 1859443 - RNA, 19 nt, Artificial Sequence
  Description of Artificial Sequence: Synthetic oligonucleotide
  Sense strand starting at position 3774 of SEQ ID NO: 1564165
gcugaaucuccguaagaac

SEQ ID NO: 1859444 - RNA, 19 nt, Artificial Sequence
  Description of Artificial Sequence: Synthetic oligonucleotide
  Antisense strand to SEQ ID NO: 1859443
guucuuacggagauucagc

SEQ ID NO: 1859445 - RNA, 19 nt, Artificial Sequence
  Description of Artificial Sequence: Synthetic oligonucleotide
  Sense strand starting at position 3920 of SEQ ID NO: 1564165
aaugucaguccugauauag

SEQ ID NO: 1859446 - RNA, 19 nt, Artificial Sequence
  Description of Artificial Sequence: Synthetic oligonucleotide
  Antisense strand to SEQ ID NO: 1859445
cuauaucaggacugacauu

SEQ ID NO: 1859447 - RNA, 19 nt, Artificial Sequence
  Description of Artificial Sequence: Synthetic oligonucleotide
  Sense strand starting at position 3953 of SEQ ID NO: 1564165
gcccuuucuggagguugau

SEQ ID NO: 1859448 - RNA, 19 nt, Artificial Sequence
  Description of Artificial Sequence: Synthetic oligonucleotide
  Antisense strand to SEQ ID NO: 1859447
aucaaccuccagaaagggc

SEQ ID NO: 1859449 - RNA, 19 nt, Artificial Sequence
  Description of Artificial Sequence: Synthetic oligonucleotide
  Sense strand starting at position 3962 of SEQ ID NO: 1564165
ggagguugauacucugugu

SEQ ID NO: 1859450 - RNA, 19 nt, Artificial Sequence
  Description of Artificial Sequence: Synthetic oligonucleotide
  Antisense strand to SEQ ID NO: 1859449
acacagaguaucaaccucc

SEQ ID NO: 1859451 - RNA, 19 nt, Artificial Sequence
  Description of Artificial Sequence: Synthetic oligonucleotide
  Sense strand starting at position 955 of SEQ ID NO: 1564166
gagauaacauggucucuuu

SEQ ID NO: 1859452 - RNA, 19 nt, Artificial Sequence
  Description of Artificial Sequence: Synthetic oligonucleotide
  Antisense strand to SEQ ID NO: 1859451
aaagagaccauguuaucuc

SEQ ID NO: 1859453 - RNA, 19 nt, Artificial Sequence
  Description of Artificial Sequence: Synthetic oligonucleotide
  Sense strand starting at position 965 of SEQ ID NO: 1564166
ggucucuuuggcgauggau

SEQ ID NO: 1859454 - RNA, 19 nt, Artificial Sequence
  Description of Artificial Sequence: Synthetic oligonucleotide
  Antisense strand to SEQ ID NO: 1859453
auccaucgccaaagagacc

SEQ ID NO: 1859455 - RNA, 19 nt, Artificial Sequence
  Description of Artificial Sequence: Synthetic oligonucleotide
  Sense strand starting at position 1056 of SEQ ID NO: 1564166
gaggcuauuacucggugau

SEQ ID NO: 1859456 - RNA, 19 nt, Artificial Sequence
  Description of Artificial Sequence: Synthetic oligonucleotide
  Antisense strand to SEQ ID NO: 1859455
aucaccgaguaauagccuc

SEQ ID NO: 1859457 - RNA, 19 nt, Artificial Sequence
  Description of Artificial Sequence: Synthetic oligonucleotide
  Sense strand starting at position 1058 of SEQ ID NO: 1564166
ggcuauuacucggugauuu

SEQ ID NO: 1859458 - RNA, 19 nt, Artificial Sequence
  Description of Artificial Sequence: Synthetic oligonucleotide
  Antisense strand to SEQ ID NO: 1859457
aaaucaccgaguaauagcc

SEQ ID NO: 1859459 - RNA, 19 nt, Artificial Sequence
  Description of Artificial Sequence: Synthetic oligonucleotide
  Sense strand starting at position 1059 of SEQ ID NO: 1564166
gcuauuacucggugauuug

SEQ ID NO: 1859460 - RNA, 19 nt, Artificial Sequence
  Description of Artificial Sequence: Synthetic oligonucleotide
  Antisense strand to SEQ ID NO: 1859459
caaaucaccgaguaauagc

SEQ ID NO: 1859461 - RNA, 19 nt, Artificial Sequence
  Description of Artificial Sequence: Synthetic oligonucleotide
  Sense strand starting at position 2168 of SEQ ID NO: 1564166
auccuugggcagugacaua

SEQ ID NO: 1859462 - RNA, 19 nt, Artificial Sequence
  Description of Artificial Sequence: Synthetic oligonucleotide
  Antisense strand to SEQ ID NO: 1859461
uaugucacugcccaaggau

SEQ ID NO: 1859463 - RNA, 19 nt, Artificial Sequence
  Description of Artificial Sequence: Synthetic oligonucleotide
  Sense strand starting at position 2362 of SEQ ID NO: 1564166
acuugaaagacacgauguu

SEQ ID NO: 1859464 - RNA, 19 nt, Artificial Sequence
  Description of Artificial Sequence: Synthetic oligonucleotide
  Antisense strand to SEQ ID NO: 1859463
aacaucgugucuuucaagu

SEQ ID NO: 1859465 - RNA, 19 nt, Artificial Sequence
  Description of Artificial Sequence: Synthetic oligonucleotide
  Sense strand starting at position 2363 of SEQ ID NO: 1564166
cuugaaagacacgauguuu

SEQ ID NO: 1859466 - RNA, 19 nt, Artificial Sequence
  Description of Artificial Sequence: Synthetic oligonucleotide
  Antisense strand to SEQ ID NO: 1859465
aaacaucgugucuuucaag

SEQ ID NO: 1859467 - RNA, 19 nt, Artificial Sequence
  Description of Artificial Sequence: Synthetic oligonucleotide
  Sense strand starting at position 2401 of SEQ ID NO: 1564166
ggagguuugcuauacuuag

SEQ ID NO: 1859468 - RNA, 19 nt, Artificial Sequence
  Description of Artificial Sequence: Synthetic oligonucleotide
  Antisense strand to SEQ ID NO: 1859467
cuaaguauagcaaaccucc

SEQ ID NO: 1859469 - RNA, 19 nt, Artificial Sequence
  Description of Artificial Sequence: Synthetic oligonucleotide
  Sense strand starting at position 2508 of SEQ ID NO: 1564166
agggaaucuuaaguauggu

SEQ ID NO: 1859470 - RNA, 19 nt, Artificial Sequence
  Description of Artificial Sequence: Synthetic oligonucleotide
  Antisense strand to SEQ ID NO: 1859469
accauacuuaagauucccu

SEQ ID NO: 1859471 - RNA, 19 nt, Artificial Sequence
  Description of Artificial Sequence: Synthetic oligonucleotide
  Sense strand starting at position 3354 of SEQ ID NO: 1564166
ucuguuguucuuguuguua

SEQ ID NO: 1859472 - RNA, 19 nt, Artificial Sequence
  Description of Artificial Sequence: Synthetic oligonucleotide
  Antisense strand to SEQ ID NO: 1859471
uaacaacaagaacaacaga

SEQ ID NO: 1859473 - RNA, 19 nt, Artificial Sequence
  Description of Artificial Sequence: Synthetic oligonucleotide
  Sense strand starting at position 95 of SEQ ID NO: 1564167
gugcuagaucugggaacug

SEQ ID NO: 1859474 - RNA, 19 nt, Artificial Sequence
  Description of Artificial Sequence: Synthetic oligonucleotide
  Antisense strand to SEQ ID NO: 1859473
caguucccagaucuagcac

SEQ ID NO: 1859475 - RNA, 19 nt, Artificial Sequence
  Description of Artificial Sequence: Synthetic oligonucleotide
  Sense strand starting at position 120 of SEQ ID NO: 1564167
auaauccuuccugguugau

SEQ ID NO: 1859476 - RNA, 19 nt, Artificial Sequence
  Description of Artificial Sequence: Synthetic oligonucleotide
  Antisense strand to SEQ ID NO: 1859475
aucaaccaggaaggauuau

SEQ ID NO: 1859477 - RNA, 19 nt, Artificial Sequence
  Description of Artificial Sequence: Synthetic oligonucleotide
  Sense strand starting at position 532 of SEQ ID NO: 1564167
ggagcagucugaccugcaa

SEQ ID NO: 1859478 - RNA, 19 nt, Artificial Sequence
  Description of Artificial Sequence: Synthetic oligonucleotide
  Antisense strand to SEQ ID NO: 1859477
uugcaggucagacugcucc

SEQ ID NO: 1859479 - RNA, 19 nt, Artificial Sequence
  Description of Artificial Sequence: Synthetic oligonucleotide
  Sense strand starting at position 534 of SEQ ID NO: 1564167
agcagucugaccugcaaga

SEQ ID NO: 1859480 - RNA, 19 nt, Artificial Sequence
  Description of Artificial Sequence: Synthetic oligonucleotide
  Antisense strand to SEQ ID NO: 1859479
ucuugcaggucagacugcu

SEQ ID NO: 1859481 - RNA, 19 nt, Artificial Sequence
  Description of Artificial Sequence: Synthetic oligonucleotide
  Sense strand starting at position 536 of SEQ ID NO: 1564167
cagucugaccugcaagaga

SEQ ID NO: 1859482 - RNA, 19 nt, Artificial Sequence
  Description of Artificial Sequence: Synthetic oligonucleotide
  Antisense strand to SEQ ID NO: 1859481
ucucuugcaggucagacug

SEQ ID NO: 1859483 - RNA, 19 nt, Artificial Sequence
  Description of Artificial Sequence: Synthetic oligonucleotide
  Sense strand starting at position 550 of SEQ ID NO: 1564167
agagaaauagccugagucu

SEQ ID NO: 1859484 - RNA, 19 nt, Artificial Sequence
  Description of Artificial Sequence: Synthetic oligonucleotide
  Antisense strand to SEQ ID NO: 1859483
agacucaggcuauuucucu

SEQ ID NO: 1859485 - RNA, 19 nt, Artificial Sequence
  Description of Artificial Sequence: Synthetic oligonucleotide
  Sense strand starting at position 551 of SEQ ID NO: 1564167
gagaaauagccugagucuu

SEQ ID NO: 1859486 - RNA, 19 nt, Artificial Sequence
  Description of Artificial Sequence: Synthetic oligonucleotide
  Antisense strand to SEQ ID NO: 1859485
aagacucaggcuauuucuc

SEQ ID NO: 1859487 - RNA, 19 nt, Artificial Sequence
  Description of Artificial Sequence: Synthetic oligonucleotide
  Sense strand starting at position 553 of SEQ ID NO: 1564167
gaaauagccugagucuuuc

SEQ ID NO: 1859488 - RNA, 19 nt, Artificial Sequence
  Description of Artificial Sequence: Synthetic oligonucleotide
  Antisense strand to SEQ ID NO: 1859487
gaaagacucaggcuauuuc

SEQ ID NO: 1859489 - RNA, 19 nt, Artificial Sequence
  Description of Artificial Sequence: Synthetic oligonucleotide
  Sense strand starting at position 672 of SEQ ID NO: 1564167
ucugucccugaguaaggau

SEQ ID NO: 1859490 - RNA, 19 nt, Artificial Sequence
  Description of Artificial Sequence: Synthetic oligonucleotide
  Antisense strand to SEQ ID NO: 1859489
auccuuacucagggacaga

SEQ ID NO: 1859491 - RNA, 19 nt, Artificial Sequence
  Description of Artificial Sequence: Synthetic oligonucleotide
  Sense strand starting at position 755 of SEQ ID NO: 1564167
acagguuuccuaugggcaa

SEQ ID NO: 1859492 - RNA, 19 nt, Artificial Sequence
  Description of Artificial Sequence: Synthetic oligonucleotide
  Antisense strand to SEQ ID NO: 1859491
uugcccauaggaaaccugu

SEQ ID NO: 1859493 - RNA, 19 nt, Artificial Sequence
  Description of Artificial Sequence: Synthetic oligonucleotide
  Sense strand starting at position 939 of SEQ ID NO: 1564167
aagggaaguuagucccaga

SEQ ID NO: 1859494 - RNA, 19 nt, Artificial Sequence
  Description of Artificial Sequence: Synthetic oligonucleotide
  Antisense strand to SEQ ID NO: 1859493
ucugggacuaacuucccuu

SEQ ID NO: 1859495 - RNA, 19 nt, Artificial Sequence
  Description of Artificial Sequence: Synthetic oligonucleotide
  Sense strand starting at position 956 of SEQ ID NO: 1564167
gagauaacauggucucuuu

SEQ ID NO: 1859496 - RNA, 19 nt, Artificial Sequence
  Description of Artificial Sequence: Synthetic oligonucleotide
  Antisense strand to SEQ ID NO: 1859495
aaagagaccauguuaucuc

SEQ ID NO: 1859497 - RNA, 19 nt, Artificial Sequence
  Description of Artificial Sequence: Synthetic oligonucleotide
  Sense strand starting at position 966 of SEQ ID NO: 1564167
ggucucuuuggcgauggau

SEQ ID NO: 1859498 - RNA, 19 nt, Artificial Sequence
  Description of Artificial Sequence: Synthetic oligonucleotide
  Antisense strand to SEQ ID NO: 1859497
auccaucgccaaagagacc

SEQ ID NO: 1859499 - RNA, 19 nt, Artificial Sequence
  Description of Artificial Sequence: Synthetic oligonucleotide
  Sense strand starting at position 1025 of SEQ ID NO: 1564167
agaaaugagcaucgcuaau

SEQ ID NO: 1859500 - RNA, 19 nt, Artificial Sequence
  Description of Artificial Sequence: Synthetic oligonucleotide
  Antisense strand to SEQ ID NO: 1859499
auuagcgaugcucauuucu

SEQ ID NO: 1859501 - RNA, 19 nt, Artificial Sequence
  Description of Artificial Sequence: Synthetic oligonucleotide
  Sense strand starting at position 1715 of SEQ ID NO: 1564167
acuacagaguuccuaggaa

SEQ ID NO: 1859502 - RNA, 19 nt, Artificial Sequence
  Description of Artificial Sequence: Synthetic oligonucleotide
  Antisense strand to SEQ ID NO: 1859501
uuccuaggaacucuguagu

SEQ ID NO: 1859503 - RNA, 19 nt, Artificial Sequence
  Description of Artificial Sequence: Synthetic oligonucleotide
  Sense strand starting at position 1753 of SEQ ID NO: 1564167
guuagaaacugacaggaaa

SEQ ID NO: 1859504 - RNA, 19 nt, Artificial Sequence
  Description of Artificial Sequence: Synthetic oligonucleotide
  Antisense strand to SEQ ID NO: 1859503
uuuccugucaguuucuaac

SEQ ID NO: 1859505 - RNA, 19 nt, Artificial Sequence
  Description of Artificial Sequence: Synthetic oligonucleotide
  Sense strand starting at position 2169 of SEQ ID NO: 1564167
auccuugggcagugacaua

SEQ ID NO: 1859506 - RNA, 19 nt, Artificial Sequence
  Description of Artificial Sequence: Synthetic oligonucleotide
  Antisense strand to SEQ ID NO: 1859505
uaugucacugcccaaggau

SEQ ID NO: 1859507 - RNA, 19 nt, Artificial Sequence
  Description of Artificial Sequence: Synthetic oligonucleotide
  Sense strand starting at position 2318 of SEQ ID NO: 1564167
gucugaacugugggaagaa

SEQ ID NO: 1859508 - RNA, 19 nt, Artificial Sequence
  Description of Artificial Sequence: Synthetic oligonucleotide
  Antisense strand to SEQ ID NO: 1859507
uucuucccacaguucagac

SEQ ID NO: 1859509 - RNA, 19 nt, Artificial Sequence
  Description of Artificial Sequence: Synthetic oligonucleotide
  Sense strand starting at position 2363 of SEQ ID NO: 1564167
acuugaaagacacgauguu

SEQ ID NO: 1859510 - RNA, 19 nt, Artificial Sequence
  Description of Artificial Sequence: Synthetic oligonucleotide
  Antisense strand to SEQ ID NO: 1859509
aacaucgugucuuucaagu

SEQ ID NO: 1859511 - RNA, 19 nt, Artificial Sequence
  Description of Artificial Sequence: Synthetic oligonucleotide
  Sense strand starting at position 2364 of SEQ ID NO: 1564167
cuugaaagacacgauguuu

SEQ ID NO: 1859512 - RNA, 19 nt, Artificial Sequence
  Description of Artificial Sequence: Synthetic oligonucleotide
  Antisense strand to SEQ ID NO: 1859511
aaacaucgugucuuucaag

SEQ ID NO: 1859513 - RNA, 19 nt, Artificial Sequence
  Description of Artificial Sequence: Synthetic oligonucleotide
  Sense strand starting at position 2402 of SEQ ID NO: 1564167
ggagguuugcuauacuuag

SEQ ID NO: 1859514 - RNA, 19 nt, Artificial Sequence
  Description of Artificial Sequence: Synthetic oligonucleotide
  Antisense strand to SEQ ID NO: 1859513
cuaaguauagcaaaccucc

SEQ ID NO: 1859515 - RNA, 19 nt, Artificial Sequence
  Description of Artificial Sequence: Synthetic oligonucleotide
  Sense strand starting at position 2509 of SEQ ID NO: 1564167
agggaaucuuaaguauggu

SEQ ID NO: 1859516 - RNA, 19 nt, Artificial Sequence
  Description of Artificial Sequence: Synthetic oligonucleotide
  Antisense strand to SEQ ID NO: 1859515
accauacuuaagauucccu

SEQ ID NO: 1859517 - RNA, 19 nt, Artificial Sequence
  Description of Artificial Sequence: Synthetic oligonucleotide
  Sense strand starting at position 2548 of SEQ ID NO: 1564167
accuguagcccugaagaga

SEQ ID NO: 1859518 - RNA, 19 nt, Artificial Sequence
  Description of Artificial Sequence: Synthetic oligonucleotide
  Antisense strand to SEQ ID NO: 1859517
ucucuucagggcuacaggu

SEQ ID NO: 1859519 - RNA, 19 nt, Artificial Sequence
  Description of Artificial Sequence: Synthetic oligonucleotide
  Sense strand starting at position 2596 of SEQ ID NO: 1564167
ugugguauugguuacaucu

SEQ ID NO: 1859520 - RNA, 19 nt, Artificial Sequence
  Description of Artificial Sequence: Synthetic oligonucleotide
  Antisense strand to SEQ ID NO: 1859519
agauguaaccaauaccaca

SEQ ID NO: 1859521 - RNA, 19 nt, Artificial Sequence
  Description of Artificial Sequence: Synthetic oligonucleotide
  Sense strand starting at position 3774 of SEQ ID NO: 1564167
agcugaaucuccguaagaa

SEQ ID NO: 1859522 - RNA, 19 nt, Artificial Sequence
  Description of Artificial Sequence: Synthetic oligonucleotide
  Antisense strand to SEQ ID NO: 1859521
uucuuacggagauucagcu

SEQ ID NO: 1859523 - RNA, 19 nt, Artificial Sequence
  Description of Artificial Sequence: Synthetic oligonucleotide
  Sense strand starting at position 3775 of SEQ ID NO: 1564167
gcugaaucuccguaagaac

SEQ ID NO: 1859524 - RNA, 19 nt, Artificial Sequence
  Description of Artificial Sequence: Synthetic oligonucleotide
  Antisense strand to SEQ ID NO: 1859523
guucuuacggagauucagc

SEQ ID NO: 1859525 - RNA, 19 nt, Artificial Sequence
  Description of Artificial Sequence: Synthetic oligonucleotide
  Sense strand starting at position 3921 of SEQ ID NO: 1564167
aaugucaguccugauauag

SEQ ID NO: 1859526 - RNA, 19 nt, Artificial Sequence
  Description of Artificial Sequence: Synthetic oligonucleotide
  Antisense strand to SEQ ID NO: 1859525
cuauaucaggacugacauu

SEQ ID NO: 1859527 - RNA, 19 nt, Artificial Sequence
  Description of Artificial Sequence: Synthetic oligonucleotide
  Sense strand starting at position 3954 of SEQ ID NO: 1564167
gcccuuucuggagguugau

SEQ ID NO: 1859528 - RNA, 19 nt, Artificial Sequence
  Description of Artificial Sequence: Synthetic oligonucleotide
  Antisense strand to SEQ ID NO: 1859527
aucaaccuccagaaagggc

SEQ ID NO: 1859529 - RNA, 19 nt, Artificial Sequence
  Description of Artificial Sequence: Synthetic oligonucleotide
  Sense strand starting at position 3963 of SEQ ID NO: 1564167
ggagguugauacucugugu

SEQ ID NO: 1859530 - RNA, 19 nt, Artificial Sequence
  Description of Artificial Sequence: Synthetic oligonucleotide
  Antisense strand to SEQ ID NO: 1859529
acacagaguaucaaccucc

SEQ ID NO: 1859531 - RNA, 19 nt, Artificial Sequence
  Description of Artificial Sequence: Synthetic oligonucleotide
  Sense strand starting at position 580 of SEQ ID NO: 1564166
cagcuuugauccuguggag

SEQ ID NO: 1859532 - RNA, 19 nt, Artificial Sequence
  Description of Artificial Sequence: Synthetic oligonucleotide
  Antisense strand to SEQ ID NO: 1859531
cuccacaggaucaaagcug

SEQ ID NO: 1859533 - RNA, 19 nt, Artificial Sequence
  Description of Artificial Sequence: Synthetic oligonucleotide
  Sense strand starting at position 583 of SEQ ID NO: 1564166
cuuugauccuguggaggga

SEQ ID NO: 1859534 - RNA, 19 nt, Artificial Sequence
  Description of Artificial Sequence: Synthetic oligonucleotide
  Antisense strand to SEQ ID NO: 1859533
ucccuccacaggaucaaag

SEQ ID NO: 1859535 - RNA, 19 nt, Artificial Sequence
  Description of Artificial Sequence: Synthetic oligonucleotide
  Sense strand starting at position 636 of SEQ ID NO: 1564166
ggaaucagcugcugcauuu

SEQ ID NO: 1859536 - RNA, 19 nt, Artificial Sequence
  Description of Artificial Sequence: Synthetic oligonucleotide
  Antisense strand to SEQ ID NO: 1859535
aaaugcagcagcugauucc

SEQ ID NO: 1859537 - RNA, 19 nt, Artificial Sequence
  Description of Artificial Sequence: Synthetic oligonucleotide
  Sense strand starting at position 736 of SEQ ID NO: 1564166
aaguauugauagggaauga

SEQ ID NO: 1859538 - RNA, 19 nt, Artificial Sequence
  Description of Artificial Sequence: Synthetic oligonucleotide
  Antisense strand to SEQ ID NO: 1859537
ucauucccuaucaauacuu

SEQ ID NO: 1859539 - RNA, 19 nt, Artificial Sequence
  Description of Artificial Sequence: Synthetic oligonucleotide
  Sense strand starting at position 964 of SEQ ID NO: 1564166
uggucucuuuggcgaugga

SEQ ID NO: 1859540 - RNA, 19 nt, Artificial Sequence
  Description of Artificial Sequence: Synthetic oligonucleotide
  Antisense strand to SEQ ID NO: 1859539
uccaucgccaaagagacca

SEQ ID NO: 1859541 - RNA, 19 nt, Artificial Sequence
  Description of Artificial Sequence: Synthetic oligonucleotide
  Sense strand starting at position 967 of SEQ ID NO: 1564166
ucucuuuggcgauggaucu

SEQ ID NO: 1859542 - RNA, 19 nt, Artificial Sequence
  Description of Artificial Sequence: Synthetic oligonucleotide
  Antisense strand to SEQ ID NO: 1859541
agauccaucgccaaagaga

SEQ ID NO: 1859543 - RNA, 19 nt, Artificial Sequence
  Description of Artificial Sequence: Synthetic oligonucleotide
  Sense strand starting at position 1030 of SEQ ID NO: 1564166
gagcaucgcuaauaugaac

SEQ ID NO: 1859544 - RNA, 19 nt, Artificial Sequence
  Description of Artificial Sequence: Synthetic oligonucleotide
  Antisense strand to SEQ ID NO: 1859543
guucauauuagcgaugcuc

SEQ ID NO: 1859545 - RNA, 19 nt, Artificial Sequence
  Description of Artificial Sequence: Synthetic oligonucleotide
  Sense strand starting at position 1057 of SEQ ID NO: 1564166
aggcuauuacucggugauu

SEQ ID NO: 1859546 - RNA, 19 nt, Artificial Sequence
  Description of Artificial Sequence: Synthetic oligonucleotide
  Antisense strand to SEQ ID NO: 1859545
aaucaccgaguaauagccu

SEQ ID NO: 1859547 - RNA, 19 nt, Artificial Sequence
  Description of Artificial Sequence: Synthetic oligonucleotide
  Sense strand starting at position 1066 of SEQ ID NO: 1564166
cucggugauuuguaaauua

SEQ ID NO: 1859548 - RNA, 19 nt, Artificial Sequence
  Description of Artificial Sequence: Synthetic oligonucleotide
  Antisense strand to SEQ ID NO: 1859547
uaauuuacaaaucaccgag

SEQ ID NO: 1859549 - RNA, 19 nt, Artificial Sequence
  Description of Artificial Sequence: Synthetic oligonucleotide
  Sense strand starting at position 1873 of SEQ ID NO: 1564166
ggcguaugcuuacucugau

SEQ ID NO: 1859550 - RNA, 19 nt, Artificial Sequence
  Description of Artificial Sequence: Synthetic oligonucleotide
  Antisense strand to SEQ ID NO: 1859549
aucagaguaagcauacgcc

SEQ ID NO: 1859551 - RNA, 19 nt, Artificial Sequence
  Description of Artificial Sequence: Synthetic oligonucleotide
  Sense strand starting at position 1874 of SEQ ID NO: 1564166
gcguaugcuuacucugauu

SEQ ID NO: 1859552 - RNA, 19 nt, Artificial Sequence
  Description of Artificial Sequence: Synthetic oligonucleotide
  Antisense strand to SEQ ID NO: 1859551
aaucagaguaagcauacgc

SEQ ID NO: 1859553 - RNA, 19 nt, Artificial Sequence
  Description of Artificial Sequence: Synthetic oligonucleotide
  Sense strand starting at position 2216 of SEQ ID NO: 1564166
cuuuguugccacugcgaaa

SEQ ID NO: 1859554 - RNA, 19 nt, Artificial Sequence
  Description of Artificial Sequence: Synthetic oligonucleotide
  Antisense strand to SEQ ID NO: 1859553
uuucgcaguggcaacaaag

SEQ ID NO: 1859555 - RNA, 19 nt, Artificial Sequence
  Description of Artificial Sequence: Synthetic oligonucleotide
  Sense strand starting at position 2398 of SEQ ID NO: 1564166
ugcggagguuugcuauacu

SEQ ID NO: 1859556 - RNA, 19 nt, Artificial Sequence
  Description of Artificial Sequence: Synthetic oligonucleotide
  Antisense strand to SEQ ID NO: 1859555
aguauagcaaaccuccgca

SEQ ID NO: 1859557 - RNA, 19 nt, Artificial Sequence
  Description of Artificial Sequence: Synthetic oligonucleotide
  Sense strand starting at position 2411 of SEQ ID NO: 1564166
uauacuuagucguggcuuu

SEQ ID NO: 1859558 - RNA, 19 nt, Artificial Sequence
  Description of Artificial Sequence: Synthetic oligonucleotide
  Antisense strand to SEQ ID NO: 1859557
aaagccacgacuaaguaua

SEQ ID NO: 1859559 - RNA, 19 nt, Artificial Sequence
  Description of Artificial Sequence: Synthetic oligonucleotide
  Sense strand starting at position 2442 of SEQ ID NO: 1564166
gcuucuaugucuguugcca

SEQ ID NO: 1859560 - RNA, 19 nt, Artificial Sequence
  Description of Artificial Sequence: Synthetic oligonucleotide
  Antisense strand to SEQ ID NO: 1859559
uggcaacagacauagaagc

SEQ ID NO: 1859561 - RNA, 19 nt, Artificial Sequence
  Description of Artificial Sequence: Synthetic oligonucleotide
  Sense strand starting at position 2483 of SEQ ID NO: 1564166
cgcaaccucugcuuacauu

SEQ ID NO: 1859562 - RNA, 19 nt, Artificial Sequence
  Description of Artificial Sequence: Synthetic oligonucleotide
  Antisense strand to SEQ ID NO: 1859561
aauguaagcagagguugcg

SEQ ID NO: 1859563 - RNA, 19 nt, Artificial Sequence
  Description of Artificial Sequence: Synthetic oligonucleotide
  Sense strand starting at position 2517 of SEQ ID NO: 1564166
uaaguauggugcgcacaau

SEQ ID NO: 1859564 - RNA, 19 nt, Artificial Sequence
  Description of Artificial Sequence: Synthetic oligonucleotide
  Antisense strand to SEQ ID NO: 1859563
auugugcgcaccauacuua

SEQ ID NO: 1859565 - RNA, 19 nt, Artificial Sequence
  Description of Artificial Sequence: Synthetic oligonucleotide
  Sense strand starting at position 2518 of SEQ ID NO: 1564166
aaguauggugcgcacaauu

SEQ ID NO: 1859566 - RNA, 19 nt, Artificial Sequence
  Description of Artificial Sequence: Synthetic oligonucleotide
  Antisense strand to SEQ ID NO: 1859565
aauugugcgcaccauacuu

SEQ ID NO: 1859567 - RNA, 19 nt, Artificial Sequence
  Description of Artificial Sequence: Synthetic oligonucleotide
  Sense strand starting at position 2968 of SEQ ID NO: 1564166
aaccguguuucccuauguu

SEQ ID NO: 1859568 - RNA, 19 nt, Artificial Sequence
  Description of Artificial Sequence: Synthetic oligonucleotide
  Antisense strand to SEQ ID NO: 1859567
aacauagggaaacacgguu

SEQ ID NO: 1859569 - RNA, 19 nt, Artificial Sequence
  Description of Artificial Sequence: Synthetic oligonucleotide
  Sense strand starting at position 3359 of SEQ ID NO: 1564166
uguucuuguuguuagcaga

SEQ ID NO: 1859570 - RNA, 19 nt, Artificial Sequence
  Description of Artificial Sequence: Synthetic oligonucleotide
  Antisense strand to SEQ ID NO: 1859569
ucugcuaacaacaagaaca

SEQ ID NO: 1859571 - RNA, 19 nt, Artificial Sequence
  Description of Artificial Sequence: Synthetic oligonucleotide
  Sense strand starting at position 3362 of SEQ ID NO: 1564166
ucuuguuguuagcagaaau

SEQ ID NO: 1859572 - RNA, 19 nt, Artificial Sequence
  Description of Artificial Sequence: Synthetic oligonucleotide
  Antisense strand to SEQ ID NO: 1859571
auuucugcuaacaacaaga

SEQ ID NO: 1859573 - RNA, 19 nt, Artificial Sequence
  Description of Artificial Sequence: Synthetic oligonucleotide
  Sense strand starting at position 3777 of SEQ ID NO: 1564166
gaaucuccguaagaacagu

SEQ ID NO: 1859574 - RNA, 19 nt, Artificial Sequence
  Description of Artificial Sequence: Synthetic oligonucleotide
  Antisense strand to SEQ ID NO: 1859573
acuguucuuacggagauuc

SEQ ID NO: 1859575 - RNA, 19 nt, Artificial Sequence
  Description of Artificial Sequence: Synthetic oligonucleotide
  Sense strand starting at position 3783 of SEQ ID NO: 1564166
ccguaagaacagugagcuu

SEQ ID NO: 1859576 - RNA, 19 nt, Artificial Sequence
  Description of Artificial Sequence: Synthetic oligonucleotide
  Antisense strand to SEQ ID NO: 1859575
aagcucacuguucuuacgg

SEQ ID NO: 1859577 - RNA, 19 nt, Artificial Sequence
  Description of Artificial Sequence: Synthetic oligonucleotide
  Sense strand starting at position 559 of SEQ ID NO: 1564167
gccugagucuuuccagcca

SEQ ID NO: 1859578 - RNA, 19 nt, Artificial Sequence
  Description of Artificial Sequence: Synthetic oligonucleotide
  Antisense strand to SEQ ID NO: 1859577
uggcuggaaagacucaggc

SEQ ID NO: 1859579 - RNA, 19 nt, Artificial Sequence
  Description of Artificial Sequence: Synthetic oligonucleotide
  Sense strand starting at position 737 of SEQ ID NO: 1564167
aaguauugauagggaauga

SEQ ID NO: 1859580 - RNA, 19 nt, Artificial Sequence
  Description of Artificial Sequence: Synthetic oligonucleotide
  Antisense strand to SEQ ID NO: 1859579
ucauucccuaucaauacuu

SEQ ID NO: 1859581 - RNA, 19 nt, Artificial Sequence
  Description of Artificial Sequence: Synthetic oligonucleotide
  Sense strand starting at position 801 of SEQ ID NO: 1564167
uggcuaauguuguuaguag

SEQ ID NO: 1859582 - RNA, 19 nt, Artificial Sequence
  Description of Artificial Sequence: Synthetic oligonucleotide
  Antisense strand to SEQ ID NO: 1859581
cuacuaacaacauuagcca

SEQ ID NO: 1859583 - RNA, 19 nt, Artificial Sequence
  Description of Artificial Sequence: Synthetic oligonucleotide
  Sense strand starting at position 968 of SEQ ID NO: 1564167
ucucuuuggcgauggaucu

SEQ ID NO: 1859584 - RNA, 19 nt, Artificial Sequence
  Description of Artificial Sequence: Synthetic oligonucleotide
  Antisense strand to SEQ ID NO: 1859583
agauccaucgccaaagaga

SEQ ID NO: 1859585 - RNA, 19 nt, Artificial Sequence
  Description of Artificial Sequence: Synthetic oligonucleotide
  Sense strand starting at position 2319 of SEQ ID NO: 1564167
ucugaacugugggaagaaa

SEQ ID NO: 1859586 - RNA, 19 nt, Artificial Sequence
  Description of Artificial Sequence: Synthetic oligonucleotide
  Antisense strand to SEQ ID NO: 1859585
uuucuucccacaguucaga

SEQ ID NO: 1859587 - RNA, 19 nt, Artificial Sequence
  Description of Artificial Sequence: Synthetic oligonucleotide
  Sense strand starting at position 2399 of SEQ ID NO: 1564167
ugcggagguuugcuauacu

SEQ ID NO: 1859588 - RNA, 19 nt, Artificial Sequence
  Description of Artificial Sequence: Synthetic oligonucleotide
  Antisense strand to SEQ ID NO: 1859587
aguauagcaaaccuccgca

SEQ ID NO: 1859589 - RNA, 19 nt, Artificial Sequence
  Description of Artificial Sequence: Synthetic oligonucleotide
  Sense strand starting at position 2484 of SEQ ID NO: 1564167
cgcaaccucugcuuacauu

SEQ ID NO: 1859590 - RNA, 19 nt, Artificial Sequence
  Description of Artificial Sequence: Synthetic oligonucleotide
  Antisense strand to SEQ ID NO: 1859589
aauguaagcagagguugcg

SEQ ID NO: 1859591 - RNA, 19 nt, Artificial Sequence
  Description of Artificial Sequence: Synthetic oligonucleotide
  Sense strand starting at position 2518 of SEQ ID NO: 1564167
uaaguauggugcgcacaau

SEQ ID NO: 1859592 - RNA, 19 nt, Artificial Sequence
  Description of Artificial Sequence: Synthetic oligonucleotide
  Antisense strand to SEQ ID NO: 1859591
auugugcgcaccauacuua

SEQ ID NO: 1859593 - RNA, 19 nt, Artificial Sequence
  Description of Artificial Sequence: Synthetic oligonucleotide
  Sense strand starting at position 2519 of SEQ ID NO: 1564167
aaguauggugcgcacaauu

SEQ ID NO: 1859594 - RNA, 19 nt, Artificial Sequence
  Description of Artificial Sequence: Synthetic oligonucleotide
  Antisense strand to SEQ ID NO: 1859593
aauugugcgcaccauacuu

SEQ ID NO: 1859595 - RNA, 19 nt, Artificial Sequence
  Description of Artificial Sequence: Synthetic oligonucleotide
  Sense strand starting at position 2607 of SEQ ID NO: 1564167
uuacaucugccuuggccaa

SEQ ID NO: 1859596 - RNA, 19 nt, Artificial Sequence
  Description of Artificial Sequence: Synthetic oligonucleotide
  Antisense strand to SEQ ID NO: 1859595
uuggccaaggcagauguaa

SEQ ID NO: 1859597 - RNA, 19 nt, Artificial Sequence
  Description of Artificial Sequence: Synthetic oligonucleotide
  Sense strand starting at position 3784 of SEQ ID NO: 1564167
ccguaagaacagugagcuu

SEQ ID NO: 1859598 - RNA, 19 nt, Artificial Sequence
  Description of Artificial Sequence: Synthetic oligonucleotide
  Antisense strand to SEQ ID NO: 1859597
aagcucacuguucuuacgg

SEQ ID NO: 1859599 - RNA, 19 nt, Artificial Sequence
  Description of Artificial Sequence: Synthetic oligonucleotide
  Sense strand starting at position 91 of SEQ ID NO: 1564168
ggauaauccuuccugguug

SEQ ID NO: 1859600 - RNA, 19 nt, Artificial Sequence
  Description of Artificial Sequence: Synthetic oligonucleotide
  Antisense strand to SEQ ID NO: 1859599
caaccaggaaggauuaucc

SEQ ID NO: 1859601 - RNA, 19 nt, Artificial Sequence
  Description of Artificial Sequence: Synthetic oligonucleotide
  Sense strand starting at position 478 of SEQ ID NO: 1564168
aggugucaucuccguucau

SEQ ID NO: 1859602 - RNA, 19 nt, Artificial Sequence
  Description of Artificial Sequence: Synthetic oligonucleotide
  Antisense strand to SEQ ID NO: 1859601
augaacggagaugacaccu

SEQ ID NO: 1859603 - RNA, 19 nt, Artificial Sequence
  Description of Artificial Sequence: Synthetic oligonucleotide
  Sense strand starting at position 479 of SEQ ID NO: 1564168
ggugucaucuccguucaug

SEQ ID NO: 1859604 - RNA, 19 nt, Artificial Sequence
  Description of Artificial Sequence: Synthetic oligonucleotide
  Antisense strand to SEQ ID NO: 1859603
caugaacggagaugacacc

SEQ ID NO: 1859605 - RNA, 19 nt, Artificial Sequence
  Description of Artificial Sequence: Synthetic oligonucleotide
  Sense strand starting at position 506 of SEQ ID NO: 1564168
aguagucugaccugcaaga

SEQ ID NO: 1859606 - RNA, 19 nt, Artificial Sequence
  Description of Artificial Sequence: Synthetic oligonucleotide
  Antisense strand to SEQ ID NO: 1859605
ucuugcaggucagacuacu

SEQ ID NO: 1859607 - RNA, 19 nt, Artificial Sequence
  Description of Artificial Sequence: Synthetic oligonucleotide
  Sense strand starting at position 923 of SEQ ID NO: 1564168
cagagauaacguggucucu

SEQ ID NO: 1859608 - RNA, 19 nt, Artificial Sequence
  Description of Artificial Sequence: Synthetic oligonucleotide
  Antisense strand to SEQ ID NO: 1859607
agagaccacguuaucucug

SEQ ID NO: 1859609 - RNA, 19 nt, Artificial Sequence
  Description of Artificial Sequence: Synthetic oligonucleotide
  Sense strand starting at position 925 of SEQ ID NO: 1564168
gagauaacguggucucuuu

SEQ ID NO: 1859610 - RNA, 19 nt, Artificial Sequence
  Description of Artificial Sequence: Synthetic oligonucleotide
  Antisense strand to SEQ ID NO: 1859609
aaagagaccacguuaucuc

SEQ ID NO: 1859611 - RNA, 19 nt, Artificial Sequence
  Description of Artificial Sequence: Synthetic oligonucleotide
  Sense strand starting at position 935 of SEQ ID NO: 1564168
ggucucuuuggugauggau

SEQ ID NO: 1859612 - RNA, 19 nt, Artificial Sequence
  Description of Artificial Sequence: Synthetic oligonucleotide
  Antisense strand to SEQ ID NO: 1859611
auccaucaccaaagagacc

SEQ ID NO: 1859613 - RNA, 19 nt, Artificial Sequence
  Description of Artificial Sequence: Synthetic oligonucleotide
  Sense strand starting at position 978 of SEQ ID NO: 1564168
uucuguucugcugaagaga

SEQ ID NO: 1859614 - RNA, 19 nt, Artificial Sequence
  Description of Artificial Sequence: Synthetic oligonucleotide
  Antisense strand to SEQ ID NO: 1859613
ucucuucagcagaacagaa

SEQ ID NO: 1859615 - RNA, 19 nt, Artificial Sequence
  Description of Artificial Sequence: Synthetic oligonucleotide
  Sense strand starting at position 981 of SEQ ID NO: 1564168
uguucugcugaagagaaau

SEQ ID NO: 1859616 - RNA, 19 nt, Artificial Sequence
  Description of Artificial Sequence: Synthetic oligonucleotide
  Antisense strand to SEQ ID NO: 1859615
auuucucuucagcagaaca

SEQ ID NO: 1859617 - RNA, 19 nt, Artificial Sequence
  Description of Artificial Sequence: Synthetic oligonucleotide
  Sense strand starting at position 987 of SEQ ID NO: 1564168
gcugaagagaaaugagcau

SEQ ID NO: 1859618 - RNA, 19 nt, Artificial Sequence
  Description of Artificial Sequence: Synthetic oligonucleotide
  Antisense strand to SEQ ID NO: 1859617
augcucauuucucuucagc

SEQ ID NO: 1859619 - RNA, 19 nt, Artificial Sequence
  Description of Artificial Sequence: Synthetic oligonucleotide
  Sense strand starting at position 1006 of SEQ ID NO: 1564168
cgcuaauaugaauguguuc

SEQ ID NO: 1859620 - RNA, 19 nt, Artificial Sequence
  Description of Artificial Sequence: Synthetic oligonucleotide
  Antisense strand to SEQ ID NO: 1859619
gaacacauucauauuagcg

SEQ ID NO: 1859621 - RNA, 19 nt, Artificial Sequence
  Description of Artificial Sequence: Synthetic oligonucleotide
  Sense strand starting at position 1011 of SEQ ID NO: 1564168
auaugaauguguucagagg

SEQ ID NO: 1859622 - RNA, 19 nt, Artificial Sequence
  Description of Artificial Sequence: Synthetic oligonucleotide
  Antisense strand to SEQ ID NO: 1859621
ccucugaacacauucauau

SEQ ID NO: 1859623 - RNA, 19 nt, Artificial Sequence
  Description of Artificial Sequence: Synthetic oligonucleotide
  Sense strand starting at position 1036 of SEQ ID NO: 1564168
cugggugauuuguaaguua

SEQ ID NO: 1859624 - RNA, 19 nt, Artificial Sequence
  Description of Artificial Sequence: Synthetic oligonucleotide
  Antisense strand to SEQ ID NO: 1859623
uaacuuacaaaucacccag

SEQ ID NO: 1859625 - RNA, 19 nt, Artificial Sequence
  Description of Artificial Sequence: Synthetic oligonucleotide
  Sense strand starting at position 1486 of SEQ ID NO: 1564168
caggaaagauuugagugau

SEQ ID NO: 1859626 - RNA, 19 nt, Artificial Sequence
  Description of Artificial Sequence: Synthetic oligonucleotide
  Antisense strand to SEQ ID NO: 1859625
aucacucaaaucuuuccug

SEQ ID NO: 1859627 - RNA, 19 nt, Artificial Sequence
  Description of Artificial Sequence: Synthetic oligonucleotide
  Sense strand starting at position 1915 of SEQ ID NO: 1564168
ccgugcguacucuugagua

SEQ ID NO: 1859628 - RNA, 19 nt, Artificial Sequence
  Description of Artificial Sequence: Synthetic oligonucleotide
  Antisense strand to SEQ ID NO: 1859627
uacucaagaguacgcacgg

SEQ ID NO: 1859629 - RNA, 19 nt, Artificial Sequence
  Description of Artificial Sequence: Synthetic oligonucleotide
  Sense strand starting at position 1917 of SEQ ID NO: 1564168
gugcguacucuugaguaug

SEQ ID NO: 1859630 - RNA, 19 nt, Artificial Sequence
  Description of Artificial Sequence: Synthetic oligonucleotide
  Antisense strand to SEQ ID NO: 1859629
cauacucaagaguacgcac

SEQ ID NO: 1859631 - RNA, 19 nt, Artificial Sequence
  Description of Artificial Sequence: Synthetic oligonucleotide
  Sense strand starting at position 1919 of SEQ ID NO: 1564168
gcguacucuugaguaugga

SEQ ID NO: 1859632 - RNA, 19 nt, Artificial Sequence
  Description of Artificial Sequence: Synthetic oligonucleotide
  Antisense strand to SEQ ID NO: 1859631
uccauacucaagaguacgc

SEQ ID NO: 1859633 - RNA, 19 nt, Artificial Sequence
  Description of Artificial Sequence: Synthetic oligonucleotide
  Sense strand starting at position 1920 of SEQ ID NO: 1564168
cguacucuugaguauggaa

SEQ ID NO: 1859634 - RNA, 19 nt, Artificial Sequence
  Description of Artificial Sequence: Synthetic oligonucleotide
  Antisense strand to SEQ ID NO: 1859633
uuccauacucaagaguacg

SEQ ID NO: 1859635 - RNA, 19 nt, Artificial Sequence
  Description of Artificial Sequence: Synthetic oligonucleotide
  Sense strand starting at position 1922 of SEQ ID NO: 1564168
uacucuugaguauggaaga

SEQ ID NO: 1859636 - RNA, 19 nt, Artificial Sequence
  Description of Artificial Sequence: Synthetic oligonucleotide
  Antisense strand to SEQ ID NO: 1859635
ucuuccauacucaagagua

SEQ ID NO: 1859637 - RNA, 19 nt, Artificial Sequence
  Description of Artificial Sequence: Synthetic oligonucleotide
  Sense strand starting at position 1923 of SEQ ID NO: 1564168
acucuugaguauggaagaa

SEQ ID NO: 1859638 - RNA, 19 nt, Artificial Sequence
  Description of Artificial Sequence: Synthetic oligonucleotide
  Antisense strand to SEQ ID NO: 1859637
uucuuccauacucaagagu

SEQ ID NO: 1859639 - RNA, 19 nt, Artificial Sequence
  Description of Artificial Sequence: Synthetic oligonucleotide
  Sense strand starting at position 2174 of SEQ ID NO: 1564168
agcgacauugcagaauaau

SEQ ID NO: 1859640 - RNA, 19 nt, Artificial Sequence
  Description of Artificial Sequence: Synthetic oligonucleotide
  Antisense strand to SEQ ID NO: 1859639
auuauucugcaaugucgcu

SEQ ID NO: 1859641 - RNA, 19 nt, Artificial Sequence
  Description of Artificial Sequence: Synthetic oligonucleotide
  Sense strand starting at position 2212 of SEQ ID NO: 1564168
ccuugucgccacugcgaaa

SEQ ID NO: 1859642 - RNA, 19 nt, Artificial Sequence
  Description of Artificial Sequence: Synthetic oligonucleotide
  Antisense strand to SEQ ID NO: 1859641
uuucgcaguggcgacaagg

SEQ ID NO: 1859643 - RNA, 19 nt, Artificial Sequence
  Description of Artificial Sequence: Synthetic oligonucleotide
  Sense strand starting at position 2260 of SEQ ID NO: 1564168
uuugaucucucugaagacu

SEQ ID NO: 1859644 - RNA, 19 nt, Artificial Sequence
  Description of Artificial Sequence: Synthetic oligonucleotide
  Antisense strand to SEQ ID NO: 1859643
agucuucagagagaucaaa

SEQ ID NO: 1859645 - RNA, 19 nt, Artificial Sequence
  Description of Artificial Sequence: Synthetic oligonucleotide
  Sense strand starting at position 2263 of SEQ ID NO: 1564168
gaucucucugaagacuguu

SEQ ID NO: 1859646 - RNA, 19 nt, Artificial Sequence
  Description of Artificial Sequence: Synthetic oligonucleotide
  Antisense strand to SEQ ID NO: 1859645
aacagucuucagagagauc

SEQ ID NO: 1859647 - RNA, 19 nt, Artificial Sequence
  Description of Artificial Sequence: Synthetic oligonucleotide
  Sense strand starting at position 2271 of SEQ ID NO: 1564168
ugaagacuguuccuggauc

SEQ ID NO: 1859648 - RNA, 19 nt, Artificial Sequence
  Description of Artificial Sequence: Synthetic oligonucleotide
  Antisense strand to SEQ ID NO: 1859647
gauccaggaacagucuuca

SEQ ID NO: 1859649 - RNA, 19 nt, Artificial Sequence
  Description of Artificial Sequence: Synthetic oligonucleotide
  Sense strand starting at position 2273 of SEQ ID NO: 1564168
aagacuguuccuggaucuu

SEQ ID NO: 1859650 - RNA, 19 nt, Artificial Sequence
  Description of Artificial Sequence: Synthetic oligonucleotide
  Antisense strand to SEQ ID NO: 1859649
aagauccaggaacagucuu

SEQ ID NO: 1859651 - RNA, 19 nt, Artificial Sequence
  Description of Artificial Sequence: Synthetic oligonucleotide
  Sense strand starting at position 2358 of SEQ ID NO: 1564168
acuugaaagccacaauguu

SEQ ID NO: 1859652 - RNA, 19 nt, Artificial Sequence
  Description of Artificial Sequence: Synthetic oligonucleotide
  Antisense strand to SEQ ID NO: 1859651
aacauuguggcuuucaagu

SEQ ID NO: 1859653 - RNA, 19 nt, Artificial Sequence
  Description of Artificial Sequence: Synthetic oligonucleotide
  Sense strand starting at position 2394 of SEQ ID NO: 1564168
ugcggagguuugcuauaau

SEQ ID NO: 1859654 - RNA, 19 nt, Artificial Sequence
  Description of Artificial Sequence: Synthetic oligonucleotide
  Antisense strand to SEQ ID NO: 1859653
auuauagcaaaccuccgca

SEQ ID NO: 1859655 - RNA, 19 nt, Artificial Sequence
  Description of Artificial Sequence: Synthetic oligonucleotide
  Sense strand starting at position 2397 of SEQ ID NO: 1564168
ggagguuugcuauaauuag

SEQ ID NO: 1859656 - RNA, 19 nt, Artificial Sequence
  Description of Artificial Sequence: Synthetic oligonucleotide
  Antisense strand to SEQ ID NO: 1859655
cuaauuauagcaaaccucc

SEQ ID NO: 1859657 - RNA, 19 nt, Artificial Sequence
  Description of Artificial Sequence: Synthetic oligonucleotide
  Sense strand starting at position 2404 of SEQ ID NO: 1564168
ugcuauaauuagucgugga

SEQ ID NO: 1859658 - RNA, 19 nt, Artificial Sequence
  Description of Artificial Sequence: Synthetic oligonucleotide
  Antisense strand to SEQ ID NO: 1859657
uccacgacuaauuauagca

SEQ ID NO: 1859659 - RNA, 19 nt, Artificial Sequence
  Description of Artificial Sequence: Synthetic oligonucleotide
  Sense strand starting at position 2405 of SEQ ID NO: 1564168
gcuauaauuagucguggag

SEQ ID NO: 1859660 - RNA, 19 nt, Artificial Sequence
  Description of Artificial Sequence: Synthetic oligonucleotide
  Antisense strand to SEQ ID NO: 1859659
cuccacgacuaauuauagc

SEQ ID NO: 1859661 - RNA, 19 nt, Artificial Sequence
  Description of Artificial Sequence: Synthetic oligonucleotide
  Sense strand starting at position 2408 of SEQ ID NO: 1564168
auaauuagucguggaguuc

SEQ ID NO: 1859662 - RNA, 19 nt, Artificial Sequence
  Description of Artificial Sequence: Synthetic oligonucleotide
  Antisense strand to SEQ ID NO: 1859661
gaacuccacgacuaauuau

SEQ ID NO: 1859663 - RNA, 19 nt, Artificial Sequence
  Description of Artificial Sequence: Synthetic oligonucleotide
  Sense strand starting at position 2511 of SEQ ID NO: 1564168
cuaaguguggugugcagaa

SEQ ID NO: 1859664 - RNA, 19 nt, Artificial Sequence
  Description of Artificial Sequence: Synthetic oligonucleotide
  Antisense strand to SEQ ID NO: 1859663
uucugcacaccacacuuag

SEQ ID NO: 1859665 - RNA, 19 nt, Artificial Sequence
  Description of Artificial Sequence: Synthetic oligonucleotide
  Sense strand starting at position 2513 of SEQ ID NO: 1564168
aaguguggugugcagaauu

SEQ ID NO: 1859666 - RNA, 19 nt, Artificial Sequence
  Description of Artificial Sequence: Synthetic oligonucleotide
  Antisense strand to SEQ ID NO: 1859665
aauucugcacaccacacuu

SEQ ID NO: 1859667 - RNA, 19 nt, Artificial Sequence
  Description of Artificial Sequence: Synthetic oligonucleotide
  Sense strand starting at position 2910 of SEQ ID NO: 1564168
ccaccauggccucgagacu

SEQ ID NO: 1859668 - RNA, 19 nt, Artificial Sequence
  Description of Artificial Sequence: Synthetic oligonucleotide
  Antisense strand to SEQ ID NO: 1859667
agucucgaggccauggugg

SEQ ID NO: 1859669 - RNA, 19 nt, Artificial Sequence
  Description of Artificial Sequence: Synthetic oligonucleotide
  Sense strand starting at position 2911 of SEQ ID NO: 1564168
caccauggccucgagacua

SEQ ID NO: 1859670 - RNA, 19 nt, Artificial Sequence
  Description of Artificial Sequence: Synthetic oligonucleotide
  Antisense strand to SEQ ID NO: 1859669
uagucucgaggccauggug

SEQ ID NO: 1859671 - RNA, 19 nt, Artificial Sequence
  Description of Artificial Sequence: Synthetic oligonucleotide
  Sense strand starting at position 3156 of SEQ ID NO: 1564168
aucucuuaggcucagauga

SEQ ID NO: 1859672 - RNA, 19 nt, Artificial Sequence
  Description of Artificial Sequence: Synthetic oligonucleotide
  Antisense strand to SEQ ID NO: 1859671
ucaucugagccuaagagau

SEQ ID NO: 1859673 - RNA, 19 nt, Artificial Sequence
  Description of Artificial Sequence: Synthetic oligonucleotide
  Sense strand starting at position 3158 of SEQ ID NO: 1564168
cucuuaggcucagaugaug

SEQ ID NO: 1859674 - RNA, 19 nt, Artificial Sequence
  Description of Artificial Sequence: Synthetic oligonucleotide
  Antisense strand to SEQ ID NO: 1859673
caucaucugagccuaagag

SEQ ID NO: 1859675 - RNA, 19 nt, Artificial Sequence
  Description of Artificial Sequence: Synthetic oligonucleotide
  Sense strand starting at position 3805 of SEQ ID NO: 1564168
agcggaaucuccguaagaa

SEQ ID NO: 1859676 - RNA, 19 nt, Artificial Sequence
  Description of Artificial Sequence: Synthetic oligonucleotide
  Antisense strand to SEQ ID NO: 1859675
uucuuacggagauuccgcu

SEQ ID NO: 1859677 - RNA, 19 nt, Artificial Sequence
  Description of Artificial Sequence: Synthetic oligonucleotide
  Sense strand starting at position 3806 of SEQ ID NO: 1564168
gcggaaucuccguaagaac

SEQ ID NO: 1859678 - RNA, 19 nt, Artificial Sequence
  Description of Artificial Sequence: Synthetic oligonucleotide
  Antisense strand to SEQ ID NO: 1859677
guucuuacggagauuccgc

SEQ ID NO: 1859679 - RNA, 19 nt, Artificial Sequence
  Description of Artificial Sequence: Synthetic oligonucleotide
  Sense strand starting at position 195 of SEQ ID NO: 1564169
uuuauuucuuaagaggcaa

SEQ ID NO: 1859680 - RNA, 19 nt, Artificial Sequence
  Description of Artificial Sequence: Synthetic oligonucleotide
  Antisense strand to SEQ ID NO: 1859679
uugccucuuaagaaauaaa

SEQ ID NO: 1859681 - RNA, 19 nt, Artificial Sequence
  Description of Artificial Sequence: Synthetic oligonucleotide
  Sense strand starting at position 445 of SEQ ID NO: 1564169
gugagcuaugcuugcacua

SEQ ID NO: 1859682 - RNA, 19 nt, Artificial Sequence
  Description of Artificial Sequence: Synthetic oligonucleotide
  Antisense strand to SEQ ID NO: 1859681
uagugcaagcauagcucac

SEQ ID NO: 1859683 - RNA, 19 nt, Artificial Sequence
  Description of Artificial Sequence: Synthetic oligonucleotide
  Sense strand starting at position 820 of SEQ ID NO: 1564169
ccagacuugucugcuucua

SEQ ID NO: 1859684 - RNA, 19 nt, Artificial Sequence
  Description of Artificial Sequence: Synthetic oligonucleotide
  Antisense strand to SEQ ID NO: 1859683
uagaagcagacaagucugg

SEQ ID NO: 1859685 - RNA, 19 nt, Artificial Sequence
  Description of Artificial Sequence: Synthetic oligonucleotide
  Sense strand starting at position 822 of SEQ ID NO: 1564169
agacuugucugcuucuaga

SEQ ID NO: 1859686 - RNA, 19 nt, Artificial Sequence
  Description of Artificial Sequence: Synthetic oligonucleotide
  Antisense strand to SEQ ID NO: 1859685
ucuagaagcagacaagucu

SEQ ID NO: 1859687 - RNA, 19 nt, Artificial Sequence
  Description of Artificial Sequence: Synthetic oligonucleotide
  Sense strand starting at position 1043 of SEQ ID NO: 1564169
gugugugggaucugagaag

SEQ ID NO: 1859688 - RNA, 19 nt, Artificial Sequence
  Description of Artificial Sequence: Synthetic oligonucleotide
  Antisense strand to SEQ ID NO: 1859687
cuucucagaucccacacac

SEQ ID NO: 1859689 - RNA, 19 nt, Artificial Sequence
  Description of Artificial Sequence: Synthetic oligonucleotide
  Sense strand starting at position 1067 of SEQ ID NO: 1564169
augauagucuguccugguu

SEQ ID NO: 1859690 - RNA, 19 nt, Artificial Sequence
  Description of Artificial Sequence: Synthetic oligonucleotide
  Antisense strand to SEQ ID NO: 1859689
aaccaggacagacuaucau

SEQ ID NO: 1859691 - RNA, 19 nt, Artificial Sequence
  Description of Artificial Sequence: Synthetic oligonucleotide
  Sense strand starting at position 1070 of SEQ ID NO: 1564169
auagucuguccugguugau

SEQ ID NO: 1859692 - RNA, 19 nt, Artificial Sequence
  Description of Artificial Sequence: Synthetic oligonucleotide
  Antisense strand to SEQ ID NO: 1859691
aucaaccaggacagacuau

SEQ ID NO: 1859693 - RNA, 19 nt, Artificial Sequence
  Description of Artificial Sequence: Synthetic oligonucleotide
  Sense strand starting at position 1112 of SEQ ID NO: 1564169
gagggaacuucccuagcuu

SEQ ID NO: 1859694 - RNA, 19 nt, Artificial Sequence
  Description of Artificial Sequence: Synthetic oligonucleotide
  Antisense strand to SEQ ID NO: 1859693
aagcuagggaaguucccuc

SEQ ID NO: 1859695 - RNA, 19 nt, Artificial Sequence
  Description of Artificial Sequence: Synthetic oligonucleotide
  Sense strand starting at position 1484 of SEQ ID NO: 1564169
agcagucucaccugcgaga

SEQ ID NO: 1859696 - RNA, 19 nt, Artificial Sequence
  Description of Artificial Sequence: Synthetic oligonucleotide
  Antisense strand to SEQ ID NO: 1859695
ucucgcaggugagacugcu

SEQ ID NO: 1859697 - RNA, 19 nt, Artificial Sequence
  Description of Artificial Sequence: Synthetic oligonucleotide
  Sense strand starting at position 1486 of SEQ ID NO: 1564169
cagucucaccugcgagaga

SEQ ID NO: 1859698 - RNA, 19 nt, Artificial Sequence
  Description of Artificial Sequence: Synthetic oligonucleotide
  Antisense strand to SEQ ID NO: 1859697
ucucucgcaggugagacug

SEQ ID NO: 1859699 - RNA, 19 nt, Artificial Sequence
  Description of Artificial Sequence: Synthetic oligonucleotide
  Sense strand starting at position 1487 of SEQ ID NO: 1564169
agucucaccugcgagagaa

SEQ ID NO: 1859700 - RNA, 19 nt, Artificial Sequence
  Description of Artificial Sequence: Synthetic oligonucleotide
  Antisense strand to SEQ ID NO: 1859699
uucucucgcaggugagacu

SEQ ID NO: 1859701 - RNA, 19 nt, Artificial Sequence
  Description of Artificial Sequence: Synthetic oligonucleotide
  Sense strand starting at position 1861 of SEQ ID NO: 1564169
cgaccugccucacauaaau

SEQ ID NO: 1859702 - RNA, 19 nt, Artificial Sequence
  Description of Artificial Sequence: Synthetic oligonucleotide
  Antisense strand to SEQ ID NO: 1859701
auuuaugugaggcaggucg

SEQ ID NO: 1859703 - RNA, 19 nt, Artificial Sequence
  Description of Artificial Sequence: Synthetic oligonucleotide
  Sense strand starting at position 1952 of SEQ ID NO: 1564169
gcgcaugcuuacccugauu

SEQ ID NO: 1859704 - RNA, 19 nt, Artificial Sequence
  Description of Artificial Sequence: Synthetic oligonucleotide
  Antisense strand to SEQ ID NO: 1859703
aaucaggguaagcaugcgc

SEQ ID NO: 1859705 - RNA, 19 nt, Artificial Sequence
  Description of Artificial Sequence: Synthetic oligonucleotide
  Sense strand starting at position 1954 of SEQ ID NO: 1564169
gcaugcuuacccugauugu

SEQ ID NO: 1859706 - RNA, 19 nt, Artificial Sequence
  Description of Artificial Sequence: Synthetic oligonucleotide
  Antisense strand to SEQ ID NO: 1859705
acaaucaggguaagcaugc

SEQ ID NO: 1859707 - RNA, 19 nt, Artificial Sequence
  Description of Artificial Sequence: Synthetic oligonucleotide
  Sense strand starting at position 1995 of SEQ ID NO: 1564169
ggcgugugcguacucugaa

SEQ ID NO: 1859708 - RNA, 19 nt, Artificial Sequence
  Description of Artificial Sequence: Synthetic oligonucleotide
  Antisense strand to SEQ ID NO: 1859707
uucagaguacgcacacgcc

SEQ ID NO: 1859709 - RNA, 19 nt, Artificial Sequence
  Description of Artificial Sequence: Synthetic oligonucleotide
  Sense strand starting at position 1996 of SEQ ID NO: 1564169
gcgugugcguacucugaau

SEQ ID NO: 1859710 - RNA, 19 nt, Artificial Sequence
  Description of Artificial Sequence: Synthetic oligonucleotide
  Antisense strand to SEQ ID NO: 1859709
auucagaguacgcacacgc

SEQ ID NO: 1859711 - RNA, 19 nt, Artificial Sequence
  Description of Artificial Sequence: Synthetic oligonucleotide
  Sense strand starting at position 1998 of SEQ ID NO: 1564169
gugugcguacucugaauuu

SEQ ID NO: 1859712 - RNA, 19 nt, Artificial Sequence
  Description of Artificial Sequence: Synthetic oligonucleotide
  Antisense strand to SEQ ID NO: 1859711
aaauucagaguacgcacac

SEQ ID NO: 1859713 - RNA, 19 nt, Artificial Sequence
  Description of Artificial Sequence: Synthetic oligonucleotide
  Sense strand starting at position 2035 of SEQ ID NO: 1564169
ggacgcuuucggcgggaaa

SEQ ID NO: 1859714 - RNA, 19 nt, Artificial Sequence
  Description of Artificial Sequence: Synthetic oligonucleotide
  Antisense strand to SEQ ID NO: 1859713
uuucccgccgaaagcgucc

SEQ ID NO: 1859715 - RNA, 19 nt, Artificial Sequence
  Description of Artificial Sequence: Synthetic oligonucleotide
  Sense strand starting at position 2080 of SEQ ID NO: 1564169
ugggaagguucugucccua

SEQ ID NO: 1859716 - RNA, 19 nt, Artificial Sequence
  Description of Artificial Sequence: Synthetic oligonucleotide
  Antisense strand to SEQ ID NO: 1859715
uagggacagaaccuuccca

SEQ ID NO: 1859717 - RNA, 19 nt, Artificial Sequence
  Description of Artificial Sequence: Synthetic oligonucleotide
  Sense strand starting at position 2202 of SEQ ID NO: 1564169
auccuugggcagugacauu

SEQ ID NO: 1859718 - RNA, 19 nt, Artificial Sequence
  Description of Artificial Sequence: Synthetic oligonucleotide
  Antisense strand to SEQ ID NO: 1859717
aaugucacugcccaaggau

SEQ ID NO: 1859719 - RNA, 19 nt, Artificial Sequence
  Description of Artificial Sequence: Synthetic oligonucleotide
  Sense strand starting at position 2212 of SEQ ID NO: 1564169
agugacauugcagaauguu

SEQ ID NO: 1859720 - RNA, 19 nt, Artificial Sequence
  Description of Artificial Sequence: Synthetic oligonucleotide
  Antisense strand to SEQ ID NO: 1859719
aacauucugcaaugucacu

SEQ ID NO: 1859721 - RNA, 19 nt, Artificial Sequence
  Description of Artificial Sequence: Synthetic oligonucleotide
  Sense strand starting at position 2245 of SEQ ID NO: 1564169
ccacacuuugugcgacaaa

SEQ ID NO: 1859722 - RNA, 19 nt, Artificial Sequence
  Description of Artificial Sequence: Synthetic oligonucleotide
  Antisense strand to SEQ ID NO: 1859721
uuugucgcacaaagugugg

SEQ ID NO: 1859723 - RNA, 19 nt, Artificial Sequence
  Description of Artificial Sequence: Synthetic oligonucleotide
  Sense strand starting at position 2316 of SEQ ID NO: 1564169
ccuggaucuuggguuaaac

SEQ ID NO: 1859724 - RNA, 19 nt, Artificial Sequence
  Description of Artificial Sequence: Synthetic oligonucleotide
  Antisense strand to SEQ ID NO: 1859723
guuuaacccaagauccagg

SEQ ID NO: 1859725 - RNA, 19 nt, Artificial Sequence
  Description of Artificial Sequence: Synthetic oligonucleotide
  Sense strand starting at position 2326 of SEQ ID NO: 1564169
ggguuaaacaucuggauuc

SEQ ID NO: 1859726 - RNA, 19 nt, Artificial Sequence
  Description of Artificial Sequence: Synthetic oligonucleotide
  Antisense strand to SEQ ID NO: 1859725
gaauccagauguuuaaccc

SEQ ID NO: 1859727 - RNA, 19 nt, Artificial Sequence
  Description of Artificial Sequence: Synthetic oligonucleotide
  Sense strand starting at position 2327 of SEQ ID NO: 1564169
gguuaaacaucuggauucu

SEQ ID NO: 1859728 - RNA, 19 nt, Artificial Sequence
  Description of Artificial Sequence: Synthetic oligonucleotide
  Antisense strand to SEQ ID NO: 1859727
agaauccagauguuuaacc

SEQ ID NO: 1859729 - RNA, 19 nt, Artificial Sequence
  Description of Artificial Sequence: Synthetic oligonucleotide
  Sense strand starting at position 2339 of SEQ ID NO: 1564169
ggauucuagucugaaccgu

SEQ ID NO: 1859730 - RNA, 19 nt, Artificial Sequence
  Description of Artificial Sequence: Synthetic oligonucleotide
  Antisense strand to SEQ ID NO: 1859729
acgguucagacuagaaucc

SEQ ID NO: 1859731 - RNA, 19 nt, Artificial Sequence
  Description of Artificial Sequence: Synthetic oligonucleotide
  Sense strand starting at position 2430 of SEQ ID NO: 1564169
ggagguuugcuguacuuag

SEQ ID NO: 1859732 - RNA, 19 nt, Artificial Sequence
  Description of Artificial Sequence: Synthetic oligonucleotide
  Antisense strand to SEQ ID NO: 1859731
cuaaguacagcaaaccucc

SEQ ID NO: 1859733 - RNA, 19 nt, Artificial Sequence
  Description of Artificial Sequence: Synthetic oligonucleotide
  Sense strand starting at position 2470 of SEQ ID NO: 1564169
ggcuucuacaucuguugga

SEQ ID NO: 1859734 - RNA, 19 nt, Artificial Sequence
  Description of Artificial Sequence: Synthetic oligonucleotide
  Antisense strand to SEQ ID NO: 1859733
uccaacagauguagaagcc

SEQ ID NO: 1859735 - RNA, 19 nt, Artificial Sequence
  Description of Artificial Sequence: Synthetic oligonucleotide
  Sense strand starting at position 2471 of SEQ ID NO: 1564169
gcuucuacaucuguuggaa

SEQ ID NO: 1859736 - RNA, 19 nt, Artificial Sequence
  Description of Artificial Sequence: Synthetic oligonucleotide
  Antisense strand to SEQ ID NO: 1859735
uuccaacagauguagaagc

SEQ ID NO: 1859737 - RNA, 19 nt, Artificial Sequence
  Description of Artificial Sequence: Synthetic oligonucleotide
  Sense strand starting at position 2473 of SEQ ID NO: 1564169
uucuacaucuguuggaacu

SEQ ID NO: 1859738 - RNA, 19 nt, Artificial Sequence
  Description of Artificial Sequence: Synthetic oligonucleotide
  Antisense strand to SEQ ID NO: 1859737
aguuccaacagauguagaa

SEQ ID NO: 1859739 - RNA, 19 nt, Artificial Sequence
  Description of Artificial Sequence: Synthetic oligonucleotide
  Sense strand starting at position 2474 of SEQ ID NO: 1564169
ucuacaucuguuggaacua

SEQ ID NO: 1859740 - RNA, 19 nt, Artificial Sequence
  Description of Artificial Sequence: Synthetic oligonucleotide
  Antisense strand to SEQ ID NO: 1859739
uaguuccaacagauguaga

SEQ ID NO: 1859741 - RNA, 19 nt, Artificial Sequence
  Description of Artificial Sequence: Synthetic oligonucleotide
  Sense strand starting at position 2475 of SEQ ID NO: 1564169
cuacaucuguuggaacuaa

SEQ ID NO: 1859742 - RNA, 19 nt, Artificial Sequence
  Description of Artificial Sequence: Synthetic oligonucleotide
  Antisense strand to SEQ ID NO: 1859741
uuaguuccaacagauguag

SEQ ID NO: 1859743 - RNA, 19 nt, Artificial Sequence
  Description of Artificial Sequence: Synthetic oligonucleotide
  Sense strand starting at position 3009 of SEQ ID NO: 1564169
ugugaauagugccgcauuu

SEQ ID NO: 1859744 - RNA, 19 nt, Artificial Sequence
  Description of Artificial Sequence: Synthetic oligonucleotide
  Antisense strand to SEQ ID NO: 1859743
aaaugcggcacuauucaca

SEQ ID NO: 1859745 - RNA, 19 nt, Artificial Sequence
  Description of Artificial Sequence: Synthetic oligonucleotide
  Sense strand starting at position 3155 of SEQ ID NO: 1564169
caucucauucucgggacua

SEQ ID NO: 1859746 - RNA, 19 nt, Artificial Sequence
  Description of Artificial Sequence: Synthetic oligonucleotide
  Antisense strand to SEQ ID NO: 1859745
uagucccgagaaugagaug

SEQ ID NO: 1859747 - RNA, 19 nt, Artificial Sequence
  Description of Artificial Sequence: Synthetic oligonucleotide
  Sense strand starting at position 3156 of SEQ ID NO: 1564169
aucucauucucgggacuac

SEQ ID NO: 1859748 - RNA, 19 nt, Artificial Sequence
  Description of Artificial Sequence: Synthetic oligonucleotide
  Antisense strand to SEQ ID NO: 1859747
guagucccgagaaugagau

SEQ ID NO: 1859749 - RNA, 19 nt, Artificial Sequence
  Description of Artificial Sequence: Synthetic oligonucleotide
  Sense strand starting at position 3157 of SEQ ID NO: 1564169
ucucauucucgggacuaca

SEQ ID NO: 1859750 - RNA, 19 nt, Artificial Sequence
  Description of Artificial Sequence: Synthetic oligonucleotide
  Antisense strand to SEQ ID NO: 1859749
uguagucccgagaaugaga

SEQ ID NO: 1859751 - RNA, 19 nt, Artificial Sequence
  Description of Artificial Sequence: Synthetic oligonucleotide
  Sense strand starting at position 3451 of SEQ ID NO: 1564169
gugccauucugcccugaua

SEQ ID NO: 1859752 - RNA, 19 nt, Artificial Sequence
  Description of Artificial Sequence: Synthetic oligonucleotide
  Antisense strand to SEQ ID NO: 1859751
uaucagggcagaauggcac

SEQ ID NO: 1859753 - RNA, 19 nt, Artificial Sequence
  Description of Artificial Sequence: Synthetic oligonucleotide
  Sense strand starting at position 3453 of SEQ ID NO: 1564169
gccauucugcccugauaau

SEQ ID NO: 1859754 - RNA, 19 nt, Artificial Sequence
  Description of Artificial Sequence: Synthetic oligonucleotide
  Antisense strand to SEQ ID NO: 1859753
auuaucagggcagaauggc

SEQ ID NO: 1859755 - RNA, 19 nt, Artificial Sequence
  Description of Artificial Sequence: Synthetic oligonucleotide
  Sense strand starting at position 3593 of SEQ ID NO: 1564169
uuugguuguucuucuuauu

SEQ ID NO: 1859756 - RNA, 19 nt, Artificial Sequence
  Description of Artificial Sequence: Synthetic oligonucleotide
  Antisense strand to SEQ ID NO: 1859755
aauaagaagaacaaccaaa

SEQ ID NO: 1859757 - RNA, 19 nt, Artificial Sequence
  Description of Artificial Sequence: Synthetic oligonucleotide
  Sense strand starting at position 3599 of SEQ ID NO: 1564169
uguucuucuuauuaguaga

SEQ ID NO: 1859758 - RNA, 19 nt, Artificial Sequence
  Description of Artificial Sequence: Synthetic oligonucleotide
  Antisense strand to SEQ ID NO: 1859757
ucuacuaauaagaagaaca

SEQ ID NO: 1859759 - RNA, 19 nt, Artificial Sequence
  Description of Artificial Sequence: Synthetic oligonucleotide
  Sense strand starting at position 78 of SEQ ID NO: 1564170
cccugauuccugugguuuc

SEQ ID NO: 1859760 - RNA, 19 nt, Artificial Sequence
  Description of Artificial Sequence: Synthetic oligonucleotide
  Antisense strand to SEQ ID NO: 1859759
gaaaccacaggaaucaggg

SEQ ID NO: 1859761 - RNA, 19 nt, Artificial Sequence
  Description of Artificial Sequence: Synthetic oligonucleotide
  Sense strand starting at position 81 of SEQ ID NO: 1564170
ugauuccugugguuucgau

SEQ ID NO: 1859762 - RNA, 19 nt, Artificial Sequence
  Description of Artificial Sequence: Synthetic oligonucleotide
  Antisense strand to SEQ ID NO: 1859761
aucgaaaccacaggaauca

SEQ ID NO: 1859763 - RNA, 19 nt, Artificial Sequence
  Description of Artificial Sequence: Synthetic oligonucleotide
  Sense strand starting at position 90 of SEQ ID NO: 1564170
ugguuucgaucguuaccaa

SEQ ID NO: 1859764 - RNA, 19 nt, Artificial Sequence
  Description of Artificial Sequence: Synthetic oligonucleotide
  Antisense strand to SEQ ID NO: 1859763
uugguaacgaucgaaacca

SEQ ID NO: 1859765 - RNA, 19 nt, Artificial Sequence
  Description of Artificial Sequence: Synthetic oligonucleotide
  Sense strand starting at position 91 of SEQ ID NO: 1564170
gguuucgaucguuaccaaa

SEQ ID NO: 1859766 - RNA, 19 nt, Artificial Sequence
  Description of Artificial Sequence: Synthetic oligonucleotide
  Antisense strand to SEQ ID NO: 1859765
uuugguaacgaucgaaacc

SEQ ID NO: 1859767 - RNA, 19 nt, Artificial Sequence
  Description of Artificial Sequence: Synthetic oligonucleotide
  Sense strand starting at position 108 of SEQ ID NO: 1564170
aaaucauucccguggaagu

SEQ ID NO: 1859768 - RNA, 19 nt, Artificial Sequence
  Description of Artificial Sequence: Synthetic oligonucleotide
  Antisense strand to SEQ ID NO: 1859767
acuuccacgggaaugauuu

SEQ ID NO: 1859769 - RNA, 19 nt, Artificial Sequence
  Description of Artificial Sequence: Synthetic oligonucleotide
  Sense strand starting at position 125 of SEQ ID NO: 1564170
gucugcagcccguuuacua

SEQ ID NO: 1859770 - RNA, 19 nt, Artificial Sequence
  Description of Artificial Sequence: Synthetic oligonucleotide
  Antisense strand to SEQ ID NO: 1859769
uaguaaacgggcugcagac

SEQ ID NO: 1859771 - RNA, 19 nt, Artificial Sequence
  Description of Artificial Sequence: Synthetic oligonucleotide
  Sense strand starting at position 133 of SEQ ID NO: 1564170
cccguuuacuacgcaugaa

SEQ ID NO: 1859772 - RNA, 19 nt, Artificial Sequence
  Description of Artificial Sequence: Synthetic oligonucleotide
  Antisense strand to SEQ ID NO: 1859771
uucaugcguaguaaacggg

SEQ ID NO: 1859773 - RNA, 19 nt, Artificial Sequence
  Description of Artificial Sequence: Synthetic oligonucleotide
  Sense strand starting at position 134 of SEQ ID NO: 1564170
ccguuuacuacgcaugaaa

SEQ ID NO: 1859774 - RNA, 19 nt, Artificial Sequence
  Description of Artificial Sequence: Synthetic oligonucleotide
  Antisense strand to SEQ ID NO: 1859773
uuucaugcguaguaaacgg

SEQ ID NO: 1859775 - RNA, 19 nt, Artificial Sequence
  Description of Artificial Sequence: Synthetic oligonucleotide
  Sense strand starting at position 193 of SEQ ID NO: 1564170
uuuauuucuuaagaggcaa

SEQ ID NO: 1859776 - RNA, 19 nt, Artificial Sequence
  Description of Artificial Sequence: Synthetic oligonucleotide
  Antisense strand to SEQ ID NO: 1859775
uugccucuuaagaaauaaa

SEQ ID NO: 1859777 - RNA, 19 nt, Artificial Sequence
  Description of Artificial Sequence: Synthetic oligonucleotide
  Sense strand starting at position 463 of SEQ ID NO: 1564170
ugcacucuucccuagguga

SEQ ID NO: 1859778 - RNA, 19 nt, Artificial Sequence
  Description of Artificial Sequence: Synthetic oligonucleotide
  Antisense strand to SEQ ID NO: 1859777
ucaccuagggaagagugca

SEQ ID NO: 1859779 - RNA, 19 nt, Artificial Sequence
  Description of Artificial Sequence: Synthetic oligonucleotide
  Sense strand starting at position 818 of SEQ ID NO: 1564170
ccagacuugucugcuucua

SEQ ID NO: 1859780 - RNA, 19 nt, Artificial Sequence
  Description of Artificial Sequence: Synthetic oligonucleotide
  Antisense strand to SEQ ID NO: 1859779
uagaagcagacaagucugg

SEQ ID NO: 1859781 - RNA, 19 nt, Artificial Sequence
  Description of Artificial Sequence: Synthetic oligonucleotide
  Sense strand starting at position 820 of SEQ ID NO: 1564170
agacuugucugcuucuaga

SEQ ID NO: 1859782 - RNA, 19 nt, Artificial Sequence
  Description of Artificial Sequence: Synthetic oligonucleotide
  Antisense strand to SEQ ID NO: 1859781
ucuagaagcagacaagucu

SEQ ID NO: 1859783 - RNA, 19 nt, Artificial Sequence
  Description of Artificial Sequence: Synthetic oligonucleotide
  Sense strand starting at position 847 of SEQ ID NO: 1564170
uuaccuaguuuagucauga

SEQ ID NO: 1859784 - RNA, 19 nt, Artificial Sequence
  Description of Artificial Sequence: Synthetic oligonucleotide
  Antisense strand to SEQ ID NO: 1859783
ucaugacuaaacuagguaa

SEQ ID NO: 1859785 - RNA, 19 nt, Artificial Sequence
  Description of Artificial Sequence: Synthetic oligonucleotide
  Sense strand starting at position 1042 of SEQ ID NO: 1564170
gugugugggaucugagaag

SEQ ID NO: 1859786 - RNA, 19 nt, Artificial Sequence
  Description of Artificial Sequence: Synthetic oligonucleotide
  Antisense strand to SEQ ID NO: 1859785
cuucucagaucccacacac

SEQ ID NO: 1859787 - RNA, 19 nt, Artificial Sequence
  Description of Artificial Sequence: Synthetic oligonucleotide
  Sense strand starting at position 1066 of SEQ ID NO: 1564170
augauagucuguccugguu

SEQ ID NO: 1859788 - RNA, 19 nt, Artificial Sequence
  Description of Artificial Sequence: Synthetic oligonucleotide
  Antisense strand to SEQ ID NO: 1859787
aaccaggacagacuaucau

SEQ ID NO: 1859789 - RNA, 19 nt, Artificial Sequence
  Description of Artificial Sequence: Synthetic oligonucleotide
  Sense strand starting at position 1069 of SEQ ID NO: 1564170
auagucuguccugguugau

SEQ ID NO: 1859790 - RNA, 19 nt, Artificial Sequence
  Description of Artificial Sequence: Synthetic oligonucleotide
  Antisense strand to SEQ ID NO: 1859789
aucaaccaggacagacuau

SEQ ID NO: 1859791 - RNA, 19 nt, Artificial Sequence
  Description of Artificial Sequence: Synthetic oligonucleotide
  Sense strand starting at position 1111 of SEQ ID NO: 1564170
gagggaacuucccuagcuu

SEQ ID NO: 1859792 - RNA, 19 nt, Artificial Sequence
  Description of Artificial Sequence: Synthetic oligonucleotide
  Antisense strand to SEQ ID NO: 1859791
aagcuagggaaguucccuc

SEQ ID NO: 1859793 - RNA, 19 nt, Artificial Sequence
  Description of Artificial Sequence: Synthetic oligonucleotide
  Sense strand starting at position 1406 of SEQ ID NO: 1564170
uuucguaacuucucugaua

SEQ ID NO: 1859794 - RNA, 19 nt, Artificial Sequence
  Description of Artificial Sequence: Synthetic oligonucleotide
  Antisense strand to SEQ ID NO: 1859793
uaucagagaaguuacgaaa

SEQ ID NO: 1859795 - RNA, 19 nt, Artificial Sequence
  Description of Artificial Sequence: Synthetic oligonucleotide
  Sense strand starting at position 1407 of SEQ ID NO: 1564170
uucguaacuucucugauau

SEQ ID NO: 1859796 - RNA, 19 nt, Artificial Sequence
  Description of Artificial Sequence: Synthetic oligonucleotide
  Antisense strand to SEQ ID NO: 1859795
auaucagagaaguuacgaa

SEQ ID NO: 1859797 - RNA, 19 nt, Artificial Sequence
  Description of Artificial Sequence: Synthetic oligonucleotide
  Sense strand starting at position 1408 of SEQ ID NO: 1564170
ucguaacuucucugauauu

SEQ ID NO: 1859798 - RNA, 19 nt, Artificial Sequence
  Description of Artificial Sequence: Synthetic oligonucleotide
  Antisense strand to SEQ ID NO: 1859797
aauaucagagaaguuacga

SEQ ID NO: 1859799 - RNA, 19 nt, Artificial Sequence
  Description of Artificial Sequence: Synthetic oligonucleotide
  Sense strand starting at position 1409 of SEQ ID NO: 1564170
cguaacuucucugauauuu

SEQ ID NO: 1859800 - RNA, 19 nt, Artificial Sequence
  Description of Artificial Sequence: Synthetic oligonucleotide
  Antisense strand to SEQ ID NO: 1859799
aaauaucagagaaguuacg

SEQ ID NO: 1859801 - RNA, 19 nt, Artificial Sequence
  Description of Artificial Sequence: Synthetic oligonucleotide
  Sense strand starting at position 1483 of SEQ ID NO: 1564170
agcagucucaccugcgaga

SEQ ID NO: 1859802 - RNA, 19 nt, Artificial Sequence
  Description of Artificial Sequence: Synthetic oligonucleotide
  Antisense strand to SEQ ID NO: 1859801
ucucgcaggugagacugcu

SEQ ID NO: 1859803 - RNA, 19 nt, Artificial Sequence
  Description of Artificial Sequence: Synthetic oligonucleotide
  Sense strand starting at position 1485 of SEQ ID NO: 1564170
cagucucaccugcgagaga

SEQ ID NO: 1859804 - RNA, 19 nt, Artificial Sequence
  Description of Artificial Sequence: Synthetic oligonucleotide
  Antisense strand to SEQ ID NO: 1859803
ucucucgcaggugagacug

SEQ ID NO: 1859805 - RNA, 19 nt, Artificial Sequence
  Description of Artificial Sequence: Synthetic oligonucleotide
  Sense strand starting at position 1953 of SEQ ID NO: 1564170
gcaugcuuacccugauugu

SEQ ID NO: 1859806 - RNA, 19 nt, Artificial Sequence
  Description of Artificial Sequence: Synthetic oligonucleotide
  Antisense strand to SEQ ID NO: 1859805
acaaucaggguaagcaugc

SEQ ID NO: 1859807 - RNA, 19 nt, Artificial Sequence
  Description of Artificial Sequence: Synthetic oligonucleotide
  Sense strand starting at position 1994 of SEQ ID NO: 1564170
ggcgugugcguacucugaa

SEQ ID NO: 1859808 - RNA, 19 nt, Artificial Sequence
  Description of Artificial Sequence: Synthetic oligonucleotide
  Antisense strand to SEQ ID NO: 1859807
uucagaguacgcacacgcc

SEQ ID NO: 1859809 - RNA, 19 nt, Artificial Sequence
  Description of Artificial Sequence: Synthetic oligonucleotide
  Sense strand starting at position 1997 of SEQ ID NO: 1564170
gugugcguacucugaauuu

SEQ ID NO: 1859810 - RNA, 19 nt, Artificial Sequence
  Description of Artificial Sequence: Synthetic oligonucleotide
  Antisense strand to SEQ ID NO: 1859809
aaauucagaguacgcacac

SEQ ID NO: 1859811 - RNA, 19 nt, Artificial Sequence
  Description of Artificial Sequence: Synthetic oligonucleotide
  Sense strand starting at position 2079 of SEQ ID NO: 1564170
ugggaagguucugucccua

SEQ ID NO: 1859812 - RNA, 19 nt, Artificial Sequence
  Description of Artificial Sequence: Synthetic oligonucleotide
  Antisense strand to SEQ ID NO: 1859811
uagggacagaaccuuccca

SEQ ID NO: 1859813 - RNA, 19 nt, Artificial Sequence
  Description of Artificial Sequence: Synthetic oligonucleotide
  Sense strand starting at position 2201 of SEQ ID NO: 1564170
auccuugggcagugacauu

SEQ ID NO: 1859814 - RNA, 19 nt, Artificial Sequence
  Description of Artificial Sequence: Synthetic oligonucleotide
  Antisense strand to SEQ ID NO: 1859813
aaugucacugcccaaggau

SEQ ID NO: 1859815 - RNA, 19 nt, Artificial Sequence
  Description of Artificial Sequence: Synthetic oligonucleotide
  Sense strand starting at position 2211 of SEQ ID NO: 1564170
agugacauugcagaauguu

SEQ ID NO: 1859816 - RNA, 19 nt, Artificial Sequence
  Description of Artificial Sequence: Synthetic oligonucleotide
  Antisense strand to SEQ ID NO: 1859815
aacauucugcaaugucacu

SEQ ID NO: 1859817 - RNA, 19 nt, Artificial Sequence
  Description of Artificial Sequence: Synthetic oligonucleotide
  Sense strand starting at position 2244 of SEQ ID NO: 1564170
ccacacuuugugcgacaaa

SEQ ID NO: 1859818 - RNA, 19 nt, Artificial Sequence
  Description of Artificial Sequence: Synthetic oligonucleotide
  Antisense strand to SEQ ID NO: 1859817
uuugucgcacaaagugugg

SEQ ID NO: 1859819 - RNA, 19 nt, Artificial Sequence
  Description of Artificial Sequence: Synthetic oligonucleotide
  Sense strand starting at position 2325 of SEQ ID NO: 1564170
ggguuaaacaucuggauuc

SEQ ID NO: 1859820 - RNA, 19 nt, Artificial Sequence
  Description of Artificial Sequence: Synthetic oligonucleotide
  Antisense strand to SEQ ID NO: 1859819
gaauccagauguuuaaccc

SEQ ID NO: 1859821 - RNA, 19 nt, Artificial Sequence
  Description of Artificial Sequence: Synthetic oligonucleotide
  Sense strand starting at position 2346 of SEQ ID NO: 1564170
gucugaaccgugggaagaa

SEQ ID NO: 1859822 - RNA, 19 nt, Artificial Sequence
  Description of Artificial Sequence: Synthetic oligonucleotide
  Antisense strand to SEQ ID NO: 1859821
uucuucccacgguucagac

SEQ ID NO: 1859823 - RNA, 19 nt, Artificial Sequence
  Description of Artificial Sequence: Synthetic oligonucleotide
  Sense strand starting at position 2469 of SEQ ID NO: 1564170
ggcuucuacaucuguugga

SEQ ID NO: 1859824 - RNA, 19 nt, Artificial Sequence
  Description of Artificial Sequence: Synthetic oligonucleotide
  Antisense strand to SEQ ID NO: 1859823
uccaacagauguagaagcc

SEQ ID NO: 1859825 - RNA, 19 nt, Artificial Sequence
  Description of Artificial Sequence: Synthetic oligonucleotide
  Sense strand starting at position 2470 of SEQ ID NO: 1564170
gcuucuacaucuguuggaa

SEQ ID NO: 1859826 - RNA, 19 nt, Artificial Sequence
  Description of Artificial Sequence: Synthetic oligonucleotide
  Antisense strand to SEQ ID NO: 1859825
uuccaacagauguagaagc

SEQ ID NO: 1859827 - RNA, 19 nt, Artificial Sequence
  Description of Artificial Sequence: Synthetic oligonucleotide
  Sense strand starting at position 2473 of SEQ ID NO: 1564170
ucuacaucuguuggaacua

SEQ ID NO: 1859828 - RNA, 19 nt, Artificial Sequence
  Description of Artificial Sequence: Synthetic oligonucleotide
  Antisense strand to SEQ ID NO: 1859827
uaguuccaacagauguaga

SEQ ID NO: 1859829 - RNA, 19 nt, Artificial Sequence
  Description of Artificial Sequence: Synthetic oligonucleotide
  Sense strand starting at position 3041 of SEQ ID NO: 1564170
aaguguggugcgcacaauu

SEQ ID NO: 1859830 - RNA, 19 nt, Artificial Sequence
  Description of Artificial Sequence: Synthetic oligonucleotide
  Antisense strand to SEQ ID NO: 1859829
aauugugcgcaccacacuu

SEQ ID NO: 1859831 - RNA, 19 nt, Artificial Sequence
  Description of Artificial Sequence: Synthetic oligonucleotide
  Sense strand starting at position 3154 of SEQ ID NO: 1564170
caucucauucucgggacua

SEQ ID NO: 1859832 - RNA, 19 nt, Artificial Sequence
  Description of Artificial Sequence: Synthetic oligonucleotide
  Antisense strand to SEQ ID NO: 1859831
uagucccgagaaugagaug

SEQ ID NO: 1859833 - RNA, 19 nt, Artificial Sequence
  Description of Artificial Sequence: Synthetic oligonucleotide
  Sense strand starting at position 3156 of SEQ ID NO: 1564170
ucucauucucgggacuaca

SEQ ID NO: 1859834 - RNA, 19 nt, Artificial Sequence
  Description of Artificial Sequence: Synthetic oligonucleotide
  Antisense strand to SEQ ID NO: 1859833
uguagucccgagaaugaga

SEQ ID NO: 1859835 - RNA, 19 nt, Artificial Sequence
  Description of Artificial Sequence: Synthetic oligonucleotide
  Sense strand starting at position 3450 of SEQ ID NO: 1564170
gugccauucugcccugaua

SEQ ID NO: 1859836 - RNA, 19 nt, Artificial Sequence
  Description of Artificial Sequence: Synthetic oligonucleotide
  Antisense strand to SEQ ID NO: 1859835
uaucagggcagaauggcac

SEQ ID NO: 1859837 - RNA, 19 nt, Artificial Sequence
  Description of Artificial Sequence: Synthetic oligonucleotide
  Sense strand starting at position 3452 of SEQ ID NO: 1564170
gccauucugcccugauaau

SEQ ID NO: 1859838 - RNA, 19 nt, Artificial Sequence
  Description of Artificial Sequence: Synthetic oligonucleotide
  Antisense strand to SEQ ID NO: 1859837
auuaucagggcagaauggc

SEQ ID NO: 1859839 - RNA, 19 nt, Artificial Sequence
  Description of Artificial Sequence: Synthetic oligonucleotide
  Sense strand starting at position 184 of SEQ ID NO: 1564171
uuuauuucuuaagaggcaa

SEQ ID NO: 1859840 - RNA, 19 nt, Artificial Sequence
  Description of Artificial Sequence: Synthetic oligonucleotide
  Antisense strand to SEQ ID NO: 1859839
uugccucuuaagaaauaaa

SEQ ID NO: 1859841 - RNA, 19 nt, Artificial Sequence
  Description of Artificial Sequence: Synthetic oligonucleotide
  Sense strand starting at position 811 of SEQ ID NO: 1564171
agacuugucugcuucuaga

SEQ ID NO: 1859842 - RNA, 19 nt, Artificial Sequence
  Description of Artificial Sequence: Synthetic oligonucleotide
  Antisense strand to SEQ ID NO: 1859841
ucuagaagcagacaagucu

SEQ ID NO: 1859843 - RNA, 19 nt, Artificial Sequence
  Description of Artificial Sequence: Synthetic oligonucleotide
  Sense strand starting at position 1032 of SEQ ID NO: 1564171
gugugugggaucugagaag

SEQ ID NO: 1859844 - RNA, 19 nt, Artificial Sequence
  Description of Artificial Sequence: Synthetic oligonucleotide
  Antisense strand to SEQ ID NO: 1859843
cuucucagaucccacacac

SEQ ID NO: 1859845 - RNA, 19 nt, Artificial Sequence
  Description of Artificial Sequence: Synthetic oligonucleotide
  Sense strand starting at position 1101 of SEQ ID NO: 1564171
gagggaacuucccuagcuu

SEQ ID NO: 1859846 - RNA, 19 nt, Artificial Sequence
  Description of Artificial Sequence: Synthetic oligonucleotide
  Antisense strand to SEQ ID NO: 1859845
aagcuagggaaguucccuc

SEQ ID NO: 1859847 - RNA, 19 nt, Artificial Sequence
  Description of Artificial Sequence: Synthetic oligonucleotide
  Sense strand starting at position 1475 of SEQ ID NO: 1564171
cagucucaccugcgagaga

SEQ ID NO: 1859848 - RNA, 19 nt, Artificial Sequence
  Description of Artificial Sequence: Synthetic oligonucleotide
  Antisense strand to SEQ ID NO: 1859847
ucucucgcaggugagacug

SEQ ID NO: 1859849 - RNA, 19 nt, Artificial Sequence
  Description of Artificial Sequence: Synthetic oligonucleotide
  Sense strand starting at position 1984 of SEQ ID NO: 1564171
ggcgugugcguacucugaa

SEQ ID NO: 1859850 - RNA, 19 nt, Artificial Sequence
  Description of Artificial Sequence: Synthetic oligonucleotide
  Antisense strand to SEQ ID NO: 1859849
uucagaguacgcacacgcc

SEQ ID NO: 1859851 - RNA, 19 nt, Artificial Sequence
  Description of Artificial Sequence: Synthetic oligonucleotide
  Sense strand starting at position 1987 of SEQ ID NO: 1564171
gugugcguacucugaauuu

SEQ ID NO: 1859852 - RNA, 19 nt, Artificial Sequence
  Description of Artificial Sequence: Synthetic oligonucleotide
  Antisense strand to SEQ ID NO: 1859851
aaauucagaguacgcacac

SEQ ID NO: 1859853 - RNA, 19 nt, Artificial Sequence
  Description of Artificial Sequence: Synthetic oligonucleotide
  Sense strand starting at position 2069 of SEQ ID NO: 1564171
ugggaagguucugucccua

SEQ ID NO: 1859854 - RNA, 19 nt, Artificial Sequence
  Description of Artificial Sequence: Synthetic oligonucleotide
  Antisense strand to SEQ ID NO: 1859853
uagggacagaaccuuccca

SEQ ID NO: 1859855 - RNA, 19 nt, Artificial Sequence
  Description of Artificial Sequence: Synthetic oligonucleotide
  Sense strand starting at position 2191 of SEQ ID NO: 1564171
auccuugggcagugacauu

SEQ ID NO: 1859856 - RNA, 19 nt, Artificial Sequence
  Description of Artificial Sequence: Synthetic oligonucleotide
  Antisense strand to SEQ ID NO: 1859855
aaugucacugcccaaggau

SEQ ID NO: 1859857 - RNA, 19 nt, Artificial Sequence
  Description of Artificial Sequence: Synthetic oligonucleotide
  Sense strand starting at position 2201 of SEQ ID NO: 1564171
agugacauugcagaauguu

SEQ ID NO: 1859858 - RNA, 19 nt, Artificial Sequence
  Description of Artificial Sequence: Synthetic oligonucleotide
  Antisense strand to SEQ ID NO: 1859857
aacauucugcaaugucacu

SEQ ID NO: 1859859 - RNA, 19 nt, Artificial Sequence
  Description of Artificial Sequence: Synthetic oligonucleotide
  Sense strand starting at position 2305 of SEQ ID NO: 1564171
ccuggaucuuggguuaaac

SEQ ID NO: 1859860 - RNA, 19 nt, Artificial Sequence
  Description of Artificial Sequence: Synthetic oligonucleotide
  Antisense strand to SEQ ID NO: 1859859
guuuaacccaagauccagg

SEQ ID NO: 1859861 - RNA, 19 nt, Artificial Sequence
  Description of Artificial Sequence: Synthetic oligonucleotide
  Sense strand starting at position 2315 of SEQ ID NO: 1564171
ggguuaaacaucuggauuc

SEQ ID NO: 1859862 - RNA, 19 nt, Artificial Sequence
  Description of Artificial Sequence: Synthetic oligonucleotide
  Antisense strand to SEQ ID NO: 1859861
gaauccagauguuuaaccc

SEQ ID NO: 1859863 - RNA, 19 nt, Artificial Sequence
  Description of Artificial Sequence: Synthetic oligonucleotide
  Sense strand starting at position 2419 of SEQ ID NO: 1564171
ggagguuugcuguacuuag

SEQ ID NO: 1859864 - RNA, 19 nt, Artificial Sequence
  Description of Artificial Sequence: Synthetic oligonucleotide
  Antisense strand to SEQ ID NO: 1859863
cuaaguacagcaaaccucc

SEQ ID NO: 1859865 - RNA, 19 nt, Artificial Sequence
  Description of Artificial Sequence: Synthetic oligonucleotide
  Sense strand starting at position 2460 of SEQ ID NO: 1564171
gcuucuacaucuguuggaa

SEQ ID NO: 1859866 - RNA, 19 nt, Artificial Sequence
  Description of Artificial Sequence: Synthetic oligonucleotide
  Antisense strand to SEQ ID NO: 1859865
uuccaacagauguagaagc

SEQ ID NO: 1859867 - RNA, 19 nt, Artificial Sequence
  Description of Artificial Sequence: Synthetic oligonucleotide
  Sense strand starting at position 2463 of SEQ ID NO: 1564171
ucuacaucuguuggaacua

SEQ ID NO: 1859868 - RNA, 19 nt, Artificial Sequence
  Description of Artificial Sequence: Synthetic oligonucleotide
  Antisense strand to SEQ ID NO: 1859867
uaguuccaacagauguaga

SEQ ID NO: 1859869 - RNA, 19 nt, Artificial Sequence
  Description of Artificial Sequence: Synthetic oligonucleotide
  Sense strand starting at position 3144 of SEQ ID NO: 1564171
caucucauucucgggacua

SEQ ID NO: 1859870 - RNA, 19 nt, Artificial Sequence
  Description of Artificial Sequence: Synthetic oligonucleotide
  Antisense strand to SEQ ID NO: 1859869
uagucccgagaaugagaug

SEQ ID NO: 1859871 - RNA, 19 nt, Artificial Sequence
  Description of Artificial Sequence: Synthetic oligonucleotide
  Sense strand starting at position 3146 of SEQ ID NO: 1564171
ucucauucucgggacuaca

SEQ ID NO: 1859872 - RNA, 19 nt, Artificial Sequence
  Description of Artificial Sequence: Synthetic oligonucleotide
  Antisense strand to SEQ ID NO: 1859871
uguagucccgagaaugaga

SEQ ID NO: 1859873 - RNA, 19 nt, Artificial Sequence
  Description of Artificial Sequence: Synthetic oligonucleotide
  Sense strand starting at position 80 of SEQ ID NO: 1564172
gguuucgaucguuaccaaa

SEQ ID NO: 1859874 - RNA, 19 nt, Artificial Sequence
  Description of Artificial Sequence: Synthetic oligonucleotide
  Antisense strand to SEQ ID NO: 1859873
uuugguaacgaucgaaacc

SEQ ID NO: 1859875 - RNA, 19 nt, Artificial Sequence
  Description of Artificial Sequence: Synthetic oligonucleotide
  Sense strand starting at position 97 of SEQ ID NO: 1564172
aaaucauucccguggaagu

SEQ ID NO: 1859876 - RNA, 19 nt, Artificial Sequence
  Description of Artificial Sequence: Synthetic oligonucleotide
  Antisense strand to SEQ ID NO: 1859875
acuuccacgggaaugauuu

SEQ ID NO: 1859877 - RNA, 19 nt, Artificial Sequence
  Description of Artificial Sequence: Synthetic oligonucleotide
  Sense strand starting at position 114 of SEQ ID NO: 1564172
gucugcagcccguuuacua

SEQ ID NO: 1859878 - RNA, 19 nt, Artificial Sequence
  Description of Artificial Sequence: Synthetic oligonucleotide
  Antisense strand to SEQ ID NO: 1859877
uaguaaacgggcugcagac

SEQ ID NO: 1859879 - RNA, 19 nt, Artificial Sequence
  Description of Artificial Sequence: Synthetic oligonucleotide
  Sense strand starting at position 123 of SEQ ID NO: 1564172
ccguuuacuacgcaugaaa

SEQ ID NO: 1859880 - RNA, 19 nt, Artificial Sequence
  Description of Artificial Sequence: Synthetic oligonucleotide
  Antisense strand to SEQ ID NO: 1859879
uuucaugcguaguaaacgg

SEQ ID NO: 1859881 - RNA, 19 nt, Artificial Sequence
  Description of Artificial Sequence: Synthetic oligonucleotide
  Sense strand starting at position 182 of SEQ ID NO: 1564172
uuuauuucuuaagaggcaa

SEQ ID NO: 1859882 - RNA, 19 nt, Artificial Sequence
  Description of Artificial Sequence: Synthetic oligonucleotide
  Antisense strand to SEQ ID NO: 1859881
uugccucuuaagaaauaaa

SEQ ID NO: 1859883 - RNA, 19 nt, Artificial Sequence
  Description of Artificial Sequence: Synthetic oligonucleotide
  Sense strand starting at position 452 of SEQ ID NO: 1564172
ugcacucuucccuagguga

SEQ ID NO: 1859884 - RNA, 19 nt, Artificial Sequence
  Description of Artificial Sequence: Synthetic oligonucleotide
  Antisense strand to SEQ ID NO: 1859883
ucaccuagggaagagugca

SEQ ID NO: 1859885 - RNA, 19 nt, Artificial Sequence
  Description of Artificial Sequence: Synthetic oligonucleotide
  Sense strand starting at position 809 of SEQ ID NO: 1564172
agacuugucugcuucuaga

SEQ ID NO: 1859886 - RNA, 19 nt, Artificial Sequence
  Description of Artificial Sequence: Synthetic oligonucleotide
  Antisense strand to SEQ ID NO: 1859885
ucuagaagcagacaagucu

SEQ ID NO: 1859887 - RNA, 19 nt, Artificial Sequence
  Description of Artificial Sequence: Synthetic oligonucleotide
  Sense strand starting at position 836 of SEQ ID NO: 1564172
uuaccuaguuuagucauga

SEQ ID NO: 1859888 - RNA, 19 nt, Artificial Sequence
  Description of Artificial Sequence: Synthetic oligonucleotide
  Antisense strand to SEQ ID NO: 1859887
ucaugacuaaacuagguaa

SEQ ID NO: 1859889 - RNA, 19 nt, Artificial Sequence
  Description of Artificial Sequence: Synthetic oligonucleotide
  Sense strand starting at position 1031 of SEQ ID NO: 1564172
gugugugggaucugagaag

SEQ ID NO: 1859890 - RNA, 19 nt, Artificial Sequence
  Description of Artificial Sequence: Synthetic oligonucleotide
  Antisense strand to SEQ ID NO: 1859889
cuucucagaucccacacac

SEQ ID NO: 1859891 - RNA, 19 nt, Artificial Sequence
  Description of Artificial Sequence: Synthetic oligonucleotide
  Sense strand starting at position 1100 of SEQ ID NO: 1564172
gagggaacuucccuagcuu

SEQ ID NO: 1859892 - RNA, 19 nt, Artificial Sequence
  Description of Artificial Sequence: Synthetic oligonucleotide
  Antisense strand to SEQ ID NO: 1859891
aagcuagggaaguucccuc

SEQ ID NO: 1859893 - RNA, 19 nt, Artificial Sequence
  Description of Artificial Sequence: Synthetic oligonucleotide
  Sense strand starting at position 1395 of SEQ ID NO: 1564172
uuucguaacuucucugaua

SEQ ID NO: 1859894 - RNA, 19 nt, Artificial Sequence
  Description of Artificial Sequence: Synthetic oligonucleotide
  Antisense strand to SEQ ID NO: 1859893
uaucagagaaguuacgaaa

SEQ ID NO: 1859895 - RNA, 19 nt, Artificial Sequence
  Description of Artificial Sequence: Synthetic oligonucleotide
  Sense strand starting at position 1474 of SEQ ID NO: 1564172
cagucucaccugcgagaga

SEQ ID NO: 1859896 - RNA, 19 nt, Artificial Sequence
  Description of Artificial Sequence: Synthetic oligonucleotide
  Antisense strand to SEQ ID NO: 1859895
ucucucgcaggugagacug

SEQ ID NO: 1859897 - RNA, 19 nt, Artificial Sequence
  Description of Artificial Sequence: Synthetic oligonucleotide
  Sense strand starting at position 1983 of SEQ ID NO: 1564172
ggcgugugcguacucugaa

SEQ ID NO: 1859898 - RNA, 19 nt, Artificial Sequence
  Description of Artificial Sequence: Synthetic oligonucleotide
  Antisense strand to SEQ ID NO: 1859897
uucagaguacgcacacgcc

SEQ ID NO: 1859899 - RNA, 19 nt, Artificial Sequence
  Description of Artificial Sequence: Synthetic oligonucleotide
  Sense strand starting at position 1986 of SEQ ID NO: 1564172
gugugcguacucugaauuu

SEQ ID NO: 1859900 - RNA, 19 nt, Artificial Sequence
  Description of Artificial Sequence: Synthetic oligonucleotide
  Antisense strand to SEQ ID NO: 1859899
aaauucagaguacgcacac

SEQ ID NO: 1859901 - RNA, 19 nt, Artificial Sequence
  Description of Artificial Sequence: Synthetic oligonucleotide
  Sense strand starting at position 2068 of SEQ ID NO: 1564172
ugggaagguucugucccua

SEQ ID NO: 1859902 - RNA, 19 nt, Artificial Sequence
  Description of Artificial Sequence: Synthetic oligonucleotide
  Antisense strand to SEQ ID NO: 1859901
uagggacagaaccuuccca

SEQ ID NO: 1859903 - RNA, 19 nt, Artificial Sequence
  Description of Artificial Sequence: Synthetic oligonucleotide
  Sense strand starting at position 2190 of SEQ ID NO: 1564172
auccuugggcagugacauu

SEQ ID NO: 1859904 - RNA, 19 nt, Artificial Sequence
  Description of Artificial Sequence: Synthetic oligonucleotide
  Antisense strand to SEQ ID NO: 1859903
aaugucacugcccaaggau

SEQ ID NO: 1859905 - RNA, 19 nt, Artificial Sequence
  Description of Artificial Sequence: Synthetic oligonucleotide
  Sense strand starting at position 2200 of SEQ ID NO: 1564172
agugacauugcagaauguu

SEQ ID NO: 1859906 - RNA, 19 nt, Artificial Sequence
  Description of Artificial Sequence: Synthetic oligonucleotide
  Antisense strand to SEQ ID NO: 1859905
aacauucugcaaugucacu

SEQ ID NO: 1859907 - RNA, 19 nt, Artificial Sequence
  Description of Artificial Sequence: Synthetic oligonucleotide
  Sense strand starting at position 2314 of SEQ ID NO: 1564172
ggguuaaacaucuggauuc

SEQ ID NO: 1859908 - RNA, 19 nt, Artificial Sequence
  Description of Artificial Sequence: Synthetic oligonucleotide
  Antisense strand to SEQ ID NO: 1859907
gaauccagauguuuaaccc

SEQ ID NO: 1859909 - RNA, 19 nt, Artificial Sequence
  Description of Artificial Sequence: Synthetic oligonucleotide
  Sense strand starting at position 2335 of SEQ ID NO: 1564172
gucugaaccgugggaagaa

SEQ ID NO: 1859910 - RNA, 19 nt, Artificial Sequence
  Description of Artificial Sequence: Synthetic oligonucleotide
  Antisense strand to SEQ ID NO: 1859909
uucuucccacgguucagac

SEQ ID NO: 1859911 - RNA, 19 nt, Artificial Sequence
  Description of Artificial Sequence: Synthetic oligonucleotide
  Sense strand starting at position 2459 of SEQ ID NO: 1564172
gcuucuacaucuguuggaa

SEQ ID NO: 1859912 - RNA, 19 nt, Artificial Sequence
  Description of Artificial Sequence: Synthetic oligonucleotide
  Antisense strand to SEQ ID NO: 1859911
uuccaacagauguagaagc

SEQ ID NO: 1859913 - RNA, 19 nt, Artificial Sequence
  Description of Artificial Sequence: Synthetic oligonucleotide
  Sense strand starting at position 2462 of SEQ ID NO: 1564172
ucuacaucuguuggaacua

SEQ ID NO: 1859914 - RNA, 19 nt, Artificial Sequence
  Description of Artificial Sequence: Synthetic oligonucleotide
  Antisense strand to SEQ ID NO: 1859913
uaguuccaacagauguaga

SEQ ID NO: 1859915 - RNA, 19 nt, Artificial Sequence
  Description of Artificial Sequence: Synthetic oligonucleotide
  Sense strand starting at position 3143 of SEQ ID NO: 1564172
caucucauucucgggacua

SEQ ID NO: 1859916 - RNA, 19 nt, Artificial Sequence
  Description of Artificial Sequence: Synthetic oligonucleotide
  Antisense strand to SEQ ID NO: 1859915
uagucccgagaaugagaug

SEQ ID NO: 1859917 - RNA, 19 nt, Artificial Sequence
  Description of Artificial Sequence: Synthetic oligonucleotide
  Sense strand starting at position 3145 of SEQ ID NO: 1564172
ucucauucucgggacuaca

SEQ ID NO: 1859918 - RNA, 19 nt, Artificial Sequence
  Description of Artificial Sequence: Synthetic oligonucleotide
  Antisense strand to SEQ ID NO: 1859917
uguagucccgagaaugaga

SEQ ID NO: 1859919 - RNA, 19 nt, Artificial Sequence
  Description of Artificial Sequence: Synthetic oligonucleotide
  Sense strand starting at position 105 of SEQ ID NO: 1564173
aaggauuucugauagugac

SEQ ID NO: 1859920 - RNA, 19 nt, Artificial Sequence
  Description of Artificial Sequence: Synthetic oligonucleotide
  Antisense strand to SEQ ID NO: 1859919
gucacuaucagaaauccuu

SEQ ID NO: 1859921 - RNA, 19 nt, Artificial Sequence
  Description of Artificial Sequence: Synthetic oligonucleotide
  Sense strand starting at position 108 of SEQ ID NO: 1564173
gauuucugauagugacuca

SEQ ID NO: 1859922 - RNA, 19 nt, Artificial Sequence
  Description of Artificial Sequence: Synthetic oligonucleotide
  Antisense strand to SEQ ID NO: 1859921
ugagucacuaucagaaauc

SEQ ID NO: 1859923 - RNA, 19 nt, Artificial Sequence
  Description of Artificial Sequence: Synthetic oligonucleotide
  Sense strand starting at position 306 of SEQ ID NO: 1564173
uccagaacggacugagauu

SEQ ID NO: 1859924 - RNA, 19 nt, Artificial Sequence
  Description of Artificial Sequence: Synthetic oligonucleotide
  Antisense strand to SEQ ID NO: 1859923
aaucucaguccguucugga

SEQ ID NO: 1859925 - RNA, 19 nt, Artificial Sequence
  Description of Artificial Sequence: Synthetic oligonucleotide
  Sense strand starting at position 330 of SEQ ID NO: 1564173
aauguauuccacggucaca

SEQ ID NO: 1859926 - RNA, 19 nt, Artificial Sequence
  Description of Artificial Sequence: Synthetic oligonucleotide
  Antisense strand to SEQ ID NO: 1859925
ugugaccguggaauacauu

SEQ ID NO: 1859927 - RNA, 19 nt, Artificial Sequence
  Description of Artificial Sequence: Synthetic oligonucleotide
  Sense strand starting at position 529 of SEQ ID NO: 1564173
uuugcaucuucucugguau

SEQ ID NO: 1859928 - RNA, 19 nt, Artificial Sequence
  Description of Artificial Sequence: Synthetic oligonucleotide
  Antisense strand to SEQ ID NO: 1859927
auaccagagaagaugcaaa

SEQ ID NO: 1859929 - RNA, 19 nt, Artificial Sequence
  Description of Artificial Sequence: Synthetic oligonucleotide
  Sense strand starting at position 530 of SEQ ID NO: 1564173
uugcaucuucucugguauu

SEQ ID NO: 1859930 - RNA, 19 nt, Artificial Sequence
  Description of Artificial Sequence: Synthetic oligonucleotide
  Antisense strand to SEQ ID NO: 1859929
aauaccagagaagaugcaa

SEQ ID NO: 1859931 - RNA, 19 nt, Artificial Sequence
  Description of Artificial Sequence: Synthetic oligonucleotide
  Sense strand starting at position 540 of SEQ ID NO: 1564173
ucugguauuugagaaccaa

SEQ ID NO: 1859932 - RNA, 19 nt, Artificial Sequence
  Description of Artificial Sequence: Synthetic oligonucleotide
  Antisense strand to SEQ ID NO: 1859931
uugguucucaaauaccaga

SEQ ID NO: 1859933 - RNA, 19 nt, Artificial Sequence
  Description of Artificial Sequence: Synthetic oligonucleotide
  Sense strand starting at position 558 of SEQ ID NO: 1564173
acccuaggucuccguacaa

SEQ ID NO: 1859934 - RNA, 19 nt, Artificial Sequence
  Description of Artificial Sequence: Synthetic oligonucleotide
  Antisense strand to SEQ ID NO: 1859933
uuguacggagaccuagggu

SEQ ID NO: 1859935 - RNA, 19 nt, Artificial Sequence
  Description of Artificial Sequence: Synthetic oligonucleotide
  Sense strand starting at position 603 of SEQ ID NO: 1564173
ggagcacucuguccuacaa

SEQ ID NO: 1859936 - RNA, 19 nt, Artificial Sequence
  Description of Artificial Sequence: Synthetic oligonucleotide
  Antisense strand to SEQ ID NO: 1859935
uuguaggacagagugcucc

SEQ ID NO: 1859937 - RNA, 19 nt, Artificial Sequence
  Description of Artificial Sequence: Synthetic oligonucleotide
  Sense strand starting at position 605 of SEQ ID NO: 1564173
agcacucuguccuacaaga

SEQ ID NO: 1859938 - RNA, 19 nt, Artificial Sequence
  Description of Artificial Sequence: Synthetic oligonucleotide
  Antisense strand to SEQ ID NO: 1859937
ucuuguaggacagagugcu

SEQ ID NO: 1859939 - RNA, 19 nt, Artificial Sequence
  Description of Artificial Sequence: Synthetic oligonucleotide
  Sense strand starting at position 621 of SEQ ID NO: 1564173
agagaaacagucugagucu

SEQ ID NO: 1859940 - RNA, 19 nt, Artificial Sequence
  Description of Artificial Sequence: Synthetic oligonucleotide
  Antisense strand to SEQ ID NO: 1859939
agacucagacuguuucucu

SEQ ID NO: 1859941 - RNA, 19 nt, Artificial Sequence
  Description of Artificial Sequence: Synthetic oligonucleotide
  Sense strand starting at position 622 of SEQ ID NO: 1564173
gagaaacagucugagucuu

SEQ ID NO: 1859942 - RNA, 19 nt, Artificial Sequence
  Description of Artificial Sequence: Synthetic oligonucleotide
  Antisense strand to SEQ ID NO: 1859941
aagacucagacuguuucuc

SEQ ID NO: 1859943 - RNA, 19 nt, Artificial Sequence
  Description of Artificial Sequence: Synthetic oligonucleotide
  Sense strand starting at position 630 of SEQ ID NO: 1564173
gucugagucuuuccagcug

SEQ ID NO: 1859944 - RNA, 19 nt, Artificial Sequence
  Description of Artificial Sequence: Synthetic oligonucleotide
  Antisense strand to SEQ ID NO: 1859943
cagcuggaaagacucagac

SEQ ID NO: 1859945 - RNA, 19 nt, Artificial Sequence
  Description of Artificial Sequence: Synthetic oligonucleotide
  Sense strand starting at position 826 of SEQ ID NO: 1564173
acauguuuccuaugggcaa

SEQ ID NO: 1859946 - RNA, 19 nt, Artificial Sequence
  Description of Artificial Sequence: Synthetic oligonucleotide
  Antisense strand to SEQ ID NO: 1859945
uugcccauaggaaacaugu

SEQ ID NO: 1859947 - RNA, 19 nt, Artificial Sequence
  Description of Artificial Sequence: Synthetic oligonucleotide
  Sense strand starting at position 885 of SEQ ID NO: 1564173
aguaguuucccugaggcca

SEQ ID NO: 1859948 - RNA, 19 nt, Artificial Sequence
  Description of Artificial Sequence: Synthetic oligonucleotide
  Antisense strand to SEQ ID NO: 1859947
uggccucagggaaacuacu

SEQ ID NO: 1859949 - RNA, 19 nt, Artificial Sequence
  Description of Artificial Sequence: Synthetic oligonucleotide
  Sense strand starting at position 1094 of SEQ ID NO: 1564173
agaaaugagcaucgcuacu

SEQ ID NO: 1859950 - RNA, 19 nt, Artificial Sequence
  Description of Artificial Sequence: Synthetic oligonucleotide
  Antisense strand to SEQ ID NO: 1859949
aguagcgaugcucauuucu

SEQ ID NO: 1859951 - RNA, 19 nt, Artificial Sequence
  Description of Artificial Sequence: Synthetic oligonucleotide
  Sense strand starting at position 1127 of SEQ ID NO: 1564173
aagcuauuacugggugauu

SEQ ID NO: 1859952 - RNA, 19 nt, Artificial Sequence
  Description of Artificial Sequence: Synthetic oligonucleotide
  Antisense strand to SEQ ID NO: 1859951
aaucacccaguaauagcuu

SEQ ID NO: 1859953 - RNA, 19 nt, Artificial Sequence
  Description of Artificial Sequence: Synthetic oligonucleotide
  Sense strand starting at position 1196 of SEQ ID NO: 1564173
cgggaacacuuagagagaa

SEQ ID NO: 1859954 - RNA, 19 nt, Artificial Sequence
  Description of Artificial Sequence: Synthetic oligonucleotide
  Antisense strand to SEQ ID NO: 1859953
uucucucuaaguguucccg

SEQ ID NO: 1859955 - RNA, 19 nt, Artificial Sequence
  Description of Artificial Sequence: Synthetic oligonucleotide
  Sense strand starting at position 1667 of SEQ ID NO: 1564173
ggugcacuggcgugaucau

SEQ ID NO: 1859956 - RNA, 19 nt, Artificial Sequence
  Description of Artificial Sequence: Synthetic oligonucleotide
  Antisense strand to SEQ ID NO: 1859955
augaucacgccagugcacc

SEQ ID NO: 1859957 - RNA, 19 nt, Artificial Sequence
  Description of Artificial Sequence: Synthetic oligonucleotide
  Sense strand starting at position 1674 of SEQ ID NO: 1564173
uggcgugaucauggucacu

SEQ ID NO: 1859958 - RNA, 19 nt, Artificial Sequence
  Description of Artificial Sequence: Synthetic oligonucleotide
  Antisense strand to SEQ ID NO: 1859957
agugaccaugaucacgcca

SEQ ID NO: 1859959 - RNA, 19 nt, Artificial Sequence
  Description of Artificial Sequence: Synthetic oligonucleotide
  Sense strand starting at position 1777 of SEQ ID NO: 1564173
cgcccaaauuucuuaaguu

SEQ ID NO: 1859960 - RNA, 19 nt, Artificial Sequence
  Description of Artificial Sequence: Synthetic oligonucleotide
  Antisense strand to SEQ ID NO: 1859959
aacuuaagaaauuugggcg

SEQ ID NO: 1859961 - RNA, 19 nt, Artificial Sequence
  Description of Artificial Sequence: Synthetic oligonucleotide
  Sense strand starting at position 1955 of SEQ ID NO: 1564173
agcaaaugcuuacucugau

SEQ ID NO: 1859962 - RNA, 19 nt, Artificial Sequence
  Description of Artificial Sequence: Synthetic oligonucleotide
  Antisense strand to SEQ ID NO: 1859961
aucagaguaagcauuugcu

SEQ ID NO: 1859963 - RNA, 19 nt, Artificial Sequence
  Description of Artificial Sequence: Synthetic oligonucleotide
  Sense strand starting at position 1956 of SEQ ID NO: 1564173
gcaaaugcuuacucugauu

SEQ ID NO: 1859964 - RNA, 19 nt, Artificial Sequence
  Description of Artificial Sequence: Synthetic oligonucleotide
  Antisense strand to SEQ ID NO: 1859963
aaucagaguaagcauuugc

SEQ ID NO: 1859965 - RNA, 19 nt, Artificial Sequence
  Description of Artificial Sequence: Synthetic oligonucleotide
  Sense strand starting at position 2079 of SEQ ID NO: 1564173
guaugcuuuaggcgggaaa

SEQ ID NO: 1859966 - RNA, 19 nt, Artificial Sequence
  Description of Artificial Sequence: Synthetic oligonucleotide
  Antisense strand to SEQ ID NO: 1859965
uuucccgccuaaagcauac

SEQ ID NO: 1859967 - RNA, 19 nt, Artificial Sequence
  Description of Artificial Sequence: Synthetic oligonucleotide
  Sense strand starting at position 2126 of SEQ ID NO: 1564173
ggugcugucccuggagguu

SEQ ID NO: 1859968 - RNA, 19 nt, Artificial Sequence
  Description of Artificial Sequence: Synthetic oligonucleotide
  Antisense strand to SEQ ID NO: 1859967
aaccuccagggacagcacc

SEQ ID NO: 1859969 - RNA, 19 nt, Artificial Sequence
  Description of Artificial Sequence: Synthetic oligonucleotide
  Sense strand starting at position 2241 of SEQ ID NO: 1564173
cuccuugggcagugacauu

SEQ ID NO: 1859970 - RNA, 19 nt, Artificial Sequence
  Description of Artificial Sequence: Synthetic oligonucleotide
  Antisense strand to SEQ ID NO: 1859969
aaugucacugcccaaggag

SEQ ID NO: 1859971 - RNA, 19 nt, Artificial Sequence
  Description of Artificial Sequence: Synthetic oligonucleotide
  Sense strand starting at position 2333 of SEQ ID NO: 1564173
gccgucaggagauguugaa

SEQ ID NO: 1859972 - RNA, 19 nt, Artificial Sequence
  Description of Artificial Sequence: Synthetic oligonucleotide
  Antisense strand to SEQ ID NO: 1859971
uucaacaucuccugacggc

SEQ ID NO: 1859973 - RNA, 19 nt, Artificial Sequence
  Description of Artificial Sequence: Synthetic oligonucleotide
  Sense strand starting at position 2345 of SEQ ID NO: 1564173
uguugaacucucugaagac

SEQ ID NO: 1859974 - RNA, 19 nt, Artificial Sequence
  Description of Artificial Sequence: Synthetic oligonucleotide
  Antisense strand to SEQ ID NO: 1859973
gucuucagagaguucaaca

SEQ ID NO: 1859975 - RNA, 19 nt, Artificial Sequence
  Description of Artificial Sequence: Synthetic oligonucleotide
  Sense strand starting at position 2346 of SEQ ID NO: 1564173
guugaacucucugaagacu

SEQ ID NO: 1859976 - RNA, 19 nt, Artificial Sequence
  Description of Artificial Sequence: Synthetic oligonucleotide
  Antisense strand to SEQ ID NO: 1859975
agucuucagagaguucaac

SEQ ID NO: 1859977 - RNA, 19 nt, Artificial Sequence
  Description of Artificial Sequence: Synthetic oligonucleotide
  Sense strand starting at position 2357 of SEQ ID NO: 1564173
ugaagacugucccuggauc

SEQ ID NO: 1859978 - RNA, 19 nt, Artificial Sequence
  Description of Artificial Sequence: Synthetic oligonucleotide
  Antisense strand to SEQ ID NO: 1859977
gauccagggacagucuuca

SEQ ID NO: 1859979 - RNA, 19 nt, Artificial Sequence
  Description of Artificial Sequence: Synthetic oligonucleotide
  Sense strand starting at position 2358 of SEQ ID NO: 1564173
gaagacugucccuggaucu

SEQ ID NO: 1859980 - RNA, 19 nt, Artificial Sequence
  Description of Artificial Sequence: Synthetic oligonucleotide
  Antisense strand to SEQ ID NO: 1859979
agauccagggacagucuuc

SEQ ID NO: 1859981 - RNA, 19 nt, Artificial Sequence
  Description of Artificial Sequence: Synthetic oligonucleotide
  Sense strand starting at position 2359 of SEQ ID NO: 1564173
aagacugucccuggaucuu

SEQ ID NO: 1859982 - RNA, 19 nt, Artificial Sequence
  Description of Artificial Sequence: Synthetic oligonucleotide
  Antisense strand to SEQ ID NO: 1859981
aagauccagggacagucuu

SEQ ID NO: 1859983 - RNA, 19 nt, Artificial Sequence
  Description of Artificial Sequence: Synthetic oligonucleotide
  Sense strand starting at position 2379 of SEQ ID NO: 1564173
gguuaaacaucuguauucu

SEQ ID NO: 1859984 - RNA, 19 nt, Artificial Sequence
  Description of Artificial Sequence: Synthetic oligonucleotide
  Antisense strand to SEQ ID NO: 1859983
agaauacagauguuuaacc

SEQ ID NO: 1859985 - RNA, 19 nt, Artificial Sequence
  Description of Artificial Sequence: Synthetic oligonucleotide
  Sense strand starting at position 2380 of SEQ ID NO: 1564173
guuaaacaucuguauucua

SEQ ID NO: 1859986 - RNA, 19 nt, Artificial Sequence
  Description of Artificial Sequence: Synthetic oligonucleotide
  Antisense strand to SEQ ID NO: 1859985
uagaauacagauguuuaac

SEQ ID NO: 1859987 - RNA, 19 nt, Artificial Sequence
  Description of Artificial Sequence: Synthetic oligonucleotide
  Sense strand starting at position 2388 of SEQ ID NO: 1564173
ucuguauucuagucugaac

SEQ ID NO: 1859988 - RNA, 19 nt, Artificial Sequence
  Description of Artificial Sequence: Synthetic oligonucleotide
  Antisense strand to SEQ ID NO: 1859987
guucagacuagaauacaga

SEQ ID NO: 1859989 - RNA, 19 nt, Artificial Sequence
  Description of Artificial Sequence: Synthetic oligonucleotide
  Sense strand starting at position 2390 of SEQ ID NO: 1564173
uguauucuagucugaacag

SEQ ID NO: 1859990 - RNA, 19 nt, Artificial Sequence
  Description of Artificial Sequence: Synthetic oligonucleotide
  Antisense strand to SEQ ID NO: 1859989
cuguucagacuagaauaca

SEQ ID NO: 1859991 - RNA, 19 nt, Artificial Sequence
  Description of Artificial Sequence: Synthetic oligonucleotide
  Sense strand starting at position 3057 of SEQ ID NO: 1564173
guaggaaccaggugucgau

SEQ ID NO: 1859992 - RNA, 19 nt, Artificial Sequence
  Description of Artificial Sequence: Synthetic oligonucleotide
  Antisense strand to SEQ ID NO: 1859991
aucgacaccugguuccuac

SEQ ID NO: 1859993 - RNA, 19 nt, Artificial Sequence
  Description of Artificial Sequence: Synthetic oligonucleotide
  Sense strand starting at position 3061 of SEQ ID NO: 1564173
gaaccaggugucgauaugu

SEQ ID NO: 1859994 - RNA, 19 nt, Artificial Sequence
  Description of Artificial Sequence: Synthetic oligonucleotide
  Antisense strand to SEQ ID NO: 1859993
acauaucgacaccugguuc

SEQ ID NO: 1859995 - RNA, 19 nt, Artificial Sequence
  Description of Artificial Sequence: Synthetic oligonucleotide
  Sense strand starting at position 3338 of SEQ ID NO: 1564173
uuguucuguguuguuagua

SEQ ID NO: 1859996 - RNA, 19 nt, Artificial Sequence
  Description of Artificial Sequence: Synthetic oligonucleotide
  Antisense strand to SEQ ID NO: 1859995
uacuaacaacacagaacaa

SEQ ID NO: 1859997 - RNA, 19 nt, Artificial Sequence
  Description of Artificial Sequence: Synthetic oligonucleotide
  Sense strand starting at position 3485 of SEQ ID NO: 1564173
agaaacaguucugcuaugu

SEQ ID NO: 1859998 - RNA, 19 nt, Artificial Sequence
  Description of Artificial Sequence: Synthetic oligonucleotide
  Antisense strand to SEQ ID NO: 1859997
acauagcagaacuguuucu

SEQ ID NO: 1859999 - RNA, 19 nt, Artificial Sequence
  Description of Artificial Sequence: Synthetic oligonucleotide
  Sense strand starting at position 66 of SEQ ID NO: 1564174
uggcaauaucaucgaagga

SEQ ID NO: 1860000 - RNA, 19 nt, Artificial Sequence
  Description of Artificial Sequence: Synthetic oligonucleotide
  Antisense strand to SEQ ID NO: 1859999
uccuucgaugauauugcca

SEQ ID NO: 1860001 - RNA, 19 nt, Artificial Sequence
  Description of Artificial Sequence: Synthetic oligonucleotide
  Sense strand starting at position 123 of SEQ ID NO: 1564174
gcuagacaugucugccauu

SEQ ID NO: 1860002 - RNA, 19 nt, Artificial Sequence
  Description of Artificial Sequence: Synthetic oligonucleotide
  Antisense strand to SEQ ID NO: 1860001
aauggcagacaugucuagc

SEQ ID NO: 1860003 - RNA, 19 nt, Artificial Sequence
  Description of Artificial Sequence: Synthetic oligonucleotide
  Sense strand starting at position 182 of SEQ ID NO: 1564174
ggaugaugccauggcuaac

SEQ ID NO: 1860004 - RNA, 19 nt, Artificial Sequence
  Description of Artificial Sequence: Synthetic oligonucleotide
  Antisense strand to SEQ ID NO: 1860003
guuagccauggcaucaucc

SEQ ID NO: 1860005 - RNA, 19 nt, Artificial Sequence
  Description of Artificial Sequence: Synthetic oligonucleotide
  Sense strand starting at position 210 of SEQ ID NO: 1564174
gagcgaccuuuccuagcuu

SEQ ID NO: 1860006 - RNA, 19 nt, Artificial Sequence
  Description of Artificial Sequence: Synthetic oligonucleotide
  Antisense strand to SEQ ID NO: 1860005
aagcuaggaaaggucgcuc

SEQ ID NO: 1860007 - RNA, 19 nt, Artificial Sequence
  Description of Artificial Sequence: Synthetic oligonucleotide
  Sense strand starting at position 250 of SEQ ID NO: 1564174
cuuuaaugcugcugacuga

SEQ ID NO: 1860008 - RNA, 19 nt, Artificial Sequence
  Description of Artificial Sequence: Synthetic oligonucleotide
  Antisense strand to SEQ ID NO: 1860007
ucagucagcagcauuaaag

SEQ ID NO: 1860009 - RNA, 19 nt, Artificial Sequence
  Description of Artificial Sequence: Synthetic oligonucleotide
  Sense strand starting at position 340 of SEQ ID NO: 1564174
gaugcuaguugaugacaga

SEQ ID NO: 1860010 - RNA, 19 nt, Artificial Sequence
  Description of Artificial Sequence: Synthetic oligonucleotide
  Antisense strand to SEQ ID NO: 1860009
ucugucaucaacuagcauc

SEQ ID NO: 1860011 - RNA, 19 nt, Artificial Sequence
  Description of Artificial Sequence: Synthetic oligonucleotide
  Sense strand starting at position 365 of SEQ ID NO: 1564174
augggaggcucucaaggau

SEQ ID NO: 1860012 - RNA, 19 nt, Artificial Sequence
  Description of Artificial Sequence: Synthetic oligonucleotide
  Antisense strand to SEQ ID NO: 1860011
auccuugagagccucccau

SEQ ID NO: 1860013 - RNA, 19 nt, Artificial Sequence
  Description of Artificial Sequence: Synthetic oligonucleotide
  Sense strand starting at position 404 of SEQ ID NO: 1564174
ugguccuugucuccaguau

SEQ ID NO: 1860014 - RNA, 19 nt, Artificial Sequence
  Description of Artificial Sequence: Synthetic oligonucleotide
  Antisense strand to SEQ ID NO: 1860013
auacuggagacaaggacca

SEQ ID NO: 1860015 - RNA, 19 nt, Artificial Sequence
  Description of Artificial Sequence: Synthetic oligonucleotide
  Sense strand starting at position 876 of SEQ ID NO: 1564174
gggcuagccuuacucugaa

SEQ ID NO: 1860016 - RNA, 19 nt, Artificial Sequence
  Description of Artificial Sequence: Synthetic oligonucleotide
  Antisense strand to SEQ ID NO: 1860015
uucagaguaaggcuagccc

SEQ ID NO: 1860017 - RNA, 19 nt, Artificial Sequence
  Description of Artificial Sequence: Synthetic oligonucleotide
  Sense strand starting at position 879 of SEQ ID NO: 1564174
cuagccuuacucugaaaga

SEQ ID NO: 1860018 - RNA, 19 nt, Artificial Sequence
  Description of Artificial Sequence: Synthetic oligonucleotide
  Antisense strand to SEQ ID NO: 1860017
ucuuucagaguaaggcuag

SEQ ID NO: 1860019 - RNA, 19 nt, Artificial Sequence
  Description of Artificial Sequence: Synthetic oligonucleotide
  Sense strand starting at position 1002 of SEQ ID NO: 1564174
cagagauaacaucgucucu

SEQ ID NO: 1860020 - RNA, 19 nt, Artificial Sequence
  Description of Artificial Sequence: Synthetic oligonucleotide
  Antisense strand to SEQ ID NO: 1860019
agagacgauguuaucucug

SEQ ID NO: 1860021 - RNA, 19 nt, Artificial Sequence
  Description of Artificial Sequence: Synthetic oligonucleotide
  Sense strand starting at position 1004 of SEQ ID NO: 1564174
gagauaacaucgucucucu

SEQ ID NO: 1860022 - RNA, 19 nt, Artificial Sequence
  Description of Artificial Sequence: Synthetic oligonucleotide
  Antisense strand to SEQ ID NO: 1860021
agagagacgauguuaucuc

SEQ ID NO: 1860023 - RNA, 19 nt, Artificial Sequence
  Description of Artificial Sequence: Synthetic oligonucleotide
  Sense strand starting at position 1013 of SEQ ID NO: 1564174
ucgucucucuggugaugga

SEQ ID NO: 1860024 - RNA, 19 nt, Artificial Sequence
  Description of Artificial Sequence: Synthetic oligonucleotide
  Antisense strand to SEQ ID NO: 1860023
uccaucaccagagagacga

SEQ ID NO: 1860025 - RNA, 19 nt, Artificial Sequence
  Description of Artificial Sequence: Synthetic oligonucleotide
  Sense strand starting at position 1014 of SEQ ID NO: 1564174
cgucucucuggugauggau

SEQ ID NO: 1860026 - RNA, 19 nt, Artificial Sequence
  Description of Artificial Sequence: Synthetic oligonucleotide
  Antisense strand to SEQ ID NO: 1860025
auccaucaccagagagacg

SEQ ID NO: 1860027 - RNA, 19 nt, Artificial Sequence
  Description of Artificial Sequence: Synthetic oligonucleotide
  Sense strand starting at position 1186 of SEQ ID NO: 1564174
gagagaauguagggaguuu

SEQ ID NO: 1860028 - RNA, 19 nt, Artificial Sequence
  Description of Artificial Sequence: Synthetic oligonucleotide
  Antisense strand to SEQ ID NO: 1860027
aaacucccuacauucucuc

SEQ ID NO: 1860029 - RNA, 19 nt, Artificial Sequence
  Description of Artificial Sequence: Synthetic oligonucleotide
  Sense strand starting at position 2024 of SEQ ID NO: 1564174
cgcuuaucacgcuacuguu

SEQ ID NO: 1860030 - RNA, 19 nt, Artificial Sequence
  Description of Artificial Sequence: Synthetic oligonucleotide
  Antisense strand to SEQ ID NO: 1860029
aacaguagcgugauaagcg

SEQ ID NO: 1860031 - RNA, 19 nt, Artificial Sequence
  Description of Artificial Sequence: Synthetic oligonucleotide
  Sense strand starting at position 2087 of SEQ ID NO: 1564174
gguccaucaucccugcaua

SEQ ID NO: 1860032 - RNA, 19 nt, Artificial Sequence
  Description of Artificial Sequence: Synthetic oligonucleotide
  Antisense strand to SEQ ID NO: 1860031
uaugcagggaugauggacc

SEQ ID NO: 1860033 - RNA, 19 nt, Artificial Sequence
  Description of Artificial Sequence: Synthetic oligonucleotide
  Sense strand starting at position 2143 of SEQ ID NO: 1564174
cuuuguugccacugcgaca

SEQ ID NO: 1860034 - RNA, 19 nt, Artificial Sequence
  Description of Artificial Sequence: Synthetic oligonucleotide
  Antisense strand to SEQ ID NO: 1860033
ugucgcaguggcaacaaag

SEQ ID NO: 1860035 - RNA, 19 nt, Artificial Sequence
  Description of Artificial Sequence: Synthetic oligonucleotide
  Sense strand starting at position 2373 of SEQ ID NO: 1564174
gcuucuauaucuguugcua

SEQ ID NO: 1860036 - RNA, 19 nt, Artificial Sequence
  Description of Artificial Sequence: Synthetic oligonucleotide
  Antisense strand to SEQ ID NO: 1860035
uagcaacagauauagaagc

SEQ ID NO: 1860037 - RNA, 19 nt, Artificial Sequence
  Description of Artificial Sequence: Synthetic oligonucleotide
  Sense strand starting at position 2375 of SEQ ID NO: 1564174
uucuauaucuguugcuacu

SEQ ID NO: 1860038 - RNA, 19 nt, Artificial Sequence
  Description of Artificial Sequence: Synthetic oligonucleotide
  Antisense strand to SEQ ID NO: 1860037
aguagcaacagauauagaa

SEQ ID NO: 1860039 - RNA, 19 nt, Artificial Sequence
  Description of Artificial Sequence: Synthetic oligonucleotide
  Sense strand starting at position 2377 of SEQ ID NO: 1564174
cuauaucuguugcuacuga

SEQ ID NO: 1860040 - RNA, 19 nt, Artificial Sequence
  Description of Artificial Sequence: Synthetic oligonucleotide
  Antisense strand to SEQ ID NO: 1860039
ucaguagcaacagauauag

SEQ ID NO: 1860041 - RNA, 19 nt, Artificial Sequence
  Description of Artificial Sequence: Synthetic oligonucleotide
  Sense strand starting at position 3775 of SEQ ID NO: 1564174
uagguauucucuugagaaa

SEQ ID NO: 1860042 - RNA, 19 nt, Artificial Sequence
  Description of Artificial Sequence: Synthetic oligonucleotide
  Antisense strand to SEQ ID NO: 1860041
uuucucaagagaauaccua

SEQ ID NO: 1860043 - RNA, 19 nt, Artificial Sequence
  Description of Artificial Sequence: Synthetic oligonucleotide
  Sense strand starting at position 3898 of SEQ ID NO: 1564174
cugguugcccaguaugcaa

SEQ ID NO: 1860044 - RNA, 19 nt, Artificial Sequence
  Description of Artificial Sequence: Synthetic oligonucleotide
  Antisense strand to SEQ ID NO: 1860043
uugcauacugggcaaccag

SEQ ID NO: 1860045 - RNA, 19 nt, Artificial Sequence
  Description of Artificial Sequence: Synthetic oligonucleotide
  Sense strand starting at position 3910 of SEQ ID NO: 1564174
uaugcaauggugcgaucuu

SEQ ID NO: 1860046 - RNA, 19 nt, Artificial Sequence
  Description of Artificial Sequence: Synthetic oligonucleotide
  Antisense strand to SEQ ID NO: 1860045
aagaucgcaccauugcaua

SEQ ID NO: 1860047 - RNA, 19 nt, Artificial Sequence
  Description of Artificial Sequence: Synthetic oligonucleotide
  Sense strand starting at position 3947 of SEQ ID NO: 1564174
ccugcugaguucuagcgaa

SEQ ID NO: 1860048 - RNA, 19 nt, Artificial Sequence
  Description of Artificial Sequence: Synthetic oligonucleotide
  Antisense strand to SEQ ID NO: 1860047
uucgcuagaacucagcagg

SEQ ID NO: 1860049 - RNA, 19 nt, Artificial Sequence
  Description of Artificial Sequence: Synthetic oligonucleotide
  Sense strand starting at position 3951 of SEQ ID NO: 1564174
cugaguucuagcgaaucuc

SEQ ID NO: 1860050 - RNA, 19 nt, Artificial Sequence
  Description of Artificial Sequence: Synthetic oligonucleotide
  Antisense strand to SEQ ID NO: 1860049
gagauucgcuagaacucag

SEQ ID NO: 1860051 - RNA, 19 nt, Artificial Sequence
  Description of Artificial Sequence: Synthetic oligonucleotide
  Sense strand starting at position 21 of SEQ ID NO: 1564175
ggaugaaacuacuaauaca

SEQ ID NO: 1860052 - RNA, 19 nt, Artificial Sequence
  Description of Artificial Sequence: Synthetic oligonucleotide
  Antisense strand to SEQ ID NO: 1860051
uguauuaguaguuucaucc

SEQ ID NO: 1860053 - RNA, 19 nt, Artificial Sequence
  Description of Artificial Sequence: Synthetic oligonucleotide
  Sense strand starting at position 81 of SEQ ID NO: 1564175
acgauaacccauuacaguu

SEQ ID NO: 1860054 - RNA, 19 nt, Artificial Sequence
  Description of Artificial Sequence: Synthetic oligonucleotide
  Antisense strand to SEQ ID NO: 1860053
aacuguaauggguuaucgu

SEQ ID NO: 1860055 - RNA, 19 nt, Artificial Sequence
  Description of Artificial Sequence: Synthetic oligonucleotide
  Sense strand starting at position 138 of SEQ ID NO: 1564175
gcggaaacuaaaugucgaa

SEQ ID NO: 1860056 - RNA, 19 nt, Artificial Sequence
  Description of Artificial Sequence: Synthetic oligonucleotide
  Antisense strand to SEQ ID NO: 1860055
uucgacauuuaguuuccgc

SEQ ID NO: 1860057 - RNA, 19 nt, Artificial Sequence
  Description of Artificial Sequence: Synthetic oligonucleotide
  Sense strand starting at position 141 of SEQ ID NO: 1564175
gaaacuaaaugucgaaagu

SEQ ID NO: 1860058 - RNA, 19 nt, Artificial Sequence
  Description of Artificial Sequence: Synthetic oligonucleotide
  Antisense strand to SEQ ID NO: 1860057
acuuucgacauuuaguuuc

SEQ ID NO: 1860059 - RNA, 19 nt, Artificial Sequence
  Description of Artificial Sequence: Synthetic oligonucleotide
  Sense strand starting at position 471 of SEQ ID NO: 1564175
cucaguucgugccuugaga

SEQ ID NO: 1860060 - RNA, 19 nt, Artificial Sequence
  Description of Artificial Sequence: Synthetic oligonucleotide
  Antisense strand to SEQ ID NO: 1860059
ucucaaggcacgaacugag

SEQ ID NO: 1860061 - RNA, 19 nt, Artificial Sequence
  Description of Artificial Sequence: Synthetic oligonucleotide
  Sense strand starting at position 473 of SEQ ID NO: 1564175
caguucgugccuugagaaa

SEQ ID NO: 1860062 - RNA, 19 nt, Artificial Sequence
  Description of Artificial Sequence: Synthetic oligonucleotide
  Antisense strand to SEQ ID NO: 1860061
uuucucaaggcacgaacug

SEQ ID NO: 1860063 - RNA, 19 nt, Artificial Sequence
  Description of Artificial Sequence: Synthetic oligonucleotide
  Sense strand starting at position 1389 of SEQ ID NO: 1564175
gcuggaaguuccuuggaag

SEQ ID NO: 1860064 - RNA, 19 nt, Artificial Sequence
  Description of Artificial Sequence: Synthetic oligonucleotide
  Antisense strand to SEQ ID NO: 1860063
cuuccaaggaacuuccagc

SEQ ID NO: 1860065 - RNA, 19 nt, Artificial Sequence
  Description of Artificial Sequence: Synthetic oligonucleotide
  Sense strand starting at position 1392 of SEQ ID NO: 1564175
ggaaguuccuuggaagugu

SEQ ID NO: 1860066 - RNA, 19 nt, Artificial Sequence
  Description of Artificial Sequence: Synthetic oligonucleotide
  Antisense strand to SEQ ID NO: 1860065
acacuuccaaggaacuucc

SEQ ID NO: 1860067 - RNA, 19 nt, Artificial Sequence
  Description of Artificial Sequence: Synthetic oligonucleotide
  Sense strand starting at position 2264 of SEQ ID NO: 1564175
cugacuuacucauucguuu

SEQ ID NO: 1860068 - RNA, 19 nt, Artificial Sequence
  Description of Artificial Sequence: Synthetic oligonucleotide
  Antisense strand to SEQ ID NO: 1860067
aaacgaaugaguaagucag

SEQ ID NO: 1860069 - RNA, 19 nt, Artificial Sequence
  Description of Artificial Sequence: Synthetic oligonucleotide
  Sense strand starting at position 2316 of SEQ ID NO: 1564175
cgguucuucugucuuuagu

SEQ ID NO: 1860070 - RNA, 19 nt, Artificial Sequence
  Description of Artificial Sequence: Synthetic oligonucleotide
  Antisense strand to SEQ ID NO: 1860069
acuaaagacagaagaaccg

SEQ ID NO: 1860071 - RNA, 19 nt, Artificial Sequence
  Description of Artificial Sequence: Synthetic oligonucleotide
  Sense strand starting at position 2609 of SEQ ID NO: 1564175
gauccuaaaugguuuaaug

SEQ ID NO: 1860072 - RNA, 19 nt, Artificial Sequence
  Description of Artificial Sequence: Synthetic oligonucleotide
  Antisense strand to SEQ ID NO: 1860071
cauuaaaccauuuaggauc

SEQ ID NO: 1860073 - RNA, 19 nt, Artificial Sequence
  Description of Artificial Sequence: Synthetic oligonucleotide
  Sense strand starting at position 2627 of SEQ ID NO: 1564175
ggagcuacuugggcuagau

SEQ ID NO: 1860074 - RNA, 19 nt, Artificial Sequence
  Description of Artificial Sequence: Synthetic oligonucleotide
  Antisense strand to SEQ ID NO: 1860073
aucuagcccaaguagcucc

SEQ ID NO: 1860075 - RNA, 19 nt, Artificial Sequence
  Description of Artificial Sequence: Synthetic oligonucleotide
  Sense strand starting at position 2703 of SEQ ID NO: 1564175
gcgagcugauucucuacca

SEQ ID NO: 1860076 - RNA, 19 nt, Artificial Sequence
  Description of Artificial Sequence: Synthetic oligonucleotide
  Antisense strand to SEQ ID NO: 1860075
ugguagagaaucagcucgc

SEQ ID NO: 1860077 - RNA, 19 nt, Artificial Sequence
  Description of Artificial Sequence: Synthetic oligonucleotide
  Sense strand starting at position 2708 of SEQ ID NO: 1564175
cugauucucuaccaguaag

SEQ ID NO: 1860078 - RNA, 19 nt, Artificial Sequence
  Description of Artificial Sequence: Synthetic oligonucleotide
  Antisense strand to SEQ ID NO: 1860077
cuuacugguagagaaucag

SEQ ID NO: 1860079 - RNA, 19 nt, Artificial Sequence
  Description of Artificial Sequence: Synthetic oligonucleotide
  Sense strand starting at position 2774 of SEQ ID NO: 1564175
uggucccgucuccgagaaa

SEQ ID NO: 1860080 - RNA, 19 nt, Artificial Sequence
  Description of Artificial Sequence: Synthetic oligonucleotide
  Antisense strand to SEQ ID NO: 1860079
uuucucggagacgggacca

SEQ ID NO: 1860081 - RNA, 19 nt, Artificial Sequence
  Description of Artificial Sequence: Synthetic oligonucleotide
  Sense strand starting at position 2799 of SEQ ID NO: 1564175
ucuguaucuccagguucua

SEQ ID NO: 1860082 - RNA, 19 nt, Artificial Sequence
  Description of Artificial Sequence: Synthetic oligonucleotide
  Antisense strand to SEQ ID NO: 1860081
uagaaccuggagauacaga

SEQ ID NO: 1860083 - RNA, 19 nt, Artificial Sequence
  Description of Artificial Sequence: Synthetic oligonucleotide
  Sense strand starting at position 2860 of SEQ ID NO: 1564175
gaccaauuuguucgccacu

SEQ ID NO: 1860084 - RNA, 19 nt, Artificial Sequence
  Description of Artificial Sequence: Synthetic oligonucleotide
  Antisense strand to SEQ ID NO: 1860083
aguggcgaacaaauugguc

SEQ ID NO: 1860085 - RNA, 19 nt, Artificial Sequence
  Description of Artificial Sequence: Synthetic oligonucleotide
  Sense strand starting at position 2862 of SEQ ID NO: 1564175
ccaauuuguucgccacucu

SEQ ID NO: 1860086 - RNA, 19 nt, Artificial Sequence
  Description of Artificial Sequence: Synthetic oligonucleotide
  Antisense strand to SEQ ID NO: 1860085
agaguggcgaacaaauugg

SEQ ID NO: 1860087 - RNA, 19 nt, Artificial Sequence
  Description of Artificial Sequence: Synthetic oligonucleotide
  Sense strand starting at position 3004 of SEQ ID NO: 1564175
acgcgaaaugguugggaau

SEQ ID NO: 1860088 - RNA, 19 nt, Artificial Sequence
  Description of Artificial Sequence: Synthetic oligonucleotide
  Antisense strand to SEQ ID NO: 1860087
auucccaaccauuucgcgu

SEQ ID NO: 1860089 - RNA, 19 nt, Artificial Sequence
  Description of Artificial Sequence: Synthetic oligonucleotide
  Sense strand starting at position 3005 of SEQ ID NO: 1564175
cgcgaaaugguugggaauu

SEQ ID NO: 1860090 - RNA, 19 nt, Artificial Sequence
  Description of Artificial Sequence: Synthetic oligonucleotide
  Antisense strand to SEQ ID NO: 1860089
aauucccaaccauuucgcg

SEQ ID NO: 1860091 - RNA, 19 nt, Artificial Sequence
  Description of Artificial Sequence: Synthetic oligonucleotide
  Sense strand starting at position 3006 of SEQ ID NO: 1564175
gcgaaaugguugggaauuu

SEQ ID NO: 1860092 - RNA, 19 nt, Artificial Sequence
  Description of Artificial Sequence: Synthetic oligonucleotide
  Antisense strand to SEQ ID NO: 1860091
aaauucccaaccauuucgc

SEQ ID NO: 1860093 - RNA, 19 nt, Artificial Sequence
  Description of Artificial Sequence: Synthetic oligonucleotide
  Sense strand starting at position 3007 of SEQ ID NO: 1564175
cgaaaugguugggaauuua

SEQ ID NO: 1860094 - RNA, 19 nt, Artificial Sequence
  Description of Artificial Sequence: Synthetic oligonucleotide
  Antisense strand to SEQ ID NO: 1860093
uaaauucccaaccauuucg

SEQ ID NO: 1860095 - RNA, 19 nt, Artificial Sequence
  Description of Artificial Sequence: Synthetic oligonucleotide
  Sense strand starting at position 3062 of SEQ ID NO: 1564175
agauguuugaagugcgaaa

SEQ ID NO: 1860096 - RNA, 19 nt, Artificial Sequence
  Description of Artificial Sequence: Synthetic oligonucleotide
  Antisense strand to SEQ ID NO: 1860095
uuucgcacuucaaacaucu

SEQ ID NO: 1860097 - RNA, 19 nt, Artificial Sequence
  Description of Artificial Sequence: Synthetic oligonucleotide
  Sense strand starting at position 3144 of SEQ ID NO: 1564175
uuucgaauccaguguauug

SEQ ID NO: 1860098 - RNA, 19 nt, Artificial Sequence
  Description of Artificial Sequence: Synthetic oligonucleotide
  Antisense strand to SEQ ID NO: 1860097
caauacacuggauucgaaa

SEQ ID NO: 1860099 - RNA, 19 nt, Artificial Sequence
  Description of Artificial Sequence: Synthetic oligonucleotide
  Sense strand starting at position 3285 of SEQ ID NO: 1564175
guuauagaaguucguagau

SEQ ID NO: 1860100 - RNA, 19 nt, Artificial Sequence
  Description of Artificial Sequence: Synthetic oligonucleotide
  Antisense strand to SEQ ID NO: 1860099
aucuacgaacuucuauaac

SEQ ID NO: 1860101 - RNA, 19 nt, Artificial Sequence
  Description of Artificial Sequence: Synthetic oligonucleotide
  Sense strand starting at position 3287 of SEQ ID NO: 1564175
uauagaaguucguagauuc

SEQ ID NO: 1860102 - RNA, 19 nt, Artificial Sequence
  Description of Artificial Sequence: Synthetic oligonucleotide
  Antisense strand to SEQ ID NO: 1860101
gaaucuacgaacuucuaua

SEQ ID NO: 1860103 - RNA, 19 nt, Artificial Sequence
  Description of Artificial Sequence: Synthetic oligonucleotide
  Sense strand starting at position 3310 of SEQ ID NO: 1564175
aauaguguuugcuuaagaa

SEQ ID NO: 1860104 - RNA, 19 nt, Artificial Sequence
  Description of Artificial Sequence: Synthetic oligonucleotide
  Antisense strand to SEQ ID NO: 1860103
uucuuaagcaaacacuauu

SEQ ID NO: 1860105 - RNA, 19 nt, Artificial Sequence
  Description of Artificial Sequence: Synthetic oligonucleotide
  Sense strand starting at position 3322 of SEQ ID NO: 1564175
uuaagaagucuucguuucu

SEQ ID NO: 1860106 - RNA, 19 nt, Artificial Sequence
  Description of Artificial Sequence: Synthetic oligonucleotide
  Antisense strand to SEQ ID NO: 1860105
agaaacgaagacuucuuaa

SEQ ID NO: 1860107 - RNA, 19 nt, Artificial Sequence
  Description of Artificial Sequence: Synthetic oligonucleotide
  Sense strand starting at position 3323 of SEQ ID NO: 1564175
uaagaagucuucguuucug

SEQ ID NO: 1860108 - RNA, 19 nt, Artificial Sequence
  Description of Artificial Sequence: Synthetic oligonucleotide
  Antisense strand to SEQ ID NO: 1860107
cagaaacgaagacuucuua

SEQ ID NO: 1860109 - RNA, 19 nt, Artificial Sequence
  Description of Artificial Sequence: Synthetic oligonucleotide
  Sense strand starting at position 3331 of SEQ ID NO: 1564175
cuucguuucuguuccauuu

SEQ ID NO: 1860110 - RNA, 19 nt, Artificial Sequence
  Description of Artificial Sequence: Synthetic oligonucleotide
  Antisense strand to SEQ ID NO: 1860109
aaauggaacagaaacgaag

SEQ ID NO: 1860111 - RNA, 19 nt, Artificial Sequence
  Description of Artificial Sequence: Synthetic oligonucleotide
  Sense strand starting at position 3465 of SEQ ID NO: 1564175
cguguaaaucaugaagcuu

SEQ ID NO: 1860112 - RNA, 19 nt, Artificial Sequence
  Description of Artificial Sequence: Synthetic oligonucleotide
  Antisense strand to SEQ ID NO: 1860111
aagcuucaugauuuacacg

SEQ ID NO: 1860113 - RNA, 19 nt, Artificial Sequence
  Description of Artificial Sequence: Synthetic oligonucleotide
  Sense strand starting at position 3490 of SEQ ID NO: 1564175
cgauaucacuucugaaaca

SEQ ID NO: 1860114 - RNA, 19 nt, Artificial Sequence
  Description of Artificial Sequence: Synthetic oligonucleotide
  Antisense strand to SEQ ID NO: 1860113
uguuucagaagugauaucg

SEQ ID NO: 1860115 - RNA, 19 nt, Artificial Sequence
  Description of Artificial Sequence: Synthetic oligonucleotide
  Sense strand starting at position 3558 of SEQ ID NO: 1564175
ccauaucucuuguuaguuu

SEQ ID NO: 1860116 - RNA, 19 nt, Artificial Sequence
  Description of Artificial Sequence: Synthetic oligonucleotide
  Antisense strand to SEQ ID NO: 1860115
aaacuaacaagagauaugg

SEQ ID NO: 1860117 - RNA, 19 nt, Artificial Sequence
  Description of Artificial Sequence: Synthetic oligonucleotide
  Sense strand starting at position 3567 of SEQ ID NO: 1564175
uuguuaguuucucucccau

SEQ ID NO: 1860118 - RNA, 19 nt, Artificial Sequence
  Description of Artificial Sequence: Synthetic oligonucleotide
  Antisense strand to SEQ ID NO: 1860117
augggagagaaacuaacaa

SEQ ID NO: 1860119 - RNA, 19 nt, Artificial Sequence
  Description of Artificial Sequence: Synthetic oligonucleotide
  Sense strand starting at position 3774 of SEQ ID NO: 1564175
uagaccaucuuugguagaa

SEQ ID NO: 1860120 - RNA, 19 nt, Artificial Sequence
  Description of Artificial Sequence: Synthetic oligonucleotide
  Antisense strand to SEQ ID NO: 1860119
uucuaccaaagauggucua

SEQ ID NO: 1860121 - RNA, 19 nt, Artificial Sequence
  Description of Artificial Sequence: Synthetic oligonucleotide
  Sense strand starting at position 3775 of SEQ ID NO: 1564175
agaccaucuuugguagaau

SEQ ID NO: 1860122 - RNA, 19 nt, Artificial Sequence
  Description of Artificial Sequence: Synthetic oligonucleotide
  Antisense strand to SEQ ID NO: 1860121
auucuaccaaagauggucu

SEQ ID NO: 1860123 - RNA, 19 nt, Artificial Sequence
  Description of Artificial Sequence: Synthetic oligonucleotide
  Sense strand starting at position 3776 of SEQ ID NO: 1564175
gaccaucuuugguagaaug

SEQ ID NO: 1860124 - RNA, 19 nt, Artificial Sequence
  Description of Artificial Sequence: Synthetic oligonucleotide
  Antisense strand to SEQ ID NO: 1860123
cauucuaccaaagaugguc

SEQ ID NO: 1860125 - RNA, 19 nt, Artificial Sequence
  Description of Artificial Sequence: Synthetic oligonucleotide
  Sense strand starting at position 3778 of SEQ ID NO: 1564175
ccaucuuugguagaaugcu

SEQ ID NO: 1860126 - RNA, 19 nt, Artificial Sequence
  Description of Artificial Sequence: Synthetic oligonucleotide
  Antisense strand to SEQ ID NO: 1860125
agcauucuaccaaagaugg

SEQ ID NO: 1860127 - RNA, 19 nt, Artificial Sequence
  Description of Artificial Sequence: Synthetic oligonucleotide
  Sense strand starting at position 3786 of SEQ ID NO: 1564175
gguagaaugcuauacaguu

SEQ ID NO: 1860128 - RNA, 19 nt, Artificial Sequence
  Description of Artificial Sequence: Synthetic oligonucleotide
  Antisense strand to SEQ ID NO: 1860127
aacuguauagcauucuacc

SEQ ID NO: 1860129 - RNA, 19 nt, Artificial Sequence
  Description of Artificial Sequence: Synthetic oligonucleotide
  Sense strand starting at position 3816 of SEQ ID NO: 1564175
caaguuacagaaugaugca

SEQ ID NO: 1860130 - RNA, 19 nt, Artificial Sequence
  Description of Artificial Sequence: Synthetic oligonucleotide
  Antisense strand to SEQ ID NO: 1860129
ugcaucauucuguaacuug

SEQ ID NO: 1860131 - RNA, 19 nt, Artificial Sequence
  Description of Artificial Sequence: Synthetic oligonucleotide
  Sense strand starting at position 92 of SEQ ID NO: 1564176
ucgacuauuuaacauaaug

SEQ ID NO: 1860132 - RNA, 19 nt, Artificial Sequence
  Description of Artificial Sequence: Synthetic oligonucleotide
  Antisense strand to SEQ ID NO: 1860131
cauuauguuaaauagucga

SEQ ID NO: 1860133 - RNA, 19 nt, Artificial Sequence
  Description of Artificial Sequence: Synthetic oligonucleotide
  Sense strand starting at position 164 of SEQ ID NO: 1564176
uuaaacugguccuucugau

SEQ ID NO: 1860134 - RNA, 19 nt, Artificial Sequence
  Description of Artificial Sequence: Synthetic oligonucleotide
  Antisense strand to SEQ ID NO: 1860133
aucagaaggaccaguuuaa

SEQ ID NO: 1860135 - RNA, 19 nt, Artificial Sequence
  Description of Artificial Sequence: Synthetic oligonucleotide
  Sense strand starting at position 170 of SEQ ID NO: 1564176
ugguccuucugaucccuaa

SEQ ID NO: 1860136 - RNA, 19 nt, Artificial Sequence
  Description of Artificial Sequence: Synthetic oligonucleotide
  Antisense strand to SEQ ID NO: 1860135
uuagggaucagaaggacca

SEQ ID NO: 1860137 - RNA, 19 nt, Artificial Sequence
  Description of Artificial Sequence: Synthetic oligonucleotide
  Sense strand starting at position 683 of SEQ ID NO: 1564176
gaugauuccucuuucgaca

SEQ ID NO: 1860138 - RNA, 19 nt, Artificial Sequence
  Description of Artificial Sequence: Synthetic oligonucleotide
  Antisense strand to SEQ ID NO: 1860137
ugucgaaagaggaaucauc

SEQ ID NO: 1860139 - RNA, 19 nt, Artificial Sequence
  Description of Artificial Sequence: Synthetic oligonucleotide
  Sense strand starting at position 685 of SEQ ID NO: 1564176
ugauuccucuuucgacacu

SEQ ID NO: 1860140 - RNA, 19 nt, Artificial Sequence
  Description of Artificial Sequence: Synthetic oligonucleotide
  Antisense strand to SEQ ID NO: 1860139
agugucgaaagaggaauca

SEQ ID NO: 1860141 - RNA, 19 nt, Artificial Sequence
  Description of Artificial Sequence: Synthetic oligonucleotide
  Sense strand starting at position 725 of SEQ ID NO: 1564176
aaagaagcuucgugcuuaa

SEQ ID NO: 1860142 - RNA, 19 nt, Artificial Sequence
  Description of Artificial Sequence: Synthetic oligonucleotide
  Antisense strand to SEQ ID NO: 1860141
uuaagcacgaagcuucuuu

SEQ ID NO: 1860143 - RNA, 19 nt, Artificial Sequence
  Description of Artificial Sequence: Synthetic oligonucleotide
  Sense strand starting at position 728 of SEQ ID NO: 1564176
gaagcuucgugcuuaagca

SEQ ID NO: 1860144 - RNA, 19 nt, Artificial Sequence
  Description of Artificial Sequence: Synthetic oligonucleotide
  Antisense strand to SEQ ID NO: 1860143
ugcuuaagcacgaagcuuc

SEQ ID NO: 1860145 - RNA, 19 nt, Artificial Sequence
  Description of Artificial Sequence: Synthetic oligonucleotide
  Sense strand starting at position 729 of SEQ ID NO: 1564176
aagcuucgugcuuaagcaa

SEQ ID NO: 1860146 - RNA, 19 nt, Artificial Sequence
  Description of Artificial Sequence: Synthetic oligonucleotide
  Antisense strand to SEQ ID NO: 1860145
uugcuuaagcacgaagcuu

SEQ ID NO: 1860147 - RNA, 19 nt, Artificial Sequence
  Description of Artificial Sequence: Synthetic oligonucleotide
  Sense strand starting at position 748 of SEQ ID NO: 1564176
gucccaucauggugguuua

SEQ ID NO: 1860148 - RNA, 19 nt, Artificial Sequence
  Description of Artificial Sequence: Synthetic oligonucleotide
  Antisense strand to SEQ ID NO: 1860147
uaaaccaccaugaugggac

SEQ ID NO: 1860149 - RNA, 19 nt, Artificial Sequence
  Description of Artificial Sequence: Synthetic oligonucleotide
  Sense strand starting at position 749 of SEQ ID NO: 1564176
ucccaucauggugguuuaa

SEQ ID NO: 1860150 - RNA, 19 nt, Artificial Sequence
  Description of Artificial Sequence: Synthetic oligonucleotide
  Antisense strand to SEQ ID NO: 1860149
uuaaaccaccaugauggga

SEQ ID NO: 1860151 - RNA, 19 nt, Artificial Sequence
  Description of Artificial Sequence: Synthetic oligonucleotide
  Sense strand starting at position 751 of SEQ ID NO: 1564176
ccaucauggugguuuaaga

SEQ ID NO: 1860152 - RNA, 19 nt, Artificial Sequence
  Description of Artificial Sequence: Synthetic oligonucleotide
  Antisense strand to SEQ ID NO: 1860151
ucuuaaaccaccaugaugg

SEQ ID NO: 1860153 - RNA, 19 nt, Artificial Sequence
  Description of Artificial Sequence: Synthetic oligonucleotide
  Sense strand starting at position 762 of SEQ ID NO: 1564176
guuuaagagucacuaaauu

SEQ ID NO: 1860154 - RNA, 19 nt, Artificial Sequence
  Description of Artificial Sequence: Synthetic oligonucleotide
  Antisense strand to SEQ ID NO: 1860153
aauuuagugacucuuaaac

SEQ ID NO: 1860155 - RNA, 19 nt, Artificial Sequence
  Description of Artificial Sequence: Synthetic oligonucleotide
  Sense strand starting at position 782 of SEQ ID NO: 1564176
agcugauaaugaguccaau

SEQ ID NO: 1860156 - RNA, 19 nt, Artificial Sequence
  Description of Artificial Sequence: Synthetic oligonucleotide
  Antisense strand to SEQ ID NO: 1860155
auuggacucauuaucagcu

SEQ ID NO: 1860157 - RNA, 19 nt, Artificial Sequence
  Description of Artificial Sequence: Synthetic oligonucleotide
  Sense strand starting at position 818 of SEQ ID NO: 1564176
ggguguggcugcugcgaaa

SEQ ID NO: 1860158 - RNA, 19 nt, Artificial Sequence
  Description of Artificial Sequence: Synthetic oligonucleotide
  Antisense strand to SEQ ID NO: 1860157
uuucgcagcagccacaccc

SEQ ID NO: 1860159 - RNA, 19 nt, Artificial Sequence
  Description of Artificial Sequence: Synthetic oligonucleotide
  Sense strand starting at position 819 of SEQ ID NO: 1564176
gguguggcugcugcgaaau

SEQ ID NO: 1860160 - RNA, 19 nt, Artificial Sequence
  Description of Artificial Sequence: Synthetic oligonucleotide
  Antisense strand to SEQ ID NO: 1860159
auuucgcagcagccacacc

SEQ ID NO: 1860161 - RNA, 19 nt, Artificial Sequence
  Description of Artificial Sequence: Synthetic oligonucleotide
  Sense strand starting at position 839 of SEQ ID NO: 1564176
cggcgguccgugggagaaa

SEQ ID NO: 1860162 - RNA, 19 nt, Artificial Sequence
  Description of Artificial Sequence: Synthetic oligonucleotide
  Antisense strand to SEQ ID NO: 1860161
uuucucccacggaccgccg

SEQ ID NO: 1860163 - RNA, 19 nt, Artificial Sequence
  Description of Artificial Sequence: Synthetic oligonucleotide
  Sense strand starting at position 897 of SEQ ID NO: 1564176
gggcuuuauggugggagaa

SEQ ID NO: 1860164 - RNA, 19 nt, Artificial Sequence
  Description of Artificial Sequence: Synthetic oligonucleotide
  Antisense strand to SEQ ID NO: 1860163
uucucccaccauaaagccc

SEQ ID NO: 1860165 - RNA, 19 nt, Artificial Sequence
  Description of Artificial Sequence: Synthetic oligonucleotide
  Sense strand starting at position 898 of SEQ ID NO: 1564176
ggcuuuauggugggagaag

SEQ ID NO: 1860166 - RNA, 19 nt, Artificial Sequence
  Description of Artificial Sequence: Synthetic oligonucleotide
  Antisense strand to SEQ ID NO: 1860165
cuucucccaccauaaagcc

SEQ ID NO: 1860167 - RNA, 19 nt, Artificial Sequence
  Description of Artificial Sequence: Synthetic oligonucleotide
  Sense strand starting at position 961 of SEQ ID NO: 1564176
gcgccucguuuacuuuaaa

SEQ ID NO: 1860168 - RNA, 19 nt, Artificial Sequence
  Description of Artificial Sequence: Synthetic oligonucleotide
  Antisense strand to SEQ ID NO: 1860167
uuuaaaguaaacgaggcgc

SEQ ID NO: 1860169 - RNA, 19 nt, Artificial Sequence
  Description of Artificial Sequence: Synthetic oligonucleotide
  Sense strand starting at position 962 of SEQ ID NO: 1564176
cgccucguuuacuuuaaau

SEQ ID NO: 1860170 - RNA, 19 nt, Artificial Sequence
  Description of Artificial Sequence: Synthetic oligonucleotide
  Antisense strand to SEQ ID NO: 1860169
auuuaaaguaaacgaggcg

SEQ ID NO: 1860171 - RNA, 19 nt, Artificial Sequence
  Description of Artificial Sequence: Synthetic oligonucleotide
  Sense strand starting at position 1167 of SEQ ID NO: 1564176
ggaugaaacuacuaauaca

SEQ ID NO: 1860172 - RNA, 19 nt, Artificial Sequence
  Description of Artificial Sequence: Synthetic oligonucleotide
  Antisense strand to SEQ ID NO: 1860171
uguauuaguaguuucaucc

SEQ ID NO: 1860173 - RNA, 19 nt, Artificial Sequence
  Description of Artificial Sequence: Synthetic oligonucleotide
  Sense strand starting at position 1227 of SEQ ID NO: 1564176
acgauaacccauuacaguu

SEQ ID NO: 1860174 - RNA, 19 nt, Artificial Sequence
  Description of Artificial Sequence: Synthetic oligonucleotide
  Antisense strand to SEQ ID NO: 1860173
aacuguaauggguuaucgu

SEQ ID NO: 1860175 - RNA, 19 nt, Artificial Sequence
  Description of Artificial Sequence: Synthetic oligonucleotide
  Sense strand starting at position 1284 of SEQ ID NO: 1564176
gcggaaacuaaaugucgaa

SEQ ID NO: 1860176 - RNA, 19 nt, Artificial Sequence
  Description of Artificial Sequence: Synthetic oligonucleotide
  Antisense strand to SEQ ID NO: 1860175
uucgacauuuaguuuccgc

SEQ ID NO: 1860177 - RNA, 19 nt, Artificial Sequence
  Description of Artificial Sequence: Synthetic oligonucleotide
  Sense strand starting at position 1287 of SEQ ID NO: 1564176
gaaacuaaaugucgaaagu

SEQ ID NO: 1860178 - RNA, 19 nt, Artificial Sequence
  Description of Artificial Sequence: Synthetic oligonucleotide
  Antisense strand to SEQ ID NO: 1860177
acuuucgacauuuaguuuc

SEQ ID NO: 1860179 - RNA, 19 nt, Artificial Sequence
  Description of Artificial Sequence: Synthetic oligonucleotide
  Sense strand starting at position 1617 of SEQ ID NO: 1564176
cucaguucgugccuugaga

SEQ ID NO: 1860180 - RNA, 19 nt, Artificial Sequence
  Description of Artificial Sequence: Synthetic oligonucleotide
  Antisense strand to SEQ ID NO: 1860179
ucucaaggcacgaacugag

SEQ ID NO: 1860181 - RNA, 19 nt, Artificial Sequence
  Description of Artificial Sequence: Synthetic oligonucleotide
  Sense strand starting at position 1619 of SEQ ID NO: 1564176
caguucgugccuugagaaa

SEQ ID NO: 1860182 - RNA, 19 nt, Artificial Sequence
  Description of Artificial Sequence: Synthetic oligonucleotide
  Antisense strand to SEQ ID NO: 1860181
uuucucaaggcacgaacug

SEQ ID NO: 1860183 - RNA, 19 nt, Artificial Sequence
  Description of Artificial Sequence: Synthetic oligonucleotide
  Sense strand starting at position 2535 of SEQ ID NO: 1564176
gcuggaaguuccuuggaag

SEQ ID NO: 1860184 - RNA, 19 nt, Artificial Sequence
  Description of Artificial Sequence: Synthetic oligonucleotide
  Antisense strand to SEQ ID NO: 1860183
cuuccaaggaacuuccagc

SEQ ID NO: 1860185 - RNA, 19 nt, Artificial Sequence
  Description of Artificial Sequence: Synthetic oligonucleotide
  Sense strand starting at position 2538 of SEQ ID NO: 1564176
ggaaguuccuuggaagugu

SEQ ID NO: 1860186 - RNA, 19 nt, Artificial Sequence
  Description of Artificial Sequence: Synthetic oligonucleotide
  Antisense strand to SEQ ID NO: 1860185
acacuuccaaggaacuucc

SEQ ID NO: 1860187 - RNA, 19 nt, Artificial Sequence
  Description of Artificial Sequence: Synthetic oligonucleotide
  Sense strand starting at position 3410 of SEQ ID NO: 1564176
cugacuuacucauucguuu

SEQ ID NO: 1860188 - RNA, 19 nt, Artificial Sequence
  Description of Artificial Sequence: Synthetic oligonucleotide
  Antisense strand to SEQ ID NO: 1860187
aaacgaaugaguaagucag

SEQ ID NO: 1860189 - RNA, 19 nt, Artificial Sequence
  Description of Artificial Sequence: Synthetic oligonucleotide
  Sense strand starting at position 3460 of SEQ ID NO: 1564176
cgcgguucuucugucuuua

SEQ ID NO: 1860190 - RNA, 19 nt, Artificial Sequence
  Description of Artificial Sequence: Synthetic oligonucleotide
  Antisense strand to SEQ ID NO: 1860189
uaaagacagaagaaccgcg

SEQ ID NO: 1860191 - RNA, 19 nt, Artificial Sequence
  Description of Artificial Sequence: Synthetic oligonucleotide
  Sense strand starting at position 3462 of SEQ ID NO: 1564176
cgguucuucugucuuuagu

SEQ ID NO: 1860192 - RNA, 19 nt, Artificial Sequence
  Description of Artificial Sequence: Synthetic oligonucleotide
  Antisense strand to SEQ ID NO: 1860191
acuaaagacagaagaaccg

SEQ ID NO: 1860193 - RNA, 19 nt, Artificial Sequence
  Description of Artificial Sequence: Synthetic oligonucleotide
  Sense strand starting at position 3755 of SEQ ID NO: 1564176
gauccuaaaugguuuaaug

SEQ ID NO: 1860194 - RNA, 19 nt, Artificial Sequence
  Description of Artificial Sequence: Synthetic oligonucleotide
  Antisense strand to SEQ ID NO: 1860193
cauuaaaccauuuaggauc

SEQ ID NO: 1860195 - RNA, 19 nt, Artificial Sequence
  Description of Artificial Sequence: Synthetic oligonucleotide
  Sense strand starting at position 3773 of SEQ ID NO: 1564176
ggagcuacuugggcuagau

SEQ ID NO: 1860196 - RNA, 19 nt, Artificial Sequence
  Description of Artificial Sequence: Synthetic oligonucleotide
  Antisense strand to SEQ ID NO: 1860195
aucuagcccaaguagcucc

SEQ ID NO: 1860197 - RNA, 19 nt, Artificial Sequence
  Description of Artificial Sequence: Synthetic oligonucleotide
  Sense strand starting at position 3849 of SEQ ID NO: 1564176
gcgagcugauucucuacca

SEQ ID NO: 1860198 - RNA, 19 nt, Artificial Sequence
  Description of Artificial Sequence: Synthetic oligonucleotide
  Antisense strand to SEQ ID NO: 1860197
ugguagagaaucagcucgc

SEQ ID NO: 1860199 - RNA, 19 nt, Artificial Sequence
  Description of Artificial Sequence: Synthetic oligonucleotide
  Sense strand starting at position 3854 of SEQ ID NO: 1564176
cugauucucuaccaguaag

SEQ ID NO: 1860200 - RNA, 19 nt, Artificial Sequence
  Description of Artificial Sequence: Synthetic oligonucleotide
  Antisense strand to SEQ ID NO: 1860199
cuuacugguagagaaucag

SEQ ID NO: 1860201 - RNA, 19 nt, Artificial Sequence
  Description of Artificial Sequence: Synthetic oligonucleotide
  Sense strand starting at position 3920 of SEQ ID NO: 1564176
uggucccgucuccgagaaa

SEQ ID NO: 1860202 - RNA, 19 nt, Artificial Sequence
  Description of Artificial Sequence: Synthetic oligonucleotide
  Antisense strand to SEQ ID NO: 1860201
uuucucggagacgggacca

SEQ ID NO: 1860203 - RNA, 19 nt, Artificial Sequence
  Description of Artificial Sequence: Synthetic oligonucleotide
  Sense strand starting at position 3945 of SEQ ID NO: 1564176
ucuguaucuccagguucua

SEQ ID NO: 1860204 - RNA, 19 nt, Artificial Sequence
  Description of Artificial Sequence: Synthetic oligonucleotide
  Antisense strand to SEQ ID NO: 1860203
uagaaccuggagauacaga

SEQ ID NO: 1860205 - RNA, 19 nt, Artificial Sequence
  Description of Artificial Sequence: Synthetic oligonucleotide
  Sense strand starting at position 289 of SEQ ID NO: 1564177
gaugauuccucuuucgaca

SEQ ID NO: 1860206 - RNA, 19 nt, Artificial Sequence
  Description of Artificial Sequence: Synthetic oligonucleotide
  Antisense strand to SEQ ID NO: 1860205
ugucgaaagaggaaucauc

SEQ ID NO: 1860207 - RNA, 19 nt, Artificial Sequence
  Description of Artificial Sequence: Synthetic oligonucleotide
  Sense strand starting at position 291 of SEQ ID NO: 1564177
ugauuccucuuucgacacu

SEQ ID NO: 1860208 - RNA, 19 nt, Artificial Sequence
  Description of Artificial Sequence: Synthetic oligonucleotide
  Antisense strand to SEQ ID NO: 1860207
agugucgaaagaggaauca

SEQ ID NO: 1860209 - RNA, 19 nt, Artificial Sequence
  Description of Artificial Sequence: Synthetic oligonucleotide
  Sense strand starting at position 334 of SEQ ID NO: 1564177
gaagcuucgugcuuaagca

SEQ ID NO: 1860210 - RNA, 19 nt, Artificial Sequence
  Description of Artificial Sequence: Synthetic oligonucleotide
  Antisense strand to SEQ ID NO: 1860209
ugcuuaagcacgaagcuuc

SEQ ID NO: 1860211 - RNA, 19 nt, Artificial Sequence
  Description of Artificial Sequence: Synthetic oligonucleotide
  Sense strand starting at position 335 of SEQ ID NO: 1564177
aagcuucgugcuuaagcaa

SEQ ID NO: 1860212 - RNA, 19 nt, Artificial Sequence
  Description of Artificial Sequence: Synthetic oligonucleotide
  Antisense strand to SEQ ID NO: 1860211
uugcuuaagcacgaagcuu

SEQ ID NO: 1860213 - RNA, 19 nt, Artificial Sequence
  Description of Artificial Sequence: Synthetic oligonucleotide
  Sense strand starting at position 355 of SEQ ID NO: 1564177
ucccaucauggugguuuaa

SEQ ID NO: 1860214 - RNA, 19 nt, Artificial Sequence
  Description of Artificial Sequence: Synthetic oligonucleotide
  Antisense strand to SEQ ID NO: 1860213
uuaaaccaccaugauggga

SEQ ID NO: 1860215 - RNA, 19 nt, Artificial Sequence
  Description of Artificial Sequence: Synthetic oligonucleotide
  Sense strand starting at position 357 of SEQ ID NO: 1564177
ccaucauggugguuuaaga

SEQ ID NO: 1860216 - RNA, 19 nt, Artificial Sequence
  Description of Artificial Sequence: Synthetic oligonucleotide
  Antisense strand to SEQ ID NO: 1860215
ucuuaaaccaccaugaugg

SEQ ID NO: 1860217 - RNA, 19 nt, Artificial Sequence
  Description of Artificial Sequence: Synthetic oligonucleotide
  Sense strand starting at position 368 of SEQ ID NO: 1564177
guuuaagagucacuaaauu

SEQ ID NO: 1860218 - RNA, 19 nt, Artificial Sequence
  Description of Artificial Sequence: Synthetic oligonucleotide
  Antisense strand to SEQ ID NO: 1860217
aauuuagugacucuuaaac

SEQ ID NO: 1860219 - RNA, 19 nt, Artificial Sequence
  Description of Artificial Sequence: Synthetic oligonucleotide
  Sense strand starting at position 388 of SEQ ID NO: 1564177
agcugauaaugaguccaau

SEQ ID NO: 1860220 - RNA, 19 nt, Artificial Sequence
  Description of Artificial Sequence: Synthetic oligonucleotide
  Antisense strand to SEQ ID NO: 1860219
auuggacucauuaucagcu

SEQ ID NO: 1860221 - RNA, 19 nt, Artificial Sequence
  Description of Artificial Sequence: Synthetic oligonucleotide
  Sense strand starting at position 425 of SEQ ID NO: 1564177
gguguggcugcugcgaaau

SEQ ID NO: 1860222 - RNA, 19 nt, Artificial Sequence
  Description of Artificial Sequence: Synthetic oligonucleotide
  Antisense strand to SEQ ID NO: 1860221
auuucgcagcagccacacc

SEQ ID NO: 1860223 - RNA, 19 nt, Artificial Sequence
  Description of Artificial Sequence: Synthetic oligonucleotide
  Sense strand starting at position 445 of SEQ ID NO: 1564177
cggcgguccgugggagaaa

SEQ ID NO: 1860224 - RNA, 19 nt, Artificial Sequence
  Description of Artificial Sequence: Synthetic oligonucleotide
  Antisense strand to SEQ ID NO: 1860223
uuucucccacggaccgccg

SEQ ID NO: 1860225 - RNA, 19 nt, Artificial Sequence
  Description of Artificial Sequence: Synthetic oligonucleotide
  Sense strand starting at position 503 of SEQ ID NO: 1564177
gggcuuuauggugggagaa

SEQ ID NO: 1860226 - RNA, 19 nt, Artificial Sequence
  Description of Artificial Sequence: Synthetic oligonucleotide
  Antisense strand to SEQ ID NO: 1860225
uucucccaccauaaagccc

SEQ ID NO: 1860227 - RNA, 19 nt, Artificial Sequence
  Description of Artificial Sequence: Synthetic oligonucleotide
  Sense strand starting at position 504 of SEQ ID NO: 1564177
ggcuuuauggugggagaag

SEQ ID NO: 1860228 - RNA, 19 nt, Artificial Sequence
  Description of Artificial Sequence: Synthetic oligonucleotide
  Antisense strand to SEQ ID NO: 1860227
cuucucccaccauaaagcc

SEQ ID NO: 1860229 - RNA, 19 nt, Artificial Sequence
  Description of Artificial Sequence: Synthetic oligonucleotide
  Sense strand starting at position 567 of SEQ ID NO: 1564177
gcgccucguuuacuuuaaa

SEQ ID NO: 1860230 - RNA, 19 nt, Artificial Sequence
  Description of Artificial Sequence: Synthetic oligonucleotide
  Antisense strand to SEQ ID NO: 1860229
uuuaaaguaaacgaggcgc

SEQ ID NO: 1860231 - RNA, 19 nt, Artificial Sequence
  Description of Artificial Sequence: Synthetic oligonucleotide
  Sense strand starting at position 568 of SEQ ID NO: 1564177
cgccucguuuacuuuaaau

SEQ ID NO: 1860232 - RNA, 19 nt, Artificial Sequence
  Description of Artificial Sequence: Synthetic oligonucleotide
  Antisense strand to SEQ ID NO: 1860231
auuuaaaguaaacgaggcg

SEQ ID NO: 1860233 - RNA, 19 nt, Artificial Sequence
  Description of Artificial Sequence: Synthetic oligonucleotide
  Sense strand starting at position 773 of SEQ ID NO: 1564177
ggaugaaacuacuaauaca

SEQ ID NO: 1860234 - RNA, 19 nt, Artificial Sequence
  Description of Artificial Sequence: Synthetic oligonucleotide
  Antisense strand to SEQ ID NO: 1860233
uguauuaguaguuucaucc

SEQ ID NO: 1860235 - RNA, 19 nt, Artificial Sequence
  Description of Artificial Sequence: Synthetic oligonucleotide
  Sense strand starting at position 833 of SEQ ID NO: 1564177
acgauaacccauuacaguu

SEQ ID NO: 1860236 - RNA, 19 nt, Artificial Sequence
  Description of Artificial Sequence: Synthetic oligonucleotide
  Antisense strand to SEQ ID NO: 1860235
aacuguaauggguuaucgu

SEQ ID NO: 1860237 - RNA, 19 nt, Artificial Sequence
  Description of Artificial Sequence: Synthetic oligonucleotide
  Sense strand starting at position 890 of SEQ ID NO: 1564177
gcggaaacuaaaugucgaa

SEQ ID NO: 1860238 - RNA, 19 nt, Artificial Sequence
  Description of Artificial Sequence: Synthetic oligonucleotide
  Antisense strand to SEQ ID NO: 1860237
uucgacauuuaguuuccgc

SEQ ID NO: 1860239 - RNA, 19 nt, Artificial Sequence
  Description of Artificial Sequence: Synthetic oligonucleotide
  Sense strand starting at position 893 of SEQ ID NO: 1564177
gaaacuaaaugucgaaagu

SEQ ID NO: 1860240 - RNA, 19 nt, Artificial Sequence
  Description of Artificial Sequence: Synthetic oligonucleotide
  Antisense strand to SEQ ID NO: 1860239
acuuucgacauuuaguuuc

SEQ ID NO: 1860241 - RNA, 19 nt, Artificial Sequence
  Description of Artificial Sequence: Synthetic oligonucleotide
  Sense strand starting at position 1223 of SEQ ID NO: 1564177
cucaguucgugccuugaga

SEQ ID NO: 1860242 - RNA, 19 nt, Artificial Sequence
  Description of Artificial Sequence: Synthetic oligonucleotide
  Antisense strand to SEQ ID NO: 1860241
ucucaaggcacgaacugag

SEQ ID NO: 1860243 - RNA, 19 nt, Artificial Sequence
  Description of Artificial Sequence: Synthetic oligonucleotide
  Sense strand starting at position 1225 of SEQ ID NO: 1564177
caguucgugccuugagaaa

SEQ ID NO: 1860244 - RNA, 19 nt, Artificial Sequence
  Description of Artificial Sequence: Synthetic oligonucleotide
  Antisense strand to SEQ ID NO: 1860243
uuucucaaggcacgaacug

SEQ ID NO: 1860245 - RNA, 19 nt, Artificial Sequence
  Description of Artificial Sequence: Synthetic oligonucleotide
  Sense strand starting at position 2141 of SEQ ID NO: 1564177
gcuggaaguuccuuggaag

SEQ ID NO: 1860246 - RNA, 19 nt, Artificial Sequence
  Description of Artificial Sequence: Synthetic oligonucleotide
  Antisense strand to SEQ ID NO: 1860245
cuuccaaggaacuuccagc

SEQ ID NO: 1860247 - RNA, 19 nt, Artificial Sequence
  Description of Artificial Sequence: Synthetic oligonucleotide
  Sense strand starting at position 2144 of SEQ ID NO: 1564177
ggaaguuccuuggaagugu

SEQ ID NO: 1860248 - RNA, 19 nt, Artificial Sequence
  Description of Artificial Sequence: Synthetic oligonucleotide
  Antisense strand to SEQ ID NO: 1860247
acacuuccaaggaacuucc

SEQ ID NO: 1860249 - RNA, 19 nt, Artificial Sequence
  Description of Artificial Sequence: Synthetic oligonucleotide
  Sense strand starting at position 3016 of SEQ ID NO: 1564177
cugacuuacucauucguuu

SEQ ID NO: 1860250 - RNA, 19 nt, Artificial Sequence
  Description of Artificial Sequence: Synthetic oligonucleotide
  Antisense strand to SEQ ID NO: 1860249
aaacgaaugaguaagucag

SEQ ID NO: 1860251 - RNA, 19 nt, Artificial Sequence
  Description of Artificial Sequence: Synthetic oligonucleotide
  Sense strand starting at position 3066 of SEQ ID NO: 1564177
cgcgguucuucugucuuua

SEQ ID NO: 1860252 - RNA, 19 nt, Artificial Sequence
  Description of Artificial Sequence: Synthetic oligonucleotide
  Antisense strand to SEQ ID NO: 1860251
uaaagacagaagaaccgcg

SEQ ID NO: 1860253 - RNA, 19 nt, Artificial Sequence
  Description of Artificial Sequence: Synthetic oligonucleotide
  Sense strand starting at position 3068 of SEQ ID NO: 1564177
cgguucuucugucuuuagu

SEQ ID NO: 1860254 - RNA, 19 nt, Artificial Sequence
  Description of Artificial Sequence: Synthetic oligonucleotide
  Antisense strand to SEQ ID NO: 1860253
acuaaagacagaagaaccg

SEQ ID NO: 1860255 - RNA, 19 nt, Artificial Sequence
  Description of Artificial Sequence: Synthetic oligonucleotide
  Sense strand starting at position 3361 of SEQ ID NO: 1564177
gauccuaaaugguuuaaug

SEQ ID NO: 1860256 - RNA, 19 nt, Artificial Sequence
  Description of Artificial Sequence: Synthetic oligonucleotide
  Antisense strand to SEQ ID NO: 1860255
cauuaaaccauuuaggauc

SEQ ID NO: 1860257 - RNA, 19 nt, Artificial Sequence
  Description of Artificial Sequence: Synthetic oligonucleotide
  Sense strand starting at position 3379 of SEQ ID NO: 1564177
ggagcuacuugggcuagau

SEQ ID NO: 1860258 - RNA, 19 nt, Artificial Sequence
  Description of Artificial Sequence: Synthetic oligonucleotide
  Antisense strand to SEQ ID NO: 1860257
aucuagcccaaguagcucc

SEQ ID NO: 1860259 - RNA, 19 nt, Artificial Sequence
  Description of Artificial Sequence: Synthetic oligonucleotide
  Sense strand starting at position 3455 of SEQ ID NO: 1564177
gcgagcugauucucuacca

SEQ ID NO: 1860260 - RNA, 19 nt, Artificial Sequence
  Description of Artificial Sequence: Synthetic oligonucleotide
  Antisense strand to SEQ ID NO: 1860259
ugguagagaaucagcucgc

SEQ ID NO: 1860261 - RNA, 19 nt, Artificial Sequence
  Description of Artificial Sequence: Synthetic oligonucleotide
  Sense strand starting at position 3460 of SEQ ID NO: 1564177
cugauucucuaccaguaag

SEQ ID NO: 1860262 - RNA, 19 nt, Artificial Sequence
  Description of Artificial Sequence: Synthetic oligonucleotide
  Antisense strand to SEQ ID NO: 1860261
cuuacugguagagaaucag

SEQ ID NO: 1860263 - RNA, 19 nt, Artificial Sequence
  Description of Artificial Sequence: Synthetic oligonucleotide
  Sense strand starting at position 3526 of SEQ ID NO: 1564177
uggucccgucuccgagaaa

SEQ ID NO: 1860264 - RNA, 19 nt, Artificial Sequence
  Description of Artificial Sequence: Synthetic oligonucleotide
  Antisense strand to SEQ ID NO: 1860263
uuucucggagacgggacca

SEQ ID NO: 1860265 - RNA, 19 nt, Artificial Sequence
  Description of Artificial Sequence: Synthetic oligonucleotide
  Sense strand starting at position 3551 of SEQ ID NO: 1564177
ucuguaucuccagguucua

SEQ ID NO: 1860266 - RNA, 19 nt, Artificial Sequence
  Description of Artificial Sequence: Synthetic oligonucleotide
  Antisense strand to SEQ ID NO: 1860265
uagaaccuggagauacaga

SEQ ID NO: 1860267 - RNA, 19 nt, Artificial Sequence
  Description of Artificial Sequence: Synthetic oligonucleotide
  Sense strand starting at position 3612 of SEQ ID NO: 1564177
gaccaauuuguucgccacu

SEQ ID NO: 1860268 - RNA, 19 nt, Artificial Sequence
  Description of Artificial Sequence: Synthetic oligonucleotide
  Antisense strand to SEQ ID NO: 1860267
aguggcgaacaaauugguc

SEQ ID NO: 1860269 - RNA, 19 nt, Artificial Sequence
  Description of Artificial Sequence: Synthetic oligonucleotide
  Sense strand starting at position 3614 of SEQ ID NO: 1564177
ccaauuuguucgccacucu

SEQ ID NO: 1860270 - RNA, 19 nt, Artificial Sequence
  Description of Artificial Sequence: Synthetic oligonucleotide
  Antisense strand to SEQ ID NO: 1860269
agaguggcgaacaaauugg

SEQ ID NO: 1860271 - RNA, 19 nt, Artificial Sequence
  Description of Artificial Sequence: Synthetic oligonucleotide
  Sense strand starting at position 3756 of SEQ ID NO: 1564177
acgcgaaaugguugggaau

SEQ ID NO: 1860272 - RNA, 19 nt, Artificial Sequence
  Description of Artificial Sequence: Synthetic oligonucleotide
  Antisense strand to SEQ ID NO: 1860271
auucccaaccauuucgcgu

SEQ ID NO: 1860273 - RNA, 19 nt, Artificial Sequence
  Description of Artificial Sequence: Synthetic oligonucleotide
  Sense strand starting at position 3757 of SEQ ID NO: 1564177
cgcgaaaugguugggaauu

SEQ ID NO: 1860274 - RNA, 19 nt, Artificial Sequence
  Description of Artificial Sequence: Synthetic oligonucleotide
  Antisense strand to SEQ ID NO: 1860273
aauucccaaccauuucgcg

SEQ ID NO: 1860275 - RNA, 19 nt, Artificial Sequence
  Description of Artificial Sequence: Synthetic oligonucleotide
  Sense strand starting at position 3758 of SEQ ID NO: 1564177
gcgaaaugguugggaauuu

SEQ ID NO: 1860276 - RNA, 19 nt, Artificial Sequence
  Description of Artificial Sequence: Synthetic oligonucleotide
  Antisense strand to SEQ ID NO: 1860275
aaauucccaaccauuucgc

SEQ ID NO: 1860277 - RNA, 19 nt, Artificial Sequence
  Description of Artificial Sequence: Synthetic oligonucleotide
  Sense strand starting at position 3759 of SEQ ID NO: 1564177
cgaaaugguugggaauuua

SEQ ID NO: 1860278 - RNA, 19 nt, Artificial Sequence
  Description of Artificial Sequence: Synthetic oligonucleotide
  Antisense strand to SEQ ID NO: 1860277
uaaauucccaaccauuucg

SEQ ID NO: 1860279 - RNA, 19 nt, Artificial Sequence
  Description of Artificial Sequence: Synthetic oligonucleotide
  Sense strand starting at position 3814 of SEQ ID NO: 1564177
agauguuugaagugcgaaa

SEQ ID NO: 1860280 - RNA, 19 nt, Artificial Sequence
  Description of Artificial Sequence: Synthetic oligonucleotide
  Antisense strand to SEQ ID NO: 1860279
uuucgcacuucaaacaucu

SEQ ID NO: 1860281 - RNA, 19 nt, Artificial Sequence
  Description of Artificial Sequence: Synthetic oligonucleotide
  Sense strand starting at position 3888 of SEQ ID NO: 1564177
uuuguuuguuucgaaucca

SEQ ID NO: 1860282 - RNA, 19 nt, Artificial Sequence
  Description of Artificial Sequence: Synthetic oligonucleotide
  Antisense strand to SEQ ID NO: 1860281
uggauucgaaacaaacaaa

SEQ ID NO: 1860283 - RNA, 19 nt, Artificial Sequence
  Description of Artificial Sequence: Synthetic oligonucleotide
  Sense strand starting at position 3896 of SEQ ID NO: 1564177
uuucgaauccaguguauug

SEQ ID NO: 1860284 - RNA, 19 nt, Artificial Sequence
  Description of Artificial Sequence: Synthetic oligonucleotide
  Antisense strand to SEQ ID NO: 1860283
caauacacuggauucgaaa

SEQ ID NO: 1860285 - RNA, 19 nt, Artificial Sequence
  Description of Artificial Sequence: Synthetic oligonucleotide
  Sense strand starting at position 112 of SEQ ID NO: 1564178
aaagaauaguccuuugagu

SEQ ID NO: 1860286 - RNA, 19 nt, Artificial Sequence
  Description of Artificial Sequence: Synthetic oligonucleotide
  Antisense strand to SEQ ID NO: 1860285
acucaaaggacuauucuuu

SEQ ID NO: 1860287 - RNA, 19 nt, Artificial Sequence
  Description of Artificial Sequence: Synthetic oligonucleotide
  Sense strand starting at position 114 of SEQ ID NO: 1564178
agaauaguccuuugaguug

SEQ ID NO: 1860288 - RNA, 19 nt, Artificial Sequence
  Description of Artificial Sequence: Synthetic oligonucleotide
  Antisense strand to SEQ ID NO: 1860287
caacucaaaggacuauucu

SEQ ID NO: 1860289 - RNA, 19 nt, Artificial Sequence
  Description of Artificial Sequence: Synthetic oligonucleotide
  Sense strand starting at position 117 of SEQ ID NO: 1564178
auaguccuuugaguugaau

SEQ ID NO: 1860290 - RNA, 19 nt, Artificial Sequence
  Description of Artificial Sequence: Synthetic oligonucleotide
  Antisense strand to SEQ ID NO: 1860289
auucaacucaaaggacuau

SEQ ID NO: 1860291 - RNA, 19 nt, Artificial Sequence
  Description of Artificial Sequence: Synthetic oligonucleotide
  Sense strand starting at position 120 of SEQ ID NO: 1564178
guccuuugaguugaauuaa

SEQ ID NO: 1860292 - RNA, 19 nt, Artificial Sequence
  Description of Artificial Sequence: Synthetic oligonucleotide
  Antisense strand to SEQ ID NO: 1860291
uuaauucaacucaaaggac

SEQ ID NO: 1860293 - RNA, 19 nt, Artificial Sequence
  Description of Artificial Sequence: Synthetic oligonucleotide
  Sense strand starting at position 149 of SEQ ID NO: 1564178
ugaacacugcacgacauua

SEQ ID NO: 1860294 - RNA, 19 nt, Artificial Sequence
  Description of Artificial Sequence: Synthetic oligonucleotide
  Antisense strand to SEQ ID NO: 1860293
uaaugucgugcaguguuca

SEQ ID NO: 1860295 - RNA, 19 nt, Artificial Sequence
  Description of Artificial Sequence: Synthetic oligonucleotide
  Sense strand starting at position 498 of SEQ ID NO: 1564178
ugugaaaccucuccaaguc

SEQ ID NO: 1860296 - RNA, 19 nt, Artificial Sequence
  Description of Artificial Sequence: Synthetic oligonucleotide
  Antisense strand to SEQ ID NO: 1860295
gacuuggagagguuucaca

SEQ ID NO: 1860297 - RNA, 19 nt, Artificial Sequence
  Description of Artificial Sequence: Synthetic oligonucleotide
  Sense strand starting at position 609 of SEQ ID NO: 1564178
uggguuggacugugggaaa

SEQ ID NO: 1860298 - RNA, 19 nt, Artificial Sequence
  Description of Artificial Sequence: Synthetic oligonucleotide
  Antisense strand to SEQ ID NO: 1860297
uuucccacaguccaaccca

SEQ ID NO: 1860299 - RNA, 19 nt, Artificial Sequence
  Description of Artificial Sequence: Synthetic oligonucleotide
  Sense strand starting at position 638 of SEQ ID NO: 1564178
ucaagaaaggcauggacuu

SEQ ID NO: 1860300 - RNA, 19 nt, Artificial Sequence
  Description of Artificial Sequence: Synthetic oligonucleotide
  Antisense strand to SEQ ID NO: 1860299
aaguccaugccuuucuuga

SEQ ID NO: 1860301 - RNA, 19 nt, Artificial Sequence
  Description of Artificial Sequence: Synthetic oligonucleotide
  Sense strand starting at position 681 of SEQ ID NO: 1564178
agucauaucugagcaaccu

SEQ ID NO: 1860302 - RNA, 19 nt, Artificial Sequence
  Description of Artificial Sequence: Synthetic oligonucleotide
  Antisense strand to SEQ ID NO: 1860301
agguugcucagauaugacu

SEQ ID NO: 1860303 - RNA, 19 nt, Artificial Sequence
  Description of Artificial Sequence: Synthetic oligonucleotide
  Sense strand starting at position 682 of SEQ ID NO: 1564178
gucauaucugagcaaccuu

SEQ ID NO: 1860304 - RNA, 19 nt, Artificial Sequence
  Description of Artificial Sequence: Synthetic oligonucleotide
  Antisense strand to SEQ ID NO: 1860303
aagguugcucagauaugac

SEQ ID NO: 1860305 - RNA, 19 nt, Artificial Sequence
  Description of Artificial Sequence: Synthetic oligonucleotide
  Sense strand starting at position 779 of SEQ ID NO: 1564178
cugccacaugaaugaauua

SEQ ID NO: 1860306 - RNA, 19 nt, Artificial Sequence
  Description of Artificial Sequence: Synthetic oligonucleotide
  Antisense strand to SEQ ID NO: 1860305
uaauucauucauguggcag

SEQ ID NO: 1860307 - RNA, 19 nt, Artificial Sequence
  Description of Artificial Sequence: Synthetic oligonucleotide
  Sense strand starting at position 842 of SEQ ID NO: 1564178
guuucuugguucuugagag

SEQ ID NO: 1860308 - RNA, 19 nt, Artificial Sequence
  Description of Artificial Sequence: Synthetic oligonucleotide
  Antisense strand to SEQ ID NO: 1860307
cucucaagaaccaagaaac

SEQ ID NO: 1860309 - RNA, 19 nt, Artificial Sequence
  Description of Artificial Sequence: Synthetic oligonucleotide
  Sense strand starting at position 849 of SEQ ID NO: 1564178
gguucuugagaguggaauc

SEQ ID NO: 1860310 - RNA, 19 nt, Artificial Sequence
  Description of Artificial Sequence: Synthetic oligonucleotide
  Antisense strand to SEQ ID NO: 1860309
gauuccacucucaagaacc

SEQ ID NO: 1860311 - RNA, 19 nt, Artificial Sequence
  Description of Artificial Sequence: Synthetic oligonucleotide
  Sense strand starting at position 850 of SEQ ID NO: 1564178
guucuugagaguggaauca

SEQ ID NO: 1860312 - RNA, 19 nt, Artificial Sequence
  Description of Artificial Sequence: Synthetic oligonucleotide
  Antisense strand to SEQ ID NO: 1860311
ugauuccacucucaagaac

SEQ ID NO: 1860313 - RNA, 19 nt, Artificial Sequence
  Description of Artificial Sequence: Synthetic oligonucleotide
  Sense strand starting at position 860 of SEQ ID NO: 1564178
guggaaucaugcuuuacac

SEQ ID NO: 1860314 - RNA, 19 nt, Artificial Sequence
  Description of Artificial Sequence: Synthetic oligonucleotide
  Antisense strand to SEQ ID NO: 1860313
guguaaagcaugauuccac

SEQ ID NO: 1860315 - RNA, 19 nt, Artificial Sequence
  Description of Artificial Sequence: Synthetic oligonucleotide
  Sense strand starting at position 862 of SEQ ID NO: 1564178
ggaaucaugcuuuacacac

SEQ ID NO: 1860316 - RNA, 19 nt, Artificial Sequence
  Description of Artificial Sequence: Synthetic oligonucleotide
  Antisense strand to SEQ ID NO: 1860315
guguguaaagcaugauucc

SEQ ID NO: 1860317 - RNA, 19 nt, Artificial Sequence
  Description of Artificial Sequence: Synthetic oligonucleotide
  Sense strand starting at position 1018 of SEQ ID NO: 1564178
cuuauauucucuuugagga

SEQ ID NO: 1860318 - RNA, 19 nt, Artificial Sequence
  Description of Artificial Sequence: Synthetic oligonucleotide
  Antisense strand to SEQ ID NO: 1860317
uccucaaagagaauauaag

SEQ ID NO: 1860319 - RNA, 19 nt, Artificial Sequence
  Description of Artificial Sequence: Synthetic oligonucleotide
  Sense strand starting at position 1019 of SEQ ID NO: 1564178
uuauauucucuuugaggac

SEQ ID NO: 1860320 - RNA, 19 nt, Artificial Sequence
  Description of Artificial Sequence: Synthetic oligonucleotide
  Antisense strand to SEQ ID NO: 1860319
guccucaaagagaauauaa

SEQ ID NO: 1860321 - RNA, 19 nt, Artificial Sequence
  Description of Artificial Sequence: Synthetic oligonucleotide
  Sense strand starting at position 1356 of SEQ ID NO: 1564178
ugcauacauuugcuaugua

SEQ ID NO: 1860322 - RNA, 19 nt, Artificial Sequence
  Description of Artificial Sequence: Synthetic oligonucleotide
  Antisense strand to SEQ ID NO: 1860321
uacauagcaaauguaugca

SEQ ID NO: 1860323 - RNA, 19 nt, Artificial Sequence
  Description of Artificial Sequence: Synthetic oligonucleotide
  Sense strand starting at position 1413 of SEQ ID NO: 1564178
uuacuaugguccucauucu

SEQ ID NO: 1860324 - RNA, 19 nt, Artificial Sequence
  Description of Artificial Sequence: Synthetic oligonucleotide
  Antisense strand to SEQ ID NO: 1860323
agaaugaggaccauaguaa

SEQ ID NO: 1860325 - RNA, 19 nt, Artificial Sequence
  Description of Artificial Sequence: Synthetic oligonucleotide
  Sense strand starting at position 1542 of SEQ ID NO: 1564178
uuuguaugggaaugcaaca

SEQ ID NO: 1860326 - RNA, 19 nt, Artificial Sequence
  Description of Artificial Sequence: Synthetic oligonucleotide
  Antisense strand to SEQ ID NO: 1860325
uguugcauucccauacaaa

SEQ ID NO: 1860327 - RNA, 19 nt, Artificial Sequence
  Description of Artificial Sequence: Synthetic oligonucleotide
  Sense strand starting at position 1563 of SEQ ID NO: 1564178
aggucacagaacugguuaa

SEQ ID NO: 1860328 - RNA, 19 nt, Artificial Sequence
  Description of Artificial Sequence: Synthetic oligonucleotide
  Antisense strand to SEQ ID NO: 1860327
uuaaccaguucugugaccu

SEQ ID NO: 1860329 - RNA, 19 nt, Artificial Sequence
  Description of Artificial Sequence: Synthetic oligonucleotide
  Sense strand starting at position 1570 of SEQ ID NO: 1564178
agaacugguuaagugacaa

SEQ ID NO: 1860330 - RNA, 19 nt, Artificial Sequence
  Description of Artificial Sequence: Synthetic oligonucleotide
  Antisense strand to SEQ ID NO: 1860329
uugucacuuaaccaguucu

SEQ ID NO: 1860331 - RNA, 19 nt, Artificial Sequence
  Description of Artificial Sequence: Synthetic oligonucleotide
  Sense strand starting at position 2354 of SEQ ID NO: 1564178
gaccgaacaaggugugaau

SEQ ID NO: 1860332 - RNA, 19 nt, Artificial Sequence
  Description of Artificial Sequence: Synthetic oligonucleotide
  Antisense strand to SEQ ID NO: 1860331
auucacaccuuguucgguc

SEQ ID NO: 1860333 - RNA, 19 nt, Artificial Sequence
  Description of Artificial Sequence: Synthetic oligonucleotide
  Sense strand starting at position 2555 of SEQ ID NO: 1564178
guuagaggucucuaaguau

SEQ ID NO: 1860334 - RNA, 19 nt, Artificial Sequence
  Description of Artificial Sequence: Synthetic oligonucleotide
  Antisense strand to SEQ ID NO: 1860333
auacuuagagaccucuaac

SEQ ID NO: 1860335 - RNA, 19 nt, Artificial Sequence
  Description of Artificial Sequence: Synthetic oligonucleotide
  Sense strand starting at position 2558 of SEQ ID NO: 1564178
agaggucucuaaguaucaa

SEQ ID NO: 1860336 - RNA, 19 nt, Artificial Sequence
  Description of Artificial Sequence: Synthetic oligonucleotide
  Antisense strand to SEQ ID NO: 1860335
uugauacuuagagaccucu

SEQ ID NO: 1860337 - RNA, 19 nt, Artificial Sequence
  Description of Artificial Sequence: Synthetic oligonucleotide
  Sense strand starting at position 2769 of SEQ ID NO: 1564178
cucagauagacugggugua

SEQ ID NO: 1860338 - RNA, 19 nt, Artificial Sequence
  Description of Artificial Sequence: Synthetic oligonucleotide
  Antisense strand to SEQ ID NO: 1860337
uacacccagucuaucugag

SEQ ID NO: 1860339 - RNA, 19 nt, Artificial Sequence
  Description of Artificial Sequence: Synthetic oligonucleotide
  Sense strand starting at position 2770 of SEQ ID NO: 1564178
ucagauagacuggguguau

SEQ ID NO: 1860340 - RNA, 19 nt, Artificial Sequence
  Description of Artificial Sequence: Synthetic oligonucleotide
  Antisense strand to SEQ ID NO: 1860339
auacacccagucuaucuga

SEQ ID NO: 1860341 - RNA, 19 nt, Artificial Sequence
  Description of Artificial Sequence: Synthetic oligonucleotide
  Sense strand starting at position 2856 of SEQ ID NO: 1564178
ccucuaagcccagaaguuu

SEQ ID NO: 1860342 - RNA, 19 nt, Artificial Sequence
  Description of Artificial Sequence: Synthetic oligonucleotide
  Antisense strand to SEQ ID NO: 1860341
aaacuucugggcuuagagg

SEQ ID NO: 1860343 - RNA, 19 nt, Artificial Sequence
  Description of Artificial Sequence: Synthetic oligonucleotide
  Sense strand starting at position 2864 of SEQ ID NO: 1564178
cccagaaguuuagccugaa

SEQ ID NO: 1860344 - RNA, 19 nt, Artificial Sequence
  Description of Artificial Sequence: Synthetic oligonucleotide
  Antisense strand to SEQ ID NO: 1860343
uucaggcuaaacuucuggg

SEQ ID NO: 1860345 - RNA, 19 nt, Artificial Sequence
  Description of Artificial Sequence: Synthetic oligonucleotide
  Sense strand starting at position 2865 of SEQ ID NO: 1564178
ccagaaguuuagccugaaa

SEQ ID NO: 1860346 - RNA, 19 nt, Artificial Sequence
  Description of Artificial Sequence: Synthetic oligonucleotide
  Antisense strand to SEQ ID NO: 1860345
uuucaggcuaaacuucugg

SEQ ID NO: 1860347 - RNA, 19 nt, Artificial Sequence
  Description of Artificial Sequence: Synthetic oligonucleotide
  Sense strand starting at position 2867 of SEQ ID NO: 1564178
agaaguuuagccugaaauc

SEQ ID NO: 1860348 - RNA, 19 nt, Artificial Sequence
  Description of Artificial Sequence: Synthetic oligonucleotide
  Antisense strand to SEQ ID NO: 1860347
gauuucaggcuaaacuucu

SEQ ID NO: 1860349 - RNA, 19 nt, Artificial Sequence
  Description of Artificial Sequence: Synthetic oligonucleotide
  Sense strand starting at position 2868 of SEQ ID NO: 1564178
gaaguuuagccugaaaucu

SEQ ID NO: 1860350 - RNA, 19 nt, Artificial Sequence
  Description of Artificial Sequence: Synthetic oligonucleotide
  Antisense strand to SEQ ID NO: 1860349
agauuucaggcuaaacuuc

SEQ ID NO: 1860351 - RNA, 19 nt, Artificial Sequence
  Description of Artificial Sequence: Synthetic oligonucleotide
  Sense strand starting at position 2943 of SEQ ID NO: 1564178
agaggcuuucugggcagaa

SEQ ID NO: 1860352 - RNA, 19 nt, Artificial Sequence
  Description of Artificial Sequence: Synthetic oligonucleotide
  Antisense strand to SEQ ID NO: 1860351
uucugcccagaaagccucu

SEQ ID NO: 1860353 - RNA, 19 nt, Artificial Sequence
  Description of Artificial Sequence: Synthetic oligonucleotide
  Sense strand starting at position 2944 of SEQ ID NO: 1564178
gaggcuuucugggcagaaa

SEQ ID NO: 1860354 - RNA, 19 nt, Artificial Sequence
  Description of Artificial Sequence: Synthetic oligonucleotide
  Antisense strand to SEQ ID NO: 1860353
uuucugcccagaaagccuc

SEQ ID NO: 1860355 - RNA, 19 nt, Artificial Sequence
  Description of Artificial Sequence: Synthetic oligonucleotide
  Sense strand starting at position 2945 of SEQ ID NO: 1564178
aggcuuucugggcagaaag

SEQ ID NO: 1860356 - RNA, 19 nt, Artificial Sequence
  Description of Artificial Sequence: Synthetic oligonucleotide
  Antisense strand to SEQ ID NO: 1860355
cuuucugcccagaaagccu

SEQ ID NO: 1860357 - RNA, 19 nt, Artificial Sequence
  Description of Artificial Sequence: Synthetic oligonucleotide
  Sense strand starting at position 3255 of SEQ ID NO: 1564178
ggcuuuguccggagguuug

SEQ ID NO: 1860358 - RNA, 19 nt, Artificial Sequence
  Description of Artificial Sequence: Synthetic oligonucleotide
  Antisense strand to SEQ ID NO: 1860357
caaaccuccggacaaagcc

SEQ ID NO: 1860359 - RNA, 19 nt, Artificial Sequence
  Description of Artificial Sequence: Synthetic oligonucleotide
  Sense strand starting at position 3860 of SEQ ID NO: 1564178
agccaugaacucggaaguu

SEQ ID NO: 1860360 - RNA, 19 nt, Artificial Sequence
  Description of Artificial Sequence: Synthetic oligonucleotide
  Antisense strand to SEQ ID NO: 1860359
aacuuccgaguucauggcu

SEQ ID NO: 1860361 - RNA, 19 nt, Artificial Sequence
  Description of Artificial Sequence: Synthetic oligonucleotide
  Sense strand starting at position 3873 of SEQ ID NO: 1564178
gaaguugacugccuggauu

SEQ ID NO: 1860362 - RNA, 19 nt, Artificial Sequence
  Description of Artificial Sequence: Synthetic oligonucleotide
  Antisense strand to SEQ ID NO: 1860361
aauccaggcagucaacuuc

SEQ ID NO: 1860363 - RNA, 19 nt, Artificial Sequence
  Description of Artificial Sequence: Synthetic oligonucleotide
  Sense strand starting at position 3979 of SEQ ID NO: 1564178
guaccuacuuccuuuggga

SEQ ID NO: 1860364 - RNA, 19 nt, Artificial Sequence
  Description of Artificial Sequence: Synthetic oligonucleotide
  Antisense strand to SEQ ID NO: 1860363
ucccaaaggaaguagguac

SEQ ID NO: 1860365 - RNA, 19 nt, Artificial Sequence
  Description of Artificial Sequence: Synthetic oligonucleotide
  Sense strand starting at position 134 of SEQ ID NO: 1564179
cagagagguuuagcauaau

SEQ ID NO: 1860366 - RNA, 19 nt, Artificial Sequence
  Description of Artificial Sequence: Synthetic oligonucleotide
  Antisense strand to SEQ ID NO: 1860365
auuaugcuaaaccucucug

SEQ ID NO: 1860367 - RNA, 19 nt, Artificial Sequence
  Description of Artificial Sequence: Synthetic oligonucleotide
  Sense strand starting at position 137 of SEQ ID NO: 1564179
agagguuuagcauaauucu

SEQ ID NO: 1860368 - RNA, 19 nt, Artificial Sequence
  Description of Artificial Sequence: Synthetic oligonucleotide
  Antisense strand to SEQ ID NO: 1860367
agaauuaugcuaaaccucu

SEQ ID NO: 1860369 - RNA, 19 nt, Artificial Sequence
  Description of Artificial Sequence: Synthetic oligonucleotide
  Sense strand starting at position 312 of SEQ ID NO: 1564179
guaccuuuagagugaaaga

SEQ ID NO: 1860370 - RNA, 19 nt, Artificial Sequence
  Description of Artificial Sequence: Synthetic oligonucleotide
  Antisense strand to SEQ ID NO: 1860369
ucuuucacucuaaagguac

SEQ ID NO: 1860371 - RNA, 19 nt, Artificial Sequence
  Description of Artificial Sequence: Synthetic oligonucleotide
  Sense strand starting at position 596 of SEQ ID NO: 1564179
aggaggagucaggguuuga

SEQ ID NO: 1860372 - RNA, 19 nt, Artificial Sequence
  Description of Artificial Sequence: Synthetic oligonucleotide
  Antisense strand to SEQ ID NO: 1860371
ucaaacccugacuccuccu

SEQ ID NO: 1860373 - RNA, 19 nt, Artificial Sequence
  Description of Artificial Sequence: Synthetic oligonucleotide
  Sense strand starting at position 837 of SEQ ID NO: 1564179
gcuggcuuagcugcauaau

SEQ ID NO: 1860374 - RNA, 19 nt, Artificial Sequence
  Description of Artificial Sequence: Synthetic oligonucleotide
  Antisense strand to SEQ ID NO: 1860373
auuaugcagcuaagccagc

SEQ ID NO: 1860375 - RNA, 19 nt, Artificial Sequence
  Description of Artificial Sequence: Synthetic oligonucleotide
  Sense strand starting at position 862 of SEQ ID NO: 1564179
aaagcucuccgugugcaua

SEQ ID NO: 1860376 - RNA, 19 nt, Artificial Sequence
  Description of Artificial Sequence: Synthetic oligonucleotide
  Antisense strand to SEQ ID NO: 1860375
uaugcacacggagagcuuu

SEQ ID NO: 1860377 - RNA, 19 nt, Artificial Sequence
  Description of Artificial Sequence: Synthetic oligonucleotide
  Sense strand starting at position 1101 of SEQ ID NO: 1564179
guaauucagcgcgcaacuu

SEQ ID NO: 1860378 - RNA, 19 nt, Artificial Sequence
  Description of Artificial Sequence: Synthetic oligonucleotide
  Antisense strand to SEQ ID NO: 1860377
aaguugcgcgcugaauuac

SEQ ID NO: 1860379 - RNA, 19 nt, Artificial Sequence
  Description of Artificial Sequence: Synthetic oligonucleotide
  Sense strand starting at position 1247 of SEQ ID NO: 1564179
gaagaugagacguguccaa

SEQ ID NO: 1860380 - RNA, 19 nt, Artificial Sequence
  Description of Artificial Sequence: Synthetic oligonucleotide
  Antisense strand to SEQ ID NO: 1860379
uuggacacgucucaucuuc

SEQ ID NO: 1860381 - RNA, 19 nt, Artificial Sequence
  Description of Artificial Sequence: Synthetic oligonucleotide
  Sense strand starting at position 1251 of SEQ ID NO: 1564179
augagacguguccaaacgu

SEQ ID NO: 1860382 - RNA, 19 nt, Artificial Sequence
  Description of Artificial Sequence: Synthetic oligonucleotide
  Antisense strand to SEQ ID NO: 1860381
acguuuggacacgucucau

SEQ ID NO: 1860383 - RNA, 19 nt, Artificial Sequence
  Description of Artificial Sequence: Synthetic oligonucleotide
  Sense strand starting at position 1300 of SEQ ID NO: 1564179
ccaagaaguccugggcauu

SEQ ID NO: 1860384 - RNA, 19 nt, Artificial Sequence
  Description of Artificial Sequence: Synthetic oligonucleotide
  Antisense strand to SEQ ID NO: 1860383
aaugcccaggacuucuugg

SEQ ID NO: 1860385 - RNA, 19 nt, Artificial Sequence
  Description of Artificial Sequence: Synthetic oligonucleotide
  Sense strand starting at position 1310 of SEQ ID NO: 1564179
cugggcauuucucaggaga

SEQ ID NO: 1860386 - RNA, 19 nt, Artificial Sequence
  Description of Artificial Sequence: Synthetic oligonucleotide
  Antisense strand to SEQ ID NO: 1860385
ucuccugagaaaugcccag

SEQ ID NO: 1860387 - RNA, 19 nt, Artificial Sequence
  Description of Artificial Sequence: Synthetic oligonucleotide
  Sense strand starting at position 1312 of SEQ ID NO: 1564179
gggcauuucucaggagaga

SEQ ID NO: 1860388 - RNA, 19 nt, Artificial Sequence
  Description of Artificial Sequence: Synthetic oligonucleotide
  Antisense strand to SEQ ID NO: 1860387
ucucuccugagaaaugccc

SEQ ID NO: 1860389 - RNA, 19 nt, Artificial Sequence
  Description of Artificial Sequence: Synthetic oligonucleotide
  Sense strand starting at position 1386 of SEQ ID NO: 1564179
ggaaaugcccucgaaagca

SEQ ID NO: 1860390 - RNA, 19 nt, Artificial Sequence
  Description of Artificial Sequence: Synthetic oligonucleotide
  Antisense strand to SEQ ID NO: 1860389
ugcuuucgagggcauuucc

SEQ ID NO: 1860391 - RNA, 19 nt, Artificial Sequence
  Description of Artificial Sequence: Synthetic oligonucleotide
  Sense strand starting at position 2095 of SEQ ID NO: 1564179
gccagaaagucacccaaau

SEQ ID NO: 1860392 - RNA, 19 nt, Artificial Sequence
  Description of Artificial Sequence: Synthetic oligonucleotide
  Antisense strand to SEQ ID NO: 1860391
auuugggugacuuucuggc

SEQ ID NO: 1860393 - RNA, 19 nt, Artificial Sequence
  Description of Artificial Sequence: Synthetic oligonucleotide
  Sense strand starting at position 2268 of SEQ ID NO: 1564179
gaaugaguccggcacuguu

SEQ ID NO: 1860394 - RNA, 19 nt, Artificial Sequence
  Description of Artificial Sequence: Synthetic oligonucleotide
  Antisense strand to SEQ ID NO: 1860393
aacagugccggacucauuc

SEQ ID NO: 1860395 - RNA, 19 nt, Artificial Sequence
  Description of Artificial Sequence: Synthetic oligonucleotide
  Sense strand starting at position 2327 of SEQ ID NO: 1564179
cagugacuugcucggauaa

SEQ ID NO: 1860396 - RNA, 19 nt, Artificial Sequence
  Description of Artificial Sequence: Synthetic oligonucleotide
  Antisense strand to SEQ ID NO: 1860395
uuauccgagcaagucacug

SEQ ID NO: 1860397 - RNA, 19 nt, Artificial Sequence
  Description of Artificial Sequence: Synthetic oligonucleotide
  Sense strand starting at position 2328 of SEQ ID NO: 1564179
agugacuugcucggauaau

SEQ ID NO: 1860398 - RNA, 19 nt, Artificial Sequence
  Description of Artificial Sequence: Synthetic oligonucleotide
  Antisense strand to SEQ ID NO: 1860397
auuauccgagcaagucacu

SEQ ID NO: 1860399 - RNA, 19 nt, Artificial Sequence
  Description of Artificial Sequence: Synthetic oligonucleotide
  Sense strand starting at position 2338 of SEQ ID NO: 1564179
ucggauaauuuaugggaug

SEQ ID NO: 1860400 - RNA, 19 nt, Artificial Sequence
  Description of Artificial Sequence: Synthetic oligonucleotide
  Antisense strand to SEQ ID NO: 1860399
caucccauaaauuauccga

SEQ ID NO: 1860401 - RNA, 19 nt, Artificial Sequence
  Description of Artificial Sequence: Synthetic oligonucleotide
  Sense strand starting at position 2402 of SEQ ID NO: 1564179
accagauaauuaggaauuu

SEQ ID NO: 1860402 - RNA, 19 nt, Artificial Sequence
  Description of Artificial Sequence: Synthetic oligonucleotide
  Antisense strand to SEQ ID NO: 1860401
aaauuccuaauuaucuggu

SEQ ID NO: 1860403 - RNA, 19 nt, Artificial Sequence
  Description of Artificial Sequence: Synthetic oligonucleotide
  Sense strand starting at position 2514 of SEQ ID NO: 1564179
acucuaccuccgcagagaa

SEQ ID NO: 1860404 - RNA, 19 nt, Artificial Sequence
  Description of Artificial Sequence: Synthetic oligonucleotide
  Antisense strand to SEQ ID NO: 1860403
uucucugcggagguagagu

SEQ ID NO: 1860405 - RNA, 19 nt, Artificial Sequence
  Description of Artificial Sequence: Synthetic oligonucleotide
  Sense strand starting at position 2516 of SEQ ID NO: 1564179
ucuaccuccgcagagaaau

SEQ ID NO: 1860406 - RNA, 19 nt, Artificial Sequence
  Description of Artificial Sequence: Synthetic oligonucleotide
  Antisense strand to SEQ ID NO: 1860405
auuucucugcggagguaga

SEQ ID NO: 1860407 - RNA, 19 nt, Artificial Sequence
  Description of Artificial Sequence: Synthetic oligonucleotide
  Sense strand starting at position 2653 of SEQ ID NO: 1564179
uugauuucucucuggccuu

SEQ ID NO: 1860408 - RNA, 19 nt, Artificial Sequence
  Description of Artificial Sequence: Synthetic oligonucleotide
  Antisense strand to SEQ ID NO: 1860407
aaggccagagagaaaucaa

SEQ ID NO: 1860409 - RNA, 19 nt, Artificial Sequence
  Description of Artificial Sequence: Synthetic oligonucleotide
  Sense strand starting at position 2733 of SEQ ID NO: 1564179
auuagucaggucugagagu

SEQ ID NO: 1860410 - RNA, 19 nt, Artificial Sequence
  Description of Artificial Sequence: Synthetic oligonucleotide
  Antisense strand to SEQ ID NO: 1860409
acucucagaccugacuaau

SEQ ID NO: 1860411 - RNA, 19 nt, Artificial Sequence
  Description of Artificial Sequence: Synthetic oligonucleotide
  Sense strand starting at position 2806 of SEQ ID NO: 1564179
cugagcagacuuuaagcau

SEQ ID NO: 1860412 - RNA, 19 nt, Artificial Sequence
  Description of Artificial Sequence: Synthetic oligonucleotide
  Antisense strand to SEQ ID NO: 1860411
augcuuaaagucugcucag

SEQ ID NO: 1860413 - RNA, 19 nt, Artificial Sequence
  Description of Artificial Sequence: Synthetic oligonucleotide
  Sense strand starting at position 2812 of SEQ ID NO: 1564179
agacuuuaagcaugacuca

SEQ ID NO: 1860414 - RNA, 19 nt, Artificial Sequence
  Description of Artificial Sequence: Synthetic oligonucleotide
  Antisense strand to SEQ ID NO: 1860413
ugagucaugcuuaaagucu

SEQ ID NO: 1860415 - RNA, 19 nt, Artificial Sequence
  Description of Artificial Sequence: Synthetic oligonucleotide
  Sense strand starting at position 2850 of SEQ ID NO: 1564179
gaacuccuguggucaagaa

SEQ ID NO: 1860416 - RNA, 19 nt, Artificial Sequence
  Description of Artificial Sequence: Synthetic oligonucleotide
  Antisense strand to SEQ ID NO: 1860415
uucuugaccacaggaguuc

SEQ ID NO: 1860417 - RNA, 19 nt, Artificial Sequence
  Description of Artificial Sequence: Synthetic oligonucleotide
  Sense strand starting at position 3028 of SEQ ID NO: 1564179
ggucaauaccuguacacug

SEQ ID NO: 1860418 - RNA, 19 nt, Artificial Sequence
  Description of Artificial Sequence: Synthetic oligonucleotide
  Antisense strand to SEQ ID NO: 1860417
caguguacagguauugacc

SEQ ID NO: 1860419 - RNA, 19 nt, Artificial Sequence
  Description of Artificial Sequence: Synthetic oligonucleotide
  Sense strand starting at position 3090 of SEQ ID NO: 1564179
aucuaacuugcuuguuaga

SEQ ID NO: 1860420 - RNA, 19 nt, Artificial Sequence
  Description of Artificial Sequence: Synthetic oligonucleotide
  Antisense strand to SEQ ID NO: 1860419
ucuaacaagcaaguuagau

SEQ ID NO: 1860421 - RNA, 19 nt, Artificial Sequence
  Description of Artificial Sequence: Synthetic oligonucleotide
  Sense strand starting at position 3101 of SEQ ID NO: 1564179
uuguuagaguaucugauac

SEQ ID NO: 1860422 - RNA, 19 nt, Artificial Sequence
  Description of Artificial Sequence: Synthetic oligonucleotide
  Antisense strand to SEQ ID NO: 1860421
guaucagauacucuaacaa

SEQ ID NO: 1860423 - RNA, 19 nt, Artificial Sequence
  Description of Artificial Sequence: Synthetic oligonucleotide
  Sense strand starting at position 3150 of SEQ ID NO: 1564179
gcagcaacuuuaucaaggu

SEQ ID NO: 1860424 - RNA, 19 nt, Artificial Sequence
  Description of Artificial Sequence: Synthetic oligonucleotide
  Antisense strand to SEQ ID NO: 1860423
accuugauaaaguugcugc

SEQ ID NO: 1860425 - RNA, 19 nt, Artificial Sequence
  Description of Artificial Sequence: Synthetic oligonucleotide
  Sense strand starting at position 3272 of SEQ ID NO: 1564179
ccugcuggcccugaugaga

SEQ ID NO: 1860426 - RNA, 19 nt, Artificial Sequence
  Description of Artificial Sequence: Synthetic oligonucleotide
  Antisense strand to SEQ ID NO: 1860425
ucucaucagggccagcagg

SEQ ID NO: 1860427 - RNA, 19 nt, Artificial Sequence
  Description of Artificial Sequence: Synthetic oligonucleotide
  Sense strand starting at position 3441 of SEQ ID NO: 1564179
accagaaguuacucccaga

SEQ ID NO: 1860428 - RNA, 19 nt, Artificial Sequence
  Description of Artificial Sequence: Synthetic oligonucleotide
  Antisense strand to SEQ ID NO: 1860427
ucugggaguaacuucuggu

SEQ ID NO: 1860429 - RNA, 19 nt, Artificial Sequence
  Description of Artificial Sequence: Synthetic oligonucleotide
  Sense strand starting at position 3505 of SEQ ID NO: 1564179
gaggcugggcuuuaacaau

SEQ ID NO: 1860430 - RNA, 19 nt, Artificial Sequence
  Description of Artificial Sequence: Synthetic oligonucleotide
  Antisense strand to SEQ ID NO: 1860429
auuguuaaagcccagccuc

SEQ ID NO: 1860431 - RNA, 19 nt, Artificial Sequence
  Description of Artificial Sequence: Synthetic oligonucleotide
  Sense strand starting at position 3532 of SEQ ID NO: 1564179
uccuuaaggcucugaguug

SEQ ID NO: 1860432 - RNA, 19 nt, Artificial Sequence
  Description of Artificial Sequence: Synthetic oligonucleotide
  Antisense strand to SEQ ID NO: 1860431
caacucagagccuuaagga

SEQ ID NO: 1860433 - RNA, 19 nt, Artificial Sequence
  Description of Artificial Sequence: Synthetic oligonucleotide
  Sense strand starting at position 3677 of SEQ ID NO: 1564179
aagcacagugcuuacagua

SEQ ID NO: 1860434 - RNA, 19 nt, Artificial Sequence
  Description of Artificial Sequence: Synthetic oligonucleotide
  Antisense strand to SEQ ID NO: 1860433
uacuguaagcacugugcuu

SEQ ID NO: 1860435 - RNA, 19 nt, Artificial Sequence
  Description of Artificial Sequence: Synthetic oligonucleotide
  Sense strand starting at position 3700 of SEQ ID NO: 1564179
ccucacuauuguuuguuaa

SEQ ID NO: 1860436 - RNA, 19 nt, Artificial Sequence
  Description of Artificial Sequence: Synthetic oligonucleotide
  Antisense strand to SEQ ID NO: 1860435
uuaacaaacaauagugagg

SEQ ID NO: 1860437 - RNA, 19 nt, Artificial Sequence
  Description of Artificial Sequence: Synthetic oligonucleotide
  Sense strand starting at position 3702 of SEQ ID NO: 1564179
ucacuauuguuuguuaaug

SEQ ID NO: 1860438 - RNA, 19 nt, Artificial Sequence
  Description of Artificial Sequence: Synthetic oligonucleotide
  Antisense strand to SEQ ID NO: 1860437
cauuaacaaacaauaguga

SEQ ID NO: 1860439 - RNA, 19 nt, Artificial Sequence
  Description of Artificial Sequence: Synthetic oligonucleotide
  Sense strand starting at position 3826 of SEQ ID NO: 1564179
aucagauaucauggguucu

SEQ ID NO: 1860440 - RNA, 19 nt, Artificial Sequence
  Description of Artificial Sequence: Synthetic oligonucleotide
  Antisense strand to SEQ ID NO: 1860439
agaacccaugauaucugau

SEQ ID NO: 1860441 - RNA, 19 nt, Artificial Sequence
  Description of Artificial Sequence: Synthetic oligonucleotide
  Sense strand starting at position 3828 of SEQ ID NO: 1564179
cagauaucauggguucuga

SEQ ID NO: 1860442 - RNA, 19 nt, Artificial Sequence
  Description of Artificial Sequence: Synthetic oligonucleotide
  Antisense strand to SEQ ID NO: 1860441
ucagaacccaugauaucug

SEQ ID NO: 1860443 - RNA, 19 nt, Artificial Sequence
  Description of Artificial Sequence: Synthetic oligonucleotide
  Sense strand starting at position 3936 of SEQ ID NO: 1564179
ugcuauaaauacuuagaag

SEQ ID NO: 1860444 - RNA, 19 nt, Artificial Sequence
  Description of Artificial Sequence: Synthetic oligonucleotide
  Antisense strand to SEQ ID NO: 1860443
cuucuaaguauuuauagca

SEQ ID NO: 1860445 - RNA, 19 nt, Artificial Sequence
  Description of Artificial Sequence: Synthetic oligonucleotide
  Sense strand starting at position 125 of SEQ ID NO: 1564180
auaggcaacucagauaauu

SEQ ID NO: 1860446 - RNA, 19 nt, Artificial Sequence
  Description of Artificial Sequence: Synthetic oligonucleotide
  Antisense strand to SEQ ID NO: 1860445
aauuaucugaguugccuau

SEQ ID NO: 1860447 - RNA, 19 nt, Artificial Sequence
  Description of Artificial Sequence: Synthetic oligonucleotide
  Sense strand starting at position 610 of SEQ ID NO: 1564180
gcuugaguggauuaaucuu

SEQ ID NO: 1860448 - RNA, 19 nt, Artificial Sequence
  Description of Artificial Sequence: Synthetic oligonucleotide
  Antisense strand to SEQ ID NO: 1860447
aagauuaauccacucaagc

SEQ ID NO: 1860449 - RNA, 19 nt, Artificial Sequence
  Description of Artificial Sequence: Synthetic oligonucleotide
  Sense strand starting at position 728 of SEQ ID NO: 1564180
agcugaaaugucugguguu

SEQ ID NO: 1860450 - RNA, 19 nt, Artificial Sequence
  Description of Artificial Sequence: Synthetic oligonucleotide
  Antisense strand to SEQ ID NO: 1860449
aacaccagacauuucagcu

SEQ ID NO: 1860451 - RNA, 19 nt, Artificial Sequence
  Description of Artificial Sequence: Synthetic oligonucleotide
  Sense strand starting at position 756 of SEQ ID NO: 1564180
ccaagaguucuaggugcac

SEQ ID NO: 1860452 - RNA, 19 nt, Artificial Sequence
  Description of Artificial Sequence: Synthetic oligonucleotide
  Antisense strand to SEQ ID NO: 1860451
gugcaccuagaacucuugg

SEQ ID NO: 1860453 - RNA, 19 nt, Artificial Sequence
  Description of Artificial Sequence: Synthetic oligonucleotide
  Sense strand starting at position 760 of SEQ ID NO: 1564180
gaguucuaggugcacaaau

SEQ ID NO: 1860454 - RNA, 19 nt, Artificial Sequence
  Description of Artificial Sequence: Synthetic oligonucleotide
  Antisense strand to SEQ ID NO: 1860453
auuugugcaccuagaacuc

SEQ ID NO: 1860455 - RNA, 19 nt, Artificial Sequence
  Description of Artificial Sequence: Synthetic oligonucleotide
  Sense strand starting at position 762 of SEQ ID NO: 1564180
guucuaggugcacaaauaa

SEQ ID NO: 1860456 - RNA, 19 nt, Artificial Sequence
  Description of Artificial Sequence: Synthetic oligonucleotide
  Antisense strand to SEQ ID NO: 1860455
uuauuugugcaccuagaac

SEQ ID NO: 1860457 - RNA, 19 nt, Artificial Sequence
  Description of Artificial Sequence: Synthetic oligonucleotide
  Sense strand starting at position 890 of SEQ ID NO: 1564180
gucuacagcucuuugauuu

SEQ ID NO: 1860458 - RNA, 19 nt, Artificial Sequence
  Description of Artificial Sequence: Synthetic oligonucleotide
  Antisense strand to SEQ ID NO: 1860457
aaaucaaagagcuguagac

SEQ ID NO: 1860459 - RNA, 19 nt, Artificial Sequence
  Description of Artificial Sequence: Synthetic oligonucleotide
  Sense strand starting at position 1058 of SEQ ID NO: 1564180
auagaacaugaaugcuuua

SEQ ID NO: 1860460 - RNA, 19 nt, Artificial Sequence
  Description of Artificial Sequence: Synthetic oligonucleotide
  Antisense strand to SEQ ID NO: 1860459
uaaagcauucauguucuau

SEQ ID NO: 1860461 - RNA, 19 nt, Artificial Sequence
  Description of Artificial Sequence: Synthetic oligonucleotide
  Sense strand starting at position 1081 of SEQ ID NO: 1564180
guuaguaaauuuggauaac

SEQ ID NO: 1860462 - RNA, 19 nt, Artificial Sequence
  Description of Artificial Sequence: Synthetic oligonucleotide
  Antisense strand to SEQ ID NO: 1860461
guuauccaaauuuacuaac

SEQ ID NO: 1860463 - RNA, 19 nt, Artificial Sequence
  Description of Artificial Sequence: Synthetic oligonucleotide
  Sense strand starting at position 1208 of SEQ ID NO: 1564180
cuggguagacuucgaguaa

SEQ ID NO: 1860464 - RNA, 19 nt, Artificial Sequence
  Description of Artificial Sequence: Synthetic oligonucleotide
  Antisense strand to SEQ ID NO: 1860463
uuacucgaagucuacccag

SEQ ID NO: 1860465 - RNA, 19 nt, Artificial Sequence
  Description of Artificial Sequence: Synthetic oligonucleotide
  Sense strand starting at position 1212 of SEQ ID NO: 1564180
guagacuucgaguaacaag

SEQ ID NO: 1860466 - RNA, 19 nt, Artificial Sequence
  Description of Artificial Sequence: Synthetic oligonucleotide
  Antisense strand to SEQ ID NO: 1860465
cuuguuacucgaagucuac

SEQ ID NO: 1860467 - RNA, 19 nt, Artificial Sequence
  Description of Artificial Sequence: Synthetic oligonucleotide
  Sense strand starting at position 1244 of SEQ ID NO: 1564180
aguagucccuuguccaaga

SEQ ID NO: 1860468 - RNA, 19 nt, Artificial Sequence
  Description of Artificial Sequence: Synthetic oligonucleotide
  Antisense strand to SEQ ID NO: 1860467
ucuuggacaagggacuacu

SEQ ID NO: 1860469 - RNA, 19 nt, Artificial Sequence
  Description of Artificial Sequence: Synthetic oligonucleotide
  Sense strand starting at position 2679 of SEQ ID NO: 1564180
acgacuugagcugaaacuu

SEQ ID NO: 1860470 - RNA, 19 nt, Artificial Sequence
  Description of Artificial Sequence: Synthetic oligonucleotide
  Antisense strand to SEQ ID NO: 1860469
aaguuucagcucaagucgu

SEQ ID NO: 1860471 - RNA, 19 nt, Artificial Sequence
  Description of Artificial Sequence: Synthetic oligonucleotide
  Sense strand starting at position 2914 of SEQ ID NO: 1564180
ugggcuaucccuugcagaa

SEQ ID NO: 1860472 - RNA, 19 nt, Artificial Sequence
  Description of Artificial Sequence: Synthetic oligonucleotide
  Antisense strand to SEQ ID NO: 1860471
uucugcaagggauagccca

SEQ ID NO: 1860473 - RNA, 19 nt, Artificial Sequence
  Description of Artificial Sequence: Synthetic oligonucleotide
  Sense strand starting at position 2943 of SEQ ID NO: 1564180
agggcuucucucuaccaca

SEQ ID NO: 1860474 - RNA, 19 nt, Artificial Sequence
  Description of Artificial Sequence: Synthetic oligonucleotide
  Antisense strand to SEQ ID NO: 1860473
ugugguagagagaagcccu

SEQ ID NO: 1860475 - RNA, 19 nt, Artificial Sequence
  Description of Artificial Sequence: Synthetic oligonucleotide
  Sense strand starting at position 3000 of SEQ ID NO: 1564180
gaugguacaucggcagaaa

SEQ ID NO: 1860476 - RNA, 19 nt, Artificial Sequence
  Description of Artificial Sequence: Synthetic oligonucleotide
  Antisense strand to SEQ ID NO: 1860475
uuucugccgauguaccauc

SEQ ID NO: 1860477 - RNA, 19 nt, Artificial Sequence
  Description of Artificial Sequence: Synthetic oligonucleotide
  Sense strand starting at position 3030 of SEQ ID NO: 1564180
auaguagaggcuugggaaa

SEQ ID NO: 1860478 - RNA, 19 nt, Artificial Sequence
  Description of Artificial Sequence: Synthetic oligonucleotide
  Antisense strand to SEQ ID NO: 1860477
uuucccaagccucuacuau

SEQ ID NO: 1860479 - RNA, 19 nt, Artificial Sequence
  Description of Artificial Sequence: Synthetic oligonucleotide
  Sense strand starting at position 3037 of SEQ ID NO: 1564180
aggcuugggaaaugagauu

SEQ ID NO: 1860480 - RNA, 19 nt, Artificial Sequence
  Description of Artificial Sequence: Synthetic oligonucleotide
  Antisense strand to SEQ ID NO: 1860479
aaucucauuucccaagccu

SEQ ID NO: 1860481 - RNA, 19 nt, Artificial Sequence
  Description of Artificial Sequence: Synthetic oligonucleotide
  Sense strand starting at position 3050 of SEQ ID NO: 1564180
gagauuggaucguuagcag

SEQ ID NO: 1860482 - RNA, 19 nt, Artificial Sequence
  Description of Artificial Sequence: Synthetic oligonucleotide
  Antisense strand to SEQ ID NO: 1860481
cugcuaacgauccaaucuc

SEQ ID NO: 1860483 - RNA, 19 nt, Artificial Sequence
  Description of Artificial Sequence: Synthetic oligonucleotide
  Sense strand starting at position 3064 of SEQ ID NO: 1564180
agcaguacagguuauugaa

SEQ ID NO: 1860484 - RNA, 19 nt, Artificial Sequence
  Description of Artificial Sequence: Synthetic oligonucleotide
  Antisense strand to SEQ ID NO: 1860483
uucaauaaccuguacugcu

SEQ ID NO: 1860485 - RNA, 19 nt, Artificial Sequence
  Description of Artificial Sequence: Synthetic oligonucleotide
  Sense strand starting at position 3066 of SEQ ID NO: 1564180
caguacagguuauugaaau

SEQ ID NO: 1860486 - RNA, 19 nt, Artificial Sequence
  Description of Artificial Sequence: Synthetic oligonucleotide
  Antisense strand to SEQ ID NO: 1860485
auuucaauaaccuguacug

SEQ ID NO: 1860487 - RNA, 19 nt, Artificial Sequence
  Description of Artificial Sequence: Synthetic oligonucleotide
  Sense strand starting at position 3167 of SEQ ID NO: 1564180
uugagaguacucuaacagu

SEQ ID NO: 1860488 - RNA, 19 nt, Artificial Sequence
  Description of Artificial Sequence: Synthetic oligonucleotide
  Antisense strand to SEQ ID NO: 1860487
acuguuagaguacucucaa

SEQ ID NO: 1860489 - RNA, 19 nt, Artificial Sequence
  Description of Artificial Sequence: Synthetic oligonucleotide
  Sense strand starting at position 3305 of SEQ ID NO: 1564180
agaugaaguuccuuaccuu

SEQ ID NO: 1860490 - RNA, 19 nt, Artificial Sequence
  Description of Artificial Sequence: Synthetic oligonucleotide
  Antisense strand to SEQ ID NO: 1860489
aagguaaggaacuucaucu

SEQ ID NO: 1860491 - RNA, 19 nt, Artificial Sequence
  Description of Artificial Sequence: Synthetic oligonucleotide
  Sense strand starting at position 3308 of SEQ ID NO: 1564180
ugaaguuccuuaccuugaa

SEQ ID NO: 1860492 - RNA, 19 nt, Artificial Sequence
  Description of Artificial Sequence: Synthetic oligonucleotide
  Antisense strand to SEQ ID NO: 1860491
uucaagguaaggaacuuca

SEQ ID NO: 1860493 - RNA, 19 nt, Artificial Sequence
  Description of Artificial Sequence: Synthetic oligonucleotide
  Sense strand starting at position 3321 of SEQ ID NO: 1564180
cuugaaauuuguuaugggu

SEQ ID NO: 1860494 - RNA, 19 nt, Artificial Sequence
  Description of Artificial Sequence: Synthetic oligonucleotide
  Antisense strand to SEQ ID NO: 1860493
acccauaacaaauuucaag

SEQ ID NO: 1860495 - RNA, 19 nt, Artificial Sequence
  Description of Artificial Sequence: Synthetic oligonucleotide
  Sense strand starting at position 3323 of SEQ ID NO: 1564180
ugaaauuuguuaugggucu

SEQ ID NO: 1860496 - RNA, 19 nt, Artificial Sequence
  Description of Artificial Sequence: Synthetic oligonucleotide
  Antisense strand to SEQ ID NO: 1860495
agacccauaacaaauuuca

SEQ ID NO: 1860497 - RNA, 19 nt, Artificial Sequence
  Description of Artificial Sequence: Synthetic oligonucleotide
  Sense strand starting at position 3479 of SEQ ID NO: 1564180
acugcuaagugcuuucuau

SEQ ID NO: 1860498 - RNA, 19 nt, Artificial Sequence
  Description of Artificial Sequence: Synthetic oligonucleotide
  Antisense strand to SEQ ID NO: 1860497
auagaaagcacuuagcagu

SEQ ID NO: 1860499 - RNA, 19 nt, Artificial Sequence
  Description of Artificial Sequence: Synthetic oligonucleotide
  Sense strand starting at position 3488 of SEQ ID NO: 1564180
ugcuuucuauguguuauua

SEQ ID NO: 1860500 - RNA, 19 nt, Artificial Sequence
  Description of Artificial Sequence: Synthetic oligonucleotide
  Antisense strand to SEQ ID NO: 1860499
uaauaacacauagaaagca

SEQ ID NO: 1860501 - RNA, 19 nt, Artificial Sequence
  Description of Artificial Sequence: Synthetic oligonucleotide
  Sense strand starting at position 3581 of SEQ ID NO: 1564180
gcucaaccagguuaaauaa

SEQ ID NO: 1860502 - RNA, 19 nt, Artificial Sequence
  Description of Artificial Sequence: Synthetic oligonucleotide
  Antisense strand to SEQ ID NO: 1860501
uuauuuaaccugguugagc

SEQ ID NO: 1860503 - RNA, 19 nt, Artificial Sequence
  Description of Artificial Sequence: Synthetic oligonucleotide
  Sense strand starting at position 3591 of SEQ ID NO: 1564180
guuaaauaauuugaccgaa

SEQ ID NO: 1860504 - RNA, 19 nt, Artificial Sequence
  Description of Artificial Sequence: Synthetic oligonucleotide
  Antisense strand to SEQ ID NO: 1860503
uucggucaaauuauuuaac

SEQ ID NO: 1860505 - RNA, 19 nt, Artificial Sequence
  Description of Artificial Sequence: Synthetic oligonucleotide
  Sense strand starting at position 3606 of SEQ ID NO: 1564180
cgaaaugucacgcaauuaa

SEQ ID NO: 1860506 - RNA, 19 nt, Artificial Sequence
  Description of Artificial Sequence: Synthetic oligonucleotide
  Antisense strand to SEQ ID NO: 1860505
uuaauugcgugacauuucg

SEQ ID NO: 1860507 - RNA, 19 nt, Artificial Sequence
  Description of Artificial Sequence: Synthetic oligonucleotide
  Sense strand starting at position 3617 of SEQ ID NO: 1564180
gcaauuaagaagugguaca

SEQ ID NO: 1860508 - RNA, 19 nt, Artificial Sequence
  Description of Artificial Sequence: Synthetic oligonucleotide
  Antisense strand to SEQ ID NO: 1860507
uguaccacuucuuaauugc

SEQ ID NO: 1860509 - RNA, 19 nt, Artificial Sequence
  Description of Artificial Sequence: Synthetic oligonucleotide
  Sense strand starting at position 3627 of SEQ ID NO: 1564180
agugguacagcugggaauu

SEQ ID NO: 1860510 - RNA, 19 nt, Artificial Sequence
  Description of Artificial Sequence: Synthetic oligonucleotide
  Antisense strand to SEQ ID NO: 1860509
aauucccagcuguaccacu

SEQ ID NO: 1860511 - RNA, 19 nt, Artificial Sequence
  Description of Artificial Sequence: Synthetic oligonucleotide
  Sense strand starting at position 3655 of SEQ ID NO: 1564180
gucccucugacuggugaua

SEQ ID NO: 1860512 - RNA, 19 nt, Artificial Sequence
  Description of Artificial Sequence: Synthetic oligonucleotide
  Antisense strand to SEQ ID NO: 1860511
uaucaccagucagagggac

SEQ ID NO: 1860513 - RNA, 19 nt, Artificial Sequence
  Description of Artificial Sequence: Synthetic oligonucleotide
  Sense strand starting at position 3696 of SEQ ID NO: 1564180
uucuguuuguguuuaauga

SEQ ID NO: 1860514 - RNA, 19 nt, Artificial Sequence
  Description of Artificial Sequence: Synthetic oligonucleotide
  Antisense strand to SEQ ID NO: 1860513
ucauuaaacacaaacagaa

SEQ ID NO: 1860515 - RNA, 19 nt, Artificial Sequence
  Description of Artificial Sequence: Synthetic oligonucleotide
  Sense strand starting at position 3697 of SEQ ID NO: 1564180
ucuguuuguguuuaaugau

SEQ ID NO: 1860516 - RNA, 19 nt, Artificial Sequence
  Description of Artificial Sequence: Synthetic oligonucleotide
  Antisense strand to SEQ ID NO: 1860515
aucauuaaacacaaacaga

SEQ ID NO: 1860517 - RNA, 19 nt, Artificial Sequence
  Description of Artificial Sequence: Synthetic oligonucleotide
  Sense strand starting at position 3793 of SEQ ID NO: 1564180
gcuccaaucuagucucgau

SEQ ID NO: 1860518 - RNA, 19 nt, Artificial Sequence
  Description of Artificial Sequence: Synthetic oligonucleotide
  Antisense strand to SEQ ID NO: 1860517
aucgagacuagauuggagc

SEQ ID NO: 1860519 - RNA, 19 nt, Artificial Sequence
  Description of Artificial Sequence: Synthetic oligonucleotide
  Sense strand starting at position 3885 of SEQ ID NO: 1564180
auagaaauccgaggguucu

SEQ ID NO: 1860520 - RNA, 19 nt, Artificial Sequence
  Description of Artificial Sequence: Synthetic oligonucleotide
  Antisense strand to SEQ ID NO: 1860519
agaacccucggauuucuau

SEQ ID NO: 1860521 - RNA, 19 nt, Artificial Sequence
  Description of Artificial Sequence: Synthetic oligonucleotide
  Sense strand starting at position 3886 of SEQ ID NO: 1564180
uagaaauccgaggguucuu

SEQ ID NO: 1860522 - RNA, 19 nt, Artificial Sequence
  Description of Artificial Sequence: Synthetic oligonucleotide
  Antisense strand to SEQ ID NO: 1860521
aagaacccucggauuucua

SEQ ID NO: 1860523 - RNA, 19 nt, Artificial Sequence
  Description of Artificial Sequence: Synthetic oligonucleotide
  Sense strand starting at position 3942 of SEQ ID NO: 1564180
cuggacugggcccaagauu

SEQ ID NO: 1860524 - RNA, 19 nt, Artificial Sequence
  Description of Artificial Sequence: Synthetic oligonucleotide
  Antisense strand to SEQ ID NO: 1860523
aaucuugggcccaguccag

SEQ ID NO: 1860525 - RNA, 19 nt, Artificial Sequence
  Description of Artificial Sequence: Synthetic oligonucleotide
  Sense strand starting at position 219 of SEQ ID NO: 1564181
gcuugaguggauuaaucuu

SEQ ID NO: 1860526 - RNA, 19 nt, Artificial Sequence
  Description of Artificial Sequence: Synthetic oligonucleotide
  Antisense strand to SEQ ID NO: 1860525
aagauuaauccacucaagc

SEQ ID NO: 1860527 - RNA, 19 nt, Artificial Sequence
  Description of Artificial Sequence: Synthetic oligonucleotide
  Sense strand starting at position 365 of SEQ ID NO: 1564181
ccaagaguucuaggugcac

SEQ ID NO: 1860528 - RNA, 19 nt, Artificial Sequence
  Description of Artificial Sequence: Synthetic oligonucleotide
  Antisense strand to SEQ ID NO: 1860527
gugcaccuagaacucuugg

SEQ ID NO: 1860529 - RNA, 19 nt, Artificial Sequence
  Description of Artificial Sequence: Synthetic oligonucleotide
  Sense strand starting at position 369 of SEQ ID NO: 1564181
gaguucuaggugcacaaau

SEQ ID NO: 1860530 - RNA, 19 nt, Artificial Sequence
  Description of Artificial Sequence: Synthetic oligonucleotide
  Antisense strand to SEQ ID NO: 1860529
auuugugcaccuagaacuc

SEQ ID NO: 1860531 - RNA, 19 nt, Artificial Sequence
  Description of Artificial Sequence: Synthetic oligonucleotide
  Sense strand starting at position 371 of SEQ ID NO: 1564181
guucuaggugcacaaauaa

SEQ ID NO: 1860532 - RNA, 19 nt, Artificial Sequence
  Description of Artificial Sequence: Synthetic oligonucleotide
  Antisense strand to SEQ ID NO: 1860531
uuauuugugcaccuagaac

SEQ ID NO: 1860533 - RNA, 19 nt, Artificial Sequence
  Description of Artificial Sequence: Synthetic oligonucleotide
  Sense strand starting at position 499 of SEQ ID NO: 1564181
gucuacagcucuuugauuu

SEQ ID NO: 1860534 - RNA, 19 nt, Artificial Sequence
  Description of Artificial Sequence: Synthetic oligonucleotide
  Antisense strand to SEQ ID NO: 1860533
aaaucaaagagcuguagac

SEQ ID NO: 1860535 - RNA, 19 nt, Artificial Sequence
  Description of Artificial Sequence: Synthetic oligonucleotide
  Sense strand starting at position 667 of SEQ ID NO: 1564181
auagaacaugaaugcuuua

SEQ ID NO: 1860536 - RNA, 19 nt, Artificial Sequence
  Description of Artificial Sequence: Synthetic oligonucleotide
  Antisense strand to SEQ ID NO: 1860535
uaaagcauucauguucuau

SEQ ID NO: 1860537 - RNA, 19 nt, Artificial Sequence
  Description of Artificial Sequence: Synthetic oligonucleotide
  Sense strand starting at position 690 of SEQ ID NO: 1564181
guuaguaaauuuggauaac

SEQ ID NO: 1860538 - RNA, 19 nt, Artificial Sequence
  Description of Artificial Sequence: Synthetic oligonucleotide
  Antisense strand to SEQ ID NO: 1860537
guuauccaaauuuacuaac

SEQ ID NO: 1860539 - RNA, 19 nt, Artificial Sequence
  Description of Artificial Sequence: Synthetic oligonucleotide
  Sense strand starting at position 817 of SEQ ID NO: 1564181
cuggguagacuucgaguaa

SEQ ID NO: 1860540 - RNA, 19 nt, Artificial Sequence
  Description of Artificial Sequence: Synthetic oligonucleotide
  Antisense strand to SEQ ID NO: 1860539
uuacucgaagucuacccag

SEQ ID NO: 1860541 - RNA, 19 nt, Artificial Sequence
  Description of Artificial Sequence: Synthetic oligonucleotide
  Sense strand starting at position 821 of SEQ ID NO: 1564181
guagacuucgaguaacaag

SEQ ID NO: 1860542 - RNA, 19 nt, Artificial Sequence
  Description of Artificial Sequence: Synthetic oligonucleotide
  Antisense strand to SEQ ID NO: 1860541
cuuguuacucgaagucuac

SEQ ID NO: 1860543 - RNA, 19 nt, Artificial Sequence
  Description of Artificial Sequence: Synthetic oligonucleotide
  Sense strand starting at position 853 of SEQ ID NO: 1564181
aguagucccuuguccaaga

SEQ ID NO: 1860544 - RNA, 19 nt, Artificial Sequence
  Description of Artificial Sequence: Synthetic oligonucleotide
  Antisense strand to SEQ ID NO: 1860543
ucuuggacaagggacuacu

SEQ ID NO: 1860545 - RNA, 19 nt, Artificial Sequence
  Description of Artificial Sequence: Synthetic oligonucleotide
  Sense strand starting at position 2288 of SEQ ID NO: 1564181
acgacuugagcugaaacuu

SEQ ID NO: 1860546 - RNA, 19 nt, Artificial Sequence
  Description of Artificial Sequence: Synthetic oligonucleotide
  Antisense strand to SEQ ID NO: 1860545
aaguuucagcucaagucgu

SEQ ID NO: 1860547 - RNA, 19 nt, Artificial Sequence
  Description of Artificial Sequence: Synthetic oligonucleotide
  Sense strand starting at position 2523 of SEQ ID NO: 1564181
ugggcuaucccuugcagaa

SEQ ID NO: 1860548 - RNA, 19 nt, Artificial Sequence
  Description of Artificial Sequence: Synthetic oligonucleotide
  Antisense strand to SEQ ID NO: 1860547
uucugcaagggauagccca

SEQ ID NO: 1860549 - RNA, 19 nt, Artificial Sequence
  Description of Artificial Sequence: Synthetic oligonucleotide
  Sense strand starting at position 2552 of SEQ ID NO: 1564181
agggcuucucucuaccaca

SEQ ID NO: 1860550 - RNA, 19 nt, Artificial Sequence
  Description of Artificial Sequence: Synthetic oligonucleotide
  Antisense strand to SEQ ID NO: 1860549
ugugguagagagaagcccu

SEQ ID NO: 1860551 - RNA, 19 nt, Artificial Sequence
  Description of Artificial Sequence: Synthetic oligonucleotide
  Sense strand starting at position 2609 of SEQ ID NO: 1564181
gaugguacaucggcagaaa

SEQ ID NO: 1860552 - RNA, 19 nt, Artificial Sequence
  Description of Artificial Sequence: Synthetic oligonucleotide
  Antisense strand to SEQ ID NO: 1860551
uuucugccgauguaccauc

SEQ ID NO: 1860553 - RNA, 19 nt, Artificial Sequence
  Description of Artificial Sequence: Synthetic oligonucleotide
  Sense strand starting at position 2639 of SEQ ID NO: 1564181
auaguagaggcuugggaaa

SEQ ID NO: 1860554 - RNA, 19 nt, Artificial Sequence
  Description of Artificial Sequence: Synthetic oligonucleotide
  Antisense strand to SEQ ID NO: 1860553
uuucccaagccucuacuau

SEQ ID NO: 1860555 - RNA, 19 nt, Artificial Sequence
  Description of Artificial Sequence: Synthetic oligonucleotide
  Sense strand starting at position 2646 of SEQ ID NO: 1564181
aggcuugggaaaugagauu

SEQ ID NO: 1860556 - RNA, 19 nt, Artificial Sequence
  Description of Artificial Sequence: Synthetic oligonucleotide
  Antisense strand to SEQ ID NO: 1860555
aaucucauuucccaagccu

SEQ ID NO: 1860557 - RNA, 19 nt, Artificial Sequence
  Description of Artificial Sequence: Synthetic oligonucleotide
  Sense strand starting at position 2659 of SEQ ID NO: 1564181
gagauuggaucguuagcag

SEQ ID NO: 1860558 - RNA, 19 nt, Artificial Sequence
  Description of Artificial Sequence: Synthetic oligonucleotide
  Antisense strand to SEQ ID NO: 1860557
cugcuaacgauccaaucuc

SEQ ID NO: 1860559 - RNA, 19 nt, Artificial Sequence
  Description of Artificial Sequence: Synthetic oligonucleotide
  Sense strand starting at position 2673 of SEQ ID NO: 1564181
agcaguacagguuauugaa

SEQ ID NO: 1860560 - RNA, 19 nt, Artificial Sequence
  Description of Artificial Sequence: Synthetic oligonucleotide
  Antisense strand to SEQ ID NO: 1860559
uucaauaaccuguacugcu

SEQ ID NO: 1860561 - RNA, 19 nt, Artificial Sequence
  Description of Artificial Sequence: Synthetic oligonucleotide
  Sense strand starting at position 2675 of SEQ ID NO: 1564181
caguacagguuauugaaau

SEQ ID NO: 1860562 - RNA, 19 nt, Artificial Sequence
  Description of Artificial Sequence: Synthetic oligonucleotide
  Antisense strand to SEQ ID NO: 1860561
auuucaauaaccuguacug

SEQ ID NO: 1860563 - RNA, 19 nt, Artificial Sequence
  Description of Artificial Sequence: Synthetic oligonucleotide
  Sense strand starting at position 2776 of SEQ ID NO: 1564181
uugagaguacucuaacagu

SEQ ID NO: 1860564 - RNA, 19 nt, Artificial Sequence
  Description of Artificial Sequence: Synthetic oligonucleotide
  Antisense strand to SEQ ID NO: 1860563
acuguuagaguacucucaa

SEQ ID NO: 1860565 - RNA, 19 nt, Artificial Sequence
  Description of Artificial Sequence: Synthetic oligonucleotide
  Sense strand starting at position 2914 of SEQ ID NO: 1564181
agaugaaguuccuuaccuu

SEQ ID NO: 1860566 - RNA, 19 nt, Artificial Sequence
  Description of Artificial Sequence: Synthetic oligonucleotide
  Antisense strand to SEQ ID NO: 1860565
aagguaaggaacuucaucu

SEQ ID NO: 1860567 - RNA, 19 nt, Artificial Sequence
  Description of Artificial Sequence: Synthetic oligonucleotide
  Sense strand starting at position 2917 of SEQ ID NO: 1564181
ugaaguuccuuaccuugaa

SEQ ID NO: 1860568 - RNA, 19 nt, Artificial Sequence
  Description of Artificial Sequence: Synthetic oligonucleotide
  Antisense strand to SEQ ID NO: 1860567
uucaagguaaggaacuuca

SEQ ID NO: 1860569 - RNA, 19 nt, Artificial Sequence
  Description of Artificial Sequence: Synthetic oligonucleotide
  Sense strand starting at position 2930 of SEQ ID NO: 1564181
cuugaaauuuguuaugggu

SEQ ID NO: 1860570 - RNA, 19 nt, Artificial Sequence
  Description of Artificial Sequence: Synthetic oligonucleotide
  Antisense strand to SEQ ID NO: 1860569
acccauaacaaauuucaag

SEQ ID NO: 1860571 - RNA, 19 nt, Artificial Sequence
  Description of Artificial Sequence: Synthetic oligonucleotide
  Sense strand starting at position 3190 of SEQ ID NO: 1564181
gcucaaccagguuaaauaa

SEQ ID NO: 1860572 - RNA, 19 nt, Artificial Sequence
  Description of Artificial Sequence: Synthetic oligonucleotide
  Antisense strand to SEQ ID NO: 1860571
uuauuuaaccugguugagc

SEQ ID NO: 1860573 - RNA, 19 nt, Artificial Sequence
  Description of Artificial Sequence: Synthetic oligonucleotide
  Sense strand starting at position 3200 of SEQ ID NO: 1564181
guuaaauaauuugaccgaa

SEQ ID NO: 1860574 - RNA, 19 nt, Artificial Sequence
  Description of Artificial Sequence: Synthetic oligonucleotide
  Antisense strand to SEQ ID NO: 1860573
uucggucaaauuauuuaac

SEQ ID NO: 1860575 - RNA, 19 nt, Artificial Sequence
  Description of Artificial Sequence: Synthetic oligonucleotide
  Sense strand starting at position 3215 of SEQ ID NO: 1564181
cgaaaugucacgcaauuaa

SEQ ID NO: 1860576 - RNA, 19 nt, Artificial Sequence
  Description of Artificial Sequence: Synthetic oligonucleotide
  Antisense strand to SEQ ID NO: 1860575
uuaauugcgugacauuucg

SEQ ID NO: 1860577 - RNA, 19 nt, Artificial Sequence
  Description of Artificial Sequence: Synthetic oligonucleotide
  Sense strand starting at position 3226 of SEQ ID NO: 1564181
gcaauuaagaagugguaca

SEQ ID NO: 1860578 - RNA, 19 nt, Artificial Sequence
  Description of Artificial Sequence: Synthetic oligonucleotide
  Antisense strand to SEQ ID NO: 1860577
uguaccacuucuuaauugc

SEQ ID NO: 1860579 - RNA, 19 nt, Artificial Sequence
  Description of Artificial Sequence: Synthetic oligonucleotide
  Sense strand starting at position 3236 of SEQ ID NO: 1564181
agugguacagcugggaauu

SEQ ID NO: 1860580 - RNA, 19 nt, Artificial Sequence
  Description of Artificial Sequence: Synthetic oligonucleotide
  Antisense strand to SEQ ID NO: 1860579
aauucccagcuguaccacu

SEQ ID NO: 1860581 - RNA, 19 nt, Artificial Sequence
  Description of Artificial Sequence: Synthetic oligonucleotide
  Sense strand starting at position 3264 of SEQ ID NO: 1564181
gucccucugacuggugaua

SEQ ID NO: 1860582 - RNA, 19 nt, Artificial Sequence
  Description of Artificial Sequence: Synthetic oligonucleotide
  Antisense strand to SEQ ID NO: 1860581
uaucaccagucagagggac

SEQ ID NO: 1860583 - RNA, 19 nt, Artificial Sequence
  Description of Artificial Sequence: Synthetic oligonucleotide
  Sense strand starting at position 3305 of SEQ ID NO: 1564181
uucuguuuguguuuaauga

SEQ ID NO: 1860584 - RNA, 19 nt, Artificial Sequence
  Description of Artificial Sequence: Synthetic oligonucleotide
  Antisense strand to SEQ ID NO: 1860583
ucauuaaacacaaacagaa

SEQ ID NO: 1860585 - RNA, 19 nt, Artificial Sequence
  Description of Artificial Sequence: Synthetic oligonucleotide
  Sense strand starting at position 3306 of SEQ ID NO: 1564181
ucuguuuguguuuaaugau

SEQ ID NO: 1860586 - RNA, 19 nt, Artificial Sequence
  Description of Artificial Sequence: Synthetic oligonucleotide
  Antisense strand to SEQ ID NO: 1860585
aucauuaaacacaaacaga

SEQ ID NO: 1860587 - RNA, 19 nt, Artificial Sequence
  Description of Artificial Sequence: Synthetic oligonucleotide
  Sense strand starting at position 3494 of SEQ ID NO: 1564181
auagaaauccgaggguucu

SEQ ID NO: 1860588 - RNA, 19 nt, Artificial Sequence
  Description of Artificial Sequence: Synthetic oligonucleotide
  Antisense strand to SEQ ID NO: 1860587
agaacccucggauuucuau

SEQ ID NO: 1860589 - RNA, 19 nt, Artificial Sequence
  Description of Artificial Sequence: Synthetic oligonucleotide
  Sense strand starting at position 3495 of SEQ ID NO: 1564181
uagaaauccgaggguucuu

SEQ ID NO: 1860590 - RNA, 19 nt, Artificial Sequence
  Description of Artificial Sequence: Synthetic oligonucleotide
  Antisense strand to SEQ ID NO: 1860589
aagaacccucggauuucua

SEQ ID NO: 1860591 - RNA, 19 nt, Artificial Sequence
  Description of Artificial Sequence: Synthetic oligonucleotide
  Sense strand starting at position 3551 of SEQ ID NO: 1564181
cuggacugggcccaagauu

SEQ ID NO: 1860592 - RNA, 19 nt, Artificial Sequence
  Description of Artificial Sequence: Synthetic oligonucleotide
  Antisense strand to SEQ ID NO: 1860591
aaucuugggcccaguccag

SEQ ID NO: 1860593 - RNA, 19 nt, Artificial Sequence
  Description of Artificial Sequence: Synthetic oligonucleotide
  Sense strand starting at position 3594 of SEQ ID NO: 1564181
uggugaugauguuuagauc

SEQ ID NO: 1860594 - RNA, 19 nt, Artificial Sequence
  Description of Artificial Sequence: Synthetic oligonucleotide
  Antisense strand to SEQ ID NO: 1860593
gaucuaaacaucaucacca

SEQ ID NO: 1860595 - RNA, 19 nt, Artificial Sequence
  Description of Artificial Sequence: Synthetic oligonucleotide
  Sense strand starting at position 3595 of SEQ ID NO: 1564181
ggugaugauguuuagauca

SEQ ID NO: 1860596 - RNA, 19 nt, Artificial Sequence
  Description of Artificial Sequence: Synthetic oligonucleotide
  Antisense strand to SEQ ID NO: 1860595
ugaucuaaacaucaucacc

SEQ ID NO: 1860597 - RNA, 19 nt, Artificial Sequence
  Description of Artificial Sequence: Synthetic oligonucleotide
  Sense strand starting at position 3600 of SEQ ID NO: 1564181
ugauguuuagaucacacuu

SEQ ID NO: 1860598 - RNA, 19 nt, Artificial Sequence
  Description of Artificial Sequence: Synthetic oligonucleotide
  Antisense strand to SEQ ID NO: 1860597
aagugugaucuaaacauca

SEQ ID NO: 1860599 - RNA, 19 nt, Artificial Sequence
  Description of Artificial Sequence: Synthetic oligonucleotide
  Sense strand starting at position 3623 of SEQ ID NO: 1564181
gucgcaagggucugaauca

SEQ ID NO: 1860600 - RNA, 19 nt, Artificial Sequence
  Description of Artificial Sequence: Synthetic oligonucleotide
  Antisense strand to SEQ ID NO: 1860599
ugauucagacccuugcgac

SEQ ID NO: 1860601 - RNA, 19 nt, Artificial Sequence
  Description of Artificial Sequence: Synthetic oligonucleotide
  Sense strand starting at position 3745 of SEQ ID NO: 1564181
guaguucuuucuucuuauu

SEQ ID NO: 1860602 - RNA, 19 nt, Artificial Sequence
  Description of Artificial Sequence: Synthetic oligonucleotide
  Antisense strand to SEQ ID NO: 1860601
aauaagaagaaagaacuac

SEQ ID NO: 1860603 - RNA, 19 nt, Artificial Sequence
  Description of Artificial Sequence: Synthetic oligonucleotide
  Sense strand starting at position 3975 of SEQ ID NO: 1564181
ugaauucuccacugagguu

SEQ ID NO: 1860604 - RNA, 19 nt, Artificial Sequence
  Description of Artificial Sequence: Synthetic oligonucleotide
  Antisense strand to SEQ ID NO: 1860603
aaccucaguggagaauuca

SEQ ID NO: 1860605 - RNA, 19 nt, Artificial Sequence
  Description of Artificial Sequence: Synthetic oligonucleotide
  Sense strand starting at position 93 of SEQ ID NO: 1564182
aaugauuuguaugaaucga

SEQ ID NO: 1860606 - RNA, 19 nt, Artificial Sequence
  Description of Artificial Sequence: Synthetic oligonucleotide
  Antisense strand to SEQ ID NO: 1860605
ucgauucauacaaaucauu

SEQ ID NO: 1860607 - RNA, 19 nt, Artificial Sequence
  Description of Artificial Sequence: Synthetic oligonucleotide
  Sense strand starting at position 363 of SEQ ID NO: 1564182
gggaaugacugagaagacu

SEQ ID NO: 1860608 - RNA, 19 nt, Artificial Sequence
  Description of Artificial Sequence: Synthetic oligonucleotide
  Antisense strand to SEQ ID NO: 1860607
agucuucucagucauuccc

SEQ ID NO: 1860609 - RNA, 19 nt, Artificial Sequence
  Description of Artificial Sequence: Synthetic oligonucleotide
  Sense strand starting at position 396 of SEQ ID NO: 1564182
uuugguguacguuaagaag

SEQ ID NO: 1860610 - RNA, 19 nt, Artificial Sequence
  Description of Artificial Sequence: Synthetic oligonucleotide
  Antisense strand to SEQ ID NO: 1860609
cuucuuaacguacaccaaa

SEQ ID NO: 1860611 - RNA, 19 nt, Artificial Sequence
  Description of Artificial Sequence: Synthetic oligonucleotide
  Sense strand starting at position 451 of SEQ ID NO: 1564182
agcuguuuacacgaaguca

SEQ ID NO: 1860612 - RNA, 19 nt, Artificial Sequence
  Description of Artificial Sequence: Synthetic oligonucleotide
  Antisense strand to SEQ ID NO: 1860611
ugacuucguguaaacagcu

SEQ ID NO: 1860613 - RNA, 19 nt, Artificial Sequence
  Description of Artificial Sequence: Synthetic oligonucleotide
  Sense strand starting at position 494 of SEQ ID NO: 1564182
ugcagaucccugcgauuua

SEQ ID NO: 1860614 - RNA, 19 nt, Artificial Sequence
  Description of Artificial Sequence: Synthetic oligonucleotide
  Antisense strand to SEQ ID NO: 1860613
uaaaucgcagggaucugca

SEQ ID NO: 1860615 - RNA, 19 nt, Artificial Sequence
  Description of Artificial Sequence: Synthetic oligonucleotide
  Sense strand starting at position 531 of SEQ ID NO: 1564182
uggcauaucaagggagagu

SEQ ID NO: 1860616 - RNA, 19 nt, Artificial Sequence
  Description of Artificial Sequence: Synthetic oligonucleotide
  Antisense strand to SEQ ID NO: 1860615
acucucccuugauaugcca

SEQ ID NO: 1860617 - RNA, 19 nt, Artificial Sequence
  Description of Artificial Sequence: Synthetic oligonucleotide
  Sense strand starting at position 544 of SEQ ID NO: 1564182
gagagugaucaggaugcuu

SEQ ID NO: 1860618 - RNA, 19 nt, Artificial Sequence
  Description of Artificial Sequence: Synthetic oligonucleotide
  Antisense strand to SEQ ID NO: 1860617
aagcauccugaucacucuc

SEQ ID NO: 1860619 - RNA, 19 nt, Artificial Sequence
  Description of Artificial Sequence: Synthetic oligonucleotide
  Sense strand starting at position 546 of SEQ ID NO: 1564182
gagugaucaggaugcuuaa

SEQ ID NO: 1860620 - RNA, 19 nt, Artificial Sequence
  Description of Artificial Sequence: Synthetic oligonucleotide
  Antisense strand to SEQ ID NO: 1860619
uuaagcauccugaucacuc

SEQ ID NO: 1860621 - RNA, 19 nt, Artificial Sequence
  Description of Artificial Sequence: Synthetic oligonucleotide
  Sense strand starting at position 904 of SEQ ID NO: 1564182
uucuuaggaaucgguaaca

SEQ ID NO: 1860622 - RNA, 19 nt, Artificial Sequence
  Description of Artificial Sequence: Synthetic oligonucleotide
  Antisense strand to SEQ ID NO: 1860621
uguuaccgauuccuaagaa

SEQ ID NO: 1860623 - RNA, 19 nt, Artificial Sequence
  Description of Artificial Sequence: Synthetic oligonucleotide
  Sense strand starting at position 1227 of SEQ ID NO: 1564182
agaagauuccgacagccca

SEQ ID NO: 1860624 - RNA, 19 nt, Artificial Sequence
  Description of Artificial Sequence: Synthetic oligonucleotide
  Antisense strand to SEQ ID NO: 1860623
ugggcugucggaaucuucu

SEQ ID NO: 1860625 - RNA, 19 nt, Artificial Sequence
  Description of Artificial Sequence: Synthetic oligonucleotide
  Sense strand starting at position 1247 of SEQ ID NO: 1564182
agacaaacucgucaucuga

SEQ ID NO: 1860626 - RNA, 19 nt, Artificial Sequence
  Description of Artificial Sequence: Synthetic oligonucleotide
  Antisense strand to SEQ ID NO: 1860625
ucagaugacgaguuugucu

SEQ ID NO: 1860627 - RNA, 19 nt, Artificial Sequence
  Description of Artificial Sequence: Synthetic oligonucleotide
  Sense strand starting at position 1249 of SEQ ID NO: 1564182
acaaacucgucaucugaga

SEQ ID NO: 1860628 - RNA, 19 nt, Artificial Sequence
  Description of Artificial Sequence: Synthetic oligonucleotide
  Antisense strand to SEQ ID NO: 1860627
ucucagaugacgaguuugu

SEQ ID NO: 1860629 - RNA, 19 nt, Artificial Sequence
  Description of Artificial Sequence: Synthetic oligonucleotide
  Sense strand starting at position 1256 of SEQ ID NO: 1564182
cgucaucugagauacauag

SEQ ID NO: 1860630 - RNA, 19 nt, Artificial Sequence
  Description of Artificial Sequence: Synthetic oligonucleotide
  Antisense strand to SEQ ID NO: 1860629
cuauguaucucagaugacg

SEQ ID NO: 1860631 - RNA, 19 nt, Artificial Sequence
  Description of Artificial Sequence: Synthetic oligonucleotide
  Sense strand starting at position 1396 of SEQ ID NO: 1564182
augacaucuccugaugcaa

SEQ ID NO: 1860632 - RNA, 19 nt, Artificial Sequence
  Description of Artificial Sequence: Synthetic oligonucleotide
  Antisense strand to SEQ ID NO: 1860631
uugcaucaggagaugucau

SEQ ID NO: 1860633 - RNA, 19 nt, Artificial Sequence
  Description of Artificial Sequence: Synthetic oligonucleotide
  Sense strand starting at position 1502 of SEQ ID NO: 1564182
aagcgauuugcaugucacu

SEQ ID NO: 1860634 - RNA, 19 nt, Artificial Sequence
  Description of Artificial Sequence: Synthetic oligonucleotide
  Antisense strand to SEQ ID NO: 1860633
agugacaugcaaaucgcuu

SEQ ID NO: 1860635 - RNA, 19 nt, Artificial Sequence
  Description of Artificial Sequence: Synthetic oligonucleotide
  Sense strand starting at position 1508 of SEQ ID NO: 1564182
uuugcaugucacuaauuag

SEQ ID NO: 1860636 - RNA, 19 nt, Artificial Sequence
  Description of Artificial Sequence: Synthetic oligonucleotide
  Antisense strand to SEQ ID NO: 1860635
cuaauuagugacaugcaaa

SEQ ID NO: 1860637 - RNA, 19 nt, Artificial Sequence
  Description of Artificial Sequence: Synthetic oligonucleotide
  Sense strand starting at position 1731 of SEQ ID NO: 1564182
ggaauagacgcuuaccuua

SEQ ID NO: 1860638 - RNA, 19 nt, Artificial Sequence
  Description of Artificial Sequence: Synthetic oligonucleotide
  Antisense strand to SEQ ID NO: 1860637
uaagguaagcgucuauucc

SEQ ID NO: 1860639 - RNA, 19 nt, Artificial Sequence
  Description of Artificial Sequence: Synthetic oligonucleotide
  Sense strand starting at position 2040 of SEQ ID NO: 1564182
ucaggugauccugguaaac

SEQ ID NO: 1860640 - RNA, 19 nt, Artificial Sequence
  Description of Artificial Sequence: Synthetic oligonucleotide
  Antisense strand to SEQ ID NO: 1860639
guuuaccaggaucaccuga

SEQ ID NO: 1860641 - RNA, 19 nt, Artificial Sequence
  Description of Artificial Sequence: Synthetic oligonucleotide
  Sense strand starting at position 2049 of SEQ ID NO: 1564182
ccugguaaaccggauucuu

SEQ ID NO: 1860642 - RNA, 19 nt, Artificial Sequence
  Description of Artificial Sequence: Synthetic oligonucleotide
  Antisense strand to SEQ ID NO: 1860641
aagaauccgguuuaccagg

SEQ ID NO: 1860643 - RNA, 19 nt, Artificial Sequence
  Description of Artificial Sequence: Synthetic oligonucleotide
  Sense strand starting at position 2089 of SEQ ID NO: 1564182
uucgguaugauuuguguca

SEQ ID NO: 1860644 - RNA, 19 nt, Artificial Sequence
  Description of Artificial Sequence: Synthetic oligonucleotide
  Antisense strand to SEQ ID NO: 1860643
ugacacaaaucauaccgaa

SEQ ID NO: 1860645 - RNA, 19 nt, Artificial Sequence
  Description of Artificial Sequence: Synthetic oligonucleotide
  Sense strand starting at position 2090 of SEQ ID NO: 1564182
ucgguaugauuugugucaa

SEQ ID NO: 1860646 - RNA, 19 nt, Artificial Sequence
  Description of Artificial Sequence: Synthetic oligonucleotide
  Antisense strand to SEQ ID NO: 1860645
uugacacaaaucauaccga

SEQ ID NO: 1860647 - RNA, 19 nt, Artificial Sequence
  Description of Artificial Sequence: Synthetic oligonucleotide
  Sense strand starting at position 2326 of SEQ ID NO: 1564182
uucuuauaagaguaagcuu

SEQ ID NO: 1860648 - RNA, 19 nt, Artificial Sequence
  Description of Artificial Sequence: Synthetic oligonucleotide
  Antisense strand to SEQ ID NO: 1860647
aagcuuacucuuauaagaa

SEQ ID NO: 1860649 - RNA, 19 nt, Artificial Sequence
  Description of Artificial Sequence: Synthetic oligonucleotide
  Sense strand starting at position 2559 of SEQ ID NO: 1564182
cuugguggaucccuugaau

SEQ ID NO: 1860650 - RNA, 19 nt, Artificial Sequence
  Description of Artificial Sequence: Synthetic oligonucleotide
  Antisense strand to SEQ ID NO: 1860649
auucaagggauccaccaag

SEQ ID NO: 1860651 - RNA, 19 nt, Artificial Sequence
  Description of Artificial Sequence: Synthetic oligonucleotide
  Sense strand starting at position 2620 of SEQ ID NO: 1564182
agagguugcuaaguugaaa

SEQ ID NO: 1860652 - RNA, 19 nt, Artificial Sequence
  Description of Artificial Sequence: Synthetic oligonucleotide
  Antisense strand to SEQ ID NO: 1860651
uuucaacuuagcaaccucu

SEQ ID NO: 1860653 - RNA, 19 nt, Artificial Sequence
  Description of Artificial Sequence: Synthetic oligonucleotide
  Sense strand starting at position 2633 of SEQ ID NO: 1564182
uugaaauaccaccgacauu

SEQ ID NO: 1860654 - RNA, 19 nt, Artificial Sequence
  Description of Artificial Sequence: Synthetic oligonucleotide
  Antisense strand to SEQ ID NO: 1860653
aaugucggugguauuucaa

SEQ ID NO: 1860655 - RNA, 19 nt, Artificial Sequence
  Description of Artificial Sequence: Synthetic oligonucleotide
  Sense strand starting at position 2662 of SEQ ID NO: 1564182
acccgaacccuuugaucuu

SEQ ID NO: 1860656 - RNA, 19 nt, Artificial Sequence
  Description of Artificial Sequence: Synthetic oligonucleotide
  Antisense strand to SEQ ID NO: 1860655
aagaucaaaggguucgggu

SEQ ID NO: 1860657 - RNA, 19 nt, Artificial Sequence
  Description of Artificial Sequence: Synthetic oligonucleotide
  Sense strand starting at position 2747 of SEQ ID NO: 1564182
uccugaaucuuguucuaag

SEQ ID NO: 1860658 - RNA, 19 nt, Artificial Sequence
  Description of Artificial Sequence: Synthetic oligonucleotide
  Antisense strand to SEQ ID NO: 1860657
cuuagaacaagauucagga

SEQ ID NO: 1860659 - RNA, 19 nt, Artificial Sequence
  Description of Artificial Sequence: Synthetic oligonucleotide
  Sense strand starting at position 2748 of SEQ ID NO: 1564182
ccugaaucuuguucuaaga

SEQ ID NO: 1860660 - RNA, 19 nt, Artificial Sequence
  Description of Artificial Sequence: Synthetic oligonucleotide
  Antisense strand to SEQ ID NO: 1860659
ucuuagaacaagauucagg

SEQ ID NO: 1860661 - RNA, 19 nt, Artificial Sequence
  Description of Artificial Sequence: Synthetic oligonucleotide
  Sense strand starting at position 2844 of SEQ ID NO: 1564182
gaucauucucuauaggguu

SEQ ID NO: 1860662 - RNA, 19 nt, Artificial Sequence
  Description of Artificial Sequence: Synthetic oligonucleotide
  Antisense strand to SEQ ID NO: 1860661
aacccuauagagaaugauc

SEQ ID NO: 1860663 - RNA, 19 nt, Artificial Sequence
  Description of Artificial Sequence: Synthetic oligonucleotide
  Sense strand starting at position 2884 of SEQ ID NO: 1564182
aggcgaugucuauauucuu

SEQ ID NO: 1860664 - RNA, 19 nt, Artificial Sequence
  Description of Artificial Sequence: Synthetic oligonucleotide
  Antisense strand to SEQ ID NO: 1860663
aagaauauagacaucgccu

SEQ ID NO: 1860665 - RNA, 19 nt, Artificial Sequence
  Description of Artificial Sequence: Synthetic oligonucleotide
  Sense strand starting at position 2935 of SEQ ID NO: 1564182
agauuagugacgcauacau

SEQ ID NO: 1860666 - RNA, 19 nt, Artificial Sequence
  Description of Artificial Sequence: Synthetic oligonucleotide
  Antisense strand to SEQ ID NO: 1860665
auguaugcgucacuaaucu

SEQ ID NO: 1860667 - RNA, 19 nt, Artificial Sequence
  Description of Artificial Sequence: Synthetic oligonucleotide
  Sense strand starting at position 2937 of SEQ ID NO: 1564182
auuagugacgcauacauaa

SEQ ID NO: 1860668 - RNA, 19 nt, Artificial Sequence
  Description of Artificial Sequence: Synthetic oligonucleotide
  Antisense strand to SEQ ID NO: 1860667
uuauguaugcgucacuaau

SEQ ID NO: 1860669 - RNA, 19 nt, Artificial Sequence
  Description of Artificial Sequence: Synthetic oligonucleotide
  Sense strand starting at position 2972 of SEQ ID NO: 1564182
ucagcaaucccgcaggaaa

SEQ ID NO: 1860670 - RNA, 19 nt, Artificial Sequence
  Description of Artificial Sequence: Synthetic oligonucleotide
  Antisense strand to SEQ ID NO: 1860669
uuuccugcgggauugcuga

SEQ ID NO: 1860671 - RNA, 19 nt, Artificial Sequence
  Description of Artificial Sequence: Synthetic oligonucleotide
  Sense strand starting at position 3140 of SEQ ID NO: 1564182
guauaaagguuccuuagaa

SEQ ID NO: 1860672 - RNA, 19 nt, Artificial Sequence
  Description of Artificial Sequence: Synthetic oligonucleotide
  Antisense strand to SEQ ID NO: 1860671
uucuaaggaaccuuuauac

SEQ ID NO: 1860673 - RNA, 19 nt, Artificial Sequence
  Description of Artificial Sequence: Synthetic oligonucleotide
  Sense strand starting at position 3305 of SEQ ID NO: 1564182
guuccaguucugcaaagau

SEQ ID NO: 1860674 - RNA, 19 nt, Artificial Sequence
  Description of Artificial Sequence: Synthetic oligonucleotide
  Antisense strand to SEQ ID NO: 1860673
aucuuugcagaacuggaac

SEQ ID NO: 1860675 - RNA, 19 nt, Artificial Sequence
  Description of Artificial Sequence: Synthetic oligonucleotide
  Sense strand starting at position 3423 of SEQ ID NO: 1564182
gccagauuguuacccaaca

SEQ ID NO: 1860676 - RNA, 19 nt, Artificial Sequence
  Description of Artificial Sequence: Synthetic oligonucleotide
  Antisense strand to SEQ ID NO: 1860675
uguuggguaacaaucuggc

SEQ ID NO: 1860677 - RNA, 19 nt, Artificial Sequence
  Description of Artificial Sequence: Synthetic oligonucleotide
  Sense strand starting at position 3671 of SEQ ID NO: 1564182
gggacucuagccuggugaa

SEQ ID NO: 1860678 - RNA, 19 nt, Artificial Sequence
  Description of Artificial Sequence: Synthetic oligonucleotide
  Antisense strand to SEQ ID NO: 1860677
uucaccaggcuagaguccc

SEQ ID NO: 1860679 - RNA, 19 nt, Artificial Sequence
  Description of Artificial Sequence: Synthetic oligonucleotide
  Sense strand starting at position 3695 of SEQ ID NO: 1564182
ggcuuugcucuacaaauac

SEQ ID NO: 1860680 - RNA, 19 nt, Artificial Sequence
  Description of Artificial Sequence: Synthetic oligonucleotide
  Antisense strand to SEQ ID NO: 1860679
guauuuguagagcaaagcc

SEQ ID NO: 1860681 - RNA, 19 nt, Artificial Sequence
  Description of Artificial Sequence: Synthetic oligonucleotide
  Sense strand starting at position 3822 of SEQ ID NO: 1564182
guuggaugagaugggcaua

SEQ ID NO: 1860682 - RNA, 19 nt, Artificial Sequence
  Description of Artificial Sequence: Synthetic oligonucleotide
  Antisense strand to SEQ ID NO: 1860681
uaugcccaucucauccaac

SEQ ID NO: 1860683 - RNA, 19 nt, Artificial Sequence
  Description of Artificial Sequence: Synthetic oligonucleotide
  Sense strand starting at position 3834 of SEQ ID NO: 1564182
gggcauacuauugggacua

SEQ ID NO: 1860684 - RNA, 19 nt, Artificial Sequence
  Description of Artificial Sequence: Synthetic oligonucleotide
  Antisense strand to SEQ ID NO: 1860683
uagucccaauaguaugccc

SEQ ID NO: 1860685 - RNA, 19 nt, Artificial Sequence
  Description of Artificial Sequence: Synthetic oligonucleotide
  Sense strand starting at position 2128 of SEQ ID NO: 1564183
gugggcaucugcccagaaa

SEQ ID NO: 1860686 - RNA, 19 nt, Artificial Sequence
  Description of Artificial Sequence: Synthetic oligonucleotide
  Antisense strand to SEQ ID NO: 1860685
uuucugggcagaugcccac

SEQ ID NO: 1860687 - RNA, 19 nt, Artificial Sequence
  Description of Artificial Sequence: Synthetic oligonucleotide
  Sense strand starting at position 2167 of SEQ ID NO: 1564183
acccaaucuguuugagggu

SEQ ID NO: 1860688 - RNA, 19 nt, Artificial Sequence
  Description of Artificial Sequence: Synthetic oligonucleotide
  Antisense strand to SEQ ID NO: 1860687
acccucaaacagauugggu

SEQ ID NO: 1860689 - RNA, 19 nt, Artificial Sequence
  Description of Artificial Sequence: Synthetic oligonucleotide
  Sense strand starting at position 2628 of SEQ ID NO: 1564183
acgguauagauguaucuuu

SEQ ID NO: 1860690 - RNA, 19 nt, Artificial Sequence
  Description of Artificial Sequence: Synthetic oligonucleotide
  Antisense strand to SEQ ID NO: 1860689
aaagauacaucuauaccgu

SEQ ID NO: 1860691 - RNA, 19 nt, Artificial Sequence
  Description of Artificial Sequence: Synthetic oligonucleotide
  Sense strand starting at position 2681 of SEQ ID NO: 1564183
gccgcugucgggaaaucau

SEQ ID NO: 1860692 - RNA, 19 nt, Artificial Sequence
  Description of Artificial Sequence: Synthetic oligonucleotide
  Antisense strand to SEQ ID NO: 1860691
augauuucccgacagcggc

SEQ ID NO: 1860693 - RNA, 19 nt, Artificial Sequence
  Description of Artificial Sequence: Synthetic oligonucleotide
  Sense strand starting at position 2688 of SEQ ID NO: 1564183
ucgggaaaucaugggaagu

SEQ ID NO: 1860694 - RNA, 19 nt, Artificial Sequence
  Description of Artificial Sequence: Synthetic oligonucleotide
  Antisense strand to SEQ ID NO: 1860693
acuucccaugauuucccga

SEQ ID NO: 1860695 - RNA, 19 nt, Artificial Sequence
  Description of Artificial Sequence: Synthetic oligonucleotide
  Sense strand starting at position 2689 of SEQ ID NO: 1564183
cgggaaaucaugggaaguu

SEQ ID NO: 1860696 - RNA, 19 nt, Artificial Sequence
  Description of Artificial Sequence: Synthetic oligonucleotide
  Antisense strand to SEQ ID NO: 1860695
aacuucccaugauuucccg

SEQ ID NO: 1860697 - RNA, 19 nt, Artificial Sequence
  Description of Artificial Sequence: Synthetic oligonucleotide
  Sense strand starting at position 2701 of SEQ ID NO: 1564183
ggaaguugucacugaucuu

SEQ ID NO: 1860698 - RNA, 19 nt, Artificial Sequence
  Description of Artificial Sequence: Synthetic oligonucleotide
  Antisense strand to SEQ ID NO: 1860697
aagaucagugacaacuucc

SEQ ID NO: 1860699 - RNA, 19 nt, Artificial Sequence
  Description of Artificial Sequence: Synthetic oligonucleotide
  Sense strand starting at position 2708 of SEQ ID NO: 1564183
gucacugaucuugguggaa

SEQ ID NO: 1860700 - RNA, 19 nt, Artificial Sequence
  Description of Artificial Sequence: Synthetic oligonucleotide
  Antisense strand to SEQ ID NO: 1860699
uuccaccaagaucagugac

SEQ ID NO: 1860701 - RNA, 19 nt, Artificial Sequence
  Description of Artificial Sequence: Synthetic oligonucleotide
  Sense strand starting at position 2711 of SEQ ID NO: 1564183
acugaucuugguggaaacu

SEQ ID NO: 1860702 - RNA, 19 nt, Artificial Sequence
  Description of Artificial Sequence: Synthetic oligonucleotide
  Antisense strand to SEQ ID NO: 1860701
aguuuccaccaagaucagu

SEQ ID NO: 1860703 - RNA, 19 nt, Artificial Sequence
  Description of Artificial Sequence: Synthetic oligonucleotide
  Sense strand starting at position 2912 of SEQ ID NO: 1564183
gguguucauguagaugcau

SEQ ID NO: 1860704 - RNA, 19 nt, Artificial Sequence
  Description of Artificial Sequence: Synthetic oligonucleotide
  Antisense strand to SEQ ID NO: 1860703
augcaucuacaugaacacc

SEQ ID NO: 1860705 - RNA, 19 nt, Artificial Sequence
  Description of Artificial Sequence: Synthetic oligonucleotide
  Sense strand starting at position 2965 of SEQ ID NO: 1564183
uuuauuucuccauguguug

SEQ ID NO: 1860706 - RNA, 19 nt, Artificial Sequence
  Description of Artificial Sequence: Synthetic oligonucleotide
  Antisense strand to SEQ ID NO: 1860705
caacacauggagaaauaaa

SEQ ID NO: 1860707 - RNA, 19 nt, Artificial Sequence
  Description of Artificial Sequence: Synthetic oligonucleotide
  Sense strand starting at position 3019 of SEQ ID NO: 1564183
gggucauuacauugucuau

SEQ ID NO: 1860708 - RNA, 19 nt, Artificial Sequence
  Description of Artificial Sequence: Synthetic oligonucleotide
  Antisense strand to SEQ ID NO: 1860707
auagacaauguaaugaccc

SEQ ID NO: 1860709 - RNA, 19 nt, Artificial Sequence
  Description of Artificial Sequence: Synthetic oligonucleotide
  Sense strand starting at position 3022 of SEQ ID NO: 1564183
ucauuacauugucuaugga

SEQ ID NO: 1860710 - RNA, 19 nt, Artificial Sequence
  Description of Artificial Sequence: Synthetic oligonucleotide
  Antisense strand to SEQ ID NO: 1860709
uccauagacaauguaauga

SEQ ID NO: 1860711 - RNA, 19 nt, Artificial Sequence
  Description of Artificial Sequence: Synthetic oligonucleotide
  Sense strand starting at position 3115 of SEQ ID NO: 1564183
acaauuguuccaggugaug

SEQ ID NO: 1860712 - RNA, 19 nt, Artificial Sequence
  Description of Artificial Sequence: Synthetic oligonucleotide
  Antisense strand to SEQ ID NO: 1860711
caucaccuggaacaauugu

SEQ ID NO: 1860713 - RNA, 19 nt, Artificial Sequence
  Description of Artificial Sequence: Synthetic oligonucleotide
  Sense strand starting at position 3163 of SEQ ID NO: 1564183
uguagaccuuagcuaagau

SEQ ID NO: 1860714 - RNA, 19 nt, Artificial Sequence
  Description of Artificial Sequence: Synthetic oligonucleotide
  Antisense strand to SEQ ID NO: 1860713
aucuuagcuaaggucuaca

SEQ ID NO: 1860715 - RNA, 19 nt, Artificial Sequence
  Description of Artificial Sequence: Synthetic oligonucleotide
  Sense strand starting at position 3216 of SEQ ID NO: 1564183
uuagguaauuuaugggaca

SEQ ID NO: 1860716 - RNA, 19 nt, Artificial Sequence
  Description of Artificial Sequence: Synthetic oligonucleotide
  Antisense strand to SEQ ID NO: 1860715
ugucccauaaauuaccuaa

SEQ ID NO: 1860717 - RNA, 19 nt, Artificial Sequence
  Description of Artificial Sequence: Synthetic oligonucleotide
  Sense strand starting at position 3217 of SEQ ID NO: 1564183
uagguaauuuaugggacau

SEQ ID NO: 1860718 - RNA, 19 nt, Artificial Sequence
  Description of Artificial Sequence: Synthetic oligonucleotide
  Antisense strand to SEQ ID NO: 1860717
augucccauaaauuaccua

SEQ ID NO: 1860719 - RNA, 19 nt, Artificial Sequence
  Description of Artificial Sequence: Synthetic oligonucleotide
  Sense strand starting at position 3219 of SEQ ID NO: 1564183
gguaauuuaugggacauug

SEQ ID NO: 1860720 - RNA, 19 nt, Artificial Sequence
  Description of Artificial Sequence: Synthetic oligonucleotide
  Antisense strand to SEQ ID NO: 1860719
caaugucccauaaauuacc

SEQ ID NO: 1860721 - RNA, 19 nt, Artificial Sequence
  Description of Artificial Sequence: Synthetic oligonucleotide
  Sense strand starting at position 3249 of SEQ ID NO: 1564183
cuuuguugccuugaaaucu

SEQ ID NO: 1860722 - RNA, 19 nt, Artificial Sequence
  Description of Artificial Sequence: Synthetic oligonucleotide
  Antisense strand to SEQ ID NO: 1860721
agauuucaaggcaacaaag

SEQ ID NO: 1860723 - RNA, 19 nt, Artificial Sequence
  Description of Artificial Sequence: Synthetic oligonucleotide
  Sense strand starting at position 3349 of SEQ ID NO: 1564183
ucugacucaugagugugau

SEQ ID NO: 1860724 - RNA, 19 nt, Artificial Sequence
  Description of Artificial Sequence: Synthetic oligonucleotide
  Antisense strand to SEQ ID NO: 1860723
aucacacucaugagucaga

SEQ ID NO: 1860725 - RNA, 19 nt, Artificial Sequence
  Description of Artificial Sequence: Synthetic oligonucleotide
  Sense strand starting at position 3350 of SEQ ID NO: 1564183
cugacucaugagugugauc

SEQ ID NO: 1860726 - RNA, 19 nt, Artificial Sequence
  Description of Artificial Sequence: Synthetic oligonucleotide
  Antisense strand to SEQ ID NO: 1860725
gaucacacucaugagucag

SEQ ID NO: 1860727 - RNA, 19 nt, Artificial Sequence
  Description of Artificial Sequence: Synthetic oligonucleotide
  Sense strand starting at position 3352 of SEQ ID NO: 1564183
gacucaugagugugaucua

SEQ ID NO: 1860728 - RNA, 19 nt, Artificial Sequence
  Description of Artificial Sequence: Synthetic oligonucleotide
  Antisense strand to SEQ ID NO: 1860727
uagaucacacucaugaguc

SEQ ID NO: 1860729 - RNA, 19 nt, Artificial Sequence
  Description of Artificial Sequence: Synthetic oligonucleotide
  Sense strand starting at position 3355 of SEQ ID NO: 1564183
ucaugagugugaucuaaau

SEQ ID NO: 1860730 - RNA, 19 nt, Artificial Sequence
  Description of Artificial Sequence: Synthetic oligonucleotide
  Antisense strand to SEQ ID NO: 1860729
auuuagaucacacucauga

SEQ ID NO: 1860731 - RNA, 19 nt, Artificial Sequence
  Description of Artificial Sequence: Synthetic oligonucleotide
  Sense strand starting at position 3390 of SEQ ID NO: 1564183
cugauaucccagggugcau

SEQ ID NO: 1860732 - RNA, 19 nt, Artificial Sequence
  Description of Artificial Sequence: Synthetic oligonucleotide
  Antisense strand to SEQ ID NO: 1860731
augcacccugggauaucag

SEQ ID NO: 1860733 - RNA, 19 nt, Artificial Sequence
  Description of Artificial Sequence: Synthetic oligonucleotide
  Sense strand starting at position 3401 of SEQ ID NO: 1564183
gggugcaucucacuuauua

SEQ ID NO: 1860734 - RNA, 19 nt, Artificial Sequence
  Description of Artificial Sequence: Synthetic oligonucleotide
  Antisense strand to SEQ ID NO: 1860733
uaauaagugagaugcaccc

SEQ ID NO: 1860735 - RNA, 19 nt, Artificial Sequence
  Description of Artificial Sequence: Synthetic oligonucleotide
  Sense strand starting at position 3405 of SEQ ID NO: 1564183
gcaucucacuuauuagaga

SEQ ID NO: 1860736 - RNA, 19 nt, Artificial Sequence
  Description of Artificial Sequence: Synthetic oligonucleotide
  Antisense strand to SEQ ID NO: 1860735
ucucuaauaagugagaugc

SEQ ID NO: 1860737 - RNA, 19 nt, Artificial Sequence
  Description of Artificial Sequence: Synthetic oligonucleotide
  Sense strand starting at position 3445 of SEQ ID NO: 1564183
augggauggacucgaucuu

SEQ ID NO: 1860738 - RNA, 19 nt, Artificial Sequence
  Description of Artificial Sequence: Synthetic oligonucleotide
  Antisense strand to SEQ ID NO: 1860737
aagaucgaguccaucccau

SEQ ID NO: 1860739 - RNA, 19 nt, Artificial Sequence
  Description of Artificial Sequence: Synthetic oligonucleotide
  Sense strand starting at position 3523 of SEQ ID NO: 1564183
ggauuugagugggaguagu

SEQ ID NO: 1860740 - RNA, 19 nt, Artificial Sequence
  Description of Artificial Sequence: Synthetic oligonucleotide
  Antisense strand to SEQ ID NO: 1860739
acuacucccacucaaaucc

SEQ ID NO: 1860741 - RNA, 19 nt, Artificial Sequence
  Description of Artificial Sequence: Synthetic oligonucleotide
  Sense strand starting at position 3533 of SEQ ID NO: 1564183
gggaguaguuucuuugggu

SEQ ID NO: 1860742 - RNA, 19 nt, Artificial Sequence
  Description of Artificial Sequence: Synthetic oligonucleotide
  Antisense strand to SEQ ID NO: 1860741
acccaaagaaacuacuccc

SEQ ID NO: 1860743 - RNA, 19 nt, Artificial Sequence
  Description of Artificial Sequence: Synthetic oligonucleotide
  Sense strand starting at position 3534 of SEQ ID NO: 1564183
ggaguaguuucuuugggug

SEQ ID NO: 1860744 - RNA, 19 nt, Artificial Sequence
  Description of Artificial Sequence: Synthetic oligonucleotide
  Antisense strand to SEQ ID NO: 1860743
cacccaaagaaacuacucc

SEQ ID NO: 1860745 - RNA, 19 nt, Artificial Sequence
  Description of Artificial Sequence: Synthetic oligonucleotide
  Sense strand starting at position 3548 of SEQ ID NO: 1564183
gggugcuaauccuuagaag

SEQ ID NO: 1860746 - RNA, 19 nt, Artificial Sequence
  Description of Artificial Sequence: Synthetic oligonucleotide
  Antisense strand to SEQ ID NO: 1860745
cuucuaaggauuagcaccc

SEQ ID NO: 1860747 - RNA, 19 nt, Artificial Sequence
  Description of Artificial Sequence: Synthetic oligonucleotide
  Sense strand starting at position 3549 of SEQ ID NO: 1564183
ggugcuaauccuuagaagc

SEQ ID NO: 1860748 - RNA, 19 nt, Artificial Sequence
  Description of Artificial Sequence: Synthetic oligonucleotide
  Antisense strand to SEQ ID NO: 1860747
gcuucuaaggauuagcacc

SEQ ID NO: 1860749 - RNA, 19 nt, Artificial Sequence
  Description of Artificial Sequence: Synthetic oligonucleotide
  Sense strand starting at position 3559 of SEQ ID NO: 1564183
cuuagaagcauuggugaca

SEQ ID NO: 1860750 - RNA, 19 nt, Artificial Sequence
  Description of Artificial Sequence: Synthetic oligonucleotide
  Antisense strand to SEQ ID NO: 1860749
ugucaccaaugcuucuaag

SEQ ID NO: 1860751 - RNA, 19 nt, Artificial Sequence
  Description of Artificial Sequence: Synthetic oligonucleotide
  Sense strand starting at position 3619 of SEQ ID NO: 1564183
agacguauuccugagcaca

SEQ ID NO: 1860752 - RNA, 19 nt, Artificial Sequence
  Description of Artificial Sequence: Synthetic oligonucleotide
  Antisense strand to SEQ ID NO: 1860751
ugugcucaggaauacgucu

SEQ ID NO: 1860753 - RNA, 19 nt, Artificial Sequence
  Description of Artificial Sequence: Synthetic oligonucleotide
  Sense strand starting at position 3621 of SEQ ID NO: 1564183
acguauuccugagcacaag

SEQ ID NO: 1860754 - RNA, 19 nt, Artificial Sequence
  Description of Artificial Sequence: Synthetic oligonucleotide
  Antisense strand to SEQ ID NO: 1860753
cuugugcucaggaauacgu

SEQ ID NO: 1860755 - RNA, 19 nt, Artificial Sequence
  Description of Artificial Sequence: Synthetic oligonucleotide
  Sense strand starting at position 3766 of SEQ ID NO: 1564183
aggacaguccugggagcau

SEQ ID NO: 1860756 - RNA, 19 nt, Artificial Sequence
  Description of Artificial Sequence: Synthetic oligonucleotide
  Antisense strand to SEQ ID NO: 1860755
augcucccaggacuguccu

SEQ ID NO: 1860757 - RNA, 19 nt, Artificial Sequence
  Description of Artificial Sequence: Synthetic oligonucleotide
  Sense strand starting at position 3770 of SEQ ID NO: 1564183
caguccugggagcauuauu

SEQ ID NO: 1860758 - RNA, 19 nt, Artificial Sequence
  Description of Artificial Sequence: Synthetic oligonucleotide
  Antisense strand to SEQ ID NO: 1860757
aauaaugcucccaggacug

SEQ ID NO: 1860759 - RNA, 19 nt, Artificial Sequence
  Description of Artificial Sequence: Synthetic oligonucleotide
  Sense strand starting at position 3778 of SEQ ID NO: 1564183
ggagcauuauucccugaca

SEQ ID NO: 1860760 - RNA, 19 nt, Artificial Sequence
  Description of Artificial Sequence: Synthetic oligonucleotide
  Antisense strand to SEQ ID NO: 1860759
ugucagggaauaaugcucc

SEQ ID NO: 1860761 - RNA, 19 nt, Artificial Sequence
  Description of Artificial Sequence: Synthetic oligonucleotide
  Sense strand starting at position 3828 of SEQ ID NO: 1564183
gcugauuuggcucgaggau

SEQ ID NO: 1860762 - RNA, 19 nt, Artificial Sequence
  Description of Artificial Sequence: Synthetic oligonucleotide
  Antisense strand to SEQ ID NO: 1860761
auccucgagccaaaucagc

SEQ ID NO: 1860763 - RNA, 19 nt, Artificial Sequence
  Description of Artificial Sequence: Synthetic oligonucleotide
  Sense strand starting at position 3840 of SEQ ID NO: 1564183
cgaggaugcccucagacaa

SEQ ID NO: 1860764 - RNA, 19 nt, Artificial Sequence
  Description of Artificial Sequence: Synthetic oligonucleotide
  Antisense strand to SEQ ID NO: 1860763
uugucugagggcauccucg

SEQ ID NO: 1860765 - RNA, 19 nt, Artificial Sequence
  Description of Artificial Sequence: Synthetic oligonucleotide
  Sense strand starting at position 62 of SEQ ID NO: 1564184
ugagaccuuccggaguauu

SEQ ID NO: 1860766 - RNA, 19 nt, Artificial Sequence
  Description of Artificial Sequence: Synthetic oligonucleotide
  Antisense strand to SEQ ID NO: 1860765
aauacuccggaaggucuca

SEQ ID NO: 1860767 - RNA, 19 nt, Artificial Sequence
  Description of Artificial Sequence: Synthetic oligonucleotide
  Sense strand starting at position 360 of SEQ ID NO: 1564184
gcgccugcuagcuuuaaua

SEQ ID NO: 1860768 - RNA, 19 nt, Artificial Sequence
  Description of Artificial Sequence: Synthetic oligonucleotide
  Antisense strand to SEQ ID NO: 1860767
uauuaaagcuagcaggcgc

SEQ ID NO: 1860769 - RNA, 19 nt, Artificial Sequence
  Description of Artificial Sequence: Synthetic oligonucleotide
  Sense strand starting at position 517 of SEQ ID NO: 1564184
gcaggaaauggacgcuuaa

SEQ ID NO: 1860770 - RNA, 19 nt, Artificial Sequence
  Description of Artificial Sequence: Synthetic oligonucleotide
  Antisense strand to SEQ ID NO: 1860769
uuaagcguccauuuccugc

SEQ ID NO: 1860771 - RNA, 19 nt, Artificial Sequence
  Description of Artificial Sequence: Synthetic oligonucleotide
  Sense strand starting at position 574 of SEQ ID NO: 1564184
gaggaaaucuuuccugagc

SEQ ID NO: 1860772 - RNA, 19 nt, Artificial Sequence
  Description of Artificial Sequence: Synthetic oligonucleotide
  Antisense strand to SEQ ID NO: 1860771
gcucaggaaagauuuccuc

SEQ ID NO: 1860773 - RNA, 19 nt, Artificial Sequence
  Description of Artificial Sequence: Synthetic oligonucleotide
  Sense strand starting at position 575 of SEQ ID NO: 1564184
aggaaaucuuuccugagcu

SEQ ID NO: 1860774 - RNA, 19 nt, Artificial Sequence
  Description of Artificial Sequence: Synthetic oligonucleotide
  Antisense strand to SEQ ID NO: 1860773
agcucaggaaagauuuccu

SEQ ID NO: 1860775 - RNA, 19 nt, Artificial Sequence
  Description of Artificial Sequence: Synthetic oligonucleotide
  Sense strand starting at position 829 of SEQ ID NO: 1564184
gcugaauggucaucuggga

SEQ ID NO: 1860776 - RNA, 19 nt, Artificial Sequence
  Description of Artificial Sequence: Synthetic oligonucleotide
  Antisense strand to SEQ ID NO: 1860775
ucccagaugaccauucagc

SEQ ID NO: 1860777 - RNA, 19 nt, Artificial Sequence
  Description of Artificial Sequence: Synthetic oligonucleotide
  Sense strand starting at position 922 of SEQ ID NO: 1564184
ucauuaaacgacugcauga

SEQ ID NO: 1860778 - RNA, 19 nt, Artificial Sequence
  Description of Artificial Sequence: Synthetic oligonucleotide
  Antisense strand to SEQ ID NO: 1860777
ucaugcagucguuuaauga

SEQ ID NO: 1860779 - RNA, 19 nt, Artificial Sequence
  Description of Artificial Sequence: Synthetic oligonucleotide
  Sense strand starting at position 988 of SEQ ID NO: 1564184
cugaaagggucuucuaccu

SEQ ID NO: 1860780 - RNA, 19 nt, Artificial Sequence
  Description of Artificial Sequence: Synthetic oligonucleotide
  Antisense strand to SEQ ID NO: 1860779
agguagaagacccuuucag

SEQ ID NO: 1860781 - RNA, 19 nt, Artificial Sequence
  Description of Artificial Sequence: Synthetic oligonucleotide
  Sense strand starting at position 1379 of SEQ ID NO: 1564184
gugguucagcugucgcuaa

SEQ ID NO: 1860782 - RNA, 19 nt, Artificial Sequence
  Description of Artificial Sequence: Synthetic oligonucleotide
  Antisense strand to SEQ ID NO: 1860781
uuagcgacagcugaaccac

SEQ ID NO: 1860783 - RNA, 19 nt, Artificial Sequence
  Description of Artificial Sequence: Synthetic oligonucleotide
  Sense strand starting at position 1488 of SEQ ID NO: 1564184
caugguuggacguagaaga

SEQ ID NO: 1860784 - RNA, 19 nt, Artificial Sequence
  Description of Artificial Sequence: Synthetic oligonucleotide
  Antisense strand to SEQ ID NO: 1860783
ucuucuacguccaaccaug

SEQ ID NO: 1860785 - RNA, 19 nt, Artificial Sequence
  Description of Artificial Sequence: Synthetic oligonucleotide
  Sense strand starting at position 1501 of SEQ ID NO: 1564184
agaagaauaugccugcuuu

SEQ ID NO: 1860786 - RNA, 19 nt, Artificial Sequence
  Description of Artificial Sequence: Synthetic oligonucleotide
  Antisense strand to SEQ ID NO: 1860785
aaagcaggcauauucuucu

SEQ ID NO: 1860787 - RNA, 19 nt, Artificial Sequence
  Description of Artificial Sequence: Synthetic oligonucleotide
  Sense strand starting at position 1502 of SEQ ID NO: 1564184
gaagaauaugccugcuuug

SEQ ID NO: 1860788 - RNA, 19 nt, Artificial Sequence
  Description of Artificial Sequence: Synthetic oligonucleotide
  Antisense strand to SEQ ID NO: 1860787
caaagcaggcauauucuuc

SEQ ID NO: 1860789 - RNA, 19 nt, Artificial Sequence
  Description of Artificial Sequence: Synthetic oligonucleotide
  Sense strand starting at position 1602 of SEQ ID NO: 1564184
cgaagcuuuauccaggaca

SEQ ID NO: 1860790 - RNA, 19 nt, Artificial Sequence
  Description of Artificial Sequence: Synthetic oligonucleotide
  Antisense strand to SEQ ID NO: 1860789
uguccuggauaaagcuucg

SEQ ID NO: 1860791 - RNA, 19 nt, Artificial Sequence
  Description of Artificial Sequence: Synthetic oligonucleotide
  Sense strand starting at position 1605 of SEQ ID NO: 1564184
agcuuuauccaggacauca

SEQ ID NO: 1860792 - RNA, 19 nt, Artificial Sequence
  Description of Artificial Sequence: Synthetic oligonucleotide
  Antisense strand to SEQ ID NO: 1860791
ugauguccuggauaaagcu

SEQ ID NO: 1860793 - RNA, 19 nt, Artificial Sequence
  Description of Artificial Sequence: Synthetic oligonucleotide
  Sense strand starting at position 1650 of SEQ ID NO: 1564184
auccaaguaguccagcaau

SEQ ID NO: 1860794 - RNA, 19 nt, Artificial Sequence
  Description of Artificial Sequence: Synthetic oligonucleotide
  Antisense strand to SEQ ID NO: 1860793
auugcuggacuacuuggau

SEQ ID NO: 1860795 - RNA, 19 nt, Artificial Sequence
  Description of Artificial Sequence: Synthetic oligonucleotide
  Sense strand starting at position 1743 of SEQ ID NO: 1564184
cugauugccuggguauaga

SEQ ID NO: 1860796 - RNA, 19 nt, Artificial Sequence
  Description of Artificial Sequence: Synthetic oligonucleotide
  Antisense strand to SEQ ID NO: 1860795
ucuauacccaggcaaucag

SEQ ID NO: 1860797 - RNA, 19 nt, Artificial Sequence
  Description of Artificial Sequence: Synthetic oligonucleotide
  Sense strand starting at position 1752 of SEQ ID NO: 1564184
uggguauagauugaccagu

SEQ ID NO: 1860798 - RNA, 19 nt, Artificial Sequence
  Description of Artificial Sequence: Synthetic oligonucleotide
  Antisense strand to SEQ ID NO: 1860797
acuggucaaucuauaccca

SEQ ID NO: 1860799 - RNA, 19 nt, Artificial Sequence
  Description of Artificial Sequence: Synthetic oligonucleotide
  Sense strand starting at position 1754 of SEQ ID NO: 1564184
gguauagauugaccaguaa

SEQ ID NO: 1860800 - RNA, 19 nt, Artificial Sequence
  Description of Artificial Sequence: Synthetic oligonucleotide
  Antisense strand to SEQ ID NO: 1860799
uuacuggucaaucuauacc

SEQ ID NO: 1860801 - RNA, 19 nt, Artificial Sequence
  Description of Artificial Sequence: Synthetic oligonucleotide
  Sense strand starting at position 1911 of SEQ ID NO: 1564184
aggugaguaucuccuucua

SEQ ID NO: 1860802 - RNA, 19 nt, Artificial Sequence
  Description of Artificial Sequence: Synthetic oligonucleotide
  Antisense strand to SEQ ID NO: 1860801
uagaaggagauacucaccu

SEQ ID NO: 1860803 - RNA, 19 nt, Artificial Sequence
  Description of Artificial Sequence: Synthetic oligonucleotide
  Sense strand starting at position 1982 of SEQ ID NO: 1564184
guucuaaaucucgauccau

SEQ ID NO: 1860804 - RNA, 19 nt, Artificial Sequence
  Description of Artificial Sequence: Synthetic oligonucleotide
  Antisense strand to SEQ ID NO: 1860803
auggaucgagauuuagaac

SEQ ID NO: 1860805 - RNA, 19 nt, Artificial Sequence
  Description of Artificial Sequence: Synthetic oligonucleotide
  Sense strand starting at position 2166 of SEQ ID NO: 1564184
acccaaucuguuugagggu

SEQ ID NO: 1860806 - RNA, 19 nt, Artificial Sequence
  Description of Artificial Sequence: Synthetic oligonucleotide
  Antisense strand to SEQ ID NO: 1860805
acccucaaacagauugggu

SEQ ID NO: 1860807 - RNA, 19 nt, Artificial Sequence
  Description of Artificial Sequence: Synthetic oligonucleotide
  Sense strand starting at position 2994 of SEQ ID NO: 1564184
cgcgcauagacaucaguuu

SEQ ID NO: 1860808 - RNA, 19 nt, Artificial Sequence
  Description of Artificial Sequence: Synthetic oligonucleotide
  Antisense strand to SEQ ID NO: 1860807
aaacugaugucuaugcgcg

SEQ ID NO: 1860809 - RNA, 19 nt, Artificial Sequence
  Description of Artificial Sequence: Synthetic oligonucleotide
  Sense strand starting at position 3020 of SEQ ID NO: 1564184
aauaccacugucgggaaau

SEQ ID NO: 1860810 - RNA, 19 nt, Artificial Sequence
  Description of Artificial Sequence: Synthetic oligonucleotide
  Antisense strand to SEQ ID NO: 1860809
auuucccgacagugguauu

SEQ ID NO: 1860811 - RNA, 19 nt, Artificial Sequence
  Description of Artificial Sequence: Synthetic oligonucleotide
  Sense strand starting at position 3030 of SEQ ID NO: 1564184
ucgggaaaucaugggaagu

SEQ ID NO: 1860812 - RNA, 19 nt, Artificial Sequence
  Description of Artificial Sequence: Synthetic oligonucleotide
  Antisense strand to SEQ ID NO: 1860811
acuucccaugauuucccga

SEQ ID NO: 1860813 - RNA, 19 nt, Artificial Sequence
  Description of Artificial Sequence: Synthetic oligonucleotide
  Sense strand starting at position 3031 of SEQ ID NO: 1564184
cgggaaaucaugggaaguu

SEQ ID NO: 1860814 - RNA, 19 nt, Artificial Sequence
  Description of Artificial Sequence: Synthetic oligonucleotide
  Antisense strand to SEQ ID NO: 1860813
aacuucccaugauuucccg

SEQ ID NO: 1860815 - RNA, 19 nt, Artificial Sequence
  Description of Artificial Sequence: Synthetic oligonucleotide
  Sense strand starting at position 3221 of SEQ ID NO: 1564184
uguugucguccaguaagcu

SEQ ID NO: 1860816 - RNA, 19 nt, Artificial Sequence
  Description of Artificial Sequence: Synthetic oligonucleotide
  Antisense strand to SEQ ID NO: 1860815
agcuuacuggacgacaaca

SEQ ID NO: 1860817 - RNA, 19 nt, Artificial Sequence
  Description of Artificial Sequence: Synthetic oligonucleotide
  Sense strand starting at position 3304 of SEQ ID NO: 1564184
uuuauuucuccauguguug

SEQ ID NO: 1860818 - RNA, 19 nt, Artificial Sequence
  Description of Artificial Sequence: Synthetic oligonucleotide
  Antisense strand to SEQ ID NO: 1860817
caacacauggagaaauaaa

SEQ ID NO: 1860819 - RNA, 19 nt, Artificial Sequence
  Description of Artificial Sequence: Synthetic oligonucleotide
  Sense strand starting at position 3358 of SEQ ID NO: 1564184
gggucauuacauugucuau

SEQ ID NO: 1860820 - RNA, 19 nt, Artificial Sequence
  Description of Artificial Sequence: Synthetic oligonucleotide
  Antisense strand to SEQ ID NO: 1860819
auagacaauguaaugaccc

SEQ ID NO: 1860821 - RNA, 19 nt, Artificial Sequence
  Description of Artificial Sequence: Synthetic oligonucleotide
  Sense strand starting at position 3361 of SEQ ID NO: 1564184
ucauuacauugucuaugga

SEQ ID NO: 1860822 - RNA, 19 nt, Artificial Sequence
  Description of Artificial Sequence: Synthetic oligonucleotide
  Antisense strand to SEQ ID NO: 1860821
uccauagacaauguaauga

SEQ ID NO: 1860823 - RNA, 19 nt, Artificial Sequence
  Description of Artificial Sequence: Synthetic oligonucleotide
  Sense strand starting at position 3453 of SEQ ID NO: 1564184
aacaauuguccaggugaug

SEQ ID NO: 1860824 - RNA, 19 nt, Artificial Sequence
  Description of Artificial Sequence: Synthetic oligonucleotide
  Antisense strand to SEQ ID NO: 1860823
caucaccuggacaauuguu

SEQ ID NO: 1860825 - RNA, 19 nt, Artificial Sequence
  Description of Artificial Sequence: Synthetic oligonucleotide
  Sense strand starting at position 3501 of SEQ ID NO: 1564184
uguagaccuuagcuaagau

SEQ ID NO: 1860826 - RNA, 19 nt, Artificial Sequence
  Description of Artificial Sequence: Synthetic oligonucleotide
  Antisense strand to SEQ ID NO: 1860825
aucuuagcuaaggucuaca

SEQ ID NO: 1860827 - RNA, 19 nt, Artificial Sequence
  Description of Artificial Sequence: Synthetic oligonucleotide
  Sense strand starting at position 3557 of SEQ ID NO: 1564184
gguaauuuaugggacauug

SEQ ID NO: 1860828 - RNA, 19 nt, Artificial Sequence
  Description of Artificial Sequence: Synthetic oligonucleotide
  Antisense strand to SEQ ID NO: 1860827
caaugucccauaaauuacc

SEQ ID NO: 1860829 - RNA, 19 nt, Artificial Sequence
  Description of Artificial Sequence: Synthetic oligonucleotide
  Sense strand starting at position 3587 of SEQ ID NO: 1564184
cuuuguugccuugaaaucu

SEQ ID NO: 1860830 - RNA, 19 nt, Artificial Sequence
  Description of Artificial Sequence: Synthetic oligonucleotide
  Antisense strand to SEQ ID NO: 1860829
agauuucaaggcaacaaag

SEQ ID NO: 1860831 - RNA, 19 nt, Artificial Sequence
  Description of Artificial Sequence: Synthetic oligonucleotide
  Sense strand starting at position 3687 of SEQ ID NO: 1564184
ucugacucaugagugugau

SEQ ID NO: 1860832 - RNA, 19 nt, Artificial Sequence
  Description of Artificial Sequence: Synthetic oligonucleotide
  Antisense strand to SEQ ID NO: 1860831
aucacacucaugagucaga

SEQ ID NO: 1860833 - RNA, 19 nt, Artificial Sequence
  Description of Artificial Sequence: Synthetic oligonucleotide
  Sense strand starting at position 3688 of SEQ ID NO: 1564184
cugacucaugagugugauc

SEQ ID NO: 1860834 - RNA, 19 nt, Artificial Sequence
  Description of Artificial Sequence: Synthetic oligonucleotide
  Antisense strand to SEQ ID NO: 1860833
gaucacacucaugagucag

SEQ ID NO: 1860835 - RNA, 19 nt, Artificial Sequence
  Description of Artificial Sequence: Synthetic oligonucleotide
  Sense strand starting at position 3690 of SEQ ID NO: 1564184
gacucaugagugugaucua

SEQ ID NO: 1860836 - RNA, 19 nt, Artificial Sequence
  Description of Artificial Sequence: Synthetic oligonucleotide
  Antisense strand to SEQ ID NO: 1860835
uagaucacacucaugaguc

SEQ ID NO: 1860837 - RNA, 19 nt, Artificial Sequence
  Description of Artificial Sequence: Synthetic oligonucleotide
  Sense strand starting at position 3693 of SEQ ID NO: 1564184
ucaugagugugaucuaaau

SEQ ID NO: 1860838 - RNA, 19 nt, Artificial Sequence
  Description of Artificial Sequence: Synthetic oligonucleotide
  Antisense strand to SEQ ID NO: 1860837
auuuagaucacacucauga

SEQ ID NO: 1860839 - RNA, 19 nt, Artificial Sequence
  Description of Artificial Sequence: Synthetic oligonucleotide
  Sense strand starting at position 3748 of SEQ ID NO: 1564184
acacuuauuagcgagguau

SEQ ID NO: 1860840 - RNA, 19 nt, Artificial Sequence
  Description of Artificial Sequence: Synthetic oligonucleotide
  Antisense strand to SEQ ID NO: 1860839
auaccucgcuaauaagugu

SEQ ID NO: 1860841 - RNA, 19 nt, Artificial Sequence
  Description of Artificial Sequence: Synthetic oligonucleotide
  Sense strand starting at position 3783 of SEQ ID NO: 1564184
augggauggacucgaucuu

SEQ ID NO: 1860842 - RNA, 19 nt, Artificial Sequence
  Description of Artificial Sequence: Synthetic oligonucleotide
  Antisense strand to SEQ ID NO: 1860841
aagaucgaguccaucccau

SEQ ID NO: 1860843 - RNA, 19 nt, Artificial Sequence
  Description of Artificial Sequence: Synthetic oligonucleotide
  Sense strand starting at position 3955 of SEQ ID NO: 1564184
aaagauguauuccugagca

SEQ ID NO: 1860844 - RNA, 19 nt, Artificial Sequence
  Description of Artificial Sequence: Synthetic oligonucleotide
  Antisense strand to SEQ ID NO: 1860843
ugcucaggaauacaucuuu

SEQ ID NO: 1860845 - RNA, 19 nt, Artificial Sequence
  Description of Artificial Sequence: Synthetic oligonucleotide
  Sense strand starting at position 40 of SEQ ID NO: 1564185
ccacuuaaguggucccaau

SEQ ID NO: 1860846 - RNA, 19 nt, Artificial Sequence
  Description of Artificial Sequence: Synthetic oligonucleotide
  Antisense strand to SEQ ID NO: 1860845
auugggaccacuuaagugg

SEQ ID NO: 1860847 - RNA, 19 nt, Artificial Sequence
  Description of Artificial Sequence: Synthetic oligonucleotide
  Sense strand starting at position 121 of SEQ ID NO: 1564185
gguccucccacuuguggaa

SEQ ID NO: 1860848 - RNA, 19 nt, Artificial Sequence
  Description of Artificial Sequence: Synthetic oligonucleotide
  Antisense strand to SEQ ID NO: 1860847
uuccacaagugggaggacc

SEQ ID NO: 1860849 - RNA, 19 nt, Artificial Sequence
  Description of Artificial Sequence: Synthetic oligonucleotide
  Sense strand starting at position 219 of SEQ ID NO: 1564185
gaguccagcuguccuauua

SEQ ID NO: 1860850 - RNA, 19 nt, Artificial Sequence
  Description of Artificial Sequence: Synthetic oligonucleotide
  Antisense strand to SEQ ID NO: 1860849
uaauaggacagcuggacuc

SEQ ID NO: 1860851 - RNA, 19 nt, Artificial Sequence
  Description of Artificial Sequence: Synthetic oligonucleotide
  Sense strand starting at position 1108 of SEQ ID NO: 1564185
cugucauacucccuguuau

SEQ ID NO: 1860852 - RNA, 19 nt, Artificial Sequence
  Description of Artificial Sequence: Synthetic oligonucleotide
  Antisense strand to SEQ ID NO: 1860851
auaacagggaguaugacag

SEQ ID NO: 1860853 - RNA, 19 nt, Artificial Sequence
  Description of Artificial Sequence: Synthetic oligonucleotide
  Sense strand starting at position 1109 of SEQ ID NO: 1564185
ugucauacucccuguuauc

SEQ ID NO: 1860854 - RNA, 19 nt, Artificial Sequence
  Description of Artificial Sequence: Synthetic oligonucleotide
  Antisense strand to SEQ ID NO: 1860853
gauaacagggaguaugaca

SEQ ID NO: 1860855 - RNA, 19 nt, Artificial Sequence
  Description of Artificial Sequence: Synthetic oligonucleotide
  Sense strand starting at position 1184 of SEQ ID NO: 1564185
ggacuagugccguauccaa

SEQ ID NO: 1860856 - RNA, 19 nt, Artificial Sequence
  Description of Artificial Sequence: Synthetic oligonucleotide
  Antisense strand to SEQ ID NO: 1860855
uuggauacggcacuagucc

SEQ ID NO: 1860857 - RNA, 19 nt, Artificial Sequence
  Description of Artificial Sequence: Synthetic oligonucleotide
  Sense strand starting at position 1224 of SEQ ID NO: 1564185
acaggugccuagucagacu

SEQ ID NO: 1860858 - RNA, 19 nt, Artificial Sequence
  Description of Artificial Sequence: Synthetic oligonucleotide
  Antisense strand to SEQ ID NO: 1860857
agucugacuaggcaccugu

SEQ ID NO: 1860859 - RNA, 19 nt, Artificial Sequence
  Description of Artificial Sequence: Synthetic oligonucleotide
  Sense strand starting at position 1269 of SEQ ID NO: 1564185
agucaauacuggcuuccau

SEQ ID NO: 1860860 - RNA, 19 nt, Artificial Sequence
  Description of Artificial Sequence: Synthetic oligonucleotide
  Antisense strand to SEQ ID NO: 1860859
auggaagccaguauugacu

SEQ ID NO: 1860861 - RNA, 19 nt, Artificial Sequence
  Description of Artificial Sequence: Synthetic oligonucleotide
  Sense strand starting at position 1339 of SEQ ID NO: 1564185
gccagccugccuuaucauu

SEQ ID NO: 1860862 - RNA, 19 nt, Artificial Sequence
  Description of Artificial Sequence: Synthetic oligonucleotide
  Antisense strand to SEQ ID NO: 1860861
aaugauaaggcaggcuggc

SEQ ID NO: 1860863 - RNA, 19 nt, Artificial Sequence
  Description of Artificial Sequence: Synthetic oligonucleotide
  Sense strand starting at position 1377 of SEQ ID NO: 1564185
ucacguugucagcagauca

SEQ ID NO: 1860864 - RNA, 19 nt, Artificial Sequence
  Description of Artificial Sequence: Synthetic oligonucleotide
  Antisense strand to SEQ ID NO: 1860863
ugaucugcugacaacguga

SEQ ID NO: 1860865 - RNA, 19 nt, Artificial Sequence
  Description of Artificial Sequence: Synthetic oligonucleotide
  Sense strand starting at position 1437 of SEQ ID NO: 1564185
gcgauucucccuggcuaaa

SEQ ID NO: 1860866 - RNA, 19 nt, Artificial Sequence
  Description of Artificial Sequence: Synthetic oligonucleotide
  Antisense strand to SEQ ID NO: 1860865
uuuagccagggagaaucgc

SEQ ID NO: 1860867 - RNA, 19 nt, Artificial Sequence
  Description of Artificial Sequence: Synthetic oligonucleotide
  Sense strand starting at position 1498 of SEQ ID NO: 1564185
cugugauuaggucgggaca

SEQ ID NO: 1860868 - RNA, 19 nt, Artificial Sequence
  Description of Artificial Sequence: Synthetic oligonucleotide
  Antisense strand to SEQ ID NO: 1860867
ugucccgaccuaaucacag

SEQ ID NO: 1860869 - RNA, 19 nt, Artificial Sequence
  Description of Artificial Sequence: Synthetic oligonucleotide
  Sense strand starting at position 1499 of SEQ ID NO: 1564185
ugugauuaggucgggacaa

SEQ ID NO: 1860870 - RNA, 19 nt, Artificial Sequence
  Description of Artificial Sequence: Synthetic oligonucleotide
  Antisense strand to SEQ ID NO: 1860869
uugucccgaccuaaucaca

SEQ ID NO: 1860871 - RNA, 19 nt, Artificial Sequence
  Description of Artificial Sequence: Synthetic oligonucleotide
  Sense strand starting at position 1553 of SEQ ID NO: 1564185
gcacuaucaguuggucacu

SEQ ID NO: 1860872 - RNA, 19 nt, Artificial Sequence
  Description of Artificial Sequence: Synthetic oligonucleotide
  Antisense strand to SEQ ID NO: 1860871
agugaccaacugauagugc

SEQ ID NO: 1860873 - RNA, 19 nt, Artificial Sequence
  Description of Artificial Sequence: Synthetic oligonucleotide
  Sense strand starting at position 1570 of SEQ ID NO: 1564185
cugucuuucccucagauua

SEQ ID NO: 1860874 - RNA, 19 nt, Artificial Sequence
  Description of Artificial Sequence: Synthetic oligonucleotide
  Antisense strand to SEQ ID NO: 1860873
uaaucugagggaaagacag

SEQ ID NO: 1860875 - RNA, 19 nt, Artificial Sequence
  Description of Artificial Sequence: Synthetic oligonucleotide
  Sense strand starting at position 1664 of SEQ ID NO: 1564185
ggauuaagccuccacacca

SEQ ID NO: 1860876 - RNA, 19 nt, Artificial Sequence
  Description of Artificial Sequence: Synthetic oligonucleotide
  Antisense strand to SEQ ID NO: 1860875
ugguguggaggcuuaaucc

SEQ ID NO: 1860877 - RNA, 19 nt, Artificial Sequence
  Description of Artificial Sequence: Synthetic oligonucleotide
  Sense strand starting at position 1991 of SEQ ID NO: 1564185
gauaguugaucaccagaua

SEQ ID NO: 1860878 - RNA, 19 nt, Artificial Sequence
  Description of Artificial Sequence: Synthetic oligonucleotide
  Antisense strand to SEQ ID NO: 1860877
uaucuggugaucaacuauc

SEQ ID NO: 1860879 - RNA, 19 nt, Artificial Sequence
  Description of Artificial Sequence: Synthetic oligonucleotide
  Sense strand starting at position 2031 of SEQ ID NO: 1564185
cgggucuguugaucaguua

SEQ ID NO: 1860880 - RNA, 19 nt, Artificial Sequence
  Description of Artificial Sequence: Synthetic oligonucleotide
  Antisense strand to SEQ ID NO: 1860879
uaacugaucaacagacccg

SEQ ID NO: 1860881 - RNA, 19 nt, Artificial Sequence
  Description of Artificial Sequence: Synthetic oligonucleotide
  Sense strand starting at position 2038 of SEQ ID NO: 1564185
guugaucaguuagccugaa

SEQ ID NO: 1860882 - RNA, 19 nt, Artificial Sequence
  Description of Artificial Sequence: Synthetic oligonucleotide
  Antisense strand to SEQ ID NO: 1860881
uucaggcuaacugaucaac

SEQ ID NO: 1860883 - RNA, 19 nt, Artificial Sequence
  Description of Artificial Sequence: Synthetic oligonucleotide
  Sense strand starting at position 2042 of SEQ ID NO: 1564185
aucaguuagccugaaguuu

SEQ ID NO: 1860884 - RNA, 19 nt, Artificial Sequence
  Description of Artificial Sequence: Synthetic oligonucleotide
  Antisense strand to SEQ ID NO: 1860883
aaacuucaggcuaacugau

SEQ ID NO: 1860885 - RNA, 19 nt, Artificial Sequence
  Description of Artificial Sequence: Synthetic oligonucleotide
  Sense strand starting at position 2343 of SEQ ID NO: 1564185
ccaugaguucuguagucaa

SEQ ID NO: 1860886 - RNA, 19 nt, Artificial Sequence
  Description of Artificial Sequence: Synthetic oligonucleotide
  Antisense strand to SEQ ID NO: 1860885
uugacuacagaacucaugg

SEQ ID NO: 1860887 - RNA, 19 nt, Artificial Sequence
  Description of Artificial Sequence: Synthetic oligonucleotide
  Sense strand starting at position 2346 of SEQ ID NO: 1564185
ugaguucuguagucaacca

SEQ ID NO: 1860888 - RNA, 19 nt, Artificial Sequence
  Description of Artificial Sequence: Synthetic oligonucleotide
  Antisense strand to SEQ ID NO: 1860887
ugguugacuacagaacuca

SEQ ID NO: 1860889 - RNA, 19 nt, Artificial Sequence
  Description of Artificial Sequence: Synthetic oligonucleotide
  Sense strand starting at position 2415 of SEQ ID NO: 1564185
cugugagcucauuaagaag

SEQ ID NO: 1860890 - RNA, 19 nt, Artificial Sequence
  Description of Artificial Sequence: Synthetic oligonucleotide
  Antisense strand to SEQ ID NO: 1860889
cuucuuaaugagcucacag

SEQ ID NO: 1860891 - RNA, 19 nt, Artificial Sequence
  Description of Artificial Sequence: Synthetic oligonucleotide
  Sense strand starting at position 2537 of SEQ ID NO: 1564185
agcagagucaggugcucau

SEQ ID NO: 1860892 - RNA, 19 nt, Artificial Sequence
  Description of Artificial Sequence: Synthetic oligonucleotide
  Antisense strand to SEQ ID NO: 1860891
augagcaccugacucugcu

SEQ ID NO: 1860893 - RNA, 19 nt, Artificial Sequence
  Description of Artificial Sequence: Synthetic oligonucleotide
  Sense strand starting at position 2546 of SEQ ID NO: 1564185
aggugcucauccucaugua

SEQ ID NO: 1860894 - RNA, 19 nt, Artificial Sequence
  Description of Artificial Sequence: Synthetic oligonucleotide
  Antisense strand to SEQ ID NO: 1860893
uacaugaggaugagcaccu

SEQ ID NO: 1860895 - RNA, 19 nt, Artificial Sequence
  Description of Artificial Sequence: Synthetic oligonucleotide
  Sense strand starting at position 2685 of SEQ ID NO: 1564185
gggucugucgccaguagug

SEQ ID NO: 1860896 - RNA, 19 nt, Artificial Sequence
  Description of Artificial Sequence: Synthetic oligonucleotide
  Antisense strand to SEQ ID NO: 1860895
cacuacuggcgacagaccc

SEQ ID NO: 1860897 - RNA, 19 nt, Artificial Sequence
  Description of Artificial Sequence: Synthetic oligonucleotide
  Sense strand starting at position 2714 of SEQ ID NO: 1564185
cuauaaaguagugggcaaa

SEQ ID NO: 1860898 - RNA, 19 nt, Artificial Sequence
  Description of Artificial Sequence: Synthetic oligonucleotide
  Antisense strand to SEQ ID NO: 1860897
uuugcccacuacuuuauag

SEQ ID NO: 1860899 - RNA, 19 nt, Artificial Sequence
  Description of Artificial Sequence: Synthetic oligonucleotide
  Sense strand starting at position 2794 of SEQ ID NO: 1564185
acuugaucuuaggcaguuu

SEQ ID NO: 1860900 - RNA, 19 nt, Artificial Sequence
  Description of Artificial Sequence: Synthetic oligonucleotide
  Antisense strand to SEQ ID NO: 1860899
aaacugccuaagaucaagu

SEQ ID NO: 1860901 - RNA, 19 nt, Artificial Sequence
  Description of Artificial Sequence: Synthetic oligonucleotide
  Sense strand starting at position 2919 of SEQ ID NO: 1564185
aaguuaagaggccaucuua

SEQ ID NO: 1860902 - RNA, 19 nt, Artificial Sequence
  Description of Artificial Sequence: Synthetic oligonucleotide
  Antisense strand to SEQ ID NO: 1860901
uaagauggccucuuaacuu

SEQ ID NO: 1860903 - RNA, 19 nt, Artificial Sequence
  Description of Artificial Sequence: Synthetic oligonucleotide
  Sense strand starting at position 3057 of SEQ ID NO: 1564185
auguaaaccucagauugga

SEQ ID NO: 1860904 - RNA, 19 nt, Artificial Sequence
  Description of Artificial Sequence: Synthetic oligonucleotide
  Antisense strand to SEQ ID NO: 1860903
uccaaucugagguuuacau

SEQ ID NO: 1860905 - RNA, 19 nt, Artificial Sequence
  Description of Artificial Sequence: Synthetic oligonucleotide
  Sense strand starting at position 3065 of SEQ ID NO: 1564185
cucagauuggaguguaaca

SEQ ID NO: 1860906 - RNA, 19 nt, Artificial Sequence
  Description of Artificial Sequence: Synthetic oligonucleotide
  Antisense strand to SEQ ID NO: 1860905
uguuacacuccaaucugag

SEQ ID NO: 1860907 - RNA, 19 nt, Artificial Sequence
  Description of Artificial Sequence: Synthetic oligonucleotide
  Sense strand starting at position 3695 of SEQ ID NO: 1564185
cguuguguaguggugaagu

SEQ ID NO: 1860908 - RNA, 19 nt, Artificial Sequence
  Description of Artificial Sequence: Synthetic oligonucleotide
  Antisense strand to SEQ ID NO: 1860907
acuucaccacuacacaacg

SEQ ID NO: 1860909 - RNA, 19 nt, Artificial Sequence
  Description of Artificial Sequence: Synthetic oligonucleotide
  Sense strand starting at position 3858 of SEQ ID NO: 1564185
cuguauccauagccugaau

SEQ ID NO: 1860910 - RNA, 19 nt, Artificial Sequence
  Description of Artificial Sequence: Synthetic oligonucleotide
  Antisense strand to SEQ ID NO: 1860909
auucaggcuauggauacag

SEQ ID NO: 1860911 - RNA, 19 nt, Artificial Sequence
  Description of Artificial Sequence: Synthetic oligonucleotide
  Sense strand starting at position 3860 of SEQ ID NO: 1564185
guauccauagccugaauaa

SEQ ID NO: 1860912 - RNA, 19 nt, Artificial Sequence
  Description of Artificial Sequence: Synthetic oligonucleotide
  Antisense strand to SEQ ID NO: 1860911
uuauucaggcuauggauac

SEQ ID NO: 1860913 - RNA, 19 nt, Artificial Sequence
  Description of Artificial Sequence: Synthetic oligonucleotide
  Sense strand starting at position 3879 of SEQ ID NO: 1564185
ugcacauuguacucguuaa

SEQ ID NO: 1860914 - RNA, 19 nt, Artificial Sequence
  Description of Artificial Sequence: Synthetic oligonucleotide
  Antisense strand to SEQ ID NO: 1860913
uuaacgaguacaaugugca

SEQ ID NO: 1860915 - RNA, 19 nt, Artificial Sequence
  Description of Artificial Sequence: Synthetic oligonucleotide
  Sense strand starting at position 3880 of SEQ ID NO: 1564185
gcacauuguacucguuaag

SEQ ID NO: 1860916 - RNA, 19 nt, Artificial Sequence
  Description of Artificial Sequence: Synthetic oligonucleotide
  Antisense strand to SEQ ID NO: 1860915
cuuaacgaguacaaugugc

SEQ ID NO: 1860917 - RNA, 19 nt, Artificial Sequence
  Description of Artificial Sequence: Synthetic oligonucleotide
  Sense strand starting at position 3883 of SEQ ID NO: 1564185
cauuguacucguuaaguaa

SEQ ID NO: 1860918 - RNA, 19 nt, Artificial Sequence
  Description of Artificial Sequence: Synthetic oligonucleotide
  Antisense strand to SEQ ID NO: 1860917
uuacuuaacgaguacaaug

SEQ ID NO: 1860919 - RNA, 19 nt, Artificial Sequence
  Description of Artificial Sequence: Synthetic oligonucleotide
  Sense strand starting at position 3886 of SEQ ID NO: 1564185
uguacucguuaaguaauuu

SEQ ID NO: 1860920 - RNA, 19 nt, Artificial Sequence
  Description of Artificial Sequence: Synthetic oligonucleotide
  Antisense strand to SEQ ID NO: 1860919
aaauuacuuaacgaguaca

SEQ ID NO: 1860921 - RNA, 19 nt, Artificial Sequence
  Description of Artificial Sequence: Synthetic oligonucleotide
  Sense strand starting at position 3939 of SEQ ID NO: 1564185
uuccaaguuucuguuguuu

SEQ ID NO: 1860922 - RNA, 19 nt, Artificial Sequence
  Description of Artificial Sequence: Synthetic oligonucleotide
  Antisense strand to SEQ ID NO: 1860921
aaacaacagaaacuuggaa

SEQ ID NO: 1860923 - RNA, 19 nt, Artificial Sequence
  Description of Artificial Sequence: Synthetic oligonucleotide
  Sense strand starting at position 3950 of SEQ ID NO: 1564185
uguuguuuauaauuccaca

SEQ ID NO: 1860924 - RNA, 19 nt, Artificial Sequence
  Description of Artificial Sequence: Synthetic oligonucleotide
  Antisense strand to SEQ ID NO: 1860923
uguggaauuauaaacaaca

SEQ ID NO: 1860925 - RNA, 19 nt, Artificial Sequence
  Description of Artificial Sequence: Synthetic oligonucleotide
  Sense strand starting at position 58 of SEQ ID NO: 1564186
ggguuugcaacaugaauug

SEQ ID NO: 1860926 - RNA, 19 nt, Artificial Sequence
  Description of Artificial Sequence: Synthetic oligonucleotide
  Antisense strand to SEQ ID NO: 1860925
caauucauguugcaaaccc

SEQ ID NO: 1860927 - RNA, 19 nt, Artificial Sequence
  Description of Artificial Sequence: Synthetic oligonucleotide
  Sense strand starting at position 84 of SEQ ID NO: 1564186
ggaaucuauuuccagagcu

SEQ ID NO: 1860928 - RNA, 19 nt, Artificial Sequence
  Description of Artificial Sequence: Synthetic oligonucleotide
  Antisense strand to SEQ ID NO: 1860927
agcucuggaaauagauucc

SEQ ID NO: 1860929 - RNA, 19 nt, Artificial Sequence
  Description of Artificial Sequence: Synthetic oligonucleotide
  Sense strand starting at position 285 of SEQ ID NO: 1564186
acuggaaagacuggucuuu

SEQ ID NO: 1860930 - RNA, 19 nt, Artificial Sequence
  Description of Artificial Sequence: Synthetic oligonucleotide
  Antisense strand to SEQ ID NO: 1860929
aaagaccagucuuuccagu

SEQ ID NO: 1860931 - RNA, 19 nt, Artificial Sequence
  Description of Artificial Sequence: Synthetic oligonucleotide
  Sense strand starting at position 287 of SEQ ID NO: 1564186
uggaaagacuggucuuuaa

SEQ ID NO: 1860932 - RNA, 19 nt, Artificial Sequence
  Description of Artificial Sequence: Synthetic oligonucleotide
  Antisense strand to SEQ ID NO: 1860931
uuaaagaccagucuuucca

SEQ ID NO: 1860933 - RNA, 19 nt, Artificial Sequence
  Description of Artificial Sequence: Synthetic oligonucleotide
  Sense strand starting at position 368 of SEQ ID NO: 1564186
agacuaguucuaggauauc

SEQ ID NO: 1860934 - RNA, 19 nt, Artificial Sequence
  Description of Artificial Sequence: Synthetic oligonucleotide
  Antisense strand to SEQ ID NO: 1860933
gauauccuagaacuagucu

SEQ ID NO: 1860935 - RNA, 19 nt, Artificial Sequence
  Description of Artificial Sequence: Synthetic oligonucleotide
  Sense strand starting at position 645 of SEQ ID NO: 1564186
caggaaggcuccuuaaaug

SEQ ID NO: 1860936 - RNA, 19 nt, Artificial Sequence
  Description of Artificial Sequence: Synthetic oligonucleotide
  Antisense strand to SEQ ID NO: 1860935
cauuuaaggagccuuccug

SEQ ID NO: 1860937 - RNA, 19 nt, Artificial Sequence
  Description of Artificial Sequence: Synthetic oligonucleotide
  Sense strand starting at position 662 of SEQ ID NO: 1564186
ugaucaaucugggugccuu

SEQ ID NO: 1860938 - RNA, 19 nt, Artificial Sequence
  Description of Artificial Sequence: Synthetic oligonucleotide
  Antisense strand to SEQ ID NO: 1860937
aaggcacccagauugauca

SEQ ID NO: 1860939 - RNA, 19 nt, Artificial Sequence
  Description of Artificial Sequence: Synthetic oligonucleotide
  Sense strand starting at position 663 of SEQ ID NO: 1564186
gaucaaucugggugccuua

SEQ ID NO: 1860940 - RNA, 19 nt, Artificial Sequence
  Description of Artificial Sequence: Synthetic oligonucleotide
  Antisense strand to SEQ ID NO: 1860939
uaaggcacccagauugauc

SEQ ID NO: 1860941 - RNA, 19 nt, Artificial Sequence
  Description of Artificial Sequence: Synthetic oligonucleotide
  Sense strand starting at position 666 of SEQ ID NO: 1564186
caaucugggugccuuaaau

SEQ ID NO: 1860942 - RNA, 19 nt, Artificial Sequence
  Description of Artificial Sequence: Synthetic oligonucleotide
  Antisense strand to SEQ ID NO: 1860941
auuuaaggcacccagauug

SEQ ID NO: 1860943 - RNA, 19 nt, Artificial Sequence
  Description of Artificial Sequence: Synthetic oligonucleotide
  Sense strand starting at position 676 of SEQ ID NO: 1564186
gccuuaaauccacaaggua

SEQ ID NO: 1860944 - RNA, 19 nt, Artificial Sequence
  Description of Artificial Sequence: Synthetic oligonucleotide
  Antisense strand to SEQ ID NO: 1860943
uaccuuguggauuuaaggc

SEQ ID NO: 1860945 - RNA, 19 nt, Artificial Sequence
  Description of Artificial Sequence: Synthetic oligonucleotide
  Sense strand starting at position 729 of SEQ ID NO: 1564186
auccaucuuucugugaaga

SEQ ID NO: 1860946 - RNA, 19 nt, Artificial Sequence
  Description of Artificial Sequence: Synthetic oligonucleotide
  Antisense strand to SEQ ID NO: 1860945
ucuucacagaaagauggau

SEQ ID NO: 1860947 - RNA, 19 nt, Artificial Sequence
  Description of Artificial Sequence: Synthetic oligonucleotide
  Sense strand starting at position 730 of SEQ ID NO: 1564186
uccaucuuucugugaagag

SEQ ID NO: 1860948 - RNA, 19 nt, Artificial Sequence
  Description of Artificial Sequence: Synthetic oligonucleotide
  Antisense strand to SEQ ID NO: 1860947
cucuucacagaaagaugga

SEQ ID NO: 1860949 - RNA, 19 nt, Artificial Sequence
  Description of Artificial Sequence: Synthetic oligonucleotide
  Sense strand starting at position 734 of SEQ ID NO: 1564186
ucuuucugugaagaguaaa

SEQ ID NO: 1860950 - RNA, 19 nt, Artificial Sequence
  Description of Artificial Sequence: Synthetic oligonucleotide
  Antisense strand to SEQ ID NO: 1860949
uuuacucuucacagaaaga

SEQ ID NO: 1860951 - RNA, 19 nt, Artificial Sequence
  Description of Artificial Sequence: Synthetic oligonucleotide
  Sense strand starting at position 746 of SEQ ID NO: 1564186
gaguaaagcucauccaaag

SEQ ID NO: 1860952 - RNA, 19 nt, Artificial Sequence
  Description of Artificial Sequence: Synthetic oligonucleotide
  Antisense strand to SEQ ID NO: 1860951
cuuuggaugagcuuuacuc

SEQ ID NO: 1860953 - RNA, 19 nt, Artificial Sequence
  Description of Artificial Sequence: Synthetic oligonucleotide
  Sense strand starting at position 764 of SEQ ID NO: 1564186
ggguuaugcucugaauuua

SEQ ID NO: 1860954 - RNA, 19 nt, Artificial Sequence
  Description of Artificial Sequence: Synthetic oligonucleotide
  Antisense strand to SEQ ID NO: 1860953
uaaauucagagcauaaccc

SEQ ID NO: 1860955 - RNA, 19 nt, Artificial Sequence
  Description of Artificial Sequence: Synthetic oligonucleotide
  Sense strand starting at position 969 of SEQ ID NO: 1564186
gcagucaguccucauccua

SEQ ID NO: 1860956 - RNA, 19 nt, Artificial Sequence
  Description of Artificial Sequence: Synthetic oligonucleotide
  Antisense strand to SEQ ID NO: 1860955
uaggaugaggacugacugc

SEQ ID NO: 1860957 - RNA, 19 nt, Artificial Sequence
  Description of Artificial Sequence: Synthetic oligonucleotide
  Sense strand starting at position 1086 of SEQ ID NO: 1564186
aauuauuucgugugcaagc

SEQ ID NO: 1860958 - RNA, 19 nt, Artificial Sequence
  Description of Artificial Sequence: Synthetic oligonucleotide
  Antisense strand to SEQ ID NO: 1860957
gcuugcacacgaaauaauu

SEQ ID NO: 1860959 - RNA, 19 nt, Artificial Sequence
  Description of Artificial Sequence: Synthetic oligonucleotide
  Sense strand starting at position 1219 of SEQ ID NO: 1564186
ccacuuaaguggucccaau

SEQ ID NO: 1860960 - RNA, 19 nt, Artificial Sequence
  Description of Artificial Sequence: Synthetic oligonucleotide
  Antisense strand to SEQ ID NO: 1860959
auugggaccacuuaagugg

SEQ ID NO: 1860961 - RNA, 19 nt, Artificial Sequence
  Description of Artificial Sequence: Synthetic oligonucleotide
  Sense strand starting at position 1300 of SEQ ID NO: 1564186
gguccucccacuuguggaa

SEQ ID NO: 1860962 - RNA, 19 nt, Artificial Sequence
  Description of Artificial Sequence: Synthetic oligonucleotide
  Antisense strand to SEQ ID NO: 1860961
uuccacaagugggaggacc

SEQ ID NO: 1860963 - RNA, 19 nt, Artificial Sequence
  Description of Artificial Sequence: Synthetic oligonucleotide
  Sense strand starting at position 1398 of SEQ ID NO: 1564186
gaguccagcuguccuauua

SEQ ID NO: 1860964 - RNA, 19 nt, Artificial Sequence
  Description of Artificial Sequence: Synthetic oligonucleotide
  Antisense strand to SEQ ID NO: 1860963
uaauaggacagcuggacuc

SEQ ID NO: 1860965 - RNA, 19 nt, Artificial Sequence
  Description of Artificial Sequence: Synthetic oligonucleotide
  Sense strand starting at position 2287 of SEQ ID NO: 1564186
cugucauacucccuguuau

SEQ ID NO: 1860966 - RNA, 19 nt, Artificial Sequence
  Description of Artificial Sequence: Synthetic oligonucleotide
  Antisense strand to SEQ ID NO: 1860965
auaacagggaguaugacag

SEQ ID NO: 1860967 - RNA, 19 nt, Artificial Sequence
  Description of Artificial Sequence: Synthetic oligonucleotide
  Sense strand starting at position 2288 of SEQ ID NO: 1564186
ugucauacucccuguuauc

SEQ ID NO: 1860968 - RNA, 19 nt, Artificial Sequence
  Description of Artificial Sequence: Synthetic oligonucleotide
  Antisense strand to SEQ ID NO: 1860967
gauaacagggaguaugaca

SEQ ID NO: 1860969 - RNA, 19 nt, Artificial Sequence
  Description of Artificial Sequence: Synthetic oligonucleotide
  Sense strand starting at position 2363 of SEQ ID NO: 1564186
ggacuagugccguauccaa

SEQ ID NO: 1860970 - RNA, 19 nt, Artificial Sequence
  Description of Artificial Sequence: Synthetic oligonucleotide
  Antisense strand to SEQ ID NO: 1860969
uuggauacggcacuagucc

SEQ ID NO: 1860971 - RNA, 19 nt, Artificial Sequence
  Description of Artificial Sequence: Synthetic oligonucleotide
  Sense strand starting at position 2403 of SEQ ID NO: 1564186
acaggugccuagucagacu

SEQ ID NO: 1860972 - RNA, 19 nt, Artificial Sequence
  Description of Artificial Sequence: Synthetic oligonucleotide
  Antisense strand to SEQ ID NO: 1860971
agucugacuaggcaccugu

SEQ ID NO: 1860973 - RNA, 19 nt, Artificial Sequence
  Description of Artificial Sequence: Synthetic oligonucleotide
  Sense strand starting at position 2448 of SEQ ID NO: 1564186
agucaauacuggcuuccau

SEQ ID NO: 1860974 - RNA, 19 nt, Artificial Sequence
  Description of Artificial Sequence: Synthetic oligonucleotide
  Antisense strand to SEQ ID NO: 1860973
auggaagccaguauugacu

SEQ ID NO: 1860975 - RNA, 19 nt, Artificial Sequence
  Description of Artificial Sequence: Synthetic oligonucleotide
  Sense strand starting at position 2556 of SEQ ID NO: 1564186
ucacguugucagcagauca

SEQ ID NO: 1860976 - RNA, 19 nt, Artificial Sequence
  Description of Artificial Sequence: Synthetic oligonucleotide
  Antisense strand to SEQ ID NO: 1860975
ugaucugcugacaacguga

SEQ ID NO: 1860977 - RNA, 19 nt, Artificial Sequence
  Description of Artificial Sequence: Synthetic oligonucleotide
  Sense strand starting at position 2677 of SEQ ID NO: 1564186
cugugauuaggucgggaca

SEQ ID NO: 1860978 - RNA, 19 nt, Artificial Sequence
  Description of Artificial Sequence: Synthetic oligonucleotide
  Antisense strand to SEQ ID NO: 1860977
ugucccgaccuaaucacag

SEQ ID NO: 1860979 - RNA, 19 nt, Artificial Sequence
  Description of Artificial Sequence: Synthetic oligonucleotide
  Sense strand starting at position 2678 of SEQ ID NO: 1564186
ugugauuaggucgggacaa

SEQ ID NO: 1860980 - RNA, 19 nt, Artificial Sequence
  Description of Artificial Sequence: Synthetic oligonucleotide
  Antisense strand to SEQ ID NO: 1860979
uugucccgaccuaaucaca

SEQ ID NO: 1860981 - RNA, 19 nt, Artificial Sequence
  Description of Artificial Sequence: Synthetic oligonucleotide
  Sense strand starting at position 2749 of SEQ ID NO: 1564186
cugucuuucccucagauua

SEQ ID NO: 1860982 - RNA, 19 nt, Artificial Sequence
  Description of Artificial Sequence: Synthetic oligonucleotide
  Antisense strand to SEQ ID NO: 1860981
uaaucugagggaaagacag

SEQ ID NO: 1860983 - RNA, 19 nt, Artificial Sequence
  Description of Artificial Sequence: Synthetic oligonucleotide
  Sense strand starting at position 2843 of SEQ ID NO: 1564186
ggauuaagccuccacacca

SEQ ID NO: 1860984 - RNA, 19 nt, Artificial Sequence
  Description of Artificial Sequence: Synthetic oligonucleotide
  Antisense strand to SEQ ID NO: 1860983
ugguguggaggcuuaaucc

SEQ ID NO: 1860985 - RNA, 19 nt, Artificial Sequence
  Description of Artificial Sequence: Synthetic oligonucleotide
  Sense strand starting at position 3170 of SEQ ID NO: 1564186
gauaguugaucaccagaua

SEQ ID NO: 1860986 - RNA, 19 nt, Artificial Sequence
  Description of Artificial Sequence: Synthetic oligonucleotide
  Antisense strand to SEQ ID NO: 1860985
uaucuggugaucaacuauc

SEQ ID NO: 1860987 - RNA, 19 nt, Artificial Sequence
  Description of Artificial Sequence: Synthetic oligonucleotide
  Sense strand starting at position 3217 of SEQ ID NO: 1564186
guugaucaguuagccugaa

SEQ ID NO: 1860988 - RNA, 19 nt, Artificial Sequence
  Description of Artificial Sequence: Synthetic oligonucleotide
  Antisense strand to SEQ ID NO: 1860987
uucaggcuaacugaucaac

SEQ ID NO: 1860989 - RNA, 19 nt, Artificial Sequence
  Description of Artificial Sequence: Synthetic oligonucleotide
  Sense strand starting at position 3221 of SEQ ID NO: 1564186
aucaguuagccugaaguuu

SEQ ID NO: 1860990 - RNA, 19 nt, Artificial Sequence
  Description of Artificial Sequence: Synthetic oligonucleotide
  Antisense strand to SEQ ID NO: 1860989
aaacuucaggcuaacugau

SEQ ID NO: 1860991 - RNA, 19 nt, Artificial Sequence
  Description of Artificial Sequence: Synthetic oligonucleotide
  Sense strand starting at position 3522 of SEQ ID NO: 1564186
ccaugaguucuguagucaa

SEQ ID NO: 1860992 - RNA, 19 nt, Artificial Sequence
  Description of Artificial Sequence: Synthetic oligonucleotide
  Antisense strand to SEQ ID NO: 1860991
uugacuacagaacucaugg

SEQ ID NO: 1860993 - RNA, 19 nt, Artificial Sequence
  Description of Artificial Sequence: Synthetic oligonucleotide
  Sense strand starting at position 3525 of SEQ ID NO: 1564186
ugaguucuguagucaacca

SEQ ID NO: 1860994 - RNA, 19 nt, Artificial Sequence
  Description of Artificial Sequence: Synthetic oligonucleotide
  Antisense strand to SEQ ID NO: 1860993
ugguugacuacagaacuca

SEQ ID NO: 1860995 - RNA, 19 nt, Artificial Sequence
  Description of Artificial Sequence: Synthetic oligonucleotide
  Sense strand starting at position 3594 of SEQ ID NO: 1564186
cugugagcucauuaagaag

SEQ ID NO: 1860996 - RNA, 19 nt, Artificial Sequence
  Description of Artificial Sequence: Synthetic oligonucleotide
  Antisense strand to SEQ ID NO: 1860995
cuucuuaaugagcucacag

SEQ ID NO: 1860997 - RNA, 19 nt, Artificial Sequence
  Description of Artificial Sequence: Synthetic oligonucleotide
  Sense strand starting at position 3725 of SEQ ID NO: 1564186
aggugcucauccucaugua

SEQ ID NO: 1860998 - RNA, 19 nt, Artificial Sequence
  Description of Artificial Sequence: Synthetic oligonucleotide
  Antisense strand to SEQ ID NO: 1860997
uacaugaggaugagcaccu

SEQ ID NO: 1860999 - RNA, 19 nt, Artificial Sequence
  Description of Artificial Sequence: Synthetic oligonucleotide
  Sense strand starting at position 3864 of SEQ ID NO: 1564186
gggucugucgccaguagug

SEQ ID NO: 1861000 - RNA, 19 nt, Artificial Sequence
  Description of Artificial Sequence: Synthetic oligonucleotide
  Antisense strand to SEQ ID NO: 1860999
cacuacuggcgacagaccc

SEQ ID NO: 1861001 - RNA, 19 nt, Artificial Sequence
  Description of Artificial Sequence: Synthetic oligonucleotide
  Sense strand starting at position 3893 of SEQ ID NO: 1564186
cuauaaaguagugggcaaa

SEQ ID NO: 1861002 - RNA, 19 nt, Artificial Sequence
  Description of Artificial Sequence: Synthetic oligonucleotide
  Antisense strand to SEQ ID NO: 1861001
uuugcccacuacuuuauag

SEQ ID NO: 1861003 - RNA, 19 nt, Artificial Sequence
  Description of Artificial Sequence: Synthetic oligonucleotide
  Sense strand starting at position 3973 of SEQ ID NO: 1564186
acuugaucuuaggcaguuu

SEQ ID NO: 1861004 - RNA, 19 nt, Artificial Sequence
  Description of Artificial Sequence: Synthetic oligonucleotide
  Antisense strand to SEQ ID NO: 1861003
aaacugccuaagaucaagu

SEQ ID NO: 1861005 - RNA, 19 nt, Artificial Sequence
  Description of Artificial Sequence: Synthetic oligonucleotide
  Sense strand starting at position 44 of SEQ ID NO: 1564187
gggccuugggcugagauua

SEQ ID NO: 1861006 - RNA, 19 nt, Artificial Sequence
  Description of Artificial Sequence: Synthetic oligonucleotide
  Antisense strand to SEQ ID NO: 1861005
uaaucucagcccaaggccc

SEQ ID NO: 1861007 - RNA, 19 nt, Artificial Sequence
  Description of Artificial Sequence: Synthetic oligonucleotide
  Sense strand starting at position 56 of SEQ ID NO: 1564187
gagauuauacacugucaug

SEQ ID NO: 1861008 - RNA, 19 nt, Artificial Sequence
  Description of Artificial Sequence: Synthetic oligonucleotide
  Antisense strand to SEQ ID NO: 1861007
caugacaguguauaaucuc

SEQ ID NO: 1861009 - RNA, 19 nt, Artificial Sequence
  Description of Artificial Sequence: Synthetic oligonucleotide
  Sense strand starting at position 66 of SEQ ID NO: 1564187
acugucaugguuugagauu

SEQ ID NO: 1861010 - RNA, 19 nt, Artificial Sequence
  Description of Artificial Sequence: Synthetic oligonucleotide
  Antisense strand to SEQ ID NO: 1861009
aaucucaaaccaugacagu

SEQ ID NO: 1861011 - RNA, 19 nt, Artificial Sequence
  Description of Artificial Sequence: Synthetic oligonucleotide
  Sense strand starting at position 72 of SEQ ID NO: 1564187
augguuugagauuaugucu

SEQ ID NO: 1861012 - RNA, 19 nt, Artificial Sequence
  Description of Artificial Sequence: Synthetic oligonucleotide
  Antisense strand to SEQ ID NO: 1861011
agacauaaucucaaaccau

SEQ ID NO: 1861013 - RNA, 19 nt, Artificial Sequence
  Description of Artificial Sequence: Synthetic oligonucleotide
  Sense strand starting at position 202 of SEQ ID NO: 1564187
agggcaugccuguaaucca

SEQ ID NO: 1861014 - RNA, 19 nt, Artificial Sequence
  Description of Artificial Sequence: Synthetic oligonucleotide
  Antisense strand to SEQ ID NO: 1861013
uggauuacaggcaugcccu

SEQ ID NO: 1861015 - RNA, 19 nt, Artificial Sequence
  Description of Artificial Sequence: Synthetic oligonucleotide
  Sense strand starting at position 361 of SEQ ID NO: 1564187
acucaaauauguguuuauc

SEQ ID NO: 1861016 - RNA, 19 nt, Artificial Sequence
  Description of Artificial Sequence: Synthetic oligonucleotide
  Antisense strand to SEQ ID NO: 1861015
gauaaacacauauuugagu

SEQ ID NO: 1861017 - RNA, 19 nt, Artificial Sequence
  Description of Artificial Sequence: Synthetic oligonucleotide
  Sense strand starting at position 454 of SEQ ID NO: 1564187
ucaaauguugcugaacuua

SEQ ID NO: 1861018 - RNA, 19 nt, Artificial Sequence
  Description of Artificial Sequence: Synthetic oligonucleotide
  Antisense strand to SEQ ID NO: 1861017
uaaguucagcaacauuuga

SEQ ID NO: 1861019 - RNA, 19 nt, Artificial Sequence
  Description of Artificial Sequence: Synthetic oligonucleotide
  Sense strand starting at position 522 of SEQ ID NO: 1564187
gggcucaccuccucaaaga

SEQ ID NO: 1861020 - RNA, 19 nt, Artificial Sequence
  Description of Artificial Sequence: Synthetic oligonucleotide
  Antisense strand to SEQ ID NO: 1861019
ucuuugaggaggugagccc

SEQ ID NO: 1861021 - RNA, 19 nt, Artificial Sequence
  Description of Artificial Sequence: Synthetic oligonucleotide
  Sense strand starting at position 523 of SEQ ID NO: 1564187
ggcucaccuccucaaagau

SEQ ID NO: 1861022 - RNA, 19 nt, Artificial Sequence
  Description of Artificial Sequence: Synthetic oligonucleotide
  Antisense strand to SEQ ID NO: 1861021
aucuuugaggaggugagcc

SEQ ID NO: 1861023 - RNA, 19 nt, Artificial Sequence
  Description of Artificial Sequence: Synthetic oligonucleotide
  Sense strand starting at position 854 of SEQ ID NO: 1564187
caaagaugcuuucugugau

SEQ ID NO: 1861024 - RNA, 19 nt, Artificial Sequence
  Description of Artificial Sequence: Synthetic oligonucleotide
  Antisense strand to SEQ ID NO: 1861023
aucacagaaagcaucuuug

SEQ ID NO: 1861025 - RNA, 19 nt, Artificial Sequence
  Description of Artificial Sequence: Synthetic oligonucleotide
  Sense strand starting at position 857 of SEQ ID NO: 1564187
agaugcuuucugugaucac

SEQ ID NO: 1861026 - RNA, 19 nt, Artificial Sequence
  Description of Artificial Sequence: Synthetic oligonucleotide
  Antisense strand to SEQ ID NO: 1861025
gugaucacagaaagcaucu

SEQ ID NO: 1861027 - RNA, 19 nt, Artificial Sequence
  Description of Artificial Sequence: Synthetic oligonucleotide
  Sense strand starting at position 860 of SEQ ID NO: 1564187
ugcuuucugugaucacuga

SEQ ID NO: 1861028 - RNA, 19 nt, Artificial Sequence
  Description of Artificial Sequence: Synthetic oligonucleotide
  Antisense strand to SEQ ID NO: 1861027
ucagugaucacagaaagca

SEQ ID NO: 1861029 - RNA, 19 nt, Artificial Sequence
  Description of Artificial Sequence: Synthetic oligonucleotide
  Sense strand starting at position 861 of SEQ ID NO: 1564187
gcuuucugugaucacugaa

SEQ ID NO: 1861030 - RNA, 19 nt, Artificial Sequence
  Description of Artificial Sequence: Synthetic oligonucleotide
  Antisense strand to SEQ ID NO: 1861029
uucagugaucacagaaagc

SEQ ID NO: 1861031 - RNA, 19 nt, Artificial Sequence
  Description of Artificial Sequence: Synthetic oligonucleotide
  Sense strand starting at position 958 of SEQ ID NO: 1564187
cccuguagacuguaaacuu

SEQ ID NO: 1861032 - RNA, 19 nt, Artificial Sequence
  Description of Artificial Sequence: Synthetic oligonucleotide
  Antisense strand to SEQ ID NO: 1861031
aaguuuacagucuacaggg

SEQ ID NO: 1861033 - RNA, 19 nt, Artificial Sequence
  Description of Artificial Sequence: Synthetic oligonucleotide
  Sense strand starting at position 1043 of SEQ ID NO: 1564187
aguauaacuuuggcccaau

SEQ ID NO: 1861034 - RNA, 19 nt, Artificial Sequence
  Description of Artificial Sequence: Synthetic oligonucleotide
  Antisense strand to SEQ ID NO: 1861033
auugggccaaaguuauacu

SEQ ID NO: 1861035 - RNA, 19 nt, Artificial Sequence
  Description of Artificial Sequence: Synthetic oligonucleotide
  Sense strand starting at position 1044 of SEQ ID NO: 1564187
guauaacuuuggcccaaua

SEQ ID NO: 1861036 - RNA, 19 nt, Artificial Sequence
  Description of Artificial Sequence: Synthetic oligonucleotide
  Antisense strand to SEQ ID NO: 1861035
uauugggccaaaguuauac

SEQ ID NO: 1861037 - RNA, 19 nt, Artificial Sequence
  Description of Artificial Sequence: Synthetic oligonucleotide
  Sense strand starting at position 1055 of SEQ ID NO: 1564187
gcccaauaacucugggcuu

SEQ ID NO: 1861038 - RNA, 19 nt, Artificial Sequence
  Description of Artificial Sequence: Synthetic oligonucleotide
  Antisense strand to SEQ ID NO: 1861037
aagcccagaguuauugggc

SEQ ID NO: 1861039 - RNA, 19 nt, Artificial Sequence
  Description of Artificial Sequence: Synthetic oligonucleotide
  Sense strand starting at position 1057 of SEQ ID NO: 1564187
ccaauaacucugggcuugu

SEQ ID NO: 1861040 - RNA, 19 nt, Artificial Sequence
  Description of Artificial Sequence: Synthetic oligonucleotide
  Antisense strand to SEQ ID NO: 1861039
acaagcccagaguuauugg

SEQ ID NO: 1861041 - RNA, 19 nt, Artificial Sequence
  Description of Artificial Sequence: Synthetic oligonucleotide
  Sense strand starting at position 1058 of SEQ ID NO: 1564187
caauaacucugggcuuguu

SEQ ID NO: 1861042 - RNA, 19 nt, Artificial Sequence
  Description of Artificial Sequence: Synthetic oligonucleotide
  Antisense strand to SEQ ID NO: 1861041
aacaagcccagaguuauug

SEQ ID NO: 1861043 - RNA, 19 nt, Artificial Sequence
  Description of Artificial Sequence: Synthetic oligonucleotide
  Sense strand starting at position 1094 of SEQ ID NO: 1564187
guguuuaacagaugaaaug

SEQ ID NO: 1861044 - RNA, 19 nt, Artificial Sequence
  Description of Artificial Sequence: Synthetic oligonucleotide
  Antisense strand to SEQ ID NO: 1861043
cauuucaucuguuaaacac

SEQ ID NO: 1861045 - RNA, 19 nt, Artificial Sequence
  Description of Artificial Sequence: Synthetic oligonucleotide
  Sense strand starting at position 1424 of SEQ ID NO: 1564187
ugauuccaaugucugcaaa

SEQ ID NO: 1861046 - RNA, 19 nt, Artificial Sequence
  Description of Artificial Sequence: Synthetic oligonucleotide
  Antisense strand to SEQ ID NO: 1861045
uuugcagacauuggaauca

SEQ ID NO: 1861047 - RNA, 19 nt, Artificial Sequence
  Description of Artificial Sequence: Synthetic oligonucleotide
  Sense strand starting at position 1435 of SEQ ID NO: 1564187
ucugcaaacuuuguagacu

SEQ ID NO: 1861048 - RNA, 19 nt, Artificial Sequence
  Description of Artificial Sequence: Synthetic oligonucleotide
  Antisense strand to SEQ ID NO: 1861047
agucuacaaaguuugcaga

SEQ ID NO: 1861049 - RNA, 19 nt, Artificial Sequence
  Description of Artificial Sequence: Synthetic oligonucleotide
  Sense strand starting at position 1447 of SEQ ID NO: 1564187
guagacuugucaccaggaa

SEQ ID NO: 1861050 - RNA, 19 nt, Artificial Sequence
  Description of Artificial Sequence: Synthetic oligonucleotide
  Antisense strand to SEQ ID NO: 1861049
uuccuggugacaagucuac

SEQ ID NO: 1861051 - RNA, 19 nt, Artificial Sequence
  Description of Artificial Sequence: Synthetic oligonucleotide
  Sense strand starting at position 1507 of SEQ ID NO: 1564187
cguccagauccucaccaau

SEQ ID NO: 1861052 - RNA, 19 nt, Artificial Sequence
  Description of Artificial Sequence: Synthetic oligonucleotide
  Antisense strand to SEQ ID NO: 1861051
auuggugaggaucuggacg

SEQ ID NO: 1861053 - RNA, 19 nt, Artificial Sequence
  Description of Artificial Sequence: Synthetic oligonucleotide
  Sense strand starting at position 2026 of SEQ ID NO: 1564187
gcgucacuuccguccaaag

SEQ ID NO: 1861054 - RNA, 19 nt, Artificial Sequence
  Description of Artificial Sequence: Synthetic oligonucleotide
  Antisense strand to SEQ ID NO: 1861053
cuuuggacggaagugacgc

SEQ ID NO: 1861055 - RNA, 19 nt, Artificial Sequence
  Description of Artificial Sequence: Synthetic oligonucleotide
  Sense strand starting at position 2141 of SEQ ID NO: 1564187
cucauucgccagcuuugua

SEQ ID NO: 1861056 - RNA, 19 nt, Artificial Sequence
  Description of Artificial Sequence: Synthetic oligonucleotide
  Antisense strand to SEQ ID NO: 1861055
uacaaagcuggcgaaugag

SEQ ID NO: 1861057 - RNA, 19 nt, Artificial Sequence
  Description of Artificial Sequence: Synthetic oligonucleotide
  Sense strand starting at position 2150 of SEQ ID NO: 1564187
cagcuuuguaggugacuga

SEQ ID NO: 1861058 - RNA, 19 nt, Artificial Sequence
  Description of Artificial Sequence: Synthetic oligonucleotide
  Antisense strand to SEQ ID NO: 1861057
ucagucaccuacaaagcug

SEQ ID NO: 1861059 - RNA, 19 nt, Artificial Sequence
  Description of Artificial Sequence: Synthetic oligonucleotide
  Sense strand starting at position 2157 of SEQ ID NO: 1564187
guaggugacugaccuagua

SEQ ID NO: 1861060 - RNA, 19 nt, Artificial Sequence
  Description of Artificial Sequence: Synthetic oligonucleotide
  Antisense strand to SEQ ID NO: 1861059
uacuaggucagucaccuac

SEQ ID NO: 1861061 - RNA, 19 nt, Artificial Sequence
  Description of Artificial Sequence: Synthetic oligonucleotide
  Sense strand starting at position 2280 of SEQ ID NO: 1564187
ggcugcguucccgcagaau

SEQ ID NO: 1861062 - RNA, 19 nt, Artificial Sequence
  Description of Artificial Sequence: Synthetic oligonucleotide
  Antisense strand to SEQ ID NO: 1861061
auucugcgggaacgcagcc

SEQ ID NO: 1861063 - RNA, 19 nt, Artificial Sequence
  Description of Artificial Sequence: Synthetic oligonucleotide
  Sense strand starting at position 2402 of SEQ ID NO: 1564187
ggaugcugucagcagaauc

SEQ ID NO: 1861064 - RNA, 19 nt, Artificial Sequence
  Description of Artificial Sequence: Synthetic oligonucleotide
  Antisense strand to SEQ ID NO: 1861063
gauucugcugacagcaucc

SEQ ID NO: 1861065 - RNA, 19 nt, Artificial Sequence
  Description of Artificial Sequence: Synthetic oligonucleotide
  Sense strand starting at position 2623 of SEQ ID NO: 1564187
gacacuggguaguugauaa

SEQ ID NO: 1861066 - RNA, 19 nt, Artificial Sequence
  Description of Artificial Sequence: Synthetic oligonucleotide
  Antisense strand to SEQ ID NO: 1861065
uuaucaacuacccaguguc

SEQ ID NO: 1861067 - RNA, 19 nt, Artificial Sequence
  Description of Artificial Sequence: Synthetic oligonucleotide
  Sense strand starting at position 2726 of SEQ ID NO: 1564187
cguuucuaaguguacaauu

SEQ ID NO: 1861068 - RNA, 19 nt, Artificial Sequence
  Description of Artificial Sequence: Synthetic oligonucleotide
  Antisense strand to SEQ ID NO: 1861067
aauuguacacuuagaaacg

SEQ ID NO: 1861069 - RNA, 19 nt, Artificial Sequence
  Description of Artificial Sequence: Synthetic oligonucleotide
  Sense strand starting at position 2763 of SEQ ID NO: 1564187
uuacauuguugagcaauca

SEQ ID NO: 1861070 - RNA, 19 nt, Artificial Sequence
  Description of Artificial Sequence: Synthetic oligonucleotide
  Antisense strand to SEQ ID NO: 1861069
ugauugcucaacaauguaa

SEQ ID NO: 1861071 - RNA, 19 nt, Artificial Sequence
  Description of Artificial Sequence: Synthetic oligonucleotide
  Sense strand starting at position 3225 of SEQ ID NO: 1564187
ucaguauuugucuguaacu

SEQ ID NO: 1861072 - RNA, 19 nt, Artificial Sequence
  Description of Artificial Sequence: Synthetic oligonucleotide
  Antisense strand to SEQ ID NO: 1861071
aguuacagacaaauacuga

SEQ ID NO: 1861073 - RNA, 19 nt, Artificial Sequence
  Description of Artificial Sequence: Synthetic oligonucleotide
  Sense strand starting at position 3347 of SEQ ID NO: 1564187
guuuauccaccgcacauau

SEQ ID NO: 1861074 - RNA, 19 nt, Artificial Sequence
  Description of Artificial Sequence: Synthetic oligonucleotide
  Antisense strand to SEQ ID NO: 1861073
auaugugcgguggauaaac

SEQ ID NO: 1861075 - RNA, 19 nt, Artificial Sequence
  Description of Artificial Sequence: Synthetic oligonucleotide
  Sense strand starting at position 3804 of SEQ ID NO: 1564187
gguugaagcuggguaguua

SEQ ID NO: 1861076 - RNA, 19 nt, Artificial Sequence
  Description of Artificial Sequence: Synthetic oligonucleotide
  Antisense strand to SEQ ID NO: 1861075
uaacuacccagcuucaacc

SEQ ID NO: 1861077 - RNA, 19 nt, Artificial Sequence
  Description of Artificial Sequence: Synthetic oligonucleotide
  Sense strand starting at position 3805 of SEQ ID NO: 1564187
guugaagcuggguaguuaa

SEQ ID NO: 1861078 - RNA, 19 nt, Artificial Sequence
  Description of Artificial Sequence: Synthetic oligonucleotide
  Antisense strand to SEQ ID NO: 1861077
uuaacuacccagcuucaac

SEQ ID NO: 1861079 - RNA, 19 nt, Artificial Sequence
  Description of Artificial Sequence: Synthetic oligonucleotide
  Sense strand starting at position 3808 of SEQ ID NO: 1564187
gaagcuggguaguuaaaca

SEQ ID NO: 1861080 - RNA, 19 nt, Artificial Sequence
  Description of Artificial Sequence: Synthetic oligonucleotide
  Antisense strand to SEQ ID NO: 1861079
uguuuaacuacccagcuuc

SEQ ID NO: 1861081 - RNA, 19 nt, Artificial Sequence
  Description of Artificial Sequence: Synthetic oligonucleotide
  Sense strand starting at position 3883 of SEQ ID NO: 1564187
acuagugaugugcauaacu

SEQ ID NO: 1861082 - RNA, 19 nt, Artificial Sequence
  Description of Artificial Sequence: Synthetic oligonucleotide
  Antisense strand to SEQ ID NO: 1861081
aguuaugcacaucacuagu

SEQ ID NO: 1861083 - RNA, 19 nt, Artificial Sequence
  Description of Artificial Sequence: Synthetic oligonucleotide
  Sense strand starting at position 3885 of SEQ ID NO: 1564187
uagugaugugcauaacuac

SEQ ID NO: 1861084 - RNA, 19 nt, Artificial Sequence
  Description of Artificial Sequence: Synthetic oligonucleotide
  Antisense strand to SEQ ID NO: 1861083
guaguuaugcacaucacua

SEQ ID NO: 1861085 - RNA, 19 nt, Artificial Sequence
  Description of Artificial Sequence: Synthetic oligonucleotide
  Sense strand starting at position 124 of SEQ ID NO: 1564188
agugcagaaaguugaucua

SEQ ID NO: 1861086 - RNA, 19 nt, Artificial Sequence
  Description of Artificial Sequence: Synthetic oligonucleotide
  Antisense strand to SEQ ID NO: 1861085
uagaucaacuuucugcacu

SEQ ID NO: 1861087 - RNA, 19 nt, Artificial Sequence
  Description of Artificial Sequence: Synthetic oligonucleotide
  Sense strand starting at position 226 of SEQ ID NO: 1564188
uacuccaaggagugauuaa

SEQ ID NO: 1861088 - RNA, 19 nt, Artificial Sequence
  Description of Artificial Sequence: Synthetic oligonucleotide
  Antisense strand to SEQ ID NO: 1861087
uuaaucacuccuuggagua

SEQ ID NO: 1861089 - RNA, 19 nt, Artificial Sequence
  Description of Artificial Sequence: Synthetic oligonucleotide
  Sense strand starting at position 285 of SEQ ID NO: 1564188
cagcaagugccagauaucu

SEQ ID NO: 1861090 - RNA, 19 nt, Artificial Sequence
  Description of Artificial Sequence: Synthetic oligonucleotide
  Antisense strand to SEQ ID NO: 1861089
agauaucuggcacuugcug

SEQ ID NO: 1861091 - RNA, 19 nt, Artificial Sequence
  Description of Artificial Sequence: Synthetic oligonucleotide
  Sense strand starting at position 287 of SEQ ID NO: 1564188
gcaagugccagauaucuga

SEQ ID NO: 1861092 - RNA, 19 nt, Artificial Sequence
  Description of Artificial Sequence: Synthetic oligonucleotide
  Antisense strand to SEQ ID NO: 1861091
ucagauaucuggcacuugc

SEQ ID NO: 1861093 - RNA, 19 nt, Artificial Sequence
  Description of Artificial Sequence: Synthetic oligonucleotide
  Sense strand starting at position 294 of SEQ ID NO: 1564188
ccagauaucugagcacugu

SEQ ID NO: 1861094 - RNA, 19 nt, Artificial Sequence
  Description of Artificial Sequence: Synthetic oligonucleotide
  Antisense strand to SEQ ID NO: 1861093
acagugcucagauaucugg

SEQ ID NO: 1861095 - RNA, 19 nt, Artificial Sequence
  Description of Artificial Sequence: Synthetic oligonucleotide
  Sense strand starting at position 295 of SEQ ID NO: 1564188
cagauaucugagcacugua

SEQ ID NO: 1861096 - RNA, 19 nt, Artificial Sequence
  Description of Artificial Sequence: Synthetic oligonucleotide
  Antisense strand to SEQ ID NO: 1861095
uacagugcucagauaucug

SEQ ID NO: 1861097 - RNA, 19 nt, Artificial Sequence
  Description of Artificial Sequence: Synthetic oligonucleotide
  Sense strand starting at position 298 of SEQ ID NO: 1564188
auaucugagcacuguauua

SEQ ID NO: 1861098 - RNA, 19 nt, Artificial Sequence
  Description of Artificial Sequence: Synthetic oligonucleotide
  Antisense strand to SEQ ID NO: 1861097
uaauacagugcucagauau

SEQ ID NO: 1861099 - RNA, 19 nt, Artificial Sequence
  Description of Artificial Sequence: Synthetic oligonucleotide
  Sense strand starting at position 300 of SEQ ID NO: 1564188
aucugagcacuguauuaac

SEQ ID NO: 1861100 - RNA, 19 nt, Artificial Sequence
  Description of Artificial Sequence: Synthetic oligonucleotide
  Antisense strand to SEQ ID NO: 1861099
guuaauacagugcucagau

SEQ ID NO: 1861101 - RNA, 19 nt, Artificial Sequence
  Description of Artificial Sequence: Synthetic oligonucleotide
  Sense strand starting at position 308 of SEQ ID NO: 1564188
acuguauuaacuggaggca

SEQ ID NO: 1861102 - RNA, 19 nt, Artificial Sequence
  Description of Artificial Sequence: Synthetic oligonucleotide
  Antisense strand to SEQ ID NO: 1861101
ugccuccaguuaauacagu

SEQ ID NO: 1861103 - RNA, 19 nt, Artificial Sequence
  Description of Artificial Sequence: Synthetic oligonucleotide
  Sense strand starting at position 329 of SEQ ID NO: 1564188
ggccuuuauggagaggucu

SEQ ID NO: 1861104 - RNA, 19 nt, Artificial Sequence
  Description of Artificial Sequence: Synthetic oligonucleotide
  Antisense strand to SEQ ID NO: 1861103
agaccucuccauaaaggcc

SEQ ID NO: 1861105 - RNA, 19 nt, Artificial Sequence
  Description of Artificial Sequence: Synthetic oligonucleotide
  Sense strand starting at position 331 of SEQ ID NO: 1564188
ccuuuauggagaggucuaa

SEQ ID NO: 1861106 - RNA, 19 nt, Artificial Sequence
  Description of Artificial Sequence: Synthetic oligonucleotide
  Antisense strand to SEQ ID NO: 1861105
uuagaccucuccauaaagg

SEQ ID NO: 1861107 - RNA, 19 nt, Artificial Sequence
  Description of Artificial Sequence: Synthetic oligonucleotide
  Sense strand starting at position 703 of SEQ ID NO: 1564188
aaugauuuguuugagaagg

SEQ ID NO: 1861108 - RNA, 19 nt, Artificial Sequence
  Description of Artificial Sequence: Synthetic oligonucleotide
  Antisense strand to SEQ ID NO: 1861107
ccuucucaaacaaaucauu

SEQ ID NO: 1861109 - RNA, 19 nt, Artificial Sequence
  Description of Artificial Sequence: Synthetic oligonucleotide
  Sense strand starting at position 897 of SEQ ID NO: 1564188
gguacucaauguuuacuaa

SEQ ID NO: 1861110 - RNA, 19 nt, Artificial Sequence
  Description of Artificial Sequence: Synthetic oligonucleotide
  Antisense strand to SEQ ID NO: 1861109
uuaguaaacauugaguacc

SEQ ID NO: 1861111 - RNA, 19 nt, Artificial Sequence
  Description of Artificial Sequence: Synthetic oligonucleotide
  Sense strand starting at position 898 of SEQ ID NO: 1564188
guacucaauguuuacuaaa

SEQ ID NO: 1861112 - RNA, 19 nt, Artificial Sequence
  Description of Artificial Sequence: Synthetic oligonucleotide
  Antisense strand to SEQ ID NO: 1861111
uuuaguaaacauugaguac

SEQ ID NO: 1861113 - RNA, 19 nt, Artificial Sequence
  Description of Artificial Sequence: Synthetic oligonucleotide
  Sense strand starting at position 1119 of SEQ ID NO: 1564188
cuagauaagugcucacaag

SEQ ID NO: 1861114 - RNA, 19 nt, Artificial Sequence
  Description of Artificial Sequence: Synthetic oligonucleotide
  Antisense strand to SEQ ID NO: 1861113
cuugugagcacuuaucuag

SEQ ID NO: 1861115 - RNA, 19 nt, Artificial Sequence
  Description of Artificial Sequence: Synthetic oligonucleotide
  Sense strand starting at position 1293 of SEQ ID NO: 1564188
uggauccaucaagguuuaa

SEQ ID NO: 1861116 - RNA, 19 nt, Artificial Sequence
  Description of Artificial Sequence: Synthetic oligonucleotide
  Antisense strand to SEQ ID NO: 1861115
uuaaaccuugauggaucca

SEQ ID NO: 1861117 - RNA, 19 nt, Artificial Sequence
  Description of Artificial Sequence: Synthetic oligonucleotide
  Sense strand starting at position 1343 of SEQ ID NO: 1564188
agaggaagcauccagcuua

SEQ ID NO: 1861118 - RNA, 19 nt, Artificial Sequence
  Description of Artificial Sequence: Synthetic oligonucleotide
  Antisense strand to SEQ ID NO: 1861117
uaagcuggaugcuuccucu

SEQ ID NO: 1861119 - RNA, 19 nt, Artificial Sequence
  Description of Artificial Sequence: Synthetic oligonucleotide
  Sense strand starting at position 1395 of SEQ ID NO: 1564188
ccaggugucaggcacacaa

SEQ ID NO: 1861120 - RNA, 19 nt, Artificial Sequence
  Description of Artificial Sequence: Synthetic oligonucleotide
  Antisense strand to SEQ ID NO: 1861119
uugugugccugacaccugg

SEQ ID NO: 1861121 - RNA, 19 nt, Artificial Sequence
  Description of Artificial Sequence: Synthetic oligonucleotide
  Sense strand starting at position 1429 of SEQ ID NO: 1564188
ugcucauucgcagaagaac

SEQ ID NO: 1861122 - RNA, 19 nt, Artificial Sequence
  Description of Artificial Sequence: Synthetic oligonucleotide
  Antisense strand to SEQ ID NO: 1861121
guucuucugcgaaugagca

SEQ ID NO: 1861123 - RNA, 19 nt, Artificial Sequence
  Description of Artificial Sequence: Synthetic oligonucleotide
  Sense strand starting at position 1793 of SEQ ID NO: 1564188
gcugcaggucugucaugua

SEQ ID NO: 1861124 - RNA, 19 nt, Artificial Sequence
  Description of Artificial Sequence: Synthetic oligonucleotide
  Antisense strand to SEQ ID NO: 1861123
uacaugacagaccugcagc

SEQ ID NO: 1861125 - RNA, 19 nt, Artificial Sequence
  Description of Artificial Sequence: Synthetic oligonucleotide
  Sense strand starting at position 1798 of SEQ ID NO: 1564188
aggucugucauguacccau

SEQ ID NO: 1861126 - RNA, 19 nt, Artificial Sequence
  Description of Artificial Sequence: Synthetic oligonucleotide
  Antisense strand to SEQ ID NO: 1861125
auggguacaugacagaccu

SEQ ID NO: 1861127 - RNA, 19 nt, Artificial Sequence
  Description of Artificial Sequence: Synthetic oligonucleotide
  Sense strand starting at position 1817 of SEQ ID NO: 1564188
uuggcagauuggccauaaa

SEQ ID NO: 1861128 - RNA, 19 nt, Artificial Sequence
  Description of Artificial Sequence: Synthetic oligonucleotide
  Antisense strand to SEQ ID NO: 1861127
uuuauggccaaucugccaa

SEQ ID NO: 1861129 - RNA, 19 nt, Artificial Sequence
  Description of Artificial Sequence: Synthetic oligonucleotide
  Sense strand starting at position 1820 of SEQ ID NO: 1564188
gcagauuggccauaaaguu

SEQ ID NO: 1861130 - RNA, 19 nt, Artificial Sequence
  Description of Artificial Sequence: Synthetic oligonucleotide
  Antisense strand to SEQ ID NO: 1861129
aacuuuauggccaaucugc

SEQ ID NO: 1861131 - RNA, 19 nt, Artificial Sequence
  Description of Artificial Sequence: Synthetic oligonucleotide
  Sense strand starting at position 2563 of SEQ ID NO: 1564188
ggagauuagucucccacau

SEQ ID NO: 1861132 - RNA, 19 nt, Artificial Sequence
  Description of Artificial Sequence: Synthetic oligonucleotide
  Antisense strand to SEQ ID NO: 1861131
augugggagacuaaucucc

SEQ ID NO: 1861133 - RNA, 19 nt, Artificial Sequence
  Description of Artificial Sequence: Synthetic oligonucleotide
  Sense strand starting at position 2816 of SEQ ID NO: 1564188
cacacaugggcauguuaca

SEQ ID NO: 1861134 - RNA, 19 nt, Artificial Sequence
  Description of Artificial Sequence: Synthetic oligonucleotide
  Antisense strand to SEQ ID NO: 1861133
uguaacaugcccaugugug

SEQ ID NO: 1861135 - RNA, 19 nt, Artificial Sequence
  Description of Artificial Sequence: Synthetic oligonucleotide
  Sense strand starting at position 2898 of SEQ ID NO: 1564188
gggaaacucauaugagcau

SEQ ID NO: 1861136 - RNA, 19 nt, Artificial Sequence
  Description of Artificial Sequence: Synthetic oligonucleotide
  Antisense strand to SEQ ID NO: 1861135
augcucauaugaguuuccc

SEQ ID NO: 1861137 - RNA, 19 nt, Artificial Sequence
  Description of Artificial Sequence: Synthetic oligonucleotide
  Sense strand starting at position 2932 of SEQ ID NO: 1564188
acacauucccaccgaugau

SEQ ID NO: 1861138 - RNA, 19 nt, Artificial Sequence
  Description of Artificial Sequence: Synthetic oligonucleotide
  Antisense strand to SEQ ID NO: 1861137
aucaucggugggaaugugu

SEQ ID NO: 1861139 - RNA, 19 nt, Artificial Sequence
  Description of Artificial Sequence: Synthetic oligonucleotide
  Sense strand starting at position 3079 of SEQ ID NO: 1564188
cacgauaacuaccugaugu

SEQ ID NO: 1861140 - RNA, 19 nt, Artificial Sequence
  Description of Artificial Sequence: Synthetic oligonucleotide
  Antisense strand to SEQ ID NO: 1861139
acaucagguaguuaucgug

SEQ ID NO: 1861141 - RNA, 19 nt, Artificial Sequence
  Description of Artificial Sequence: Synthetic oligonucleotide
  Sense strand starting at position 3081 of SEQ ID NO: 1564188
cgauaacuaccugauguca

SEQ ID NO: 1861142 - RNA, 19 nt, Artificial Sequence
  Description of Artificial Sequence: Synthetic oligonucleotide
  Antisense strand to SEQ ID NO: 1861141
ugacaucagguaguuaucg

SEQ ID NO: 1861143 - RNA, 19 nt, Artificial Sequence
  Description of Artificial Sequence: Synthetic oligonucleotide
  Sense strand starting at position 3192 of SEQ ID NO: 1564188
uuugcauaugagcaaauga

SEQ ID NO: 1861144 - RNA, 19 nt, Artificial Sequence
  Description of Artificial Sequence: Synthetic oligonucleotide
  Antisense strand to SEQ ID NO: 1861143
ucauuugcucauaugcaaa

SEQ ID NO: 1861145 - RNA, 19 nt, Artificial Sequence
  Description of Artificial Sequence: Synthetic oligonucleotide
  Sense strand starting at position 3489 of SEQ ID NO: 1564188
ggaaacauccagugccaau

SEQ ID NO: 1861146 - RNA, 19 nt, Artificial Sequence
  Description of Artificial Sequence: Synthetic oligonucleotide
  Antisense strand to SEQ ID NO: 1861145
auuggcacuggauguuucc

SEQ ID NO: 1861147 - RNA, 19 nt, Artificial Sequence
  Description of Artificial Sequence: Synthetic oligonucleotide
  Sense strand starting at position 3553 of SEQ ID NO: 1564188
uggguaggaccuugaccau

SEQ ID NO: 1861148 - RNA, 19 nt, Artificial Sequence
  Description of Artificial Sequence: Synthetic oligonucleotide
  Antisense strand to SEQ ID NO: 1861147
auggucaagguccuaccca

SEQ ID NO: 1861149 - RNA, 19 nt, Artificial Sequence
  Description of Artificial Sequence: Synthetic oligonucleotide
  Sense strand starting at position 3566 of SEQ ID NO: 1564188
gaccauagugagcagugau

SEQ ID NO: 1861150 - RNA, 19 nt, Artificial Sequence
  Description of Artificial Sequence: Synthetic oligonucleotide
  Antisense strand to SEQ ID NO: 1861149
aucacugcucacuaugguc

SEQ ID NO: 1861151 - RNA, 19 nt, Artificial Sequence
  Description of Artificial Sequence: Synthetic oligonucleotide
  Sense strand starting at position 3658 of SEQ ID NO: 1564188
ucaggugacucauccacuu

SEQ ID NO: 1861152 - RNA, 19 nt, Artificial Sequence
  Description of Artificial Sequence: Synthetic oligonucleotide
  Antisense strand to SEQ ID NO: 1861151
aaguggaugagucaccuga

SEQ ID NO: 1861153 - RNA, 19 nt, Artificial Sequence
  Description of Artificial Sequence: Synthetic oligonucleotide
  Sense strand starting at position 3702 of SEQ ID NO: 1564188
uaaaucauuggcugguuua

SEQ ID NO: 1861154 - RNA, 19 nt, Artificial Sequence
  Description of Artificial Sequence: Synthetic oligonucleotide
  Antisense strand to SEQ ID NO: 1861153
uaaaccagccaaugauuua

SEQ ID NO: 1861155 - RNA, 19 nt, Artificial Sequence
  Description of Artificial Sequence: Synthetic oligonucleotide
  Sense strand starting at position 3703 of SEQ ID NO: 1564188
aaaucauuggcugguuuaa

SEQ ID NO: 1861156 - RNA, 19 nt, Artificial Sequence
  Description of Artificial Sequence: Synthetic oligonucleotide
  Antisense strand to SEQ ID NO: 1861155
uuaaaccagccaaugauuu

SEQ ID NO: 1861157 - RNA, 19 nt, Artificial Sequence
  Description of Artificial Sequence: Synthetic oligonucleotide
  Sense strand starting at position 3705 of SEQ ID NO: 1564188
aucauuggcugguuuaaac

SEQ ID NO: 1861158 - RNA, 19 nt, Artificial Sequence
  Description of Artificial Sequence: Synthetic oligonucleotide
  Antisense strand to SEQ ID NO: 1861157
guuuaaaccagccaaugau

SEQ ID NO: 1861159 - RNA, 19 nt, Artificial Sequence
  Description of Artificial Sequence: Synthetic oligonucleotide
  Sense strand starting at position 3719 of SEQ ID NO: 1564188
uaaacaaggcaguaauagu

SEQ ID NO: 1861160 - RNA, 19 nt, Artificial Sequence
  Description of Artificial Sequence: Synthetic oligonucleotide
  Antisense strand to SEQ ID NO: 1861159
acuauuacugccuuguuua

SEQ ID NO: 1861161 - RNA, 19 nt, Artificial Sequence
  Description of Artificial Sequence: Synthetic oligonucleotide
  Sense strand starting at position 3912 of SEQ ID NO: 1564188
uaacuucugccaggaaugu

SEQ ID NO: 1861162 - RNA, 19 nt, Artificial Sequence
  Description of Artificial Sequence: Synthetic oligonucleotide
  Antisense strand to SEQ ID NO: 1861161
acauuccuggcagaaguua

SEQ ID NO: 1861163 - RNA, 19 nt, Artificial Sequence
  Description of Artificial Sequence: Synthetic oligonucleotide
  Sense strand starting at position 3921 of SEQ ID NO: 1564188
ccaggaauguccucuccuu

SEQ ID NO: 1861164 - RNA, 19 nt, Artificial Sequence
  Description of Artificial Sequence: Synthetic oligonucleotide
  Antisense strand to SEQ ID NO: 1861163
aaggagaggacauuccugg

SEQ ID NO: 1861165 - RNA, 19 nt, Artificial Sequence
  Description of Artificial Sequence: Synthetic oligonucleotide
  Sense strand starting at position 18 of SEQ ID NO: 1564189
aucugaucugucgaugucu

SEQ ID NO: 1861166 - RNA, 19 nt, Artificial Sequence
  Description of Artificial Sequence: Synthetic oligonucleotide
  Antisense strand to SEQ ID NO: 1861165
agacaucgacagaucagau

SEQ ID NO: 1861167 - RNA, 19 nt, Artificial Sequence
  Description of Artificial Sequence: Synthetic oligonucleotide
  Sense strand starting at position 444 of SEQ ID NO: 1564189
ggguuucucugacuuugca

SEQ ID NO: 1861168 - RNA, 19 nt, Artificial Sequence
  Description of Artificial Sequence: Synthetic oligonucleotide
  Antisense strand to SEQ ID NO: 1861167
ugcaaagucagagaaaccc

SEQ ID NO: 1861169 - RNA, 19 nt, Artificial Sequence
  Description of Artificial Sequence: Synthetic oligonucleotide
  Sense strand starting at position 1010 of SEQ ID NO: 1564189
gucugaagagauggugagu

SEQ ID NO: 1861170 - RNA, 19 nt, Artificial Sequence
  Description of Artificial Sequence: Synthetic oligonucleotide
  Antisense strand to SEQ ID NO: 1861169
acucaccaucucuucagac

SEQ ID NO: 1861171 - RNA, 19 nt, Artificial Sequence
  Description of Artificial Sequence: Synthetic oligonucleotide
  Sense strand starting at position 1021 of SEQ ID NO: 1564189
uggugagucagauggcaga

SEQ ID NO: 1861172 - RNA, 19 nt, Artificial Sequence
  Description of Artificial Sequence: Synthetic oligonucleotide
  Antisense strand to SEQ ID NO: 1861171
ucugccaucugacucacca

SEQ ID NO: 1861173 - RNA, 19 nt, Artificial Sequence
  Description of Artificial Sequence: Synthetic oligonucleotide
  Sense strand starting at position 1092 of SEQ ID NO: 1564189
ggagcagguuugaaacgua

SEQ ID NO: 1861174 - RNA, 19 nt, Artificial Sequence
  Description of Artificial Sequence: Synthetic oligonucleotide
  Antisense strand to SEQ ID NO: 1861173
uacguuucaaaccugcucc

SEQ ID NO: 1861175 - RNA, 19 nt, Artificial Sequence
  Description of Artificial Sequence: Synthetic oligonucleotide
  Sense strand starting at position 1095 of SEQ ID NO: 1564189
gcagguuugaaacguaaag

SEQ ID NO: 1861176 - RNA, 19 nt, Artificial Sequence
  Description of Artificial Sequence: Synthetic oligonucleotide
  Antisense strand to SEQ ID NO: 1861175
cuuuacguuucaaaccugc

SEQ ID NO: 1861177 - RNA, 19 nt, Artificial Sequence
  Description of Artificial Sequence: Synthetic oligonucleotide
  Sense strand starting at position 1188 of SEQ ID NO: 1564189
uggugaaggugagucauaa

SEQ ID NO: 1861178 - RNA, 19 nt, Artificial Sequence
  Description of Artificial Sequence: Synthetic oligonucleotide
  Antisense strand to SEQ ID NO: 1861177
uuaugacucaccuucacca

SEQ ID NO: 1861179 - RNA, 19 nt, Artificial Sequence
  Description of Artificial Sequence: Synthetic oligonucleotide
  Sense strand starting at position 1251 of SEQ ID NO: 1564189
ggguaaagguguguuagac

SEQ ID NO: 1861180 - RNA, 19 nt, Artificial Sequence
  Description of Artificial Sequence: Synthetic oligonucleotide
  Antisense strand to SEQ ID NO: 1861179
gucuaacacaccuuuaccc

SEQ ID NO: 1861181 - RNA, 19 nt, Artificial Sequence
  Description of Artificial Sequence: Synthetic oligonucleotide
  Sense strand starting at position 1270 of SEQ ID NO: 1564189
ggcgguggcgguagauauu

SEQ ID NO: 1861182 - RNA, 19 nt, Artificial Sequence
  Description of Artificial Sequence: Synthetic oligonucleotide
  Antisense strand to SEQ ID NO: 1861181
aauaucuaccgccaccgcc

SEQ ID NO: 1861183 - RNA, 19 nt, Artificial Sequence
  Description of Artificial Sequence: Synthetic oligonucleotide
  Sense strand starting at position 1331 of SEQ ID NO: 1564189
gaguuucugagguggcaaa

SEQ ID NO: 1861184 - RNA, 19 nt, Artificial Sequence
  Description of Artificial Sequence: Synthetic oligonucleotide
  Antisense strand to SEQ ID NO: 1861183
uuugccaccucagaaacuc

SEQ ID NO: 1861185 - RNA, 19 nt, Artificial Sequence
  Description of Artificial Sequence: Synthetic oligonucleotide
  Sense strand starting at position 1368 of SEQ ID NO: 1564189
gagggucuggacugauuaa

SEQ ID NO: 1861186 - RNA, 19 nt, Artificial Sequence
  Description of Artificial Sequence: Synthetic oligonucleotide
  Antisense strand to SEQ ID NO: 1861185
uuaaucaguccagacccuc

SEQ ID NO: 1861187 - RNA, 19 nt, Artificial Sequence
  Description of Artificial Sequence: Synthetic oligonucleotide
  Sense strand starting at position 2191 of SEQ ID NO: 1564189
gggaauaugcguugggaaa

SEQ ID NO: 1861188 - RNA, 19 nt, Artificial Sequence
  Description of Artificial Sequence: Synthetic oligonucleotide
  Antisense strand to SEQ ID NO: 1861187
uuucccaacgcauauuccc

SEQ ID NO: 1861189 - RNA, 19 nt, Artificial Sequence
  Description of Artificial Sequence: Synthetic oligonucleotide
  Sense strand starting at position 2309 of SEQ ID NO: 1564189
auuuaaugcuuacagaagu

SEQ ID NO: 1861190 - RNA, 19 nt, Artificial Sequence
  Description of Artificial Sequence: Synthetic oligonucleotide
  Antisense strand to SEQ ID NO: 1861189
acuucuguaagcauuaaau

SEQ ID NO: 1861191 - RNA, 19 nt, Artificial Sequence
  Description of Artificial Sequence: Synthetic oligonucleotide
  Sense strand starting at position 2329 of SEQ ID NO: 1564189
cuacguuguagggacuauu

SEQ ID NO: 1861192 - RNA, 19 nt, Artificial Sequence
  Description of Artificial Sequence: Synthetic oligonucleotide
  Antisense strand to SEQ ID NO: 1861191
aauagucccuacaacguag

SEQ ID NO: 1861193 - RNA, 19 nt, Artificial Sequence
  Description of Artificial Sequence: Synthetic oligonucleotide
  Sense strand starting at position 2565 of SEQ ID NO: 1564189
auuaaugccuacucgaacu

SEQ ID NO: 1861194 - RNA, 19 nt, Artificial Sequence
  Description of Artificial Sequence: Synthetic oligonucleotide
  Antisense strand to SEQ ID NO: 1861193
aguucgaguaggcauuaau

SEQ ID NO: 1861195 - RNA, 19 nt, Artificial Sequence
  Description of Artificial Sequence: Synthetic oligonucleotide
  Sense strand starting at position 2671 of SEQ ID NO: 1564189
cagugauggcuaugaugca

SEQ ID NO: 1861196 - RNA, 19 nt, Artificial Sequence
  Description of Artificial Sequence: Synthetic oligonucleotide
  Antisense strand to SEQ ID NO: 1861195
ugcaucauagccaucacug

SEQ ID NO: 1861197 - RNA, 19 nt, Artificial Sequence
  Description of Artificial Sequence: Synthetic oligonucleotide
  Sense strand starting at position 2709 of SEQ ID NO: 1564189
ggcuuaagaugcucaacuu

SEQ ID NO: 1861198 - RNA, 19 nt, Artificial Sequence
  Description of Artificial Sequence: Synthetic oligonucleotide
  Antisense strand to SEQ ID NO: 1861197
aaguugagcaucuuaagcc

SEQ ID NO: 1861199 - RNA, 19 nt, Artificial Sequence
  Description of Artificial Sequence: Synthetic oligonucleotide
  Sense strand starting at position 2710 of SEQ ID NO: 1564189
gcuuaagaugcucaacuuc

SEQ ID NO: 1861200 - RNA, 19 nt, Artificial Sequence
  Description of Artificial Sequence: Synthetic oligonucleotide
  Antisense strand to SEQ ID NO: 1861199
gaaguugagcaucuuaagc

SEQ ID NO: 1861201 - RNA, 19 nt, Artificial Sequence
  Description of Artificial Sequence: Synthetic oligonucleotide
  Sense strand starting at position 3062 of SEQ ID NO: 1564189
caggguggugaguaucaaa

SEQ ID NO: 1861202 - RNA, 19 nt, Artificial Sequence
  Description of Artificial Sequence: Synthetic oligonucleotide
  Antisense strand to SEQ ID NO: 1861201
uuugauacucaccacccug

SEQ ID NO: 1861203 - RNA, 19 nt, Artificial Sequence
  Description of Artificial Sequence: Synthetic oligonucleotide
  Sense strand starting at position 3101 of SEQ ID NO: 1564189
uugguagguuggccagaaa

SEQ ID NO: 1861204 - RNA, 19 nt, Artificial Sequence
  Description of Artificial Sequence: Synthetic oligonucleotide
  Antisense strand to SEQ ID NO: 1861203
uuucuggccaaccuaccaa

SEQ ID NO: 1861205 - RNA, 19 nt, Artificial Sequence
  Description of Artificial Sequence: Synthetic oligonucleotide
  Sense strand starting at position 3104 of SEQ ID NO: 1564189
guagguuggccagaaacaa

SEQ ID NO: 1861206 - RNA, 19 nt, Artificial Sequence
  Description of Artificial Sequence: Synthetic oligonucleotide
  Antisense strand to SEQ ID NO: 1861205
uuguuucuggccaaccuac

SEQ ID NO: 1861207 - RNA, 19 nt, Artificial Sequence
  Description of Artificial Sequence: Synthetic oligonucleotide
  Sense strand starting at position 3129 of SEQ ID NO: 1564189
ucauaaaucgccuguggaa

SEQ ID NO: 1861208 - RNA, 19 nt, Artificial Sequence
  Description of Artificial Sequence: Synthetic oligonucleotide
  Antisense strand to SEQ ID NO: 1861207
uuccacaggcgauuuauga

SEQ ID NO: 1861209 - RNA, 19 nt, Artificial Sequence
  Description of Artificial Sequence: Synthetic oligonucleotide
  Sense strand starting at position 3142 of SEQ ID NO: 1564189
guggaaguuucauugguau

SEQ ID NO: 1861210 - RNA, 19 nt, Artificial Sequence
  Description of Artificial Sequence: Synthetic oligonucleotide
  Antisense strand to SEQ ID NO: 1861209
auaccaaugaaacuuccac

SEQ ID NO: 1861211 - RNA, 19 nt, Artificial Sequence
  Description of Artificial Sequence: Synthetic oligonucleotide
  Sense strand starting at position 3148 of SEQ ID NO: 1564189
guuucauugguauaacgug

SEQ ID NO: 1861212 - RNA, 19 nt, Artificial Sequence
  Description of Artificial Sequence: Synthetic oligonucleotide
  Antisense strand to SEQ ID NO: 1861211
cacguuauaccaaugaaac

SEQ ID NO: 1861213 - RNA, 19 nt, Artificial Sequence
  Description of Artificial Sequence: Synthetic oligonucleotide
  Sense strand starting at position 3153 of SEQ ID NO: 1564189
auugguauaacguguagaa

SEQ ID NO: 1861214 - RNA, 19 nt, Artificial Sequence
  Description of Artificial Sequence: Synthetic oligonucleotide
  Antisense strand to SEQ ID NO: 1861213
uucuacacguuauaccaau

SEQ ID NO: 1861215 - RNA, 19 nt, Artificial Sequence
  Description of Artificial Sequence: Synthetic oligonucleotide
  Sense strand starting at position 3301 of SEQ ID NO: 1564189
acaugacugggcuguuuau

SEQ ID NO: 1861216 - RNA, 19 nt, Artificial Sequence
  Description of Artificial Sequence: Synthetic oligonucleotide
  Antisense strand to SEQ ID NO: 1861215
auaaacagcccagucaugu

SEQ ID NO: 1861217 - RNA, 19 nt, Artificial Sequence
  Description of Artificial Sequence: Synthetic oligonucleotide
  Sense strand starting at position 3535 of SEQ ID NO: 1564189
uggcuaggguggucaugaa

SEQ ID NO: 1861218 - RNA, 19 nt, Artificial Sequence
  Description of Artificial Sequence: Synthetic oligonucleotide
  Antisense strand to SEQ ID NO: 1861217
uucaugaccacccuagcca

SEQ ID NO: 1861219 - RNA, 19 nt, Artificial Sequence
  Description of Artificial Sequence: Synthetic oligonucleotide
  Sense strand starting at position 3664 of SEQ ID NO: 1564189
ucccaaagugcucauuguu

SEQ ID NO: 1861220 - RNA, 19 nt, Artificial Sequence
  Description of Artificial Sequence: Synthetic oligonucleotide
  Antisense strand to SEQ ID NO: 1861219
aacaaugagcacuuuggga

SEQ ID NO: 1861221 - RNA, 19 nt, Artificial Sequence
  Description of Artificial Sequence: Synthetic oligonucleotide
  Sense strand starting at position 3681 of SEQ ID NO: 1564189
uugguagccuguuuaaaua

SEQ ID NO: 1861222 - RNA, 19 nt, Artificial Sequence
  Description of Artificial Sequence: Synthetic oligonucleotide
  Antisense strand to SEQ ID NO: 1861221
uauuuaaacaggcuaccaa

SEQ ID NO: 1861223 - RNA, 19 nt, Artificial Sequence
  Description of Artificial Sequence: Synthetic oligonucleotide
  Sense strand starting at position 3742 of SEQ ID NO: 1564189
auggaaugauugccaagau

SEQ ID NO: 1861224 - RNA, 19 nt, Artificial Sequence
  Description of Artificial Sequence: Synthetic oligonucleotide
  Antisense strand to SEQ ID NO: 1861223
aucuuggcaaucauuccau

SEQ ID NO: 1861225 - RNA, 19 nt, Artificial Sequence
  Description of Artificial Sequence: Synthetic oligonucleotide
  Sense strand starting at position 3784 of SEQ ID NO: 1564189
gaugucaaacuguguggua

SEQ ID NO: 1861226 - RNA, 19 nt, Artificial Sequence
  Description of Artificial Sequence: Synthetic oligonucleotide
  Antisense strand to SEQ ID NO: 1861225
uaccacacaguuugacauc

SEQ ID NO: 1861227 - RNA, 19 nt, Artificial Sequence
  Description of Artificial Sequence: Synthetic oligonucleotide
  Sense strand starting at position 3785 of SEQ ID NO: 1564189
augucaaacugugugguaa

SEQ ID NO: 1861228 - RNA, 19 nt, Artificial Sequence
  Description of Artificial Sequence: Synthetic oligonucleotide
  Antisense strand to SEQ ID NO: 1861227
uuaccacacaguuugacau

SEQ ID NO: 1861229 - RNA, 19 nt, Artificial Sequence
  Description of Artificial Sequence: Synthetic oligonucleotide
  Sense strand starting at position 3796 of SEQ ID NO: 1564189
ugugguaauuguguacaaa

SEQ ID NO: 1861230 - RNA, 19 nt, Artificial Sequence
  Description of Artificial Sequence: Synthetic oligonucleotide
  Antisense strand to SEQ ID NO: 1861229
uuuguacacaauuaccaca

SEQ ID NO: 1861231 - RNA, 19 nt, Artificial Sequence
  Description of Artificial Sequence: Synthetic oligonucleotide
  Sense strand starting at position 3797 of SEQ ID NO: 1564189
gugguaauuguguacaaag

SEQ ID NO: 1861232 - RNA, 19 nt, Artificial Sequence
  Description of Artificial Sequence: Synthetic oligonucleotide
  Antisense strand to SEQ ID NO: 1861231
cuuuguacacaauuaccac

SEQ ID NO: 1861233 - RNA, 19 nt, Artificial Sequence
  Description of Artificial Sequence: Synthetic oligonucleotide
  Sense strand starting at position 3799 of SEQ ID NO: 1564189
gguaauuguguacaaagag

SEQ ID NO: 1861234 - RNA, 19 nt, Artificial Sequence
  Description of Artificial Sequence: Synthetic oligonucleotide
  Antisense strand to SEQ ID NO: 1861233
cucuuuguacacaauuacc

SEQ ID NO: 1861235 - RNA, 19 nt, Artificial Sequence
  Description of Artificial Sequence: Synthetic oligonucleotide
  Sense strand starting at position 3819 of SEQ ID NO: 1564189
agagaaggguuauaucaga

SEQ ID NO: 1861236 - RNA, 19 nt, Artificial Sequence
  Description of Artificial Sequence: Synthetic oligonucleotide
  Antisense strand to SEQ ID NO: 1861235
ucugauauaacccuucucu

SEQ ID NO: 1861237 - RNA, 19 nt, Artificial Sequence
  Description of Artificial Sequence: Synthetic oligonucleotide
  Sense strand starting at position 3888 of SEQ ID NO: 1564189
uagagaacuuugccuguau

SEQ ID NO: 1861238 - RNA, 19 nt, Artificial Sequence
  Description of Artificial Sequence: Synthetic oligonucleotide
  Antisense strand to SEQ ID NO: 1861237
auacaggcaaaguucucua

SEQ ID NO: 1861239 - RNA, 19 nt, Artificial Sequence
  Description of Artificial Sequence: Synthetic oligonucleotide
  Sense strand starting at position 3889 of SEQ ID NO: 1564189
agagaacuuugccuguauu

SEQ ID NO: 1861240 - RNA, 19 nt, Artificial Sequence
  Description of Artificial Sequence: Synthetic oligonucleotide
  Antisense strand to SEQ ID NO: 1861239
aauacaggcaaaguucucu

SEQ ID NO: 1861241 - RNA, 19 nt, Artificial Sequence
  Description of Artificial Sequence: Synthetic oligonucleotide
  Sense strand starting at position 3890 of SEQ ID NO: 1564189
gagaacuuugccuguauua

SEQ ID NO: 1861242 - RNA, 19 nt, Artificial Sequence
  Description of Artificial Sequence: Synthetic oligonucleotide
  Antisense strand to SEQ ID NO: 1861241
uaauacaggcaaaguucuc

SEQ ID NO: 1861243 - RNA, 19 nt, Artificial Sequence
  Description of Artificial Sequence: Synthetic oligonucleotide
  Sense strand starting at position 3933 of SEQ ID NO: 1564189
cuaugugacagguacgaca

SEQ ID NO: 1861244 - RNA, 19 nt, Artificial Sequence
  Description of Artificial Sequence: Synthetic oligonucleotide
  Antisense strand to SEQ ID NO: 1861243
ugucguaccugucacauag

SEQ ID NO: 1861245 - RNA, 19 nt, Artificial Sequence
  Description of Artificial Sequence: Synthetic oligonucleotide
  Sense strand starting at position 55 of SEQ ID NO: 1564190
agggauguguacuuauagu

SEQ ID NO: 1861246 - RNA, 19 nt, Artificial Sequence
  Description of Artificial Sequence: Synthetic oligonucleotide
  Antisense strand to SEQ ID NO: 1861245
acuauaaguacacaucccu

SEQ ID NO: 1861247 - RNA, 19 nt, Artificial Sequence
  Description of Artificial Sequence: Synthetic oligonucleotide
  Sense strand starting at position 97 of SEQ ID NO: 1564190
uuggaaaugaaguggguaa

SEQ ID NO: 1861248 - RNA, 19 nt, Artificial Sequence
  Description of Artificial Sequence: Synthetic oligonucleotide
  Antisense strand to SEQ ID NO: 1861247
uuacccacuucauuuccaa

SEQ ID NO: 1861249 - RNA, 19 nt, Artificial Sequence
  Description of Artificial Sequence: Synthetic oligonucleotide
  Sense strand starting at position 128 of SEQ ID NO: 1564190
guaaguaguccauagucuc

SEQ ID NO: 1861250 - RNA, 19 nt, Artificial Sequence
  Description of Artificial Sequence: Synthetic oligonucleotide
  Antisense strand to SEQ ID NO: 1861249
gagacuauggacuacuuac

SEQ ID NO: 1861251 - RNA, 19 nt, Artificial Sequence
  Description of Artificial Sequence: Synthetic oligonucleotide
  Sense strand starting at position 183 of SEQ ID NO: 1564190
uauacuugggcuuggaaga

SEQ ID NO: 1861252 - RNA, 19 nt, Artificial Sequence
  Description of Artificial Sequence: Synthetic oligonucleotide
  Antisense strand to SEQ ID NO: 1861251
ucuuccaagcccaaguaua

SEQ ID NO: 1861253 - RNA, 19 nt, Artificial Sequence
  Description of Artificial Sequence: Synthetic oligonucleotide
  Sense strand starting at position 219 of SEQ ID NO: 1564190
aguccucauccaugagcua

SEQ ID NO: 1861254 - RNA, 19 nt, Artificial Sequence
  Description of Artificial Sequence: Synthetic oligonucleotide
  Antisense strand to SEQ ID NO: 1861253
uagcucauggaugaggacu

SEQ ID NO: 1861255 - RNA, 19 nt, Artificial Sequence
  Description of Artificial Sequence: Synthetic oligonucleotide
  Sense strand starting at position 220 of SEQ ID NO: 1564190
guccucauccaugagcuau

SEQ ID NO: 1861256 - RNA, 19 nt, Artificial Sequence
  Description of Artificial Sequence: Synthetic oligonucleotide
  Antisense strand to SEQ ID NO: 1861255
auagcucauggaugaggac

SEQ ID NO: 1861257 - RNA, 19 nt, Artificial Sequence
  Description of Artificial Sequence: Synthetic oligonucleotide
  Sense strand starting at position 371 of SEQ ID NO: 1564190
gcaccuacuguauagaguu

SEQ ID NO: 1861258 - RNA, 19 nt, Artificial Sequence
  Description of Artificial Sequence: Synthetic oligonucleotide
  Antisense strand to SEQ ID NO: 1861257
aacucuauacaguaggugc

SEQ ID NO: 1861259 - RNA, 19 nt, Artificial Sequence
  Description of Artificial Sequence: Synthetic oligonucleotide
  Sense strand starting at position 379 of SEQ ID NO: 1564190
uguauagaguuauugugag

SEQ ID NO: 1861260 - RNA, 19 nt, Artificial Sequence
  Description of Artificial Sequence: Synthetic oligonucleotide
  Antisense strand to SEQ ID NO: 1861259
cucacaauaacucuauaca

SEQ ID NO: 1861261 - RNA, 19 nt, Artificial Sequence
  Description of Artificial Sequence: Synthetic oligonucleotide
  Sense strand starting at position 478 of SEQ ID NO: 1564190
gccagaaugcuacauauac

SEQ ID NO: 1861262 - RNA, 19 nt, Artificial Sequence
  Description of Artificial Sequence: Synthetic oligonucleotide
  Antisense strand to SEQ ID NO: 1861261
guauauguagcauucuggc

SEQ ID NO: 1861263 - RNA, 19 nt, Artificial Sequence
  Description of Artificial Sequence: Synthetic oligonucleotide
  Sense strand starting at position 538 of SEQ ID NO: 1564190
cacugcucugaccaagagu

SEQ ID NO: 1861264 - RNA, 19 nt, Artificial Sequence
  Description of Artificial Sequence: Synthetic oligonucleotide
  Antisense strand to SEQ ID NO: 1861263
acucuuggucagagcagug

SEQ ID NO: 1861265 - RNA, 19 nt, Artificial Sequence
  Description of Artificial Sequence: Synthetic oligonucleotide
  Sense strand starting at position 562 of SEQ ID NO: 1564190
accugaaauuguguuacca

SEQ ID NO: 1861266 - RNA, 19 nt, Artificial Sequence
  Description of Artificial Sequence: Synthetic oligonucleotide
  Antisense strand to SEQ ID NO: 1861265
ugguaacacaauuucaggu

SEQ ID NO: 1861267 - RNA, 19 nt, Artificial Sequence
  Description of Artificial Sequence: Synthetic oligonucleotide
  Sense strand starting at position 566 of SEQ ID NO: 1564190
gaaauuguguuaccagaaa

SEQ ID NO: 1861268 - RNA, 19 nt, Artificial Sequence
  Description of Artificial Sequence: Synthetic oligonucleotide
  Antisense strand to SEQ ID NO: 1861267
uuucugguaacacaauuuc

SEQ ID NO: 1861269 - RNA, 19 nt, Artificial Sequence
  Description of Artificial Sequence: Synthetic oligonucleotide
  Sense strand starting at position 634 of SEQ ID NO: 1564190
uuucuacuagggugcuaaa

SEQ ID NO: 1861270 - RNA, 19 nt, Artificial Sequence
  Description of Artificial Sequence: Synthetic oligonucleotide
  Antisense strand to SEQ ID NO: 1861269
uuuagcacccuaguagaaa

SEQ ID NO: 1861271 - RNA, 19 nt, Artificial Sequence
  Description of Artificial Sequence: Synthetic oligonucleotide
  Sense strand starting at position 692 of SEQ ID NO: 1564190
acgucucugcauuaaacau

SEQ ID NO: 1861272 - RNA, 19 nt, Artificial Sequence
  Description of Artificial Sequence: Synthetic oligonucleotide
  Antisense strand to SEQ ID NO: 1861271
auguuuaaugcagagacgu

SEQ ID NO: 1861273 - RNA, 19 nt, Artificial Sequence
  Description of Artificial Sequence: Synthetic oligonucleotide
  Sense strand starting at position 729 of SEQ ID NO: 1564190
agucuuaagucauuaauac

SEQ ID NO: 1861274 - RNA, 19 nt, Artificial Sequence
  Description of Artificial Sequence: Synthetic oligonucleotide
  Antisense strand to SEQ ID NO: 1861273
guauuaaugacuuaagacu

SEQ ID NO: 1861275 - RNA, 19 nt, Artificial Sequence
  Description of Artificial Sequence: Synthetic oligonucleotide
  Sense strand starting at position 730 of SEQ ID NO: 1564190
gucuuaagucauuaauacc

SEQ ID NO: 1861276 - RNA, 19 nt, Artificial Sequence
  Description of Artificial Sequence: Synthetic oligonucleotide
  Antisense strand to SEQ ID NO: 1861275
gguauuaaugacuuaagac

SEQ ID NO: 1861277 - RNA, 19 nt, Artificial Sequence
  Description of Artificial Sequence: Synthetic oligonucleotide
  Sense strand starting at position 817 of SEQ ID NO: 1564190
auaggagguccaggaugua

SEQ ID NO: 1861278 - RNA, 19 nt, Artificial Sequence
  Description of Artificial Sequence: Synthetic oligonucleotide
  Antisense strand to SEQ ID NO: 1861277
uacauccuggaccuccuau

SEQ ID NO: 1861279 - RNA, 19 nt, Artificial Sequence
  Description of Artificial Sequence: Synthetic oligonucleotide
  Sense strand starting at position 888 of SEQ ID NO: 1564190
agcacaguacucuggaauu

SEQ ID NO: 1861280 - RNA, 19 nt, Artificial Sequence
  Description of Artificial Sequence: Synthetic oligonucleotide
  Antisense strand to SEQ ID NO: 1861279
aauuccagaguacugugcu

SEQ ID NO: 1861281 - RNA, 19 nt, Artificial Sequence
  Description of Artificial Sequence: Synthetic oligonucleotide
  Sense strand starting at position 1032 of SEQ ID NO: 1564190
aauguuaaggguuggagga

SEQ ID NO: 1861282 - RNA, 19 nt, Artificial Sequence
  Description of Artificial Sequence: Synthetic oligonucleotide
  Antisense strand to SEQ ID NO: 1861281
uccuccaacccuuaacauu

SEQ ID NO: 1861283 - RNA, 19 nt, Artificial Sequence
  Description of Artificial Sequence: Synthetic oligonucleotide
  Sense strand starting at position 1033 of SEQ ID NO: 1564190
auguuaaggguuggaggaa

SEQ ID NO: 1861284 - RNA, 19 nt, Artificial Sequence
  Description of Artificial Sequence: Synthetic oligonucleotide
  Antisense strand to SEQ ID NO: 1861283
uuccuccaacccuuaacau

SEQ ID NO: 1861285 - RNA, 19 nt, Artificial Sequence
  Description of Artificial Sequence: Synthetic oligonucleotide
  Sense strand starting at position 1157 of SEQ ID NO: 1564190
cuugaagagcggcaauaua

SEQ ID NO: 1861286 - RNA, 19 nt, Artificial Sequence
  Description of Artificial Sequence: Synthetic oligonucleotide
  Antisense strand to SEQ ID NO: 1861285
uauauugccgcucuucaag

SEQ ID NO: 1861287 - RNA, 19 nt, Artificial Sequence
  Description of Artificial Sequence: Synthetic oligonucleotide
  Sense strand starting at position 1892 of SEQ ID NO: 1564190
gucccagugccgguuucaa

SEQ ID NO: 1861288 - RNA, 19 nt, Artificial Sequence
  Description of Artificial Sequence: Synthetic oligonucleotide
  Antisense strand to SEQ ID NO: 1861287
uugaaaccggcacugggac

SEQ ID NO: 1861289 - RNA, 19 nt, Artificial Sequence
  Description of Artificial Sequence: Synthetic oligonucleotide
  Sense strand starting at position 2123 of SEQ ID NO: 1564190
guccuuccagguuaggaau

SEQ ID NO: 1861290 - RNA, 19 nt, Artificial Sequence
  Description of Artificial Sequence: Synthetic oligonucleotide
  Antisense strand to SEQ ID NO: 1861289
auuccuaaccuggaaggac

SEQ ID NO: 1861291 - RNA, 19 nt, Artificial Sequence
  Description of Artificial Sequence: Synthetic oligonucleotide
  Sense strand starting at position 2216 of SEQ ID NO: 1564190
acucucuuagacggugaaa

SEQ ID NO: 1861292 - RNA, 19 nt, Artificial Sequence
  Description of Artificial Sequence: Synthetic oligonucleotide
  Antisense strand to SEQ ID NO: 1861291
uuucaccgucuaagagagu

SEQ ID NO: 1861293 - RNA, 19 nt, Artificial Sequence
  Description of Artificial Sequence: Synthetic oligonucleotide
  Sense strand starting at position 2218 of SEQ ID NO: 1564190
ucucuuagacggugaaauc

SEQ ID NO: 1861294 - RNA, 19 nt, Artificial Sequence
  Description of Artificial Sequence: Synthetic oligonucleotide
  Antisense strand to SEQ ID NO: 1861293
gauuucaccgucuaagaga

SEQ ID NO: 1861295 - RNA, 19 nt, Artificial Sequence
  Description of Artificial Sequence: Synthetic oligonucleotide
  Sense strand starting at position 2219 of SEQ ID NO: 1564190
cucuuagacggugaaauca

SEQ ID NO: 1861296 - RNA, 19 nt, Artificial Sequence
  Description of Artificial Sequence: Synthetic oligonucleotide
  Antisense strand to SEQ ID NO: 1861295
ugauuucaccgucuaagag

SEQ ID NO: 1861297 - RNA, 19 nt, Artificial Sequence
  Description of Artificial Sequence: Synthetic oligonucleotide
  Sense strand starting at position 2375 of SEQ ID NO: 1564190
gcaaauaaaugucugucua

SEQ ID NO: 1861298 - RNA, 19 nt, Artificial Sequence
  Description of Artificial Sequence: Synthetic oligonucleotide
  Antisense strand to SEQ ID NO: 1861297
uagacagacauuuauuugc

SEQ ID NO: 1861299 - RNA, 19 nt, Artificial Sequence
  Description of Artificial Sequence: Synthetic oligonucleotide
  Sense strand starting at position 2511 of SEQ ID NO: 1564190
ugagauucuuuggcaaaga

SEQ ID NO: 1861300 - RNA, 19 nt, Artificial Sequence
  Description of Artificial Sequence: Synthetic oligonucleotide
  Antisense strand to SEQ ID NO: 1861299
ucuuugccaaagaaucuca

SEQ ID NO: 1861301 - RNA, 19 nt, Artificial Sequence
  Description of Artificial Sequence: Synthetic oligonucleotide
  Sense strand starting at position 2585 of SEQ ID NO: 1564190
gucuuaauugcugauagca

SEQ ID NO: 1861302 - RNA, 19 nt, Artificial Sequence
  Description of Artificial Sequence: Synthetic oligonucleotide
  Antisense strand to SEQ ID NO: 1861301
ugcuaucagcaauuaagac

SEQ ID NO: 1861303 - RNA, 19 nt, Artificial Sequence
  Description of Artificial Sequence: Synthetic oligonucleotide
  Sense strand starting at position 2628 of SEQ ID NO: 1564190
uagaaagcacgugagcaau

SEQ ID NO: 1861304 - RNA, 19 nt, Artificial Sequence
  Description of Artificial Sequence: Synthetic oligonucleotide
  Antisense strand to SEQ ID NO: 1861303
auugcucacgugcuuucua

SEQ ID NO: 1861305 - RNA, 19 nt, Artificial Sequence
  Description of Artificial Sequence: Synthetic oligonucleotide
  Sense strand starting at position 2630 of SEQ ID NO: 1564190
gaaagcacgugagcaauau

SEQ ID NO: 1861306 - RNA, 19 nt, Artificial Sequence
  Description of Artificial Sequence: Synthetic oligonucleotide
  Antisense strand to SEQ ID NO: 1861305
auauugcucacgugcuuuc

SEQ ID NO: 1861307 - RNA, 19 nt, Artificial Sequence
  Description of Artificial Sequence: Synthetic oligonucleotide
  Sense strand starting at position 2669 of SEQ ID NO: 1564190
guuuauaccuacccaguaa

SEQ ID NO: 1861308 - RNA, 19 nt, Artificial Sequence
  Description of Artificial Sequence: Synthetic oligonucleotide
  Antisense strand to SEQ ID NO: 1861307
uuacuggguagguauaaac

SEQ ID NO: 1861309 - RNA, 19 nt, Artificial Sequence
  Description of Artificial Sequence: Synthetic oligonucleotide
  Sense strand starting at position 2681 of SEQ ID NO: 1564190
ccaguaauugcagauuccu

SEQ ID NO: 1861310 - RNA, 19 nt, Artificial Sequence
  Description of Artificial Sequence: Synthetic oligonucleotide
  Antisense strand to SEQ ID NO: 1861309
aggaaucugcaauuacugg

SEQ ID NO: 1861311 - RNA, 19 nt, Artificial Sequence
  Description of Artificial Sequence: Synthetic oligonucleotide
  Sense strand starting at position 2813 of SEQ ID NO: 1564190
ccucuuuaugggcaaaugu

SEQ ID NO: 1861312 - RNA, 19 nt, Artificial Sequence
  Description of Artificial Sequence: Synthetic oligonucleotide
  Antisense strand to SEQ ID NO: 1861311
acauuugcccauaaagagg

SEQ ID NO: 1861313 - RNA, 19 nt, Artificial Sequence
  Description of Artificial Sequence: Synthetic oligonucleotide
  Sense strand starting at position 3043 of SEQ ID NO: 1564190
accauuuccucguccuuga

SEQ ID NO: 1861314 - RNA, 19 nt, Artificial Sequence
  Description of Artificial Sequence: Synthetic oligonucleotide
  Antisense strand to SEQ ID NO: 1861313
ucaaggacgaggaaauggu

SEQ ID NO: 1861315 - RNA, 19 nt, Artificial Sequence
  Description of Artificial Sequence: Synthetic oligonucleotide
  Sense strand starting at position 3048 of SEQ ID NO: 1564190
uuccucguccuugaaacuu

SEQ ID NO: 1861316 - RNA, 19 nt, Artificial Sequence
  Description of Artificial Sequence: Synthetic oligonucleotide
  Antisense strand to SEQ ID NO: 1861315
aaguuucaaggacgaggaa

SEQ ID NO: 1861317 - RNA, 19 nt, Artificial Sequence
  Description of Artificial Sequence: Synthetic oligonucleotide
  Sense strand starting at position 3154 of SEQ ID NO: 1564190
cuaucugaccucugaaagu

SEQ ID NO: 1861318 - RNA, 19 nt, Artificial Sequence
  Description of Artificial Sequence: Synthetic oligonucleotide
  Antisense strand to SEQ ID NO: 1861317
acuuucagaggucagauag

SEQ ID NO: 1861319 - RNA, 19 nt, Artificial Sequence
  Description of Artificial Sequence: Synthetic oligonucleotide
  Sense strand starting at position 3285 of SEQ ID NO: 1564190
cagacugcuuuauugaguu

SEQ ID NO: 1861320 - RNA, 19 nt, Artificial Sequence
  Description of Artificial Sequence: Synthetic oligonucleotide
  Antisense strand to SEQ ID NO: 1861319
aacucaauaaagcagucug

SEQ ID NO: 1861321 - RNA, 19 nt, Artificial Sequence
  Description of Artificial Sequence: Synthetic oligonucleotide
  Sense strand starting at position 3391 of SEQ ID NO: 1564190
auuuguuccuccuccagua

SEQ ID NO: 1861322 - RNA, 19 nt, Artificial Sequence
  Description of Artificial Sequence: Synthetic oligonucleotide
  Antisense strand to SEQ ID NO: 1861321
uacuggaggaggaacaaau

SEQ ID NO: 1861323 - RNA, 19 nt, Artificial Sequence
  Description of Artificial Sequence: Synthetic oligonucleotide
  Sense strand starting at position 3591 of SEQ ID NO: 1564190
agucacuacacauguggua

SEQ ID NO: 1861324 - RNA, 19 nt, Artificial Sequence
  Description of Artificial Sequence: Synthetic oligonucleotide
  Antisense strand to SEQ ID NO: 1861323
uaccacauguguagugacu

SEQ ID NO: 1861325 - RNA, 19 nt, Artificial Sequence
  Description of Artificial Sequence: Synthetic oligonucleotide
  Sense strand starting at position 32 of SEQ ID NO: 1564191
gaaggaauggcaugguaug

SEQ ID NO: 1861326 - RNA, 19 nt, Artificial Sequence
  Description of Artificial Sequence: Synthetic oligonucleotide
  Antisense strand to SEQ ID NO: 1861325
cauaccaugccauuccuuc

SEQ ID NO: 1861327 - RNA, 19 nt, Artificial Sequence
  Description of Artificial Sequence: Synthetic oligonucleotide
  Sense strand starting at position 53 of SEQ ID NO: 1564191
cgguuacuggcacaaauau

SEQ ID NO: 1861328 - RNA, 19 nt, Artificial Sequence
  Description of Artificial Sequence: Synthetic oligonucleotide
  Antisense strand to SEQ ID NO: 1861327
auauuugugccaguaaccg

SEQ ID NO: 1861329 - RNA, 19 nt, Artificial Sequence
  Description of Artificial Sequence: Synthetic oligonucleotide
  Sense strand starting at position 157 of SEQ ID NO: 1564191
acaacuaagcaguguuaag

SEQ ID NO: 1861330 - RNA, 19 nt, Artificial Sequence
  Description of Artificial Sequence: Synthetic oligonucleotide
  Antisense strand to SEQ ID NO: 1861329
cuuaacacugcuuaguugu

SEQ ID NO: 1861331 - RNA, 19 nt, Artificial Sequence
  Description of Artificial Sequence: Synthetic oligonucleotide
  Sense strand starting at position 191 of SEQ ID NO: 1564191
uaaacaaagugcuuuagga

SEQ ID NO: 1861332 - RNA, 19 nt, Artificial Sequence
  Description of Artificial Sequence: Synthetic oligonucleotide
  Antisense strand to SEQ ID NO: 1861331
uccuaaagcacuuuguuua

SEQ ID NO: 1861333 - RNA, 19 nt, Artificial Sequence
  Description of Artificial Sequence: Synthetic oligonucleotide
  Sense strand starting at position 298 of SEQ ID NO: 1564191
agggauggauaggaauuaa

SEQ ID NO: 1861334 - RNA, 19 nt, Artificial Sequence
  Description of Artificial Sequence: Synthetic oligonucleotide
  Antisense strand to SEQ ID NO: 1861333
uuaauuccuauccaucccu

SEQ ID NO: 1861335 - RNA, 19 nt, Artificial Sequence
  Description of Artificial Sequence: Synthetic oligonucleotide
  Sense strand starting at position 370 of SEQ ID NO: 1564191
ggaacaguuugagcaaagu

SEQ ID NO: 1861336 - RNA, 19 nt, Artificial Sequence
  Description of Artificial Sequence: Synthetic oligonucleotide
  Antisense strand to SEQ ID NO: 1861335
acuuugcucaaacuguucc

SEQ ID NO: 1861337 - RNA, 19 nt, Artificial Sequence
  Description of Artificial Sequence: Synthetic oligonucleotide
  Sense strand starting at position 421 of SEQ ID NO: 1564191
ccuauccuugucuauggua

SEQ ID NO: 1861338 - RNA, 19 nt, Artificial Sequence
  Description of Artificial Sequence: Synthetic oligonucleotide
  Antisense strand to SEQ ID NO: 1861337
uaccauagacaaggauagg

SEQ ID NO: 1861339 - RNA, 19 nt, Artificial Sequence
  Description of Artificial Sequence: Synthetic oligonucleotide
  Sense strand starting at position 561 of SEQ ID NO: 1564191
aguugagucaggcacacau

SEQ ID NO: 1861340 - RNA, 19 nt, Artificial Sequence
  Description of Artificial Sequence: Synthetic oligonucleotide
  Antisense strand to SEQ ID NO: 1861339
augugugccugacucaacu

SEQ ID NO: 1861341 - RNA, 19 nt, Artificial Sequence
  Description of Artificial Sequence: Synthetic oligonucleotide
  Sense strand starting at position 570 of SEQ ID NO: 1564191
aggcacacaucccuagaau

SEQ ID NO: 1861342 - RNA, 19 nt, Artificial Sequence
  Description of Artificial Sequence: Synthetic oligonucleotide
  Antisense strand to SEQ ID NO: 1861341
auucuagggaugugugccu

SEQ ID NO: 1861343 - RNA, 19 nt, Artificial Sequence
  Description of Artificial Sequence: Synthetic oligonucleotide
  Sense strand starting at position 571 of SEQ ID NO: 1564191
ggcacacaucccuagaauc

SEQ ID NO: 1861344 - RNA, 19 nt, Artificial Sequence
  Description of Artificial Sequence: Synthetic oligonucleotide
  Antisense strand to SEQ ID NO: 1861343
gauucuagggaugugugcc

SEQ ID NO: 1861345 - RNA, 19 nt, Artificial Sequence
  Description of Artificial Sequence: Synthetic oligonucleotide
  Sense strand starting at position 669 of SEQ ID NO: 1564191
agggauguguacuuauagu

SEQ ID NO: 1861346 - RNA, 19 nt, Artificial Sequence
  Description of Artificial Sequence: Synthetic oligonucleotide
  Antisense strand to SEQ ID NO: 1861345
acuauaaguacacaucccu

SEQ ID NO: 1861347 - RNA, 19 nt, Artificial Sequence
  Description of Artificial Sequence: Synthetic oligonucleotide
  Sense strand starting at position 711 of SEQ ID NO: 1564191
uuggaaaugaaguggguaa

SEQ ID NO: 1861348 - RNA, 19 nt, Artificial Sequence
  Description of Artificial Sequence: Synthetic oligonucleotide
  Antisense strand to SEQ ID NO: 1861347
uuacccacuucauuuccaa

SEQ ID NO: 1861349 - RNA, 19 nt, Artificial Sequence
  Description of Artificial Sequence: Synthetic oligonucleotide
  Sense strand starting at position 797 of SEQ ID NO: 1564191
uauacuugggcuuggaaga

SEQ ID NO: 1861350 - RNA, 19 nt, Artificial Sequence
  Description of Artificial Sequence: Synthetic oligonucleotide
  Antisense strand to SEQ ID NO: 1861349
ucuuccaagcccaaguaua

SEQ ID NO: 1861351 - RNA, 19 nt, Artificial Sequence
  Description of Artificial Sequence: Synthetic oligonucleotide
  Sense strand starting at position 834 of SEQ ID NO: 1564191
guccucauccaugagcuau

SEQ ID NO: 1861352 - RNA, 19 nt, Artificial Sequence
  Description of Artificial Sequence: Synthetic oligonucleotide
  Antisense strand to SEQ ID NO: 1861351
auagcucauggaugaggac

SEQ ID NO: 1861353 - RNA, 19 nt, Artificial Sequence
  Description of Artificial Sequence: Synthetic oligonucleotide
  Sense strand starting at position 985 of SEQ ID NO: 1564191
gcaccuacuguauagaguu

SEQ ID NO: 1861354 - RNA, 19 nt, Artificial Sequence
  Description of Artificial Sequence: Synthetic oligonucleotide
  Antisense strand to SEQ ID NO: 1861353
aacucuauacaguaggugc

SEQ ID NO: 1861355 - RNA, 19 nt, Artificial Sequence
  Description of Artificial Sequence: Synthetic oligonucleotide
  Sense strand starting at position 993 of SEQ ID NO: 1564191
uguauagaguuauugugag

SEQ ID NO: 1861356 - RNA, 19 nt, Artificial Sequence
  Description of Artificial Sequence: Synthetic oligonucleotide
  Antisense strand to SEQ ID NO: 1861355
cucacaauaacucuauaca

SEQ ID NO: 1861357 - RNA, 19 nt, Artificial Sequence
  Description of Artificial Sequence: Synthetic oligonucleotide
  Sense strand starting at position 1092 of SEQ ID NO: 1564191
gccagaaugcuacauauac

SEQ ID NO: 1861358 - RNA, 19 nt, Artificial Sequence
  Description of Artificial Sequence: Synthetic oligonucleotide
  Antisense strand to SEQ ID NO: 1861357
guauauguagcauucuggc

SEQ ID NO: 1861359 - RNA, 19 nt, Artificial Sequence
  Description of Artificial Sequence: Synthetic oligonucleotide
  Sense strand starting at position 1152 of SEQ ID NO: 1564191
cacugcucugaccaagagu

SEQ ID NO: 1861360 - RNA, 19 nt, Artificial Sequence
  Description of Artificial Sequence: Synthetic oligonucleotide
  Antisense strand to SEQ ID NO: 1861359
acucuuggucagagcagug

SEQ ID NO: 1861361 - RNA, 19 nt, Artificial Sequence
  Description of Artificial Sequence: Synthetic oligonucleotide
  Sense strand starting at position 1176 of SEQ ID NO: 1564191
accugaaauuguguuacca

SEQ ID NO: 1861362 - RNA, 19 nt, Artificial Sequence
  Description of Artificial Sequence: Synthetic oligonucleotide
  Antisense strand to SEQ ID NO: 1861361
ugguaacacaauuucaggu

SEQ ID NO: 1861363 - RNA, 19 nt, Artificial Sequence
  Description of Artificial Sequence: Synthetic oligonucleotide
  Sense strand starting at position 1180 of SEQ ID NO: 1564191
gaaauuguguuaccagaaa

SEQ ID NO: 1861364 - RNA, 19 nt, Artificial Sequence
  Description of Artificial Sequence: Synthetic oligonucleotide
  Antisense strand to SEQ ID NO: 1861363
uuucugguaacacaauuuc

SEQ ID NO: 1861365 - RNA, 19 nt, Artificial Sequence
  Description of Artificial Sequence: Synthetic oligonucleotide
  Sense strand starting at position 1306 of SEQ ID NO: 1564191
acgucucugcauuaaacau

SEQ ID NO: 1861366 - RNA, 19 nt, Artificial Sequence
  Description of Artificial Sequence: Synthetic oligonucleotide
  Antisense strand to SEQ ID NO: 1861365
auguuuaaugcagagacgu

SEQ ID NO: 1861367 - RNA, 19 nt, Artificial Sequence
  Description of Artificial Sequence: Synthetic oligonucleotide
  Sense strand starting at position 1343 of SEQ ID NO: 1564191
agucuuaagucauuaauac

SEQ ID NO: 1861368 - RNA, 19 nt, Artificial Sequence
  Description of Artificial Sequence: Synthetic oligonucleotide
  Antisense strand to SEQ ID NO: 1861367
guauuaaugacuuaagacu

SEQ ID NO: 1861369 - RNA, 19 nt, Artificial Sequence
  Description of Artificial Sequence: Synthetic oligonucleotide
  Sense strand starting at position 1344 of SEQ ID NO: 1564191
gucuuaagucauuaauacc

SEQ ID NO: 1861370 - RNA, 19 nt, Artificial Sequence
  Description of Artificial Sequence: Synthetic oligonucleotide
  Antisense strand to SEQ ID NO: 1861369
gguauuaaugacuuaagac

SEQ ID NO: 1861371 - RNA, 19 nt, Artificial Sequence
  Description of Artificial Sequence: Synthetic oligonucleotide
  Sense strand starting at position 1431 of SEQ ID NO: 1564191
auaggagguccaggaugua

SEQ ID NO: 1861372 - RNA, 19 nt, Artificial Sequence
  Description of Artificial Sequence: Synthetic oligonucleotide
  Antisense strand to SEQ ID NO: 1861371
uacauccuggaccuccuau

SEQ ID NO: 1861373 - RNA, 19 nt, Artificial Sequence
  Description of Artificial Sequence: Synthetic oligonucleotide
  Sense strand starting at position 1502 of SEQ ID NO: 1564191
agcacaguacucuggaauu

SEQ ID NO: 1861374 - RNA, 19 nt, Artificial Sequence
  Description of Artificial Sequence: Synthetic oligonucleotide
  Antisense strand to SEQ ID NO: 1861373
aauuccagaguacugugcu

SEQ ID NO: 1861375 - RNA, 19 nt, Artificial Sequence
  Description of Artificial Sequence: Synthetic oligonucleotide
  Sense strand starting at position 1646 of SEQ ID NO: 1564191
aauguuaaggguuggagga

SEQ ID NO: 1861376 - RNA, 19 nt, Artificial Sequence
  Description of Artificial Sequence: Synthetic oligonucleotide
  Antisense strand to SEQ ID NO: 1861375
uccuccaacccuuaacauu

SEQ ID NO: 1861377 - RNA, 19 nt, Artificial Sequence
  Description of Artificial Sequence: Synthetic oligonucleotide
  Sense strand starting at position 1647 of SEQ ID NO: 1564191
auguuaaggguuggaggaa

SEQ ID NO: 1861378 - RNA, 19 nt, Artificial Sequence
  Description of Artificial Sequence: Synthetic oligonucleotide
  Antisense strand to SEQ ID NO: 1861377
uuccuccaacccuuaacau

SEQ ID NO: 1861379 - RNA, 19 nt, Artificial Sequence
  Description of Artificial Sequence: Synthetic oligonucleotide
  Sense strand starting at position 1771 of SEQ ID NO: 1564191
cuugaagagcggcaauaua

SEQ ID NO: 1861380 - RNA, 19 nt, Artificial Sequence
  Description of Artificial Sequence: Synthetic oligonucleotide
  Antisense strand to SEQ ID NO: 1861379
uauauugccgcucuucaag

SEQ ID NO: 1861381 - RNA, 19 nt, Artificial Sequence
  Description of Artificial Sequence: Synthetic oligonucleotide
  Sense strand starting at position 2506 of SEQ ID NO: 1564191
gucccagugccgguuucaa

SEQ ID NO: 1861382 - RNA, 19 nt, Artificial Sequence
  Description of Artificial Sequence: Synthetic oligonucleotide
  Antisense strand to SEQ ID NO: 1861381
uugaaaccggcacugggac

SEQ ID NO: 1861383 - RNA, 19 nt, Artificial Sequence
  Description of Artificial Sequence: Synthetic oligonucleotide
  Sense strand starting at position 2737 of SEQ ID NO: 1564191
guccuuccagguuaggaau

SEQ ID NO: 1861384 - RNA, 19 nt, Artificial Sequence
  Description of Artificial Sequence: Synthetic oligonucleotide
  Antisense strand to SEQ ID NO: 1861383
auuccuaaccuggaaggac

SEQ ID NO: 1861385 - RNA, 19 nt, Artificial Sequence
  Description of Artificial Sequence: Synthetic oligonucleotide
  Sense strand starting at position 2830 of SEQ ID NO: 1564191
acucucuuagacggugaaa

SEQ ID NO: 1861386 - RNA, 19 nt, Artificial Sequence
  Description of Artificial Sequence: Synthetic oligonucleotide
  Antisense strand to SEQ ID NO: 1861385
uuucaccgucuaagagagu

SEQ ID NO: 1861387 - RNA, 19 nt, Artificial Sequence
  Description of Artificial Sequence: Synthetic oligonucleotide
  Sense strand starting at position 2832 of SEQ ID NO: 1564191
ucucuuagacggugaaauc

SEQ ID NO: 1861388 - RNA, 19 nt, Artificial Sequence
  Description of Artificial Sequence: Synthetic oligonucleotide
  Antisense strand to SEQ ID NO: 1861387
gauuucaccgucuaagaga

SEQ ID NO: 1861389 - RNA, 19 nt, Artificial Sequence
  Description of Artificial Sequence: Synthetic oligonucleotide
  Sense strand starting at position 2833 of SEQ ID NO: 1564191
cucuuagacggugaaauca

SEQ ID NO: 1861390 - RNA, 19 nt, Artificial Sequence
  Description of Artificial Sequence: Synthetic oligonucleotide
  Antisense strand to SEQ ID NO: 1861389
ugauuucaccgucuaagag

SEQ ID NO: 1861391 - RNA, 19 nt, Artificial Sequence
  Description of Artificial Sequence: Synthetic oligonucleotide
  Sense strand starting at position 3125 of SEQ ID NO: 1564191
ugagauucuuuggcaaaga

SEQ ID NO: 1861392 - RNA, 19 nt, Artificial Sequence
  Description of Artificial Sequence: Synthetic oligonucleotide
  Antisense strand to SEQ ID NO: 1861391
ucuuugccaaagaaucuca

SEQ ID NO: 1861393 - RNA, 19 nt, Artificial Sequence
  Description of Artificial Sequence: Synthetic oligonucleotide
  Sense strand starting at position 3242 of SEQ ID NO: 1564191
uagaaagcacgugagcaau

SEQ ID NO: 1861394 - RNA, 19 nt, Artificial Sequence
  Description of Artificial Sequence: Synthetic oligonucleotide
  Antisense strand to SEQ ID NO: 1861393
auugcucacgugcuuucua

SEQ ID NO: 1861395 - RNA, 19 nt, Artificial Sequence
  Description of Artificial Sequence: Synthetic oligonucleotide
  Sense strand starting at position 3283 of SEQ ID NO: 1564191
guuuauaccuacccaguaa

SEQ ID NO: 1861396 - RNA, 19 nt, Artificial Sequence
  Description of Artificial Sequence: Synthetic oligonucleotide
  Antisense strand to SEQ ID NO: 1861395
uuacuggguagguauaaac

SEQ ID NO: 1861397 - RNA, 19 nt, Artificial Sequence
  Description of Artificial Sequence: Synthetic oligonucleotide
  Sense strand starting at position 3295 of SEQ ID NO: 1564191
ccaguaauugcagauuccu

SEQ ID NO: 1861398 - RNA, 19 nt, Artificial Sequence
  Description of Artificial Sequence: Synthetic oligonucleotide
  Antisense strand to SEQ ID NO: 1861397
aggaaucugcaauuacugg

SEQ ID NO: 1861399 - RNA, 19 nt, Artificial Sequence
  Description of Artificial Sequence: Synthetic oligonucleotide
  Sense strand starting at position 3427 of SEQ ID NO: 1564191
ccucuuuaugggcaaaugu

SEQ ID NO: 1861400 - RNA, 19 nt, Artificial Sequence
  Description of Artificial Sequence: Synthetic oligonucleotide
  Antisense strand to SEQ ID NO: 1861399
acauuugcccauaaagagg

SEQ ID NO: 1861401 - RNA, 19 nt, Artificial Sequence
  Description of Artificial Sequence: Synthetic oligonucleotide
  Sense strand starting at position 3657 of SEQ ID NO: 1564191
accauuuccucguccuuga

SEQ ID NO: 1861402 - RNA, 19 nt, Artificial Sequence
  Description of Artificial Sequence: Synthetic oligonucleotide
  Antisense strand to SEQ ID NO: 1861401
ucaaggacgaggaaauggu

SEQ ID NO: 1861403 - RNA, 19 nt, Artificial Sequence
  Description of Artificial Sequence: Synthetic oligonucleotide
  Sense strand starting at position 3768 of SEQ ID NO: 1564191
cuaucugaccucugaaagu

SEQ ID NO: 1861404 - RNA, 19 nt, Artificial Sequence
  Description of Artificial Sequence: Synthetic oligonucleotide
  Antisense strand to SEQ ID NO: 1861403
acuuucagaggucagauag

SEQ ID NO: 1861405 - RNA, 19 nt, Artificial Sequence
  Description of Artificial Sequence: Synthetic oligonucleotide
  Sense strand starting at position 162 of SEQ ID NO: 1564192
cuuggaaugucaucaauuc

SEQ ID NO: 1861406 - RNA, 19 nt, Artificial Sequence
  Description of Artificial Sequence: Synthetic oligonucleotide
  Antisense strand to SEQ ID NO: 1861405
gaauugaugacauuccaag

SEQ ID NO: 1861407 - RNA, 19 nt, Artificial Sequence
  Description of Artificial Sequence: Synthetic oligonucleotide
  Sense strand starting at position 325 of SEQ ID NO: 1564192
accugaauucuaugcauag

SEQ ID NO: 1861408 - RNA, 19 nt, Artificial Sequence
  Description of Artificial Sequence: Synthetic oligonucleotide
  Antisense strand to SEQ ID NO: 1861407
cuaugcauagaauucaggu

SEQ ID NO: 1861409 - RNA, 19 nt, Artificial Sequence
  Description of Artificial Sequence: Synthetic oligonucleotide
  Sense strand starting at position 326 of SEQ ID NO: 1564192
ccugaauucuaugcauaga

SEQ ID NO: 1861410 - RNA, 19 nt, Artificial Sequence
  Description of Artificial Sequence: Synthetic oligonucleotide
  Antisense strand to SEQ ID NO: 1861409
ucuaugcauagaauucagg

SEQ ID NO: 1861411 - RNA, 19 nt, Artificial Sequence
  Description of Artificial Sequence: Synthetic oligonucleotide
  Sense strand starting at position 387 of SEQ ID NO: 1564192
uuaguugaauaucuuggaa

SEQ ID NO: 1861412 - RNA, 19 nt, Artificial Sequence
  Description of Artificial Sequence: Synthetic oligonucleotide
  Antisense strand to SEQ ID NO: 1861411
uuccaagauauucaacuaa

SEQ ID NO: 1861413 - RNA, 19 nt, Artificial Sequence
  Description of Artificial Sequence: Synthetic oligonucleotide
  Sense strand starting at position 493 of SEQ ID NO: 1564192
uggcuuugggcacauuaaa

SEQ ID NO: 1861414 - RNA, 19 nt, Artificial Sequence
  Description of Artificial Sequence: Synthetic oligonucleotide
  Antisense strand to SEQ ID NO: 1861413
uuuaaugugcccaaagcca

SEQ ID NO: 1861415 - RNA, 19 nt, Artificial Sequence
  Description of Artificial Sequence: Synthetic oligonucleotide
  Sense strand starting at position 803 of SEQ ID NO: 1564192
agaauugaugcuggcugaa

SEQ ID NO: 1861416 - RNA, 19 nt, Artificial Sequence
  Description of Artificial Sequence: Synthetic oligonucleotide
  Antisense strand to SEQ ID NO: 1861415
uucagccagcaucaauucu

SEQ ID NO: 1861417 - RNA, 19 nt, Artificial Sequence
  Description of Artificial Sequence: Synthetic oligonucleotide
  Sense strand starting at position 805 of SEQ ID NO: 1564192
aauugaugcuggcugaaau

SEQ ID NO: 1861418 - RNA, 19 nt, Artificial Sequence
  Description of Artificial Sequence: Synthetic oligonucleotide
  Antisense strand to SEQ ID NO: 1861417
auuucagccagcaucaauu

SEQ ID NO: 1861419 - RNA, 19 nt, Artificial Sequence
  Description of Artificial Sequence: Synthetic oligonucleotide
  Sense strand starting at position 817 of SEQ ID NO: 1564192
cugaaauauuaggugaagu

SEQ ID NO: 1861420 - RNA, 19 nt, Artificial Sequence
  Description of Artificial Sequence: Synthetic oligonucleotide
  Antisense strand to SEQ ID NO: 1861419
acuucaccuaauauuucag

SEQ ID NO: 1861421 - RNA, 19 nt, Artificial Sequence
  Description of Artificial Sequence: Synthetic oligonucleotide
  Sense strand starting at position 818 of SEQ ID NO: 1564192
ugaaauauuaggugaaguc

SEQ ID NO: 1861422 - RNA, 19 nt, Artificial Sequence
  Description of Artificial Sequence: Synthetic oligonucleotide
  Antisense strand to SEQ ID NO: 1861421
gacuucaccuaauauuuca

SEQ ID NO: 1861423 - RNA, 19 nt, Artificial Sequence
  Description of Artificial Sequence: Synthetic oligonucleotide
  Sense strand starting at position 1023 of SEQ ID NO: 1564192
caguaagacugaucugaca

SEQ ID NO: 1861424 - RNA, 19 nt, Artificial Sequence
  Description of Artificial Sequence: Synthetic oligonucleotide
  Antisense strand to SEQ ID NO: 1861423
ugucagaucagucuuacug

SEQ ID NO: 1861425 - RNA, 19 nt, Artificial Sequence
  Description of Artificial Sequence: Synthetic oligonucleotide
  Sense strand starting at position 1031 of SEQ ID NO: 1564192
cugaucugacaauggcauu

SEQ ID NO: 1861426 - RNA, 19 nt, Artificial Sequence
  Description of Artificial Sequence: Synthetic oligonucleotide
  Antisense strand to SEQ ID NO: 1861425
aaugccauugucagaucag

SEQ ID NO: 1861427 - RNA, 19 nt, Artificial Sequence
  Description of Artificial Sequence: Synthetic oligonucleotide
  Sense strand starting at position 1093 of SEQ ID NO: 1564192
ggcacuacauauguauaaa

SEQ ID NO: 1861428 - RNA, 19 nt, Artificial Sequence
  Description of Artificial Sequence: Synthetic oligonucleotide
  Antisense strand to SEQ ID NO: 1861427
uuuauacauauguagugcc

SEQ ID NO: 1861429 - RNA, 19 nt, Artificial Sequence
  Description of Artificial Sequence: Synthetic oligonucleotide
  Sense strand starting at position 1143 of SEQ ID NO: 1564192
uggauacuguuauuaucuu

SEQ ID NO: 1861430 - RNA, 19 nt, Artificial Sequence
  Description of Artificial Sequence: Synthetic oligonucleotide
  Antisense strand to SEQ ID NO: 1861429
aagauaauaacaguaucca

SEQ ID NO: 1861431 - RNA, 19 nt, Artificial Sequence
  Description of Artificial Sequence: Synthetic oligonucleotide
  Sense strand starting at position 1408 of SEQ ID NO: 1564192
ugaaguuccuaacugacau

SEQ ID NO: 1861432 - RNA, 19 nt, Artificial Sequence
  Description of Artificial Sequence: Synthetic oligonucleotide
  Antisense strand to SEQ ID NO: 1861431
augucaguuaggaacuuca

SEQ ID NO: 1861433 - RNA, 19 nt, Artificial Sequence
  Description of Artificial Sequence: Synthetic oligonucleotide
  Sense strand starting at position 2279 of SEQ ID NO: 1564192
agcugacugaugggugaau

SEQ ID NO: 1861434 - RNA, 19 nt, Artificial Sequence
  Description of Artificial Sequence: Synthetic oligonucleotide
  Antisense strand to SEQ ID NO: 1861433
auucacccaucagucagcu

SEQ ID NO: 1861435 - RNA, 19 nt, Artificial Sequence
  Description of Artificial Sequence: Synthetic oligonucleotide
  Sense strand starting at position 2280 of SEQ ID NO: 1564192
gcugacugaugggugaauu

SEQ ID NO: 1861436 - RNA, 19 nt, Artificial Sequence
  Description of Artificial Sequence: Synthetic oligonucleotide
  Antisense strand to SEQ ID NO: 1861435
aauucacccaucagucagc

SEQ ID NO: 1861437 - RNA, 19 nt, Artificial Sequence
  Description of Artificial Sequence: Synthetic oligonucleotide
  Sense strand starting at position 2291 of SEQ ID NO: 1564192
ggugaauugggucaccacu

SEQ ID NO: 1861438 - RNA, 19 nt, Artificial Sequence
  Description of Artificial Sequence: Synthetic oligonucleotide
  Antisense strand to SEQ ID NO: 1861437
aguggugacccaauucacc

SEQ ID NO: 1861439 - RNA, 19 nt, Artificial Sequence
  Description of Artificial Sequence: Synthetic oligonucleotide
  Sense strand starting at position 2293 of SEQ ID NO: 1564192
ugaauugggucaccacuuu

SEQ ID NO: 1861440 - RNA, 19 nt, Artificial Sequence
  Description of Artificial Sequence: Synthetic oligonucleotide
  Antisense strand to SEQ ID NO: 1861439
aaaguggugacccaauuca

SEQ ID NO: 1861441 - RNA, 19 nt, Artificial Sequence
  Description of Artificial Sequence: Synthetic oligonucleotide
  Sense strand starting at position 2703 of SEQ ID NO: 1564192
agguaaucacuugagccua

SEQ ID NO: 1861442 - RNA, 19 nt, Artificial Sequence
  Description of Artificial Sequence: Synthetic oligonucleotide
  Antisense strand to SEQ ID NO: 1861441
uaggcucaagugauuaccu

SEQ ID NO: 1861443 - RNA, 19 nt, Artificial Sequence
  Description of Artificial Sequence: Synthetic oligonucleotide
  Sense strand starting at position 2859 of SEQ ID NO: 1564192
ugaaguauauaacuugcaa

SEQ ID NO: 1861444 - RNA, 19 nt, Artificial Sequence
  Description of Artificial Sequence: Synthetic oligonucleotide
  Antisense strand to SEQ ID NO: 1861443
uugcaaguuauauacuuca

SEQ ID NO: 1861445 - RNA, 19 nt, Artificial Sequence
  Description of Artificial Sequence: Synthetic oligonucleotide
  Sense strand starting at position 2945 of SEQ ID NO: 1564192
caugauuaccucuggugga

SEQ ID NO: 1861446 - RNA, 19 nt, Artificial Sequence
  Description of Artificial Sequence: Synthetic oligonucleotide
  Antisense strand to SEQ ID NO: 1861445
uccaccagagguaaucaug

SEQ ID NO: 1861447 - RNA, 19 nt, Artificial Sequence
  Description of Artificial Sequence: Synthetic oligonucleotide
  Sense strand starting at position 3001 of SEQ ID NO: 1564192
caaugcauuggguaauguu

SEQ ID NO: 1861448 - RNA, 19 nt, Artificial Sequence
  Description of Artificial Sequence: Synthetic oligonucleotide
  Antisense strand to SEQ ID NO: 1861447
aacauuacccaaugcauug

SEQ ID NO: 1861449 - RNA, 19 nt, Artificial Sequence
  Description of Artificial Sequence: Synthetic oligonucleotide
  Sense strand starting at position 3033 of SEQ ID NO: 1564192
gaguguuuauaucucauga

SEQ ID NO: 1861450 - RNA, 19 nt, Artificial Sequence
  Description of Artificial Sequence: Synthetic oligonucleotide
  Antisense strand to SEQ ID NO: 1861449
ucaugagauauaaacacuc

SEQ ID NO: 1861451 - RNA, 19 nt, Artificial Sequence
  Description of Artificial Sequence: Synthetic oligonucleotide
  Sense strand starting at position 3038 of SEQ ID NO: 1564192
uuuauaucucaugauguac

SEQ ID NO: 1861452 - RNA, 19 nt, Artificial Sequence
  Description of Artificial Sequence: Synthetic oligonucleotide
  Antisense strand to SEQ ID NO: 1861451
guacaucaugagauauaaa

SEQ ID NO: 1861453 - RNA, 19 nt, Artificial Sequence
  Description of Artificial Sequence: Synthetic oligonucleotide
  Sense strand starting at position 3212 of SEQ ID NO: 1564192
ucuaaagcugcuuaagaau

SEQ ID NO: 1861454 - RNA, 19 nt, Artificial Sequence
  Description of Artificial Sequence: Synthetic oligonucleotide
  Antisense strand to SEQ ID NO: 1861453
auucuuaagcagcuuuaga

SEQ ID NO: 1861455 - RNA, 19 nt, Artificial Sequence
  Description of Artificial Sequence: Synthetic oligonucleotide
  Sense strand starting at position 3228 of SEQ ID NO: 1564192
aaugaugacuucuugggua

SEQ ID NO: 1861456 - RNA, 19 nt, Artificial Sequence
  Description of Artificial Sequence: Synthetic oligonucleotide
  Antisense strand to SEQ ID NO: 1861455
uacccaagaagucaucauu

SEQ ID NO: 1861457 - RNA, 19 nt, Artificial Sequence
  Description of Artificial Sequence: Synthetic oligonucleotide
  Sense strand starting at position 3230 of SEQ ID NO: 1564192
ugaugacuucuuggguaau

SEQ ID NO: 1861458 - RNA, 19 nt, Artificial Sequence
  Description of Artificial Sequence: Synthetic oligonucleotide
  Antisense strand to SEQ ID NO: 1861457
auuacccaagaagucauca

SEQ ID NO: 1861459 - RNA, 19 nt, Artificial Sequence
  Description of Artificial Sequence: Synthetic oligonucleotide
  Sense strand starting at position 3232 of SEQ ID NO: 1564192
augacuucuuggguaaucu

SEQ ID NO: 1861460 - RNA, 19 nt, Artificial Sequence
  Description of Artificial Sequence: Synthetic oligonucleotide
  Antisense strand to SEQ ID NO: 1861459
agauuacccaagaagucau

SEQ ID NO: 1861461 - RNA, 19 nt, Artificial Sequence
  Description of Artificial Sequence: Synthetic oligonucleotide
  Sense strand starting at position 3233 of SEQ ID NO: 1564192
ugacuucuuggguaaucua

SEQ ID NO: 1861462 - RNA, 19 nt, Artificial Sequence
  Description of Artificial Sequence: Synthetic oligonucleotide
  Antisense strand to SEQ ID NO: 1861461
uagauuacccaagaaguca

SEQ ID NO: 1861463 - RNA, 19 nt, Artificial Sequence
  Description of Artificial Sequence: Synthetic oligonucleotide
  Sense strand starting at position 3269 of SEQ ID NO: 1564192
ggcaucaucccaugauacu

SEQ ID NO: 1861464 - RNA, 19 nt, Artificial Sequence
  Description of Artificial Sequence: Synthetic oligonucleotide
  Antisense strand to SEQ ID NO: 1861463
aguaucaugggaugaugcc

SEQ ID NO: 1861465 - RNA, 19 nt, Artificial Sequence
  Description of Artificial Sequence: Synthetic oligonucleotide
  Sense strand starting at position 3270 of SEQ ID NO: 1564192
gcaucaucccaugauacug

SEQ ID NO: 1861466 - RNA, 19 nt, Artificial Sequence
  Description of Artificial Sequence: Synthetic oligonucleotide
  Antisense strand to SEQ ID NO: 1861465
caguaucaugggaugaugc

SEQ ID NO: 1861467 - RNA, 19 nt, Artificial Sequence
  Description of Artificial Sequence: Synthetic oligonucleotide
  Sense strand starting at position 3411 of SEQ ID NO: 1564192
cccaguaaccaugagguca

SEQ ID NO: 1861468 - RNA, 19 nt, Artificial Sequence
  Description of Artificial Sequence: Synthetic oligonucleotide
  Antisense strand to SEQ ID NO: 1861467
ugaccucaugguuacuggg

SEQ ID NO: 1861469 - RNA, 19 nt, Artificial Sequence
  Description of Artificial Sequence: Synthetic oligonucleotide
  Sense strand starting at position 3534 of SEQ ID NO: 1564192
accagaacuuugcugaaau

SEQ ID NO: 1861470 - RNA, 19 nt, Artificial Sequence
  Description of Artificial Sequence: Synthetic oligonucleotide
  Antisense strand to SEQ ID NO: 1861469
auuucagcaaaguucuggu

SEQ ID NO: 1861471 - RNA, 19 nt, Artificial Sequence
  Description of Artificial Sequence: Synthetic oligonucleotide
  Sense strand starting at position 3562 of SEQ ID NO: 1564192
augaacugcuuccuacaga

SEQ ID NO: 1861472 - RNA, 19 nt, Artificial Sequence
  Description of Artificial Sequence: Synthetic oligonucleotide
  Antisense strand to SEQ ID NO: 1861471
ucuguaggaagcaguucau

SEQ ID NO: 1861473 - RNA, 19 nt, Artificial Sequence
  Description of Artificial Sequence: Synthetic oligonucleotide
  Sense strand starting at position 3619 of SEQ ID NO: 1564192
gugcauauucucuggauuu

SEQ ID NO: 1861474 - RNA, 19 nt, Artificial Sequence
  Description of Artificial Sequence: Synthetic oligonucleotide
  Antisense strand to SEQ ID NO: 1861473
aaauccagagaauaugcac

SEQ ID NO: 1861475 - RNA, 19 nt, Artificial Sequence
  Description of Artificial Sequence: Synthetic oligonucleotide
  Sense strand starting at position 3659 of SEQ ID NO: 1564192
uugaaagcucuagaggcaa

SEQ ID NO: 1861476 - RNA, 19 nt, Artificial Sequence
  Description of Artificial Sequence: Synthetic oligonucleotide
  Antisense strand to SEQ ID NO: 1861475
uugccucuagagcuuucaa

SEQ ID NO: 1861477 - RNA, 19 nt, Artificial Sequence
  Description of Artificial Sequence: Synthetic oligonucleotide
  Sense strand starting at position 3875 of SEQ ID NO: 1564192
agugaaugacuauguuauc

SEQ ID NO: 1861478 - RNA, 19 nt, Artificial Sequence
  Description of Artificial Sequence: Synthetic oligonucleotide
  Antisense strand to SEQ ID NO: 1861477
gauaacauagucauucacu

SEQ ID NO: 1861479 - RNA, 19 nt, Artificial Sequence
  Description of Artificial Sequence: Synthetic oligonucleotide
  Sense strand starting at position 3876 of SEQ ID NO: 1564192
gugaaugacuauguuauca

SEQ ID NO: 1861480 - RNA, 19 nt, Artificial Sequence
  Description of Artificial Sequence: Synthetic oligonucleotide
  Antisense strand to SEQ ID NO: 1861479
ugauaacauagucauucac

SEQ ID NO: 1861481 - RNA, 19 nt, Artificial Sequence
  Description of Artificial Sequence: Synthetic oligonucleotide
  Sense strand starting at position 3943 of SEQ ID NO: 1564192
cuuagacuuuacuuuguga

SEQ ID NO: 1861482 - RNA, 19 nt, Artificial Sequence
  Description of Artificial Sequence: Synthetic oligonucleotide
  Antisense strand to SEQ ID NO: 1861481
ucacaaaguaaagucuaag

SEQ ID NO: 1861483 - RNA, 19 nt, Artificial Sequence
  Description of Artificial Sequence: Synthetic oligonucleotide
  Sense strand starting at position 3946 of SEQ ID NO: 1564192
agacuuuacuuugugaaug

SEQ ID NO: 1861484 - RNA, 19 nt, Artificial Sequence
  Description of Artificial Sequence: Synthetic oligonucleotide
  Antisense strand to SEQ ID NO: 1861483
cauucacaaaguaaagucu

SEQ ID NO: 1861485 - RNA, 19 nt, Artificial Sequence
  Description of Artificial Sequence: Synthetic oligonucleotide
  Sense strand starting at position 70 of SEQ ID NO: 1564193
gcgguugcuaacucugcaa

SEQ ID NO: 1861486 - RNA, 19 nt, Artificial Sequence
  Description of Artificial Sequence: Synthetic oligonucleotide
  Antisense strand to SEQ ID NO: 1861485
uugcagaguuagcaaccgc

SEQ ID NO: 1861487 - RNA, 19 nt, Artificial Sequence
  Description of Artificial Sequence: Synthetic oligonucleotide
  Sense strand starting at position 229 of SEQ ID NO: 1564193
cgagguuggagagaaguuu

SEQ ID NO: 1861488 - RNA, 19 nt, Artificial Sequence
  Description of Artificial Sequence: Synthetic oligonucleotide
  Antisense strand to SEQ ID NO: 1861487
aaacuucucuccaaccucg

SEQ ID NO: 1861489 - RNA, 19 nt, Artificial Sequence
  Description of Artificial Sequence: Synthetic oligonucleotide
  Sense strand starting at position 320 of SEQ ID NO: 1564193
guaagauaugaauguacaa

SEQ ID NO: 1861490 - RNA, 19 nt, Artificial Sequence
  Description of Artificial Sequence: Synthetic oligonucleotide
  Antisense strand to SEQ ID NO: 1861489
uuguacauucauaucuuac

SEQ ID NO: 1861491 - RNA, 19 nt, Artificial Sequence
  Description of Artificial Sequence: Synthetic oligonucleotide
  Sense strand starting at position 375 of SEQ ID NO: 1564193
uaaagaugauuagcuaagu

SEQ ID NO: 1861492 - RNA, 19 nt, Artificial Sequence
  Description of Artificial Sequence: Synthetic oligonucleotide
  Antisense strand to SEQ ID NO: 1861491
acuuagcuaaucaucuuua

SEQ ID NO: 1861493 - RNA, 19 nt, Artificial Sequence
  Description of Artificial Sequence: Synthetic oligonucleotide
  Sense strand starting at position 752 of SEQ ID NO: 1564193
auuaguugcccacauguaa

SEQ ID NO: 1861494 - RNA, 19 nt, Artificial Sequence
  Description of Artificial Sequence: Synthetic oligonucleotide
  Antisense strand to SEQ ID NO: 1861493
uuacaugugggcaacuaau

SEQ ID NO: 1861495 - RNA, 19 nt, Artificial Sequence
  Description of Artificial Sequence: Synthetic oligonucleotide
  Sense strand starting at position 900 of SEQ ID NO: 1564193
guguguaagcuguugucca

SEQ ID NO: 1861496 - RNA, 19 nt, Artificial Sequence
  Description of Artificial Sequence: Synthetic oligonucleotide
  Antisense strand to SEQ ID NO: 1861495
uggacaacagcuuacacac

SEQ ID NO: 1861497 - RNA, 19 nt, Artificial Sequence
  Description of Artificial Sequence: Synthetic oligonucleotide
  Sense strand starting at position 1116 of SEQ ID NO: 1564193
acacauauacuuggagcaa

SEQ ID NO: 1861498 - RNA, 19 nt, Artificial Sequence
  Description of Artificial Sequence: Synthetic oligonucleotide
  Antisense strand to SEQ ID NO: 1861497
uugcuccaaguauaugugu

SEQ ID NO: 1861499 - RNA, 19 nt, Artificial Sequence
  Description of Artificial Sequence: Synthetic oligonucleotide
  Sense strand starting at position 1187 of SEQ ID NO: 1564193
aagacaguauugguaauua

SEQ ID NO: 1861500 - RNA, 19 nt, Artificial Sequence
  Description of Artificial Sequence: Synthetic oligonucleotide
  Antisense strand to SEQ ID NO: 1861499
uaauuaccaauacugucuu

SEQ ID NO: 1861501 - RNA, 19 nt, Artificial Sequence
  Description of Artificial Sequence: Synthetic oligonucleotide
  Sense strand starting at position 1317 of SEQ ID NO: 1564193
uguugaaauuauuccaggu

SEQ ID NO: 1861502 - RNA, 19 nt, Artificial Sequence
  Description of Artificial Sequence: Synthetic oligonucleotide
  Antisense strand to SEQ ID NO: 1861501
accuggaauaauuucaaca

SEQ ID NO: 1861503 - RNA, 19 nt, Artificial Sequence
  Description of Artificial Sequence: Synthetic oligonucleotide
  Sense strand starting at position 1483 of SEQ ID NO: 1564193
aggacaaucuauguuauau

SEQ ID NO: 1861504 - RNA, 19 nt, Artificial Sequence
  Description of Artificial Sequence: Synthetic oligonucleotide
  Antisense strand to SEQ ID NO: 1861503
auauaacauagauuguccu

SEQ ID NO: 1861505 - RNA, 19 nt, Artificial Sequence
  Description of Artificial Sequence: Synthetic oligonucleotide
  Sense strand starting at position 1495 of SEQ ID NO: 1564193
guuauauagagaugugaga

SEQ ID NO: 1861506 - RNA, 19 nt, Artificial Sequence
  Description of Artificial Sequence: Synthetic oligonucleotide
  Antisense strand to SEQ ID NO: 1861505
ucucacaucucuauauaac

SEQ ID NO: 1861507 - RNA, 19 nt, Artificial Sequence
  Description of Artificial Sequence: Synthetic oligonucleotide
  Sense strand starting at position 1502 of SEQ ID NO: 1564193
agagaugugagagguuuau

SEQ ID NO: 1861508 - RNA, 19 nt, Artificial Sequence
  Description of Artificial Sequence: Synthetic oligonucleotide
  Antisense strand to SEQ ID NO: 1861507
auaaaccucucacaucucu

SEQ ID NO: 1861509 - RNA, 19 nt, Artificial Sequence
  Description of Artificial Sequence: Synthetic oligonucleotide
  Sense strand starting at position 1514 of SEQ ID NO: 1564193
gguuuauauagagaggugu

SEQ ID NO: 1861510 - RNA, 19 nt, Artificial Sequence
  Description of Artificial Sequence: Synthetic oligonucleotide
  Antisense strand to SEQ ID NO: 1861509
acaccucucuauauaaacc

SEQ ID NO: 1861511 - RNA, 19 nt, Artificial Sequence
  Description of Artificial Sequence: Synthetic oligonucleotide
  Sense strand starting at position 1516 of SEQ ID NO: 1564193
uuuauauagagagguguga

SEQ ID NO: 1861512 - RNA, 19 nt, Artificial Sequence
  Description of Artificial Sequence: Synthetic oligonucleotide
  Antisense strand to SEQ ID NO: 1861511
ucacaccucucuauauaaa

SEQ ID NO: 1861513 - RNA, 19 nt, Artificial Sequence
  Description of Artificial Sequence: Synthetic oligonucleotide
  Sense strand starting at position 1518 of SEQ ID NO: 1564193
uauauagagaggugugaga

SEQ ID NO: 1861514 - RNA, 19 nt, Artificial Sequence
  Description of Artificial Sequence: Synthetic oligonucleotide
  Antisense strand to SEQ ID NO: 1861513
ucucacaccucucuauaua

SEQ ID NO: 1861515 - RNA, 19 nt, Artificial Sequence
  Description of Artificial Sequence: Synthetic oligonucleotide
  Sense strand starting at position 1531 of SEQ ID NO: 1564193
gugagagauuuauagcaaa

SEQ ID NO: 1861516 - RNA, 19 nt, Artificial Sequence
  Description of Artificial Sequence: Synthetic oligonucleotide
  Antisense strand to SEQ ID NO: 1861515
uuugcuauaaaucucucac

SEQ ID NO: 1861517 - RNA, 19 nt, Artificial Sequence
  Description of Artificial Sequence: Synthetic oligonucleotide
  Sense strand starting at position 1558 of SEQ ID NO: 1564193
acacuucugcugugaauuu

SEQ ID NO: 1861518 - RNA, 19 nt, Artificial Sequence
  Description of Artificial Sequence: Synthetic oligonucleotide
  Antisense strand to SEQ ID NO: 1861517
aaauucacagcagaagugu

SEQ ID NO: 1861519 - RNA, 19 nt, Artificial Sequence
  Description of Artificial Sequence: Synthetic oligonucleotide
  Sense strand starting at position 1586 of SEQ ID NO: 1564193
augucacuagaaugcauau

SEQ ID NO: 1861520 - RNA, 19 nt, Artificial Sequence
  Description of Artificial Sequence: Synthetic oligonucleotide
  Antisense strand to SEQ ID NO: 1861519
auaugcauucuagugacau

SEQ ID NO: 1861521 - RNA, 19 nt, Artificial Sequence
  Description of Artificial Sequence: Synthetic oligonucleotide
  Sense strand starting at position 1742 of SEQ ID NO: 1564193
augucccuucuguacauau

SEQ ID NO: 1861522 - RNA, 19 nt, Artificial Sequence
  Description of Artificial Sequence: Synthetic oligonucleotide
  Antisense strand to SEQ ID NO: 1861521
auauguacagaagggacau

SEQ ID NO: 1861523 - RNA, 19 nt, Artificial Sequence
  Description of Artificial Sequence: Synthetic oligonucleotide
  Sense strand starting at position 1908 of SEQ ID NO: 1564193
gucuuaccuuaaucugaag

SEQ ID NO: 1861524 - RNA, 19 nt, Artificial Sequence
  Description of Artificial Sequence: Synthetic oligonucleotide
  Antisense strand to SEQ ID NO: 1861523
cuucagauuaagguaagac

SEQ ID NO: 1861525 - RNA, 19 nt, Artificial Sequence
  Description of Artificial Sequence: Synthetic oligonucleotide
  Sense strand starting at position 2082 of SEQ ID NO: 1564193
cagaguaauguuuaucugu

SEQ ID NO: 1861526 - RNA, 19 nt, Artificial Sequence
  Description of Artificial Sequence: Synthetic oligonucleotide
  Antisense strand to SEQ ID NO: 1861525
acagauaaacauuacucug

SEQ ID NO: 1861527 - RNA, 19 nt, Artificial Sequence
  Description of Artificial Sequence: Synthetic oligonucleotide
  Sense strand starting at position 2314 of SEQ ID NO: 1564193
cugggagaaacgugauaac

SEQ ID NO: 1861528 - RNA, 19 nt, Artificial Sequence
  Description of Artificial Sequence: Synthetic oligonucleotide
  Antisense strand to SEQ ID NO: 1861527
guuaucacguuucucccag

SEQ ID NO: 1861529 - RNA, 19 nt, Artificial Sequence
  Description of Artificial Sequence: Synthetic oligonucleotide
  Sense strand starting at position 2323 of SEQ ID NO: 1564193
acgugauaacaaugaacac

SEQ ID NO: 1861530 - RNA, 19 nt, Artificial Sequence
  Description of Artificial Sequence: Synthetic oligonucleotide
  Antisense strand to SEQ ID NO: 1861529
guguucauuguuaucacgu

SEQ ID NO: 1861531 - RNA, 19 nt, Artificial Sequence
  Description of Artificial Sequence: Synthetic oligonucleotide
  Sense strand starting at position 2400 of SEQ ID NO: 1564193
auguguuagguguauaaua

SEQ ID NO: 1861532 - RNA, 19 nt, Artificial Sequence
  Description of Artificial Sequence: Synthetic oligonucleotide
  Antisense strand to SEQ ID NO: 1861531
uauuauacaccuaacacau

SEQ ID NO: 1861533 - RNA, 19 nt, Artificial Sequence
  Description of Artificial Sequence: Synthetic oligonucleotide
  Sense strand starting at position 2476 of SEQ ID NO: 1564193
uaguaaguacuggagucaa

SEQ ID NO: 1861534 - RNA, 19 nt, Artificial Sequence
  Description of Artificial Sequence: Synthetic oligonucleotide
  Antisense strand to SEQ ID NO: 1861533
uugacuccaguacuuacua

SEQ ID NO: 1861535 - RNA, 19 nt, Artificial Sequence
  Description of Artificial Sequence: Synthetic oligonucleotide
  Sense strand starting at position 2650 of SEQ ID NO: 1564193
acugaaucuuuaguugaag

SEQ ID NO: 1861536 - RNA, 19 nt, Artificial Sequence
  Description of Artificial Sequence: Synthetic oligonucleotide
  Antisense strand to SEQ ID NO: 1861535
cuucaacuaaagauucagu

SEQ ID NO: 1861537 - RNA, 19 nt, Artificial Sequence
  Description of Artificial Sequence: Synthetic oligonucleotide
  Sense strand starting at position 2661 of SEQ ID NO: 1564193
aguugaaguaagugaaauu

SEQ ID NO: 1861538 - RNA, 19 nt, Artificial Sequence
  Description of Artificial Sequence: Synthetic oligonucleotide
  Antisense strand to SEQ ID NO: 1861537
aauuucacuuacuucaacu

SEQ ID NO: 1861539 - RNA, 19 nt, Artificial Sequence
  Description of Artificial Sequence: Synthetic oligonucleotide
  Sense strand starting at position 2765 of SEQ ID NO: 1564193
ggugguguccuggagaauc

SEQ ID NO: 1861540 - RNA, 19 nt, Artificial Sequence
  Description of Artificial Sequence: Synthetic oligonucleotide
  Antisense strand to SEQ ID NO: 1861539
gauucuccaggacaccacc

SEQ ID NO: 1861541 - RNA, 19 nt, Artificial Sequence
  Description of Artificial Sequence: Synthetic oligonucleotide
  Sense strand starting at position 2767 of SEQ ID NO: 1564193
ugguguccuggagaaucga

SEQ ID NO: 1861542 - RNA, 19 nt, Artificial Sequence
  Description of Artificial Sequence: Synthetic oligonucleotide
  Antisense strand to SEQ ID NO: 1861541
ucgauucuccaggacacca

SEQ ID NO: 1861543 - RNA, 19 nt, Artificial Sequence
  Description of Artificial Sequence: Synthetic oligonucleotide
  Sense strand starting at position 2809 of SEQ ID NO: 1564193
ccaagagaguuauuacuuu

SEQ ID NO: 1861544 - RNA, 19 nt, Artificial Sequence
  Description of Artificial Sequence: Synthetic oligonucleotide
  Antisense strand to SEQ ID NO: 1861543
aaaguaauaacucucuugg

SEQ ID NO: 1861545 - RNA, 19 nt, Artificial Sequence
  Description of Artificial Sequence: Synthetic oligonucleotide
  Sense strand starting at position 2910 of SEQ ID NO: 1564193
cagauuggaugauuacuuu

SEQ ID NO: 1861546 - RNA, 19 nt, Artificial Sequence
  Description of Artificial Sequence: Synthetic oligonucleotide
  Antisense strand to SEQ ID NO: 1861545
aaaguaaucauccaaucug

SEQ ID NO: 1861547 - RNA, 19 nt, Artificial Sequence
  Description of Artificial Sequence: Synthetic oligonucleotide
  Sense strand starting at position 3222 of SEQ ID NO: 1564193
uuaugacaauaggugauau

SEQ ID NO: 1861548 - RNA, 19 nt, Artificial Sequence
  Description of Artificial Sequence: Synthetic oligonucleotide
  Antisense strand to SEQ ID NO: 1861547
auaucaccuauugucauaa

SEQ ID NO: 1861549 - RNA, 19 nt, Artificial Sequence
  Description of Artificial Sequence: Synthetic oligonucleotide
  Sense strand starting at position 3318 of SEQ ID NO: 1564193
ucucccucugaggaguauu

SEQ ID NO: 1861550 - RNA, 19 nt, Artificial Sequence
  Description of Artificial Sequence: Synthetic oligonucleotide
  Antisense strand to SEQ ID NO: 1861549
aauacuccucagagggaga

SEQ ID NO: 1861551 - RNA, 19 nt, Artificial Sequence
  Description of Artificial Sequence: Synthetic oligonucleotide
  Sense strand starting at position 3388 of SEQ ID NO: 1564193
uaauguaguuaugcagaaa

SEQ ID NO: 1861552 - RNA, 19 nt, Artificial Sequence
  Description of Artificial Sequence: Synthetic oligonucleotide
  Antisense strand to SEQ ID NO: 1861551
uuucugcauaacuacauua

SEQ ID NO: 1861553 - RNA, 19 nt, Artificial Sequence
  Description of Artificial Sequence: Synthetic oligonucleotide
  Sense strand starting at position 3416 of SEQ ID NO: 1564193
ccuuuccaagccugaugaa

SEQ ID NO: 1861554 - RNA, 19 nt, Artificial Sequence
  Description of Artificial Sequence: Synthetic oligonucleotide
  Antisense strand to SEQ ID NO: 1861553
uucaucaggcuuggaaagg

SEQ ID NO: 1861555 - RNA, 19 nt, Artificial Sequence
  Description of Artificial Sequence: Synthetic oligonucleotide
  Sense strand starting at position 3417 of SEQ ID NO: 1564193
cuuuccaagccugaugaau

SEQ ID NO: 1861556 - RNA, 19 nt, Artificial Sequence
  Description of Artificial Sequence: Synthetic oligonucleotide
  Antisense strand to SEQ ID NO: 1861555
auucaucaggcuuggaaag

SEQ ID NO: 1861557 - RNA, 19 nt, Artificial Sequence
  Description of Artificial Sequence: Synthetic oligonucleotide
  Sense strand starting at position 3426 of SEQ ID NO: 1564193
ccugaugaauuugggagau

SEQ ID NO: 1861558 - RNA, 19 nt, Artificial Sequence
  Description of Artificial Sequence: Synthetic oligonucleotide
  Antisense strand to SEQ ID NO: 1861557
aucucccaaauucaucagg

SEQ ID NO: 1861559 - RNA, 19 nt, Artificial Sequence
  Description of Artificial Sequence: Synthetic oligonucleotide
  Sense strand starting at position 3428 of SEQ ID NO: 1564193
ugaugaauuugggagauca

SEQ ID NO: 1861560 - RNA, 19 nt, Artificial Sequence
  Description of Artificial Sequence: Synthetic oligonucleotide
  Antisense strand to SEQ ID NO: 1861559
ugaucucccaaauucauca

SEQ ID NO: 1861561 - RNA, 19 nt, Artificial Sequence
  Description of Artificial Sequence: Synthetic oligonucleotide
  Sense strand starting at position 3540 of SEQ ID NO: 1564193
auuuaugaguuacagagau

SEQ ID NO: 1861562 - RNA, 19 nt, Artificial Sequence
  Description of Artificial Sequence: Synthetic oligonucleotide
  Antisense strand to SEQ ID NO: 1861561
aucucuguaacucauaaau

SEQ ID NO: 1861563 - RNA, 19 nt, Artificial Sequence
  Description of Artificial Sequence: Synthetic oligonucleotide
  Sense strand starting at position 3567 of SEQ ID NO: 1564193
acaggcuugcaauauauaa

SEQ ID NO: 1861564 - RNA, 19 nt, Artificial Sequence
  Description of Artificial Sequence: Synthetic oligonucleotide
  Antisense strand to SEQ ID NO: 1861563
uuauauauugcaagccugu

SEQ ID NO: 1861565 - RNA, 19 nt, Artificial Sequence
  Description of Artificial Sequence: Synthetic oligonucleotide
  Sense strand starting at position 39 of SEQ ID NO: 1564194
acugaaagguuucuuugua

SEQ ID NO: 1861566 - RNA, 19 nt, Artificial Sequence
  Description of Artificial Sequence: Synthetic oligonucleotide
  Antisense strand to SEQ ID NO: 1861565
uacaaagaaaccuuucagu

SEQ ID NO: 1861567 - RNA, 19 nt, Artificial Sequence
  Description of Artificial Sequence: Synthetic oligonucleotide
  Sense strand starting at position 40 of SEQ ID NO: 1564194
cugaaagguuucuuuguaa

SEQ ID NO: 1861568 - RNA, 19 nt, Artificial Sequence
  Description of Artificial Sequence: Synthetic oligonucleotide
  Antisense strand to SEQ ID NO: 1861567
uuacaaagaaaccuuucag

SEQ ID NO: 1861569 - RNA, 19 nt, Artificial Sequence
  Description of Artificial Sequence: Synthetic oligonucleotide
  Sense strand starting at position 150 of SEQ ID NO: 1564194
acaugaguuugaguucuag

SEQ ID NO: 1861570 - RNA, 19 nt, Artificial Sequence
  Description of Artificial Sequence: Synthetic oligonucleotide
  Antisense strand to SEQ ID NO: 1861569
cuagaacucaaacucaugu

SEQ ID NO: 1861571 - RNA, 19 nt, Artificial Sequence
  Description of Artificial Sequence: Synthetic oligonucleotide
  Sense strand starting at position 161 of SEQ ID NO: 1564194
aguucuagcucugcaauuu

SEQ ID NO: 1861572 - RNA, 19 nt, Artificial Sequence
  Description of Artificial Sequence: Synthetic oligonucleotide
  Antisense strand to SEQ ID NO: 1861571
aaauugcagagcuagaacu

SEQ ID NO: 1861573 - RNA, 19 nt, Artificial Sequence
  Description of Artificial Sequence: Synthetic oligonucleotide
  Sense strand starting at position 162 of SEQ ID NO: 1564194
guucuagcucugcaauuua

SEQ ID NO: 1861574 - RNA, 19 nt, Artificial Sequence
  Description of Artificial Sequence: Synthetic oligonucleotide
  Antisense strand to SEQ ID NO: 1861573
uaaauugcagagcuagaac

SEQ ID NO: 1861575 - RNA, 19 nt, Artificial Sequence
  Description of Artificial Sequence: Synthetic oligonucleotide
  Sense strand starting at position 187 of SEQ ID NO: 1564194
auauaaucuccucagcgaa

SEQ ID NO: 1861576 - RNA, 19 nt, Artificial Sequence
  Description of Artificial Sequence: Synthetic oligonucleotide
  Antisense strand to SEQ ID NO: 1861575
uucgcugaggagauuauau

SEQ ID NO: 1861577 - RNA, 19 nt, Artificial Sequence
  Description of Artificial Sequence: Synthetic oligonucleotide
  Sense strand starting at position 213 of SEQ ID NO: 1564194
aagaauauuggagguuagu

SEQ ID NO: 1861578 - RNA, 19 nt, Artificial Sequence
  Description of Artificial Sequence: Synthetic oligonucleotide
  Antisense strand to SEQ ID NO: 1861577
acuaaccuccaauauucuu

SEQ ID NO: 1861579 - RNA, 19 nt, Artificial Sequence
  Description of Artificial Sequence: Synthetic oligonucleotide
  Sense strand starting at position 226 of SEQ ID NO: 1564194
guuaguauuguucugugca

SEQ ID NO: 1861580 - RNA, 19 nt, Artificial Sequence
  Description of Artificial Sequence: Synthetic oligonucleotide
  Antisense strand to SEQ ID NO: 1861579
ugcacagaacaauacuaac

SEQ ID NO: 1861581 - RNA, 19 nt, Artificial Sequence
  Description of Artificial Sequence: Synthetic oligonucleotide
  Sense strand starting at position 246 of SEQ ID NO: 1564194
ucggcauaacauuaucuuu

SEQ ID NO: 1861582 - RNA, 19 nt, Artificial Sequence
  Description of Artificial Sequence: Synthetic oligonucleotide
  Antisense strand to SEQ ID NO: 1861581
aaagauaauguuaugccga

SEQ ID NO: 1861583 - RNA, 19 nt, Artificial Sequence
  Description of Artificial Sequence: Synthetic oligonucleotide
  Sense strand starting at position 248 of SEQ ID NO: 1564194
ggcauaacauuaucuuuag

SEQ ID NO: 1861584 - RNA, 19 nt, Artificial Sequence
  Description of Artificial Sequence: Synthetic oligonucleotide
  Antisense strand to SEQ ID NO: 1861583
cuaaagauaauguuaugcc

SEQ ID NO: 1861585 - RNA, 19 nt, Artificial Sequence
  Description of Artificial Sequence: Synthetic oligonucleotide
  Sense strand starting at position 257 of SEQ ID NO: 1564194
uuaucuuuagcauagggua

SEQ ID NO: 1861586 - RNA, 19 nt, Artificial Sequence
  Description of Artificial Sequence: Synthetic oligonucleotide
  Antisense strand to SEQ ID NO: 1861585
uacccuaugcuaaagauaa

SEQ ID NO: 1861587 - RNA, 19 nt, Artificial Sequence
  Description of Artificial Sequence: Synthetic oligonucleotide
  Sense strand starting at position 286 of SEQ ID NO: 1564194
ucuccagugccugaauaua

SEQ ID NO: 1861588 - RNA, 19 nt, Artificial Sequence
  Description of Artificial Sequence: Synthetic oligonucleotide
  Antisense strand to SEQ ID NO: 1861587
uauauucaggcacuggaga

SEQ ID NO: 1861589 - RNA, 19 nt, Artificial Sequence
  Description of Artificial Sequence: Synthetic oligonucleotide
  Sense strand starting at position 296 of SEQ ID NO: 1564194
cugaauauaaucgacguua

SEQ ID NO: 1861590 - RNA, 19 nt, Artificial Sequence
  Description of Artificial Sequence: Synthetic oligonucleotide
  Antisense strand to SEQ ID NO: 1861589
uaacgucgauuauauucag

SEQ ID NO: 1861591 - RNA, 19 nt, Artificial Sequence
  Description of Artificial Sequence: Synthetic oligonucleotide
  Sense strand starting at position 477 of SEQ ID NO: 1564194
agucuuucccuugauuaag

SEQ ID NO: 1861592 - RNA, 19 nt, Artificial Sequence
  Description of Artificial Sequence: Synthetic oligonucleotide
  Antisense strand to SEQ ID NO: 1861591
cuuaaucaagggaaagacu

SEQ ID NO: 1861593 - RNA, 19 nt, Artificial Sequence
  Description of Artificial Sequence: Synthetic oligonucleotide
  Sense strand starting at position 584 of SEQ ID NO: 1564194
gccuguauucuuccggugu

SEQ ID NO: 1861594 - RNA, 19 nt, Artificial Sequence
  Description of Artificial Sequence: Synthetic oligonucleotide
  Antisense strand to SEQ ID NO: 1861593
acaccggaagaauacaggc

SEQ ID NO: 1861595 - RNA, 19 nt, Artificial Sequence
  Description of Artificial Sequence: Synthetic oligonucleotide
  Sense strand starting at position 702 of SEQ ID NO: 1564194
cuuccacguguucuuguau

SEQ ID NO: 1861596 - RNA, 19 nt, Artificial Sequence
  Description of Artificial Sequence: Synthetic oligonucleotide
  Antisense strand to SEQ ID NO: 1861595
auacaagaacacguggaag

SEQ ID NO: 1861597 - RNA, 19 nt, Artificial Sequence
  Description of Artificial Sequence: Synthetic oligonucleotide
  Sense strand starting at position 858 of SEQ ID NO: 1564194
guaaauauacuguaugcca

SEQ ID NO: 1861598 - RNA, 19 nt, Artificial Sequence
  Description of Artificial Sequence: Synthetic oligonucleotide
  Antisense strand to SEQ ID NO: 1861597
uggcauacaguauauuuac

SEQ ID NO: 1861599 - RNA, 19 nt, Artificial Sequence
  Description of Artificial Sequence: Synthetic oligonucleotide
  Sense strand starting at position 892 of SEQ ID NO: 1564194
ugacaaacgucacugaaga

SEQ ID NO: 1861600 - RNA, 19 nt, Artificial Sequence
  Description of Artificial Sequence: Synthetic oligonucleotide
  Antisense strand to SEQ ID NO: 1861599
ucuucagugacguuuguca

SEQ ID NO: 1861601 - RNA, 19 nt, Artificial Sequence
  Description of Artificial Sequence: Synthetic oligonucleotide
  Sense strand starting at position 893 of SEQ ID NO: 1564194
gacaaacgucacugaagaa

SEQ ID NO: 1861602 - RNA, 19 nt, Artificial Sequence
  Description of Artificial Sequence: Synthetic oligonucleotide
  Antisense strand to SEQ ID NO: 1861601
uucuucagugacguuuguc

SEQ ID NO: 1861603 - RNA, 19 nt, Artificial Sequence
  Description of Artificial Sequence: Synthetic oligonucleotide
  Sense strand starting at position 1177 of SEQ ID NO: 1564194
cugcuugugcgaucuuuaa

SEQ ID NO: 1861604 - RNA, 19 nt, Artificial Sequence
  Description of Artificial Sequence: Synthetic oligonucleotide
  Antisense strand to SEQ ID NO: 1861603
uuaaagaucgcacaagcag

SEQ ID NO: 1861605 - RNA, 19 nt, Artificial Sequence
  Description of Artificial Sequence: Synthetic oligonucleotide
  Sense strand starting at position 1181 of SEQ ID NO: 1564194
uugugcgaucuuuaaagga

SEQ ID NO: 1861606 - RNA, 19 nt, Artificial Sequence
  Description of Artificial Sequence: Synthetic oligonucleotide
  Antisense strand to SEQ ID NO: 1861605
uccuuuaaagaucgcacaa

SEQ ID NO: 1861607 - RNA, 19 nt, Artificial Sequence
  Description of Artificial Sequence: Synthetic oligonucleotide
  Sense strand starting at position 2092 of SEQ ID NO: 1564194
gcccaaaggaaaggugaua

SEQ ID NO: 1861608 - RNA, 19 nt, Artificial Sequence
  Description of Artificial Sequence: Synthetic oligonucleotide
  Antisense strand to SEQ ID NO: 1861607
uaucaccuuuccuuugggc

SEQ ID NO: 1861609 - RNA, 19 nt, Artificial Sequence
  Description of Artificial Sequence: Synthetic oligonucleotide
  Sense strand starting at position 2129 of SEQ ID NO: 1564194
aaacgcuucccauaucgga

SEQ ID NO: 1861610 - RNA, 19 nt, Artificial Sequence
  Description of Artificial Sequence: Synthetic oligonucleotide
  Antisense strand to SEQ ID NO: 1861609
uccgauaugggaagcguuu

SEQ ID NO: 1861611 - RNA, 19 nt, Artificial Sequence
  Description of Artificial Sequence: Synthetic oligonucleotide
  Sense strand starting at position 2152 of SEQ ID NO: 1564194
ggcaguaccaguuaccgaa

SEQ ID NO: 1861612 - RNA, 19 nt, Artificial Sequence
  Description of Artificial Sequence: Synthetic oligonucleotide
  Antisense strand to SEQ ID NO: 1861611
uucgguaacugguacugcc

SEQ ID NO: 1861613 - RNA, 19 nt, Artificial Sequence
  Description of Artificial Sequence: Synthetic oligonucleotide
  Sense strand starting at position 2156 of SEQ ID NO: 1564194
guaccaguuaccgaagaag

SEQ ID NO: 1861614 - RNA, 19 nt, Artificial Sequence
  Description of Artificial Sequence: Synthetic oligonucleotide
  Antisense strand to SEQ ID NO: 1861613
cuucuucgguaacugguac

SEQ ID NO: 1861615 - RNA, 19 nt, Artificial Sequence
  Description of Artificial Sequence: Synthetic oligonucleotide
  Sense strand starting at position 2159 of SEQ ID NO: 1564194
ccaguuaccgaagaaguua

SEQ ID NO: 1861616 - RNA, 19 nt, Artificial Sequence
  Description of Artificial Sequence: Synthetic oligonucleotide
  Antisense strand to SEQ ID NO: 1861615
uaacuucuucgguaacugg

SEQ ID NO: 1861617 - RNA, 19 nt, Artificial Sequence
  Description of Artificial Sequence: Synthetic oligonucleotide
  Sense strand starting at position 2231 of SEQ ID NO: 1564194
gaccuaguucuccagguuu

SEQ ID NO: 1861618 - RNA, 19 nt, Artificial Sequence
  Description of Artificial Sequence: Synthetic oligonucleotide
  Antisense strand to SEQ ID NO: 1861617
aaaccuggagaacuagguc

SEQ ID NO: 1861619 - RNA, 19 nt, Artificial Sequence
  Description of Artificial Sequence: Synthetic oligonucleotide
  Sense strand starting at position 2714 of SEQ ID NO: 1564194
gaggaaaugcugugaucuc

SEQ ID NO: 1861620 - RNA, 19 nt, Artificial Sequence
  Description of Artificial Sequence: Synthetic oligonucleotide
  Antisense strand to SEQ ID NO: 1861619
gagaucacagcauuuccuc

SEQ ID NO: 1861621 - RNA, 19 nt, Artificial Sequence
  Description of Artificial Sequence: Synthetic oligonucleotide
  Sense strand starting at position 2724 of SEQ ID NO: 1564194
ugugaucucagggagcuau

SEQ ID NO: 1861622 - RNA, 19 nt, Artificial Sequence
  Description of Artificial Sequence: Synthetic oligonucleotide
  Antisense strand to SEQ ID NO: 1861621
auagcucccugagaucaca

SEQ ID NO: 1861623 - RNA, 19 nt, Artificial Sequence
  Description of Artificial Sequence: Synthetic oligonucleotide
  Sense strand starting at position 2734 of SEQ ID NO: 1564194
gggagcuauuggucuggga

SEQ ID NO: 1861624 - RNA, 19 nt, Artificial Sequence
  Description of Artificial Sequence: Synthetic oligonucleotide
  Antisense strand to SEQ ID NO: 1861623
ucccagaccaauagcuccc

SEQ ID NO: 1861625 - RNA, 19 nt, Artificial Sequence
  Description of Artificial Sequence: Synthetic oligonucleotide
  Sense strand starting at position 2736 of SEQ ID NO: 1564194
gagcuauuggucugggaug

SEQ ID NO: 1861626 - RNA, 19 nt, Artificial Sequence
  Description of Artificial Sequence: Synthetic oligonucleotide
  Antisense strand to SEQ ID NO: 1861625
caucccagaccaauagcuc

SEQ ID NO: 1861627 - RNA, 19 nt, Artificial Sequence
  Description of Artificial Sequence: Synthetic oligonucleotide
  Sense strand starting at position 2738 of SEQ ID NO: 1564194
gcuauuggucugggaugga

SEQ ID NO: 1861628 - RNA, 19 nt, Artificial Sequence
  Description of Artificial Sequence: Synthetic oligonucleotide
  Antisense strand to SEQ ID NO: 1861627
uccaucccagaccaauagc

SEQ ID NO: 1861629 - RNA, 19 nt, Artificial Sequence
  Description of Artificial Sequence: Synthetic oligonucleotide
  Sense strand starting at position 2792 of SEQ ID NO: 1564194
caguaaguucuaugauaga

SEQ ID NO: 1861630 - RNA, 19 nt, Artificial Sequence
  Description of Artificial Sequence: Synthetic oligonucleotide
  Antisense strand to SEQ ID NO: 1861629
ucuaucauagaacuuacug

SEQ ID NO: 1861631 - RNA, 19 nt, Artificial Sequence
  Description of Artificial Sequence: Synthetic oligonucleotide
  Sense strand starting at position 3188 of SEQ ID NO: 1564194
gucugacaggcauaggauu

SEQ ID NO: 1861632 - RNA, 19 nt, Artificial Sequence
  Description of Artificial Sequence: Synthetic oligonucleotide
  Antisense strand to SEQ ID NO: 1861631
aauccuaugccugucagac

SEQ ID NO: 1861633 - RNA, 19 nt, Artificial Sequence
  Description of Artificial Sequence: Synthetic oligonucleotide
  Sense strand starting at position 3215 of SEQ ID NO: 1564194
ugaaucacucagggcgaua

SEQ ID NO: 1861634 - RNA, 19 nt, Artificial Sequence
  Description of Artificial Sequence: Synthetic oligonucleotide
  Antisense strand to SEQ ID NO: 1861633
uaucgcccugagugauuca

SEQ ID NO: 1861635 - RNA, 19 nt, Artificial Sequence
  Description of Artificial Sequence: Synthetic oligonucleotide
  Sense strand starting at position 3325 of SEQ ID NO: 1564194
uaauguaucgcagagguag

SEQ ID NO: 1861636 - RNA, 19 nt, Artificial Sequence
  Description of Artificial Sequence: Synthetic oligonucleotide
  Antisense strand to SEQ ID NO: 1861635
cuaccucugcgauacauua

SEQ ID NO: 1861637 - RNA, 19 nt, Artificial Sequence
  Description of Artificial Sequence: Synthetic oligonucleotide
  Sense strand starting at position 3424 of SEQ ID NO: 1564194
gaggaauugccuuguggag

SEQ ID NO: 1861638 - RNA, 19 nt, Artificial Sequence
  Description of Artificial Sequence: Synthetic oligonucleotide
  Antisense strand to SEQ ID NO: 1861637
cuccacaaggcaauuccuc

SEQ ID NO: 1861639 - RNA, 19 nt, Artificial Sequence
  Description of Artificial Sequence: Synthetic oligonucleotide
  Sense strand starting at position 3481 of SEQ ID NO: 1564194
ggugcucgugucuuugagu

SEQ ID NO: 1861640 - RNA, 19 nt, Artificial Sequence
  Description of Artificial Sequence: Synthetic oligonucleotide
  Antisense strand to SEQ ID NO: 1861639
acucaaagacacgagcacc

SEQ ID NO: 1861641 - RNA, 19 nt, Artificial Sequence
  Description of Artificial Sequence: Synthetic oligonucleotide
  Sense strand starting at position 3704 of SEQ ID NO: 1564194
gcuggauguggucagaaag

SEQ ID NO: 1861642 - RNA, 19 nt, Artificial Sequence
  Description of Artificial Sequence: Synthetic oligonucleotide
  Antisense strand to SEQ ID NO: 1861641
cuuucugaccacauccagc

SEQ ID NO: 1861643 - RNA, 19 nt, Artificial Sequence
  Description of Artificial Sequence: Synthetic oligonucleotide
  Sense strand starting at position 3837 of SEQ ID NO: 1564194
cucacaaacccaugaguga

SEQ ID NO: 1861644 - RNA, 19 nt, Artificial Sequence
  Description of Artificial Sequence: Synthetic oligonucleotide
  Antisense strand to SEQ ID NO: 1861643
ucacucauggguuugugag

SEQ ID NO: 1861645 - RNA, 19 nt, Artificial Sequence
  Description of Artificial Sequence: Synthetic oligonucleotide
  Sense strand starting at position 26 of SEQ ID NO: 1564195
ggauaaugcacuggaaugu

SEQ ID NO: 1861646 - RNA, 19 nt, Artificial Sequence
  Description of Artificial Sequence: Synthetic oligonucleotide
  Antisense strand to SEQ ID NO: 1861645
acauuccagugcauuaucc

SEQ ID NO: 1861647 - RNA, 19 nt, Artificial Sequence
  Description of Artificial Sequence: Synthetic oligonucleotide
  Sense strand starting at position 27 of SEQ ID NO: 1564195
gauaaugcacuggaauguu

SEQ ID NO: 1861648 - RNA, 19 nt, Artificial Sequence
  Description of Artificial Sequence: Synthetic oligonucleotide
  Antisense strand to SEQ ID NO: 1861647
aacauuccagugcauuauc

SEQ ID NO: 1861649 - RNA, 19 nt, Artificial Sequence
  Description of Artificial Sequence: Synthetic oligonucleotide
  Sense strand starting at position 63 of SEQ ID NO: 1564195
gaaucaccugaguggcaaa

SEQ ID NO: 1861650 - RNA, 19 nt, Artificial Sequence
  Description of Artificial Sequence: Synthetic oligonucleotide
  Antisense strand to SEQ ID NO: 1861649
uuugccacucaggugauuc

SEQ ID NO: 1861651 - RNA, 19 nt, Artificial Sequence
  Description of Artificial Sequence: Synthetic oligonucleotide
  Sense strand starting at position 202 of SEQ ID NO: 1564195
ggagaaucgcaacaacagu

SEQ ID NO: 1861652 - RNA, 19 nt, Artificial Sequence
  Description of Artificial Sequence: Synthetic oligonucleotide
  Antisense strand to SEQ ID NO: 1861651
acuguuguugcgauucucc

SEQ ID NO: 1861653 - RNA, 19 nt, Artificial Sequence
  Description of Artificial Sequence: Synthetic oligonucleotide
  Sense strand starting at position 753 of SEQ ID NO: 1564195
acagcacgagucgaagaua

SEQ ID NO: 1861654 - RNA, 19 nt, Artificial Sequence
  Description of Artificial Sequence: Synthetic oligonucleotide
  Antisense strand to SEQ ID NO: 1861653
uaucuucgacucgugcugu

SEQ ID NO: 1861655 - RNA, 19 nt, Artificial Sequence
  Description of Artificial Sequence: Synthetic oligonucleotide
  Sense strand starting at position 756 of SEQ ID NO: 1564195
gcacgagucgaagauaaca

SEQ ID NO: 1861656 - RNA, 19 nt, Artificial Sequence
  Description of Artificial Sequence: Synthetic oligonucleotide
  Antisense strand to SEQ ID NO: 1861655
uguuaucuucgacucgugc

SEQ ID NO: 1861657 - RNA, 19 nt, Artificial Sequence
  Description of Artificial Sequence: Synthetic oligonucleotide
  Sense strand starting at position 809 of SEQ ID NO: 1564195
uucccugguccacgacaaa

SEQ ID NO: 1861658 - RNA, 19 nt, Artificial Sequence
  Description of Artificial Sequence: Synthetic oligonucleotide
  Antisense strand to SEQ ID NO: 1861657
uuugucguggaccagggaa

SEQ ID NO: 1861659 - RNA, 19 nt, Artificial Sequence
  Description of Artificial Sequence: Synthetic oligonucleotide
  Sense strand starting at position 878 of SEQ ID NO: 1564195
acguucgagaacuguaaua

SEQ ID NO: 1861660 - RNA, 19 nt, Artificial Sequence
  Description of Artificial Sequence: Synthetic oligonucleotide
  Antisense strand to SEQ ID NO: 1861659
uauuacaguucucgaacgu

SEQ ID NO: 1861661 - RNA, 19 nt, Artificial Sequence
  Description of Artificial Sequence: Synthetic oligonucleotide
  Sense strand starting at position 880 of SEQ ID NO: 1564195
guucgagaacuguaauaua

SEQ ID NO: 1861662 - RNA, 19 nt, Artificial Sequence
  Description of Artificial Sequence: Synthetic oligonucleotide
  Antisense strand to SEQ ID NO: 1861661
uauauuacaguucucgaac

SEQ ID NO: 1861663 - RNA, 19 nt, Artificial Sequence
  Description of Artificial Sequence: Synthetic oligonucleotide
  Sense strand starting at position 883 of SEQ ID NO: 1564195
cgagaacuguaauauacau

SEQ ID NO: 1861664 - RNA, 19 nt, Artificial Sequence
  Description of Artificial Sequence: Synthetic oligonucleotide
  Antisense strand to SEQ ID NO: 1861663
auguauauuacaguucucg

SEQ ID NO: 1861665 - RNA, 19 nt, Artificial Sequence
  Description of Artificial Sequence: Synthetic oligonucleotide
  Sense strand starting at position 912 of SEQ ID NO: 1564195
ccgcaucgaucagaucuuu

SEQ ID NO: 1861666 - RNA, 19 nt, Artificial Sequence
  Description of Artificial Sequence: Synthetic oligonucleotide
  Antisense strand to SEQ ID NO: 1861665
aaagaucugaucgaugcgg

SEQ ID NO: 1861667 - RNA, 19 nt, Artificial Sequence
  Description of Artificial Sequence: Synthetic oligonucleotide
  Sense strand starting at position 917 of SEQ ID NO: 1564195
ucgaucagaucuuuauuaa

SEQ ID NO: 1861668 - RNA, 19 nt, Artificial Sequence
  Description of Artificial Sequence: Synthetic oligonucleotide
  Antisense strand to SEQ ID NO: 1861667
uuaauaaagaucugaucga

SEQ ID NO: 1861669 - RNA, 19 nt, Artificial Sequence
  Description of Artificial Sequence: Synthetic oligonucleotide
  Sense strand starting at position 1218 of SEQ ID NO: 1564195
ucacgaaagucagugaaga

SEQ ID NO: 1861670 - RNA, 19 nt, Artificial Sequence
  Description of Artificial Sequence: Synthetic oligonucleotide
  Antisense strand to SEQ ID NO: 1861669
ucuucacugacuuucguga

SEQ ID NO: 1861671 - RNA, 19 nt, Artificial Sequence
  Description of Artificial Sequence: Synthetic oligonucleotide
  Sense strand starting at position 1353 of SEQ ID NO: 1564195
ccaguccucuggcucuaua

SEQ ID NO: 1861672 - RNA, 19 nt, Artificial Sequence
  Description of Artificial Sequence: Synthetic oligonucleotide
  Antisense strand to SEQ ID NO: 1861671
uauagagccagaggacugg

SEQ ID NO: 1861673 - RNA, 19 nt, Artificial Sequence
  Description of Artificial Sequence: Synthetic oligonucleotide
  Sense strand starting at position 1645 of SEQ ID NO: 1564195
cccuguucucgcugccuga

SEQ ID NO: 1861674 - RNA, 19 nt, Artificial Sequence
  Description of Artificial Sequence: Synthetic oligonucleotide
  Antisense strand to SEQ ID NO: 1861673
ucaggcagcgagaacaggg

SEQ ID NO: 1861675 - RNA, 19 nt, Artificial Sequence
  Description of Artificial Sequence: Synthetic oligonucleotide
  Sense strand starting at position 2072 of SEQ ID NO: 1564195
cggcuauccuaagagaaag

SEQ ID NO: 1861676 - RNA, 19 nt, Artificial Sequence
  Description of Artificial Sequence: Synthetic oligonucleotide
  Antisense strand to SEQ ID NO: 1861675
cuuucucuuaggauagccg

SEQ ID NO: 1861677 - RNA, 19 nt, Artificial Sequence
  Description of Artificial Sequence: Synthetic oligonucleotide
  Sense strand starting at position 2150 of SEQ ID NO: 1564195
guggaaagcgguuggucaa

SEQ ID NO: 1861678 - RNA, 19 nt, Artificial Sequence
  Description of Artificial Sequence: Synthetic oligonucleotide
  Antisense strand to SEQ ID NO: 1861677
uugaccaaccgcuuuccac

SEQ ID NO: 1861679 - RNA, 19 nt, Artificial Sequence
  Description of Artificial Sequence: Synthetic oligonucleotide
  Sense strand starting at position 2151 of SEQ ID NO: 1564195
uggaaagcgguuggucaaa

SEQ ID NO: 1861680 - RNA, 19 nt, Artificial Sequence
  Description of Artificial Sequence: Synthetic oligonucleotide
  Antisense strand to SEQ ID NO: 1861679
uuugaccaaccgcuuucca

SEQ ID NO: 1861681 - RNA, 19 nt, Artificial Sequence
  Description of Artificial Sequence: Synthetic oligonucleotide
  Sense strand starting at position 2153 of SEQ ID NO: 1564195
gaaagcgguuggucaaaga

SEQ ID NO: 1861682 - RNA, 19 nt, Artificial Sequence
  Description of Artificial Sequence: Synthetic oligonucleotide
  Antisense strand to SEQ ID NO: 1861681
ucuuugaccaaccgcuuuc

SEQ ID NO: 1861683 - RNA, 19 nt, Artificial Sequence
  Description of Artificial Sequence: Synthetic oligonucleotide
  Sense strand starting at position 2267 of SEQ ID NO: 1564195
gcucgagucacguggcuua

SEQ ID NO: 1861684 - RNA, 19 nt, Artificial Sequence
  Description of Artificial Sequence: Synthetic oligonucleotide
  Antisense strand to SEQ ID NO: 1861683
uaagccacgugacucgagc

SEQ ID NO: 1861685 - RNA, 19 nt, Artificial Sequence
  Description of Artificial Sequence: Synthetic oligonucleotide
  Sense strand starting at position 2301 of SEQ ID NO: 1564195
ggguuccuguaccacaaua

SEQ ID NO: 1861686 - RNA, 19 nt, Artificial Sequence
  Description of Artificial Sequence: Synthetic oligonucleotide
  Antisense strand to SEQ ID NO: 1861685
uauugugguacaggaaccc

SEQ ID NO: 1861687 - RNA, 19 nt, Artificial Sequence
  Description of Artificial Sequence: Synthetic oligonucleotide
  Sense strand starting at position 2345 of SEQ ID NO: 1564195
cuuugugcugcgugcaauu

SEQ ID NO: 1861688 - RNA, 19 nt, Artificial Sequence
  Description of Artificial Sequence: Synthetic oligonucleotide
  Antisense strand to SEQ ID NO: 1861687
aauugcacgcagcacaaag

SEQ ID NO: 1861689 - RNA, 19 nt, Artificial Sequence
  Description of Artificial Sequence: Synthetic oligonucleotide
  Sense strand starting at position 2378 of SEQ ID NO: 1564195
caaggagagacuugacgua

SEQ ID NO: 1861690 - RNA, 19 nt, Artificial Sequence
  Description of Artificial Sequence: Synthetic oligonucleotide
  Antisense strand to SEQ ID NO: 1861689
uacgucaagucucuccuug

SEQ ID NO: 1861691 - RNA, 19 nt, Artificial Sequence
  Description of Artificial Sequence: Synthetic oligonucleotide
  Sense strand starting at position 2403 of SEQ ID NO: 1564195
acaggcauucccgagcuau

SEQ ID NO: 1861692 - RNA, 19 nt, Artificial Sequence
  Description of Artificial Sequence: Synthetic oligonucleotide
  Antisense strand to SEQ ID NO: 1861691
auagcucgggaaugccugu

SEQ ID NO: 1861693 - RNA, 19 nt, Artificial Sequence
  Description of Artificial Sequence: Synthetic oligonucleotide
  Sense strand starting at position 2413 of SEQ ID NO: 1564195
ccgagcuaugcagguuacu

SEQ ID NO: 1861694 - RNA, 19 nt, Artificial Sequence
  Description of Artificial Sequence: Synthetic oligonucleotide
  Antisense strand to SEQ ID NO: 1861693
aguaaccugcauagcucgg

SEQ ID NO: 1861695 - RNA, 19 nt, Artificial Sequence
  Description of Artificial Sequence: Synthetic oligonucleotide
  Sense strand starting at position 2799 of SEQ ID NO: 1564195
cuagacucacaaugguuaa

SEQ ID NO: 1861696 - RNA, 19 nt, Artificial Sequence
  Description of Artificial Sequence: Synthetic oligonucleotide
  Antisense strand to SEQ ID NO: 1861695
uuaaccauugugagucuag

SEQ ID NO: 1861697 - RNA, 19 nt, Artificial Sequence
  Description of Artificial Sequence: Synthetic oligonucleotide
  Sense strand starting at position 2916 of SEQ ID NO: 1564195
ucacaacuuuaggaaguaa

SEQ ID NO: 1861698 - RNA, 19 nt, Artificial Sequence
  Description of Artificial Sequence: Synthetic oligonucleotide
  Antisense strand to SEQ ID NO: 1861697
uuacuuccuaaaguuguga

SEQ ID NO: 1861699 - RNA, 19 nt, Artificial Sequence
  Description of Artificial Sequence: Synthetic oligonucleotide
  Sense strand starting at position 2948 of SEQ ID NO: 1564195
aaggaagaguccgcacuua

SEQ ID NO: 1861700 - RNA, 19 nt, Artificial Sequence
  Description of Artificial Sequence: Synthetic oligonucleotide
  Antisense strand to SEQ ID NO: 1861699
uaagugcggacucuuccuu

SEQ ID NO: 1861701 - RNA, 19 nt, Artificial Sequence
  Description of Artificial Sequence: Synthetic oligonucleotide
  Sense strand starting at position 2976 of SEQ ID NO: 1564195
aguuguccuaguuggaaca

SEQ ID NO: 1861702 - RNA, 19 nt, Artificial Sequence
  Description of Artificial Sequence: Synthetic oligonucleotide
  Antisense strand to SEQ ID NO: 1861701
uguuccaacuaggacaacu

SEQ ID NO: 1861703 - RNA, 19 nt, Artificial Sequence
  Description of Artificial Sequence: Synthetic oligonucleotide
  Sense strand starting at position 2978 of SEQ ID NO: 1564195
uuguccuaguuggaacauu

SEQ ID NO: 1861704 - RNA, 19 nt, Artificial Sequence
  Description of Artificial Sequence: Synthetic oligonucleotide
  Antisense strand to SEQ ID NO: 1861703
aauguuccaacuaggacaa

SEQ ID NO: 1861705 - RNA, 19 nt, Artificial Sequence
  Description of Artificial Sequence: Synthetic oligonucleotide
  Sense strand starting at position 3312 of SEQ ID NO: 1564195
ccaggcaaguugucuugaa

SEQ ID NO: 1861706 - RNA, 19 nt, Artificial Sequence
  Description of Artificial Sequence: Synthetic oligonucleotide
  Antisense strand to SEQ ID NO: 1861705
uucaagacaacuugccugg

SEQ ID NO: 1861707 - RNA, 19 nt, Artificial Sequence
  Description of Artificial Sequence: Synthetic oligonucleotide
  Sense strand starting at position 3313 of SEQ ID NO: 1564195
caggcaaguugucuugaaa

SEQ ID NO: 1861708 - RNA, 19 nt, Artificial Sequence
  Description of Artificial Sequence: Synthetic oligonucleotide
  Antisense strand to SEQ ID NO: 1861707
uuucaagacaacuugccug

SEQ ID NO: 1861709 - RNA, 19 nt, Artificial Sequence
  Description of Artificial Sequence: Synthetic oligonucleotide
  Sense strand starting at position 3342 of SEQ ID NO: 1564195
auccgaauuucucuuguuu

SEQ ID NO: 1861710 - RNA, 19 nt, Artificial Sequence
  Description of Artificial Sequence: Synthetic oligonucleotide
  Antisense strand to SEQ ID NO: 1861709
aaacaagagaaauucggau

SEQ ID NO: 1861711 - RNA, 19 nt, Artificial Sequence
  Description of Artificial Sequence: Synthetic oligonucleotide
  Sense strand starting at position 3693 of SEQ ID NO: 1564195
cucugucucccaggauaaa

SEQ ID NO: 1861712 - RNA, 19 nt, Artificial Sequence
  Description of Artificial Sequence: Synthetic oligonucleotide
  Antisense strand to SEQ ID NO: 1861711
uuuauccugggagacagag

SEQ ID NO: 1861713 - RNA, 19 nt, Artificial Sequence
  Description of Artificial Sequence: Synthetic oligonucleotide
  Sense strand starting at position 3782 of SEQ ID NO: 1564195
ccauauuggccacacugau

SEQ ID NO: 1861714 - RNA, 19 nt, Artificial Sequence
  Description of Artificial Sequence: Synthetic oligonucleotide
  Antisense strand to SEQ ID NO: 1861713
aucaguguggccaauaugg

SEQ ID NO: 1861715 - RNA, 19 nt, Artificial Sequence
  Description of Artificial Sequence: Synthetic oligonucleotide
  Sense strand starting at position 3829 of SEQ ID NO: 1564195
gccucaagugcuggaaauu

SEQ ID NO: 1861716 - RNA, 19 nt, Artificial Sequence
  Description of Artificial Sequence: Synthetic oligonucleotide
  Antisense strand to SEQ ID NO: 1861715
aauuuccagcacuugaggc

SEQ ID NO: 1861717 - RNA, 19 nt, Artificial Sequence
  Description of Artificial Sequence: Synthetic oligonucleotide
  Sense strand starting at position 3830 of SEQ ID NO: 1564195
ccucaagugcuggaaauua

SEQ ID NO: 1861718 - RNA, 19 nt, Artificial Sequence
  Description of Artificial Sequence: Synthetic oligonucleotide
  Antisense strand to SEQ ID NO: 1861717
uaauuuccagcacuugagg

SEQ ID NO: 1861719 - RNA, 19 nt, Artificial Sequence
  Description of Artificial Sequence: Synthetic oligonucleotide
  Sense strand starting at position 3915 of SEQ ID NO: 1564195
aauacaguguuguccuagu

SEQ ID NO: 1861720 - RNA, 19 nt, Artificial Sequence
  Description of Artificial Sequence: Synthetic oligonucleotide
  Antisense strand to SEQ ID NO: 1861719
acuaggacaacacuguauu

SEQ ID NO: 1861721 - RNA, 19 nt, Artificial Sequence
  Description of Artificial Sequence: Synthetic oligonucleotide
  Sense strand starting at position 3928 of SEQ ID NO: 1564195
ccuaguauuggugaugcua

SEQ ID NO: 1861722 - RNA, 19 nt, Artificial Sequence
  Description of Artificial Sequence: Synthetic oligonucleotide
  Antisense strand to SEQ ID NO: 1861721
uagcaucaccaauacuagg

SEQ ID NO: 1861723 - RNA, 19 nt, Artificial Sequence
  Description of Artificial Sequence: Synthetic oligonucleotide
  Sense strand starting at position 3930 of SEQ ID NO: 1564195
uaguauuggugaugcuaaa

SEQ ID NO: 1861724 - RNA, 19 nt, Artificial Sequence
  Description of Artificial Sequence: Synthetic oligonucleotide
  Antisense strand to SEQ ID NO: 1861723
uuuagcaucaccaauacua

SEQ ID NO: 1861725 - RNA, 19 nt, Artificial Sequence
  Description of Artificial Sequence: Synthetic oligonucleotide
  Sense strand starting at position 21 of SEQ ID NO: 1564196
ggauauuucuuugacacac

SEQ ID NO: 1861726 - RNA, 19 nt, Artificial Sequence
  Description of Artificial Sequence: Synthetic oligonucleotide
  Antisense strand to SEQ ID NO: 1861725
gugugucaaagaaauaucc

SEQ ID NO: 1861727 - RNA, 19 nt, Artificial Sequence
  Description of Artificial Sequence: Synthetic oligonucleotide
  Sense strand starting at position 185 of SEQ ID NO: 1564196
ccauguauuugggauguau

SEQ ID NO: 1861728 - RNA, 19 nt, Artificial Sequence
  Description of Artificial Sequence: Synthetic oligonucleotide
  Antisense strand to SEQ ID NO: 1861727
auacaucccaaauacaugg

SEQ ID NO: 1861729 - RNA, 19 nt, Artificial Sequence
  Description of Artificial Sequence: Synthetic oligonucleotide
  Sense strand starting at position 203 of SEQ ID NO: 1564196
uuuguagagcccugcauuu

SEQ ID NO: 1861730 - RNA, 19 nt, Artificial Sequence
  Description of Artificial Sequence: Synthetic oligonucleotide
  Antisense strand to SEQ ID NO: 1861729
aaaugcagggcucuacaaa

SEQ ID NO: 1861731 - RNA, 19 nt, Artificial Sequence
  Description of Artificial Sequence: Synthetic oligonucleotide
  Sense strand starting at position 224 of SEQ ID NO: 1564196
gguauuagggcccacacuu

SEQ ID NO: 1861732 - RNA, 19 nt, Artificial Sequence
  Description of Artificial Sequence: Synthetic oligonucleotide
  Antisense strand to SEQ ID NO: 1861731
aagugugggcccuaauacc

SEQ ID NO: 1861733 - RNA, 19 nt, Artificial Sequence
  Description of Artificial Sequence: Synthetic oligonucleotide
  Sense strand starting at position 556 of SEQ ID NO: 1564196
ccacacuucugaggaagau

SEQ ID NO: 1861734 - RNA, 19 nt, Artificial Sequence
  Description of Artificial Sequence: Synthetic oligonucleotide
  Antisense strand to SEQ ID NO: 1861733
aucuuccucagaagugugg

SEQ ID NO: 1861735 - RNA, 19 nt, Artificial Sequence
  Description of Artificial Sequence: Synthetic oligonucleotide
  Sense strand starting at position 937 of SEQ ID NO: 1564196
ugcauuauuugugauugua

SEQ ID NO: 1861736 - RNA, 19 nt, Artificial Sequence
  Description of Artificial Sequence: Synthetic oligonucleotide
  Antisense strand to SEQ ID NO: 1861735
uacaaucacaaauaaugca

SEQ ID NO: 1861737 - RNA, 19 nt, Artificial Sequence
  Description of Artificial Sequence: Synthetic oligonucleotide
  Sense strand starting at position 1158 of SEQ ID NO: 1564196
uuuaucagaucaguaguaa

SEQ ID NO: 1861738 - RNA, 19 nt, Artificial Sequence
  Description of Artificial Sequence: Synthetic oligonucleotide
  Antisense strand to SEQ ID NO: 1861737
uuacuacugaucugauaaa

SEQ ID NO: 1861739 - RNA, 19 nt, Artificial Sequence
  Description of Artificial Sequence: Synthetic oligonucleotide
  Sense strand starting at position 1159 of SEQ ID NO: 1564196
uuaucagaucaguaguaac

SEQ ID NO: 1861740 - RNA, 19 nt, Artificial Sequence
  Description of Artificial Sequence: Synthetic oligonucleotide
  Antisense strand to SEQ ID NO: 1861739
guuacuacugaucugauaa

SEQ ID NO: 1861741 - RNA, 19 nt, Artificial Sequence
  Description of Artificial Sequence: Synthetic oligonucleotide
  Sense strand starting at position 1162 of SEQ ID NO: 1564196
ucagaucaguaguaacuuu

SEQ ID NO: 1861742 - RNA, 19 nt, Artificial Sequence
  Description of Artificial Sequence: Synthetic oligonucleotide
  Antisense strand to SEQ ID NO: 1861741
aaaguuacuacugaucuga

SEQ ID NO: 1861743 - RNA, 19 nt, Artificial Sequence
  Description of Artificial Sequence: Synthetic oligonucleotide
  Sense strand starting at position 1257 of SEQ ID NO: 1564196
gaaagaauguaagaacuga

SEQ ID NO: 1861744 - RNA, 19 nt, Artificial Sequence
  Description of Artificial Sequence: Synthetic oligonucleotide
  Antisense strand to SEQ ID NO: 1861743
ucaguucuuacauucuuuc

SEQ ID NO: 1861745 - RNA, 19 nt, Artificial Sequence
  Description of Artificial Sequence: Synthetic oligonucleotide
  Sense strand starting at position 1288 of SEQ ID NO: 1564196
guauuuguuugauaaacag

SEQ ID NO: 1861746 - RNA, 19 nt, Artificial Sequence
  Description of Artificial Sequence: Synthetic oligonucleotide
  Antisense strand to SEQ ID NO: 1861745
cuguuuaucaaacaaauac

SEQ ID NO: 1861747 - RNA, 19 nt, Artificial Sequence
  Description of Artificial Sequence: Synthetic oligonucleotide
  Sense strand starting at position 1336 of SEQ ID NO: 1564196
uuagacaauccugguugaa

SEQ ID NO: 1861748 - RNA, 19 nt, Artificial Sequence
  Description of Artificial Sequence: Synthetic oligonucleotide
  Antisense strand to SEQ ID NO: 1861747
uucaaccaggauugucuaa

SEQ ID NO: 1861749 - RNA, 19 nt, Artificial Sequence
  Description of Artificial Sequence: Synthetic oligonucleotide
  Sense strand starting at position 1398 of SEQ ID NO: 1564196
agacuaguuguacgguauu

SEQ ID NO: 1861750 - RNA, 19 nt, Artificial Sequence
  Description of Artificial Sequence: Synthetic oligonucleotide
  Antisense strand to SEQ ID NO: 1861749
aauaccguacaacuagucu

SEQ ID NO: 1861751 - RNA, 19 nt, Artificial Sequence
  Description of Artificial Sequence: Synthetic oligonucleotide
  Sense strand starting at position 1454 of SEQ ID NO: 1564196
acucuuugaugccugauua

SEQ ID NO: 1861752 - RNA, 19 nt, Artificial Sequence
  Description of Artificial Sequence: Synthetic oligonucleotide
  Antisense strand to SEQ ID NO: 1861751
uaaucaggcaucaaagagu

SEQ ID NO: 1861753 - RNA, 19 nt, Artificial Sequence
  Description of Artificial Sequence: Synthetic oligonucleotide
  Sense strand starting at position 1455 of SEQ ID NO: 1564196
cucuuugaugccugauuaa

SEQ ID NO: 1861754 - RNA, 19 nt, Artificial Sequence
  Description of Artificial Sequence: Synthetic oligonucleotide
  Antisense strand to SEQ ID NO: 1861753
uuaaucaggcaucaaagag

SEQ ID NO: 1861755 - RNA, 19 nt, Artificial Sequence
  Description of Artificial Sequence: Synthetic oligonucleotide
  Sense strand starting at position 1458 of SEQ ID NO: 1564196
uuugaugccugauuaaauu

SEQ ID NO: 1861756 - RNA, 19 nt, Artificial Sequence
  Description of Artificial Sequence: Synthetic oligonucleotide
  Antisense strand to SEQ ID NO: 1861755
aauuuaaucaggcaucaaa

SEQ ID NO: 1861757 - RNA, 19 nt, Artificial Sequence
  Description of Artificial Sequence: Synthetic oligonucleotide
  Sense strand starting at position 1507 of SEQ ID NO: 1564196
guuccaucucgcuuuagca

SEQ ID NO: 1861758 - RNA, 19 nt, Artificial Sequence
  Description of Artificial Sequence: Synthetic oligonucleotide
  Antisense strand to SEQ ID NO: 1861757
ugcuaaagcgagauggaac

SEQ ID NO: 1861759 - RNA, 19 nt, Artificial Sequence
  Description of Artificial Sequence: Synthetic oligonucleotide
  Sense strand starting at position 1537 of SEQ ID NO: 1564196
ggaauuauaauuggcugga

SEQ ID NO: 1861760 - RNA, 19 nt, Artificial Sequence
  Description of Artificial Sequence: Synthetic oligonucleotide
  Antisense strand to SEQ ID NO: 1861759
uccagccaauuauaauucc

SEQ ID NO: 1861761 - RNA, 19 nt, Artificial Sequence
  Description of Artificial Sequence: Synthetic oligonucleotide
  Sense strand starting at position 2593 of SEQ ID NO: 1564196
cagugauacuccuaagagg

SEQ ID NO: 1861762 - RNA, 19 nt, Artificial Sequence
  Description of Artificial Sequence: Synthetic oligonucleotide
  Antisense strand to SEQ ID NO: 1861761
ccucuuaggaguaucacug

SEQ ID NO: 1861763 - RNA, 19 nt, Artificial Sequence
  Description of Artificial Sequence: Synthetic oligonucleotide
  Sense strand starting at position 3167 of SEQ ID NO: 1564196
gacgguuugucccuaggca

SEQ ID NO: 1861764 - RNA, 19 nt, Artificial Sequence
  Description of Artificial Sequence: Synthetic oligonucleotide
  Antisense strand to SEQ ID NO: 1861763
ugccuagggacaaaccguc

SEQ ID NO: 1861765 - RNA, 19 nt, Artificial Sequence
  Description of Artificial Sequence: Synthetic oligonucleotide
  Sense strand starting at position 3236 of SEQ ID NO: 1564196
acuagaaucugugcccaaa

SEQ ID NO: 1861766 - RNA, 19 nt, Artificial Sequence
  Description of Artificial Sequence: Synthetic oligonucleotide
  Antisense strand to SEQ ID NO: 1861765
uuugggcacagauucuagu

SEQ ID NO: 1861767 - RNA, 19 nt, Artificial Sequence
  Description of Artificial Sequence: Synthetic oligonucleotide
  Sense strand starting at position 3391 of SEQ ID NO: 1564196
agcaguuuguuucuccgaa

SEQ ID NO: 1861768 - RNA, 19 nt, Artificial Sequence
  Description of Artificial Sequence: Synthetic oligonucleotide
  Antisense strand to SEQ ID NO: 1861767
uucggagaaacaaacugcu

SEQ ID NO: 1861769 - RNA, 19 nt, Artificial Sequence
  Description of Artificial Sequence: Synthetic oligonucleotide
  Sense strand starting at position 3392 of SEQ ID NO: 1564196
gcaguuuguuucuccgaaa

SEQ ID NO: 1861770 - RNA, 19 nt, Artificial Sequence
  Description of Artificial Sequence: Synthetic oligonucleotide
  Antisense strand to SEQ ID NO: 1861769
uuucggagaaacaaacugc

SEQ ID NO: 1861771 - RNA, 19 nt, Artificial Sequence
  Description of Artificial Sequence: Synthetic oligonucleotide
  Sense strand starting at position 3393 of SEQ ID NO: 1564196
caguuuguuucuccgaaag

SEQ ID NO: 1861772 - RNA, 19 nt, Artificial Sequence
  Description of Artificial Sequence: Synthetic oligonucleotide
  Antisense strand to SEQ ID NO: 1861771
cuuucggagaaacaaacug

SEQ ID NO: 1861773 - RNA, 19 nt, Artificial Sequence
  Description of Artificial Sequence: Synthetic oligonucleotide
  Sense strand starting at position 3454 of SEQ ID NO: 1564196
uuucccuuccuggaaguuu

SEQ ID NO: 1861774 - RNA, 19 nt, Artificial Sequence
  Description of Artificial Sequence: Synthetic oligonucleotide
  Antisense strand to SEQ ID NO: 1861773
aaacuuccaggaagggaaa

SEQ ID NO: 1861775 - RNA, 19 nt, Artificial Sequence
  Description of Artificial Sequence: Synthetic oligonucleotide
  Sense strand starting at position 3533 of SEQ ID NO: 1564196
gcaggaaucugggugccuu

SEQ ID NO: 1861776 - RNA, 19 nt, Artificial Sequence
  Description of Artificial Sequence: Synthetic oligonucleotide
  Antisense strand to SEQ ID NO: 1861775
aaggcacccagauuccugc

SEQ ID NO: 1861777 - RNA, 19 nt, Artificial Sequence
  Description of Artificial Sequence: Synthetic oligonucleotide
  Sense strand starting at position 3617 of SEQ ID NO: 1564196
gguucuuguuggcuaguua

SEQ ID NO: 1861778 - RNA, 19 nt, Artificial Sequence
  Description of Artificial Sequence: Synthetic oligonucleotide
  Antisense strand to SEQ ID NO: 1861777
uaacuagccaacaagaacc

SEQ ID NO: 1861779 - RNA, 19 nt, Artificial Sequence
  Description of Artificial Sequence: Synthetic oligonucleotide
  Sense strand starting at position 3631 of SEQ ID NO: 1564196
aguuacuuccgauguugaa

SEQ ID NO: 1861780 - RNA, 19 nt, Artificial Sequence
  Description of Artificial Sequence: Synthetic oligonucleotide
  Antisense strand to SEQ ID NO: 1861779
uucaacaucggaaguaacu

SEQ ID NO: 1861781 - RNA, 19 nt, Artificial Sequence
  Description of Artificial Sequence: Synthetic oligonucleotide
  Sense strand starting at position 3650 of SEQ ID NO: 1564196
acuguugguguugaaucau

SEQ ID NO: 1861782 - RNA, 19 nt, Artificial Sequence
  Description of Artificial Sequence: Synthetic oligonucleotide
  Antisense strand to SEQ ID NO: 1861781
augauucaacaccaacagu

SEQ ID NO: 1861783 - RNA, 19 nt, Artificial Sequence
  Description of Artificial Sequence: Synthetic oligonucleotide
  Sense strand starting at position 3734 of SEQ ID NO: 1564196
uggcuuccuguguagucau

SEQ ID NO: 1861784 - RNA, 19 nt, Artificial Sequence
  Description of Artificial Sequence: Synthetic oligonucleotide
  Antisense strand to SEQ ID NO: 1861783
augacuacacaggaagcca

SEQ ID NO: 1861785 - RNA, 19 nt, Artificial Sequence
  Description of Artificial Sequence: Synthetic oligonucleotide
  Sense strand starting at position 3742 of SEQ ID NO: 1564196
uguguagucaugugaccug

SEQ ID NO: 1861786 - RNA, 19 nt, Artificial Sequence
  Description of Artificial Sequence: Synthetic oligonucleotide
  Antisense strand to SEQ ID NO: 1861785
caggucacaugacuacaca

SEQ ID NO: 1861787 - RNA, 19 nt, Artificial Sequence
  Description of Artificial Sequence: Synthetic oligonucleotide
  Sense strand starting at position 3749 of SEQ ID NO: 1564196
ucaugugaccuggaggguu

SEQ ID NO: 1861788 - RNA, 19 nt, Artificial Sequence
  Description of Artificial Sequence: Synthetic oligonucleotide
  Antisense strand to SEQ ID NO: 1861787
aacccuccaggucacauga

SEQ ID NO: 1861789 - RNA, 19 nt, Artificial Sequence
  Description of Artificial Sequence: Synthetic oligonucleotide
  Sense strand starting at position 3767 of SEQ ID NO: 1564196
uccagaaccuucguaaaug

SEQ ID NO: 1861790 - RNA, 19 nt, Artificial Sequence
  Description of Artificial Sequence: Synthetic oligonucleotide
  Antisense strand to SEQ ID NO: 1861789
cauuuacgaagguucugga

SEQ ID NO: 1861791 - RNA, 19 nt, Artificial Sequence
  Description of Artificial Sequence: Synthetic oligonucleotide
  Sense strand starting at position 3834 of SEQ ID NO: 1564196
gccggugccgguucaagau

SEQ ID NO: 1861792 - RNA, 19 nt, Artificial Sequence
  Description of Artificial Sequence: Synthetic oligonucleotide
  Antisense strand to SEQ ID NO: 1861791
aucuugaaccggcaccggc

SEQ ID NO: 1861793 - RNA, 19 nt, Artificial Sequence
  Description of Artificial Sequence: Synthetic oligonucleotide
  Sense strand starting at position 3888 of SEQ ID NO: 1564196
caaacuuaaucgcagggaa

SEQ ID NO: 1861794 - RNA, 19 nt, Artificial Sequence
  Description of Artificial Sequence: Synthetic oligonucleotide
  Antisense strand to SEQ ID NO: 1861793
uucccugcgauuaaguuug

SEQ ID NO: 1861795 - RNA, 19 nt, Artificial Sequence
  Description of Artificial Sequence: Synthetic oligonucleotide
  Sense strand starting at position 3890 of SEQ ID NO: 1564196
aacuuaaucgcagggaaua

SEQ ID NO: 1861796 - RNA, 19 nt, Artificial Sequence
  Description of Artificial Sequence: Synthetic oligonucleotide
  Antisense strand to SEQ ID NO: 1861795
uauucccugcgauuaaguu

SEQ ID NO: 1861797 - RNA, 19 nt, Artificial Sequence
  Description of Artificial Sequence: Synthetic oligonucleotide
  Sense strand starting at position 3891 of SEQ ID NO: 1564196
acuuaaucgcagggaauaa

SEQ ID NO: 1861798 - RNA, 19 nt, Artificial Sequence
  Description of Artificial Sequence: Synthetic oligonucleotide
  Antisense strand to SEQ ID NO: 1861797
uuauucccugcgauuaagu

SEQ ID NO: 1861799 - RNA, 19 nt, Artificial Sequence
  Description of Artificial Sequence: Synthetic oligonucleotide
  Sense strand starting at position 3916 of SEQ ID NO: 1564196
ucggaagacuauucuacaa

SEQ ID NO: 1861800 - RNA, 19 nt, Artificial Sequence
  Description of Artificial Sequence: Synthetic oligonucleotide
  Antisense strand to SEQ ID NO: 1861799
uuguagaauagucuuccga

SEQ ID NO: 1861801 - RNA, 19 nt, Artificial Sequence
  Description of Artificial Sequence: Synthetic oligonucleotide
  Sense strand starting at position 3918 of SEQ ID NO: 1564196
ggaagacuauucuacaauc

SEQ ID NO: 1861802 - RNA, 19 nt, Artificial Sequence
  Description of Artificial Sequence: Synthetic oligonucleotide
  Antisense strand to SEQ ID NO: 1861801
gauuguagaauagucuucc

SEQ ID NO: 1861803 - RNA, 19 nt, Artificial Sequence
  Description of Artificial Sequence: Synthetic oligonucleotide
  Sense strand starting at position 3975 of SEQ ID NO: 1564196
acuagauuaucagagcuuc

SEQ ID NO: 1861804 - RNA, 19 nt, Artificial Sequence
  Description of Artificial Sequence: Synthetic oligonucleotide
  Antisense strand to SEQ ID NO: 1861803
gaagcucugauaaucuagu

SEQ ID NO: 1861805 - RNA, 19 nt, Artificial Sequence
  Description of Artificial Sequence: Synthetic oligonucleotide
  Sense strand starting at position 1502 of SEQ ID NO: 1564197
acuagaaucugugcccaaa

SEQ ID NO: 1861806 - RNA, 19 nt, Artificial Sequence
  Description of Artificial Sequence: Synthetic oligonucleotide
  Antisense strand to SEQ ID NO: 1861805
uuugggcacagauucuagu

SEQ ID NO: 1861807 - RNA, 19 nt, Artificial Sequence
  Description of Artificial Sequence: Synthetic oligonucleotide
  Sense strand starting at position 1720 of SEQ ID NO: 1564197
uuucccuuccuggaaguuu

SEQ ID NO: 1861808 - RNA, 19 nt, Artificial Sequence
  Description of Artificial Sequence: Synthetic oligonucleotide
  Antisense strand to SEQ ID NO: 1861807
aaacuuccaggaagggaaa

SEQ ID NO: 1861809 - RNA, 19 nt, Artificial Sequence
  Description of Artificial Sequence: Synthetic oligonucleotide
  Sense strand starting at position 1897 of SEQ ID NO: 1564197
aguuacuuccgauguugaa

SEQ ID NO: 1861810 - RNA, 19 nt, Artificial Sequence
  Description of Artificial Sequence: Synthetic oligonucleotide
  Antisense strand to SEQ ID NO: 1861809
uucaacaucggaaguaacu

SEQ ID NO: 1861811 - RNA, 19 nt, Artificial Sequence
  Description of Artificial Sequence: Synthetic oligonucleotide
  Sense strand starting at position 1916 of SEQ ID NO: 1564197
acuguugguguugaaucau

SEQ ID NO: 1861812 - RNA, 19 nt, Artificial Sequence
  Description of Artificial Sequence: Synthetic oligonucleotide
  Antisense strand to SEQ ID NO: 1861811
augauucaacaccaacagu

SEQ ID NO: 1861813 - RNA, 19 nt, Artificial Sequence
  Description of Artificial Sequence: Synthetic oligonucleotide
  Sense strand starting at position 2015 of SEQ ID NO: 1564197
ucaugugaccuggaggguu

SEQ ID NO: 1861814 - RNA, 19 nt, Artificial Sequence
  Description of Artificial Sequence: Synthetic oligonucleotide
  Antisense strand to SEQ ID NO: 1861813
aacccuccaggucacauga

SEQ ID NO: 1861815 - RNA, 19 nt, Artificial Sequence
  Description of Artificial Sequence: Synthetic oligonucleotide
  Sense strand starting at position 2033 of SEQ ID NO: 1564197
uccagaaccuucguaaaug

SEQ ID NO: 1861816 - RNA, 19 nt, Artificial Sequence
  Description of Artificial Sequence: Synthetic oligonucleotide
  Antisense strand to SEQ ID NO: 1861815
cauuuacgaagguucugga

SEQ ID NO: 1861817 - RNA, 19 nt, Artificial Sequence
  Description of Artificial Sequence: Synthetic oligonucleotide
  Sense strand starting at position 2100 of SEQ ID NO: 1564197
gccggugccgguucaagau

SEQ ID NO: 1861818 - RNA, 19 nt, Artificial Sequence
  Description of Artificial Sequence: Synthetic oligonucleotide
  Antisense strand to SEQ ID NO: 1861817
aucuugaaccggcaccggc

SEQ ID NO: 1861819 - RNA, 19 nt, Artificial Sequence
  Description of Artificial Sequence: Synthetic oligonucleotide
  Sense strand starting at position 2156 of SEQ ID NO: 1564197
aacuuaaucgcagggaaua

SEQ ID NO: 1861820 - RNA, 19 nt, Artificial Sequence
  Description of Artificial Sequence: Synthetic oligonucleotide
  Antisense strand to SEQ ID NO: 1861819
uauucccugcgauuaaguu

SEQ ID NO: 1861821 - RNA, 19 nt, Artificial Sequence
  Description of Artificial Sequence: Synthetic oligonucleotide
  Sense strand starting at position 2157 of SEQ ID NO: 1564197
acuuaaucgcagggaauaa

SEQ ID NO: 1861822 - RNA, 19 nt, Artificial Sequence
  Description of Artificial Sequence: Synthetic oligonucleotide
  Antisense strand to SEQ ID NO: 1861821
uuauucccugcgauuaagu

SEQ ID NO: 1861823 - RNA, 19 nt, Artificial Sequence
  Description of Artificial Sequence: Synthetic oligonucleotide
  Sense strand starting at position 2182 of SEQ ID NO: 1564197
ucggaagacuauucuacaa

SEQ ID NO: 1861824 - RNA, 19 nt, Artificial Sequence
  Description of Artificial Sequence: Synthetic oligonucleotide
  Antisense strand to SEQ ID NO: 1861823
uuguagaauagucuuccga

SEQ ID NO: 1861825 - RNA, 19 nt, Artificial Sequence
  Description of Artificial Sequence: Synthetic oligonucleotide
  Sense strand starting at position 2398 of SEQ ID NO: 1564197
ucuugaaggcauuaauuau

SEQ ID NO: 1861826 - RNA, 19 nt, Artificial Sequence
  Description of Artificial Sequence: Synthetic oligonucleotide
  Antisense strand to SEQ ID NO: 1861825
auaauuaaugccuucaaga

SEQ ID NO: 1861827 - RNA, 19 nt, Artificial Sequence
  Description of Artificial Sequence: Synthetic oligonucleotide
  Sense strand starting at position 2468 of SEQ ID NO: 1564197
ugaaauagcugaguaauug

SEQ ID NO: 1861828 - RNA, 19 nt, Artificial Sequence
  Description of Artificial Sequence: Synthetic oligonucleotide
  Antisense strand to SEQ ID NO: 1861827
caauuacucagcuauuuca

SEQ ID NO: 1861829 - RNA, 19 nt, Artificial Sequence
  Description of Artificial Sequence: Synthetic oligonucleotide
  Sense strand starting at position 2469 of SEQ ID NO: 1564197
gaaauagcugaguaauugu

SEQ ID NO: 1861830 - RNA, 19 nt, Artificial Sequence
  Description of Artificial Sequence: Synthetic oligonucleotide
  Antisense strand to SEQ ID NO: 1861829
acaauuacucagcuauuuc

SEQ ID NO: 1861831 - RNA, 19 nt, Artificial Sequence
  Description of Artificial Sequence: Synthetic oligonucleotide
  Sense strand starting at position 2494 of SEQ ID NO: 1564197
uuguaaggacagugugaau

SEQ ID NO: 1861832 - RNA, 19 nt, Artificial Sequence
  Description of Artificial Sequence: Synthetic oligonucleotide
  Antisense strand to SEQ ID NO: 1861831
auucacacuguccuuacaa

SEQ ID NO: 1861833 - RNA, 19 nt, Artificial Sequence
  Description of Artificial Sequence: Synthetic oligonucleotide
  Sense strand starting at position 2615 of SEQ ID NO: 1564197
guaacuauguucucuccca

SEQ ID NO: 1861834 - RNA, 19 nt, Artificial Sequence
  Description of Artificial Sequence: Synthetic oligonucleotide
  Antisense strand to SEQ ID NO: 1861833
ugggagagaacauaguuac

SEQ ID NO: 1861835 - RNA, 19 nt, Artificial Sequence
  Description of Artificial Sequence: Synthetic oligonucleotide
  Sense strand starting at position 2651 of SEQ ID NO: 1564197
ugucucaugcaguaaauaa

SEQ ID NO: 1861836 - RNA, 19 nt, Artificial Sequence
  Description of Artificial Sequence: Synthetic oligonucleotide
  Antisense strand to SEQ ID NO: 1861835
uuauuuacugcaugagaca

SEQ ID NO: 1861837 - RNA, 19 nt, Artificial Sequence
  Description of Artificial Sequence: Synthetic oligonucleotide
  Sense strand starting at position 2711 of SEQ ID NO: 1564197
uauacauguuagguaaaug

SEQ ID NO: 1861838 - RNA, 19 nt, Artificial Sequence
  Description of Artificial Sequence: Synthetic oligonucleotide
  Antisense strand to SEQ ID NO: 1861837
cauuuaccuaacauguaua

SEQ ID NO: 1861839 - RNA, 19 nt, Artificial Sequence
  Description of Artificial Sequence: Synthetic oligonucleotide
  Sense strand starting at position 2834 of SEQ ID NO: 1564197
ugaccaacacggugagaau

SEQ ID NO: 1861840 - RNA, 19 nt, Artificial Sequence
  Description of Artificial Sequence: Synthetic oligonucleotide
  Antisense strand to SEQ ID NO: 1861839
auucucaccguguugguca

SEQ ID NO: 1861841 - RNA, 19 nt, Artificial Sequence
  Description of Artificial Sequence: Synthetic oligonucleotide
  Sense strand starting at position 3179 of SEQ ID NO: 1564197
gggagcaucucugugggua

SEQ ID NO: 1861842 - RNA, 19 nt, Artificial Sequence
  Description of Artificial Sequence: Synthetic oligonucleotide
  Antisense strand to SEQ ID NO: 1861841
uacccacagagaugcuccc

SEQ ID NO: 1861843 - RNA, 19 nt, Artificial Sequence
  Description of Artificial Sequence: Synthetic oligonucleotide
  Sense strand starting at position 3262 of SEQ ID NO: 1564197
uuuagugugccagaucgga

SEQ ID NO: 1861844 - RNA, 19 nt, Artificial Sequence
  Description of Artificial Sequence: Synthetic oligonucleotide
  Antisense strand to SEQ ID NO: 1861843
uccgaucuggcacacuaaa

SEQ ID NO: 1861845 - RNA, 19 nt, Artificial Sequence
  Description of Artificial Sequence: Synthetic oligonucleotide
  Sense strand starting at position 3272 of SEQ ID NO: 1564197
cagaucggauuugaaacau

SEQ ID NO: 1861846 - RNA, 19 nt, Artificial Sequence
  Description of Artificial Sequence: Synthetic oligonucleotide
  Antisense strand to SEQ ID NO: 1861845
auguuucaaauccgaucug

SEQ ID NO: 1861847 - RNA, 19 nt, Artificial Sequence
  Description of Artificial Sequence: Synthetic oligonucleotide
  Sense strand starting at position 3364 of SEQ ID NO: 1564197
cuaguuagagcauacacau

SEQ ID NO: 1861848 - RNA, 19 nt, Artificial Sequence
  Description of Artificial Sequence: Synthetic oligonucleotide
  Antisense strand to SEQ ID NO: 1861847
auguguaugcucuaacuag

SEQ ID NO: 1861849 - RNA, 19 nt, Artificial Sequence
  Description of Artificial Sequence: Synthetic oligonucleotide
  Sense strand starting at position 3454 of SEQ ID NO: 1564197
aggaaaggauaugaauuau

SEQ ID NO: 1861850 - RNA, 19 nt, Artificial Sequence
  Description of Artificial Sequence: Synthetic oligonucleotide
  Antisense strand to SEQ ID NO: 1861849
auaauucauauccuuuccu

SEQ ID NO: 1861851 - RNA, 19 nt, Artificial Sequence
  Description of Artificial Sequence: Synthetic oligonucleotide
  Sense strand starting at position 3466 of SEQ ID NO: 1564197
gaauuaugguuucucuuug

SEQ ID NO: 1861852 - RNA, 19 nt, Artificial Sequence
  Description of Artificial Sequence: Synthetic oligonucleotide
  Antisense strand to SEQ ID NO: 1861851
caaagagaaaccauaauuc

SEQ ID NO: 1861853 - RNA, 19 nt, Artificial Sequence
  Description of Artificial Sequence: Synthetic oligonucleotide
  Sense strand starting at position 3470 of SEQ ID NO: 1564197
uaugguuucucuuugguag

SEQ ID NO: 1861854 - RNA, 19 nt, Artificial Sequence
  Description of Artificial Sequence: Synthetic oligonucleotide
  Antisense strand to SEQ ID NO: 1861853
cuaccaaagagaaaccaua

SEQ ID NO: 1861855 - RNA, 19 nt, Artificial Sequence
  Description of Artificial Sequence: Synthetic oligonucleotide
  Sense strand starting at position 3471 of SEQ ID NO: 1564197
augguuucucuuugguaga

SEQ ID NO: 1861856 - RNA, 19 nt, Artificial Sequence
  Description of Artificial Sequence: Synthetic oligonucleotide
  Antisense strand to SEQ ID NO: 1861855
ucuaccaaagagaaaccau

SEQ ID NO: 1861857 - RNA, 19 nt, Artificial Sequence
  Description of Artificial Sequence: Synthetic oligonucleotide
  Sense strand starting at position 3549 of SEQ ID NO: 1564197
acuaucauauuaucaggua

SEQ ID NO: 1861858 - RNA, 19 nt, Artificial Sequence
  Description of Artificial Sequence: Synthetic oligonucleotide
  Antisense strand to SEQ ID NO: 1861857
uaccugauaauaugauagu

SEQ ID NO: 1861859 - RNA, 19 nt, Artificial Sequence
  Description of Artificial Sequence: Synthetic oligonucleotide
  Sense strand starting at position 3576 of SEQ ID NO: 1564197
guguguuuccggguucuag

SEQ ID NO: 1861860 - RNA, 19 nt, Artificial Sequence
  Description of Artificial Sequence: Synthetic oligonucleotide
  Antisense strand to SEQ ID NO: 1861859
cuagaacccggaaacacac

SEQ ID NO: 1861861 - RNA, 19 nt, Artificial Sequence
  Description of Artificial Sequence: Synthetic oligonucleotide
  Sense strand starting at position 3577 of SEQ ID NO: 1564197
uguguuuccggguucuagu

SEQ ID NO: 1861862 - RNA, 19 nt, Artificial Sequence
  Description of Artificial Sequence: Synthetic oligonucleotide
  Antisense strand to SEQ ID NO: 1861861
acuagaacccggaaacaca

SEQ ID NO: 1861863 - RNA, 19 nt, Artificial Sequence
  Description of Artificial Sequence: Synthetic oligonucleotide
  Sense strand starting at position 3594 of SEQ ID NO: 1564197
gucugucaugcugcaguuu

SEQ ID NO: 1861864 - RNA, 19 nt, Artificial Sequence
  Description of Artificial Sequence: Synthetic oligonucleotide
  Antisense strand to SEQ ID NO: 1861863
aaacugcagcaugacagac

SEQ ID NO: 1861865 - RNA, 19 nt, Artificial Sequence
  Description of Artificial Sequence: Synthetic oligonucleotide
  Sense strand starting at position 3732 of SEQ ID NO: 1564197
uuauuagguaucgggaauu

SEQ ID NO: 1861866 - RNA, 19 nt, Artificial Sequence
  Description of Artificial Sequence: Synthetic oligonucleotide
  Antisense strand to SEQ ID NO: 1861865
aauucccgauaccuaauaa

SEQ ID NO: 1861867 - RNA, 19 nt, Artificial Sequence
  Description of Artificial Sequence: Synthetic oligonucleotide
  Sense strand starting at position 3738 of SEQ ID NO: 1564197
gguaucgggaauuguccua

SEQ ID NO: 1861868 - RNA, 19 nt, Artificial Sequence
  Description of Artificial Sequence: Synthetic oligonucleotide
  Antisense strand to SEQ ID NO: 1861867
uaggacaauucccgauacc

SEQ ID NO: 1861869 - RNA, 19 nt, Artificial Sequence
  Description of Artificial Sequence: Synthetic oligonucleotide
  Sense strand starting at position 3749 of SEQ ID NO: 1564197
uuguccuaaggucauuaau

SEQ ID NO: 1861870 - RNA, 19 nt, Artificial Sequence
  Description of Artificial Sequence: Synthetic oligonucleotide
  Antisense strand to SEQ ID NO: 1861869
auuaaugaccuuaggacaa

SEQ ID NO: 1861871 - RNA, 19 nt, Artificial Sequence
  Description of Artificial Sequence: Synthetic oligonucleotide
  Sense strand starting at position 3751 of SEQ ID NO: 1564197
guccuaaggucauuaauag

SEQ ID NO: 1861872 - RNA, 19 nt, Artificial Sequence
  Description of Artificial Sequence: Synthetic oligonucleotide
  Antisense strand to SEQ ID NO: 1861871
cuauuaaugaccuuaggac

SEQ ID NO: 1861873 - RNA, 19 nt, Artificial Sequence
  Description of Artificial Sequence: Synthetic oligonucleotide
  Sense strand starting at position 3758 of SEQ ID NO: 1564197
ggucauuaauagcuaacau

SEQ ID NO: 1861874 - RNA, 19 nt, Artificial Sequence
  Description of Artificial Sequence: Synthetic oligonucleotide
  Antisense strand to SEQ ID NO: 1861873
auguuagcuauuaaugacc

SEQ ID NO: 1861875 - RNA, 19 nt, Artificial Sequence
  Description of Artificial Sequence: Synthetic oligonucleotide
  Sense strand starting at position 3786 of SEQ ID NO: 1564197
guuuaugugcuagacucuu

SEQ ID NO: 1861876 - RNA, 19 nt, Artificial Sequence
  Description of Artificial Sequence: Synthetic oligonucleotide
  Antisense strand to SEQ ID NO: 1861875
aagagucuagcacauaaac

SEQ ID NO: 1861877 - RNA, 19 nt, Artificial Sequence
  Description of Artificial Sequence: Synthetic oligonucleotide
  Sense strand starting at position 3839 of SEQ ID NO: 1564197
acaauugcccucugaguuu

SEQ ID NO: 1861878 - RNA, 19 nt, Artificial Sequence
  Description of Artificial Sequence: Synthetic oligonucleotide
  Antisense strand to SEQ ID NO: 1861877
aaacucagagggcaauugu

SEQ ID NO: 1861879 - RNA, 19 nt, Artificial Sequence
  Description of Artificial Sequence: Synthetic oligonucleotide
  Sense strand starting at position 3850 of SEQ ID NO: 1564197
cugaguuugguaugauuau

SEQ ID NO: 1861880 - RNA, 19 nt, Artificial Sequence
  Description of Artificial Sequence: Synthetic oligonucleotide
  Antisense strand to SEQ ID NO: 1861879
auaaucauaccaaacucag

SEQ ID NO: 1861881 - RNA, 19 nt, Artificial Sequence
  Description of Artificial Sequence: Synthetic oligonucleotide
  Sense strand starting at position 3859 of SEQ ID NO: 1564197
guaugauuaugauucuguu

SEQ ID NO: 1861882 - RNA, 19 nt, Artificial Sequence
  Description of Artificial Sequence: Synthetic oligonucleotide
  Antisense strand to SEQ ID NO: 1861881
aacagaaucauaaucauac

SEQ ID NO: 1861883 - RNA, 19 nt, Artificial Sequence
  Description of Artificial Sequence: Synthetic oligonucleotide
  Sense strand starting at position 3979 of SEQ ID NO: 1564197
aauguaagaccucgcacua

SEQ ID NO: 1861884 - RNA, 19 nt, Artificial Sequence
  Description of Artificial Sequence: Synthetic oligonucleotide
  Antisense strand to SEQ ID NO: 1861883
uagugcgaggucuuacauu

SEQ ID NO: 1861885 - RNA, 19 nt, Artificial Sequence
  Description of Artificial Sequence: Synthetic oligonucleotide
  Sense strand starting at position 144 of SEQ ID NO: 1564198
auggcuuaaucaguggcaa

SEQ ID NO: 1861886 - RNA, 19 nt, Artificial Sequence
  Description of Artificial Sequence: Synthetic oligonucleotide
  Antisense strand to SEQ ID NO: 1861885
uugccacugauuaagccau

SEQ ID NO: 1861887 - RNA, 19 nt, Artificial Sequence
  Description of Artificial Sequence: Synthetic oligonucleotide
  Sense strand starting at position 145 of SEQ ID NO: 1564198
uggcuuaaucaguggcaaa

SEQ ID NO: 1861888 - RNA, 19 nt, Artificial Sequence
  Description of Artificial Sequence: Synthetic oligonucleotide
  Antisense strand to SEQ ID NO: 1861887
uuugccacugauuaagcca

SEQ ID NO: 1861889 - RNA, 19 nt, Artificial Sequence
  Description of Artificial Sequence: Synthetic oligonucleotide
  Sense strand starting at position 146 of SEQ ID NO: 1564198
ggcuuaaucaguggcaaag

SEQ ID NO: 1861890 - RNA, 19 nt, Artificial Sequence
  Description of Artificial Sequence: Synthetic oligonucleotide
  Antisense strand to SEQ ID NO: 1861889
cuuugccacugauuaagcc

SEQ ID NO: 1861891 - RNA, 19 nt, Artificial Sequence
  Description of Artificial Sequence: Synthetic oligonucleotide
  Sense strand starting at position 303 of SEQ ID NO: 1564198
aagauuggucagcacgaca

SEQ ID NO: 1861892 - RNA, 19 nt, Artificial Sequence
  Description of Artificial Sequence: Synthetic oligonucleotide
  Antisense strand to SEQ ID NO: 1861891
ugucgugcugaccaaucuu

SEQ ID NO: 1861893 - RNA, 19 nt, Artificial Sequence
  Description of Artificial Sequence: Synthetic oligonucleotide
  Sense strand starting at position 353 of SEQ ID NO: 1564198
acauuagguuucuuagcau

SEQ ID NO: 1861894 - RNA, 19 nt, Artificial Sequence
  Description of Artificial Sequence: Synthetic oligonucleotide
  Antisense strand to SEQ ID NO: 1861893
augcuaagaaaccuaaugu

SEQ ID NO: 1861895 - RNA, 19 nt, Artificial Sequence
  Description of Artificial Sequence: Synthetic oligonucleotide
  Sense strand starting at position 365 of SEQ ID NO: 1564198
uuagcauggcucgaauaaa

SEQ ID NO: 1861896 - RNA, 19 nt, Artificial Sequence
  Description of Artificial Sequence: Synthetic oligonucleotide
  Antisense strand to SEQ ID NO: 1861895
uuuauucgagccaugcuaa

SEQ ID NO: 1861897 - RNA, 19 nt, Artificial Sequence
  Description of Artificial Sequence: Synthetic oligonucleotide
  Sense strand starting at position 387 of SEQ ID NO: 1564198
uugcaucauccagaauugu

SEQ ID NO: 1861898 - RNA, 19 nt, Artificial Sequence
  Description of Artificial Sequence: Synthetic oligonucleotide
  Antisense strand to SEQ ID NO: 1861897
acaauucuggaugaugcaa

SEQ ID NO: 1861899 - RNA, 19 nt, Artificial Sequence
  Description of Artificial Sequence: Synthetic oligonucleotide
  Sense strand starting at position 396 of SEQ ID NO: 1564198
ccagaauuguagucacaua

SEQ ID NO: 1861900 - RNA, 19 nt, Artificial Sequence
  Description of Artificial Sequence: Synthetic oligonucleotide
  Antisense strand to SEQ ID NO: 1861899
uaugugacuacaauucugg

SEQ ID NO: 1861901 - RNA, 19 nt, Artificial Sequence
  Description of Artificial Sequence: Synthetic oligonucleotide
  Sense strand starting at position 404 of SEQ ID NO: 1564198
guagucacauaaccuauaa

SEQ ID NO: 1861902 - RNA, 19 nt, Artificial Sequence
  Description of Artificial Sequence: Synthetic oligonucleotide
  Antisense strand to SEQ ID NO: 1861901
uuauagguuaugugacuac

SEQ ID NO: 1861903 - RNA, 19 nt, Artificial Sequence
  Description of Artificial Sequence: Synthetic oligonucleotide
  Sense strand starting at position 469 of SEQ ID NO: 1564198
auggcuacuugucuuaaua

SEQ ID NO: 1861904 - RNA, 19 nt, Artificial Sequence
  Description of Artificial Sequence: Synthetic oligonucleotide
  Antisense strand to SEQ ID NO: 1861903
uauuaagacaaguagccau

SEQ ID NO: 1861905 - RNA, 19 nt, Artificial Sequence
  Description of Artificial Sequence: Synthetic oligonucleotide
  Sense strand starting at position 550 of SEQ ID NO: 1564198
cgcuauguugcccaggaaa

SEQ ID NO: 1861906 - RNA, 19 nt, Artificial Sequence
  Description of Artificial Sequence: Synthetic oligonucleotide
  Antisense strand to SEQ ID NO: 1861905
uuuccugggcaacauagcg

SEQ ID NO: 1861907 - RNA, 19 nt, Artificial Sequence
  Description of Artificial Sequence: Synthetic oligonucleotide
  Sense strand starting at position 552 of SEQ ID NO: 1564198
cuauguugcccaggaaacu

SEQ ID NO: 1861908 - RNA, 19 nt, Artificial Sequence
  Description of Artificial Sequence: Synthetic oligonucleotide
  Antisense strand to SEQ ID NO: 1861907
aguuuccugggcaacauag

SEQ ID NO: 1861909 - RNA, 19 nt, Artificial Sequence
  Description of Artificial Sequence: Synthetic oligonucleotide
  Sense strand starting at position 651 of SEQ ID NO: 1564198
auaaguaauuguccugucu

SEQ ID NO: 1861910 - RNA, 19 nt, Artificial Sequence
  Description of Artificial Sequence: Synthetic oligonucleotide
  Antisense strand to SEQ ID NO: 1861909
agacaggacaauuacuuau

SEQ ID NO: 1861911 - RNA, 19 nt, Artificial Sequence
  Description of Artificial Sequence: Synthetic oligonucleotide
  Sense strand starting at position 664 of SEQ ID NO: 1564198
cugucuauaugaucaguuu

SEQ ID NO: 1861912 - RNA, 19 nt, Artificial Sequence
  Description of Artificial Sequence: Synthetic oligonucleotide
  Antisense strand to SEQ ID NO: 1861911
aaacugaucauauagacag

SEQ ID NO: 1861913 - RNA, 19 nt, Artificial Sequence
  Description of Artificial Sequence: Synthetic oligonucleotide
  Sense strand starting at position 687 of SEQ ID NO: 1564198
cagauaucacagugugaau

SEQ ID NO: 1861914 - RNA, 19 nt, Artificial Sequence
  Description of Artificial Sequence: Synthetic oligonucleotide
  Antisense strand to SEQ ID NO: 1861913
auucacacugugauaucug

SEQ ID NO: 1861915 - RNA, 19 nt, Artificial Sequence
  Description of Artificial Sequence: Synthetic oligonucleotide
  Sense strand starting at position 735 of SEQ ID NO: 1564198
guucuuuaggcugaauucu

SEQ ID NO: 1861916 - RNA, 19 nt, Artificial Sequence
  Description of Artificial Sequence: Synthetic oligonucleotide
  Antisense strand to SEQ ID NO: 1861915
agaauucagccuaaagaac

SEQ ID NO: 1861917 - RNA, 19 nt, Artificial Sequence
  Description of Artificial Sequence: Synthetic oligonucleotide
  Sense strand starting at position 743 of SEQ ID NO: 1564198
ggcugaauucuaugauacu

SEQ ID NO: 1861918 - RNA, 19 nt, Artificial Sequence
  Description of Artificial Sequence: Synthetic oligonucleotide
  Antisense strand to SEQ ID NO: 1861917
aguaucauagaauucagcc

SEQ ID NO: 1861919 - RNA, 19 nt, Artificial Sequence
  Description of Artificial Sequence: Synthetic oligonucleotide
  Sense strand starting at position 851 of SEQ ID NO: 1564198
gggaucacuugagucagua

SEQ ID NO: 1861920 - RNA, 19 nt, Artificial Sequence
  Description of Artificial Sequence: Synthetic oligonucleotide
  Antisense strand to SEQ ID NO: 1861919
uacugacucaagugauccc

SEQ ID NO: 1861921 - RNA, 19 nt, Artificial Sequence
  Description of Artificial Sequence: Synthetic oligonucleotide
  Sense strand starting at position 1206 of SEQ ID NO: 1564198
cugugauucccauauccuu

SEQ ID NO: 1861922 - RNA, 19 nt, Artificial Sequence
  Description of Artificial Sequence: Synthetic oligonucleotide
  Antisense strand to SEQ ID NO: 1861921
aaggauaugggaaucacag

SEQ ID NO: 1861923 - RNA, 19 nt, Artificial Sequence
  Description of Artificial Sequence: Synthetic oligonucleotide
  Sense strand starting at position 1269 of SEQ ID NO: 1564198
ugcagaauuugguacugga

SEQ ID NO: 1861924 - RNA, 19 nt, Artificial Sequence
  Description of Artificial Sequence: Synthetic oligonucleotide
  Antisense strand to SEQ ID NO: 1861923
uccaguaccaaauucugca

SEQ ID NO: 1861925 - RNA, 19 nt, Artificial Sequence
  Description of Artificial Sequence: Synthetic oligonucleotide
  Sense strand starting at position 1272 of SEQ ID NO: 1564198
agaauuugguacuggaaau

SEQ ID NO: 1861926 - RNA, 19 nt, Artificial Sequence
  Description of Artificial Sequence: Synthetic oligonucleotide
  Antisense strand to SEQ ID NO: 1861925
auuuccaguaccaaauucu

SEQ ID NO: 1861927 - RNA, 19 nt, Artificial Sequence
  Description of Artificial Sequence: Synthetic oligonucleotide
  Sense strand starting at position 1300 of SEQ ID NO: 1564198
acugaaggguaguauuuau

SEQ ID NO: 1861928 - RNA, 19 nt, Artificial Sequence
  Description of Artificial Sequence: Synthetic oligonucleotide
  Antisense strand to SEQ ID NO: 1861927
auaaauacuacccuucagu

SEQ ID NO: 1861929 - RNA, 19 nt, Artificial Sequence
  Description of Artificial Sequence: Synthetic oligonucleotide
  Sense strand starting at position 1375 of SEQ ID NO: 1564198
ucccaagugagucagugau

SEQ ID NO: 1861930 - RNA, 19 nt, Artificial Sequence
  Description of Artificial Sequence: Synthetic oligonucleotide
  Antisense strand to SEQ ID NO: 1861929
aucacugacucacuuggga

SEQ ID NO: 1861931 - RNA, 19 nt, Artificial Sequence
  Description of Artificial Sequence: Synthetic oligonucleotide
  Sense strand starting at position 1377 of SEQ ID NO: 1564198
ccaagugagucagugauca

SEQ ID NO: 1861932 - RNA, 19 nt, Artificial Sequence
  Description of Artificial Sequence: Synthetic oligonucleotide
  Antisense strand to SEQ ID NO: 1861931
ugaucacugacucacuugg

SEQ ID NO: 1861933 - RNA, 19 nt, Artificial Sequence
  Description of Artificial Sequence: Synthetic oligonucleotide
  Sense strand starting at position 1857 of SEQ ID NO: 1564198
gcggcuuauccuucgcacu

SEQ ID NO: 1861934 - RNA, 19 nt, Artificial Sequence
  Description of Artificial Sequence: Synthetic oligonucleotide
  Antisense strand to SEQ ID NO: 1861933
agugcgaaggauaagccgc

SEQ ID NO: 1861935 - RNA, 19 nt, Artificial Sequence
  Description of Artificial Sequence: Synthetic oligonucleotide
  Sense strand starting at position 2109 of SEQ ID NO: 1564198
gcccgaguucaguauugga

SEQ ID NO: 1861936 - RNA, 19 nt, Artificial Sequence
  Description of Artificial Sequence: Synthetic oligonucleotide
  Antisense strand to SEQ ID NO: 1861935
uccaauacugaacucgggc

SEQ ID NO: 1861937 - RNA, 19 nt, Artificial Sequence
  Description of Artificial Sequence: Synthetic oligonucleotide
  Sense strand starting at position 2332 of SEQ ID NO: 1564198
ggcugcuugguccaacaca

SEQ ID NO: 1861938 - RNA, 19 nt, Artificial Sequence
  Description of Artificial Sequence: Synthetic oligonucleotide
  Antisense strand to SEQ ID NO: 1861937
uguguuggaccaagcagcc

SEQ ID NO: 1861939 - RNA, 19 nt, Artificial Sequence
  Description of Artificial Sequence: Synthetic oligonucleotide
  Sense strand starting at position 2400 of SEQ ID NO: 1564198
guauaaguauaucccagau

SEQ ID NO: 1861940 - RNA, 19 nt, Artificial Sequence
  Description of Artificial Sequence: Synthetic oligonucleotide
  Antisense strand to SEQ ID NO: 1861939
aucugggauauacuuauac

SEQ ID NO: 1861941 - RNA, 19 nt, Artificial Sequence
  Description of Artificial Sequence: Synthetic oligonucleotide
  Sense strand starting at position 2430 of SEQ ID NO: 1564198
auacuuaugcuacgaaaua

SEQ ID NO: 1861942 - RNA, 19 nt, Artificial Sequence
  Description of Artificial Sequence: Synthetic oligonucleotide
  Antisense strand to SEQ ID NO: 1861941
uauuucguagcauaaguau

SEQ ID NO: 1861943 - RNA, 19 nt, Artificial Sequence
  Description of Artificial Sequence: Synthetic oligonucleotide
  Sense strand starting at position 2441 of SEQ ID NO: 1564198
acgaaauaauuguucugau

SEQ ID NO: 1861944 - RNA, 19 nt, Artificial Sequence
  Description of Artificial Sequence: Synthetic oligonucleotide
  Antisense strand to SEQ ID NO: 1861943
aucagaacaauuauuucgu

SEQ ID NO: 1861945 - RNA, 19 nt, Artificial Sequence
  Description of Artificial Sequence: Synthetic oligonucleotide
  Sense strand starting at position 2442 of SEQ ID NO: 1564198
cgaaauaauuguucugaua

SEQ ID NO: 1861946 - RNA, 19 nt, Artificial Sequence
  Description of Artificial Sequence: Synthetic oligonucleotide
  Antisense strand to SEQ ID NO: 1861945
uaucagaacaauuauuucg

SEQ ID NO: 1861947 - RNA, 19 nt, Artificial Sequence
  Description of Artificial Sequence: Synthetic oligonucleotide
  Sense strand starting at position 2810 of SEQ ID NO: 1564198
aguuaacuaucucuggcuu

SEQ ID NO: 1861948 - RNA, 19 nt, Artificial Sequence
  Description of Artificial Sequence: Synthetic oligonucleotide
  Antisense strand to SEQ ID NO: 1861947
aagccagagauaguuaacu

SEQ ID NO: 1861949 - RNA, 19 nt, Artificial Sequence
  Description of Artificial Sequence: Synthetic oligonucleotide
  Sense strand starting at position 2811 of SEQ ID NO: 1564198
guuaacuaucucuggcuua

SEQ ID NO: 1861950 - RNA, 19 nt, Artificial Sequence
  Description of Artificial Sequence: Synthetic oligonucleotide
  Antisense strand to SEQ ID NO: 1861949
uaagccagagauaguuaac

SEQ ID NO: 1861951 - RNA, 19 nt, Artificial Sequence
  Description of Artificial Sequence: Synthetic oligonucleotide
  Sense strand starting at position 2876 of SEQ ID NO: 1564198
cuaggauucucccucagga

SEQ ID NO: 1861952 - RNA, 19 nt, Artificial Sequence
  Description of Artificial Sequence: Synthetic oligonucleotide
  Antisense strand to SEQ ID NO: 1861951
uccugagggagaauccuag

SEQ ID NO: 1861953 - RNA, 19 nt, Artificial Sequence
  Description of Artificial Sequence: Synthetic oligonucleotide
  Sense strand starting at position 3340 of SEQ ID NO: 1564198
agaaccauguguucucaau

SEQ ID NO: 1861954 - RNA, 19 nt, Artificial Sequence
  Description of Artificial Sequence: Synthetic oligonucleotide
  Antisense strand to SEQ ID NO: 1861953
auugagaacacaugguucu

SEQ ID NO: 1861955 - RNA, 19 nt, Artificial Sequence
  Description of Artificial Sequence: Synthetic oligonucleotide
  Sense strand starting at position 3346 of SEQ ID NO: 1564198
auguguucucaauacauug

SEQ ID NO: 1861956 - RNA, 19 nt, Artificial Sequence
  Description of Artificial Sequence: Synthetic oligonucleotide
  Antisense strand to SEQ ID NO: 1861955
caauguauugagaacacau

SEQ ID NO: 1861957 - RNA, 19 nt, Artificial Sequence
  Description of Artificial Sequence: Synthetic oligonucleotide
  Sense strand starting at position 3361 of SEQ ID NO: 1564198
auuguuuccagugagagca

SEQ ID NO: 1861958 - RNA, 19 nt, Artificial Sequence
  Description of Artificial Sequence: Synthetic oligonucleotide
  Antisense strand to SEQ ID NO: 1861957
ugcucucacuggaaacaau

SEQ ID NO: 1861959 - RNA, 19 nt, Artificial Sequence
  Description of Artificial Sequence: Synthetic oligonucleotide
  Sense strand starting at position 3422 of SEQ ID NO: 1564198
uggccaaccucuguguaaa

SEQ ID NO: 1861960 - RNA, 19 nt, Artificial Sequence
  Description of Artificial Sequence: Synthetic oligonucleotide
  Antisense strand to SEQ ID NO: 1861959
uuuacacagagguuggcca

SEQ ID NO: 1861961 - RNA, 19 nt, Artificial Sequence
  Description of Artificial Sequence: Synthetic oligonucleotide
  Sense strand starting at position 3461 of SEQ ID NO: 1564198
uuugaauauuugcaaggua

SEQ ID NO: 1861962 - RNA, 19 nt, Artificial Sequence
  Description of Artificial Sequence: Synthetic oligonucleotide
  Antisense strand to SEQ ID NO: 1861961
uaccuugcaaauauucaaa

SEQ ID NO: 1861963 - RNA, 19 nt, Artificial Sequence
  Description of Artificial Sequence: Synthetic oligonucleotide
  Sense strand starting at position 3808 of SEQ ID NO: 1564198
cgugguauauuugcaaggu

SEQ ID NO: 1861964 - RNA, 19 nt, Artificial Sequence
  Description of Artificial Sequence: Synthetic oligonucleotide
  Antisense strand to SEQ ID NO: 1861963
accuugcaaauauaccacg

SEQ ID NO: 1861965 - RNA, 19 nt, Artificial Sequence
  Description of Artificial Sequence: Synthetic oligonucleotide
  Sense strand starting at position 466 of SEQ ID NO: 1564199
acccuuaggccagaucauu

SEQ ID NO: 1861966 - RNA, 19 nt, Artificial Sequence
  Description of Artificial Sequence: Synthetic oligonucleotide
  Antisense strand to SEQ ID NO: 1861965
aaugaucuggccuaagggu

SEQ ID NO: 1861967 - RNA, 19 nt, Artificial Sequence
  Description of Artificial Sequence: Synthetic oligonucleotide
  Sense strand starting at position 754 of SEQ ID NO: 1564199
ccaugaacucuaggacagu

SEQ ID NO: 1861968 - RNA, 19 nt, Artificial Sequence
  Description of Artificial Sequence: Synthetic oligonucleotide
  Antisense strand to SEQ ID NO: 1861967
acuguccuagaguucaugg

SEQ ID NO: 1861969 - RNA, 19 nt, Artificial Sequence
  Description of Artificial Sequence: Synthetic oligonucleotide
  Sense strand starting at position 755 of SEQ ID NO: 1564199
caugaacucuaggacaguu

SEQ ID NO: 1861970 - RNA, 19 nt, Artificial Sequence
  Description of Artificial Sequence: Synthetic oligonucleotide
  Antisense strand to SEQ ID NO: 1861969
aacuguccuagaguucaug

SEQ ID NO: 1861971 - RNA, 19 nt, Artificial Sequence
  Description of Artificial Sequence: Synthetic oligonucleotide
  Sense strand starting at position 817 of SEQ ID NO: 1564199
cggccaucugguuaccaga

SEQ ID NO: 1861972 - RNA, 19 nt, Artificial Sequence
  Description of Artificial Sequence: Synthetic oligonucleotide
  Antisense strand to SEQ ID NO: 1861971
ucugguaaccagauggccg

SEQ ID NO: 1861973 - RNA, 19 nt, Artificial Sequence
  Description of Artificial Sequence: Synthetic oligonucleotide
  Sense strand starting at position 840 of SEQ ID NO: 1564199
agcaacuuccugugaaguc

SEQ ID NO: 1861974 - RNA, 19 nt, Artificial Sequence
  Description of Artificial Sequence: Synthetic oligonucleotide
  Antisense strand to SEQ ID NO: 1861973
gacuucacaggaaguugcu

SEQ ID NO: 1861975 - RNA, 19 nt, Artificial Sequence
  Description of Artificial Sequence: Synthetic oligonucleotide
  Sense strand starting at position 841 of SEQ ID NO: 1564199
gcaacuuccugugaaguca

SEQ ID NO: 1861976 - RNA, 19 nt, Artificial Sequence
  Description of Artificial Sequence: Synthetic oligonucleotide
  Antisense strand to SEQ ID NO: 1861975
ugacuucacaggaaguugc

SEQ ID NO: 1861977 - RNA, 19 nt, Artificial Sequence
  Description of Artificial Sequence: Synthetic oligonucleotide
  Sense strand starting at position 973 of SEQ ID NO: 1564199
agaacuuccucacaggaua

SEQ ID NO: 1861978 - RNA, 19 nt, Artificial Sequence
  Description of Artificial Sequence: Synthetic oligonucleotide
  Antisense strand to SEQ ID NO: 1861977
uauccugugaggaaguucu

SEQ ID NO: 1861979 - RNA, 19 nt, Artificial Sequence
  Description of Artificial Sequence: Synthetic oligonucleotide
  Sense strand starting at position 986 of SEQ ID NO: 1564199
aggauauccuauguccaac

SEQ ID NO: 1861980 - RNA, 19 nt, Artificial Sequence
  Description of Artificial Sequence: Synthetic oligonucleotide
  Antisense strand to SEQ ID NO: 1861979
guuggacauaggauauccu

SEQ ID NO: 1861981 - RNA, 19 nt, Artificial Sequence
  Description of Artificial Sequence: Synthetic oligonucleotide
  Sense strand starting at position 1034 of SEQ ID NO: 1564199
cuggaugguuuagagaaca

SEQ ID NO: 1861982 - RNA, 19 nt, Artificial Sequence
  Description of Artificial Sequence: Synthetic oligonucleotide
  Antisense strand to SEQ ID NO: 1861981
uguucucuaaaccauccag

SEQ ID NO: 1861983 - RNA, 19 nt, Artificial Sequence
  Description of Artificial Sequence: Synthetic oligonucleotide
  Sense strand starting at position 1072 of SEQ ID NO: 1564199
cguuaaaggagcuguaaga

SEQ ID NO: 1861984 - RNA, 19 nt, Artificial Sequence
  Description of Artificial Sequence: Synthetic oligonucleotide
  Antisense strand to SEQ ID NO: 1861983
ucuuacagcuccuuuaacg

SEQ ID NO: 1861985 - RNA, 19 nt, Artificial Sequence
  Description of Artificial Sequence: Synthetic oligonucleotide
  Sense strand starting at position 1219 of SEQ ID NO: 1564199
gugccagggcuccaugaaa

SEQ ID NO: 1861986 - RNA, 19 nt, Artificial Sequence
  Description of Artificial Sequence: Synthetic oligonucleotide
  Antisense strand to SEQ ID NO: 1861985
uuucauggagcccuggcac

SEQ ID NO: 1861987 - RNA, 19 nt, Artificial Sequence
  Description of Artificial Sequence: Synthetic oligonucleotide
  Sense strand starting at position 2400 of SEQ ID NO: 1564199
guuacaguacuacaugaua

SEQ ID NO: 1861988 - RNA, 19 nt, Artificial Sequence
  Description of Artificial Sequence: Synthetic oligonucleotide
  Antisense strand to SEQ ID NO: 1861987
uaucauguaguacuguaac

SEQ ID NO: 1861989 - RNA, 19 nt, Artificial Sequence
  Description of Artificial Sequence: Synthetic oligonucleotide
  Sense strand starting at position 2411 of SEQ ID NO: 1564199
acaugauacuauguguaug

SEQ ID NO: 1861990 - RNA, 19 nt, Artificial Sequence
  Description of Artificial Sequence: Synthetic oligonucleotide
  Antisense strand to SEQ ID NO: 1861989
cauacacauaguaucaugu

SEQ ID NO: 1861991 - RNA, 19 nt, Artificial Sequence
  Description of Artificial Sequence: Synthetic oligonucleotide
  Sense strand starting at position 2413 of SEQ ID NO: 1564199
augauacuauguguaugua

SEQ ID NO: 1861992 - RNA, 19 nt, Artificial Sequence
  Description of Artificial Sequence: Synthetic oligonucleotide
  Antisense strand to SEQ ID NO: 1861991
uacauacacauaguaucau

SEQ ID NO: 1861993 - RNA, 19 nt, Artificial Sequence
  Description of Artificial Sequence: Synthetic oligonucleotide
  Sense strand starting at position 2421 of SEQ ID NO: 1564199
auguguauguagcaaugua

SEQ ID NO: 1861994 - RNA, 19 nt, Artificial Sequence
  Description of Artificial Sequence: Synthetic oligonucleotide
  Antisense strand to SEQ ID NO: 1861993
uacauugcuacauacacau

SEQ ID NO: 1861995 - RNA, 19 nt, Artificial Sequence
  Description of Artificial Sequence: Synthetic oligonucleotide
  Sense strand starting at position 2428 of SEQ ID NO: 1564199
uguagcaauguauaaucua

SEQ ID NO: 1861996 - RNA, 19 nt, Artificial Sequence
  Description of Artificial Sequence: Synthetic oligonucleotide
  Antisense strand to SEQ ID NO: 1861995
uagauuauacauugcuaca

SEQ ID NO: 1861997 - RNA, 19 nt, Artificial Sequence
  Description of Artificial Sequence: Synthetic oligonucleotide
  Sense strand starting at position 2484 of SEQ ID NO: 1564199
acaaacauauuguguauca

SEQ ID NO: 1861998 - RNA, 19 nt, Artificial Sequence
  Description of Artificial Sequence: Synthetic oligonucleotide
  Antisense strand to SEQ ID NO: 1861997
ugauacacaauauguuugu

SEQ ID NO: 1861999 - RNA, 19 nt, Artificial Sequence
  Description of Artificial Sequence: Synthetic oligonucleotide
  Sense strand starting at position 2494 of SEQ ID NO: 1564199
uguguaucauauguaauac

SEQ ID NO: 1862000 - RNA, 19 nt, Artificial Sequence
  Description of Artificial Sequence: Synthetic oligonucleotide
  Antisense strand to SEQ ID NO: 1861999
guauuacauaugauacaca

SEQ ID NO: 1862001 - RNA, 19 nt, Artificial Sequence
  Description of Artificial Sequence: Synthetic oligonucleotide
  Sense strand starting at position 2543 of SEQ ID NO: 1564199
gucacaaugucagcuacua

SEQ ID NO: 1862002 - RNA, 19 nt, Artificial Sequence
  Description of Artificial Sequence: Synthetic oligonucleotide
  Antisense strand to SEQ ID NO: 1862001
uaguagcugacauugugac

SEQ ID NO: 1862003 - RNA, 19 nt, Artificial Sequence
  Description of Artificial Sequence: Synthetic oligonucleotide
  Sense strand starting at position 3616 of SEQ ID NO: 1564199
cuucuauuaccacgucgaa

SEQ ID NO: 1862004 - RNA, 19 nt, Artificial Sequence
  Description of Artificial Sequence: Synthetic oligonucleotide
  Antisense strand to SEQ ID NO: 1862003
uucgacgugguaauagaag

SEQ ID NO: 1862005 - RNA, 19 nt, Artificial Sequence
  Description of Artificial Sequence: Synthetic oligonucleotide
  Sense strand starting at position 3628 of SEQ ID NO: 1564199
cgucgaauccauuagcuac

SEQ ID NO: 1862006 - RNA, 19 nt, Artificial Sequence
  Description of Artificial Sequence: Synthetic oligonucleotide
  Antisense strand to SEQ ID NO: 1862005
guagcuaauggauucgacg

SEQ ID NO: 1862007 - RNA, 19 nt, Artificial Sequence
  Description of Artificial Sequence: Synthetic oligonucleotide
  Sense strand starting at position 3645 of SEQ ID NO: 1564199
acagccaucccaugagaag

SEQ ID NO: 1862008 - RNA, 19 nt, Artificial Sequence
  Description of Artificial Sequence: Synthetic oligonucleotide
  Antisense strand to SEQ ID NO: 1862007
cuucucaugggauggcugu

SEQ ID NO: 1862009 - RNA, 19 nt, Artificial Sequence
  Description of Artificial Sequence: Synthetic oligonucleotide
  Sense strand starting at position 3656 of SEQ ID NO: 1564199
augagaagcugaguggauu

SEQ ID NO: 1862010 - RNA, 19 nt, Artificial Sequence
  Description of Artificial Sequence: Synthetic oligonucleotide
  Antisense strand to SEQ ID NO: 1862009
aauccacucagcuucucau

SEQ ID NO: 1862011 - RNA, 19 nt, Artificial Sequence
  Description of Artificial Sequence: Synthetic oligonucleotide
  Sense strand starting at position 3826 of SEQ ID NO: 1564199
gccagaucauguguggacu

SEQ ID NO: 1862012 - RNA, 19 nt, Artificial Sequence
  Description of Artificial Sequence: Synthetic oligonucleotide
  Antisense strand to SEQ ID NO: 1862011
aguccacacaugaucuggc

SEQ ID NO: 1862013 - RNA, 19 nt, Artificial Sequence
  Description of Artificial Sequence: Synthetic oligonucleotide
  Sense strand starting at position 92 of SEQ ID NO: 1564200
guagacuacugugcuccaa

SEQ ID NO: 1862014 - RNA, 19 nt, Artificial Sequence
  Description of Artificial Sequence: Synthetic oligonucleotide
  Antisense strand to SEQ ID NO: 1862013
uuggagcacaguagucuac

SEQ ID NO: 1862015 - RNA, 19 nt, Artificial Sequence
  Description of Artificial Sequence: Synthetic oligonucleotide
  Sense strand starting at position 94 of SEQ ID NO: 1564200
agacuacugugcuccaaga

SEQ ID NO: 1862016 - RNA, 19 nt, Artificial Sequence
  Description of Artificial Sequence: Synthetic oligonucleotide
  Antisense strand to SEQ ID NO: 1862015
ucuuggagcacaguagucu

SEQ ID NO: 1862017 - RNA, 19 nt, Artificial Sequence
  Description of Artificial Sequence: Synthetic oligonucleotide
  Sense strand starting at position 122 of SEQ ID NO: 1564200
guggcuguucacuguggga

SEQ ID NO: 1862018 - RNA, 19 nt, Artificial Sequence
  Description of Artificial Sequence: Synthetic oligonucleotide
  Antisense strand to SEQ ID NO: 1862017
ucccacagugaacagccac

SEQ ID NO: 1862019 - RNA, 19 nt, Artificial Sequence
  Description of Artificial Sequence: Synthetic oligonucleotide
  Sense strand starting at position 124 of SEQ ID NO: 1564200
ggcuguucacugugggauu

SEQ ID NO: 1862020 - RNA, 19 nt, Artificial Sequence
  Description of Artificial Sequence: Synthetic oligonucleotide
  Antisense strand to SEQ ID NO: 1862019
aaucccacagugaacagcc

SEQ ID NO: 1862021 - RNA, 19 nt, Artificial Sequence
  Description of Artificial Sequence: Synthetic oligonucleotide
  Sense strand starting at position 136 of SEQ ID NO: 1564200
ugggauuauuuguaguagu

SEQ ID NO: 1862022 - RNA, 19 nt, Artificial Sequence
  Description of Artificial Sequence: Synthetic oligonucleotide
  Antisense strand to SEQ ID NO: 1862021
acuacuacaaauaauccca

SEQ ID NO: 1862023 - RNA, 19 nt, Artificial Sequence
  Description of Artificial Sequence: Synthetic oligonucleotide
  Sense strand starting at position 549 of SEQ ID NO: 1564200
caacuaugguugccagaau

SEQ ID NO: 1862024 - RNA, 19 nt, Artificial Sequence
  Description of Artificial Sequence: Synthetic oligonucleotide
  Antisense strand to SEQ ID NO: 1862023
auucuggcaaccauaguug

SEQ ID NO: 1862025 - RNA, 19 nt, Artificial Sequence
  Description of Artificial Sequence: Synthetic oligonucleotide
  Sense strand starting at position 747 of SEQ ID NO: 1564200
guaguaccaaacuguuaga

SEQ ID NO: 1862026 - RNA, 19 nt, Artificial Sequence
  Description of Artificial Sequence: Synthetic oligonucleotide
  Antisense strand to SEQ ID NO: 1862025
ucuaacaguuugguacuac

SEQ ID NO: 1862027 - RNA, 19 nt, Artificial Sequence
  Description of Artificial Sequence: Synthetic oligonucleotide
  Sense strand starting at position 760 of SEQ ID NO: 1564200
guuagaaguuaccuugaaa

SEQ ID NO: 1862028 - RNA, 19 nt, Artificial Sequence
  Description of Artificial Sequence: Synthetic oligonucleotide
  Antisense strand to SEQ ID NO: 1862027
uuucaagguaacuucuaac

SEQ ID NO: 1862029 - RNA, 19 nt, Artificial Sequence
  Description of Artificial Sequence: Synthetic oligonucleotide
  Sense strand starting at position 905 of SEQ ID NO: 1564200
gcucuauuacacugaagug

SEQ ID NO: 1862030 - RNA, 19 nt, Artificial Sequence
  Description of Artificial Sequence: Synthetic oligonucleotide
  Antisense strand to SEQ ID NO: 1862029
cacuucaguguaauagagc

SEQ ID NO: 1862031 - RNA, 19 nt, Artificial Sequence
  Description of Artificial Sequence: Synthetic oligonucleotide
  Sense strand starting at position 1002 of SEQ ID NO: 1564200
agcguucuuccucagcaua

SEQ ID NO: 1862032 - RNA, 19 nt, Artificial Sequence
  Description of Artificial Sequence: Synthetic oligonucleotide
  Antisense strand to SEQ ID NO: 1862031
uaugcugaggaagaacgcu

SEQ ID NO: 1862033 - RNA, 19 nt, Artificial Sequence
  Description of Artificial Sequence: Synthetic oligonucleotide
  Sense strand starting at position 1004 of SEQ ID NO: 1564200
cguucuuccucagcauaca

SEQ ID NO: 1862034 - RNA, 19 nt, Artificial Sequence
  Description of Artificial Sequence: Synthetic oligonucleotide
  Antisense strand to SEQ ID NO: 1862033
uguaugcugaggaagaacg

SEQ ID NO: 1862035 - RNA, 19 nt, Artificial Sequence
  Description of Artificial Sequence: Synthetic oligonucleotide
  Sense strand starting at position 1048 of SEQ ID NO: 1564200
ucugucuuagcgcucugau

SEQ ID NO: 1862036 - RNA, 19 nt, Artificial Sequence
  Description of Artificial Sequence: Synthetic oligonucleotide
  Antisense strand to SEQ ID NO: 1862035
aucagagcgcuaagacaga

SEQ ID NO: 1862037 - RNA, 19 nt, Artificial Sequence
  Description of Artificial Sequence: Synthetic oligonucleotide
  Sense strand starting at position 1049 of SEQ ID NO: 1564200
cugucuuagcgcucugauu

SEQ ID NO: 1862038 - RNA, 19 nt, Artificial Sequence
  Description of Artificial Sequence: Synthetic oligonucleotide
  Antisense strand to SEQ ID NO: 1862037
aaucagagcgcuaagacag

SEQ ID NO: 1862039 - RNA, 19 nt, Artificial Sequence
  Description of Artificial Sequence: Synthetic oligonucleotide
  Sense strand starting at position 1326 of SEQ ID NO: 1564200
cgaagcaucucauuucuuu

SEQ ID NO: 1862040 - RNA, 19 nt, Artificial Sequence
  Description of Artificial Sequence: Synthetic oligonucleotide
  Antisense strand to SEQ ID NO: 1862039
aaagaaaugagaugcuucg

SEQ ID NO: 1862041 - RNA, 19 nt, Artificial Sequence
  Description of Artificial Sequence: Synthetic oligonucleotide
  Sense strand starting at position 1330 of SEQ ID NO: 1564200
gcaucucauuucuuuaguu

SEQ ID NO: 1862042 - RNA, 19 nt, Artificial Sequence
  Description of Artificial Sequence: Synthetic oligonucleotide
  Antisense strand to SEQ ID NO: 1862041
aacuaaagaaaugagaugc

SEQ ID NO: 1862043 - RNA, 19 nt, Artificial Sequence
  Description of Artificial Sequence: Synthetic oligonucleotide
  Sense strand starting at position 1364 of SEQ ID NO: 1564200
ccugucagcucaucaaagu

SEQ ID NO: 1862044 - RNA, 19 nt, Artificial Sequence
  Description of Artificial Sequence: Synthetic oligonucleotide
  Antisense strand to SEQ ID NO: 1862043
acuuugaugagcugacagg

SEQ ID NO: 1862045 - RNA, 19 nt, Artificial Sequence
  Description of Artificial Sequence: Synthetic oligonucleotide
  Sense strand starting at position 1382 of SEQ ID NO: 1564200
ugggaacuugcacauaagu

SEQ ID NO: 1862046 - RNA, 19 nt, Artificial Sequence
  Description of Artificial Sequence: Synthetic oligonucleotide
  Antisense strand to SEQ ID NO: 1862045
acuuaugugcaaguuccca

SEQ ID NO: 1862047 - RNA, 19 nt, Artificial Sequence
  Description of Artificial Sequence: Synthetic oligonucleotide
  Sense strand starting at position 1660 of SEQ ID NO: 1564200
ucagguuauguccgaaauc

SEQ ID NO: 1862048 - RNA, 19 nt, Artificial Sequence
  Description of Artificial Sequence: Synthetic oligonucleotide
  Antisense strand to SEQ ID NO: 1862047
gauuucggacauaaccuga

SEQ ID NO: 1862049 - RNA, 19 nt, Artificial Sequence
  Description of Artificial Sequence: Synthetic oligonucleotide
  Sense strand starting at position 2205 of SEQ ID NO: 1564200
cggauucacggagguguua

SEQ ID NO: 1862050 - RNA, 19 nt, Artificial Sequence
  Description of Artificial Sequence: Synthetic oligonucleotide
  Antisense strand to SEQ ID NO: 1862049
uaacaccuccgugaauccg

SEQ ID NO: 1862051 - RNA, 19 nt, Artificial Sequence
  Description of Artificial Sequence: Synthetic oligonucleotide
  Sense strand starting at position 2478 of SEQ ID NO: 1564200
gccucaaagugagcuauga

SEQ ID NO: 1862052 - RNA, 19 nt, Artificial Sequence
  Description of Artificial Sequence: Synthetic oligonucleotide
  Antisense strand to SEQ ID NO: 1862051
ucauagcucacuuugaggc

SEQ ID NO: 1862053 - RNA, 19 nt, Artificial Sequence
  Description of Artificial Sequence: Synthetic oligonucleotide
  Sense strand starting at position 2482 of SEQ ID NO: 1564200
caaagugagcuaugaucaa

SEQ ID NO: 1862054 - RNA, 19 nt, Artificial Sequence
  Description of Artificial Sequence: Synthetic oligonucleotide
  Antisense strand to SEQ ID NO: 1862053
uugaucauagcucacuuug

SEQ ID NO: 1862055 - RNA, 19 nt, Artificial Sequence
  Description of Artificial Sequence: Synthetic oligonucleotide
  Sense strand starting at position 2571 of SEQ ID NO: 1564200
guauaucuuguauaaacag

SEQ ID NO: 1862056 - RNA, 19 nt, Artificial Sequence
  Description of Artificial Sequence: Synthetic oligonucleotide
  Antisense strand to SEQ ID NO: 1862055
cuguuuauacaagauauac

SEQ ID NO: 1862057 - RNA, 19 nt, Artificial Sequence
  Description of Artificial Sequence: Synthetic oligonucleotide
  Sense strand starting at position 3018 of SEQ ID NO: 1564200
uuuauacccugacuuagua

SEQ ID NO: 1862058 - RNA, 19 nt, Artificial Sequence
  Description of Artificial Sequence: Synthetic oligonucleotide
  Antisense strand to SEQ ID NO: 1862057
uacuaagucaggguauaaa

SEQ ID NO: 1862059 - RNA, 19 nt, Artificial Sequence
  Description of Artificial Sequence: Synthetic oligonucleotide
  Sense strand starting at position 3058 of SEQ ID NO: 1564200
ugguuuacacauugugaaa

SEQ ID NO: 1862060 - RNA, 19 nt, Artificial Sequence
  Description of Artificial Sequence: Synthetic oligonucleotide
  Antisense strand to SEQ ID NO: 1862059
uuucacaauguguaaacca

SEQ ID NO: 1862061 - RNA, 19 nt, Artificial Sequence
  Description of Artificial Sequence: Synthetic oligonucleotide
  Sense strand starting at position 3107 of SEQ ID NO: 1564200
uuguacuuccuguaugaau

SEQ ID NO: 1862062 - RNA, 19 nt, Artificial Sequence
  Description of Artificial Sequence: Synthetic oligonucleotide
  Antisense strand to SEQ ID NO: 1862061
auucauacaggaaguacaa

SEQ ID NO: 1862063 - RNA, 19 nt, Artificial Sequence
  Description of Artificial Sequence: Synthetic oligonucleotide
  Sense strand starting at position 3109 of SEQ ID NO: 1564200
guacuuccuguaugaaugu

SEQ ID NO: 1862064 - RNA, 19 nt, Artificial Sequence
  Description of Artificial Sequence: Synthetic oligonucleotide
  Antisense strand to SEQ ID NO: 1862063
acauucauacaggaaguac

SEQ ID NO: 1862065 - RNA, 19 nt, Artificial Sequence
  Description of Artificial Sequence: Synthetic oligonucleotide
  Sense strand starting at position 3162 of SEQ ID NO: 1564200
cuauuaugcucucuggagu

SEQ ID NO: 1862066 - RNA, 19 nt, Artificial Sequence
  Description of Artificial Sequence: Synthetic oligonucleotide
  Antisense strand to SEQ ID NO: 1862065
acuccagagagcauaauag

SEQ ID NO: 1862067 - RNA, 19 nt, Artificial Sequence
  Description of Artificial Sequence: Synthetic oligonucleotide
  Sense strand starting at position 3163 of SEQ ID NO: 1564200
uauuaugcucucuggaguu

SEQ ID NO: 1862068 - RNA, 19 nt, Artificial Sequence
  Description of Artificial Sequence: Synthetic oligonucleotide
  Antisense strand to SEQ ID NO: 1862067
aacuccagagagcauaaua

SEQ ID NO: 1862069 - RNA, 19 nt, Artificial Sequence
  Description of Artificial Sequence: Synthetic oligonucleotide
  Sense strand starting at position 3191 of SEQ ID NO: 1564200
uaguuugccuuugucugaa

SEQ ID NO: 1862070 - RNA, 19 nt, Artificial Sequence
  Description of Artificial Sequence: Synthetic oligonucleotide
  Antisense strand to SEQ ID NO: 1862069
uucagacaaaggcaaacua

SEQ ID NO: 1862071 - RNA, 19 nt, Artificial Sequence
  Description of Artificial Sequence: Synthetic oligonucleotide
  Sense strand starting at position 3194 of SEQ ID NO: 1564200
uuugccuuugucugaaacu

SEQ ID NO: 1862072 - RNA, 19 nt, Artificial Sequence
  Description of Artificial Sequence: Synthetic oligonucleotide
  Antisense strand to SEQ ID NO: 1862071
aguuucagacaaaggcaaa

SEQ ID NO: 1862073 - RNA, 19 nt, Artificial Sequence
  Description of Artificial Sequence: Synthetic oligonucleotide
  Sense strand starting at position 3215 of SEQ ID NO: 1564200
acgagaucauacuuuccca

SEQ ID NO: 1862074 - RNA, 19 nt, Artificial Sequence
  Description of Artificial Sequence: Synthetic oligonucleotide
  Antisense strand to SEQ ID NO: 1862073
ugggaaaguaugaucucgu

SEQ ID NO: 1862075 - RNA, 19 nt, Artificial Sequence
  Description of Artificial Sequence: Synthetic oligonucleotide
  Sense strand starting at position 3249 of SEQ ID NO: 1564200
gaggcaaauuuccagguaa

SEQ ID NO: 1862076 - RNA, 19 nt, Artificial Sequence
  Description of Artificial Sequence: Synthetic oligonucleotide
  Antisense strand to SEQ ID NO: 1862075
uuaccuggaaauuugccuc

SEQ ID NO: 1862077 - RNA, 19 nt, Artificial Sequence
  Description of Artificial Sequence: Synthetic oligonucleotide
  Sense strand starting at position 3282 of SEQ ID NO: 1564200
ggacacuaaugcuucuaau

SEQ ID NO: 1862078 - RNA, 19 nt, Artificial Sequence
  Description of Artificial Sequence: Synthetic oligonucleotide
  Antisense strand to SEQ ID NO: 1862077
auuagaagcauuagugucc

SEQ ID NO: 1862079 - RNA, 19 nt, Artificial Sequence
  Description of Artificial Sequence: Synthetic oligonucleotide
  Sense strand starting at position 3310 of SEQ ID NO: 1564200
ggaagaaguuaacaaucaa

SEQ ID NO: 1862080 - RNA, 19 nt, Artificial Sequence
  Description of Artificial Sequence: Synthetic oligonucleotide
  Antisense strand to SEQ ID NO: 1862079
uugauuguuaacuucuucc

SEQ ID NO: 1862081 - RNA, 19 nt, Artificial Sequence
  Description of Artificial Sequence: Synthetic oligonucleotide
  Sense strand starting at position 3370 of SEQ ID NO: 1564200
gcagcauaucucuaaagcu

SEQ ID NO: 1862082 - RNA, 19 nt, Artificial Sequence
  Description of Artificial Sequence: Synthetic oligonucleotide
  Antisense strand to SEQ ID NO: 1862081
agcuuuagagauaugcugc

SEQ ID NO: 1862083 - RNA, 19 nt, Artificial Sequence
  Description of Artificial Sequence: Synthetic oligonucleotide
  Sense strand starting at position 3496 of SEQ ID NO: 1564200
uccagcuuggucuagagau

SEQ ID NO: 1862084 - RNA, 19 nt, Artificial Sequence
  Description of Artificial Sequence: Synthetic oligonucleotide
  Antisense strand to SEQ ID NO: 1862083
aucucuagaccaagcugga

SEQ ID NO: 1862085 - RNA, 19 nt, Artificial Sequence
  Description of Artificial Sequence: Synthetic oligonucleotide
  Sense strand starting at position 3509 of SEQ ID NO: 1564200
agagauuucuuugaaaccu

SEQ ID NO: 1862086 - RNA, 19 nt, Artificial Sequence
  Description of Artificial Sequence: Synthetic oligonucleotide
  Antisense strand to SEQ ID NO: 1862085
agguuucaaagaaaucucu

SEQ ID NO: 1862087 - RNA, 19 nt, Artificial Sequence
  Description of Artificial Sequence: Synthetic oligonucleotide
  Sense strand starting at position 3716 of SEQ ID NO: 1564200
cagcaaugugcugagcaca

SEQ ID NO: 1862088 - RNA, 19 nt, Artificial Sequence
  Description of Artificial Sequence: Synthetic oligonucleotide
  Antisense strand to SEQ ID NO: 1862087
ugugcucagcacauugcug

SEQ ID NO: 1862089 - RNA, 19 nt, Artificial Sequence
  Description of Artificial Sequence: Synthetic oligonucleotide
  Sense strand starting at position 3727 of SEQ ID NO: 1564200
ugagcacauaguuagugau

SEQ ID NO: 1862090 - RNA, 19 nt, Artificial Sequence
  Description of Artificial Sequence: Synthetic oligonucleotide
  Antisense strand to SEQ ID NO: 1862089
aucacuaacuaugugcuca

SEQ ID NO: 1862091 - RNA, 19 nt, Artificial Sequence
  Description of Artificial Sequence: Synthetic oligonucleotide
  Sense strand starting at position 3729 of SEQ ID NO: 1564200
agcacauaguuagugauca

SEQ ID NO: 1862092 - RNA, 19 nt, Artificial Sequence
  Description of Artificial Sequence: Synthetic oligonucleotide
  Antisense strand to SEQ ID NO: 1862091
ugaucacuaacuaugugcu

SEQ ID NO: 1862093 - RNA, 19 nt, Artificial Sequence
  Description of Artificial Sequence: Synthetic oligonucleotide
  Sense strand starting at position 125 of SEQ ID NO: 1564201
uuaugucacuggguaauua

SEQ ID NO: 1862094 - RNA, 19 nt, Artificial Sequence
  Description of Artificial Sequence: Synthetic oligonucleotide
  Antisense strand to SEQ ID NO: 1862093
uaauuacccagugacauaa

SEQ ID NO: 1862095 - RNA, 19 nt, Artificial Sequence
  Description of Artificial Sequence: Synthetic oligonucleotide
  Sense strand starting at position 126 of SEQ ID NO: 1564201
uaugucacuggguaauuau

SEQ ID NO: 1862096 - RNA, 19 nt, Artificial Sequence
  Description of Artificial Sequence: Synthetic oligonucleotide
  Antisense strand to SEQ ID NO: 1862095
auaauuacccagugacaua

SEQ ID NO: 1862097 - RNA, 19 nt, Artificial Sequence
  Description of Artificial Sequence: Synthetic oligonucleotide
  Sense strand starting at position 129 of SEQ ID NO: 1564201
gucacuggguaauuaugaa

SEQ ID NO: 1862098 - RNA, 19 nt, Artificial Sequence
  Description of Artificial Sequence: Synthetic oligonucleotide
  Antisense strand to SEQ ID NO: 1862097
uucauaauuacccagugac

SEQ ID NO: 1862099 - RNA, 19 nt, Artificial Sequence
  Description of Artificial Sequence: Synthetic oligonucleotide
  Sense strand starting at position 194 of SEQ ID NO: 1564201
uggaaagacucuucugcaa

SEQ ID NO: 1862100 - RNA, 19 nt, Artificial Sequence
  Description of Artificial Sequence: Synthetic oligonucleotide
  Antisense strand to SEQ ID NO: 1862099
uugcagaagagucuuucca

SEQ ID NO: 1862101 - RNA, 19 nt, Artificial Sequence
  Description of Artificial Sequence: Synthetic oligonucleotide
  Sense strand starting at position 399 of SEQ ID NO: 1564201
gaaauaacagcauacguuu

SEQ ID NO: 1862102 - RNA, 19 nt, Artificial Sequence
  Description of Artificial Sequence: Synthetic oligonucleotide
  Antisense strand to SEQ ID NO: 1862101
aaacguaugcuguuauuuc

SEQ ID NO: 1862103 - RNA, 19 nt, Artificial Sequence
  Description of Artificial Sequence: Synthetic oligonucleotide
  Sense strand starting at position 447 of SEQ ID NO: 1564201
ggugcuauuaucuuucguu

SEQ ID NO: 1862104 - RNA, 19 nt, Artificial Sequence
  Description of Artificial Sequence: Synthetic oligonucleotide
  Antisense strand to SEQ ID NO: 1862103
aacgaaagauaauagcacc

SEQ ID NO: 1862105 - RNA, 19 nt, Artificial Sequence
  Description of Artificial Sequence: Synthetic oligonucleotide
  Sense strand starting at position 519 of SEQ ID NO: 1564201
ggucaucuccuccaugaau

SEQ ID NO: 1862106 - RNA, 19 nt, Artificial Sequence
  Description of Artificial Sequence: Synthetic oligonucleotide
  Antisense strand to SEQ ID NO: 1862105
auucauggaggagaugacc

SEQ ID NO: 1862107 - RNA, 19 nt, Artificial Sequence
  Description of Artificial Sequence: Synthetic oligonucleotide
  Sense strand starting at position 662 of SEQ ID NO: 1564201
gugcuuaagguugaguaaa

SEQ ID NO: 1862108 - RNA, 19 nt, Artificial Sequence
  Description of Artificial Sequence: Synthetic oligonucleotide
  Antisense strand to SEQ ID NO: 1862107
uuuacucaaccuuaagcac

SEQ ID NO: 1862109 - RNA, 19 nt, Artificial Sequence
  Description of Artificial Sequence: Synthetic oligonucleotide
  Sense strand starting at position 664 of SEQ ID NO: 1564201
gcuuaagguugaguaaaug

SEQ ID NO: 1862110 - RNA, 19 nt, Artificial Sequence
  Description of Artificial Sequence: Synthetic oligonucleotide
  Antisense strand to SEQ ID NO: 1862109
cauuuacucaaccuuaagc

SEQ ID NO: 1862111 - RNA, 19 nt, Artificial Sequence
  Description of Artificial Sequence: Synthetic oligonucleotide
  Sense strand starting at position 686 of SEQ ID NO: 1564201
gaguuugaggaaugucauc

SEQ ID NO: 1862112 - RNA, 19 nt, Artificial Sequence
  Description of Artificial Sequence: Synthetic oligonucleotide
  Antisense strand to SEQ ID NO: 1862111
gaugacauuccucaaacuc

SEQ ID NO: 1862113 - RNA, 19 nt, Artificial Sequence
  Description of Artificial Sequence: Synthetic oligonucleotide
  Sense strand starting at position 691 of SEQ ID NO: 1564201
ugaggaaugucauccaaca

SEQ ID NO: 1862114 - RNA, 19 nt, Artificial Sequence
  Description of Artificial Sequence: Synthetic oligonucleotide
  Antisense strand to SEQ ID NO: 1862113
uguuggaugacauuccuca

SEQ ID NO: 1862115 - RNA, 19 nt, Artificial Sequence
  Description of Artificial Sequence: Synthetic oligonucleotide
  Sense strand starting at position 877 of SEQ ID NO: 1564201
caagaugaguggucucaaa

SEQ ID NO: 1862116 - RNA, 19 nt, Artificial Sequence
  Description of Artificial Sequence: Synthetic oligonucleotide
  Antisense strand to SEQ ID NO: 1862115
uuugagaccacucaucuug

SEQ ID NO: 1862117 - RNA, 19 nt, Artificial Sequence
  Description of Artificial Sequence: Synthetic oligonucleotide
  Sense strand starting at position 1048 of SEQ ID NO: 1564201
aauuuauuacgacguuguu

SEQ ID NO: 1862118 - RNA, 19 nt, Artificial Sequence
  Description of Artificial Sequence: Synthetic oligonucleotide
  Antisense strand to SEQ ID NO: 1862117
aacaacgucguaauaaauu

SEQ ID NO: 1862119 - RNA, 19 nt, Artificial Sequence
  Description of Artificial Sequence: Synthetic oligonucleotide
  Sense strand starting at position 1064 of SEQ ID NO: 1564201
guuaauagccuuugagagg

SEQ ID NO: 1862120 - RNA, 19 nt, Artificial Sequence
  Description of Artificial Sequence: Synthetic oligonucleotide
  Antisense strand to SEQ ID NO: 1862119
ccucucaaaggcuauuaac

SEQ ID NO: 1862121 - RNA, 19 nt, Artificial Sequence
  Description of Artificial Sequence: Synthetic oligonucleotide
  Sense strand starting at position 1513 of SEQ ID NO: 1564201
gcaacucgucguccaguga

SEQ ID NO: 1862122 - RNA, 19 nt, Artificial Sequence
  Description of Artificial Sequence: Synthetic oligonucleotide
  Antisense strand to SEQ ID NO: 1862121
ucacuggacgacgaguugc

SEQ ID NO: 1862123 - RNA, 19 nt, Artificial Sequence
  Description of Artificial Sequence: Synthetic oligonucleotide
  Sense strand starting at position 1519 of SEQ ID NO: 1564201
cgucguccagugagacauu

SEQ ID NO: 1862124 - RNA, 19 nt, Artificial Sequence
  Description of Artificial Sequence: Synthetic oligonucleotide
  Antisense strand to SEQ ID NO: 1862123
aaugucucacuggacgacg

SEQ ID NO: 1862125 - RNA, 19 nt, Artificial Sequence
  Description of Artificial Sequence: Synthetic oligonucleotide
  Sense strand starting at position 1562 of SEQ ID NO: 1564201
aaagguggugucgggagaa

SEQ ID NO: 1862126 - RNA, 19 nt, Artificial Sequence
  Description of Artificial Sequence: Synthetic oligonucleotide
  Antisense strand to SEQ ID NO: 1862125
uucucccgacaccaccuuu

SEQ ID NO: 1862127 - RNA, 19 nt, Artificial Sequence
  Description of Artificial Sequence: Synthetic oligonucleotide
  Sense strand starting at position 1564 of SEQ ID NO: 1564201
agguggugucgggagaaga

SEQ ID NO: 1862128 - RNA, 19 nt, Artificial Sequence
  Description of Artificial Sequence: Synthetic oligonucleotide
  Antisense strand to SEQ ID NO: 1862127
ucuucucccgacaccaccu

SEQ ID NO: 1862129 - RNA, 19 nt, Artificial Sequence
  Description of Artificial Sequence: Synthetic oligonucleotide
  Sense strand starting at position 2184 of SEQ ID NO: 1564201
ggucccagccaucaguuaa

SEQ ID NO: 1862130 - RNA, 19 nt, Artificial Sequence
  Description of Artificial Sequence: Synthetic oligonucleotide
  Antisense strand to SEQ ID NO: 1862129
uuaacugauggcugggacc

SEQ ID NO: 1862131 - RNA, 19 nt, Artificial Sequence
  Description of Artificial Sequence: Synthetic oligonucleotide
  Sense strand starting at position 2214 of SEQ ID NO: 1564201
cuaucugaaguuuaaagca

SEQ ID NO: 1862132 - RNA, 19 nt, Artificial Sequence
  Description of Artificial Sequence: Synthetic oligonucleotide
  Antisense strand to SEQ ID NO: 1862131
ugcuuuaaacuucagauag

SEQ ID NO: 1862133 - RNA, 19 nt, Artificial Sequence
  Description of Artificial Sequence: Synthetic oligonucleotide
  Sense strand starting at position 2347 of SEQ ID NO: 1564201
gguucauuccaggaaguag

SEQ ID NO: 1862134 - RNA, 19 nt, Artificial Sequence
  Description of Artificial Sequence: Synthetic oligonucleotide
  Antisense strand to SEQ ID NO: 1862133
cuacuuccuggaaugaacc

SEQ ID NO: 1862135 - RNA, 19 nt, Artificial Sequence
  Description of Artificial Sequence: Synthetic oligonucleotide
  Sense strand starting at position 2461 of SEQ ID NO: 1564201
cgcuuugcacauuaauaaa

SEQ ID NO: 1862136 - RNA, 19 nt, Artificial Sequence
  Description of Artificial Sequence: Synthetic oligonucleotide
  Antisense strand to SEQ ID NO: 1862135
uuuauuaaugugcaaagcg

SEQ ID NO: 1862137 - RNA, 19 nt, Artificial Sequence
  Description of Artificial Sequence: Synthetic oligonucleotide
  Sense strand starting at position 2527 of SEQ ID NO: 1564201
ugauacgauuccuucucua

SEQ ID NO: 1862138 - RNA, 19 nt, Artificial Sequence
  Description of Artificial Sequence: Synthetic oligonucleotide
  Antisense strand to SEQ ID NO: 1862137
uagagaaggaaucguauca

SEQ ID NO: 1862139 - RNA, 19 nt, Artificial Sequence
  Description of Artificial Sequence: Synthetic oligonucleotide
  Sense strand starting at position 2673 of SEQ ID NO: 1564201
auuaaacugcuguaaugaa

SEQ ID NO: 1862140 - RNA, 19 nt, Artificial Sequence
  Description of Artificial Sequence: Synthetic oligonucleotide
  Antisense strand to SEQ ID NO: 1862139
uucauuacagcaguuuaau

SEQ ID NO: 1862141 - RNA, 19 nt, Artificial Sequence
  Description of Artificial Sequence: Synthetic oligonucleotide
  Sense strand starting at position 2869 of SEQ ID NO: 1564201
uaucgcugugaggaaauau

SEQ ID NO: 1862142 - RNA, 19 nt, Artificial Sequence
  Description of Artificial Sequence: Synthetic oligonucleotide
  Antisense strand to SEQ ID NO: 1862141
auauuuccucacagcgaua

SEQ ID NO: 1862143 - RNA, 19 nt, Artificial Sequence
  Description of Artificial Sequence: Synthetic oligonucleotide
  Sense strand starting at position 2880 of SEQ ID NO: 1564201
ggaaauauuugacagaugu

SEQ ID NO: 1862144 - RNA, 19 nt, Artificial Sequence
  Description of Artificial Sequence: Synthetic oligonucleotide
  Antisense strand to SEQ ID NO: 1862143
acaucugucaaauauuucc

SEQ ID NO: 1862145 - RNA, 19 nt, Artificial Sequence
  Description of Artificial Sequence: Synthetic oligonucleotide
  Sense strand starting at position 2917 of SEQ ID NO: 1564201
cuaaguccaccggaauuaa

SEQ ID NO: 1862146 - RNA, 19 nt, Artificial Sequence
  Description of Artificial Sequence: Synthetic oligonucleotide
  Antisense strand to SEQ ID NO: 1862145
uuaauuccgguggacuuag

SEQ ID NO: 1862147 - RNA, 19 nt, Artificial Sequence
  Description of Artificial Sequence: Synthetic oligonucleotide
  Sense strand starting at position 2928 of SEQ ID NO: 1564201
ggaauuaaagagugcauua

SEQ ID NO: 1862148 - RNA, 19 nt, Artificial Sequence
  Description of Artificial Sequence: Synthetic oligonucleotide
  Antisense strand to SEQ ID NO: 1862147
uaaugcacucuuuaauucc

SEQ ID NO: 1862149 - RNA, 19 nt, Artificial Sequence
  Description of Artificial Sequence: Synthetic oligonucleotide
  Sense strand starting at position 3092 of SEQ ID NO: 1564201
ggaacucugcccuggagga

SEQ ID NO: 1862150 - RNA, 19 nt, Artificial Sequence
  Description of Artificial Sequence: Synthetic oligonucleotide
  Antisense strand to SEQ ID NO: 1862149
uccuccagggcagaguucc

SEQ ID NO: 1862151 - RNA, 19 nt, Artificial Sequence
  Description of Artificial Sequence: Synthetic oligonucleotide
  Sense strand starting at position 3122 of SEQ ID NO: 1564201
guaaccuuccaagaugugu

SEQ ID NO: 1862152 - RNA, 19 nt, Artificial Sequence
  Description of Artificial Sequence: Synthetic oligonucleotide
  Antisense strand to SEQ ID NO: 1862151
acacaucuuggaagguuac

SEQ ID NO: 1862153 - RNA, 19 nt, Artificial Sequence
  Description of Artificial Sequence: Synthetic oligonucleotide
  Sense strand starting at position 3209 of SEQ ID NO: 1564201
cugggauucucuucuacua

SEQ ID NO: 1862154 - RNA, 19 nt, Artificial Sequence
  Description of Artificial Sequence: Synthetic oligonucleotide
  Antisense strand to SEQ ID NO: 1862153
uaguagaagagaaucccag

SEQ ID NO: 1862155 - RNA, 19 nt, Artificial Sequence
  Description of Artificial Sequence: Synthetic oligonucleotide
  Sense strand starting at position 3299 of SEQ ID NO: 1564201
ugcaauguaucuuugggaa

SEQ ID NO: 1862156 - RNA, 19 nt, Artificial Sequence
  Description of Artificial Sequence: Synthetic oligonucleotide
  Antisense strand to SEQ ID NO: 1862155
uucccaaagauacauugca

SEQ ID NO: 1862157 - RNA, 19 nt, Artificial Sequence
  Description of Artificial Sequence: Synthetic oligonucleotide
  Sense strand starting at position 3324 of SEQ ID NO: 1564201
ucgcaauuugaauguguac

SEQ ID NO: 1862158 - RNA, 19 nt, Artificial Sequence
  Description of Artificial Sequence: Synthetic oligonucleotide
  Antisense strand to SEQ ID NO: 1862157
guacacauucaaauugcga

SEQ ID NO: 1862159 - RNA, 19 nt, Artificial Sequence
  Description of Artificial Sequence: Synthetic oligonucleotide
  Sense strand starting at position 3335 of SEQ ID NO: 1564201
auguguacuaagggaggua

SEQ ID NO: 1862160 - RNA, 19 nt, Artificial Sequence
  Description of Artificial Sequence: Synthetic oligonucleotide
  Antisense strand to SEQ ID NO: 1862159
uaccucccuuaguacacau

SEQ ID NO: 1862161 - RNA, 19 nt, Artificial Sequence
  Description of Artificial Sequence: Synthetic oligonucleotide
  Sense strand starting at position 3338 of SEQ ID NO: 1564201
uguacuaagggagguaauu

SEQ ID NO: 1862162 - RNA, 19 nt, Artificial Sequence
  Description of Artificial Sequence: Synthetic oligonucleotide
  Antisense strand to SEQ ID NO: 1862161
aauuaccucccuuaguaca

SEQ ID NO: 1862163 - RNA, 19 nt, Artificial Sequence
  Description of Artificial Sequence: Synthetic oligonucleotide
  Sense strand starting at position 3358 of SEQ ID NO: 1564201
cuucuucucuuccuggaga

SEQ ID NO: 1862164 - RNA, 19 nt, Artificial Sequence
  Description of Artificial Sequence: Synthetic oligonucleotide
  Antisense strand to SEQ ID NO: 1862163
ucuccaggaagagaagaag

SEQ ID NO: 1862165 - RNA, 19 nt, Artificial Sequence
  Description of Artificial Sequence: Synthetic oligonucleotide
  Sense strand starting at position 3360 of SEQ ID NO: 1564201
ucuucucuuccuggagaaa

SEQ ID NO: 1862166 - RNA, 19 nt, Artificial Sequence
  Description of Artificial Sequence: Synthetic oligonucleotide
  Antisense strand to SEQ ID NO: 1862165
uuucuccaggaagagaaga

SEQ ID NO: 1862167 - RNA, 19 nt, Artificial Sequence
  Description of Artificial Sequence: Synthetic oligonucleotide
  Sense strand starting at position 3390 of SEQ ID NO: 1564201
guagcaaacguugagagau

SEQ ID NO: 1862168 - RNA, 19 nt, Artificial Sequence
  Description of Artificial Sequence: Synthetic oligonucleotide
  Antisense strand to SEQ ID NO: 1862167
aucucucaacguuugcuac

SEQ ID NO: 1862169 - RNA, 19 nt, Artificial Sequence
  Description of Artificial Sequence: Synthetic oligonucleotide
  Sense strand starting at position 3542 of SEQ ID NO: 1564201
ucugcaauuucuuccaggu

SEQ ID NO: 1862170 - RNA, 19 nt, Artificial Sequence
  Description of Artificial Sequence: Synthetic oligonucleotide
  Antisense strand to SEQ ID NO: 1862169
accuggaagaaauugcaga

SEQ ID NO: 1862171 - RNA, 19 nt, Artificial Sequence
  Description of Artificial Sequence: Synthetic oligonucleotide
  Sense strand starting at position 3932 of SEQ ID NO: 1564201
acaugcuuacuuuacgaau

SEQ ID NO: 1862172 - RNA, 19 nt, Artificial Sequence
  Description of Artificial Sequence: Synthetic oligonucleotide
  Antisense strand to SEQ ID NO: 1862171
auucguaaaguaagcaugu

SEQ ID NO: 1862173 - RNA, 19 nt, Artificial Sequence
  Description of Artificial Sequence: Synthetic oligonucleotide
  Sense strand starting at position 780 of SEQ ID NO: 1564202
gauggugaaucucccucaa

SEQ ID NO: 1862174 - RNA, 19 nt, Artificial Sequence
  Description of Artificial Sequence: Synthetic oligonucleotide
  Antisense strand to SEQ ID NO: 1862173
uugagggagauucaccauc

SEQ ID NO: 1862175 - RNA, 19 nt, Artificial Sequence
  Description of Artificial Sequence: Synthetic oligonucleotide
  Sense strand starting at position 898 of SEQ ID NO: 1564202
gccagaaaugcuuagggac

SEQ ID NO: 1862176 - RNA, 19 nt, Artificial Sequence
  Description of Artificial Sequence: Synthetic oligonucleotide
  Antisense strand to SEQ ID NO: 1862175
gucccuaagcauuucuggc

SEQ ID NO: 1862177 - RNA, 19 nt, Artificial Sequence
  Description of Artificial Sequence: Synthetic oligonucleotide
  Sense strand starting at position 901 of SEQ ID NO: 1564202
agaaaugcuuagggacaaa

SEQ ID NO: 1862178 - RNA, 19 nt, Artificial Sequence
  Description of Artificial Sequence: Synthetic oligonucleotide
  Antisense strand to SEQ ID NO: 1862177
uuugucccuaagcauuucu

SEQ ID NO: 1862179 - RNA, 19 nt, Artificial Sequence
  Description of Artificial Sequence: Synthetic oligonucleotide
  Sense strand starting at position 1197 of SEQ ID NO: 1564202
gggucagccucguugaaua

SEQ ID NO: 1862180 - RNA, 19 nt, Artificial Sequence
  Description of Artificial Sequence: Synthetic oligonucleotide
  Antisense strand to SEQ ID NO: 1862179
uauucaacgaggcugaccc

SEQ ID NO: 1862181 - RNA, 19 nt, Artificial Sequence
  Description of Artificial Sequence: Synthetic oligonucleotide
  Sense strand starting at position 1199 of SEQ ID NO: 1564202
gucagccucguugaauauu

SEQ ID NO: 1862182 - RNA, 19 nt, Artificial Sequence
  Description of Artificial Sequence: Synthetic oligonucleotide
  Antisense strand to SEQ ID NO: 1862181
aauauucaacgaggcugac

SEQ ID NO: 1862183 - RNA, 19 nt, Artificial Sequence
  Description of Artificial Sequence: Synthetic oligonucleotide
  Sense strand starting at position 1248 of SEQ ID NO: 1564202
uauaaugagcuucgugcua

SEQ ID NO: 1862184 - RNA, 19 nt, Artificial Sequence
  Description of Artificial Sequence: Synthetic oligonucleotide
  Antisense strand to SEQ ID NO: 1862183
uagcacgaagcucauuaua

SEQ ID NO: 1862185 - RNA, 19 nt, Artificial Sequence
  Description of Artificial Sequence: Synthetic oligonucleotide
  Sense strand starting at position 1273 of SEQ ID NO: 1564202
cgguacacucagcaaucua

SEQ ID NO: 1862186 - RNA, 19 nt, Artificial Sequence
  Description of Artificial Sequence: Synthetic oligonucleotide
  Antisense strand to SEQ ID NO: 1862185
uagauugcugaguguaccg

SEQ ID NO: 1862187 - RNA, 19 nt, Artificial Sequence
  Description of Artificial Sequence: Synthetic oligonucleotide
  Sense strand starting at position 1314 of SEQ ID NO: 1564202
ccucgaacucuagaccauu

SEQ ID NO: 1862188 - RNA, 19 nt, Artificial Sequence
  Description of Artificial Sequence: Synthetic oligonucleotide
  Antisense strand to SEQ ID NO: 1862187
aauggucuagaguucgagg

SEQ ID NO: 1862189 - RNA, 19 nt, Artificial Sequence
  Description of Artificial Sequence: Synthetic oligonucleotide
  Sense strand starting at position 2031 of SEQ ID NO: 1564202
gaacgagcucaugaugcaa

SEQ ID NO: 1862190 - RNA, 19 nt, Artificial Sequence
  Description of Artificial Sequence: Synthetic oligonucleotide
  Antisense strand to SEQ ID NO: 1862189
uugcaucaugagcucguuc

SEQ ID NO: 1862191 - RNA, 19 nt, Artificial Sequence
  Description of Artificial Sequence: Synthetic oligonucleotide
  Sense strand starting at position 2125 of SEQ ID NO: 1564202
gucacauugugguugauug

SEQ ID NO: 1862192 - RNA, 19 nt, Artificial Sequence
  Description of Artificial Sequence: Synthetic oligonucleotide
  Antisense strand to SEQ ID NO: 1862191
caaucaaccacaaugugac

SEQ ID NO: 1862193 - RNA, 19 nt, Artificial Sequence
  Description of Artificial Sequence: Synthetic oligonucleotide
  Sense strand starting at position 2126 of SEQ ID NO: 1564202
ucacauugugguugauuga

SEQ ID NO: 1862194 - RNA, 19 nt, Artificial Sequence
  Description of Artificial Sequence: Synthetic oligonucleotide
  Antisense strand to SEQ ID NO: 1862193
ucaaucaaccacaauguga

SEQ ID NO: 1862195 - RNA, 19 nt, Artificial Sequence
  Description of Artificial Sequence: Synthetic oligonucleotide
  Sense strand starting at position 2127 of SEQ ID NO: 1564202
cacauugugguugauugau

SEQ ID NO: 1862196 - RNA, 19 nt, Artificial Sequence
  Description of Artificial Sequence: Synthetic oligonucleotide
  Antisense strand to SEQ ID NO: 1862195
aucaaucaaccacaaugug

SEQ ID NO: 1862197 - RNA, 19 nt, Artificial Sequence
  Description of Artificial Sequence: Synthetic oligonucleotide
  Sense strand starting at position 2301 of SEQ ID NO: 1564202
gugguuagcaguuggaaau

SEQ ID NO: 1862198 - RNA, 19 nt, Artificial Sequence
  Description of Artificial Sequence: Synthetic oligonucleotide
  Antisense strand to SEQ ID NO: 1862197
auuuccaacugcuaaccac

SEQ ID NO: 1862199 - RNA, 19 nt, Artificial Sequence
  Description of Artificial Sequence: Synthetic oligonucleotide
  Sense strand starting at position 2302 of SEQ ID NO: 1564202
ugguuagcaguuggaaauu

SEQ ID NO: 1862200 - RNA, 19 nt, Artificial Sequence
  Description of Artificial Sequence: Synthetic oligonucleotide
  Antisense strand to SEQ ID NO: 1862199
aauuuccaacugcuaacca

SEQ ID NO: 1862201 - RNA, 19 nt, Artificial Sequence
  Description of Artificial Sequence: Synthetic oligonucleotide
  Sense strand starting at position 2357 of SEQ ID NO: 1564202
uuugauuacuuggcagaug

SEQ ID NO: 1862202 - RNA, 19 nt, Artificial Sequence
  Description of Artificial Sequence: Synthetic oligonucleotide
  Antisense strand to SEQ ID NO: 1862201
caucugccaaguaaucaaa

SEQ ID NO: 1862203 - RNA, 19 nt, Artificial Sequence
  Description of Artificial Sequence: Synthetic oligonucleotide
  Sense strand starting at position 2401 of SEQ ID NO: 1564202
gguggaaauccucacuuuc

SEQ ID NO: 1862204 - RNA, 19 nt, Artificial Sequence
  Description of Artificial Sequence: Synthetic oligonucleotide
  Antisense strand to SEQ ID NO: 1862203
gaaagugaggauuuccacc

SEQ ID NO: 1862205 - RNA, 19 nt, Artificial Sequence
  Description of Artificial Sequence: Synthetic oligonucleotide
  Sense strand starting at position 2454 of SEQ ID NO: 1564202
gagcuccuguaauugacaa

SEQ ID NO: 1862206 - RNA, 19 nt, Artificial Sequence
  Description of Artificial Sequence: Synthetic oligonucleotide
  Antisense strand to SEQ ID NO: 1862205
uugucaauuacaggagcuc

SEQ ID NO: 1862207 - RNA, 19 nt, Artificial Sequence
  Description of Artificial Sequence: Synthetic oligonucleotide
  Sense strand starting at position 2531 of SEQ ID NO: 1564202
ccuuauuacccguaaagag

SEQ ID NO: 1862208 - RNA, 19 nt, Artificial Sequence
  Description of Artificial Sequence: Synthetic oligonucleotide
  Antisense strand to SEQ ID NO: 1862207
cucuuuacggguaauaagg

SEQ ID NO: 1862209 - RNA, 19 nt, Artificial Sequence
  Description of Artificial Sequence: Synthetic oligonucleotide
  Sense strand starting at position 2619 of SEQ ID NO: 1564202
cgccuacauuuaucgugaa

SEQ ID NO: 1862210 - RNA, 19 nt, Artificial Sequence
  Description of Artificial Sequence: Synthetic oligonucleotide
  Antisense strand to SEQ ID NO: 1862209
uucacgauaaauguaggcg

SEQ ID NO: 1862211 - RNA, 19 nt, Artificial Sequence
  Description of Artificial Sequence: Synthetic oligonucleotide
  Sense strand starting at position 2622 of SEQ ID NO: 1564202
cuacauuuaucgugaaauc

SEQ ID NO: 1862212 - RNA, 19 nt, Artificial Sequence
  Description of Artificial Sequence: Synthetic oligonucleotide
  Antisense strand to SEQ ID NO: 1862211
gauuucacgauaaauguag

SEQ ID NO: 1862213 - RNA, 19 nt, Artificial Sequence
  Description of Artificial Sequence: Synthetic oligonucleotide
  Sense strand starting at position 2671 of SEQ ID NO: 1564202
ggacuguaggugggugaua

SEQ ID NO: 1862214 - RNA, 19 nt, Artificial Sequence
  Description of Artificial Sequence: Synthetic oligonucleotide
  Antisense strand to SEQ ID NO: 1862213
uaucacccaccuacagucc

SEQ ID NO: 1862215 - RNA, 19 nt, Artificial Sequence
  Description of Artificial Sequence: Synthetic oligonucleotide
  Sense strand starting at position 2672 of SEQ ID NO: 1564202
gacuguaggugggugauaa

SEQ ID NO: 1862216 - RNA, 19 nt, Artificial Sequence
  Description of Artificial Sequence: Synthetic oligonucleotide
  Antisense strand to SEQ ID NO: 1862215
uuaucacccaccuacaguc

SEQ ID NO: 1862217 - RNA, 19 nt, Artificial Sequence
  Description of Artificial Sequence: Synthetic oligonucleotide
  Sense strand starting at position 2673 of SEQ ID NO: 1564202
acuguaggugggugauaau

SEQ ID NO: 1862218 - RNA, 19 nt, Artificial Sequence
  Description of Artificial Sequence: Synthetic oligonucleotide
  Antisense strand to SEQ ID NO: 1862217
auuaucacccaccuacagu

SEQ ID NO: 1862219 - RNA, 19 nt, Artificial Sequence
  Description of Artificial Sequence: Synthetic oligonucleotide
  Sense strand starting at position 2685 of SEQ ID NO: 1564202
ugauaauuagacuguguua

SEQ ID NO: 1862220 - RNA, 19 nt, Artificial Sequence
  Description of Artificial Sequence: Synthetic oligonucleotide
  Antisense strand to SEQ ID NO: 1862219
uaacacagucuaauuauca

SEQ ID NO: 1862221 - RNA, 19 nt, Artificial Sequence
  Description of Artificial Sequence: Synthetic oligonucleotide
  Sense strand starting at position 2736 of SEQ ID NO: 1564202
aguccuauaaggugggaga

SEQ ID NO: 1862222 - RNA, 19 nt, Artificial Sequence
  Description of Artificial Sequence: Synthetic oligonucleotide
  Antisense strand to SEQ ID NO: 1862221
ucucccaccuuauaggacu

SEQ ID NO: 1862223 - RNA, 19 nt, Artificial Sequence
  Description of Artificial Sequence: Synthetic oligonucleotide
  Sense strand starting at position 2737 of SEQ ID NO: 1564202
guccuauaaggugggagaa

SEQ ID NO: 1862224 - RNA, 19 nt, Artificial Sequence
  Description of Artificial Sequence: Synthetic oligonucleotide
  Antisense strand to SEQ ID NO: 1862223
uucucccaccuuauaggac

SEQ ID NO: 1862225 - RNA, 19 nt, Artificial Sequence
  Description of Artificial Sequence: Synthetic oligonucleotide
  Sense strand starting at position 2783 of SEQ ID NO: 1564202
gagguaguguauucugaga

SEQ ID NO: 1862226 - RNA, 19 nt, Artificial Sequence
  Description of Artificial Sequence: Synthetic oligonucleotide
  Antisense strand to SEQ ID NO: 1862225
ucucagaauacacuaccuc

SEQ ID NO: 1862227 - RNA, 19 nt, Artificial Sequence
  Description of Artificial Sequence: Synthetic oligonucleotide
  Sense strand starting at position 2885 of SEQ ID NO: 1564202
guguguugcaaacacuuau

SEQ ID NO: 1862228 - RNA, 19 nt, Artificial Sequence
  Description of Artificial Sequence: Synthetic oligonucleotide
  Antisense strand to SEQ ID NO: 1862227
auaaguguuugcaacacac

SEQ ID NO: 1862229 - RNA, 19 nt, Artificial Sequence
  Description of Artificial Sequence: Synthetic oligonucleotide
  Sense strand starting at position 2907 of SEQ ID NO: 1564202
caguuauugacuggaggga

SEQ ID NO: 1862230 - RNA, 19 nt, Artificial Sequence
  Description of Artificial Sequence: Synthetic oligonucleotide
  Antisense strand to SEQ ID NO: 1862229
ucccuccagucaauaacug

SEQ ID NO: 1862231 - RNA, 19 nt, Artificial Sequence
  Description of Artificial Sequence: Synthetic oligonucleotide
  Sense strand starting at position 2933 of SEQ ID NO: 1564202
acaagaaucugcuugcaac

SEQ ID NO: 1862232 - RNA, 19 nt, Artificial Sequence
  Description of Artificial Sequence: Synthetic oligonucleotide
  Antisense strand to SEQ ID NO: 1862231
guugcaagcagauucuugu

SEQ ID NO: 1862233 - RNA, 19 nt, Artificial Sequence
  Description of Artificial Sequence: Synthetic oligonucleotide
  Sense strand starting at position 3241 of SEQ ID NO: 1564202
ugguaaugacuguguagcu

SEQ ID NO: 1862234 - RNA, 19 nt, Artificial Sequence
  Description of Artificial Sequence: Synthetic oligonucleotide
  Antisense strand to SEQ ID NO: 1862233
agcuacacagucauuacca

SEQ ID NO: 1862235 - RNA, 19 nt, Artificial Sequence
  Description of Artificial Sequence: Synthetic oligonucleotide
  Sense strand starting at position 3242 of SEQ ID NO: 1564202
gguaaugacuguguagcua

SEQ ID NO: 1862236 - RNA, 19 nt, Artificial Sequence
  Description of Artificial Sequence: Synthetic oligonucleotide
  Antisense strand to SEQ ID NO: 1862235
uagcuacacagucauuacc

SEQ ID NO: 1862237 - RNA, 19 nt, Artificial Sequence
  Description of Artificial Sequence: Synthetic oligonucleotide
  Sense strand starting at position 3301 of SEQ ID NO: 1564202
uaaguugggcaucacuaaa

SEQ ID NO: 1862238 - RNA, 19 nt, Artificial Sequence
  Description of Artificial Sequence: Synthetic oligonucleotide
  Antisense strand to SEQ ID NO: 1862237
uuuagugaugcccaacuua

SEQ ID NO: 1862239 - RNA, 19 nt, Artificial Sequence
  Description of Artificial Sequence: Synthetic oligonucleotide
  Sense strand starting at position 3405 of SEQ ID NO: 1564202
gauuaaggauuguauuuga

SEQ ID NO: 1862240 - RNA, 19 nt, Artificial Sequence
  Description of Artificial Sequence: Synthetic oligonucleotide
  Antisense strand to SEQ ID NO: 1862239
ucaaauacaauccuuaauc

SEQ ID NO: 1862241 - RNA, 19 nt, Artificial Sequence
  Description of Artificial Sequence: Synthetic oligonucleotide
  Sense strand starting at position 3509 of SEQ ID NO: 1564202
agaagaccuugucucuaau

SEQ ID NO: 1862242 - RNA, 19 nt, Artificial Sequence
  Description of Artificial Sequence: Synthetic oligonucleotide
  Antisense strand to SEQ ID NO: 1862241
auuagagacaaggucuucu

SEQ ID NO: 1862243 - RNA, 19 nt, Artificial Sequence
  Description of Artificial Sequence: Synthetic oligonucleotide
  Sense strand starting at position 3567 of SEQ ID NO: 1564202
gugugugcguguacagaua

SEQ ID NO: 1862244 - RNA, 19 nt, Artificial Sequence
  Description of Artificial Sequence: Synthetic oligonucleotide
  Antisense strand to SEQ ID NO: 1862243
uaucuguacacgcacacac

SEQ ID NO: 1862245 - RNA, 19 nt, Artificial Sequence
  Description of Artificial Sequence: Synthetic oligonucleotide
  Sense strand starting at position 3759 of SEQ ID NO: 1564202
ggaauugcaaguuaaagua

SEQ ID NO: 1862246 - RNA, 19 nt, Artificial Sequence
  Description of Artificial Sequence: Synthetic oligonucleotide
  Antisense strand to SEQ ID NO: 1862245
uacuuuaacuugcaauucc

SEQ ID NO: 1862247 - RNA, 19 nt, Artificial Sequence
  Description of Artificial Sequence: Synthetic oligonucleotide
  Sense strand starting at position 3871 of SEQ ID NO: 1564202
auuuguugcuaaugggaau

SEQ ID NO: 1862248 - RNA, 19 nt, Artificial Sequence
  Description of Artificial Sequence: Synthetic oligonucleotide
  Antisense strand to SEQ ID NO: 1862247
auucccauuagcaacaaau

SEQ ID NO: 1862249 - RNA, 19 nt, Artificial Sequence
  Description of Artificial Sequence: Synthetic oligonucleotide
  Sense strand starting at position 3921 of SEQ ID NO: 1564202
ucggcaauuuccuacaaag

SEQ ID NO: 1862250 - RNA, 19 nt, Artificial Sequence
  Description of Artificial Sequence: Synthetic oligonucleotide
  Antisense strand to SEQ ID NO: 1862249
cuuuguaggaaauugccga

SEQ ID NO: 1862251 - RNA, 19 nt, Artificial Sequence
  Description of Artificial Sequence: Synthetic oligonucleotide
  Sense strand starting at position 3946 of SEQ ID NO: 1564202
agagucuuaccauacaguc

SEQ ID NO: 1862252 - RNA, 19 nt, Artificial Sequence
  Description of Artificial Sequence: Synthetic oligonucleotide
  Antisense strand to SEQ ID NO: 1862251
gacuguaugguaagacucu

SEQ ID NO: 1862253 - RNA, 19 nt, Artificial Sequence
  Description of Artificial Sequence: Synthetic oligonucleotide
  Sense strand starting at position 19 of SEQ ID NO: 1564203
ugauauaauugaugggaaa

SEQ ID NO: 1862254 - RNA, 19 nt, Artificial Sequence
  Description of Artificial Sequence: Synthetic oligonucleotide
  Antisense strand to SEQ ID NO: 1862253
uuucccaucaauuauauca

SEQ ID NO: 1862255 - RNA, 19 nt, Artificial Sequence
  Description of Artificial Sequence: Synthetic oligonucleotide
  Sense strand starting at position 61 of SEQ ID NO: 1564203
uucuaaguaugucuacaau

SEQ ID NO: 1862256 - RNA, 19 nt, Artificial Sequence
  Description of Artificial Sequence: Synthetic oligonucleotide
  Antisense strand to SEQ ID NO: 1862255
auuguagacauacuuagaa

SEQ ID NO: 1862257 - RNA, 19 nt, Artificial Sequence
  Description of Artificial Sequence: Synthetic oligonucleotide
  Sense strand starting at position 67 of SEQ ID NO: 1564203
guaugucuacaauaaaguu

SEQ ID NO: 1862258 - RNA, 19 nt, Artificial Sequence
  Description of Artificial Sequence: Synthetic oligonucleotide
  Antisense strand to SEQ ID NO: 1862257
aacuuuauuguagacauac

SEQ ID NO: 1862259 - RNA, 19 nt, Artificial Sequence
  Description of Artificial Sequence: Synthetic oligonucleotide
  Sense strand starting at position 124 of SEQ ID NO: 1564203
agagaaguucucugaggua

SEQ ID NO: 1862260 - RNA, 19 nt, Artificial Sequence
  Description of Artificial Sequence: Synthetic oligonucleotide
  Antisense strand to SEQ ID NO: 1862259
uaccucagagaacuucucu

SEQ ID NO: 1862261 - RNA, 19 nt, Artificial Sequence
  Description of Artificial Sequence: Synthetic oligonucleotide
  Sense strand starting at position 127 of SEQ ID NO: 1564203
gaaguucucugagguaaag

SEQ ID NO: 1862262 - RNA, 19 nt, Artificial Sequence
  Description of Artificial Sequence: Synthetic oligonucleotide
  Antisense strand to SEQ ID NO: 1862261
cuuuaccucagagaacuuc

SEQ ID NO: 1862263 - RNA, 19 nt, Artificial Sequence
  Description of Artificial Sequence: Synthetic oligonucleotide
  Sense strand starting at position 256 of SEQ ID NO: 1564203
cggugauccagugaugaac

SEQ ID NO: 1862264 - RNA, 19 nt, Artificial Sequence
  Description of Artificial Sequence: Synthetic oligonucleotide
  Antisense strand to SEQ ID NO: 1862263
guucaucacuggaucaccg

SEQ ID NO: 1862265 - RNA, 19 nt, Artificial Sequence
  Description of Artificial Sequence: Synthetic oligonucleotide
  Sense strand starting at position 258 of SEQ ID NO: 1564203
gugauccagugaugaacaa

SEQ ID NO: 1862266 - RNA, 19 nt, Artificial Sequence
  Description of Artificial Sequence: Synthetic oligonucleotide
  Antisense strand to SEQ ID NO: 1862265
uuguucaucacuggaucac

SEQ ID NO: 1862267 - RNA, 19 nt, Artificial Sequence
  Description of Artificial Sequence: Synthetic oligonucleotide
  Sense strand starting at position 281 of SEQ ID NO: 1564203
uguuguuugcauuaguuac

SEQ ID NO: 1862268 - RNA, 19 nt, Artificial Sequence
  Description of Artificial Sequence: Synthetic oligonucleotide
  Antisense strand to SEQ ID NO: 1862267
guaacuaaugcaaacaaca

SEQ ID NO: 1862269 - RNA, 19 nt, Artificial Sequence
  Description of Artificial Sequence: Synthetic oligonucleotide
  Sense strand starting at position 304 of SEQ ID NO: 1564203
cuugguggcuuuccacaaa

SEQ ID NO: 1862270 - RNA, 19 nt, Artificial Sequence
  Description of Artificial Sequence: Synthetic oligonucleotide
  Antisense strand to SEQ ID NO: 1862269
uuuguggaaagccaccaag

SEQ ID NO: 1862271 - RNA, 19 nt, Artificial Sequence
  Description of Artificial Sequence: Synthetic oligonucleotide
  Sense strand starting at position 364 of SEQ ID NO: 1564203
acgcgucauacucaacguu

SEQ ID NO: 1862272 - RNA, 19 nt, Artificial Sequence
  Description of Artificial Sequence: Synthetic oligonucleotide
  Antisense strand to SEQ ID NO: 1862271
aacguugaguaugacgcgu

SEQ ID NO: 1862273 - RNA, 19 nt, Artificial Sequence
  Description of Artificial Sequence: Synthetic oligonucleotide
  Sense strand starting at position 367 of SEQ ID NO: 1564203
cgucauacucaacguucuu

SEQ ID NO: 1862274 - RNA, 19 nt, Artificial Sequence
  Description of Artificial Sequence: Synthetic oligonucleotide
  Antisense strand to SEQ ID NO: 1862273
aagaacguugaguaugacg

SEQ ID NO: 1862275 - RNA, 19 nt, Artificial Sequence
  Description of Artificial Sequence: Synthetic oligonucleotide
  Sense strand starting at position 373 of SEQ ID NO: 1564203
acucaacguucuucuguau

SEQ ID NO: 1862276 - RNA, 19 nt, Artificial Sequence
  Description of Artificial Sequence: Synthetic oligonucleotide
  Antisense strand to SEQ ID NO: 1862275
auacagaagaacguugagu

SEQ ID NO: 1862277 - RNA, 19 nt, Artificial Sequence
  Description of Artificial Sequence: Synthetic oligonucleotide
  Sense strand starting at position 516 of SEQ ID NO: 1564203
ccucgccuuccagguuaaa

SEQ ID NO: 1862278 - RNA, 19 nt, Artificial Sequence
  Description of Artificial Sequence: Synthetic oligonucleotide
  Antisense strand to SEQ ID NO: 1862277
uuuaaccuggaaggcgagg

SEQ ID NO: 1862279 - RNA, 19 nt, Artificial Sequence
  Description of Artificial Sequence: Synthetic oligonucleotide
  Sense strand starting at position 538 of SEQ ID NO: 1564203
gggacugggcgauguuuca

SEQ ID NO: 1862280 - RNA, 19 nt, Artificial Sequence
  Description of Artificial Sequence: Synthetic oligonucleotide
  Antisense strand to SEQ ID NO: 1862279
ugaaacaucgcccaguccc

SEQ ID NO: 1862281 - RNA, 19 nt, Artificial Sequence
  Description of Artificial Sequence: Synthetic oligonucleotide
  Sense strand starting at position 668 of SEQ ID NO: 1564203
gaacaucacugacucgaga

SEQ ID NO: 1862282 - RNA, 19 nt, Artificial Sequence
  Description of Artificial Sequence: Synthetic oligonucleotide
  Antisense strand to SEQ ID NO: 1862281
ucucgagucagugauguuc

SEQ ID NO: 1862283 - RNA, 19 nt, Artificial Sequence
  Description of Artificial Sequence: Synthetic oligonucleotide
  Sense strand starting at position 685 of SEQ ID NO: 1564203
gaauaaacgucagucccua

SEQ ID NO: 1862284 - RNA, 19 nt, Artificial Sequence
  Description of Artificial Sequence: Synthetic oligonucleotide
  Antisense strand to SEQ ID NO: 1862283
uagggacugacguuuauuc

SEQ ID NO: 1862285 - RNA, 19 nt, Artificial Sequence
  Description of Artificial Sequence: Synthetic oligonucleotide
  Sense strand starting at position 1118 of SEQ ID NO: 1564203
ucccgacuuccuugacagu

SEQ ID NO: 1862286 - RNA, 19 nt, Artificial Sequence
  Description of Artificial Sequence: Synthetic oligonucleotide
  Antisense strand to SEQ ID NO: 1862285
acugucaaggaagucggga

SEQ ID NO: 1862287 - RNA, 19 nt, Artificial Sequence
  Description of Artificial Sequence: Synthetic oligonucleotide
  Sense strand starting at position 1119 of SEQ ID NO: 1564203
cccgacuuccuugacaguu

SEQ ID NO: 1862288 - RNA, 19 nt, Artificial Sequence
  Description of Artificial Sequence: Synthetic oligonucleotide
  Antisense strand to SEQ ID NO: 1862287
aacugucaaggaagucggg

SEQ ID NO: 1862289 - RNA, 19 nt, Artificial Sequence
  Description of Artificial Sequence: Synthetic oligonucleotide
  Sense strand starting at position 1132 of SEQ ID NO: 1564203
acaguuucugcgcgucaga

SEQ ID NO: 1862290 - RNA, 19 nt, Artificial Sequence
  Description of Artificial Sequence: Synthetic oligonucleotide
  Antisense strand to SEQ ID NO: 1862289
ucugacgcgcagaaacugu

SEQ ID NO: 1862291 - RNA, 19 nt, Artificial Sequence
  Description of Artificial Sequence: Synthetic oligonucleotide
  Sense strand starting at position 1133 of SEQ ID NO: 1564203
caguuucugcgcgucagaa

SEQ ID NO: 1862292 - RNA, 19 nt, Artificial Sequence
  Description of Artificial Sequence: Synthetic oligonucleotide
  Antisense strand to SEQ ID NO: 1862291
uucugacgcgcagaaacug

SEQ ID NO: 1862293 - RNA, 19 nt, Artificial Sequence
  Description of Artificial Sequence: Synthetic oligonucleotide
  Sense strand starting at position 1134 of SEQ ID NO: 1564203
aguuucugcgcgucagaaa

SEQ ID NO: 1862294 - RNA, 19 nt, Artificial Sequence
  Description of Artificial Sequence: Synthetic oligonucleotide
  Antisense strand to SEQ ID NO: 1862293
uuucugacgcgcagaaacu

SEQ ID NO: 1862295 - RNA, 19 nt, Artificial Sequence
  Description of Artificial Sequence: Synthetic oligonucleotide
  Sense strand starting at position 1135 of SEQ ID NO: 1564203
guuucugcgcgucagaaac

SEQ ID NO: 1862296 - RNA, 19 nt, Artificial Sequence
  Description of Artificial Sequence: Synthetic oligonucleotide
  Antisense strand to SEQ ID NO: 1862295
guuucugacgcgcagaaac

SEQ ID NO: 1862297 - RNA, 19 nt, Artificial Sequence
  Description of Artificial Sequence: Synthetic oligonucleotide
  Sense strand starting at position 1241 of SEQ ID NO: 1564203
ccgcgucccggguaugaau

SEQ ID NO: 1862298 - RNA, 19 nt, Artificial Sequence
  Description of Artificial Sequence: Synthetic oligonucleotide
  Antisense strand to SEQ ID NO: 1862297
auucauacccgggacgcgg

SEQ ID NO: 1862299 - RNA, 19 nt, Artificial Sequence
  Description of Artificial Sequence: Synthetic oligonucleotide
  Sense strand starting at position 1386 of SEQ ID NO: 1564203
agccgagcgcuucccuaaa

SEQ ID NO: 1862300 - RNA, 19 nt, Artificial Sequence
  Description of Artificial Sequence: Synthetic oligonucleotide
  Antisense strand to SEQ ID NO: 1862299
uuuagggaagcgcucggcu

SEQ ID NO: 1862301 - RNA, 19 nt, Artificial Sequence
  Description of Artificial Sequence: Synthetic oligonucleotide
  Sense strand starting at position 1388 of SEQ ID NO: 1564203
ccgagcgcuucccuaaacu

SEQ ID NO: 1862302 - RNA, 19 nt, Artificial Sequence
  Description of Artificial Sequence: Synthetic oligonucleotide
  Antisense strand to SEQ ID NO: 1862301
aguuuagggaagcgcucgg

SEQ ID NO: 1862303 - RNA, 19 nt, Artificial Sequence
  Description of Artificial Sequence: Synthetic oligonucleotide
  Sense strand starting at position 2646 of SEQ ID NO: 1564203
gauggugaaucucccucaa

SEQ ID NO: 1862304 - RNA, 19 nt, Artificial Sequence
  Description of Artificial Sequence: Synthetic oligonucleotide
  Antisense strand to SEQ ID NO: 1862303
uugagggagauucaccauc

SEQ ID NO: 1862305 - RNA, 19 nt, Artificial Sequence
  Description of Artificial Sequence: Synthetic oligonucleotide
  Sense strand starting at position 2764 of SEQ ID NO: 1564203
gccagaaaugcuuagggac

SEQ ID NO: 1862306 - RNA, 19 nt, Artificial Sequence
  Description of Artificial Sequence: Synthetic oligonucleotide
  Antisense strand to SEQ ID NO: 1862305
gucccuaagcauuucuggc

SEQ ID NO: 1862307 - RNA, 19 nt, Artificial Sequence
  Description of Artificial Sequence: Synthetic oligonucleotide
  Sense strand starting at position 2766 of SEQ ID NO: 1564203
cagaaaugcuuagggacaa

SEQ ID NO: 1862308 - RNA, 19 nt, Artificial Sequence
  Description of Artificial Sequence: Synthetic oligonucleotide
  Antisense strand to SEQ ID NO: 1862307
uugucccuaagcauuucug

SEQ ID NO: 1862309 - RNA, 19 nt, Artificial Sequence
  Description of Artificial Sequence: Synthetic oligonucleotide
  Sense strand starting at position 2767 of SEQ ID NO: 1564203
agaaaugcuuagggacaaa

SEQ ID NO: 1862310 - RNA, 19 nt, Artificial Sequence
  Description of Artificial Sequence: Synthetic oligonucleotide
  Antisense strand to SEQ ID NO: 1862309
uuugucccuaagcauuucu

SEQ ID NO: 1862311 - RNA, 19 nt, Artificial Sequence
  Description of Artificial Sequence: Synthetic oligonucleotide
  Sense strand starting at position 2906 of SEQ ID NO: 1564203
cuugcaaagugcuuuaugu

SEQ ID NO: 1862312 - RNA, 19 nt, Artificial Sequence
  Description of Artificial Sequence: Synthetic oligonucleotide
  Antisense strand to SEQ ID NO: 1862311
acauaaagcacuuugcaag

SEQ ID NO: 1862313 - RNA, 19 nt, Artificial Sequence
  Description of Artificial Sequence: Synthetic oligonucleotide
  Sense strand starting at position 3063 of SEQ ID NO: 1564203
gggucagccucguugaaua

SEQ ID NO: 1862314 - RNA, 19 nt, Artificial Sequence
  Description of Artificial Sequence: Synthetic oligonucleotide
  Antisense strand to SEQ ID NO: 1862313
uauucaacgaggcugaccc

SEQ ID NO: 1862315 - RNA, 19 nt, Artificial Sequence
  Description of Artificial Sequence: Synthetic oligonucleotide
  Sense strand starting at position 3065 of SEQ ID NO: 1564203
gucagccucguugaauauu

SEQ ID NO: 1862316 - RNA, 19 nt, Artificial Sequence
  Description of Artificial Sequence: Synthetic oligonucleotide
  Antisense strand to SEQ ID NO: 1862315
aauauucaacgaggcugac

SEQ ID NO: 1862317 - RNA, 19 nt, Artificial Sequence
  Description of Artificial Sequence: Synthetic oligonucleotide
  Sense strand starting at position 3114 of SEQ ID NO: 1564203
uauaaugagcuucgugcua

SEQ ID NO: 1862318 - RNA, 19 nt, Artificial Sequence
  Description of Artificial Sequence: Synthetic oligonucleotide
  Antisense strand to SEQ ID NO: 1862317
uagcacgaagcucauuaua

SEQ ID NO: 1862319 - RNA, 19 nt, Artificial Sequence
  Description of Artificial Sequence: Synthetic oligonucleotide
  Sense strand starting at position 3116 of SEQ ID NO: 1564203
uaaugagcuucgugcuaag

SEQ ID NO: 1862320 - RNA, 19 nt, Artificial Sequence
  Description of Artificial Sequence: Synthetic oligonucleotide
  Antisense strand to SEQ ID NO: 1862319
cuuagcacgaagcucauua

SEQ ID NO: 1862321 - RNA, 19 nt, Artificial Sequence
  Description of Artificial Sequence: Synthetic oligonucleotide
  Sense strand starting at position 3139 of SEQ ID NO: 1564203
cgguacacucagcaaucua

SEQ ID NO: 1862322 - RNA, 19 nt, Artificial Sequence
  Description of Artificial Sequence: Synthetic oligonucleotide
  Antisense strand to SEQ ID NO: 1862321
uagauugcugaguguaccg

SEQ ID NO: 1862323 - RNA, 19 nt, Artificial Sequence
  Description of Artificial Sequence: Synthetic oligonucleotide
  Sense strand starting at position 3180 of SEQ ID NO: 1564203
ccucgaacucuagaccauu

SEQ ID NO: 1862324 - RNA, 19 nt, Artificial Sequence
  Description of Artificial Sequence: Synthetic oligonucleotide
  Antisense strand to SEQ ID NO: 1862323
aauggucuagaguucgagg

SEQ ID NO: 1862325 - RNA, 19 nt, Artificial Sequence
  Description of Artificial Sequence: Synthetic oligonucleotide
  Sense strand starting at position 3196 of SEQ ID NO: 1564203
auuuguuguucugguugua

SEQ ID NO: 1862326 - RNA, 19 nt, Artificial Sequence
  Description of Artificial Sequence: Synthetic oligonucleotide
  Antisense strand to SEQ ID NO: 1862325
uacaaccagaacaacaaau

SEQ ID NO: 1862327 - RNA, 19 nt, Artificial Sequence
  Description of Artificial Sequence: Synthetic oligonucleotide
  Sense strand starting at position 3897 of SEQ ID NO: 1564203
gaacgagcucaugaugcaa

SEQ ID NO: 1862328 - RNA, 19 nt, Artificial Sequence
  Description of Artificial Sequence: Synthetic oligonucleotide
  Antisense strand to SEQ ID NO: 1862327
uugcaucaugagcucguuc

SEQ ID NO: 1862329 - RNA, 19 nt, Artificial Sequence
  Description of Artificial Sequence: Synthetic oligonucleotide
  Sense strand starting at position 63 of SEQ ID NO: 1564204
gagucagaguuaccuccaa

SEQ ID NO: 1862330 - RNA, 19 nt, Artificial Sequence
  Description of Artificial Sequence: Synthetic oligonucleotide
  Antisense strand to SEQ ID NO: 1862329
uuggagguaacucugacuc

SEQ ID NO: 1862331 - RNA, 19 nt, Artificial Sequence
  Description of Artificial Sequence: Synthetic oligonucleotide
  Sense strand starting at position 224 of SEQ ID NO: 1564204
aguuaauugcaucaaugaa

SEQ ID NO: 1862332 - RNA, 19 nt, Artificial Sequence
  Description of Artificial Sequence: Synthetic oligonucleotide
  Antisense strand to SEQ ID NO: 1862331
uucauugaugcaauuaacu

SEQ ID NO: 1862333 - RNA, 19 nt, Artificial Sequence
  Description of Artificial Sequence: Synthetic oligonucleotide
  Sense strand starting at position 330 of SEQ ID NO: 1564204
acgcuuucucaccaaauga

SEQ ID NO: 1862334 - RNA, 19 nt, Artificial Sequence
  Description of Artificial Sequence: Synthetic oligonucleotide
  Antisense strand to SEQ ID NO: 1862333
ucauuuggugagaaagcgu

SEQ ID NO: 1862335 - RNA, 19 nt, Artificial Sequence
  Description of Artificial Sequence: Synthetic oligonucleotide
  Sense strand starting at position 362 of SEQ ID NO: 1564204
ucagaucagugagucauca

SEQ ID NO: 1862336 - RNA, 19 nt, Artificial Sequence
  Description of Artificial Sequence: Synthetic oligonucleotide
  Antisense strand to SEQ ID NO: 1862335
ugaugacucacugaucuga

SEQ ID NO: 1862337 - RNA, 19 nt, Artificial Sequence
  Description of Artificial Sequence: Synthetic oligonucleotide
  Sense strand starting at position 556 of SEQ ID NO: 1564204
ucaucauuccuaggacaug

SEQ ID NO: 1862338 - RNA, 19 nt, Artificial Sequence
  Description of Artificial Sequence: Synthetic oligonucleotide
  Antisense strand to SEQ ID NO: 1862337
cauguccuaggaaugauga

SEQ ID NO: 1862339 - RNA, 19 nt, Artificial Sequence
  Description of Artificial Sequence: Synthetic oligonucleotide
  Sense strand starting at position 572 of SEQ ID NO: 1564204
augcgaauaagguacuaaa

SEQ ID NO: 1862340 - RNA, 19 nt, Artificial Sequence
  Description of Artificial Sequence: Synthetic oligonucleotide
  Antisense strand to SEQ ID NO: 1862339
uuuaguaccuuauucgcau

SEQ ID NO: 1862341 - RNA, 19 nt, Artificial Sequence
  Description of Artificial Sequence: Synthetic oligonucleotide
  Sense strand starting at position 860 of SEQ ID NO: 1564204
guuaguaaacccugaucaa

SEQ ID NO: 1862342 - RNA, 19 nt, Artificial Sequence
  Description of Artificial Sequence: Synthetic oligonucleotide
  Antisense strand to SEQ ID NO: 1862341
uugaucaggguuuacuaac

SEQ ID NO: 1862343 - RNA, 19 nt, Artificial Sequence
  Description of Artificial Sequence: Synthetic oligonucleotide
  Sense strand starting at position 969 of SEQ ID NO: 1564204
ggucuucauggagauaagu

SEQ ID NO: 1862344 - RNA, 19 nt, Artificial Sequence
  Description of Artificial Sequence: Synthetic oligonucleotide
  Antisense strand to SEQ ID NO: 1862343
acuuaucuccaugaagacc

SEQ ID NO: 1862345 - RNA, 19 nt, Artificial Sequence
  Description of Artificial Sequence: Synthetic oligonucleotide
  Sense strand starting at position 977 of SEQ ID NO: 1564204
uggagauaagucugcugaa

SEQ ID NO: 1862346 - RNA, 19 nt, Artificial Sequence
  Description of Artificial Sequence: Synthetic oligonucleotide
  Antisense strand to SEQ ID NO: 1862345
uucagcagacuuaucucca

SEQ ID NO: 1862347 - RNA, 19 nt, Artificial Sequence
  Description of Artificial Sequence: Synthetic oligonucleotide
  Sense strand starting at position 978 of SEQ ID NO: 1564204
ggagauaagucugcugaac

SEQ ID NO: 1862348 - RNA, 19 nt, Artificial Sequence
  Description of Artificial Sequence: Synthetic oligonucleotide
  Antisense strand to SEQ ID NO: 1862347
guucagcagacuuaucucc

SEQ ID NO: 1862349 - RNA, 19 nt, Artificial Sequence
  Description of Artificial Sequence: Synthetic oligonucleotide
  Sense strand starting at position 1333 of SEQ ID NO: 1564204
ggaagagccucgguagaaa

SEQ ID NO: 1862350 - RNA, 19 nt, Artificial Sequence
  Description of Artificial Sequence: Synthetic oligonucleotide
  Antisense strand to SEQ ID NO: 1862349
uuucuaccgaggcucuucc

SEQ ID NO: 1862351 - RNA, 19 nt, Artificial Sequence
  Description of Artificial Sequence: Synthetic oligonucleotide
  Sense strand starting at position 1492 of SEQ ID NO: 1564204
aaacaagaucugugagcac

SEQ ID NO: 1862352 - RNA, 19 nt, Artificial Sequence
  Description of Artificial Sequence: Synthetic oligonucleotide
  Antisense strand to SEQ ID NO: 1862351
gugcucacagaucuuguuu

SEQ ID NO: 1862353 - RNA, 19 nt, Artificial Sequence
  Description of Artificial Sequence: Synthetic oligonucleotide
  Sense strand starting at position 1495 of SEQ ID NO: 1564204
caagaucugugagcacuaa

SEQ ID NO: 1862354 - RNA, 19 nt, Artificial Sequence
  Description of Artificial Sequence: Synthetic oligonucleotide
  Antisense strand to SEQ ID NO: 1862353
uuagugcucacagaucuug

SEQ ID NO: 1862355 - RNA, 19 nt, Artificial Sequence
  Description of Artificial Sequence: Synthetic oligonucleotide
  Sense strand starting at position 1496 of SEQ ID NO: 1564204
aagaucugugagcacuaau

SEQ ID NO: 1862356 - RNA, 19 nt, Artificial Sequence
  Description of Artificial Sequence: Synthetic oligonucleotide
  Antisense strand to SEQ ID NO: 1862355
auuagugcucacagaucuu

SEQ ID NO: 1862357 - RNA, 19 nt, Artificial Sequence
  Description of Artificial Sequence: Synthetic oligonucleotide
  Sense strand starting at position 1545 of SEQ ID NO: 1564204
gcugcauugcugccuagga

SEQ ID NO: 1862358 - RNA, 19 nt, Artificial Sequence
  Description of Artificial Sequence: Synthetic oligonucleotide
  Antisense strand to SEQ ID NO: 1862357
uccuaggcagcaaugcagc

SEQ ID NO: 1862359 - RNA, 19 nt, Artificial Sequence
  Description of Artificial Sequence: Synthetic oligonucleotide
  Sense strand starting at position 1588 of SEQ ID NO: 1564204
gguauuacagcauacucuu

SEQ ID NO: 1862360 - RNA, 19 nt, Artificial Sequence
  Description of Artificial Sequence: Synthetic oligonucleotide
  Antisense strand to SEQ ID NO: 1862359
aagaguaugcuguaauacc

SEQ ID NO: 1862361 - RNA, 19 nt, Artificial Sequence
  Description of Artificial Sequence: Synthetic oligonucleotide
  Sense strand starting at position 1674 of SEQ ID NO: 1564204
agaaguagugauugcaaga

SEQ ID NO: 1862362 - RNA, 19 nt, Artificial Sequence
  Description of Artificial Sequence: Synthetic oligonucleotide
  Antisense strand to SEQ ID NO: 1862361
ucuugcaaucacuacuucu

SEQ ID NO: 1862363 - RNA, 19 nt, Artificial Sequence
  Description of Artificial Sequence: Synthetic oligonucleotide
  Sense strand starting at position 1679 of SEQ ID NO: 1564204
uagugauugcaagaucucu

SEQ ID NO: 1862364 - RNA, 19 nt, Artificial Sequence
  Description of Artificial Sequence: Synthetic oligonucleotide
  Antisense strand to SEQ ID NO: 1862363
agagaucuugcaaucacua

SEQ ID NO: 1862365 - RNA, 19 nt, Artificial Sequence
  Description of Artificial Sequence: Synthetic oligonucleotide
  Sense strand starting at position 1761 of SEQ ID NO: 1564204
uagggacuugguuagugau

SEQ ID NO: 1862366 - RNA, 19 nt, Artificial Sequence
  Description of Artificial Sequence: Synthetic oligonucleotide
  Antisense strand to SEQ ID NO: 1862365
aucacuaaccaagucccua

SEQ ID NO: 1862367 - RNA, 19 nt, Artificial Sequence
  Description of Artificial Sequence: Synthetic oligonucleotide
  Sense strand starting at position 1763 of SEQ ID NO: 1564204
gggacuugguuagugauag

SEQ ID NO: 1862368 - RNA, 19 nt, Artificial Sequence
  Description of Artificial Sequence: Synthetic oligonucleotide
  Antisense strand to SEQ ID NO: 1862367
cuaucacuaaccaaguccc

SEQ ID NO: 1862369 - RNA, 19 nt, Artificial Sequence
  Description of Artificial Sequence: Synthetic oligonucleotide
  Sense strand starting at position 1802 of SEQ ID NO: 1564204
ugaggagaaucccuguacu

SEQ ID NO: 1862370 - RNA, 19 nt, Artificial Sequence
  Description of Artificial Sequence: Synthetic oligonucleotide
  Antisense strand to SEQ ID NO: 1862369
aguacagggauucuccuca

SEQ ID NO: 1862371 - RNA, 19 nt, Artificial Sequence
  Description of Artificial Sequence: Synthetic oligonucleotide
  Sense strand starting at position 1836 of SEQ ID NO: 1564204
cccauaacauggucaguaa

SEQ ID NO: 1862372 - RNA, 19 nt, Artificial Sequence
  Description of Artificial Sequence: Synthetic oligonucleotide
  Antisense strand to SEQ ID NO: 1862371
uuacugaccauguuauggg

SEQ ID NO: 1862373 - RNA, 19 nt, Artificial Sequence
  Description of Artificial Sequence: Synthetic oligonucleotide
  Sense strand starting at position 2292 of SEQ ID NO: 1564204
guggauugacuuuacaagu

SEQ ID NO: 1862374 - RNA, 19 nt, Artificial Sequence
  Description of Artificial Sequence: Synthetic oligonucleotide
  Antisense strand to SEQ ID NO: 1862373
acuuguaaagucaauccac

SEQ ID NO: 1862375 - RNA, 19 nt, Artificial Sequence
  Description of Artificial Sequence: Synthetic oligonucleotide
  Sense strand starting at position 2311 of SEQ ID NO: 1564204
cuagucagcucauuuccau

SEQ ID NO: 1862376 - RNA, 19 nt, Artificial Sequence
  Description of Artificial Sequence: Synthetic oligonucleotide
  Antisense strand to SEQ ID NO: 1862375
auggaaaugagcugacuag

SEQ ID NO: 1862377 - RNA, 19 nt, Artificial Sequence
  Description of Artificial Sequence: Synthetic oligonucleotide
  Sense strand starting at position 2602 of SEQ ID NO: 1564204
cagcgaaucccagaaaugu

SEQ ID NO: 1862378 - RNA, 19 nt, Artificial Sequence
  Description of Artificial Sequence: Synthetic oligonucleotide
  Antisense strand to SEQ ID NO: 1862377
acauuucugggauucgcug

SEQ ID NO: 1862379 - RNA, 19 nt, Artificial Sequence
  Description of Artificial Sequence: Synthetic oligonucleotide
  Sense strand starting at position 2616 of SEQ ID NO: 1564204
aaugucuuggcugacacau

SEQ ID NO: 1862380 - RNA, 19 nt, Artificial Sequence
  Description of Artificial Sequence: Synthetic oligonucleotide
  Antisense strand to SEQ ID NO: 1862379
augugucagccaagacauu

SEQ ID NO: 1862381 - RNA, 19 nt, Artificial Sequence
  Description of Artificial Sequence: Synthetic oligonucleotide
  Sense strand starting at position 2733 of SEQ ID NO: 1564204
agaagaauuuacuagcaau

SEQ ID NO: 1862382 - RNA, 19 nt, Artificial Sequence
  Description of Artificial Sequence: Synthetic oligonucleotide
  Antisense strand to SEQ ID NO: 1862381
auugcuaguaaauucuucu

SEQ ID NO: 1862383 - RNA, 19 nt, Artificial Sequence
  Description of Artificial Sequence: Synthetic oligonucleotide
  Sense strand starting at position 2736 of SEQ ID NO: 1564204
agaauuuacuagcaauaag

SEQ ID NO: 1862384 - RNA, 19 nt, Artificial Sequence
  Description of Artificial Sequence: Synthetic oligonucleotide
  Antisense strand to SEQ ID NO: 1862383
cuuauugcuaguaaauucu

SEQ ID NO: 1862385 - RNA, 19 nt, Artificial Sequence
  Description of Artificial Sequence: Synthetic oligonucleotide
  Sense strand starting at position 2746 of SEQ ID NO: 1564204
agcaauaagugauccauag

SEQ ID NO: 1862386 - RNA, 19 nt, Artificial Sequence
  Description of Artificial Sequence: Synthetic oligonucleotide
  Antisense strand to SEQ ID NO: 1862385
cuauggaucacuuauugcu

SEQ ID NO: 1862387 - RNA, 19 nt, Artificial Sequence
  Description of Artificial Sequence: Synthetic oligonucleotide
  Sense strand starting at position 2845 of SEQ ID NO: 1564204
guuuaauuggacgaauucu

SEQ ID NO: 1862388 - RNA, 19 nt, Artificial Sequence
  Description of Artificial Sequence: Synthetic oligonucleotide
  Antisense strand to SEQ ID NO: 1862387
agaauucguccaauuaaac

SEQ ID NO: 1862389 - RNA, 19 nt, Artificial Sequence
  Description of Artificial Sequence: Synthetic oligonucleotide
  Sense strand starting at position 2853 of SEQ ID NO: 1564204
ggacgaauucuauagcuuu

SEQ ID NO: 1862390 - RNA, 19 nt, Artificial Sequence
  Description of Artificial Sequence: Synthetic oligonucleotide
  Antisense strand to SEQ ID NO: 1862389
aaagcuauagaauucgucc

SEQ ID NO: 1862391 - RNA, 19 nt, Artificial Sequence
  Description of Artificial Sequence: Synthetic oligonucleotide
  Sense strand starting at position 3251 of SEQ ID NO: 1564204
ggacuacagucucucuaaa

SEQ ID NO: 1862392 - RNA, 19 nt, Artificial Sequence
  Description of Artificial Sequence: Synthetic oligonucleotide
  Antisense strand to SEQ ID NO: 1862391
uuuagagagacuguagucc

SEQ ID NO: 1862393 - RNA, 19 nt, Artificial Sequence
  Description of Artificial Sequence: Synthetic oligonucleotide
  Sense strand starting at position 3458 of SEQ ID NO: 1564204
cugaaagaagaauguguuu

SEQ ID NO: 1862394 - RNA, 19 nt, Artificial Sequence
  Description of Artificial Sequence: Synthetic oligonucleotide
  Antisense strand to SEQ ID NO: 1862393
aaacacauucuucuuucag

SEQ ID NO: 1862395 - RNA, 19 nt, Artificial Sequence
  Description of Artificial Sequence: Synthetic oligonucleotide
  Sense strand starting at position 3460 of SEQ ID NO: 1564204
gaaagaagaauguguuugu

SEQ ID NO: 1862396 - RNA, 19 nt, Artificial Sequence
  Description of Artificial Sequence: Synthetic oligonucleotide
  Antisense strand to SEQ ID NO: 1862395
acaaacacauucuucuuuc

SEQ ID NO: 1862397 - RNA, 19 nt, Artificial Sequence
  Description of Artificial Sequence: Synthetic oligonucleotide
  Sense strand starting at position 3506 of SEQ ID NO: 1564204
gggagagaagguugcaaau

SEQ ID NO: 1862398 - RNA, 19 nt, Artificial Sequence
  Description of Artificial Sequence: Synthetic oligonucleotide
  Antisense strand to SEQ ID NO: 1862397
auuugcaaccuucucuccc

SEQ ID NO: 1862399 - RNA, 19 nt, Artificial Sequence
  Description of Artificial Sequence: Synthetic oligonucleotide
  Sense strand starting at position 3611 of SEQ ID NO: 1564204
auguguuuccugucguaau

SEQ ID NO: 1862400 - RNA, 19 nt, Artificial Sequence
  Description of Artificial Sequence: Synthetic oligonucleotide
  Antisense strand to SEQ ID NO: 1862399
auuacgacaggaaacacau

SEQ ID NO: 1862401 - RNA, 19 nt, Artificial Sequence
  Description of Artificial Sequence: Synthetic oligonucleotide
  Sense strand starting at position 3613 of SEQ ID NO: 1564204
guguuuccugucguaauug

SEQ ID NO: 1862402 - RNA, 19 nt, Artificial Sequence
  Description of Artificial Sequence: Synthetic oligonucleotide
  Antisense strand to SEQ ID NO: 1862401
caauuacgacaggaaacac

SEQ ID NO: 1862403 - RNA, 19 nt, Artificial Sequence
  Description of Artificial Sequence: Synthetic oligonucleotide
  Sense strand starting at position 3686 of SEQ ID NO: 1564204
uuugguuaaccacgaagga

SEQ ID NO: 1862404 - RNA, 19 nt, Artificial Sequence
  Description of Artificial Sequence: Synthetic oligonucleotide
  Antisense strand to SEQ ID NO: 1862403
uccuucgugguuaaccaaa

SEQ ID NO: 1862405 - RNA, 19 nt, Artificial Sequence
  Description of Artificial Sequence: Synthetic oligonucleotide
  Sense strand starting at position 3849 of SEQ ID NO: 1564204
gcaauagacagugaggagu

SEQ ID NO: 1862406 - RNA, 19 nt, Artificial Sequence
  Description of Artificial Sequence: Synthetic oligonucleotide
  Antisense strand to SEQ ID NO: 1862405
acuccucacugucuauugc

SEQ ID NO: 1862407 - RNA, 19 nt, Artificial Sequence
  Description of Artificial Sequence: Synthetic oligonucleotide
  Sense strand starting at position 3947 of SEQ ID NO: 1564204
guguauaugcgggaagaag

SEQ ID NO: 1862408 - RNA, 19 nt, Artificial Sequence
  Description of Artificial Sequence: Synthetic oligonucleotide
  Antisense strand to SEQ ID NO: 1862407
cuucuucccgcauauacac

SEQ ID NO: 1862409 - RNA, 19 nt, Artificial Sequence
  Description of Artificial Sequence: Synthetic oligonucleotide
  Sense strand starting at position 171 of SEQ ID NO: 1564205
ggaacauccgccuguaaga

SEQ ID NO: 1862410 - RNA, 19 nt, Artificial Sequence
  Description of Artificial Sequence: Synthetic oligonucleotide
  Antisense strand to SEQ ID NO: 1862409
ucuuacaggcggauguucc

SEQ ID NO: 1862411 - RNA, 19 nt, Artificial Sequence
  Description of Artificial Sequence: Synthetic oligonucleotide
  Sense strand starting at position 234 of SEQ ID NO: 1564205
gagggaguguuucuggaca

SEQ ID NO: 1862412 - RNA, 19 nt, Artificial Sequence
  Description of Artificial Sequence: Synthetic oligonucleotide
  Antisense strand to SEQ ID NO: 1862411
uguccagaaacacucccuc

SEQ ID NO: 1862413 - RNA, 19 nt, Artificial Sequence
  Description of Artificial Sequence: Synthetic oligonucleotide
  Sense strand starting at position 249 of SEQ ID NO: 1564205
gacaaaugcugacuccagu

SEQ ID NO: 1862414 - RNA, 19 nt, Artificial Sequence
  Description of Artificial Sequence: Synthetic oligonucleotide
  Antisense strand to SEQ ID NO: 1862413
acuggagucagcauuuguc

SEQ ID NO: 1862415 - RNA, 19 nt, Artificial Sequence
  Description of Artificial Sequence: Synthetic oligonucleotide
  Sense strand starting at position 337 of SEQ ID NO: 1564205
aaagauuguugguugcaua

SEQ ID NO: 1862416 - RNA, 19 nt, Artificial Sequence
  Description of Artificial Sequence: Synthetic oligonucleotide
  Antisense strand to SEQ ID NO: 1862415
uaugcaaccaacaaucuuu

SEQ ID NO: 1862417 - RNA, 19 nt, Artificial Sequence
  Description of Artificial Sequence: Synthetic oligonucleotide
  Sense strand starting at position 349 of SEQ ID NO: 1564205
uugcauacuugaccgaaca

SEQ ID NO: 1862418 - RNA, 19 nt, Artificial Sequence
  Description of Artificial Sequence: Synthetic oligonucleotide
  Antisense strand to SEQ ID NO: 1862417
uguucggucaaguaugcaa

SEQ ID NO: 1862419 - RNA, 19 nt, Artificial Sequence
  Description of Artificial Sequence: Synthetic oligonucleotide
  Sense strand starting at position 350 of SEQ ID NO: 1564205
ugcauacuugaccgaacaa

SEQ ID NO: 1862420 - RNA, 19 nt, Artificial Sequence
  Description of Artificial Sequence: Synthetic oligonucleotide
  Antisense strand to SEQ ID NO: 1862419
uuguucggucaaguaugca

SEQ ID NO: 1862421 - RNA, 19 nt, Artificial Sequence
  Description of Artificial Sequence: Synthetic oligonucleotide
  Sense strand starting at position 528 of SEQ ID NO: 1564205
ggcugaaauuaguuagacu

SEQ ID NO: 1862422 - RNA, 19 nt, Artificial Sequence
  Description of Artificial Sequence: Synthetic oligonucleotide
  Antisense strand to SEQ ID NO: 1862421
agucuaacuaauuucagcc

SEQ ID NO: 1862423 - RNA, 19 nt, Artificial Sequence
  Description of Artificial Sequence: Synthetic oligonucleotide
  Sense strand starting at position 600 of SEQ ID NO: 1564205
gggaauggcucaccucaaa

SEQ ID NO: 1862424 - RNA, 19 nt, Artificial Sequence
  Description of Artificial Sequence: Synthetic oligonucleotide
  Antisense strand to SEQ ID NO: 1862423
uuugaggugagccauuccc

SEQ ID NO: 1862425 - RNA, 19 nt, Artificial Sequence
  Description of Artificial Sequence: Synthetic oligonucleotide
  Sense strand starting at position 660 of SEQ ID NO: 1564205
ugggauacuguccaugguu

SEQ ID NO: 1862426 - RNA, 19 nt, Artificial Sequence
  Description of Artificial Sequence: Synthetic oligonucleotide
  Antisense strand to SEQ ID NO: 1862425
aaccauggacaguauccca

SEQ ID NO: 1862427 - RNA, 19 nt, Artificial Sequence
  Description of Artificial Sequence: Synthetic oligonucleotide
  Sense strand starting at position 662 of SEQ ID NO: 1564205
ggauacuguccaugguuau

SEQ ID NO: 1862428 - RNA, 19 nt, Artificial Sequence
  Description of Artificial Sequence: Synthetic oligonucleotide
  Antisense strand to SEQ ID NO: 1862427
auaaccauggacaguaucc

SEQ ID NO: 1862429 - RNA, 19 nt, Artificial Sequence
  Description of Artificial Sequence: Synthetic oligonucleotide
  Sense strand starting at position 663 of SEQ ID NO: 1564205
gauacuguccaugguuauc

SEQ ID NO: 1862430 - RNA, 19 nt, Artificial Sequence
  Description of Artificial Sequence: Synthetic oligonucleotide
  Antisense strand to SEQ ID NO: 1862429
gauaaccauggacaguauc

SEQ ID NO: 1862431 - RNA, 19 nt, Artificial Sequence
  Description of Artificial Sequence: Synthetic oligonucleotide
  Sense strand starting at position 668 of SEQ ID NO: 1564205
uguccaugguuaucuuaga

SEQ ID NO: 1862432 - RNA, 19 nt, Artificial Sequence
  Description of Artificial Sequence: Synthetic oligonucleotide
  Antisense strand to SEQ ID NO: 1862431
ucuaagauaaccauggaca

SEQ ID NO: 1862433 - RNA, 19 nt, Artificial Sequence
  Description of Artificial Sequence: Synthetic oligonucleotide
  Sense strand starting at position 675 of SEQ ID NO: 1564205
gguuaucuuagaggccuua

SEQ ID NO: 1862434 - RNA, 19 nt, Artificial Sequence
  Description of Artificial Sequence: Synthetic oligonucleotide
  Antisense strand to SEQ ID NO: 1862433
uaaggccucuaagauaacc

SEQ ID NO: 1862435 - RNA, 19 nt, Artificial Sequence
  Description of Artificial Sequence: Synthetic oligonucleotide
  Sense strand starting at position 764 of SEQ ID NO: 1564205
ggaagugaguuauuggagu

SEQ ID NO: 1862436 - RNA, 19 nt, Artificial Sequence
  Description of Artificial Sequence: Synthetic oligonucleotide
  Antisense strand to SEQ ID NO: 1862435
acuccaauaacucacuucc

SEQ ID NO: 1862437 - RNA, 19 nt, Artificial Sequence
  Description of Artificial Sequence: Synthetic oligonucleotide
  Sense strand starting at position 766 of SEQ ID NO: 1564205
aagugaguuauuggaguca

SEQ ID NO: 1862438 - RNA, 19 nt, Artificial Sequence
  Description of Artificial Sequence: Synthetic oligonucleotide
  Antisense strand to SEQ ID NO: 1862437
ugacuccaauaacucacuu

SEQ ID NO: 1862439 - RNA, 19 nt, Artificial Sequence
  Description of Artificial Sequence: Synthetic oligonucleotide
  Sense strand starting at position 830 of SEQ ID NO: 1564205
aaguccgagcccuaucaau

SEQ ID NO: 1862440 - RNA, 19 nt, Artificial Sequence
  Description of Artificial Sequence: Synthetic oligonucleotide
  Antisense strand to SEQ ID NO: 1862439
auugauagggcucggacuu

SEQ ID NO: 1862441 - RNA, 19 nt, Artificial Sequence
  Description of Artificial Sequence: Synthetic oligonucleotide
  Sense strand starting at position 920 of SEQ ID NO: 1564205
acuggagaguccucaucuu

SEQ ID NO: 1862442 - RNA, 19 nt, Artificial Sequence
  Description of Artificial Sequence: Synthetic oligonucleotide
  Antisense strand to SEQ ID NO: 1862441
aagaugaggacucuccagu

SEQ ID NO: 1862443 - RNA, 19 nt, Artificial Sequence
  Description of Artificial Sequence: Synthetic oligonucleotide
  Sense strand starting at position 934 of SEQ ID NO: 1564205
aucuuaccagagcgguaaa

SEQ ID NO: 1862444 - RNA, 19 nt, Artificial Sequence
  Description of Artificial Sequence: Synthetic oligonucleotide
  Antisense strand to SEQ ID NO: 1862443
uuuaccgcucugguaagau

SEQ ID NO: 1862445 - RNA, 19 nt, Artificial Sequence
  Description of Artificial Sequence: Synthetic oligonucleotide
  Sense strand starting at position 935 of SEQ ID NO: 1564205
ucuuaccagagcgguaaau

SEQ ID NO: 1862446 - RNA, 19 nt, Artificial Sequence
  Description of Artificial Sequence: Synthetic oligonucleotide
  Antisense strand to SEQ ID NO: 1862445
auuuaccgcucugguaaga

SEQ ID NO: 1862447 - RNA, 19 nt, Artificial Sequence
  Description of Artificial Sequence: Synthetic oligonucleotide
  Sense strand starting at position 937 of SEQ ID NO: 1564205
uuaccagagcgguaaauua

SEQ ID NO: 1862448 - RNA, 19 nt, Artificial Sequence
  Description of Artificial Sequence: Synthetic oligonucleotide
  Antisense strand to SEQ ID NO: 1862447
uaauuuaccgcucugguaa

SEQ ID NO: 1862449 - RNA, 19 nt, Artificial Sequence
  Description of Artificial Sequence: Synthetic oligonucleotide
  Sense strand starting at position 1213 of SEQ ID NO: 1564205
uugagagagcgucacaguu

SEQ ID NO: 1862450 - RNA, 19 nt, Artificial Sequence
  Description of Artificial Sequence: Synthetic oligonucleotide
  Antisense strand to SEQ ID NO: 1862449
aacugugacgcucucucaa

SEQ ID NO: 1862451 - RNA, 19 nt, Artificial Sequence
  Description of Artificial Sequence: Synthetic oligonucleotide
  Sense strand starting at position 1293 of SEQ ID NO: 1564205
gaacuuuggcgacagauuc

SEQ ID NO: 1862452 - RNA, 19 nt, Artificial Sequence
  Description of Artificial Sequence: Synthetic oligonucleotide
  Antisense strand to SEQ ID NO: 1862451
gaaucugucgccaaaguuc

SEQ ID NO: 1862453 - RNA, 19 nt, Artificial Sequence
  Description of Artificial Sequence: Synthetic oligonucleotide
  Sense strand starting at position 1470 of SEQ ID NO: 1564205
acuggaugcccucgggauu

SEQ ID NO: 1862454 - RNA, 19 nt, Artificial Sequence
  Description of Artificial Sequence: Synthetic oligonucleotide
  Antisense strand to SEQ ID NO: 1862453
aaucccgagggcauccagu

SEQ ID NO: 1862455 - RNA, 19 nt, Artificial Sequence
  Description of Artificial Sequence: Synthetic oligonucleotide
  Sense strand starting at position 1471 of SEQ ID NO: 1564205
cuggaugcccucgggauuu

SEQ ID NO: 1862456 - RNA, 19 nt, Artificial Sequence
  Description of Artificial Sequence: Synthetic oligonucleotide
  Antisense strand to SEQ ID NO: 1862455
aaaucccgagggcauccag

SEQ ID NO: 1862457 - RNA, 19 nt, Artificial Sequence
  Description of Artificial Sequence: Synthetic oligonucleotide
  Sense strand starting at position 1538 of SEQ ID NO: 1564205
cggugagagcuuuccgcga

SEQ ID NO: 1862458 - RNA, 19 nt, Artificial Sequence
  Description of Artificial Sequence: Synthetic oligonucleotide
  Antisense strand to SEQ ID NO: 1862457
ucgcggaaagcucucaccg

SEQ ID NO: 1862459 - RNA, 19 nt, Artificial Sequence
  Description of Artificial Sequence: Synthetic oligonucleotide
  Sense strand starting at position 1630 of SEQ ID NO: 1564205
gcuguacuccgggauggau

SEQ ID NO: 1862460 - RNA, 19 nt, Artificial Sequence
  Description of Artificial Sequence: Synthetic oligonucleotide
  Antisense strand to SEQ ID NO: 1862459
auccaucccggaguacagc

SEQ ID NO: 1862461 - RNA, 19 nt, Artificial Sequence
  Description of Artificial Sequence: Synthetic oligonucleotide
  Sense strand starting at position 1993 of SEQ ID NO: 1564205
gauucuuugcagcaaaguu

SEQ ID NO: 1862462 - RNA, 19 nt, Artificial Sequence
  Description of Artificial Sequence: Synthetic oligonucleotide
  Antisense strand to SEQ ID NO: 1862461
aacuuugcugcaaagaauc

SEQ ID NO: 1862463 - RNA, 19 nt, Artificial Sequence
  Description of Artificial Sequence: Synthetic oligonucleotide
  Sense strand starting at position 2634 of SEQ ID NO: 1564205
agguuacagcuuuacauua

SEQ ID NO: 1862464 - RNA, 19 nt, Artificial Sequence
  Description of Artificial Sequence: Synthetic oligonucleotide
  Antisense strand to SEQ ID NO: 1862463
uaauguaaagcuguaaccu

SEQ ID NO: 1862465 - RNA, 19 nt, Artificial Sequence
  Description of Artificial Sequence: Synthetic oligonucleotide
  Sense strand starting at position 2678 of SEQ ID NO: 1564205
aauaauugcccacgaggga

SEQ ID NO: 1862466 - RNA, 19 nt, Artificial Sequence
  Description of Artificial Sequence: Synthetic oligonucleotide
  Antisense strand to SEQ ID NO: 1862465
ucccucgugggcaauuauu

SEQ ID NO: 1862467 - RNA, 19 nt, Artificial Sequence
  Description of Artificial Sequence: Synthetic oligonucleotide
  Sense strand starting at position 2705 of SEQ ID NO: 1564205
agcagauccggagagaugu

SEQ ID NO: 1862468 - RNA, 19 nt, Artificial Sequence
  Description of Artificial Sequence: Synthetic oligonucleotide
  Antisense strand to SEQ ID NO: 1862467
acaucucuccggaucugcu

SEQ ID NO: 1862469 - RNA, 19 nt, Artificial Sequence
  Description of Artificial Sequence: Synthetic oligonucleotide
  Sense strand starting at position 2824 of SEQ ID NO: 1564205
gcagcaguugugccaguuu

SEQ ID NO: 1862470 - RNA, 19 nt, Artificial Sequence
  Description of Artificial Sequence: Synthetic oligonucleotide
  Antisense strand to SEQ ID NO: 1862469
aaacuggcacaacugcugc

SEQ ID NO: 1862471 - RNA, 19 nt, Artificial Sequence
  Description of Artificial Sequence: Synthetic oligonucleotide
  Sense strand starting at position 2827 of SEQ ID NO: 1564205
gcaguugugccaguuuauc

SEQ ID NO: 1862472 - RNA, 19 nt, Artificial Sequence
  Description of Artificial Sequence: Synthetic oligonucleotide
  Antisense strand to SEQ ID NO: 1862471
gauaaacuggcacaacugc

SEQ ID NO: 1862473 - RNA, 19 nt, Artificial Sequence
  Description of Artificial Sequence: Synthetic oligonucleotide
  Sense strand starting at position 2846 of SEQ ID NO: 1564205
cgcucucuucuguuaguga

SEQ ID NO: 1862474 - RNA, 19 nt, Artificial Sequence
  Description of Artificial Sequence: Synthetic oligonucleotide
  Antisense strand to SEQ ID NO: 1862473
ucacuaacagaagagagcg

SEQ ID NO: 1862475 - RNA, 19 nt, Artificial Sequence
  Description of Artificial Sequence: Synthetic oligonucleotide
  Sense strand starting at position 3085 of SEQ ID NO: 1564205
uuaaguaauugauuccagu

SEQ ID NO: 1862476 - RNA, 19 nt, Artificial Sequence
  Description of Artificial Sequence: Synthetic oligonucleotide
  Antisense strand to SEQ ID NO: 1862475
acuggaaucaauuacuuaa

SEQ ID NO: 1862477 - RNA, 19 nt, Artificial Sequence
  Description of Artificial Sequence: Synthetic oligonucleotide
  Sense strand starting at position 3096 of SEQ ID NO: 1564205
auuccagugucuccuggaa

SEQ ID NO: 1862478 - RNA, 19 nt, Artificial Sequence
  Description of Artificial Sequence: Synthetic oligonucleotide
  Antisense strand to SEQ ID NO: 1862477
uuccaggagacacuggaau

SEQ ID NO: 1862479 - RNA, 19 nt, Artificial Sequence
  Description of Artificial Sequence: Synthetic oligonucleotide
  Sense strand starting at position 3114 of SEQ ID NO: 1564205
auauauucuugggcuggau

SEQ ID NO: 1862480 - RNA, 19 nt, Artificial Sequence
  Description of Artificial Sequence: Synthetic oligonucleotide
  Antisense strand to SEQ ID NO: 1862479
auccagcccaagaauauau

SEQ ID NO: 1862481 - RNA, 19 nt, Artificial Sequence
  Description of Artificial Sequence: Synthetic oligonucleotide
  Sense strand starting at position 3209 of SEQ ID NO: 1564205
uguuuacguaugcagauau

SEQ ID NO: 1862482 - RNA, 19 nt, Artificial Sequence
  Description of Artificial Sequence: Synthetic oligonucleotide
  Antisense strand to SEQ ID NO: 1862481
auaucugcauacguaaaca

SEQ ID NO: 1862483 - RNA, 19 nt, Artificial Sequence
  Description of Artificial Sequence: Synthetic oligonucleotide
  Sense strand starting at position 3312 of SEQ ID NO: 1564205
guugcaucuuaacuaauag

SEQ ID NO: 1862484 - RNA, 19 nt, Artificial Sequence
  Description of Artificial Sequence: Synthetic oligonucleotide
  Antisense strand to SEQ ID NO: 1862483
cuauuaguuaagaugcaac

SEQ ID NO: 1862485 - RNA, 19 nt, Artificial Sequence
  Description of Artificial Sequence: Synthetic oligonucleotide
  Sense strand starting at position 3717 of SEQ ID NO: 1564205
agacacugucccuauccua

SEQ ID NO: 1862486 - RNA, 19 nt, Artificial Sequence
  Description of Artificial Sequence: Synthetic oligonucleotide
  Antisense strand to SEQ ID NO: 1862485
uaggauagggacagugucu

SEQ ID NO: 1862487 - RNA, 19 nt, Artificial Sequence
  Description of Artificial Sequence: Synthetic oligonucleotide
  Sense strand starting at position 3854 of SEQ ID NO: 1564205
gggagaguguuuguucauu

SEQ ID NO: 1862488 - RNA, 19 nt, Artificial Sequence
  Description of Artificial Sequence: Synthetic oligonucleotide
  Antisense strand to SEQ ID NO: 1862487
aaugaacaaacacucuccc

SEQ ID NO: 1862489 - RNA, 19 nt, Artificial Sequence
  Description of Artificial Sequence: Synthetic oligonucleotide
  Sense strand starting at position 1100 of SEQ ID NO: 1564206
agaauagagucagaauacu

SEQ ID NO: 1862490 - RNA, 19 nt, Artificial Sequence
  Description of Artificial Sequence: Synthetic oligonucleotide
  Antisense strand to SEQ ID NO: 1862489
aguauucugacucuauucu

SEQ ID NO: 1862491 - RNA, 19 nt, Artificial Sequence
  Description of Artificial Sequence: Synthetic oligonucleotide
  Sense strand starting at position 2131 of SEQ ID NO: 1564206
aguguucucugacccgaga

SEQ ID NO: 1862492 - RNA, 19 nt, Artificial Sequence
  Description of Artificial Sequence: Synthetic oligonucleotide
  Antisense strand to SEQ ID NO: 1862491
ucucgggucagagaacacu

SEQ ID NO: 1862493 - RNA, 19 nt, Artificial Sequence
  Description of Artificial Sequence: Synthetic oligonucleotide
  Sense strand starting at position 2133 of SEQ ID NO: 1564206
uguucucugacccgagaca

SEQ ID NO: 1862494 - RNA, 19 nt, Artificial Sequence
  Description of Artificial Sequence: Synthetic oligonucleotide
  Antisense strand to SEQ ID NO: 1862493
ugucucgggucagagaaca

SEQ ID NO: 1862495 - RNA, 19 nt, Artificial Sequence
  Description of Artificial Sequence: Synthetic oligonucleotide
  Sense strand starting at position 2549 of SEQ ID NO: 1564206
caguucgagaccuguagaa

SEQ ID NO: 1862496 - RNA, 19 nt, Artificial Sequence
  Description of Artificial Sequence: Synthetic oligonucleotide
  Antisense strand to SEQ ID NO: 1862495
uucuacaggucucgaacug

SEQ ID NO: 1862497 - RNA, 19 nt, Artificial Sequence
  Description of Artificial Sequence: Synthetic oligonucleotide
  Sense strand starting at position 2551 of SEQ ID NO: 1564206
guucgagaccuguagaaag

SEQ ID NO: 1862498 - RNA, 19 nt, Artificial Sequence
  Description of Artificial Sequence: Synthetic oligonucleotide
  Antisense strand to SEQ ID NO: 1862497
cuuucuacaggucucgaac

SEQ ID NO: 1862499 - RNA, 19 nt, Artificial Sequence
  Description of Artificial Sequence: Synthetic oligonucleotide
  Sense strand starting at position 2561 of SEQ ID NO: 1564206
uguagaaagaguugaguuu

SEQ ID NO: 1862500 - RNA, 19 nt, Artificial Sequence
  Description of Artificial Sequence: Synthetic oligonucleotide
  Antisense strand to SEQ ID NO: 1862499
aaacucaacucuuucuaca

SEQ ID NO: 1862501 - RNA, 19 nt, Artificial Sequence
  Description of Artificial Sequence: Synthetic oligonucleotide
  Sense strand starting at position 2567 of SEQ ID NO: 1564206
aagaguugaguuuguaaag

SEQ ID NO: 1862502 - RNA, 19 nt, Artificial Sequence
  Description of Artificial Sequence: Synthetic oligonucleotide
  Antisense strand to SEQ ID NO: 1862501
cuuuacaaacucaacucuu

SEQ ID NO: 1862503 - RNA, 19 nt, Artificial Sequence
  Description of Artificial Sequence: Synthetic oligonucleotide
  Sense strand starting at position 2568 of SEQ ID NO: 1564206
agaguugaguuuguaaagu

SEQ ID NO: 1862504 - RNA, 19 nt, Artificial Sequence
  Description of Artificial Sequence: Synthetic oligonucleotide
  Antisense strand to SEQ ID NO: 1862503
acuuuacaaacucaacucu

SEQ ID NO: 1862505 - RNA, 19 nt, Artificial Sequence
  Description of Artificial Sequence: Synthetic oligonucleotide
  Sense strand starting at position 2576 of SEQ ID NO: 1564206
guuuguaaaguuuguagau

SEQ ID NO: 1862506 - RNA, 19 nt, Artificial Sequence
  Description of Artificial Sequence: Synthetic oligonucleotide
  Antisense strand to SEQ ID NO: 1862505
aucuacaaacuuuacaaac

SEQ ID NO: 1862507 - RNA, 19 nt, Artificial Sequence
  Description of Artificial Sequence: Synthetic oligonucleotide
  Sense strand starting at position 2577 of SEQ ID NO: 1564206
uuuguaaaguuuguagauc

SEQ ID NO: 1862508 - RNA, 19 nt, Artificial Sequence
  Description of Artificial Sequence: Synthetic oligonucleotide
  Antisense strand to SEQ ID NO: 1862507
gaucuacaaacuuuacaaa

SEQ ID NO: 1862509 - RNA, 19 nt, Artificial Sequence
  Description of Artificial Sequence: Synthetic oligonucleotide
  Sense strand starting at position 2631 of SEQ ID NO: 1564206
auacguauuuguccaucua

SEQ ID NO: 1862510 - RNA, 19 nt, Artificial Sequence
  Description of Artificial Sequence: Synthetic oligonucleotide
  Antisense strand to SEQ ID NO: 1862509
uagauggacaaauacguau

SEQ ID NO: 1862511 - RNA, 19 nt, Artificial Sequence
  Description of Artificial Sequence: Synthetic oligonucleotide
  Sense strand starting at position 2674 of SEQ ID NO: 1564206
uuaucugaaaugggauagu

SEQ ID NO: 1862512 - RNA, 19 nt, Artificial Sequence
  Description of Artificial Sequence: Synthetic oligonucleotide
  Antisense strand to SEQ ID NO: 1862511
acuaucccauuucagauaa

SEQ ID NO: 1862513 - RNA, 19 nt, Artificial Sequence
  Description of Artificial Sequence: Synthetic oligonucleotide
  Sense strand starting at position 2684 of SEQ ID NO: 1564206
ugggauaguccuuggugga

SEQ ID NO: 1862514 - RNA, 19 nt, Artificial Sequence
  Description of Artificial Sequence: Synthetic oligonucleotide
  Antisense strand to SEQ ID NO: 1862513
uccaccaaggacuauccca

SEQ ID NO: 1862515 - RNA, 19 nt, Artificial Sequence
  Description of Artificial Sequence: Synthetic oligonucleotide
  Sense strand starting at position 2685 of SEQ ID NO: 1564206
gggauaguccuugguggag

SEQ ID NO: 1862516 - RNA, 19 nt, Artificial Sequence
  Description of Artificial Sequence: Synthetic oligonucleotide
  Antisense strand to SEQ ID NO: 1862515
cuccaccaaggacuauccc

SEQ ID NO: 1862517 - RNA, 19 nt, Artificial Sequence
  Description of Artificial Sequence: Synthetic oligonucleotide
  Sense strand starting at position 2697 of SEQ ID NO: 1564206
gguggagagcuuggcauua

SEQ ID NO: 1862518 - RNA, 19 nt, Artificial Sequence
  Description of Artificial Sequence: Synthetic oligonucleotide
  Antisense strand to SEQ ID NO: 1862517
uaaugccaagcucuccacc

SEQ ID NO: 1862519 - RNA, 19 nt, Artificial Sequence
  Description of Artificial Sequence: Synthetic oligonucleotide
  Sense strand starting at position 2708 of SEQ ID NO: 1564206
uggcauuauucucucuaug

SEQ ID NO: 1862520 - RNA, 19 nt, Artificial Sequence
  Description of Artificial Sequence: Synthetic oligonucleotide
  Antisense strand to SEQ ID NO: 1862519
cauagagagaauaaugcca

SEQ ID NO: 1862521 - RNA, 19 nt, Artificial Sequence
  Description of Artificial Sequence: Synthetic oligonucleotide
  Sense strand starting at position 2710 of SEQ ID NO: 1564206
gcauuauucucucuaugug

SEQ ID NO: 1862522 - RNA, 19 nt, Artificial Sequence
  Description of Artificial Sequence: Synthetic oligonucleotide
  Antisense strand to SEQ ID NO: 1862521
cacauagagagaauaaugc

SEQ ID NO: 1862523 - RNA, 19 nt, Artificial Sequence
  Description of Artificial Sequence: Synthetic oligonucleotide
  Sense strand starting at position 2915 of SEQ ID NO: 1564206
uggugcuucugguugagga

SEQ ID NO: 1862524 - RNA, 19 nt, Artificial Sequence
  Description of Artificial Sequence: Synthetic oligonucleotide
  Antisense strand to SEQ ID NO: 1862523
uccucaaccagaagcacca

SEQ ID NO: 1862525 - RNA, 19 nt, Artificial Sequence
  Description of Artificial Sequence: Synthetic oligonucleotide
  Sense strand starting at position 2916 of SEQ ID NO: 1564206
ggugcuucugguugaggaa

SEQ ID NO: 1862526 - RNA, 19 nt, Artificial Sequence
  Description of Artificial Sequence: Synthetic oligonucleotide
  Antisense strand to SEQ ID NO: 1862525
uuccucaaccagaagcacc

SEQ ID NO: 1862527 - RNA, 19 nt, Artificial Sequence
  Description of Artificial Sequence: Synthetic oligonucleotide
  Sense strand starting at position 2962 of SEQ ID NO: 1564206
auauuugaguucugggacu

SEQ ID NO: 1862528 - RNA, 19 nt, Artificial Sequence
  Description of Artificial Sequence: Synthetic oligonucleotide
  Antisense strand to SEQ ID NO: 1862527
agucccagaacucaaauau

SEQ ID NO: 1862529 - RNA, 19 nt, Artificial Sequence
  Description of Artificial Sequence: Synthetic oligonucleotide
  Sense strand starting at position 3093 of SEQ ID NO: 1564206
uugucauugcaauauguau

SEQ ID NO: 1862530 - RNA, 19 nt, Artificial Sequence
  Description of Artificial Sequence: Synthetic oligonucleotide
  Antisense strand to SEQ ID NO: 1862529
auacauauugcaaugacaa

SEQ ID NO: 1862531 - RNA, 19 nt, Artificial Sequence
  Description of Artificial Sequence: Synthetic oligonucleotide
  Sense strand starting at position 3178 of SEQ ID NO: 1564206
ccuggaugcuacuuucuua

SEQ ID NO: 1862532 - RNA, 19 nt, Artificial Sequence
  Description of Artificial Sequence: Synthetic oligonucleotide
  Antisense strand to SEQ ID NO: 1862531
uaagaaaguagcauccagg

SEQ ID NO: 1862533 - RNA, 19 nt, Artificial Sequence
  Description of Artificial Sequence: Synthetic oligonucleotide
  Sense strand starting at position 3268 of SEQ ID NO: 1564206
accaucugaucugugagga

SEQ ID NO: 1862534 - RNA, 19 nt, Artificial Sequence
  Description of Artificial Sequence: Synthetic oligonucleotide
  Antisense strand to SEQ ID NO: 1862533
uccucacagaucagauggu

SEQ ID NO: 1862535 - RNA, 19 nt, Artificial Sequence
  Description of Artificial Sequence: Synthetic oligonucleotide
  Sense strand starting at position 3269 of SEQ ID NO: 1564206
ccaucugaucugugaggau

SEQ ID NO: 1862536 - RNA, 19 nt, Artificial Sequence
  Description of Artificial Sequence: Synthetic oligonucleotide
  Antisense strand to SEQ ID NO: 1862535
auccucacagaucagaugg

SEQ ID NO: 1862537 - RNA, 19 nt, Artificial Sequence
  Description of Artificial Sequence: Synthetic oligonucleotide
  Sense strand starting at position 3305 of SEQ ID NO: 1564206
aagccaggcuguuuaguaa

SEQ ID NO: 1862538 - RNA, 19 nt, Artificial Sequence
  Description of Artificial Sequence: Synthetic oligonucleotide
  Antisense strand to SEQ ID NO: 1862537
uuacuaaacagccuggcuu

SEQ ID NO: 1862539 - RNA, 19 nt, Artificial Sequence
  Description of Artificial Sequence: Synthetic oligonucleotide
  Sense strand starting at position 3359 of SEQ ID NO: 1564206
uuaagaacuguuuguugcu

SEQ ID NO: 1862540 - RNA, 19 nt, Artificial Sequence
  Description of Artificial Sequence: Synthetic oligonucleotide
  Antisense strand to SEQ ID NO: 1862539
agcaacaaacaguucuuaa

SEQ ID NO: 1862541 - RNA, 19 nt, Artificial Sequence
  Description of Artificial Sequence: Synthetic oligonucleotide
  Sense strand starting at position 3390 of SEQ ID NO: 1564206
cugauuaacuuuguguuga

SEQ ID NO: 1862542 - RNA, 19 nt, Artificial Sequence
  Description of Artificial Sequence: Synthetic oligonucleotide
  Antisense strand to SEQ ID NO: 1862541
ucaacacaaaguuaaucag

SEQ ID NO: 1862543 - RNA, 19 nt, Artificial Sequence
  Description of Artificial Sequence: Synthetic oligonucleotide
  Sense strand starting at position 3392 of SEQ ID NO: 1564206
gauuaacuuuguguugaga

SEQ ID NO: 1862544 - RNA, 19 nt, Artificial Sequence
  Description of Artificial Sequence: Synthetic oligonucleotide
  Antisense strand to SEQ ID NO: 1862543
ucucaacacaaaguuaauc

SEQ ID NO: 1862545 - RNA, 19 nt, Artificial Sequence
  Description of Artificial Sequence: Synthetic oligonucleotide
  Sense strand starting at position 3395 of SEQ ID NO: 1564206
uaacuuuguguugagauag

SEQ ID NO: 1862546 - RNA, 19 nt, Artificial Sequence
  Description of Artificial Sequence: Synthetic oligonucleotide
  Antisense strand to SEQ ID NO: 1862545
cuaucucaacacaaaguua

SEQ ID NO: 1862547 - RNA, 19 nt, Artificial Sequence
  Description of Artificial Sequence: Synthetic oligonucleotide
  Sense strand starting at position 3469 of SEQ ID NO: 1564206
caauuucucugugagaugu

SEQ ID NO: 1862548 - RNA, 19 nt, Artificial Sequence
  Description of Artificial Sequence: Synthetic oligonucleotide
  Antisense strand to SEQ ID NO: 1862547
acaucucacagagaaauug

SEQ ID NO: 1862549 - RNA, 19 nt, Artificial Sequence
  Description of Artificial Sequence: Synthetic oligonucleotide
  Sense strand starting at position 3475 of SEQ ID NO: 1564206
cucugugagaugugucuuu

SEQ ID NO: 1862550 - RNA, 19 nt, Artificial Sequence
  Description of Artificial Sequence: Synthetic oligonucleotide
  Antisense strand to SEQ ID NO: 1862549
aaagacacaucucacagag

SEQ ID NO: 1862551 - RNA, 19 nt, Artificial Sequence
  Description of Artificial Sequence: Synthetic oligonucleotide
  Sense strand starting at position 3538 of SEQ ID NO: 1564206
gguuucucauuuguauagu

SEQ ID NO: 1862552 - RNA, 19 nt, Artificial Sequence
  Description of Artificial Sequence: Synthetic oligonucleotide
  Antisense strand to SEQ ID NO: 1862551
acuauacaaaugagaaacc

SEQ ID NO: 1862553 - RNA, 19 nt, Artificial Sequence
  Description of Artificial Sequence: Synthetic oligonucleotide
  Sense strand starting at position 3552 of SEQ ID NO: 1564206
auaguuucuuuccuagaga

SEQ ID NO: 1862554 - RNA, 19 nt, Artificial Sequence
  Description of Artificial Sequence: Synthetic oligonucleotide
  Antisense strand to SEQ ID NO: 1862553
ucucuaggaaagaaacuau

SEQ ID NO: 1862555 - RNA, 19 nt, Artificial Sequence
  Description of Artificial Sequence: Synthetic oligonucleotide
  Sense strand starting at position 3555 of SEQ ID NO: 1564206
guuucuuuccuagagaagu

SEQ ID NO: 1862556 - RNA, 19 nt, Artificial Sequence
  Description of Artificial Sequence: Synthetic oligonucleotide
  Antisense strand to SEQ ID NO: 1862555
acuucucuaggaaagaaac

SEQ ID NO: 1862557 - RNA, 19 nt, Artificial Sequence
  Description of Artificial Sequence: Synthetic oligonucleotide
  Sense strand starting at position 3603 of SEQ ID NO: 1564206
ucuuaaauccugugaugga

SEQ ID NO: 1862558 - RNA, 19 nt, Artificial Sequence
  Description of Artificial Sequence: Synthetic oligonucleotide
  Antisense strand to SEQ ID NO: 1862557
uccaucacaggauuuaaga

SEQ ID NO: 1862559 - RNA, 19 nt, Artificial Sequence
  Description of Artificial Sequence: Synthetic oligonucleotide
  Sense strand starting at position 3618 of SEQ ID NO: 1564206
uggagaacucacugccuua

SEQ ID NO: 1862560 - RNA, 19 nt, Artificial Sequence
  Description of Artificial Sequence: Synthetic oligonucleotide
  Antisense strand to SEQ ID NO: 1862559
uaaggcagugaguucucca

SEQ ID NO: 1862561 - RNA, 19 nt, Artificial Sequence
  Description of Artificial Sequence: Synthetic oligonucleotide
  Sense strand starting at position 3648 of SEQ ID NO: 1564206
acugaaaucucagaaaguu

SEQ ID NO: 1862562 - RNA, 19 nt, Artificial Sequence
  Description of Artificial Sequence: Synthetic oligonucleotide
  Antisense strand to SEQ ID NO: 1862561
aacuuucugagauuucagu

SEQ ID NO: 1862563 - RNA, 19 nt, Artificial Sequence
  Description of Artificial Sequence: Synthetic oligonucleotide
  Sense strand starting at position 3728 of SEQ ID NO: 1564206
ucugccucccaguaguuua

SEQ ID NO: 1862564 - RNA, 19 nt, Artificial Sequence
  Description of Artificial Sequence: Synthetic oligonucleotide
  Antisense strand to SEQ ID NO: 1862563
uaaacuacugggaggcaga

SEQ ID NO: 1862565 - RNA, 19 nt, Artificial Sequence
  Description of Artificial Sequence: Synthetic oligonucleotide
  Sense strand starting at position 3863 of SEQ ID NO: 1564206
ccuuccauucugugagaca

SEQ ID NO: 1862566 - RNA, 19 nt, Artificial Sequence
  Description of Artificial Sequence: Synthetic oligonucleotide
  Antisense strand to SEQ ID NO: 1862565
ugucucacagaauggaagg

SEQ ID NO: 1862567 - RNA, 19 nt, Artificial Sequence
  Description of Artificial Sequence: Synthetic oligonucleotide
  Sense strand starting at position 3959 of SEQ ID NO: 1564206
auagaauuguaagaggaau

SEQ ID NO: 1862568 - RNA, 19 nt, Artificial Sequence
  Description of Artificial Sequence: Synthetic oligonucleotide
  Antisense strand to SEQ ID NO: 1862567
auuccucuuacaauucuau

SEQ ID NO: 1862569 - RNA, 19 nt, Artificial Sequence
  Description of Artificial Sequence: Synthetic oligonucleotide
  Sense strand starting at position 856 of SEQ ID NO: 1564207
agaauagagucagaauacu

SEQ ID NO: 1862570 - RNA, 19 nt, Artificial Sequence
  Description of Artificial Sequence: Synthetic oligonucleotide
  Antisense strand to SEQ ID NO: 1862569
aguauucugacucuauucu

SEQ ID NO: 1862571 - RNA, 19 nt, Artificial Sequence
  Description of Artificial Sequence: Synthetic oligonucleotide
  Sense strand starting at position 1887 of SEQ ID NO: 1564207
aguguucucugacccgaga

SEQ ID NO: 1862572 - RNA, 19 nt, Artificial Sequence
  Description of Artificial Sequence: Synthetic oligonucleotide
  Antisense strand to SEQ ID NO: 1862571
ucucgggucagagaacacu

SEQ ID NO: 1862573 - RNA, 19 nt, Artificial Sequence
  Description of Artificial Sequence: Synthetic oligonucleotide
  Sense strand starting at position 1889 of SEQ ID NO: 1564207
uguucucugacccgagaca

SEQ ID NO: 1862574 - RNA, 19 nt, Artificial Sequence
  Description of Artificial Sequence: Synthetic oligonucleotide
  Antisense strand to SEQ ID NO: 1862573
ugucucgggucagagaaca

SEQ ID NO: 1862575 - RNA, 19 nt, Artificial Sequence
  Description of Artificial Sequence: Synthetic oligonucleotide
  Sense strand starting at position 2305 of SEQ ID NO: 1564207
caguucgagaccuguagaa

SEQ ID NO: 1862576 - RNA, 19 nt, Artificial Sequence
  Description of Artificial Sequence: Synthetic oligonucleotide
  Antisense strand to SEQ ID NO: 1862575
uucuacaggucucgaacug

SEQ ID NO: 1862577 - RNA, 19 nt, Artificial Sequence
  Description of Artificial Sequence: Synthetic oligonucleotide
  Sense strand starting at position 2307 of SEQ ID NO: 1564207
guucgagaccuguagaaag

SEQ ID NO: 1862578 - RNA, 19 nt, Artificial Sequence
  Description of Artificial Sequence: Synthetic oligonucleotide
  Antisense strand to SEQ ID NO: 1862577
cuuucuacaggucucgaac

SEQ ID NO: 1862579 - RNA, 19 nt, Artificial Sequence
  Description of Artificial Sequence: Synthetic oligonucleotide
  Sense strand starting at position 2317 of SEQ ID NO: 1564207
uguagaaagaguugaguuu

SEQ ID NO: 1862580 - RNA, 19 nt, Artificial Sequence
  Description of Artificial Sequence: Synthetic oligonucleotide
  Antisense strand to SEQ ID NO: 1862579
aaacucaacucuuucuaca

SEQ ID NO: 1862581 - RNA, 19 nt, Artificial Sequence
  Description of Artificial Sequence: Synthetic oligonucleotide
  Sense strand starting at position 2323 of SEQ ID NO: 1564207
aagaguugaguuuguaaag

SEQ ID NO: 1862582 - RNA, 19 nt, Artificial Sequence
  Description of Artificial Sequence: Synthetic oligonucleotide
  Antisense strand to SEQ ID NO: 1862581
cuuuacaaacucaacucuu

SEQ ID NO: 1862583 - RNA, 19 nt, Artificial Sequence
  Description of Artificial Sequence: Synthetic oligonucleotide
  Sense strand starting at position 2324 of SEQ ID NO: 1564207
agaguugaguuuguaaagu

SEQ ID NO: 1862584 - RNA, 19 nt, Artificial Sequence
  Description of Artificial Sequence: Synthetic oligonucleotide
  Antisense strand to SEQ ID NO: 1862583
acuuuacaaacucaacucu

SEQ ID NO: 1862585 - RNA, 19 nt, Artificial Sequence
  Description of Artificial Sequence: Synthetic oligonucleotide
  Sense strand starting at position 2332 of SEQ ID NO: 1564207
guuuguaaaguuuguagau

SEQ ID NO: 1862586 - RNA, 19 nt, Artificial Sequence
  Description of Artificial Sequence: Synthetic oligonucleotide
  Antisense strand to SEQ ID NO: 1862585
aucuacaaacuuuacaaac

SEQ ID NO: 1862587 - RNA, 19 nt, Artificial Sequence
  Description of Artificial Sequence: Synthetic oligonucleotide
  Sense strand starting at position 2333 of SEQ ID NO: 1564207
uuuguaaaguuuguagauc

SEQ ID NO: 1862588 - RNA, 19 nt, Artificial Sequence
  Description of Artificial Sequence: Synthetic oligonucleotide
  Antisense strand to SEQ ID NO: 1862587
gaucuacaaacuuuacaaa

SEQ ID NO: 1862589 - RNA, 19 nt, Artificial Sequence
  Description of Artificial Sequence: Synthetic oligonucleotide
  Sense strand starting at position 2387 of SEQ ID NO: 1564207
auacguauuuguccaucua

SEQ ID NO: 1862590 - RNA, 19 nt, Artificial Sequence
  Description of Artificial Sequence: Synthetic oligonucleotide
  Antisense strand to SEQ ID NO: 1862589
uagauggacaaauacguau

SEQ ID NO: 1862591 - RNA, 19 nt, Artificial Sequence
  Description of Artificial Sequence: Synthetic oligonucleotide
  Sense strand starting at position 2430 of SEQ ID NO: 1564207
uuaucugaaaugggauagu

SEQ ID NO: 1862592 - RNA, 19 nt, Artificial Sequence
  Description of Artificial Sequence: Synthetic oligonucleotide
  Antisense strand to SEQ ID NO: 1862591
acuaucccauuucagauaa

SEQ ID NO: 1862593 - RNA, 19 nt, Artificial Sequence
  Description of Artificial Sequence: Synthetic oligonucleotide
  Sense strand starting at position 2440 of SEQ ID NO: 1564207
ugggauaguccuuggugga

SEQ ID NO: 1862594 - RNA, 19 nt, Artificial Sequence
  Description of Artificial Sequence: Synthetic oligonucleotide
  Antisense strand to SEQ ID NO: 1862593
uccaccaaggacuauccca

SEQ ID NO: 1862595 - RNA, 19 nt, Artificial Sequence
  Description of Artificial Sequence: Synthetic oligonucleotide
  Sense strand starting at position 2441 of SEQ ID NO: 1564207
gggauaguccuugguggag

SEQ ID NO: 1862596 - RNA, 19 nt, Artificial Sequence
  Description of Artificial Sequence: Synthetic oligonucleotide
  Antisense strand to SEQ ID NO: 1862595
cuccaccaaggacuauccc

SEQ ID NO: 1862597 - RNA, 19 nt, Artificial Sequence
  Description of Artificial Sequence: Synthetic oligonucleotide
  Sense strand starting at position 2453 of SEQ ID NO: 1564207
gguggagagcuuggcauua

SEQ ID NO: 1862598 - RNA, 19 nt, Artificial Sequence
  Description of Artificial Sequence: Synthetic oligonucleotide
  Antisense strand to SEQ ID NO: 1862597
uaaugccaagcucuccacc

SEQ ID NO: 1862599 - RNA, 19 nt, Artificial Sequence
  Description of Artificial Sequence: Synthetic oligonucleotide
  Sense strand starting at position 2464 of SEQ ID NO: 1564207
uggcauuauucucucuaug

SEQ ID NO: 1862600 - RNA, 19 nt, Artificial Sequence
  Description of Artificial Sequence: Synthetic oligonucleotide
  Antisense strand to SEQ ID NO: 1862599
cauagagagaauaaugcca

SEQ ID NO: 1862601 - RNA, 19 nt, Artificial Sequence
  Description of Artificial Sequence: Synthetic oligonucleotide
  Sense strand starting at position 2466 of SEQ ID NO: 1564207
gcauuauucucucuaugug

SEQ ID NO: 1862602 - RNA, 19 nt, Artificial Sequence
  Description of Artificial Sequence: Synthetic oligonucleotide
  Antisense strand to SEQ ID NO: 1862601
cacauagagagaauaaugc

SEQ ID NO: 1862603 - RNA, 19 nt, Artificial Sequence
  Description of Artificial Sequence: Synthetic oligonucleotide
  Sense strand starting at position 2671 of SEQ ID NO: 1564207
uggugcuucugguugagga

SEQ ID NO: 1862604 - RNA, 19 nt, Artificial Sequence
  Description of Artificial Sequence: Synthetic oligonucleotide
  Antisense strand to SEQ ID NO: 1862603
uccucaaccagaagcacca

SEQ ID NO: 1862605 - RNA, 19 nt, Artificial Sequence
  Description of Artificial Sequence: Synthetic oligonucleotide
  Sense strand starting at position 2672 of SEQ ID NO: 1564207
ggugcuucugguugaggaa

SEQ ID NO: 1862606 - RNA, 19 nt, Artificial Sequence
  Description of Artificial Sequence: Synthetic oligonucleotide
  Antisense strand to SEQ ID NO: 1862605
uuccucaaccagaagcacc

SEQ ID NO: 1862607 - RNA, 19 nt, Artificial Sequence
  Description of Artificial Sequence: Synthetic oligonucleotide
  Sense strand starting at position 2718 of SEQ ID NO: 1564207
auauuugaguucugggacu

SEQ ID NO: 1862608 - RNA, 19 nt, Artificial Sequence
  Description of Artificial Sequence: Synthetic oligonucleotide
  Antisense strand to SEQ ID NO: 1862607
agucccagaacucaaauau

SEQ ID NO: 1862609 - RNA, 19 nt, Artificial Sequence
  Description of Artificial Sequence: Synthetic oligonucleotide
  Sense strand starting at position 2849 of SEQ ID NO: 1564207
uugucauugcaauauguau

SEQ ID NO: 1862610 - RNA, 19 nt, Artificial Sequence
  Description of Artificial Sequence: Synthetic oligonucleotide
  Antisense strand to SEQ ID NO: 1862609
auacauauugcaaugacaa

SEQ ID NO: 1862611 - RNA, 19 nt, Artificial Sequence
  Description of Artificial Sequence: Synthetic oligonucleotide
  Sense strand starting at position 2934 of SEQ ID NO: 1564207
ccuggaugcuacuuucuua

SEQ ID NO: 1862612 - RNA, 19 nt, Artificial Sequence
  Description of Artificial Sequence: Synthetic oligonucleotide
  Antisense strand to SEQ ID NO: 1862611
uaagaaaguagcauccagg

SEQ ID NO: 1862613 - RNA, 19 nt, Artificial Sequence
  Description of Artificial Sequence: Synthetic oligonucleotide
  Sense strand starting at position 3024 of SEQ ID NO: 1564207
accaucugaucugugagga

SEQ ID NO: 1862614 - RNA, 19 nt, Artificial Sequence
  Description of Artificial Sequence: Synthetic oligonucleotide
  Antisense strand to SEQ ID NO: 1862613
uccucacagaucagauggu

SEQ ID NO: 1862615 - RNA, 19 nt, Artificial Sequence
  Description of Artificial Sequence: Synthetic oligonucleotide
  Sense strand starting at position 3025 of SEQ ID NO: 1564207
ccaucugaucugugaggau

SEQ ID NO: 1862616 - RNA, 19 nt, Artificial Sequence
  Description of Artificial Sequence: Synthetic oligonucleotide
  Antisense strand to SEQ ID NO: 1862615
auccucacagaucagaugg

SEQ ID NO: 1862617 - RNA, 19 nt, Artificial Sequence
  Description of Artificial Sequence: Synthetic oligonucleotide
  Sense strand starting at position 3061 of SEQ ID NO: 1564207
aagccaggcuguuuaguaa

SEQ ID NO: 1862618 - RNA, 19 nt, Artificial Sequence
  Description of Artificial Sequence: Synthetic oligonucleotide
  Antisense strand to SEQ ID NO: 1862617
uuacuaaacagccuggcuu

SEQ ID NO: 1862619 - RNA, 19 nt, Artificial Sequence
  Description of Artificial Sequence: Synthetic oligonucleotide
  Sense strand starting at position 3115 of SEQ ID NO: 1564207
uuaagaacuguuuguugcu

SEQ ID NO: 1862620 - RNA, 19 nt, Artificial Sequence
  Description of Artificial Sequence: Synthetic oligonucleotide
  Antisense strand to SEQ ID NO: 1862619
agcaacaaacaguucuuaa

SEQ ID NO: 1862621 - RNA, 19 nt, Artificial Sequence
  Description of Artificial Sequence: Synthetic oligonucleotide
  Sense strand starting at position 3146 of SEQ ID NO: 1564207
cugauuaacuuuguguuga

SEQ ID NO: 1862622 - RNA, 19 nt, Artificial Sequence
  Description of Artificial Sequence: Synthetic oligonucleotide
  Antisense strand to SEQ ID NO: 1862621
ucaacacaaaguuaaucag

SEQ ID NO: 1862623 - RNA, 19 nt, Artificial Sequence
  Description of Artificial Sequence: Synthetic oligonucleotide
  Sense strand starting at position 3148 of SEQ ID NO: 1564207
gauuaacuuuguguugaga

SEQ ID NO: 1862624 - RNA, 19 nt, Artificial Sequence
  Description of Artificial Sequence: Synthetic oligonucleotide
  Antisense strand to SEQ ID NO: 1862623
ucucaacacaaaguuaauc

SEQ ID NO: 1862625 - RNA, 19 nt, Artificial Sequence
  Description of Artificial Sequence: Synthetic oligonucleotide
  Sense strand starting at position 3151 of SEQ ID NO: 1564207
uaacuuuguguugagauag

SEQ ID NO: 1862626 - RNA, 19 nt, Artificial Sequence
  Description of Artificial Sequence: Synthetic oligonucleotide
  Antisense strand to SEQ ID NO: 1862625
cuaucucaacacaaaguua

SEQ ID NO: 1862627 - RNA, 19 nt, Artificial Sequence
  Description of Artificial Sequence: Synthetic oligonucleotide
  Sense strand starting at position 3225 of SEQ ID NO: 1564207
caauuucucugugagaugu

SEQ ID NO: 1862628 - RNA, 19 nt, Artificial Sequence
  Description of Artificial Sequence: Synthetic oligonucleotide
  Antisense strand to SEQ ID NO: 1862627
acaucucacagagaaauug

SEQ ID NO: 1862629 - RNA, 19 nt, Artificial Sequence
  Description of Artificial Sequence: Synthetic oligonucleotide
  Sense strand starting at position 3231 of SEQ ID NO: 1564207
cucugugagaugugucuuu

SEQ ID NO: 1862630 - RNA, 19 nt, Artificial Sequence
  Description of Artificial Sequence: Synthetic oligonucleotide
  Antisense strand to SEQ ID NO: 1862629
aaagacacaucucacagag

SEQ ID NO: 1862631 - RNA, 19 nt, Artificial Sequence
  Description of Artificial Sequence: Synthetic oligonucleotide
  Sense strand starting at position 3294 of SEQ ID NO: 1564207
gguuucucauuuguauagu

SEQ ID NO: 1862632 - RNA, 19 nt, Artificial Sequence
  Description of Artificial Sequence: Synthetic oligonucleotide
  Antisense strand to SEQ ID NO: 1862631
acuauacaaaugagaaacc

SEQ ID NO: 1862633 - RNA, 19 nt, Artificial Sequence
  Description of Artificial Sequence: Synthetic oligonucleotide
  Sense strand starting at position 3308 of SEQ ID NO: 1564207
auaguuucuuuccuagaga

SEQ ID NO: 1862634 - RNA, 19 nt, Artificial Sequence
  Description of Artificial Sequence: Synthetic oligonucleotide
  Antisense strand to SEQ ID NO: 1862633
ucucuaggaaagaaacuau

SEQ ID NO: 1862635 - RNA, 19 nt, Artificial Sequence
  Description of Artificial Sequence: Synthetic oligonucleotide
  Sense strand starting at position 3311 of SEQ ID NO: 1564207
guuucuuuccuagagaagu

SEQ ID NO: 1862636 - RNA, 19 nt, Artificial Sequence
  Description of Artificial Sequence: Synthetic oligonucleotide
  Antisense strand to SEQ ID NO: 1862635
acuucucuaggaaagaaac

SEQ ID NO: 1862637 - RNA, 19 nt, Artificial Sequence
  Description of Artificial Sequence: Synthetic oligonucleotide
  Sense strand starting at position 3359 of SEQ ID NO: 1564207
ucuuaaauccugugaugga

SEQ ID NO: 1862638 - RNA, 19 nt, Artificial Sequence
  Description of Artificial Sequence: Synthetic oligonucleotide
  Antisense strand to SEQ ID NO: 1862637
uccaucacaggauuuaaga

SEQ ID NO: 1862639 - RNA, 19 nt, Artificial Sequence
  Description of Artificial Sequence: Synthetic oligonucleotide
  Sense strand starting at position 3374 of SEQ ID NO: 1564207
uggagaacucacugccuua

SEQ ID NO: 1862640 - RNA, 19 nt, Artificial Sequence
  Description of Artificial Sequence: Synthetic oligonucleotide
  Antisense strand to SEQ ID NO: 1862639
uaaggcagugaguucucca

SEQ ID NO: 1862641 - RNA, 19 nt, Artificial Sequence
  Description of Artificial Sequence: Synthetic oligonucleotide
  Sense strand starting at position 3484 of SEQ ID NO: 1564207
ucugccucccaguaguuua

SEQ ID NO: 1862642 - RNA, 19 nt, Artificial Sequence
  Description of Artificial Sequence: Synthetic oligonucleotide
  Antisense strand to SEQ ID NO: 1862641
uaaacuacugggaggcaga

SEQ ID NO: 1862643 - RNA, 19 nt, Artificial Sequence
  Description of Artificial Sequence: Synthetic oligonucleotide
  Sense strand starting at position 3619 of SEQ ID NO: 1564207
ccuuccauucugugagaca

SEQ ID NO: 1862644 - RNA, 19 nt, Artificial Sequence
  Description of Artificial Sequence: Synthetic oligonucleotide
  Antisense strand to SEQ ID NO: 1862643
ugucucacagaauggaagg

SEQ ID NO: 1862645 - RNA, 19 nt, Artificial Sequence
  Description of Artificial Sequence: Synthetic oligonucleotide
  Sense strand starting at position 3715 of SEQ ID NO: 1564207
auagaauuguaagaggaau

SEQ ID NO: 1862646 - RNA, 19 nt, Artificial Sequence
  Description of Artificial Sequence: Synthetic oligonucleotide
  Antisense strand to SEQ ID NO: 1862645
auuccucuuacaauucuau

SEQ ID NO: 1862647 - RNA, 19 nt, Artificial Sequence
  Description of Artificial Sequence: Synthetic oligonucleotide
  Sense strand starting at position 3745 of SEQ ID NO: 1564207
ugagucaaccuauguaaag

SEQ ID NO: 1862648 - RNA, 19 nt, Artificial Sequence
  Description of Artificial Sequence: Synthetic oligonucleotide
  Antisense strand to SEQ ID NO: 1862647
cuuuacauagguugacuca

SEQ ID NO: 1862649 - RNA, 19 nt, Artificial Sequence
  Description of Artificial Sequence: Synthetic oligonucleotide
  Sense strand starting at position 953 of SEQ ID NO: 1564208
aaugcaggucuggauacua

SEQ ID NO: 1862650 - RNA, 19 nt, Artificial Sequence
  Description of Artificial Sequence: Synthetic oligonucleotide
  Antisense strand to SEQ ID NO: 1862649
uaguauccagaccugcauu

SEQ ID NO: 1862651 - RNA, 19 nt, Artificial Sequence
  Description of Artificial Sequence: Synthetic oligonucleotide
  Sense strand starting at position 1564 of SEQ ID NO: 1564208
aaguguuuccaugggugua

SEQ ID NO: 1862652 - RNA, 19 nt, Artificial Sequence
  Description of Artificial Sequence: Synthetic oligonucleotide
  Antisense strand to SEQ ID NO: 1862651
uacacccauggaaacacuu

SEQ ID NO: 1862653 - RNA, 19 nt, Artificial Sequence
  Description of Artificial Sequence: Synthetic oligonucleotide
  Sense strand starting at position 1566 of SEQ ID NO: 1564208
guguuuccauggguguaga

SEQ ID NO: 1862654 - RNA, 19 nt, Artificial Sequence
  Description of Artificial Sequence: Synthetic oligonucleotide
  Antisense strand to SEQ ID NO: 1862653
ucuacacccauggaaacac

SEQ ID NO: 1862655 - RNA, 19 nt, Artificial Sequence
  Description of Artificial Sequence: Synthetic oligonucleotide
  Sense strand starting at position 1567 of SEQ ID NO: 1564208
uguuuccauggguguagau

SEQ ID NO: 1862656 - RNA, 19 nt, Artificial Sequence
  Description of Artificial Sequence: Synthetic oligonucleotide
  Antisense strand to SEQ ID NO: 1862655
aucuacacccauggaaaca

SEQ ID NO: 1862657 - RNA, 19 nt, Artificial Sequence
  Description of Artificial Sequence: Synthetic oligonucleotide
  Sense strand starting at position 1574 of SEQ ID NO: 1564208
auggguguagauugugaga

SEQ ID NO: 1862658 - RNA, 19 nt, Artificial Sequence
  Description of Artificial Sequence: Synthetic oligonucleotide
  Antisense strand to SEQ ID NO: 1862657
ucucacaaucuacacccau

SEQ ID NO: 1862659 - RNA, 19 nt, Artificial Sequence
  Description of Artificial Sequence: Synthetic oligonucleotide
  Sense strand starting at position 2192 of SEQ ID NO: 1564208
gucucggugcguuugugua

SEQ ID NO: 1862660 - RNA, 19 nt, Artificial Sequence
  Description of Artificial Sequence: Synthetic oligonucleotide
  Antisense strand to SEQ ID NO: 1862659
uacacaaacgcaccgagac

SEQ ID NO: 1862661 - RNA, 19 nt, Artificial Sequence
  Description of Artificial Sequence: Synthetic oligonucleotide
  Sense strand starting at position 2199 of SEQ ID NO: 1564208
ugcguuuguguagcaaagu

SEQ ID NO: 1862662 - RNA, 19 nt, Artificial Sequence
  Description of Artificial Sequence: Synthetic oligonucleotide
  Antisense strand to SEQ ID NO: 1862661
acuuugcuacacaaacgca

SEQ ID NO: 1862663 - RNA, 19 nt, Artificial Sequence
  Description of Artificial Sequence: Synthetic oligonucleotide
  Sense strand starting at position 2326 of SEQ ID NO: 1564208
aggugugacagcugaucau

SEQ ID NO: 1862664 - RNA, 19 nt, Artificial Sequence
  Description of Artificial Sequence: Synthetic oligonucleotide
  Antisense strand to SEQ ID NO: 1862663
augaucagcugucacaccu

SEQ ID NO: 1862665 - RNA, 19 nt, Artificial Sequence
  Description of Artificial Sequence: Synthetic oligonucleotide
  Sense strand starting at position 2329 of SEQ ID NO: 1564208
ugugacagcugaucauaga

SEQ ID NO: 1862666 - RNA, 19 nt, Artificial Sequence
  Description of Artificial Sequence: Synthetic oligonucleotide
  Antisense strand to SEQ ID NO: 1862665
ucuaugaucagcugucaca

SEQ ID NO: 1862667 - RNA, 19 nt, Artificial Sequence
  Description of Artificial Sequence: Synthetic oligonucleotide
  Sense strand starting at position 2568 of SEQ ID NO: 1564208
cgaugacucccagaucuac

SEQ ID NO: 1862668 - RNA, 19 nt, Artificial Sequence
  Description of Artificial Sequence: Synthetic oligonucleotide
  Antisense strand to SEQ ID NO: 1862667
guagaucugggagucaucg

SEQ ID NO: 1862669 - RNA, 19 nt, Artificial Sequence
  Description of Artificial Sequence: Synthetic oligonucleotide
  Sense strand starting at position 2852 of SEQ ID NO: 1564208
ucaucauaguccuugguuu

SEQ ID NO: 1862670 - RNA, 19 nt, Artificial Sequence
  Description of Artificial Sequence: Synthetic oligonucleotide
  Antisense strand to SEQ ID NO: 1862669
aaaccaaggacuaugauga

SEQ ID NO: 1862671 - RNA, 19 nt, Artificial Sequence
  Description of Artificial Sequence: Synthetic oligonucleotide
  Sense strand starting at position 3042 of SEQ ID NO: 1564208
aguauagugacauguauau

SEQ ID NO: 1862672 - RNA, 19 nt, Artificial Sequence
  Description of Artificial Sequence: Synthetic oligonucleotide
  Antisense strand to SEQ ID NO: 1862671
auauacaugucacuauacu

SEQ ID NO: 1862673 - RNA, 19 nt, Artificial Sequence
  Description of Artificial Sequence: Synthetic oligonucleotide
  Sense strand starting at position 3046 of SEQ ID NO: 1564208
uagugacauguauauguau

SEQ ID NO: 1862674 - RNA, 19 nt, Artificial Sequence
  Description of Artificial Sequence: Synthetic oligonucleotide
  Antisense strand to SEQ ID NO: 1862673
auacauauacaugucacua

SEQ ID NO: 1862675 - RNA, 19 nt, Artificial Sequence
  Description of Artificial Sequence: Synthetic oligonucleotide
  Sense strand starting at position 3048 of SEQ ID NO: 1564208
gugacauguauauguauau

SEQ ID NO: 1862676 - RNA, 19 nt, Artificial Sequence
  Description of Artificial Sequence: Synthetic oligonucleotide
  Antisense strand to SEQ ID NO: 1862675
auauacauauacaugucac

SEQ ID NO: 1862677 - RNA, 19 nt, Artificial Sequence
  Description of Artificial Sequence: Synthetic oligonucleotide
  Sense strand starting at position 3129 of SEQ ID NO: 1564208
guaugucuuguguauaucu

SEQ ID NO: 1862678 - RNA, 19 nt, Artificial Sequence
  Description of Artificial Sequence: Synthetic oligonucleotide
  Antisense strand to SEQ ID NO: 1862677
agauauacacaagacauac

SEQ ID NO: 1862679 - RNA, 19 nt, Artificial Sequence
  Description of Artificial Sequence: Synthetic oligonucleotide
  Sense strand starting at position 3137 of SEQ ID NO: 1564208
uguguauaucugggcaaca

SEQ ID NO: 1862680 - RNA, 19 nt, Artificial Sequence
  Description of Artificial Sequence: Synthetic oligonucleotide
  Antisense strand to SEQ ID NO: 1862679
uguugcccagauauacaca

SEQ ID NO: 1862681 - RNA, 19 nt, Artificial Sequence
  Description of Artificial Sequence: Synthetic oligonucleotide
  Sense strand starting at position 3138 of SEQ ID NO: 1564208
guguauaucugggcaacaa

SEQ ID NO: 1862682 - RNA, 19 nt, Artificial Sequence
  Description of Artificial Sequence: Synthetic oligonucleotide
  Antisense strand to SEQ ID NO: 1862681
uuguugcccagauauacac

SEQ ID NO: 1862683 - RNA, 19 nt, Artificial Sequence
  Description of Artificial Sequence: Synthetic oligonucleotide
  Sense strand starting at position 3139 of SEQ ID NO: 1564208
uguauaucugggcaacaac

SEQ ID NO: 1862684 - RNA, 19 nt, Artificial Sequence
  Description of Artificial Sequence: Synthetic oligonucleotide
  Antisense strand to SEQ ID NO: 1862683
guuguugcccagauauaca

SEQ ID NO: 1862685 - RNA, 19 nt, Artificial Sequence
  Description of Artificial Sequence: Synthetic oligonucleotide
  Sense strand starting at position 3203 of SEQ ID NO: 1564208
uaugaauuauguguguuac

SEQ ID NO: 1862686 - RNA, 19 nt, Artificial Sequence
  Description of Artificial Sequence: Synthetic oligonucleotide
  Antisense strand to SEQ ID NO: 1862685
guaacacacauaauucaua

SEQ ID NO: 1862687 - RNA, 19 nt, Artificial Sequence
  Description of Artificial Sequence: Synthetic oligonucleotide
  Sense strand starting at position 3204 of SEQ ID NO: 1564208
augaauuauguguguuaca

SEQ ID NO: 1862688 - RNA, 19 nt, Artificial Sequence
  Description of Artificial Sequence: Synthetic oligonucleotide
  Antisense strand to SEQ ID NO: 1862687
uguaacacacauaauucau

SEQ ID NO: 1862689 - RNA, 19 nt, Artificial Sequence
  Description of Artificial Sequence: Synthetic oligonucleotide
  Sense strand starting at position 3205 of SEQ ID NO: 1564208
ugaauuauguguguuacac

SEQ ID NO: 1862690 - RNA, 19 nt, Artificial Sequence
  Description of Artificial Sequence: Synthetic oligonucleotide
  Antisense strand to SEQ ID NO: 1862689
guguaacacacauaauuca

SEQ ID NO: 1862691 - RNA, 19 nt, Artificial Sequence
  Description of Artificial Sequence: Synthetic oligonucleotide
  Sense strand starting at position 3276 of SEQ ID NO: 1564208
uugaucuuccuacaguauu

SEQ ID NO: 1862692 - RNA, 19 nt, Artificial Sequence
  Description of Artificial Sequence: Synthetic oligonucleotide
  Antisense strand to SEQ ID NO: 1862691
aauacuguaggaagaucaa

SEQ ID NO: 1862693 - RNA, 19 nt, Artificial Sequence
  Description of Artificial Sequence: Synthetic oligonucleotide
  Sense strand starting at position 3295 of SEQ ID NO: 1564208
uugcucuaucaauaugugu

SEQ ID NO: 1862694 - RNA, 19 nt, Artificial Sequence
  Description of Artificial Sequence: Synthetic oligonucleotide
  Antisense strand to SEQ ID NO: 1862693
acacauauugauagagcaa

SEQ ID NO: 1862695 - RNA, 19 nt, Artificial Sequence
  Description of Artificial Sequence: Synthetic oligonucleotide
  Sense strand starting at position 3298 of SEQ ID NO: 1564208
cucuaucaauauguguauu

SEQ ID NO: 1862696 - RNA, 19 nt, Artificial Sequence
  Description of Artificial Sequence: Synthetic oligonucleotide
  Antisense strand to SEQ ID NO: 1862695
aauacacauauugauagag

SEQ ID NO: 1862697 - RNA, 19 nt, Artificial Sequence
  Description of Artificial Sequence: Synthetic oligonucleotide
  Sense strand starting at position 3301 of SEQ ID NO: 1564208
uaucaauauguguauucgu

SEQ ID NO: 1862698 - RNA, 19 nt, Artificial Sequence
  Description of Artificial Sequence: Synthetic oligonucleotide
  Antisense strand to SEQ ID NO: 1862697
acgaauacacauauugaua

SEQ ID NO: 1862699 - RNA, 19 nt, Artificial Sequence
  Description of Artificial Sequence: Synthetic oligonucleotide
  Sense strand starting at position 3304 of SEQ ID NO: 1564208
caauauguguauucgucau

SEQ ID NO: 1862700 - RNA, 19 nt, Artificial Sequence
  Description of Artificial Sequence: Synthetic oligonucleotide
  Antisense strand to SEQ ID NO: 1862699
augacgaauacacauauug

SEQ ID NO: 1862701 - RNA, 19 nt, Artificial Sequence
  Description of Artificial Sequence: Synthetic oligonucleotide
  Sense strand starting at position 3306 of SEQ ID NO: 1564208
auauguguauucgucauua

SEQ ID NO: 1862702 - RNA, 19 nt, Artificial Sequence
  Description of Artificial Sequence: Synthetic oligonucleotide
  Antisense strand to SEQ ID NO: 1862701
uaaugacgaauacacauau

SEQ ID NO: 1862703 - RNA, 19 nt, Artificial Sequence
  Description of Artificial Sequence: Synthetic oligonucleotide
  Sense strand starting at position 3308 of SEQ ID NO: 1564208
auguguauucgucauuauc

SEQ ID NO: 1862704 - RNA, 19 nt, Artificial Sequence
  Description of Artificial Sequence: Synthetic oligonucleotide
  Antisense strand to SEQ ID NO: 1862703
gauaaugacgaauacacau

SEQ ID NO: 1862705 - RNA, 19 nt, Artificial Sequence
  Description of Artificial Sequence: Synthetic oligonucleotide
  Sense strand starting at position 3316 of SEQ ID NO: 1564208
ucgucauuaucaccacauc

SEQ ID NO: 1862706 - RNA, 19 nt, Artificial Sequence
  Description of Artificial Sequence: Synthetic oligonucleotide
  Antisense strand to SEQ ID NO: 1862705
gauguggugauaaugacga

SEQ ID NO: 1862707 - RNA, 19 nt, Artificial Sequence
  Description of Artificial Sequence: Synthetic oligonucleotide
  Sense strand starting at position 3317 of SEQ ID NO: 1564208
cgucauuaucaccacauca

SEQ ID NO: 1862708 - RNA, 19 nt, Artificial Sequence
  Description of Artificial Sequence: Synthetic oligonucleotide
  Antisense strand to SEQ ID NO: 1862707
ugauguggugauaaugacg

SEQ ID NO: 1862709 - RNA, 19 nt, Artificial Sequence
  Description of Artificial Sequence: Synthetic oligonucleotide
  Sense strand starting at position 3339 of SEQ ID NO: 1564208
auaauucuguccucaaugu

SEQ ID NO: 1862710 - RNA, 19 nt, Artificial Sequence
  Description of Artificial Sequence: Synthetic oligonucleotide
  Antisense strand to SEQ ID NO: 1862709
acauugaggacagaauuau

SEQ ID NO: 1862711 - RNA, 19 nt, Artificial Sequence
  Description of Artificial Sequence: Synthetic oligonucleotide
  Sense strand starting at position 3368 of SEQ ID NO: 1564208
uccugaauuaucgaggcua

SEQ ID NO: 1862712 - RNA, 19 nt, Artificial Sequence
  Description of Artificial Sequence: Synthetic oligonucleotide
  Antisense strand to SEQ ID NO: 1862711
uagccucgauaauucagga

SEQ ID NO: 1862713 - RNA, 19 nt, Artificial Sequence
  Description of Artificial Sequence: Synthetic oligonucleotide
  Sense strand starting at position 3550 of SEQ ID NO: 1564208
ugcuaauggagccaaagua

SEQ ID NO: 1862714 - RNA, 19 nt, Artificial Sequence
  Description of Artificial Sequence: Synthetic oligonucleotide
  Antisense strand to SEQ ID NO: 1862713
uacuuuggcuccauuagca

SEQ ID NO: 1862715 - RNA, 19 nt, Artificial Sequence
  Description of Artificial Sequence: Synthetic oligonucleotide
  Sense strand starting at position 3703 of SEQ ID NO: 1564208
uuugcauuugcauguaaua

SEQ ID NO: 1862716 - RNA, 19 nt, Artificial Sequence
  Description of Artificial Sequence: Synthetic oligonucleotide
  Antisense strand to SEQ ID NO: 1862715
uauuacaugcaaaugcaaa

SEQ ID NO: 1862717 - RNA, 19 nt, Artificial Sequence
  Description of Artificial Sequence: Synthetic oligonucleotide
  Sense strand starting at position 3716 of SEQ ID NO: 1564208
guaauaaauugacacauug

SEQ ID NO: 1862718 - RNA, 19 nt, Artificial Sequence
  Description of Artificial Sequence: Synthetic oligonucleotide
  Antisense strand to SEQ ID NO: 1862717
caaugugucaauuuauuac

SEQ ID NO: 1862719 - RNA, 19 nt, Artificial Sequence
  Description of Artificial Sequence: Synthetic oligonucleotide
  Sense strand starting at position 3727 of SEQ ID NO: 1564208
acacauuguuccucaagua

SEQ ID NO: 1862720 - RNA, 19 nt, Artificial Sequence
  Description of Artificial Sequence: Synthetic oligonucleotide
  Antisense strand to SEQ ID NO: 1862719
uacuugaggaacaaugugu

SEQ ID NO: 1862721 - RNA, 19 nt, Artificial Sequence
  Description of Artificial Sequence: Synthetic oligonucleotide
  Sense strand starting at position 3742 of SEQ ID NO: 1564208
aguaauuacuaccuuugga

SEQ ID NO: 1862722 - RNA, 19 nt, Artificial Sequence
  Description of Artificial Sequence: Synthetic oligonucleotide
  Antisense strand to SEQ ID NO: 1862721
uccaaagguaguaauuacu

SEQ ID NO: 1862723 - RNA, 19 nt, Artificial Sequence
  Description of Artificial Sequence: Synthetic oligonucleotide
  Sense strand starting at position 3779 of SEQ ID NO: 1564208
ucucuugaugcauaguaua

SEQ ID NO: 1862724 - RNA, 19 nt, Artificial Sequence
  Description of Artificial Sequence: Synthetic oligonucleotide
  Antisense strand to SEQ ID NO: 1862723
uauacuaugcaucaagaga

SEQ ID NO: 1862725 - RNA, 19 nt, Artificial Sequence
  Description of Artificial Sequence: Synthetic oligonucleotide
  Sense strand starting at position 3787 of SEQ ID NO: 1564208
ugcauaguauauguugauu

SEQ ID NO: 1862726 - RNA, 19 nt, Artificial Sequence
  Description of Artificial Sequence: Synthetic oligonucleotide
  Antisense strand to SEQ ID NO: 1862725
aaucaacauauacuaugca

SEQ ID NO: 1862727 - RNA, 19 nt, Artificial Sequence
  Description of Artificial Sequence: Synthetic oligonucleotide
  Sense strand starting at position 3819 of SEQ ID NO: 1564208
guuaaauguuugucaucca

SEQ ID NO: 1862728 - RNA, 19 nt, Artificial Sequence
  Description of Artificial Sequence: Synthetic oligonucleotide
  Antisense strand to SEQ ID NO: 1862727
uggaugacaaacauuuaac

SEQ ID NO: 1862729 - RNA, 19 nt, Artificial Sequence
  Description of Artificial Sequence: Synthetic oligonucleotide
  Sense strand starting at position 1551 of SEQ ID NO: 1564209
agauguuuccaugggagca

SEQ ID NO: 1862730 - RNA, 19 nt, Artificial Sequence
  Description of Artificial Sequence: Synthetic oligonucleotide
  Antisense strand to SEQ ID NO: 1862729
ugcucccauggaaacaucu

SEQ ID NO: 1862731 - RNA, 19 nt, Artificial Sequence
  Description of Artificial Sequence: Synthetic oligonucleotide
  Sense strand starting at position 1570 of SEQ ID NO: 1564209
gauugugagaggcgguuau

SEQ ID NO: 1862732 - RNA, 19 nt, Artificial Sequence
  Description of Artificial Sequence: Synthetic oligonucleotide
  Antisense strand to SEQ ID NO: 1862731
auaaccgccucucacaauc

SEQ ID NO: 1862733 - RNA, 19 nt, Artificial Sequence
  Description of Artificial Sequence: Synthetic oligonucleotide
  Sense strand starting at position 1580 of SEQ ID NO: 1564209
ggcgguuauuuccagaaua

SEQ ID NO: 1862734 - RNA, 19 nt, Artificial Sequence
  Description of Artificial Sequence: Synthetic oligonucleotide
  Antisense strand to SEQ ID NO: 1862733
uauucuggaaauaaccgcc

SEQ ID NO: 1862735 - RNA, 19 nt, Artificial Sequence
  Description of Artificial Sequence: Synthetic oligonucleotide
  Sense strand starting at position 2233 of SEQ ID NO: 1564209
ugccauuaucgccaggugu

SEQ ID NO: 1862736 - RNA, 19 nt, Artificial Sequence
  Description of Artificial Sequence: Synthetic oligonucleotide
  Antisense strand to SEQ ID NO: 1862735
acaccuggcgauaauggca

SEQ ID NO: 1862737 - RNA, 19 nt, Artificial Sequence
  Description of Artificial Sequence: Synthetic oligonucleotide
  Sense strand starting at position 2246 of SEQ ID NO: 1564209
aggugugacagcugaucaa

SEQ ID NO: 1862738 - RNA, 19 nt, Artificial Sequence
  Description of Artificial Sequence: Synthetic oligonucleotide
  Antisense strand to SEQ ID NO: 1862737
uugaucagcugucacaccu

SEQ ID NO: 1862739 - RNA, 19 nt, Artificial Sequence
  Description of Artificial Sequence: Synthetic oligonucleotide
  Sense strand starting at position 2249 of SEQ ID NO: 1564209
ugugacagcugaucaaaga

SEQ ID NO: 1862740 - RNA, 19 nt, Artificial Sequence
  Description of Artificial Sequence: Synthetic oligonucleotide
  Antisense strand to SEQ ID NO: 1862739
ucuuugaucagcugucaca

SEQ ID NO: 1862741 - RNA, 19 nt, Artificial Sequence
  Description of Artificial Sequence: Synthetic oligonucleotide
  Sense strand starting at position 2452 of SEQ ID NO: 1564209
cucccuguuugaucucauu

SEQ ID NO: 1862742 - RNA, 19 nt, Artificial Sequence
  Description of Artificial Sequence: Synthetic oligonucleotide
  Antisense strand to SEQ ID NO: 1862741
aaugagaucaaacagggag

SEQ ID NO: 1862743 - RNA, 19 nt, Artificial Sequence
  Description of Artificial Sequence: Synthetic oligonucleotide
  Sense strand starting at position 2635 of SEQ ID NO: 1564209
uaugauaguugagaaguaa

SEQ ID NO: 1862744 - RNA, 19 nt, Artificial Sequence
  Description of Artificial Sequence: Synthetic oligonucleotide
  Antisense strand to SEQ ID NO: 1862743
uuacuucucaacuaucaua

SEQ ID NO: 1862745 - RNA, 19 nt, Artificial Sequence
  Description of Artificial Sequence: Synthetic oligonucleotide
  Sense strand starting at position 2650 of SEQ ID NO: 1564209
guaauaucucaauggcauu

SEQ ID NO: 1862746 - RNA, 19 nt, Artificial Sequence
  Description of Artificial Sequence: Synthetic oligonucleotide
  Antisense strand to SEQ ID NO: 1862745
aaugccauugagauauuac

SEQ ID NO: 1862747 - RNA, 19 nt, Artificial Sequence
  Description of Artificial Sequence: Synthetic oligonucleotide
  Sense strand starting at position 2673 of SEQ ID NO: 1564209
uuugccuuaucuguguuua

SEQ ID NO: 1862748 - RNA, 19 nt, Artificial Sequence
  Description of Artificial Sequence: Synthetic oligonucleotide
  Antisense strand to SEQ ID NO: 1862747
uaaacacagauaaggcaaa

SEQ ID NO: 1862749 - RNA, 19 nt, Artificial Sequence
  Description of Artificial Sequence: Synthetic oligonucleotide
  Sense strand starting at position 2674 of SEQ ID NO: 1564209
uugccuuaucuguguuuaa

SEQ ID NO: 1862750 - RNA, 19 nt, Artificial Sequence
  Description of Artificial Sequence: Synthetic oligonucleotide
  Antisense strand to SEQ ID NO: 1862749
uuaaacacagauaaggcaa

SEQ ID NO: 1862751 - RNA, 19 nt, Artificial Sequence
  Description of Artificial Sequence: Synthetic oligonucleotide
  Sense strand starting at position 2675 of SEQ ID NO: 1564209
ugccuuaucuguguuuaag

SEQ ID NO: 1862752 - RNA, 19 nt, Artificial Sequence
  Description of Artificial Sequence: Synthetic oligonucleotide
  Antisense strand to SEQ ID NO: 1862751
cuuaaacacagauaaggca

SEQ ID NO: 1862753 - RNA, 19 nt, Artificial Sequence
  Description of Artificial Sequence: Synthetic oligonucleotide
  Sense strand starting at position 2677 of SEQ ID NO: 1564209
ccuuaucuguguuuaagga

SEQ ID NO: 1862754 - RNA, 19 nt, Artificial Sequence
  Description of Artificial Sequence: Synthetic oligonucleotide
  Antisense strand to SEQ ID NO: 1862753
uccuuaaacacagauaagg

SEQ ID NO: 1862755 - RNA, 19 nt, Artificial Sequence
  Description of Artificial Sequence: Synthetic oligonucleotide
  Sense strand starting at position 2714 of SEQ ID NO: 1564209
uugugaauugucgguucau

SEQ ID NO: 1862756 - RNA, 19 nt, Artificial Sequence
  Description of Artificial Sequence: Synthetic oligonucleotide
  Antisense strand to SEQ ID NO: 1862755
augaaccgacaauucacaa

SEQ ID NO: 1862757 - RNA, 19 nt, Artificial Sequence
  Description of Artificial Sequence: Synthetic oligonucleotide
  Sense strand starting at position 2715 of SEQ ID NO: 1564209
ugugaauugucgguucaug

SEQ ID NO: 1862758 - RNA, 19 nt, Artificial Sequence
  Description of Artificial Sequence: Synthetic oligonucleotide
  Antisense strand to SEQ ID NO: 1862757
caugaaccgacaauucaca

SEQ ID NO: 1862759 - RNA, 19 nt, Artificial Sequence
  Description of Artificial Sequence: Synthetic oligonucleotide
  Sense strand starting at position 2804 of SEQ ID NO: 1564209
acuguuauauauguugcaa

SEQ ID NO: 1862760 - RNA, 19 nt, Artificial Sequence
  Description of Artificial Sequence: Synthetic oligonucleotide
  Antisense strand to SEQ ID NO: 1862759
uugcaacauauauaacagu

SEQ ID NO: 1862761 - RNA, 19 nt, Artificial Sequence
  Description of Artificial Sequence: Synthetic oligonucleotide
  Sense strand starting at position 2831 of SEQ ID NO: 1564209
ccaguuugucaguugcuuu

SEQ ID NO: 1862762 - RNA, 19 nt, Artificial Sequence
  Description of Artificial Sequence: Synthetic oligonucleotide
  Antisense strand to SEQ ID NO: 1862761
aaagcaacugacaaacugg

SEQ ID NO: 1862763 - RNA, 19 nt, Artificial Sequence
  Description of Artificial Sequence: Synthetic oligonucleotide
  Sense strand starting at position 3029 of SEQ ID NO: 1564209
auauuuguguauggcauaa

SEQ ID NO: 1862764 - RNA, 19 nt, Artificial Sequence
  Description of Artificial Sequence: Synthetic oligonucleotide
  Antisense strand to SEQ ID NO: 1862763
uuaugccauacacaaauau

SEQ ID NO: 1862765 - RNA, 19 nt, Artificial Sequence
  Description of Artificial Sequence: Synthetic oligonucleotide
  Sense strand starting at position 3031 of SEQ ID NO: 1564209
auuuguguauggcauaaag

SEQ ID NO: 1862766 - RNA, 19 nt, Artificial Sequence
  Description of Artificial Sequence: Synthetic oligonucleotide
  Antisense strand to SEQ ID NO: 1862765
cuuuaugccauacacaaau

SEQ ID NO: 1862767 - RNA, 19 nt, Artificial Sequence
  Description of Artificial Sequence: Synthetic oligonucleotide
  Sense strand starting at position 3045 of SEQ ID NO: 1564209
uaaaguauugauggaucuu

SEQ ID NO: 1862768 - RNA, 19 nt, Artificial Sequence
  Description of Artificial Sequence: Synthetic oligonucleotide
  Antisense strand to SEQ ID NO: 1862767
aagauccaucaauacuuua

SEQ ID NO: 1862769 - RNA, 19 nt, Artificial Sequence
  Description of Artificial Sequence: Synthetic oligonucleotide
  Sense strand starting at position 3093 of SEQ ID NO: 1564209
uuguucuggcaucagaaag

SEQ ID NO: 1862770 - RNA, 19 nt, Artificial Sequence
  Description of Artificial Sequence: Synthetic oligonucleotide
  Antisense strand to SEQ ID NO: 1862769
cuuucugaugccagaacaa

SEQ ID NO: 1862771 - RNA, 19 nt, Artificial Sequence
  Description of Artificial Sequence: Synthetic oligonucleotide
  Sense strand starting at position 3113 of SEQ ID NO: 1564209
ccaucuuugcuuuagggau

SEQ ID NO: 1862772 - RNA, 19 nt, Artificial Sequence
  Description of Artificial Sequence: Synthetic oligonucleotide
  Antisense strand to SEQ ID NO: 1862771
aucccuaaagcaaagaugg

SEQ ID NO: 1862773 - RNA, 19 nt, Artificial Sequence
  Description of Artificial Sequence: Synthetic oligonucleotide
  Sense strand starting at position 3212 of SEQ ID NO: 1564209
ucuguuugcuauccauaua

SEQ ID NO: 1862774 - RNA, 19 nt, Artificial Sequence
  Description of Artificial Sequence: Synthetic oligonucleotide
  Antisense strand to SEQ ID NO: 1862773
uauauggauagcaaacaga

SEQ ID NO: 1862775 - RNA, 19 nt, Artificial Sequence
  Description of Artificial Sequence: Synthetic oligonucleotide
  Sense strand starting at position 3215 of SEQ ID NO: 1564209
guuugcuauccauauacca

SEQ ID NO: 1862776 - RNA, 19 nt, Artificial Sequence
  Description of Artificial Sequence: Synthetic oligonucleotide
  Antisense strand to SEQ ID NO: 1862775
ugguauauggauagcaaac

SEQ ID NO: 1862777 - RNA, 19 nt, Artificial Sequence
  Description of Artificial Sequence: Synthetic oligonucleotide
  Sense strand starting at position 3231 of SEQ ID NO: 1564209
ccaguugaauuauagagga

SEQ ID NO: 1862778 - RNA, 19 nt, Artificial Sequence
  Description of Artificial Sequence: Synthetic oligonucleotide
  Antisense strand to SEQ ID NO: 1862777
uccucuauaauucaacugg

SEQ ID NO: 1862779 - RNA, 19 nt, Artificial Sequence
  Description of Artificial Sequence: Synthetic oligonucleotide
  Sense strand starting at position 3394 of SEQ ID NO: 1564209
ccugaaugucccugaagga

SEQ ID NO: 1862780 - RNA, 19 nt, Artificial Sequence
  Description of Artificial Sequence: Synthetic oligonucleotide
  Antisense strand to SEQ ID NO: 1862779
uccuucagggacauucagg

SEQ ID NO: 1862781 - RNA, 19 nt, Artificial Sequence
  Description of Artificial Sequence: Synthetic oligonucleotide
  Sense strand starting at position 3500 of SEQ ID NO: 1564209
cuuaauagauggcuccaga

SEQ ID NO: 1862782 - RNA, 19 nt, Artificial Sequence
  Description of Artificial Sequence: Synthetic oligonucleotide
  Antisense strand to SEQ ID NO: 1862781
ucuggagccaucuauuaag

SEQ ID NO: 1862783 - RNA, 19 nt, Artificial Sequence
  Description of Artificial Sequence: Synthetic oligonucleotide
  Sense strand starting at position 3547 of SEQ ID NO: 1564209
ugggaaucaucccucauuc

SEQ ID NO: 1862784 - RNA, 19 nt, Artificial Sequence
  Description of Artificial Sequence: Synthetic oligonucleotide
  Antisense strand to SEQ ID NO: 1862783
gaaugagggaugauuccca

SEQ ID NO: 1862785 - RNA, 19 nt, Artificial Sequence
  Description of Artificial Sequence: Synthetic oligonucleotide
  Sense strand starting at position 3682 of SEQ ID NO: 1564209
cuggucuaugguggaagau

SEQ ID NO: 1862786 - RNA, 19 nt, Artificial Sequence
  Description of Artificial Sequence: Synthetic oligonucleotide
  Antisense strand to SEQ ID NO: 1862785
aucuuccaccauagaccag

SEQ ID NO: 1862787 - RNA, 19 nt, Artificial Sequence
  Description of Artificial Sequence: Synthetic oligonucleotide
  Sense strand starting at position 3781 of SEQ ID NO: 1564209
ucauuacaguacuugaagu

SEQ ID NO: 1862788 - RNA, 19 nt, Artificial Sequence
  Description of Artificial Sequence: Synthetic oligonucleotide
  Antisense strand to SEQ ID NO: 1862787
acuucaaguacuguaauga

SEQ ID NO: 1862789 - RNA, 19 nt, Artificial Sequence
  Description of Artificial Sequence: Synthetic oligonucleotide
  Sense strand starting at position 3798 of SEQ ID NO: 1564209
guagguaggucacuaauua

SEQ ID NO: 1862790 - RNA, 19 nt, Artificial Sequence
  Description of Artificial Sequence: Synthetic oligonucleotide
  Antisense strand to SEQ ID NO: 1862789
uaauuagugaccuaccuac

SEQ ID NO: 1862791 - RNA, 19 nt, Artificial Sequence
  Description of Artificial Sequence: Synthetic oligonucleotide
  Sense strand starting at position 3799 of SEQ ID NO: 1564209
uagguaggucacuaauuac

SEQ ID NO: 1862792 - RNA, 19 nt, Artificial Sequence
  Description of Artificial Sequence: Synthetic oligonucleotide
  Antisense strand to SEQ ID NO: 1862791
guaauuagugaccuaccua

SEQ ID NO: 1862793 - RNA, 19 nt, Artificial Sequence
  Description of Artificial Sequence: Synthetic oligonucleotide
  Sense strand starting at position 3860 of SEQ ID NO: 1564209
cuuggucuuuagccugauu

SEQ ID NO: 1862794 - RNA, 19 nt, Artificial Sequence
  Description of Artificial Sequence: Synthetic oligonucleotide
  Antisense strand to SEQ ID NO: 1862793
aaucaggcuaaagaccaag

SEQ ID NO: 1862795 - RNA, 19 nt, Artificial Sequence
  Description of Artificial Sequence: Synthetic oligonucleotide
  Sense strand starting at position 3862 of SEQ ID NO: 1564209
uggucuuuagccugauuau

SEQ ID NO: 1862796 - RNA, 19 nt, Artificial Sequence
  Description of Artificial Sequence: Synthetic oligonucleotide
  Antisense strand to SEQ ID NO: 1862795
auaaucaggcuaaagacca

SEQ ID NO: 1862797 - RNA, 19 nt, Artificial Sequence
  Description of Artificial Sequence: Synthetic oligonucleotide
  Sense strand starting at position 3863 of SEQ ID NO: 1564209
ggucuuuagccugauuauu

SEQ ID NO: 1862798 - RNA, 19 nt, Artificial Sequence
  Description of Artificial Sequence: Synthetic oligonucleotide
  Antisense strand to SEQ ID NO: 1862797
aauaaucaggcuaaagacc

SEQ ID NO: 1862799 - RNA, 19 nt, Artificial Sequence
  Description of Artificial Sequence: Synthetic oligonucleotide
  Sense strand starting at position 3898 of SEQ ID NO: 1564209
gcaguuauugaagaucuaa

SEQ ID NO: 1862800 - RNA, 19 nt, Artificial Sequence
  Description of Artificial Sequence: Synthetic oligonucleotide
  Antisense strand to SEQ ID NO: 1862799
uuagaucuucaauaacugc

SEQ ID NO: 1862801 - RNA, 19 nt, Artificial Sequence
  Description of Artificial Sequence: Synthetic oligonucleotide
  Sense strand starting at position 3946 of SEQ ID NO: 1564209
aagaaaugugccuguugga

SEQ ID NO: 1862802 - RNA, 19 nt, Artificial Sequence
  Description of Artificial Sequence: Synthetic oligonucleotide
  Antisense strand to SEQ ID NO: 1862801
uccaacaggcacauuucuu

SEQ ID NO: 1862803 - RNA, 19 nt, Artificial Sequence
  Description of Artificial Sequence: Synthetic oligonucleotide
  Sense strand starting at position 3953 of SEQ ID NO: 1564209
gugccuguuggauaauuag

SEQ ID NO: 1862804 - RNA, 19 nt, Artificial Sequence
  Description of Artificial Sequence: Synthetic oligonucleotide
  Antisense strand to SEQ ID NO: 1862803
cuaauuauccaacaggcac

SEQ ID NO: 1862805 - RNA, 19 nt, Artificial Sequence
  Description of Artificial Sequence: Synthetic oligonucleotide
  Sense strand starting at position 3956 of SEQ ID NO: 1564209
ccuguuggauaauuagaca

SEQ ID NO: 1862806 - RNA, 19 nt, Artificial Sequence
  Description of Artificial Sequence: Synthetic oligonucleotide
  Antisense strand to SEQ ID NO: 1862805
ugucuaauuauccaacagg

SEQ ID NO: 1862807 - RNA, 19 nt, Artificial Sequence
  Description of Artificial Sequence: Synthetic oligonucleotide
  Sense strand starting at position 3959 of SEQ ID NO: 1564209
guuggauaauuagacaguu

SEQ ID NO: 1862808 - RNA, 19 nt, Artificial Sequence
  Description of Artificial Sequence: Synthetic oligonucleotide
  Antisense strand to SEQ ID NO: 1862807
aacugucuaauuauccaac

SEQ ID NO: 1862809 - RNA, 19 nt, Artificial Sequence
  Description of Artificial Sequence: Synthetic oligonucleotide
  Sense strand starting at position 1425 of SEQ ID NO: 1564210
gcaccaaaucaggaugcuu

SEQ ID NO: 1862810 - RNA, 19 nt, Artificial Sequence
  Description of Artificial Sequence: Synthetic oligonucleotide
  Antisense strand to SEQ ID NO: 1862809
aagcauccugauuuggugc

SEQ ID NO: 1862811 - RNA, 19 nt, Artificial Sequence
  Description of Artificial Sequence: Synthetic oligonucleotide
  Sense strand starting at position 1433 of SEQ ID NO: 1564210
ucaggaugcuuuccaaacu

SEQ ID NO: 1862812 - RNA, 19 nt, Artificial Sequence
  Description of Artificial Sequence: Synthetic oligonucleotide
  Antisense strand to SEQ ID NO: 1862811
aguuuggaaagcauccuga

SEQ ID NO: 1862813 - RNA, 19 nt, Artificial Sequence
  Description of Artificial Sequence: Synthetic oligonucleotide
  Sense strand starting at position 1547 of SEQ ID NO: 1564210
guuuacuuccacugucuca

SEQ ID NO: 1862814 - RNA, 19 nt, Artificial Sequence
  Description of Artificial Sequence: Synthetic oligonucleotide
  Antisense strand to SEQ ID NO: 1862813
ugagacaguggaaguaaac

SEQ ID NO: 1862815 - RNA, 19 nt, Artificial Sequence
  Description of Artificial Sequence: Synthetic oligonucleotide
  Sense strand starting at position 1623 of SEQ ID NO: 1564210
agaggaugugccuggaaag

SEQ ID NO: 1862816 - RNA, 19 nt, Artificial Sequence
  Description of Artificial Sequence: Synthetic oligonucleotide
  Antisense strand to SEQ ID NO: 1862815
cuuuccaggcacauccucu

SEQ ID NO: 1862817 - RNA, 19 nt, Artificial Sequence
  Description of Artificial Sequence: Synthetic oligonucleotide
  Sense strand starting at position 2192 of SEQ ID NO: 1564210
ucuugauaauguugcucuu

SEQ ID NO: 1862818 - RNA, 19 nt, Artificial Sequence
  Description of Artificial Sequence: Synthetic oligonucleotide
  Antisense strand to SEQ ID NO: 1862817
aagagcaacauuaucaaga

SEQ ID NO: 1862819 - RNA, 19 nt, Artificial Sequence
  Description of Artificial Sequence: Synthetic oligonucleotide
  Sense strand starting at position 2194 of SEQ ID NO: 1564210
uugauaauguugcucuuaa

SEQ ID NO: 1862820 - RNA, 19 nt, Artificial Sequence
  Description of Artificial Sequence: Synthetic oligonucleotide
  Antisense strand to SEQ ID NO: 1862819
uuaagagcaacauuaucaa

SEQ ID NO: 1862821 - RNA, 19 nt, Artificial Sequence
  Description of Artificial Sequence: Synthetic oligonucleotide
  Sense strand starting at position 2195 of SEQ ID NO: 1564210
ugauaauguugcucuuaaa

SEQ ID NO: 1862822 - RNA, 19 nt, Artificial Sequence
  Description of Artificial Sequence: Synthetic oligonucleotide
  Antisense strand to SEQ ID NO: 1862821
uuuaagagcaacauuauca

SEQ ID NO: 1862823 - RNA, 19 nt, Artificial Sequence
  Description of Artificial Sequence: Synthetic oligonucleotide
  Sense strand starting at position 2247 of SEQ ID NO: 1564210
aucguaugaaugugaacuu

SEQ ID NO: 1862824 - RNA, 19 nt, Artificial Sequence
  Description of Artificial Sequence: Synthetic oligonucleotide
  Antisense strand to SEQ ID NO: 1862823
aaguucacauucauacgau

SEQ ID NO: 1862825 - RNA, 19 nt, Artificial Sequence
  Description of Artificial Sequence: Synthetic oligonucleotide
  Sense strand starting at position 2248 of SEQ ID NO: 1564210
ucguaugaaugugaacuua

SEQ ID NO: 1862826 - RNA, 19 nt, Artificial Sequence
  Description of Artificial Sequence: Synthetic oligonucleotide
  Antisense strand to SEQ ID NO: 1862825
uaaguucacauucauacga

SEQ ID NO: 1862827 - RNA, 19 nt, Artificial Sequence
  Description of Artificial Sequence: Synthetic oligonucleotide
  Sense strand starting at position 2524 of SEQ ID NO: 1564210
aguauagcaucugcagaaa

SEQ ID NO: 1862828 - RNA, 19 nt, Artificial Sequence
  Description of Artificial Sequence: Synthetic oligonucleotide
  Antisense strand to SEQ ID NO: 1862827
uuucugcagaugcuauacu

SEQ ID NO: 1862829 - RNA, 19 nt, Artificial Sequence
  Description of Artificial Sequence: Synthetic oligonucleotide
  Sense strand starting at position 2527 of SEQ ID NO: 1564210
auagcaucugcagaaaugu

SEQ ID NO: 1862830 - RNA, 19 nt, Artificial Sequence
  Description of Artificial Sequence: Synthetic oligonucleotide
  Antisense strand to SEQ ID NO: 1862829
acauuucugcagaugcuau

SEQ ID NO: 1862831 - RNA, 19 nt, Artificial Sequence
  Description of Artificial Sequence: Synthetic oligonucleotide
  Sense strand starting at position 2712 of SEQ ID NO: 1564210
agcugaagucuuuguguuu

SEQ ID NO: 1862832 - RNA, 19 nt, Artificial Sequence
  Description of Artificial Sequence: Synthetic oligonucleotide
  Antisense strand to SEQ ID NO: 1862831
aaacacaaagacuucagcu

SEQ ID NO: 1862833 - RNA, 19 nt, Artificial Sequence
  Description of Artificial Sequence: Synthetic oligonucleotide
  Sense strand starting at position 2782 of SEQ ID NO: 1564210
gccagacucaaaugauggu

SEQ ID NO: 1862834 - RNA, 19 nt, Artificial Sequence
  Description of Artificial Sequence: Synthetic oligonucleotide
  Antisense strand to SEQ ID NO: 1862833
accaucauuugagucuggc

SEQ ID NO: 1862835 - RNA, 19 nt, Artificial Sequence
  Description of Artificial Sequence: Synthetic oligonucleotide
  Sense strand starting at position 2791 of SEQ ID NO: 1564210
aaaugaugguggcuugacu

SEQ ID NO: 1862836 - RNA, 19 nt, Artificial Sequence
  Description of Artificial Sequence: Synthetic oligonucleotide
  Antisense strand to SEQ ID NO: 1862835
agucaagccaccaucauuu

SEQ ID NO: 1862837 - RNA, 19 nt, Artificial Sequence
  Description of Artificial Sequence: Synthetic oligonucleotide
  Sense strand starting at position 2800 of SEQ ID NO: 1564210
uggcuugacuuccuugcua

SEQ ID NO: 1862838 - RNA, 19 nt, Artificial Sequence
  Description of Artificial Sequence: Synthetic oligonucleotide
  Antisense strand to SEQ ID NO: 1862837
uagcaaggaagucaagcca

SEQ ID NO: 1862839 - RNA, 19 nt, Artificial Sequence
  Description of Artificial Sequence: Synthetic oligonucleotide
  Sense strand starting at position 2802 of SEQ ID NO: 1564210
gcuugacuuccuugcuaua

SEQ ID NO: 1862840 - RNA, 19 nt, Artificial Sequence
  Description of Artificial Sequence: Synthetic oligonucleotide
  Antisense strand to SEQ ID NO: 1862839
uauagcaaggaagucaagc

SEQ ID NO: 1862841 - RNA, 19 nt, Artificial Sequence
  Description of Artificial Sequence: Synthetic oligonucleotide
  Sense strand starting at position 2840 of SEQ ID NO: 1564210
gcacuuguuuguucucuua

SEQ ID NO: 1862842 - RNA, 19 nt, Artificial Sequence
  Description of Artificial Sequence: Synthetic oligonucleotide
  Antisense strand to SEQ ID NO: 1862841
uaagagaacaaacaagugc

SEQ ID NO: 1862843 - RNA, 19 nt, Artificial Sequence
  Description of Artificial Sequence: Synthetic oligonucleotide
  Sense strand starting at position 2842 of SEQ ID NO: 1564210
acuuguuuguucucuuaug

SEQ ID NO: 1862844 - RNA, 19 nt, Artificial Sequence
  Description of Artificial Sequence: Synthetic oligonucleotide
  Antisense strand to SEQ ID NO: 1862843
cauaagagaacaaacaagu

SEQ ID NO: 1862845 - RNA, 19 nt, Artificial Sequence
  Description of Artificial Sequence: Synthetic oligonucleotide
  Sense strand starting at position 2848 of SEQ ID NO: 1564210
uuguucucuuauggguaga

SEQ ID NO: 1862846 - RNA, 19 nt, Artificial Sequence
  Description of Artificial Sequence: Synthetic oligonucleotide
  Antisense strand to SEQ ID NO: 1862845
ucuacccauaagagaacaa

SEQ ID NO: 1862847 - RNA, 19 nt, Artificial Sequence
  Description of Artificial Sequence: Synthetic oligonucleotide
  Sense strand starting at position 2850 of SEQ ID NO: 1564210
guucucuuauggguagacu

SEQ ID NO: 1862848 - RNA, 19 nt, Artificial Sequence
  Description of Artificial Sequence: Synthetic oligonucleotide
  Antisense strand to SEQ ID NO: 1862847
agucuacccauaagagaac

SEQ ID NO: 1862849 - RNA, 19 nt, Artificial Sequence
  Description of Artificial Sequence: Synthetic oligonucleotide
  Sense strand starting at position 2858 of SEQ ID NO: 1564210
auggguagacuccguuuau

SEQ ID NO: 1862850 - RNA, 19 nt, Artificial Sequence
  Description of Artificial Sequence: Synthetic oligonucleotide
  Antisense strand to SEQ ID NO: 1862849
auaaacggagucuacccau

SEQ ID NO: 1862851 - RNA, 19 nt, Artificial Sequence
  Description of Artificial Sequence: Synthetic oligonucleotide
  Sense strand starting at position 2859 of SEQ ID NO: 1564210
uggguagacuccguuuauc

SEQ ID NO: 1862852 - RNA, 19 nt, Artificial Sequence
  Description of Artificial Sequence: Synthetic oligonucleotide
  Antisense strand to SEQ ID NO: 1862851
gauaaacggagucuaccca

SEQ ID NO: 1862853 - RNA, 19 nt, Artificial Sequence
  Description of Artificial Sequence: Synthetic oligonucleotide
  Sense strand starting at position 2867 of SEQ ID NO: 1564210
cuccguuuaucuccacaua

SEQ ID NO: 1862854 - RNA, 19 nt, Artificial Sequence
  Description of Artificial Sequence: Synthetic oligonucleotide
  Antisense strand to SEQ ID NO: 1862853
uauguggagauaaacggag

SEQ ID NO: 1862855 - RNA, 19 nt, Artificial Sequence
  Description of Artificial Sequence: Synthetic oligonucleotide
  Sense strand starting at position 2896 of SEQ ID NO: 1564210
guggaaggccuuuauaguc

SEQ ID NO: 1862856 - RNA, 19 nt, Artificial Sequence
  Description of Artificial Sequence: Synthetic oligonucleotide
  Antisense strand to SEQ ID NO: 1862855
gacuauaaaggccuuccac

SEQ ID NO: 1862857 - RNA, 19 nt, Artificial Sequence
  Description of Artificial Sequence: Synthetic oligonucleotide
  Sense strand starting at position 2975 of SEQ ID NO: 1564210
gcgaacaucguagagugua

SEQ ID NO: 1862858 - RNA, 19 nt, Artificial Sequence
  Description of Artificial Sequence: Synthetic oligonucleotide
  Antisense strand to SEQ ID NO: 1862857
uacacucuacgauguucgc

SEQ ID NO: 1862859 - RNA, 19 nt, Artificial Sequence
  Description of Artificial Sequence: Synthetic oligonucleotide
  Sense strand starting at position 2980 of SEQ ID NO: 1564210
caucguagaguguaguuau

SEQ ID NO: 1862860 - RNA, 19 nt, Artificial Sequence
  Description of Artificial Sequence: Synthetic oligonucleotide
  Antisense strand to SEQ ID NO: 1862859
auaacuacacucuacgaug

SEQ ID NO: 1862861 - RNA, 19 nt, Artificial Sequence
  Description of Artificial Sequence: Synthetic oligonucleotide
  Sense strand starting at position 2983 of SEQ ID NO: 1564210
cguagaguguaguuauaca

SEQ ID NO: 1862862 - RNA, 19 nt, Artificial Sequence
  Description of Artificial Sequence: Synthetic oligonucleotide
  Antisense strand to SEQ ID NO: 1862861
uguauaacuacacucuacg

SEQ ID NO: 1862863 - RNA, 19 nt, Artificial Sequence
  Description of Artificial Sequence: Synthetic oligonucleotide
  Sense strand starting at position 3066 of SEQ ID NO: 1564210
guccguugucguugaccaa

SEQ ID NO: 1862864 - RNA, 19 nt, Artificial Sequence
  Description of Artificial Sequence: Synthetic oligonucleotide
  Antisense strand to SEQ ID NO: 1862863
uuggucaacgacaacggac

SEQ ID NO: 1862865 - RNA, 19 nt, Artificial Sequence
  Description of Artificial Sequence: Synthetic oligonucleotide
  Sense strand starting at position 3067 of SEQ ID NO: 1564210
uccguugucguugaccaau

SEQ ID NO: 1862866 - RNA, 19 nt, Artificial Sequence
  Description of Artificial Sequence: Synthetic oligonucleotide
  Antisense strand to SEQ ID NO: 1862865
auuggucaacgacaacgga

SEQ ID NO: 1862867 - RNA, 19 nt, Artificial Sequence
  Description of Artificial Sequence: Synthetic oligonucleotide
  Sense strand starting at position 3112 of SEQ ID NO: 1564210
agagacaaaugcugauaga

SEQ ID NO: 1862868 - RNA, 19 nt, Artificial Sequence
  Description of Artificial Sequence: Synthetic oligonucleotide
  Antisense strand to SEQ ID NO: 1862867
ucuaucagcauuugucucu

SEQ ID NO: 1862869 - RNA, 19 nt, Artificial Sequence
  Description of Artificial Sequence: Synthetic oligonucleotide
  Sense strand starting at position 3122 of SEQ ID NO: 1564210
gcugauagauuagauuaca

SEQ ID NO: 1862870 - RNA, 19 nt, Artificial Sequence
  Description of Artificial Sequence: Synthetic oligonucleotide
  Antisense strand to SEQ ID NO: 1862869
uguaaucuaaucuaucagc

SEQ ID NO: 1862871 - RNA, 19 nt, Artificial Sequence
  Description of Artificial Sequence: Synthetic oligonucleotide
  Sense strand starting at position 3199 of SEQ ID NO: 1564210
uauugaauauguuggugaa

SEQ ID NO: 1862872 - RNA, 19 nt, Artificial Sequence
  Description of Artificial Sequence: Synthetic oligonucleotide
  Antisense strand to SEQ ID NO: 1862871
uucaccaacauauucaaua

SEQ ID NO: 1862873 - RNA, 19 nt, Artificial Sequence
  Description of Artificial Sequence: Synthetic oligonucleotide
  Sense strand starting at position 3200 of SEQ ID NO: 1564210
auugaauauguuggugaaa

SEQ ID NO: 1862874 - RNA, 19 nt, Artificial Sequence
  Description of Artificial Sequence: Synthetic oligonucleotide
  Antisense strand to SEQ ID NO: 1862873
uuucaccaacauauucaau

SEQ ID NO: 1862875 - RNA, 19 nt, Artificial Sequence
  Description of Artificial Sequence: Synthetic oligonucleotide
  Sense strand starting at position 3201 of SEQ ID NO: 1564210
uugaauauguuggugaaau

SEQ ID NO: 1862876 - RNA, 19 nt, Artificial Sequence
  Description of Artificial Sequence: Synthetic oligonucleotide
  Antisense strand to SEQ ID NO: 1862875
auuucaccaacauauucaa

SEQ ID NO: 1862877 - RNA, 19 nt, Artificial Sequence
  Description of Artificial Sequence: Synthetic oligonucleotide
  Sense strand starting at position 3706 of SEQ ID NO: 1564210
ugcuguauagaucaucuca

SEQ ID NO: 1862878 - RNA, 19 nt, Artificial Sequence
  Description of Artificial Sequence: Synthetic oligonucleotide
  Antisense strand to SEQ ID NO: 1862877
ugagaugaucuauacagca

SEQ ID NO: 1862879 - RNA, 19 nt, Artificial Sequence
  Description of Artificial Sequence: Synthetic oligonucleotide
  Sense strand starting at position 3802 of SEQ ID NO: 1564210
guguguuguucccugacau

SEQ ID NO: 1862880 - RNA, 19 nt, Artificial Sequence
  Description of Artificial Sequence: Synthetic oligonucleotide
  Antisense strand to SEQ ID NO: 1862879
augucagggaacaacacac

SEQ ID NO: 1862881 - RNA, 19 nt, Artificial Sequence
  Description of Artificial Sequence: Synthetic oligonucleotide
  Sense strand starting at position 3803 of SEQ ID NO: 1564210
uguguuguucccugacaug

SEQ ID NO: 1862882 - RNA, 19 nt, Artificial Sequence
  Description of Artificial Sequence: Synthetic oligonucleotide
  Antisense strand to SEQ ID NO: 1862881
caugucagggaacaacaca

SEQ ID NO: 1862883 - RNA, 19 nt, Artificial Sequence
  Description of Artificial Sequence: Synthetic oligonucleotide
  Sense strand starting at position 3814 of SEQ ID NO: 1564210
cugacauguguccaugugu

SEQ ID NO: 1862884 - RNA, 19 nt, Artificial Sequence
  Description of Artificial Sequence: Synthetic oligonucleotide
  Antisense strand to SEQ ID NO: 1862883
acacauggacacaugucag

SEQ ID NO: 1862885 - RNA, 19 nt, Artificial Sequence
  Description of Artificial Sequence: Synthetic oligonucleotide
  Sense strand starting at position 141 of SEQ ID NO: 1564211
guauuaguccauuaauaug

SEQ ID NO: 1862886 - RNA, 19 nt, Artificial Sequence
  Description of Artificial Sequence: Synthetic oligonucleotide
  Antisense strand to SEQ ID NO: 1862885
cauauuaauggacuaauac

SEQ ID NO: 1862887 - RNA, 19 nt, Artificial Sequence
  Description of Artificial Sequence: Synthetic oligonucleotide
  Sense strand starting at position 252 of SEQ ID NO: 1564211
acugcuaaugggcaugaga

SEQ ID NO: 1862888 - RNA, 19 nt, Artificial Sequence
  Description of Artificial Sequence: Synthetic oligonucleotide
  Antisense strand to SEQ ID NO: 1862887
ucucaugcccauuagcagu

SEQ ID NO: 1862889 - RNA, 19 nt, Artificial Sequence
  Description of Artificial Sequence: Synthetic oligonucleotide
  Sense strand starting at position 295 of SEQ ID NO: 1564211
uucuaagguugauugugau

SEQ ID NO: 1862890 - RNA, 19 nt, Artificial Sequence
  Description of Artificial Sequence: Synthetic oligonucleotide
  Antisense strand to SEQ ID NO: 1862889
aucacaaucaaccuuagaa

SEQ ID NO: 1862891 - RNA, 19 nt, Artificial Sequence
  Description of Artificial Sequence: Synthetic oligonucleotide
  Sense strand starting at position 302 of SEQ ID NO: 1564211
guugauugugaugaugguu

SEQ ID NO: 1862892 - RNA, 19 nt, Artificial Sequence
  Description of Artificial Sequence: Synthetic oligonucleotide
  Antisense strand to SEQ ID NO: 1862891
aaccaucaucacaaucaac

SEQ ID NO: 1862893 - RNA, 19 nt, Artificial Sequence
  Description of Artificial Sequence: Synthetic oligonucleotide
  Sense strand starting at position 323 of SEQ ID NO: 1564211
acaacucugugaguauauu

SEQ ID NO: 1862894 - RNA, 19 nt, Artificial Sequence
  Description of Artificial Sequence: Synthetic oligonucleotide
  Antisense strand to SEQ ID NO: 1862893
aauauacucacagaguugu

SEQ ID NO: 1862895 - RNA, 19 nt, Artificial Sequence
  Description of Artificial Sequence: Synthetic oligonucleotide
  Sense strand starting at position 363 of SEQ ID NO: 1564211
cccuaaauaggcgaauuau

SEQ ID NO: 1862896 - RNA, 19 nt, Artificial Sequence
  Description of Artificial Sequence: Synthetic oligonucleotide
  Antisense strand to SEQ ID NO: 1862895
auaauucgccuauuuaggg

SEQ ID NO: 1862897 - RNA, 19 nt, Artificial Sequence
  Description of Artificial Sequence: Synthetic oligonucleotide
  Sense strand starting at position 401 of SEQ ID NO: 1564211
ucaauaaagcugugauaaa

SEQ ID NO: 1862898 - RNA, 19 nt, Artificial Sequence
  Description of Artificial Sequence: Synthetic oligonucleotide
  Antisense strand to SEQ ID NO: 1862897
uuuaucacagcuuuauuga

SEQ ID NO: 1862899 - RNA, 19 nt, Artificial Sequence
  Description of Artificial Sequence: Synthetic oligonucleotide
  Sense strand starting at position 560 of SEQ ID NO: 1564211
uuggauuuauucuaagaac

SEQ ID NO: 1862900 - RNA, 19 nt, Artificial Sequence
  Description of Artificial Sequence: Synthetic oligonucleotide
  Antisense strand to SEQ ID NO: 1862899
guucuuagaauaaauccaa

SEQ ID NO: 1862901 - RNA, 19 nt, Artificial Sequence
  Description of Artificial Sequence: Synthetic oligonucleotide
  Sense strand starting at position 621 of SEQ ID NO: 1564211
ugauauauguagcuaaaug

SEQ ID NO: 1862902 - RNA, 19 nt, Artificial Sequence
  Description of Artificial Sequence: Synthetic oligonucleotide
  Antisense strand to SEQ ID NO: 1862901
cauuuagcuacauauauca

SEQ ID NO: 1862903 - RNA, 19 nt, Artificial Sequence
  Description of Artificial Sequence: Synthetic oligonucleotide
  Sense strand starting at position 826 of SEQ ID NO: 1564211
agaacauucccaugucagu

SEQ ID NO: 1862904 - RNA, 19 nt, Artificial Sequence
  Description of Artificial Sequence: Synthetic oligonucleotide
  Antisense strand to SEQ ID NO: 1862903
acugacaugggaauguucu

SEQ ID NO: 1862905 - RNA, 19 nt, Artificial Sequence
  Description of Artificial Sequence: Synthetic oligonucleotide
  Sense strand starting at position 883 of SEQ ID NO: 1564211
auauucuacucuuuagagu

SEQ ID NO: 1862906 - RNA, 19 nt, Artificial Sequence
  Description of Artificial Sequence: Synthetic oligonucleotide
  Antisense strand to SEQ ID NO: 1862905
acucuaaagaguagaauau

SEQ ID NO: 1862907 - RNA, 19 nt, Artificial Sequence
  Description of Artificial Sequence: Synthetic oligonucleotide
  Sense strand starting at position 892 of SEQ ID NO: 1564211
ucuuuagaguuaccaaagu

SEQ ID NO: 1862908 - RNA, 19 nt, Artificial Sequence
  Description of Artificial Sequence: Synthetic oligonucleotide
  Antisense strand to SEQ ID NO: 1862907
acuuugguaacucuaaaga

SEQ ID NO: 1862909 - RNA, 19 nt, Artificial Sequence
  Description of Artificial Sequence: Synthetic oligonucleotide
  Sense strand starting at position 1334 of SEQ ID NO: 1564211
gcuccagcuguguuguaau

SEQ ID NO: 1862910 - RNA, 19 nt, Artificial Sequence
  Description of Artificial Sequence: Synthetic oligonucleotide
  Antisense strand to SEQ ID NO: 1862909
auuacaacacagcuggagc

SEQ ID NO: 1862911 - RNA, 19 nt, Artificial Sequence
  Description of Artificial Sequence: Synthetic oligonucleotide
  Sense strand starting at position 1427 of SEQ ID NO: 1564211
auugcuguccuagaugaca

SEQ ID NO: 1862912 - RNA, 19 nt, Artificial Sequence
  Description of Artificial Sequence: Synthetic oligonucleotide
  Antisense strand to SEQ ID NO: 1862911
ugucaucuaggacagcaau

SEQ ID NO: 1862913 - RNA, 19 nt, Artificial Sequence
  Description of Artificial Sequence: Synthetic oligonucleotide
  Sense strand starting at position 1430 of SEQ ID NO: 1564211
gcuguccuagaugacauau

SEQ ID NO: 1862914 - RNA, 19 nt, Artificial Sequence
  Description of Artificial Sequence: Synthetic oligonucleotide
  Antisense strand to SEQ ID NO: 1862913
auaugucaucuaggacagc

SEQ ID NO: 1862915 - RNA, 19 nt, Artificial Sequence
  Description of Artificial Sequence: Synthetic oligonucleotide
  Sense strand starting at position 2032 of SEQ ID NO: 1564211
aaucgucaucauugagaug

SEQ ID NO: 1862916 - RNA, 19 nt, Artificial Sequence
  Description of Artificial Sequence: Synthetic oligonucleotide
  Antisense strand to SEQ ID NO: 1862915
caucucaaugaugacgauu

SEQ ID NO: 1862917 - RNA, 19 nt, Artificial Sequence
  Description of Artificial Sequence: Synthetic oligonucleotide
  Sense strand starting at position 2033 of SEQ ID NO: 1564211
aucgucaucauugagaugu

SEQ ID NO: 1862918 - RNA, 19 nt, Artificial Sequence
  Description of Artificial Sequence: Synthetic oligonucleotide
  Antisense strand to SEQ ID NO: 1862917
acaucucaaugaugacgau

SEQ ID NO: 1862919 - RNA, 19 nt, Artificial Sequence
  Description of Artificial Sequence: Synthetic oligonucleotide
  Sense strand starting at position 2037 of SEQ ID NO: 1564211
ucaucauugagaugugaug

SEQ ID NO: 1862920 - RNA, 19 nt, Artificial Sequence
  Description of Artificial Sequence: Synthetic oligonucleotide
  Antisense strand to SEQ ID NO: 1862919
caucacaucucaaugauga

SEQ ID NO: 1862921 - RNA, 19 nt, Artificial Sequence
  Description of Artificial Sequence: Synthetic oligonucleotide
  Sense strand starting at position 2039 of SEQ ID NO: 1564211
aucauugagaugugauguu

SEQ ID NO: 1862922 - RNA, 19 nt, Artificial Sequence
  Description of Artificial Sequence: Synthetic oligonucleotide
  Antisense strand to SEQ ID NO: 1862921
aacaucacaucucaaugau

SEQ ID NO: 1862923 - RNA, 19 nt, Artificial Sequence
  Description of Artificial Sequence: Synthetic oligonucleotide
  Sense strand starting at position 2052 of SEQ ID NO: 1564211
gauguugagugacuacuaa

SEQ ID NO: 1862924 - RNA, 19 nt, Artificial Sequence
  Description of Artificial Sequence: Synthetic oligonucleotide
  Antisense strand to SEQ ID NO: 1862923
uuaguagucacucaacauc

SEQ ID NO: 1862925 - RNA, 19 nt, Artificial Sequence
  Description of Artificial Sequence: Synthetic oligonucleotide
  Sense strand starting at position 2630 of SEQ ID NO: 1564211
ggcauauaauaguugaaau

SEQ ID NO: 1862926 - RNA, 19 nt, Artificial Sequence
  Description of Artificial Sequence: Synthetic oligonucleotide
  Antisense strand to SEQ ID NO: 1862925
auuucaacuauuauaugcc

SEQ ID NO: 1862927 - RNA, 19 nt, Artificial Sequence
  Description of Artificial Sequence: Synthetic oligonucleotide
  Sense strand starting at position 2699 of SEQ ID NO: 1564211
auacauucuggcuggaacu

SEQ ID NO: 1862928 - RNA, 19 nt, Artificial Sequence
  Description of Artificial Sequence: Synthetic oligonucleotide
  Antisense strand to SEQ ID NO: 1862927
aguuccagccagaauguau

SEQ ID NO: 1862929 - RNA, 19 nt, Artificial Sequence
  Description of Artificial Sequence: Synthetic oligonucleotide
  Sense strand starting at position 2847 of SEQ ID NO: 1564211
ugugaacaagauugaucau

SEQ ID NO: 1862930 - RNA, 19 nt, Artificial Sequence
  Description of Artificial Sequence: Synthetic oligonucleotide
  Antisense strand to SEQ ID NO: 1862929
augaucaaucuuguucaca

SEQ ID NO: 1862931 - RNA, 19 nt, Artificial Sequence
  Description of Artificial Sequence: Synthetic oligonucleotide
  Sense strand starting at position 2915 of SEQ ID NO: 1564211
guuauaguccuauaaugca

SEQ ID NO: 1862932 - RNA, 19 nt, Artificial Sequence
  Description of Artificial Sequence: Synthetic oligonucleotide
  Antisense strand to SEQ ID NO: 1862931
ugcauuauaggacuauaac

SEQ ID NO: 1862933 - RNA, 19 nt, Artificial Sequence
  Description of Artificial Sequence: Synthetic oligonucleotide
  Sense strand starting at position 3049 of SEQ ID NO: 1564211
accacauaccuauggaguu

SEQ ID NO: 1862934 - RNA, 19 nt, Artificial Sequence
  Description of Artificial Sequence: Synthetic oligonucleotide
  Antisense strand to SEQ ID NO: 1862933
aacuccauagguauguggu

SEQ ID NO: 1862935 - RNA, 19 nt, Artificial Sequence
  Description of Artificial Sequence: Synthetic oligonucleotide
  Sense strand starting at position 3279 of SEQ ID NO: 1564211
acguauuucuuggcaagca

SEQ ID NO: 1862936 - RNA, 19 nt, Artificial Sequence
  Description of Artificial Sequence: Synthetic oligonucleotide
  Antisense strand to SEQ ID NO: 1862935
ugcuugccaagaaauacgu

SEQ ID NO: 1862937 - RNA, 19 nt, Artificial Sequence
  Description of Artificial Sequence: Synthetic oligonucleotide
  Sense strand starting at position 3320 of SEQ ID NO: 1564211
uucuaugagucucugauag

SEQ ID NO: 1862938 - RNA, 19 nt, Artificial Sequence
  Description of Artificial Sequence: Synthetic oligonucleotide
  Antisense strand to SEQ ID NO: 1862937
cuaucagagacucauagaa

SEQ ID NO: 1862939 - RNA, 19 nt, Artificial Sequence
  Description of Artificial Sequence: Synthetic oligonucleotide
  Sense strand starting at position 3327 of SEQ ID NO: 1564211
agucucugauaggcucaaa

SEQ ID NO: 1862940 - RNA, 19 nt, Artificial Sequence
  Description of Artificial Sequence: Synthetic oligonucleotide
  Antisense strand to SEQ ID NO: 1862939
uuugagccuaucagagacu

SEQ ID NO: 1862941 - RNA, 19 nt, Artificial Sequence
  Description of Artificial Sequence: Synthetic oligonucleotide
  Sense strand starting at position 3355 of SEQ ID NO: 1564211
uaaugccaugucugauaga

SEQ ID NO: 1862942 - RNA, 19 nt, Artificial Sequence
  Description of Artificial Sequence: Synthetic oligonucleotide
  Antisense strand to SEQ ID NO: 1862941
ucuaucagacauggcauua

SEQ ID NO: 1862943 - RNA, 19 nt, Artificial Sequence
  Description of Artificial Sequence: Synthetic oligonucleotide
  Sense strand starting at position 3360 of SEQ ID NO: 1564211
ccaugucugauagagcaga

SEQ ID NO: 1862944 - RNA, 19 nt, Artificial Sequence
  Description of Artificial Sequence: Synthetic oligonucleotide
  Antisense strand to SEQ ID NO: 1862943
ucugcucuaucagacaugg

SEQ ID NO: 1862945 - RNA, 19 nt, Artificial Sequence
  Description of Artificial Sequence: Synthetic oligonucleotide
  Sense strand starting at position 3544 of SEQ ID NO: 1564211
aaguguaaugacuaugcau

SEQ ID NO: 1862946 - RNA, 19 nt, Artificial Sequence
  Description of Artificial Sequence: Synthetic oligonucleotide
  Antisense strand to SEQ ID NO: 1862945
augcauagucauuacacuu

SEQ ID NO: 1862947 - RNA, 19 nt, Artificial Sequence
  Description of Artificial Sequence: Synthetic oligonucleotide
  Sense strand starting at position 3547 of SEQ ID NO: 1564211
uguaaugacuaugcauauu

SEQ ID NO: 1862948 - RNA, 19 nt, Artificial Sequence
  Description of Artificial Sequence: Synthetic oligonucleotide
  Antisense strand to SEQ ID NO: 1862947
aauaugcauagucauuaca

SEQ ID NO: 1862949 - RNA, 19 nt, Artificial Sequence
  Description of Artificial Sequence: Synthetic oligonucleotide
  Sense strand starting at position 3585 of SEQ ID NO: 1564211
uuccuuauagugcaugaca

SEQ ID NO: 1862950 - RNA, 19 nt, Artificial Sequence
  Description of Artificial Sequence: Synthetic oligonucleotide
  Antisense strand to SEQ ID NO: 1862949
ugucaugcacuauaaggaa

SEQ ID NO: 1862951 - RNA, 19 nt, Artificial Sequence
  Description of Artificial Sequence: Synthetic oligonucleotide
  Sense strand starting at position 3587 of SEQ ID NO: 1564211
ccuuauagugcaugacaaa

SEQ ID NO: 1862952 - RNA, 19 nt, Artificial Sequence
  Description of Artificial Sequence: Synthetic oligonucleotide
  Antisense strand to SEQ ID NO: 1862951
uuugucaugcacuauaagg

SEQ ID NO: 1862953 - RNA, 19 nt, Artificial Sequence
  Description of Artificial Sequence: Synthetic oligonucleotide
  Sense strand starting at position 3686 of SEQ ID NO: 1564211
acuuaccucuguguggaaa

SEQ ID NO: 1862954 - RNA, 19 nt, Artificial Sequence
  Description of Artificial Sequence: Synthetic oligonucleotide
  Antisense strand to SEQ ID NO: 1862953
uuuccacacagagguaagu

SEQ ID NO: 1862955 - RNA, 19 nt, Artificial Sequence
  Description of Artificial Sequence: Synthetic oligonucleotide
  Sense strand starting at position 3689 of SEQ ID NO: 1564211
uaccucuguguggaaagau

SEQ ID NO: 1862956 - RNA, 19 nt, Artificial Sequence
  Description of Artificial Sequence: Synthetic oligonucleotide
  Antisense strand to SEQ ID NO: 1862955
aucuuuccacacagaggua

SEQ ID NO: 1862957 - RNA, 19 nt, Artificial Sequence
  Description of Artificial Sequence: Synthetic oligonucleotide
  Sense strand starting at position 3714 of SEQ ID NO: 1564211
agcagagguaguuaaauua

SEQ ID NO: 1862958 - RNA, 19 nt, Artificial Sequence
  Description of Artificial Sequence: Synthetic oligonucleotide
  Antisense strand to SEQ ID NO: 1862957
uaauuuaacuaccucugcu

SEQ ID NO: 1862959 - RNA, 19 nt, Artificial Sequence
  Description of Artificial Sequence: Synthetic oligonucleotide
  Sense strand starting at position 3725 of SEQ ID NO: 1564211
uuaaauuauggauggguuu

SEQ ID NO: 1862960 - RNA, 19 nt, Artificial Sequence
  Description of Artificial Sequence: Synthetic oligonucleotide
  Antisense strand to SEQ ID NO: 1862959
aaacccauccauaauuuaa

SEQ ID NO: 1862961 - RNA, 19 nt, Artificial Sequence
  Description of Artificial Sequence: Synthetic oligonucleotide
  Sense strand starting at position 3744 of SEQ ID NO: 1564211
ugguauuacuuaguaauag

SEQ ID NO: 1862962 - RNA, 19 nt, Artificial Sequence
  Description of Artificial Sequence: Synthetic oligonucleotide
  Antisense strand to SEQ ID NO: 1862961
cuauuacuaaguaauacca

SEQ ID NO: 1862963 - RNA, 19 nt, Artificial Sequence
  Description of Artificial Sequence: Synthetic oligonucleotide
  Sense strand starting at position 3953 of SEQ ID NO: 1564211
gggaaagaguggcuacuuu

SEQ ID NO: 1862964 - RNA, 19 nt, Artificial Sequence
  Description of Artificial Sequence: Synthetic oligonucleotide
  Antisense strand to SEQ ID NO: 1862963
aaaguagccacucuuuccc

SEQ ID NO: 1862965 - RNA, 19 nt, Artificial Sequence
  Description of Artificial Sequence: Synthetic oligonucleotide
  Sense strand starting at position 51 of SEQ ID NO: 1564212
ugcagaaauccugggcagu

SEQ ID NO: 1862966 - RNA, 19 nt, Artificial Sequence
  Description of Artificial Sequence: Synthetic oligonucleotide
  Antisense strand to SEQ ID NO: 1862965
acugcccaggauuucugca

SEQ ID NO: 1862967 - RNA, 19 nt, Artificial Sequence
  Description of Artificial Sequence: Synthetic oligonucleotide
  Sense strand starting at position 52 of SEQ ID NO: 1564212
gcagaaauccugggcaguu

SEQ ID NO: 1862968 - RNA, 19 nt, Artificial Sequence
  Description of Artificial Sequence: Synthetic oligonucleotide
  Antisense strand to SEQ ID NO: 1862967
aacugcccaggauuucugc

SEQ ID NO: 1862969 - RNA, 19 nt, Artificial Sequence
  Description of Artificial Sequence: Synthetic oligonucleotide
  Sense strand starting at position 53 of SEQ ID NO: 1564212
cagaaauccugggcaguuu

SEQ ID NO: 1862970 - RNA, 19 nt, Artificial Sequence
  Description of Artificial Sequence: Synthetic oligonucleotide
  Antisense strand to SEQ ID NO: 1862969
aaacugcccaggauuucug

SEQ ID NO: 1862971 - RNA, 19 nt, Artificial Sequence
  Description of Artificial Sequence: Synthetic oligonucleotide
  Sense strand starting at position 175 of SEQ ID NO: 1564212
gggcaucacagaugcuaca

SEQ ID NO: 1862972 - RNA, 19 nt, Artificial Sequence
  Description of Artificial Sequence: Synthetic oligonucleotide
  Antisense strand to SEQ ID NO: 1862971
uguagcaucugugaugccc

SEQ ID NO: 1862973 - RNA, 19 nt, Artificial Sequence
  Description of Artificial Sequence: Synthetic oligonucleotide
  Sense strand starting at position 261 of SEQ ID NO: 1564212
gggucuugacagcagucau

SEQ ID NO: 1862974 - RNA, 19 nt, Artificial Sequence
  Description of Artificial Sequence: Synthetic oligonucleotide
  Antisense strand to SEQ ID NO: 1862973
augacugcugucaagaccc

SEQ ID NO: 1862975 - RNA, 19 nt, Artificial Sequence
  Description of Artificial Sequence: Synthetic oligonucleotide
  Sense strand starting at position 350 of SEQ ID NO: 1564212
ggcuuaaguuacuccuacu

SEQ ID NO: 1862976 - RNA, 19 nt, Artificial Sequence
  Description of Artificial Sequence: Synthetic oligonucleotide
  Antisense strand to SEQ ID NO: 1862975
aguaggaguaacuuaagcc

SEQ ID NO: 1862977 - RNA, 19 nt, Artificial Sequence
  Description of Artificial Sequence: Synthetic oligonucleotide
  Sense strand starting at position 545 of SEQ ID NO: 1564212
guucuuugggaccguauuu

SEQ ID NO: 1862978 - RNA, 19 nt, Artificial Sequence
  Description of Artificial Sequence: Synthetic oligonucleotide
  Antisense strand to SEQ ID NO: 1862977
aaauacggucccaaagaac

SEQ ID NO: 1862979 - RNA, 19 nt, Artificial Sequence
  Description of Artificial Sequence: Synthetic oligonucleotide
  Sense strand starting at position 659 of SEQ ID NO: 1564212
guucuacuugugggaaaua

SEQ ID NO: 1862980 - RNA, 19 nt, Artificial Sequence
  Description of Artificial Sequence: Synthetic oligonucleotide
  Antisense strand to SEQ ID NO: 1862979
uauuucccacaaguagaac

SEQ ID NO: 1862981 - RNA, 19 nt, Artificial Sequence
  Description of Artificial Sequence: Synthetic oligonucleotide
  Sense strand starting at position 668 of SEQ ID NO: 1564212
gugggaaauaggcgagaaa

SEQ ID NO: 1862982 - RNA, 19 nt, Artificial Sequence
  Description of Artificial Sequence: Synthetic oligonucleotide
  Antisense strand to SEQ ID NO: 1862981
uuucucgccuauuucccac

SEQ ID NO: 1862983 - RNA, 19 nt, Artificial Sequence
  Description of Artificial Sequence: Synthetic oligonucleotide
  Sense strand starting at position 789 of SEQ ID NO: 1564212
aagacagaguguucugaug

SEQ ID NO: 1862984 - RNA, 19 nt, Artificial Sequence
  Description of Artificial Sequence: Synthetic oligonucleotide
  Antisense strand to SEQ ID NO: 1862983
caucagaacacucugucuu

SEQ ID NO: 1862985 - RNA, 19 nt, Artificial Sequence
  Description of Artificial Sequence: Synthetic oligonucleotide
  Sense strand starting at position 996 of SEQ ID NO: 1564212
uuccaaacccgguaacauu

SEQ ID NO: 1862986 - RNA, 19 nt, Artificial Sequence
  Description of Artificial Sequence: Synthetic oligonucleotide
  Antisense strand to SEQ ID NO: 1862985
aauguuaccggguuuggaa

SEQ ID NO: 1862987 - RNA, 19 nt, Artificial Sequence
  Description of Artificial Sequence: Synthetic oligonucleotide
  Sense strand starting at position 1464 of SEQ ID NO: 1564212
gcaccaaaugagugagcau

SEQ ID NO: 1862988 - RNA, 19 nt, Artificial Sequence
  Description of Artificial Sequence: Synthetic oligonucleotide
  Antisense strand to SEQ ID NO: 1862987
augcucacucauuuggugc

SEQ ID NO: 1862989 - RNA, 19 nt, Artificial Sequence
  Description of Artificial Sequence: Synthetic oligonucleotide
  Sense strand starting at position 1471 of SEQ ID NO: 1564212
augagugagcaucgggaaa

SEQ ID NO: 1862990 - RNA, 19 nt, Artificial Sequence
  Description of Artificial Sequence: Synthetic oligonucleotide
  Antisense strand to SEQ ID NO: 1862989
uuucccgaugcucacucau

SEQ ID NO: 1862991 - RNA, 19 nt, Artificial Sequence
  Description of Artificial Sequence: Synthetic oligonucleotide
  Sense strand starting at position 1591 of SEQ ID NO: 1564212
ggaaaugacucuuucucac

SEQ ID NO: 1862992 - RNA, 19 nt, Artificial Sequence
  Description of Artificial Sequence: Synthetic oligonucleotide
  Antisense strand to SEQ ID NO: 1862991
gugagaaagagucauuucc

SEQ ID NO: 1862993 - RNA, 19 nt, Artificial Sequence
  Description of Artificial Sequence: Synthetic oligonucleotide
  Sense strand starting at position 1628 of SEQ ID NO: 1564212
ccugcacuucuccagggaa

SEQ ID NO: 1862994 - RNA, 19 nt, Artificial Sequence
  Description of Artificial Sequence: Synthetic oligonucleotide
  Antisense strand to SEQ ID NO: 1862993
uucccuggagaagugcagg

SEQ ID NO: 1862995 - RNA, 19 nt, Artificial Sequence
  Description of Artificial Sequence: Synthetic oligonucleotide
  Sense strand starting at position 1630 of SEQ ID NO: 1564212
ugcacuucuccagggaaau

SEQ ID NO: 1862996 - RNA, 19 nt, Artificial Sequence
  Description of Artificial Sequence: Synthetic oligonucleotide
  Antisense strand to SEQ ID NO: 1862995
auuucccuggagaagugca

SEQ ID NO: 1862997 - RNA, 19 nt, Artificial Sequence
  Description of Artificial Sequence: Synthetic oligonucleotide
  Sense strand starting at position 1903 of SEQ ID NO: 1564212
gcacacgucggcuucagau

SEQ ID NO: 1862998 - RNA, 19 nt, Artificial Sequence
  Description of Artificial Sequence: Synthetic oligonucleotide
  Antisense strand to SEQ ID NO: 1862997
aucugaagccgacgugugc

SEQ ID NO: 1862999 - RNA, 19 nt, Artificial Sequence
  Description of Artificial Sequence: Synthetic oligonucleotide
  Sense strand starting at position 2105 of SEQ ID NO: 1564212
ggucuuugcuaaucccaca

SEQ ID NO: 1863000 - RNA, 19 nt, Artificial Sequence
  Description of Artificial Sequence: Synthetic oligonucleotide
  Antisense strand to SEQ ID NO: 1862999
ugugggauuagcaaagacc

SEQ ID NO: 1863001 - RNA, 19 nt, Artificial Sequence
  Description of Artificial Sequence: Synthetic oligonucleotide
  Sense strand starting at position 2110 of SEQ ID NO: 1564212
uugcuaaucccacagguca

SEQ ID NO: 1863002 - RNA, 19 nt, Artificial Sequence
  Description of Artificial Sequence: Synthetic oligonucleotide
  Antisense strand to SEQ ID NO: 1863001
ugaccugugggauuagcaa

SEQ ID NO: 1863003 - RNA, 19 nt, Artificial Sequence
  Description of Artificial Sequence: Synthetic oligonucleotide
  Sense strand starting at position 2142 of SEQ ID NO: 1564212
cucuguguaguauguauuu

SEQ ID NO: 1863004 - RNA, 19 nt, Artificial Sequence
  Description of Artificial Sequence: Synthetic oligonucleotide
  Antisense strand to SEQ ID NO: 1863003
aaauacauacuacacagag

SEQ ID NO: 1863005 - RNA, 19 nt, Artificial Sequence
  Description of Artificial Sequence: Synthetic oligonucleotide
  Sense strand starting at position 2157 of SEQ ID NO: 1564212
auuuauucuuccgugguua

SEQ ID NO: 1863006 - RNA, 19 nt, Artificial Sequence
  Description of Artificial Sequence: Synthetic oligonucleotide
  Antisense strand to SEQ ID NO: 1863005
uaaccacggaagaauaaau

SEQ ID NO: 1863007 - RNA, 19 nt, Artificial Sequence
  Description of Artificial Sequence: Synthetic oligonucleotide
  Sense strand starting at position 2168 of SEQ ID NO: 1564212
cgugguuaucagggaggga

SEQ ID NO: 1863008 - RNA, 19 nt, Artificial Sequence
  Description of Artificial Sequence: Synthetic oligonucleotide
  Antisense strand to SEQ ID NO: 1863007
ucccucccugauaaccacg

SEQ ID NO: 1863009 - RNA, 19 nt, Artificial Sequence
  Description of Artificial Sequence: Synthetic oligonucleotide
  Sense strand starting at position 2341 of SEQ ID NO: 1564212
caagguggauugucaagua

SEQ ID NO: 1863010 - RNA, 19 nt, Artificial Sequence
  Description of Artificial Sequence: Synthetic oligonucleotide
  Antisense strand to SEQ ID NO: 1863009
uacuugacaauccaccuug

SEQ ID NO: 1863011 - RNA, 19 nt, Artificial Sequence
  Description of Artificial Sequence: Synthetic oligonucleotide
  Sense strand starting at position 2430 of SEQ ID NO: 1564212
cagcauggguuauucuuau

SEQ ID NO: 1863012 - RNA, 19 nt, Artificial Sequence
  Description of Artificial Sequence: Synthetic oligonucleotide
  Antisense strand to SEQ ID NO: 1863011
auaagaauaacccaugcug

SEQ ID NO: 1863013 - RNA, 19 nt, Artificial Sequence
  Description of Artificial Sequence: Synthetic oligonucleotide
  Sense strand starting at position 2709 of SEQ ID NO: 1564212
auuuaauguucccaaacga

SEQ ID NO: 1863014 - RNA, 19 nt, Artificial Sequence
  Description of Artificial Sequence: Synthetic oligonucleotide
  Antisense strand to SEQ ID NO: 1863013
ucguuugggaacauuaaau

SEQ ID NO: 1863015 - RNA, 19 nt, Artificial Sequence
  Description of Artificial Sequence: Synthetic oligonucleotide
  Sense strand starting at position 2723 of SEQ ID NO: 1564212
aacgauuacugagugcuaa

SEQ ID NO: 1863016 - RNA, 19 nt, Artificial Sequence
  Description of Artificial Sequence: Synthetic oligonucleotide
  Antisense strand to SEQ ID NO: 1863015
uuagcacucaguaaucguu

SEQ ID NO: 1863017 - RNA, 19 nt, Artificial Sequence
  Description of Artificial Sequence: Synthetic oligonucleotide
  Sense strand starting at position 2724 of SEQ ID NO: 1564212
acgauuacugagugcuaaa

SEQ ID NO: 1863018 - RNA, 19 nt, Artificial Sequence
  Description of Artificial Sequence: Synthetic oligonucleotide
  Antisense strand to SEQ ID NO: 1863017
uuuagcacucaguaaucgu

SEQ ID NO: 1863019 - RNA, 19 nt, Artificial Sequence
  Description of Artificial Sequence: Synthetic oligonucleotide
  Sense strand starting at position 2737 of SEQ ID NO: 1564212
gcuaaauagacuugcugga

SEQ ID NO: 1863020 - RNA, 19 nt, Artificial Sequence
  Description of Artificial Sequence: Synthetic oligonucleotide
  Antisense strand to SEQ ID NO: 1863019
uccagcaagucuauuuagc

SEQ ID NO: 1863021 - RNA, 19 nt, Artificial Sequence
  Description of Artificial Sequence: Synthetic oligonucleotide
  Sense strand starting at position 2751 of SEQ ID NO: 1564212
cuggaaucugaugguugaa

SEQ ID NO: 1863022 - RNA, 19 nt, Artificial Sequence
  Description of Artificial Sequence: Synthetic oligonucleotide
  Antisense strand to SEQ ID NO: 1863021
uucaaccaucagauuccag

SEQ ID NO: 1863023 - RNA, 19 nt, Artificial Sequence
  Description of Artificial Sequence: Synthetic oligonucleotide
  Sense strand starting at position 2996 of SEQ ID NO: 1564212
augacucuguugcucaaga

SEQ ID NO: 1863024 - RNA, 19 nt, Artificial Sequence
  Description of Artificial Sequence: Synthetic oligonucleotide
  Antisense strand to SEQ ID NO: 1863023
ucuugagcaacagagucau

SEQ ID NO: 1863025 - RNA, 19 nt, Artificial Sequence
  Description of Artificial Sequence: Synthetic oligonucleotide
  Sense strand starting at position 2998 of SEQ ID NO: 1564212
gacucuguugcucaagagu

SEQ ID NO: 1863026 - RNA, 19 nt, Artificial Sequence
  Description of Artificial Sequence: Synthetic oligonucleotide
  Antisense strand to SEQ ID NO: 1863025
acucuugagcaacagaguc

SEQ ID NO: 1863027 - RNA, 19 nt, Artificial Sequence
  Description of Artificial Sequence: Synthetic oligonucleotide
  Sense strand starting at position 3001 of SEQ ID NO: 1564212
ucuguugcucaagagucau

SEQ ID NO: 1863028 - RNA, 19 nt, Artificial Sequence
  Description of Artificial Sequence: Synthetic oligonucleotide
  Antisense strand to SEQ ID NO: 1863027
augacucuugagcaacaga

SEQ ID NO: 1863029 - RNA, 19 nt, Artificial Sequence
  Description of Artificial Sequence: Synthetic oligonucleotide
  Sense strand starting at position 3012 of SEQ ID NO: 1564212
agagucaucuguccaagaa

SEQ ID NO: 1863030 - RNA, 19 nt, Artificial Sequence
  Description of Artificial Sequence: Synthetic oligonucleotide
  Antisense strand to SEQ ID NO: 1863029
uucuuggacagaugacucu

SEQ ID NO: 1863031 - RNA, 19 nt, Artificial Sequence
  Description of Artificial Sequence: Synthetic oligonucleotide
  Sense strand starting at position 3202 of SEQ ID NO: 1564212
guucaugaggccugaagug

SEQ ID NO: 1863032 - RNA, 19 nt, Artificial Sequence
  Description of Artificial Sequence: Synthetic oligonucleotide
  Antisense strand to SEQ ID NO: 1863031
cacuucaggccucaugaac

SEQ ID NO: 1863033 - RNA, 19 nt, Artificial Sequence
  Description of Artificial Sequence: Synthetic oligonucleotide
  Sense strand starting at position 3434 of SEQ ID NO: 1564212
augacugucucagcaaauu

SEQ ID NO: 1863034 - RNA, 19 nt, Artificial Sequence
  Description of Artificial Sequence: Synthetic oligonucleotide
  Antisense strand to SEQ ID NO: 1863033
aauuugcugagacagucau

SEQ ID NO: 1863035 - RNA, 19 nt, Artificial Sequence
  Description of Artificial Sequence: Synthetic oligonucleotide
  Sense strand starting at position 3516 of SEQ ID NO: 1564212
ugaugaagucugugggcca

SEQ ID NO: 1863036 - RNA, 19 nt, Artificial Sequence
  Description of Artificial Sequence: Synthetic oligonucleotide
  Antisense strand to SEQ ID NO: 1863035
uggcccacagacuucauca

SEQ ID NO: 1863037 - RNA, 19 nt, Artificial Sequence
  Description of Artificial Sequence: Synthetic oligonucleotide
  Sense strand starting at position 3552 of SEQ ID NO: 1564212
aauugcauauguuuaggaa

SEQ ID NO: 1863038 - RNA, 19 nt, Artificial Sequence
  Description of Artificial Sequence: Synthetic oligonucleotide
  Antisense strand to SEQ ID NO: 1863037
uuccuaaacauaugcaauu

SEQ ID NO: 1863039 - RNA, 19 nt, Artificial Sequence
  Description of Artificial Sequence: Synthetic oligonucleotide
  Sense strand starting at position 3564 of SEQ ID NO: 1564212
uuaggaaguaguggaguau

SEQ ID NO: 1863040 - RNA, 19 nt, Artificial Sequence
  Description of Artificial Sequence: Synthetic oligonucleotide
  Antisense strand to SEQ ID NO: 1863039
auacuccacuacuuccuaa

SEQ ID NO: 1863041 - RNA, 19 nt, Artificial Sequence
  Description of Artificial Sequence: Synthetic oligonucleotide
  Sense strand starting at position 3600 of SEQ ID NO: 1564212
gaagaucuguacccuagga

SEQ ID NO: 1863042 - RNA, 19 nt, Artificial Sequence
  Description of Artificial Sequence: Synthetic oligonucleotide
  Antisense strand to SEQ ID NO: 1863041
uccuaggguacagaucuuc

SEQ ID NO: 1863043 - RNA, 19 nt, Artificial Sequence
  Description of Artificial Sequence: Synthetic oligonucleotide
  Sense strand starting at position 3656 of SEQ ID NO: 1564212
cuguuuauccaucauaugu

SEQ ID NO: 1863044 - RNA, 19 nt, Artificial Sequence
  Description of Artificial Sequence: Synthetic oligonucleotide
  Antisense strand to SEQ ID NO: 1863043
acauaugauggauaaacag

SEQ ID NO: 1863045 - RNA, 19 nt, Artificial Sequence
  Description of Artificial Sequence: Synthetic oligonucleotide
  Sense strand starting at position 32 of SEQ ID NO: 1564213
auaaauauuggcugauaac

SEQ ID NO: 1863046 - RNA, 19 nt, Artificial Sequence
  Description of Artificial Sequence: Synthetic oligonucleotide
  Antisense strand to SEQ ID NO: 1863045
guuaucagccaauauuuau

SEQ ID NO: 1863047 - RNA, 19 nt, Artificial Sequence
  Description of Artificial Sequence: Synthetic oligonucleotide
  Sense strand starting at position 41 of SEQ ID NO: 1564213
ggcugauaaccguauacga

SEQ ID NO: 1863048 - RNA, 19 nt, Artificial Sequence
  Description of Artificial Sequence: Synthetic oligonucleotide
  Antisense strand to SEQ ID NO: 1863047
ucguauacgguuaucagcc

SEQ ID NO: 1863049 - RNA, 19 nt, Artificial Sequence
  Description of Artificial Sequence: Synthetic oligonucleotide
  Sense strand starting at position 54 of SEQ ID NO: 1564213
auacgagguucugcaaacu

SEQ ID NO: 1863050 - RNA, 19 nt, Artificial Sequence
  Description of Artificial Sequence: Synthetic oligonucleotide
  Antisense strand to SEQ ID NO: 1863049
aguuugcagaaccucguau

SEQ ID NO: 1863051 - RNA, 19 nt, Artificial Sequence
  Description of Artificial Sequence: Synthetic oligonucleotide
  Sense strand starting at position 98 of SEQ ID NO: 1564213
augugucaugaacaucuuu

SEQ ID NO: 1863052 - RNA, 19 nt, Artificial Sequence
  Description of Artificial Sequence: Synthetic oligonucleotide
  Antisense strand to SEQ ID NO: 1863051
aaagauguucaugacacau

SEQ ID NO: 1863053 - RNA, 19 nt, Artificial Sequence
  Description of Artificial Sequence: Synthetic oligonucleotide
  Sense strand starting at position 228 of SEQ ID NO: 1564213
aagcauugggccuggcaaa

SEQ ID NO: 1863054 - RNA, 19 nt, Artificial Sequence
  Description of Artificial Sequence: Synthetic oligonucleotide
  Antisense strand to SEQ ID NO: 1863053
uuugccaggcccaaugcuu

SEQ ID NO: 1863055 - RNA, 19 nt, Artificial Sequence
  Description of Artificial Sequence: Synthetic oligonucleotide
  Sense strand starting at position 303 of SEQ ID NO: 1564213
ggccaaaggcauuaaaggu

SEQ ID NO: 1863056 - RNA, 19 nt, Artificial Sequence
  Description of Artificial Sequence: Synthetic oligonucleotide
  Antisense strand to SEQ ID NO: 1863055
accuuuaaugccuuuggcc

SEQ ID NO: 1863057 - RNA, 19 nt, Artificial Sequence
  Description of Artificial Sequence: Synthetic oligonucleotide
  Sense strand starting at position 311 of SEQ ID NO: 1564213
gcauuaaagguaugggaua

SEQ ID NO: 1863058 - RNA, 19 nt, Artificial Sequence
  Description of Artificial Sequence: Synthetic oligonucleotide
  Antisense strand to SEQ ID NO: 1863057
uaucccauaccuuuaaugc

SEQ ID NO: 1863059 - RNA, 19 nt, Artificial Sequence
  Description of Artificial Sequence: Synthetic oligonucleotide
  Sense strand starting at position 323 of SEQ ID NO: 1564213
ugggauaucguguaagccu

SEQ ID NO: 1863060 - RNA, 19 nt, Artificial Sequence
  Description of Artificial Sequence: Synthetic oligonucleotide
  Antisense strand to SEQ ID NO: 1863059
aggcuuacacgauauccca

SEQ ID NO: 1863061 - RNA, 19 nt, Artificial Sequence
  Description of Artificial Sequence: Synthetic oligonucleotide
  Sense strand starting at position 513 of SEQ ID NO: 1564213
ucagaugccuuuccuguaa

SEQ ID NO: 1863062 - RNA, 19 nt, Artificial Sequence
  Description of Artificial Sequence: Synthetic oligonucleotide
  Antisense strand to SEQ ID NO: 1863061
uuacaggaaaggcaucuga

SEQ ID NO: 1863063 - RNA, 19 nt, Artificial Sequence
  Description of Artificial Sequence: Synthetic oligonucleotide
  Sense strand starting at position 1007 of SEQ ID NO: 1564213
aaugcaggucuggauacua

SEQ ID NO: 1863064 - RNA, 19 nt, Artificial Sequence
  Description of Artificial Sequence: Synthetic oligonucleotide
  Antisense strand to SEQ ID NO: 1863063
uaguauccagaccugcauu

SEQ ID NO: 1863065 - RNA, 19 nt, Artificial Sequence
  Description of Artificial Sequence: Synthetic oligonucleotide
  Sense strand starting at position 1658 of SEQ ID NO: 1564213
ccagaauaagucuguguuu

SEQ ID NO: 1863066 - RNA, 19 nt, Artificial Sequence
  Description of Artificial Sequence: Synthetic oligonucleotide
  Antisense strand to SEQ ID NO: 1863065
aaacacagacuuauucugg

SEQ ID NO: 1863067 - RNA, 19 nt, Artificial Sequence
  Description of Artificial Sequence: Synthetic oligonucleotide
  Sense strand starting at position 1659 of SEQ ID NO: 1564213
cagaauaagucuguguuuc

SEQ ID NO: 1863068 - RNA, 19 nt, Artificial Sequence
  Description of Artificial Sequence: Synthetic oligonucleotide
  Antisense strand to SEQ ID NO: 1863067
gaaacacagacuuauucug

SEQ ID NO: 1863069 - RNA, 19 nt, Artificial Sequence
  Description of Artificial Sequence: Synthetic oligonucleotide
  Sense strand starting at position 2345 of SEQ ID NO: 1564213
ugugacagcugaucagaga

SEQ ID NO: 1863070 - RNA, 19 nt, Artificial Sequence
  Description of Artificial Sequence: Synthetic oligonucleotide
  Antisense strand to SEQ ID NO: 1863069
ucucugaucagcugucaca

SEQ ID NO: 1863071 - RNA, 19 nt, Artificial Sequence
  Description of Artificial Sequence: Synthetic oligonucleotide
  Sense strand starting at position 2585 of SEQ ID NO: 1564213
cgaugacucccagaucuac

SEQ ID NO: 1863072 - RNA, 19 nt, Artificial Sequence
  Description of Artificial Sequence: Synthetic oligonucleotide
  Antisense strand to SEQ ID NO: 1863071
guagaucugggagucaucg

SEQ ID NO: 1863073 - RNA, 19 nt, Artificial Sequence
  Description of Artificial Sequence: Synthetic oligonucleotide
  Sense strand starting at position 2645 of SEQ ID NO: 1564213
gccaacuguuuauuggaca

SEQ ID NO: 1863074 - RNA, 19 nt, Artificial Sequence
  Description of Artificial Sequence: Synthetic oligonucleotide
  Antisense strand to SEQ ID NO: 1863073
uguccaauaaacaguuggc

SEQ ID NO: 1863075 - RNA, 19 nt, Artificial Sequence
  Description of Artificial Sequence: Synthetic oligonucleotide
  Sense strand starting at position 2780 of SEQ ID NO: 1564213
ggccuuucuccacacuuga

SEQ ID NO: 1863076 - RNA, 19 nt, Artificial Sequence
  Description of Artificial Sequence: Synthetic oligonucleotide
  Antisense strand to SEQ ID NO: 1863075
ucaaguguggagaaaggcc

SEQ ID NO: 1863077 - RNA, 19 nt, Artificial Sequence
  Description of Artificial Sequence: Synthetic oligonucleotide
  Sense strand starting at position 3143 of SEQ ID NO: 1564213
auauucuugucacuacagu

SEQ ID NO: 1863078 - RNA, 19 nt, Artificial Sequence
  Description of Artificial Sequence: Synthetic oligonucleotide
  Antisense strand to SEQ ID NO: 1863077
acuguagugacaagaauau

SEQ ID NO: 1863079 - RNA, 19 nt, Artificial Sequence
  Description of Artificial Sequence: Synthetic oligonucleotide
  Sense strand starting at position 3165 of SEQ ID NO: 1564213
gugucauauauuuggguuu

SEQ ID NO: 1863080 - RNA, 19 nt, Artificial Sequence
  Description of Artificial Sequence: Synthetic oligonucleotide
  Antisense strand to SEQ ID NO: 1863079
aaacccaaauauaugacac

SEQ ID NO: 1863081 - RNA, 19 nt, Artificial Sequence
  Description of Artificial Sequence: Synthetic oligonucleotide
  Sense strand starting at position 3225 of SEQ ID NO: 1564213
agauuauccuguuuggagu

SEQ ID NO: 1863082 - RNA, 19 nt, Artificial Sequence
  Description of Artificial Sequence: Synthetic oligonucleotide
  Antisense strand to SEQ ID NO: 1863081
acuccaaacaggauaaucu

SEQ ID NO: 1863083 - RNA, 19 nt, Artificial Sequence
  Description of Artificial Sequence: Synthetic oligonucleotide
  Sense strand starting at position 3233 of SEQ ID NO: 1564213
cuguuuggaguguauugaa

SEQ ID NO: 1863084 - RNA, 19 nt, Artificial Sequence
  Description of Artificial Sequence: Synthetic oligonucleotide
  Antisense strand to SEQ ID NO: 1863083
uucaauacacuccaaacag

SEQ ID NO: 1863085 - RNA, 19 nt, Artificial Sequence
  Description of Artificial Sequence: Synthetic oligonucleotide
  Sense strand starting at position 3246 of SEQ ID NO: 1564213
auugaacuucuuggauaca

SEQ ID NO: 1863086 - RNA, 19 nt, Artificial Sequence
  Description of Artificial Sequence: Synthetic oligonucleotide
  Antisense strand to SEQ ID NO: 1863085
uguauccaagaaguucaau

SEQ ID NO: 1863087 - RNA, 19 nt, Artificial Sequence
  Description of Artificial Sequence: Synthetic oligonucleotide
  Sense strand starting at position 3255 of SEQ ID NO: 1564213
cuuggauacaucgauuagu

SEQ ID NO: 1863088 - RNA, 19 nt, Artificial Sequence
  Description of Artificial Sequence: Synthetic oligonucleotide
  Antisense strand to SEQ ID NO: 1863087
acuaaucgauguauccaag

SEQ ID NO: 1863089 - RNA, 19 nt, Artificial Sequence
  Description of Artificial Sequence: Synthetic oligonucleotide
  Sense strand starting at position 3268 of SEQ ID NO: 1564213
auuagugucuuuccucaag

SEQ ID NO: 1863090 - RNA, 19 nt, Artificial Sequence
  Description of Artificial Sequence: Synthetic oligonucleotide
  Antisense strand to SEQ ID NO: 1863089
cuugaggaaagacacuaau

SEQ ID NO: 1863091 - RNA, 19 nt, Artificial Sequence
  Description of Artificial Sequence: Synthetic oligonucleotide
  Sense strand starting at position 3271 of SEQ ID NO: 1564213
agugucuuuccucaaguuu

SEQ ID NO: 1863092 - RNA, 19 nt, Artificial Sequence
  Description of Artificial Sequence: Synthetic oligonucleotide
  Antisense strand to SEQ ID NO: 1863091
aaacuugaggaaagacacu

SEQ ID NO: 1863093 - RNA, 19 nt, Artificial Sequence
  Description of Artificial Sequence: Synthetic oligonucleotide
  Sense strand starting at position 3277 of SEQ ID NO: 1564213
uuuccucaaguuugaguaa

SEQ ID NO: 1863094 - RNA, 19 nt, Artificial Sequence
  Description of Artificial Sequence: Synthetic oligonucleotide
  Antisense strand to SEQ ID NO: 1863093
uuacucaaacuugaggaaa

SEQ ID NO: 1863095 - RNA, 19 nt, Artificial Sequence
  Description of Artificial Sequence: Synthetic oligonucleotide
  Sense strand starting at position 3286 of SEQ ID NO: 1564213
guuugaguaauuugcaguc

SEQ ID NO: 1863096 - RNA, 19 nt, Artificial Sequence
  Description of Artificial Sequence: Synthetic oligonucleotide
  Antisense strand to SEQ ID NO: 1863095
gacugcaaauuacucaaac

SEQ ID NO: 1863097 - RNA, 19 nt, Artificial Sequence
  Description of Artificial Sequence: Synthetic oligonucleotide
  Sense strand starting at position 3411 of SEQ ID NO: 1564213
ugcuccucggacugaauaa

SEQ ID NO: 1863098 - RNA, 19 nt, Artificial Sequence
  Description of Artificial Sequence: Synthetic oligonucleotide
  Antisense strand to SEQ ID NO: 1863097
uuauucaguccgaggagca

SEQ ID NO: 1863099 - RNA, 19 nt, Artificial Sequence
  Description of Artificial Sequence: Synthetic oligonucleotide
  Sense strand starting at position 3418 of SEQ ID NO: 1564213
cggacugaauaaucucaau

SEQ ID NO: 1863100 - RNA, 19 nt, Artificial Sequence
  Description of Artificial Sequence: Synthetic oligonucleotide
  Antisense strand to SEQ ID NO: 1863099
auugagauuauucaguccg

SEQ ID NO: 1863101 - RNA, 19 nt, Artificial Sequence
  Description of Artificial Sequence: Synthetic oligonucleotide
  Sense strand starting at position 3584 of SEQ ID NO: 1564213
gauauuguguauuugcuga

SEQ ID NO: 1863102 - RNA, 19 nt, Artificial Sequence
  Description of Artificial Sequence: Synthetic oligonucleotide
  Antisense strand to SEQ ID NO: 1863101
ucagcaaauacacaauauc

SEQ ID NO: 1863103 - RNA, 19 nt, Artificial Sequence
  Description of Artificial Sequence: Synthetic oligonucleotide
  Sense strand starting at position 3586 of SEQ ID NO: 1564213
uauuguguauuugcugaga

SEQ ID NO: 1863104 - RNA, 19 nt, Artificial Sequence
  Description of Artificial Sequence: Synthetic oligonucleotide
  Antisense strand to SEQ ID NO: 1863103
ucucagcaaauacacaaua

SEQ ID NO: 1863105 - RNA, 19 nt, Artificial Sequence
  Description of Artificial Sequence: Synthetic oligonucleotide
  Sense strand starting at position 3623 of SEQ ID NO: 1564213
uaguccuuuguuuacgauu

SEQ ID NO: 1863106 - RNA, 19 nt, Artificial Sequence
  Description of Artificial Sequence: Synthetic oligonucleotide
  Antisense strand to SEQ ID NO: 1863105
aaucguaaacaaaggacua

SEQ ID NO: 1863107 - RNA, 19 nt, Artificial Sequence
  Description of Artificial Sequence: Synthetic oligonucleotide
  Sense strand starting at position 3632 of SEQ ID NO: 1564213
guuuacgauuuccuuuagu

SEQ ID NO: 1863108 - RNA, 19 nt, Artificial Sequence
  Description of Artificial Sequence: Synthetic oligonucleotide
  Antisense strand to SEQ ID NO: 1863107
acuaaaggaaaucguaaac

SEQ ID NO: 1863109 - RNA, 19 nt, Artificial Sequence
  Description of Artificial Sequence: Synthetic oligonucleotide
  Sense strand starting at position 3647 of SEQ ID NO: 1564213
uaguucuucgagcauauau

SEQ ID NO: 1863110 - RNA, 19 nt, Artificial Sequence
  Description of Artificial Sequence: Synthetic oligonucleotide
  Antisense strand to SEQ ID NO: 1863109
auauaugcucgaagaacua

SEQ ID NO: 1863111 - RNA, 19 nt, Artificial Sequence
  Description of Artificial Sequence: Synthetic oligonucleotide
  Sense strand starting at position 3649 of SEQ ID NO: 1564213
guucuucgagcauauauaa

SEQ ID NO: 1863112 - RNA, 19 nt, Artificial Sequence
  Description of Artificial Sequence: Synthetic oligonucleotide
  Antisense strand to SEQ ID NO: 1863111
uuauauaugcucgaagaac

SEQ ID NO: 1863113 - RNA, 19 nt, Artificial Sequence
  Description of Artificial Sequence: Synthetic oligonucleotide
  Sense strand starting at position 3731 of SEQ ID NO: 1564213
auuauuucuuuccugugua

SEQ ID NO: 1863114 - RNA, 19 nt, Artificial Sequence
  Description of Artificial Sequence: Synthetic oligonucleotide
  Antisense strand to SEQ ID NO: 1863113
uacacaggaaagaaauaau

SEQ ID NO: 1863115 - RNA, 19 nt, Artificial Sequence
  Description of Artificial Sequence: Synthetic oligonucleotide
  Sense strand starting at position 3816 of SEQ ID NO: 1564213
cuaauauguugacucugga

SEQ ID NO: 1863116 - RNA, 19 nt, Artificial Sequence
  Description of Artificial Sequence: Synthetic oligonucleotide
  Antisense strand to SEQ ID NO: 1863115
uccagagucaacauauuag

SEQ ID NO: 1863117 - RNA, 19 nt, Artificial Sequence
  Description of Artificial Sequence: Synthetic oligonucleotide
  Sense strand starting at position 3819 of SEQ ID NO: 1564213
auauguugacucuggaaau

SEQ ID NO: 1863118 - RNA, 19 nt, Artificial Sequence
  Description of Artificial Sequence: Synthetic oligonucleotide
  Antisense strand to SEQ ID NO: 1863117
auuuccagagucaacauau

SEQ ID NO: 1863119 - RNA, 19 nt, Artificial Sequence
  Description of Artificial Sequence: Synthetic oligonucleotide
  Sense strand starting at position 3882 of SEQ ID NO: 1564213
guuauuguuuacuuaguga

SEQ ID NO: 1863120 - RNA, 19 nt, Artificial Sequence
  Description of Artificial Sequence: Synthetic oligonucleotide
  Antisense strand to SEQ ID NO: 1863119
ucacuaaguaaacaauaac

SEQ ID NO: 1863121 - RNA, 19 nt, Artificial Sequence
  Description of Artificial Sequence: Synthetic oligonucleotide
  Sense strand starting at position 3885 of SEQ ID NO: 1564213
auuguuuacuuagugacuu

SEQ ID NO: 1863122 - RNA, 19 nt, Artificial Sequence
  Description of Artificial Sequence: Synthetic oligonucleotide
  Antisense strand to SEQ ID NO: 1863121
aagucacuaaguaaacaau

SEQ ID NO: 1863123 - RNA, 19 nt, Artificial Sequence
  Description of Artificial Sequence: Synthetic oligonucleotide
  Sense strand starting at position 3923 of SEQ ID NO: 1564213
uuauguauucuuugucaug

SEQ ID NO: 1863124 - RNA, 19 nt, Artificial Sequence
  Description of Artificial Sequence: Synthetic oligonucleotide
  Antisense strand to SEQ ID NO: 1863123
caugacaaagaauacauaa

SEQ ID NO: 1863125 - RNA, 19 nt, Artificial Sequence
  Description of Artificial Sequence: Synthetic oligonucleotide
  Sense strand starting at position 1069 of SEQ ID NO: 1564214
gcaaauuucgccuagcuuu

SEQ ID NO: 1863126 - RNA, 19 nt, Artificial Sequence
  Description of Artificial Sequence: Synthetic oligonucleotide
  Antisense strand to SEQ ID NO: 1863125
aaagcuaggcgaaauuugc

SEQ ID NO: 1863127 - RNA, 19 nt, Artificial Sequence
  Description of Artificial Sequence: Synthetic oligonucleotide
  Sense strand starting at position 1098 of SEQ ID NO: 1564214
cgacuccuauccucagaga

SEQ ID NO: 1863128 - RNA, 19 nt, Artificial Sequence
  Description of Artificial Sequence: Synthetic oligonucleotide
  Antisense strand to SEQ ID NO: 1863127
ucucugaggauaggagucg

SEQ ID NO: 1863129 - RNA, 19 nt, Artificial Sequence
  Description of Artificial Sequence: Synthetic oligonucleotide
  Sense strand starting at position 1271 of SEQ ID NO: 1564214
agacaagacagacguuauu

SEQ ID NO: 1863130 - RNA, 19 nt, Artificial Sequence
  Description of Artificial Sequence: Synthetic oligonucleotide
  Antisense strand to SEQ ID NO: 1863129
aauaacgucugucuugucu

SEQ ID NO: 1863131 - RNA, 19 nt, Artificial Sequence
  Description of Artificial Sequence: Synthetic oligonucleotide
  Sense strand starting at position 1274 of SEQ ID NO: 1564214
caagacagacguuauuauu

SEQ ID NO: 1863132 - RNA, 19 nt, Artificial Sequence
  Description of Artificial Sequence: Synthetic oligonucleotide
  Antisense strand to SEQ ID NO: 1863131
aauaauaacgucugucuug

SEQ ID NO: 1863133 - RNA, 19 nt, Artificial Sequence
  Description of Artificial Sequence: Synthetic oligonucleotide
  Sense strand starting at position 1299 of SEQ ID NO: 1564214
cugggauucucaucaucac

SEQ ID NO: 1863134 - RNA, 19 nt, Artificial Sequence
  Description of Artificial Sequence: Synthetic oligonucleotide
  Antisense strand to SEQ ID NO: 1863133
gugaugaugagaaucccag

SEQ ID NO: 1863135 - RNA, 19 nt, Artificial Sequence
  Description of Artificial Sequence: Synthetic oligonucleotide
  Sense strand starting at position 1488 of SEQ ID NO: 1564214
cauugagugaggugaacua

SEQ ID NO: 1863136 - RNA, 19 nt, Artificial Sequence
  Description of Artificial Sequence: Synthetic oligonucleotide
  Antisense strand to SEQ ID NO: 1863135
uaguucaccucacucaaug

SEQ ID NO: 1863137 - RNA, 19 nt, Artificial Sequence
  Description of Artificial Sequence: Synthetic oligonucleotide
  Sense strand starting at position 1519 of SEQ ID NO: 1564214
cucuaaauuucuguugucu

SEQ ID NO: 1863138 - RNA, 19 nt, Artificial Sequence
  Description of Artificial Sequence: Synthetic oligonucleotide
  Antisense strand to SEQ ID NO: 1863137
agacaacagaaauuuagag

SEQ ID NO: 1863139 - RNA, 19 nt, Artificial Sequence
  Description of Artificial Sequence: Synthetic oligonucleotide
  Sense strand starting at position 1652 of SEQ ID NO: 1564214
gugagagaagccgauuauu

SEQ ID NO: 1863140 - RNA, 19 nt, Artificial Sequence
  Description of Artificial Sequence: Synthetic oligonucleotide
  Antisense strand to SEQ ID NO: 1863139
aauaaucggcuucucucac

SEQ ID NO: 1863141 - RNA, 19 nt, Artificial Sequence
  Description of Artificial Sequence: Synthetic oligonucleotide
  Sense strand starting at position 1680 of SEQ ID NO: 1564214
ucacuaaaucucuaggugu

SEQ ID NO: 1863142 - RNA, 19 nt, Artificial Sequence
  Description of Artificial Sequence: Synthetic oligonucleotide
  Antisense strand to SEQ ID NO: 1863141
acaccuagagauuuaguga

SEQ ID NO: 1863143 - RNA, 19 nt, Artificial Sequence
  Description of Artificial Sequence: Synthetic oligonucleotide
  Sense strand starting at position 1744 of SEQ ID NO: 1564214
auacaauuaucuccgacga

SEQ ID NO: 1863144 - RNA, 19 nt, Artificial Sequence
  Description of Artificial Sequence: Synthetic oligonucleotide
  Antisense strand to SEQ ID NO: 1863143
ucgucggagauaauuguau

SEQ ID NO: 1863145 - RNA, 19 nt, Artificial Sequence
  Description of Artificial Sequence: Synthetic oligonucleotide
  Sense strand starting at position 1796 of SEQ ID NO: 1564214
cuauuccagucauuagauu

SEQ ID NO: 1863146 - RNA, 19 nt, Artificial Sequence
  Description of Artificial Sequence: Synthetic oligonucleotide
  Antisense strand to SEQ ID NO: 1863145
aaucuaaugacuggaauag

SEQ ID NO: 1863147 - RNA, 19 nt, Artificial Sequence
  Description of Artificial Sequence: Synthetic oligonucleotide
  Sense strand starting at position 1998 of SEQ ID NO: 1564214
uccugaucacgugaggauu

SEQ ID NO: 1863148 - RNA, 19 nt, Artificial Sequence
  Description of Artificial Sequence: Synthetic oligonucleotide
  Antisense strand to SEQ ID NO: 1863147
aauccucacgugaucagga

SEQ ID NO: 1863149 - RNA, 19 nt, Artificial Sequence
  Description of Artificial Sequence: Synthetic oligonucleotide
  Sense strand starting at position 2004 of SEQ ID NO: 1564214
ucacgugaggauuauguca

SEQ ID NO: 1863150 - RNA, 19 nt, Artificial Sequence
  Description of Artificial Sequence: Synthetic oligonucleotide
  Antisense strand to SEQ ID NO: 1863149
ugacauaauccucacguga

SEQ ID NO: 1863151 - RNA, 19 nt, Artificial Sequence
  Description of Artificial Sequence: Synthetic oligonucleotide
  Sense strand starting at position 2135 of SEQ ID NO: 1564214
uugcuaauuccagagguca

SEQ ID NO: 1863152 - RNA, 19 nt, Artificial Sequence
  Description of Artificial Sequence: Synthetic oligonucleotide
  Antisense strand to SEQ ID NO: 1863151
ugaccucuggaauuagcaa

SEQ ID NO: 1863153 - RNA, 19 nt, Artificial Sequence
  Description of Artificial Sequence: Synthetic oligonucleotide
  Sense strand starting at position 2166 of SEQ ID NO: 1564214
ucucccuguggucagaauu

SEQ ID NO: 1863154 - RNA, 19 nt, Artificial Sequence
  Description of Artificial Sequence: Synthetic oligonucleotide
  Antisense strand to SEQ ID NO: 1863153
aauucugaccacagggaga

SEQ ID NO: 1863155 - RNA, 19 nt, Artificial Sequence
  Description of Artificial Sequence: Synthetic oligonucleotide
  Sense strand starting at position 2173 of SEQ ID NO: 1564214
guggucagaauuugccuuu

SEQ ID NO: 1863156 - RNA, 19 nt, Artificial Sequence
  Description of Artificial Sequence: Synthetic oligonucleotide
  Antisense strand to SEQ ID NO: 1863155
aaaggcaaauucugaccac

SEQ ID NO: 1863157 - RNA, 19 nt, Artificial Sequence
  Description of Artificial Sequence: Synthetic oligonucleotide
  Sense strand starting at position 2176 of SEQ ID NO: 1564214
gucagaauuugccuuucuc

SEQ ID NO: 1863158 - RNA, 19 nt, Artificial Sequence
  Description of Artificial Sequence: Synthetic oligonucleotide
  Antisense strand to SEQ ID NO: 1863157
gagaaaggcaaauucugac

SEQ ID NO: 1863159 - RNA, 19 nt, Artificial Sequence
  Description of Artificial Sequence: Synthetic oligonucleotide
  Sense strand starting at position 2313 of SEQ ID NO: 1564214
ggcagucuccuccauccaa

SEQ ID NO: 1863160 - RNA, 19 nt, Artificial Sequence
  Description of Artificial Sequence: Synthetic oligonucleotide
  Antisense strand to SEQ ID NO: 1863159
uuggauggaggagacugcc

SEQ ID NO: 1863161 - RNA, 19 nt, Artificial Sequence
  Description of Artificial Sequence: Synthetic oligonucleotide
  Sense strand starting at position 2367 of SEQ ID NO: 1564214
ggaguccaauccuugaaac

SEQ ID NO: 1863162 - RNA, 19 nt, Artificial Sequence
  Description of Artificial Sequence: Synthetic oligonucleotide
  Antisense strand to SEQ ID NO: 1863161
guuucaaggauuggacucc

SEQ ID NO: 1863163 - RNA, 19 nt, Artificial Sequence
  Description of Artificial Sequence: Synthetic oligonucleotide
  Sense strand starting at position 2616 of SEQ ID NO: 1564214
acccuuuaggcagacauau

SEQ ID NO: 1863164 - RNA, 19 nt, Artificial Sequence
  Description of Artificial Sequence: Synthetic oligonucleotide
  Antisense strand to SEQ ID NO: 1863163
auaugucugccuaaagggu

SEQ ID NO: 1863165 - RNA, 19 nt, Artificial Sequence
  Description of Artificial Sequence: Synthetic oligonucleotide
  Sense strand starting at position 2639 of SEQ ID NO: 1564214
ugaaguuuaagauguacag

SEQ ID NO: 1863166 - RNA, 19 nt, Artificial Sequence
  Description of Artificial Sequence: Synthetic oligonucleotide
  Antisense strand to SEQ ID NO: 1863165
cuguacaucuuaaacuuca

SEQ ID NO: 1863167 - RNA, 19 nt, Artificial Sequence
  Description of Artificial Sequence: Synthetic oligonucleotide
  Sense strand starting at position 2700 of SEQ ID NO: 1564214
agguccuuccauuagguga

SEQ ID NO: 1863168 - RNA, 19 nt, Artificial Sequence
  Description of Artificial Sequence: Synthetic oligonucleotide
  Antisense strand to SEQ ID NO: 1863167
ucaccuaauggaaggaccu

SEQ ID NO: 1863169 - RNA, 19 nt, Artificial Sequence
  Description of Artificial Sequence: Synthetic oligonucleotide
  Sense strand starting at position 3066 of SEQ ID NO: 1564214
uggguacuugucuaaguag

SEQ ID NO: 1863170 - RNA, 19 nt, Artificial Sequence
  Description of Artificial Sequence: Synthetic oligonucleotide
  Antisense strand to SEQ ID NO: 1863169
cuacuuagacaaguaccca

SEQ ID NO: 1863171 - RNA, 19 nt, Artificial Sequence
  Description of Artificial Sequence: Synthetic oligonucleotide
  Sense strand starting at position 3082 of SEQ ID NO: 1564214
uagauuugcucuugauuug

SEQ ID NO: 1863172 - RNA, 19 nt, Artificial Sequence
  Description of Artificial Sequence: Synthetic oligonucleotide
  Antisense strand to SEQ ID NO: 1863171
caaaucaagagcaaaucua

SEQ ID NO: 1863173 - RNA, 19 nt, Artificial Sequence
  Description of Artificial Sequence: Synthetic oligonucleotide
  Sense strand starting at position 3089 of SEQ ID NO: 1564214
gcucuugauuuguuagcuu

SEQ ID NO: 1863174 - RNA, 19 nt, Artificial Sequence
  Description of Artificial Sequence: Synthetic oligonucleotide
  Antisense strand to SEQ ID NO: 1863173
aagcuaacaaaucaagagc

SEQ ID NO: 1863175 - RNA, 19 nt, Artificial Sequence
  Description of Artificial Sequence: Synthetic oligonucleotide
  Sense strand starting at position 3133 of SEQ ID NO: 1564214
uguguaaacuucucauaag

SEQ ID NO: 1863176 - RNA, 19 nt, Artificial Sequence
  Description of Artificial Sequence: Synthetic oligonucleotide
  Antisense strand to SEQ ID NO: 1863175
cuuaugagaaguuuacaca

SEQ ID NO: 1863177 - RNA, 19 nt, Artificial Sequence
  Description of Artificial Sequence: Synthetic oligonucleotide
  Sense strand starting at position 3166 of SEQ ID NO: 1564214
auugcagcucauuaugaau

SEQ ID NO: 1863178 - RNA, 19 nt, Artificial Sequence
  Description of Artificial Sequence: Synthetic oligonucleotide
  Antisense strand to SEQ ID NO: 1863177
auucauaaugagcugcaau

SEQ ID NO: 1863179 - RNA, 19 nt, Artificial Sequence
  Description of Artificial Sequence: Synthetic oligonucleotide
  Sense strand starting at position 3273 of SEQ ID NO: 1564214
uugucacaguuauuaagga

SEQ ID NO: 1863180 - RNA, 19 nt, Artificial Sequence
  Description of Artificial Sequence: Synthetic oligonucleotide
  Antisense strand to SEQ ID NO: 1863179
uccuuaauaacugugacaa

SEQ ID NO: 1863181 - RNA, 19 nt, Artificial Sequence
  Description of Artificial Sequence: Synthetic oligonucleotide
  Sense strand starting at position 3288 of SEQ ID NO: 1564214
aggaaugacuaguugugau

SEQ ID NO: 1863182 - RNA, 19 nt, Artificial Sequence
  Description of Artificial Sequence: Synthetic oligonucleotide
  Antisense strand to SEQ ID NO: 1863181
aucacaacuagucauuccu

SEQ ID NO: 1863183 - RNA, 19 nt, Artificial Sequence
  Description of Artificial Sequence: Synthetic oligonucleotide
  Sense strand starting at position 3296 of SEQ ID NO: 1564214
cuaguugugauagaggcaa

SEQ ID NO: 1863184 - RNA, 19 nt, Artificial Sequence
  Description of Artificial Sequence: Synthetic oligonucleotide
  Antisense strand to SEQ ID NO: 1863183
uugccucuaucacaacuag

SEQ ID NO: 1863185 - RNA, 19 nt, Artificial Sequence
  Description of Artificial Sequence: Synthetic oligonucleotide
  Sense strand starting at position 3338 of SEQ ID NO: 1564214
auuccugaauccucuguga

SEQ ID NO: 1863186 - RNA, 19 nt, Artificial Sequence
  Description of Artificial Sequence: Synthetic oligonucleotide
  Antisense strand to SEQ ID NO: 1863185
ucacagaggauucaggaau

SEQ ID NO: 1863187 - RNA, 19 nt, Artificial Sequence
  Description of Artificial Sequence: Synthetic oligonucleotide
  Sense strand starting at position 3340 of SEQ ID NO: 1564214
uccugaauccucugugaac

SEQ ID NO: 1863188 - RNA, 19 nt, Artificial Sequence
  Description of Artificial Sequence: Synthetic oligonucleotide
  Antisense strand to SEQ ID NO: 1863187
guucacagaggauucagga

SEQ ID NO: 1863189 - RNA, 19 nt, Artificial Sequence
  Description of Artificial Sequence: Synthetic oligonucleotide
  Sense strand starting at position 3341 of SEQ ID NO: 1564214
ccugaauccucugugaaca

SEQ ID NO: 1863190 - RNA, 19 nt, Artificial Sequence
  Description of Artificial Sequence: Synthetic oligonucleotide
  Antisense strand to SEQ ID NO: 1863189
uguucacagaggauucagg

SEQ ID NO: 1863191 - RNA, 19 nt, Artificial Sequence
  Description of Artificial Sequence: Synthetic oligonucleotide
  Sense strand starting at position 3342 of SEQ ID NO: 1564214
cugaauccucugugaacag

SEQ ID NO: 1863192 - RNA, 19 nt, Artificial Sequence
  Description of Artificial Sequence: Synthetic oligonucleotide
  Antisense strand to SEQ ID NO: 1863191
cuguucacagaggauucag

SEQ ID NO: 1863193 - RNA, 19 nt, Artificial Sequence
  Description of Artificial Sequence: Synthetic oligonucleotide
  Sense strand starting at position 3372 of SEQ ID NO: 1564214
gaugguuagacucagaguu

SEQ ID NO: 1863194 - RNA, 19 nt, Artificial Sequence
  Description of Artificial Sequence: Synthetic oligonucleotide
  Antisense strand to SEQ ID NO: 1863193
aacucugagucuaaccauc

SEQ ID NO: 1863195 - RNA, 19 nt, Artificial Sequence
  Description of Artificial Sequence: Synthetic oligonucleotide
  Sense strand starting at position 3402 of SEQ ID NO: 1564214
gaaggauucggguguugaa

SEQ ID NO: 1863196 - RNA, 19 nt, Artificial Sequence
  Description of Artificial Sequence: Synthetic oligonucleotide
  Antisense strand to SEQ ID NO: 1863195
uucaacacccgaauccuuc

SEQ ID NO: 1863197 - RNA, 19 nt, Artificial Sequence
  Description of Artificial Sequence: Synthetic oligonucleotide
  Sense strand starting at position 3418 of SEQ ID NO: 1564214
gaagacuuugcauauuagu

SEQ ID NO: 1863198 - RNA, 19 nt, Artificial Sequence
  Description of Artificial Sequence: Synthetic oligonucleotide
  Antisense strand to SEQ ID NO: 1863197
acuaauaugcaaagucuuc

SEQ ID NO: 1863199 - RNA, 19 nt, Artificial Sequence
  Description of Artificial Sequence: Synthetic oligonucleotide
  Sense strand starting at position 3423 of SEQ ID NO: 1564214
cuuugcauauuaguaagaa

SEQ ID NO: 1863200 - RNA, 19 nt, Artificial Sequence
  Description of Artificial Sequence: Synthetic oligonucleotide
  Antisense strand to SEQ ID NO: 1863199
uucuuacuaauaugcaaag

SEQ ID NO: 1863201 - RNA, 19 nt, Artificial Sequence
  Description of Artificial Sequence: Synthetic oligonucleotide
  Sense strand starting at position 3433 of SEQ ID NO: 1564214
uaguaagaagaauggcauu

SEQ ID NO: 1863202 - RNA, 19 nt, Artificial Sequence
  Description of Artificial Sequence: Synthetic oligonucleotide
  Antisense strand to SEQ ID NO: 1863201
aaugccauucuucuuacua

SEQ ID NO: 1863203 - RNA, 19 nt, Artificial Sequence
  Description of Artificial Sequence: Synthetic oligonucleotide
  Sense strand starting at position 3793 of SEQ ID NO: 1564214
ggcugugggauccagacua

SEQ ID NO: 1863204 - RNA, 19 nt, Artificial Sequence
  Description of Artificial Sequence: Synthetic oligonucleotide
  Antisense strand to SEQ ID NO: 1863203
uagucuggaucccacagcc

SEQ ID NO: 1863205 - RNA, 19 nt, Artificial Sequence
  Description of Artificial Sequence: Synthetic oligonucleotide
  Sense strand starting at position 57 of SEQ ID NO: 1564215
agaaauaagcuugguuaag

SEQ ID NO: 1863206 - RNA, 19 nt, Artificial Sequence
  Description of Artificial Sequence: Synthetic oligonucleotide
  Antisense strand to SEQ ID NO: 1863205
cuuaaccaagcuuauuucu

SEQ ID NO: 1863207 - RNA, 19 nt, Artificial Sequence
  Description of Artificial Sequence: Synthetic oligonucleotide
  Sense strand starting at position 58 of SEQ ID NO: 1564215
gaaauaagcuugguuaagu

SEQ ID NO: 1863208 - RNA, 19 nt, Artificial Sequence
  Description of Artificial Sequence: Synthetic oligonucleotide
  Antisense strand to SEQ ID NO: 1863207
acuuaaccaagcuuauuuc

SEQ ID NO: 1863209 - RNA, 19 nt, Artificial Sequence
  Description of Artificial Sequence: Synthetic oligonucleotide
  Sense strand starting at position 88 of SEQ ID NO: 1564215
guuauauggauguauguau

SEQ ID NO: 1863210 - RNA, 19 nt, Artificial Sequence
  Description of Artificial Sequence: Synthetic oligonucleotide
  Antisense strand to SEQ ID NO: 1863209
auacauacauccauauaac

SEQ ID NO: 1863211 - RNA, 19 nt, Artificial Sequence
  Description of Artificial Sequence: Synthetic oligonucleotide
  Sense strand starting at position 143 of SEQ ID NO: 1564215
cuacauaugugagcugaua

SEQ ID NO: 1863212 - RNA, 19 nt, Artificial Sequence
  Description of Artificial Sequence: Synthetic oligonucleotide
  Antisense strand to SEQ ID NO: 1863211
uaucagcucacauauguag

SEQ ID NO: 1863213 - RNA, 19 nt, Artificial Sequence
  Description of Artificial Sequence: Synthetic oligonucleotide
  Sense strand starting at position 670 of SEQ ID NO: 1564215
uucggaagguugaggauuu

SEQ ID NO: 1863214 - RNA, 19 nt, Artificial Sequence
  Description of Artificial Sequence: Synthetic oligonucleotide
  Antisense strand to SEQ ID NO: 1863213
aaauccucaaccuuccgaa

SEQ ID NO: 1863215 - RNA, 19 nt, Artificial Sequence
  Description of Artificial Sequence: Synthetic oligonucleotide
  Sense strand starting at position 915 of SEQ ID NO: 1564215
ucaguacccuaauugucaa

SEQ ID NO: 1863216 - RNA, 19 nt, Artificial Sequence
  Description of Artificial Sequence: Synthetic oligonucleotide
  Antisense strand to SEQ ID NO: 1863215
uugacaauuaggguacuga

SEQ ID NO: 1863217 - RNA, 19 nt, Artificial Sequence
  Description of Artificial Sequence: Synthetic oligonucleotide
  Sense strand starting at position 1498 of SEQ ID NO: 1564215
ggaguguuuggugagcaga

SEQ ID NO: 1863218 - RNA, 19 nt, Artificial Sequence
  Description of Artificial Sequence: Synthetic oligonucleotide
  Antisense strand to SEQ ID NO: 1863217
ucugcucaccaaacacucc

SEQ ID NO: 1863219 - RNA, 19 nt, Artificial Sequence
  Description of Artificial Sequence: Synthetic oligonucleotide
  Sense strand starting at position 1775 of SEQ ID NO: 1564215
gggaguuuggcggaacaga

SEQ ID NO: 1863220 - RNA, 19 nt, Artificial Sequence
  Description of Artificial Sequence: Synthetic oligonucleotide
  Antisense strand to SEQ ID NO: 1863219
ucuguuccgccaaacuccc

SEQ ID NO: 1863221 - RNA, 19 nt, Artificial Sequence
  Description of Artificial Sequence: Synthetic oligonucleotide
  Sense strand starting at position 1872 of SEQ ID NO: 1564215
cguuuauacuaaccugaaa

SEQ ID NO: 1863222 - RNA, 19 nt, Artificial Sequence
  Description of Artificial Sequence: Synthetic oligonucleotide
  Antisense strand to SEQ ID NO: 1863221
uuucagguuaguauaaacg

SEQ ID NO: 1863223 - RNA, 19 nt, Artificial Sequence
  Description of Artificial Sequence: Synthetic oligonucleotide
  Sense strand starting at position 1888 of SEQ ID NO: 1564215
aaaggaucuugggcacuuu

SEQ ID NO: 1863224 - RNA, 19 nt, Artificial Sequence
  Description of Artificial Sequence: Synthetic oligonucleotide
  Antisense strand to SEQ ID NO: 1863223
aaagugcccaagauccuuu

SEQ ID NO: 1863225 - RNA, 19 nt, Artificial Sequence
  Description of Artificial Sequence: Synthetic oligonucleotide
  Sense strand starting at position 1991 of SEQ ID NO: 1564215
gugagagucgcgucaucac

SEQ ID NO: 1863226 - RNA, 19 nt, Artificial Sequence
  Description of Artificial Sequence: Synthetic oligonucleotide
  Antisense strand to SEQ ID NO: 1863225
gugaugacgcgacucucac

SEQ ID NO: 1863227 - RNA, 19 nt, Artificial Sequence
  Description of Artificial Sequence: Synthetic oligonucleotide
  Sense strand starting at position 2100 of SEQ ID NO: 1564215
uugccaaucggagacaaua

SEQ ID NO: 1863228 - RNA, 19 nt, Artificial Sequence
  Description of Artificial Sequence: Synthetic oligonucleotide
  Antisense strand to SEQ ID NO: 1863227
uauugucuccgauuggcaa

SEQ ID NO: 1863229 - RNA, 19 nt, Artificial Sequence
  Description of Artificial Sequence: Synthetic oligonucleotide
  Sense strand starting at position 2136 of SEQ ID NO: 1564215
uggaguauuuauucgccuu

SEQ ID NO: 1863230 - RNA, 19 nt, Artificial Sequence
  Description of Artificial Sequence: Synthetic oligonucleotide
  Antisense strand to SEQ ID NO: 1863229
aaggcgaauaaauacucca

SEQ ID NO: 1863231 - RNA, 19 nt, Artificial Sequence
  Description of Artificial Sequence: Synthetic oligonucleotide
  Sense strand starting at position 2137 of SEQ ID NO: 1564215
ggaguauuuauucgccuuu

SEQ ID NO: 1863232 - RNA, 19 nt, Artificial Sequence
  Description of Artificial Sequence: Synthetic oligonucleotide
  Antisense strand to SEQ ID NO: 1863231
aaaggcgaauaaauacucc

SEQ ID NO: 1863233 - RNA, 19 nt, Artificial Sequence
  Description of Artificial Sequence: Synthetic oligonucleotide
  Sense strand starting at position 2138 of SEQ ID NO: 1564215
gaguauuuauucgccuuuc

SEQ ID NO: 1863234 - RNA, 19 nt, Artificial Sequence
  Description of Artificial Sequence: Synthetic oligonucleotide
  Antisense strand to SEQ ID NO: 1863233
gaaaggcgaauaaauacuc

SEQ ID NO: 1863235 - RNA, 19 nt, Artificial Sequence
  Description of Artificial Sequence: Synthetic oligonucleotide
  Sense strand starting at position 2139 of SEQ ID NO: 1564215
aguauuuauucgccuuucu

SEQ ID NO: 1863236 - RNA, 19 nt, Artificial Sequence
  Description of Artificial Sequence: Synthetic oligonucleotide
  Antisense strand to SEQ ID NO: 1863235
agaaaggcgaauaaauacu

SEQ ID NO: 1863237 - RNA, 19 nt, Artificial Sequence
  Description of Artificial Sequence: Synthetic oligonucleotide
  Sense strand starting at position 2288 of SEQ ID NO: 1564215
cuggaauccuauccagcau

SEQ ID NO: 1863238 - RNA, 19 nt, Artificial Sequence
  Description of Artificial Sequence: Synthetic oligonucleotide
  Antisense strand to SEQ ID NO: 1863237
augcuggauaggauuccag

SEQ ID NO: 1863239 - RNA, 19 nt, Artificial Sequence
  Description of Artificial Sequence: Synthetic oligonucleotide
  Sense strand starting at position 2295 of SEQ ID NO: 1564215
ccuauccagcauugaaaug

SEQ ID NO: 1863240 - RNA, 19 nt, Artificial Sequence
  Description of Artificial Sequence: Synthetic oligonucleotide
  Antisense strand to SEQ ID NO: 1863239
cauuucaaugcuggauagg

SEQ ID NO: 1863241 - RNA, 19 nt, Artificial Sequence
  Description of Artificial Sequence: Synthetic oligonucleotide
  Sense strand starting at position 2350 of SEQ ID NO: 1564215
agaaucuaagguugaaagu

SEQ ID NO: 1863242 - RNA, 19 nt, Artificial Sequence
  Description of Artificial Sequence: Synthetic oligonucleotide
  Antisense strand to SEQ ID NO: 1863241
acuuucaaccuuagauucu

SEQ ID NO: 1863243 - RNA, 19 nt, Artificial Sequence
  Description of Artificial Sequence: Synthetic oligonucleotide
  Sense strand starting at position 2366 of SEQ ID NO: 1564215
aguggaggauuugacuaau

SEQ ID NO: 1863244 - RNA, 19 nt, Artificial Sequence
  Description of Artificial Sequence: Synthetic oligonucleotide
  Antisense strand to SEQ ID NO: 1863243
auuagucaaauccuccacu

SEQ ID NO: 1863245 - RNA, 19 nt, Artificial Sequence
  Description of Artificial Sequence: Synthetic oligonucleotide
  Sense strand starting at position 2399 of SEQ ID NO: 1564215
uucuguuguguucuauguu

SEQ ID NO: 1863246 - RNA, 19 nt, Artificial Sequence
  Description of Artificial Sequence: Synthetic oligonucleotide
  Antisense strand to SEQ ID NO: 1863245
aacauagaacacaacagaa

SEQ ID NO: 1863247 - RNA, 19 nt, Artificial Sequence
  Description of Artificial Sequence: Synthetic oligonucleotide
  Sense strand starting at position 2536 of SEQ ID NO: 1564215
uuucuaauggcuggaaaug

SEQ ID NO: 1863248 - RNA, 19 nt, Artificial Sequence
  Description of Artificial Sequence: Synthetic oligonucleotide
  Antisense strand to SEQ ID NO: 1863247
cauuuccagccauuagaaa

SEQ ID NO: 1863249 - RNA, 19 nt, Artificial Sequence
  Description of Artificial Sequence: Synthetic oligonucleotide
  Sense strand starting at position 2679 of SEQ ID NO: 1564215
uuguauagguaaucuacua

SEQ ID NO: 1863250 - RNA, 19 nt, Artificial Sequence
  Description of Artificial Sequence: Synthetic oligonucleotide
  Antisense strand to SEQ ID NO: 1863249
uaguagauuaccuauacaa

SEQ ID NO: 1863251 - RNA, 19 nt, Artificial Sequence
  Description of Artificial Sequence: Synthetic oligonucleotide
  Sense strand starting at position 2768 of SEQ ID NO: 1564215
gguggcauccacuaagguu

SEQ ID NO: 1863252 - RNA, 19 nt, Artificial Sequence
  Description of Artificial Sequence: Synthetic oligonucleotide
  Antisense strand to SEQ ID NO: 1863251
aaccuuaguggaugccacc

SEQ ID NO: 1863253 - RNA, 19 nt, Artificial Sequence
  Description of Artificial Sequence: Synthetic oligonucleotide
  Sense strand starting at position 2838 of SEQ ID NO: 1564215
guaucuuguuaaucagaua

SEQ ID NO: 1863254 - RNA, 19 nt, Artificial Sequence
  Description of Artificial Sequence: Synthetic oligonucleotide
  Antisense strand to SEQ ID NO: 1863253
uaucugauuaacaagauac

SEQ ID NO: 1863255 - RNA, 19 nt, Artificial Sequence
  Description of Artificial Sequence: Synthetic oligonucleotide
  Sense strand starting at position 2929 of SEQ ID NO: 1564215
cauuucguuguugggaaau

SEQ ID NO: 1863256 - RNA, 19 nt, Artificial Sequence
  Description of Artificial Sequence: Synthetic oligonucleotide
  Antisense strand to SEQ ID NO: 1863255
auuucccaacaacgaaaug

SEQ ID NO: 1863257 - RNA, 19 nt, Artificial Sequence
  Description of Artificial Sequence: Synthetic oligonucleotide
  Sense strand starting at position 2977 of SEQ ID NO: 1564215
agagaauucucuguaucuc

SEQ ID NO: 1863258 - RNA, 19 nt, Artificial Sequence
  Description of Artificial Sequence: Synthetic oligonucleotide
  Antisense strand to SEQ ID NO: 1863257
gagauacagagaauucucu

SEQ ID NO: 1863259 - RNA, 19 nt, Artificial Sequence
  Description of Artificial Sequence: Synthetic oligonucleotide
  Sense strand starting at position 3123 of SEQ ID NO: 1564215
agagaacaacauugcugua

SEQ ID NO: 1863260 - RNA, 19 nt, Artificial Sequence
  Description of Artificial Sequence: Synthetic oligonucleotide
  Antisense strand to SEQ ID NO: 1863259
uacagcaauguuguucucu

SEQ ID NO: 1863261 - RNA, 19 nt, Artificial Sequence
  Description of Artificial Sequence: Synthetic oligonucleotide
  Sense strand starting at position 3125 of SEQ ID NO: 1564215
agaacaacauugcuguaaa

SEQ ID NO: 1863262 - RNA, 19 nt, Artificial Sequence
  Description of Artificial Sequence: Synthetic oligonucleotide
  Antisense strand to SEQ ID NO: 1863261
uuuacagcaauguuguucu

SEQ ID NO: 1863263 - RNA, 19 nt, Artificial Sequence
  Description of Artificial Sequence: Synthetic oligonucleotide
  Sense strand starting at position 3179 of SEQ ID NO: 1564215
cucagaauccacugguacu

SEQ ID NO: 1863264 - RNA, 19 nt, Artificial Sequence
  Description of Artificial Sequence: Synthetic oligonucleotide
  Antisense strand to SEQ ID NO: 1863263
aguaccaguggauucugag

SEQ ID NO: 1863265 - RNA, 19 nt, Artificial Sequence
  Description of Artificial Sequence: Synthetic oligonucleotide
  Sense strand starting at position 3221 of SEQ ID NO: 1564215
uggcauucuggccaaugga

SEQ ID NO: 1863266 - RNA, 19 nt, Artificial Sequence
  Description of Artificial Sequence: Synthetic oligonucleotide
  Antisense strand to SEQ ID NO: 1863265
uccauuggccagaaugcca

SEQ ID NO: 1863267 - RNA, 19 nt, Artificial Sequence
  Description of Artificial Sequence: Synthetic oligonucleotide
  Sense strand starting at position 3382 of SEQ ID NO: 1564215
auaguugaagcaugacaaa

SEQ ID NO: 1863268 - RNA, 19 nt, Artificial Sequence
  Description of Artificial Sequence: Synthetic oligonucleotide
  Antisense strand to SEQ ID NO: 1863267
uuugucaugcuucaacuau

SEQ ID NO: 1863269 - RNA, 19 nt, Artificial Sequence
  Description of Artificial Sequence: Synthetic oligonucleotide
  Sense strand starting at position 3416 of SEQ ID NO: 1564215
agggauaaauguucuauug

SEQ ID NO: 1863270 - RNA, 19 nt, Artificial Sequence
  Description of Artificial Sequence: Synthetic oligonucleotide
  Antisense strand to SEQ ID NO: 1863269
caauagaacauuuaucccu

SEQ ID NO: 1863271 - RNA, 19 nt, Artificial Sequence
  Description of Artificial Sequence: Synthetic oligonucleotide
  Sense strand starting at position 3423 of SEQ ID NO: 1564215
aauguucuauuguuugaga

SEQ ID NO: 1863272 - RNA, 19 nt, Artificial Sequence
  Description of Artificial Sequence: Synthetic oligonucleotide
  Antisense strand to SEQ ID NO: 1863271
ucucaaacaauagaacauu

SEQ ID NO: 1863273 - RNA, 19 nt, Artificial Sequence
  Description of Artificial Sequence: Synthetic oligonucleotide
  Sense strand starting at position 3527 of SEQ ID NO: 1564215
accauuuagugaggaacaa

SEQ ID NO: 1863274 - RNA, 19 nt, Artificial Sequence
  Description of Artificial Sequence: Synthetic oligonucleotide
  Antisense strand to SEQ ID NO: 1863273
uuguuccucacuaaauggu

SEQ ID NO: 1863275 - RNA, 19 nt, Artificial Sequence
  Description of Artificial Sequence: Synthetic oligonucleotide
  Sense strand starting at position 3647 of SEQ ID NO: 1564215
cugcaaucagaauacaguu

SEQ ID NO: 1863276 - RNA, 19 nt, Artificial Sequence
  Description of Artificial Sequence: Synthetic oligonucleotide
  Antisense strand to SEQ ID NO: 1863275
aacuguauucugauugcag

SEQ ID NO: 1863277 - RNA, 19 nt, Artificial Sequence
  Description of Artificial Sequence: Synthetic oligonucleotide
  Sense strand starting at position 3687 of SEQ ID NO: 1564215
gcaugcugucucuuguagu

SEQ ID NO: 1863278 - RNA, 19 nt, Artificial Sequence
  Description of Artificial Sequence: Synthetic oligonucleotide
  Antisense strand to SEQ ID NO: 1863277
acuacaagagacagcaugc

SEQ ID NO: 1863279 - RNA, 19 nt, Artificial Sequence
  Description of Artificial Sequence: Synthetic oligonucleotide
  Sense strand starting at position 3870 of SEQ ID NO: 1564215
ccauuugaguuguugcaug

SEQ ID NO: 1863280 - RNA, 19 nt, Artificial Sequence
  Description of Artificial Sequence: Synthetic oligonucleotide
  Antisense strand to SEQ ID NO: 1863279
caugcaacaacucaaaugg

SEQ ID NO: 1863281 - RNA, 19 nt, Artificial Sequence
  Description of Artificial Sequence: Synthetic oligonucleotide
  Sense strand starting at position 3920 of SEQ ID NO: 1564215
aguauucuguuauuuagcu

SEQ ID NO: 1863282 - RNA, 19 nt, Artificial Sequence
  Description of Artificial Sequence: Synthetic oligonucleotide
  Antisense strand to SEQ ID NO: 1863281
agcuaaauaacagaauacu

SEQ ID NO: 1863283 - RNA, 19 nt, Artificial Sequence
  Description of Artificial Sequence: Synthetic oligonucleotide
  Sense strand starting at position 3921 of SEQ ID NO: 1564215
guauucuguuauuuagcua

SEQ ID NO: 1863284 - RNA, 19 nt, Artificial Sequence
  Description of Artificial Sequence: Synthetic oligonucleotide
  Antisense strand to SEQ ID NO: 1863283
uagcuaaauaacagaauac

SEQ ID NO: 1863285 - RNA, 19 nt, Artificial Sequence
  Description of Artificial Sequence: Synthetic oligonucleotide
  Sense strand starting at position 39 of SEQ ID NO: 1564216
guuguuaaaugaguaauga

SEQ ID NO: 1863286 - RNA, 19 nt, Artificial Sequence
  Description of Artificial Sequence: Synthetic oligonucleotide
  Antisense strand to SEQ ID NO: 1863285
ucauuacucauuuaacaac

SEQ ID NO: 1863287 - RNA, 19 nt, Artificial Sequence
  Description of Artificial Sequence: Synthetic oligonucleotide
  Sense strand starting at position 286 of SEQ ID NO: 1564216
cccacugugggcuaaugaa

SEQ ID NO: 1863288 - RNA, 19 nt, Artificial Sequence
  Description of Artificial Sequence: Synthetic oligonucleotide
  Antisense strand to SEQ ID NO: 1863287
uucauuagcccacaguggg

SEQ ID NO: 1863289 - RNA, 19 nt, Artificial Sequence
  Description of Artificial Sequence: Synthetic oligonucleotide
  Sense strand starting at position 377 of SEQ ID NO: 1564216
gagcaaguuggauaaguuu

SEQ ID NO: 1863290 - RNA, 19 nt, Artificial Sequence
  Description of Artificial Sequence: Synthetic oligonucleotide
  Antisense strand to SEQ ID NO: 1863289
aaacuuauccaacuugcuc

SEQ ID NO: 1863291 - RNA, 19 nt, Artificial Sequence
  Description of Artificial Sequence: Synthetic oligonucleotide
  Sense strand starting at position 385 of SEQ ID NO: 1564216
uggauaaguuucuugacca

SEQ ID NO: 1863292 - RNA, 19 nt, Artificial Sequence
  Description of Artificial Sequence: Synthetic oligonucleotide
  Antisense strand to SEQ ID NO: 1863291
uggucaagaaacuuaucca

SEQ ID NO: 1863293 - RNA, 19 nt, Artificial Sequence
  Description of Artificial Sequence: Synthetic oligonucleotide
  Sense strand starting at position 481 of SEQ ID NO: 1564216
uugauaaagugcuuugaac

SEQ ID NO: 1863294 - RNA, 19 nt, Artificial Sequence
  Description of Artificial Sequence: Synthetic oligonucleotide
  Antisense strand to SEQ ID NO: 1863293
guucaaagcacuuuaucaa

SEQ ID NO: 1863295 - RNA, 19 nt, Artificial Sequence
  Description of Artificial Sequence: Synthetic oligonucleotide
  Sense strand starting at position 483 of SEQ ID NO: 1564216
gauaaagugcuuugaacua

SEQ ID NO: 1863296 - RNA, 19 nt, Artificial Sequence
  Description of Artificial Sequence: Synthetic oligonucleotide
  Antisense strand to SEQ ID NO: 1863295
uaguucaaagcacuuuauc

SEQ ID NO: 1863297 - RNA, 19 nt, Artificial Sequence
  Description of Artificial Sequence: Synthetic oligonucleotide
  Sense strand starting at position 652 of SEQ ID NO: 1564216
gccauacaaucucuaugga

SEQ ID NO: 1863298 - RNA, 19 nt, Artificial Sequence
  Description of Artificial Sequence: Synthetic oligonucleotide
  Antisense strand to SEQ ID NO: 1863297
uccauagagauuguauggc

SEQ ID NO: 1863299 - RNA, 19 nt, Artificial Sequence
  Description of Artificial Sequence: Synthetic oligonucleotide
  Sense strand starting at position 725 of SEQ ID NO: 1564216
aauggauaggcaugaucuu

SEQ ID NO: 1863300 - RNA, 19 nt, Artificial Sequence
  Description of Artificial Sequence: Synthetic oligonucleotide
  Antisense strand to SEQ ID NO: 1863299
aagaucaugccuauccauu

SEQ ID NO: 1863301 - RNA, 19 nt, Artificial Sequence
  Description of Artificial Sequence: Synthetic oligonucleotide
  Sense strand starting at position 748 of SEQ ID NO: 1564216
ugguaacacuuguuuacaa

SEQ ID NO: 1863302 - RNA, 19 nt, Artificial Sequence
  Description of Artificial Sequence: Synthetic oligonucleotide
  Antisense strand to SEQ ID NO: 1863301
uuguaaacaaguguuacca

SEQ ID NO: 1863303 - RNA, 19 nt, Artificial Sequence
  Description of Artificial Sequence: Synthetic oligonucleotide
  Sense strand starting at position 749 of SEQ ID NO: 1564216
gguaacacuuguuuacaaa

SEQ ID NO: 1863304 - RNA, 19 nt, Artificial Sequence
  Description of Artificial Sequence: Synthetic oligonucleotide
  Antisense strand to SEQ ID NO: 1863303
uuuguaaacaaguguuacc

SEQ ID NO: 1863305 - RNA, 19 nt, Artificial Sequence
  Description of Artificial Sequence: Synthetic oligonucleotide
  Sense strand starting at position 823 of SEQ ID NO: 1564216
agggcugugcaacauauau

SEQ ID NO: 1863306 - RNA, 19 nt, Artificial Sequence
  Description of Artificial Sequence: Synthetic oligonucleotide
  Antisense strand to SEQ ID NO: 1863305
auauauguugcacagcccu

SEQ ID NO: 1863307 - RNA, 19 nt, Artificial Sequence
  Description of Artificial Sequence: Synthetic oligonucleotide
  Sense strand starting at position 937 of SEQ ID NO: 1564216
guguauccagaauagucau

SEQ ID NO: 1863308 - RNA, 19 nt, Artificial Sequence
  Description of Artificial Sequence: Synthetic oligonucleotide
  Antisense strand to SEQ ID NO: 1863307
augacuauucuggauacac

SEQ ID NO: 1863309 - RNA, 19 nt, Artificial Sequence
  Description of Artificial Sequence: Synthetic oligonucleotide
  Sense strand starting at position 1077 of SEQ ID NO: 1564216
gugaucaagccuuauguaa

SEQ ID NO: 1863310 - RNA, 19 nt, Artificial Sequence
  Description of Artificial Sequence: Synthetic oligonucleotide
  Antisense strand to SEQ ID NO: 1863309
uuacauaaggcuugaucac

SEQ ID NO: 1863311 - RNA, 19 nt, Artificial Sequence
  Description of Artificial Sequence: Synthetic oligonucleotide
  Sense strand starting at position 1092 of SEQ ID NO: 1564216
guaacuaauggcuaucauu

SEQ ID NO: 1863312 - RNA, 19 nt, Artificial Sequence
  Description of Artificial Sequence: Synthetic oligonucleotide
  Antisense strand to SEQ ID NO: 1863311
aaugauagccauuaguuac

SEQ ID NO: 1863313 - RNA, 19 nt, Artificial Sequence
  Description of Artificial Sequence: Synthetic oligonucleotide
  Sense strand starting at position 1124 of SEQ ID NO: 1564216
gguucuagaacugaugcua

SEQ ID NO: 1863314 - RNA, 19 nt, Artificial Sequence
  Description of Artificial Sequence: Synthetic oligonucleotide
  Antisense strand to SEQ ID NO: 1863313
uagcaucaguucuagaacc

SEQ ID NO: 1863315 - RNA, 19 nt, Artificial Sequence
  Description of Artificial Sequence: Synthetic oligonucleotide
  Sense strand starting at position 1163 of SEQ ID NO: 1564216
ggugcauaccuauaccaaa

SEQ ID NO: 1863316 - RNA, 19 nt, Artificial Sequence
  Description of Artificial Sequence: Synthetic oligonucleotide
  Antisense strand to SEQ ID NO: 1863315
uuugguauagguaugcacc

SEQ ID NO: 1863317 - RNA, 19 nt, Artificial Sequence
  Description of Artificial Sequence: Synthetic oligonucleotide
  Sense strand starting at position 1205 of SEQ ID NO: 1564216
guaggcacgaaauauggua

SEQ ID NO: 1863318 - RNA, 19 nt, Artificial Sequence
  Description of Artificial Sequence: Synthetic oligonucleotide
  Antisense strand to SEQ ID NO: 1863317
uaccauauuucgugccuac

SEQ ID NO: 1863319 - RNA, 19 nt, Artificial Sequence
  Description of Artificial Sequence: Synthetic oligonucleotide
  Sense strand starting at position 1331 of SEQ ID NO: 1564216
uggaaacaauguuuccaga

SEQ ID NO: 1863320 - RNA, 19 nt, Artificial Sequence
  Description of Artificial Sequence: Synthetic oligonucleotide
  Antisense strand to SEQ ID NO: 1863319
ucuggaaacauuguuucca

SEQ ID NO: 1863321 - RNA, 19 nt, Artificial Sequence
  Description of Artificial Sequence: Synthetic oligonucleotide
  Sense strand starting at position 1342 of SEQ ID NO: 1564216
uuuccagaaguuuguaaca

SEQ ID NO: 1863322 - RNA, 19 nt, Artificial Sequence
  Description of Artificial Sequence: Synthetic oligonucleotide
  Antisense strand to SEQ ID NO: 1863321
uguuacaaacuucuggaaa

SEQ ID NO: 1863323 - RNA, 19 nt, Artificial Sequence
  Description of Artificial Sequence: Synthetic oligonucleotide
  Sense strand starting at position 1512 of SEQ ID NO: 1564216
gcgguguagcgguuacuga

SEQ ID NO: 1863324 - RNA, 19 nt, Artificial Sequence
  Description of Artificial Sequence: Synthetic oligonucleotide
  Antisense strand to SEQ ID NO: 1863323
ucaguaaccgcuacaccgc

SEQ ID NO: 1863325 - RNA, 19 nt, Artificial Sequence
  Description of Artificial Sequence: Synthetic oligonucleotide
  Sense strand starting at position 1678 of SEQ ID NO: 1564216
gcuaaucaucuugggauga

SEQ ID NO: 1863326 - RNA, 19 nt, Artificial Sequence
  Description of Artificial Sequence: Synthetic oligonucleotide
  Antisense strand to SEQ ID NO: 1863325
ucaucccaagaugauuagc

SEQ ID NO: 1863327 - RNA, 19 nt, Artificial Sequence
  Description of Artificial Sequence: Synthetic oligonucleotide
  Sense strand starting at position 2181 of SEQ ID NO: 1564216
guugauguacuuuacaacu

SEQ ID NO: 1863328 - RNA, 19 nt, Artificial Sequence
  Description of Artificial Sequence: Synthetic oligonucleotide
  Antisense strand to SEQ ID NO: 1863327
aguuguaaaguacaucaac

SEQ ID NO: 1863329 - RNA, 19 nt, Artificial Sequence
  Description of Artificial Sequence: Synthetic oligonucleotide
  Sense strand starting at position 2325 of SEQ ID NO: 1564216
caugcaucaguugauauga

SEQ ID NO: 1863330 - RNA, 19 nt, Artificial Sequence
  Description of Artificial Sequence: Synthetic oligonucleotide
  Antisense strand to SEQ ID NO: 1863329
ucauaucaacugaugcaug

SEQ ID NO: 1863331 - RNA, 19 nt, Artificial Sequence
  Description of Artificial Sequence: Synthetic oligonucleotide
  Sense strand starting at position 2435 of SEQ ID NO: 1564216
cacagugaugguugaacga

SEQ ID NO: 1863332 - RNA, 19 nt, Artificial Sequence
  Description of Artificial Sequence: Synthetic oligonucleotide
  Antisense strand to SEQ ID NO: 1863331
ucguucaaccaucacugug

SEQ ID NO: 1863333 - RNA, 19 nt, Artificial Sequence
  Description of Artificial Sequence: Synthetic oligonucleotide
  Sense strand starting at position 2619 of SEQ ID NO: 1564216
accagugacucauuaacug

SEQ ID NO: 1863334 - RNA, 19 nt, Artificial Sequence
  Description of Artificial Sequence: Synthetic oligonucleotide
  Antisense strand to SEQ ID NO: 1863333
caguuaaugagucacuggu

SEQ ID NO: 1863335 - RNA, 19 nt, Artificial Sequence
  Description of Artificial Sequence: Synthetic oligonucleotide
  Sense strand starting at position 2623 of SEQ ID NO: 1564216
gugacucauuaacugggau

SEQ ID NO: 1863336 - RNA, 19 nt, Artificial Sequence
  Description of Artificial Sequence: Synthetic oligonucleotide
  Antisense strand to SEQ ID NO: 1863335
aucccaguuaaugagucac

SEQ ID NO: 1863337 - RNA, 19 nt, Artificial Sequence
  Description of Artificial Sequence: Synthetic oligonucleotide
  Sense strand starting at position 2702 of SEQ ID NO: 1564216
gugauuacgaaggagucuu

SEQ ID NO: 1863338 - RNA, 19 nt, Artificial Sequence
  Description of Artificial Sequence: Synthetic oligonucleotide
  Antisense strand to SEQ ID NO: 1863337
aagacuccuucguaaucac

SEQ ID NO: 1863339 - RNA, 19 nt, Artificial Sequence
  Description of Artificial Sequence: Synthetic oligonucleotide
  Sense strand starting at position 2731 of SEQ ID NO: 1564216
ugauccaucuggucaaaga

SEQ ID NO: 1863340 - RNA, 19 nt, Artificial Sequence
  Description of Artificial Sequence: Synthetic oligonucleotide
  Antisense strand to SEQ ID NO: 1863339
ucuuugaccagauggauca

SEQ ID NO: 1863341 - RNA, 19 nt, Artificial Sequence
  Description of Artificial Sequence: Synthetic oligonucleotide
  Sense strand starting at position 2780 of SEQ ID NO: 1564216
auuuauguuccacgcagca

SEQ ID NO: 1863342 - RNA, 19 nt, Artificial Sequence
  Description of Artificial Sequence: Synthetic oligonucleotide
  Antisense strand to SEQ ID NO: 1863341
ugcugcguggaacauaaau

SEQ ID NO: 1863343 - RNA, 19 nt, Artificial Sequence
  Description of Artificial Sequence: Synthetic oligonucleotide
  Sense strand starting at position 3456 of SEQ ID NO: 1564216
cugacaagauucuugcuga

SEQ ID NO: 1863344 - RNA, 19 nt, Artificial Sequence
  Description of Artificial Sequence: Synthetic oligonucleotide
  Antisense strand to SEQ ID NO: 1863343
ucagcaagaaucuugucag

SEQ ID NO: 1863345 - RNA, 19 nt, Artificial Sequence
  Description of Artificial Sequence: Synthetic oligonucleotide
  Sense strand starting at position 3491 of SEQ ID NO: 1564216
ucagaugucaccuggaggu

SEQ ID NO: 1863346 - RNA, 19 nt, Artificial Sequence
  Description of Artificial Sequence: Synthetic oligonucleotide
  Antisense strand to SEQ ID NO: 1863345
accuccaggugacaucuga

SEQ ID NO: 1863347 - RNA, 19 nt, Artificial Sequence
  Description of Artificial Sequence: Synthetic oligonucleotide
  Sense strand starting at position 3549 of SEQ ID NO: 1564216
ucagauauugagggugguu

SEQ ID NO: 1863348 - RNA, 19 nt, Artificial Sequence
  Description of Artificial Sequence: Synthetic oligonucleotide
  Antisense strand to SEQ ID NO: 1863347
aaccacccucaauaucuga

SEQ ID NO: 1863349 - RNA, 19 nt, Artificial Sequence
  Description of Artificial Sequence: Synthetic oligonucleotide
  Sense strand starting at position 3653 of SEQ ID NO: 1564216
gacuaaaguuugguuggaa

SEQ ID NO: 1863350 - RNA, 19 nt, Artificial Sequence
  Description of Artificial Sequence: Synthetic oligonucleotide
  Antisense strand to SEQ ID NO: 1863349
uuccaaccaaacuuuaguc

SEQ ID NO: 1863351 - RNA, 19 nt, Artificial Sequence
  Description of Artificial Sequence: Synthetic oligonucleotide
  Sense strand starting at position 3654 of SEQ ID NO: 1564216
acuaaaguuugguuggaaa

SEQ ID NO: 1863352 - RNA, 19 nt, Artificial Sequence
  Description of Artificial Sequence: Synthetic oligonucleotide
  Antisense strand to SEQ ID NO: 1863351
uuuccaaccaaacuuuagu

SEQ ID NO: 1863353 - RNA, 19 nt, Artificial Sequence
  Description of Artificial Sequence: Synthetic oligonucleotide
  Sense strand starting at position 3741 of SEQ ID NO: 1564216
gaguuuaugugagcaaaga

SEQ ID NO: 1863354 - RNA, 19 nt, Artificial Sequence
  Description of Artificial Sequence: Synthetic oligonucleotide
  Antisense strand to SEQ ID NO: 1863353
ucuuugcucacauaaacuc

SEQ ID NO: 1863355 - RNA, 19 nt, Artificial Sequence
  Description of Artificial Sequence: Synthetic oligonucleotide
  Sense strand starting at position 3742 of SEQ ID NO: 1564216
aguuuaugugagcaaagaa

SEQ ID NO: 1863356 - RNA, 19 nt, Artificial Sequence
  Description of Artificial Sequence: Synthetic oligonucleotide
  Antisense strand to SEQ ID NO: 1863355
uucuuugcucacauaaacu

SEQ ID NO: 1863357 - RNA, 19 nt, Artificial Sequence
  Description of Artificial Sequence: Synthetic oligonucleotide
  Sense strand starting at position 3765 of SEQ ID NO: 1564216
ucaugaaucggacagcacu

SEQ ID NO: 1863358 - RNA, 19 nt, Artificial Sequence
  Description of Artificial Sequence: Synthetic oligonucleotide
  Antisense strand to SEQ ID NO: 1863357
agugcuguccgauucauga

SEQ ID NO: 1863359 - RNA, 19 nt, Artificial Sequence
  Description of Artificial Sequence: Synthetic oligonucleotide
  Sense strand starting at position 3807 of SEQ ID NO: 1564216
gcuuugugggccgugagua

SEQ ID NO: 1863360 - RNA, 19 nt, Artificial Sequence
  Description of Artificial Sequence: Synthetic oligonucleotide
  Antisense strand to SEQ ID NO: 1863359
uacucacggcccacaaagc

SEQ ID NO: 1863361 - RNA, 19 nt, Artificial Sequence
  Description of Artificial Sequence: Synthetic oligonucleotide
  Sense strand starting at position 3884 of SEQ ID NO: 1564216
aucagaucauuuggauaug

SEQ ID NO: 1863362 - RNA, 19 nt, Artificial Sequence
  Description of Artificial Sequence: Synthetic oligonucleotide
  Antisense strand to SEQ ID NO: 1863361
cauauccaaaugaucugau

SEQ ID NO: 1863363 - RNA, 19 nt, Artificial Sequence
  Description of Artificial Sequence: Synthetic oligonucleotide
  Sense strand starting at position 3885 of SEQ ID NO: 1564216
ucagaucauuuggauauga

SEQ ID NO: 1863364 - RNA, 19 nt, Artificial Sequence
  Description of Artificial Sequence: Synthetic oligonucleotide
  Antisense strand to SEQ ID NO: 1863363
ucauauccaaaugaucuga

SEQ ID NO: 1863365 - RNA, 19 nt, Artificial Sequence
  Description of Artificial Sequence: Synthetic oligonucleotide
  Sense strand starting at position 124 of SEQ ID NO: 1564217
guuguuaaaugaguaauga

SEQ ID NO: 1863366 - RNA, 19 nt, Artificial Sequence
  Description of Artificial Sequence: Synthetic oligonucleotide
  Antisense strand to SEQ ID NO: 1863365
ucauuacucauuuaacaac

SEQ ID NO: 1863367 - RNA, 19 nt, Artificial Sequence
  Description of Artificial Sequence: Synthetic oligonucleotide
  Sense strand starting at position 371 of SEQ ID NO: 1564217
cccacugugggcuaaugaa

SEQ ID NO: 1863368 - RNA, 19 nt, Artificial Sequence
  Description of Artificial Sequence: Synthetic oligonucleotide
  Antisense strand to SEQ ID NO: 1863367
uucauuagcccacaguggg

SEQ ID NO: 1863369 - RNA, 19 nt, Artificial Sequence
  Description of Artificial Sequence: Synthetic oligonucleotide
  Sense strand starting at position 462 of SEQ ID NO: 1564217
gagcaaguuggauaaguuu

SEQ ID NO: 1863370 - RNA, 19 nt, Artificial Sequence
  Description of Artificial Sequence: Synthetic oligonucleotide
  Antisense strand to SEQ ID NO: 1863369
aaacuuauccaacuugcuc

SEQ ID NO: 1863371 - RNA, 19 nt, Artificial Sequence
  Description of Artificial Sequence: Synthetic oligonucleotide
  Sense strand starting at position 470 of SEQ ID NO: 1564217
uggauaaguuucuugacca

SEQ ID NO: 1863372 - RNA, 19 nt, Artificial Sequence
  Description of Artificial Sequence: Synthetic oligonucleotide
  Antisense strand to SEQ ID NO: 1863371
uggucaagaaacuuaucca

SEQ ID NO: 1863373 - RNA, 19 nt, Artificial Sequence
  Description of Artificial Sequence: Synthetic oligonucleotide
  Sense strand starting at position 566 of SEQ ID NO: 1564217
uugauaaagugcuuugaac

SEQ ID NO: 1863374 - RNA, 19 nt, Artificial Sequence
  Description of Artificial Sequence: Synthetic oligonucleotide
  Antisense strand to SEQ ID NO: 1863373
guucaaagcacuuuaucaa

SEQ ID NO: 1863375 - RNA, 19 nt, Artificial Sequence
  Description of Artificial Sequence: Synthetic oligonucleotide
  Sense strand starting at position 568 of SEQ ID NO: 1564217
gauaaagugcuuugaacua

SEQ ID NO: 1863376 - RNA, 19 nt, Artificial Sequence
  Description of Artificial Sequence: Synthetic oligonucleotide
  Antisense strand to SEQ ID NO: 1863375
uaguucaaagcacuuuauc

SEQ ID NO: 1863377 - RNA, 19 nt, Artificial Sequence
  Description of Artificial Sequence: Synthetic oligonucleotide
  Sense strand starting at position 737 of SEQ ID NO: 1564217
gccauacaaucucuaugga

SEQ ID NO: 1863378 - RNA, 19 nt, Artificial Sequence
  Description of Artificial Sequence: Synthetic oligonucleotide
  Antisense strand to SEQ ID NO: 1863377
uccauagagauuguauggc

SEQ ID NO: 1863379 - RNA, 19 nt, Artificial Sequence
  Description of Artificial Sequence: Synthetic oligonucleotide
  Sense strand starting at position 810 of SEQ ID NO: 1564217
aauggauaggcaugaucuu

SEQ ID NO: 1863380 - RNA, 19 nt, Artificial Sequence
  Description of Artificial Sequence: Synthetic oligonucleotide
  Antisense strand to SEQ ID NO: 1863379
aagaucaugccuauccauu

SEQ ID NO: 1863381 - RNA, 19 nt, Artificial Sequence
  Description of Artificial Sequence: Synthetic oligonucleotide
  Sense strand starting at position 833 of SEQ ID NO: 1564217
ugguaacacuuguuuacaa

SEQ ID NO: 1863382 - RNA, 19 nt, Artificial Sequence
  Description of Artificial Sequence: Synthetic oligonucleotide
  Antisense strand to SEQ ID NO: 1863381
uuguaaacaaguguuacca

SEQ ID NO: 1863383 - RNA, 19 nt, Artificial Sequence
  Description of Artificial Sequence: Synthetic oligonucleotide
  Sense strand starting at position 834 of SEQ ID NO: 1564217
gguaacacuuguuuacaaa

SEQ ID NO: 1863384 - RNA, 19 nt, Artificial Sequence
  Description of Artificial Sequence: Synthetic oligonucleotide
  Antisense strand to SEQ ID NO: 1863383
uuuguaaacaaguguuacc

SEQ ID NO: 1863385 - RNA, 19 nt, Artificial Sequence
  Description of Artificial Sequence: Synthetic oligonucleotide
  Sense strand starting at position 908 of SEQ ID NO: 1564217
agggcugugcaacauauau

SEQ ID NO: 1863386 - RNA, 19 nt, Artificial Sequence
  Description of Artificial Sequence: Synthetic oligonucleotide
  Antisense strand to SEQ ID NO: 1863385
auauauguugcacagcccu

SEQ ID NO: 1863387 - RNA, 19 nt, Artificial Sequence
  Description of Artificial Sequence: Synthetic oligonucleotide
  Sense strand starting at position 1022 of SEQ ID NO: 1564217
guguauccagaauagucau

SEQ ID NO: 1863388 - RNA, 19 nt, Artificial Sequence
  Description of Artificial Sequence: Synthetic oligonucleotide
  Antisense strand to SEQ ID NO: 1863387
augacuauucuggauacac

SEQ ID NO: 1863389 - RNA, 19 nt, Artificial Sequence
  Description of Artificial Sequence: Synthetic oligonucleotide
  Sense strand starting at position 1162 of SEQ ID NO: 1564217
gugaucaagccuuauguaa

SEQ ID NO: 1863390 - RNA, 19 nt, Artificial Sequence
  Description of Artificial Sequence: Synthetic oligonucleotide
  Antisense strand to SEQ ID NO: 1863389
uuacauaaggcuugaucac

SEQ ID NO: 1863391 - RNA, 19 nt, Artificial Sequence
  Description of Artificial Sequence: Synthetic oligonucleotide
  Sense strand starting at position 1177 of SEQ ID NO: 1564217
guaacuaauggcuaucauu

SEQ ID NO: 1863392 - RNA, 19 nt, Artificial Sequence
  Description of Artificial Sequence: Synthetic oligonucleotide
  Antisense strand to SEQ ID NO: 1863391
aaugauagccauuaguuac

SEQ ID NO: 1863393 - RNA, 19 nt, Artificial Sequence
  Description of Artificial Sequence: Synthetic oligonucleotide
  Sense strand starting at position 1209 of SEQ ID NO: 1564217
gguucuagaacugaugcua

SEQ ID NO: 1863394 - RNA, 19 nt, Artificial Sequence
  Description of Artificial Sequence: Synthetic oligonucleotide
  Antisense strand to SEQ ID NO: 1863393
uagcaucaguucuagaacc

SEQ ID NO: 1863395 - RNA, 19 nt, Artificial Sequence
  Description of Artificial Sequence: Synthetic oligonucleotide
  Sense strand starting at position 1248 of SEQ ID NO: 1564217
ggugcauaccuauaccaaa

SEQ ID NO: 1863396 - RNA, 19 nt, Artificial Sequence
  Description of Artificial Sequence: Synthetic oligonucleotide
  Antisense strand to SEQ ID NO: 1863395
uuugguauagguaugcacc

SEQ ID NO: 1863397 - RNA, 19 nt, Artificial Sequence
  Description of Artificial Sequence: Synthetic oligonucleotide
  Sense strand starting at position 1290 of SEQ ID NO: 1564217
guaggcacgaaauauggua

SEQ ID NO: 1863398 - RNA, 19 nt, Artificial Sequence
  Description of Artificial Sequence: Synthetic oligonucleotide
  Antisense strand to SEQ ID NO: 1863397
uaccauauuucgugccuac

SEQ ID NO: 1863399 - RNA, 19 nt, Artificial Sequence
  Description of Artificial Sequence: Synthetic oligonucleotide
  Sense strand starting at position 1416 of SEQ ID NO: 1564217
uggaaacaauguuuccaga

SEQ ID NO: 1863400 - RNA, 19 nt, Artificial Sequence
  Description of Artificial Sequence: Synthetic oligonucleotide
  Antisense strand to SEQ ID NO: 1863399
ucuggaaacauuguuucca

SEQ ID NO: 1863401 - RNA, 19 nt, Artificial Sequence
  Description of Artificial Sequence: Synthetic oligonucleotide
  Sense strand starting at position 1427 of SEQ ID NO: 1564217
uuuccagaaguuuguaaca

SEQ ID NO: 1863402 - RNA, 19 nt, Artificial Sequence
  Description of Artificial Sequence: Synthetic oligonucleotide
  Antisense strand to SEQ ID NO: 1863401
uguuacaaacuucuggaaa

SEQ ID NO: 1863403 - RNA, 19 nt, Artificial Sequence
  Description of Artificial Sequence: Synthetic oligonucleotide
  Sense strand starting at position 1597 of SEQ ID NO: 1564217
gcgguguagcgguuacuga

SEQ ID NO: 1863404 - RNA, 19 nt, Artificial Sequence
  Description of Artificial Sequence: Synthetic oligonucleotide
  Antisense strand to SEQ ID NO: 1863403
ucaguaaccgcuacaccgc

SEQ ID NO: 1863405 - RNA, 19 nt, Artificial Sequence
  Description of Artificial Sequence: Synthetic oligonucleotide
  Sense strand starting at position 1763 of SEQ ID NO: 1564217
gcuaaucaucuugggauga

SEQ ID NO: 1863406 - RNA, 19 nt, Artificial Sequence
  Description of Artificial Sequence: Synthetic oligonucleotide
  Antisense strand to SEQ ID NO: 1863405
ucaucccaagaugauuagc

SEQ ID NO: 1863407 - RNA, 19 nt, Artificial Sequence
  Description of Artificial Sequence: Synthetic oligonucleotide
  Sense strand starting at position 2266 of SEQ ID NO: 1564217
guugauguacuuuacaacu

SEQ ID NO: 1863408 - RNA, 19 nt, Artificial Sequence
  Description of Artificial Sequence: Synthetic oligonucleotide
  Antisense strand to SEQ ID NO: 1863407
aguuguaaaguacaucaac

SEQ ID NO: 1863409 - RNA, 19 nt, Artificial Sequence
  Description of Artificial Sequence: Synthetic oligonucleotide
  Sense strand starting at position 2410 of SEQ ID NO: 1564217
caugcaucaguugauauga

SEQ ID NO: 1863410 - RNA, 19 nt, Artificial Sequence
  Description of Artificial Sequence: Synthetic oligonucleotide
  Antisense strand to SEQ ID NO: 1863409
ucauaucaacugaugcaug

SEQ ID NO: 1863411 - RNA, 19 nt, Artificial Sequence
  Description of Artificial Sequence: Synthetic oligonucleotide
  Sense strand starting at position 2520 of SEQ ID NO: 1564217
cacagugaugguugaacga

SEQ ID NO: 1863412 - RNA, 19 nt, Artificial Sequence
  Description of Artificial Sequence: Synthetic oligonucleotide
  Antisense strand to SEQ ID NO: 1863411
ucguucaaccaucacugug

SEQ ID NO: 1863413 - RNA, 19 nt, Artificial Sequence
  Description of Artificial Sequence: Synthetic oligonucleotide
  Sense strand starting at position 2704 of SEQ ID NO: 1564217
accagugacucauuaacug

SEQ ID NO: 1863414 - RNA, 19 nt, Artificial Sequence
  Description of Artificial Sequence: Synthetic oligonucleotide
  Antisense strand to SEQ ID NO: 1863413
caguuaaugagucacuggu

SEQ ID NO: 1863415 - RNA, 19 nt, Artificial Sequence
  Description of Artificial Sequence: Synthetic oligonucleotide
  Sense strand starting at position 2708 of SEQ ID NO: 1564217
gugacucauuaacugggau

SEQ ID NO: 1863416 - RNA, 19 nt, Artificial Sequence
  Description of Artificial Sequence: Synthetic oligonucleotide
  Antisense strand to SEQ ID NO: 1863415
aucccaguuaaugagucac

SEQ ID NO: 1863417 - RNA, 19 nt, Artificial Sequence
  Description of Artificial Sequence: Synthetic oligonucleotide
  Sense strand starting at position 2787 of SEQ ID NO: 1564217
gugauuacgaaggagucuu

SEQ ID NO: 1863418 - RNA, 19 nt, Artificial Sequence
  Description of Artificial Sequence: Synthetic oligonucleotide
  Antisense strand to SEQ ID NO: 1863417
aagacuccuucguaaucac

SEQ ID NO: 1863419 - RNA, 19 nt, Artificial Sequence
  Description of Artificial Sequence: Synthetic oligonucleotide
  Sense strand starting at position 2816 of SEQ ID NO: 1564217
ugauccaucuggucaaaga

SEQ ID NO: 1863420 - RNA, 19 nt, Artificial Sequence
  Description of Artificial Sequence: Synthetic oligonucleotide
  Antisense strand to SEQ ID NO: 1863419
ucuuugaccagauggauca

SEQ ID NO: 1863421 - RNA, 19 nt, Artificial Sequence
  Description of Artificial Sequence: Synthetic oligonucleotide
  Sense strand starting at position 2865 of SEQ ID NO: 1564217
auuuauguuccacgcagca

SEQ ID NO: 1863422 - RNA, 19 nt, Artificial Sequence
  Description of Artificial Sequence: Synthetic oligonucleotide
  Antisense strand to SEQ ID NO: 1863421
ugcugcguggaacauaaau

SEQ ID NO: 1863423 - RNA, 19 nt, Artificial Sequence
  Description of Artificial Sequence: Synthetic oligonucleotide
  Sense strand starting at position 3541 of SEQ ID NO: 1564217
cugacaagauucuugcuga

SEQ ID NO: 1863424 - RNA, 19 nt, Artificial Sequence
  Description of Artificial Sequence: Synthetic oligonucleotide
  Antisense strand to SEQ ID NO: 1863423
ucagcaagaaucuugucag

SEQ ID NO: 1863425 - RNA, 19 nt, Artificial Sequence
  Description of Artificial Sequence: Synthetic oligonucleotide
  Sense strand starting at position 3576 of SEQ ID NO: 1564217
ucagaugucaccuggaggu

SEQ ID NO: 1863426 - RNA, 19 nt, Artificial Sequence
  Description of Artificial Sequence: Synthetic oligonucleotide
  Antisense strand to SEQ ID NO: 1863425
accuccaggugacaucuga

SEQ ID NO: 1863427 - RNA, 19 nt, Artificial Sequence
  Description of Artificial Sequence: Synthetic oligonucleotide
  Sense strand starting at position 3634 of SEQ ID NO: 1564217
ucagauauugagggugguu

SEQ ID NO: 1863428 - RNA, 19 nt, Artificial Sequence
  Description of Artificial Sequence: Synthetic oligonucleotide
  Antisense strand to SEQ ID NO: 1863427
aaccacccucaauaucuga

SEQ ID NO: 1863429 - RNA, 19 nt, Artificial Sequence
  Description of Artificial Sequence: Synthetic oligonucleotide
  Sense strand starting at position 3738 of SEQ ID NO: 1564217
gacuaaaguuugguuggaa

SEQ ID NO: 1863430 - RNA, 19 nt, Artificial Sequence
  Description of Artificial Sequence: Synthetic oligonucleotide
  Antisense strand to SEQ ID NO: 1863429
uuccaaccaaacuuuaguc

SEQ ID NO: 1863431 - RNA, 19 nt, Artificial Sequence
  Description of Artificial Sequence: Synthetic oligonucleotide
  Sense strand starting at position 3739 of SEQ ID NO: 1564217
acuaaaguuugguuggaaa

SEQ ID NO: 1863432 - RNA, 19 nt, Artificial Sequence
  Description of Artificial Sequence: Synthetic oligonucleotide
  Antisense strand to SEQ ID NO: 1863431
uuuccaaccaaacuuuagu

SEQ ID NO: 1863433 - RNA, 19 nt, Artificial Sequence
  Description of Artificial Sequence: Synthetic oligonucleotide
  Sense strand starting at position 3826 of SEQ ID NO: 1564217
gaguuuaugugagcaaaga

SEQ ID NO: 1863434 - RNA, 19 nt, Artificial Sequence
  Description of Artificial Sequence: Synthetic oligonucleotide
  Antisense strand to SEQ ID NO: 1863433
ucuuugcucacauaaacuc

SEQ ID NO: 1863435 - RNA, 19 nt, Artificial Sequence
  Description of Artificial Sequence: Synthetic oligonucleotide
  Sense strand starting at position 3827 of SEQ ID NO: 1564217
aguuuaugugagcaaagaa

SEQ ID NO: 1863436 - RNA, 19 nt, Artificial Sequence
  Description of Artificial Sequence: Synthetic oligonucleotide
  Antisense strand to SEQ ID NO: 1863435
uucuuugcucacauaaacu

SEQ ID NO: 1863437 - RNA, 19 nt, Artificial Sequence
  Description of Artificial Sequence: Synthetic oligonucleotide
  Sense strand starting at position 3850 of SEQ ID NO: 1564217
ucaugaaucggacagcacu

SEQ ID NO: 1863438 - RNA, 19 nt, Artificial Sequence
  Description of Artificial Sequence: Synthetic oligonucleotide
  Antisense strand to SEQ ID NO: 1863437
agugcuguccgauucauga

SEQ ID NO: 1863439 - RNA, 19 nt, Artificial Sequence
  Description of Artificial Sequence: Synthetic oligonucleotide
  Sense strand starting at position 3892 of SEQ ID NO: 1564217
gcuuugugggccgugagua

SEQ ID NO: 1863440 - RNA, 19 nt, Artificial Sequence
  Description of Artificial Sequence: Synthetic oligonucleotide
  Antisense strand to SEQ ID NO: 1863439
uacucacggcccacaaagc

SEQ ID NO: 1863441 - RNA, 19 nt, Artificial Sequence
  Description of Artificial Sequence: Synthetic oligonucleotide
  Sense strand starting at position 3969 of SEQ ID NO: 1564217
aucagaucauuuggauaug

SEQ ID NO: 1863442 - RNA, 19 nt, Artificial Sequence
  Description of Artificial Sequence: Synthetic oligonucleotide
  Antisense strand to SEQ ID NO: 1863441
cauauccaaaugaucugau

SEQ ID NO: 1863443 - RNA, 19 nt, Artificial Sequence
  Description of Artificial Sequence: Synthetic oligonucleotide
  Sense strand starting at position 3970 of SEQ ID NO: 1564217
ucagaucauuuggauauga

SEQ ID NO: 1863444 - RNA, 19 nt, Artificial Sequence
  Description of Artificial Sequence: Synthetic oligonucleotide
  Antisense strand to SEQ ID NO: 1863443
ucauauccaaaugaucuga

SEQ ID NO: 1863445 - RNA, 19 nt, Artificial Sequence
  Description of Artificial Sequence: Synthetic oligonucleotide
  Sense strand starting at position 27 of SEQ ID NO: 1564218
cacagucagcauuaagagu

SEQ ID NO: 1863446 - RNA, 19 nt, Artificial Sequence
  Description of Artificial Sequence: Synthetic oligonucleotide
  Antisense strand to SEQ ID NO: 1863445
acucuuaaugcugacugug

SEQ ID NO: 1863447 - RNA, 19 nt, Artificial Sequence
  Description of Artificial Sequence: Synthetic oligonucleotide
  Sense strand starting at position 124 of SEQ ID NO: 1564218
ugguaagaacuauguccua

SEQ ID NO: 1863448 - RNA, 19 nt, Artificial Sequence
  Description of Artificial Sequence: Synthetic oligonucleotide
  Antisense strand to SEQ ID NO: 1863447
uaggacauaguucuuacca

SEQ ID NO: 1863449 - RNA, 19 nt, Artificial Sequence
  Description of Artificial Sequence: Synthetic oligonucleotide
  Sense strand starting at position 300 of SEQ ID NO: 1564218
auaacuuggucagagagaa

SEQ ID NO: 1863450 - RNA, 19 nt, Artificial Sequence
  Description of Artificial Sequence: Synthetic oligonucleotide
  Antisense strand to SEQ ID NO: 1863449
uucucucugaccaaguuau

SEQ ID NO: 1863451 - RNA, 19 nt, Artificial Sequence
  Description of Artificial Sequence: Synthetic oligonucleotide
  Sense strand starting at position 541 of SEQ ID NO: 1564218
gagagauauuaugaaguau

SEQ ID NO: 1863452 - RNA, 19 nt, Artificial Sequence
  Description of Artificial Sequence: Synthetic oligonucleotide
  Antisense strand to SEQ ID NO: 1863451
auacuucauaauaucucuc

SEQ ID NO: 1863453 - RNA, 19 nt, Artificial Sequence
  Description of Artificial Sequence: Synthetic oligonucleotide
  Sense strand starting at position 552 of SEQ ID NO: 1564218
ugaaguaugaauugugcca

SEQ ID NO: 1863454 - RNA, 19 nt, Artificial Sequence
  Description of Artificial Sequence: Synthetic oligonucleotide
  Antisense strand to SEQ ID NO: 1863453
uggcacaauucauacuuca

SEQ ID NO: 1863455 - RNA, 19 nt, Artificial Sequence
  Description of Artificial Sequence: Synthetic oligonucleotide
  Sense strand starting at position 650 of SEQ ID NO: 1564218
uguucaagagguuggauca

SEQ ID NO: 1863456 - RNA, 19 nt, Artificial Sequence
  Description of Artificial Sequence: Synthetic oligonucleotide
  Antisense strand to SEQ ID NO: 1863455
ugauccaaccucuugaaca

SEQ ID NO: 1863457 - RNA, 19 nt, Artificial Sequence
  Description of Artificial Sequence: Synthetic oligonucleotide
  Sense strand starting at position 651 of SEQ ID NO: 1564218
guucaagagguuggaucaa

SEQ ID NO: 1863458 - RNA, 19 nt, Artificial Sequence
  Description of Artificial Sequence: Synthetic oligonucleotide
  Antisense strand to SEQ ID NO: 1863457
uugauccaaccucuugaac

SEQ ID NO: 1863459 - RNA, 19 nt, Artificial Sequence
  Description of Artificial Sequence: Synthetic oligonucleotide
  Sense strand starting at position 679 of SEQ ID NO: 1564218
ucuggagaggucugcagau

SEQ ID NO: 1863460 - RNA, 19 nt, Artificial Sequence
  Description of Artificial Sequence: Synthetic oligonucleotide
  Antisense strand to SEQ ID NO: 1863459
aucugcagaccucuccaga

SEQ ID NO: 1863461 - RNA, 19 nt, Artificial Sequence
  Description of Artificial Sequence: Synthetic oligonucleotide
  Sense strand starting at position 681 of SEQ ID NO: 1564218
uggagaggucugcagauua

SEQ ID NO: 1863462 - RNA, 19 nt, Artificial Sequence
  Description of Artificial Sequence: Synthetic oligonucleotide
  Antisense strand to SEQ ID NO: 1863461
uaaucugcagaccucucca

SEQ ID NO: 1863463 - RNA, 19 nt, Artificial Sequence
  Description of Artificial Sequence: Synthetic oligonucleotide
  Sense strand starting at position 937 of SEQ ID NO: 1564218
acagauaauuuggaucacu

SEQ ID NO: 1863464 - RNA, 19 nt, Artificial Sequence
  Description of Artificial Sequence: Synthetic oligonucleotide
  Antisense strand to SEQ ID NO: 1863463
agugauccaaauuaucugu

SEQ ID NO: 1863465 - RNA, 19 nt, Artificial Sequence
  Description of Artificial Sequence: Synthetic oligonucleotide
  Sense strand starting at position 957 of SEQ ID NO: 1564218
cgaucuguccuagaucuac

SEQ ID NO: 1863466 - RNA, 19 nt, Artificial Sequence
  Description of Artificial Sequence: Synthetic oligonucleotide
  Antisense strand to SEQ ID NO: 1863465
guagaucuaggacagaucg

SEQ ID NO: 1863467 - RNA, 19 nt, Artificial Sequence
  Description of Artificial Sequence: Synthetic oligonucleotide
  Sense strand starting at position 1046 of SEQ ID NO: 1564218
ucucgacuguugucaaaca

SEQ ID NO: 1863468 - RNA, 19 nt, Artificial Sequence
  Description of Artificial Sequence: Synthetic oligonucleotide
  Antisense strand to SEQ ID NO: 1863467
uguuugacaacagucgaga

SEQ ID NO: 1863469 - RNA, 19 nt, Artificial Sequence
  Description of Artificial Sequence: Synthetic oligonucleotide
  Sense strand starting at position 1133 of SEQ ID NO: 1564218
gccuaaguccugcauguaa

SEQ ID NO: 1863470 - RNA, 19 nt, Artificial Sequence
  Description of Artificial Sequence: Synthetic oligonucleotide
  Antisense strand to SEQ ID NO: 1863469
uuacaugcaggacuuaggc

SEQ ID NO: 1863471 - RNA, 19 nt, Artificial Sequence
  Description of Artificial Sequence: Synthetic oligonucleotide
  Sense strand starting at position 1278 of SEQ ID NO: 1564218
ugucuauuccuuuagccua

SEQ ID NO: 1863472 - RNA, 19 nt, Artificial Sequence
  Description of Artificial Sequence: Synthetic oligonucleotide
  Antisense strand to SEQ ID NO: 1863471
uaggcuaaaggaauagaca

SEQ ID NO: 1863473 - RNA, 19 nt, Artificial Sequence
  Description of Artificial Sequence: Synthetic oligonucleotide
  Sense strand starting at position 1293 of SEQ ID NO: 1564218
ccuaauugcuguccauaga

SEQ ID NO: 1863474 - RNA, 19 nt, Artificial Sequence
  Description of Artificial Sequence: Synthetic oligonucleotide
  Antisense strand to SEQ ID NO: 1863473
ucuauggacagcaauuagg

SEQ ID NO: 1863475 - RNA, 19 nt, Artificial Sequence
  Description of Artificial Sequence: Synthetic oligonucleotide
  Sense strand starting at position 1294 of SEQ ID NO: 1564218
cuaauugcuguccauagaa

SEQ ID NO: 1863476 - RNA, 19 nt, Artificial Sequence
  Description of Artificial Sequence: Synthetic oligonucleotide
  Antisense strand to SEQ ID NO: 1863475
uucuauggacagcaauuag

SEQ ID NO: 1863477 - RNA, 19 nt, Artificial Sequence
  Description of Artificial Sequence: Synthetic oligonucleotide
  Sense strand starting at position 1296 of SEQ ID NO: 1564218
aauugcuguccauagaagu

SEQ ID NO: 1863478 - RNA, 19 nt, Artificial Sequence
  Description of Artificial Sequence: Synthetic oligonucleotide
  Antisense strand to SEQ ID NO: 1863477
acuucuauggacagcaauu

SEQ ID NO: 1863479 - RNA, 19 nt, Artificial Sequence
  Description of Artificial Sequence: Synthetic oligonucleotide
  Sense strand starting at position 1463 of SEQ ID NO: 1564218
ucuugauguuaucuggaau

SEQ ID NO: 1863480 - RNA, 19 nt, Artificial Sequence
  Description of Artificial Sequence: Synthetic oligonucleotide
  Antisense strand to SEQ ID NO: 1863479
auuccagauaacaucaaga

SEQ ID NO: 1863481 - RNA, 19 nt, Artificial Sequence
  Description of Artificial Sequence: Synthetic oligonucleotide
  Sense strand starting at position 1495 of SEQ ID NO: 1564218
agaggcaagcuguguaaga

SEQ ID NO: 1863482 - RNA, 19 nt, Artificial Sequence
  Description of Artificial Sequence: Synthetic oligonucleotide
  Antisense strand to SEQ ID NO: 1863481
ucuuacacagcuugccucu

SEQ ID NO: 1863483 - RNA, 19 nt, Artificial Sequence
  Description of Artificial Sequence: Synthetic oligonucleotide
  Sense strand starting at position 1564 of SEQ ID NO: 1564218
guguguccuggugacugaa

SEQ ID NO: 1863484 - RNA, 19 nt, Artificial Sequence
  Description of Artificial Sequence: Synthetic oligonucleotide
  Antisense strand to SEQ ID NO: 1863483
uucagucaccaggacacac

SEQ ID NO: 1863485 - RNA, 19 nt, Artificial Sequence
  Description of Artificial Sequence: Synthetic oligonucleotide
  Sense strand starting at position 1682 of SEQ ID NO: 1564218
uggcacuuccuuuacugaa

SEQ ID NO: 1863486 - RNA, 19 nt, Artificial Sequence
  Description of Artificial Sequence: Synthetic oligonucleotide
  Antisense strand to SEQ ID NO: 1863485
uucaguaaaggaagugcca

SEQ ID NO: 1863487 - RNA, 19 nt, Artificial Sequence
  Description of Artificial Sequence: Synthetic oligonucleotide
  Sense strand starting at position 1701 of SEQ ID NO: 1564218
aucaaagaagucuggucuu

SEQ ID NO: 1863488 - RNA, 19 nt, Artificial Sequence
  Description of Artificial Sequence: Synthetic oligonucleotide
  Antisense strand to SEQ ID NO: 1863487
aagaccagacuucuuugau

SEQ ID NO: 1863489 - RNA, 19 nt, Artificial Sequence
  Description of Artificial Sequence: Synthetic oligonucleotide
  Sense strand starting at position 1756 of SEQ ID NO: 1564218
acaauuaacucgccagaag

SEQ ID NO: 1863490 - RNA, 19 nt, Artificial Sequence
  Description of Artificial Sequence: Synthetic oligonucleotide
  Antisense strand to SEQ ID NO: 1863489
cuucuggcgaguuaauugu

SEQ ID NO: 1863491 - RNA, 19 nt, Artificial Sequence
  Description of Artificial Sequence: Synthetic oligonucleotide
  Sense strand starting at position 2026 of SEQ ID NO: 1564218
caaccuggucugggaagua

SEQ ID NO: 1863492 - RNA, 19 nt, Artificial Sequence
  Description of Artificial Sequence: Synthetic oligonucleotide
  Antisense strand to SEQ ID NO: 1863491
uacuucccagaccagguug

SEQ ID NO: 1863493 - RNA, 19 nt, Artificial Sequence
  Description of Artificial Sequence: Synthetic oligonucleotide
  Sense strand starting at position 2042 of SEQ ID NO: 1564218
guaccauuguagccaggaa

SEQ ID NO: 1863494 - RNA, 19 nt, Artificial Sequence
  Description of Artificial Sequence: Synthetic oligonucleotide
  Antisense strand to SEQ ID NO: 1863493
uuccuggcuacaaugguac

SEQ ID NO: 1863495 - RNA, 19 nt, Artificial Sequence
  Description of Artificial Sequence: Synthetic oligonucleotide
  Sense strand starting at position 2066 of SEQ ID NO: 1564218
gggagaucaucagggagga

SEQ ID NO: 1863496 - RNA, 19 nt, Artificial Sequence
  Description of Artificial Sequence: Synthetic oligonucleotide
  Antisense strand to SEQ ID NO: 1863495
uccucccugaugaucuccc

SEQ ID NO: 1863497 - RNA, 19 nt, Artificial Sequence
  Description of Artificial Sequence: Synthetic oligonucleotide
  Sense strand starting at position 2259 of SEQ ID NO: 1564218
cucaccauugggugacaaa

SEQ ID NO: 1863498 - RNA, 19 nt, Artificial Sequence
  Description of Artificial Sequence: Synthetic oligonucleotide
  Antisense strand to SEQ ID NO: 1863497
uuugucacccaauggugag

SEQ ID NO: 1863499 - RNA, 19 nt, Artificial Sequence
  Description of Artificial Sequence: Synthetic oligonucleotide
  Sense strand starting at position 2466 of SEQ ID NO: 1564218
aagcguuuguuguuuauuu

SEQ ID NO: 1863500 - RNA, 19 nt, Artificial Sequence
  Description of Artificial Sequence: Synthetic oligonucleotide
  Antisense strand to SEQ ID NO: 1863499
aaauaaacaacaaacgcuu

SEQ ID NO: 1863501 - RNA, 19 nt, Artificial Sequence
  Description of Artificial Sequence: Synthetic oligonucleotide
  Sense strand starting at position 2679 of SEQ ID NO: 1564218
cacagaagcugugugguaa

SEQ ID NO: 1863502 - RNA, 19 nt, Artificial Sequence
  Description of Artificial Sequence: Synthetic oligonucleotide
  Antisense strand to SEQ ID NO: 1863501
uuaccacacagcuucugug

SEQ ID NO: 1863503 - RNA, 19 nt, Artificial Sequence
  Description of Artificial Sequence: Synthetic oligonucleotide
  Sense strand starting at position 2680 of SEQ ID NO: 1564218
acagaagcugugugguaaa

SEQ ID NO: 1863504 - RNA, 19 nt, Artificial Sequence
  Description of Artificial Sequence: Synthetic oligonucleotide
  Antisense strand to SEQ ID NO: 1863503
uuuaccacacagcuucugu

SEQ ID NO: 1863505 - RNA, 19 nt, Artificial Sequence
  Description of Artificial Sequence: Synthetic oligonucleotide
  Sense strand starting at position 2798 of SEQ ID NO: 1564218
uggagcucaucuguaaacu

SEQ ID NO: 1863506 - RNA, 19 nt, Artificial Sequence
  Description of Artificial Sequence: Synthetic oligonucleotide
  Antisense strand to SEQ ID NO: 1863505
aguuuacagaugagcucca

SEQ ID NO: 1863507 - RNA, 19 nt, Artificial Sequence
  Description of Artificial Sequence: Synthetic oligonucleotide
  Sense strand starting at position 2799 of SEQ ID NO: 1564218
ggagcucaucuguaaacug

SEQ ID NO: 1863508 - RNA, 19 nt, Artificial Sequence
  Description of Artificial Sequence: Synthetic oligonucleotide
  Antisense strand to SEQ ID NO: 1863507
caguuuacagaugagcucc

SEQ ID NO: 1863509 - RNA, 19 nt, Artificial Sequence
  Description of Artificial Sequence: Synthetic oligonucleotide
  Sense strand starting at position 2897 of SEQ ID NO: 1564218
cagucaccacagugauaug

SEQ ID NO: 1863510 - RNA, 19 nt, Artificial Sequence
  Description of Artificial Sequence: Synthetic oligonucleotide
  Antisense strand to SEQ ID NO: 1863509
cauaucacuguggugacug

SEQ ID NO: 1863511 - RNA, 19 nt, Artificial Sequence
  Description of Artificial Sequence: Synthetic oligonucleotide
  Sense strand starting at position 3082 of SEQ ID NO: 1564218
aacaguaccgugugaauau

SEQ ID NO: 1863512 - RNA, 19 nt, Artificial Sequence
  Description of Artificial Sequence: Synthetic oligonucleotide
  Antisense strand to SEQ ID NO: 1863511
auauucacacgguacuguu

SEQ ID NO: 1863513 - RNA, 19 nt, Artificial Sequence
  Description of Artificial Sequence: Synthetic oligonucleotide
  Sense strand starting at position 3230 of SEQ ID NO: 1564218
cgcuuagcuaaagaguuua

SEQ ID NO: 1863514 - RNA, 19 nt, Artificial Sequence
  Description of Artificial Sequence: Synthetic oligonucleotide
  Antisense strand to SEQ ID NO: 1863513
uaaacucuuuagcuaagcg

SEQ ID NO: 1863515 - RNA, 19 nt, Artificial Sequence
  Description of Artificial Sequence: Synthetic oligonucleotide
  Sense strand starting at position 3305 of SEQ ID NO: 1564218
ucaguaauaucagcuguga

SEQ ID NO: 1863516 - RNA, 19 nt, Artificial Sequence
  Description of Artificial Sequence: Synthetic oligonucleotide
  Antisense strand to SEQ ID NO: 1863515
ucacagcugauauuacuga

SEQ ID NO: 1863517 - RNA, 19 nt, Artificial Sequence
  Description of Artificial Sequence: Synthetic oligonucleotide
  Sense strand starting at position 3541 of SEQ ID NO: 1564218
aacucuacgcagugauaac

SEQ ID NO: 1863518 - RNA, 19 nt, Artificial Sequence
  Description of Artificial Sequence: Synthetic oligonucleotide
  Antisense strand to SEQ ID NO: 1863517
guuaucacugcguagaguu

SEQ ID NO: 1863519 - RNA, 19 nt, Artificial Sequence
  Description of Artificial Sequence: Synthetic oligonucleotide
  Sense strand starting at position 3745 of SEQ ID NO: 1564218
acguauuaucaagaguugu

SEQ ID NO: 1863520 - RNA, 19 nt, Artificial Sequence
  Description of Artificial Sequence: Synthetic oligonucleotide
  Antisense strand to SEQ ID NO: 1863519
acaacucuugauaauacgu

SEQ ID NO: 1863521 - RNA, 19 nt, Artificial Sequence
  Description of Artificial Sequence: Synthetic oligonucleotide
  Sense strand starting at position 3751 of SEQ ID NO: 1564218
uaucaagaguugucaagaa

SEQ ID NO: 1863522 - RNA, 19 nt, Artificial Sequence
  Description of Artificial Sequence: Synthetic oligonucleotide
  Antisense strand to SEQ ID NO: 1863521
uucuugacaacucuugaua

SEQ ID NO: 1863523 - RNA, 19 nt, Artificial Sequence
  Description of Artificial Sequence: Synthetic oligonucleotide
  Sense strand starting at position 3958 of SEQ ID NO: 1564218
cagagacagucagucuuaa

SEQ ID NO: 1863524 - RNA, 19 nt, Artificial Sequence
  Description of Artificial Sequence: Synthetic oligonucleotide
  Antisense strand to SEQ ID NO: 1863523
uuaagacugacugucucug

SEQ ID NO: 1863525 - RNA, 19 nt, Artificial Sequence
  Description of Artificial Sequence: Synthetic oligonucleotide
  Sense strand starting at position 26 of SEQ ID NO: 1564219
cacagucagcauuaagagu

SEQ ID NO: 1863526 - RNA, 19 nt, Artificial Sequence
  Description of Artificial Sequence: Synthetic oligonucleotide
  Antisense strand to SEQ ID NO: 1863525
acucuuaaugcugacugug

SEQ ID NO: 1863527 - RNA, 19 nt, Artificial Sequence
  Description of Artificial Sequence: Synthetic oligonucleotide
  Sense strand starting at position 123 of SEQ ID NO: 1564219
ugguaagaacuauguccua

SEQ ID NO: 1863528 - RNA, 19 nt, Artificial Sequence
  Description of Artificial Sequence: Synthetic oligonucleotide
  Antisense strand to SEQ ID NO: 1863527
uaggacauaguucuuacca

SEQ ID NO: 1863529 - RNA, 19 nt, Artificial Sequence
  Description of Artificial Sequence: Synthetic oligonucleotide
  Sense strand starting at position 159 of SEQ ID NO: 1564219
gggaaccaguguucuaaau

SEQ ID NO: 1863530 - RNA, 19 nt, Artificial Sequence
  Description of Artificial Sequence: Synthetic oligonucleotide
  Antisense strand to SEQ ID NO: 1863529
auuuagaacacugguuccc

SEQ ID NO: 1863531 - RNA, 19 nt, Artificial Sequence
  Description of Artificial Sequence: Synthetic oligonucleotide
  Sense strand starting at position 530 of SEQ ID NO: 1564219
ucauuucuuugagagauau

SEQ ID NO: 1863532 - RNA, 19 nt, Artificial Sequence
  Description of Artificial Sequence: Synthetic oligonucleotide
  Antisense strand to SEQ ID NO: 1863531
auaucucucaaagaaauga

SEQ ID NO: 1863533 - RNA, 19 nt, Artificial Sequence
  Description of Artificial Sequence: Synthetic oligonucleotide
  Sense strand starting at position 551 of SEQ ID NO: 1564219
ugaaguaugaauugugcca

SEQ ID NO: 1863534 - RNA, 19 nt, Artificial Sequence
  Description of Artificial Sequence: Synthetic oligonucleotide
  Antisense strand to SEQ ID NO: 1863533
uggcacaauucauacuuca

SEQ ID NO: 1863535 - RNA, 19 nt, Artificial Sequence
  Description of Artificial Sequence: Synthetic oligonucleotide
  Sense strand starting at position 649 of SEQ ID NO: 1564219
uguucaagagguuggauca

SEQ ID NO: 1863536 - RNA, 19 nt, Artificial Sequence
  Description of Artificial Sequence: Synthetic oligonucleotide
  Antisense strand to SEQ ID NO: 1863535
ugauccaaccucuugaaca

SEQ ID NO: 1863537 - RNA, 19 nt, Artificial Sequence
  Description of Artificial Sequence: Synthetic oligonucleotide
  Sense strand starting at position 650 of SEQ ID NO: 1564219
guucaagagguuggaucaa

SEQ ID NO: 1863538 - RNA, 19 nt, Artificial Sequence
  Description of Artificial Sequence: Synthetic oligonucleotide
  Antisense strand to SEQ ID NO: 1863537
uugauccaaccucuugaac

SEQ ID NO: 1863539 - RNA, 19 nt, Artificial Sequence
  Description of Artificial Sequence: Synthetic oligonucleotide
  Sense strand starting at position 678 of SEQ ID NO: 1564219
ucuggagaggucugcagau

SEQ ID NO: 1863540 - RNA, 19 nt, Artificial Sequence
  Description of Artificial Sequence: Synthetic oligonucleotide
  Antisense strand to SEQ ID NO: 1863539
aucugcagaccucuccaga

SEQ ID NO: 1863541 - RNA, 19 nt, Artificial Sequence
  Description of Artificial Sequence: Synthetic oligonucleotide
  Sense strand starting at position 680 of SEQ ID NO: 1564219
uggagaggucugcagauua

SEQ ID NO: 1863542 - RNA, 19 nt, Artificial Sequence
  Description of Artificial Sequence: Synthetic oligonucleotide
  Antisense strand to SEQ ID NO: 1863541
uaaucugcagaccucucca

SEQ ID NO: 1863543 - RNA, 19 nt, Artificial Sequence
  Description of Artificial Sequence: Synthetic oligonucleotide
  Sense strand starting at position 936 of SEQ ID NO: 1564219
acagauaauuuggaucacu

SEQ ID NO: 1863544 - RNA, 19 nt, Artificial Sequence
  Description of Artificial Sequence: Synthetic oligonucleotide
  Antisense strand to SEQ ID NO: 1863543
agugauccaaauuaucugu

SEQ ID NO: 1863545 - RNA, 19 nt, Artificial Sequence
  Description of Artificial Sequence: Synthetic oligonucleotide
  Sense strand starting at position 956 of SEQ ID NO: 1564219
cgaucuguccuagaucuac

SEQ ID NO: 1863546 - RNA, 19 nt, Artificial Sequence
  Description of Artificial Sequence: Synthetic oligonucleotide
  Antisense strand to SEQ ID NO: 1863545
guagaucuaggacagaucg

SEQ ID NO: 1863547 - RNA, 19 nt, Artificial Sequence
  Description of Artificial Sequence: Synthetic oligonucleotide
  Sense strand starting at position 1277 of SEQ ID NO: 1564219
ugucuauuccuuuagccua

SEQ ID NO: 1863548 - RNA, 19 nt, Artificial Sequence
  Description of Artificial Sequence: Synthetic oligonucleotide
  Antisense strand to SEQ ID NO: 1863547
uaggcuaaaggaauagaca

SEQ ID NO: 1863549 - RNA, 19 nt, Artificial Sequence
  Description of Artificial Sequence: Synthetic oligonucleotide
  Sense strand starting at position 1292 of SEQ ID NO: 1564219
ccuaauugcuguccauaga

SEQ ID NO: 1863550 - RNA, 19 nt, Artificial Sequence
  Description of Artificial Sequence: Synthetic oligonucleotide
  Antisense strand to SEQ ID NO: 1863549
ucuauggacagcaauuagg

SEQ ID NO: 1863551 - RNA, 19 nt, Artificial Sequence
  Description of Artificial Sequence: Synthetic oligonucleotide
  Sense strand starting at position 1293 of SEQ ID NO: 1564219
cuaauugcuguccauagaa

SEQ ID NO: 1863552 - RNA, 19 nt, Artificial Sequence
  Description of Artificial Sequence: Synthetic oligonucleotide
  Antisense strand to SEQ ID NO: 1863551
uucuauggacagcaauuag

SEQ ID NO: 1863553 - RNA, 19 nt, Artificial Sequence
  Description of Artificial Sequence: Synthetic oligonucleotide
  Sense strand starting at position 1295 of SEQ ID NO: 1564219
aauugcuguccauagaagu

SEQ ID NO: 1863554 - RNA, 19 nt, Artificial Sequence
  Description of Artificial Sequence: Synthetic oligonucleotide
  Antisense strand to SEQ ID NO: 1863553
acuucuauggacagcaauu

SEQ ID NO: 1863555 - RNA, 19 nt, Artificial Sequence
  Description of Artificial Sequence: Synthetic oligonucleotide
  Sense strand starting at position 1335 of SEQ ID NO: 1564219
ccaggagacuggucaucua

SEQ ID NO: 1863556 - RNA, 19 nt, Artificial Sequence
  Description of Artificial Sequence: Synthetic oligonucleotide
  Antisense strand to SEQ ID NO: 1863555
uagaugaccagucuccugg

SEQ ID NO: 1863557 - RNA, 19 nt, Artificial Sequence
  Description of Artificial Sequence: Synthetic oligonucleotide
  Sense strand starting at position 1338 of SEQ ID NO: 1564219
ggagacuggucaucuaaac

SEQ ID NO: 1863558 - RNA, 19 nt, Artificial Sequence
  Description of Artificial Sequence: Synthetic oligonucleotide
  Antisense strand to SEQ ID NO: 1863557
guuuagaugaccagucucc

SEQ ID NO: 1863559 - RNA, 19 nt, Artificial Sequence
  Description of Artificial Sequence: Synthetic oligonucleotide
  Sense strand starting at position 1462 of SEQ ID NO: 1564219
ucuugauguuaucuggaau

SEQ ID NO: 1863560 - RNA, 19 nt, Artificial Sequence
  Description of Artificial Sequence: Synthetic oligonucleotide
  Antisense strand to SEQ ID NO: 1863559
auuccagauaacaucaaga

SEQ ID NO: 1863561 - RNA, 19 nt, Artificial Sequence
  Description of Artificial Sequence: Synthetic oligonucleotide
  Sense strand starting at position 1494 of SEQ ID NO: 1564219
agaggcaagcuguguaaga

SEQ ID NO: 1863562 - RNA, 19 nt, Artificial Sequence
  Description of Artificial Sequence: Synthetic oligonucleotide
  Antisense strand to SEQ ID NO: 1863561
ucuuacacagcuugccucu

SEQ ID NO: 1863563 - RNA, 19 nt, Artificial Sequence
  Description of Artificial Sequence: Synthetic oligonucleotide
  Sense strand starting at position 1563 of SEQ ID NO: 1564219
guguguccuggugacugaa

SEQ ID NO: 1863564 - RNA, 19 nt, Artificial Sequence
  Description of Artificial Sequence: Synthetic oligonucleotide
  Antisense strand to SEQ ID NO: 1863563
uucagucaccaggacacac

SEQ ID NO: 1863565 - RNA, 19 nt, Artificial Sequence
  Description of Artificial Sequence: Synthetic oligonucleotide
  Sense strand starting at position 1681 of SEQ ID NO: 1564219
uggcacuuccuuuacugaa

SEQ ID NO: 1863566 - RNA, 19 nt, Artificial Sequence
  Description of Artificial Sequence: Synthetic oligonucleotide
  Antisense strand to SEQ ID NO: 1863565
uucaguaaaggaagugcca

SEQ ID NO: 1863567 - RNA, 19 nt, Artificial Sequence
  Description of Artificial Sequence: Synthetic oligonucleotide
  Sense strand starting at position 1700 of SEQ ID NO: 1564219
aucaaagaagucuggucuu

SEQ ID NO: 1863568 - RNA, 19 nt, Artificial Sequence
  Description of Artificial Sequence: Synthetic oligonucleotide
  Antisense strand to SEQ ID NO: 1863567
aagaccagacuucuuugau

SEQ ID NO: 1863569 - RNA, 19 nt, Artificial Sequence
  Description of Artificial Sequence: Synthetic oligonucleotide
  Sense strand starting at position 1755 of SEQ ID NO: 1564219
acaauuaacucgccagaag

SEQ ID NO: 1863570 - RNA, 19 nt, Artificial Sequence
  Description of Artificial Sequence: Synthetic oligonucleotide
  Antisense strand to SEQ ID NO: 1863569
cuucuggcgaguuaauugu

SEQ ID NO: 1863571 - RNA, 19 nt, Artificial Sequence
  Description of Artificial Sequence: Synthetic oligonucleotide
  Sense strand starting at position 2025 of SEQ ID NO: 1564219
caaccuggucugggaagua

SEQ ID NO: 1863572 - RNA, 19 nt, Artificial Sequence
  Description of Artificial Sequence: Synthetic oligonucleotide
  Antisense strand to SEQ ID NO: 1863571
uacuucccagaccagguug

SEQ ID NO: 1863573 - RNA, 19 nt, Artificial Sequence
  Description of Artificial Sequence: Synthetic oligonucleotide
  Sense strand starting at position 2041 of SEQ ID NO: 1564219
guaccauuguagccaggaa

SEQ ID NO: 1863574 - RNA, 19 nt, Artificial Sequence
  Description of Artificial Sequence: Synthetic oligonucleotide
  Antisense strand to SEQ ID NO: 1863573
uuccuggcuacaaugguac

SEQ ID NO: 1863575 - RNA, 19 nt, Artificial Sequence
  Description of Artificial Sequence: Synthetic oligonucleotide
  Sense strand starting at position 2258 of SEQ ID NO: 1564219
cucaccauugggugacaaa

SEQ ID NO: 1863576 - RNA, 19 nt, Artificial Sequence
  Description of Artificial Sequence: Synthetic oligonucleotide
  Antisense strand to SEQ ID NO: 1863575
uuugucacccaauggugag

SEQ ID NO: 1863577 - RNA, 19 nt, Artificial Sequence
  Description of Artificial Sequence: Synthetic oligonucleotide
  Sense strand starting at position 2465 of SEQ ID NO: 1564219
aagcguuuguuguuuauuu

SEQ ID NO: 1863578 - RNA, 19 nt, Artificial Sequence
  Description of Artificial Sequence: Synthetic oligonucleotide
  Antisense strand to SEQ ID NO: 1863577
aaauaaacaacaaacgcuu

SEQ ID NO: 1863579 - RNA, 19 nt, Artificial Sequence
  Description of Artificial Sequence: Synthetic oligonucleotide
  Sense strand starting at position 2678 of SEQ ID NO: 1564219
cacagaagcugugugguaa

SEQ ID NO: 1863580 - RNA, 19 nt, Artificial Sequence
  Description of Artificial Sequence: Synthetic oligonucleotide
  Antisense strand to SEQ ID NO: 1863579
uuaccacacagcuucugug

SEQ ID NO: 1863581 - RNA, 19 nt, Artificial Sequence
  Description of Artificial Sequence: Synthetic oligonucleotide
  Sense strand starting at position 2679 of SEQ ID NO: 1564219
acagaagcugugugguaaa

SEQ ID NO: 1863582 - RNA, 19 nt, Artificial Sequence
  Description of Artificial Sequence: Synthetic oligonucleotide
  Antisense strand to SEQ ID NO: 1863581
uuuaccacacagcuucugu

SEQ ID NO: 1863583 - RNA, 19 nt, Artificial Sequence
  Description of Artificial Sequence: Synthetic oligonucleotide
  Sense strand starting at position 2797 of SEQ ID NO: 1564219
uggagcucaucuguaaacu

SEQ ID NO: 1863584 - RNA, 19 nt, Artificial Sequence
  Description of Artificial Sequence: Synthetic oligonucleotide
  Antisense strand to SEQ ID NO: 1863583
aguuuacagaugagcucca

SEQ ID NO: 1863585 - RNA, 19 nt, Artificial Sequence
  Description of Artificial Sequence: Synthetic oligonucleotide
  Sense strand starting at position 2798 of SEQ ID NO: 1564219
ggagcucaucuguaaacug

SEQ ID NO: 1863586 - RNA, 19 nt, Artificial Sequence
  Description of Artificial Sequence: Synthetic oligonucleotide
  Antisense strand to SEQ ID NO: 1863585
caguuuacagaugagcucc

SEQ ID NO: 1863587 - RNA, 19 nt, Artificial Sequence
  Description of Artificial Sequence: Synthetic oligonucleotide
  Sense strand starting at position 2896 of SEQ ID NO: 1564219
cagucaccacagugauaug

SEQ ID NO: 1863588 - RNA, 19 nt, Artificial Sequence
  Description of Artificial Sequence: Synthetic oligonucleotide
  Antisense strand to SEQ ID NO: 1863587
cauaucacuguggugacug

SEQ ID NO: 1863589 - RNA, 19 nt, Artificial Sequence
  Description of Artificial Sequence: Synthetic oligonucleotide
  Sense strand starting at position 3081 of SEQ ID NO: 1564219
aacaguaccgugugaauau

SEQ ID NO: 1863590 - RNA, 19 nt, Artificial Sequence
  Description of Artificial Sequence: Synthetic oligonucleotide
  Antisense strand to SEQ ID NO: 1863589
auauucacacgguacuguu

SEQ ID NO: 1863591 - RNA, 19 nt, Artificial Sequence
  Description of Artificial Sequence: Synthetic oligonucleotide
  Sense strand starting at position 3229 of SEQ ID NO: 1564219
cgcuuagcuaaagaguuua

SEQ ID NO: 1863592 - RNA, 19 nt, Artificial Sequence
  Description of Artificial Sequence: Synthetic oligonucleotide
  Antisense strand to SEQ ID NO: 1863591
uaaacucuuuagcuaagcg

SEQ ID NO: 1863593 - RNA, 19 nt, Artificial Sequence
  Description of Artificial Sequence: Synthetic oligonucleotide
  Sense strand starting at position 3304 of SEQ ID NO: 1564219
ucaguaauaucagcuguga

SEQ ID NO: 1863594 - RNA, 19 nt, Artificial Sequence
  Description of Artificial Sequence: Synthetic oligonucleotide
  Antisense strand to SEQ ID NO: 1863593
ucacagcugauauuacuga

SEQ ID NO: 1863595 - RNA, 19 nt, Artificial Sequence
  Description of Artificial Sequence: Synthetic oligonucleotide
  Sense strand starting at position 3540 of SEQ ID NO: 1564219
aacucuacgcagugauaac

SEQ ID NO: 1863596 - RNA, 19 nt, Artificial Sequence
  Description of Artificial Sequence: Synthetic oligonucleotide
  Antisense strand to SEQ ID NO: 1863595
guuaucacugcguagaguu

SEQ ID NO: 1863597 - RNA, 19 nt, Artificial Sequence
  Description of Artificial Sequence: Synthetic oligonucleotide
  Sense strand starting at position 3744 of SEQ ID NO: 1564219
acguauuaucaagaguugu

SEQ ID NO: 1863598 - RNA, 19 nt, Artificial Sequence
  Description of Artificial Sequence: Synthetic oligonucleotide
  Antisense strand to SEQ ID NO: 1863597
acaacucuugauaauacgu

SEQ ID NO: 1863599 - RNA, 19 nt, Artificial Sequence
  Description of Artificial Sequence: Synthetic oligonucleotide
  Sense strand starting at position 3750 of SEQ ID NO: 1564219
uaucaagaguugucaagaa

SEQ ID NO: 1863600 - RNA, 19 nt, Artificial Sequence
  Description of Artificial Sequence: Synthetic oligonucleotide
  Antisense strand to SEQ ID NO: 1863599
uucuugacaacucuugaua

SEQ ID NO: 1863601 - RNA, 19 nt, Artificial Sequence
  Description of Artificial Sequence: Synthetic oligonucleotide
  Sense strand starting at position 3793 of SEQ ID NO: 1564219
gguggaauagaaggcuaua

SEQ ID NO: 1863602 - RNA, 19 nt, Artificial Sequence
  Description of Artificial Sequence: Synthetic oligonucleotide
  Antisense strand to SEQ ID NO: 1863601
uauagccuucuauuccacc

SEQ ID NO: 1863603 - RNA, 19 nt, Artificial Sequence
  Description of Artificial Sequence: Synthetic oligonucleotide
  Sense strand starting at position 3957 of SEQ ID NO: 1564219
cagagacagucagucuuaa

SEQ ID NO: 1863604 - RNA, 19 nt, Artificial Sequence
  Description of Artificial Sequence: Synthetic oligonucleotide
  Antisense strand to SEQ ID NO: 1863603
uuaagacugacugucucug

SEQ ID NO: 1863605 - RNA, 19 nt, Artificial Sequence
  Description of Artificial Sequence: Synthetic oligonucleotide
  Sense strand starting at position 51 of SEQ ID NO: 1564220
aggugagaucccgguagac

SEQ ID NO: 1863606 - RNA, 19 nt, Artificial Sequence
  Description of Artificial Sequence: Synthetic oligonucleotide
  Antisense strand to SEQ ID NO: 1863605
gucuaccgggaucucaccu

SEQ ID NO: 1863607 - RNA, 19 nt, Artificial Sequence
  Description of Artificial Sequence: Synthetic oligonucleotide
  Sense strand starting at position 53 of SEQ ID NO: 1564220
gugagaucccgguagacca

SEQ ID NO: 1863608 - RNA, 19 nt, Artificial Sequence
  Description of Artificial Sequence: Synthetic oligonucleotide
  Antisense strand to SEQ ID NO: 1863607
uggucuaccgggaucucac

SEQ ID NO: 1863609 - RNA, 19 nt, Artificial Sequence
  Description of Artificial Sequence: Synthetic oligonucleotide
  Sense strand starting at position 158 of SEQ ID NO: 1564220
agagauuaacucugcugga

SEQ ID NO: 1863610 - RNA, 19 nt, Artificial Sequence
  Description of Artificial Sequence: Synthetic oligonucleotide
  Antisense strand to SEQ ID NO: 1863609
uccagcagaguuaaucucu

SEQ ID NO: 1863611 - RNA, 19 nt, Artificial Sequence
  Description of Artificial Sequence: Synthetic oligonucleotide
  Sense strand starting at position 159 of SEQ ID NO: 1564220
gagauuaacucugcuggau

SEQ ID NO: 1863612 - RNA, 19 nt, Artificial Sequence
  Description of Artificial Sequence: Synthetic oligonucleotide
  Antisense strand to SEQ ID NO: 1863611
auccagcagaguuaaucuc

SEQ ID NO: 1863613 - RNA, 19 nt, Artificial Sequence
  Description of Artificial Sequence: Synthetic oligonucleotide
  Sense strand starting at position 191 of SEQ ID NO: 1564220
agauauaguaaguaugugu

SEQ ID NO: 1863614 - RNA, 19 nt, Artificial Sequence
  Description of Artificial Sequence: Synthetic oligonucleotide
  Antisense strand to SEQ ID NO: 1863613
acacauacuuacuauaucu

SEQ ID NO: 1863615 - RNA, 19 nt, Artificial Sequence
  Description of Artificial Sequence: Synthetic oligonucleotide
  Sense strand starting at position 232 of SEQ ID NO: 1564220
uuaacagauguaggugaua

SEQ ID NO: 1863616 - RNA, 19 nt, Artificial Sequence
  Description of Artificial Sequence: Synthetic oligonucleotide
  Antisense strand to SEQ ID NO: 1863615
uaucaccuacaucuguuaa

SEQ ID NO: 1863617 - RNA, 19 nt, Artificial Sequence
  Description of Artificial Sequence: Synthetic oligonucleotide
  Sense strand starting at position 264 of SEQ ID NO: 1564220
ugggauuaggaguguuaag

SEQ ID NO: 1863618 - RNA, 19 nt, Artificial Sequence
  Description of Artificial Sequence: Synthetic oligonucleotide
  Antisense strand to SEQ ID NO: 1863617
cuuaacacuccuaauccca

SEQ ID NO: 1863619 - RNA, 19 nt, Artificial Sequence
  Description of Artificial Sequence: Synthetic oligonucleotide
  Sense strand starting at position 273 of SEQ ID NO: 1564220
gaguguuaagaugauugcu

SEQ ID NO: 1863620 - RNA, 19 nt, Artificial Sequence
  Description of Artificial Sequence: Synthetic oligonucleotide
  Antisense strand to SEQ ID NO: 1863619
agcaaucaucuuaacacuc

SEQ ID NO: 1863621 - RNA, 19 nt, Artificial Sequence
  Description of Artificial Sequence: Synthetic oligonucleotide
  Sense strand starting at position 296 of SEQ ID NO: 1564220
cuuuaaauagacugguuua

SEQ ID NO: 1863622 - RNA, 19 nt, Artificial Sequence
  Description of Artificial Sequence: Synthetic oligonucleotide
  Antisense strand to SEQ ID NO: 1863621
uaaaccagucuauuuaaag

SEQ ID NO: 1863623 - RNA, 19 nt, Artificial Sequence
  Description of Artificial Sequence: Synthetic oligonucleotide
  Sense strand starting at position 384 of SEQ ID NO: 1564220
gaaggagguuaggucugaa

SEQ ID NO: 1863624 - RNA, 19 nt, Artificial Sequence
  Description of Artificial Sequence: Synthetic oligonucleotide
  Antisense strand to SEQ ID NO: 1863623
uucagaccuaaccuccuuc

SEQ ID NO: 1863625 - RNA, 19 nt, Artificial Sequence
  Description of Artificial Sequence: Synthetic oligonucleotide
  Sense strand starting at position 387 of SEQ ID NO: 1564220
ggagguuaggucugaagau

SEQ ID NO: 1863626 - RNA, 19 nt, Artificial Sequence
  Description of Artificial Sequence: Synthetic oligonucleotide
  Antisense strand to SEQ ID NO: 1863625
aucuucagaccuaaccucc

SEQ ID NO: 1863627 - RNA, 19 nt, Artificial Sequence
  Description of Artificial Sequence: Synthetic oligonucleotide
  Sense strand starting at position 549 of SEQ ID NO: 1564220
caggguuucugacucaaua

SEQ ID NO: 1863628 - RNA, 19 nt, Artificial Sequence
  Description of Artificial Sequence: Synthetic oligonucleotide
  Antisense strand to SEQ ID NO: 1863627
uauugagucagaaacccug

SEQ ID NO: 1863629 - RNA, 19 nt, Artificial Sequence
  Description of Artificial Sequence: Synthetic oligonucleotide
  Sense strand starting at position 559 of SEQ ID NO: 1564220
gacucaauaugucuagagu

SEQ ID NO: 1863630 - RNA, 19 nt, Artificial Sequence
  Description of Artificial Sequence: Synthetic oligonucleotide
  Antisense strand to SEQ ID NO: 1863629
acucuagacauauugaguc

SEQ ID NO: 1863631 - RNA, 19 nt, Artificial Sequence
  Description of Artificial Sequence: Synthetic oligonucleotide
  Sense strand starting at position 560 of SEQ ID NO: 1564220
acucaauaugucuagagug

SEQ ID NO: 1863632 - RNA, 19 nt, Artificial Sequence
  Description of Artificial Sequence: Synthetic oligonucleotide
  Antisense strand to SEQ ID NO: 1863631
cacucuagacauauugagu

SEQ ID NO: 1863633 - RNA, 19 nt, Artificial Sequence
  Description of Artificial Sequence: Synthetic oligonucleotide
  Sense strand starting at position 1219 of SEQ ID NO: 1564220
uauuguaggaaggguucua

SEQ ID NO: 1863634 - RNA, 19 nt, Artificial Sequence
  Description of Artificial Sequence: Synthetic oligonucleotide
  Antisense strand to SEQ ID NO: 1863633
uagaacccuuccuacaaua

SEQ ID NO: 1863635 - RNA, 19 nt, Artificial Sequence
  Description of Artificial Sequence: Synthetic oligonucleotide
  Sense strand starting at position 1279 of SEQ ID NO: 1564220
ucuacauuacggugauaga

SEQ ID NO: 1863636 - RNA, 19 nt, Artificial Sequence
  Description of Artificial Sequence: Synthetic oligonucleotide
  Antisense strand to SEQ ID NO: 1863635
ucuaucaccguaauguaga

SEQ ID NO: 1863637 - RNA, 19 nt, Artificial Sequence
  Description of Artificial Sequence: Synthetic oligonucleotide
  Sense strand starting at position 1290 of SEQ ID NO: 1564220
gugauagacuuucuggaac

SEQ ID NO: 1863638 - RNA, 19 nt, Artificial Sequence
  Description of Artificial Sequence: Synthetic oligonucleotide
  Antisense strand to SEQ ID NO: 1863637
guuccagaaagucuaucac

SEQ ID NO: 1863639 - RNA, 19 nt, Artificial Sequence
  Description of Artificial Sequence: Synthetic oligonucleotide
  Sense strand starting at position 1364 of SEQ ID NO: 1564220
ugagacuucugucccauau

SEQ ID NO: 1863640 - RNA, 19 nt, Artificial Sequence
  Description of Artificial Sequence: Synthetic oligonucleotide
  Antisense strand to SEQ ID NO: 1863639
auaugggacagaagucuca

SEQ ID NO: 1863641 - RNA, 19 nt, Artificial Sequence
  Description of Artificial Sequence: Synthetic oligonucleotide
  Sense strand starting at position 1563 of SEQ ID NO: 1564220
ugggcugacauaugcaaua

SEQ ID NO: 1863642 - RNA, 19 nt, Artificial Sequence
  Description of Artificial Sequence: Synthetic oligonucleotide
  Antisense strand to SEQ ID NO: 1863641
uauugcauaugucagccca

SEQ ID NO: 1863643 - RNA, 19 nt, Artificial Sequence
  Description of Artificial Sequence: Synthetic oligonucleotide
  Sense strand starting at position 1565 of SEQ ID NO: 1564220
ggcugacauaugcaauaga

SEQ ID NO: 1863644 - RNA, 19 nt, Artificial Sequence
  Description of Artificial Sequence: Synthetic oligonucleotide
  Antisense strand to SEQ ID NO: 1863643
ucuauugcauaugucagcc

SEQ ID NO: 1863645 - RNA, 19 nt, Artificial Sequence
  Description of Artificial Sequence: Synthetic oligonucleotide
  Sense strand starting at position 1581 of SEQ ID NO: 1564220
agauucucugagcauauau

SEQ ID NO: 1863646 - RNA, 19 nt, Artificial Sequence
  Description of Artificial Sequence: Synthetic oligonucleotide
  Antisense strand to SEQ ID NO: 1863645
auauaugcucagagaaucu

SEQ ID NO: 1863647 - RNA, 19 nt, Artificial Sequence
  Description of Artificial Sequence: Synthetic oligonucleotide
  Sense strand starting at position 1853 of SEQ ID NO: 1564220
aucagaagaacugguguaa

SEQ ID NO: 1863648 - RNA, 19 nt, Artificial Sequence
  Description of Artificial Sequence: Synthetic oligonucleotide
  Antisense strand to SEQ ID NO: 1863647
uuacaccaguucuucugau

SEQ ID NO: 1863649 - RNA, 19 nt, Artificial Sequence
  Description of Artificial Sequence: Synthetic oligonucleotide
  Sense strand starting at position 1857 of SEQ ID NO: 1564220
gaagaacugguguaagcua

SEQ ID NO: 1863650 - RNA, 19 nt, Artificial Sequence
  Description of Artificial Sequence: Synthetic oligonucleotide
  Antisense strand to SEQ ID NO: 1863649
uagcuuacaccaguucuuc

SEQ ID NO: 1863651 - RNA, 19 nt, Artificial Sequence
  Description of Artificial Sequence: Synthetic oligonucleotide
  Sense strand starting at position 1864 of SEQ ID NO: 1564220
ugguguaagcuagauccau

SEQ ID NO: 1863652 - RNA, 19 nt, Artificial Sequence
  Description of Artificial Sequence: Synthetic oligonucleotide
  Antisense strand to SEQ ID NO: 1863651
auggaucuagcuuacacca

SEQ ID NO: 1863653 - RNA, 19 nt, Artificial Sequence
  Description of Artificial Sequence: Synthetic oligonucleotide
  Sense strand starting at position 1975 of SEQ ID NO: 1564220
gaggaaguccuuuaaugca

SEQ ID NO: 1863654 - RNA, 19 nt, Artificial Sequence
  Description of Artificial Sequence: Synthetic oligonucleotide
  Antisense strand to SEQ ID NO: 1863653
ugcauuaaaggacuuccuc

SEQ ID NO: 1863655 - RNA, 19 nt, Artificial Sequence
  Description of Artificial Sequence: Synthetic oligonucleotide
  Sense strand starting at position 2051 of SEQ ID NO: 1564220
aggaaaugcaucuggcaga

SEQ ID NO: 1863656 - RNA, 19 nt, Artificial Sequence
  Description of Artificial Sequence: Synthetic oligonucleotide
  Antisense strand to SEQ ID NO: 1863655
ucugccagaugcauuuccu

SEQ ID NO: 1863657 - RNA, 19 nt, Artificial Sequence
  Description of Artificial Sequence: Synthetic oligonucleotide
  Sense strand starting at position 2148 of SEQ ID NO: 1564220
auaauaacacucuguguua

SEQ ID NO: 1863658 - RNA, 19 nt, Artificial Sequence
  Description of Artificial Sequence: Synthetic oligonucleotide
  Antisense strand to SEQ ID NO: 1863657
uaacacagaguguuauuau

SEQ ID NO: 1863659 - RNA, 19 nt, Artificial Sequence
  Description of Artificial Sequence: Synthetic oligonucleotide
  Sense strand starting at position 2176 of SEQ ID NO: 1564220
auugucaagcauuaaggau

SEQ ID NO: 1863660 - RNA, 19 nt, Artificial Sequence
  Description of Artificial Sequence: Synthetic oligonucleotide
  Antisense strand to SEQ ID NO: 1863659
auccuuaaugcuugacaau

SEQ ID NO: 1863661 - RNA, 19 nt, Artificial Sequence
  Description of Artificial Sequence: Synthetic oligonucleotide
  Sense strand starting at position 2594 of SEQ ID NO: 1564220
cauucuuaaugaguuaggu

SEQ ID NO: 1863662 - RNA, 19 nt, Artificial Sequence
  Description of Artificial Sequence: Synthetic oligonucleotide
  Antisense strand to SEQ ID NO: 1863661
accuaacucauuaagaaug

SEQ ID NO: 1863663 - RNA, 19 nt, Artificial Sequence
  Description of Artificial Sequence: Synthetic oligonucleotide
  Sense strand starting at position 2634 of SEQ ID NO: 1564220
auaguacugagaggaugua

SEQ ID NO: 1863664 - RNA, 19 nt, Artificial Sequence
  Description of Artificial Sequence: Synthetic oligonucleotide
  Antisense strand to SEQ ID NO: 1863663
uacauccucucaguacuau

SEQ ID NO: 1863665 - RNA, 19 nt, Artificial Sequence
  Description of Artificial Sequence: Synthetic oligonucleotide
  Sense strand starting at position 2653 of SEQ ID NO: 1564220
aacacuucuggugaguaua

SEQ ID NO: 1863666 - RNA, 19 nt, Artificial Sequence
  Description of Artificial Sequence: Synthetic oligonucleotide
  Antisense strand to SEQ ID NO: 1863665
uauacucaccagaaguguu

SEQ ID NO: 1863667 - RNA, 19 nt, Artificial Sequence
  Description of Artificial Sequence: Synthetic oligonucleotide
  Sense strand starting at position 2787 of SEQ ID NO: 1564220
aggucuuagggccaguaga

SEQ ID NO: 1863668 - RNA, 19 nt, Artificial Sequence
  Description of Artificial Sequence: Synthetic oligonucleotide
  Antisense strand to SEQ ID NO: 1863667
ucuacuggcccuaagaccu

SEQ ID NO: 1863669 - RNA, 19 nt, Artificial Sequence
  Description of Artificial Sequence: Synthetic oligonucleotide
  Sense strand starting at position 2819 of SEQ ID NO: 1564220
cuacuuagcacggagaguu

SEQ ID NO: 1863670 - RNA, 19 nt, Artificial Sequence
  Description of Artificial Sequence: Synthetic oligonucleotide
  Antisense strand to SEQ ID NO: 1863669
aacucuccgugcuaaguag

SEQ ID NO: 1863671 - RNA, 19 nt, Artificial Sequence
  Description of Artificial Sequence: Synthetic oligonucleotide
  Sense strand starting at position 2832 of SEQ ID NO: 1564220
agaguuucgagacgaucaa

SEQ ID NO: 1863672 - RNA, 19 nt, Artificial Sequence
  Description of Artificial Sequence: Synthetic oligonucleotide
  Antisense strand to SEQ ID NO: 1863671
uugaucgucucgaaacucu

SEQ ID NO: 1863673 - RNA, 19 nt, Artificial Sequence
  Description of Artificial Sequence: Synthetic oligonucleotide
  Sense strand starting at position 2845 of SEQ ID NO: 1564220
gaucaagugucaucugaga

SEQ ID NO: 1863674 - RNA, 19 nt, Artificial Sequence
  Description of Artificial Sequence: Synthetic oligonucleotide
  Antisense strand to SEQ ID NO: 1863673
ucucagaugacacuugauc

SEQ ID NO: 1863675 - RNA, 19 nt, Artificial Sequence
  Description of Artificial Sequence: Synthetic oligonucleotide
  Sense strand starting at position 2847 of SEQ ID NO: 1564220
ucaagugucaucugagaug

SEQ ID NO: 1863676 - RNA, 19 nt, Artificial Sequence
  Description of Artificial Sequence: Synthetic oligonucleotide
  Antisense strand to SEQ ID NO: 1863675
caucucagaugacacuuga

SEQ ID NO: 1863677 - RNA, 19 nt, Artificial Sequence
  Description of Artificial Sequence: Synthetic oligonucleotide
  Sense strand starting at position 3593 of SEQ ID NO: 1564220
acauuugacugauauaugu

SEQ ID NO: 1863678 - RNA, 19 nt, Artificial Sequence
  Description of Artificial Sequence: Synthetic oligonucleotide
  Antisense strand to SEQ ID NO: 1863677
acauauaucagucaaaugu

SEQ ID NO: 1863679 - RNA, 19 nt, Artificial Sequence
  Description of Artificial Sequence: Synthetic oligonucleotide
  Sense strand starting at position 3806 of SEQ ID NO: 1564220
acaccuaguuugguuugaa

SEQ ID NO: 1863680 - RNA, 19 nt, Artificial Sequence
  Description of Artificial Sequence: Synthetic oligonucleotide
  Antisense strand to SEQ ID NO: 1863679
uucaaaccaaacuaggugu

SEQ ID NO: 1863681 - RNA, 19 nt, Artificial Sequence
  Description of Artificial Sequence: Synthetic oligonucleotide
  Sense strand starting at position 3832 of SEQ ID NO: 1564220
gagagaugagcaugcuuaa

SEQ ID NO: 1863682 - RNA, 19 nt, Artificial Sequence
  Description of Artificial Sequence: Synthetic oligonucleotide
  Antisense strand to SEQ ID NO: 1863681
uuaagcaugcucaucucuc

SEQ ID NO: 1863683 - RNA, 19 nt, Artificial Sequence
  Description of Artificial Sequence: Synthetic oligonucleotide
  Sense strand starting at position 3835 of SEQ ID NO: 1564220
agaugagcaugcuuaaaga

SEQ ID NO: 1863684 - RNA, 19 nt, Artificial Sequence
  Description of Artificial Sequence: Synthetic oligonucleotide
  Antisense strand to SEQ ID NO: 1863683
ucuuuaagcaugcucaucu

SEQ ID NO: 1863685 - RNA, 19 nt, Artificial Sequence
  Description of Artificial Sequence: Synthetic oligonucleotide
  Sense strand starting at position 179 of SEQ ID NO: 1564221
auuauaugaaugugaaggu

SEQ ID NO: 1863686 - RNA, 19 nt, Artificial Sequence
  Description of Artificial Sequence: Synthetic oligonucleotide
  Antisense strand to SEQ ID NO: 1863685
accuucacauucauauaau

SEQ ID NO: 1863687 - RNA, 19 nt, Artificial Sequence
  Description of Artificial Sequence: Synthetic oligonucleotide
  Sense strand starting at position 261 of SEQ ID NO: 1564221
aguugaggaaucugguguu

SEQ ID NO: 1863688 - RNA, 19 nt, Artificial Sequence
  Description of Artificial Sequence: Synthetic oligonucleotide
  Antisense strand to SEQ ID NO: 1863687
aacaccagauuccucaacu

SEQ ID NO: 1863689 - RNA, 19 nt, Artificial Sequence
  Description of Artificial Sequence: Synthetic oligonucleotide
  Sense strand starting at position 273 of SEQ ID NO: 1564221
ugguguucuggucagucaa

SEQ ID NO: 1863690 - RNA, 19 nt, Artificial Sequence
  Description of Artificial Sequence: Synthetic oligonucleotide
  Antisense strand to SEQ ID NO: 1863689
uugacugaccagaacacca

SEQ ID NO: 1863691 - RNA, 19 nt, Artificial Sequence
  Description of Artificial Sequence: Synthetic oligonucleotide
  Sense strand starting at position 551 of SEQ ID NO: 1564221
ugugaauucugucucccua

SEQ ID NO: 1863692 - RNA, 19 nt, Artificial Sequence
  Description of Artificial Sequence: Synthetic oligonucleotide
  Antisense strand to SEQ ID NO: 1863691
uagggagacagaauucaca

SEQ ID NO: 1863693 - RNA, 19 nt, Artificial Sequence
  Description of Artificial Sequence: Synthetic oligonucleotide
  Sense strand starting at position 583 of SEQ ID NO: 1564221
aaagguucccaauguguua

SEQ ID NO: 1863694 - RNA, 19 nt, Artificial Sequence
  Description of Artificial Sequence: Synthetic oligonucleotide
  Antisense strand to SEQ ID NO: 1863693
uaacacauugggaaccuuu

SEQ ID NO: 1863695 - RNA, 19 nt, Artificial Sequence
  Description of Artificial Sequence: Synthetic oligonucleotide
  Sense strand starting at position 612 of SEQ ID NO: 1564221
uuguuucugguacauaaau

SEQ ID NO: 1863696 - RNA, 19 nt, Artificial Sequence
  Description of Artificial Sequence: Synthetic oligonucleotide
  Antisense strand to SEQ ID NO: 1863695
auuuauguaccagaaacaa

SEQ ID NO: 1863697 - RNA, 19 nt, Artificial Sequence
  Description of Artificial Sequence: Synthetic oligonucleotide
  Sense strand starting at position 1024 of SEQ ID NO: 1564221
agagcuacguaccuuuaaa

SEQ ID NO: 1863698 - RNA, 19 nt, Artificial Sequence
  Description of Artificial Sequence: Synthetic oligonucleotide
  Antisense strand to SEQ ID NO: 1863697
uuuaaagguacguagcucu

SEQ ID NO: 1863699 - RNA, 19 nt, Artificial Sequence
  Description of Artificial Sequence: Synthetic oligonucleotide
  Sense strand starting at position 1083 of SEQ ID NO: 1564221
cuggcucaagccugugaaa

SEQ ID NO: 1863700 - RNA, 19 nt, Artificial Sequence
  Description of Artificial Sequence: Synthetic oligonucleotide
  Antisense strand to SEQ ID NO: 1863699
uuucacaggcuugagccag

SEQ ID NO: 1863701 - RNA, 19 nt, Artificial Sequence
  Description of Artificial Sequence: Synthetic oligonucleotide
  Sense strand starting at position 1085 of SEQ ID NO: 1564221
ggcucaagccugugaaaua

SEQ ID NO: 1863702 - RNA, 19 nt, Artificial Sequence
  Description of Artificial Sequence: Synthetic oligonucleotide
  Antisense strand to SEQ ID NO: 1863701
uauuucacaggcuugagcc

SEQ ID NO: 1863703 - RNA, 19 nt, Artificial Sequence
  Description of Artificial Sequence: Synthetic oligonucleotide
  Sense strand starting at position 1159 of SEQ ID NO: 1564221
agugaaauguuucccguua

SEQ ID NO: 1863704 - RNA, 19 nt, Artificial Sequence
  Description of Artificial Sequence: Synthetic oligonucleotide
  Antisense strand to SEQ ID NO: 1863703
uaacgggaaacauuucacu

SEQ ID NO: 1863705 - RNA, 19 nt, Artificial Sequence
  Description of Artificial Sequence: Synthetic oligonucleotide
  Sense strand starting at position 1173 of SEQ ID NO: 1564221
cguuacuuguuauccaaag

SEQ ID NO: 1863706 - RNA, 19 nt, Artificial Sequence
  Description of Artificial Sequence: Synthetic oligonucleotide
  Antisense strand to SEQ ID NO: 1863705
cuuuggauaacaaguaacg

SEQ ID NO: 1863707 - RNA, 19 nt, Artificial Sequence
  Description of Artificial Sequence: Synthetic oligonucleotide
  Sense strand starting at position 1289 of SEQ ID NO: 1564221
ccauaagucugccuggcaa

SEQ ID NO: 1863708 - RNA, 19 nt, Artificial Sequence
  Description of Artificial Sequence: Synthetic oligonucleotide
  Antisense strand to SEQ ID NO: 1863707
uugccaggcagacuuaugg

SEQ ID NO: 1863709 - RNA, 19 nt, Artificial Sequence
  Description of Artificial Sequence: Synthetic oligonucleotide
  Sense strand starting at position 1786 of SEQ ID NO: 1564221
cgagcaguucuguaguaca

SEQ ID NO: 1863710 - RNA, 19 nt, Artificial Sequence
  Description of Artificial Sequence: Synthetic oligonucleotide
  Antisense strand to SEQ ID NO: 1863709
uguacuacagaacugcucg

SEQ ID NO: 1863711 - RNA, 19 nt, Artificial Sequence
  Description of Artificial Sequence: Synthetic oligonucleotide
  Sense strand starting at position 1800 of SEQ ID NO: 1564221
guacaaagucacugccuua

SEQ ID NO: 1863712 - RNA, 19 nt, Artificial Sequence
  Description of Artificial Sequence: Synthetic oligonucleotide
  Antisense strand to SEQ ID NO: 1863711
uaaggcagugacuuuguac

SEQ ID NO: 1863713 - RNA, 19 nt, Artificial Sequence
  Description of Artificial Sequence: Synthetic oligonucleotide
  Sense strand starting at position 1837 of SEQ ID NO: 1564221
uuggccuaauggcuauaau

SEQ ID NO: 1863714 - RNA, 19 nt, Artificial Sequence
  Description of Artificial Sequence: Synthetic oligonucleotide
  Antisense strand to SEQ ID NO: 1863713
auuauagccauuaggccaa

SEQ ID NO: 1863715 - RNA, 19 nt, Artificial Sequence
  Description of Artificial Sequence: Synthetic oligonucleotide
  Sense strand starting at position 1838 of SEQ ID NO: 1564221
uggccuaauggcuauaaua

SEQ ID NO: 1863716 - RNA, 19 nt, Artificial Sequence
  Description of Artificial Sequence: Synthetic oligonucleotide
  Antisense strand to SEQ ID NO: 1863715
uauuauagccauuaggcca

SEQ ID NO: 1863717 - RNA, 19 nt, Artificial Sequence
  Description of Artificial Sequence: Synthetic oligonucleotide
  Sense strand starting at position 1840 of SEQ ID NO: 1564221
gccuaauggcuauaauaua

SEQ ID NO: 1863718 - RNA, 19 nt, Artificial Sequence
  Description of Artificial Sequence: Synthetic oligonucleotide
  Antisense strand to SEQ ID NO: 1863717
uauauuauagccauuaggc

SEQ ID NO: 1863719 - RNA, 19 nt, Artificial Sequence
  Description of Artificial Sequence: Synthetic oligonucleotide
  Sense strand starting at position 1891 of SEQ ID NO: 1564221
gugcuugaagccuauucua

SEQ ID NO: 1863720 - RNA, 19 nt, Artificial Sequence
  Description of Artificial Sequence: Synthetic oligonucleotide
  Antisense strand to SEQ ID NO: 1863719
uagaauaggcuucaagcac

SEQ ID NO: 1863721 - RNA, 19 nt, Artificial Sequence
  Description of Artificial Sequence: Synthetic oligonucleotide
  Sense strand starting at position 2144 of SEQ ID NO: 1564221
gagucagucacuuggugag

SEQ ID NO: 1863722 - RNA, 19 nt, Artificial Sequence
  Description of Artificial Sequence: Synthetic oligonucleotide
  Antisense strand to SEQ ID NO: 1863721
cucaccaagugacugacuc

SEQ ID NO: 1863723 - RNA, 19 nt, Artificial Sequence
  Description of Artificial Sequence: Synthetic oligonucleotide
  Sense strand starting at position 2156 of SEQ ID NO: 1564221
uggugaguucagggugaga

SEQ ID NO: 1863724 - RNA, 19 nt, Artificial Sequence
  Description of Artificial Sequence: Synthetic oligonucleotide
  Antisense strand to SEQ ID NO: 1863723
ucucacccugaacucacca

SEQ ID NO: 1863725 - RNA, 19 nt, Artificial Sequence
  Description of Artificial Sequence: Synthetic oligonucleotide
  Sense strand starting at position 2158 of SEQ ID NO: 1564221
gugaguucagggugagaau

SEQ ID NO: 1863726 - RNA, 19 nt, Artificial Sequence
  Description of Artificial Sequence: Synthetic oligonucleotide
  Antisense strand to SEQ ID NO: 1863725
auucucacccugaacucac

SEQ ID NO: 1863727 - RNA, 19 nt, Artificial Sequence
  Description of Artificial Sequence: Synthetic oligonucleotide
  Sense strand starting at position 2171 of SEQ ID NO: 1564221
gagaauaacugagaguaag

SEQ ID NO: 1863728 - RNA, 19 nt, Artificial Sequence
  Description of Artificial Sequence: Synthetic oligonucleotide
  Antisense strand to SEQ ID NO: 1863727
cuuacucucaguuauucuc

SEQ ID NO: 1863729 - RNA, 19 nt, Artificial Sequence
  Description of Artificial Sequence: Synthetic oligonucleotide
  Sense strand starting at position 2313 of SEQ ID NO: 1564221
gcaaguagacauuguugau

SEQ ID NO: 1863730 - RNA, 19 nt, Artificial Sequence
  Description of Artificial Sequence: Synthetic oligonucleotide
  Antisense strand to SEQ ID NO: 1863729
aucaacaaugucuacuugc

SEQ ID NO: 1863731 - RNA, 19 nt, Artificial Sequence
  Description of Artificial Sequence: Synthetic oligonucleotide
  Sense strand starting at position 2317 of SEQ ID NO: 1564221
guagacauuguugaucacu

SEQ ID NO: 1863732 - RNA, 19 nt, Artificial Sequence
  Description of Artificial Sequence: Synthetic oligonucleotide
  Antisense strand to SEQ ID NO: 1863731
agugaucaacaaugucuac

SEQ ID NO: 1863733 - RNA, 19 nt, Artificial Sequence
  Description of Artificial Sequence: Synthetic oligonucleotide
  Sense strand starting at position 2322 of SEQ ID NO: 1564221
cauuguugaucacugguua

SEQ ID NO: 1863734 - RNA, 19 nt, Artificial Sequence
  Description of Artificial Sequence: Synthetic oligonucleotide
  Antisense strand to SEQ ID NO: 1863733
uaaccagugaucaacaaug

SEQ ID NO: 1863735 - RNA, 19 nt, Artificial Sequence
  Description of Artificial Sequence: Synthetic oligonucleotide
  Sense strand starting at position 2323 of SEQ ID NO: 1564221
auuguugaucacugguuau

SEQ ID NO: 1863736 - RNA, 19 nt, Artificial Sequence
  Description of Artificial Sequence: Synthetic oligonucleotide
  Antisense strand to SEQ ID NO: 1863735
auaaccagugaucaacaau

SEQ ID NO: 1863737 - RNA, 19 nt, Artificial Sequence
  Description of Artificial Sequence: Synthetic oligonucleotide
  Sense strand starting at position 2326 of SEQ ID NO: 1564221
guugaucacugguuaugca

SEQ ID NO: 1863738 - RNA, 19 nt, Artificial Sequence
  Description of Artificial Sequence: Synthetic oligonucleotide
  Antisense strand to SEQ ID NO: 1863737
ugcauaaccagugaucaac

SEQ ID NO: 1863739 - RNA, 19 nt, Artificial Sequence
  Description of Artificial Sequence: Synthetic oligonucleotide
  Sense strand starting at position 2327 of SEQ ID NO: 1564221
uugaucacugguuaugcaa

SEQ ID NO: 1863740 - RNA, 19 nt, Artificial Sequence
  Description of Artificial Sequence: Synthetic oligonucleotide
  Antisense strand to SEQ ID NO: 1863739
uugcauaaccagugaucaa

SEQ ID NO: 1863741 - RNA, 19 nt, Artificial Sequence
  Description of Artificial Sequence: Synthetic oligonucleotide
  Sense strand starting at position 2516 of SEQ ID NO: 1564221
auuugagccugagaguuua

SEQ ID NO: 1863742 - RNA, 19 nt, Artificial Sequence
  Description of Artificial Sequence: Synthetic oligonucleotide
  Antisense strand to SEQ ID NO: 1863741
uaaacucucaggcucaaau

SEQ ID NO: 1863743 - RNA, 19 nt, Artificial Sequence
  Description of Artificial Sequence: Synthetic oligonucleotide
  Sense strand starting at position 2524 of SEQ ID NO: 1564221
cugagaguuuagguccaau

SEQ ID NO: 1863744 - RNA, 19 nt, Artificial Sequence
  Description of Artificial Sequence: Synthetic oligonucleotide
  Antisense strand to SEQ ID NO: 1863743
auuggaccuaaacucucag

SEQ ID NO: 1863745 - RNA, 19 nt, Artificial Sequence
  Description of Artificial Sequence: Synthetic oligonucleotide
  Sense strand starting at position 3367 of SEQ ID NO: 1564221
ugacacaugucuguaacca

SEQ ID NO: 1863746 - RNA, 19 nt, Artificial Sequence
  Description of Artificial Sequence: Synthetic oligonucleotide
  Antisense strand to SEQ ID NO: 1863745
ugguuacagacauguguca

SEQ ID NO: 1863747 - RNA, 19 nt, Artificial Sequence
  Description of Artificial Sequence: Synthetic oligonucleotide
  Sense strand starting at position 3368 of SEQ ID NO: 1564221
gacacaugucuguaaccag

SEQ ID NO: 1863748 - RNA, 19 nt, Artificial Sequence
  Description of Artificial Sequence: Synthetic oligonucleotide
  Antisense strand to SEQ ID NO: 1863747
cugguuacagacauguguc

SEQ ID NO: 1863749 - RNA, 19 nt, Artificial Sequence
  Description of Artificial Sequence: Synthetic oligonucleotide
  Sense strand starting at position 3371 of SEQ ID NO: 1564221
acaugucuguaaccagcua

SEQ ID NO: 1863750 - RNA, 19 nt, Artificial Sequence
  Description of Artificial Sequence: Synthetic oligonucleotide
  Antisense strand to SEQ ID NO: 1863749
uagcugguuacagacaugu

SEQ ID NO: 1863751 - RNA, 19 nt, Artificial Sequence
  Description of Artificial Sequence: Synthetic oligonucleotide
  Sense strand starting at position 3586 of SEQ ID NO: 1564221
uuuguccaaucauuaggaa

SEQ ID NO: 1863752 - RNA, 19 nt, Artificial Sequence
  Description of Artificial Sequence: Synthetic oligonucleotide
  Antisense strand to SEQ ID NO: 1863751
uuccuaaugauuggacaaa

SEQ ID NO: 1863753 - RNA, 19 nt, Artificial Sequence
  Description of Artificial Sequence: Synthetic oligonucleotide
  Sense strand starting at position 3707 of SEQ ID NO: 1564221
agcuaaaucuaagcaugau

SEQ ID NO: 1863754 - RNA, 19 nt, Artificial Sequence
  Description of Artificial Sequence: Synthetic oligonucleotide
  Antisense strand to SEQ ID NO: 1863753
aucaugcuuagauuuagcu

SEQ ID NO: 1863755 - RNA, 19 nt, Artificial Sequence
  Description of Artificial Sequence: Synthetic oligonucleotide
  Sense strand starting at position 3766 of SEQ ID NO: 1564221
ccuccagauuuguagacaa

SEQ ID NO: 1863756 - RNA, 19 nt, Artificial Sequence
  Description of Artificial Sequence: Synthetic oligonucleotide
  Antisense strand to SEQ ID NO: 1863755
uugucuacaaaucuggagg

SEQ ID NO: 1863757 - RNA, 19 nt, Artificial Sequence
  Description of Artificial Sequence: Synthetic oligonucleotide
  Sense strand starting at position 3891 of SEQ ID NO: 1564221
gagagauuguggcuccagu

SEQ ID NO: 1863758 - RNA, 19 nt, Artificial Sequence
  Description of Artificial Sequence: Synthetic oligonucleotide
  Antisense strand to SEQ ID NO: 1863757
acuggagccacaaucucuc

SEQ ID NO: 1863759 - RNA, 19 nt, Artificial Sequence
  Description of Artificial Sequence: Synthetic oligonucleotide
  Sense strand starting at position 3929 of SEQ ID NO: 1564221
guuccuuccugauccugaa

SEQ ID NO: 1863760 - RNA, 19 nt, Artificial Sequence
  Description of Artificial Sequence: Synthetic oligonucleotide
  Antisense strand to SEQ ID NO: 1863759
uucaggaucaggaaggaac

SEQ ID NO: 1863761 - RNA, 19 nt, Artificial Sequence
  Description of Artificial Sequence: Synthetic oligonucleotide
  Sense strand starting at position 3949 of SEQ ID NO: 1564221
gucucagaaucagucauua

SEQ ID NO: 1863762 - RNA, 19 nt, Artificial Sequence
  Description of Artificial Sequence: Synthetic oligonucleotide
  Antisense strand to SEQ ID NO: 1863761
uaaugacugauucugagac

SEQ ID NO: 1863763 - RNA, 19 nt, Artificial Sequence
  Description of Artificial Sequence: Synthetic oligonucleotide
  Sense strand starting at position 3964 of SEQ ID NO: 1564221
auuagaucucguggacaag

SEQ ID NO: 1863764 - RNA, 19 nt, Artificial Sequence
  Description of Artificial Sequence: Synthetic oligonucleotide
  Antisense strand to SEQ ID NO: 1863763
cuuguccacgagaucuaau

SEQ ID NO: 1863765 - RNA, 19 nt, Artificial Sequence
  Description of Artificial Sequence: Synthetic oligonucleotide
  Sense strand starting at position 109 of SEQ ID NO: 1564222
cucugaaguuauucguaaa

SEQ ID NO: 1863766 - RNA, 19 nt, Artificial Sequence
  Description of Artificial Sequence: Synthetic oligonucleotide
  Antisense strand to SEQ ID NO: 1863765
uuuacgaauaacuucagag

SEQ ID NO: 1863767 - RNA, 19 nt, Artificial Sequence
  Description of Artificial Sequence: Synthetic oligonucleotide
  Sense strand starting at position 110 of SEQ ID NO: 1564222
ucugaaguuauucguaaag

SEQ ID NO: 1863768 - RNA, 19 nt, Artificial Sequence
  Description of Artificial Sequence: Synthetic oligonucleotide
  Antisense strand to SEQ ID NO: 1863767
cuuuacgaauaacuucaga

SEQ ID NO: 1863769 - RNA, 19 nt, Artificial Sequence
  Description of Artificial Sequence: Synthetic oligonucleotide
  Sense strand starting at position 216 of SEQ ID NO: 1564222
aaauuaauucgccaucgag

SEQ ID NO: 1863770 - RNA, 19 nt, Artificial Sequence
  Description of Artificial Sequence: Synthetic oligonucleotide
  Antisense strand to SEQ ID NO: 1863769
cucgauggcgaauuaauuu

SEQ ID NO: 1863771 - RNA, 19 nt, Artificial Sequence
  Description of Artificial Sequence: Synthetic oligonucleotide
  Sense strand starting at position 224 of SEQ ID NO: 1564222
ucgccaucgagauauacau

SEQ ID NO: 1863772 - RNA, 19 nt, Artificial Sequence
  Description of Artificial Sequence: Synthetic oligonucleotide
  Antisense strand to SEQ ID NO: 1863771
auguauaucucgauggcga

SEQ ID NO: 1863773 - RNA, 19 nt, Artificial Sequence
  Description of Artificial Sequence: Synthetic oligonucleotide
  Sense strand starting at position 314 of SEQ ID NO: 1564222
caaguaucccuccgugaaa

SEQ ID NO: 1863774 - RNA, 19 nt, Artificial Sequence
  Description of Artificial Sequence: Synthetic oligonucleotide
  Antisense strand to SEQ ID NO: 1863773
uuucacggagggauacuug

SEQ ID NO: 1863775 - RNA, 19 nt, Artificial Sequence
  Description of Artificial Sequence: Synthetic oligonucleotide
  Sense strand starting at position 377 of SEQ ID NO: 1564222
cgauauacuggaggucuuu

SEQ ID NO: 1863776 - RNA, 19 nt, Artificial Sequence
  Description of Artificial Sequence: Synthetic oligonucleotide
  Antisense strand to SEQ ID NO: 1863775
aaagaccuccaguauaucg

SEQ ID NO: 1863777 - RNA, 19 nt, Artificial Sequence
  Description of Artificial Sequence: Synthetic oligonucleotide
  Sense strand starting at position 383 of SEQ ID NO: 1564222
acuggaggucuuugcugau

SEQ ID NO: 1863778 - RNA, 19 nt, Artificial Sequence
  Description of Artificial Sequence: Synthetic oligonucleotide
  Antisense strand to SEQ ID NO: 1863777
aucagcaaagaccuccagu

SEQ ID NO: 1863779 - RNA, 19 nt, Artificial Sequence
  Description of Artificial Sequence: Synthetic oligonucleotide
  Sense strand starting at position 547 of SEQ ID NO: 1564222
ggauauaguggguaugucu

SEQ ID NO: 1863780 - RNA, 19 nt, Artificial Sequence
  Description of Artificial Sequence: Synthetic oligonucleotide
  Antisense strand to SEQ ID NO: 1863779
agacauacccacuauaucc

SEQ ID NO: 1863781 - RNA, 19 nt, Artificial Sequence
  Description of Artificial Sequence: Synthetic oligonucleotide
  Sense strand starting at position 580 of SEQ ID NO: 1564222
agggcuugaguaugaguau

SEQ ID NO: 1863782 - RNA, 19 nt, Artificial Sequence
  Description of Artificial Sequence: Synthetic oligonucleotide
  Antisense strand to SEQ ID NO: 1863781
auacucauacucaagcccu

SEQ ID NO: 1863783 - RNA, 19 nt, Artificial Sequence
  Description of Artificial Sequence: Synthetic oligonucleotide
  Sense strand starting at position 658 of SEQ ID NO: 1564222
cgugguuccagagaaauaa

SEQ ID NO: 1863784 - RNA, 19 nt, Artificial Sequence
  Description of Artificial Sequence: Synthetic oligonucleotide
  Antisense strand to SEQ ID NO: 1863783
uuauuucucuggaaccacg

SEQ ID NO: 1863785 - RNA, 19 nt, Artificial Sequence
  Description of Artificial Sequence: Synthetic oligonucleotide
  Sense strand starting at position 765 of SEQ ID NO: 1564222
ggaggauucucuccagcuu

SEQ ID NO: 1863786 - RNA, 19 nt, Artificial Sequence
  Description of Artificial Sequence: Synthetic oligonucleotide
  Antisense strand to SEQ ID NO: 1863785
aagcuggagagaauccucc

SEQ ID NO: 1863787 - RNA, 19 nt, Artificial Sequence
  Description of Artificial Sequence: Synthetic oligonucleotide
  Sense strand starting at position 766 of SEQ ID NO: 1564222
gaggauucucuccagcuuc

SEQ ID NO: 1863788 - RNA, 19 nt, Artificial Sequence
  Description of Artificial Sequence: Synthetic oligonucleotide
  Antisense strand to SEQ ID NO: 1863787
gaagcuggagagaauccuc

SEQ ID NO: 1863789 - RNA, 19 nt, Artificial Sequence
  Description of Artificial Sequence: Synthetic oligonucleotide
  Sense strand starting at position 1225 of SEQ ID NO: 1564222
ggaccaguugagggaucuu

SEQ ID NO: 1863790 - RNA, 19 nt, Artificial Sequence
  Description of Artificial Sequence: Synthetic oligonucleotide
  Antisense strand to SEQ ID NO: 1863789
aagaucccucaacuggucc

SEQ ID NO: 1863791 - RNA, 19 nt, Artificial Sequence
  Description of Artificial Sequence: Synthetic oligonucleotide
  Sense strand starting at position 1396 of SEQ ID NO: 1564222
ggcugauuugugcaguuug

SEQ ID NO: 1863792 - RNA, 19 nt, Artificial Sequence
  Description of Artificial Sequence: Synthetic oligonucleotide
  Antisense strand to SEQ ID NO: 1863791
caaacugcacaaaucagcc

SEQ ID NO: 1863793 - RNA, 19 nt, Artificial Sequence
  Description of Artificial Sequence: Synthetic oligonucleotide
  Sense strand starting at position 2039 of SEQ ID NO: 1564222
uguuccaauuuccagagau

SEQ ID NO: 1863794 - RNA, 19 nt, Artificial Sequence
  Description of Artificial Sequence: Synthetic oligonucleotide
  Antisense strand to SEQ ID NO: 1863793
aucucuggaaauuggaaca

SEQ ID NO: 1863795 - RNA, 19 nt, Artificial Sequence
  Description of Artificial Sequence: Synthetic oligonucleotide
  Sense strand starting at position 2092 of SEQ ID NO: 1564222
cugccacuccauugggauu

SEQ ID NO: 1863796 - RNA, 19 nt, Artificial Sequence
  Description of Artificial Sequence: Synthetic oligonucleotide
  Antisense strand to SEQ ID NO: 1863795
aaucccaauggaguggcag

SEQ ID NO: 1863797 - RNA, 19 nt, Artificial Sequence
  Description of Artificial Sequence: Synthetic oligonucleotide
  Sense strand starting at position 2095 of SEQ ID NO: 1564222
ccacuccauugggauuuaa

SEQ ID NO: 1863798 - RNA, 19 nt, Artificial Sequence
  Description of Artificial Sequence: Synthetic oligonucleotide
  Antisense strand to SEQ ID NO: 1863797
uuaaaucccaauggagugg

SEQ ID NO: 1863799 - RNA, 19 nt, Artificial Sequence
  Description of Artificial Sequence: Synthetic oligonucleotide
  Sense strand starting at position 2137 of SEQ ID NO: 1564222
gcccuuaaaggucggaaga

SEQ ID NO: 1863800 - RNA, 19 nt, Artificial Sequence
  Description of Artificial Sequence: Synthetic oligonucleotide
  Antisense strand to SEQ ID NO: 1863799
ucuuccgaccuuuaagggc

SEQ ID NO: 1863801 - RNA, 19 nt, Artificial Sequence
  Description of Artificial Sequence: Synthetic oligonucleotide
  Sense strand starting at position 2138 of SEQ ID NO: 1564222
cccuuaaaggucggaagaa

SEQ ID NO: 1863802 - RNA, 19 nt, Artificial Sequence
  Description of Artificial Sequence: Synthetic oligonucleotide
  Antisense strand to SEQ ID NO: 1863801
uucuuccgaccuuuaaggg

SEQ ID NO: 1863803 - RNA, 19 nt, Artificial Sequence
  Description of Artificial Sequence: Synthetic oligonucleotide
  Sense strand starting at position 2241 of SEQ ID NO: 1564222
ugacaaugguuugucccau

SEQ ID NO: 1863804 - RNA, 19 nt, Artificial Sequence
  Description of Artificial Sequence: Synthetic oligonucleotide
  Antisense strand to SEQ ID NO: 1863803
augggacaaaccauuguca

SEQ ID NO: 1863805 - RNA, 19 nt, Artificial Sequence
  Description of Artificial Sequence: Synthetic oligonucleotide
  Sense strand starting at position 2299 of SEQ ID NO: 1564222
gaauaauggguauguucua

SEQ ID NO: 1863806 - RNA, 19 nt, Artificial Sequence
  Description of Artificial Sequence: Synthetic oligonucleotide
  Antisense strand to SEQ ID NO: 1863805
uagaacauacccauuauuc

SEQ ID NO: 1863807 - RNA, 19 nt, Artificial Sequence
  Description of Artificial Sequence: Synthetic oligonucleotide
  Sense strand starting at position 2306 of SEQ ID NO: 1564222
ggguauguucuagaacacg

SEQ ID NO: 1863808 - RNA, 19 nt, Artificial Sequence
  Description of Artificial Sequence: Synthetic oligonucleotide
  Antisense strand to SEQ ID NO: 1863807
cguguucuagaacauaccc

SEQ ID NO: 1863809 - RNA, 19 nt, Artificial Sequence
  Description of Artificial Sequence: Synthetic oligonucleotide
  Sense strand starting at position 2552 of SEQ ID NO: 1564222
uggcaugauuuggccugua

SEQ ID NO: 1863810 - RNA, 19 nt, Artificial Sequence
  Description of Artificial Sequence: Synthetic oligonucleotide
  Antisense strand to SEQ ID NO: 1863809
uacaggccaaaucaugcca

SEQ ID NO: 1863811 - RNA, 19 nt, Artificial Sequence
  Description of Artificial Sequence: Synthetic oligonucleotide
  Sense strand starting at position 2677 of SEQ ID NO: 1564222
guuagacaacguuaacagu

SEQ ID NO: 1863812 - RNA, 19 nt, Artificial Sequence
  Description of Artificial Sequence: Synthetic oligonucleotide
  Antisense strand to SEQ ID NO: 1863811
acuguuaacguugucuaac

SEQ ID NO: 1863813 - RNA, 19 nt, Artificial Sequence
  Description of Artificial Sequence: Synthetic oligonucleotide
  Sense strand starting at position 2688 of SEQ ID NO: 1564222
uuaacaguuuguuuacaca

SEQ ID NO: 1863814 - RNA, 19 nt, Artificial Sequence
  Description of Artificial Sequence: Synthetic oligonucleotide
  Antisense strand to SEQ ID NO: 1863813
uguguaaacaaacuguuaa

SEQ ID NO: 1863815 - RNA, 19 nt, Artificial Sequence
  Description of Artificial Sequence: Synthetic oligonucleotide
  Sense strand starting at position 2936 of SEQ ID NO: 1564222
uuguguuuggcugaaauua

SEQ ID NO: 1863816 - RNA, 19 nt, Artificial Sequence
  Description of Artificial Sequence: Synthetic oligonucleotide
  Antisense strand to SEQ ID NO: 1863815
uaauuucagccaaacacaa

SEQ ID NO: 1863817 - RNA, 19 nt, Artificial Sequence
  Description of Artificial Sequence: Synthetic oligonucleotide
  Sense strand starting at position 2946 of SEQ ID NO: 1564222
cugaaauuaggcugucuuu

SEQ ID NO: 1863818 - RNA, 19 nt, Artificial Sequence
  Description of Artificial Sequence: Synthetic oligonucleotide
  Antisense strand to SEQ ID NO: 1863817
aaagacagccuaauuucag

SEQ ID NO: 1863819 - RNA, 19 nt, Artificial Sequence
  Description of Artificial Sequence: Synthetic oligonucleotide
  Sense strand starting at position 3005 of SEQ ID NO: 1564222
guuaguuugcgguuuguua

SEQ ID NO: 1863820 - RNA, 19 nt, Artificial Sequence
  Description of Artificial Sequence: Synthetic oligonucleotide
  Antisense strand to SEQ ID NO: 1863819
uaacaaaccgcaaacuaac

SEQ ID NO: 1863821 - RNA, 19 nt, Artificial Sequence
  Description of Artificial Sequence: Synthetic oligonucleotide
  Sense strand starting at position 3014 of SEQ ID NO: 1564222
cgguuuguuagauaggaac

SEQ ID NO: 1863822 - RNA, 19 nt, Artificial Sequence
  Description of Artificial Sequence: Synthetic oligonucleotide
  Antisense strand to SEQ ID NO: 1863821
guuccuaucuaacaaaccg

SEQ ID NO: 1863823 - RNA, 19 nt, Artificial Sequence
  Description of Artificial Sequence: Synthetic oligonucleotide
  Sense strand starting at position 3077 of SEQ ID NO: 1564222
uuaauauaugcaggagaug

SEQ ID NO: 1863824 - RNA, 19 nt, Artificial Sequence
  Description of Artificial Sequence: Synthetic oligonucleotide
  Antisense strand to SEQ ID NO: 1863823
caucuccugcauauauuaa

SEQ ID NO: 1863825 - RNA, 19 nt, Artificial Sequence
  Description of Artificial Sequence: Synthetic oligonucleotide
  Sense strand starting at position 3109 of SEQ ID NO: 1564222
auuccuauguuguccaaua

SEQ ID NO: 1863826 - RNA, 19 nt, Artificial Sequence
  Description of Artificial Sequence: Synthetic oligonucleotide
  Antisense strand to SEQ ID NO: 1863825
uauuggacaacauaggaau

SEQ ID NO: 1863827 - RNA, 19 nt, Artificial Sequence
  Description of Artificial Sequence: Synthetic oligonucleotide
  Sense strand starting at position 3111 of SEQ ID NO: 1564222
uccuauguuguccaauaca

SEQ ID NO: 1863828 - RNA, 19 nt, Artificial Sequence
  Description of Artificial Sequence: Synthetic oligonucleotide
  Antisense strand to SEQ ID NO: 1863827
uguauuggacaacauagga

SEQ ID NO: 1863829 - RNA, 19 nt, Artificial Sequence
  Description of Artificial Sequence: Synthetic oligonucleotide
  Sense strand starting at position 3253 of SEQ ID NO: 1564222
agggaauguccauguuucu

SEQ ID NO: 1863830 - RNA, 19 nt, Artificial Sequence
  Description of Artificial Sequence: Synthetic oligonucleotide
  Antisense strand to SEQ ID NO: 1863829
agaaacauggacauucccu

SEQ ID NO: 1863831 - RNA, 19 nt, Artificial Sequence
  Description of Artificial Sequence: Synthetic oligonucleotide
  Sense strand starting at position 3332 of SEQ ID NO: 1564222
cuaugaucauguuucucuu

SEQ ID NO: 1863832 - RNA, 19 nt, Artificial Sequence
  Description of Artificial Sequence: Synthetic oligonucleotide
  Antisense strand to SEQ ID NO: 1863831
aagagaaacaugaucauag

SEQ ID NO: 1863833 - RNA, 19 nt, Artificial Sequence
  Description of Artificial Sequence: Synthetic oligonucleotide
  Sense strand starting at position 3335 of SEQ ID NO: 1564222
ugaucauguuucucuuaag

SEQ ID NO: 1863834 - RNA, 19 nt, Artificial Sequence
  Description of Artificial Sequence: Synthetic oligonucleotide
  Antisense strand to SEQ ID NO: 1863833
cuuaagagaaacaugauca

SEQ ID NO: 1863835 - RNA, 19 nt, Artificial Sequence
  Description of Artificial Sequence: Synthetic oligonucleotide
  Sense strand starting at position 3385 of SEQ ID NO: 1564222
acuccuuguccugacauua

SEQ ID NO: 1863836 - RNA, 19 nt, Artificial Sequence
  Description of Artificial Sequence: Synthetic oligonucleotide
  Antisense strand to SEQ ID NO: 1863835
uaaugucaggacaaggagu

SEQ ID NO: 1863837 - RNA, 19 nt, Artificial Sequence
  Description of Artificial Sequence: Synthetic oligonucleotide
  Sense strand starting at position 3555 of SEQ ID NO: 1564222
uuauuauaugggcauuaug

SEQ ID NO: 1863838 - RNA, 19 nt, Artificial Sequence
  Description of Artificial Sequence: Synthetic oligonucleotide
  Antisense strand to SEQ ID NO: 1863837
cauaaugcccauauaauaa

SEQ ID NO: 1863839 - RNA, 19 nt, Artificial Sequence
  Description of Artificial Sequence: Synthetic oligonucleotide
  Sense strand starting at position 3796 of SEQ ID NO: 1564222
guggaaaggguucauguuu

SEQ ID NO: 1863840 - RNA, 19 nt, Artificial Sequence
  Description of Artificial Sequence: Synthetic oligonucleotide
  Antisense strand to SEQ ID NO: 1863839
aaacaugaacccuuuccac

SEQ ID NO: 1863841 - RNA, 19 nt, Artificial Sequence
  Description of Artificial Sequence: Synthetic oligonucleotide
  Sense strand starting at position 3815 of SEQ ID NO: 1564222
uggcuuauucuagagugac

SEQ ID NO: 1863842 - RNA, 19 nt, Artificial Sequence
  Description of Artificial Sequence: Synthetic oligonucleotide
  Antisense strand to SEQ ID NO: 1863841
gucacucuagaauaagcca

SEQ ID NO: 1863843 - RNA, 19 nt, Artificial Sequence
  Description of Artificial Sequence: Synthetic oligonucleotide
  Sense strand starting at position 3913 of SEQ ID NO: 1564222
ccauuagggagaugcuaaa

SEQ ID NO: 1863844 - RNA, 19 nt, Artificial Sequence
  Description of Artificial Sequence: Synthetic oligonucleotide
  Antisense strand to SEQ ID NO: 1863843
uuuagcaucucccuaaugg

SEQ ID NO: 1863845 - RNA, 19 nt, Artificial Sequence
  Description of Artificial Sequence: Synthetic oligonucleotide
  Sense strand starting at position 47 of SEQ ID NO: 1564223
acacuauucugacugugga

SEQ ID NO: 1863846 - RNA, 19 nt, Artificial Sequence
  Description of Artificial Sequence: Synthetic oligonucleotide
  Antisense strand to SEQ ID NO: 1863845
uccacagucagaauagugu

SEQ ID NO: 1863847 - RNA, 19 nt, Artificial Sequence
  Description of Artificial Sequence: Synthetic oligonucleotide
  Sense strand starting at position 48 of SEQ ID NO: 1564223
cacuauucugacuguggaa

SEQ ID NO: 1863848 - RNA, 19 nt, Artificial Sequence
  Description of Artificial Sequence: Synthetic oligonucleotide
  Antisense strand to SEQ ID NO: 1863847
uuccacagucagaauagug

SEQ ID NO: 1863849 - RNA, 19 nt, Artificial Sequence
  Description of Artificial Sequence: Synthetic oligonucleotide
  Sense strand starting at position 107 of SEQ ID NO: 1564223
uggcucaggauuggucaaa

SEQ ID NO: 1863850 - RNA, 19 nt, Artificial Sequence
  Description of Artificial Sequence: Synthetic oligonucleotide
  Antisense strand to SEQ ID NO: 1863849
uuugaccaauccugagcca

SEQ ID NO: 1863851 - RNA, 19 nt, Artificial Sequence
  Description of Artificial Sequence: Synthetic oligonucleotide
  Sense strand starting at position 108 of SEQ ID NO: 1564223
ggcucaggauuggucaaau

SEQ ID NO: 1863852 - RNA, 19 nt, Artificial Sequence
  Description of Artificial Sequence: Synthetic oligonucleotide
  Antisense strand to SEQ ID NO: 1863851
auuugaccaauccugagcc

SEQ ID NO: 1863853 - RNA, 19 nt, Artificial Sequence
  Description of Artificial Sequence: Synthetic oligonucleotide
  Sense strand starting at position 192 of SEQ ID NO: 1564223
ccagguccgacagauacuu

SEQ ID NO: 1863854 - RNA, 19 nt, Artificial Sequence
  Description of Artificial Sequence: Synthetic oligonucleotide
  Antisense strand to SEQ ID NO: 1863853
aaguaucugucggaccugg

SEQ ID NO: 1863855 - RNA, 19 nt, Artificial Sequence
  Description of Artificial Sequence: Synthetic oligonucleotide
  Sense strand starting at position 197 of SEQ ID NO: 1564223
uccgacagauacuuaagau

SEQ ID NO: 1863856 - RNA, 19 nt, Artificial Sequence
  Description of Artificial Sequence: Synthetic oligonucleotide
  Antisense strand to SEQ ID NO: 1863855
aucuuaaguaucugucgga

SEQ ID NO: 1863857 - RNA, 19 nt, Artificial Sequence
  Description of Artificial Sequence: Synthetic oligonucleotide
  Sense strand starting at position 259 of SEQ ID NO: 1564223
uggaguguugacuacuaau

SEQ ID NO: 1863858 - RNA, 19 nt, Artificial Sequence
  Description of Artificial Sequence: Synthetic oligonucleotide
  Antisense strand to SEQ ID NO: 1863857
auuaguagucaacacucca

SEQ ID NO: 1863859 - RNA, 19 nt, Artificial Sequence
  Description of Artificial Sequence: Synthetic oligonucleotide
  Sense strand starting at position 725 of SEQ ID NO: 1564223
uugaaaggcaucugaguug

SEQ ID NO: 1863860 - RNA, 19 nt, Artificial Sequence
  Description of Artificial Sequence: Synthetic oligonucleotide
  Antisense strand to SEQ ID NO: 1863859
caacucagaugccuuucaa

SEQ ID NO: 1863861 - RNA, 19 nt, Artificial Sequence
  Description of Artificial Sequence: Synthetic oligonucleotide
  Sense strand starting at position 808 of SEQ ID NO: 1564223
agggcauggguaugaguau

SEQ ID NO: 1863862 - RNA, 19 nt, Artificial Sequence
  Description of Artificial Sequence: Synthetic oligonucleotide
  Antisense strand to SEQ ID NO: 1863861
auacucauacccaugcccu

SEQ ID NO: 1863863 - RNA, 19 nt, Artificial Sequence
  Description of Artificial Sequence: Synthetic oligonucleotide
  Sense strand starting at position 814 of SEQ ID NO: 1564223
uggguaugaguaugugaau

SEQ ID NO: 1863864 - RNA, 19 nt, Artificial Sequence
  Description of Artificial Sequence: Synthetic oligonucleotide
  Antisense strand to SEQ ID NO: 1863863
auucacauacucauaccca

SEQ ID NO: 1863865 - RNA, 19 nt, Artificial Sequence
  Description of Artificial Sequence: Synthetic oligonucleotide
  Sense strand starting at position 815 of SEQ ID NO: 1564223
ggguaugaguaugugaaug

SEQ ID NO: 1863866 - RNA, 19 nt, Artificial Sequence
  Description of Artificial Sequence: Synthetic oligonucleotide
  Antisense strand to SEQ ID NO: 1863865
cauucacauacucauaccc

SEQ ID NO: 1863867 - RNA, 19 nt, Artificial Sequence
  Description of Artificial Sequence: Synthetic oligonucleotide
  Sense strand starting at position 820 of SEQ ID NO: 1564223
ugaguaugugaaugaggua

SEQ ID NO: 1863868 - RNA, 19 nt, Artificial Sequence
  Description of Artificial Sequence: Synthetic oligonucleotide
  Antisense strand to SEQ ID NO: 1863867
uaccucauucacauacuca

SEQ ID NO: 1863869 - RNA, 19 nt, Artificial Sequence
  Description of Artificial Sequence: Synthetic oligonucleotide
  Sense strand starting at position 945 of SEQ ID NO: 1564223
agguguaauuugccugcua

SEQ ID NO: 1863870 - RNA, 19 nt, Artificial Sequence
  Description of Artificial Sequence: Synthetic oligonucleotide
  Antisense strand to SEQ ID NO: 1863869
uagcaggcaaauuacaccu

SEQ ID NO: 1863871 - RNA, 19 nt, Artificial Sequence
  Description of Artificial Sequence: Synthetic oligonucleotide
  Sense strand starting at position 1289 of SEQ ID NO: 1564223
gggaucuuacggcauggaa

SEQ ID NO: 1863872 - RNA, 19 nt, Artificial Sequence
  Description of Artificial Sequence: Synthetic oligonucleotide
  Antisense strand to SEQ ID NO: 1863871
uuccaugccguaagauccc

SEQ ID NO: 1863873 - RNA, 19 nt, Artificial Sequence
  Description of Artificial Sequence: Synthetic oligonucleotide
  Sense strand starting at position 1291 of SEQ ID NO: 1564223
gaucuuacggcauggaaga

SEQ ID NO: 1863874 - RNA, 19 nt, Artificial Sequence
  Description of Artificial Sequence: Synthetic oligonucleotide
  Antisense strand to SEQ ID NO: 1863873
ucuuccaugccguaagauc

SEQ ID NO: 1863875 - RNA, 19 nt, Artificial Sequence
  Description of Artificial Sequence: Synthetic oligonucleotide
  Sense strand starting at position 1636 of SEQ ID NO: 1564223
aaggauauauucucgaagu

SEQ ID NO: 1863876 - RNA, 19 nt, Artificial Sequence
  Description of Artificial Sequence: Synthetic oligonucleotide
  Antisense strand to SEQ ID NO: 1863875
acuucgagaauauauccuu

SEQ ID NO: 1863877 - RNA, 19 nt, Artificial Sequence
  Description of Artificial Sequence: Synthetic oligonucleotide
  Sense strand starting at position 1706 of SEQ ID NO: 1564223
ccacguuuccgugccggaa

SEQ ID NO: 1863878 - RNA, 19 nt, Artificial Sequence
  Description of Artificial Sequence: Synthetic oligonucleotide
  Antisense strand to SEQ ID NO: 1863877
uuccggcacggaaacgugg

SEQ ID NO: 1863879 - RNA, 19 nt, Artificial Sequence
  Description of Artificial Sequence: Synthetic oligonucleotide
  Sense strand starting at position 2131 of SEQ ID NO: 1564223
cugccauuccacugggaca

SEQ ID NO: 1863880 - RNA, 19 nt, Artificial Sequence
  Description of Artificial Sequence: Synthetic oligonucleotide
  Antisense strand to SEQ ID NO: 1863879
ugucccaguggaauggcag

SEQ ID NO: 1863881 - RNA, 19 nt, Artificial Sequence
  Description of Artificial Sequence: Synthetic oligonucleotide
  Sense strand starting at position 2133 of SEQ ID NO: 1564223
gccauuccacugggacaaa

SEQ ID NO: 1863882 - RNA, 19 nt, Artificial Sequence
  Description of Artificial Sequence: Synthetic oligonucleotide
  Antisense strand to SEQ ID NO: 1863881
uuugucccaguggaauggc

SEQ ID NO: 1863883 - RNA, 19 nt, Artificial Sequence
  Description of Artificial Sequence: Synthetic oligonucleotide
  Sense strand starting at position 2394 of SEQ ID NO: 1564223
cuguuugcucaggacuaaa

SEQ ID NO: 1863884 - RNA, 19 nt, Artificial Sequence
  Description of Artificial Sequence: Synthetic oligonucleotide
  Antisense strand to SEQ ID NO: 1863883
uuuaguccugagcaaacag

SEQ ID NO: 1863885 - RNA, 19 nt, Artificial Sequence
  Description of Artificial Sequence: Synthetic oligonucleotide
  Sense strand starting at position 2397 of SEQ ID NO: 1564223
uuugcucaggacuaaacau

SEQ ID NO: 1863886 - RNA, 19 nt, Artificial Sequence
  Description of Artificial Sequence: Synthetic oligonucleotide
  Antisense strand to SEQ ID NO: 1863885
auguuuaguccugagcaaa

SEQ ID NO: 1863887 - RNA, 19 nt, Artificial Sequence
  Description of Artificial Sequence: Synthetic oligonucleotide
  Sense strand starting at position 2510 of SEQ ID NO: 1564223
cugaaacgccuugaaucuu

SEQ ID NO: 1863888 - RNA, 19 nt, Artificial Sequence
  Description of Artificial Sequence: Synthetic oligonucleotide
  Antisense strand to SEQ ID NO: 1863887
aagauucaaggcguuucag

SEQ ID NO: 1863889 - RNA, 19 nt, Artificial Sequence
  Description of Artificial Sequence: Synthetic oligonucleotide
  Sense strand starting at position 2548 of SEQ ID NO: 1564223
gagaguuaggaguagcaua

SEQ ID NO: 1863890 - RNA, 19 nt, Artificial Sequence
  Description of Artificial Sequence: Synthetic oligonucleotide
  Antisense strand to SEQ ID NO: 1863889
uaugcuacuccuaacucuc

SEQ ID NO: 1863891 - RNA, 19 nt, Artificial Sequence
  Description of Artificial Sequence: Synthetic oligonucleotide
  Sense strand starting at position 2615 of SEQ ID NO: 1564223
gggauaugaauaugucucu

SEQ ID NO: 1863892 - RNA, 19 nt, Artificial Sequence
  Description of Artificial Sequence: Synthetic oligonucleotide
  Antisense strand to SEQ ID NO: 1863891
agagacauauucauauccc

SEQ ID NO: 1863893 - RNA, 19 nt, Artificial Sequence
  Description of Artificial Sequence: Synthetic oligonucleotide
  Sense strand starting at position 2616 of SEQ ID NO: 1564223
ggauaugaauaugucucuu

SEQ ID NO: 1863894 - RNA, 19 nt, Artificial Sequence
  Description of Artificial Sequence: Synthetic oligonucleotide
  Antisense strand to SEQ ID NO: 1863893
aagagacauauucauaucc

SEQ ID NO: 1863895 - RNA, 19 nt, Artificial Sequence
  Description of Artificial Sequence: Synthetic oligonucleotide
  Sense strand starting at position 2954 of SEQ ID NO: 1564223
uugaaugacuuucugagac

SEQ ID NO: 1863896 - RNA, 19 nt, Artificial Sequence
  Description of Artificial Sequence: Synthetic oligonucleotide
  Antisense strand to SEQ ID NO: 1863895
gucucagaaagucauucaa

SEQ ID NO: 1863897 - RNA, 19 nt, Artificial Sequence
  Description of Artificial Sequence: Synthetic oligonucleotide
  Sense strand starting at position 3048 of SEQ ID NO: 1564223
aucuguuucuaccuaugga

SEQ ID NO: 1863898 - RNA, 19 nt, Artificial Sequence
  Description of Artificial Sequence: Synthetic oligonucleotide
  Antisense strand to SEQ ID NO: 1863897
uccauagguagaaacagau

SEQ ID NO: 1863899 - RNA, 19 nt, Artificial Sequence
  Description of Artificial Sequence: Synthetic oligonucleotide
  Sense strand starting at position 3068 of SEQ ID NO: 1564223
cuaugaugauggccaauga

SEQ ID NO: 1863900 - RNA, 19 nt, Artificial Sequence
  Description of Artificial Sequence: Synthetic oligonucleotide
  Antisense strand to SEQ ID NO: 1863899
ucauuggccaucaucauag

SEQ ID NO: 1863901 - RNA, 19 nt, Artificial Sequence
  Description of Artificial Sequence: Synthetic oligonucleotide
  Sense strand starting at position 3172 of SEQ ID NO: 1564223
uucuauaaucuuggagaac

SEQ ID NO: 1863902 - RNA, 19 nt, Artificial Sequence
  Description of Artificial Sequence: Synthetic oligonucleotide
  Antisense strand to SEQ ID NO: 1863901
guucuccaagauuauagaa

SEQ ID NO: 1863903 - RNA, 19 nt, Artificial Sequence
  Description of Artificial Sequence: Synthetic oligonucleotide
  Sense strand starting at position 3224 of SEQ ID NO: 1564223
uaauuaucucugggaagug

SEQ ID NO: 1863904 - RNA, 19 nt, Artificial Sequence
  Description of Artificial Sequence: Synthetic oligonucleotide
  Antisense strand to SEQ ID NO: 1863903
cacuucccagagauaauua

SEQ ID NO: 1863905 - RNA, 19 nt, Artificial Sequence
  Description of Artificial Sequence: Synthetic oligonucleotide
  Sense strand starting at position 3293 of SEQ ID NO: 1564223
ucucuaauuucgcuuguua

SEQ ID NO: 1863906 - RNA, 19 nt, Artificial Sequence
  Description of Artificial Sequence: Synthetic oligonucleotide
  Antisense strand to SEQ ID NO: 1863905
uaacaagcgaaauuagaga

SEQ ID NO: 1863907 - RNA, 19 nt, Artificial Sequence
  Description of Artificial Sequence: Synthetic oligonucleotide
  Sense strand starting at position 3295 of SEQ ID NO: 1564223
ucuaauuucgcuuguuaca

SEQ ID NO: 1863908 - RNA, 19 nt, Artificial Sequence
  Description of Artificial Sequence: Synthetic oligonucleotide
  Antisense strand to SEQ ID NO: 1863907
uguaacaagcgaaauuaga

SEQ ID NO: 1863909 - RNA, 19 nt, Artificial Sequence
  Description of Artificial Sequence: Synthetic oligonucleotide
  Sense strand starting at position 3373 of SEQ ID NO: 1564223
acacuuuaacagugguuau

SEQ ID NO: 1863910 - RNA, 19 nt, Artificial Sequence
  Description of Artificial Sequence: Synthetic oligonucleotide
  Antisense strand to SEQ ID NO: 1863909
auaaccacuguuaaagugu

SEQ ID NO: 1863911 - RNA, 19 nt, Artificial Sequence
  Description of Artificial Sequence: Synthetic oligonucleotide
  Sense strand starting at position 3386 of SEQ ID NO: 1564223
gguuaucuuuggguaauag

SEQ ID NO: 1863912 - RNA, 19 nt, Artificial Sequence
  Description of Artificial Sequence: Synthetic oligonucleotide
  Antisense strand to SEQ ID NO: 1863911
cuauuacccaaagauaacc

SEQ ID NO: 1863913 - RNA, 19 nt, Artificial Sequence
  Description of Artificial Sequence: Synthetic oligonucleotide
  Sense strand starting at position 3506 of SEQ ID NO: 1564223
ccaguaacagcugaucauu

SEQ ID NO: 1863914 - RNA, 19 nt, Artificial Sequence
  Description of Artificial Sequence: Synthetic oligonucleotide
  Antisense strand to SEQ ID NO: 1863913
aaugaucagcuguuacugg

SEQ ID NO: 1863915 - RNA, 19 nt, Artificial Sequence
  Description of Artificial Sequence: Synthetic oligonucleotide
  Sense strand starting at position 3509 of SEQ ID NO: 1564223
guaacagcugaucauugua

SEQ ID NO: 1863916 - RNA, 19 nt, Artificial Sequence
  Description of Artificial Sequence: Synthetic oligonucleotide
  Antisense strand to SEQ ID NO: 1863915
uacaaugaucagcuguuac

SEQ ID NO: 1863917 - RNA, 19 nt, Artificial Sequence
  Description of Artificial Sequence: Synthetic oligonucleotide
  Sense strand starting at position 3543 of SEQ ID NO: 1564223
cuuggaaaguacuucuaua

SEQ ID NO: 1863918 - RNA, 19 nt, Artificial Sequence
  Description of Artificial Sequence: Synthetic oligonucleotide
  Antisense strand to SEQ ID NO: 1863917
uauagaaguacuuuccaag

SEQ ID NO: 1863919 - RNA, 19 nt, Artificial Sequence
  Description of Artificial Sequence: Synthetic oligonucleotide
  Sense strand starting at position 3583 of SEQ ID NO: 1564223
gggugauaaucccucuuaa

SEQ ID NO: 1863920 - RNA, 19 nt, Artificial Sequence
  Description of Artificial Sequence: Synthetic oligonucleotide
  Antisense strand to SEQ ID NO: 1863919
uuaagagggauuaucaccc

SEQ ID NO: 1863921 - RNA, 19 nt, Artificial Sequence
  Description of Artificial Sequence: Synthetic oligonucleotide
  Sense strand starting at position 3792 of SEQ ID NO: 1564223
ucaugacagugcucaaaca

SEQ ID NO: 1863922 - RNA, 19 nt, Artificial Sequence
  Description of Artificial Sequence: Synthetic oligonucleotide
  Antisense strand to SEQ ID NO: 1863921
uguuugagcacugucauga

SEQ ID NO: 1863923 - RNA, 19 nt, Artificial Sequence
  Description of Artificial Sequence: Synthetic oligonucleotide
  Sense strand starting at position 3972 of SEQ ID NO: 1564223
gggauuccuggaggguuua

SEQ ID NO: 1863924 - RNA, 19 nt, Artificial Sequence
  Description of Artificial Sequence: Synthetic oligonucleotide
  Antisense strand to SEQ ID NO: 1863923
uaaacccuccaggaauccc

SEQ ID NO: 1863925 - RNA, 19 nt, Artificial Sequence
  Description of Artificial Sequence: Synthetic oligonucleotide
  Sense strand starting at position 1060 of SEQ ID NO: 1564224
auguuaggcuggucaggaa

SEQ ID NO: 1863926 - RNA, 19 nt, Artificial Sequence
  Description of Artificial Sequence: Synthetic oligonucleotide
  Antisense strand to SEQ ID NO: 1863925
uuccugaccagccuaacau

SEQ ID NO: 1863927 - RNA, 19 nt, Artificial Sequence
  Description of Artificial Sequence: Synthetic oligonucleotide
  Sense strand starting at position 1794 of SEQ ID NO: 1564224
ugcgaguucugggucggua

SEQ ID NO: 1863928 - RNA, 19 nt, Artificial Sequence
  Description of Artificial Sequence: Synthetic oligonucleotide
  Antisense strand to SEQ ID NO: 1863927
uaccgacccagaacucgca

SEQ ID NO: 1863929 - RNA, 19 nt, Artificial Sequence
  Description of Artificial Sequence: Synthetic oligonucleotide
  Sense strand starting at position 1795 of SEQ ID NO: 1564224
gcgaguucugggucgguag

SEQ ID NO: 1863930 - RNA, 19 nt, Artificial Sequence
  Description of Artificial Sequence: Synthetic oligonucleotide
  Antisense strand to SEQ ID NO: 1863929
cuaccgacccagaacucgc

SEQ ID NO: 1863931 - RNA, 19 nt, Artificial Sequence
  Description of Artificial Sequence: Synthetic oligonucleotide
  Sense strand starting at position 1806 of SEQ ID NO: 1564224
gucgguaggucaccucaga

SEQ ID NO: 1863932 - RNA, 19 nt, Artificial Sequence
  Description of Artificial Sequence: Synthetic oligonucleotide
  Antisense strand to SEQ ID NO: 1863931
ucugaggugaccuaccgac

SEQ ID NO: 1863933 - RNA, 19 nt, Artificial Sequence
  Description of Artificial Sequence: Synthetic oligonucleotide
  Sense strand starting at position 1903 of SEQ ID NO: 1564224
cgagcacauucccuaguua

SEQ ID NO: 1863934 - RNA, 19 nt, Artificial Sequence
  Description of Artificial Sequence: Synthetic oligonucleotide
  Antisense strand to SEQ ID NO: 1863933
uaacuagggaaugugcucg

SEQ ID NO: 1863935 - RNA, 19 nt, Artificial Sequence
  Description of Artificial Sequence: Synthetic oligonucleotide
  Sense strand starting at position 1961 of SEQ ID NO: 1564224
ugggcuaacuccuccucaa

SEQ ID NO: 1863936 - RNA, 19 nt, Artificial Sequence
  Description of Artificial Sequence: Synthetic oligonucleotide
  Antisense strand to SEQ ID NO: 1863935
uugaggaggaguuagccca

SEQ ID NO: 1863937 - RNA, 19 nt, Artificial Sequence
  Description of Artificial Sequence: Synthetic oligonucleotide
  Sense strand starting at position 1990 of SEQ ID NO: 1564224
gggcuugccucauagaaug

SEQ ID NO: 1863938 - RNA, 19 nt, Artificial Sequence
  Description of Artificial Sequence: Synthetic oligonucleotide
  Antisense strand to SEQ ID NO: 1863937
cauucuaugaggcaagccc

SEQ ID NO: 1863939 - RNA, 19 nt, Artificial Sequence
  Description of Artificial Sequence: Synthetic oligonucleotide
  Sense strand starting at position 2116 of SEQ ID NO: 1564224
gugaccauuuaucacgaaa

SEQ ID NO: 1863940 - RNA, 19 nt, Artificial Sequence
  Description of Artificial Sequence: Synthetic oligonucleotide
  Antisense strand to SEQ ID NO: 1863939
uuucgugauaaauggucac

SEQ ID NO: 1863941 - RNA, 19 nt, Artificial Sequence
  Description of Artificial Sequence: Synthetic oligonucleotide
  Sense strand starting at position 2323 of SEQ ID NO: 1564224
cagcuagugccggaacuuu

SEQ ID NO: 1863942 - RNA, 19 nt, Artificial Sequence
  Description of Artificial Sequence: Synthetic oligonucleotide
  Antisense strand to SEQ ID NO: 1863941
aaaguuccggcacuagcug

SEQ ID NO: 1863943 - RNA, 19 nt, Artificial Sequence
  Description of Artificial Sequence: Synthetic oligonucleotide
  Sense strand starting at position 2405 of SEQ ID NO: 1564224
agaugagaaugggacuauu

SEQ ID NO: 1863944 - RNA, 19 nt, Artificial Sequence
  Description of Artificial Sequence: Synthetic oligonucleotide
  Antisense strand to SEQ ID NO: 1863943
aauagucccauucucaucu

SEQ ID NO: 1863945 - RNA, 19 nt, Artificial Sequence
  Description of Artificial Sequence: Synthetic oligonucleotide
  Sense strand starting at position 2770 of SEQ ID NO: 1564224
ccacgagcuccggguaagu

SEQ ID NO: 1863946 - RNA, 19 nt, Artificial Sequence
  Description of Artificial Sequence: Synthetic oligonucleotide
  Antisense strand to SEQ ID NO: 1863945
acuuacccggagcucgugg

SEQ ID NO: 1863947 - RNA, 19 nt, Artificial Sequence
  Description of Artificial Sequence: Synthetic oligonucleotide
  Sense strand starting at position 2779 of SEQ ID NO: 1564224
ccggguaaguucuccucau

SEQ ID NO: 1863948 - RNA, 19 nt, Artificial Sequence
  Description of Artificial Sequence: Synthetic oligonucleotide
  Antisense strand to SEQ ID NO: 1863947
augaggagaacuuacccgg

SEQ ID NO: 1863949 - RNA, 19 nt, Artificial Sequence
  Description of Artificial Sequence: Synthetic oligonucleotide
  Sense strand starting at position 2780 of SEQ ID NO: 1564224
cggguaaguucuccucauu

SEQ ID NO: 1863950 - RNA, 19 nt, Artificial Sequence
  Description of Artificial Sequence: Synthetic oligonucleotide
  Antisense strand to SEQ ID NO: 1863949
aaugaggagaacuuacccg

SEQ ID NO: 1863951 - RNA, 19 nt, Artificial Sequence
  Description of Artificial Sequence: Synthetic oligonucleotide
  Sense strand starting at position 2783 of SEQ ID NO: 1564224
guaaguucuccucauugaa

SEQ ID NO: 1863952 - RNA, 19 nt, Artificial Sequence
  Description of Artificial Sequence: Synthetic oligonucleotide
  Antisense strand to SEQ ID NO: 1863951
uucaaugaggagaacuuac

SEQ ID NO: 1863953 - RNA, 19 nt, Artificial Sequence
  Description of Artificial Sequence: Synthetic oligonucleotide
  Sense strand starting at position 2795 of SEQ ID NO: 1564224
cauugaagucugggucaug

SEQ ID NO: 1863954 - RNA, 19 nt, Artificial Sequence
  Description of Artificial Sequence: Synthetic oligonucleotide
  Antisense strand to SEQ ID NO: 1863953
caugacccagacuucaaug

SEQ ID NO: 1863955 - RNA, 19 nt, Artificial Sequence
  Description of Artificial Sequence: Synthetic oligonucleotide
  Sense strand starting at position 2899 of SEQ ID NO: 1564224
gucguaaugcccugucuug

SEQ ID NO: 1863956 - RNA, 19 nt, Artificial Sequence
  Description of Artificial Sequence: Synthetic oligonucleotide
  Antisense strand to SEQ ID NO: 1863955
caagacagggcauuacgac

SEQ ID NO: 1863957 - RNA, 19 nt, Artificial Sequence
  Description of Artificial Sequence: Synthetic oligonucleotide
  Sense strand starting at position 3108 of SEQ ID NO: 1564224
ggagaaugucacugggauc

SEQ ID NO: 1863958 - RNA, 19 nt, Artificial Sequence
  Description of Artificial Sequence: Synthetic oligonucleotide
  Antisense strand to SEQ ID NO: 1863957
gaucccagugacauucucc

SEQ ID NO: 1863959 - RNA, 19 nt, Artificial Sequence
  Description of Artificial Sequence: Synthetic oligonucleotide
  Sense strand starting at position 3111 of SEQ ID NO: 1564224
gaaugucacugggaucaga

SEQ ID NO: 1863960 - RNA, 19 nt, Artificial Sequence
  Description of Artificial Sequence: Synthetic oligonucleotide
  Antisense strand to SEQ ID NO: 1863959
ucugaucccagugacauuc

SEQ ID NO: 1863961 - RNA, 19 nt, Artificial Sequence
  Description of Artificial Sequence: Synthetic oligonucleotide
  Sense strand starting at position 3202 of SEQ ID NO: 1564224
gggugaaugagcgacucua

SEQ ID NO: 1863962 - RNA, 19 nt, Artificial Sequence
  Description of Artificial Sequence: Synthetic oligonucleotide
  Antisense strand to SEQ ID NO: 1863961
uagagucgcucauucaccc

SEQ ID NO: 1863963 - RNA, 19 nt, Artificial Sequence
  Description of Artificial Sequence: Synthetic oligonucleotide
  Sense strand starting at position 3401 of SEQ ID NO: 1564224
uuugcaucaguuugaggga

SEQ ID NO: 1863964 - RNA, 19 nt, Artificial Sequence
  Description of Artificial Sequence: Synthetic oligonucleotide
  Antisense strand to SEQ ID NO: 1863963
ucccucaaacugaugcaaa

SEQ ID NO: 1863965 - RNA, 19 nt, Artificial Sequence
  Description of Artificial Sequence: Synthetic oligonucleotide
  Sense strand starting at position 3402 of SEQ ID NO: 1564224
uugcaucaguuugagggau

SEQ ID NO: 1863966 - RNA, 19 nt, Artificial Sequence
  Description of Artificial Sequence: Synthetic oligonucleotide
  Antisense strand to SEQ ID NO: 1863965
aucccucaaacugaugcaa

SEQ ID NO: 1863967 - RNA, 19 nt, Artificial Sequence
  Description of Artificial Sequence: Synthetic oligonucleotide
  Sense strand starting at position 3404 of SEQ ID NO: 1564224
gcaucaguuugagggauau

SEQ ID NO: 1863968 - RNA, 19 nt, Artificial Sequence
  Description of Artificial Sequence: Synthetic oligonucleotide
  Antisense strand to SEQ ID NO: 1863967
auaucccucaaacugaugc

SEQ ID NO: 1863969 - RNA, 19 nt, Artificial Sequence
  Description of Artificial Sequence: Synthetic oligonucleotide
  Sense strand starting at position 3408 of SEQ ID NO: 1564224
caguuugagggauauuggu

SEQ ID NO: 1863970 - RNA, 19 nt, Artificial Sequence
  Description of Artificial Sequence: Synthetic oligonucleotide
  Antisense strand to SEQ ID NO: 1863969
accaauaucccucaaacug

SEQ ID NO: 1863971 - RNA, 19 nt, Artificial Sequence
  Description of Artificial Sequence: Synthetic oligonucleotide
  Sense strand starting at position 3421 of SEQ ID NO: 1564224
auuggucucuaguuguauu

SEQ ID NO: 1863972 - RNA, 19 nt, Artificial Sequence
  Description of Artificial Sequence: Synthetic oligonucleotide
  Antisense strand to SEQ ID NO: 1863971
aauacaacuagagaccaau

SEQ ID NO: 1863973 - RNA, 19 nt, Artificial Sequence
  Description of Artificial Sequence: Synthetic oligonucleotide
  Sense strand starting at position 3429 of SEQ ID NO: 1564224
cuaguuguauuguaguauu

SEQ ID NO: 1863974 - RNA, 19 nt, Artificial Sequence
  Description of Artificial Sequence: Synthetic oligonucleotide
  Antisense strand to SEQ ID NO: 1863973
aauacuacaauacaacuag

SEQ ID NO: 1863975 - RNA, 19 nt, Artificial Sequence
  Description of Artificial Sequence: Synthetic oligonucleotide
  Sense strand starting at position 3453 of SEQ ID NO: 1564224
uugguaucaaaguguaaug

SEQ ID NO: 1863976 - RNA, 19 nt, Artificial Sequence
  Description of Artificial Sequence: Synthetic oligonucleotide
  Antisense strand to SEQ ID NO: 1863975
cauuacacuuugauaccaa

SEQ ID NO: 1863977 - RNA, 19 nt, Artificial Sequence
  Description of Artificial Sequence: Synthetic oligonucleotide
  Sense strand starting at position 3494 of SEQ ID NO: 1564224
aguguuccaucuuaaauuu

SEQ ID NO: 1863978 - RNA, 19 nt, Artificial Sequence
  Description of Artificial Sequence: Synthetic oligonucleotide
  Antisense strand to SEQ ID NO: 1863977
aaauuuaagauggaacacu

SEQ ID NO: 1863979 - RNA, 19 nt, Artificial Sequence
  Description of Artificial Sequence: Synthetic oligonucleotide
  Sense strand starting at position 3591 of SEQ ID NO: 1564224
ccuagaaacuaguucgaga

SEQ ID NO: 1863980 - RNA, 19 nt, Artificial Sequence
  Description of Artificial Sequence: Synthetic oligonucleotide
  Antisense strand to SEQ ID NO: 1863979
ucucgaacuaguuucuagg

SEQ ID NO: 1863981 - RNA, 19 nt, Artificial Sequence
  Description of Artificial Sequence: Synthetic oligonucleotide
  Sense strand starting at position 3593 of SEQ ID NO: 1564224
uagaaacuaguucgagauc

SEQ ID NO: 1863982 - RNA, 19 nt, Artificial Sequence
  Description of Artificial Sequence: Synthetic oligonucleotide
  Antisense strand to SEQ ID NO: 1863981
gaucucgaacuaguuucua

SEQ ID NO: 1863983 - RNA, 19 nt, Artificial Sequence
  Description of Artificial Sequence: Synthetic oligonucleotide
  Sense strand starting at position 3594 of SEQ ID NO: 1564224
agaaacuaguucgagauca

SEQ ID NO: 1863984 - RNA, 19 nt, Artificial Sequence
  Description of Artificial Sequence: Synthetic oligonucleotide
  Antisense strand to SEQ ID NO: 1863983
ugaucucgaacuaguuucu

SEQ ID NO: 1863985 - RNA, 19 nt, Artificial Sequence
  Description of Artificial Sequence: Synthetic oligonucleotide
  Sense strand starting at position 3625 of SEQ ID NO: 1564224
uggcgaaccucuguacaaa

SEQ ID NO: 1863986 - RNA, 19 nt, Artificial Sequence
  Description of Artificial Sequence: Synthetic oligonucleotide
  Antisense strand to SEQ ID NO: 1863985
uuuguacagagguucgcca

SEQ ID NO: 1863987 - RNA, 19 nt, Artificial Sequence
  Description of Artificial Sequence: Synthetic oligonucleotide
  Sense strand starting at position 3702 of SEQ ID NO: 1564224
ggcugagaggcucagguua

SEQ ID NO: 1863988 - RNA, 19 nt, Artificial Sequence
  Description of Artificial Sequence: Synthetic oligonucleotide
  Antisense strand to SEQ ID NO: 1863987
uaaccugagccucucagcc

SEQ ID NO: 1863989 - RNA, 19 nt, Artificial Sequence
  Description of Artificial Sequence: Synthetic oligonucleotide
  Sense strand starting at position 3704 of SEQ ID NO: 1564224
cugagaggcucagguuaca

SEQ ID NO: 1863990 - RNA, 19 nt, Artificial Sequence
  Description of Artificial Sequence: Synthetic oligonucleotide
  Antisense strand to SEQ ID NO: 1863989
uguaaccugagccucucag

SEQ ID NO: 1863991 - RNA, 19 nt, Artificial Sequence
  Description of Artificial Sequence: Synthetic oligonucleotide
  Sense strand starting at position 3766 of SEQ ID NO: 1564224
gagaccgugccucaaagaa

SEQ ID NO: 1863992 - RNA, 19 nt, Artificial Sequence
  Description of Artificial Sequence: Synthetic oligonucleotide
  Antisense strand to SEQ ID NO: 1863991
uucuuugaggcacggucuc

SEQ ID NO: 1863993 - RNA, 19 nt, Artificial Sequence
  Description of Artificial Sequence: Synthetic oligonucleotide
  Sense strand starting at position 3934 of SEQ ID NO: 1564224
ccgggaauugaguacgaau

SEQ ID NO: 1863994 - RNA, 19 nt, Artificial Sequence
  Description of Artificial Sequence: Synthetic oligonucleotide
  Antisense strand to SEQ ID NO: 1863993
auucguacucaauucccgg

SEQ ID NO: 1863995 - RNA, 19 nt, Artificial Sequence
  Description of Artificial Sequence: Synthetic oligonucleotide
  Sense strand starting at position 3936 of SEQ ID NO: 1564224
gggaauugaguacgaauug

SEQ ID NO: 1863996 - RNA, 19 nt, Artificial Sequence
  Description of Artificial Sequence: Synthetic oligonucleotide
  Antisense strand to SEQ ID NO: 1863995
caauucguacucaauuccc

SEQ ID NO: 1863997 - RNA, 19 nt, Artificial Sequence
  Description of Artificial Sequence: Synthetic oligonucleotide
  Sense strand starting at position 3941 of SEQ ID NO: 1564224
uugaguacgaauuggaaca

SEQ ID NO: 1863998 - RNA, 19 nt, Artificial Sequence
  Description of Artificial Sequence: Synthetic oligonucleotide
  Antisense strand to SEQ ID NO: 1863997
uguuccaauucguacucaa

SEQ ID NO: 1863999 - RNA, 19 nt, Artificial Sequence
  Description of Artificial Sequence: Synthetic oligonucleotide
  Sense strand starting at position 3943 of SEQ ID NO: 1564224
gaguacgaauuggaacaaa

SEQ ID NO: 1864000 - RNA, 19 nt, Artificial Sequence
  Description of Artificial Sequence: Synthetic oligonucleotide
  Antisense strand to SEQ ID NO: 1863999
uuuguuccaauucguacuc

SEQ ID NO: 1864001 - RNA, 19 nt, Artificial Sequence
  Description of Artificial Sequence: Synthetic oligonucleotide
  Sense strand starting at position 3969 of SEQ ID NO: 1564224
uguugaauuugcuaguaug

SEQ ID NO: 1864002 - RNA, 19 nt, Artificial Sequence
  Description of Artificial Sequence: Synthetic oligonucleotide
  Antisense strand to SEQ ID NO: 1864001
cauacuagcaaauucaaca

SEQ ID NO: 1864003 - RNA, 19 nt, Artificial Sequence
  Description of Artificial Sequence: Synthetic oligonucleotide
  Sense strand starting at position 3980 of SEQ ID NO: 1564224
cuaguaugcgguugauggu

SEQ ID NO: 1864004 - RNA, 19 nt, Artificial Sequence
  Description of Artificial Sequence: Synthetic oligonucleotide
  Antisense strand to SEQ ID NO: 1864003
accaucaaccgcauacuag

SEQ ID NO: 1864005 - RNA, 19 nt, Artificial Sequence
  Description of Artificial Sequence: Synthetic oligonucleotide
  Sense strand starting at position 1170 of SEQ ID NO: 1564225
auguuaggcuggucaggaa

SEQ ID NO: 1864006 - RNA, 19 nt, Artificial Sequence
  Description of Artificial Sequence: Synthetic oligonucleotide
  Antisense strand to SEQ ID NO: 1864005
uuccugaccagccuaacau

SEQ ID NO: 1864007 - RNA, 19 nt, Artificial Sequence
  Description of Artificial Sequence: Synthetic oligonucleotide
  Sense strand starting at position 1904 of SEQ ID NO: 1564225
ugcgaguucugggucggua

SEQ ID NO: 1864008 - RNA, 19 nt, Artificial Sequence
  Description of Artificial Sequence: Synthetic oligonucleotide
  Antisense strand to SEQ ID NO: 1864007
uaccgacccagaacucgca

SEQ ID NO: 1864009 - RNA, 19 nt, Artificial Sequence
  Description of Artificial Sequence: Synthetic oligonucleotide
  Sense strand starting at position 1905 of SEQ ID NO: 1564225
gcgaguucugggucgguag

SEQ ID NO: 1864010 - RNA, 19 nt, Artificial Sequence
  Description of Artificial Sequence: Synthetic oligonucleotide
  Antisense strand to SEQ ID NO: 1864009
cuaccgacccagaacucgc

SEQ ID NO: 1864011 - RNA, 19 nt, Artificial Sequence
  Description of Artificial Sequence: Synthetic oligonucleotide
  Sense strand starting at position 1916 of SEQ ID NO: 1564225
gucgguaggucaccucaga

SEQ ID NO: 1864012 - RNA, 19 nt, Artificial Sequence
  Description of Artificial Sequence: Synthetic oligonucleotide
  Antisense strand to SEQ ID NO: 1864011
ucugaggugaccuaccgac

SEQ ID NO: 1864013 - RNA, 19 nt, Artificial Sequence
  Description of Artificial Sequence: Synthetic oligonucleotide
  Sense strand starting at position 2013 of SEQ ID NO: 1564225
cgagcacauucccuaguua

SEQ ID NO: 1864014 - RNA, 19 nt, Artificial Sequence
  Description of Artificial Sequence: Synthetic oligonucleotide
  Antisense strand to SEQ ID NO: 1864013
uaacuagggaaugugcucg

SEQ ID NO: 1864015 - RNA, 19 nt, Artificial Sequence
  Description of Artificial Sequence: Synthetic oligonucleotide
  Sense strand starting at position 2043 of SEQ ID NO: 1564225
ucgagucagucacgucaca

SEQ ID NO: 1864016 - RNA, 19 nt, Artificial Sequence
  Description of Artificial Sequence: Synthetic oligonucleotide
  Antisense strand to SEQ ID NO: 1864015
ugugacgugacugacucga

SEQ ID NO: 1864017 - RNA, 19 nt, Artificial Sequence
  Description of Artificial Sequence: Synthetic oligonucleotide
  Sense strand starting at position 2071 of SEQ ID NO: 1564225
ugggcuaacuccuccucaa

SEQ ID NO: 1864018 - RNA, 19 nt, Artificial Sequence
  Description of Artificial Sequence: Synthetic oligonucleotide
  Antisense strand to SEQ ID NO: 1864017
uugaggaggaguuagccca

SEQ ID NO: 1864019 - RNA, 19 nt, Artificial Sequence
  Description of Artificial Sequence: Synthetic oligonucleotide
  Sense strand starting at position 2100 of SEQ ID NO: 1564225
gggcuugccucauagaaug

SEQ ID NO: 1864020 - RNA, 19 nt, Artificial Sequence
  Description of Artificial Sequence: Synthetic oligonucleotide
  Antisense strand to SEQ ID NO: 1864019
cauucuaugaggcaagccc

SEQ ID NO: 1864021 - RNA, 19 nt, Artificial Sequence
  Description of Artificial Sequence: Synthetic oligonucleotide
  Sense strand starting at position 2226 of SEQ ID NO: 1564225
gugaccauuuaucacgaaa

SEQ ID NO: 1864022 - RNA, 19 nt, Artificial Sequence
  Description of Artificial Sequence: Synthetic oligonucleotide
  Antisense strand to SEQ ID NO: 1864021
uuucgugauaaauggucac

SEQ ID NO: 1864023 - RNA, 19 nt, Artificial Sequence
  Description of Artificial Sequence: Synthetic oligonucleotide
  Sense strand starting at position 2433 of SEQ ID NO: 1564225
cagcuagugccggaacuuu

SEQ ID NO: 1864024 - RNA, 19 nt, Artificial Sequence
  Description of Artificial Sequence: Synthetic oligonucleotide
  Antisense strand to SEQ ID NO: 1864023
aaaguuccggcacuagcug

SEQ ID NO: 1864025 - RNA, 19 nt, Artificial Sequence
  Description of Artificial Sequence: Synthetic oligonucleotide
  Sense strand starting at position 2515 of SEQ ID NO: 1564225
agaugagaaugggacuauu

SEQ ID NO: 1864026 - RNA, 19 nt, Artificial Sequence
  Description of Artificial Sequence: Synthetic oligonucleotide
  Antisense strand to SEQ ID NO: 1864025
aauagucccauucucaucu

SEQ ID NO: 1864027 - RNA, 19 nt, Artificial Sequence
  Description of Artificial Sequence: Synthetic oligonucleotide
  Sense strand starting at position 2880 of SEQ ID NO: 1564225
ccacgagcuccggguaagu

SEQ ID NO: 1864028 - RNA, 19 nt, Artificial Sequence
  Description of Artificial Sequence: Synthetic oligonucleotide
  Antisense strand to SEQ ID NO: 1864027
acuuacccggagcucgugg

SEQ ID NO: 1864029 - RNA, 19 nt, Artificial Sequence
  Description of Artificial Sequence: Synthetic oligonucleotide
  Sense strand starting at position 2889 of SEQ ID NO: 1564225
ccggguaaguucuccucau

SEQ ID NO: 1864030 - RNA, 19 nt, Artificial Sequence
  Description of Artificial Sequence: Synthetic oligonucleotide
  Antisense strand to SEQ ID NO: 1864029
augaggagaacuuacccgg

SEQ ID NO: 1864031 - RNA, 19 nt, Artificial Sequence
  Description of Artificial Sequence: Synthetic oligonucleotide
  Sense strand starting at position 2890 of SEQ ID NO: 1564225
cggguaaguucuccucauu

SEQ ID NO: 1864032 - RNA, 19 nt, Artificial Sequence
  Description of Artificial Sequence: Synthetic oligonucleotide
  Antisense strand to SEQ ID NO: 1864031
aaugaggagaacuuacccg

SEQ ID NO: 1864033 - RNA, 19 nt, Artificial Sequence
  Description of Artificial Sequence: Synthetic oligonucleotide
  Sense strand starting at position 2893 of SEQ ID NO: 1564225
guaaguucuccucauugaa

SEQ ID NO: 1864034 - RNA, 19 nt, Artificial Sequence
  Description of Artificial Sequence: Synthetic oligonucleotide
  Antisense strand to SEQ ID NO: 1864033
uucaaugaggagaacuuac

SEQ ID NO: 1864035 - RNA, 19 nt, Artificial Sequence
  Description of Artificial Sequence: Synthetic oligonucleotide
  Sense strand starting at position 2905 of SEQ ID NO: 1564225
cauugaagucugggucaug

SEQ ID NO: 1864036 - RNA, 19 nt, Artificial Sequence
  Description of Artificial Sequence: Synthetic oligonucleotide
  Antisense strand to SEQ ID NO: 1864035
caugacccagacuucaaug

SEQ ID NO: 1864037 - RNA, 19 nt, Artificial Sequence
  Description of Artificial Sequence: Synthetic oligonucleotide
  Sense strand starting at position 3009 of SEQ ID NO: 1564225
gucguaaugcccugucuug

SEQ ID NO: 1864038 - RNA, 19 nt, Artificial Sequence
  Description of Artificial Sequence: Synthetic oligonucleotide
  Antisense strand to SEQ ID NO: 1864037
caagacagggcauuacgac

SEQ ID NO: 1864039 - RNA, 19 nt, Artificial Sequence
  Description of Artificial Sequence: Synthetic oligonucleotide
  Sense strand starting at position 3218 of SEQ ID NO: 1564225
ggagaaugucacugggauc

SEQ ID NO: 1864040 - RNA, 19 nt, Artificial Sequence
  Description of Artificial Sequence: Synthetic oligonucleotide
  Antisense strand to SEQ ID NO: 1864039
gaucccagugacauucucc

SEQ ID NO: 1864041 - RNA, 19 nt, Artificial Sequence
  Description of Artificial Sequence: Synthetic oligonucleotide
  Sense strand starting at position 3221 of SEQ ID NO: 1564225
gaaugucacugggaucaga

SEQ ID NO: 1864042 - RNA, 19 nt, Artificial Sequence
  Description of Artificial Sequence: Synthetic oligonucleotide
  Antisense strand to SEQ ID NO: 1864041
ucugaucccagugacauuc

SEQ ID NO: 1864043 - RNA, 19 nt, Artificial Sequence
  Description of Artificial Sequence: Synthetic oligonucleotide
  Sense strand starting at position 3312 of SEQ ID NO: 1564225
gggugaaugagcgacucua

SEQ ID NO: 1864044 - RNA, 19 nt, Artificial Sequence
  Description of Artificial Sequence: Synthetic oligonucleotide
  Antisense strand to SEQ ID NO: 1864043
uagagucgcucauucaccc

SEQ ID NO: 1864045 - RNA, 19 nt, Artificial Sequence
  Description of Artificial Sequence: Synthetic oligonucleotide
  Sense strand starting at position 3511 of SEQ ID NO: 1564225
uuugcaucaguuugaggga

SEQ ID NO: 1864046 - RNA, 19 nt, Artificial Sequence
  Description of Artificial Sequence: Synthetic oligonucleotide
  Antisense strand to SEQ ID NO: 1864045
ucccucaaacugaugcaaa

SEQ ID NO: 1864047 - RNA, 19 nt, Artificial Sequence
  Description of Artificial Sequence: Synthetic oligonucleotide
  Sense strand starting at position 3512 of SEQ ID NO: 1564225
uugcaucaguuugagggau

SEQ ID NO: 1864048 - RNA, 19 nt, Artificial Sequence
  Description of Artificial Sequence: Synthetic oligonucleotide
  Antisense strand to SEQ ID NO: 1864047
aucccucaaacugaugcaa

SEQ ID NO: 1864049 - RNA, 19 nt, Artificial Sequence
  Description of Artificial Sequence: Synthetic oligonucleotide
  Sense strand starting at position 3514 of SEQ ID NO: 1564225
gcaucaguuugagggauau

SEQ ID NO: 1864050 - RNA, 19 nt, Artificial Sequence
  Description of Artificial Sequence: Synthetic oligonucleotide
  Antisense strand to SEQ ID NO: 1864049
auaucccucaaacugaugc

SEQ ID NO: 1864051 - RNA, 19 nt, Artificial Sequence
  Description of Artificial Sequence: Synthetic oligonucleotide
  Sense strand starting at position 3518 of SEQ ID NO: 1564225
caguuugagggauauuggu

SEQ ID NO: 1864052 - RNA, 19 nt, Artificial Sequence
  Description of Artificial Sequence: Synthetic oligonucleotide
  Antisense strand to SEQ ID NO: 1864051
accaauaucccucaaacug

SEQ ID NO: 1864053 - RNA, 19 nt, Artificial Sequence
  Description of Artificial Sequence: Synthetic oligonucleotide
  Sense strand starting at position 3531 of SEQ ID NO: 1564225
auuggucucuaguuguauu

SEQ ID NO: 1864054 - RNA, 19 nt, Artificial Sequence
  Description of Artificial Sequence: Synthetic oligonucleotide
  Antisense strand to SEQ ID NO: 1864053
aauacaacuagagaccaau

SEQ ID NO: 1864055 - RNA, 19 nt, Artificial Sequence
  Description of Artificial Sequence: Synthetic oligonucleotide
  Sense strand starting at position 3534 of SEQ ID NO: 1564225
ggucucuaguuguauugua

SEQ ID NO: 1864056 - RNA, 19 nt, Artificial Sequence
  Description of Artificial Sequence: Synthetic oligonucleotide
  Antisense strand to SEQ ID NO: 1864055
uacaauacaacuagagacc

SEQ ID NO: 1864057 - RNA, 19 nt, Artificial Sequence
  Description of Artificial Sequence: Synthetic oligonucleotide
  Sense strand starting at position 3539 of SEQ ID NO: 1564225
cuaguuguauuguaguauu

SEQ ID NO: 1864058 - RNA, 19 nt, Artificial Sequence
  Description of Artificial Sequence: Synthetic oligonucleotide
  Antisense strand to SEQ ID NO: 1864057
aauacuacaauacaacuag

SEQ ID NO: 1864059 - RNA, 19 nt, Artificial Sequence
  Description of Artificial Sequence: Synthetic oligonucleotide
  Sense strand starting at position 3563 of SEQ ID NO: 1564225
uugguaucaaaguguaaug

SEQ ID NO: 1864060 - RNA, 19 nt, Artificial Sequence
  Description of Artificial Sequence: Synthetic oligonucleotide
  Antisense strand to SEQ ID NO: 1864059
cauuacacuuugauaccaa

SEQ ID NO: 1864061 - RNA, 19 nt, Artificial Sequence
  Description of Artificial Sequence: Synthetic oligonucleotide
  Sense strand starting at position 3604 of SEQ ID NO: 1564225
aguguuccaucuuaaauuu

SEQ ID NO: 1864062 - RNA, 19 nt, Artificial Sequence
  Description of Artificial Sequence: Synthetic oligonucleotide
  Antisense strand to SEQ ID NO: 1864061
aaauuuaagauggaacacu

SEQ ID NO: 1864063 - RNA, 19 nt, Artificial Sequence
  Description of Artificial Sequence: Synthetic oligonucleotide
  Sense strand starting at position 3686 of SEQ ID NO: 1564225
gacggaucgugugagccua

SEQ ID NO: 1864064 - RNA, 19 nt, Artificial Sequence
  Description of Artificial Sequence: Synthetic oligonucleotide
  Antisense strand to SEQ ID NO: 1864063
uaggcucacacgauccguc

SEQ ID NO: 1864065 - RNA, 19 nt, Artificial Sequence
  Description of Artificial Sequence: Synthetic oligonucleotide
  Sense strand starting at position 3701 of SEQ ID NO: 1564225
ccuagaaacuaguucgaga

SEQ ID NO: 1864066 - RNA, 19 nt, Artificial Sequence
  Description of Artificial Sequence: Synthetic oligonucleotide
  Antisense strand to SEQ ID NO: 1864065
ucucgaacuaguuucuagg

SEQ ID NO: 1864067 - RNA, 19 nt, Artificial Sequence
  Description of Artificial Sequence: Synthetic oligonucleotide
  Sense strand starting at position 3703 of SEQ ID NO: 1564225
uagaaacuaguucgagauc

SEQ ID NO: 1864068 - RNA, 19 nt, Artificial Sequence
  Description of Artificial Sequence: Synthetic oligonucleotide
  Antisense strand to SEQ ID NO: 1864067
gaucucgaacuaguuucua

SEQ ID NO: 1864069 - RNA, 19 nt, Artificial Sequence
  Description of Artificial Sequence: Synthetic oligonucleotide
  Sense strand starting at position 3704 of SEQ ID NO: 1564225
agaaacuaguucgagauca

SEQ ID NO: 1864070 - RNA, 19 nt, Artificial Sequence
  Description of Artificial Sequence: Synthetic oligonucleotide
  Antisense strand to SEQ ID NO: 1864069
ugaucucgaacuaguuucu

SEQ ID NO: 1864071 - RNA, 19 nt, Artificial Sequence
  Description of Artificial Sequence: Synthetic oligonucleotide
  Sense strand starting at position 3735 of SEQ ID NO: 1564225
uggcgaaccucuguacaaa

SEQ ID NO: 1864072 - RNA, 19 nt, Artificial Sequence
  Description of Artificial Sequence: Synthetic oligonucleotide
  Antisense strand to SEQ ID NO: 1864071
uuuguacagagguucgcca

SEQ ID NO: 1864073 - RNA, 19 nt, Artificial Sequence
  Description of Artificial Sequence: Synthetic oligonucleotide
  Sense strand starting at position 3812 of SEQ ID NO: 1564225
ggcugagaggcucagguua

SEQ ID NO: 1864074 - RNA, 19 nt, Artificial Sequence
  Description of Artificial Sequence: Synthetic oligonucleotide
  Antisense strand to SEQ ID NO: 1864073
uaaccugagccucucagcc

SEQ ID NO: 1864075 - RNA, 19 nt, Artificial Sequence
  Description of Artificial Sequence: Synthetic oligonucleotide
  Sense strand starting at position 3814 of SEQ ID NO: 1564225
cugagaggcucagguuaca

SEQ ID NO: 1864076 - RNA, 19 nt, Artificial Sequence
  Description of Artificial Sequence: Synthetic oligonucleotide
  Antisense strand to SEQ ID NO: 1864075
uguaaccugagccucucag

SEQ ID NO: 1864077 - RNA, 19 nt, Artificial Sequence
  Description of Artificial Sequence: Synthetic oligonucleotide
  Sense strand starting at position 3876 of SEQ ID NO: 1564225
gagaccgugccucaaagaa

SEQ ID NO: 1864078 - RNA, 19 nt, Artificial Sequence
  Description of Artificial Sequence: Synthetic oligonucleotide
  Antisense strand to SEQ ID NO: 1864077
uucuuugaggcacggucuc

SEQ ID NO: 1864079 - RNA, 19 nt, Artificial Sequence
  Description of Artificial Sequence: Synthetic oligonucleotide
  Sense strand starting at position 161 of SEQ ID NO: 1564226
gauugaugguguuuauugu

SEQ ID NO: 1864080 - RNA, 19 nt, Artificial Sequence
  Description of Artificial Sequence: Synthetic oligonucleotide
  Antisense strand to SEQ ID NO: 1864079
acaauaaacaccaucaauc

SEQ ID NO: 1864081 - RNA, 19 nt, Artificial Sequence
  Description of Artificial Sequence: Synthetic oligonucleotide
  Sense strand starting at position 168 of SEQ ID NO: 1564226
gguguuuauuguucugaaa

SEQ ID NO: 1864082 - RNA, 19 nt, Artificial Sequence
  Description of Artificial Sequence: Synthetic oligonucleotide
  Antisense strand to SEQ ID NO: 1864081
uuucagaacaauaaacacc

SEQ ID NO: 1864083 - RNA, 19 nt, Artificial Sequence
  Description of Artificial Sequence: Synthetic oligonucleotide
  Sense strand starting at position 188 of SEQ ID NO: 1564226
uagaauucugccguuugcu

SEQ ID NO: 1864084 - RNA, 19 nt, Artificial Sequence
  Description of Artificial Sequence: Synthetic oligonucleotide
  Antisense strand to SEQ ID NO: 1864083
agcaaacggcagaauucua

SEQ ID NO: 1864085 - RNA, 19 nt, Artificial Sequence
  Description of Artificial Sequence: Synthetic oligonucleotide
  Sense strand starting at position 189 of SEQ ID NO: 1564226
agaauucugccguuugcuu

SEQ ID NO: 1864086 - RNA, 19 nt, Artificial Sequence
  Description of Artificial Sequence: Synthetic oligonucleotide
  Antisense strand to SEQ ID NO: 1864085
aagcaaacggcagaauucu

SEQ ID NO: 1864087 - RNA, 19 nt, Artificial Sequence
  Description of Artificial Sequence: Synthetic oligonucleotide
  Sense strand starting at position 309 of SEQ ID NO: 1564226
gguacucacugugcacaaa

SEQ ID NO: 1864088 - RNA, 19 nt, Artificial Sequence
  Description of Artificial Sequence: Synthetic oligonucleotide
  Antisense strand to SEQ ID NO: 1864087
uuugugcacagugaguacc

SEQ ID NO: 1864089 - RNA, 19 nt, Artificial Sequence
  Description of Artificial Sequence: Synthetic oligonucleotide
  Sense strand starting at position 466 of SEQ ID NO: 1564226
uaaagauucugugucagca

SEQ ID NO: 1864090 - RNA, 19 nt, Artificial Sequence
  Description of Artificial Sequence: Synthetic oligonucleotide
  Antisense strand to SEQ ID NO: 1864089
ugcugacacagaaucuuua

SEQ ID NO: 1864091 - RNA, 19 nt, Artificial Sequence
  Description of Artificial Sequence: Synthetic oligonucleotide
  Sense strand starting at position 515 of SEQ ID NO: 1564226
gucuuaaucauacgggaaa

SEQ ID NO: 1864092 - RNA, 19 nt, Artificial Sequence
  Description of Artificial Sequence: Synthetic oligonucleotide
  Antisense strand to SEQ ID NO: 1864091
uuucccguaugauuaagac

SEQ ID NO: 1864093 - RNA, 19 nt, Artificial Sequence
  Description of Artificial Sequence: Synthetic oligonucleotide
  Sense strand starting at position 683 of SEQ ID NO: 1564226
gcgagaggacgucagucau

SEQ ID NO: 1864094 - RNA, 19 nt, Artificial Sequence
  Description of Artificial Sequence: Synthetic oligonucleotide
  Antisense strand to SEQ ID NO: 1864093
augacugacguccucucgc

SEQ ID NO: 1864095 - RNA, 19 nt, Artificial Sequence
  Description of Artificial Sequence: Synthetic oligonucleotide
  Sense strand starting at position 790 of SEQ ID NO: 1564226
cugagauccaccggagcuu

SEQ ID NO: 1864096 - RNA, 19 nt, Artificial Sequence
  Description of Artificial Sequence: Synthetic oligonucleotide
  Antisense strand to SEQ ID NO: 1864095
aagcuccgguggaucucag

SEQ ID NO: 1864097 - RNA, 19 nt, Artificial Sequence
  Description of Artificial Sequence: Synthetic oligonucleotide
  Sense strand starting at position 862 of SEQ ID NO: 1564226
gccauuagaccuggaaccu

SEQ ID NO: 1864098 - RNA, 19 nt, Artificial Sequence
  Description of Artificial Sequence: Synthetic oligonucleotide
  Antisense strand to SEQ ID NO: 1864097
agguuccaggucuaauggc

SEQ ID NO: 1864099 - RNA, 19 nt, Artificial Sequence
  Description of Artificial Sequence: Synthetic oligonucleotide
  Sense strand starting at position 1035 of SEQ ID NO: 1564226
cugugucaucguggauuuc

SEQ ID NO: 1864100 - RNA, 19 nt, Artificial Sequence
  Description of Artificial Sequence: Synthetic oligonucleotide
  Antisense strand to SEQ ID NO: 1864099
gaaauccacgaugacacag

SEQ ID NO: 1864101 - RNA, 19 nt, Artificial Sequence
  Description of Artificial Sequence: Synthetic oligonucleotide
  Sense strand starting at position 1036 of SEQ ID NO: 1564226
ugugucaucguggauuuca

SEQ ID NO: 1864102 - RNA, 19 nt, Artificial Sequence
  Description of Artificial Sequence: Synthetic oligonucleotide
  Antisense strand to SEQ ID NO: 1864101
ugaaauccacgaugacaca

SEQ ID NO: 1864103 - RNA, 19 nt, Artificial Sequence
  Description of Artificial Sequence: Synthetic oligonucleotide
  Sense strand starting at position 1082 of SEQ ID NO: 1564226
ucugauuugucgucggaga

SEQ ID NO: 1864104 - RNA, 19 nt, Artificial Sequence
  Description of Artificial Sequence: Synthetic oligonucleotide
  Antisense strand to SEQ ID NO: 1864103
ucuccgacgacaaaucaga

SEQ ID NO: 1864105 - RNA, 19 nt, Artificial Sequence
  Description of Artificial Sequence: Synthetic oligonucleotide
  Sense strand starting at position 1083 of SEQ ID NO: 1564226
cugauuugucgucggagau

SEQ ID NO: 1864106 - RNA, 19 nt, Artificial Sequence
  Description of Artificial Sequence: Synthetic oligonucleotide
  Antisense strand to SEQ ID NO: 1864105
aucuccgacgacaaaucag

SEQ ID NO: 1864107 - RNA, 19 nt, Artificial Sequence
  Description of Artificial Sequence: Synthetic oligonucleotide
  Sense strand starting at position 1084 of SEQ ID NO: 1564226
ugauuugucgucggagaug

SEQ ID NO: 1864108 - RNA, 19 nt, Artificial Sequence
  Description of Artificial Sequence: Synthetic oligonucleotide
  Antisense strand to SEQ ID NO: 1864107
caucuccgacgacaaauca

SEQ ID NO: 1864109 - RNA, 19 nt, Artificial Sequence
  Description of Artificial Sequence: Synthetic oligonucleotide
  Sense strand starting at position 1196 of SEQ ID NO: 1564226
uccacauacugguuucuca

SEQ ID NO: 1864110 - RNA, 19 nt, Artificial Sequence
  Description of Artificial Sequence: Synthetic oligonucleotide
  Antisense strand to SEQ ID NO: 1864109
ugagaaaccaguaugugga

SEQ ID NO: 1864111 - RNA, 19 nt, Artificial Sequence
  Description of Artificial Sequence: Synthetic oligonucleotide
  Sense strand starting at position 1241 of SEQ ID NO: 1564226
uguagaauaaguuguugaa

SEQ ID NO: 1864112 - RNA, 19 nt, Artificial Sequence
  Description of Artificial Sequence: Synthetic oligonucleotide
  Antisense strand to SEQ ID NO: 1864111
uucaacaacuuauucuaca

SEQ ID NO: 1864113 - RNA, 19 nt, Artificial Sequence
  Description of Artificial Sequence: Synthetic oligonucleotide
  Sense strand starting at position 1243 of SEQ ID NO: 1564226
uagaauaaguuguugaagu

SEQ ID NO: 1864114 - RNA, 19 nt, Artificial Sequence
  Description of Artificial Sequence: Synthetic oligonucleotide
  Antisense strand to SEQ ID NO: 1864113
acuucaacaacuuauucua

SEQ ID NO: 1864115 - RNA, 19 nt, Artificial Sequence
  Description of Artificial Sequence: Synthetic oligonucleotide
  Sense strand starting at position 1245 of SEQ ID NO: 1564226
gaauaaguuguugaaguuc

SEQ ID NO: 1864116 - RNA, 19 nt, Artificial Sequence
  Description of Artificial Sequence: Synthetic oligonucleotide
  Antisense strand to SEQ ID NO: 1864115
gaacuucaacaacuuauuc

SEQ ID NO: 1864117 - RNA, 19 nt, Artificial Sequence
  Description of Artificial Sequence: Synthetic oligonucleotide
  Sense strand starting at position 1740 of SEQ ID NO: 1564226
ccacuugcuggucaauguu

SEQ ID NO: 1864118 - RNA, 19 nt, Artificial Sequence
  Description of Artificial Sequence: Synthetic oligonucleotide
  Antisense strand to SEQ ID NO: 1864117
aacauugaccagcaagugg

SEQ ID NO: 1864119 - RNA, 19 nt, Artificial Sequence
  Description of Artificial Sequence: Synthetic oligonucleotide
  Sense strand starting at position 1857 of SEQ ID NO: 1564226
ccauuaagaccuugaguuc

SEQ ID NO: 1864120 - RNA, 19 nt, Artificial Sequence
  Description of Artificial Sequence: Synthetic oligonucleotide
  Antisense strand to SEQ ID NO: 1864119
gaacucaaggucuuaaugg

SEQ ID NO: 1864121 - RNA, 19 nt, Artificial Sequence
  Description of Artificial Sequence: Synthetic oligonucleotide
  Sense strand starting at position 1887 of SEQ ID NO: 1564226
cagugagacugacauauuu

SEQ ID NO: 1864122 - RNA, 19 nt, Artificial Sequence
  Description of Artificial Sequence: Synthetic oligonucleotide
  Antisense strand to SEQ ID NO: 1864121
aaauaugucagucucacug

SEQ ID NO: 1864123 - RNA, 19 nt, Artificial Sequence
  Description of Artificial Sequence: Synthetic oligonucleotide
  Sense strand starting at position 1912 of SEQ ID NO: 1564226
guuaacagauuugggaaau

SEQ ID NO: 1864124 - RNA, 19 nt, Artificial Sequence
  Description of Artificial Sequence: Synthetic oligonucleotide
  Antisense strand to SEQ ID NO: 1864123
auuucccaaaucuguuaac

SEQ ID NO: 1864125 - RNA, 19 nt, Artificial Sequence
  Description of Artificial Sequence: Synthetic oligonucleotide
  Sense strand starting at position 1913 of SEQ ID NO: 1564226
uuaacagauuugggaaaua

SEQ ID NO: 1864126 - RNA, 19 nt, Artificial Sequence
  Description of Artificial Sequence: Synthetic oligonucleotide
  Antisense strand to SEQ ID NO: 1864125
uauuucccaaaucuguuaa

SEQ ID NO: 1864127 - RNA, 19 nt, Artificial Sequence
  Description of Artificial Sequence: Synthetic oligonucleotide
  Sense strand starting at position 2415 of SEQ ID NO: 1564226
cgucuaucauuucuucuca

SEQ ID NO: 1864128 - RNA, 19 nt, Artificial Sequence
  Description of Artificial Sequence: Synthetic oligonucleotide
  Antisense strand to SEQ ID NO: 1864127
ugagaagaaaugauagacg

SEQ ID NO: 1864129 - RNA, 19 nt, Artificial Sequence
  Description of Artificial Sequence: Synthetic oligonucleotide
  Sense strand starting at position 2461 of SEQ ID NO: 1564226
gggcucuugcaaggauuau

SEQ ID NO: 1864130 - RNA, 19 nt, Artificial Sequence
  Description of Artificial Sequence: Synthetic oligonucleotide
  Antisense strand to SEQ ID NO: 1864129
auaauccuugcaagagccc

SEQ ID NO: 1864131 - RNA, 19 nt, Artificial Sequence
  Description of Artificial Sequence: Synthetic oligonucleotide
  Sense strand starting at position 2462 of SEQ ID NO: 1564226
ggcucuugcaaggauuauu

SEQ ID NO: 1864132 - RNA, 19 nt, Artificial Sequence
  Description of Artificial Sequence: Synthetic oligonucleotide
  Antisense strand to SEQ ID NO: 1864131
aauaauccuugcaagagcc

SEQ ID NO: 1864133 - RNA, 19 nt, Artificial Sequence
  Description of Artificial Sequence: Synthetic oligonucleotide
  Sense strand starting at position 2495 of SEQ ID NO: 1564226
ucaagaagcuuauugugga

SEQ ID NO: 1864134 - RNA, 19 nt, Artificial Sequence
  Description of Artificial Sequence: Synthetic oligonucleotide
  Antisense strand to SEQ ID NO: 1864133
uccacaauaagcuucuuga

SEQ ID NO: 1864135 - RNA, 19 nt, Artificial Sequence
  Description of Artificial Sequence: Synthetic oligonucleotide
  Sense strand starting at position 2551 of SEQ ID NO: 1564226
cuaagccuuccugaguaga

SEQ ID NO: 1864136 - RNA, 19 nt, Artificial Sequence
  Description of Artificial Sequence: Synthetic oligonucleotide
  Antisense strand to SEQ ID NO: 1864135
ucuacucaggaaggcuuag

SEQ ID NO: 1864137 - RNA, 19 nt, Artificial Sequence
  Description of Artificial Sequence: Synthetic oligonucleotide
  Sense strand starting at position 2553 of SEQ ID NO: 1564226
aagccuuccugaguagaua

SEQ ID NO: 1864138 - RNA, 19 nt, Artificial Sequence
  Description of Artificial Sequence: Synthetic oligonucleotide
  Antisense strand to SEQ ID NO: 1864137
uaucuacucaggaaggcuu

SEQ ID NO: 1864139 - RNA, 19 nt, Artificial Sequence
  Description of Artificial Sequence: Synthetic oligonucleotide
  Sense strand starting at position 2554 of SEQ ID NO: 1564226
agccuuccugaguagauag

SEQ ID NO: 1864140 - RNA, 19 nt, Artificial Sequence
  Description of Artificial Sequence: Synthetic oligonucleotide
  Antisense strand to SEQ ID NO: 1864139
cuaucuacucaggaaggcu

SEQ ID NO: 1864141 - RNA, 19 nt, Artificial Sequence
  Description of Artificial Sequence: Synthetic oligonucleotide
  Sense strand starting at position 2866 of SEQ ID NO: 1564226
gcaccucgacucuggaaau

SEQ ID NO: 1864142 - RNA, 19 nt, Artificial Sequence
  Description of Artificial Sequence: Synthetic oligonucleotide
  Antisense strand to SEQ ID NO: 1864141
auuuccagagucgaggugc

SEQ ID NO: 1864143 - RNA, 19 nt, Artificial Sequence
  Description of Artificial Sequence: Synthetic oligonucleotide
  Sense strand starting at position 2879 of SEQ ID NO: 1564226
ggaaauaaugcaugugauu

SEQ ID NO: 1864144 - RNA, 19 nt, Artificial Sequence
  Description of Artificial Sequence: Synthetic oligonucleotide
  Antisense strand to SEQ ID NO: 1864143
aaucacaugcauuauuucc

SEQ ID NO: 1864145 - RNA, 19 nt, Artificial Sequence
  Description of Artificial Sequence: Synthetic oligonucleotide
  Sense strand starting at position 2884 of SEQ ID NO: 1564226
uaaugcaugugauugcaca

SEQ ID NO: 1864146 - RNA, 19 nt, Artificial Sequence
  Description of Artificial Sequence: Synthetic oligonucleotide
  Antisense strand to SEQ ID NO: 1864145
ugugcaaucacaugcauua

SEQ ID NO: 1864147 - RNA, 19 nt, Artificial Sequence
  Description of Artificial Sequence: Synthetic oligonucleotide
  Sense strand starting at position 3041 of SEQ ID NO: 1564226
ucaaguuuccagcaggguu

SEQ ID NO: 1864148 - RNA, 19 nt, Artificial Sequence
  Description of Artificial Sequence: Synthetic oligonucleotide
  Antisense strand to SEQ ID NO: 1864147
aacccugcuggaaacuuga

SEQ ID NO: 1864149 - RNA, 19 nt, Artificial Sequence
  Description of Artificial Sequence: Synthetic oligonucleotide
  Sense strand starting at position 3334 of SEQ ID NO: 1564226
acaguagugaaagaguagu

SEQ ID NO: 1864150 - RNA, 19 nt, Artificial Sequence
  Description of Artificial Sequence: Synthetic oligonucleotide
  Antisense strand to SEQ ID NO: 1864149
acuacucuuucacuacugu

SEQ ID NO: 1864151 - RNA, 19 nt, Artificial Sequence
  Description of Artificial Sequence: Synthetic oligonucleotide
  Sense strand starting at position 3768 of SEQ ID NO: 1564226
caaaguggucaguggauga

SEQ ID NO: 1864152 - RNA, 19 nt, Artificial Sequence
  Description of Artificial Sequence: Synthetic oligonucleotide
  Antisense strand to SEQ ID NO: 1864151
ucauccacugaccacuuug

SEQ ID NO: 1864153 - RNA, 19 nt, Artificial Sequence
  Description of Artificial Sequence: Synthetic oligonucleotide
  Sense strand starting at position 3813 of SEQ ID NO: 1564226
guagaugaauucuuguuaa

SEQ ID NO: 1864154 - RNA, 19 nt, Artificial Sequence
  Description of Artificial Sequence: Synthetic oligonucleotide
  Antisense strand to SEQ ID NO: 1864153
uuaacaagaauucaucuac

SEQ ID NO: 1864155 - RNA, 19 nt, Artificial Sequence
  Description of Artificial Sequence: Synthetic oligonucleotide
  Sense strand starting at position 3841 of SEQ ID NO: 1564226
acaagauucuugcuaaagg

SEQ ID NO: 1864156 - RNA, 19 nt, Artificial Sequence
  Description of Artificial Sequence: Synthetic oligonucleotide
  Antisense strand to SEQ ID NO: 1864155
ccuuuagcaagaaucuugu

SEQ ID NO: 1864157 - RNA, 19 nt, Artificial Sequence
  Description of Artificial Sequence: Synthetic oligonucleotide
  Sense strand starting at position 3905 of SEQ ID NO: 1564226
ucagauauugaaggugauu

SEQ ID NO: 1864158 - RNA, 19 nt, Artificial Sequence
  Description of Artificial Sequence: Synthetic oligonucleotide
  Antisense strand to SEQ ID NO: 1864157
aaucaccuucaauaucuga

SEQ ID NO: 1864159 - RNA, 19 nt, Artificial Sequence
  Description of Artificial Sequence: Synthetic oligonucleotide
  Sense strand starting at position 1 of SEQ ID NO: 1564227
agggagaauuugggugguu

SEQ ID NO: 1864160 - RNA, 19 nt, Artificial Sequence
  Description of Artificial Sequence: Synthetic oligonucleotide
  Antisense strand to SEQ ID NO: 1864159
aaccacccaaauucucccu

SEQ ID NO: 1864161 - RNA, 19 nt, Artificial Sequence
  Description of Artificial Sequence: Synthetic oligonucleotide
  Sense strand starting at position 172 of SEQ ID NO: 1564227
uguccacuacugcgaugau

SEQ ID NO: 1864162 - RNA, 19 nt, Artificial Sequence
  Description of Artificial Sequence: Synthetic oligonucleotide
  Antisense strand to SEQ ID NO: 1864161
aucaucgcaguaguggaca

SEQ ID NO: 1864163 - RNA, 19 nt, Artificial Sequence
  Description of Artificial Sequence: Synthetic oligonucleotide
  Sense strand starting at position 175 of SEQ ID NO: 1564227
ccacuacugcgaugaucua

SEQ ID NO: 1864164 - RNA, 19 nt, Artificial Sequence
  Description of Artificial Sequence: Synthetic oligonucleotide
  Antisense strand to SEQ ID NO: 1864163
uagaucaucgcaguagugg

SEQ ID NO: 1864165 - RNA, 19 nt, Artificial Sequence
  Description of Artificial Sequence: Synthetic oligonucleotide
  Sense strand starting at position 185 of SEQ ID NO: 1564227
gaugaucuagguuguuaca

SEQ ID NO: 1864166 - RNA, 19 nt, Artificial Sequence
  Description of Artificial Sequence: Synthetic oligonucleotide
  Antisense strand to SEQ ID NO: 1864165
uguaacaaccuagaucauc

SEQ ID NO: 1864167 - RNA, 19 nt, Artificial Sequence
  Description of Artificial Sequence: Synthetic oligonucleotide
  Sense strand starting at position 187 of SEQ ID NO: 1564227
ugaucuagguuguuacaga

SEQ ID NO: 1864168 - RNA, 19 nt, Artificial Sequence
  Description of Artificial Sequence: Synthetic oligonucleotide
  Antisense strand to SEQ ID NO: 1864167
ucuguaacaaccuagauca

SEQ ID NO: 1864169 - RNA, 19 nt, Artificial Sequence
  Description of Artificial Sequence: Synthetic oligonucleotide
  Sense strand starting at position 194 of SEQ ID NO: 1564227
gguuguuacagaggaauua

SEQ ID NO: 1864170 - RNA, 19 nt, Artificial Sequence
  Description of Artificial Sequence: Synthetic oligonucleotide
  Antisense strand to SEQ ID NO: 1864169
uaauuccucuguaacaacc

SEQ ID NO: 1864171 - RNA, 19 nt, Artificial Sequence
  Description of Artificial Sequence: Synthetic oligonucleotide
  Sense strand starting at position 315 of SEQ ID NO: 1564227
cauuuagaaugcugagaga

SEQ ID NO: 1864172 - RNA, 19 nt, Artificial Sequence
  Description of Artificial Sequence: Synthetic oligonucleotide
  Antisense strand to SEQ ID NO: 1864171
ucucucagcauucuaaaug

SEQ ID NO: 1864173 - RNA, 19 nt, Artificial Sequence
  Description of Artificial Sequence: Synthetic oligonucleotide
  Sense strand starting at position 583 of SEQ ID NO: 1564227
uccaaagcccauugaugaa

SEQ ID NO: 1864174 - RNA, 19 nt, Artificial Sequence
  Description of Artificial Sequence: Synthetic oligonucleotide
  Antisense strand to SEQ ID NO: 1864173
uucaucaaugggcuuugga

SEQ ID NO: 1864175 - RNA, 19 nt, Artificial Sequence
  Description of Artificial Sequence: Synthetic oligonucleotide
  Sense strand starting at position 887 of SEQ ID NO: 1564227
gcccuuaacagguguggga

SEQ ID NO: 1864176 - RNA, 19 nt, Artificial Sequence
  Description of Artificial Sequence: Synthetic oligonucleotide
  Antisense strand to SEQ ID NO: 1864175
ucccacaccuguuaagggc

SEQ ID NO: 1864177 - RNA, 19 nt, Artificial Sequence
  Description of Artificial Sequence: Synthetic oligonucleotide
  Sense strand starting at position 914 of SEQ ID NO: 1564227
uuuccacuauccuugggau

SEQ ID NO: 1864178 - RNA, 19 nt, Artificial Sequence
  Description of Artificial Sequence: Synthetic oligonucleotide
  Antisense strand to SEQ ID NO: 1864177
aucccaaggauaguggaaa

SEQ ID NO: 1864179 - RNA, 19 nt, Artificial Sequence
  Description of Artificial Sequence: Synthetic oligonucleotide
  Sense strand starting at position 916 of SEQ ID NO: 1564227
uccacuauccuugggaucu

SEQ ID NO: 1864180 - RNA, 19 nt, Artificial Sequence
  Description of Artificial Sequence: Synthetic oligonucleotide
  Antisense strand to SEQ ID NO: 1864179
agaucccaaggauagugga

SEQ ID NO: 1864181 - RNA, 19 nt, Artificial Sequence
  Description of Artificial Sequence: Synthetic oligonucleotide
  Sense strand starting at position 966 of SEQ ID NO: 1564227
ggauuauucuggucaaguc

SEQ ID NO: 1864182 - RNA, 19 nt, Artificial Sequence
  Description of Artificial Sequence: Synthetic oligonucleotide
  Antisense strand to SEQ ID NO: 1864181
gacuugaccagaauaaucc

SEQ ID NO: 1864183 - RNA, 19 nt, Artificial Sequence
  Description of Artificial Sequence: Synthetic oligonucleotide
  Sense strand starting at position 967 of SEQ ID NO: 1564227
gauuauucuggucaagucu

SEQ ID NO: 1864184 - RNA, 19 nt, Artificial Sequence
  Description of Artificial Sequence: Synthetic oligonucleotide
  Antisense strand to SEQ ID NO: 1864183
agacuugaccagaauaauc

SEQ ID NO: 1864185 - RNA, 19 nt, Artificial Sequence
  Description of Artificial Sequence: Synthetic oligonucleotide
  Sense strand starting at position 976 of SEQ ID NO: 1564227
ggucaagucuugcugaaug

SEQ ID NO: 1864186 - RNA, 19 nt, Artificial Sequence
  Description of Artificial Sequence: Synthetic oligonucleotide
  Antisense strand to SEQ ID NO: 1864185
cauucagcaagacuugacc

SEQ ID NO: 1864187 - RNA, 19 nt, Artificial Sequence
  Description of Artificial Sequence: Synthetic oligonucleotide
  Sense strand starting at position 978 of SEQ ID NO: 1564227
ucaagucuugcugaauguu

SEQ ID NO: 1864188 - RNA, 19 nt, Artificial Sequence
  Description of Artificial Sequence: Synthetic oligonucleotide
  Antisense strand to SEQ ID NO: 1864187
aacauucagcaagacuuga

SEQ ID NO: 1864189 - RNA, 19 nt, Artificial Sequence
  Description of Artificial Sequence: Synthetic oligonucleotide
  Sense strand starting at position 1133 of SEQ ID NO: 1564227
gcacuucugucccucagga

SEQ ID NO: 1864190 - RNA, 19 nt, Artificial Sequence
  Description of Artificial Sequence: Synthetic oligonucleotide
  Antisense strand to SEQ ID NO: 1864189
uccugagggacagaagugc

SEQ ID NO: 1864191 - RNA, 19 nt, Artificial Sequence
  Description of Artificial Sequence: Synthetic oligonucleotide
  Sense strand starting at position 1309 of SEQ ID NO: 1564227
ucagaccaguuucuggaua

SEQ ID NO: 1864192 - RNA, 19 nt, Artificial Sequence
  Description of Artificial Sequence: Synthetic oligonucleotide
  Antisense strand to SEQ ID NO: 1864191
uauccagaaacuggucuga

SEQ ID NO: 1864193 - RNA, 19 nt, Artificial Sequence
  Description of Artificial Sequence: Synthetic oligonucleotide
  Sense strand starting at position 1317 of SEQ ID NO: 1564227
guuucuggauacuccagaa

SEQ ID NO: 1864194 - RNA, 19 nt, Artificial Sequence
  Description of Artificial Sequence: Synthetic oligonucleotide
  Antisense strand to SEQ ID NO: 1864193
uucuggaguauccagaaac

SEQ ID NO: 1864195 - RNA, 19 nt, Artificial Sequence
  Description of Artificial Sequence: Synthetic oligonucleotide
  Sense strand starting at position 2131 of SEQ ID NO: 1564227
cccucauuccgagaagcag

SEQ ID NO: 1864196 - RNA, 19 nt, Artificial Sequence
  Description of Artificial Sequence: Synthetic oligonucleotide
  Antisense strand to SEQ ID NO: 1864195
cugcuucucggaaugaggg

SEQ ID NO: 1864197 - RNA, 19 nt, Artificial Sequence
  Description of Artificial Sequence: Synthetic oligonucleotide
  Sense strand starting at position 2179 of SEQ ID NO: 1564227
caaauaggcgaggguugau

SEQ ID NO: 1864198 - RNA, 19 nt, Artificial Sequence
  Description of Artificial Sequence: Synthetic oligonucleotide
  Antisense strand to SEQ ID NO: 1864197
aucaacccucgccuauuug

SEQ ID NO: 1864199 - RNA, 19 nt, Artificial Sequence
  Description of Artificial Sequence: Synthetic oligonucleotide
  Sense strand starting at position 2188 of SEQ ID NO: 1564227
gaggguugauuugguugaa

SEQ ID NO: 1864200 - RNA, 19 nt, Artificial Sequence
  Description of Artificial Sequence: Synthetic oligonucleotide
  Antisense strand to SEQ ID NO: 1864199
uucaaccaaaucaacccuc

SEQ ID NO: 1864201 - RNA, 19 nt, Artificial Sequence
  Description of Artificial Sequence: Synthetic oligonucleotide
  Sense strand starting at position 2204 of SEQ ID NO: 1564227
gaaccacgccucuauguuu

SEQ ID NO: 1864202 - RNA, 19 nt, Artificial Sequence
  Description of Artificial Sequence: Synthetic oligonucleotide
  Antisense strand to SEQ ID NO: 1864201
aaacauagaggcgugguuc

SEQ ID NO: 1864203 - RNA, 19 nt, Artificial Sequence
  Description of Artificial Sequence: Synthetic oligonucleotide
  Sense strand starting at position 2260 of SEQ ID NO: 1564227
aucccucugcaagguaaua

SEQ ID NO: 1864204 - RNA, 19 nt, Artificial Sequence
  Description of Artificial Sequence: Synthetic oligonucleotide
  Antisense strand to SEQ ID NO: 1864203
uauuaccuugcagagggau

SEQ ID NO: 1864205 - RNA, 19 nt, Artificial Sequence
  Description of Artificial Sequence: Synthetic oligonucleotide
  Sense strand starting at position 2372 of SEQ ID NO: 1564227
cccucuuucggccaauauu

SEQ ID NO: 1864206 - RNA, 19 nt, Artificial Sequence
  Description of Artificial Sequence: Synthetic oligonucleotide
  Antisense strand to SEQ ID NO: 1864205
aauauuggccgaaagaggg

SEQ ID NO: 1864207 - RNA, 19 nt, Artificial Sequence
  Description of Artificial Sequence: Synthetic oligonucleotide
  Sense strand starting at position 2381 of SEQ ID NO: 1564227
ggccaauauuuguaauauc

SEQ ID NO: 1864208 - RNA, 19 nt, Artificial Sequence
  Description of Artificial Sequence: Synthetic oligonucleotide
  Antisense strand to SEQ ID NO: 1864207
gauauuacaaauauuggcc

SEQ ID NO: 1864209 - RNA, 19 nt, Artificial Sequence
  Description of Artificial Sequence: Synthetic oligonucleotide
  Sense strand starting at position 2474 of SEQ ID NO: 1564227
agcuacauucccugaaggu

SEQ ID NO: 1864210 - RNA, 19 nt, Artificial Sequence
  Description of Artificial Sequence: Synthetic oligonucleotide
  Antisense strand to SEQ ID NO: 1864209
accuucagggaauguagcu

SEQ ID NO: 1864211 - RNA, 19 nt, Artificial Sequence
  Description of Artificial Sequence: Synthetic oligonucleotide
  Sense strand starting at position 2475 of SEQ ID NO: 1564227
gcuacauucccugaaggug

SEQ ID NO: 1864212 - RNA, 19 nt, Artificial Sequence
  Description of Artificial Sequence: Synthetic oligonucleotide
  Antisense strand to SEQ ID NO: 1864211
caccuucagggaauguagc

SEQ ID NO: 1864213 - RNA, 19 nt, Artificial Sequence
  Description of Artificial Sequence: Synthetic oligonucleotide
  Sense strand starting at position 2541 of SEQ ID NO: 1564227
cuggucuuccgggaguauu

SEQ ID NO: 1864214 - RNA, 19 nt, Artificial Sequence
  Description of Artificial Sequence: Synthetic oligonucleotide
  Antisense strand to SEQ ID NO: 1864213
aauacucccggaagaccag

SEQ ID NO: 1864215 - RNA, 19 nt, Artificial Sequence
  Description of Artificial Sequence: Synthetic oligonucleotide
  Sense strand starting at position 2562 of SEQ ID NO: 1564227
gccuguuccaugccaucga

SEQ ID NO: 1864216 - RNA, 19 nt, Artificial Sequence
  Description of Artificial Sequence: Synthetic oligonucleotide
  Antisense strand to SEQ ID NO: 1864215
ucgauggcauggaacaggc

SEQ ID NO: 1864217 - RNA, 19 nt, Artificial Sequence
  Description of Artificial Sequence: Synthetic oligonucleotide
  Sense strand starting at position 2596 of SEQ ID NO: 1564227
guucauugcgcugcgcaau

SEQ ID NO: 1864218 - RNA, 19 nt, Artificial Sequence
  Description of Artificial Sequence: Synthetic oligonucleotide
  Antisense strand to SEQ ID NO: 1864217
auugcgcagcgcaaugaac

SEQ ID NO: 1864219 - RNA, 19 nt, Artificial Sequence
  Description of Artificial Sequence: Synthetic oligonucleotide
  Sense strand starting at position 2622 of SEQ ID NO: 1564227
uaauaaauucuugacgggu

SEQ ID NO: 1864220 - RNA, 19 nt, Artificial Sequence
  Description of Artificial Sequence: Synthetic oligonucleotide
  Antisense strand to SEQ ID NO: 1864219
acccgucaagaauuuauua

SEQ ID NO: 1864221 - RNA, 19 nt, Artificial Sequence
  Description of Artificial Sequence: Synthetic oligonucleotide
  Sense strand starting at position 2625 of SEQ ID NO: 1564227
uaaauucuugacgggugaa

SEQ ID NO: 1864222 - RNA, 19 nt, Artificial Sequence
  Description of Artificial Sequence: Synthetic oligonucleotide
  Antisense strand to SEQ ID NO: 1864221
uucacccgucaagaauuua

SEQ ID NO: 1864223 - RNA, 19 nt, Artificial Sequence
  Description of Artificial Sequence: Synthetic oligonucleotide
  Sense strand starting at position 2628 of SEQ ID NO: 1564227
auucuugacgggugaauga

SEQ ID NO: 1864224 - RNA, 19 nt, Artificial Sequence
  Description of Artificial Sequence: Synthetic oligonucleotide
  Antisense strand to SEQ ID NO: 1864223
ucauucacccgucaagaau

SEQ ID NO: 1864225 - RNA, 19 nt, Artificial Sequence
  Description of Artificial Sequence: Synthetic oligonucleotide
  Sense strand starting at position 2641 of SEQ ID NO: 1564227
gaaugaaucuggucccuuc

SEQ ID NO: 1864226 - RNA, 19 nt, Artificial Sequence
  Description of Artificial Sequence: Synthetic oligonucleotide
  Antisense strand to SEQ ID NO: 1864225
gaagggaccagauucauuc

SEQ ID NO: 1864227 - RNA, 19 nt, Artificial Sequence
  Description of Artificial Sequence: Synthetic oligonucleotide
  Sense strand starting at position 2650 of SEQ ID NO: 1564227
uggucccuucggugaauga

SEQ ID NO: 1864228 - RNA, 19 nt, Artificial Sequence
  Description of Artificial Sequence: Synthetic oligonucleotide
  Antisense strand to SEQ ID NO: 1864227
ucauucaccgaagggacca

SEQ ID NO: 1864229 - RNA, 19 nt, Artificial Sequence
  Description of Artificial Sequence: Synthetic oligonucleotide
  Sense strand starting at position 2682 of SEQ ID NO: 1564227
cacaaagauccagguuuga

SEQ ID NO: 1864230 - RNA, 19 nt, Artificial Sequence
  Description of Artificial Sequence: Synthetic oligonucleotide
  Antisense strand to SEQ ID NO: 1864229
ucaaaccuggaucuuugug

SEQ ID NO: 1864231 - RNA, 19 nt, Artificial Sequence
  Description of Artificial Sequence: Synthetic oligonucleotide
  Sense strand starting at position 2822 of SEQ ID NO: 1564227
gguuguuuggcauacaaga

SEQ ID NO: 1864232 - RNA, 19 nt, Artificial Sequence
  Description of Artificial Sequence: Synthetic oligonucleotide
  Antisense strand to SEQ ID NO: 1864231
ucuuguaugccaaacaacc

SEQ ID NO: 1864233 - RNA, 19 nt, Artificial Sequence
  Description of Artificial Sequence: Synthetic oligonucleotide
  Sense strand starting at position 2900 of SEQ ID NO: 1564227
uucuguaugccagacgcau

SEQ ID NO: 1864234 - RNA, 19 nt, Artificial Sequence
  Description of Artificial Sequence: Synthetic oligonucleotide
  Antisense strand to SEQ ID NO: 1864233
augcgucuggcauacagaa

SEQ ID NO: 1864235 - RNA, 19 nt, Artificial Sequence
  Description of Artificial Sequence: Synthetic oligonucleotide
  Sense strand starting at position 3090 of SEQ ID NO: 1564227
cuguauuggcaucauuauu

SEQ ID NO: 1864236 - RNA, 19 nt, Artificial Sequence
  Description of Artificial Sequence: Synthetic oligonucleotide
  Antisense strand to SEQ ID NO: 1864235
aauaaugaugccaauacag

SEQ ID NO: 1864237 - RNA, 19 nt, Artificial Sequence
  Description of Artificial Sequence: Synthetic oligonucleotide
  Sense strand starting at position 3117 of SEQ ID NO: 1564227
cugucaguugcuuucguaa

SEQ ID NO: 1864238 - RNA, 19 nt, Artificial Sequence
  Description of Artificial Sequence: Synthetic oligonucleotide
  Antisense strand to SEQ ID NO: 1864237
uuacgaaagcaacugacag

SEQ ID NO: 1864239 - RNA, 19 nt, Artificial Sequence
  Description of Artificial Sequence: Synthetic oligonucleotide
  Sense strand starting at position 718 of SEQ ID NO: 1564228
agagaagauuaccgagaga

SEQ ID NO: 1864240 - RNA, 19 nt, Artificial Sequence
  Description of Artificial Sequence: Synthetic oligonucleotide
  Antisense strand to SEQ ID NO: 1864239
ucucucgguaaucuucucu

SEQ ID NO: 1864241 - RNA, 19 nt, Artificial Sequence
  Description of Artificial Sequence: Synthetic oligonucleotide
  Sense strand starting at position 766 of SEQ ID NO: 1564228
guagcaacccugggacuaa

SEQ ID NO: 1864242 - RNA, 19 nt, Artificial Sequence
  Description of Artificial Sequence: Synthetic oligonucleotide
  Antisense strand to SEQ ID NO: 1864241
uuagucccaggguugcuac

SEQ ID NO: 1864243 - RNA, 19 nt, Artificial Sequence
  Description of Artificial Sequence: Synthetic oligonucleotide
  Sense strand starting at position 781 of SEQ ID NO: 1564228
cuaagaaaguuggcuagaa

SEQ ID NO: 1864244 - RNA, 19 nt, Artificial Sequence
  Description of Artificial Sequence: Synthetic oligonucleotide
  Antisense strand to SEQ ID NO: 1864243
uucuagccaacuuucuuag

SEQ ID NO: 1864245 - RNA, 19 nt, Artificial Sequence
  Description of Artificial Sequence: Synthetic oligonucleotide
  Sense strand starting at position 835 of SEQ ID NO: 1564228
uguuuaaucucagauguau

SEQ ID NO: 1864246 - RNA, 19 nt, Artificial Sequence
  Description of Artificial Sequence: Synthetic oligonucleotide
  Antisense strand to SEQ ID NO: 1864245
auacaucugagauuaaaca

SEQ ID NO: 1864247 - RNA, 19 nt, Artificial Sequence
  Description of Artificial Sequence: Synthetic oligonucleotide
  Sense strand starting at position 844 of SEQ ID NO: 1564228
ucagauguauuagucugau

SEQ ID NO: 1864248 - RNA, 19 nt, Artificial Sequence
  Description of Artificial Sequence: Synthetic oligonucleotide
  Antisense strand to SEQ ID NO: 1864247
aucagacuaauacaucuga

SEQ ID NO: 1864249 - RNA, 19 nt, Artificial Sequence
  Description of Artificial Sequence: Synthetic oligonucleotide
  Sense strand starting at position 847 of SEQ ID NO: 1564228
gauguauuagucugauggu

SEQ ID NO: 1864250 - RNA, 19 nt, Artificial Sequence
  Description of Artificial Sequence: Synthetic oligonucleotide
  Antisense strand to SEQ ID NO: 1864249
accaucagacuaauacauc

SEQ ID NO: 1864251 - RNA, 19 nt, Artificial Sequence
  Description of Artificial Sequence: Synthetic oligonucleotide
  Sense strand starting at position 848 of SEQ ID NO: 1564228
auguauuagucugaugguc

SEQ ID NO: 1864252 - RNA, 19 nt, Artificial Sequence
  Description of Artificial Sequence: Synthetic oligonucleotide
  Antisense strand to SEQ ID NO: 1864251
gaccaucagacuaauacau

SEQ ID NO: 1864253 - RNA, 19 nt, Artificial Sequence
  Description of Artificial Sequence: Synthetic oligonucleotide
  Sense strand starting at position 850 of SEQ ID NO: 1564228
guauuagucugauggucua

SEQ ID NO: 1864254 - RNA, 19 nt, Artificial Sequence
  Description of Artificial Sequence: Synthetic oligonucleotide
  Antisense strand to SEQ ID NO: 1864253
uagaccaucagacuaauac

SEQ ID NO: 1864255 - RNA, 19 nt, Artificial Sequence
  Description of Artificial Sequence: Synthetic oligonucleotide
  Sense strand starting at position 853 of SEQ ID NO: 1564228
uuagucugauggucuaaag

SEQ ID NO: 1864256 - RNA, 19 nt, Artificial Sequence
  Description of Artificial Sequence: Synthetic oligonucleotide
  Antisense strand to SEQ ID NO: 1864255
cuuuagaccaucagacuaa

SEQ ID NO: 1864257 - RNA, 19 nt, Artificial Sequence
  Description of Artificial Sequence: Synthetic oligonucleotide
  Sense strand starting at position 2226 of SEQ ID NO: 1564228
uguaaauacgccuaccacu

SEQ ID NO: 1864258 - RNA, 19 nt, Artificial Sequence
  Description of Artificial Sequence: Synthetic oligonucleotide
  Antisense strand to SEQ ID NO: 1864257
agugguaggcguauuuaca

SEQ ID NO: 1864259 - RNA, 19 nt, Artificial Sequence
  Description of Artificial Sequence: Synthetic oligonucleotide
  Sense strand starting at position 2363 of SEQ ID NO: 1564228
gaguguaacuacuguacuu

SEQ ID NO: 1864260 - RNA, 19 nt, Artificial Sequence
  Description of Artificial Sequence: Synthetic oligonucleotide
  Antisense strand to SEQ ID NO: 1864259
aaguacaguaguuacacuc

SEQ ID NO: 1864261 - RNA, 19 nt, Artificial Sequence
  Description of Artificial Sequence: Synthetic oligonucleotide
  Sense strand starting at position 2826 of SEQ ID NO: 1564228
uuugaaugacuuugcuauu

SEQ ID NO: 1864262 - RNA, 19 nt, Artificial Sequence
  Description of Artificial Sequence: Synthetic oligonucleotide
  Antisense strand to SEQ ID NO: 1864261
aauagcaaagucauucaaa

SEQ ID NO: 1864263 - RNA, 19 nt, Artificial Sequence
  Description of Artificial Sequence: Synthetic oligonucleotide
  Sense strand starting at position 3355 of SEQ ID NO: 1564228
guggaaaucacccgguaag

SEQ ID NO: 1864264 - RNA, 19 nt, Artificial Sequence
  Description of Artificial Sequence: Synthetic oligonucleotide
  Antisense strand to SEQ ID NO: 1864263
cuuaccgggugauuuccac

SEQ ID NO: 1864265 - RNA, 19 nt, Artificial Sequence
  Description of Artificial Sequence: Synthetic oligonucleotide
  Sense strand starting at position 3356 of SEQ ID NO: 1564228
uggaaaucacccgguaagu

SEQ ID NO: 1864266 - RNA, 19 nt, Artificial Sequence
  Description of Artificial Sequence: Synthetic oligonucleotide
  Antisense strand to SEQ ID NO: 1864265
acuuaccgggugauuucca

SEQ ID NO: 1864267 - RNA, 19 nt, Artificial Sequence
  Description of Artificial Sequence: Synthetic oligonucleotide
  Sense strand starting at position 3358 of SEQ ID NO: 1564228
gaaaucacccgguaaguca

SEQ ID NO: 1864268 - RNA, 19 nt, Artificial Sequence
  Description of Artificial Sequence: Synthetic oligonucleotide
  Antisense strand to SEQ ID NO: 1864267
ugacuuaccgggugauuuc

SEQ ID NO: 1864269 - RNA, 19 nt, Artificial Sequence
  Description of Artificial Sequence: Synthetic oligonucleotide
  Sense strand starting at position 3572 of SEQ ID NO: 1564228
agcauauauuauccacagu

SEQ ID NO: 1864270 - RNA, 19 nt, Artificial Sequence
  Description of Artificial Sequence: Synthetic oligonucleotide
  Antisense strand to SEQ ID NO: 1864269
acuguggauaauauaugcu

SEQ ID NO: 1864271 - RNA, 19 nt, Artificial Sequence
  Description of Artificial Sequence: Synthetic oligonucleotide
  Sense strand starting at position 33 of SEQ ID NO: 1564229
ggauuacccuaauaucgau

SEQ ID NO: 1864272 - RNA, 19 nt, Artificial Sequence
  Description of Artificial Sequence: Synthetic oligonucleotide
  Antisense strand to SEQ ID NO: 1864271
aucgauauuaggguaaucc

SEQ ID NO: 1864273 - RNA, 19 nt, Artificial Sequence
  Description of Artificial Sequence: Synthetic oligonucleotide
  Sense strand starting at position 93 of SEQ ID NO: 1564229
cccaaacuugauggcuauu

SEQ ID NO: 1864274 - RNA, 19 nt, Artificial Sequence
  Description of Artificial Sequence: Synthetic oligonucleotide
  Antisense strand to SEQ ID NO: 1864273
aauagccaucaaguuuggg

SEQ ID NO: 1864275 - RNA, 19 nt, Artificial Sequence
  Description of Artificial Sequence: Synthetic oligonucleotide
  Sense strand starting at position 354 of SEQ ID NO: 1564229
augaauaagucagagacca

SEQ ID NO: 1864276 - RNA, 19 nt, Artificial Sequence
  Description of Artificial Sequence: Synthetic oligonucleotide
  Antisense strand to SEQ ID NO: 1864275
uggucucugacuuauucau

SEQ ID NO: 1864277 - RNA, 19 nt, Artificial Sequence
  Description of Artificial Sequence: Synthetic oligonucleotide
  Sense strand starting at position 373 of SEQ ID NO: 1564229
auuaauugcuaaccugagu

SEQ ID NO: 1864278 - RNA, 19 nt, Artificial Sequence
  Description of Artificial Sequence: Synthetic oligonucleotide
  Antisense strand to SEQ ID NO: 1864277
acucagguuagcaauuaau

SEQ ID NO: 1864279 - RNA, 19 nt, Artificial Sequence
  Description of Artificial Sequence: Synthetic oligonucleotide
  Sense strand starting at position 379 of SEQ ID NO: 1564229
ugcuaaccugagugguaca

SEQ ID NO: 1864280 - RNA, 19 nt, Artificial Sequence
  Description of Artificial Sequence: Synthetic oligonucleotide
  Antisense strand to SEQ ID NO: 1864279
uguaccacucagguuagca

SEQ ID NO: 1864281 - RNA, 19 nt, Artificial Sequence
  Description of Artificial Sequence: Synthetic oligonucleotide
  Sense strand starting at position 384 of SEQ ID NO: 1564229
accugagugguacagacuu

SEQ ID NO: 1864282 - RNA, 19 nt, Artificial Sequence
  Description of Artificial Sequence: Synthetic oligonucleotide
  Antisense strand to SEQ ID NO: 1864281
aagucuguaccacucaggu

SEQ ID NO: 1864283 - RNA, 19 nt, Artificial Sequence
  Description of Artificial Sequence: Synthetic oligonucleotide
  Sense strand starting at position 386 of SEQ ID NO: 1564229
cugagugguacagacuuua

SEQ ID NO: 1864284 - RNA, 19 nt, Artificial Sequence
  Description of Artificial Sequence: Synthetic oligonucleotide
  Antisense strand to SEQ ID NO: 1864283
uaaagucuguaccacucag

SEQ ID NO: 1864285 - RNA, 19 nt, Artificial Sequence
  Description of Artificial Sequence: Synthetic oligonucleotide
  Sense strand starting at position 410 of SEQ ID NO: 1564229
augagcuguccugagaagu

SEQ ID NO: 1864286 - RNA, 19 nt, Artificial Sequence
  Description of Artificial Sequence: Synthetic oligonucleotide
  Antisense strand to SEQ ID NO: 1864285
acuucucaggacagcucau

SEQ ID NO: 1864287 - RNA, 19 nt, Artificial Sequence
  Description of Artificial Sequence: Synthetic oligonucleotide
  Sense strand starting at position 435 of SEQ ID NO: 1564229
aucuaaagguuggaauaau

SEQ ID NO: 1864288 - RNA, 19 nt, Artificial Sequence
  Description of Artificial Sequence: Synthetic oligonucleotide
  Antisense strand to SEQ ID NO: 1864287
auuauuccaaccuuuagau

SEQ ID NO: 1864289 - RNA, 19 nt, Artificial Sequence
  Description of Artificial Sequence: Synthetic oligonucleotide
  Sense strand starting at position 467 of SEQ ID NO: 1564229
gcuaucacuugagcacuua

SEQ ID NO: 1864290 - RNA, 19 nt, Artificial Sequence
  Description of Artificial Sequence: Synthetic oligonucleotide
  Antisense strand to SEQ ID NO: 1864289
uaagugcucaagugauagc

SEQ ID NO: 1864291 - RNA, 19 nt, Artificial Sequence
  Description of Artificial Sequence: Synthetic oligonucleotide
  Sense strand starting at position 527 of SEQ ID NO: 1564229
acaauccuuugaguagagu

SEQ ID NO: 1864292 - RNA, 19 nt, Artificial Sequence
  Description of Artificial Sequence: Synthetic oligonucleotide
  Antisense strand to SEQ ID NO: 1864291
acucuacucaaaggauugu

SEQ ID NO: 1864293 - RNA, 19 nt, Artificial Sequence
  Description of Artificial Sequence: Synthetic oligonucleotide
  Sense strand starting at position 528 of SEQ ID NO: 1564229
caauccuuugaguagagua

SEQ ID NO: 1864294 - RNA, 19 nt, Artificial Sequence
  Description of Artificial Sequence: Synthetic oligonucleotide
  Antisense strand to SEQ ID NO: 1864293
uacucuacucaaaggauug

SEQ ID NO: 1864295 - RNA, 19 nt, Artificial Sequence
  Description of Artificial Sequence: Synthetic oligonucleotide
  Sense strand starting at position 533 of SEQ ID NO: 1564229
cuuugaguagaguacuuau

SEQ ID NO: 1864296 - RNA, 19 nt, Artificial Sequence
  Description of Artificial Sequence: Synthetic oligonucleotide
  Antisense strand to SEQ ID NO: 1864295
auaaguacucuacucaaag

SEQ ID NO: 1864297 - RNA, 19 nt, Artificial Sequence
  Description of Artificial Sequence: Synthetic oligonucleotide
  Sense strand starting at position 536 of SEQ ID NO: 1564229
ugaguagaguacuuauuau

SEQ ID NO: 1864298 - RNA, 19 nt, Artificial Sequence
  Description of Artificial Sequence: Synthetic oligonucleotide
  Antisense strand to SEQ ID NO: 1864297
auaauaaguacucuacuca

SEQ ID NO: 1864299 - RNA, 19 nt, Artificial Sequence
  Description of Artificial Sequence: Synthetic oligonucleotide
  Sense strand starting at position 578 of SEQ ID NO: 1564229
aguccaagugguuaaggaa

SEQ ID NO: 1864300 - RNA, 19 nt, Artificial Sequence
  Description of Artificial Sequence: Synthetic oligonucleotide
  Antisense strand to SEQ ID NO: 1864299
uuccuuaaccacuuggacu

SEQ ID NO: 1864301 - RNA, 19 nt, Artificial Sequence
  Description of Artificial Sequence: Synthetic oligonucleotide
  Sense strand starting at position 617 of SEQ ID NO: 1564229
uacuuaaguggcuaagaca

SEQ ID NO: 1864302 - RNA, 19 nt, Artificial Sequence
  Description of Artificial Sequence: Synthetic oligonucleotide
  Antisense strand to SEQ ID NO: 1864301
ugucuuagccacuuaagua

SEQ ID NO: 1864303 - RNA, 19 nt, Artificial Sequence
  Description of Artificial Sequence: Synthetic oligonucleotide
  Sense strand starting at position 637 of SEQ ID NO: 1564229
ccgcuuauuuagggaauuc

SEQ ID NO: 1864304 - RNA, 19 nt, Artificial Sequence
  Description of Artificial Sequence: Synthetic oligonucleotide
  Antisense strand to SEQ ID NO: 1864303
gaauucccuaaauaagcgg

SEQ ID NO: 1864305 - RNA, 19 nt, Artificial Sequence
  Description of Artificial Sequence: Synthetic oligonucleotide
  Sense strand starting at position 758 of SEQ ID NO: 1564229
ccucguguuucguuccaag

SEQ ID NO: 1864306 - RNA, 19 nt, Artificial Sequence
  Description of Artificial Sequence: Synthetic oligonucleotide
  Antisense strand to SEQ ID NO: 1864305
cuuggaacgaaacacgagg

SEQ ID NO: 1864307 - RNA, 19 nt, Artificial Sequence
  Description of Artificial Sequence: Synthetic oligonucleotide
  Sense strand starting at position 760 of SEQ ID NO: 1564229
ucguguuucguuccaagua

SEQ ID NO: 1864308 - RNA, 19 nt, Artificial Sequence
  Description of Artificial Sequence: Synthetic oligonucleotide
  Antisense strand to SEQ ID NO: 1864307
uacuuggaacgaaacacga

SEQ ID NO: 1864309 - RNA, 19 nt, Artificial Sequence
  Description of Artificial Sequence: Synthetic oligonucleotide
  Sense strand starting at position 765 of SEQ ID NO: 1564229
uuucguuccaaguaacgaa

SEQ ID NO: 1864310 - RNA, 19 nt, Artificial Sequence
  Description of Artificial Sequence: Synthetic oligonucleotide
  Antisense strand to SEQ ID NO: 1864309
uucguuacuuggaacgaaa

SEQ ID NO: 1864311 - RNA, 19 nt, Artificial Sequence
  Description of Artificial Sequence: Synthetic oligonucleotide
  Sense strand starting at position 804 of SEQ ID NO: 1564229
uagcaugagccacgguaaa

SEQ ID NO: 1864312 - RNA, 19 nt, Artificial Sequence
  Description of Artificial Sequence: Synthetic oligonucleotide
  Antisense strand to SEQ ID NO: 1864311
uuuaccguggcucaugcua

SEQ ID NO: 1864313 - RNA, 19 nt, Artificial Sequence
  Description of Artificial Sequence: Synthetic oligonucleotide
  Sense strand starting at position 816 of SEQ ID NO: 1564229
cgguaaacuggcuacuaga

SEQ ID NO: 1864314 - RNA, 19 nt, Artificial Sequence
  Description of Artificial Sequence: Synthetic oligonucleotide
  Antisense strand to SEQ ID NO: 1864313
ucuaguagccaguuuaccg

SEQ ID NO: 1864315 - RNA, 19 nt, Artificial Sequence
  Description of Artificial Sequence: Synthetic oligonucleotide
  Sense strand starting at position 865 of SEQ ID NO: 1564229
auggcuaacgaggguuaau

SEQ ID NO: 1864316 - RNA, 19 nt, Artificial Sequence
  Description of Artificial Sequence: Synthetic oligonucleotide
  Antisense strand to SEQ ID NO: 1864315
auuaacccucguuagccau

SEQ ID NO: 1864317 - RNA, 19 nt, Artificial Sequence
  Description of Artificial Sequence: Synthetic oligonucleotide
  Sense strand starting at position 893 of SEQ ID NO: 1564229
gguugagcuuuagcaucua

SEQ ID NO: 1864318 - RNA, 19 nt, Artificial Sequence
  Description of Artificial Sequence: Synthetic oligonucleotide
  Antisense strand to SEQ ID NO: 1864317
uagaugcuaaagcucaacc

SEQ ID NO: 1864319 - RNA, 19 nt, Artificial Sequence
  Description of Artificial Sequence: Synthetic oligonucleotide
  Sense strand starting at position 967 of SEQ ID NO: 1564229
guuugcuuugcugcuuaaa

SEQ ID NO: 1864320 - RNA, 19 nt, Artificial Sequence
  Description of Artificial Sequence: Synthetic oligonucleotide
  Antisense strand to SEQ ID NO: 1864319
uuuaagcagcaaagcaaac

SEQ ID NO: 1864321 - RNA, 19 nt, Artificial Sequence
  Description of Artificial Sequence: Synthetic oligonucleotide
  Sense strand starting at position 970 of SEQ ID NO: 1564229
ugcuuugcugcuuaaacga

SEQ ID NO: 1864322 - RNA, 19 nt, Artificial Sequence
  Description of Artificial Sequence: Synthetic oligonucleotide
  Antisense strand to SEQ ID NO: 1864321
ucguuuaagcagcaaagca

SEQ ID NO: 1864323 - RNA, 19 nt, Artificial Sequence
  Description of Artificial Sequence: Synthetic oligonucleotide
  Sense strand starting at position 1096 of SEQ ID NO: 1564229
aaggaaacgcguuauccua

SEQ ID NO: 1864324 - RNA, 19 nt, Artificial Sequence
  Description of Artificial Sequence: Synthetic oligonucleotide
  Antisense strand to SEQ ID NO: 1864323
uaggauaacgcguuuccuu

SEQ ID NO: 1864325 - RNA, 19 nt, Artificial Sequence
  Description of Artificial Sequence: Synthetic oligonucleotide
  Sense strand starting at position 1103 of SEQ ID NO: 1564229
cgcguuauccuagguacug

SEQ ID NO: 1864326 - RNA, 19 nt, Artificial Sequence
  Description of Artificial Sequence: Synthetic oligonucleotide
  Antisense strand to SEQ ID NO: 1864325
caguaccuaggauaacgcg

SEQ ID NO: 1864327 - RNA, 19 nt, Artificial Sequence
  Description of Artificial Sequence: Synthetic oligonucleotide
  Sense strand starting at position 1139 of SEQ ID NO: 1564229
gccagaauuaguugcaguc

SEQ ID NO: 1864328 - RNA, 19 nt, Artificial Sequence
  Description of Artificial Sequence: Synthetic oligonucleotide
  Antisense strand to SEQ ID NO: 1864327
gacugcaacuaauucuggc

SEQ ID NO: 1864329 - RNA, 19 nt, Artificial Sequence
  Description of Artificial Sequence: Synthetic oligonucleotide
  Sense strand starting at position 1149 of SEQ ID NO: 1564229
guugcagucccaggauaaa

SEQ ID NO: 1864330 - RNA, 19 nt, Artificial Sequence
  Description of Artificial Sequence: Synthetic oligonucleotide
  Antisense strand to SEQ ID NO: 1864329
uuuauccugggacugcaac

SEQ ID NO: 1864331 - RNA, 19 nt, Artificial Sequence
  Description of Artificial Sequence: Synthetic oligonucleotide
  Sense strand starting at position 1178 of SEQ ID NO: 1564229
gggaacauuuaaugacgaa

SEQ ID NO: 1864332 - RNA, 19 nt, Artificial Sequence
  Description of Artificial Sequence: Synthetic oligonucleotide
  Antisense strand to SEQ ID NO: 1864331
uucgucauuaaauguuccc

SEQ ID NO: 1864333 - RNA, 19 nt, Artificial Sequence
  Description of Artificial Sequence: Synthetic oligonucleotide
  Sense strand starting at position 1210 of SEQ ID NO: 1564229
ccgaaauagcucuaaggug

SEQ ID NO: 1864334 - RNA, 19 nt, Artificial Sequence
  Description of Artificial Sequence: Synthetic oligonucleotide
  Antisense strand to SEQ ID NO: 1864333
caccuuagagcuauuucgg

SEQ ID NO: 1864335 - RNA, 19 nt, Artificial Sequence
  Description of Artificial Sequence: Synthetic oligonucleotide
  Sense strand starting at position 1240 of SEQ ID NO: 1564229
caaagaaaugucggugguu

SEQ ID NO: 1864336 - RNA, 19 nt, Artificial Sequence
  Description of Artificial Sequence: Synthetic oligonucleotide
  Antisense strand to SEQ ID NO: 1864335
aaccaccgacauuucuuug

SEQ ID NO: 1864337 - RNA, 19 nt, Artificial Sequence
  Description of Artificial Sequence: Synthetic oligonucleotide
  Sense strand starting at position 1241 of SEQ ID NO: 1564229
aaagaaaugucggugguuc

SEQ ID NO: 1864338 - RNA, 19 nt, Artificial Sequence
  Description of Artificial Sequence: Synthetic oligonucleotide
  Antisense strand to SEQ ID NO: 1864337
gaaccaccgacauuucuuu

SEQ ID NO: 1864339 - RNA, 19 nt, Artificial Sequence
  Description of Artificial Sequence: Synthetic oligonucleotide
  Sense strand starting at position 1242 of SEQ ID NO: 1564229
aagaaaugucggugguucu

SEQ ID NO: 1864340 - RNA, 19 nt, Artificial Sequence
  Description of Artificial Sequence: Synthetic oligonucleotide
  Antisense strand to SEQ ID NO: 1864339
agaaccaccgacauuucuu

SEQ ID NO: 1864341 - RNA, 19 nt, Artificial Sequence
  Description of Artificial Sequence: Synthetic oligonucleotide
  Sense strand starting at position 1243 of SEQ ID NO: 1564229
agaaaugucggugguucuu

SEQ ID NO: 1864342 - RNA, 19 nt, Artificial Sequence
  Description of Artificial Sequence: Synthetic oligonucleotide
  Antisense strand to SEQ ID NO: 1864341
aagaaccaccgacauuucu

SEQ ID NO: 1864343 - RNA, 19 nt, Artificial Sequence
  Description of Artificial Sequence: Synthetic oligonucleotide
  Sense strand starting at position 1641 of SEQ ID NO: 1564229
gaguucuacuaagaggcua

SEQ ID NO: 1864344 - RNA, 19 nt, Artificial Sequence
  Description of Artificial Sequence: Synthetic oligonucleotide
  Antisense strand to SEQ ID NO: 1864343
uagccucuuaguagaacuc

SEQ ID NO: 1864345 - RNA, 19 nt, Artificial Sequence
  Description of Artificial Sequence: Synthetic oligonucleotide
  Sense strand starting at position 1910 of SEQ ID NO: 1564229
ccugauuucucccaguucu

SEQ ID NO: 1864346 - RNA, 19 nt, Artificial Sequence
  Description of Artificial Sequence: Synthetic oligonucleotide
  Antisense strand to SEQ ID NO: 1864345
agaacugggagaaaucagg

SEQ ID NO: 1864347 - RNA, 19 nt, Artificial Sequence
  Description of Artificial Sequence: Synthetic oligonucleotide
  Sense strand starting at position 2339 of SEQ ID NO: 1564229
auaauagucuuugggaaag

SEQ ID NO: 1864348 - RNA, 19 nt, Artificial Sequence
  Description of Artificial Sequence: Synthetic oligonucleotide
  Antisense strand to SEQ ID NO: 1864347
cuuucccaaagacuauuau

SEQ ID NO: 1864349 - RNA, 19 nt, Artificial Sequence
  Description of Artificial Sequence: Synthetic oligonucleotide
  Sense strand starting at position 3728 of SEQ ID NO: 1564229
cggcaggcucguuaagagu

SEQ ID NO: 1864350 - RNA, 19 nt, Artificial Sequence
  Description of Artificial Sequence: Synthetic oligonucleotide
  Antisense strand to SEQ ID NO: 1864349
acucuuaacgagccugccg

SEQ ID NO: 1864351 - RNA, 19 nt, Artificial Sequence
  Description of Artificial Sequence: Synthetic oligonucleotide
  Sense strand starting at position 329 of SEQ ID NO: 1564230
cugucuggcuuugcacaua

SEQ ID NO: 1864352 - RNA, 19 nt, Artificial Sequence
  Description of Artificial Sequence: Synthetic oligonucleotide
  Antisense strand to SEQ ID NO: 1864351
uaugugcaaagccagacag

SEQ ID NO: 1864353 - RNA, 19 nt, Artificial Sequence
  Description of Artificial Sequence: Synthetic oligonucleotide
  Sense strand starting at position 360 of SEQ ID NO: 1564230
ggugaugacucuuugaacg

SEQ ID NO: 1864354 - RNA, 19 nt, Artificial Sequence
  Description of Artificial Sequence: Synthetic oligonucleotide
  Antisense strand to SEQ ID NO: 1864353
cguucaaagagucaucacc

SEQ ID NO: 1864355 - RNA, 19 nt, Artificial Sequence
  Description of Artificial Sequence: Synthetic oligonucleotide
  Sense strand starting at position 362 of SEQ ID NO: 1564230
ugaugacucuuugaacgac

SEQ ID NO: 1864356 - RNA, 19 nt, Artificial Sequence
  Description of Artificial Sequence: Synthetic oligonucleotide
  Antisense strand to SEQ ID NO: 1864355
gucguucaaagagucauca

SEQ ID NO: 1864357 - RNA, 19 nt, Artificial Sequence
  Description of Artificial Sequence: Synthetic oligonucleotide
  Sense strand starting at position 365 of SEQ ID NO: 1564230
ugacucuuugaacgacaca

SEQ ID NO: 1864358 - RNA, 19 nt, Artificial Sequence
  Description of Artificial Sequence: Synthetic oligonucleotide
  Antisense strand to SEQ ID NO: 1864357
ugugucguucaaagaguca

SEQ ID NO: 1864359 - RNA, 19 nt, Artificial Sequence
  Description of Artificial Sequence: Synthetic oligonucleotide
  Sense strand starting at position 512 of SEQ ID NO: 1564230
ugaauaagugcacgugacu

SEQ ID NO: 1864360 - RNA, 19 nt, Artificial Sequence
  Description of Artificial Sequence: Synthetic oligonucleotide
  Antisense strand to SEQ ID NO: 1864359
agucacgugcacuuauuca

SEQ ID NO: 1864361 - RNA, 19 nt, Artificial Sequence
  Description of Artificial Sequence: Synthetic oligonucleotide
  Sense strand starting at position 559 of SEQ ID NO: 1564230
cucccuugugggcaagaua

SEQ ID NO: 1864362 - RNA, 19 nt, Artificial Sequence
  Description of Artificial Sequence: Synthetic oligonucleotide
  Antisense strand to SEQ ID NO: 1864361
uaucuugcccacaagggag

SEQ ID NO: 1864363 - RNA, 19 nt, Artificial Sequence
  Description of Artificial Sequence: Synthetic oligonucleotide
  Sense strand starting at position 637 of SEQ ID NO: 1564230
cuugauggccuggaagacu

SEQ ID NO: 1864364 - RNA, 19 nt, Artificial Sequence
  Description of Artificial Sequence: Synthetic oligonucleotide
  Antisense strand to SEQ ID NO: 1864363
agucuuccaggccaucaag

SEQ ID NO: 1864365 - RNA, 19 nt, Artificial Sequence
  Description of Artificial Sequence: Synthetic oligonucleotide
  Sense strand starting at position 648 of SEQ ID NO: 1564230
ggaagacuccgccaccgau

SEQ ID NO: 1864366 - RNA, 19 nt, Artificial Sequence
  Description of Artificial Sequence: Synthetic oligonucleotide
  Antisense strand to SEQ ID NO: 1864365
aucgguggcggagucuucc

SEQ ID NO: 1864367 - RNA, 19 nt, Artificial Sequence
  Description of Artificial Sequence: Synthetic oligonucleotide
  Sense strand starting at position 812 of SEQ ID NO: 1564230
augggaaguuccuaaguag

SEQ ID NO: 1864368 - RNA, 19 nt, Artificial Sequence
  Description of Artificial Sequence: Synthetic oligonucleotide
  Antisense strand to SEQ ID NO: 1864367
cuacuuaggaacuucccau

SEQ ID NO: 1864369 - RNA, 19 nt, Artificial Sequence
  Description of Artificial Sequence: Synthetic oligonucleotide
  Sense strand starting at position 815 of SEQ ID NO: 1564230
ggaaguuccuaaguaggaa

SEQ ID NO: 1864370 - RNA, 19 nt, Artificial Sequence
  Description of Artificial Sequence: Synthetic oligonucleotide
  Antisense strand to SEQ ID NO: 1864369
uuccuacuuaggaacuucc

SEQ ID NO: 1864371 - RNA, 19 nt, Artificial Sequence
  Description of Artificial Sequence: Synthetic oligonucleotide
  Sense strand starting at position 844 of SEQ ID NO: 1564230
agauaauaaugagcuaguu

SEQ ID NO: 1864372 - RNA, 19 nt, Artificial Sequence
  Description of Artificial Sequence: Synthetic oligonucleotide
  Antisense strand to SEQ ID NO: 1864371
aacuagcucauuauuaucu

SEQ ID NO: 1864373 - RNA, 19 nt, Artificial Sequence
  Description of Artificial Sequence: Synthetic oligonucleotide
  Sense strand starting at position 854 of SEQ ID NO: 1564230
gagcuaguucugucacgcu

SEQ ID NO: 1864374 - RNA, 19 nt, Artificial Sequence
  Description of Artificial Sequence: Synthetic oligonucleotide
  Antisense strand to SEQ ID NO: 1864373
agcgugacagaacuagcuc

SEQ ID NO: 1864375 - RNA, 19 nt, Artificial Sequence
  Description of Artificial Sequence: Synthetic oligonucleotide
  Sense strand starting at position 926 of SEQ ID NO: 1564230
uuagucuucgcccugucua

SEQ ID NO: 1864376 - RNA, 19 nt, Artificial Sequence
  Description of Artificial Sequence: Synthetic oligonucleotide
  Antisense strand to SEQ ID NO: 1864375
uagacagggcgaagacuaa

SEQ ID NO: 1864377 - RNA, 19 nt, Artificial Sequence
  Description of Artificial Sequence: Synthetic oligonucleotide
  Sense strand starting at position 1023 of SEQ ID NO: 1564230
aagcgacauaggcguguua

SEQ ID NO: 1864378 - RNA, 19 nt, Artificial Sequence
  Description of Artificial Sequence: Synthetic oligonucleotide
  Antisense strand to SEQ ID NO: 1864377
uaacacgccuaugucgcuu

SEQ ID NO: 1864379 - RNA, 19 nt, Artificial Sequence
  Description of Artificial Sequence: Synthetic oligonucleotide
  Sense strand starting at position 1032 of SEQ ID NO: 1564230
aggcguguuaacuagccaa

SEQ ID NO: 1864380 - RNA, 19 nt, Artificial Sequence
  Description of Artificial Sequence: Synthetic oligonucleotide
  Antisense strand to SEQ ID NO: 1864379
uuggcuaguuaacacgccu

SEQ ID NO: 1864381 - RNA, 19 nt, Artificial Sequence
  Description of Artificial Sequence: Synthetic oligonucleotide
  Sense strand starting at position 1035 of SEQ ID NO: 1564230
cguguuaacuagccaagac

SEQ ID NO: 1864382 - RNA, 19 nt, Artificial Sequence
  Description of Artificial Sequence: Synthetic oligonucleotide
  Antisense strand to SEQ ID NO: 1864381
gucuuggcuaguuaacacg

SEQ ID NO: 1864383 - RNA, 19 nt, Artificial Sequence
  Description of Artificial Sequence: Synthetic oligonucleotide
  Sense strand starting at position 1452 of SEQ ID NO: 1564230
cgggagauacguuaagagu

SEQ ID NO: 1864384 - RNA, 19 nt, Artificial Sequence
  Description of Artificial Sequence: Synthetic oligonucleotide
  Antisense strand to SEQ ID NO: 1864383
acucuuaacguaucucccg

SEQ ID NO: 1864385 - RNA, 19 nt, Artificial Sequence
  Description of Artificial Sequence: Synthetic oligonucleotide
  Sense strand starting at position 1546 of SEQ ID NO: 1564230
agcaauauuccggaugccu

SEQ ID NO: 1864386 - RNA, 19 nt, Artificial Sequence
  Description of Artificial Sequence: Synthetic oligonucleotide
  Antisense strand to SEQ ID NO: 1864385
aggcauccggaauauugcu

SEQ ID NO: 1864387 - RNA, 19 nt, Artificial Sequence
  Description of Artificial Sequence: Synthetic oligonucleotide
  Sense strand starting at position 1666 of SEQ ID NO: 1564230
cggagcuuuccgccuauua

SEQ ID NO: 1864388 - RNA, 19 nt, Artificial Sequence
  Description of Artificial Sequence: Synthetic oligonucleotide
  Antisense strand to SEQ ID NO: 1864387
uaauaggcggaaagcuccg

SEQ ID NO: 1864389 - RNA, 19 nt, Artificial Sequence
  Description of Artificial Sequence: Synthetic oligonucleotide
  Sense strand starting at position 1690 of SEQ ID NO: 1564230
cagcgauugggucgcuaua

SEQ ID NO: 1864390 - RNA, 19 nt, Artificial Sequence
  Description of Artificial Sequence: Synthetic oligonucleotide
  Antisense strand to SEQ ID NO: 1864389
uauagcgacccaaucgcug

SEQ ID NO: 1864391 - RNA, 19 nt, Artificial Sequence
  Description of Artificial Sequence: Synthetic oligonucleotide
  Sense strand starting at position 1744 of SEQ ID NO: 1564230
aaucgaguuucugccauuu

SEQ ID NO: 1864392 - RNA, 19 nt, Artificial Sequence
  Description of Artificial Sequence: Synthetic oligonucleotide
  Antisense strand to SEQ ID NO: 1864391
aaauggcagaaacucgauu

SEQ ID NO: 1864393 - RNA, 19 nt, Artificial Sequence
  Description of Artificial Sequence: Synthetic oligonucleotide
  Sense strand starting at position 2502 of SEQ ID NO: 1564230
gacgcuugauaccuagcau

SEQ ID NO: 1864394 - RNA, 19 nt, Artificial Sequence
  Description of Artificial Sequence: Synthetic oligonucleotide
  Antisense strand to SEQ ID NO: 1864393
augcuagguaucaagcguc

SEQ ID NO: 1864395 - RNA, 19 nt, Artificial Sequence
  Description of Artificial Sequence: Synthetic oligonucleotide
  Sense strand starting at position 2503 of SEQ ID NO: 1564230
acgcuugauaccuagcaug

SEQ ID NO: 1864396 - RNA, 19 nt, Artificial Sequence
  Description of Artificial Sequence: Synthetic oligonucleotide
  Antisense strand to SEQ ID NO: 1864395
caugcuagguaucaagcgu

SEQ ID NO: 1864397 - RNA, 19 nt, Artificial Sequence
  Description of Artificial Sequence: Synthetic oligonucleotide
  Sense strand starting at position 2571 of SEQ ID NO: 1564230
caauguggauuccugacau

SEQ ID NO: 1864398 - RNA, 19 nt, Artificial Sequence
  Description of Artificial Sequence: Synthetic oligonucleotide
  Antisense strand to SEQ ID NO: 1864397
augucaggaauccacauug

SEQ ID NO: 1864399 - RNA, 19 nt, Artificial Sequence
  Description of Artificial Sequence: Synthetic oligonucleotide
  Sense strand starting at position 2575 of SEQ ID NO: 1564230
guggauuccugacauccau

SEQ ID NO: 1864400 - RNA, 19 nt, Artificial Sequence
  Description of Artificial Sequence: Synthetic oligonucleotide
  Antisense strand to SEQ ID NO: 1864399
auggaugucaggaauccac

SEQ ID NO: 1864401 - RNA, 19 nt, Artificial Sequence
  Description of Artificial Sequence: Synthetic oligonucleotide
  Sense strand starting at position 2684 of SEQ ID NO: 1564230
ggcagagucuuauugugca

SEQ ID NO: 1864402 - RNA, 19 nt, Artificial Sequence
  Description of Artificial Sequence: Synthetic oligonucleotide
  Antisense strand to SEQ ID NO: 1864401
ugcacaauaagacucugcc

SEQ ID NO: 1864403 - RNA, 19 nt, Artificial Sequence
  Description of Artificial Sequence: Synthetic oligonucleotide
  Sense strand starting at position 2688 of SEQ ID NO: 1564230
gagucuuauugugcaccca

SEQ ID NO: 1864404 - RNA, 19 nt, Artificial Sequence
  Description of Artificial Sequence: Synthetic oligonucleotide
  Antisense strand to SEQ ID NO: 1864403
ugggugcacaauaagacuc

SEQ ID NO: 1864405 - RNA, 19 nt, Artificial Sequence
  Description of Artificial Sequence: Synthetic oligonucleotide
  Sense strand starting at position 2776 of SEQ ID NO: 1564230
ccuuaacuucccgaguagu

SEQ ID NO: 1864406 - RNA, 19 nt, Artificial Sequence
  Description of Artificial Sequence: Synthetic oligonucleotide
  Antisense strand to SEQ ID NO: 1864405
acuacucgggaaguuaagg

SEQ ID NO: 1864407 - RNA, 19 nt, Artificial Sequence
  Description of Artificial Sequence: Synthetic oligonucleotide
  Sense strand starting at position 3187 of SEQ ID NO: 1564230
uggcauucccagcacuuua

SEQ ID NO: 1864408 - RNA, 19 nt, Artificial Sequence
  Description of Artificial Sequence: Synthetic oligonucleotide
  Antisense strand to SEQ ID NO: 1864407
uaaagugcugggaaugcca

SEQ ID NO: 1864409 - RNA, 19 nt, Artificial Sequence
  Description of Artificial Sequence: Synthetic oligonucleotide
  Sense strand starting at position 3219 of SEQ ID NO: 1564230
gguagauugcuugaguuua

SEQ ID NO: 1864410 - RNA, 19 nt, Artificial Sequence
  Description of Artificial Sequence: Synthetic oligonucleotide
  Antisense strand to SEQ ID NO: 1864409
uaaacucaagcaaucuacc

SEQ ID NO: 1864411 - RNA, 19 nt, Artificial Sequence
  Description of Artificial Sequence: Synthetic oligonucleotide
  Sense strand starting at position 3224 of SEQ ID NO: 1564230
auugcuugaguuuagggau

SEQ ID NO: 1864412 - RNA, 19 nt, Artificial Sequence
  Description of Artificial Sequence: Synthetic oligonucleotide
  Antisense strand to SEQ ID NO: 1864411
aucccuaaacucaagcaau

SEQ ID NO: 1864413 - RNA, 19 nt, Artificial Sequence
  Description of Artificial Sequence: Synthetic oligonucleotide
  Sense strand starting at position 3296 of SEQ ID NO: 1564230
aaauuaaucguguguugug

SEQ ID NO: 1864414 - RNA, 19 nt, Artificial Sequence
  Description of Artificial Sequence: Synthetic oligonucleotide
  Antisense strand to SEQ ID NO: 1864413
cacaacacacgauuaauuu

SEQ ID NO: 1864415 - RNA, 19 nt, Artificial Sequence
  Description of Artificial Sequence: Synthetic oligonucleotide
  Sense strand starting at position 3518 of SEQ ID NO: 1564230
aguuaaaucccauggauua

SEQ ID NO: 1864416 - RNA, 19 nt, Artificial Sequence
  Description of Artificial Sequence: Synthetic oligonucleotide
  Antisense strand to SEQ ID NO: 1864415
uaauccaugggauuuaacu

SEQ ID NO: 1864417 - RNA, 19 nt, Artificial Sequence
  Description of Artificial Sequence: Synthetic oligonucleotide
  Sense strand starting at position 3519 of SEQ ID NO: 1564230
guuaaaucccauggauuac

SEQ ID NO: 1864418 - RNA, 19 nt, Artificial Sequence
  Description of Artificial Sequence: Synthetic oligonucleotide
  Antisense strand to SEQ ID NO: 1864417
guaauccaugggauuuaac

SEQ ID NO: 1864419 - RNA, 19 nt, Artificial Sequence
  Description of Artificial Sequence: Synthetic oligonucleotide
  Sense strand starting at position 3609 of SEQ ID NO: 1564230
gcguaguugcagugaggau

SEQ ID NO: 1864420 - RNA, 19 nt, Artificial Sequence
  Description of Artificial Sequence: Synthetic oligonucleotide
  Antisense strand to SEQ ID NO: 1864419
auccucacugcaacuacgc

SEQ ID NO: 1864421 - RNA, 19 nt, Artificial Sequence
  Description of Artificial Sequence: Synthetic oligonucleotide
  Sense strand starting at position 3644 of SEQ ID NO: 1564230
cugugcucuggcugcaaau

SEQ ID NO: 1864422 - RNA, 19 nt, Artificial Sequence
  Description of Artificial Sequence: Synthetic oligonucleotide
  Antisense strand to SEQ ID NO: 1864421
auuugcagccagagcacag

SEQ ID NO: 1864423 - RNA, 19 nt, Artificial Sequence
  Description of Artificial Sequence: Synthetic oligonucleotide
  Sense strand starting at position 3646 of SEQ ID NO: 1564230
gugcucuggcugcaaauca

SEQ ID NO: 1864424 - RNA, 19 nt, Artificial Sequence
  Description of Artificial Sequence: Synthetic oligonucleotide
  Antisense strand to SEQ ID NO: 1864423
ugauuugcagccagagcac

SEQ ID NO: 1864425 - RNA, 19 nt, Artificial Sequence
  Description of Artificial Sequence: Synthetic oligonucleotide
  Sense strand starting at position 3771 of SEQ ID NO: 1564230
gccuacugugugcaaggua

SEQ ID NO: 1864426 - RNA, 19 nt, Artificial Sequence
  Description of Artificial Sequence: Synthetic oligonucleotide
  Antisense strand to SEQ ID NO: 1864425
uaccuugcacacaguaggc

SEQ ID NO: 1864427 - RNA, 19 nt, Artificial Sequence
  Description of Artificial Sequence: Synthetic oligonucleotide
  Sense strand starting at position 3785 of SEQ ID NO: 1564230
agguauagaccuugugguu

SEQ ID NO: 1864428 - RNA, 19 nt, Artificial Sequence
  Description of Artificial Sequence: Synthetic oligonucleotide
  Antisense strand to SEQ ID NO: 1864427
aaccacaaggucuauaccu

SEQ ID NO: 1864429 - RNA, 19 nt, Artificial Sequence
  Description of Artificial Sequence: Synthetic oligonucleotide
  Sense strand starting at position 3790 of SEQ ID NO: 1564230
uagaccuugugguuaauaa

SEQ ID NO: 1864430 - RNA, 19 nt, Artificial Sequence
  Description of Artificial Sequence: Synthetic oligonucleotide
  Antisense strand to SEQ ID NO: 1864429
uuauuaaccacaaggucua

SEQ ID NO: 1864431 - RNA, 19 nt, Artificial Sequence
  Description of Artificial Sequence: Synthetic oligonucleotide
  Sense strand starting at position 54 of SEQ ID NO: 1564231
ucugauauguuacugauag

SEQ ID NO: 1864432 - RNA, 19 nt, Artificial Sequence
  Description of Artificial Sequence: Synthetic oligonucleotide
  Antisense strand to SEQ ID NO: 1864431
cuaucaguaacauaucaga

SEQ ID NO: 1864433 - RNA, 19 nt, Artificial Sequence
  Description of Artificial Sequence: Synthetic oligonucleotide
  Sense strand starting at position 191 of SEQ ID NO: 1564231
guggcacagagauacuuua

SEQ ID NO: 1864434 - RNA, 19 nt, Artificial Sequence
  Description of Artificial Sequence: Synthetic oligonucleotide
  Antisense strand to SEQ ID NO: 1864433
uaaaguaucucugugccac

SEQ ID NO: 1864435 - RNA, 19 nt, Artificial Sequence
  Description of Artificial Sequence: Synthetic oligonucleotide
  Sense strand starting at position 232 of SEQ ID NO: 1564231
auggcagagcugggauauu

SEQ ID NO: 1864436 - RNA, 19 nt, Artificial Sequence
  Description of Artificial Sequence: Synthetic oligonucleotide
  Antisense strand to SEQ ID NO: 1864435
aauaucccagcucugccau

SEQ ID NO: 1864437 - RNA, 19 nt, Artificial Sequence
  Description of Artificial Sequence: Synthetic oligonucleotide
  Sense strand starting at position 447 of SEQ ID NO: 1564231
cuacuuaagcuagagauuc

SEQ ID NO: 1864438 - RNA, 19 nt, Artificial Sequence
  Description of Artificial Sequence: Synthetic oligonucleotide
  Antisense strand to SEQ ID NO: 1864437
gaaucucuagcuuaaguag

SEQ ID NO: 1864439 - RNA, 19 nt, Artificial Sequence
  Description of Artificial Sequence: Synthetic oligonucleotide
  Sense strand starting at position 842 of SEQ ID NO: 1564231
agauucuugcaauaguacu

SEQ ID NO: 1864440 - RNA, 19 nt, Artificial Sequence
  Description of Artificial Sequence: Synthetic oligonucleotide
  Antisense strand to SEQ ID NO: 1864439
aguacuauugcaagaaucu

SEQ ID NO: 1864441 - RNA, 19 nt, Artificial Sequence
  Description of Artificial Sequence: Synthetic oligonucleotide
  Sense strand starting at position 938 of SEQ ID NO: 1564231
gcagaccagaguuaaguaa

SEQ ID NO: 1864442 - RNA, 19 nt, Artificial Sequence
  Description of Artificial Sequence: Synthetic oligonucleotide
  Antisense strand to SEQ ID NO: 1864441
uuacuuaacucuggucugc

SEQ ID NO: 1864443 - RNA, 19 nt, Artificial Sequence
  Description of Artificial Sequence: Synthetic oligonucleotide
  Sense strand starting at position 1127 of SEQ ID NO: 1564231
cucugaauucugugaauug

SEQ ID NO: 1864444 - RNA, 19 nt, Artificial Sequence
  Description of Artificial Sequence: Synthetic oligonucleotide
  Antisense strand to SEQ ID NO: 1864443
caauucacagaauucagag

SEQ ID NO: 1864445 - RNA, 19 nt, Artificial Sequence
  Description of Artificial Sequence: Synthetic oligonucleotide
  Sense strand starting at position 1138 of SEQ ID NO: 1564231
gugaauuguguacauuaag

SEQ ID NO: 1864446 - RNA, 19 nt, Artificial Sequence
  Description of Artificial Sequence: Synthetic oligonucleotide
  Antisense strand to SEQ ID NO: 1864445
cuuaauguacacaauucac

SEQ ID NO: 1864447 - RNA, 19 nt, Artificial Sequence
  Description of Artificial Sequence: Synthetic oligonucleotide
  Sense strand starting at position 1382 of SEQ ID NO: 1564231
gaggguuagaacuggguaa

SEQ ID NO: 1864448 - RNA, 19 nt, Artificial Sequence
  Description of Artificial Sequence: Synthetic oligonucleotide
  Antisense strand to SEQ ID NO: 1864447
uuacccaguucuaacccuc

SEQ ID NO: 1864449 - RNA, 19 nt, Artificial Sequence
  Description of Artificial Sequence: Synthetic oligonucleotide
  Sense strand starting at position 1383 of SEQ ID NO: 1564231
aggguuagaacuggguaau

SEQ ID NO: 1864450 - RNA, 19 nt, Artificial Sequence
  Description of Artificial Sequence: Synthetic oligonucleotide
  Antisense strand to SEQ ID NO: 1864449
auuacccaguucuaacccu

SEQ ID NO: 1864451 - RNA, 19 nt, Artificial Sequence
  Description of Artificial Sequence: Synthetic oligonucleotide
  Sense strand starting at position 1384 of SEQ ID NO: 1564231
ggguuagaacuggguaaug

SEQ ID NO: 1864452 - RNA, 19 nt, Artificial Sequence
  Description of Artificial Sequence: Synthetic oligonucleotide
  Antisense strand to SEQ ID NO: 1864451
cauuacccaguucuaaccc

SEQ ID NO: 1864453 - RNA, 19 nt, Artificial Sequence
  Description of Artificial Sequence: Synthetic oligonucleotide
  Sense strand starting at position 1393 of SEQ ID NO: 1564231
cuggguaaugaagguaaau

SEQ ID NO: 1864454 - RNA, 19 nt, Artificial Sequence
  Description of Artificial Sequence: Synthetic oligonucleotide
  Antisense strand to SEQ ID NO: 1864453
auuuaccuucauuacccag

SEQ ID NO: 1864455 - RNA, 19 nt, Artificial Sequence
  Description of Artificial Sequence: Synthetic oligonucleotide
  Sense strand starting at position 1403 of SEQ ID NO: 1564231
aagguaaaucccgaggagu

SEQ ID NO: 1864456 - RNA, 19 nt, Artificial Sequence
  Description of Artificial Sequence: Synthetic oligonucleotide
  Antisense strand to SEQ ID NO: 1864455
acuccucgggauuuaccuu

SEQ ID NO: 1864457 - RNA, 19 nt, Artificial Sequence
  Description of Artificial Sequence: Synthetic oligonucleotide
  Sense strand starting at position 1411 of SEQ ID NO: 1564231
ucccgaggaguccaggaau

SEQ ID NO: 1864458 - RNA, 19 nt, Artificial Sequence
  Description of Artificial Sequence: Synthetic oligonucleotide
  Antisense strand to SEQ ID NO: 1864457
auuccuggacuccucggga

SEQ ID NO: 1864459 - RNA, 19 nt, Artificial Sequence
  Description of Artificial Sequence: Synthetic oligonucleotide
  Sense strand starting at position 1864 of SEQ ID NO: 1564231
agucucuaccucgaugaaa

SEQ ID NO: 1864460 - RNA, 19 nt, Artificial Sequence
  Description of Artificial Sequence: Synthetic oligonucleotide
  Antisense strand to SEQ ID NO: 1864459
uuucaucgagguagagacu

SEQ ID NO: 1864461 - RNA, 19 nt, Artificial Sequence
  Description of Artificial Sequence: Synthetic oligonucleotide
  Sense strand starting at position 1866 of SEQ ID NO: 1564231
ucucuaccucgaugaaaug

SEQ ID NO: 1864462 - RNA, 19 nt, Artificial Sequence
  Description of Artificial Sequence: Synthetic oligonucleotide
  Antisense strand to SEQ ID NO: 1864461
cauuucaucgagguagaga

SEQ ID NO: 1864463 - RNA, 19 nt, Artificial Sequence
  Description of Artificial Sequence: Synthetic oligonucleotide
  Sense strand starting at position 2192 of SEQ ID NO: 1564231
cagccuugcgccuugagau

SEQ ID NO: 1864464 - RNA, 19 nt, Artificial Sequence
  Description of Artificial Sequence: Synthetic oligonucleotide
  Antisense strand to SEQ ID NO: 1864463
aucucaaggcgcaaggcug

SEQ ID NO: 1864465 - RNA, 19 nt, Artificial Sequence
  Description of Artificial Sequence: Synthetic oligonucleotide
  Sense strand starting at position 2231 of SEQ ID NO: 1564231
gccgaggugccguugagau

SEQ ID NO: 1864466 - RNA, 19 nt, Artificial Sequence
  Description of Artificial Sequence: Synthetic oligonucleotide
  Antisense strand to SEQ ID NO: 1864465
aucucaacggcaccucggc

SEQ ID NO: 1864467 - RNA, 19 nt, Artificial Sequence
  Description of Artificial Sequence: Synthetic oligonucleotide
  Sense strand starting at position 2596 of SEQ ID NO: 1564231
agggcuuaaaccuggagga

SEQ ID NO: 1864468 - RNA, 19 nt, Artificial Sequence
  Description of Artificial Sequence: Synthetic oligonucleotide
  Antisense strand to SEQ ID NO: 1864467
uccuccagguuuaagcccu

SEQ ID NO: 1864469 - RNA, 19 nt, Artificial Sequence
  Description of Artificial Sequence: Synthetic oligonucleotide
  Sense strand starting at position 2597 of SEQ ID NO: 1564231
gggcuuaaaccuggaggau

SEQ ID NO: 1864470 - RNA, 19 nt, Artificial Sequence
  Description of Artificial Sequence: Synthetic oligonucleotide
  Antisense strand to SEQ ID NO: 1864469
auccuccagguuuaagccc

SEQ ID NO: 1864471 - RNA, 19 nt, Artificial Sequence
  Description of Artificial Sequence: Synthetic oligonucleotide
  Sense strand starting at position 2618 of SEQ ID NO: 1564231
ugucgaguucucaguguag

SEQ ID NO: 1864472 - RNA, 19 nt, Artificial Sequence
  Description of Artificial Sequence: Synthetic oligonucleotide
  Antisense strand to SEQ ID NO: 1864471
cuacacugagaacucgaca

SEQ ID NO: 1864473 - RNA, 19 nt, Artificial Sequence
  Description of Artificial Sequence: Synthetic oligonucleotide
  Sense strand starting at position 2622 of SEQ ID NO: 1564231
gaguucucaguguaggaau

SEQ ID NO: 1864474 - RNA, 19 nt, Artificial Sequence
  Description of Artificial Sequence: Synthetic oligonucleotide
  Antisense strand to SEQ ID NO: 1864473
auuccuacacugagaacuc

SEQ ID NO: 1864475 - RNA, 19 nt, Artificial Sequence
  Description of Artificial Sequence: Synthetic oligonucleotide
  Sense strand starting at position 2630 of SEQ ID NO: 1564231
aguguaggaauaugccaaa

SEQ ID NO: 1864476 - RNA, 19 nt, Artificial Sequence
  Description of Artificial Sequence: Synthetic oligonucleotide
  Antisense strand to SEQ ID NO: 1864475
uuuggcauauuccuacacu

SEQ ID NO: 1864477 - RNA, 19 nt, Artificial Sequence
  Description of Artificial Sequence: Synthetic oligonucleotide
  Sense strand starting at position 2661 of SEQ ID NO: 1564231
agcagcuuucuggaauacu

SEQ ID NO: 1864478 - RNA, 19 nt, Artificial Sequence
  Description of Artificial Sequence: Synthetic oligonucleotide
  Antisense strand to SEQ ID NO: 1864477
aguauuccagaaagcugcu

SEQ ID NO: 1864479 - RNA, 19 nt, Artificial Sequence
  Description of Artificial Sequence: Synthetic oligonucleotide
  Sense strand starting at position 2937 of SEQ ID NO: 1564231
cuuaauucucucgggaaau

SEQ ID NO: 1864480 - RNA, 19 nt, Artificial Sequence
  Description of Artificial Sequence: Synthetic oligonucleotide
  Antisense strand to SEQ ID NO: 1864479
auuucccgagagaauuaag

SEQ ID NO: 1864481 - RNA, 19 nt, Artificial Sequence
  Description of Artificial Sequence: Synthetic oligonucleotide
  Sense strand starting at position 2991 of SEQ ID NO: 1564231
gccacuaucccagggaauc

SEQ ID NO: 1864482 - RNA, 19 nt, Artificial Sequence
  Description of Artificial Sequence: Synthetic oligonucleotide
  Antisense strand to SEQ ID NO: 1864481
gauucccugggauaguggc

SEQ ID NO: 1864483 - RNA, 19 nt, Artificial Sequence
  Description of Artificial Sequence: Synthetic oligonucleotide
  Sense strand starting at position 2992 of SEQ ID NO: 1564231
ccacuaucccagggaauca

SEQ ID NO: 1864484 - RNA, 19 nt, Artificial Sequence
  Description of Artificial Sequence: Synthetic oligonucleotide
  Antisense strand to SEQ ID NO: 1864483
ugauucccugggauagugg

SEQ ID NO: 1864485 - RNA, 19 nt, Artificial Sequence
  Description of Artificial Sequence: Synthetic oligonucleotide
  Sense strand starting at position 3018 of SEQ ID NO: 1564231
ggugcauucccagauguag

SEQ ID NO: 1864486 - RNA, 19 nt, Artificial Sequence
  Description of Artificial Sequence: Synthetic oligonucleotide
  Antisense strand to SEQ ID NO: 1864485
cuacaucugggaaugcacc

SEQ ID NO: 1864487 - RNA, 19 nt, Artificial Sequence
  Description of Artificial Sequence: Synthetic oligonucleotide
  Sense strand starting at position 3080 of SEQ ID NO: 1564231
gcuccuaagcuugggauuu

SEQ ID NO: 1864488 - RNA, 19 nt, Artificial Sequence
  Description of Artificial Sequence: Synthetic oligonucleotide
  Antisense strand to SEQ ID NO: 1864487
aaaucccaagcuuaggagc

SEQ ID NO: 1864489 - RNA, 19 nt, Artificial Sequence
  Description of Artificial Sequence: Synthetic oligonucleotide
  Sense strand starting at position 3092 of SEQ ID NO: 1564231
gggauuuccucugagaaag

SEQ ID NO: 1864490 - RNA, 19 nt, Artificial Sequence
  Description of Artificial Sequence: Synthetic oligonucleotide
  Antisense strand to SEQ ID NO: 1864489
cuuucucagaggaaauccc

SEQ ID NO: 1864491 - RNA, 19 nt, Artificial Sequence
  Description of Artificial Sequence: Synthetic oligonucleotide
  Sense strand starting at position 3094 of SEQ ID NO: 1564231
gauuuccucugagaaagug

SEQ ID NO: 1864492 - RNA, 19 nt, Artificial Sequence
  Description of Artificial Sequence: Synthetic oligonucleotide
  Antisense strand to SEQ ID NO: 1864491
cacuuucucagaggaaauc

SEQ ID NO: 1864493 - RNA, 19 nt, Artificial Sequence
  Description of Artificial Sequence: Synthetic oligonucleotide
  Sense strand starting at position 3187 of SEQ ID NO: 1564231
ucuagaauauugcucagaa

SEQ ID NO: 1864494 - RNA, 19 nt, Artificial Sequence
  Description of Artificial Sequence: Synthetic oligonucleotide
  Antisense strand to SEQ ID NO: 1864493
uucugagcaauauucuaga

SEQ ID NO: 1864495 - RNA, 19 nt, Artificial Sequence
  Description of Artificial Sequence: Synthetic oligonucleotide
  Sense strand starting at position 3188 of SEQ ID NO: 1564231
cuagaauauugcucagaag

SEQ ID NO: 1864496 - RNA, 19 nt, Artificial Sequence
  Description of Artificial Sequence: Synthetic oligonucleotide
  Antisense strand to SEQ ID NO: 1864495
cuucugagcaauauucuag

SEQ ID NO: 1864497 - RNA, 19 nt, Artificial Sequence
  Description of Artificial Sequence: Synthetic oligonucleotide
  Sense strand starting at position 3267 of SEQ ID NO: 1564231
guggcuagaauccagaauu

SEQ ID NO: 1864498 - RNA, 19 nt, Artificial Sequence
  Description of Artificial Sequence: Synthetic oligonucleotide
  Antisense strand to SEQ ID NO: 1864497
aauucuggauucuagccac

SEQ ID NO: 1864499 - RNA, 19 nt, Artificial Sequence
  Description of Artificial Sequence: Synthetic oligonucleotide
  Sense strand starting at position 3307 of SEQ ID NO: 1564231
gcagcaaauguuuauuaaa

SEQ ID NO: 1864500 - RNA, 19 nt, Artificial Sequence
  Description of Artificial Sequence: Synthetic oligonucleotide
  Antisense strand to SEQ ID NO: 1864499
uuuaauaaacauuugcugc

SEQ ID NO: 1864501 - RNA, 19 nt, Artificial Sequence
  Description of Artificial Sequence: Synthetic oligonucleotide
  Sense strand starting at position 3343 of SEQ ID NO: 1564231
guagcaugcccugucgauu

SEQ ID NO: 1864502 - RNA, 19 nt, Artificial Sequence
  Description of Artificial Sequence: Synthetic oligonucleotide
  Antisense strand to SEQ ID NO: 1864501
aaucgacagggcaugcuac

SEQ ID NO: 1864503 - RNA, 19 nt, Artificial Sequence
  Description of Artificial Sequence: Synthetic oligonucleotide
  Sense strand starting at position 3430 of SEQ ID NO: 1564231
aguaacucagguuauuagu

SEQ ID NO: 1864504 - RNA, 19 nt, Artificial Sequence
  Description of Artificial Sequence: Synthetic oligonucleotide
  Antisense strand to SEQ ID NO: 1864503
acuaauaaccugaguuacu

SEQ ID NO: 1864505 - RNA, 19 nt, Artificial Sequence
  Description of Artificial Sequence: Synthetic oligonucleotide
  Sense strand starting at position 3438 of SEQ ID NO: 1564231
agguuauuagugugauaag

SEQ ID NO: 1864506 - RNA, 19 nt, Artificial Sequence
  Description of Artificial Sequence: Synthetic oligonucleotide
  Antisense strand to SEQ ID NO: 1864505
cuuaucacacuaauaaccu

SEQ ID NO: 1864507 - RNA, 19 nt, Artificial Sequence
  Description of Artificial Sequence: Synthetic oligonucleotide
  Sense strand starting at position 3645 of SEQ ID NO: 1564231
cuguauuacugagcaggga

SEQ ID NO: 1864508 - RNA, 19 nt, Artificial Sequence
  Description of Artificial Sequence: Synthetic oligonucleotide
  Antisense strand to SEQ ID NO: 1864507
ucccugcucaguaauacag

SEQ ID NO: 1864509 - RNA, 19 nt, Artificial Sequence
  Description of Artificial Sequence: Synthetic oligonucleotide
  Sense strand starting at position 3646 of SEQ ID NO: 1564231
uguauuacugagcagggau

SEQ ID NO: 1864510 - RNA, 19 nt, Artificial Sequence
  Description of Artificial Sequence: Synthetic oligonucleotide
  Antisense strand to SEQ ID NO: 1864509
aucccugcucaguaauaca

SEQ ID NO: 1864511 - RNA, 19 nt, Artificial Sequence
  Description of Artificial Sequence: Synthetic oligonucleotide
  Sense strand starting at position 198 of SEQ ID NO: 1564232
cuacuuaagcuagagauuc

SEQ ID NO: 1864512 - RNA, 19 nt, Artificial Sequence
  Description of Artificial Sequence: Synthetic oligonucleotide
  Antisense strand to SEQ ID NO: 1864511
gaaucucuagcuuaaguag

SEQ ID NO: 1864513 - RNA, 19 nt, Artificial Sequence
  Description of Artificial Sequence: Synthetic oligonucleotide
  Sense strand starting at position 593 of SEQ ID NO: 1564232
agauucuugcaauaguacu

SEQ ID NO: 1864514 - RNA, 19 nt, Artificial Sequence
  Description of Artificial Sequence: Synthetic oligonucleotide
  Antisense strand to SEQ ID NO: 1864513
aguacuauugcaagaaucu

SEQ ID NO: 1864515 - RNA, 19 nt, Artificial Sequence
  Description of Artificial Sequence: Synthetic oligonucleotide
  Sense strand starting at position 689 of SEQ ID NO: 1564232
gcagaccagaguuaaguaa

SEQ ID NO: 1864516 - RNA, 19 nt, Artificial Sequence
  Description of Artificial Sequence: Synthetic oligonucleotide
  Antisense strand to SEQ ID NO: 1864515
uuacuuaacucuggucugc

SEQ ID NO: 1864517 - RNA, 19 nt, Artificial Sequence
  Description of Artificial Sequence: Synthetic oligonucleotide
  Sense strand starting at position 878 of SEQ ID NO: 1564232
cucugaauucugugaauug

SEQ ID NO: 1864518 - RNA, 19 nt, Artificial Sequence
  Description of Artificial Sequence: Synthetic oligonucleotide
  Antisense strand to SEQ ID NO: 1864517
caauucacagaauucagag

SEQ ID NO: 1864519 - RNA, 19 nt, Artificial Sequence
  Description of Artificial Sequence: Synthetic oligonucleotide
  Sense strand starting at position 889 of SEQ ID NO: 1564232
gugaauuguguacauuaag

SEQ ID NO: 1864520 - RNA, 19 nt, Artificial Sequence
  Description of Artificial Sequence: Synthetic oligonucleotide
  Antisense strand to SEQ ID NO: 1864519
cuuaauguacacaauucac

SEQ ID NO: 1864521 - RNA, 19 nt, Artificial Sequence
  Description of Artificial Sequence: Synthetic oligonucleotide
  Sense strand starting at position 1133 of SEQ ID NO: 1564232
gaggguuagaacuggguaa

SEQ ID NO: 1864522 - RNA, 19 nt, Artificial Sequence
  Description of Artificial Sequence: Synthetic oligonucleotide
  Antisense strand to SEQ ID NO: 1864521
uuacccaguucuaacccuc

SEQ ID NO: 1864523 - RNA, 19 nt, Artificial Sequence
  Description of Artificial Sequence: Synthetic oligonucleotide
  Sense strand starting at position 1134 of SEQ ID NO: 1564232
aggguuagaacuggguaau

SEQ ID NO: 1864524 - RNA, 19 nt, Artificial Sequence
  Description of Artificial Sequence: Synthetic oligonucleotide
  Antisense strand to SEQ ID NO: 1864523
auuacccaguucuaacccu

SEQ ID NO: 1864525 - RNA, 19 nt, Artificial Sequence
  Description of Artificial Sequence: Synthetic oligonucleotide
  Sense strand starting at position 1135 of SEQ ID NO: 1564232
ggguuagaacuggguaaug

SEQ ID NO: 1864526 - RNA, 19 nt, Artificial Sequence
  Description of Artificial Sequence: Synthetic oligonucleotide
  Antisense strand to SEQ ID NO: 1864525
cauuacccaguucuaaccc

SEQ ID NO: 1864527 - RNA, 19 nt, Artificial Sequence
  Description of Artificial Sequence: Synthetic oligonucleotide
  Sense strand starting at position 1144 of SEQ ID NO: 1564232
cuggguaaugaagguaaau

SEQ ID NO: 1864528 - RNA, 19 nt, Artificial Sequence
  Description of Artificial Sequence: Synthetic oligonucleotide
  Antisense strand to SEQ ID NO: 1864527
auuuaccuucauuacccag

SEQ ID NO: 1864529 - RNA, 19 nt, Artificial Sequence
  Description of Artificial Sequence: Synthetic oligonucleotide
  Sense strand starting at position 1154 of SEQ ID NO: 1564232
aagguaaaucccgaggagu

SEQ ID NO: 1864530 - RNA, 19 nt, Artificial Sequence
  Description of Artificial Sequence: Synthetic oligonucleotide
  Antisense strand to SEQ ID NO: 1864529
acuccucgggauuuaccuu

SEQ ID NO: 1864531 - RNA, 19 nt, Artificial Sequence
  Description of Artificial Sequence: Synthetic oligonucleotide
  Sense strand starting at position 1162 of SEQ ID NO: 1564232
ucccgaggaguccaggaau

SEQ ID NO: 1864532 - RNA, 19 nt, Artificial Sequence
  Description of Artificial Sequence: Synthetic oligonucleotide
  Antisense strand to SEQ ID NO: 1864531
auuccuggacuccucggga

SEQ ID NO: 1864533 - RNA, 19 nt, Artificial Sequence
  Description of Artificial Sequence: Synthetic oligonucleotide
  Sense strand starting at position 1615 of SEQ ID NO: 1564232
agucucuaccucgaugaaa

SEQ ID NO: 1864534 - RNA, 19 nt, Artificial Sequence
  Description of Artificial Sequence: Synthetic oligonucleotide
  Antisense strand to SEQ ID NO: 1864533
uuucaucgagguagagacu

SEQ ID NO: 1864535 - RNA, 19 nt, Artificial Sequence
  Description of Artificial Sequence: Synthetic oligonucleotide
  Sense strand starting at position 1617 of SEQ ID NO: 1564232
ucucuaccucgaugaaaug

SEQ ID NO: 1864536 - RNA, 19 nt, Artificial Sequence
  Description of Artificial Sequence: Synthetic oligonucleotide
  Antisense strand to SEQ ID NO: 1864535
cauuucaucgagguagaga

SEQ ID NO: 1864537 - RNA, 19 nt, Artificial Sequence
  Description of Artificial Sequence: Synthetic oligonucleotide
  Sense strand starting at position 1943 of SEQ ID NO: 1564232
cagccuugcgccuugagau

SEQ ID NO: 1864538 - RNA, 19 nt, Artificial Sequence
  Description of Artificial Sequence: Synthetic oligonucleotide
  Antisense strand to SEQ ID NO: 1864537
aucucaaggcgcaaggcug

SEQ ID NO: 1864539 - RNA, 19 nt, Artificial Sequence
  Description of Artificial Sequence: Synthetic oligonucleotide
  Sense strand starting at position 1982 of SEQ ID NO: 1564232
gccgaggugccguugagau

SEQ ID NO: 1864540 - RNA, 19 nt, Artificial Sequence
  Description of Artificial Sequence: Synthetic oligonucleotide
  Antisense strand to SEQ ID NO: 1864539
aucucaacggcaccucggc

SEQ ID NO: 1864541 - RNA, 19 nt, Artificial Sequence
  Description of Artificial Sequence: Synthetic oligonucleotide
  Sense strand starting at position 2347 of SEQ ID NO: 1564232
agggcuuaaaccuggagga

SEQ ID NO: 1864542 - RNA, 19 nt, Artificial Sequence
  Description of Artificial Sequence: Synthetic oligonucleotide
  Antisense strand to SEQ ID NO: 1864541
uccuccagguuuaagcccu

SEQ ID NO: 1864543 - RNA, 19 nt, Artificial Sequence
  Description of Artificial Sequence: Synthetic oligonucleotide
  Sense strand starting at position 2348 of SEQ ID NO: 1564232
gggcuuaaaccuggaggau

SEQ ID NO: 1864544 - RNA, 19 nt, Artificial Sequence
  Description of Artificial Sequence: Synthetic oligonucleotide
  Antisense strand to SEQ ID NO: 1864543
auccuccagguuuaagccc

SEQ ID NO: 1864545 - RNA, 19 nt, Artificial Sequence
  Description of Artificial Sequence: Synthetic oligonucleotide
  Sense strand starting at position 2369 of SEQ ID NO: 1564232
ugucgaguucucaguguag

SEQ ID NO: 1864546 - RNA, 19 nt, Artificial Sequence
  Description of Artificial Sequence: Synthetic oligonucleotide
  Antisense strand to SEQ ID NO: 1864545
cuacacugagaacucgaca

SEQ ID NO: 1864547 - RNA, 19 nt, Artificial Sequence
  Description of Artificial Sequence: Synthetic oligonucleotide
  Sense strand starting at position 2373 of SEQ ID NO: 1564232
gaguucucaguguaggaau

SEQ ID NO: 1864548 - RNA, 19 nt, Artificial Sequence
  Description of Artificial Sequence: Synthetic oligonucleotide
  Antisense strand to SEQ ID NO: 1864547
auuccuacacugagaacuc

SEQ ID NO: 1864549 - RNA, 19 nt, Artificial Sequence
  Description of Artificial Sequence: Synthetic oligonucleotide
  Sense strand starting at position 2381 of SEQ ID NO: 1564232
aguguaggaauaugccaaa

SEQ ID NO: 1864550 - RNA, 19 nt, Artificial Sequence
  Description of Artificial Sequence: Synthetic oligonucleotide
  Antisense strand to SEQ ID NO: 1864549
uuuggcauauuccuacacu

SEQ ID NO: 1864551 - RNA, 19 nt, Artificial Sequence
  Description of Artificial Sequence: Synthetic oligonucleotide
  Sense strand starting at position 2412 of SEQ ID NO: 1564232
agcagcuuucuggaauacu

SEQ ID NO: 1864552 - RNA, 19 nt, Artificial Sequence
  Description of Artificial Sequence: Synthetic oligonucleotide
  Antisense strand to SEQ ID NO: 1864551
aguauuccagaaagcugcu

SEQ ID NO: 1864553 - RNA, 19 nt, Artificial Sequence
  Description of Artificial Sequence: Synthetic oligonucleotide
  Sense strand starting at position 2688 of SEQ ID NO: 1564232
cuuaauucucucgggaaau

SEQ ID NO: 1864554 - RNA, 19 nt, Artificial Sequence
  Description of Artificial Sequence: Synthetic oligonucleotide
  Antisense strand to SEQ ID NO: 1864553
auuucccgagagaauuaag

SEQ ID NO: 1864555 - RNA, 19 nt, Artificial Sequence
  Description of Artificial Sequence: Synthetic oligonucleotide
  Sense strand starting at position 2742 of SEQ ID NO: 1564232
gccacuaucccagggaauc

SEQ ID NO: 1864556 - RNA, 19 nt, Artificial Sequence
  Description of Artificial Sequence: Synthetic oligonucleotide
  Antisense strand to SEQ ID NO: 1864555
gauucccugggauaguggc

SEQ ID NO: 1864557 - RNA, 19 nt, Artificial Sequence
  Description of Artificial Sequence: Synthetic oligonucleotide
  Sense strand starting at position 2743 of SEQ ID NO: 1564232
ccacuaucccagggaauca

SEQ ID NO: 1864558 - RNA, 19 nt, Artificial Sequence
  Description of Artificial Sequence: Synthetic oligonucleotide
  Antisense strand to SEQ ID NO: 1864557
ugauucccugggauagugg

SEQ ID NO: 1864559 - RNA, 19 nt, Artificial Sequence
  Description of Artificial Sequence: Synthetic oligonucleotide
  Sense strand starting at position 2831 of SEQ ID NO: 1564232
gcuccuaagcuugggauuu

SEQ ID NO: 1864560 - RNA, 19 nt, Artificial Sequence
  Description of Artificial Sequence: Synthetic oligonucleotide
  Antisense strand to SEQ ID NO: 1864559
aaaucccaagcuuaggagc

SEQ ID NO: 1864561 - RNA, 19 nt, Artificial Sequence
  Description of Artificial Sequence: Synthetic oligonucleotide
  Sense strand starting at position 2843 of SEQ ID NO: 1564232
gggauuuccucugagaaag

SEQ ID NO: 1864562 - RNA, 19 nt, Artificial Sequence
  Description of Artificial Sequence: Synthetic oligonucleotide
  Antisense strand to SEQ ID NO: 1864561
cuuucucagaggaaauccc

SEQ ID NO: 1864563 - RNA, 19 nt, Artificial Sequence
  Description of Artificial Sequence: Synthetic oligonucleotide
  Sense strand starting at position 2938 of SEQ ID NO: 1564232
ucuagaauauugcucagaa

SEQ ID NO: 1864564 - RNA, 19 nt, Artificial Sequence
  Description of Artificial Sequence: Synthetic oligonucleotide
  Antisense strand to SEQ ID NO: 1864563
uucugagcaauauucuaga

SEQ ID NO: 1864565 - RNA, 19 nt, Artificial Sequence
  Description of Artificial Sequence: Synthetic oligonucleotide
  Sense strand starting at position 2939 of SEQ ID NO: 1564232
cuagaauauugcucagaag

SEQ ID NO: 1864566 - RNA, 19 nt, Artificial Sequence
  Description of Artificial Sequence: Synthetic oligonucleotide
  Antisense strand to SEQ ID NO: 1864565
cuucugagcaauauucuag

SEQ ID NO: 1864567 - RNA, 19 nt, Artificial Sequence
  Description of Artificial Sequence: Synthetic oligonucleotide
  Sense strand starting at position 3018 of SEQ ID NO: 1564232
guggcuagaauccagaauu

SEQ ID NO: 1864568 - RNA, 19 nt, Artificial Sequence
  Description of Artificial Sequence: Synthetic oligonucleotide
  Antisense strand to SEQ ID NO: 1864567
aauucuggauucuagccac

SEQ ID NO: 1864569 - RNA, 19 nt, Artificial Sequence
  Description of Artificial Sequence: Synthetic oligonucleotide
  Sense strand starting at position 3058 of SEQ ID NO: 1564232
gcagcaaauguuuauuaaa

SEQ ID NO: 1864570 - RNA, 19 nt, Artificial Sequence
  Description of Artificial Sequence: Synthetic oligonucleotide
  Antisense strand to SEQ ID NO: 1864569
uuuaauaaacauuugcugc

SEQ ID NO: 1864571 - RNA, 19 nt, Artificial Sequence
  Description of Artificial Sequence: Synthetic oligonucleotide
  Sense strand starting at position 3094 of SEQ ID NO: 1564232
guagcaugcccugucgauu

SEQ ID NO: 1864572 - RNA, 19 nt, Artificial Sequence
  Description of Artificial Sequence: Synthetic oligonucleotide
  Antisense strand to SEQ ID NO: 1864571
aaucgacagggcaugcuac

SEQ ID NO: 1864573 - RNA, 19 nt, Artificial Sequence
  Description of Artificial Sequence: Synthetic oligonucleotide
  Sense strand starting at position 3181 of SEQ ID NO: 1564232
aguaacucagguuauuagu

SEQ ID NO: 1864574 - RNA, 19 nt, Artificial Sequence
  Description of Artificial Sequence: Synthetic oligonucleotide
  Antisense strand to SEQ ID NO: 1864573
acuaauaaccugaguuacu

SEQ ID NO: 1864575 - RNA, 19 nt, Artificial Sequence
  Description of Artificial Sequence: Synthetic oligonucleotide
  Sense strand starting at position 3189 of SEQ ID NO: 1564232
agguuauuagugugauaag

SEQ ID NO: 1864576 - RNA, 19 nt, Artificial Sequence
  Description of Artificial Sequence: Synthetic oligonucleotide
  Antisense strand to SEQ ID NO: 1864575
cuuaucacacuaauaaccu

SEQ ID NO: 1864577 - RNA, 19 nt, Artificial Sequence
  Description of Artificial Sequence: Synthetic oligonucleotide
  Sense strand starting at position 3396 of SEQ ID NO: 1564232
cuguauuacugagcaggga

SEQ ID NO: 1864578 - RNA, 19 nt, Artificial Sequence
  Description of Artificial Sequence: Synthetic oligonucleotide
  Antisense strand to SEQ ID NO: 1864577
ucccugcucaguaauacag

SEQ ID NO: 1864579 - RNA, 19 nt, Artificial Sequence
  Description of Artificial Sequence: Synthetic oligonucleotide
  Sense strand starting at position 3397 of SEQ ID NO: 1564232
uguauuacugagcagggau

SEQ ID NO: 1864580 - RNA, 19 nt, Artificial Sequence
  Description of Artificial Sequence: Synthetic oligonucleotide
  Antisense strand to SEQ ID NO: 1864579
aucccugcucaguaauaca

SEQ ID NO: 1864581 - RNA, 19 nt, Artificial Sequence
  Description of Artificial Sequence: Synthetic oligonucleotide
  Sense strand starting at position 3820 of SEQ ID NO: 1564232
cgagguauuugguauuuag

SEQ ID NO: 1864582 - RNA, 19 nt, Artificial Sequence
  Description of Artificial Sequence: Synthetic oligonucleotide
  Antisense strand to SEQ ID NO: 1864581
cuaaauaccaaauaccucg

SEQ ID NO: 1864583 - RNA, 19 nt, Artificial Sequence
  Description of Artificial Sequence: Synthetic oligonucleotide
  Sense strand starting at position 3900 of SEQ ID NO: 1564232
ucuugauuccuugacucag

SEQ ID NO: 1864584 - RNA, 19 nt, Artificial Sequence
  Description of Artificial Sequence: Synthetic oligonucleotide
  Antisense strand to SEQ ID NO: 1864583
cugagucaaggaaucaaga

SEQ ID NO: 1864585 - RNA, 19 nt, Artificial Sequence
  Description of Artificial Sequence: Synthetic oligonucleotide
  Sense strand starting at position 3910 of SEQ ID NO: 1564232
uugacucagugauucuuaa

SEQ ID NO: 1864586 - RNA, 19 nt, Artificial Sequence
  Description of Artificial Sequence: Synthetic oligonucleotide
  Antisense strand to SEQ ID NO: 1864585
uuaagaaucacugagucaa

SEQ ID NO: 1864587 - RNA, 19 nt, Artificial Sequence
  Description of Artificial Sequence: Synthetic oligonucleotide
  Sense strand starting at position 3928 of SEQ ID NO: 1564232
aacuuagcugaguaucaga

SEQ ID NO: 1864588 - RNA, 19 nt, Artificial Sequence
  Description of Artificial Sequence: Synthetic oligonucleotide
  Antisense strand to SEQ ID NO: 1864587
ucugauacucagcuaaguu

SEQ ID NO: 1864589 - RNA, 19 nt, Artificial Sequence
  Description of Artificial Sequence: Synthetic oligonucleotide
  Sense strand starting at position 3941 of SEQ ID NO: 1564232
aucagaauuuccugggaag

SEQ ID NO: 1864590 - RNA, 19 nt, Artificial Sequence
  Description of Artificial Sequence: Synthetic oligonucleotide
  Antisense strand to SEQ ID NO: 1864589
cuucccaggaaauucugau

SEQ ID NO: 1864591 - RNA, 19 nt, Artificial Sequence
  Description of Artificial Sequence: Synthetic oligonucleotide
  Sense strand starting at position 369 of SEQ ID NO: 1564233
ugaauauggucuuccuuac

SEQ ID NO: 1864592 - RNA, 19 nt, Artificial Sequence
  Description of Artificial Sequence: Synthetic oligonucleotide
  Antisense strand to SEQ ID NO: 1864591
guaaggaagaccauauuca

SEQ ID NO: 1864593 - RNA, 19 nt, Artificial Sequence
  Description of Artificial Sequence: Synthetic oligonucleotide
  Sense strand starting at position 378 of SEQ ID NO: 1564233
ucuuccuuacuguguuaua

SEQ ID NO: 1864594 - RNA, 19 nt, Artificial Sequence
  Description of Artificial Sequence: Synthetic oligonucleotide
  Antisense strand to SEQ ID NO: 1864593
uauaacacaguaaggaaga

SEQ ID NO: 1864595 - RNA, 19 nt, Artificial Sequence
  Description of Artificial Sequence: Synthetic oligonucleotide
  Sense strand starting at position 379 of SEQ ID NO: 1564233
cuuccuuacuguguuauaa

SEQ ID NO: 1864596 - RNA, 19 nt, Artificial Sequence
  Description of Artificial Sequence: Synthetic oligonucleotide
  Antisense strand to SEQ ID NO: 1864595
uuauaacacaguaaggaag

SEQ ID NO: 1864597 - RNA, 19 nt, Artificial Sequence
  Description of Artificial Sequence: Synthetic oligonucleotide
  Sense strand starting at position 598 of SEQ ID NO: 1564233
cagaguacucaaggaagug

SEQ ID NO: 1864598 - RNA, 19 nt, Artificial Sequence
  Description of Artificial Sequence: Synthetic oligonucleotide
  Antisense strand to SEQ ID NO: 1864597
cacuuccuugaguacucug

SEQ ID NO: 1864599 - RNA, 19 nt, Artificial Sequence
  Description of Artificial Sequence: Synthetic oligonucleotide
  Sense strand starting at position 599 of SEQ ID NO: 1564233
agaguacucaaggaagugu

SEQ ID NO: 1864600 - RNA, 19 nt, Artificial Sequence
  Description of Artificial Sequence: Synthetic oligonucleotide
  Antisense strand to SEQ ID NO: 1864599
acacuuccuugaguacucu

SEQ ID NO: 1864601 - RNA, 19 nt, Artificial Sequence
  Description of Artificial Sequence: Synthetic oligonucleotide
  Sense strand starting at position 1052 of SEQ ID NO: 1564233
agaggaauuuaggguuuag

SEQ ID NO: 1864602 - RNA, 19 nt, Artificial Sequence
  Description of Artificial Sequence: Synthetic oligonucleotide
  Antisense strand to SEQ ID NO: 1864601
cuaaacccuaaauuccucu

SEQ ID NO: 1864603 - RNA, 19 nt, Artificial Sequence
  Description of Artificial Sequence: Synthetic oligonucleotide
  Sense strand starting at position 1064 of SEQ ID NO: 1564233
gguuuagagaguugggaga

SEQ ID NO: 1864604 - RNA, 19 nt, Artificial Sequence
  Description of Artificial Sequence: Synthetic oligonucleotide
  Antisense strand to SEQ ID NO: 1864603
ucucccaacucucuaaacc

SEQ ID NO: 1864605 - RNA, 19 nt, Artificial Sequence
  Description of Artificial Sequence: Synthetic oligonucleotide
  Sense strand starting at position 1301 of SEQ ID NO: 1564233
uagggagguugaggaauuu

SEQ ID NO: 1864606 - RNA, 19 nt, Artificial Sequence
  Description of Artificial Sequence: Synthetic oligonucleotide
  Antisense strand to SEQ ID NO: 1864605
aaauuccucaaccucccua

SEQ ID NO: 1864607 - RNA, 19 nt, Artificial Sequence
  Description of Artificial Sequence: Synthetic oligonucleotide
  Sense strand starting at position 1407 of SEQ ID NO: 1564233
ugaggaauuugagggcaaa

SEQ ID NO: 1864608 - RNA, 19 nt, Artificial Sequence
  Description of Artificial Sequence: Synthetic oligonucleotide
  Antisense strand to SEQ ID NO: 1864607
uuugcccucaaauuccuca

SEQ ID NO: 1864609 - RNA, 19 nt, Artificial Sequence
  Description of Artificial Sequence: Synthetic oligonucleotide
  Sense strand starting at position 1515 of SEQ ID NO: 1564233
gagggaaauuucgggauga

SEQ ID NO: 1864610 - RNA, 19 nt, Artificial Sequence
  Description of Artificial Sequence: Synthetic oligonucleotide
  Antisense strand to SEQ ID NO: 1864609
ucaucccgaaauuucccuc

SEQ ID NO: 1864611 - RNA, 19 nt, Artificial Sequence
  Description of Artificial Sequence: Synthetic oligonucleotide
  Sense strand starting at position 1516 of SEQ ID NO: 1564233
agggaaauuucgggaugaa

SEQ ID NO: 1864612 - RNA, 19 nt, Artificial Sequence
  Description of Artificial Sequence: Synthetic oligonucleotide
  Antisense strand to SEQ ID NO: 1864611
uucaucccgaaauuucccu

SEQ ID NO: 1864613 - RNA, 19 nt, Artificial Sequence
  Description of Artificial Sequence: Synthetic oligonucleotide
  Sense strand starting at position 1555 of SEQ ID NO: 1564233
gaaagcauuugugauauua

SEQ ID NO: 1864614 - RNA, 19 nt, Artificial Sequence
  Description of Artificial Sequence: Synthetic oligonucleotide
  Antisense strand to SEQ ID NO: 1864613
uaauaucacaaaugcuuuc

SEQ ID NO: 1864615 - RNA, 19 nt, Artificial Sequence
  Description of Artificial Sequence: Synthetic oligonucleotide
  Sense strand starting at position 1557 of SEQ ID NO: 1564233
aagcauuugugauauuagg

SEQ ID NO: 1864616 - RNA, 19 nt, Artificial Sequence
  Description of Artificial Sequence: Synthetic oligonucleotide
  Antisense strand to SEQ ID NO: 1864615
ccuaauaucacaaaugcuu

SEQ ID NO: 1864617 - RNA, 19 nt, Artificial Sequence
  Description of Artificial Sequence: Synthetic oligonucleotide
  Sense strand starting at position 2397 of SEQ ID NO: 1564233
gcacggagugguuaaguga

SEQ ID NO: 1864618 - RNA, 19 nt, Artificial Sequence
  Description of Artificial Sequence: Synthetic oligonucleotide
  Antisense strand to SEQ ID NO: 1864617
ucacuuaaccacuccgugc

SEQ ID NO: 1864619 - RNA, 19 nt, Artificial Sequence
  Description of Artificial Sequence: Synthetic oligonucleotide
  Sense strand starting at position 2400 of SEQ ID NO: 1564233
cggagugguuaagugacuu

SEQ ID NO: 1864620 - RNA, 19 nt, Artificial Sequence
  Description of Artificial Sequence: Synthetic oligonucleotide
  Antisense strand to SEQ ID NO: 1864619
aagucacuuaaccacuccg

SEQ ID NO: 1864621 - RNA, 19 nt, Artificial Sequence
  Description of Artificial Sequence: Synthetic oligonucleotide
  Sense strand starting at position 2431 of SEQ ID NO: 1564233
agagucaauacauggcaga

SEQ ID NO: 1864622 - RNA, 19 nt, Artificial Sequence
  Description of Artificial Sequence: Synthetic oligonucleotide
  Antisense strand to SEQ ID NO: 1864621
ucugccauguauugacucu

SEQ ID NO: 1864623 - RNA, 19 nt, Artificial Sequence
  Description of Artificial Sequence: Synthetic oligonucleotide
  Sense strand starting at position 2432 of SEQ ID NO: 1564233
gagucaauacauggcagaa

SEQ ID NO: 1864624 - RNA, 19 nt, Artificial Sequence
  Description of Artificial Sequence: Synthetic oligonucleotide
  Antisense strand to SEQ ID NO: 1864623
uucugccauguauugacuc

SEQ ID NO: 1864625 - RNA, 19 nt, Artificial Sequence
  Description of Artificial Sequence: Synthetic oligonucleotide
  Sense strand starting at position 2506 of SEQ ID NO: 1564233
gcaaauagccggcauuuau

SEQ ID NO: 1864626 - RNA, 19 nt, Artificial Sequence
  Description of Artificial Sequence: Synthetic oligonucleotide
  Antisense strand to SEQ ID NO: 1864625
auaaaugccggcuauuugc

SEQ ID NO: 1864627 - RNA, 19 nt, Artificial Sequence
  Description of Artificial Sequence: Synthetic oligonucleotide
  Sense strand starting at position 2544 of SEQ ID NO: 1564233
aggcacucagcauaguuua

SEQ ID NO: 1864628 - RNA, 19 nt, Artificial Sequence
  Description of Artificial Sequence: Synthetic oligonucleotide
  Antisense strand to SEQ ID NO: 1864627
uaaacuaugcugagugccu

SEQ ID NO: 1864629 - RNA, 19 nt, Artificial Sequence
  Description of Artificial Sequence: Synthetic oligonucleotide
  Sense strand starting at position 2675 of SEQ ID NO: 1564233
gggcauggccgggauucaa

SEQ ID NO: 1864630 - RNA, 19 nt, Artificial Sequence
  Description of Artificial Sequence: Synthetic oligonucleotide
  Antisense strand to SEQ ID NO: 1864629
uugaaucccggccaugccc

SEQ ID NO: 1864631 - RNA, 19 nt, Artificial Sequence
  Description of Artificial Sequence: Synthetic oligonucleotide
  Sense strand starting at position 2713 of SEQ ID NO: 1564233
aggguuguaacucaggagu

SEQ ID NO: 1864632 - RNA, 19 nt, Artificial Sequence
  Description of Artificial Sequence: Synthetic oligonucleotide
  Antisense strand to SEQ ID NO: 1864631
acuccugaguuacaacccu

SEQ ID NO: 1864633 - RNA, 19 nt, Artificial Sequence
  Description of Artificial Sequence: Synthetic oligonucleotide
  Sense strand starting at position 2751 of SEQ ID NO: 1564233
gggaauggugcgggugaau

SEQ ID NO: 1864634 - RNA, 19 nt, Artificial Sequence
  Description of Artificial Sequence: Synthetic oligonucleotide
  Antisense strand to SEQ ID NO: 1864633
auucacccgcaccauuccc

SEQ ID NO: 1864635 - RNA, 19 nt, Artificial Sequence
  Description of Artificial Sequence: Synthetic oligonucleotide
  Sense strand starting at position 2815 of SEQ ID NO: 1564233
gcaagugagugggucagua

SEQ ID NO: 1864636 - RNA, 19 nt, Artificial Sequence
  Description of Artificial Sequence: Synthetic oligonucleotide
  Antisense strand to SEQ ID NO: 1864635
uacugacccacucacuugc

SEQ ID NO: 1864637 - RNA, 19 nt, Artificial Sequence
  Description of Artificial Sequence: Synthetic oligonucleotide
  Sense strand starting at position 2819 of SEQ ID NO: 1564233
gugagugggucaguagaaa

SEQ ID NO: 1864638 - RNA, 19 nt, Artificial Sequence
  Description of Artificial Sequence: Synthetic oligonucleotide
  Antisense strand to SEQ ID NO: 1864637
uuucuacugacccacucac

SEQ ID NO: 1864639 - RNA, 19 nt, Artificial Sequence
  Description of Artificial Sequence: Synthetic oligonucleotide
  Sense strand starting at position 2969 of SEQ ID NO: 1564233
uccuuaauucgaggaggau

SEQ ID NO: 1864640 - RNA, 19 nt, Artificial Sequence
  Description of Artificial Sequence: Synthetic oligonucleotide
  Antisense strand to SEQ ID NO: 1864639
auccuccucgaauuaagga

SEQ ID NO: 1864641 - RNA, 19 nt, Artificial Sequence
  Description of Artificial Sequence: Synthetic oligonucleotide
  Sense strand starting at position 3021 of SEQ ID NO: 1564233
gccacuuauugagcacuuu

SEQ ID NO: 1864642 - RNA, 19 nt, Artificial Sequence
  Description of Artificial Sequence: Synthetic oligonucleotide
  Antisense strand to SEQ ID NO: 1864641
aaagugcucaauaaguggc

SEQ ID NO: 1864643 - RNA, 19 nt, Artificial Sequence
  Description of Artificial Sequence: Synthetic oligonucleotide
  Sense strand starting at position 3030 of SEQ ID NO: 1564233
ugagcacuuucuguguacu

SEQ ID NO: 1864644 - RNA, 19 nt, Artificial Sequence
  Description of Artificial Sequence: Synthetic oligonucleotide
  Antisense strand to SEQ ID NO: 1864643
aguacacagaaagugcuca

SEQ ID NO: 1864645 - RNA, 19 nt, Artificial Sequence
  Description of Artificial Sequence: Synthetic oligonucleotide
  Sense strand starting at position 3031 of SEQ ID NO: 1564233
gagcacuuucuguguacua

SEQ ID NO: 1864646 - RNA, 19 nt, Artificial Sequence
  Description of Artificial Sequence: Synthetic oligonucleotide
  Antisense strand to SEQ ID NO: 1864645
uaguacacagaaagugcuc

SEQ ID NO: 1864647 - RNA, 19 nt, Artificial Sequence
  Description of Artificial Sequence: Synthetic oligonucleotide
  Sense strand starting at position 3032 of SEQ ID NO: 1564233
agcacuuucuguguacuau

SEQ ID NO: 1864648 - RNA, 19 nt, Artificial Sequence
  Description of Artificial Sequence: Synthetic oligonucleotide
  Antisense strand to SEQ ID NO: 1864647
auaguacacagaaagugcu

SEQ ID NO: 1864649 - RNA, 19 nt, Artificial Sequence
  Description of Artificial Sequence: Synthetic oligonucleotide
  Sense strand starting at position 3033 of SEQ ID NO: 1564233
gcacuuucuguguacuaug

SEQ ID NO: 1864650 - RNA, 19 nt, Artificial Sequence
  Description of Artificial Sequence: Synthetic oligonucleotide
  Antisense strand to SEQ ID NO: 1864649
cauaguacacagaaagugc

SEQ ID NO: 1864651 - RNA, 19 nt, Artificial Sequence
  Description of Artificial Sequence: Synthetic oligonucleotide
  Sense strand starting at position 3052 of SEQ ID NO: 1564233
ugcuaaaguguuuguauaa

SEQ ID NO: 1864652 - RNA, 19 nt, Artificial Sequence
  Description of Artificial Sequence: Synthetic oligonucleotide
  Antisense strand to SEQ ID NO: 1864651
uuauacaaacacuuuagca

SEQ ID NO: 1864653 - RNA, 19 nt, Artificial Sequence
  Description of Artificial Sequence: Synthetic oligonucleotide
  Sense strand starting at position 3053 of SEQ ID NO: 1564233
gcuaaaguguuuguauaaa

SEQ ID NO: 1864654 - RNA, 19 nt, Artificial Sequence
  Description of Artificial Sequence: Synthetic oligonucleotide
  Antisense strand to SEQ ID NO: 1864653
uuuauacaaacacuuuagc

SEQ ID NO: 1864655 - RNA, 19 nt, Artificial Sequence
  Description of Artificial Sequence: Synthetic oligonucleotide
  Sense strand starting at position 3121 of SEQ ID NO: 1564233
cagggaugauagcccaaua

SEQ ID NO: 1864656 - RNA, 19 nt, Artificial Sequence
  Description of Artificial Sequence: Synthetic oligonucleotide
  Antisense strand to SEQ ID NO: 1864655
uauugggcuaucaucccug

SEQ ID NO: 1864657 - RNA, 19 nt, Artificial Sequence
  Description of Artificial Sequence: Synthetic oligonucleotide
  Sense strand starting at position 3185 of SEQ ID NO: 1564233
cugcguauccagcacuauu

SEQ ID NO: 1864658 - RNA, 19 nt, Artificial Sequence
  Description of Artificial Sequence: Synthetic oligonucleotide
  Antisense strand to SEQ ID NO: 1864657
aauagugcuggauacgcag

SEQ ID NO: 1864659 - RNA, 19 nt, Artificial Sequence
  Description of Artificial Sequence: Synthetic oligonucleotide
  Sense strand starting at position 3195 of SEQ ID NO: 1564233
agcacuauucuggguggga

SEQ ID NO: 1864660 - RNA, 19 nt, Artificial Sequence
  Description of Artificial Sequence: Synthetic oligonucleotide
  Antisense strand to SEQ ID NO: 1864659
ucccacccagaauagugcu

SEQ ID NO: 1864661 - RNA, 19 nt, Artificial Sequence
  Description of Artificial Sequence: Synthetic oligonucleotide
  Sense strand starting at position 3196 of SEQ ID NO: 1564233
gcacuauucugggugggag

SEQ ID NO: 1864662 - RNA, 19 nt, Artificial Sequence
  Description of Artificial Sequence: Synthetic oligonucleotide
  Antisense strand to SEQ ID NO: 1864661
cucccacccagaauagugc

SEQ ID NO: 1864663 - RNA, 19 nt, Artificial Sequence
  Description of Artificial Sequence: Synthetic oligonucleotide
  Sense strand starting at position 3211 of SEQ ID NO: 1564233
ggaggaaugugagggauga

SEQ ID NO: 1864664 - RNA, 19 nt, Artificial Sequence
  Description of Artificial Sequence: Synthetic oligonucleotide
  Antisense strand to SEQ ID NO: 1864663
ucaucccucacauuccucc

SEQ ID NO: 1864665 - RNA, 19 nt, Artificial Sequence
  Description of Artificial Sequence: Synthetic oligonucleotide
  Sense strand starting at position 3236 of SEQ ID NO: 1564233
gccuaauggguacaaugua

SEQ ID NO: 1864666 - RNA, 19 nt, Artificial Sequence
  Description of Artificial Sequence: Synthetic oligonucleotide
  Antisense strand to SEQ ID NO: 1864665
uacauuguacccauuaggc

SEQ ID NO: 1864667 - RNA, 19 nt, Artificial Sequence
  Description of Artificial Sequence: Synthetic oligonucleotide
  Sense strand starting at position 3302 of SEQ ID NO: 1564233
guaauauauccaugucaca

SEQ ID NO: 1864668 - RNA, 19 nt, Artificial Sequence
  Description of Artificial Sequence: Synthetic oligonucleotide
  Antisense strand to SEQ ID NO: 1864667
ugugacauggauauauuac

SEQ ID NO: 1864669 - RNA, 19 nt, Artificial Sequence
  Description of Artificial Sequence: Synthetic oligonucleotide
  Sense strand starting at position 3538 of SEQ ID NO: 1564233
ucaccauauuggucagauc

SEQ ID NO: 1864670 - RNA, 19 nt, Artificial Sequence
  Description of Artificial Sequence: Synthetic oligonucleotide
  Antisense strand to SEQ ID NO: 1864669
gaucugaccaauaugguga

SEQ ID NO: 1864671 - RNA, 19 nt, Artificial Sequence
  Description of Artificial Sequence: Synthetic oligonucleotide
  Sense strand starting at position 35 of SEQ ID NO: 1564234
gguggaacacuuugaaacu

SEQ ID NO: 1864672 - RNA, 19 nt, Artificial Sequence
  Description of Artificial Sequence: Synthetic oligonucleotide
  Antisense strand to SEQ ID NO: 1864671
aguuucaaaguguuccacc

SEQ ID NO: 1864673 - RNA, 19 nt, Artificial Sequence
  Description of Artificial Sequence: Synthetic oligonucleotide
  Sense strand starting at position 47 of SEQ ID NO: 1564234
ugaaacucauccuaugaag

SEQ ID NO: 1864674 - RNA, 19 nt, Artificial Sequence
  Description of Artificial Sequence: Synthetic oligonucleotide
  Antisense strand to SEQ ID NO: 1864673
cuucauaggaugaguuuca

SEQ ID NO: 1864675 - RNA, 19 nt, Artificial Sequence
  Description of Artificial Sequence: Synthetic oligonucleotide
  Sense strand starting at position 383 of SEQ ID NO: 1564234
cagugauacuucgucucaa

SEQ ID NO: 1864676 - RNA, 19 nt, Artificial Sequence
  Description of Artificial Sequence: Synthetic oligonucleotide
  Antisense strand to SEQ ID NO: 1864675
uugagacgaaguaucacug

SEQ ID NO: 1864677 - RNA, 19 nt, Artificial Sequence
  Description of Artificial Sequence: Synthetic oligonucleotide
  Sense strand starting at position 505 of SEQ ID NO: 1564234
uguuccaauucguacucaa

SEQ ID NO: 1864678 - RNA, 19 nt, Artificial Sequence
  Description of Artificial Sequence: Synthetic oligonucleotide
  Antisense strand to SEQ ID NO: 1864677
uugaguacgaauuggaaca

SEQ ID NO: 1864679 - RNA, 19 nt, Artificial Sequence
  Description of Artificial Sequence: Synthetic oligonucleotide
  Sense strand starting at position 559 of SEQ ID NO: 1564234
gggucucacuguuugccaa

SEQ ID NO: 1864680 - RNA, 19 nt, Artificial Sequence
  Description of Artificial Sequence: Synthetic oligonucleotide
  Antisense strand to SEQ ID NO: 1864679
uuggcaaacagugagaccc

SEQ ID NO: 1864681 - RNA, 19 nt, Artificial Sequence
  Description of Artificial Sequence: Synthetic oligonucleotide
  Sense strand starting at position 825 of SEQ ID NO: 1564234
uacagagguucgccaucuu

SEQ ID NO: 1864682 - RNA, 19 nt, Artificial Sequence
  Description of Artificial Sequence: Synthetic oligonucleotide
  Antisense strand to SEQ ID NO: 1864681
aagauggcgaaccucugua

SEQ ID NO: 1864683 - RNA, 19 nt, Artificial Sequence
  Description of Artificial Sequence: Synthetic oligonucleotide
  Sense strand starting at position 861 of SEQ ID NO: 1564234
acuaguuucuaggcucaca

SEQ ID NO: 1864684 - RNA, 19 nt, Artificial Sequence
  Description of Artificial Sequence: Synthetic oligonucleotide
  Antisense strand to SEQ ID NO: 1864683
ugugagccuagaaacuagu

SEQ ID NO: 1864685 - RNA, 19 nt, Artificial Sequence
  Description of Artificial Sequence: Synthetic oligonucleotide
  Sense strand starting at position 961 of SEQ ID NO: 1564234
auggaacacuuugaaacau

SEQ ID NO: 1864686 - RNA, 19 nt, Artificial Sequence
  Description of Artificial Sequence: Synthetic oligonucleotide
  Antisense strand to SEQ ID NO: 1864685
auguuucaaaguguuccau

SEQ ID NO: 1864687 - RNA, 19 nt, Artificial Sequence
  Description of Artificial Sequence: Synthetic oligonucleotide
  Sense strand starting at position 970 of SEQ ID NO: 1564234
uuugaaacauccuaugaag

SEQ ID NO: 1864688 - RNA, 19 nt, Artificial Sequence
  Description of Artificial Sequence: Synthetic oligonucleotide
  Antisense strand to SEQ ID NO: 1864687
cuucauaggauguuucaaa

SEQ ID NO: 1864689 - RNA, 19 nt, Artificial Sequence
  Description of Artificial Sequence: Synthetic oligonucleotide
  Sense strand starting at position 1229 of SEQ ID NO: 1564234
ccucacauccuggguuaga

SEQ ID NO: 1864690 - RNA, 19 nt, Artificial Sequence
  Description of Artificial Sequence: Synthetic oligonucleotide
  Antisense strand to SEQ ID NO: 1864689
ucuaacccaggaugugagg

SEQ ID NO: 1864691 - RNA, 19 nt, Artificial Sequence
  Description of Artificial Sequence: Synthetic oligonucleotide
  Sense strand starting at position 1240 of SEQ ID NO: 1564234
ggguuagagucgcucauuc

SEQ ID NO: 1864692 - RNA, 19 nt, Artificial Sequence
  Description of Artificial Sequence: Synthetic oligonucleotide
  Antisense strand to SEQ ID NO: 1864691
gaaugagcgacucuaaccc

SEQ ID NO: 1864693 - RNA, 19 nt, Artificial Sequence
  Description of Artificial Sequence: Synthetic oligonucleotide
  Sense strand starting at position 1334 of SEQ ID NO: 1564234
aucugaucccagugacauu

SEQ ID NO: 1864694 - RNA, 19 nt, Artificial Sequence
  Description of Artificial Sequence: Synthetic oligonucleotide
  Antisense strand to SEQ ID NO: 1864693
aaugucacugggaucagau

SEQ ID NO: 1864695 - RNA, 19 nt, Artificial Sequence
  Description of Artificial Sequence: Synthetic oligonucleotide
  Sense strand starting at position 1404 of SEQ ID NO: 1564234
uggcgaccuccagaacuuu

SEQ ID NO: 1864696 - RNA, 19 nt, Artificial Sequence
  Description of Artificial Sequence: Synthetic oligonucleotide
  Antisense strand to SEQ ID NO: 1864695
aaaguucuggaggucgcca

SEQ ID NO: 1864697 - RNA, 19 nt, Artificial Sequence
  Description of Artificial Sequence: Synthetic oligonucleotide
  Sense strand starting at position 1416 of SEQ ID NO: 1564234
gaacuuuggccguggguaa

SEQ ID NO: 1864698 - RNA, 19 nt, Artificial Sequence
  Description of Artificial Sequence: Synthetic oligonucleotide
  Antisense strand to SEQ ID NO: 1864697
uuacccacggccaaaguuc

SEQ ID NO: 1864699 - RNA, 19 nt, Artificial Sequence
  Description of Artificial Sequence: Synthetic oligonucleotide
  Sense strand starting at position 1417 of SEQ ID NO: 1564234
aacuuuggccguggguaaa

SEQ ID NO: 1864700 - RNA, 19 nt, Artificial Sequence
  Description of Artificial Sequence: Synthetic oligonucleotide
  Antisense strand to SEQ ID NO: 1864699
uuuacccacggccaaaguu

SEQ ID NO: 1864701 - RNA, 19 nt, Artificial Sequence
  Description of Artificial Sequence: Synthetic oligonucleotide
  Sense strand starting at position 1486 of SEQ ID NO: 1564234
uuggguuggcgggaauagu

SEQ ID NO: 1864702 - RNA, 19 nt, Artificial Sequence
  Description of Artificial Sequence: Synthetic oligonucleotide
  Antisense strand to SEQ ID NO: 1864701
acuauucccgccaacccaa

SEQ ID NO: 1864703 - RNA, 19 nt, Artificial Sequence
  Description of Artificial Sequence: Synthetic oligonucleotide
  Sense strand starting at position 2002 of SEQ ID NO: 1564234
ucuggaauguuugugacuu

SEQ ID NO: 1864704 - RNA, 19 nt, Artificial Sequence
  Description of Artificial Sequence: Synthetic oligonucleotide
  Antisense strand to SEQ ID NO: 1864703
aagucacaaacauuccaga

SEQ ID NO: 1864705 - RNA, 19 nt, Artificial Sequence
  Description of Artificial Sequence: Synthetic oligonucleotide
  Sense strand starting at position 2006 of SEQ ID NO: 1564234
gaauguuugugacuugcau

SEQ ID NO: 1864706 - RNA, 19 nt, Artificial Sequence
  Description of Artificial Sequence: Synthetic oligonucleotide
  Antisense strand to SEQ ID NO: 1864705
augcaagucacaaacauuc

SEQ ID NO: 1864707 - RNA, 19 nt, Artificial Sequence
  Description of Artificial Sequence: Synthetic oligonucleotide
  Sense strand starting at position 2008 of SEQ ID NO: 1564234
auguuugugacuugcaugu

SEQ ID NO: 1864708 - RNA, 19 nt, Artificial Sequence
  Description of Artificial Sequence: Synthetic oligonucleotide
  Antisense strand to SEQ ID NO: 1864707
acaugcaagucacaaacau

SEQ ID NO: 1864709 - RNA, 19 nt, Artificial Sequence
  Description of Artificial Sequence: Synthetic oligonucleotide
  Sense strand starting at position 2018 of SEQ ID NO: 1564234
cuugcaugugcacaguuau

SEQ ID NO: 1864710 - RNA, 19 nt, Artificial Sequence
  Description of Artificial Sequence: Synthetic oligonucleotide
  Antisense strand to SEQ ID NO: 1864709
auaacugugcacaugcaag

SEQ ID NO: 1864711 - RNA, 19 nt, Artificial Sequence
  Description of Artificial Sequence: Synthetic oligonucleotide
  Sense strand starting at position 2103 of SEQ ID NO: 1564234
ggucuucuuucucugcaca

SEQ ID NO: 1864712 - RNA, 19 nt, Artificial Sequence
  Description of Artificial Sequence: Synthetic oligonucleotide
  Antisense strand to SEQ ID NO: 1864711
ugugcagagaaagaagacc

SEQ ID NO: 1864713 - RNA, 19 nt, Artificial Sequence
  Description of Artificial Sequence: Synthetic oligonucleotide
  Sense strand starting at position 2326 of SEQ ID NO: 1564234
uuuguuucgugauaaaugg

SEQ ID NO: 1864714 - RNA, 19 nt, Artificial Sequence
  Description of Artificial Sequence: Synthetic oligonucleotide
  Antisense strand to SEQ ID NO: 1864713
ccauuuaucacgaaacaaa

SEQ ID NO: 1864715 - RNA, 19 nt, Artificial Sequence
  Description of Artificial Sequence: Synthetic oligonucleotide
  Sense strand starting at position 2476 of SEQ ID NO: 1564234
gugugauuguugaggagga

SEQ ID NO: 1864716 - RNA, 19 nt, Artificial Sequence
  Description of Artificial Sequence: Synthetic oligonucleotide
  Antisense strand to SEQ ID NO: 1864715
uccuccucaacaaucacac

SEQ ID NO: 1864717 - RNA, 19 nt, Artificial Sequence
  Description of Artificial Sequence: Synthetic oligonucleotide
  Sense strand starting at position 2478 of SEQ ID NO: 1564234
gugauuguugaggaggagu

SEQ ID NO: 1864718 - RNA, 19 nt, Artificial Sequence
  Description of Artificial Sequence: Synthetic oligonucleotide
  Antisense strand to SEQ ID NO: 1864717
acuccuccucaacaaucac

SEQ ID NO: 1864719 - RNA, 19 nt, Artificial Sequence
  Description of Artificial Sequence: Synthetic oligonucleotide
  Sense strand starting at position 2480 of SEQ ID NO: 1564234
gauuguugaggaggaguua

SEQ ID NO: 1864720 - RNA, 19 nt, Artificial Sequence
  Description of Artificial Sequence: Synthetic oligonucleotide
  Antisense strand to SEQ ID NO: 1864719
uaacuccuccucaacaauc

SEQ ID NO: 1864721 - RNA, 19 nt, Artificial Sequence
  Description of Artificial Sequence: Synthetic oligonucleotide
  Sense strand starting at position 2515 of SEQ ID NO: 1564234
ugacgugacugacucgaau

SEQ ID NO: 1864722 - RNA, 19 nt, Artificial Sequence
  Description of Artificial Sequence: Synthetic oligonucleotide
  Antisense strand to SEQ ID NO: 1864721
auucgagucagucacguca

SEQ ID NO: 1864723 - RNA, 19 nt, Artificial Sequence
  Description of Artificial Sequence: Synthetic oligonucleotide
  Sense strand starting at position 2517 of SEQ ID NO: 1564234
acgugacugacucgaauga

SEQ ID NO: 1864724 - RNA, 19 nt, Artificial Sequence
  Description of Artificial Sequence: Synthetic oligonucleotide
  Antisense strand to SEQ ID NO: 1864723
ucauucgagucagucacgu

SEQ ID NO: 1864725 - RNA, 19 nt, Artificial Sequence
  Description of Artificial Sequence: Synthetic oligonucleotide
  Sense strand starting at position 2518 of SEQ ID NO: 1564234
cgugacugacucgaaugaa

SEQ ID NO: 1864726 - RNA, 19 nt, Artificial Sequence
  Description of Artificial Sequence: Synthetic oligonucleotide
  Antisense strand to SEQ ID NO: 1864725
uucauucgagucagucacg

SEQ ID NO: 1864727 - RNA, 19 nt, Artificial Sequence
  Description of Artificial Sequence: Synthetic oligonucleotide
  Sense strand starting at position 2528 of SEQ ID NO: 1564234
ucgaaugaacccugguaac

SEQ ID NO: 1864728 - RNA, 19 nt, Artificial Sequence
  Description of Artificial Sequence: Synthetic oligonucleotide
  Antisense strand to SEQ ID NO: 1864727
guuaccaggguucauucga

SEQ ID NO: 1864729 - RNA, 19 nt, Artificial Sequence
  Description of Artificial Sequence: Synthetic oligonucleotide
  Sense strand starting at position 2608 of SEQ ID NO: 1564234
ccaugucggucucagagaa

SEQ ID NO: 1864730 - RNA, 19 nt, Artificial Sequence
  Description of Artificial Sequence: Synthetic oligonucleotide
  Antisense strand to SEQ ID NO: 1864729
uucucugagaccgacaugg

SEQ ID NO: 1864731 - RNA, 19 nt, Artificial Sequence
  Description of Artificial Sequence: Synthetic oligonucleotide
  Sense strand starting at position 2612 of SEQ ID NO: 1564234
gucggucucagagaaccuu

SEQ ID NO: 1864732 - RNA, 19 nt, Artificial Sequence
  Description of Artificial Sequence: Synthetic oligonucleotide
  Antisense strand to SEQ ID NO: 1864731
aagguucucugagaccgac

SEQ ID NO: 1864733 - RNA, 19 nt, Artificial Sequence
  Description of Artificial Sequence: Synthetic oligonucleotide
  Sense strand starting at position 2755 of SEQ ID NO: 1564234
gccgaauuucuacgugagc

SEQ ID NO: 1864734 - RNA, 19 nt, Artificial Sequence
  Description of Artificial Sequence: Synthetic oligonucleotide
  Antisense strand to SEQ ID NO: 1864733
gcucacguagaaauucggc

SEQ ID NO: 1864735 - RNA, 19 nt, Artificial Sequence
  Description of Artificial Sequence: Synthetic oligonucleotide
  Sense strand starting at position 2756 of SEQ ID NO: 1564234
ccgaauuucuacgugagcu

SEQ ID NO: 1864736 - RNA, 19 nt, Artificial Sequence
  Description of Artificial Sequence: Synthetic oligonucleotide
  Antisense strand to SEQ ID NO: 1864735
agcucacguagaaauucgg

SEQ ID NO: 1864737 - RNA, 19 nt, Artificial Sequence
  Description of Artificial Sequence: Synthetic oligonucleotide
  Sense strand starting at position 2757 of SEQ ID NO: 1564234
cgaauuucuacgugagcuc

SEQ ID NO: 1864738 - RNA, 19 nt, Artificial Sequence
  Description of Artificial Sequence: Synthetic oligonucleotide
  Antisense strand to SEQ ID NO: 1864737
gagcucacguagaaauucg

SEQ ID NO: 1864739 - RNA, 19 nt, Artificial Sequence
  Description of Artificial Sequence: Synthetic oligonucleotide
  Sense strand starting at position 2822 of SEQ ID NO: 1564234
ccauguucugcuggguuaa

SEQ ID NO: 1864740 - RNA, 19 nt, Artificial Sequence
  Description of Artificial Sequence: Synthetic oligonucleotide
  Antisense strand to SEQ ID NO: 1864739
uuaacccagcagaacaugg

SEQ ID NO: 1864741 - RNA, 19 nt, Artificial Sequence
  Description of Artificial Sequence: Synthetic oligonucleotide
  Sense strand starting at position 2823 of SEQ ID NO: 1564234
cauguucugcuggguuaaa

SEQ ID NO: 1864742 - RNA, 19 nt, Artificial Sequence
  Description of Artificial Sequence: Synthetic oligonucleotide
  Antisense strand to SEQ ID NO: 1864741
uuuaacccagcagaacaug

SEQ ID NO: 1864743 - RNA, 19 nt, Artificial Sequence
  Description of Artificial Sequence: Synthetic oligonucleotide
  Sense strand starting at position 2840 of SEQ ID NO: 1564234
aagggaauguguguuuaca

SEQ ID NO: 1864744 - RNA, 19 nt, Artificial Sequence
  Description of Artificial Sequence: Synthetic oligonucleotide
  Antisense strand to SEQ ID NO: 1864743
uguaaacacacauucccuu

SEQ ID NO: 1864745 - RNA, 19 nt, Artificial Sequence
  Description of Artificial Sequence: Synthetic oligonucleotide
  Sense strand starting at position 2842 of SEQ ID NO: 1564234
gggaauguguguuuacauu

SEQ ID NO: 1864746 - RNA, 19 nt, Artificial Sequence
  Description of Artificial Sequence: Synthetic oligonucleotide
  Antisense strand to SEQ ID NO: 1864745
aauguaaacacacauuccc

SEQ ID NO: 1864747 - RNA, 19 nt, Artificial Sequence
  Description of Artificial Sequence: Synthetic oligonucleotide
  Sense strand starting at position 2917 of SEQ ID NO: 1564234
cgaacuuagcucguugcaa

SEQ ID NO: 1864748 - RNA, 19 nt, Artificial Sequence
  Description of Artificial Sequence: Synthetic oligonucleotide
  Antisense strand to SEQ ID NO: 1864747
uugcaacgagcuaaguucg

SEQ ID NO: 1864749 - RNA, 19 nt, Artificial Sequence
  Description of Artificial Sequence: Synthetic oligonucleotide
  Sense strand starting at position 2918 of SEQ ID NO: 1564234
gaacuuagcucguugcaac

SEQ ID NO: 1864750 - RNA, 19 nt, Artificial Sequence
  Description of Artificial Sequence: Synthetic oligonucleotide
  Antisense strand to SEQ ID NO: 1864749
guugcaacgagcuaaguuc

SEQ ID NO: 1864751 - RNA, 19 nt, Artificial Sequence
  Description of Artificial Sequence: Synthetic oligonucleotide
  Sense strand starting at position 76 of SEQ ID NO: 1564235
ccauauugcguuuauauau

SEQ ID NO: 1864752 - RNA, 19 nt, Artificial Sequence
  Description of Artificial Sequence: Synthetic oligonucleotide
  Antisense strand to SEQ ID NO: 1864751
auauauaaacgcaauaugg

SEQ ID NO: 1864753 - RNA, 19 nt, Artificial Sequence
  Description of Artificial Sequence: Synthetic oligonucleotide
  Sense strand starting at position 451 of SEQ ID NO: 1564235
auguuuaaagccuagcaca

SEQ ID NO: 1864754 - RNA, 19 nt, Artificial Sequence
  Description of Artificial Sequence: Synthetic oligonucleotide
  Antisense strand to SEQ ID NO: 1864753
ugugcuaggcuuuaaacau

SEQ ID NO: 1864755 - RNA, 19 nt, Artificial Sequence
  Description of Artificial Sequence: Synthetic oligonucleotide
  Sense strand starting at position 555 of SEQ ID NO: 1564235
gcgcguacacauguaaauu

SEQ ID NO: 1864756 - RNA, 19 nt, Artificial Sequence
  Description of Artificial Sequence: Synthetic oligonucleotide
  Antisense strand to SEQ ID NO: 1864755
aauuuacauguguacgcgc

SEQ ID NO: 1864757 - RNA, 19 nt, Artificial Sequence
  Description of Artificial Sequence: Synthetic oligonucleotide
  Sense strand starting at position 1060 of SEQ ID NO: 1564235
gacacaguguacuuugaga

SEQ ID NO: 1864758 - RNA, 19 nt, Artificial Sequence
  Description of Artificial Sequence: Synthetic oligonucleotide
  Antisense strand to SEQ ID NO: 1864757
ucucaaaguacacuguguc

SEQ ID NO: 1864759 - RNA, 19 nt, Artificial Sequence
  Description of Artificial Sequence: Synthetic oligonucleotide
  Sense strand starting at position 1062 of SEQ ID NO: 1564235
cacaguguacuuugagaug

SEQ ID NO: 1864760 - RNA, 19 nt, Artificial Sequence
  Description of Artificial Sequence: Synthetic oligonucleotide
  Antisense strand to SEQ ID NO: 1864759
caucucaaaguacacugug

SEQ ID NO: 1864761 - RNA, 19 nt, Artificial Sequence
  Description of Artificial Sequence: Synthetic oligonucleotide
  Sense strand starting at position 1068 of SEQ ID NO: 1564235
guacuuugagauggcauca

SEQ ID NO: 1864762 - RNA, 19 nt, Artificial Sequence
  Description of Artificial Sequence: Synthetic oligonucleotide
  Antisense strand to SEQ ID NO: 1864761
ugaugccaucucaaaguac

SEQ ID NO: 1864763 - RNA, 19 nt, Artificial Sequence
  Description of Artificial Sequence: Synthetic oligonucleotide
  Sense strand starting at position 1156 of SEQ ID NO: 1564235
ucaugaaguggcugguauu

SEQ ID NO: 1864764 - RNA, 19 nt, Artificial Sequence
  Description of Artificial Sequence: Synthetic oligonucleotide
  Antisense strand to SEQ ID NO: 1864763
aauaccagccacuucauga

SEQ ID NO: 1864765 - RNA, 19 nt, Artificial Sequence
  Description of Artificial Sequence: Synthetic oligonucleotide
  Sense strand starting at position 1157 of SEQ ID NO: 1564235
caugaaguggcugguauuu

SEQ ID NO: 1864766 - RNA, 19 nt, Artificial Sequence
  Description of Artificial Sequence: Synthetic oligonucleotide
  Antisense strand to SEQ ID NO: 1864765
aaauaccagccacuucaug

SEQ ID NO: 1864767 - RNA, 19 nt, Artificial Sequence
  Description of Artificial Sequence: Synthetic oligonucleotide
  Sense strand starting at position 1177 of SEQ ID NO: 1564235
gcccaaucucaugagaagu

SEQ ID NO: 1864768 - RNA, 19 nt, Artificial Sequence
  Description of Artificial Sequence: Synthetic oligonucleotide
  Antisense strand to SEQ ID NO: 1864767
acuucucaugagauugggc

SEQ ID NO: 1864769 - RNA, 19 nt, Artificial Sequence
  Description of Artificial Sequence: Synthetic oligonucleotide
  Sense strand starting at position 1187 of SEQ ID NO: 1564235
augagaagugcccaucagu

SEQ ID NO: 1864770 - RNA, 19 nt, Artificial Sequence
  Description of Artificial Sequence: Synthetic oligonucleotide
  Antisense strand to SEQ ID NO: 1864769
acugaugggcacuucucau

SEQ ID NO: 1864771 - RNA, 19 nt, Artificial Sequence
  Description of Artificial Sequence: Synthetic oligonucleotide
  Sense strand starting at position 1208 of SEQ ID NO: 1564235
caggucagaugugcagaaa

SEQ ID NO: 1864772 - RNA, 19 nt, Artificial Sequence
  Description of Artificial Sequence: Synthetic oligonucleotide
  Antisense strand to SEQ ID NO: 1864771
uuucugcacaucugaccug

SEQ ID NO: 1864773 - RNA, 19 nt, Artificial Sequence
  Description of Artificial Sequence: Synthetic oligonucleotide
  Sense strand starting at position 1211 of SEQ ID NO: 1564235
gucagaugugcagaaacau

SEQ ID NO: 1864774 - RNA, 19 nt, Artificial Sequence
  Description of Artificial Sequence: Synthetic oligonucleotide
  Antisense strand to SEQ ID NO: 1864773
auguuucugcacaucugac

SEQ ID NO: 1864775 - RNA, 19 nt, Artificial Sequence
  Description of Artificial Sequence: Synthetic oligonucleotide
  Sense strand starting at position 1374 of SEQ ID NO: 1564235
ggaagcguucgugcuaagu

SEQ ID NO: 1864776 - RNA, 19 nt, Artificial Sequence
  Description of Artificial Sequence: Synthetic oligonucleotide
  Antisense strand to SEQ ID NO: 1864775
acuuagcacgaacgcuucc

SEQ ID NO: 1864777 - RNA, 19 nt, Artificial Sequence
  Description of Artificial Sequence: Synthetic oligonucleotide
  Sense strand starting at position 1489 of SEQ ID NO: 1564235
acuagaacacucgagcuuu

SEQ ID NO: 1864778 - RNA, 19 nt, Artificial Sequence
  Description of Artificial Sequence: Synthetic oligonucleotide
  Antisense strand to SEQ ID NO: 1864777
aaagcucgaguguucuagu

SEQ ID NO: 1864779 - RNA, 19 nt, Artificial Sequence
  Description of Artificial Sequence: Synthetic oligonucleotide
  Sense strand starting at position 1495 of SEQ ID NO: 1564235
acacucgagcuuuaagaug

SEQ ID NO: 1864780 - RNA, 19 nt, Artificial Sequence
  Description of Artificial Sequence: Synthetic oligonucleotide
  Antisense strand to SEQ ID NO: 1864779
caucuuaaagcucgagugu

SEQ ID NO: 1864781 - RNA, 19 nt, Artificial Sequence
  Description of Artificial Sequence: Synthetic oligonucleotide
  Sense strand starting at position 1500 of SEQ ID NO: 1564235
cgagcuuuaagaugcaaag

SEQ ID NO: 1864782 - RNA, 19 nt, Artificial Sequence
  Description of Artificial Sequence: Synthetic oligonucleotide
  Antisense strand to SEQ ID NO: 1864781
cuuugcaucuuaaagcucg

SEQ ID NO: 1864783 - RNA, 19 nt, Artificial Sequence
  Description of Artificial Sequence: Synthetic oligonucleotide
  Sense strand starting at position 1633 of SEQ ID NO: 1564235
auaccuuugcgaggacaaa

SEQ ID NO: 1864784 - RNA, 19 nt, Artificial Sequence
  Description of Artificial Sequence: Synthetic oligonucleotide
  Antisense strand to SEQ ID NO: 1864783
uuuguccucgcaaagguau

SEQ ID NO: 1864785 - RNA, 19 nt, Artificial Sequence
  Description of Artificial Sequence: Synthetic oligonucleotide
  Sense strand starting at position 1634 of SEQ ID NO: 1564235
uaccuuugcgaggacaaau

SEQ ID NO: 1864786 - RNA, 19 nt, Artificial Sequence
  Description of Artificial Sequence: Synthetic oligonucleotide
  Antisense strand to SEQ ID NO: 1864785
auuuguccucgcaaaggua

SEQ ID NO: 1864787 - RNA, 19 nt, Artificial Sequence
  Description of Artificial Sequence: Synthetic oligonucleotide
  Sense strand starting at position 2008 of SEQ ID NO: 1564235
ugccucugacaugaguauu

SEQ ID NO: 1864788 - RNA, 19 nt, Artificial Sequence
  Description of Artificial Sequence: Synthetic oligonucleotide
  Antisense strand to SEQ ID NO: 1864787
aauacucaugucagaggca

SEQ ID NO: 1864789 - RNA, 19 nt, Artificial Sequence
  Description of Artificial Sequence: Synthetic oligonucleotide
  Sense strand starting at position 2011 of SEQ ID NO: 1564235
cucugacaugaguauucuu

SEQ ID NO: 1864790 - RNA, 19 nt, Artificial Sequence
  Description of Artificial Sequence: Synthetic oligonucleotide
  Antisense strand to SEQ ID NO: 1864789
aagaauacucaugucagag

SEQ ID NO: 1864791 - RNA, 19 nt, Artificial Sequence
  Description of Artificial Sequence: Synthetic oligonucleotide
  Sense strand starting at position 2093 of SEQ ID NO: 1564235
ucagaaaugccaugaagau

SEQ ID NO: 1864792 - RNA, 19 nt, Artificial Sequence
  Description of Artificial Sequence: Synthetic oligonucleotide
  Antisense strand to SEQ ID NO: 1864791
aucuucauggcauuucuga

SEQ ID NO: 1864793 - RNA, 19 nt, Artificial Sequence
  Description of Artificial Sequence: Synthetic oligonucleotide
  Sense strand starting at position 2144 of SEQ ID NO: 1564235
ggaagugaacggugacaga

SEQ ID NO: 1864794 - RNA, 19 nt, Artificial Sequence
  Description of Artificial Sequence: Synthetic oligonucleotide
  Antisense strand to SEQ ID NO: 1864793
ucugucaccguucacuucc

SEQ ID NO: 1864795 - RNA, 19 nt, Artificial Sequence
  Description of Artificial Sequence: Synthetic oligonucleotide
  Sense strand starting at position 2155 of SEQ ID NO: 1564235
gugacagacugagaaauuu

SEQ ID NO: 1864796 - RNA, 19 nt, Artificial Sequence
  Description of Artificial Sequence: Synthetic oligonucleotide
  Antisense strand to SEQ ID NO: 1864795
aaauuucucagucugucac

SEQ ID NO: 1864797 - RNA, 19 nt, Artificial Sequence
  Description of Artificial Sequence: Synthetic oligonucleotide
  Sense strand starting at position 2164 of SEQ ID NO: 1564235
ugagaaauuugucauggua

SEQ ID NO: 1864798 - RNA, 19 nt, Artificial Sequence
  Description of Artificial Sequence: Synthetic oligonucleotide
  Antisense strand to SEQ ID NO: 1864797
uaccaugacaaauuucuca

SEQ ID NO: 1864799 - RNA, 19 nt, Artificial Sequence
  Description of Artificial Sequence: Synthetic oligonucleotide
  Sense strand starting at position 2166 of SEQ ID NO: 1564235
agaaauuugucaugguaga

SEQ ID NO: 1864800 - RNA, 19 nt, Artificial Sequence
  Description of Artificial Sequence: Synthetic oligonucleotide
  Antisense strand to SEQ ID NO: 1864799
ucuaccaugacaaauuucu

SEQ ID NO: 1864801 - RNA, 19 nt, Artificial Sequence
  Description of Artificial Sequence: Synthetic oligonucleotide
  Sense strand starting at position 2663 of SEQ ID NO: 1564235
gucgaaggugacugaugaa

SEQ ID NO: 1864802 - RNA, 19 nt, Artificial Sequence
  Description of Artificial Sequence: Synthetic oligonucleotide
  Antisense strand to SEQ ID NO: 1864801
uucaucagucaccuucgac

SEQ ID NO: 1864803 - RNA, 19 nt, Artificial Sequence
  Description of Artificial Sequence: Synthetic oligonucleotide
  Sense strand starting at position 2794 of SEQ ID NO: 1564235
uggacaucuucccugcauu

SEQ ID NO: 1864804 - RNA, 19 nt, Artificial Sequence
  Description of Artificial Sequence: Synthetic oligonucleotide
  Antisense strand to SEQ ID NO: 1864803
aaugcagggaagaugucca

SEQ ID NO: 1864805 - RNA, 19 nt, Artificial Sequence
  Description of Artificial Sequence: Synthetic oligonucleotide
  Sense strand starting at position 2795 of SEQ ID NO: 1564235
ggacaucuucccugcauug

SEQ ID NO: 1864806 - RNA, 19 nt, Artificial Sequence
  Description of Artificial Sequence: Synthetic oligonucleotide
  Antisense strand to SEQ ID NO: 1864805
caaugcagggaagaugucc

SEQ ID NO: 1864807 - RNA, 19 nt, Artificial Sequence
  Description of Artificial Sequence: Synthetic oligonucleotide
  Sense strand starting at position 2815 of SEQ ID NO: 1564235
ugggauaccuuguucuuua

SEQ ID NO: 1864808 - RNA, 19 nt, Artificial Sequence
  Description of Artificial Sequence: Synthetic oligonucleotide
  Antisense strand to SEQ ID NO: 1864807
uaaagaacaagguauccca

SEQ ID NO: 1864809 - RNA, 19 nt, Artificial Sequence
  Description of Artificial Sequence: Synthetic oligonucleotide
  Sense strand starting at position 2816 of SEQ ID NO: 1564235
gggauaccuuguucuuuau

SEQ ID NO: 1864810 - RNA, 19 nt, Artificial Sequence
  Description of Artificial Sequence: Synthetic oligonucleotide
  Antisense strand to SEQ ID NO: 1864809
auaaagaacaagguauccc

SEQ ID NO: 1864811 - RNA, 19 nt, Artificial Sequence
  Description of Artificial Sequence: Synthetic oligonucleotide
  Sense strand starting at position 2985 of SEQ ID NO: 1564235
ugcugagggucgguagaaa

SEQ ID NO: 1864812 - RNA, 19 nt, Artificial Sequence
  Description of Artificial Sequence: Synthetic oligonucleotide
  Antisense strand to SEQ ID NO: 1864811
uuucuaccgacccucagca

SEQ ID NO: 1864813 - RNA, 19 nt, Artificial Sequence
  Description of Artificial Sequence: Synthetic oligonucleotide
  Sense strand starting at position 3096 of SEQ ID NO: 1564235
ugcccuuucuacuuuggaa

SEQ ID NO: 1864814 - RNA, 19 nt, Artificial Sequence
  Description of Artificial Sequence: Synthetic oligonucleotide
  Antisense strand to SEQ ID NO: 1864813
uuccaaaguagaaagggca

SEQ ID NO: 1864815 - RNA, 19 nt, Artificial Sequence
  Description of Artificial Sequence: Synthetic oligonucleotide
  Sense strand starting at position 3186 of SEQ ID NO: 1564235
cgaugaccugaaugagcaa

SEQ ID NO: 1864816 - RNA, 19 nt, Artificial Sequence
  Description of Artificial Sequence: Synthetic oligonucleotide
  Antisense strand to SEQ ID NO: 1864815
uugcucauucaggucaucg

SEQ ID NO: 1864817 - RNA, 19 nt, Artificial Sequence
  Description of Artificial Sequence: Synthetic oligonucleotide
  Sense strand starting at position 3245 of SEQ ID NO: 1564235
ggacucgguagugacaaau

SEQ ID NO: 1864818 - RNA, 19 nt, Artificial Sequence
  Description of Artificial Sequence: Synthetic oligonucleotide
  Antisense strand to SEQ ID NO: 1864817
auuugucacuaccgagucc

SEQ ID NO: 1864819 - RNA, 19 nt, Artificial Sequence
  Description of Artificial Sequence: Synthetic oligonucleotide
  Sense strand starting at position 3251 of SEQ ID NO: 1564235
gguagugacaaaugcauaa

SEQ ID NO: 1864820 - RNA, 19 nt, Artificial Sequence
  Description of Artificial Sequence: Synthetic oligonucleotide
  Antisense strand to SEQ ID NO: 1864819
uuaugcauuugucacuacc

SEQ ID NO: 1864821 - RNA, 19 nt, Artificial Sequence
  Description of Artificial Sequence: Synthetic oligonucleotide
  Sense strand starting at position 3255 of SEQ ID NO: 1564235
gugacaaaugcauaacuau

SEQ ID NO: 1864822 - RNA, 19 nt, Artificial Sequence
  Description of Artificial Sequence: Synthetic oligonucleotide
  Antisense strand to SEQ ID NO: 1864821
auaguuaugcauuugucac

SEQ ID NO: 1864823 - RNA, 19 nt, Artificial Sequence
  Description of Artificial Sequence: Synthetic oligonucleotide
  Sense strand starting at position 3306 of SEQ ID NO: 1564235
agagguuucugcucuccca

SEQ ID NO: 1864824 - RNA, 19 nt, Artificial Sequence
  Description of Artificial Sequence: Synthetic oligonucleotide
  Antisense strand to SEQ ID NO: 1864823
ugggagagcagaaaccucu

SEQ ID NO: 1864825 - RNA, 19 nt, Artificial Sequence
  Description of Artificial Sequence: Synthetic oligonucleotide
  Sense strand starting at position 3328 of SEQ ID NO: 1564235
ugaagugugaggcauaaau

SEQ ID NO: 1864826 - RNA, 19 nt, Artificial Sequence
  Description of Artificial Sequence: Synthetic oligonucleotide
  Antisense strand to SEQ ID NO: 1864825
auuuaugccucacacuuca

SEQ ID NO: 1864827 - RNA, 19 nt, Artificial Sequence
  Description of Artificial Sequence: Synthetic oligonucleotide
  Sense strand starting at position 3560 of SEQ ID NO: 1564235
ggcucuucuggaggaugau

SEQ ID NO: 1864828 - RNA, 19 nt, Artificial Sequence
  Description of Artificial Sequence: Synthetic oligonucleotide
  Antisense strand to SEQ ID NO: 1864827
aucauccuccagaagagcc

SEQ ID NO: 1864829 - RNA, 19 nt, Artificial Sequence
  Description of Artificial Sequence: Synthetic oligonucleotide
  Sense strand starting at position 3897 of SEQ ID NO: 1564235
gaaugagagguagggucua

SEQ ID NO: 1864830 - RNA, 19 nt, Artificial Sequence
  Description of Artificial Sequence: Synthetic oligonucleotide
  Antisense strand to SEQ ID NO: 1864829
uagacccuaccucucauuc

SEQ ID NO: 1864831 - RNA, 19 nt, Artificial Sequence
  Description of Artificial Sequence: Synthetic oligonucleotide
  Sense strand starting at position 90 of SEQ ID NO: 1564236
ucuagcccucagcaugaua

SEQ ID NO: 1864832 - RNA, 19 nt, Artificial Sequence
  Description of Artificial Sequence: Synthetic oligonucleotide
  Antisense strand to SEQ ID NO: 1864831
uaucaugcugagggcuaga

SEQ ID NO: 1864833 - RNA, 19 nt, Artificial Sequence
  Description of Artificial Sequence: Synthetic oligonucleotide
  Sense strand starting at position 103 of SEQ ID NO: 1564236
augauaguugaguggucaa

SEQ ID NO: 1864834 - RNA, 19 nt, Artificial Sequence
  Description of Artificial Sequence: Synthetic oligonucleotide
  Antisense strand to SEQ ID NO: 1864833
uugaccacucaacuaucau

SEQ ID NO: 1864835 - RNA, 19 nt, Artificial Sequence
  Description of Artificial Sequence: Synthetic oligonucleotide
  Sense strand starting at position 106 of SEQ ID NO: 1564236
auaguugaguggucaagaa

SEQ ID NO: 1864836 - RNA, 19 nt, Artificial Sequence
  Description of Artificial Sequence: Synthetic oligonucleotide
  Antisense strand to SEQ ID NO: 1864835
uucuugaccacucaacuau

SEQ ID NO: 1864837 - RNA, 19 nt, Artificial Sequence
  Description of Artificial Sequence: Synthetic oligonucleotide
  Sense strand starting at position 110 of SEQ ID NO: 1564236
uugaguggucaagaaaugu

SEQ ID NO: 1864838 - RNA, 19 nt, Artificial Sequence
  Description of Artificial Sequence: Synthetic oligonucleotide
  Antisense strand to SEQ ID NO: 1864837
acauuucuugaccacucaa

SEQ ID NO: 1864839 - RNA, 19 nt, Artificial Sequence
  Description of Artificial Sequence: Synthetic oligonucleotide
  Sense strand starting at position 119 of SEQ ID NO: 1564236
caagaaaugugagcucucu

SEQ ID NO: 1864840 - RNA, 19 nt, Artificial Sequence
  Description of Artificial Sequence: Synthetic oligonucleotide
  Antisense strand to SEQ ID NO: 1864839
agagagcucacauuucuug

SEQ ID NO: 1864841 - RNA, 19 nt, Artificial Sequence
  Description of Artificial Sequence: Synthetic oligonucleotide
  Sense strand starting at position 180 of SEQ ID NO: 1564236
gacagaugugggcauaggu

SEQ ID NO: 1864842 - RNA, 19 nt, Artificial Sequence
  Description of Artificial Sequence: Synthetic oligonucleotide
  Antisense strand to SEQ ID NO: 1864841
accuaugcccacaucuguc

SEQ ID NO: 1864843 - RNA, 19 nt, Artificial Sequence
  Description of Artificial Sequence: Synthetic oligonucleotide
  Sense strand starting at position 208 of SEQ ID NO: 1564236
aauagacaucuggguuucu

SEQ ID NO: 1864844 - RNA, 19 nt, Artificial Sequence
  Description of Artificial Sequence: Synthetic oligonucleotide
  Antisense strand to SEQ ID NO: 1864843
agaaacccagaugucuauu

SEQ ID NO: 1864845 - RNA, 19 nt, Artificial Sequence
  Description of Artificial Sequence: Synthetic oligonucleotide
  Sense strand starting at position 209 of SEQ ID NO: 1564236
auagacaucuggguuucua

SEQ ID NO: 1864846 - RNA, 19 nt, Artificial Sequence
  Description of Artificial Sequence: Synthetic oligonucleotide
  Antisense strand to SEQ ID NO: 1864845
uagaaacccagaugucuau

SEQ ID NO: 1864847 - RNA, 19 nt, Artificial Sequence
  Description of Artificial Sequence: Synthetic oligonucleotide
  Sense strand starting at position 213 of SEQ ID NO: 1564236
acaucuggguuucuaggaa

SEQ ID NO: 1864848 - RNA, 19 nt, Artificial Sequence
  Description of Artificial Sequence: Synthetic oligonucleotide
  Antisense strand to SEQ ID NO: 1864847
uuccuagaaacccagaugu

SEQ ID NO: 1864849 - RNA, 19 nt, Artificial Sequence
  Description of Artificial Sequence: Synthetic oligonucleotide
  Sense strand starting at position 315 of SEQ ID NO: 1564236
ggagcuaacauucggaucu

SEQ ID NO: 1864850 - RNA, 19 nt, Artificial Sequence
  Description of Artificial Sequence: Synthetic oligonucleotide
  Antisense strand to SEQ ID NO: 1864849
agauccgaauguuagcucc

SEQ ID NO: 1864851 - RNA, 19 nt, Artificial Sequence
  Description of Artificial Sequence: Synthetic oligonucleotide
  Sense strand starting at position 328 of SEQ ID NO: 1564236
ggaucuagaaugugucuga

SEQ ID NO: 1864852 - RNA, 19 nt, Artificial Sequence
  Description of Artificial Sequence: Synthetic oligonucleotide
  Antisense strand to SEQ ID NO: 1864851
ucagacacauucuagaucc

SEQ ID NO: 1864853 - RNA, 19 nt, Artificial Sequence
  Description of Artificial Sequence: Synthetic oligonucleotide
  Sense strand starting at position 329 of SEQ ID NO: 1564236
gaucuagaaugugucugau

SEQ ID NO: 1864854 - RNA, 19 nt, Artificial Sequence
  Description of Artificial Sequence: Synthetic oligonucleotide
  Antisense strand to SEQ ID NO: 1864853
aucagacacauucuagauc

SEQ ID NO: 1864855 - RNA, 19 nt, Artificial Sequence
  Description of Artificial Sequence: Synthetic oligonucleotide
  Sense strand starting at position 919 of SEQ ID NO: 1564236
cuacuccuuggccagaaau

SEQ ID NO: 1864856 - RNA, 19 nt, Artificial Sequence
  Description of Artificial Sequence: Synthetic oligonucleotide
  Antisense strand to SEQ ID NO: 1864855
auuucuggccaaggaguag

SEQ ID NO: 1864857 - RNA, 19 nt, Artificial Sequence
  Description of Artificial Sequence: Synthetic oligonucleotide
  Sense strand starting at position 921 of SEQ ID NO: 1564236
acuccuuggccagaaaucu

SEQ ID NO: 1864858 - RNA, 19 nt, Artificial Sequence
  Description of Artificial Sequence: Synthetic oligonucleotide
  Antisense strand to SEQ ID NO: 1864857
agauuucuggccaaggagu

SEQ ID NO: 1864859 - RNA, 19 nt, Artificial Sequence
  Description of Artificial Sequence: Synthetic oligonucleotide
  Sense strand starting at position 929 of SEQ ID NO: 1564236
gccagaaaucuuuacuggu

SEQ ID NO: 1864860 - RNA, 19 nt, Artificial Sequence
  Description of Artificial Sequence: Synthetic oligonucleotide
  Antisense strand to SEQ ID NO: 1864859
accaguaaagauuucuggc

SEQ ID NO: 1864861 - RNA, 19 nt, Artificial Sequence
  Description of Artificial Sequence: Synthetic oligonucleotide
  Sense strand starting at position 943 of SEQ ID NO: 1564236
cuggucuuuggcuguauuu

SEQ ID NO: 1864862 - RNA, 19 nt, Artificial Sequence
  Description of Artificial Sequence: Synthetic oligonucleotide
  Antisense strand to SEQ ID NO: 1864861
aaauacagccaaagaccag

SEQ ID NO: 1864863 - RNA, 19 nt, Artificial Sequence
  Description of Artificial Sequence: Synthetic oligonucleotide
  Sense strand starting at position 1004 of SEQ ID NO: 1564236
ugcaauaguccugauagua

SEQ ID NO: 1864864 - RNA, 19 nt, Artificial Sequence
  Description of Artificial Sequence: Synthetic oligonucleotide
  Antisense strand to SEQ ID NO: 1864863
uacuaucaggacuauugca

SEQ ID NO: 1864865 - RNA, 19 nt, Artificial Sequence
  Description of Artificial Sequence: Synthetic oligonucleotide
  Sense strand starting at position 1014 of SEQ ID NO: 1564236
cugauaguaucuuuaucua

SEQ ID NO: 1864866 - RNA, 19 nt, Artificial Sequence
  Description of Artificial Sequence: Synthetic oligonucleotide
  Antisense strand to SEQ ID NO: 1864865
uagauaaagauacuaucag

SEQ ID NO: 1864867 - RNA, 19 nt, Artificial Sequence
  Description of Artificial Sequence: Synthetic oligonucleotide
  Sense strand starting at position 1285 of SEQ ID NO: 1564236
auuuaauucuuguaggaag

SEQ ID NO: 1864868 - RNA, 19 nt, Artificial Sequence
  Description of Artificial Sequence: Synthetic oligonucleotide
  Antisense strand to SEQ ID NO: 1864867
cuuccuacaagaauuaaau

SEQ ID NO: 1864869 - RNA, 19 nt, Artificial Sequence
  Description of Artificial Sequence: Synthetic oligonucleotide
  Sense strand starting at position 1287 of SEQ ID NO: 1564236
uuaauucuuguaggaaguu

SEQ ID NO: 1864870 - RNA, 19 nt, Artificial Sequence
  Description of Artificial Sequence: Synthetic oligonucleotide
  Antisense strand to SEQ ID NO: 1864869
aacuuccuacaagaauuaa

SEQ ID NO: 1864871 - RNA, 19 nt, Artificial Sequence
  Description of Artificial Sequence: Synthetic oligonucleotide
  Sense strand starting at position 1310 of SEQ ID NO: 1564236
agagcaagcguugauuaau

SEQ ID NO: 1864872 - RNA, 19 nt, Artificial Sequence
  Description of Artificial Sequence: Synthetic oligonucleotide
  Antisense strand to SEQ ID NO: 1864871
auuaaucaacgcuugcucu

SEQ ID NO: 1864873 - RNA, 19 nt, Artificial Sequence
  Description of Artificial Sequence: Synthetic oligonucleotide
  Sense strand starting at position 1672 of SEQ ID NO: 1564236
cuaggaucauugcuuuaaa

SEQ ID NO: 1864874 - RNA, 19 nt, Artificial Sequence
  Description of Artificial Sequence: Synthetic oligonucleotide
  Antisense strand to SEQ ID NO: 1864873
uuuaaagcaaugauccuag

SEQ ID NO: 1864875 - RNA, 19 nt, Artificial Sequence
  Description of Artificial Sequence: Synthetic oligonucleotide
  Sense strand starting at position 1725 of SEQ ID NO: 1564236
ccucaaaguuagguagacu

SEQ ID NO: 1864876 - RNA, 19 nt, Artificial Sequence
  Description of Artificial Sequence: Synthetic oligonucleotide
  Antisense strand to SEQ ID NO: 1864875
agucuaccuaacuuugagg

SEQ ID NO: 1864877 - RNA, 19 nt, Artificial Sequence
  Description of Artificial Sequence: Synthetic oligonucleotide
  Sense strand starting at position 1995 of SEQ ID NO: 1564236
agucuucugagaugaagug

SEQ ID NO: 1864878 - RNA, 19 nt, Artificial Sequence
  Description of Artificial Sequence: Synthetic oligonucleotide
  Antisense strand to SEQ ID NO: 1864877
cacuucaucucagaagacu

SEQ ID NO: 1864879 - RNA, 19 nt, Artificial Sequence
  Description of Artificial Sequence: Synthetic oligonucleotide
  Sense strand starting at position 1996 of SEQ ID NO: 1564236
gucuucugagaugaaguga

SEQ ID NO: 1864880 - RNA, 19 nt, Artificial Sequence
  Description of Artificial Sequence: Synthetic oligonucleotide
  Antisense strand to SEQ ID NO: 1864879
ucacuucaucucagaagac

SEQ ID NO: 1864881 - RNA, 19 nt, Artificial Sequence
  Description of Artificial Sequence: Synthetic oligonucleotide
  Sense strand starting at position 2022 of SEQ ID NO: 1564236
caggaaguguagucacaaa

SEQ ID NO: 1864882 - RNA, 19 nt, Artificial Sequence
  Description of Artificial Sequence: Synthetic oligonucleotide
  Antisense strand to SEQ ID NO: 1864881
uuugugacuacacuuccug

SEQ ID NO: 1864883 - RNA, 19 nt, Artificial Sequence
  Description of Artificial Sequence: Synthetic oligonucleotide
  Sense strand starting at position 2287 of SEQ ID NO: 1564236
ucuguugcaccauaggaua

SEQ ID NO: 1864884 - RNA, 19 nt, Artificial Sequence
  Description of Artificial Sequence: Synthetic oligonucleotide
  Antisense strand to SEQ ID NO: 1864883
uauccuauggugcaacaga

SEQ ID NO: 1864885 - RNA, 19 nt, Artificial Sequence
  Description of Artificial Sequence: Synthetic oligonucleotide
  Sense strand starting at position 2573 of SEQ ID NO: 1564236
ugcauuugcuucucaaagu

SEQ ID NO: 1864886 - RNA, 19 nt, Artificial Sequence
  Description of Artificial Sequence: Synthetic oligonucleotide
  Antisense strand to SEQ ID NO: 1864885
acuuugagaagcaaaugca

SEQ ID NO: 1864887 - RNA, 19 nt, Artificial Sequence
  Description of Artificial Sequence: Synthetic oligonucleotide
  Sense strand starting at position 2599 of SEQ ID NO: 1564236
ccaagagaauuguuccuuu

SEQ ID NO: 1864888 - RNA, 19 nt, Artificial Sequence
  Description of Artificial Sequence: Synthetic oligonucleotide
  Antisense strand to SEQ ID NO: 1864887
aaaggaacaauucucuugg

SEQ ID NO: 1864889 - RNA, 19 nt, Artificial Sequence
  Description of Artificial Sequence: Synthetic oligonucleotide
  Sense strand starting at position 2602 of SEQ ID NO: 1564236
agagaauuguuccuuucuu

SEQ ID NO: 1864890 - RNA, 19 nt, Artificial Sequence
  Description of Artificial Sequence: Synthetic oligonucleotide
  Antisense strand to SEQ ID NO: 1864889
aagaaaggaacaauucucu

SEQ ID NO: 1864891 - RNA, 19 nt, Artificial Sequence
  Description of Artificial Sequence: Synthetic oligonucleotide
  Sense strand starting at position 2689 of SEQ ID NO: 1564236
cuuaguccaccuggagaga

SEQ ID NO: 1864892 - RNA, 19 nt, Artificial Sequence
  Description of Artificial Sequence: Synthetic oligonucleotide
  Antisense strand to SEQ ID NO: 1864891
ucucuccagguggacuaag

SEQ ID NO: 1864893 - RNA, 19 nt, Artificial Sequence
  Description of Artificial Sequence: Synthetic oligonucleotide
  Sense strand starting at position 2700 of SEQ ID NO: 1564236
uggagagaauuuggaugau

SEQ ID NO: 1864894 - RNA, 19 nt, Artificial Sequence
  Description of Artificial Sequence: Synthetic oligonucleotide
  Antisense strand to SEQ ID NO: 1864893
aucauccaaauucucucca

SEQ ID NO: 1864895 - RNA, 19 nt, Artificial Sequence
  Description of Artificial Sequence: Synthetic oligonucleotide
  Sense strand starting at position 3150 of SEQ ID NO: 1564236
ucugaaaugcuuuggaaga

SEQ ID NO: 1864896 - RNA, 19 nt, Artificial Sequence
  Description of Artificial Sequence: Synthetic oligonucleotide
  Antisense strand to SEQ ID NO: 1864895
ucuuccaaagcauuucaga

SEQ ID NO: 1864897 - RNA, 19 nt, Artificial Sequence
  Description of Artificial Sequence: Synthetic oligonucleotide
  Sense strand starting at position 3216 of SEQ ID NO: 1564236
ggacuauaaugcuuuaccu

SEQ ID NO: 1864898 - RNA, 19 nt, Artificial Sequence
  Description of Artificial Sequence: Synthetic oligonucleotide
  Antisense strand to SEQ ID NO: 1864897
agguaaagcauuauagucc

SEQ ID NO: 1864899 - RNA, 19 nt, Artificial Sequence
  Description of Artificial Sequence: Synthetic oligonucleotide
  Sense strand starting at position 3503 of SEQ ID NO: 1564236
ccugaauuccaguaaucgu

SEQ ID NO: 1864900 - RNA, 19 nt, Artificial Sequence
  Description of Artificial Sequence: Synthetic oligonucleotide
  Antisense strand to SEQ ID NO: 1864899
acgauuacuggaauucagg

SEQ ID NO: 1864901 - RNA, 19 nt, Artificial Sequence
  Description of Artificial Sequence: Synthetic oligonucleotide
  Sense strand starting at position 3754 of SEQ ID NO: 1564236
agaaauguugcuuaaauug

SEQ ID NO: 1864902 - RNA, 19 nt, Artificial Sequence
  Description of Artificial Sequence: Synthetic oligonucleotide
  Antisense strand to SEQ ID NO: 1864901
caauuuaagcaacauuucu

SEQ ID NO: 1864903 - RNA, 19 nt, Artificial Sequence
  Description of Artificial Sequence: Synthetic oligonucleotide
  Sense strand starting at position 3821 of SEQ ID NO: 1564236
ugauacuugccagacugau

SEQ ID NO: 1864904 - RNA, 19 nt, Artificial Sequence
  Description of Artificial Sequence: Synthetic oligonucleotide
  Antisense strand to SEQ ID NO: 1864903
aucagucuggcaaguauca

SEQ ID NO: 1864905 - RNA, 19 nt, Artificial Sequence
  Description of Artificial Sequence: Synthetic oligonucleotide
  Sense strand starting at position 3878 of SEQ ID NO: 1564236
uuuguuuaucaugaagacu

SEQ ID NO: 1864906 - RNA, 19 nt, Artificial Sequence
  Description of Artificial Sequence: Synthetic oligonucleotide
  Antisense strand to SEQ ID NO: 1864905
agucuucaugauaaacaaa

SEQ ID NO: 1864907 - RNA, 19 nt, Artificial Sequence
  Description of Artificial Sequence: Synthetic oligonucleotide
  Sense strand starting at position 3898 of SEQ ID NO: 1564236
ggguuacauuauccacaaa

SEQ ID NO: 1864908 - RNA, 19 nt, Artificial Sequence
  Description of Artificial Sequence: Synthetic oligonucleotide
  Antisense strand to SEQ ID NO: 1864907
uuuguggauaauguaaccc

SEQ ID NO: 1864909 - RNA, 19 nt, Artificial Sequence
  Description of Artificial Sequence: Synthetic oligonucleotide
  Sense strand starting at position 3936 of SEQ ID NO: 1564236
aagggugcauuaccaaaua

SEQ ID NO: 1864910 - RNA, 19 nt, Artificial Sequence
  Description of Artificial Sequence: Synthetic oligonucleotide
  Antisense strand to SEQ ID NO: 1864909
uauuugguaaugcacccuu

SEQ ID NO: 1864911 - RNA, 19 nt, Artificial Sequence
  Description of Artificial Sequence: Synthetic oligonucleotide
  Sense strand starting at position 643 of SEQ ID NO: 1564237
acugcaaucccauaugugu

SEQ ID NO: 1864912 - RNA, 19 nt, Artificial Sequence
  Description of Artificial Sequence: Synthetic oligonucleotide
  Antisense strand to SEQ ID NO: 1864911
acacauaugggauugcagu

SEQ ID NO: 1864913 - RNA, 19 nt, Artificial Sequence
  Description of Artificial Sequence: Synthetic oligonucleotide
  Sense strand starting at position 763 of SEQ ID NO: 1564237
ugaacauuagguggguaua

SEQ ID NO: 1864914 - RNA, 19 nt, Artificial Sequence
  Description of Artificial Sequence: Synthetic oligonucleotide
  Antisense strand to SEQ ID NO: 1864913
uauacccaccuaauguuca

SEQ ID NO: 1864915 - RNA, 19 nt, Artificial Sequence
  Description of Artificial Sequence: Synthetic oligonucleotide
  Sense strand starting at position 764 of SEQ ID NO: 1564237
gaacauuagguggguauaa

SEQ ID NO: 1864916 - RNA, 19 nt, Artificial Sequence
  Description of Artificial Sequence: Synthetic oligonucleotide
  Antisense strand to SEQ ID NO: 1864915
uuauacccaccuaauguuc

SEQ ID NO: 1864917 - RNA, 19 nt, Artificial Sequence
  Description of Artificial Sequence: Synthetic oligonucleotide
  Sense strand starting at position 765 of SEQ ID NO: 1564237
aacauuagguggguauaaa

SEQ ID NO: 1864918 - RNA, 19 nt, Artificial Sequence
  Description of Artificial Sequence: Synthetic oligonucleotide
  Antisense strand to SEQ ID NO: 1864917
uuuauacccaccuaauguu

SEQ ID NO: 1864919 - RNA, 19 nt, Artificial Sequence
  Description of Artificial Sequence: Synthetic oligonucleotide
  Sense strand starting at position 1251 of SEQ ID NO: 1564237
gucugacaguucuugacaa

SEQ ID NO: 1864920 - RNA, 19 nt, Artificial Sequence
  Description of Artificial Sequence: Synthetic oligonucleotide
  Antisense strand to SEQ ID NO: 1864919
uugucaagaacugucagac

SEQ ID NO: 1864921 - RNA, 19 nt, Artificial Sequence
  Description of Artificial Sequence: Synthetic oligonucleotide
  Sense strand starting at position 1411 of SEQ ID NO: 1564237
gcaauuaaugucgaacuuu

SEQ ID NO: 1864922 - RNA, 19 nt, Artificial Sequence
  Description of Artificial Sequence: Synthetic oligonucleotide
  Antisense strand to SEQ ID NO: 1864921
aaaguucgacauuaauugc

SEQ ID NO: 1864923 - RNA, 19 nt, Artificial Sequence
  Description of Artificial Sequence: Synthetic oligonucleotide
  Sense strand starting at position 1479 of SEQ ID NO: 1564237
gaccuauguaugugaagga

SEQ ID NO: 1864924 - RNA, 19 nt, Artificial Sequence
  Description of Artificial Sequence: Synthetic oligonucleotide
  Antisense strand to SEQ ID NO: 1864923
uccuucacauacauagguc

SEQ ID NO: 1864925 - RNA, 19 nt, Artificial Sequence
  Description of Artificial Sequence: Synthetic oligonucleotide
  Sense strand starting at position 1495 of SEQ ID NO: 1564237
ggaagagaguuuguccuuu

SEQ ID NO: 1864926 - RNA, 19 nt, Artificial Sequence
  Description of Artificial Sequence: Synthetic oligonucleotide
  Antisense strand to SEQ ID NO: 1864925
aaaggacaaacucucuucc

SEQ ID NO: 1864927 - RNA, 19 nt, Artificial Sequence
  Description of Artificial Sequence: Synthetic oligonucleotide
  Sense strand starting at position 1579 of SEQ ID NO: 1564237
aggauauugucucugguag

SEQ ID NO: 1864928 - RNA, 19 nt, Artificial Sequence
  Description of Artificial Sequence: Synthetic oligonucleotide
  Antisense strand to SEQ ID NO: 1864927
cuaccagagacaauauccu

SEQ ID NO: 1864929 - RNA, 19 nt, Artificial Sequence
  Description of Artificial Sequence: Synthetic oligonucleotide
  Sense strand starting at position 1580 of SEQ ID NO: 1564237
ggauauugucucugguagg

SEQ ID NO: 1864930 - RNA, 19 nt, Artificial Sequence
  Description of Artificial Sequence: Synthetic oligonucleotide
  Antisense strand to SEQ ID NO: 1864929
ccuaccagagacaauaucc

SEQ ID NO: 1864931 - RNA, 19 nt, Artificial Sequence
  Description of Artificial Sequence: Synthetic oligonucleotide
  Sense strand starting at position 1596 of SEQ ID NO: 1564237
agggccaguaaguaauauu

SEQ ID NO: 1864932 - RNA, 19 nt, Artificial Sequence
  Description of Artificial Sequence: Synthetic oligonucleotide
  Antisense strand to SEQ ID NO: 1864931
aauauuacuuacuggcccu

SEQ ID NO: 1864933 - RNA, 19 nt, Artificial Sequence
  Description of Artificial Sequence: Synthetic oligonucleotide
  Sense strand starting at position 1652 of SEQ ID NO: 1564237
cuguccaaauuaguaagau

SEQ ID NO: 1864934 - RNA, 19 nt, Artificial Sequence
  Description of Artificial Sequence: Synthetic oligonucleotide
  Antisense strand to SEQ ID NO: 1864933
aucuuacuaauuuggacag

SEQ ID NO: 1864935 - RNA, 19 nt, Artificial Sequence
  Description of Artificial Sequence: Synthetic oligonucleotide
  Sense strand starting at position 1664 of SEQ ID NO: 1564237
guaagaucaucacugcauu

SEQ ID NO: 1864936 - RNA, 19 nt, Artificial Sequence
  Description of Artificial Sequence: Synthetic oligonucleotide
  Antisense strand to SEQ ID NO: 1864935
aaugcagugaugaucuuac

SEQ ID NO: 1864937 - RNA, 19 nt, Artificial Sequence
  Description of Artificial Sequence: Synthetic oligonucleotide
  Sense strand starting at position 1715 of SEQ ID NO: 1564237
uacuaacgugugcacaaau

SEQ ID NO: 1864938 - RNA, 19 nt, Artificial Sequence
  Description of Artificial Sequence: Synthetic oligonucleotide
  Antisense strand to SEQ ID NO: 1864937
auuugugcacacguuagua

SEQ ID NO: 1864939 - RNA, 19 nt, Artificial Sequence
  Description of Artificial Sequence: Synthetic oligonucleotide
  Sense strand starting at position 1762 of SEQ ID NO: 1564237
cauuuacaguuguuucgau

SEQ ID NO: 1864940 - RNA, 19 nt, Artificial Sequence
  Description of Artificial Sequence: Synthetic oligonucleotide
  Antisense strand to SEQ ID NO: 1864939
aucgaaacaacuguaaaug

SEQ ID NO: 1864941 - RNA, 19 nt, Artificial Sequence
  Description of Artificial Sequence: Synthetic oligonucleotide
  Sense strand starting at position 1876 of SEQ ID NO: 1564237
uuggaaagcuuugcuaaag

SEQ ID NO: 1864942 - RNA, 19 nt, Artificial Sequence
  Description of Artificial Sequence: Synthetic oligonucleotide
  Antisense strand to SEQ ID NO: 1864941
cuuuagcaaagcuuuccaa

SEQ ID NO: 1864943 - RNA, 19 nt, Artificial Sequence
  Description of Artificial Sequence: Synthetic oligonucleotide
  Sense strand starting at position 1877 of SEQ ID NO: 1564237
uggaaagcuuugcuaaaga

SEQ ID NO: 1864944 - RNA, 19 nt, Artificial Sequence
  Description of Artificial Sequence: Synthetic oligonucleotide
  Antisense strand to SEQ ID NO: 1864943
ucuuuagcaaagcuuucca

SEQ ID NO: 1864945 - RNA, 19 nt, Artificial Sequence
  Description of Artificial Sequence: Synthetic oligonucleotide
  Sense strand starting at position 2000 of SEQ ID NO: 1564237
cuggcuaacuuccugaaau

SEQ ID NO: 1864946 - RNA, 19 nt, Artificial Sequence
  Description of Artificial Sequence: Synthetic oligonucleotide
  Antisense strand to SEQ ID NO: 1864945
auuucaggaaguuagccag

SEQ ID NO: 1864947 - RNA, 19 nt, Artificial Sequence
  Description of Artificial Sequence: Synthetic oligonucleotide
  Sense strand starting at position 2077 of SEQ ID NO: 1564237
aagggaacuugugauuucu

SEQ ID NO: 1864948 - RNA, 19 nt, Artificial Sequence
  Description of Artificial Sequence: Synthetic oligonucleotide
  Antisense strand to SEQ ID NO: 1864947
agaaaucacaaguucccuu

SEQ ID NO: 1864949 - RNA, 19 nt, Artificial Sequence
  Description of Artificial Sequence: Synthetic oligonucleotide
  Sense strand starting at position 2086 of SEQ ID NO: 1564237
ugugauuucuuagcuguug

SEQ ID NO: 1864950 - RNA, 19 nt, Artificial Sequence
  Description of Artificial Sequence: Synthetic oligonucleotide
  Antisense strand to SEQ ID NO: 1864949
caacagcuaagaaaucaca

SEQ ID NO: 1864951 - RNA, 19 nt, Artificial Sequence
  Description of Artificial Sequence: Synthetic oligonucleotide
  Sense strand starting at position 2113 of SEQ ID NO: 1564237
uuaauugacugugcuuuaa

SEQ ID NO: 1864952 - RNA, 19 nt, Artificial Sequence
  Description of Artificial Sequence: Synthetic oligonucleotide
  Antisense strand to SEQ ID NO: 1864951
uuaaagcacagucaauuaa

SEQ ID NO: 1864953 - RNA, 19 nt, Artificial Sequence
  Description of Artificial Sequence: Synthetic oligonucleotide
  Sense strand starting at position 2224 of SEQ ID NO: 1564237
uuguguauuuguguguaca

SEQ ID NO: 1864954 - RNA, 19 nt, Artificial Sequence
  Description of Artificial Sequence: Synthetic oligonucleotide
  Antisense strand to SEQ ID NO: 1864953
uguacacacaaauacacaa

SEQ ID NO: 1864955 - RNA, 19 nt, Artificial Sequence
  Description of Artificial Sequence: Synthetic oligonucleotide
  Sense strand starting at position 2345 of SEQ ID NO: 1564237
cucgucuuccuuguguaau

SEQ ID NO: 1864956 - RNA, 19 nt, Artificial Sequence
  Description of Artificial Sequence: Synthetic oligonucleotide
  Antisense strand to SEQ ID NO: 1864955
auuacacaaggaagacgag

SEQ ID NO: 1864957 - RNA, 19 nt, Artificial Sequence
  Description of Artificial Sequence: Synthetic oligonucleotide
  Sense strand starting at position 2369 of SEQ ID NO: 1564237
gauguaggcgaauaacaug

SEQ ID NO: 1864958 - RNA, 19 nt, Artificial Sequence
  Description of Artificial Sequence: Synthetic oligonucleotide
  Antisense strand to SEQ ID NO: 1864957
cauguuauucgccuacauc

SEQ ID NO: 1864959 - RNA, 19 nt, Artificial Sequence
  Description of Artificial Sequence: Synthetic oligonucleotide
  Sense strand starting at position 2399 of SEQ ID NO: 1564237
aucuuuguuccacaaguuu

SEQ ID NO: 1864960 - RNA, 19 nt, Artificial Sequence
  Description of Artificial Sequence: Synthetic oligonucleotide
  Antisense strand to SEQ ID NO: 1864959
aaacuuguggaacaaagau

SEQ ID NO: 1864961 - RNA, 19 nt, Artificial Sequence
  Description of Artificial Sequence: Synthetic oligonucleotide
  Sense strand starting at position 2521 of SEQ ID NO: 1564237
guaguauaagcucaaugag

SEQ ID NO: 1864962 - RNA, 19 nt, Artificial Sequence
  Description of Artificial Sequence: Synthetic oligonucleotide
  Antisense strand to SEQ ID NO: 1864961
cucauugagcuuauacuac

SEQ ID NO: 1864963 - RNA, 19 nt, Artificial Sequence
  Description of Artificial Sequence: Synthetic oligonucleotide
  Sense strand starting at position 2548 of SEQ ID NO: 1564237
guaugaacgagugagucaa

SEQ ID NO: 1864964 - RNA, 19 nt, Artificial Sequence
  Description of Artificial Sequence: Synthetic oligonucleotide
  Antisense strand to SEQ ID NO: 1864963
uugacucacucguucauac

SEQ ID NO: 1864965 - RNA, 19 nt, Artificial Sequence
  Description of Artificial Sequence: Synthetic oligonucleotide
  Sense strand starting at position 2560 of SEQ ID NO: 1564237
gagucaauggcugagcauu

SEQ ID NO: 1864966 - RNA, 19 nt, Artificial Sequence
  Description of Artificial Sequence: Synthetic oligonucleotide
  Antisense strand to SEQ ID NO: 1864965
aaugcucagccauugacuc

SEQ ID NO: 1864967 - RNA, 19 nt, Artificial Sequence
  Description of Artificial Sequence: Synthetic oligonucleotide
  Sense strand starting at position 2606 of SEQ ID NO: 1564237
gauuuagucugauaaaugg

SEQ ID NO: 1864968 - RNA, 19 nt, Artificial Sequence
  Description of Artificial Sequence: Synthetic oligonucleotide
  Antisense strand to SEQ ID NO: 1864967
ccauuuaucagacuaaauc

SEQ ID NO: 1864969 - RNA, 19 nt, Artificial Sequence
  Description of Artificial Sequence: Synthetic oligonucleotide
  Sense strand starting at position 2732 of SEQ ID NO: 1564237
uuagaugaacauuggcaau

SEQ ID NO: 1864970 - RNA, 19 nt, Artificial Sequence
  Description of Artificial Sequence: Synthetic oligonucleotide
  Antisense strand to SEQ ID NO: 1864969
auugccaauguucaucuaa

SEQ ID NO: 1864971 - RNA, 19 nt, Artificial Sequence
  Description of Artificial Sequence: Synthetic oligonucleotide
  Sense strand starting at position 2750 of SEQ ID NO: 1564237
uggauuugcugauacagaa

SEQ ID NO: 1864972 - RNA, 19 nt, Artificial Sequence
  Description of Artificial Sequence: Synthetic oligonucleotide
  Antisense strand to SEQ ID NO: 1864971
uucuguaucagcaaaucca

SEQ ID NO: 1864973 - RNA, 19 nt, Artificial Sequence
  Description of Artificial Sequence: Synthetic oligonucleotide
  Sense strand starting at position 2857 of SEQ ID NO: 1564237
acugccuucgauuauuauu

SEQ ID NO: 1864974 - RNA, 19 nt, Artificial Sequence
  Description of Artificial Sequence: Synthetic oligonucleotide
  Antisense strand to SEQ ID NO: 1864973
aauaauaaucgaaggcagu

SEQ ID NO: 1864975 - RNA, 19 nt, Artificial Sequence
  Description of Artificial Sequence: Synthetic oligonucleotide
  Sense strand starting at position 3042 of SEQ ID NO: 1564237
uuuagaacgggaugugaua

SEQ ID NO: 1864976 - RNA, 19 nt, Artificial Sequence
  Description of Artificial Sequence: Synthetic oligonucleotide
  Antisense strand to SEQ ID NO: 1864975
uaucacaucccguucuaaa

SEQ ID NO: 1864977 - RNA, 19 nt, Artificial Sequence
  Description of Artificial Sequence: Synthetic oligonucleotide
  Sense strand starting at position 3148 of SEQ ID NO: 1564237
uguggaacaccuuguuaug

SEQ ID NO: 1864978 - RNA, 19 nt, Artificial Sequence
  Description of Artificial Sequence: Synthetic oligonucleotide
  Antisense strand to SEQ ID NO: 1864977
cauaacaagguguuccaca

SEQ ID NO: 1864979 - RNA, 19 nt, Artificial Sequence
  Description of Artificial Sequence: Synthetic oligonucleotide
  Sense strand starting at position 3150 of SEQ ID NO: 1564237
uggaacaccuuguuaugaa

SEQ ID NO: 1864980 - RNA, 19 nt, Artificial Sequence
  Description of Artificial Sequence: Synthetic oligonucleotide
  Antisense strand to SEQ ID NO: 1864979
uucauaacaagguguucca

SEQ ID NO: 1864981 - RNA, 19 nt, Artificial Sequence
  Description of Artificial Sequence: Synthetic oligonucleotide
  Sense strand starting at position 3272 of SEQ ID NO: 1564237
aggugauuccugugacauc

SEQ ID NO: 1864982 - RNA, 19 nt, Artificial Sequence
  Description of Artificial Sequence: Synthetic oligonucleotide
  Antisense strand to SEQ ID NO: 1864981
gaugucacaggaaucaccu

SEQ ID NO: 1864983 - RNA, 19 nt, Artificial Sequence
  Description of Artificial Sequence: Synthetic oligonucleotide
  Sense strand starting at position 3421 of SEQ ID NO: 1564237
guaaguaagaauggaucga

SEQ ID NO: 1864984 - RNA, 19 nt, Artificial Sequence
  Description of Artificial Sequence: Synthetic oligonucleotide
  Antisense strand to SEQ ID NO: 1864983
ucgauccauucuuacuuac

SEQ ID NO: 1864985 - RNA, 19 nt, Artificial Sequence
  Description of Artificial Sequence: Synthetic oligonucleotide
  Sense strand starting at position 3778 of SEQ ID NO: 1564237
gagcaaggauccuuggaac

SEQ ID NO: 1864986 - RNA, 19 nt, Artificial Sequence
  Description of Artificial Sequence: Synthetic oligonucleotide
  Antisense strand to SEQ ID NO: 1864985
guuccaaggauccuugcuc

SEQ ID NO: 1864987 - RNA, 19 nt, Artificial Sequence
  Description of Artificial Sequence: Synthetic oligonucleotide
  Sense strand starting at position 3804 of SEQ ID NO: 1564237
uuugucagcuuucuagaaa

SEQ ID NO: 1864988 - RNA, 19 nt, Artificial Sequence
  Description of Artificial Sequence: Synthetic oligonucleotide
  Antisense strand to SEQ ID NO: 1864987
uuucuagaaagcugacaaa

SEQ ID NO: 1864989 - RNA, 19 nt, Artificial Sequence
  Description of Artificial Sequence: Synthetic oligonucleotide
  Sense strand starting at position 3866 of SEQ ID NO: 1564237
ccaauuguagaccagucaa

SEQ ID NO: 1864990 - RNA, 19 nt, Artificial Sequence
  Description of Artificial Sequence: Synthetic oligonucleotide
  Antisense strand to SEQ ID NO: 1864989
uugacuggucuacaauugg

SEQ ID NO: 1864991 - RNA, 19 nt, Artificial Sequence
  Description of Artificial Sequence: Synthetic oligonucleotide
  Sense strand starting at position 20 of SEQ ID NO: 1564238
caguguagaugagaaaguu

SEQ ID NO: 1864992 - RNA, 19 nt, Artificial Sequence
  Description of Artificial Sequence: Synthetic oligonucleotide
  Antisense strand to SEQ ID NO: 1864991
aacuuucucaucuacacug

SEQ ID NO: 1864993 - RNA, 19 nt, Artificial Sequence
  Description of Artificial Sequence: Synthetic oligonucleotide
  Sense strand starting at position 30 of SEQ ID NO: 1564238
gagaaaguuuaugcgacca

SEQ ID NO: 1864994 - RNA, 19 nt, Artificial Sequence
  Description of Artificial Sequence: Synthetic oligonucleotide
  Antisense strand to SEQ ID NO: 1864993
uggucgcauaaacuuucuc

SEQ ID NO: 1864995 - RNA, 19 nt, Artificial Sequence
  Description of Artificial Sequence: Synthetic oligonucleotide
  Sense strand starting at position 116 of SEQ ID NO: 1564238
augguccacugaugugauu

SEQ ID NO: 1864996 - RNA, 19 nt, Artificial Sequence
  Description of Artificial Sequence: Synthetic oligonucleotide
  Antisense strand to SEQ ID NO: 1864995
aaucacaucaguggaccau

SEQ ID NO: 1864997 - RNA, 19 nt, Artificial Sequence
  Description of Artificial Sequence: Synthetic oligonucleotide
  Sense strand starting at position 158 of SEQ ID NO: 1564238
uggaauuccugcuugugaa

SEQ ID NO: 1864998 - RNA, 19 nt, Artificial Sequence
  Description of Artificial Sequence: Synthetic oligonucleotide
  Antisense strand to SEQ ID NO: 1864997
uucacaagcaggaauucca

SEQ ID NO: 1864999 - RNA, 19 nt, Artificial Sequence
  Description of Artificial Sequence: Synthetic oligonucleotide
  Sense strand starting at position 159 of SEQ ID NO: 1564238
ggaauuccugcuugugaaa

SEQ ID NO: 1865000 - RNA, 19 nt, Artificial Sequence
  Description of Artificial Sequence: Synthetic oligonucleotide
  Antisense strand to SEQ ID NO: 1864999
uuucacaagcaggaauucc

SEQ ID NO: 1865001 - RNA, 19 nt, Artificial Sequence
  Description of Artificial Sequence: Synthetic oligonucleotide
  Sense strand starting at position 336 of SEQ ID NO: 1564238
ggcagccacucguuggaaa

SEQ ID NO: 1865002 - RNA, 19 nt, Artificial Sequence
  Description of Artificial Sequence: Synthetic oligonucleotide
  Antisense strand to SEQ ID NO: 1865001
uuuccaacgaguggcugcc

SEQ ID NO: 1865003 - RNA, 19 nt, Artificial Sequence
  Description of Artificial Sequence: Synthetic oligonucleotide
  Sense strand starting at position 406 of SEQ ID NO: 1564238
gaguguccugagcacauaa

SEQ ID NO: 1865004 - RNA, 19 nt, Artificial Sequence
  Description of Artificial Sequence: Synthetic oligonucleotide
  Antisense strand to SEQ ID NO: 1865003
uuaugugcucaggacacuc

SEQ ID NO: 1865005 - RNA, 19 nt, Artificial Sequence
  Description of Artificial Sequence: Synthetic oligonucleotide
  Sense strand starting at position 408 of SEQ ID NO: 1564238
guguccugagcacauaaau

SEQ ID NO: 1865006 - RNA, 19 nt, Artificial Sequence
  Description of Artificial Sequence: Synthetic oligonucleotide
  Antisense strand to SEQ ID NO: 1865005
auuuaugugcucaggacac

SEQ ID NO: 1865007 - RNA, 19 nt, Artificial Sequence
  Description of Artificial Sequence: Synthetic oligonucleotide
  Sense strand starting at position 426 of SEQ ID NO: 1564238
ugacucuuaucacuuagga

SEQ ID NO: 1865008 - RNA, 19 nt, Artificial Sequence
  Description of Artificial Sequence: Synthetic oligonucleotide
  Antisense strand to SEQ ID NO: 1865007
uccuaagugauaagaguca

SEQ ID NO: 1865009 - RNA, 19 nt, Artificial Sequence
  Description of Artificial Sequence: Synthetic oligonucleotide
  Sense strand starting at position 1179 of SEQ ID NO: 1564238
aggcaauugcaccgggaau

SEQ ID NO: 1865010 - RNA, 19 nt, Artificial Sequence
  Description of Artificial Sequence: Synthetic oligonucleotide
  Antisense strand to SEQ ID NO: 1865009
auucccggugcaauugccu

SEQ ID NO: 1865011 - RNA, 19 nt, Artificial Sequence
  Description of Artificial Sequence: Synthetic oligonucleotide
  Sense strand starting at position 1180 of SEQ ID NO: 1564238
ggcaauugcaccgggaauu

SEQ ID NO: 1865012 - RNA, 19 nt, Artificial Sequence
  Description of Artificial Sequence: Synthetic oligonucleotide
  Antisense strand to SEQ ID NO: 1865011
aauucccggugcaauugcc

SEQ ID NO: 1865013 - RNA, 19 nt, Artificial Sequence
  Description of Artificial Sequence: Synthetic oligonucleotide
  Sense strand starting at position 1181 of SEQ ID NO: 1564238
gcaauugcaccgggaauua

SEQ ID NO: 1865014 - RNA, 19 nt, Artificial Sequence
  Description of Artificial Sequence: Synthetic oligonucleotide
  Antisense strand to SEQ ID NO: 1865013
uaauucccggugcaauugc

SEQ ID NO: 1865015 - RNA, 19 nt, Artificial Sequence
  Description of Artificial Sequence: Synthetic oligonucleotide
  Sense strand starting at position 2405 of SEQ ID NO: 1564238
gggcacuucuuucuauacu

SEQ ID NO: 1865016 - RNA, 19 nt, Artificial Sequence
  Description of Artificial Sequence: Synthetic oligonucleotide
  Antisense strand to SEQ ID NO: 1865015
aguauagaaagaagugccc

SEQ ID NO: 1865017 - RNA, 19 nt, Artificial Sequence
  Description of Artificial Sequence: Synthetic oligonucleotide
  Sense strand starting at position 2475 of SEQ ID NO: 1564238
aagccuuucuaguaaugag

SEQ ID NO: 1865018 - RNA, 19 nt, Artificial Sequence
  Description of Artificial Sequence: Synthetic oligonucleotide
  Antisense strand to SEQ ID NO: 1865017
cucauuacuagaaaggcuu

SEQ ID NO: 1865019 - RNA, 19 nt, Artificial Sequence
  Description of Artificial Sequence: Synthetic oligonucleotide
  Sense strand starting at position 2843 of SEQ ID NO: 1564238
cagagcaguugcuuccuaa

SEQ ID NO: 1865020 - RNA, 19 nt, Artificial Sequence
  Description of Artificial Sequence: Synthetic oligonucleotide
  Antisense strand to SEQ ID NO: 1865019
uuaggaagcaacugcucug

SEQ ID NO: 1865021 - RNA, 19 nt, Artificial Sequence
  Description of Artificial Sequence: Synthetic oligonucleotide
  Sense strand starting at position 2885 of SEQ ID NO: 1564238
ggacuauaugaguguggag

SEQ ID NO: 1865022 - RNA, 19 nt, Artificial Sequence
  Description of Artificial Sequence: Synthetic oligonucleotide
  Antisense strand to SEQ ID NO: 1865021
cuccacacucauauagucc

SEQ ID NO: 1865023 - RNA, 19 nt, Artificial Sequence
  Description of Artificial Sequence: Synthetic oligonucleotide
  Sense strand starting at position 2887 of SEQ ID NO: 1564238
acuauaugaguguggagga

SEQ ID NO: 1865024 - RNA, 19 nt, Artificial Sequence
  Description of Artificial Sequence: Synthetic oligonucleotide
  Antisense strand to SEQ ID NO: 1865023
uccuccacacucauauagu

SEQ ID NO: 1865025 - RNA, 19 nt, Artificial Sequence
  Description of Artificial Sequence: Synthetic oligonucleotide
  Sense strand starting at position 3034 of SEQ ID NO: 1564238
ggaccuuccucauguuuau

SEQ ID NO: 1865026 - RNA, 19 nt, Artificial Sequence
  Description of Artificial Sequence: Synthetic oligonucleotide
  Antisense strand to SEQ ID NO: 1865025
auaaacaugaggaaggucc

SEQ ID NO: 1865027 - RNA, 19 nt, Artificial Sequence
  Description of Artificial Sequence: Synthetic oligonucleotide
  Sense strand starting at position 3065 of SEQ ID NO: 1564238
gaagacucacgaugaguua

SEQ ID NO: 1865028 - RNA, 19 nt, Artificial Sequence
  Description of Artificial Sequence: Synthetic oligonucleotide
  Antisense strand to SEQ ID NO: 1865027
uaacucaucgugagucuuc

SEQ ID NO: 1865029 - RNA, 19 nt, Artificial Sequence
  Description of Artificial Sequence: Synthetic oligonucleotide
  Sense strand starting at position 3068 of SEQ ID NO: 1564238
gacucacgaugaguuagaa

SEQ ID NO: 1865030 - RNA, 19 nt, Artificial Sequence
  Description of Artificial Sequence: Synthetic oligonucleotide
  Antisense strand to SEQ ID NO: 1865029
uucuaacucaucgugaguc

SEQ ID NO: 1865031 - RNA, 19 nt, Artificial Sequence
  Description of Artificial Sequence: Synthetic oligonucleotide
  Sense strand starting at position 3072 of SEQ ID NO: 1564238
cacgaugaguuagaagaau

SEQ ID NO: 1865032 - RNA, 19 nt, Artificial Sequence
  Description of Artificial Sequence: Synthetic oligonucleotide
  Antisense strand to SEQ ID NO: 1865031
auucuucuaacucaucgug

SEQ ID NO: 1865033 - RNA, 19 nt, Artificial Sequence
  Description of Artificial Sequence: Synthetic oligonucleotide
  Sense strand starting at position 3111 of SEQ ID NO: 1564238
gcaccuugccuaggaaaca

SEQ ID NO: 1865034 - RNA, 19 nt, Artificial Sequence
  Description of Artificial Sequence: Synthetic oligonucleotide
  Antisense strand to SEQ ID NO: 1865033
uguuuccuaggcaaggugc

SEQ ID NO: 1865035 - RNA, 19 nt, Artificial Sequence
  Description of Artificial Sequence: Synthetic oligonucleotide
  Sense strand starting at position 3178 of SEQ ID NO: 1564238
acuguauuaucaggccauc

SEQ ID NO: 1865036 - RNA, 19 nt, Artificial Sequence
  Description of Artificial Sequence: Synthetic oligonucleotide
  Antisense strand to SEQ ID NO: 1865035
gauggccugauaauacagu

SEQ ID NO: 1865037 - RNA, 19 nt, Artificial Sequence
  Description of Artificial Sequence: Synthetic oligonucleotide
  Sense strand starting at position 3241 of SEQ ID NO: 1564238
cagguagccuugucugacu

SEQ ID NO: 1865038 - RNA, 19 nt, Artificial Sequence
  Description of Artificial Sequence: Synthetic oligonucleotide
  Antisense strand to SEQ ID NO: 1865037
agucagacaaggcuaccug

SEQ ID NO: 1865039 - RNA, 19 nt, Artificial Sequence
  Description of Artificial Sequence: Synthetic oligonucleotide
  Sense strand starting at position 3249 of SEQ ID NO: 1564238
cuugucugacuccaaguuu

SEQ ID NO: 1865040 - RNA, 19 nt, Artificial Sequence
  Description of Artificial Sequence: Synthetic oligonucleotide
  Antisense strand to SEQ ID NO: 1865039
aaacuuggagucagacaag

SEQ ID NO: 1865041 - RNA, 19 nt, Artificial Sequence
  Description of Artificial Sequence: Synthetic oligonucleotide
  Sense strand starting at position 3278 of SEQ ID NO: 1564238
cuaccauaggccugauguu

SEQ ID NO: 1865042 - RNA, 19 nt, Artificial Sequence
  Description of Artificial Sequence: Synthetic oligonucleotide
  Antisense strand to SEQ ID NO: 1865041
aacaucaggccuaugguag

SEQ ID NO: 1865043 - RNA, 19 nt, Artificial Sequence
  Description of Artificial Sequence: Synthetic oligonucleotide
  Sense strand starting at position 3287 of SEQ ID NO: 1564238
gccugauguucuccaagug

SEQ ID NO: 1865044 - RNA, 19 nt, Artificial Sequence
  Description of Artificial Sequence: Synthetic oligonucleotide
  Antisense strand to SEQ ID NO: 1865043
cacuuggagaacaucaggc

SEQ ID NO: 1865045 - RNA, 19 nt, Artificial Sequence
  Description of Artificial Sequence: Synthetic oligonucleotide
  Sense strand starting at position 3288 of SEQ ID NO: 1564238
ccugauguucuccaagugu

SEQ ID NO: 1865046 - RNA, 19 nt, Artificial Sequence
  Description of Artificial Sequence: Synthetic oligonucleotide
  Antisense strand to SEQ ID NO: 1865045
acacuuggagaacaucagg

SEQ ID NO: 1865047 - RNA, 19 nt, Artificial Sequence
  Description of Artificial Sequence: Synthetic oligonucleotide
  Sense strand starting at position 3292 of SEQ ID NO: 1564238
auguucuccaagugucaga

SEQ ID NO: 1865048 - RNA, 19 nt, Artificial Sequence
  Description of Artificial Sequence: Synthetic oligonucleotide
  Antisense strand to SEQ ID NO: 1865047
ucugacacuuggagaacau

SEQ ID NO: 1865049 - RNA, 19 nt, Artificial Sequence
  Description of Artificial Sequence: Synthetic oligonucleotide
  Sense strand starting at position 3299 of SEQ ID NO: 1564238
ccaagugucagaggcguua

SEQ ID NO: 1865050 - RNA, 19 nt, Artificial Sequence
  Description of Artificial Sequence: Synthetic oligonucleotide
  Antisense strand to SEQ ID NO: 1865049
uaacgccucugacacuugg

SEQ ID NO: 1865051 - RNA, 19 nt, Artificial Sequence
  Description of Artificial Sequence: Synthetic oligonucleotide
  Sense strand starting at position 3301 of SEQ ID NO: 1564238
aagugucagaggcguuaga

SEQ ID NO: 1865052 - RNA, 19 nt, Artificial Sequence
  Description of Artificial Sequence: Synthetic oligonucleotide
  Antisense strand to SEQ ID NO: 1865051
ucuaacgccucugacacuu

SEQ ID NO: 1865053 - RNA, 19 nt, Artificial Sequence
  Description of Artificial Sequence: Synthetic oligonucleotide
  Sense strand starting at position 3404 of SEQ ID NO: 1564238
caagucacgggaugagaua

SEQ ID NO: 1865054 - RNA, 19 nt, Artificial Sequence
  Description of Artificial Sequence: Synthetic oligonucleotide
  Antisense strand to SEQ ID NO: 1865053
uaucucaucccgugacuug

SEQ ID NO: 1865055 - RNA, 19 nt, Artificial Sequence
  Description of Artificial Sequence: Synthetic oligonucleotide
  Sense strand starting at position 3437 of SEQ ID NO: 1564238
gauuauaggucacaaagac

SEQ ID NO: 1865056 - RNA, 19 nt, Artificial Sequence
  Description of Artificial Sequence: Synthetic oligonucleotide
  Antisense strand to SEQ ID NO: 1865055
gucuuugugaccuauaauc

SEQ ID NO: 1865057 - RNA, 19 nt, Artificial Sequence
  Description of Artificial Sequence: Synthetic oligonucleotide
  Sense strand starting at position 3520 of SEQ ID NO: 1564238
gacaguuaccucuggucgu

SEQ ID NO: 1865058 - RNA, 19 nt, Artificial Sequence
  Description of Artificial Sequence: Synthetic oligonucleotide
  Antisense strand to SEQ ID NO: 1865057
acgaccagagguaacuguc

SEQ ID NO: 1865059 - RNA, 19 nt, Artificial Sequence
  Description of Artificial Sequence: Synthetic oligonucleotide
  Sense strand starting at position 3724 of SEQ ID NO: 1564238
ccauaagaauuaucaguug

SEQ ID NO: 1865060 - RNA, 19 nt, Artificial Sequence
  Description of Artificial Sequence: Synthetic oligonucleotide
  Antisense strand to SEQ ID NO: 1865059
caacugauaauucuuaugg

SEQ ID NO: 1865061 - RNA, 19 nt, Artificial Sequence
  Description of Artificial Sequence: Synthetic oligonucleotide
  Sense strand starting at position 3727 of SEQ ID NO: 1564238
uaagaauuaucaguugagc

SEQ ID NO: 1865062 - RNA, 19 nt, Artificial Sequence
  Description of Artificial Sequence: Synthetic oligonucleotide
  Antisense strand to SEQ ID NO: 1865061
gcucaacugauaauucuua

SEQ ID NO: 1865063 - RNA, 19 nt, Artificial Sequence
  Description of Artificial Sequence: Synthetic oligonucleotide
  Sense strand starting at position 3729 of SEQ ID NO: 1564238
agaauuaucaguugagcag

SEQ ID NO: 1865064 - RNA, 19 nt, Artificial Sequence
  Description of Artificial Sequence: Synthetic oligonucleotide
  Antisense strand to SEQ ID NO: 1865063
cugcucaacugauaauucu

SEQ ID NO: 1865065 - RNA, 19 nt, Artificial Sequence
  Description of Artificial Sequence: Synthetic oligonucleotide
  Sense strand starting at position 3803 of SEQ ID NO: 1564238
auagacuugcuuugacuuu

SEQ ID NO: 1865066 - RNA, 19 nt, Artificial Sequence
  Description of Artificial Sequence: Synthetic oligonucleotide
  Antisense strand to SEQ ID NO: 1865065
aaagucaaagcaagucuau

SEQ ID NO: 1865067 - RNA, 19 nt, Artificial Sequence
  Description of Artificial Sequence: Synthetic oligonucleotide
  Sense strand starting at position 3841 of SEQ ID NO: 1564238
cccgaauucuugcuagagg

SEQ ID NO: 1865068 - RNA, 19 nt, Artificial Sequence
  Description of Artificial Sequence: Synthetic oligonucleotide
  Antisense strand to SEQ ID NO: 1865067
ccucuagcaagaauucggg

SEQ ID NO: 1865069 - RNA, 19 nt, Artificial Sequence
  Description of Artificial Sequence: Synthetic oligonucleotide
  Sense strand starting at position 3842 of SEQ ID NO: 1564238
ccgaauucuugcuagaggu

SEQ ID NO: 1865070 - RNA, 19 nt, Artificial Sequence
  Description of Artificial Sequence: Synthetic oligonucleotide
  Antisense strand to SEQ ID NO: 1865069
accucuagcaagaauucgg

SEQ ID NO: 1865071 - RNA, 19 nt, Artificial Sequence
  Description of Artificial Sequence: Synthetic oligonucleotide
  Sense strand starting at position 119 of SEQ ID NO: 1564239
gguccucacccagauuauu

SEQ ID NO: 1865072 - RNA, 19 nt, Artificial Sequence
  Description of Artificial Sequence: Synthetic oligonucleotide
  Antisense strand to SEQ ID NO: 1865071
aauaaucugggugaggacc

SEQ ID NO: 1865073 - RNA, 19 nt, Artificial Sequence
  Description of Artificial Sequence: Synthetic oligonucleotide
  Sense strand starting at position 197 of SEQ ID NO: 1564239
gguggaagucgaugaggua

SEQ ID NO: 1865074 - RNA, 19 nt, Artificial Sequence
  Description of Artificial Sequence: Synthetic oligonucleotide
  Antisense strand to SEQ ID NO: 1865073
uaccucaucgacuuccacc

SEQ ID NO: 1865075 - RNA, 19 nt, Artificial Sequence
  Description of Artificial Sequence: Synthetic oligonucleotide
  Sense strand starting at position 198 of SEQ ID NO: 1564239
guggaagucgaugagguaa

SEQ ID NO: 1865076 - RNA, 19 nt, Artificial Sequence
  Description of Artificial Sequence: Synthetic oligonucleotide
  Antisense strand to SEQ ID NO: 1865075
uuaccucaucgacuuccac

SEQ ID NO: 1865077 - RNA, 19 nt, Artificial Sequence
  Description of Artificial Sequence: Synthetic oligonucleotide
  Sense strand starting at position 257 of SEQ ID NO: 1564239
gagacagaaugacaguaau

SEQ ID NO: 1865078 - RNA, 19 nt, Artificial Sequence
  Description of Artificial Sequence: Synthetic oligonucleotide
  Antisense strand to SEQ ID NO: 1865077
auuacugucauucugucuc

SEQ ID NO: 1865079 - RNA, 19 nt, Artificial Sequence
  Description of Artificial Sequence: Synthetic oligonucleotide
  Sense strand starting at position 271 of SEQ ID NO: 1564239
guaauaggauggagagguu

SEQ ID NO: 1865080 - RNA, 19 nt, Artificial Sequence
  Description of Artificial Sequence: Synthetic oligonucleotide
  Antisense strand to SEQ ID NO: 1865079
aaccucuccauccuauuac

SEQ ID NO: 1865081 - RNA, 19 nt, Artificial Sequence
  Description of Artificial Sequence: Synthetic oligonucleotide
  Sense strand starting at position 305 of SEQ ID NO: 1564239
acccucucaccauagugau

SEQ ID NO: 1865082 - RNA, 19 nt, Artificial Sequence
  Description of Artificial Sequence: Synthetic oligonucleotide
  Antisense strand to SEQ ID NO: 1865081
aucacuauggugagagggu

SEQ ID NO: 1865083 - RNA, 19 nt, Artificial Sequence
  Description of Artificial Sequence: Synthetic oligonucleotide
  Sense strand starting at position 499 of SEQ ID NO: 1564239
caguguagaugagaaaguu

SEQ ID NO: 1865084 - RNA, 19 nt, Artificial Sequence
  Description of Artificial Sequence: Synthetic oligonucleotide
  Antisense strand to SEQ ID NO: 1865083
aacuuucucaucuacacug

SEQ ID NO: 1865085 - RNA, 19 nt, Artificial Sequence
  Description of Artificial Sequence: Synthetic oligonucleotide
  Sense strand starting at position 509 of SEQ ID NO: 1564239
gagaaaguuuaugcgacca

SEQ ID NO: 1865086 - RNA, 19 nt, Artificial Sequence
  Description of Artificial Sequence: Synthetic oligonucleotide
  Antisense strand to SEQ ID NO: 1865085
uggucgcauaaacuuucuc

SEQ ID NO: 1865087 - RNA, 19 nt, Artificial Sequence
  Description of Artificial Sequence: Synthetic oligonucleotide
  Sense strand starting at position 595 of SEQ ID NO: 1564239
augguccacugaugugauu

SEQ ID NO: 1865088 - RNA, 19 nt, Artificial Sequence
  Description of Artificial Sequence: Synthetic oligonucleotide
  Antisense strand to SEQ ID NO: 1865087
aaucacaucaguggaccau

SEQ ID NO: 1865089 - RNA, 19 nt, Artificial Sequence
  Description of Artificial Sequence: Synthetic oligonucleotide
  Sense strand starting at position 637 of SEQ ID NO: 1564239
uggaauuccugcuugugaa

SEQ ID NO: 1865090 - RNA, 19 nt, Artificial Sequence
  Description of Artificial Sequence: Synthetic oligonucleotide
  Antisense strand to SEQ ID NO: 1865089
uucacaagcaggaauucca

SEQ ID NO: 1865091 - RNA, 19 nt, Artificial Sequence
  Description of Artificial Sequence: Synthetic oligonucleotide
  Sense strand starting at position 638 of SEQ ID NO: 1564239
ggaauuccugcuugugaaa

SEQ ID NO: 1865092 - RNA, 19 nt, Artificial Sequence
  Description of Artificial Sequence: Synthetic oligonucleotide
  Antisense strand to SEQ ID NO: 1865091
uuucacaagcaggaauucc

SEQ ID NO: 1865093 - RNA, 19 nt, Artificial Sequence
  Description of Artificial Sequence: Synthetic oligonucleotide
  Sense strand starting at position 815 of SEQ ID NO: 1564239
ggcagccacucguuggaaa

SEQ ID NO: 1865094 - RNA, 19 nt, Artificial Sequence
  Description of Artificial Sequence: Synthetic oligonucleotide
  Antisense strand to SEQ ID NO: 1865093
uuuccaacgaguggcugcc

SEQ ID NO: 1865095 - RNA, 19 nt, Artificial Sequence
  Description of Artificial Sequence: Synthetic oligonucleotide
  Sense strand starting at position 885 of SEQ ID NO: 1564239
gaguguccugagcacauaa

SEQ ID NO: 1865096 - RNA, 19 nt, Artificial Sequence
  Description of Artificial Sequence: Synthetic oligonucleotide
  Antisense strand to SEQ ID NO: 1865095
uuaugugcucaggacacuc

SEQ ID NO: 1865097 - RNA, 19 nt, Artificial Sequence
  Description of Artificial Sequence: Synthetic oligonucleotide
  Sense strand starting at position 887 of SEQ ID NO: 1564239
guguccugagcacauaaau

SEQ ID NO: 1865098 - RNA, 19 nt, Artificial Sequence
  Description of Artificial Sequence: Synthetic oligonucleotide
  Antisense strand to SEQ ID NO: 1865097
auuuaugugcucaggacac

SEQ ID NO: 1865099 - RNA, 19 nt, Artificial Sequence
  Description of Artificial Sequence: Synthetic oligonucleotide
  Sense strand starting at position 905 of SEQ ID NO: 1564239
ugacucuuaucacuuagga

SEQ ID NO: 1865100 - RNA, 19 nt, Artificial Sequence
  Description of Artificial Sequence: Synthetic oligonucleotide
  Antisense strand to SEQ ID NO: 1865099
uccuaagugauaagaguca

SEQ ID NO: 1865101 - RNA, 19 nt, Artificial Sequence
  Description of Artificial Sequence: Synthetic oligonucleotide
  Sense strand starting at position 1658 of SEQ ID NO: 1564239
aggcaauugcaccgggaau

SEQ ID NO: 1865102 - RNA, 19 nt, Artificial Sequence
  Description of Artificial Sequence: Synthetic oligonucleotide
  Antisense strand to SEQ ID NO: 1865101
auucccggugcaauugccu

SEQ ID NO: 1865103 - RNA, 19 nt, Artificial Sequence
  Description of Artificial Sequence: Synthetic oligonucleotide
  Sense strand starting at position 1659 of SEQ ID NO: 1564239
ggcaauugcaccgggaauu

SEQ ID NO: 1865104 - RNA, 19 nt, Artificial Sequence
  Description of Artificial Sequence: Synthetic oligonucleotide
  Antisense strand to SEQ ID NO: 1865103
aauucccggugcaauugcc

SEQ ID NO: 1865105 - RNA, 19 nt, Artificial Sequence
  Description of Artificial Sequence: Synthetic oligonucleotide
  Sense strand starting at position 1660 of SEQ ID NO: 1564239
gcaauugcaccgggaauua

SEQ ID NO: 1865106 - RNA, 19 nt, Artificial Sequence
  Description of Artificial Sequence: Synthetic oligonucleotide
  Antisense strand to SEQ ID NO: 1865105
uaauucccggugcaauugc

SEQ ID NO: 1865107 - RNA, 19 nt, Artificial Sequence
  Description of Artificial Sequence: Synthetic oligonucleotide
  Sense strand starting at position 2884 of SEQ ID NO: 1564239
gggcacuucuuucuauacu

SEQ ID NO: 1865108 - RNA, 19 nt, Artificial Sequence
  Description of Artificial Sequence: Synthetic oligonucleotide
  Antisense strand to SEQ ID NO: 1865107
aguauagaaagaagugccc

SEQ ID NO: 1865109 - RNA, 19 nt, Artificial Sequence
  Description of Artificial Sequence: Synthetic oligonucleotide
  Sense strand starting at position 2954 of SEQ ID NO: 1564239
aagccuuucuaguaaugag

SEQ ID NO: 1865110 - RNA, 19 nt, Artificial Sequence
  Description of Artificial Sequence: Synthetic oligonucleotide
  Antisense strand to SEQ ID NO: 1865109
cucauuacuagaaaggcuu

SEQ ID NO: 1865111 - RNA, 19 nt, Artificial Sequence
  Description of Artificial Sequence: Synthetic oligonucleotide
  Sense strand starting at position 3322 of SEQ ID NO: 1564239
cagagcaguugcuuccuaa

SEQ ID NO: 1865112 - RNA, 19 nt, Artificial Sequence
  Description of Artificial Sequence: Synthetic oligonucleotide
  Antisense strand to SEQ ID NO: 1865111
uuaggaagcaacugcucug

SEQ ID NO: 1865113 - RNA, 19 nt, Artificial Sequence
  Description of Artificial Sequence: Synthetic oligonucleotide
  Sense strand starting at position 3326 of SEQ ID NO: 1564239
gcaguugcuuccuaaccua

SEQ ID NO: 1865114 - RNA, 19 nt, Artificial Sequence
  Description of Artificial Sequence: Synthetic oligonucleotide
  Antisense strand to SEQ ID NO: 1865113
uagguuaggaagcaacugc

SEQ ID NO: 1865115 - RNA, 19 nt, Artificial Sequence
  Description of Artificial Sequence: Synthetic oligonucleotide
  Sense strand starting at position 3364 of SEQ ID NO: 1564239
ggacuauaugaguguggag

SEQ ID NO: 1865116 - RNA, 19 nt, Artificial Sequence
  Description of Artificial Sequence: Synthetic oligonucleotide
  Antisense strand to SEQ ID NO: 1865115
cuccacacucauauagucc

SEQ ID NO: 1865117 - RNA, 19 nt, Artificial Sequence
  Description of Artificial Sequence: Synthetic oligonucleotide
  Sense strand starting at position 3366 of SEQ ID NO: 1564239
acuauaugaguguggagga

SEQ ID NO: 1865118 - RNA, 19 nt, Artificial Sequence
  Description of Artificial Sequence: Synthetic oligonucleotide
  Antisense strand to SEQ ID NO: 1865117
uccuccacacucauauagu

SEQ ID NO: 1865119 - RNA, 19 nt, Artificial Sequence
  Description of Artificial Sequence: Synthetic oligonucleotide
  Sense strand starting at position 3513 of SEQ ID NO: 1564239
ggaccuuccucauguuuau

SEQ ID NO: 1865120 - RNA, 19 nt, Artificial Sequence
  Description of Artificial Sequence: Synthetic oligonucleotide
  Antisense strand to SEQ ID NO: 1865119
auaaacaugaggaaggucc

SEQ ID NO: 1865121 - RNA, 19 nt, Artificial Sequence
  Description of Artificial Sequence: Synthetic oligonucleotide
  Sense strand starting at position 3544 of SEQ ID NO: 1564239
gaagacucacgaugaguua

SEQ ID NO: 1865122 - RNA, 19 nt, Artificial Sequence
  Description of Artificial Sequence: Synthetic oligonucleotide
  Antisense strand to SEQ ID NO: 1865121
uaacucaucgugagucuuc

SEQ ID NO: 1865123 - RNA, 19 nt, Artificial Sequence
  Description of Artificial Sequence: Synthetic oligonucleotide
  Sense strand starting at position 3547 of SEQ ID NO: 1564239
gacucacgaugaguuagaa

SEQ ID NO: 1865124 - RNA, 19 nt, Artificial Sequence
  Description of Artificial Sequence: Synthetic oligonucleotide
  Antisense strand to SEQ ID NO: 1865123
uucuaacucaucgugaguc

SEQ ID NO: 1865125 - RNA, 19 nt, Artificial Sequence
  Description of Artificial Sequence: Synthetic oligonucleotide
  Sense strand starting at position 3551 of SEQ ID NO: 1564239
cacgaugaguuagaagaau

SEQ ID NO: 1865126 - RNA, 19 nt, Artificial Sequence
  Description of Artificial Sequence: Synthetic oligonucleotide
  Antisense strand to SEQ ID NO: 1865125
auucuucuaacucaucgug

SEQ ID NO: 1865127 - RNA, 19 nt, Artificial Sequence
  Description of Artificial Sequence: Synthetic oligonucleotide
  Sense strand starting at position 3590 of SEQ ID NO: 1564239
gcaccuugccuaggaaaca

SEQ ID NO: 1865128 - RNA, 19 nt, Artificial Sequence
  Description of Artificial Sequence: Synthetic oligonucleotide
  Antisense strand to SEQ ID NO: 1865127
uguuuccuaggcaaggugc

SEQ ID NO: 1865129 - RNA, 19 nt, Artificial Sequence
  Description of Artificial Sequence: Synthetic oligonucleotide
  Sense strand starting at position 3657 of SEQ ID NO: 1564239
acuguauuaucaggccauc

SEQ ID NO: 1865130 - RNA, 19 nt, Artificial Sequence
  Description of Artificial Sequence: Synthetic oligonucleotide
  Antisense strand to SEQ ID NO: 1865129
gauggccugauaauacagu

SEQ ID NO: 1865131 - RNA, 19 nt, Artificial Sequence
  Description of Artificial Sequence: Synthetic oligonucleotide
  Sense strand starting at position 3720 of SEQ ID NO: 1564239
cagguagccuugucugacu

SEQ ID NO: 1865132 - RNA, 19 nt, Artificial Sequence
  Description of Artificial Sequence: Synthetic oligonucleotide
  Antisense strand to SEQ ID NO: 1865131
agucagacaaggcuaccug

SEQ ID NO: 1865133 - RNA, 19 nt, Artificial Sequence
  Description of Artificial Sequence: Synthetic oligonucleotide
  Sense strand starting at position 3728 of SEQ ID NO: 1564239
cuugucugacuccaaguuu

SEQ ID NO: 1865134 - RNA, 19 nt, Artificial Sequence
  Description of Artificial Sequence: Synthetic oligonucleotide
  Antisense strand to SEQ ID NO: 1865133
aaacuuggagucagacaag

SEQ ID NO: 1865135 - RNA, 19 nt, Artificial Sequence
  Description of Artificial Sequence: Synthetic oligonucleotide
  Sense strand starting at position 3757 of SEQ ID NO: 1564239
cuaccauaggccugauguu

SEQ ID NO: 1865136 - RNA, 19 nt, Artificial Sequence
  Description of Artificial Sequence: Synthetic oligonucleotide
  Antisense strand to SEQ ID NO: 1865135
aacaucaggccuaugguag

SEQ ID NO: 1865137 - RNA, 19 nt, Artificial Sequence
  Description of Artificial Sequence: Synthetic oligonucleotide
  Sense strand starting at position 3766 of SEQ ID NO: 1564239
gccugauguucuccaagug

SEQ ID NO: 1865138 - RNA, 19 nt, Artificial Sequence
  Description of Artificial Sequence: Synthetic oligonucleotide
  Antisense strand to SEQ ID NO: 1865137
cacuuggagaacaucaggc

SEQ ID NO: 1865139 - RNA, 19 nt, Artificial Sequence
  Description of Artificial Sequence: Synthetic oligonucleotide
  Sense strand starting at position 3767 of SEQ ID NO: 1564239
ccugauguucuccaagugu

SEQ ID NO: 1865140 - RNA, 19 nt, Artificial Sequence
  Description of Artificial Sequence: Synthetic oligonucleotide
  Antisense strand to SEQ ID NO: 1865139
acacuuggagaacaucagg

SEQ ID NO: 1865141 - RNA, 19 nt, Artificial Sequence
  Description of Artificial Sequence: Synthetic oligonucleotide
  Sense strand starting at position 3771 of SEQ ID NO: 1564239
auguucuccaagugucaga

SEQ ID NO: 1865142 - RNA, 19 nt, Artificial Sequence
  Description of Artificial Sequence: Synthetic oligonucleotide
  Antisense strand to SEQ ID NO: 1865141
ucugacacuuggagaacau

SEQ ID NO: 1865143 - RNA, 19 nt, Artificial Sequence
  Description of Artificial Sequence: Synthetic oligonucleotide
  Sense strand starting at position 3778 of SEQ ID NO: 1564239
ccaagugucagaggcguua

SEQ ID NO: 1865144 - RNA, 19 nt, Artificial Sequence
  Description of Artificial Sequence: Synthetic oligonucleotide
  Antisense strand to SEQ ID NO: 1865143
uaacgccucugacacuugg

SEQ ID NO: 1865145 - RNA, 19 nt, Artificial Sequence
  Description of Artificial Sequence: Synthetic oligonucleotide
  Sense strand starting at position 3780 of SEQ ID NO: 1564239
aagugucagaggcguuaga

SEQ ID NO: 1865146 - RNA, 19 nt, Artificial Sequence
  Description of Artificial Sequence: Synthetic oligonucleotide
  Antisense strand to SEQ ID NO: 1865145
ucuaacgccucugacacuu

SEQ ID NO: 1865147 - RNA, 19 nt, Artificial Sequence
  Description of Artificial Sequence: Synthetic oligonucleotide
  Sense strand starting at position 3883 of SEQ ID NO: 1564239
caagucacgggaugagaua

SEQ ID NO: 1865148 - RNA, 19 nt, Artificial Sequence
  Description of Artificial Sequence: Synthetic oligonucleotide
  Antisense strand to SEQ ID NO: 1865147
uaucucaucccgugacuug

SEQ ID NO: 1865149 - RNA, 19 nt, Artificial Sequence
  Description of Artificial Sequence: Synthetic oligonucleotide
  Sense strand starting at position 3916 of SEQ ID NO: 1564239
gauuauaggucacaaagac

SEQ ID NO: 1865150 - RNA, 19 nt, Artificial Sequence
  Description of Artificial Sequence: Synthetic oligonucleotide
  Antisense strand to SEQ ID NO: 1865149
gucuuugugaccuauaauc

SEQ ID NO: 1865151 - RNA, 19 nt, Artificial Sequence
  Description of Artificial Sequence: Synthetic oligonucleotide
  Sense strand starting at position 50 of SEQ ID NO: 1564240
agauaagugaguugcccaa

SEQ ID NO: 1865152 - RNA, 19 nt, Artificial Sequence
  Description of Artificial Sequence: Synthetic oligonucleotide
  Antisense strand to SEQ ID NO: 1865151
uugggcaacucacuuaucu

SEQ ID NO: 1865153 - RNA, 19 nt, Artificial Sequence
  Description of Artificial Sequence: Synthetic oligonucleotide
  Sense strand starting at position 242 of SEQ ID NO: 1564240
cgaagccaacaaugauaau

SEQ ID NO: 1865154 - RNA, 19 nt, Artificial Sequence
  Description of Artificial Sequence: Synthetic oligonucleotide
  Antisense strand to SEQ ID NO: 1865153
auuaucauuguuggcuucg

SEQ ID NO: 1865155 - RNA, 19 nt, Artificial Sequence
  Description of Artificial Sequence: Synthetic oligonucleotide
  Sense strand starting at position 491 of SEQ ID NO: 1564240
aaggcaucuuaaguguaca

SEQ ID NO: 1865156 - RNA, 19 nt, Artificial Sequence
  Description of Artificial Sequence: Synthetic oligonucleotide
  Antisense strand to SEQ ID NO: 1865155
uguacacuuaagaugccuu

SEQ ID NO: 1865157 - RNA, 19 nt, Artificial Sequence
  Description of Artificial Sequence: Synthetic oligonucleotide
  Sense strand starting at position 617 of SEQ ID NO: 1564240
aacggauacuccuuucgga

SEQ ID NO: 1865158 - RNA, 19 nt, Artificial Sequence
  Description of Artificial Sequence: Synthetic oligonucleotide
  Antisense strand to SEQ ID NO: 1865157
uccgaaaggaguauccguu

SEQ ID NO: 1865159 - RNA, 19 nt, Artificial Sequence
  Description of Artificial Sequence: Synthetic oligonucleotide
  Sense strand starting at position 624 of SEQ ID NO: 1564240
acuccuuucggagaguagu

SEQ ID NO: 1865160 - RNA, 19 nt, Artificial Sequence
  Description of Artificial Sequence: Synthetic oligonucleotide
  Antisense strand to SEQ ID NO: 1865159
acuacucuccgaaaggagu

SEQ ID NO: 1865161 - RNA, 19 nt, Artificial Sequence
  Description of Artificial Sequence: Synthetic oligonucleotide
  Sense strand starting at position 639 of SEQ ID NO: 1564240
uagugcauuuaagagauca

SEQ ID NO: 1865162 - RNA, 19 nt, Artificial Sequence
  Description of Artificial Sequence: Synthetic oligonucleotide
  Antisense strand to SEQ ID NO: 1865161
ugaucucuuaaaugcacua

SEQ ID NO: 1865163 - RNA, 19 nt, Artificial Sequence
  Description of Artificial Sequence: Synthetic oligonucleotide
  Sense strand starting at position 740 of SEQ ID NO: 1564240
agucuuugggcucaguuua

SEQ ID NO: 1865164 - RNA, 19 nt, Artificial Sequence
  Description of Artificial Sequence: Synthetic oligonucleotide
  Antisense strand to SEQ ID NO: 1865163
uaaacugagcccaaagacu

SEQ ID NO: 1865165 - RNA, 19 nt, Artificial Sequence
  Description of Artificial Sequence: Synthetic oligonucleotide
  Sense strand starting at position 753 of SEQ ID NO: 1564240
aguuuaguuccacaaacau

SEQ ID NO: 1865166 - RNA, 19 nt, Artificial Sequence
  Description of Artificial Sequence: Synthetic oligonucleotide
  Antisense strand to SEQ ID NO: 1865165
auguuuguggaacuaaacu

SEQ ID NO: 1865167 - RNA, 19 nt, Artificial Sequence
  Description of Artificial Sequence: Synthetic oligonucleotide
  Sense strand starting at position 772 of SEQ ID NO: 1564240
uuuauaugugccuacuaug

SEQ ID NO: 1865168 - RNA, 19 nt, Artificial Sequence
  Description of Artificial Sequence: Synthetic oligonucleotide
  Antisense strand to SEQ ID NO: 1865167
cauaguaggcacauauaaa

SEQ ID NO: 1865169 - RNA, 19 nt, Artificial Sequence
  Description of Artificial Sequence: Synthetic oligonucleotide
  Sense strand starting at position 1635 of SEQ ID NO: 1564240
gguugaaguccuggaagag

SEQ ID NO: 1865170 - RNA, 19 nt, Artificial Sequence
  Description of Artificial Sequence: Synthetic oligonucleotide
  Antisense strand to SEQ ID NO: 1865169
cucuuccaggacuucaacc

SEQ ID NO: 1865171 - RNA, 19 nt, Artificial Sequence
  Description of Artificial Sequence: Synthetic oligonucleotide
  Sense strand starting at position 2313 of SEQ ID NO: 1564240
uccagauaugcuggcuauu

SEQ ID NO: 1865172 - RNA, 19 nt, Artificial Sequence
  Description of Artificial Sequence: Synthetic oligonucleotide
  Antisense strand to SEQ ID NO: 1865171
aauagccagcauaucugga

SEQ ID NO: 1865173 - RNA, 19 nt, Artificial Sequence
  Description of Artificial Sequence: Synthetic oligonucleotide
  Sense strand starting at position 2494 of SEQ ID NO: 1564240
cuuggauccugucuaaacu

SEQ ID NO: 1865174 - RNA, 19 nt, Artificial Sequence
  Description of Artificial Sequence: Synthetic oligonucleotide
  Antisense strand to SEQ ID NO: 1865173
aguuuagacaggauccaag

SEQ ID NO: 1865175 - RNA, 19 nt, Artificial Sequence
  Description of Artificial Sequence: Synthetic oligonucleotide
  Sense strand starting at position 2495 of SEQ ID NO: 1564240
uuggauccugucuaaacuu

SEQ ID NO: 1865176 - RNA, 19 nt, Artificial Sequence
  Description of Artificial Sequence: Synthetic oligonucleotide
  Antisense strand to SEQ ID NO: 1865175
aaguuuagacaggauccaa

SEQ ID NO: 1865177 - RNA, 19 nt, Artificial Sequence
  Description of Artificial Sequence: Synthetic oligonucleotide
  Sense strand starting at position 2503 of SEQ ID NO: 1564240
ugucuaaacuuugugguca

SEQ ID NO: 1865178 - RNA, 19 nt, Artificial Sequence
  Description of Artificial Sequence: Synthetic oligonucleotide
  Antisense strand to SEQ ID NO: 1865177
ugaccacaaaguuuagaca

SEQ ID NO: 1865179 - RNA, 19 nt, Artificial Sequence
  Description of Artificial Sequence: Synthetic oligonucleotide
  Sense strand starting at position 2593 of SEQ ID NO: 1564240
agucaacaucuuugagucu

SEQ ID NO: 1865180 - RNA, 19 nt, Artificial Sequence
  Description of Artificial Sequence: Synthetic oligonucleotide
  Antisense strand to SEQ ID NO: 1865179
agacucaaagauguugacu

SEQ ID NO: 1865181 - RNA, 19 nt, Artificial Sequence
  Description of Artificial Sequence: Synthetic oligonucleotide
  Sense strand starting at position 2660 of SEQ ID NO: 1564240
gcguguuaggaagauucag

SEQ ID NO: 1865182 - RNA, 19 nt, Artificial Sequence
  Description of Artificial Sequence: Synthetic oligonucleotide
  Antisense strand to SEQ ID NO: 1865181
cugaaucuuccuaacacgc

SEQ ID NO: 1865183 - RNA, 19 nt, Artificial Sequence
  Description of Artificial Sequence: Synthetic oligonucleotide
  Sense strand starting at position 2679 of SEQ ID NO: 1564240
ugagaucgugugcauaaca

SEQ ID NO: 1865184 - RNA, 19 nt, Artificial Sequence
  Description of Artificial Sequence: Synthetic oligonucleotide
  Antisense strand to SEQ ID NO: 1865183
uguuaugcacacgaucuca

SEQ ID NO: 1865185 - RNA, 19 nt, Artificial Sequence
  Description of Artificial Sequence: Synthetic oligonucleotide
  Sense strand starting at position 2706 of SEQ ID NO: 1564240
gguacaugcuagguguaca

SEQ ID NO: 1865186 - RNA, 19 nt, Artificial Sequence
  Description of Artificial Sequence: Synthetic oligonucleotide
  Antisense strand to SEQ ID NO: 1865185
uguacaccuagcauguacc

SEQ ID NO: 1865187 - RNA, 19 nt, Artificial Sequence
  Description of Artificial Sequence: Synthetic oligonucleotide
  Sense strand starting at position 2707 of SEQ ID NO: 1564240
guacaugcuagguguacaa

SEQ ID NO: 1865188 - RNA, 19 nt, Artificial Sequence
  Description of Artificial Sequence: Synthetic oligonucleotide
  Antisense strand to SEQ ID NO: 1865187
uuguacaccuagcauguac

SEQ ID NO: 1865189 - RNA, 19 nt, Artificial Sequence
  Description of Artificial Sequence: Synthetic oligonucleotide
  Sense strand starting at position 2711 of SEQ ID NO: 1564240
augcuagguguacaaagaa

SEQ ID NO: 1865190 - RNA, 19 nt, Artificial Sequence
  Description of Artificial Sequence: Synthetic oligonucleotide
  Antisense strand to SEQ ID NO: 1865189
uucuuuguacaccuagcau

SEQ ID NO: 1865191 - RNA, 19 nt, Artificial Sequence
  Description of Artificial Sequence: Synthetic oligonucleotide
  Sense strand starting at position 2757 of SEQ ID NO: 1564240
gugucaaccuccucaagga

SEQ ID NO: 1865192 - RNA, 19 nt, Artificial Sequence
  Description of Artificial Sequence: Synthetic oligonucleotide
  Antisense strand to SEQ ID NO: 1865191
uccuugaggagguugacac

SEQ ID NO: 1865193 - RNA, 19 nt, Artificial Sequence
  Description of Artificial Sequence: Synthetic oligonucleotide
  Sense strand starting at position 2891 of SEQ ID NO: 1564240
agucuacuaucauuaugga

SEQ ID NO: 1865194 - RNA, 19 nt, Artificial Sequence
  Description of Artificial Sequence: Synthetic oligonucleotide
  Antisense strand to SEQ ID NO: 1865193
uccauaaugauaguagacu

SEQ ID NO: 1865195 - RNA, 19 nt, Artificial Sequence
  Description of Artificial Sequence: Synthetic oligonucleotide
  Sense strand starting at position 2892 of SEQ ID NO: 1564240
gucuacuaucauuauggau

SEQ ID NO: 1865196 - RNA, 19 nt, Artificial Sequence
  Description of Artificial Sequence: Synthetic oligonucleotide
  Antisense strand to SEQ ID NO: 1865195
auccauaaugauaguagac

SEQ ID NO: 1865197 - RNA, 19 nt, Artificial Sequence
  Description of Artificial Sequence: Synthetic oligonucleotide
  Sense strand starting at position 2907 of SEQ ID NO: 1564240
ggauaauagucauccuuug

SEQ ID NO: 1865198 - RNA, 19 nt, Artificial Sequence
  Description of Artificial Sequence: Synthetic oligonucleotide
  Antisense strand to SEQ ID NO: 1865197
caaaggaugacuauuaucc

SEQ ID NO: 1865199 - RNA, 19 nt, Artificial Sequence
  Description of Artificial Sequence: Synthetic oligonucleotide
  Sense strand starting at position 2992 of SEQ ID NO: 1564240
ucacaauugcgauagucau

SEQ ID NO: 1865200 - RNA, 19 nt, Artificial Sequence
  Description of Artificial Sequence: Synthetic oligonucleotide
  Antisense strand to SEQ ID NO: 1865199
augacuaucgcaauuguga

SEQ ID NO: 1865201 - RNA, 19 nt, Artificial Sequence
  Description of Artificial Sequence: Synthetic oligonucleotide
  Sense strand starting at position 3005 of SEQ ID NO: 1564240
agucauacuuagucuugau

SEQ ID NO: 1865202 - RNA, 19 nt, Artificial Sequence
  Description of Artificial Sequence: Synthetic oligonucleotide
  Antisense strand to SEQ ID NO: 1865201
aucaagacuaaguaugacu

SEQ ID NO: 1865203 - RNA, 19 nt, Artificial Sequence
  Description of Artificial Sequence: Synthetic oligonucleotide
  Sense strand starting at position 3009 of SEQ ID NO: 1564240
auacuuagucuugauguau

SEQ ID NO: 1865204 - RNA, 19 nt, Artificial Sequence
  Description of Artificial Sequence: Synthetic oligonucleotide
  Antisense strand to SEQ ID NO: 1865203
auacaucaagacuaaguau

SEQ ID NO: 1865205 - RNA, 19 nt, Artificial Sequence
  Description of Artificial Sequence: Synthetic oligonucleotide
  Sense strand starting at position 3123 of SEQ ID NO: 1564240
aagguugaguaauccaaau

SEQ ID NO: 1865206 - RNA, 19 nt, Artificial Sequence
  Description of Artificial Sequence: Synthetic oligonucleotide
  Antisense strand to SEQ ID NO: 1865205
auuuggauuacucaaccuu

SEQ ID NO: 1865207 - RNA, 19 nt, Artificial Sequence
  Description of Artificial Sequence: Synthetic oligonucleotide
  Sense strand starting at position 3236 of SEQ ID NO: 1564240
agaggagguucucaaugaa

SEQ ID NO: 1865208 - RNA, 19 nt, Artificial Sequence
  Description of Artificial Sequence: Synthetic oligonucleotide
  Antisense strand to SEQ ID NO: 1865207
uucauugagaaccuccucu

SEQ ID NO: 1865209 - RNA, 19 nt, Artificial Sequence
  Description of Artificial Sequence: Synthetic oligonucleotide
  Sense strand starting at position 3239 of SEQ ID NO: 1564240
ggagguucucaaugaacac

SEQ ID NO: 1865210 - RNA, 19 nt, Artificial Sequence
  Description of Artificial Sequence: Synthetic oligonucleotide
  Antisense strand to SEQ ID NO: 1865209
guguucauugagaaccucc

SEQ ID NO: 1865211 - RNA, 19 nt, Artificial Sequence
  Description of Artificial Sequence: Synthetic oligonucleotide
  Sense strand starting at position 3272 of SEQ ID NO: 1564240
ggaauuaaggcgcagagaa

SEQ ID NO: 1865212 - RNA, 19 nt, Artificial Sequence
  Description of Artificial Sequence: Synthetic oligonucleotide
  Antisense strand to SEQ ID NO: 1865211
uucucugcgccuuaauucc

SEQ ID NO: 1865213 - RNA, 19 nt, Artificial Sequence
  Description of Artificial Sequence: Synthetic oligonucleotide
  Sense strand starting at position 3282 of SEQ ID NO: 1564240
cgcagagaagcuuguauaa

SEQ ID NO: 1865214 - RNA, 19 nt, Artificial Sequence
  Description of Artificial Sequence: Synthetic oligonucleotide
  Antisense strand to SEQ ID NO: 1865213
uuauacaagcuucucugcg

SEQ ID NO: 1865215 - RNA, 19 nt, Artificial Sequence
  Description of Artificial Sequence: Synthetic oligonucleotide
  Sense strand starting at position 3460 of SEQ ID NO: 1564240
agaagauggucugccaguu

SEQ ID NO: 1865216 - RNA, 19 nt, Artificial Sequence
  Description of Artificial Sequence: Synthetic oligonucleotide
  Antisense strand to SEQ ID NO: 1865215
aacuggcagaccaucuucu

SEQ ID NO: 1865217 - RNA, 19 nt, Artificial Sequence
  Description of Artificial Sequence: Synthetic oligonucleotide
  Sense strand starting at position 3566 of SEQ ID NO: 1564240
ggcagacgcuacuuuaaug

SEQ ID NO: 1865218 - RNA, 19 nt, Artificial Sequence
  Description of Artificial Sequence: Synthetic oligonucleotide
  Antisense strand to SEQ ID NO: 1865217
cauuaaaguagcgucugcc

SEQ ID NO: 1865219 - RNA, 19 nt, Artificial Sequence
  Description of Artificial Sequence: Synthetic oligonucleotide
  Sense strand starting at position 3644 of SEQ ID NO: 1564240
gcaguucuuccagaguuga

SEQ ID NO: 1865220 - RNA, 19 nt, Artificial Sequence
  Description of Artificial Sequence: Synthetic oligonucleotide
  Antisense strand to SEQ ID NO: 1865219
ucaacucuggaagaacugc

SEQ ID NO: 1865221 - RNA, 19 nt, Artificial Sequence
  Description of Artificial Sequence: Synthetic oligonucleotide
  Sense strand starting at position 3669 of SEQ ID NO: 1564240
ccuggaagcuaucuagcaa

SEQ ID NO: 1865222 - RNA, 19 nt, Artificial Sequence
  Description of Artificial Sequence: Synthetic oligonucleotide
  Antisense strand to SEQ ID NO: 1865221
uugcuagauagcuuccagg

SEQ ID NO: 1865223 - RNA, 19 nt, Artificial Sequence
  Description of Artificial Sequence: Synthetic oligonucleotide
  Sense strand starting at position 3708 of SEQ ID NO: 1564240
acaaauuacuugucagugu

SEQ ID NO: 1865224 - RNA, 19 nt, Artificial Sequence
  Description of Artificial Sequence: Synthetic oligonucleotide
  Antisense strand to SEQ ID NO: 1865223
acacugacaaguaauuugu

SEQ ID NO: 1865225 - RNA, 19 nt, Artificial Sequence
  Description of Artificial Sequence: Synthetic oligonucleotide
  Sense strand starting at position 3733 of SEQ ID NO: 1564240
uugcucugacaagguaaau

SEQ ID NO: 1865226 - RNA, 19 nt, Artificial Sequence
  Description of Artificial Sequence: Synthetic oligonucleotide
  Antisense strand to SEQ ID NO: 1865225
auuuaccuugucagagcaa

SEQ ID NO: 1865227 - RNA, 19 nt, Artificial Sequence
  Description of Artificial Sequence: Synthetic oligonucleotide
  Sense strand starting at position 3768 of SEQ ID NO: 1564240
ugaaccugucugugaggaa

SEQ ID NO: 1865228 - RNA, 19 nt, Artificial Sequence
  Description of Artificial Sequence: Synthetic oligonucleotide
  Antisense strand to SEQ ID NO: 1865227
uuccucacagacagguuca

SEQ ID NO: 1865229 - RNA, 19 nt, Artificial Sequence
  Description of Artificial Sequence: Synthetic oligonucleotide
  Sense strand starting at position 3838 of SEQ ID NO: 1564240
gguggauuaccuggacuga

SEQ ID NO: 1865230 - RNA, 19 nt, Artificial Sequence
  Description of Artificial Sequence: Synthetic oligonucleotide
  Antisense strand to SEQ ID NO: 1865229
ucaguccagguaauccacc

SEQ ID NO: 1865231 - RNA, 19 nt, Artificial Sequence
  Description of Artificial Sequence: Synthetic oligonucleotide
  Sense strand starting at position 2 of SEQ ID NO: 1564241
aagucuuggccagacuuaa

SEQ ID NO: 1865232 - RNA, 19 nt, Artificial Sequence
  Description of Artificial Sequence: Synthetic oligonucleotide
  Antisense strand to SEQ ID NO: 1865231
uuaagucuggccaagacuu

SEQ ID NO: 1865233 - RNA, 19 nt, Artificial Sequence
  Description of Artificial Sequence: Synthetic oligonucleotide
  Sense strand starting at position 95 of SEQ ID NO: 1564241
ggccauugcccuugacuca

SEQ ID NO: 1865234 - RNA, 19 nt, Artificial Sequence
  Description of Artificial Sequence: Synthetic oligonucleotide
  Antisense strand to SEQ ID NO: 1865233
ugagucaagggcaauggcc

SEQ ID NO: 1865235 - RNA, 19 nt, Artificial Sequence
  Description of Artificial Sequence: Synthetic oligonucleotide
  Sense strand starting at position 298 of SEQ ID NO: 1564241
cugucaacuugaucgagga

SEQ ID NO: 1865236 - RNA, 19 nt, Artificial Sequence
  Description of Artificial Sequence: Synthetic oligonucleotide
  Antisense strand to SEQ ID NO: 1865235
uccucgaucaaguugacag

SEQ ID NO: 1865237 - RNA, 19 nt, Artificial Sequence
  Description of Artificial Sequence: Synthetic oligonucleotide
  Sense strand starting at position 299 of SEQ ID NO: 1564241
ugucaacuugaucgaggaa

SEQ ID NO: 1865238 - RNA, 19 nt, Artificial Sequence
  Description of Artificial Sequence: Synthetic oligonucleotide
  Antisense strand to SEQ ID NO: 1865237
uuccucgaucaaguugaca

SEQ ID NO: 1865239 - RNA, 19 nt, Artificial Sequence
  Description of Artificial Sequence: Synthetic oligonucleotide
  Sense strand starting at position 443 of SEQ ID NO: 1564241
ccgagcugguuaccuuaua

SEQ ID NO: 1865240 - RNA, 19 nt, Artificial Sequence
  Description of Artificial Sequence: Synthetic oligonucleotide
  Antisense strand to SEQ ID NO: 1865239
uauaagguaaccagcucgg

SEQ ID NO: 1865241 - RNA, 19 nt, Artificial Sequence
  Description of Artificial Sequence: Synthetic oligonucleotide
  Sense strand starting at position 477 of SEQ ID NO: 1564241
accuuugaauugccaugau

SEQ ID NO: 1865242 - RNA, 19 nt, Artificial Sequence
  Description of Artificial Sequence: Synthetic oligonucleotide
  Antisense strand to SEQ ID NO: 1865241
aucauggcaauucaaaggu

SEQ ID NO: 1865243 - RNA, 19 nt, Artificial Sequence
  Description of Artificial Sequence: Synthetic oligonucleotide
  Sense strand starting at position 480 of SEQ ID NO: 1564241
uuugaauugccaugauccu

SEQ ID NO: 1865244 - RNA, 19 nt, Artificial Sequence
  Description of Artificial Sequence: Synthetic oligonucleotide
  Antisense strand to SEQ ID NO: 1865243
aggaucauggcaauucaaa

SEQ ID NO: 1865245 - RNA, 19 nt, Artificial Sequence
  Description of Artificial Sequence: Synthetic oligonucleotide
  Sense strand starting at position 481 of SEQ ID NO: 1564241
uugaauugccaugauccuu

SEQ ID NO: 1865246 - RNA, 19 nt, Artificial Sequence
  Description of Artificial Sequence: Synthetic oligonucleotide
  Antisense strand to SEQ ID NO: 1865245
aaggaucauggcaauucaa

SEQ ID NO: 1865247 - RNA, 19 nt, Artificial Sequence
  Description of Artificial Sequence: Synthetic oligonucleotide
  Sense strand starting at position 487 of SEQ ID NO: 1564241
ugccaugauccuuauuaug

SEQ ID NO: 1865248 - RNA, 19 nt, Artificial Sequence
  Description of Artificial Sequence: Synthetic oligonucleotide
  Antisense strand to SEQ ID NO: 1865247
cauaauaaggaucauggca

SEQ ID NO: 1865249 - RNA, 19 nt, Artificial Sequence
  Description of Artificial Sequence: Synthetic oligonucleotide
  Sense strand starting at position 489 of SEQ ID NO: 1564241
ccaugauccuuauuaugug

SEQ ID NO: 1865250 - RNA, 19 nt, Artificial Sequence
  Description of Artificial Sequence: Synthetic oligonucleotide
  Antisense strand to SEQ ID NO: 1865249
cacauaauaaggaucaugg

SEQ ID NO: 1865251 - RNA, 19 nt, Artificial Sequence
  Description of Artificial Sequence: Synthetic oligonucleotide
  Sense strand starting at position 492 of SEQ ID NO: 1564241
ugauccuuauuaugugaca

SEQ ID NO: 1865252 - RNA, 19 nt, Artificial Sequence
  Description of Artificial Sequence: Synthetic oligonucleotide
  Antisense strand to SEQ ID NO: 1865251
ugucacauaauaaggauca

SEQ ID NO: 1865253 - RNA, 19 nt, Artificial Sequence
  Description of Artificial Sequence: Synthetic oligonucleotide
  Sense strand starting at position 616 of SEQ ID NO: 1564241
ugacaaucuccuggcuaaa

SEQ ID NO: 1865254 - RNA, 19 nt, Artificial Sequence
  Description of Artificial Sequence: Synthetic oligonucleotide
  Antisense strand to SEQ ID NO: 1865253
uuuagccaggagauuguca

SEQ ID NO: 1865255 - RNA, 19 nt, Artificial Sequence
  Description of Artificial Sequence: Synthetic oligonucleotide
  Sense strand starting at position 691 of SEQ ID NO: 1564241
uagcauuuaugguuaguua

SEQ ID NO: 1865256 - RNA, 19 nt, Artificial Sequence
  Description of Artificial Sequence: Synthetic oligonucleotide
  Antisense strand to SEQ ID NO: 1865255
uaacuaaccauaaaugcua

SEQ ID NO: 1865257 - RNA, 19 nt, Artificial Sequence
  Description of Artificial Sequence: Synthetic oligonucleotide
  Sense strand starting at position 694 of SEQ ID NO: 1564241
cauuuaugguuaguuaugu

SEQ ID NO: 1865258 - RNA, 19 nt, Artificial Sequence
  Description of Artificial Sequence: Synthetic oligonucleotide
  Antisense strand to SEQ ID NO: 1865257
acauaacuaaccauaaaug

SEQ ID NO: 1865259 - RNA, 19 nt, Artificial Sequence
  Description of Artificial Sequence: Synthetic oligonucleotide
  Sense strand starting at position 736 of SEQ ID NO: 1564241
ugcugucuuucuguggaua

SEQ ID NO: 1865260 - RNA, 19 nt, Artificial Sequence
  Description of Artificial Sequence: Synthetic oligonucleotide
  Antisense strand to SEQ ID NO: 1865259
uauccacagaaagacagca

SEQ ID NO: 1865261 - RNA, 19 nt, Artificial Sequence
  Description of Artificial Sequence: Synthetic oligonucleotide
  Sense strand starting at position 739 of SEQ ID NO: 1564241
ugucuuucuguggauaaag

SEQ ID NO: 1865262 - RNA, 19 nt, Artificial Sequence
  Description of Artificial Sequence: Synthetic oligonucleotide
  Antisense strand to SEQ ID NO: 1865261
cuuuauccacagaaagaca

SEQ ID NO: 1865263 - RNA, 19 nt, Artificial Sequence
  Description of Artificial Sequence: Synthetic oligonucleotide
  Sense strand starting at position 1135 of SEQ ID NO: 1564241
ggacauaugugagguaacu

SEQ ID NO: 1865264 - RNA, 19 nt, Artificial Sequence
  Description of Artificial Sequence: Synthetic oligonucleotide
  Antisense strand to SEQ ID NO: 1865263
aguuaccucacauaugucc

SEQ ID NO: 1865265 - RNA, 19 nt, Artificial Sequence
  Description of Artificial Sequence: Synthetic oligonucleotide
  Sense strand starting at position 1189 of SEQ ID NO: 1564241
aggcaagaauucuucucuu

SEQ ID NO: 1865266 - RNA, 19 nt, Artificial Sequence
  Description of Artificial Sequence: Synthetic oligonucleotide
  Antisense strand to SEQ ID NO: 1865265
aagagaagaauucuugccu

SEQ ID NO: 1865267 - RNA, 19 nt, Artificial Sequence
  Description of Artificial Sequence: Synthetic oligonucleotide
  Sense strand starting at position 1272 of SEQ ID NO: 1564241
guaauauguugagaggcga

SEQ ID NO: 1865268 - RNA, 19 nt, Artificial Sequence
  Description of Artificial Sequence: Synthetic oligonucleotide
  Antisense strand to SEQ ID NO: 1865267
ucgccucucaacauauuac

SEQ ID NO: 1865269 - RNA, 19 nt, Artificial Sequence
  Description of Artificial Sequence: Synthetic oligonucleotide
  Sense strand starting at position 1321 of SEQ ID NO: 1564241
gggugacgugugcuucuuu

SEQ ID NO: 1865270 - RNA, 19 nt, Artificial Sequence
  Description of Artificial Sequence: Synthetic oligonucleotide
  Antisense strand to SEQ ID NO: 1865269
aaagaagcacacgucaccc

SEQ ID NO: 1865271 - RNA, 19 nt, Artificial Sequence
  Description of Artificial Sequence: Synthetic oligonucleotide
  Sense strand starting at position 1322 of SEQ ID NO: 1564241
ggugacgugugcuucuuua

SEQ ID NO: 1865272 - RNA, 19 nt, Artificial Sequence
  Description of Artificial Sequence: Synthetic oligonucleotide
  Antisense strand to SEQ ID NO: 1865271
uaaagaagcacacgucacc

SEQ ID NO: 1865273 - RNA, 19 nt, Artificial Sequence
  Description of Artificial Sequence: Synthetic oligonucleotide
  Sense strand starting at position 1324 of SEQ ID NO: 1564241
ugacgugugcuucuuuacu

SEQ ID NO: 1865274 - RNA, 19 nt, Artificial Sequence
  Description of Artificial Sequence: Synthetic oligonucleotide
  Antisense strand to SEQ ID NO: 1865273
aguaaagaagcacacguca

SEQ ID NO: 1865275 - RNA, 19 nt, Artificial Sequence
  Description of Artificial Sequence: Synthetic oligonucleotide
  Sense strand starting at position 1326 of SEQ ID NO: 1564241
acgugugcuucuuuacuaa

SEQ ID NO: 1865276 - RNA, 19 nt, Artificial Sequence
  Description of Artificial Sequence: Synthetic oligonucleotide
  Antisense strand to SEQ ID NO: 1865275
uuaguaaagaagcacacgu

SEQ ID NO: 1865277 - RNA, 19 nt, Artificial Sequence
  Description of Artificial Sequence: Synthetic oligonucleotide
  Sense strand starting at position 1443 of SEQ ID NO: 1564241
acugaacuucuagacguuu

SEQ ID NO: 1865278 - RNA, 19 nt, Artificial Sequence
  Description of Artificial Sequence: Synthetic oligonucleotide
  Antisense strand to SEQ ID NO: 1865277
aaacgucuagaaguucagu

SEQ ID NO: 1865279 - RNA, 19 nt, Artificial Sequence
  Description of Artificial Sequence: Synthetic oligonucleotide
  Sense strand starting at position 1449 of SEQ ID NO: 1564241
cuucuagacguuuacaaca

SEQ ID NO: 1865280 - RNA, 19 nt, Artificial Sequence
  Description of Artificial Sequence: Synthetic oligonucleotide
  Antisense strand to SEQ ID NO: 1865279
uguuguaaacgucuagaag

SEQ ID NO: 1865281 - RNA, 19 nt, Artificial Sequence
  Description of Artificial Sequence: Synthetic oligonucleotide
  Sense strand starting at position 1451 of SEQ ID NO: 1564241
ucuagacguuuacaacaaa

SEQ ID NO: 1865282 - RNA, 19 nt, Artificial Sequence
  Description of Artificial Sequence: Synthetic oligonucleotide
  Antisense strand to SEQ ID NO: 1865281
uuuguuguaaacgucuaga

SEQ ID NO: 1865283 - RNA, 19 nt, Artificial Sequence
  Description of Artificial Sequence: Synthetic oligonucleotide
  Sense strand starting at position 2261 of SEQ ID NO: 1564241
gggcgugcgucccuuauca

SEQ ID NO: 1865284 - RNA, 19 nt, Artificial Sequence
  Description of Artificial Sequence: Synthetic oligonucleotide
  Antisense strand to SEQ ID NO: 1865283
ugauaagggacgcacgccc

SEQ ID NO: 1865285 - RNA, 19 nt, Artificial Sequence
  Description of Artificial Sequence: Synthetic oligonucleotide
  Sense strand starting at position 2263 of SEQ ID NO: 1564241
gcgugcgucccuuaucaac

SEQ ID NO: 1865286 - RNA, 19 nt, Artificial Sequence
  Description of Artificial Sequence: Synthetic oligonucleotide
  Antisense strand to SEQ ID NO: 1865285
guugauaagggacgcacgc

SEQ ID NO: 1865287 - RNA, 19 nt, Artificial Sequence
  Description of Artificial Sequence: Synthetic oligonucleotide
  Sense strand starting at position 2332 of SEQ ID NO: 1564241
cagucucauccgggcauuu

SEQ ID NO: 1865288 - RNA, 19 nt, Artificial Sequence
  Description of Artificial Sequence: Synthetic oligonucleotide
  Antisense strand to SEQ ID NO: 1865287
aaaugcccggaugagacug

SEQ ID NO: 1865289 - RNA, 19 nt, Artificial Sequence
  Description of Artificial Sequence: Synthetic oligonucleotide
  Sense strand starting at position 2382 of SEQ ID NO: 1564241
ugcugaaagucgcuauuga

SEQ ID NO: 1865290 - RNA, 19 nt, Artificial Sequence
  Description of Artificial Sequence: Synthetic oligonucleotide
  Antisense strand to SEQ ID NO: 1865289
ucaauagcgacuuucagca

SEQ ID NO: 1865291 - RNA, 19 nt, Artificial Sequence
  Description of Artificial Sequence: Synthetic oligonucleotide
  Sense strand starting at position 2383 of SEQ ID NO: 1564241
gcugaaagucgcuauugac

SEQ ID NO: 1865292 - RNA, 19 nt, Artificial Sequence
  Description of Artificial Sequence: Synthetic oligonucleotide
  Antisense strand to SEQ ID NO: 1865291
gucaauagcgacuuucagc

SEQ ID NO: 1865293 - RNA, 19 nt, Artificial Sequence
  Description of Artificial Sequence: Synthetic oligonucleotide
  Sense strand starting at position 2697 of SEQ ID NO: 1564241
ccgccauguuuaguuguua

SEQ ID NO: 1865294 - RNA, 19 nt, Artificial Sequence
  Description of Artificial Sequence: Synthetic oligonucleotide
  Antisense strand to SEQ ID NO: 1865293
uaacaacuaaacauggcgg

SEQ ID NO: 1865295 - RNA, 19 nt, Artificial Sequence
  Description of Artificial Sequence: Synthetic oligonucleotide
  Sense strand starting at position 2842 of SEQ ID NO: 1564241
gagucauaaggcgggaagu

SEQ ID NO: 1865296 - RNA, 19 nt, Artificial Sequence
  Description of Artificial Sequence: Synthetic oligonucleotide
  Antisense strand to SEQ ID NO: 1865295
acuucccgccuuaugacuc

SEQ ID NO: 1865297 - RNA, 19 nt, Artificial Sequence
  Description of Artificial Sequence: Synthetic oligonucleotide
  Sense strand starting at position 2883 of SEQ ID NO: 1564241
uuuggugugcaguggaaga

SEQ ID NO: 1865298 - RNA, 19 nt, Artificial Sequence
  Description of Artificial Sequence: Synthetic oligonucleotide
  Antisense strand to SEQ ID NO: 1865297
ucuuccacugcacaccaaa

SEQ ID NO: 1865299 - RNA, 19 nt, Artificial Sequence
  Description of Artificial Sequence: Synthetic oligonucleotide
  Sense strand starting at position 2935 of SEQ ID NO: 1564241
gggagcuagucucaagaug

SEQ ID NO: 1865300 - RNA, 19 nt, Artificial Sequence
  Description of Artificial Sequence: Synthetic oligonucleotide
  Antisense strand to SEQ ID NO: 1865299
caucuugagacuagcuccc

SEQ ID NO: 1865301 - RNA, 19 nt, Artificial Sequence
  Description of Artificial Sequence: Synthetic oligonucleotide
  Sense strand starting at position 3186 of SEQ ID NO: 1564241
ccacaauuguggucugagc

SEQ ID NO: 1865302 - RNA, 19 nt, Artificial Sequence
  Description of Artificial Sequence: Synthetic oligonucleotide
  Antisense strand to SEQ ID NO: 1865301
gcucagaccacaauugugg

SEQ ID NO: 1865303 - RNA, 19 nt, Artificial Sequence
  Description of Artificial Sequence: Synthetic oligonucleotide
  Sense strand starting at position 3573 of SEQ ID NO: 1564241
cgucuaccgcugugugaga

SEQ ID NO: 1865304 - RNA, 19 nt, Artificial Sequence
  Description of Artificial Sequence: Synthetic oligonucleotide
  Antisense strand to SEQ ID NO: 1865303
ucucacacagcgguagacg

SEQ ID NO: 1865305 - RNA, 19 nt, Artificial Sequence
  Description of Artificial Sequence: Synthetic oligonucleotide
  Sense strand starting at position 3600 of SEQ ID NO: 1564241
cuccgugagagcugccuua

SEQ ID NO: 1865306 - RNA, 19 nt, Artificial Sequence
  Description of Artificial Sequence: Synthetic oligonucleotide
  Antisense strand to SEQ ID NO: 1865305
uaaggcagcucucacggag

SEQ ID NO: 1865307 - RNA, 19 nt, Artificial Sequence
  Description of Artificial Sequence: Synthetic oligonucleotide
  Sense strand starting at position 3607 of SEQ ID NO: 1564241
agagcugccuuagacgaaa

SEQ ID NO: 1865308 - RNA, 19 nt, Artificial Sequence
  Description of Artificial Sequence: Synthetic oligonucleotide
  Antisense strand to SEQ ID NO: 1865307
uuucgucuaaggcagcucu

SEQ ID NO: 1865309 - RNA, 19 nt, Artificial Sequence
  Description of Artificial Sequence: Synthetic oligonucleotide
  Sense strand starting at position 3683 of SEQ ID NO: 1564241
gcacccuuucccggaacua

SEQ ID NO: 1865310 - RNA, 19 nt, Artificial Sequence
  Description of Artificial Sequence: Synthetic oligonucleotide
  Antisense strand to SEQ ID NO: 1865309
uaguuccgggaaagggugc

SEQ ID NO: 1865311 - RNA, 19 nt, Artificial Sequence
  Description of Artificial Sequence: Synthetic oligonucleotide
  Sense strand starting at position 413 of SEQ ID NO: 1564242
uuccaccauccaggagaua

SEQ ID NO: 1865312 - RNA, 19 nt, Artificial Sequence
  Description of Artificial Sequence: Synthetic oligonucleotide
  Antisense strand to SEQ ID NO: 1865311
uaucuccuggaugguggaa

SEQ ID NO: 1865313 - RNA, 19 nt, Artificial Sequence
  Description of Artificial Sequence: Synthetic oligonucleotide
  Sense strand starting at position 635 of SEQ ID NO: 1564242
aagagagaauucgauuuga

SEQ ID NO: 1865314 - RNA, 19 nt, Artificial Sequence
  Description of Artificial Sequence: Synthetic oligonucleotide
  Antisense strand to SEQ ID NO: 1865313
ucaaaucgaauucucucuu

SEQ ID NO: 1865315 - RNA, 19 nt, Artificial Sequence
  Description of Artificial Sequence: Synthetic oligonucleotide
  Sense strand starting at position 640 of SEQ ID NO: 1564242
agaauucgauuugauugaa

SEQ ID NO: 1865316 - RNA, 19 nt, Artificial Sequence
  Description of Artificial Sequence: Synthetic oligonucleotide
  Antisense strand to SEQ ID NO: 1865315
uucaaucaaaucgaauucu

SEQ ID NO: 1865317 - RNA, 19 nt, Artificial Sequence
  Description of Artificial Sequence: Synthetic oligonucleotide
  Sense strand starting at position 659 of SEQ ID NO: 1564242
guguauccgaggcgaauuu

SEQ ID NO: 1865318 - RNA, 19 nt, Artificial Sequence
  Description of Artificial Sequence: Synthetic oligonucleotide
  Antisense strand to SEQ ID NO: 1865317
aaauucgccucggauacac

SEQ ID NO: 1865319 - RNA, 19 nt, Artificial Sequence
  Description of Artificial Sequence: Synthetic oligonucleotide
  Sense strand starting at position 720 of SEQ ID NO: 1564242
ucuccagggcuccaaauua

SEQ ID NO: 1865320 - RNA, 19 nt, Artificial Sequence
  Description of Artificial Sequence: Synthetic oligonucleotide
  Antisense strand to SEQ ID NO: 1865319
uaauuuggagcccuggaga

SEQ ID NO: 1865321 - RNA, 19 nt, Artificial Sequence
  Description of Artificial Sequence: Synthetic oligonucleotide
  Sense strand starting at position 735 of SEQ ID NO: 1564242
auuaauuucuccgcccagu

SEQ ID NO: 1865322 - RNA, 19 nt, Artificial Sequence
  Description of Artificial Sequence: Synthetic oligonucleotide
  Antisense strand to SEQ ID NO: 1865321
acugggcggagaaauuaau

SEQ ID NO: 1865323 - RNA, 19 nt, Artificial Sequence
  Description of Artificial Sequence: Synthetic oligonucleotide
  Sense strand starting at position 1348 of SEQ ID NO: 1564242
gagggagugucgaauggaa

SEQ ID NO: 1865324 - RNA, 19 nt, Artificial Sequence
  Description of Artificial Sequence: Synthetic oligonucleotide
  Antisense strand to SEQ ID NO: 1865323
uuccauucgacacucccuc

SEQ ID NO: 1865325 - RNA, 19 nt, Artificial Sequence
  Description of Artificial Sequence: Synthetic oligonucleotide
  Sense strand starting at position 1350 of SEQ ID NO: 1564242
gggagugucgaauggaaag

SEQ ID NO: 1865326 - RNA, 19 nt, Artificial Sequence
  Description of Artificial Sequence: Synthetic oligonucleotide
  Antisense strand to SEQ ID NO: 1865325
cuuuccauucgacacuccc

SEQ ID NO: 1865327 - RNA, 19 nt, Artificial Sequence
  Description of Artificial Sequence: Synthetic oligonucleotide
  Sense strand starting at position 1751 of SEQ ID NO: 1564242
ugcugagucagggacugau

SEQ ID NO: 1865328 - RNA, 19 nt, Artificial Sequence
  Description of Artificial Sequence: Synthetic oligonucleotide
  Antisense strand to SEQ ID NO: 1865327
aucagucccugacucagca

SEQ ID NO: 1865329 - RNA, 19 nt, Artificial Sequence
  Description of Artificial Sequence: Synthetic oligonucleotide
  Sense strand starting at position 1755 of SEQ ID NO: 1564242
gagucagggacugaugcau

SEQ ID NO: 1865330 - RNA, 19 nt, Artificial Sequence
  Description of Artificial Sequence: Synthetic oligonucleotide
  Antisense strand to SEQ ID NO: 1865329
augcaucagucccugacuc

SEQ ID NO: 1865331 - RNA, 19 nt, Artificial Sequence
  Description of Artificial Sequence: Synthetic oligonucleotide
  Sense strand starting at position 1761 of SEQ ID NO: 1564242
gggacugaugcauggugaa

SEQ ID NO: 1865332 - RNA, 19 nt, Artificial Sequence
  Description of Artificial Sequence: Synthetic oligonucleotide
  Antisense strand to SEQ ID NO: 1865331
uucaccaugcaucaguccc

SEQ ID NO: 1865333 - RNA, 19 nt, Artificial Sequence
  Description of Artificial Sequence: Synthetic oligonucleotide
  Sense strand starting at position 2197 of SEQ ID NO: 1564242
cagggucuuggguaauuau

SEQ ID NO: 1865334 - RNA, 19 nt, Artificial Sequence
  Description of Artificial Sequence: Synthetic oligonucleotide
  Antisense strand to SEQ ID NO: 1865333
auaauuacccaagacccug

SEQ ID NO: 1865335 - RNA, 19 nt, Artificial Sequence
  Description of Artificial Sequence: Synthetic oligonucleotide
  Sense strand starting at position 2327 of SEQ ID NO: 1564242
gugcuuccagaaugacaua

SEQ ID NO: 1865336 - RNA, 19 nt, Artificial Sequence
  Description of Artificial Sequence: Synthetic oligonucleotide
  Antisense strand to SEQ ID NO: 1865335
uaugucauucuggaagcac

SEQ ID NO: 1865337 - RNA, 19 nt, Artificial Sequence
  Description of Artificial Sequence: Synthetic oligonucleotide
  Sense strand starting at position 2414 of SEQ ID NO: 1564242
gagggugguggcugacaua

SEQ ID NO: 1865338 - RNA, 19 nt, Artificial Sequence
  Description of Artificial Sequence: Synthetic oligonucleotide
  Antisense strand to SEQ ID NO: 1865337
uaugucagccaccacccuc

SEQ ID NO: 1865339 - RNA, 19 nt, Artificial Sequence
  Description of Artificial Sequence: Synthetic oligonucleotide
  Sense strand starting at position 2421 of SEQ ID NO: 1564242
guggcugacauaugaagau

SEQ ID NO: 1865340 - RNA, 19 nt, Artificial Sequence
  Description of Artificial Sequence: Synthetic oligonucleotide
  Antisense strand to SEQ ID NO: 1865339
aucuucauaugucagccac

SEQ ID NO: 1865341 - RNA, 19 nt, Artificial Sequence
  Description of Artificial Sequence: Synthetic oligonucleotide
  Sense strand starting at position 2453 of SEQ ID NO: 1564242
gcagacucuuuagucuaga

SEQ ID NO: 1865342 - RNA, 19 nt, Artificial Sequence
  Description of Artificial Sequence: Synthetic oligonucleotide
  Antisense strand to SEQ ID NO: 1865341
ucuagacuaaagagucugc

SEQ ID NO: 1865343 - RNA, 19 nt, Artificial Sequence
  Description of Artificial Sequence: Synthetic oligonucleotide
  Sense strand starting at position 2458 of SEQ ID NO: 1564242
cucuuuagucuagaacgau

SEQ ID NO: 1865344 - RNA, 19 nt, Artificial Sequence
  Description of Artificial Sequence: Synthetic oligonucleotide
  Antisense strand to SEQ ID NO: 1865343
aucguucuagacuaaagag

SEQ ID NO: 1865345 - RNA, 19 nt, Artificial Sequence
  Description of Artificial Sequence: Synthetic oligonucleotide
  Sense strand starting at position 2461 of SEQ ID NO: 1564242
uuuagucuagaacgaugaa

SEQ ID NO: 1865346 - RNA, 19 nt, Artificial Sequence
  Description of Artificial Sequence: Synthetic oligonucleotide
  Antisense strand to SEQ ID NO: 1865345
uucaucguucuagacuaaa

SEQ ID NO: 1865347 - RNA, 19 nt, Artificial Sequence
  Description of Artificial Sequence: Synthetic oligonucleotide
  Sense strand starting at position 2492 of SEQ ID NO: 1564242
augugaccagaguguauaa

SEQ ID NO: 1865348 - RNA, 19 nt, Artificial Sequence
  Description of Artificial Sequence: Synthetic oligonucleotide
  Antisense strand to SEQ ID NO: 1865347
uuauacacucuggucacau

SEQ ID NO: 1865349 - RNA, 19 nt, Artificial Sequence
  Description of Artificial Sequence: Synthetic oligonucleotide
  Sense strand starting at position 2610 of SEQ ID NO: 1564242
aguauaacucugcaccaga

SEQ ID NO: 1865350 - RNA, 19 nt, Artificial Sequence
  Description of Artificial Sequence: Synthetic oligonucleotide
  Antisense strand to SEQ ID NO: 1865349
ucuggugcagaguuauacu

SEQ ID NO: 1865351 - RNA, 19 nt, Artificial Sequence
  Description of Artificial Sequence: Synthetic oligonucleotide
  Sense strand starting at position 2967 of SEQ ID NO: 1564242
uaaagucauggcugacaga

SEQ ID NO: 1865352 - RNA, 19 nt, Artificial Sequence
  Description of Artificial Sequence: Synthetic oligonucleotide
  Antisense strand to SEQ ID NO: 1865351
ucugucagccaugacuuua

SEQ ID NO: 1865353 - RNA, 19 nt, Artificial Sequence
  Description of Artificial Sequence: Synthetic oligonucleotide
  Sense strand starting at position 2981 of SEQ ID NO: 1564242
acagauccacuguggauua

SEQ ID NO: 1865354 - RNA, 19 nt, Artificial Sequence
  Description of Artificial Sequence: Synthetic oligonucleotide
  Antisense strand to SEQ ID NO: 1865353
uaauccacaguggaucugu

SEQ ID NO: 1865355 - RNA, 19 nt, Artificial Sequence
  Description of Artificial Sequence: Synthetic oligonucleotide
  Sense strand starting at position 3021 of SEQ ID NO: 1564242
gugggaaugucauugaucu

SEQ ID NO: 1865356 - RNA, 19 nt, Artificial Sequence
  Description of Artificial Sequence: Synthetic oligonucleotide
  Antisense strand to SEQ ID NO: 1865355
agaucaaugacauucccac

SEQ ID NO: 1865357 - RNA, 19 nt, Artificial Sequence
  Description of Artificial Sequence: Synthetic oligonucleotide
  Sense strand starting at position 3022 of SEQ ID NO: 1564242
ugggaaugucauugaucuu

SEQ ID NO: 1865358 - RNA, 19 nt, Artificial Sequence
  Description of Artificial Sequence: Synthetic oligonucleotide
  Antisense strand to SEQ ID NO: 1865357
aagaucaaugacauuccca

SEQ ID NO: 1865359 - RNA, 19 nt, Artificial Sequence
  Description of Artificial Sequence: Synthetic oligonucleotide
  Sense strand starting at position 3025 of SEQ ID NO: 1564242
gaaugucauugaucuugga

SEQ ID NO: 1865360 - RNA, 19 nt, Artificial Sequence
  Description of Artificial Sequence: Synthetic oligonucleotide
  Antisense strand to SEQ ID NO: 1865359
uccaagaucaaugacauuc

SEQ ID NO: 1865361 - RNA, 19 nt, Artificial Sequence
  Description of Artificial Sequence: Synthetic oligonucleotide
  Sense strand starting at position 3029 of SEQ ID NO: 1564242
gucauugaucuuggaagac

SEQ ID NO: 1865362 - RNA, 19 nt, Artificial Sequence
  Description of Artificial Sequence: Synthetic oligonucleotide
  Antisense strand to SEQ ID NO: 1865361
gucuuccaagaucaaugac

SEQ ID NO: 1865363 - RNA, 19 nt, Artificial Sequence
  Description of Artificial Sequence: Synthetic oligonucleotide
  Sense strand starting at position 3085 of SEQ ID NO: 1564242
uuaggauauugggcuugaa

SEQ ID NO: 1865364 - RNA, 19 nt, Artificial Sequence
  Description of Artificial Sequence: Synthetic oligonucleotide
  Antisense strand to SEQ ID NO: 1865363
uucaagcccaauauccuaa

SEQ ID NO: 1865365 - RNA, 19 nt, Artificial Sequence
  Description of Artificial Sequence: Synthetic oligonucleotide
  Sense strand starting at position 3088 of SEQ ID NO: 1564242
ggauauugggcuugaagca

SEQ ID NO: 1865366 - RNA, 19 nt, Artificial Sequence
  Description of Artificial Sequence: Synthetic oligonucleotide
  Antisense strand to SEQ ID NO: 1865365
ugcuucaagcccaauaucc

SEQ ID NO: 1865367 - RNA, 19 nt, Artificial Sequence
  Description of Artificial Sequence: Synthetic oligonucleotide
  Sense strand starting at position 3128 of SEQ ID NO: 1564242
ugguuugaauguucucaaa

SEQ ID NO: 1865368 - RNA, 19 nt, Artificial Sequence
  Description of Artificial Sequence: Synthetic oligonucleotide
  Antisense strand to SEQ ID NO: 1865367
uuugagaacauucaaacca

SEQ ID NO: 1865369 - RNA, 19 nt, Artificial Sequence
  Description of Artificial Sequence: Synthetic oligonucleotide
  Sense strand starting at position 3465 of SEQ ID NO: 1564242
agaagaguacuuggcucuu

SEQ ID NO: 1865370 - RNA, 19 nt, Artificial Sequence
  Description of Artificial Sequence: Synthetic oligonucleotide
  Antisense strand to SEQ ID NO: 1865369
aagagccaaguacucuucu

SEQ ID NO: 1865371 - RNA, 19 nt, Artificial Sequence
  Description of Artificial Sequence: Synthetic oligonucleotide
  Sense strand starting at position 3498 of SEQ ID NO: 1564242
gcuaaucuacuguaaagcu

SEQ ID NO: 1865372 - RNA, 19 nt, Artificial Sequence
  Description of Artificial Sequence: Synthetic oligonucleotide
  Antisense strand to SEQ ID NO: 1865371
agcuuuacaguagauuagc

SEQ ID NO: 1865373 - RNA, 19 nt, Artificial Sequence
  Description of Artificial Sequence: Synthetic oligonucleotide
  Sense strand starting at position 3604 of SEQ ID NO: 1564242
aaggaagcccuuuguaaag

SEQ ID NO: 1865374 - RNA, 19 nt, Artificial Sequence
  Description of Artificial Sequence: Synthetic oligonucleotide
  Antisense strand to SEQ ID NO: 1865373
cuuuacaaagggcuuccuu

SEQ ID NO: 1865375 - RNA, 19 nt, Artificial Sequence
  Description of Artificial Sequence: Synthetic oligonucleotide
  Sense strand starting at position 3683 of SEQ ID NO: 1564242
cuauacaugugguuuagaa

SEQ ID NO: 1865376 - RNA, 19 nt, Artificial Sequence
  Description of Artificial Sequence: Synthetic oligonucleotide
  Antisense strand to SEQ ID NO: 1865375
uucuaaaccacauguauag

SEQ ID NO: 1865377 - RNA, 19 nt, Artificial Sequence
  Description of Artificial Sequence: Synthetic oligonucleotide
  Sense strand starting at position 3693 of SEQ ID NO: 1564242
gguuuagaaaucugugaua

SEQ ID NO: 1865378 - RNA, 19 nt, Artificial Sequence
  Description of Artificial Sequence: Synthetic oligonucleotide
  Antisense strand to SEQ ID NO: 1865377
uaucacagauuucuaaacc

SEQ ID NO: 1865379 - RNA, 19 nt, Artificial Sequence
  Description of Artificial Sequence: Synthetic oligonucleotide
  Sense strand starting at position 3705 of SEQ ID NO: 1564242
ugugauauauguccuagau

SEQ ID NO: 1865380 - RNA, 19 nt, Artificial Sequence
  Description of Artificial Sequence: Synthetic oligonucleotide
  Antisense strand to SEQ ID NO: 1865379
aucuaggacauauaucaca

SEQ ID NO: 1865381 - RNA, 19 nt, Artificial Sequence
  Description of Artificial Sequence: Synthetic oligonucleotide
  Sense strand starting at position 3848 of SEQ ID NO: 1564242
uugaguccuguuuacuuau

SEQ ID NO: 1865382 - RNA, 19 nt, Artificial Sequence
  Description of Artificial Sequence: Synthetic oligonucleotide
  Antisense strand to SEQ ID NO: 1865381
auaaguaaacaggacucaa

SEQ ID NO: 1865383 - RNA, 19 nt, Artificial Sequence
  Description of Artificial Sequence: Synthetic oligonucleotide
  Sense strand starting at position 3956 of SEQ ID NO: 1564242
cauauuucguuucugugaa

SEQ ID NO: 1865384 - RNA, 19 nt, Artificial Sequence
  Description of Artificial Sequence: Synthetic oligonucleotide
  Antisense strand to SEQ ID NO: 1865383
uucacagaaacgaaauaug

SEQ ID NO: 1865385 - RNA, 19 nt, Artificial Sequence
  Description of Artificial Sequence: Synthetic oligonucleotide
  Sense strand starting at position 3958 of SEQ ID NO: 1564242
uauuucguuucugugaaag

SEQ ID NO: 1865386 - RNA, 19 nt, Artificial Sequence
  Description of Artificial Sequence: Synthetic oligonucleotide
  Antisense strand to SEQ ID NO: 1865385
cuuucacagaaacgaaaua

SEQ ID NO: 1865387 - RNA, 19 nt, Artificial Sequence
  Description of Artificial Sequence: Synthetic oligonucleotide
  Sense strand starting at position 3968 of SEQ ID NO: 1564242
cugugaaaguagccugaaa

SEQ ID NO: 1865388 - RNA, 19 nt, Artificial Sequence
  Description of Artificial Sequence: Synthetic oligonucleotide
  Antisense strand to SEQ ID NO: 1865387
uuucaggcuacuuucacag

SEQ ID NO: 1865389 - RNA, 19 nt, Artificial Sequence
  Description of Artificial Sequence: Synthetic oligonucleotide
  Sense strand starting at position 3970 of SEQ ID NO: 1564242
gugaaaguagccugaaaga

SEQ ID NO: 1865390 - RNA, 19 nt, Artificial Sequence
  Description of Artificial Sequence: Synthetic oligonucleotide
  Antisense strand to SEQ ID NO: 1865389
ucuuucaggcuacuuucac

SEQ ID NO: 1865391 - RNA, 19 nt, Artificial Sequence
  Description of Artificial Sequence: Synthetic oligonucleotide
  Sense strand starting at position 1992 of SEQ ID NO: 1564243
guggaaucacugcaucaag

SEQ ID NO: 1865392 - RNA, 19 nt, Artificial Sequence
  Description of Artificial Sequence: Synthetic oligonucleotide
  Antisense strand to SEQ ID NO: 1865391
cuugaugcagugauuccac

SEQ ID NO: 1865393 - RNA, 19 nt, Artificial Sequence
  Description of Artificial Sequence: Synthetic oligonucleotide
  Sense strand starting at position 2110 of SEQ ID NO: 1564243
cuguauuuaucauugcauc

SEQ ID NO: 1865394 - RNA, 19 nt, Artificial Sequence
  Description of Artificial Sequence: Synthetic oligonucleotide
  Antisense strand to SEQ ID NO: 1865393
gaugcaaugauaaauacag

SEQ ID NO: 1865395 - RNA, 19 nt, Artificial Sequence
  Description of Artificial Sequence: Synthetic oligonucleotide
  Sense strand starting at position 2195 of SEQ ID NO: 1564243
agugguuuccaggagucuu

SEQ ID NO: 1865396 - RNA, 19 nt, Artificial Sequence
  Description of Artificial Sequence: Synthetic oligonucleotide
  Antisense strand to SEQ ID NO: 1865395
aagacuccuggaaaccacu

SEQ ID NO: 1865397 - RNA, 19 nt, Artificial Sequence
  Description of Artificial Sequence: Synthetic oligonucleotide
  Sense strand starting at position 2203 of SEQ ID NO: 1564243
ccaggagucuucuccacau

SEQ ID NO: 1865398 - RNA, 19 nt, Artificial Sequence
  Description of Artificial Sequence: Synthetic oligonucleotide
  Antisense strand to SEQ ID NO: 1865397
auguggagaagacuccugg

SEQ ID NO: 1865399 - RNA, 19 nt, Artificial Sequence
  Description of Artificial Sequence: Synthetic oligonucleotide
  Sense strand starting at position 2205 of SEQ ID NO: 1564243
aggagucuucuccacauuc

SEQ ID NO: 1865400 - RNA, 19 nt, Artificial Sequence
  Description of Artificial Sequence: Synthetic oligonucleotide
  Antisense strand to SEQ ID NO: 1865399
gaauguggagaagacuccu

SEQ ID NO: 1865401 - RNA, 19 nt, Artificial Sequence
  Description of Artificial Sequence: Synthetic oligonucleotide
  Sense strand starting at position 2238 of SEQ ID NO: 1564243
ucuaguuccucuucuguga

SEQ ID NO: 1865402 - RNA, 19 nt, Artificial Sequence
  Description of Artificial Sequence: Synthetic oligonucleotide
  Antisense strand to SEQ ID NO: 1865401
ucacagaagaggaacuaga

SEQ ID NO: 1865403 - RNA, 19 nt, Artificial Sequence
  Description of Artificial Sequence: Synthetic oligonucleotide
  Sense strand starting at position 2241 of SEQ ID NO: 1564243
aguuccucuucugugaaau

SEQ ID NO: 1865404 - RNA, 19 nt, Artificial Sequence
  Description of Artificial Sequence: Synthetic oligonucleotide
  Antisense strand to SEQ ID NO: 1865403
auuucacagaagaggaacu

SEQ ID NO: 1865405 - RNA, 19 nt, Artificial Sequence
  Description of Artificial Sequence: Synthetic oligonucleotide
  Sense strand starting at position 2319 of SEQ ID NO: 1564243
cuucuaauggaucgaaaua

SEQ ID NO: 1865406 - RNA, 19 nt, Artificial Sequence
  Description of Artificial Sequence: Synthetic oligonucleotide
  Antisense strand to SEQ ID NO: 1865405
uauuucgauccauuagaag

SEQ ID NO: 1865407 - RNA, 19 nt, Artificial Sequence
  Description of Artificial Sequence: Synthetic oligonucleotide
  Sense strand starting at position 2371 of SEQ ID NO: 1564243
uuagcuugccacuguagau

SEQ ID NO: 1865408 - RNA, 19 nt, Artificial Sequence
  Description of Artificial Sequence: Synthetic oligonucleotide
  Antisense strand to SEQ ID NO: 1865407
aucuacaguggcaagcuaa

SEQ ID NO: 1865409 - RNA, 19 nt, Artificial Sequence
  Description of Artificial Sequence: Synthetic oligonucleotide
  Sense strand starting at position 2431 of SEQ ID NO: 1564243
ugcccuuuacguuauuaua

SEQ ID NO: 1865410 - RNA, 19 nt, Artificial Sequence
  Description of Artificial Sequence: Synthetic oligonucleotide
  Antisense strand to SEQ ID NO: 1865409
uauaauaacguaaagggca

SEQ ID NO: 1865411 - RNA, 19 nt, Artificial Sequence
  Description of Artificial Sequence: Synthetic oligonucleotide
  Sense strand starting at position 2433 of SEQ ID NO: 1564243
cccuuuacguuauuauaua

SEQ ID NO: 1865412 - RNA, 19 nt, Artificial Sequence
  Description of Artificial Sequence: Synthetic oligonucleotide
  Antisense strand to SEQ ID NO: 1865411
uauauaauaacguaaaggg

SEQ ID NO: 1865413 - RNA, 19 nt, Artificial Sequence
  Description of Artificial Sequence: Synthetic oligonucleotide
  Sense strand starting at position 2545 of SEQ ID NO: 1564243
agccuaucacaugaauugu

SEQ ID NO: 1865414 - RNA, 19 nt, Artificial Sequence
  Description of Artificial Sequence: Synthetic oligonucleotide
  Antisense strand to SEQ ID NO: 1865413
acaauucaugugauaggcu

SEQ ID NO: 1865415 - RNA, 19 nt, Artificial Sequence
  Description of Artificial Sequence: Synthetic oligonucleotide
  Sense strand starting at position 2551 of SEQ ID NO: 1564243
ucacaugaauuguuuauag

SEQ ID NO: 1865416 - RNA, 19 nt, Artificial Sequence
  Description of Artificial Sequence: Synthetic oligonucleotide
  Antisense strand to SEQ ID NO: 1865415
cuauaaacaauucauguga

SEQ ID NO: 1865417 - RNA, 19 nt, Artificial Sequence
  Description of Artificial Sequence: Synthetic oligonucleotide
  Sense strand starting at position 2553 of SEQ ID NO: 1564243
acaugaauuguuuauagug

SEQ ID NO: 1865418 - RNA, 19 nt, Artificial Sequence
  Description of Artificial Sequence: Synthetic oligonucleotide
  Antisense strand to SEQ ID NO: 1865417
cacuauaaacaauucaugu

SEQ ID NO: 1865419 - RNA, 19 nt, Artificial Sequence
  Description of Artificial Sequence: Synthetic oligonucleotide
  Sense strand starting at position 2610 of SEQ ID NO: 1564243
guaaguuaucaguauccac

SEQ ID NO: 1865420 - RNA, 19 nt, Artificial Sequence
  Description of Artificial Sequence: Synthetic oligonucleotide
  Antisense strand to SEQ ID NO: 1865419
guggauacugauaacuuac

SEQ ID NO: 1865421 - RNA, 19 nt, Artificial Sequence
  Description of Artificial Sequence: Synthetic oligonucleotide
  Sense strand starting at position 2651 of SEQ ID NO: 1564243
aggauuauuaugugcagua

SEQ ID NO: 1865422 - RNA, 19 nt, Artificial Sequence
  Description of Artificial Sequence: Synthetic oligonucleotide
  Antisense strand to SEQ ID NO: 1865421
uacugcacauaauaauccu

SEQ ID NO: 1865423 - RNA, 19 nt, Artificial Sequence
  Description of Artificial Sequence: Synthetic oligonucleotide
  Sense strand starting at position 2652 of SEQ ID NO: 1564243
ggauuauuaugugcaguaa

SEQ ID NO: 1865424 - RNA, 19 nt, Artificial Sequence
  Description of Artificial Sequence: Synthetic oligonucleotide
  Antisense strand to SEQ ID NO: 1865423
uuacugcacauaauaaucc

SEQ ID NO: 1865425 - RNA, 19 nt, Artificial Sequence
  Description of Artificial Sequence: Synthetic oligonucleotide
  Sense strand starting at position 2653 of SEQ ID NO: 1564243
gauuauuaugugcaguaac

SEQ ID NO: 1865426 - RNA, 19 nt, Artificial Sequence
  Description of Artificial Sequence: Synthetic oligonucleotide
  Antisense strand to SEQ ID NO: 1865425
guuacugcacauaauaauc

SEQ ID NO: 1865427 - RNA, 19 nt, Artificial Sequence
  Description of Artificial Sequence: Synthetic oligonucleotide
  Sense strand starting at position 2707 of SEQ ID NO: 1564243
acgccaucgcuugcuuuaa

SEQ ID NO: 1865428 - RNA, 19 nt, Artificial Sequence
  Description of Artificial Sequence: Synthetic oligonucleotide
  Antisense strand to SEQ ID NO: 1865427
uuaaagcaagcgauggcgu

SEQ ID NO: 1865429 - RNA, 19 nt, Artificial Sequence
  Description of Artificial Sequence: Synthetic oligonucleotide
  Sense strand starting at position 2767 of SEQ ID NO: 1564243
aucccaguugcauaaggau

SEQ ID NO: 1865430 - RNA, 19 nt, Artificial Sequence
  Description of Artificial Sequence: Synthetic oligonucleotide
  Antisense strand to SEQ ID NO: 1865429
auccuuaugcaacugggau

SEQ ID NO: 1865431 - RNA, 19 nt, Artificial Sequence
  Description of Artificial Sequence: Synthetic oligonucleotide
  Sense strand starting at position 2824 of SEQ ID NO: 1564243
aagggcuguuuguuuaaau

SEQ ID NO: 1865432 - RNA, 19 nt, Artificial Sequence
  Description of Artificial Sequence: Synthetic oligonucleotide
  Antisense strand to SEQ ID NO: 1865431
auuuaaacaaacagcccuu

SEQ ID NO: 1865433 - RNA, 19 nt, Artificial Sequence
  Description of Artificial Sequence: Synthetic oligonucleotide
  Sense strand starting at position 2825 of SEQ ID NO: 1564243
agggcuguuuguuuaaauc

SEQ ID NO: 1865434 - RNA, 19 nt, Artificial Sequence
  Description of Artificial Sequence: Synthetic oligonucleotide
  Antisense strand to SEQ ID NO: 1865433
gauuuaaacaaacagcccu

SEQ ID NO: 1865435 - RNA, 19 nt, Artificial Sequence
  Description of Artificial Sequence: Synthetic oligonucleotide
  Sense strand starting at position 2899 of SEQ ID NO: 1564243
uuauauagacuuggcuaau

SEQ ID NO: 1865436 - RNA, 19 nt, Artificial Sequence
  Description of Artificial Sequence: Synthetic oligonucleotide
  Antisense strand to SEQ ID NO: 1865435
auuagccaagucuauauaa

SEQ ID NO: 1865437 - RNA, 19 nt, Artificial Sequence
  Description of Artificial Sequence: Synthetic oligonucleotide
  Sense strand starting at position 3018 of SEQ ID NO: 1564243
gcuuaaugucuugguuuag

SEQ ID NO: 1865438 - RNA, 19 nt, Artificial Sequence
  Description of Artificial Sequence: Synthetic oligonucleotide
  Antisense strand to SEQ ID NO: 1865437
cuaaaccaagacauuaagc

SEQ ID NO: 1865439 - RNA, 19 nt, Artificial Sequence
  Description of Artificial Sequence: Synthetic oligonucleotide
  Sense strand starting at position 3022 of SEQ ID NO: 1564243
aaugucuugguuuagguaa

SEQ ID NO: 1865440 - RNA, 19 nt, Artificial Sequence
  Description of Artificial Sequence: Synthetic oligonucleotide
  Antisense strand to SEQ ID NO: 1865439
uuaccuaaaccaagacauu

SEQ ID NO: 1865441 - RNA, 19 nt, Artificial Sequence
  Description of Artificial Sequence: Synthetic oligonucleotide
  Sense strand starting at position 3029 of SEQ ID NO: 1564243
ugguuuagguaacuauuaa

SEQ ID NO: 1865442 - RNA, 19 nt, Artificial Sequence
  Description of Artificial Sequence: Synthetic oligonucleotide
  Antisense strand to SEQ ID NO: 1865441
uuaauaguuaccuaaacca

SEQ ID NO: 1865443 - RNA, 19 nt, Artificial Sequence
  Description of Artificial Sequence: Synthetic oligonucleotide
  Sense strand starting at position 3067 of SEQ ID NO: 1564243
aguacuugauuugauagca

SEQ ID NO: 1865444 - RNA, 19 nt, Artificial Sequence
  Description of Artificial Sequence: Synthetic oligonucleotide
  Antisense strand to SEQ ID NO: 1865443
ugcuaucaaaucaaguacu

SEQ ID NO: 1865445 - RNA, 19 nt, Artificial Sequence
  Description of Artificial Sequence: Synthetic oligonucleotide
  Sense strand starting at position 3139 of SEQ ID NO: 1564243
uguuaaacuugagaaggau

SEQ ID NO: 1865446 - RNA, 19 nt, Artificial Sequence
  Description of Artificial Sequence: Synthetic oligonucleotide
  Antisense strand to SEQ ID NO: 1865445
auccuucucaaguuuaaca

SEQ ID NO: 1865447 - RNA, 19 nt, Artificial Sequence
  Description of Artificial Sequence: Synthetic oligonucleotide
  Sense strand starting at position 3157 of SEQ ID NO: 1564243
uuaugagucuaacccguga

SEQ ID NO: 1865448 - RNA, 19 nt, Artificial Sequence
  Description of Artificial Sequence: Synthetic oligonucleotide
  Antisense strand to SEQ ID NO: 1865447
ucacggguuagacucauaa

SEQ ID NO: 1865449 - RNA, 19 nt, Artificial Sequence
  Description of Artificial Sequence: Synthetic oligonucleotide
  Sense strand starting at position 3159 of SEQ ID NO: 1564243
augagucuaacccgugauc

SEQ ID NO: 1865450 - RNA, 19 nt, Artificial Sequence
  Description of Artificial Sequence: Synthetic oligonucleotide
  Antisense strand to SEQ ID NO: 1865449
gaucacggguuagacucau

SEQ ID NO: 1865451 - RNA, 19 nt, Artificial Sequence
  Description of Artificial Sequence: Synthetic oligonucleotide
  Sense strand starting at position 3161 of SEQ ID NO: 1564243
gagucuaacccgugaucua

SEQ ID NO: 1865452 - RNA, 19 nt, Artificial Sequence
  Description of Artificial Sequence: Synthetic oligonucleotide
  Antisense strand to SEQ ID NO: 1865451
uagaucacggguuagacuc

SEQ ID NO: 1865453 - RNA, 19 nt, Artificial Sequence
  Description of Artificial Sequence: Synthetic oligonucleotide
  Sense strand starting at position 3162 of SEQ ID NO: 1564243
agucuaacccgugaucuaa

SEQ ID NO: 1865454 - RNA, 19 nt, Artificial Sequence
  Description of Artificial Sequence: Synthetic oligonucleotide
  Antisense strand to SEQ ID NO: 1865453
uuagaucacggguuagacu

SEQ ID NO: 1865455 - RNA, 19 nt, Artificial Sequence
  Description of Artificial Sequence: Synthetic oligonucleotide
  Sense strand starting at position 3266 of SEQ ID NO: 1564243
gaagucuuccuucgagguc

SEQ ID NO: 1865456 - RNA, 19 nt, Artificial Sequence
  Description of Artificial Sequence: Synthetic oligonucleotide
  Antisense strand to SEQ ID NO: 1865455
gaccucgaaggaagacuuc

SEQ ID NO: 1865457 - RNA, 19 nt, Artificial Sequence
  Description of Artificial Sequence: Synthetic oligonucleotide
  Sense strand starting at position 3281 of SEQ ID NO: 1564243
ggucuuuaauggcucauau

SEQ ID NO: 1865458 - RNA, 19 nt, Artificial Sequence
  Description of Artificial Sequence: Synthetic oligonucleotide
  Antisense strand to SEQ ID NO: 1865457
auaugagccauuaaagacc

SEQ ID NO: 1865459 - RNA, 19 nt, Artificial Sequence
  Description of Artificial Sequence: Synthetic oligonucleotide
  Sense strand starting at position 3283 of SEQ ID NO: 1564243
ucuuuaauggcucauaugu

SEQ ID NO: 1865460 - RNA, 19 nt, Artificial Sequence
  Description of Artificial Sequence: Synthetic oligonucleotide
  Antisense strand to SEQ ID NO: 1865459
acauaugagccauuaaaga

SEQ ID NO: 1865461 - RNA, 19 nt, Artificial Sequence
  Description of Artificial Sequence: Synthetic oligonucleotide
  Sense strand starting at position 3292 of SEQ ID NO: 1564243
gcucauaugucuuuguuaa

SEQ ID NO: 1865462 - RNA, 19 nt, Artificial Sequence
  Description of Artificial Sequence: Synthetic oligonucleotide
  Antisense strand to SEQ ID NO: 1865461
uuaacaaagacauaugagc

SEQ ID NO: 1865463 - RNA, 19 nt, Artificial Sequence
  Description of Artificial Sequence: Synthetic oligonucleotide
  Sense strand starting at position 3293 of SEQ ID NO: 1564243
cucauaugucuuuguuaaa

SEQ ID NO: 1865464 - RNA, 19 nt, Artificial Sequence
  Description of Artificial Sequence: Synthetic oligonucleotide
  Antisense strand to SEQ ID NO: 1865463
uuuaacaaagacauaugag

SEQ ID NO: 1865465 - RNA, 19 nt, Artificial Sequence
  Description of Artificial Sequence: Synthetic oligonucleotide
  Sense strand starting at position 3505 of SEQ ID NO: 1564243
cucaccauguuaguguaaa

SEQ ID NO: 1865466 - RNA, 19 nt, Artificial Sequence
  Description of Artificial Sequence: Synthetic oligonucleotide
  Antisense strand to SEQ ID NO: 1865465
uuuacacuaacauggugag

SEQ ID NO: 1865467 - RNA, 19 nt, Artificial Sequence
  Description of Artificial Sequence: Synthetic oligonucleotide
  Sense strand starting at position 3540 of SEQ ID NO: 1564243
gggcauuaauugcucaauu

SEQ ID NO: 1865468 - RNA, 19 nt, Artificial Sequence
  Description of Artificial Sequence: Synthetic oligonucleotide
  Antisense strand to SEQ ID NO: 1865467
aauugagcaauuaaugccc

SEQ ID NO: 1865469 - RNA, 19 nt, Artificial Sequence
  Description of Artificial Sequence: Synthetic oligonucleotide
  Sense strand starting at position 3541 of SEQ ID NO: 1564243
ggcauuaauugcucaauuc

SEQ ID NO: 1865470 - RNA, 19 nt, Artificial Sequence
  Description of Artificial Sequence: Synthetic oligonucleotide
  Antisense strand to SEQ ID NO: 1865469
gaauugagcaauuaaugcc

SEQ ID NO: 1865471 - RNA, 19 nt, Artificial Sequence
  Description of Artificial Sequence: Synthetic oligonucleotide
  Sense strand starting at position 63 of SEQ ID NO: 1564244
uauugugggccuugacaaa

SEQ ID NO: 1865472 - RNA, 19 nt, Artificial Sequence
  Description of Artificial Sequence: Synthetic oligonucleotide
  Antisense strand to SEQ ID NO: 1865471
uuugucaaggcccacaaua

SEQ ID NO: 1865473 - RNA, 19 nt, Artificial Sequence
  Description of Artificial Sequence: Synthetic oligonucleotide
  Sense strand starting at position 82 of SEQ ID NO: 1564244
gccgaagugcccuuguacu

SEQ ID NO: 1865474 - RNA, 19 nt, Artificial Sequence
  Description of Artificial Sequence: Synthetic oligonucleotide
  Antisense strand to SEQ ID NO: 1865473
aguacaagggcacuucggc

SEQ ID NO: 1865475 - RNA, 19 nt, Artificial Sequence
  Description of Artificial Sequence: Synthetic oligonucleotide
  Sense strand starting at position 342 of SEQ ID NO: 1564244
acuugcugacuugaaauau

SEQ ID NO: 1865476 - RNA, 19 nt, Artificial Sequence
  Description of Artificial Sequence: Synthetic oligonucleotide
  Antisense strand to SEQ ID NO: 1865475
auauuucaagucagcaagu

SEQ ID NO: 1865477 - RNA, 19 nt, Artificial Sequence
  Description of Artificial Sequence: Synthetic oligonucleotide
  Sense strand starting at position 461 of SEQ ID NO: 1564244
gcuaaaugauuugauagga

SEQ ID NO: 1865478 - RNA, 19 nt, Artificial Sequence
  Description of Artificial Sequence: Synthetic oligonucleotide
  Antisense strand to SEQ ID NO: 1865477
uccuaucaaaucauuuagc

SEQ ID NO: 1865479 - RNA, 19 nt, Artificial Sequence
  Description of Artificial Sequence: Synthetic oligonucleotide
  Sense strand starting at position 466 of SEQ ID NO: 1564244
augauuugauaggaguaag

SEQ ID NO: 1865480 - RNA, 19 nt, Artificial Sequence
  Description of Artificial Sequence: Synthetic oligonucleotide
  Antisense strand to SEQ ID NO: 1865479
cuuacuccuaucaaaucau

SEQ ID NO: 1865481 - RNA, 19 nt, Artificial Sequence
  Description of Artificial Sequence: Synthetic oligonucleotide
  Sense strand starting at position 477 of SEQ ID NO: 1564244
ggaguaaggugcuuagaag

SEQ ID NO: 1865482 - RNA, 19 nt, Artificial Sequence
  Description of Artificial Sequence: Synthetic oligonucleotide
  Antisense strand to SEQ ID NO: 1865481
cuucuaagcaccuuacucc

SEQ ID NO: 1865483 - RNA, 19 nt, Artificial Sequence
  Description of Artificial Sequence: Synthetic oligonucleotide
  Sense strand starting at position 478 of SEQ ID NO: 1564244
gaguaaggugcuuagaaga

SEQ ID NO: 1865484 - RNA, 19 nt, Artificial Sequence
  Description of Artificial Sequence: Synthetic oligonucleotide
  Antisense strand to SEQ ID NO: 1865483
ucuucuaagcaccuuacuc

SEQ ID NO: 1865485 - RNA, 19 nt, Artificial Sequence
  Description of Artificial Sequence: Synthetic oligonucleotide
  Sense strand starting at position 549 of SEQ ID NO: 1564244
aucauuacucauugaguca

SEQ ID NO: 1865486 - RNA, 19 nt, Artificial Sequence
  Description of Artificial Sequence: Synthetic oligonucleotide
  Antisense strand to SEQ ID NO: 1865485
ugacucaaugaguaaugau

SEQ ID NO: 1865487 - RNA, 19 nt, Artificial Sequence
  Description of Artificial Sequence: Synthetic oligonucleotide
  Sense strand starting at position 894 of SEQ ID NO: 1564244
gaaagacuuuaugugggua

SEQ ID NO: 1865488 - RNA, 19 nt, Artificial Sequence
  Description of Artificial Sequence: Synthetic oligonucleotide
  Antisense strand to SEQ ID NO: 1865487
uacccacauaaagucuuuc

SEQ ID NO: 1865489 - RNA, 19 nt, Artificial Sequence
  Description of Artificial Sequence: Synthetic oligonucleotide
  Sense strand starting at position 897 of SEQ ID NO: 1564244
agacuuuauguggguagaa

SEQ ID NO: 1865490 - RNA, 19 nt, Artificial Sequence
  Description of Artificial Sequence: Synthetic oligonucleotide
  Antisense strand to SEQ ID NO: 1865489
uucuacccacauaaagucu

SEQ ID NO: 1865491 - RNA, 19 nt, Artificial Sequence
  Description of Artificial Sequence: Synthetic oligonucleotide
  Sense strand starting at position 898 of SEQ ID NO: 1564244
gacuuuauguggguagaac

SEQ ID NO: 1865492 - RNA, 19 nt, Artificial Sequence
  Description of Artificial Sequence: Synthetic oligonucleotide
  Antisense strand to SEQ ID NO: 1865491
guucuacccacauaaaguc

SEQ ID NO: 1865493 - RNA, 19 nt, Artificial Sequence
  Description of Artificial Sequence: Synthetic oligonucleotide
  Sense strand starting at position 899 of SEQ ID NO: 1564244
acuuuauguggguagaacu

SEQ ID NO: 1865494 - RNA, 19 nt, Artificial Sequence
  Description of Artificial Sequence: Synthetic oligonucleotide
  Antisense strand to SEQ ID NO: 1865493
aguucuacccacauaaagu

SEQ ID NO: 1865495 - RNA, 19 nt, Artificial Sequence
  Description of Artificial Sequence: Synthetic oligonucleotide
  Sense strand starting at position 1214 of SEQ ID NO: 1564244
uaagguaacuaugcagaca

SEQ ID NO: 1865496 - RNA, 19 nt, Artificial Sequence
  Description of Artificial Sequence: Synthetic oligonucleotide
  Antisense strand to SEQ ID NO: 1865495
ugucugcauaguuaccuua

SEQ ID NO: 1865497 - RNA, 19 nt, Artificial Sequence
  Description of Artificial Sequence: Synthetic oligonucleotide
  Sense strand starting at position 1225 of SEQ ID NO: 1564244
ugcagacaggcccauuauu

SEQ ID NO: 1865498 - RNA, 19 nt, Artificial Sequence
  Description of Artificial Sequence: Synthetic oligonucleotide
  Antisense strand to SEQ ID NO: 1865497
aauaaugggccugucugca

SEQ ID NO: 1865499 - RNA, 19 nt, Artificial Sequence
  Description of Artificial Sequence: Synthetic oligonucleotide
  Sense strand starting at position 1245 of SEQ ID NO: 1564244
gagaaagcacaguguuauu

SEQ ID NO: 1865500 - RNA, 19 nt, Artificial Sequence
  Description of Artificial Sequence: Synthetic oligonucleotide
  Antisense strand to SEQ ID NO: 1865499
aauaacacugugcuuucuc

SEQ ID NO: 1865501 - RNA, 19 nt, Artificial Sequence
  Description of Artificial Sequence: Synthetic oligonucleotide
  Sense strand starting at position 1489 of SEQ ID NO: 1564244
ccaaauacuccuggaaguu

SEQ ID NO: 1865502 - RNA, 19 nt, Artificial Sequence
  Description of Artificial Sequence: Synthetic oligonucleotide
  Antisense strand to SEQ ID NO: 1865501
aacuuccaggaguauuugg

SEQ ID NO: 1865503 - RNA, 19 nt, Artificial Sequence
  Description of Artificial Sequence: Synthetic oligonucleotide
  Sense strand starting at position 1499 of SEQ ID NO: 1564244
cuggaaguuuaaccuaaau

SEQ ID NO: 1865504 - RNA, 19 nt, Artificial Sequence
  Description of Artificial Sequence: Synthetic oligonucleotide
  Antisense strand to SEQ ID NO: 1865503
auuuagguuaaacuuccag

SEQ ID NO: 1865505 - RNA, 19 nt, Artificial Sequence
  Description of Artificial Sequence: Synthetic oligonucleotide
  Sense strand starting at position 1516 of SEQ ID NO: 1564244
aucaucuuagaugguuuaa

SEQ ID NO: 1865506 - RNA, 19 nt, Artificial Sequence
  Description of Artificial Sequence: Synthetic oligonucleotide
  Antisense strand to SEQ ID NO: 1865505
uuaaaccaucuaagaugau

SEQ ID NO: 1865507 - RNA, 19 nt, Artificial Sequence
  Description of Artificial Sequence: Synthetic oligonucleotide
  Sense strand starting at position 1680 of SEQ ID NO: 1564244
uacauaccugguugacaga

SEQ ID NO: 1865508 - RNA, 19 nt, Artificial Sequence
  Description of Artificial Sequence: Synthetic oligonucleotide
  Antisense strand to SEQ ID NO: 1865507
ucugucaaccagguaugua

SEQ ID NO: 1865509 - RNA, 19 nt, Artificial Sequence
  Description of Artificial Sequence: Synthetic oligonucleotide
  Sense strand starting at position 1818 of SEQ ID NO: 1564244
uucugugacccggauuaga

SEQ ID NO: 1865510 - RNA, 19 nt, Artificial Sequence
  Description of Artificial Sequence: Synthetic oligonucleotide
  Antisense strand to SEQ ID NO: 1865509
ucuaauccgggucacagaa

SEQ ID NO: 1865511 - RNA, 19 nt, Artificial Sequence
  Description of Artificial Sequence: Synthetic oligonucleotide
  Sense strand starting at position 1829 of SEQ ID NO: 1564244
ggauuagaauaucagagaa

SEQ ID NO: 1865512 - RNA, 19 nt, Artificial Sequence
  Description of Artificial Sequence: Synthetic oligonucleotide
  Antisense strand to SEQ ID NO: 1865511
uucucugauauucuaaucc

SEQ ID NO: 1865513 - RNA, 19 nt, Artificial Sequence
  Description of Artificial Sequence: Synthetic oligonucleotide
  Sense strand starting at position 1831 of SEQ ID NO: 1564244
auuagaauaucagagaaac

SEQ ID NO: 1865514 - RNA, 19 nt, Artificial Sequence
  Description of Artificial Sequence: Synthetic oligonucleotide
  Antisense strand to SEQ ID NO: 1865513
guuucucugauauucuaau

SEQ ID NO: 1865515 - RNA, 19 nt, Artificial Sequence
  Description of Artificial Sequence: Synthetic oligonucleotide
  Sense strand starting at position 1894 of SEQ ID NO: 1564244
uuggguuaauacuuccaua

SEQ ID NO: 1865516 - RNA, 19 nt, Artificial Sequence
  Description of Artificial Sequence: Synthetic oligonucleotide
  Antisense strand to SEQ ID NO: 1865515
uauggaaguauuaacccaa

SEQ ID NO: 1865517 - RNA, 19 nt, Artificial Sequence
  Description of Artificial Sequence: Synthetic oligonucleotide
  Sense strand starting at position 2048 of SEQ ID NO: 1564244
ugcgauucucugguuacgu

SEQ ID NO: 1865518 - RNA, 19 nt, Artificial Sequence
  Description of Artificial Sequence: Synthetic oligonucleotide
  Antisense strand to SEQ ID NO: 1865517
acguaaccagagaaucgca

SEQ ID NO: 1865519 - RNA, 19 nt, Artificial Sequence
  Description of Artificial Sequence: Synthetic oligonucleotide
  Sense strand starting at position 2082 of SEQ ID NO: 1564244
uugaguccugucuagaggu

SEQ ID NO: 1865520 - RNA, 19 nt, Artificial Sequence
  Description of Artificial Sequence: Synthetic oligonucleotide
  Antisense strand to SEQ ID NO: 1865519
accucuagacaggacucaa

SEQ ID NO: 1865521 - RNA, 19 nt, Artificial Sequence
  Description of Artificial Sequence: Synthetic oligonucleotide
  Sense strand starting at position 2084 of SEQ ID NO: 1564244
gaguccugucuagagguuu

SEQ ID NO: 1865522 - RNA, 19 nt, Artificial Sequence
  Description of Artificial Sequence: Synthetic oligonucleotide
  Antisense strand to SEQ ID NO: 1865521
aaaccucuagacaggacuc

SEQ ID NO: 1865523 - RNA, 19 nt, Artificial Sequence
  Description of Artificial Sequence: Synthetic oligonucleotide
  Sense strand starting at position 2092 of SEQ ID NO: 1564244
ucuagagguuuccuugaca

SEQ ID NO: 1865524 - RNA, 19 nt, Artificial Sequence
  Description of Artificial Sequence: Synthetic oligonucleotide
  Antisense strand to SEQ ID NO: 1865523
ugucaaggaaaccucuaga

SEQ ID NO: 1865525 - RNA, 19 nt, Artificial Sequence
  Description of Artificial Sequence: Synthetic oligonucleotide
  Sense strand starting at position 2134 of SEQ ID NO: 1564244
ugagauaccugguucuuag

SEQ ID NO: 1865526 - RNA, 19 nt, Artificial Sequence
  Description of Artificial Sequence: Synthetic oligonucleotide
  Antisense strand to SEQ ID NO: 1865525
cuaagaaccagguaucuca

SEQ ID NO: 1865527 - RNA, 19 nt, Artificial Sequence
  Description of Artificial Sequence: Synthetic oligonucleotide
  Sense strand starting at position 2137 of SEQ ID NO: 1564244
gauaccugguucuuagaua

SEQ ID NO: 1865528 - RNA, 19 nt, Artificial Sequence
  Description of Artificial Sequence: Synthetic oligonucleotide
  Antisense strand to SEQ ID NO: 1865527
uaucuaagaaccagguauc

SEQ ID NO: 1865529 - RNA, 19 nt, Artificial Sequence
  Description of Artificial Sequence: Synthetic oligonucleotide
  Sense strand starting at position 2142 of SEQ ID NO: 1564244
cugguucuuagauaggcua

SEQ ID NO: 1865530 - RNA, 19 nt, Artificial Sequence
  Description of Artificial Sequence: Synthetic oligonucleotide
  Antisense strand to SEQ ID NO: 1865529
uagccuaucuaagaaccag

SEQ ID NO: 1865531 - RNA, 19 nt, Artificial Sequence
  Description of Artificial Sequence: Synthetic oligonucleotide
  Sense strand starting at position 2474 of SEQ ID NO: 1564244
aggucuggcacuugaauua

SEQ ID NO: 1865532 - RNA, 19 nt, Artificial Sequence
  Description of Artificial Sequence: Synthetic oligonucleotide
  Antisense strand to SEQ ID NO: 1865531
uaauucaagugccagaccu

SEQ ID NO: 1865533 - RNA, 19 nt, Artificial Sequence
  Description of Artificial Sequence: Synthetic oligonucleotide
  Sense strand starting at position 2598 of SEQ ID NO: 1564244
gccauugagcacuggaaau

SEQ ID NO: 1865534 - RNA, 19 nt, Artificial Sequence
  Description of Artificial Sequence: Synthetic oligonucleotide
  Antisense strand to SEQ ID NO: 1865533
auuuccagugcucaauggc

SEQ ID NO: 1865535 - RNA, 19 nt, Artificial Sequence
  Description of Artificial Sequence: Synthetic oligonucleotide
  Sense strand starting at position 2610 of SEQ ID NO: 1564244
uggaaauggagcuagugua

SEQ ID NO: 1865536 - RNA, 19 nt, Artificial Sequence
  Description of Artificial Sequence: Synthetic oligonucleotide
  Antisense strand to SEQ ID NO: 1865535
uacacuagcuccauuucca

SEQ ID NO: 1865537 - RNA, 19 nt, Artificial Sequence
  Description of Artificial Sequence: Synthetic oligonucleotide
  Sense strand starting at position 2620 of SEQ ID NO: 1564244
gcuaguguagcugagaaau

SEQ ID NO: 1865538 - RNA, 19 nt, Artificial Sequence
  Description of Artificial Sequence: Synthetic oligonucleotide
  Antisense strand to SEQ ID NO: 1865537
auuucucagcuacacuagc

SEQ ID NO: 1865539 - RNA, 19 nt, Artificial Sequence
  Description of Artificial Sequence: Synthetic oligonucleotide
  Sense strand starting at position 2626 of SEQ ID NO: 1564244
guagcugagaaauggaauu

SEQ ID NO: 1865540 - RNA, 19 nt, Artificial Sequence
  Description of Artificial Sequence: Synthetic oligonucleotide
  Antisense strand to SEQ ID NO: 1865539
aauuccauuucucagcuac

SEQ ID NO: 1865541 - RNA, 19 nt, Artificial Sequence
  Description of Artificial Sequence: Synthetic oligonucleotide
  Sense strand starting at position 2681 of SEQ ID NO: 1564244
cugacuacauuggucagua

SEQ ID NO: 1865542 - RNA, 19 nt, Artificial Sequence
  Description of Artificial Sequence: Synthetic oligonucleotide
  Antisense strand to SEQ ID NO: 1865541
uacugaccaauguagucag

SEQ ID NO: 1865543 - RNA, 19 nt, Artificial Sequence
  Description of Artificial Sequence: Synthetic oligonucleotide
  Sense strand starting at position 2683 of SEQ ID NO: 1564244
gacuacauuggucaguaca

SEQ ID NO: 1865544 - RNA, 19 nt, Artificial Sequence
  Description of Artificial Sequence: Synthetic oligonucleotide
  Antisense strand to SEQ ID NO: 1865543
uguacugaccaauguaguc

SEQ ID NO: 1865545 - RNA, 19 nt, Artificial Sequence
  Description of Artificial Sequence: Synthetic oligonucleotide
  Sense strand starting at position 3230 of SEQ ID NO: 1564244
gcaacaaagccucagagau

SEQ ID NO: 1865546 - RNA, 19 nt, Artificial Sequence
  Description of Artificial Sequence: Synthetic oligonucleotide
  Antisense strand to SEQ ID NO: 1865545
aucucugaggcuuuguugc

SEQ ID NO: 1865547 - RNA, 19 nt, Artificial Sequence
  Description of Artificial Sequence: Synthetic oligonucleotide
  Sense strand starting at position 3331 of SEQ ID NO: 1564244
gguugaugucaggacuuuc

SEQ ID NO: 1865548 - RNA, 19 nt, Artificial Sequence
  Description of Artificial Sequence: Synthetic oligonucleotide
  Antisense strand to SEQ ID NO: 1865547
gaaaguccugacaucaacc

SEQ ID NO: 1865549 - RNA, 19 nt, Artificial Sequence
  Description of Artificial Sequence: Synthetic oligonucleotide
  Sense strand starting at position 3886 of SEQ ID NO: 1564244
gaagaaagcuaugcuaaga

SEQ ID NO: 1865550 - RNA, 19 nt, Artificial Sequence
  Description of Artificial Sequence: Synthetic oligonucleotide
  Antisense strand to SEQ ID NO: 1865549
ucuuagcauagcuuucuuc

SEQ ID NO: 1865551 - RNA, 19 nt, Artificial Sequence
  Description of Artificial Sequence: Synthetic oligonucleotide
  Sense strand starting at position 26 of SEQ ID NO: 1564245
gaagauauguuagcuagua

SEQ ID NO: 1865552 - RNA, 19 nt, Artificial Sequence
  Description of Artificial Sequence: Synthetic oligonucleotide
  Antisense strand to SEQ ID NO: 1865551
uacuagcuaacauaucuuc

SEQ ID NO: 1865553 - RNA, 19 nt, Artificial Sequence
  Description of Artificial Sequence: Synthetic oligonucleotide
  Sense strand starting at position 27 of SEQ ID NO: 1564245
aagauauguuagcuaguag

SEQ ID NO: 1865554 - RNA, 19 nt, Artificial Sequence
  Description of Artificial Sequence: Synthetic oligonucleotide
  Antisense strand to SEQ ID NO: 1865553
cuacuagcuaacauaucuu

SEQ ID NO: 1865555 - RNA, 19 nt, Artificial Sequence
  Description of Artificial Sequence: Synthetic oligonucleotide
  Sense strand starting at position 28 of SEQ ID NO: 1564245
agauauguuagcuaguagu

SEQ ID NO: 1865556 - RNA, 19 nt, Artificial Sequence
  Description of Artificial Sequence: Synthetic oligonucleotide
  Antisense strand to SEQ ID NO: 1865555
acuacuagcuaacauaucu

SEQ ID NO: 1865557 - RNA, 19 nt, Artificial Sequence
  Description of Artificial Sequence: Synthetic oligonucleotide
  Sense strand starting at position 44 of SEQ ID NO: 1564245
aguagaaccuuaccaaguu

SEQ ID NO: 1865558 - RNA, 19 nt, Artificial Sequence
  Description of Artificial Sequence: Synthetic oligonucleotide
  Antisense strand to SEQ ID NO: 1865557
aacuugguaagguucuacu

SEQ ID NO: 1865559 - RNA, 19 nt, Artificial Sequence
  Description of Artificial Sequence: Synthetic oligonucleotide
  Sense strand starting at position 68 of SEQ ID NO: 1564245
auaagagauugcuuugcca

SEQ ID NO: 1865560 - RNA, 19 nt, Artificial Sequence
  Description of Artificial Sequence: Synthetic oligonucleotide
  Antisense strand to SEQ ID NO: 1865559
uggcaaagcaaucucuuau

SEQ ID NO: 1865561 - RNA, 19 nt, Artificial Sequence
  Description of Artificial Sequence: Synthetic oligonucleotide
  Sense strand starting at position 378 of SEQ ID NO: 1564245
aagagauugcuuugaguag

SEQ ID NO: 1865562 - RNA, 19 nt, Artificial Sequence
  Description of Artificial Sequence: Synthetic oligonucleotide
  Antisense strand to SEQ ID NO: 1865561
cuacucaaagcaaucucuu

SEQ ID NO: 1865563 - RNA, 19 nt, Artificial Sequence
  Description of Artificial Sequence: Synthetic oligonucleotide
  Sense strand starting at position 382 of SEQ ID NO: 1564245
gauugcuuugaguaguaau

SEQ ID NO: 1865564 - RNA, 19 nt, Artificial Sequence
  Description of Artificial Sequence: Synthetic oligonucleotide
  Antisense strand to SEQ ID NO: 1865563
auuacuacucaaagcaauc

SEQ ID NO: 1865565 - RNA, 19 nt, Artificial Sequence
  Description of Artificial Sequence: Synthetic oligonucleotide
  Sense strand starting at position 442 of SEQ ID NO: 1564245
acacuaauuggugguuaag

SEQ ID NO: 1865566 - RNA, 19 nt, Artificial Sequence
  Description of Artificial Sequence: Synthetic oligonucleotide
  Antisense strand to SEQ ID NO: 1865565
cuuaaccaccaauuagugu

SEQ ID NO: 1865567 - RNA, 19 nt, Artificial Sequence
  Description of Artificial Sequence: Synthetic oligonucleotide
  Sense strand starting at position 444 of SEQ ID NO: 1564245
acuaauuggugguuaagaa

SEQ ID NO: 1865568 - RNA, 19 nt, Artificial Sequence
  Description of Artificial Sequence: Synthetic oligonucleotide
  Antisense strand to SEQ ID NO: 1865567
uucuuaaccaccaauuagu

SEQ ID NO: 1865569 - RNA, 19 nt, Artificial Sequence
  Description of Artificial Sequence: Synthetic oligonucleotide
  Sense strand starting at position 688 of SEQ ID NO: 1564245
aaagaaaucuugucgucau

SEQ ID NO: 1865570 - RNA, 19 nt, Artificial Sequence
  Description of Artificial Sequence: Synthetic oligonucleotide
  Antisense strand to SEQ ID NO: 1865569
augacgacaagauuucuuu

SEQ ID NO: 1865571 - RNA, 19 nt, Artificial Sequence
  Description of Artificial Sequence: Synthetic oligonucleotide
  Sense strand starting at position 692 of SEQ ID NO: 1564245
aaaucuugucgucaugaca

SEQ ID NO: 1865572 - RNA, 19 nt, Artificial Sequence
  Description of Artificial Sequence: Synthetic oligonucleotide
  Antisense strand to SEQ ID NO: 1865571
ugucaugacgacaagauuu

SEQ ID NO: 1865573 - RNA, 19 nt, Artificial Sequence
  Description of Artificial Sequence: Synthetic oligonucleotide
  Sense strand starting at position 695 of SEQ ID NO: 1564245
ucuugucgucaugacaaca

SEQ ID NO: 1865574 - RNA, 19 nt, Artificial Sequence
  Description of Artificial Sequence: Synthetic oligonucleotide
  Antisense strand to SEQ ID NO: 1865573
uguugucaugacgacaaga

SEQ ID NO: 1865575 - RNA, 19 nt, Artificial Sequence
  Description of Artificial Sequence: Synthetic oligonucleotide
  Sense strand starting at position 750 of SEQ ID NO: 1564245
cuagguaaguugucaugac

SEQ ID NO: 1865576 - RNA, 19 nt, Artificial Sequence
  Description of Artificial Sequence: Synthetic oligonucleotide
  Antisense strand to SEQ ID NO: 1865575
gucaugacaacuuaccuag

SEQ ID NO: 1865577 - RNA, 19 nt, Artificial Sequence
  Description of Artificial Sequence: Synthetic oligonucleotide
  Sense strand starting at position 754 of SEQ ID NO: 1564245
guaaguugucaugacaaca

SEQ ID NO: 1865578 - RNA, 19 nt, Artificial Sequence
  Description of Artificial Sequence: Synthetic oligonucleotide
  Antisense strand to SEQ ID NO: 1865577
uguugucaugacaacuuac

SEQ ID NO: 1865579 - RNA, 19 nt, Artificial Sequence
  Description of Artificial Sequence: Synthetic oligonucleotide
  Sense strand starting at position 806 of SEQ ID NO: 1564245
uccaauuaugagcaaagcu

SEQ ID NO: 1865580 - RNA, 19 nt, Artificial Sequence
  Description of Artificial Sequence: Synthetic oligonucleotide
  Antisense strand to SEQ ID NO: 1865579
agcuuugcucauaauugga

SEQ ID NO: 1865581 - RNA, 19 nt, Artificial Sequence
  Description of Artificial Sequence: Synthetic oligonucleotide
  Sense strand starting at position 821 of SEQ ID NO: 1564245
agcugaaaggcuuaacuga

SEQ ID NO: 1865582 - RNA, 19 nt, Artificial Sequence
  Description of Artificial Sequence: Synthetic oligonucleotide
  Antisense strand to SEQ ID NO: 1865581
ucaguuaagccuuucagcu

SEQ ID NO: 1865583 - RNA, 19 nt, Artificial Sequence
  Description of Artificial Sequence: Synthetic oligonucleotide
  Sense strand starting at position 828 of SEQ ID NO: 1564245
aggcuuaacugagcuacau

SEQ ID NO: 1865584 - RNA, 19 nt, Artificial Sequence
  Description of Artificial Sequence: Synthetic oligonucleotide
  Antisense strand to SEQ ID NO: 1865583
auguagcucaguuaagccu

SEQ ID NO: 1865585 - RNA, 19 nt, Artificial Sequence
  Description of Artificial Sequence: Synthetic oligonucleotide
  Sense strand starting at position 852 of SEQ ID NO: 1564245
uugcuuaaccauuagagac

SEQ ID NO: 1865586 - RNA, 19 nt, Artificial Sequence
  Description of Artificial Sequence: Synthetic oligonucleotide
  Antisense strand to SEQ ID NO: 1865585
gucucuaaugguuaagcaa

SEQ ID NO: 1865587 - RNA, 19 nt, Artificial Sequence
  Description of Artificial Sequence: Synthetic oligonucleotide
  Sense strand starting at position 913 of SEQ ID NO: 1564245
gucuaaucuggaggcucua

SEQ ID NO: 1865588 - RNA, 19 nt, Artificial Sequence
  Description of Artificial Sequence: Synthetic oligonucleotide
  Antisense strand to SEQ ID NO: 1865587
uagagccuccagauuagac

SEQ ID NO: 1865589 - RNA, 19 nt, Artificial Sequence
  Description of Artificial Sequence: Synthetic oligonucleotide
  Sense strand starting at position 1187 of SEQ ID NO: 1564245
cucaucuagugguuugaau

SEQ ID NO: 1865590 - RNA, 19 nt, Artificial Sequence
  Description of Artificial Sequence: Synthetic oligonucleotide
  Antisense strand to SEQ ID NO: 1865589
auucaaaccacuagaugag

SEQ ID NO: 1865591 - RNA, 19 nt, Artificial Sequence
  Description of Artificial Sequence: Synthetic oligonucleotide
  Sense strand starting at position 1275 of SEQ ID NO: 1564245
aacuacauguccucgagua

SEQ ID NO: 1865592 - RNA, 19 nt, Artificial Sequence
  Description of Artificial Sequence: Synthetic oligonucleotide
  Antisense strand to SEQ ID NO: 1865591
uacucgaggacauguaguu

SEQ ID NO: 1865593 - RNA, 19 nt, Artificial Sequence
  Description of Artificial Sequence: Synthetic oligonucleotide
  Sense strand starting at position 1287 of SEQ ID NO: 1564245
ucgaguaggacucauucuu

SEQ ID NO: 1865594 - RNA, 19 nt, Artificial Sequence
  Description of Artificial Sequence: Synthetic oligonucleotide
  Antisense strand to SEQ ID NO: 1865593
aagaaugaguccuacucga

SEQ ID NO: 1865595 - RNA, 19 nt, Artificial Sequence
  Description of Artificial Sequence: Synthetic oligonucleotide
  Sense strand starting at position 1748 of SEQ ID NO: 1564245
uuuagcugugucgaacaaa

SEQ ID NO: 1865596 - RNA, 19 nt, Artificial Sequence
  Description of Artificial Sequence: Synthetic oligonucleotide
  Antisense strand to SEQ ID NO: 1865595
uuuguucgacacagcuaaa

SEQ ID NO: 1865597 - RNA, 19 nt, Artificial Sequence
  Description of Artificial Sequence: Synthetic oligonucleotide
  Sense strand starting at position 1751 of SEQ ID NO: 1564245
agcugugucgaacaaaucu

SEQ ID NO: 1865598 - RNA, 19 nt, Artificial Sequence
  Description of Artificial Sequence: Synthetic oligonucleotide
  Antisense strand to SEQ ID NO: 1865597
agauuuguucgacacagcu

SEQ ID NO: 1865599 - RNA, 19 nt, Artificial Sequence
  Description of Artificial Sequence: Synthetic oligonucleotide
  Sense strand starting at position 2053 of SEQ ID NO: 1564245
ggagucugucaugaccagu

SEQ ID NO: 1865600 - RNA, 19 nt, Artificial Sequence
  Description of Artificial Sequence: Synthetic oligonucleotide
  Antisense strand to SEQ ID NO: 1865599
acuggucaugacagacucc

SEQ ID NO: 1865601 - RNA, 19 nt, Artificial Sequence
  Description of Artificial Sequence: Synthetic oligonucleotide
  Sense strand starting at position 2235 of SEQ ID NO: 1564245
cuucuaaagucacuguuau

SEQ ID NO: 1865602 - RNA, 19 nt, Artificial Sequence
  Description of Artificial Sequence: Synthetic oligonucleotide
  Antisense strand to SEQ ID NO: 1865601
auaacagugacuuuagaag

SEQ ID NO: 1865603 - RNA, 19 nt, Artificial Sequence
  Description of Artificial Sequence: Synthetic oligonucleotide
  Sense strand starting at position 2236 of SEQ ID NO: 1564245
uucuaaagucacuguuauc

SEQ ID NO: 1865604 - RNA, 19 nt, Artificial Sequence
  Description of Artificial Sequence: Synthetic oligonucleotide
  Antisense strand to SEQ ID NO: 1865603
gauaacagugacuuuagaa

SEQ ID NO: 1865605 - RNA, 19 nt, Artificial Sequence
  Description of Artificial Sequence: Synthetic oligonucleotide
  Sense strand starting at position 2425 of SEQ ID NO: 1564245
agccaagagucaguuagga

SEQ ID NO: 1865606 - RNA, 19 nt, Artificial Sequence
  Description of Artificial Sequence: Synthetic oligonucleotide
  Antisense strand to SEQ ID NO: 1865605
uccuaacugacucuuggcu

SEQ ID NO: 1865607 - RNA, 19 nt, Artificial Sequence
  Description of Artificial Sequence: Synthetic oligonucleotide
  Sense strand starting at position 2427 of SEQ ID NO: 1564245
ccaagagucaguuaggagu

SEQ ID NO: 1865608 - RNA, 19 nt, Artificial Sequence
  Description of Artificial Sequence: Synthetic oligonucleotide
  Antisense strand to SEQ ID NO: 1865607
acuccuaacugacucuugg

SEQ ID NO: 1865609 - RNA, 19 nt, Artificial Sequence
  Description of Artificial Sequence: Synthetic oligonucleotide
  Sense strand starting at position 2440 of SEQ ID NO: 1564245
aggaguguucuaggaacca

SEQ ID NO: 1865610 - RNA, 19 nt, Artificial Sequence
  Description of Artificial Sequence: Synthetic oligonucleotide
  Antisense strand to SEQ ID NO: 1865609
ugguuccuagaacacuccu

SEQ ID NO: 1865611 - RNA, 19 nt, Artificial Sequence
  Description of Artificial Sequence: Synthetic oligonucleotide
  Sense strand starting at position 2660 of SEQ ID NO: 1564245
ggacacagcagucauguaa

SEQ ID NO: 1865612 - RNA, 19 nt, Artificial Sequence
  Description of Artificial Sequence: Synthetic oligonucleotide
  Antisense strand to SEQ ID NO: 1865611
uuacaugacugcugugucc

SEQ ID NO: 1865613 - RNA, 19 nt, Artificial Sequence
  Description of Artificial Sequence: Synthetic oligonucleotide
  Sense strand starting at position 2705 of SEQ ID NO: 1564245
auuggagaggacugucuuu

SEQ ID NO: 1865614 - RNA, 19 nt, Artificial Sequence
  Description of Artificial Sequence: Synthetic oligonucleotide
  Antisense strand to SEQ ID NO: 1865613
aaagacaguccucuccaau

SEQ ID NO: 1865615 - RNA, 19 nt, Artificial Sequence
  Description of Artificial Sequence: Synthetic oligonucleotide
  Sense strand starting at position 2744 of SEQ ID NO: 1564245
cuuugccaugaucaauaga

SEQ ID NO: 1865616 - RNA, 19 nt, Artificial Sequence
  Description of Artificial Sequence: Synthetic oligonucleotide
  Antisense strand to SEQ ID NO: 1865615
ucuauugaucauggcaaag

SEQ ID NO: 1865617 - RNA, 19 nt, Artificial Sequence
  Description of Artificial Sequence: Synthetic oligonucleotide
  Sense strand starting at position 3326 of SEQ ID NO: 1564245
ugggaaauguguccaaaua

SEQ ID NO: 1865618 - RNA, 19 nt, Artificial Sequence
  Description of Artificial Sequence: Synthetic oligonucleotide
  Antisense strand to SEQ ID NO: 1865617
uauuuggacacauuuccca

SEQ ID NO: 1865619 - RNA, 19 nt, Artificial Sequence
  Description of Artificial Sequence: Synthetic oligonucleotide
  Sense strand starting at position 3497 of SEQ ID NO: 1564245
gggugaguacugggcaaca

SEQ ID NO: 1865620 - RNA, 19 nt, Artificial Sequence
  Description of Artificial Sequence: Synthetic oligonucleotide
  Antisense strand to SEQ ID NO: 1865619
uguugcccaguacucaccc

SEQ ID NO: 1865621 - RNA, 19 nt, Artificial Sequence
  Description of Artificial Sequence: Synthetic oligonucleotide
  Sense strand starting at position 3700 of SEQ ID NO: 1564245
caaggccugucuuuaugau

SEQ ID NO: 1865622 - RNA, 19 nt, Artificial Sequence
  Description of Artificial Sequence: Synthetic oligonucleotide
  Antisense strand to SEQ ID NO: 1865621
aucauaaagacaggccuug

SEQ ID NO: 1865623 - RNA, 19 nt, Artificial Sequence
  Description of Artificial Sequence: Synthetic oligonucleotide
  Sense strand starting at position 3707 of SEQ ID NO: 1564245
ugucuuuaugaugacaggu

SEQ ID NO: 1865624 - RNA, 19 nt, Artificial Sequence
  Description of Artificial Sequence: Synthetic oligonucleotide
  Antisense strand to SEQ ID NO: 1865623
accugucaucauaaagaca

SEQ ID NO: 1865625 - RNA, 19 nt, Artificial Sequence
  Description of Artificial Sequence: Synthetic oligonucleotide
  Sense strand starting at position 3716 of SEQ ID NO: 1564245
gaugacaggucaguuucua

SEQ ID NO: 1865626 - RNA, 19 nt, Artificial Sequence
  Description of Artificial Sequence: Synthetic oligonucleotide
  Antisense strand to SEQ ID NO: 1865625
uagaaacugaccugucauc

SEQ ID NO: 1865627 - RNA, 19 nt, Artificial Sequence
  Description of Artificial Sequence: Synthetic oligonucleotide
  Sense strand starting at position 3732 of SEQ ID NO: 1564245
cuagucaugucauuaucaa

SEQ ID NO: 1865628 - RNA, 19 nt, Artificial Sequence
  Description of Artificial Sequence: Synthetic oligonucleotide
  Antisense strand to SEQ ID NO: 1865627
uugauaaugacaugacuag

SEQ ID NO: 1865629 - RNA, 19 nt, Artificial Sequence
  Description of Artificial Sequence: Synthetic oligonucleotide
  Sense strand starting at position 3739 of SEQ ID NO: 1564245
ugucauuaucaaggguuac

SEQ ID NO: 1865630 - RNA, 19 nt, Artificial Sequence
  Description of Artificial Sequence: Synthetic oligonucleotide
  Antisense strand to SEQ ID NO: 1865629
guaacccuugauaaugaca

SEQ ID NO: 1865631 - RNA, 19 nt, Artificial Sequence
  Description of Artificial Sequence: Synthetic oligonucleotide
  Sense strand starting at position 565 of SEQ ID NO: 1564246
guggguucaggagagcuau

SEQ ID NO: 1865632 - RNA, 19 nt, Artificial Sequence
  Description of Artificial Sequence: Synthetic oligonucleotide
  Antisense strand to SEQ ID NO: 1865631
auagcucuccugaacccac

SEQ ID NO: 1865633 - RNA, 19 nt, Artificial Sequence
  Description of Artificial Sequence: Synthetic oligonucleotide
  Sense strand starting at position 571 of SEQ ID NO: 1564246
ucaggagagcuaugaauuc

SEQ ID NO: 1865634 - RNA, 19 nt, Artificial Sequence
  Description of Artificial Sequence: Synthetic oligonucleotide
  Antisense strand to SEQ ID NO: 1865633
gaauucauagcucuccuga

SEQ ID NO: 1865635 - RNA, 19 nt, Artificial Sequence
  Description of Artificial Sequence: Synthetic oligonucleotide
  Sense strand starting at position 580 of SEQ ID NO: 1564246
cuaugaauuccucgcaaug

SEQ ID NO: 1865636 - RNA, 19 nt, Artificial Sequence
  Description of Artificial Sequence: Synthetic oligonucleotide
  Antisense strand to SEQ ID NO: 1865635
cauugcgaggaauucauag

SEQ ID NO: 1865637 - RNA, 19 nt, Artificial Sequence
  Description of Artificial Sequence: Synthetic oligonucleotide
  Sense strand starting at position 712 of SEQ ID NO: 1564246
gcuccuucccauuauugga

SEQ ID NO: 1865638 - RNA, 19 nt, Artificial Sequence
  Description of Artificial Sequence: Synthetic oligonucleotide
  Antisense strand to SEQ ID NO: 1865637
uccaauaaugggaaggagc

SEQ ID NO: 1865639 - RNA, 19 nt, Artificial Sequence
  Description of Artificial Sequence: Synthetic oligonucleotide
  Sense strand starting at position 806 of SEQ ID NO: 1564246
cccgaaagugcuggaaaca

SEQ ID NO: 1865640 - RNA, 19 nt, Artificial Sequence
  Description of Artificial Sequence: Synthetic oligonucleotide
  Antisense strand to SEQ ID NO: 1865639
uguuuccagcacuuucggg

SEQ ID NO: 1865641 - RNA, 19 nt, Artificial Sequence
  Description of Artificial Sequence: Synthetic oligonucleotide
  Sense strand starting at position 807 of SEQ ID NO: 1564246
ccgaaagugcuggaaacau

SEQ ID NO: 1865642 - RNA, 19 nt, Artificial Sequence
  Description of Artificial Sequence: Synthetic oligonucleotide
  Antisense strand to SEQ ID NO: 1865641
auguuuccagcacuuucgg

SEQ ID NO: 1865643 - RNA, 19 nt, Artificial Sequence
  Description of Artificial Sequence: Synthetic oligonucleotide
  Sense strand starting at position 817 of SEQ ID NO: 1564246
uggaaacauucccugccau

SEQ ID NO: 1865644 - RNA, 19 nt, Artificial Sequence
  Description of Artificial Sequence: Synthetic oligonucleotide
  Antisense strand to SEQ ID NO: 1865643
auggcagggaauguuucca

SEQ ID NO: 1865645 - RNA, 19 nt, Artificial Sequence
  Description of Artificial Sequence: Synthetic oligonucleotide
  Sense strand starting at position 818 of SEQ ID NO: 1564246
ggaaacauucccugccauc

SEQ ID NO: 1865646 - RNA, 19 nt, Artificial Sequence
  Description of Artificial Sequence: Synthetic oligonucleotide
  Antisense strand to SEQ ID NO: 1865645
gauggcagggaauguuucc

SEQ ID NO: 1865647 - RNA, 19 nt, Artificial Sequence
  Description of Artificial Sequence: Synthetic oligonucleotide
  Sense strand starting at position 838 of SEQ ID NO: 1564246
ccuaguacuccacagcaua

SEQ ID NO: 1865648 - RNA, 19 nt, Artificial Sequence
  Description of Artificial Sequence: Synthetic oligonucleotide
  Antisense strand to SEQ ID NO: 1865647
uaugcuguggaguacuagg

SEQ ID NO: 1865649 - RNA, 19 nt, Artificial Sequence
  Description of Artificial Sequence: Synthetic oligonucleotide
  Sense strand starting at position 841 of SEQ ID NO: 1564246
aguacuccacagcauaaga

SEQ ID NO: 1865650 - RNA, 19 nt, Artificial Sequence
  Description of Artificial Sequence: Synthetic oligonucleotide
  Antisense strand to SEQ ID NO: 1865649
ucuuaugcuguggaguacu

SEQ ID NO: 1865651 - RNA, 19 nt, Artificial Sequence
  Description of Artificial Sequence: Synthetic oligonucleotide
  Sense strand starting at position 930 of SEQ ID NO: 1564246
gucaccuuccgugauugau

SEQ ID NO: 1865652 - RNA, 19 nt, Artificial Sequence
  Description of Artificial Sequence: Synthetic oligonucleotide
  Antisense strand to SEQ ID NO: 1865651
aucaaucacggaaggugac

SEQ ID NO: 1865653 - RNA, 19 nt, Artificial Sequence
  Description of Artificial Sequence: Synthetic oligonucleotide
  Sense strand starting at position 1022 of SEQ ID NO: 1564246
ggacuguuugcgggagaga

SEQ ID NO: 1865654 - RNA, 19 nt, Artificial Sequence
  Description of Artificial Sequence: Synthetic oligonucleotide
  Antisense strand to SEQ ID NO: 1865653
ucucucccgcaaacagucc

SEQ ID NO: 1865655 - RNA, 19 nt, Artificial Sequence
  Description of Artificial Sequence: Synthetic oligonucleotide
  Sense strand starting at position 1023 of SEQ ID NO: 1564246
gacuguuugcgggagagaa

SEQ ID NO: 1865656 - RNA, 19 nt, Artificial Sequence
  Description of Artificial Sequence: Synthetic oligonucleotide
  Antisense strand to SEQ ID NO: 1865655
uucucucccgcaaacaguc

SEQ ID NO: 1865657 - RNA, 19 nt, Artificial Sequence
  Description of Artificial Sequence: Synthetic oligonucleotide
  Sense strand starting at position 1103 of SEQ ID NO: 1564246
cuagcucucccuugagaga

SEQ ID NO: 1865658 - RNA, 19 nt, Artificial Sequence
  Description of Artificial Sequence: Synthetic oligonucleotide
  Antisense strand to SEQ ID NO: 1865657
ucucucaagggagagcuag

SEQ ID NO: 1865659 - RNA, 19 nt, Artificial Sequence
  Description of Artificial Sequence: Synthetic oligonucleotide
  Sense strand starting at position 1135 of SEQ ID NO: 1564246
agagcuuagugaccuuuau

SEQ ID NO: 1865660 - RNA, 19 nt, Artificial Sequence
  Description of Artificial Sequence: Synthetic oligonucleotide
  Antisense strand to SEQ ID NO: 1865659
auaaaggucacuaagcucu

SEQ ID NO: 1865661 - RNA, 19 nt, Artificial Sequence
  Description of Artificial Sequence: Synthetic oligonucleotide
  Sense strand starting at position 1159 of SEQ ID NO: 1564246
ccaagaaugcuuugucuca

SEQ ID NO: 1865662 - RNA, 19 nt, Artificial Sequence
  Description of Artificial Sequence: Synthetic oligonucleotide
  Antisense strand to SEQ ID NO: 1865661
ugagacaaagcauucuugg

SEQ ID NO: 1865663 - RNA, 19 nt, Artificial Sequence
  Description of Artificial Sequence: Synthetic oligonucleotide
  Sense strand starting at position 1195 of SEQ ID NO: 1564246
ccagguggcuggaggaaua

SEQ ID NO: 1865664 - RNA, 19 nt, Artificial Sequence
  Description of Artificial Sequence: Synthetic oligonucleotide
  Antisense strand to SEQ ID NO: 1865663
uauuccuccagccaccugg

SEQ ID NO: 1865665 - RNA, 19 nt, Artificial Sequence
  Description of Artificial Sequence: Synthetic oligonucleotide
  Sense strand starting at position 1368 of SEQ ID NO: 1564246
gggaaucagacuuguauac

SEQ ID NO: 1865666 - RNA, 19 nt, Artificial Sequence
  Description of Artificial Sequence: Synthetic oligonucleotide
  Antisense strand to SEQ ID NO: 1865665
guauacaagucugauuccc

SEQ ID NO: 1865667 - RNA, 19 nt, Artificial Sequence
  Description of Artificial Sequence: Synthetic oligonucleotide
  Sense strand starting at position 1585 of SEQ ID NO: 1564246
gcugcaaaguuguugagaa

SEQ ID NO: 1865668 - RNA, 19 nt, Artificial Sequence
  Description of Artificial Sequence: Synthetic oligonucleotide
  Antisense strand to SEQ ID NO: 1865667
uucucaacaacuuugcagc

SEQ ID NO: 1865669 - RNA, 19 nt, Artificial Sequence
  Description of Artificial Sequence: Synthetic oligonucleotide
  Sense strand starting at position 2076 of SEQ ID NO: 1564246
aaggacagucucgaaguua

SEQ ID NO: 1865670 - RNA, 19 nt, Artificial Sequence
  Description of Artificial Sequence: Synthetic oligonucleotide
  Antisense strand to SEQ ID NO: 1865669
uaacuucgagacuguccuu

SEQ ID NO: 1865671 - RNA, 19 nt, Artificial Sequence
  Description of Artificial Sequence: Synthetic oligonucleotide
  Sense strand starting at position 2146 of SEQ ID NO: 1564246
ggagguuauguaugaguuc

SEQ ID NO: 1865672 - RNA, 19 nt, Artificial Sequence
  Description of Artificial Sequence: Synthetic oligonucleotide
  Antisense strand to SEQ ID NO: 1865671
gaacucauacauaaccucc

SEQ ID NO: 1865673 - RNA, 19 nt, Artificial Sequence
  Description of Artificial Sequence: Synthetic oligonucleotide
  Sense strand starting at position 2360 of SEQ ID NO: 1564246
guucguaacacucaaggau

SEQ ID NO: 1865674 - RNA, 19 nt, Artificial Sequence
  Description of Artificial Sequence: Synthetic oligonucleotide
  Antisense strand to SEQ ID NO: 1865673
auccuugaguguuacgaac

SEQ ID NO: 1865675 - RNA, 19 nt, Artificial Sequence
  Description of Artificial Sequence: Synthetic oligonucleotide
  Sense strand starting at position 2363 of SEQ ID NO: 1564246
cguaacacucaaggauaaa

SEQ ID NO: 1865676 - RNA, 19 nt, Artificial Sequence
  Description of Artificial Sequence: Synthetic oligonucleotide
  Antisense strand to SEQ ID NO: 1865675
uuuauccuugaguguuacg

SEQ ID NO: 1865677 - RNA, 19 nt, Artificial Sequence
  Description of Artificial Sequence: Synthetic oligonucleotide
  Sense strand starting at position 2455 of SEQ ID NO: 1564246
ucucauagccagugguuaa

SEQ ID NO: 1865678 - RNA, 19 nt, Artificial Sequence
  Description of Artificial Sequence: Synthetic oligonucleotide
  Antisense strand to SEQ ID NO: 1865677
uuaaccacuggcuaugaga

SEQ ID NO: 1865679 - RNA, 19 nt, Artificial Sequence
  Description of Artificial Sequence: Synthetic oligonucleotide
  Sense strand starting at position 2518 of SEQ ID NO: 1564246
ccugucucucuuuggagau

SEQ ID NO: 1865680 - RNA, 19 nt, Artificial Sequence
  Description of Artificial Sequence: Synthetic oligonucleotide
  Antisense strand to SEQ ID NO: 1865679
aucuccaaagagagacagg

SEQ ID NO: 1865681 - RNA, 19 nt, Artificial Sequence
  Description of Artificial Sequence: Synthetic oligonucleotide
  Sense strand starting at position 2719 of SEQ ID NO: 1564246
ccugauccauugucaguua

SEQ ID NO: 1865682 - RNA, 19 nt, Artificial Sequence
  Description of Artificial Sequence: Synthetic oligonucleotide
  Antisense strand to SEQ ID NO: 1865681
uaacugacaauggaucagg

SEQ ID NO: 1865683 - RNA, 19 nt, Artificial Sequence
  Description of Artificial Sequence: Synthetic oligonucleotide
  Sense strand starting at position 2722 of SEQ ID NO: 1564246
gauccauugucaguuagau

SEQ ID NO: 1865684 - RNA, 19 nt, Artificial Sequence
  Description of Artificial Sequence: Synthetic oligonucleotide
  Antisense strand to SEQ ID NO: 1865683
aucuaacugacaauggauc

SEQ ID NO: 1865685 - RNA, 19 nt, Artificial Sequence
  Description of Artificial Sequence: Synthetic oligonucleotide
  Sense strand starting at position 2731 of SEQ ID NO: 1564246
ucaguuagauaugauuucu

SEQ ID NO: 1865686 - RNA, 19 nt, Artificial Sequence
  Description of Artificial Sequence: Synthetic oligonucleotide
  Antisense strand to SEQ ID NO: 1865685
agaaaucauaucuaacuga

SEQ ID NO: 1865687 - RNA, 19 nt, Artificial Sequence
  Description of Artificial Sequence: Synthetic oligonucleotide
  Sense strand starting at position 2784 of SEQ ID NO: 1564246
uugucaacuguuuacuaga

SEQ ID NO: 1865688 - RNA, 19 nt, Artificial Sequence
  Description of Artificial Sequence: Synthetic oligonucleotide
  Antisense strand to SEQ ID NO: 1865687
ucuaguaaacaguugacaa

SEQ ID NO: 1865689 - RNA, 19 nt, Artificial Sequence
  Description of Artificial Sequence: Synthetic oligonucleotide
  Sense strand starting at position 2879 of SEQ ID NO: 1564246
ugcuaugaaugggcacauu

SEQ ID NO: 1865690 - RNA, 19 nt, Artificial Sequence
  Description of Artificial Sequence: Synthetic oligonucleotide
  Antisense strand to SEQ ID NO: 1865689
aaugugcccauucauagca

SEQ ID NO: 1865691 - RNA, 19 nt, Artificial Sequence
  Description of Artificial Sequence: Synthetic oligonucleotide
  Sense strand starting at position 2916 of SEQ ID NO: 1564246
guaacuugcccaggaguau

SEQ ID NO: 1865692 - RNA, 19 nt, Artificial Sequence
  Description of Artificial Sequence: Synthetic oligonucleotide
  Antisense strand to SEQ ID NO: 1865691
auacuccugggcaaguuac

SEQ ID NO: 1865693 - RNA, 19 nt, Artificial Sequence
  Description of Artificial Sequence: Synthetic oligonucleotide
  Sense strand starting at position 2917 of SEQ ID NO: 1564246
uaacuugcccaggaguaua

SEQ ID NO: 1865694 - RNA, 19 nt, Artificial Sequence
  Description of Artificial Sequence: Synthetic oligonucleotide
  Antisense strand to SEQ ID NO: 1865693
uauacuccugggcaaguua

SEQ ID NO: 1865695 - RNA, 19 nt, Artificial Sequence
  Description of Artificial Sequence: Synthetic oligonucleotide
  Sense strand starting at position 2928 of SEQ ID NO: 1564246
ggaguauacagcuaguaag

SEQ ID NO: 1865696 - RNA, 19 nt, Artificial Sequence
  Description of Artificial Sequence: Synthetic oligonucleotide
  Antisense strand to SEQ ID NO: 1865695
cuuacuagcuguauacucc

SEQ ID NO: 1865697 - RNA, 19 nt, Artificial Sequence
  Description of Artificial Sequence: Synthetic oligonucleotide
  Sense strand starting at position 3032 of SEQ ID NO: 1564246
ucacuauuagugugguacu

SEQ ID NO: 1865698 - RNA, 19 nt, Artificial Sequence
  Description of Artificial Sequence: Synthetic oligonucleotide
  Antisense strand to SEQ ID NO: 1865697
aguaccacacuaauaguga

SEQ ID NO: 1865699 - RNA, 19 nt, Artificial Sequence
  Description of Artificial Sequence: Synthetic oligonucleotide
  Sense strand starting at position 3049 of SEQ ID NO: 1564246
cuuaaaguuguuuagcacu

SEQ ID NO: 1865700 - RNA, 19 nt, Artificial Sequence
  Description of Artificial Sequence: Synthetic oligonucleotide
  Antisense strand to SEQ ID NO: 1865699
agugcuaaacaacuuuaag

SEQ ID NO: 1865701 - RNA, 19 nt, Artificial Sequence
  Description of Artificial Sequence: Synthetic oligonucleotide
  Sense strand starting at position 3211 of SEQ ID NO: 1564246
gagucagagccuugugaug

SEQ ID NO: 1865702 - RNA, 19 nt, Artificial Sequence
  Description of Artificial Sequence: Synthetic oligonucleotide
  Antisense strand to SEQ ID NO: 1865701
caucacaaggcucugacuc

SEQ ID NO: 1865703 - RNA, 19 nt, Artificial Sequence
  Description of Artificial Sequence: Synthetic oligonucleotide
  Sense strand starting at position 3649 of SEQ ID NO: 1564246
uuagcaucacuugaaugua

SEQ ID NO: 1865704 - RNA, 19 nt, Artificial Sequence
  Description of Artificial Sequence: Synthetic oligonucleotide
  Antisense strand to SEQ ID NO: 1865703
uacauucaagugaugcuaa

SEQ ID NO: 1865705 - RNA, 19 nt, Artificial Sequence
  Description of Artificial Sequence: Synthetic oligonucleotide
  Sense strand starting at position 3652 of SEQ ID NO: 1564246
gcaucacuugaauguacua

SEQ ID NO: 1865706 - RNA, 19 nt, Artificial Sequence
  Description of Artificial Sequence: Synthetic oligonucleotide
  Antisense strand to SEQ ID NO: 1865705
uaguacauucaagugaugc

SEQ ID NO: 1865707 - RNA, 19 nt, Artificial Sequence
  Description of Artificial Sequence: Synthetic oligonucleotide
  Sense strand starting at position 3687 of SEQ ID NO: 1564246
ugcauccuauugcuagaua

SEQ ID NO: 1865708 - RNA, 19 nt, Artificial Sequence
  Description of Artificial Sequence: Synthetic oligonucleotide
  Antisense strand to SEQ ID NO: 1865707
uaucuagcaauaggaugca

SEQ ID NO: 1865709 - RNA, 19 nt, Artificial Sequence
  Description of Artificial Sequence: Synthetic oligonucleotide
  Sense strand starting at position 3690 of SEQ ID NO: 1564246
auccuauugcuagauauug

SEQ ID NO: 1865710 - RNA, 19 nt, Artificial Sequence
  Description of Artificial Sequence: Synthetic oligonucleotide
  Antisense strand to SEQ ID NO: 1865709
caauaucuagcaauaggau

SEQ ID NO: 1865711 - RNA, 19 nt, Artificial Sequence
  Description of Artificial Sequence: Synthetic oligonucleotide
  Sense strand starting at position 36 of SEQ ID NO: 1564247
cgccaaaguuuauuuggau

SEQ ID NO: 1865712 - RNA, 19 nt, Artificial Sequence
  Description of Artificial Sequence: Synthetic oligonucleotide
  Antisense strand to SEQ ID NO: 1865711
auccaaauaaacuuuggcg

SEQ ID NO: 1865713 - RNA, 19 nt, Artificial Sequence
  Description of Artificial Sequence: Synthetic oligonucleotide
  Sense strand starting at position 70 of SEQ ID NO: 1564247
gaaagaaauucugccgauu

SEQ ID NO: 1865714 - RNA, 19 nt, Artificial Sequence
  Description of Artificial Sequence: Synthetic oligonucleotide
  Antisense strand to SEQ ID NO: 1865713
aaucggcagaauuucuuuc

SEQ ID NO: 1865715 - RNA, 19 nt, Artificial Sequence
  Description of Artificial Sequence: Synthetic oligonucleotide
  Sense strand starting at position 369 of SEQ ID NO: 1564247
cuugaaacguuuccaggaa

SEQ ID NO: 1865716 - RNA, 19 nt, Artificial Sequence
  Description of Artificial Sequence: Synthetic oligonucleotide
  Antisense strand to SEQ ID NO: 1865715
uuccuggaaacguuucaag

SEQ ID NO: 1865717 - RNA, 19 nt, Artificial Sequence
  Description of Artificial Sequence: Synthetic oligonucleotide
  Sense strand starting at position 373 of SEQ ID NO: 1564247
aaacguuuccaggaaagcu

SEQ ID NO: 1865718 - RNA, 19 nt, Artificial Sequence
  Description of Artificial Sequence: Synthetic oligonucleotide
  Antisense strand to SEQ ID NO: 1865717
agcuuuccuggaaacguuu

SEQ ID NO: 1865719 - RNA, 19 nt, Artificial Sequence
  Description of Artificial Sequence: Synthetic oligonucleotide
  Sense strand starting at position 383 of SEQ ID NO: 1564247
aggaaagcuuuauaaauag

SEQ ID NO: 1865720 - RNA, 19 nt, Artificial Sequence
  Description of Artificial Sequence: Synthetic oligonucleotide
  Antisense strand to SEQ ID NO: 1865719
cuauuuauaaagcuuuccu

SEQ ID NO: 1865721 - RNA, 19 nt, Artificial Sequence
  Description of Artificial Sequence: Synthetic oligonucleotide
  Sense strand starting at position 431 of SEQ ID NO: 1564247
uguaaugaguuucucaggu

SEQ ID NO: 1865722 - RNA, 19 nt, Artificial Sequence
  Description of Artificial Sequence: Synthetic oligonucleotide
  Antisense strand to SEQ ID NO: 1865721
accugagaaacucauuaca

SEQ ID NO: 1865723 - RNA, 19 nt, Artificial Sequence
  Description of Artificial Sequence: Synthetic oligonucleotide
  Sense strand starting at position 813 of SEQ ID NO: 1564247
ggcaucugugaguagcuca

SEQ ID NO: 1865724 - RNA, 19 nt, Artificial Sequence
  Description of Artificial Sequence: Synthetic oligonucleotide
  Antisense strand to SEQ ID NO: 1865723
ugagcuacucacagaugcc

SEQ ID NO: 1865725 - RNA, 19 nt, Artificial Sequence
  Description of Artificial Sequence: Synthetic oligonucleotide
  Sense strand starting at position 821 of SEQ ID NO: 1564247
ugaguagcucauggagaaa

SEQ ID NO: 1865726 - RNA, 19 nt, Artificial Sequence
  Description of Artificial Sequence: Synthetic oligonucleotide
  Antisense strand to SEQ ID NO: 1865725
uuucuccaugagcuacuca

SEQ ID NO: 1865727 - RNA, 19 nt, Artificial Sequence
  Description of Artificial Sequence: Synthetic oligonucleotide
  Sense strand starting at position 862 of SEQ ID NO: 1564247
aguuacuuagaguggcaga

SEQ ID NO: 1865728 - RNA, 19 nt, Artificial Sequence
  Description of Artificial Sequence: Synthetic oligonucleotide
  Antisense strand to SEQ ID NO: 1865727
ucugccacucuaaguaacu

SEQ ID NO: 1865729 - RNA, 19 nt, Artificial Sequence
  Description of Artificial Sequence: Synthetic oligonucleotide
  Sense strand starting at position 995 of SEQ ID NO: 1564247
accgaaauacauuggugaa

SEQ ID NO: 1865730 - RNA, 19 nt, Artificial Sequence
  Description of Artificial Sequence: Synthetic oligonucleotide
  Antisense strand to SEQ ID NO: 1865729
uucaccaauguauuucggu

SEQ ID NO: 1865731 - RNA, 19 nt, Artificial Sequence
  Description of Artificial Sequence: Synthetic oligonucleotide
  Sense strand starting at position 996 of SEQ ID NO: 1564247
ccgaaauacauuggugaaa

SEQ ID NO: 1865732 - RNA, 19 nt, Artificial Sequence
  Description of Artificial Sequence: Synthetic oligonucleotide
  Antisense strand to SEQ ID NO: 1865731
uuucaccaauguauuucgg

SEQ ID NO: 1865733 - RNA, 19 nt, Artificial Sequence
  Description of Artificial Sequence: Synthetic oligonucleotide
  Sense strand starting at position 1046 of SEQ ID NO: 1564247
augugaacacuaggcaaau

SEQ ID NO: 1865734 - RNA, 19 nt, Artificial Sequence
  Description of Artificial Sequence: Synthetic oligonucleotide
  Antisense strand to SEQ ID NO: 1865733
auuugccuaguguucacau

SEQ ID NO: 1865735 - RNA, 19 nt, Artificial Sequence
  Description of Artificial Sequence: Synthetic oligonucleotide
  Sense strand starting at position 1047 of SEQ ID NO: 1564247
ugugaacacuaggcaaauu

SEQ ID NO: 1865736 - RNA, 19 nt, Artificial Sequence
  Description of Artificial Sequence: Synthetic oligonucleotide
  Antisense strand to SEQ ID NO: 1865735
aauuugccuaguguucaca

SEQ ID NO: 1865737 - RNA, 19 nt, Artificial Sequence
  Description of Artificial Sequence: Synthetic oligonucleotide
  Sense strand starting at position 1059 of SEQ ID NO: 1564247
gcaaauucguccucgagag

SEQ ID NO: 1865738 - RNA, 19 nt, Artificial Sequence
  Description of Artificial Sequence: Synthetic oligonucleotide
  Antisense strand to SEQ ID NO: 1865737
cucucgaggacgaauuugc

SEQ ID NO: 1865739 - RNA, 19 nt, Artificial Sequence
  Description of Artificial Sequence: Synthetic oligonucleotide
  Sense strand starting at position 1060 of SEQ ID NO: 1564247
caaauucguccucgagaga

SEQ ID NO: 1865740 - RNA, 19 nt, Artificial Sequence
  Description of Artificial Sequence: Synthetic oligonucleotide
  Antisense strand to SEQ ID NO: 1865739
ucucucgaggacgaauuug

SEQ ID NO: 1865741 - RNA, 19 nt, Artificial Sequence
  Description of Artificial Sequence: Synthetic oligonucleotide
  Sense strand starting at position 1061 of SEQ ID NO: 1564247
aaauucguccucgagagag

SEQ ID NO: 1865742 - RNA, 19 nt, Artificial Sequence
  Description of Artificial Sequence: Synthetic oligonucleotide
  Antisense strand to SEQ ID NO: 1865741
cucucucgaggacgaauuu

SEQ ID NO: 1865743 - RNA, 19 nt, Artificial Sequence
  Description of Artificial Sequence: Synthetic oligonucleotide
  Sense strand starting at position 1063 of SEQ ID NO: 1564247
auucguccucgagagagga

SEQ ID NO: 1865744 - RNA, 19 nt, Artificial Sequence
  Description of Artificial Sequence: Synthetic oligonucleotide
  Antisense strand to SEQ ID NO: 1865743
uccucucucgaggacgaau

SEQ ID NO: 1865745 - RNA, 19 nt, Artificial Sequence
  Description of Artificial Sequence: Synthetic oligonucleotide
  Sense strand starting at position 1172 of SEQ ID NO: 1564247
uguggaaggcgucgcauuu

SEQ ID NO: 1865746 - RNA, 19 nt, Artificial Sequence
  Description of Artificial Sequence: Synthetic oligonucleotide
  Antisense strand to SEQ ID NO: 1865745
aaaugcgacgccuuccaca

SEQ ID NO: 1865747 - RNA, 19 nt, Artificial Sequence
  Description of Artificial Sequence: Synthetic oligonucleotide
  Sense strand starting at position 1206 of SEQ ID NO: 1564247
uggcucucgccucaaauga

SEQ ID NO: 1865748 - RNA, 19 nt, Artificial Sequence
  Description of Artificial Sequence: Synthetic oligonucleotide
  Antisense strand to SEQ ID NO: 1865747
ucauuugaggcgagagcca

SEQ ID NO: 1865749 - RNA, 19 nt, Artificial Sequence
  Description of Artificial Sequence: Synthetic oligonucleotide
  Sense strand starting at position 2374 of SEQ ID NO: 1564247
agagguggauuccuagguu

SEQ ID NO: 1865750 - RNA, 19 nt, Artificial Sequence
  Description of Artificial Sequence: Synthetic oligonucleotide
  Antisense strand to SEQ ID NO: 1865749
aaccuaggaauccaccucu

SEQ ID NO: 1865751 - RNA, 19 nt, Artificial Sequence
  Description of Artificial Sequence: Synthetic oligonucleotide
  Sense strand starting at position 2428 of SEQ ID NO: 1564247
ucugucucucagugaugua

SEQ ID NO: 1865752 - RNA, 19 nt, Artificial Sequence
  Description of Artificial Sequence: Synthetic oligonucleotide
  Antisense strand to SEQ ID NO: 1865751
uacaucacugagagacaga

SEQ ID NO: 1865753 - RNA, 19 nt, Artificial Sequence
  Description of Artificial Sequence: Synthetic oligonucleotide
  Sense strand starting at position 2429 of SEQ ID NO: 1564247
cugucucucagugauguaa

SEQ ID NO: 1865754 - RNA, 19 nt, Artificial Sequence
  Description of Artificial Sequence: Synthetic oligonucleotide
  Antisense strand to SEQ ID NO: 1865753
uuacaucacugagagacag

SEQ ID NO: 1865755 - RNA, 19 nt, Artificial Sequence
  Description of Artificial Sequence: Synthetic oligonucleotide
  Sense strand starting at position 2689 of SEQ ID NO: 1564247
uccugcgaaauaugaagua

SEQ ID NO: 1865756 - RNA, 19 nt, Artificial Sequence
  Description of Artificial Sequence: Synthetic oligonucleotide
  Antisense strand to SEQ ID NO: 1865755
uacuucauauuucgcagga

SEQ ID NO: 1865757 - RNA, 19 nt, Artificial Sequence
  Description of Artificial Sequence: Synthetic oligonucleotide
  Sense strand starting at position 2694 of SEQ ID NO: 1564247
cgaaauaugaaguaagucu

SEQ ID NO: 1865758 - RNA, 19 nt, Artificial Sequence
  Description of Artificial Sequence: Synthetic oligonucleotide
  Antisense strand to SEQ ID NO: 1865757
agacuuacuucauauuucg

SEQ ID NO: 1865759 - RNA, 19 nt, Artificial Sequence
  Description of Artificial Sequence: Synthetic oligonucleotide
  Sense strand starting at position 2807 of SEQ ID NO: 1564247
uggguauuaggauguccuu

SEQ ID NO: 1865760 - RNA, 19 nt, Artificial Sequence
  Description of Artificial Sequence: Synthetic oligonucleotide
  Antisense strand to SEQ ID NO: 1865759
aaggacauccuaauaccca

SEQ ID NO: 1865761 - RNA, 19 nt, Artificial Sequence
  Description of Artificial Sequence: Synthetic oligonucleotide
  Sense strand starting at position 2813 of SEQ ID NO: 1564247
uuaggauguccuuguccuu

SEQ ID NO: 1865762 - RNA, 19 nt, Artificial Sequence
  Description of Artificial Sequence: Synthetic oligonucleotide
  Antisense strand to SEQ ID NO: 1865761
aaggacaaggacauccuaa

SEQ ID NO: 1865763 - RNA, 19 nt, Artificial Sequence
  Description of Artificial Sequence: Synthetic oligonucleotide
  Sense strand starting at position 2920 of SEQ ID NO: 1564247
gcaucuaagggcuaaggau

SEQ ID NO: 1865764 - RNA, 19 nt, Artificial Sequence
  Description of Artificial Sequence: Synthetic oligonucleotide
  Antisense strand to SEQ ID NO: 1865763
auccuuagcccuuagaugc

SEQ ID NO: 1865765 - RNA, 19 nt, Artificial Sequence
  Description of Artificial Sequence: Synthetic oligonucleotide
  Sense strand starting at position 2958 of SEQ ID NO: 1564247
uccuguucuuaaguagaug

SEQ ID NO: 1865766 - RNA, 19 nt, Artificial Sequence
  Description of Artificial Sequence: Synthetic oligonucleotide
  Antisense strand to SEQ ID NO: 1865765
caucuacuuaagaacagga

SEQ ID NO: 1865767 - RNA, 19 nt, Artificial Sequence
  Description of Artificial Sequence: Synthetic oligonucleotide
  Sense strand starting at position 3055 of SEQ ID NO: 1564247
augugauugguggguuauc

SEQ ID NO: 1865768 - RNA, 19 nt, Artificial Sequence
  Description of Artificial Sequence: Synthetic oligonucleotide
  Antisense strand to SEQ ID NO: 1865767
gauaacccaccaaucacau

SEQ ID NO: 1865769 - RNA, 19 nt, Artificial Sequence
  Description of Artificial Sequence: Synthetic oligonucleotide
  Sense strand starting at position 3056 of SEQ ID NO: 1564247
ugugauugguggguuaucu

SEQ ID NO: 1865770 - RNA, 19 nt, Artificial Sequence
  Description of Artificial Sequence: Synthetic oligonucleotide
  Antisense strand to SEQ ID NO: 1865769
agauaacccaccaaucaca

SEQ ID NO: 1865771 - RNA, 19 nt, Artificial Sequence
  Description of Artificial Sequence: Synthetic oligonucleotide
  Sense strand starting at position 3067 of SEQ ID NO: 1564247
gguuaucugucucuuguag

SEQ ID NO: 1865772 - RNA, 19 nt, Artificial Sequence
  Description of Artificial Sequence: Synthetic oligonucleotide
  Antisense strand to SEQ ID NO: 1865771
cuacaagagacagauaacc

SEQ ID NO: 1865773 - RNA, 19 nt, Artificial Sequence
  Description of Artificial Sequence: Synthetic oligonucleotide
  Sense strand starting at position 3079 of SEQ ID NO: 1564247
cuuguagcucuuugacuca

SEQ ID NO: 1865774 - RNA, 19 nt, Artificial Sequence
  Description of Artificial Sequence: Synthetic oligonucleotide
  Antisense strand to SEQ ID NO: 1865773
ugagucaaagagcuacaag

SEQ ID NO: 1865775 - RNA, 19 nt, Artificial Sequence
  Description of Artificial Sequence: Synthetic oligonucleotide
  Sense strand starting at position 3156 of SEQ ID NO: 1564247
guuucuagaucuuuaguca

SEQ ID NO: 1865776 - RNA, 19 nt, Artificial Sequence
  Description of Artificial Sequence: Synthetic oligonucleotide
  Antisense strand to SEQ ID NO: 1865775
ugacuaaagaucuagaaac

SEQ ID NO: 1865777 - RNA, 19 nt, Artificial Sequence
  Description of Artificial Sequence: Synthetic oligonucleotide
  Sense strand starting at position 3157 of SEQ ID NO: 1564247
uuucuagaucuuuagucau

SEQ ID NO: 1865778 - RNA, 19 nt, Artificial Sequence
  Description of Artificial Sequence: Synthetic oligonucleotide
  Antisense strand to SEQ ID NO: 1865777
augacuaaagaucuagaaa

SEQ ID NO: 1865779 - RNA, 19 nt, Artificial Sequence
  Description of Artificial Sequence: Synthetic oligonucleotide
  Sense strand starting at position 3205 of SEQ ID NO: 1564247
gugguuaagagcugaagaa

SEQ ID NO: 1865780 - RNA, 19 nt, Artificial Sequence
  Description of Artificial Sequence: Synthetic oligonucleotide
  Antisense strand to SEQ ID NO: 1865779
uucuucagcucuuaaccac

SEQ ID NO: 1865781 - RNA, 19 nt, Artificial Sequence
  Description of Artificial Sequence: Synthetic oligonucleotide
  Sense strand starting at position 3340 of SEQ ID NO: 1564247
uguugacugcagcaacauu

SEQ ID NO: 1865782 - RNA, 19 nt, Artificial Sequence
  Description of Artificial Sequence: Synthetic oligonucleotide
  Antisense strand to SEQ ID NO: 1865781
aauguugcugcagucaaca

SEQ ID NO: 1865783 - RNA, 19 nt, Artificial Sequence
  Description of Artificial Sequence: Synthetic oligonucleotide
  Sense strand starting at position 3379 of SEQ ID NO: 1564247
guuagugucaaaugagaac

SEQ ID NO: 1865784 - RNA, 19 nt, Artificial Sequence
  Description of Artificial Sequence: Synthetic oligonucleotide
  Antisense strand to SEQ ID NO: 1865783
guucucauuugacacuaac

SEQ ID NO: 1865785 - RNA, 19 nt, Artificial Sequence
  Description of Artificial Sequence: Synthetic oligonucleotide
  Sense strand starting at position 3382 of SEQ ID NO: 1564247
agugucaaaugagaacaaa

SEQ ID NO: 1865786 - RNA, 19 nt, Artificial Sequence
  Description of Artificial Sequence: Synthetic oligonucleotide
  Antisense strand to SEQ ID NO: 1865785
uuuguucucauuugacacu

SEQ ID NO: 1865787 - RNA, 19 nt, Artificial Sequence
  Description of Artificial Sequence: Synthetic oligonucleotide
  Sense strand starting at position 3436 of SEQ ID NO: 1564247
uuuacaauuucgggaacuu

SEQ ID NO: 1865788 - RNA, 19 nt, Artificial Sequence
  Description of Artificial Sequence: Synthetic oligonucleotide
  Antisense strand to SEQ ID NO: 1865787
aaguucccgaaauuguaaa

SEQ ID NO: 1865789 - RNA, 19 nt, Artificial Sequence
  Description of Artificial Sequence: Synthetic oligonucleotide
  Sense strand starting at position 3719 of SEQ ID NO: 1564247
ucuugagugugcucucaaa

SEQ ID NO: 1865790 - RNA, 19 nt, Artificial Sequence
  Description of Artificial Sequence: Synthetic oligonucleotide
  Antisense strand to SEQ ID NO: 1865789
uuugagagcacacucaaga

SEQ ID NO: 1865791 - RNA, 19 nt, Artificial Sequence
  Description of Artificial Sequence: Synthetic oligonucleotide
  Sense strand starting at position 393 of SEQ ID NO: 1564248
accaaagagguuuguuaau

SEQ ID NO: 1865792 - RNA, 19 nt, Artificial Sequence
  Description of Artificial Sequence: Synthetic oligonucleotide
  Antisense strand to SEQ ID NO: 1865791
auuaacaaaccucuuuggu

SEQ ID NO: 1865793 - RNA, 19 nt, Artificial Sequence
  Description of Artificial Sequence: Synthetic oligonucleotide
  Sense strand starting at position 467 of SEQ ID NO: 1564248
guaaacacccagugaucca

SEQ ID NO: 1865794 - RNA, 19 nt, Artificial Sequence
  Description of Artificial Sequence: Synthetic oligonucleotide
  Antisense strand to SEQ ID NO: 1865793
uggaucacuggguguuuac

SEQ ID NO: 1865795 - RNA, 19 nt, Artificial Sequence
  Description of Artificial Sequence: Synthetic oligonucleotide
  Sense strand starting at position 796 of SEQ ID NO: 1564248
ccaccaguuccuuaaugag

SEQ ID NO: 1865796 - RNA, 19 nt, Artificial Sequence
  Description of Artificial Sequence: Synthetic oligonucleotide
  Antisense strand to SEQ ID NO: 1865795
cucauuaaggaacuggugg

SEQ ID NO: 1865797 - RNA, 19 nt, Artificial Sequence
  Description of Artificial Sequence: Synthetic oligonucleotide
  Sense strand starting at position 967 of SEQ ID NO: 1564248
acuguaugggaguggauua

SEQ ID NO: 1865798 - RNA, 19 nt, Artificial Sequence
  Description of Artificial Sequence: Synthetic oligonucleotide
  Antisense strand to SEQ ID NO: 1865797
uaauccacucccauacagu

SEQ ID NO: 1865799 - RNA, 19 nt, Artificial Sequence
  Description of Artificial Sequence: Synthetic oligonucleotide
  Sense strand starting at position 968 of SEQ ID NO: 1564248
cuguaugggaguggauuau

SEQ ID NO: 1865800 - RNA, 19 nt, Artificial Sequence
  Description of Artificial Sequence: Synthetic oligonucleotide
  Antisense strand to SEQ ID NO: 1865799
auaauccacucccauacag

SEQ ID NO: 1865801 - RNA, 19 nt, Artificial Sequence
  Description of Artificial Sequence: Synthetic oligonucleotide
  Sense strand starting at position 980 of SEQ ID NO: 1564248
ggauuaugaaaguguuucu

SEQ ID NO: 1865802 - RNA, 19 nt, Artificial Sequence
  Description of Artificial Sequence: Synthetic oligonucleotide
  Antisense strand to SEQ ID NO: 1865801
agaaacacuuucauaaucc

SEQ ID NO: 1865803 - RNA, 19 nt, Artificial Sequence
  Description of Artificial Sequence: Synthetic oligonucleotide
  Sense strand starting at position 1042 of SEQ ID NO: 1564248
gcacgcaacucauuuauca

SEQ ID NO: 1865804 - RNA, 19 nt, Artificial Sequence
  Description of Artificial Sequence: Synthetic oligonucleotide
  Antisense strand to SEQ ID NO: 1865803
ugauaaaugaguugcgugc

SEQ ID NO: 1865805 - RNA, 19 nt, Artificial Sequence
  Description of Artificial Sequence: Synthetic oligonucleotide
  Sense strand starting at position 1079 of SEQ ID NO: 1564248
guguacuauguccacucaa

SEQ ID NO: 1865806 - RNA, 19 nt, Artificial Sequence
  Description of Artificial Sequence: Synthetic oligonucleotide
  Antisense strand to SEQ ID NO: 1865805
uugaguggacauaguacac

SEQ ID NO: 1865807 - RNA, 19 nt, Artificial Sequence
  Description of Artificial Sequence: Synthetic oligonucleotide
  Sense strand starting at position 1178 of SEQ ID NO: 1564248
caauuaaugguuugaaugu

SEQ ID NO: 1865808 - RNA, 19 nt, Artificial Sequence
  Description of Artificial Sequence: Synthetic oligonucleotide
  Antisense strand to SEQ ID NO: 1865807
acauucaaaccauuaauug

SEQ ID NO: 1865809 - RNA, 19 nt, Artificial Sequence
  Description of Artificial Sequence: Synthetic oligonucleotide
  Sense strand starting at position 1354 of SEQ ID NO: 1564248
aagaaagugcugcaagauc

SEQ ID NO: 1865810 - RNA, 19 nt, Artificial Sequence
  Description of Artificial Sequence: Synthetic oligonucleotide
  Antisense strand to SEQ ID NO: 1865809
gaucuugcagcacuuucuu

SEQ ID NO: 1865811 - RNA, 19 nt, Artificial Sequence
  Description of Artificial Sequence: Synthetic oligonucleotide
  Sense strand starting at position 1455 of SEQ ID NO: 1564248
acaccaagucagugacaga

SEQ ID NO: 1865812 - RNA, 19 nt, Artificial Sequence
  Description of Artificial Sequence: Synthetic oligonucleotide
  Antisense strand to SEQ ID NO: 1865811
ucugucacugacuuggugu

SEQ ID NO: 1865813 - RNA, 19 nt, Artificial Sequence
  Description of Artificial Sequence: Synthetic oligonucleotide
  Sense strand starting at position 1622 of SEQ ID NO: 1564248
ggcacagaucgugacgaca

SEQ ID NO: 1865814 - RNA, 19 nt, Artificial Sequence
  Description of Artificial Sequence: Synthetic oligonucleotide
  Antisense strand to SEQ ID NO: 1865813
ugucgucacgaucugugcc

SEQ ID NO: 1865815 - RNA, 19 nt, Artificial Sequence
  Description of Artificial Sequence: Synthetic oligonucleotide
  Sense strand starting at position 2115 of SEQ ID NO: 1564248
gccuuuagugaacauacuu

SEQ ID NO: 1865816 - RNA, 19 nt, Artificial Sequence
  Description of Artificial Sequence: Synthetic oligonucleotide
  Antisense strand to SEQ ID NO: 1865815
aaguauguucacuaaaggc

SEQ ID NO: 1865817 - RNA, 19 nt, Artificial Sequence
  Description of Artificial Sequence: Synthetic oligonucleotide
  Sense strand starting at position 2122 of SEQ ID NO: 1564248
gugaacauacuugaagcua

SEQ ID NO: 1865818 - RNA, 19 nt, Artificial Sequence
  Description of Artificial Sequence: Synthetic oligonucleotide
  Antisense strand to SEQ ID NO: 1865817
uagcuucaaguauguucac

SEQ ID NO: 1865819 - RNA, 19 nt, Artificial Sequence
  Description of Artificial Sequence: Synthetic oligonucleotide
  Sense strand starting at position 2577 of SEQ ID NO: 1564248
augggaaauugugcaguau

SEQ ID NO: 1865820 - RNA, 19 nt, Artificial Sequence
  Description of Artificial Sequence: Synthetic oligonucleotide
  Antisense strand to SEQ ID NO: 1865819
auacugcacaauuucccau

SEQ ID NO: 1865821 - RNA, 19 nt, Artificial Sequence
  Description of Artificial Sequence: Synthetic oligonucleotide
  Sense strand starting at position 2578 of SEQ ID NO: 1564248
ugggaaauugugcaguauu

SEQ ID NO: 1865822 - RNA, 19 nt, Artificial Sequence
  Description of Artificial Sequence: Synthetic oligonucleotide
  Antisense strand to SEQ ID NO: 1865821
aauacugcacaauuuccca

SEQ ID NO: 1865823 - RNA, 19 nt, Artificial Sequence
  Description of Artificial Sequence: Synthetic oligonucleotide
  Sense strand starting at position 2581 of SEQ ID NO: 1564248
gaaauugugcaguauuaua

SEQ ID NO: 1865824 - RNA, 19 nt, Artificial Sequence
  Description of Artificial Sequence: Synthetic oligonucleotide
  Antisense strand to SEQ ID NO: 1865823
uauaauacugcacaauuuc

SEQ ID NO: 1865825 - RNA, 19 nt, Artificial Sequence
  Description of Artificial Sequence: Synthetic oligonucleotide
  Sense strand starting at position 2645 of SEQ ID NO: 1564248
aaggaauugguuuguagaa

SEQ ID NO: 1865826 - RNA, 19 nt, Artificial Sequence
  Description of Artificial Sequence: Synthetic oligonucleotide
  Antisense strand to SEQ ID NO: 1865825
uucuacaaaccaauuccuu

SEQ ID NO: 1865827 - RNA, 19 nt, Artificial Sequence
  Description of Artificial Sequence: Synthetic oligonucleotide
  Sense strand starting at position 2646 of SEQ ID NO: 1564248
aggaauugguuuguagaag

SEQ ID NO: 1865828 - RNA, 19 nt, Artificial Sequence
  Description of Artificial Sequence: Synthetic oligonucleotide
  Antisense strand to SEQ ID NO: 1865827
cuucuacaaaccaauuccu

SEQ ID NO: 1865829 - RNA, 19 nt, Artificial Sequence
  Description of Artificial Sequence: Synthetic oligonucleotide
  Sense strand starting at position 2693 of SEQ ID NO: 1564248
ccacaucuuugcccuggaa

SEQ ID NO: 1865830 - RNA, 19 nt, Artificial Sequence
  Description of Artificial Sequence: Synthetic oligonucleotide
  Antisense strand to SEQ ID NO: 1865829
uuccagggcaaagaugugg

SEQ ID NO: 1865831 - RNA, 19 nt, Artificial Sequence
  Description of Artificial Sequence: Synthetic oligonucleotide
  Sense strand starting at position 2708 of SEQ ID NO: 1564248
ggaauuccuucugccauga

SEQ ID NO: 1865832 - RNA, 19 nt, Artificial Sequence
  Description of Artificial Sequence: Synthetic oligonucleotide
  Antisense strand to SEQ ID NO: 1865831
ucauggcagaaggaauucc

SEQ ID NO: 1865833 - RNA, 19 nt, Artificial Sequence
  Description of Artificial Sequence: Synthetic oligonucleotide
  Sense strand starting at position 2777 of SEQ ID NO: 1564248
ugacucaauuuagauagca

SEQ ID NO: 1865834 - RNA, 19 nt, Artificial Sequence
  Description of Artificial Sequence: Synthetic oligonucleotide
  Antisense strand to SEQ ID NO: 1865833
ugcuaucuaaauugaguca

SEQ ID NO: 1865835 - RNA, 19 nt, Artificial Sequence
  Description of Artificial Sequence: Synthetic oligonucleotide
  Sense strand starting at position 2816 of SEQ ID NO: 1564248
cugucuuucccagauaagu

SEQ ID NO: 1865836 - RNA, 19 nt, Artificial Sequence
  Description of Artificial Sequence: Synthetic oligonucleotide
  Antisense strand to SEQ ID NO: 1865835
acuuaucugggaaagacag

SEQ ID NO: 1865837 - RNA, 19 nt, Artificial Sequence
  Description of Artificial Sequence: Synthetic oligonucleotide
  Sense strand starting at position 2824 of SEQ ID NO: 1564248
cccagauaaguuuguauau

SEQ ID NO: 1865838 - RNA, 19 nt, Artificial Sequence
  Description of Artificial Sequence: Synthetic oligonucleotide
  Antisense strand to SEQ ID NO: 1865837
auauacaaacuuaucuggg

SEQ ID NO: 1865839 - RNA, 19 nt, Artificial Sequence
  Description of Artificial Sequence: Synthetic oligonucleotide
  Sense strand starting at position 2825 of SEQ ID NO: 1564248
ccagauaaguuuguauauu

SEQ ID NO: 1865840 - RNA, 19 nt, Artificial Sequence
  Description of Artificial Sequence: Synthetic oligonucleotide
  Antisense strand to SEQ ID NO: 1865839
aauauacaaacuuaucugg

SEQ ID NO: 1865841 - RNA, 19 nt, Artificial Sequence
  Description of Artificial Sequence: Synthetic oligonucleotide
  Sense strand starting at position 2893 of SEQ ID NO: 1564248
aguaccacuuacucuagau

SEQ ID NO: 1865842 - RNA, 19 nt, Artificial Sequence
  Description of Artificial Sequence: Synthetic oligonucleotide
  Antisense strand to SEQ ID NO: 1865841
aucuagaguaagugguacu

SEQ ID NO: 1865843 - RNA, 19 nt, Artificial Sequence
  Description of Artificial Sequence: Synthetic oligonucleotide
  Sense strand starting at position 2932 of SEQ ID NO: 1564248
gucuuuguccucuaaugaa

SEQ ID NO: 1865844 - RNA, 19 nt, Artificial Sequence
  Description of Artificial Sequence: Synthetic oligonucleotide
  Antisense strand to SEQ ID NO: 1865843
uucauuagaggacaaagac

SEQ ID NO: 1865845 - RNA, 19 nt, Artificial Sequence
  Description of Artificial Sequence: Synthetic oligonucleotide
  Sense strand starting at position 2950 of SEQ ID NO: 1564248
auaaguagcuucuugagag

SEQ ID NO: 1865846 - RNA, 19 nt, Artificial Sequence
  Description of Artificial Sequence: Synthetic oligonucleotide
  Antisense strand to SEQ ID NO: 1865845
cucucaagaagcuacuuau

SEQ ID NO: 1865847 - RNA, 19 nt, Artificial Sequence
  Description of Artificial Sequence: Synthetic oligonucleotide
  Sense strand starting at position 3079 of SEQ ID NO: 1564248
acauauccagagugugaau

SEQ ID NO: 1865848 - RNA, 19 nt, Artificial Sequence
  Description of Artificial Sequence: Synthetic oligonucleotide
  Antisense strand to SEQ ID NO: 1865847
auucacacucuggauaugu

SEQ ID NO: 1865849 - RNA, 19 nt, Artificial Sequence
  Description of Artificial Sequence: Synthetic oligonucleotide
  Sense strand starting at position 3137 of SEQ ID NO: 1564248
gauuuagucuggcugguau

SEQ ID NO: 1865850 - RNA, 19 nt, Artificial Sequence
  Description of Artificial Sequence: Synthetic oligonucleotide
  Antisense strand to SEQ ID NO: 1865849
auaccagccagacuaaauc

SEQ ID NO: 1865851 - RNA, 19 nt, Artificial Sequence
  Description of Artificial Sequence: Synthetic oligonucleotide
  Sense strand starting at position 3205 of SEQ ID NO: 1564248
uacuaagaucuggguguaa

SEQ ID NO: 1865852 - RNA, 19 nt, Artificial Sequence
  Description of Artificial Sequence: Synthetic oligonucleotide
  Antisense strand to SEQ ID NO: 1865851
uuacacccagaucuuagua

SEQ ID NO: 1865853 - RNA, 19 nt, Artificial Sequence
  Description of Artificial Sequence: Synthetic oligonucleotide
  Sense strand starting at position 3260 of SEQ ID NO: 1564248
augcccuuauguuuaaaga

SEQ ID NO: 1865854 - RNA, 19 nt, Artificial Sequence
  Description of Artificial Sequence: Synthetic oligonucleotide
  Antisense strand to SEQ ID NO: 1865853
ucuuuaaacauaagggcau

SEQ ID NO: 1865855 - RNA, 19 nt, Artificial Sequence
  Description of Artificial Sequence: Synthetic oligonucleotide
  Sense strand starting at position 3349 of SEQ ID NO: 1564248
uguccuguaacaggaagau

SEQ ID NO: 1865856 - RNA, 19 nt, Artificial Sequence
  Description of Artificial Sequence: Synthetic oligonucleotide
  Antisense strand to SEQ ID NO: 1865855
aucuuccuguuacaggaca

SEQ ID NO: 1865857 - RNA, 19 nt, Artificial Sequence
  Description of Artificial Sequence: Synthetic oligonucleotide
  Sense strand starting at position 3364 of SEQ ID NO: 1564248
agaucauaacuguagcaau

SEQ ID NO: 1865858 - RNA, 19 nt, Artificial Sequence
  Description of Artificial Sequence: Synthetic oligonucleotide
  Antisense strand to SEQ ID NO: 1865857
auugcuacaguuaugaucu

SEQ ID NO: 1865859 - RNA, 19 nt, Artificial Sequence
  Description of Artificial Sequence: Synthetic oligonucleotide
  Sense strand starting at position 3376 of SEQ ID NO: 1564248
uagcaauuagagugaauga

SEQ ID NO: 1865860 - RNA, 19 nt, Artificial Sequence
  Description of Artificial Sequence: Synthetic oligonucleotide
  Antisense strand to SEQ ID NO: 1865859
ucauucacucuaauugcua

SEQ ID NO: 1865861 - RNA, 19 nt, Artificial Sequence
  Description of Artificial Sequence: Synthetic oligonucleotide
  Sense strand starting at position 3386 of SEQ ID NO: 1564248
agugaaugagcucacuuaa

SEQ ID NO: 1865862 - RNA, 19 nt, Artificial Sequence
  Description of Artificial Sequence: Synthetic oligonucleotide
  Antisense strand to SEQ ID NO: 1865861
uuaagugagcucauucacu

SEQ ID NO: 1865863 - RNA, 19 nt, Artificial Sequence
  Description of Artificial Sequence: Synthetic oligonucleotide
  Sense strand starting at position 3465 of SEQ ID NO: 1564248
guuuguuugagucaguaaa

SEQ ID NO: 1865864 - RNA, 19 nt, Artificial Sequence
  Description of Artificial Sequence: Synthetic oligonucleotide
  Antisense strand to SEQ ID NO: 1865863
uuuacugacucaaacaaac

SEQ ID NO: 1865865 - RNA, 19 nt, Artificial Sequence
  Description of Artificial Sequence: Synthetic oligonucleotide
  Sense strand starting at position 3484 of SEQ ID NO: 1564248
agaagcaaguuuccuuaau

SEQ ID NO: 1865866 - RNA, 19 nt, Artificial Sequence
  Description of Artificial Sequence: Synthetic oligonucleotide
  Antisense strand to SEQ ID NO: 1865865
auuaaggaaacuugcuucu

SEQ ID NO: 1865867 - RNA, 19 nt, Artificial Sequence
  Description of Artificial Sequence: Synthetic oligonucleotide
  Sense strand starting at position 3648 of SEQ ID NO: 1564248
ccaggaucacauggcagau

SEQ ID NO: 1865868 - RNA, 19 nt, Artificial Sequence
  Description of Artificial Sequence: Synthetic oligonucleotide
  Antisense strand to SEQ ID NO: 1865867
aucugccaugugauccugg

SEQ ID NO: 1865869 - RNA, 19 nt, Artificial Sequence
  Description of Artificial Sequence: Synthetic oligonucleotide
  Sense strand starting at position 3894 of SEQ ID NO: 1564248
agguacaaaugugcuagaa

SEQ ID NO: 1865870 - RNA, 19 nt, Artificial Sequence
  Description of Artificial Sequence: Synthetic oligonucleotide
  Antisense strand to SEQ ID NO: 1865869
uucuagcacauuuguaccu

SEQ ID NO: 1865871 - RNA, 19 nt, Artificial Sequence
  Description of Artificial Sequence: Synthetic oligonucleotide
  Sense strand starting at position 137 of SEQ ID NO: 1564249
agaugacuauuugauguuu

SEQ ID NO: 1865872 - RNA, 19 nt, Artificial Sequence
  Description of Artificial Sequence: Synthetic oligonucleotide
  Antisense strand to SEQ ID NO: 1865871
aaacaucaaauagucaucu

SEQ ID NO: 1865873 - RNA, 19 nt, Artificial Sequence
  Description of Artificial Sequence: Synthetic oligonucleotide
  Sense strand starting at position 261 of SEQ ID NO: 1564249
guguguuuccacuagaacc

SEQ ID NO: 1865874 - RNA, 19 nt, Artificial Sequence
  Description of Artificial Sequence: Synthetic oligonucleotide
  Antisense strand to SEQ ID NO: 1865873
gguucuaguggaaacacac

SEQ ID NO: 1865875 - RNA, 19 nt, Artificial Sequence
  Description of Artificial Sequence: Synthetic oligonucleotide
  Sense strand starting at position 371 of SEQ ID NO: 1564249
acaagucuggcuuaucacu

SEQ ID NO: 1865876 - RNA, 19 nt, Artificial Sequence
  Description of Artificial Sequence: Synthetic oligonucleotide
  Antisense strand to SEQ ID NO: 1865875
agugauaagccagacuugu

SEQ ID NO: 1865877 - RNA, 19 nt, Artificial Sequence
  Description of Artificial Sequence: Synthetic oligonucleotide
  Sense strand starting at position 447 of SEQ ID NO: 1564249
cagaacugucuucggacua

SEQ ID NO: 1865878 - RNA, 19 nt, Artificial Sequence
  Description of Artificial Sequence: Synthetic oligonucleotide
  Antisense strand to SEQ ID NO: 1865877
uaguccgaagacaguucug

SEQ ID NO: 1865879 - RNA, 19 nt, Artificial Sequence
  Description of Artificial Sequence: Synthetic oligonucleotide
  Sense strand starting at position 668 of SEQ ID NO: 1564249
agccaauaugucugacucu

SEQ ID NO: 1865880 - RNA, 19 nt, Artificial Sequence
  Description of Artificial Sequence: Synthetic oligonucleotide
  Antisense strand to SEQ ID NO: 1865879
agagucagacauauuggcu

SEQ ID NO: 1865881 - RNA, 19 nt, Artificial Sequence
  Description of Artificial Sequence: Synthetic oligonucleotide
  Sense strand starting at position 983 of SEQ ID NO: 1564249
guggcauugguguauaaac

SEQ ID NO: 1865882 - RNA, 19 nt, Artificial Sequence
  Description of Artificial Sequence: Synthetic oligonucleotide
  Antisense strand to SEQ ID NO: 1865881
guuuauacaccaaugccac

SEQ ID NO: 1865883 - RNA, 19 nt, Artificial Sequence
  Description of Artificial Sequence: Synthetic oligonucleotide
  Sense strand starting at position 1138 of SEQ ID NO: 1564249
ggcuguggaccugacgaaa

SEQ ID NO: 1865884 - RNA, 19 nt, Artificial Sequence
  Description of Artificial Sequence: Synthetic oligonucleotide
  Antisense strand to SEQ ID NO: 1865883
uuucgucagguccacagcc

SEQ ID NO: 1865885 - RNA, 19 nt, Artificial Sequence
  Description of Artificial Sequence: Synthetic oligonucleotide
  Sense strand starting at position 1167 of SEQ ID NO: 1564249
ccuguaagcgucccgaguu

SEQ ID NO: 1865886 - RNA, 19 nt, Artificial Sequence
  Description of Artificial Sequence: Synthetic oligonucleotide
  Antisense strand to SEQ ID NO: 1865885
aacucgggacgcuuacagg

SEQ ID NO: 1865887 - RNA, 19 nt, Artificial Sequence
  Description of Artificial Sequence: Synthetic oligonucleotide
  Sense strand starting at position 1180 of SEQ ID NO: 1564249
cgaguuuguccagaagaga

SEQ ID NO: 1865888 - RNA, 19 nt, Artificial Sequence
  Description of Artificial Sequence: Synthetic oligonucleotide
  Antisense strand to SEQ ID NO: 1865887
ucucuucuggacaaacucg

SEQ ID NO: 1865889 - RNA, 19 nt, Artificial Sequence
  Description of Artificial Sequence: Synthetic oligonucleotide
  Sense strand starting at position 1211 of SEQ ID NO: 1564249
ccagaaaucggagggcaga

SEQ ID NO: 1865890 - RNA, 19 nt, Artificial Sequence
  Description of Artificial Sequence: Synthetic oligonucleotide
  Antisense strand to SEQ ID NO: 1865889
ucugcccuccgauuucugg

SEQ ID NO: 1865891 - RNA, 19 nt, Artificial Sequence
  Description of Artificial Sequence: Synthetic oligonucleotide
  Sense strand starting at position 1254 of SEQ ID NO: 1564249
acccucgugcaguaagaua

SEQ ID NO: 1865892 - RNA, 19 nt, Artificial Sequence
  Description of Artificial Sequence: Synthetic oligonucleotide
  Antisense strand to SEQ ID NO: 1865891
uaucuuacugcacgagggu

SEQ ID NO: 1865893 - RNA, 19 nt, Artificial Sequence
  Description of Artificial Sequence: Synthetic oligonucleotide
  Sense strand starting at position 1265 of SEQ ID NO: 1564249
guaagauacuaugucuagu

SEQ ID NO: 1865894 - RNA, 19 nt, Artificial Sequence
  Description of Artificial Sequence: Synthetic oligonucleotide
  Antisense strand to SEQ ID NO: 1865893
acuagacauaguaucuuac

SEQ ID NO: 1865895 - RNA, 19 nt, Artificial Sequence
  Description of Artificial Sequence: Synthetic oligonucleotide
  Sense strand starting at position 1333 of SEQ ID NO: 1564249
gccuccauuccgucgaguu

SEQ ID NO: 1865896 - RNA, 19 nt, Artificial Sequence
  Description of Artificial Sequence: Synthetic oligonucleotide
  Antisense strand to SEQ ID NO: 1865895
aacucgacggaauggaggc

SEQ ID NO: 1865897 - RNA, 19 nt, Artificial Sequence
  Description of Artificial Sequence: Synthetic oligonucleotide
  Sense strand starting at position 1345 of SEQ ID NO: 1564249
ucgaguuuacccuaagacc

SEQ ID NO: 1865898 - RNA, 19 nt, Artificial Sequence
  Description of Artificial Sequence: Synthetic oligonucleotide
  Antisense strand to SEQ ID NO: 1865897
ggucuuaggguaaacucga

SEQ ID NO: 1865899 - RNA, 19 nt, Artificial Sequence
  Description of Artificial Sequence: Synthetic oligonucleotide
  Sense strand starting at position 2528 of SEQ ID NO: 1564249
agugcucuccuaugaaaug

SEQ ID NO: 1865900 - RNA, 19 nt, Artificial Sequence
  Description of Artificial Sequence: Synthetic oligonucleotide
  Antisense strand to SEQ ID NO: 1865899
cauuucauaggagagcacu

SEQ ID NO: 1865901 - RNA, 19 nt, Artificial Sequence
  Description of Artificial Sequence: Synthetic oligonucleotide
  Sense strand starting at position 2563 of SEQ ID NO: 1564249
agcuuucucggccacugaa

SEQ ID NO: 1865902 - RNA, 19 nt, Artificial Sequence
  Description of Artificial Sequence: Synthetic oligonucleotide
  Antisense strand to SEQ ID NO: 1865901
uucaguggccgagaaagcu

SEQ ID NO: 1865903 - RNA, 19 nt, Artificial Sequence
  Description of Artificial Sequence: Synthetic oligonucleotide
  Sense strand starting at position 2583 of SEQ ID NO: 1564249
acgauagcaguuuauaaua

SEQ ID NO: 1865904 - RNA, 19 nt, Artificial Sequence
  Description of Artificial Sequence: Synthetic oligonucleotide
  Antisense strand to SEQ ID NO: 1865903
uauuauaaacugcuaucgu

SEQ ID NO: 1865905 - RNA, 19 nt, Artificial Sequence
  Description of Artificial Sequence: Synthetic oligonucleotide
  Sense strand starting at position 2675 of SEQ ID NO: 1564249
uguggagaugucuauagau

SEQ ID NO: 1865906 - RNA, 19 nt, Artificial Sequence
  Description of Artificial Sequence: Synthetic oligonucleotide
  Antisense strand to SEQ ID NO: 1865905
aucuauagacaucuccaca

SEQ ID NO: 1865907 - RNA, 19 nt, Artificial Sequence
  Description of Artificial Sequence: Synthetic oligonucleotide
  Sense strand starting at position 2682 of SEQ ID NO: 1564249
augucuauagauugaagua

SEQ ID NO: 1865908 - RNA, 19 nt, Artificial Sequence
  Description of Artificial Sequence: Synthetic oligonucleotide
  Antisense strand to SEQ ID NO: 1865907
uacuucaaucuauagacau

SEQ ID NO: 1865909 - RNA, 19 nt, Artificial Sequence
  Description of Artificial Sequence: Synthetic oligonucleotide
  Sense strand starting at position 2699 of SEQ ID NO: 1564249
uaauaaauacgugaugggu

SEQ ID NO: 1865910 - RNA, 19 nt, Artificial Sequence
  Description of Artificial Sequence: Synthetic oligonucleotide
  Antisense strand to SEQ ID NO: 1865909
acccaucacguauuuauua

SEQ ID NO: 1865911 - RNA, 19 nt, Artificial Sequence
  Description of Artificial Sequence: Synthetic oligonucleotide
  Sense strand starting at position 2705 of SEQ ID NO: 1564249
auacgugauggguggaagu

SEQ ID NO: 1865912 - RNA, 19 nt, Artificial Sequence
  Description of Artificial Sequence: Synthetic oligonucleotide
  Antisense strand to SEQ ID NO: 1865911
acuuccacccaucacguau

SEQ ID NO: 1865913 - RNA, 19 nt, Artificial Sequence
  Description of Artificial Sequence: Synthetic oligonucleotide
  Sense strand starting at position 2707 of SEQ ID NO: 1564249
acgugauggguggaaguuu

SEQ ID NO: 1865914 - RNA, 19 nt, Artificial Sequence
  Description of Artificial Sequence: Synthetic oligonucleotide
  Antisense strand to SEQ ID NO: 1865913
aaacuuccacccaucacgu

SEQ ID NO: 1865915 - RNA, 19 nt, Artificial Sequence
  Description of Artificial Sequence: Synthetic oligonucleotide
  Sense strand starting at position 2831 of SEQ ID NO: 1564249
accuuagagcauuaaggua

SEQ ID NO: 1865916 - RNA, 19 nt, Artificial Sequence
  Description of Artificial Sequence: Synthetic oligonucleotide
  Antisense strand to SEQ ID NO: 1865915
uaccuuaaugcucuaaggu

SEQ ID NO: 1865917 - RNA, 19 nt, Artificial Sequence
  Description of Artificial Sequence: Synthetic oligonucleotide
  Sense strand starting at position 2860 of SEQ ID NO: 1564249
agaacuaugucuuuagcuu

SEQ ID NO: 1865918 - RNA, 19 nt, Artificial Sequence
  Description of Artificial Sequence: Synthetic oligonucleotide
  Antisense strand to SEQ ID NO: 1865917
aagcuaaagacauaguucu

SEQ ID NO: 1865919 - RNA, 19 nt, Artificial Sequence
  Description of Artificial Sequence: Synthetic oligonucleotide
  Sense strand starting at position 2861 of SEQ ID NO: 1564249
gaacuaugucuuuagcuug

SEQ ID NO: 1865920 - RNA, 19 nt, Artificial Sequence
  Description of Artificial Sequence: Synthetic oligonucleotide
  Antisense strand to SEQ ID NO: 1865919
caagcuaaagacauaguuc

SEQ ID NO: 1865921 - RNA, 19 nt, Artificial Sequence
  Description of Artificial Sequence: Synthetic oligonucleotide
  Sense strand starting at position 2889 of SEQ ID NO: 1564249
uguggugguauagaucuau

SEQ ID NO: 1865922 - RNA, 19 nt, Artificial Sequence
  Description of Artificial Sequence: Synthetic oligonucleotide
  Antisense strand to SEQ ID NO: 1865921
auagaucuauaccaccaca

SEQ ID NO: 1865923 - RNA, 19 nt, Artificial Sequence
  Description of Artificial Sequence: Synthetic oligonucleotide
  Sense strand starting at position 2902 of SEQ ID NO: 1564249
aucuauauagaucgaaagu

SEQ ID NO: 1865924 - RNA, 19 nt, Artificial Sequence
  Description of Artificial Sequence: Synthetic oligonucleotide
  Antisense strand to SEQ ID NO: 1865923
acuuucgaucuauauagau

SEQ ID NO: 1865925 - RNA, 19 nt, Artificial Sequence
  Description of Artificial Sequence: Synthetic oligonucleotide
  Sense strand starting at position 2911 of SEQ ID NO: 1564249
gaucgaaagucacucuuuc

SEQ ID NO: 1865926 - RNA, 19 nt, Artificial Sequence
  Description of Artificial Sequence: Synthetic oligonucleotide
  Antisense strand to SEQ ID NO: 1865925
gaaagagugacuuucgauc

SEQ ID NO: 1865927 - RNA, 19 nt, Artificial Sequence
  Description of Artificial Sequence: Synthetic oligonucleotide
  Sense strand starting at position 3277 of SEQ ID NO: 1564249
gaaugugauguguagcuuu

SEQ ID NO: 1865928 - RNA, 19 nt, Artificial Sequence
  Description of Artificial Sequence: Synthetic oligonucleotide
  Antisense strand to SEQ ID NO: 1865927
aaagcuacacaucacauuc

SEQ ID NO: 1865929 - RNA, 19 nt, Artificial Sequence
  Description of Artificial Sequence: Synthetic oligonucleotide
  Sense strand starting at position 3316 of SEQ ID NO: 1564249
acagauuaaugugauuucu

SEQ ID NO: 1865930 - RNA, 19 nt, Artificial Sequence
  Description of Artificial Sequence: Synthetic oligonucleotide
  Antisense strand to SEQ ID NO: 1865929
agaaaucacauuaaucugu

SEQ ID NO: 1865931 - RNA, 19 nt, Artificial Sequence
  Description of Artificial Sequence: Synthetic oligonucleotide
  Sense strand starting at position 3331 of SEQ ID NO: 1564249
uucuguuuccaggagcaaa

SEQ ID NO: 1865932 - RNA, 19 nt, Artificial Sequence
  Description of Artificial Sequence: Synthetic oligonucleotide
  Antisense strand to SEQ ID NO: 1865931
uuugcuccuggaaacagaa

SEQ ID NO: 1865933 - RNA, 19 nt, Artificial Sequence
  Description of Artificial Sequence: Synthetic oligonucleotide
  Sense strand starting at position 3351 of SEQ ID NO: 1564249
ugaagcauuguuugaacaa

SEQ ID NO: 1865934 - RNA, 19 nt, Artificial Sequence
  Description of Artificial Sequence: Synthetic oligonucleotide
  Antisense strand to SEQ ID NO: 1865933
uuguucaaacaaugcuuca

SEQ ID NO: 1865935 - RNA, 19 nt, Artificial Sequence
  Description of Artificial Sequence: Synthetic oligonucleotide
  Sense strand starting at position 3470 of SEQ ID NO: 1564249
cuggucugccuugaaucau

SEQ ID NO: 1865936 - RNA, 19 nt, Artificial Sequence
  Description of Artificial Sequence: Synthetic oligonucleotide
  Antisense strand to SEQ ID NO: 1865935
augauucaaggcagaccag

SEQ ID NO: 1865937 - RNA, 19 nt, Artificial Sequence
  Description of Artificial Sequence: Synthetic oligonucleotide
  Sense strand starting at position 3476 of SEQ ID NO: 1564249
ugccuugaaucauuagaac

SEQ ID NO: 1865938 - RNA, 19 nt, Artificial Sequence
  Description of Artificial Sequence: Synthetic oligonucleotide
  Antisense strand to SEQ ID NO: 1865937
guucuaaugauucaaggca

SEQ ID NO: 1865939 - RNA, 19 nt, Artificial Sequence
  Description of Artificial Sequence: Synthetic oligonucleotide
  Sense strand starting at position 3515 of SEQ ID NO: 1564249
ucuccauuugugcgaguca

SEQ ID NO: 1865940 - RNA, 19 nt, Artificial Sequence
  Description of Artificial Sequence: Synthetic oligonucleotide
  Antisense strand to SEQ ID NO: 1865939
ugacucgcacaaauggaga

SEQ ID NO: 1865941 - RNA, 19 nt, Artificial Sequence
  Description of Artificial Sequence: Synthetic oligonucleotide
  Sense strand starting at position 3560 of SEQ ID NO: 1564249
uucuaacugccauaagguu

SEQ ID NO: 1865942 - RNA, 19 nt, Artificial Sequence
  Description of Artificial Sequence: Synthetic oligonucleotide
  Antisense strand to SEQ ID NO: 1865941
aaccuuauggcaguuagaa

SEQ ID NO: 1865943 - RNA, 19 nt, Artificial Sequence
  Description of Artificial Sequence: Synthetic oligonucleotide
  Sense strand starting at position 3569 of SEQ ID NO: 1564249
ccauaagguuguguccaca

SEQ ID NO: 1865944 - RNA, 19 nt, Artificial Sequence
  Description of Artificial Sequence: Synthetic oligonucleotide
  Antisense strand to SEQ ID NO: 1865943
uguggacacaaccuuaugg

SEQ ID NO: 1865945 - RNA, 19 nt, Artificial Sequence
  Description of Artificial Sequence: Synthetic oligonucleotide
  Sense strand starting at position 3634 of SEQ ID NO: 1564249
acaauacacccucgguaau

SEQ ID NO: 1865946 - RNA, 19 nt, Artificial Sequence
  Description of Artificial Sequence: Synthetic oligonucleotide
  Antisense strand to SEQ ID NO: 1865945
auuaccgaggguguauugu

SEQ ID NO: 1865947 - RNA, 19 nt, Artificial Sequence
  Description of Artificial Sequence: Synthetic oligonucleotide
  Sense strand starting at position 3776 of SEQ ID NO: 1564249
agcuuauguaagggacuuu

SEQ ID NO: 1865948 - RNA, 19 nt, Artificial Sequence
  Description of Artificial Sequence: Synthetic oligonucleotide
  Antisense strand to SEQ ID NO: 1865947
aaagucccuuacauaagcu

SEQ ID NO: 1865949 - RNA, 19 nt, Artificial Sequence
  Description of Artificial Sequence: Synthetic oligonucleotide
  Sense strand starting at position 3804 of SEQ ID NO: 1564249
cauugcugucuuuagauag

SEQ ID NO: 1865950 - RNA, 19 nt, Artificial Sequence
  Description of Artificial Sequence: Synthetic oligonucleotide
  Antisense strand to SEQ ID NO: 1865949
cuaucuaaagacagcaaug

SEQ ID NO: 1865951 - RNA, 19 nt, Artificial Sequence
  Description of Artificial Sequence: Synthetic oligonucleotide
  Sense strand starting at position 1 of SEQ ID NO: 1564250
cuuacuuuccuuugaggga

SEQ ID NO: 1865952 - RNA, 19 nt, Artificial Sequence
  Description of Artificial Sequence: Synthetic oligonucleotide
  Antisense strand to SEQ ID NO: 1865951
ucccucaaaggaaaguaag

SEQ ID NO: 1865953 - RNA, 19 nt, Artificial Sequence
  Description of Artificial Sequence: Synthetic oligonucleotide
  Sense strand starting at position 466 of SEQ ID NO: 1564250
gcagaacuaucuucggacu

SEQ ID NO: 1865954 - RNA, 19 nt, Artificial Sequence
  Description of Artificial Sequence: Synthetic oligonucleotide
  Antisense strand to SEQ ID NO: 1865953
aguccgaagauaguucugc

SEQ ID NO: 1865955 - RNA, 19 nt, Artificial Sequence
  Description of Artificial Sequence: Synthetic oligonucleotide
  Sense strand starting at position 620 of SEQ ID NO: 1564250
guuucugauaggcaguaaa

SEQ ID NO: 1865956 - RNA, 19 nt, Artificial Sequence
  Description of Artificial Sequence: Synthetic oligonucleotide
  Antisense strand to SEQ ID NO: 1865955
uuuacugccuaucagaaac

SEQ ID NO: 1865957 - RNA, 19 nt, Artificial Sequence
  Description of Artificial Sequence: Synthetic oligonucleotide
  Sense strand starting at position 623 of SEQ ID NO: 1564250
ucugauaggcaguaaaugu

SEQ ID NO: 1865958 - RNA, 19 nt, Artificial Sequence
  Description of Artificial Sequence: Synthetic oligonucleotide
  Antisense strand to SEQ ID NO: 1865957
acauuuacugccuaucaga

SEQ ID NO: 1865959 - RNA, 19 nt, Artificial Sequence
  Description of Artificial Sequence: Synthetic oligonucleotide
  Sense strand starting at position 632 of SEQ ID NO: 1564250
caguaaaugucauuggauc

SEQ ID NO: 1865960 - RNA, 19 nt, Artificial Sequence
  Description of Artificial Sequence: Synthetic oligonucleotide
  Antisense strand to SEQ ID NO: 1865959
gauccaaugacauuuacug

SEQ ID NO: 1865961 - RNA, 19 nt, Artificial Sequence
  Description of Artificial Sequence: Synthetic oligonucleotide
  Sense strand starting at position 633 of SEQ ID NO: 1564250
aguaaaugucauuggauca

SEQ ID NO: 1865962 - RNA, 19 nt, Artificial Sequence
  Description of Artificial Sequence: Synthetic oligonucleotide
  Antisense strand to SEQ ID NO: 1865961
ugauccaaugacauuuacu

SEQ ID NO: 1865963 - RNA, 19 nt, Artificial Sequence
  Description of Artificial Sequence: Synthetic oligonucleotide
  Sense strand starting at position 687 of SEQ ID NO: 1564250
gagccauuugucugacucu

SEQ ID NO: 1865964 - RNA, 19 nt, Artificial Sequence
  Description of Artificial Sequence: Synthetic oligonucleotide
  Antisense strand to SEQ ID NO: 1865963
agagucagacaaauggcuc

SEQ ID NO: 1865965 - RNA, 19 nt, Artificial Sequence
  Description of Artificial Sequence: Synthetic oligonucleotide
  Sense strand starting at position 1005 of SEQ ID NO: 1564250
uuguaaacgcuguaagaag

SEQ ID NO: 1865966 - RNA, 19 nt, Artificial Sequence
  Description of Artificial Sequence: Synthetic oligonucleotide
  Antisense strand to SEQ ID NO: 1865965
cuucuuacagcguuuacaa

SEQ ID NO: 1865967 - RNA, 19 nt, Artificial Sequence
  Description of Artificial Sequence: Synthetic oligonucleotide
  Sense strand starting at position 1172 of SEQ ID NO: 1564250
ugugaaagucucgaguuug

SEQ ID NO: 1865968 - RNA, 19 nt, Artificial Sequence
  Description of Artificial Sequence: Synthetic oligonucleotide
  Antisense strand to SEQ ID NO: 1865967
caaacucgagacuuucaca

SEQ ID NO: 1865969 - RNA, 19 nt, Artificial Sequence
  Description of Artificial Sequence: Synthetic oligonucleotide
  Sense strand starting at position 1308 of SEQ ID NO: 1564250
gucagaagugucgaacaug

SEQ ID NO: 1865970 - RNA, 19 nt, Artificial Sequence
  Description of Artificial Sequence: Synthetic oligonucleotide
  Antisense strand to SEQ ID NO: 1865969
cauguucgacacuucugac

SEQ ID NO: 1865971 - RNA, 19 nt, Artificial Sequence
  Description of Artificial Sequence: Synthetic oligonucleotide
  Sense strand starting at position 2122 of SEQ ID NO: 1564250
ggagcuuggugacuucaga

SEQ ID NO: 1865972 - RNA, 19 nt, Artificial Sequence
  Description of Artificial Sequence: Synthetic oligonucleotide
  Antisense strand to SEQ ID NO: 1865971
ucugaagucaccaagcucc

SEQ ID NO: 1865973 - RNA, 19 nt, Artificial Sequence
  Description of Artificial Sequence: Synthetic oligonucleotide
  Sense strand starting at position 2304 of SEQ ID NO: 1564250
ccaggagaagcuuaguguu

SEQ ID NO: 1865974 - RNA, 19 nt, Artificial Sequence
  Description of Artificial Sequence: Synthetic oligonucleotide
  Antisense strand to SEQ ID NO: 1865973
aacacuaagcuucuccugg

SEQ ID NO: 1865975 - RNA, 19 nt, Artificial Sequence
  Description of Artificial Sequence: Synthetic oligonucleotide
  Sense strand starting at position 2384 of SEQ ID NO: 1564250
acaaaugcucaccgaagaa

SEQ ID NO: 1865976 - RNA, 19 nt, Artificial Sequence
  Description of Artificial Sequence: Synthetic oligonucleotide
  Antisense strand to SEQ ID NO: 1865975
uucuucggugagcauuugu

SEQ ID NO: 1865977 - RNA, 19 nt, Artificial Sequence
  Description of Artificial Sequence: Synthetic oligonucleotide
  Sense strand starting at position 2438 of SEQ ID NO: 1564250
cuccgagacguugauaaag

SEQ ID NO: 1865978 - RNA, 19 nt, Artificial Sequence
  Description of Artificial Sequence: Synthetic oligonucleotide
  Antisense strand to SEQ ID NO: 1865977
cuuuaucaacgucucggag

SEQ ID NO: 1865979 - RNA, 19 nt, Artificial Sequence
  Description of Artificial Sequence: Synthetic oligonucleotide
  Sense strand starting at position 2562 of SEQ ID NO: 1564250
gaagaugaguggcuuuaca

SEQ ID NO: 1865980 - RNA, 19 nt, Artificial Sequence
  Description of Artificial Sequence: Synthetic oligonucleotide
  Antisense strand to SEQ ID NO: 1865979
uguaaagccacucaucuuc

SEQ ID NO: 1865981 - RNA, 19 nt, Artificial Sequence
  Description of Artificial Sequence: Synthetic oligonucleotide
  Sense strand starting at position 2603 of SEQ ID NO: 1564250
gcugucugugcagagagaa

SEQ ID NO: 1865982 - RNA, 19 nt, Artificial Sequence
  Description of Artificial Sequence: Synthetic oligonucleotide
  Antisense strand to SEQ ID NO: 1865981
uucucucugcacagacagc

SEQ ID NO: 1865983 - RNA, 19 nt, Artificial Sequence
  Description of Artificial Sequence: Synthetic oligonucleotide
  Sense strand starting at position 2628 of SEQ ID NO: 1564250
gcaagaucgagauacaugu

SEQ ID NO: 1865984 - RNA, 19 nt, Artificial Sequence
  Description of Artificial Sequence: Synthetic oligonucleotide
  Antisense strand to SEQ ID NO: 1865983
acauguaucucgaucuugc

SEQ ID NO: 1865985 - RNA, 19 nt, Artificial Sequence
  Description of Artificial Sequence: Synthetic oligonucleotide
  Sense strand starting at position 2655 of SEQ ID NO: 1564250
agaguucguaugcaugaaa

SEQ ID NO: 1865986 - RNA, 19 nt, Artificial Sequence
  Description of Artificial Sequence: Synthetic oligonucleotide
  Antisense strand to SEQ ID NO: 1865985
uuucaugcauacgaacucu

SEQ ID NO: 1865987 - RNA, 19 nt, Artificial Sequence
  Description of Artificial Sequence: Synthetic oligonucleotide
  Sense strand starting at position 2658 of SEQ ID NO: 1564250
guucguaugcaugaaagaa

SEQ ID NO: 1865988 - RNA, 19 nt, Artificial Sequence
  Description of Artificial Sequence: Synthetic oligonucleotide
  Antisense strand to SEQ ID NO: 1865987
uucuuucaugcauacgaac

SEQ ID NO: 1865989 - RNA, 19 nt, Artificial Sequence
  Description of Artificial Sequence: Synthetic oligonucleotide
  Sense strand starting at position 2857 of SEQ ID NO: 1564250
uauauagcagguugagaaa

SEQ ID NO: 1865990 - RNA, 19 nt, Artificial Sequence
  Description of Artificial Sequence: Synthetic oligonucleotide
  Antisense strand to SEQ ID NO: 1865989
uuucucaaccugcuauaua

SEQ ID NO: 1865991 - RNA, 19 nt, Artificial Sequence
  Description of Artificial Sequence: Synthetic oligonucleotide
  Sense strand starting at position 2917 of SEQ ID NO: 1564250
uaaugaguucuaggaugua

SEQ ID NO: 1865992 - RNA, 19 nt, Artificial Sequence
  Description of Artificial Sequence: Synthetic oligonucleotide
  Antisense strand to SEQ ID NO: 1865991
uacauccuagaacucauua

SEQ ID NO: 1865993 - RNA, 19 nt, Artificial Sequence
  Description of Artificial Sequence: Synthetic oligonucleotide
  Sense strand starting at position 2980 of SEQ ID NO: 1564250
ucauaagggaucuguguaa

SEQ ID NO: 1865994 - RNA, 19 nt, Artificial Sequence
  Description of Artificial Sequence: Synthetic oligonucleotide
  Antisense strand to SEQ ID NO: 1865993
uuacacagaucccuuauga

SEQ ID NO: 1865995 - RNA, 19 nt, Artificial Sequence
  Description of Artificial Sequence: Synthetic oligonucleotide
  Sense strand starting at position 2984 of SEQ ID NO: 1564250
aagggaucuguguaaucug

SEQ ID NO: 1865996 - RNA, 19 nt, Artificial Sequence
  Description of Artificial Sequence: Synthetic oligonucleotide
  Antisense strand to SEQ ID NO: 1865995
cagauuacacagaucccuu

SEQ ID NO: 1865997 - RNA, 19 nt, Artificial Sequence
  Description of Artificial Sequence: Synthetic oligonucleotide
  Sense strand starting at position 2987 of SEQ ID NO: 1564250
ggaucuguguaaucugaau

SEQ ID NO: 1865998 - RNA, 19 nt, Artificial Sequence
  Description of Artificial Sequence: Synthetic oligonucleotide
  Antisense strand to SEQ ID NO: 1865997
auucagauuacacagaucc

SEQ ID NO: 1865999 - RNA, 19 nt, Artificial Sequence
  Description of Artificial Sequence: Synthetic oligonucleotide
  Sense strand starting at position 3000 of SEQ ID NO: 1564250
cugaauguauuugaauaac

SEQ ID NO: 1866000 - RNA, 19 nt, Artificial Sequence
  Description of Artificial Sequence: Synthetic oligonucleotide
  Antisense strand to SEQ ID NO: 1865999
guuauucaaauacauucag

SEQ ID NO: 1866001 - RNA, 19 nt, Artificial Sequence
  Description of Artificial Sequence: Synthetic oligonucleotide
  Sense strand starting at position 3058 of SEQ ID NO: 1564250
cgauauaaguauucccaug

SEQ ID NO: 1866002 - RNA, 19 nt, Artificial Sequence
  Description of Artificial Sequence: Synthetic oligonucleotide
  Antisense strand to SEQ ID NO: 1866001
caugggaauacuuauaucg

SEQ ID NO: 1866003 - RNA, 19 nt, Artificial Sequence
  Description of Artificial Sequence: Synthetic oligonucleotide
  Sense strand starting at position 3068 of SEQ ID NO: 1564250
auucccaugugucuuagaa

SEQ ID NO: 1866004 - RNA, 19 nt, Artificial Sequence
  Description of Artificial Sequence: Synthetic oligonucleotide
  Antisense strand to SEQ ID NO: 1866003
uucuaagacacaugggaau

SEQ ID NO: 1866005 - RNA, 19 nt, Artificial Sequence
  Description of Artificial Sequence: Synthetic oligonucleotide
  Sense strand starting at position 3169 of SEQ ID NO: 1564250
gcuauagcauaauuagauu

SEQ ID NO: 1866006 - RNA, 19 nt, Artificial Sequence
  Description of Artificial Sequence: Synthetic oligonucleotide
  Antisense strand to SEQ ID NO: 1866005
aaucuaauuaugcuauagc

SEQ ID NO: 1866007 - RNA, 19 nt, Artificial Sequence
  Description of Artificial Sequence: Synthetic oligonucleotide
  Sense strand starting at position 3339 of SEQ ID NO: 1564250
acagaagccucugcaauaa

SEQ ID NO: 1866008 - RNA, 19 nt, Artificial Sequence
  Description of Artificial Sequence: Synthetic oligonucleotide
  Antisense strand to SEQ ID NO: 1866007
uuauugcagaggcuucugu

SEQ ID NO: 1866009 - RNA, 19 nt, Artificial Sequence
  Description of Artificial Sequence: Synthetic oligonucleotide
  Sense strand starting at position 3496 of SEQ ID NO: 1564250
cgguguugucugcucuaau

SEQ ID NO: 1866010 - RNA, 19 nt, Artificial Sequence
  Description of Artificial Sequence: Synthetic oligonucleotide
  Antisense strand to SEQ ID NO: 1866009
auuagagcagacaacaccg

SEQ ID NO: 1866011 - RNA, 19 nt, Artificial Sequence
  Description of Artificial Sequence: Synthetic oligonucleotide
  Sense strand starting at position 3640 of SEQ ID NO: 1564250
agcuuucucggccacagaa

SEQ ID NO: 1866012 - RNA, 19 nt, Artificial Sequence
  Description of Artificial Sequence: Synthetic oligonucleotide
  Antisense strand to SEQ ID NO: 1866011
uucuguggccgagaaagcu

SEQ ID NO: 1866013 - RNA, 19 nt, Artificial Sequence
  Description of Artificial Sequence: Synthetic oligonucleotide
  Sense strand starting at position 3731 of SEQ ID NO: 1564250
agcacuuuggcccacaaga

SEQ ID NO: 1866014 - RNA, 19 nt, Artificial Sequence
  Description of Artificial Sequence: Synthetic oligonucleotide
  Antisense strand to SEQ ID NO: 1866013
ucuugugggccaaagugcu

SEQ ID NO: 1866015 - RNA, 19 nt, Artificial Sequence
  Description of Artificial Sequence: Synthetic oligonucleotide
  Sense strand starting at position 3753 of SEQ ID NO: 1564250
auugguuguggagauguau

SEQ ID NO: 1866016 - RNA, 19 nt, Artificial Sequence
  Description of Artificial Sequence: Synthetic oligonucleotide
  Antisense strand to SEQ ID NO: 1866015
auacaucuccacaaccaau

SEQ ID NO: 1866017 - RNA, 19 nt, Artificial Sequence
  Description of Artificial Sequence: Synthetic oligonucleotide
  Sense strand starting at position 3759 of SEQ ID NO: 1564250
uguggagauguauguggau

SEQ ID NO: 1866018 - RNA, 19 nt, Artificial Sequence
  Description of Artificial Sequence: Synthetic oligonucleotide
  Antisense strand to SEQ ID NO: 1866017
auccacauacaucuccaca

SEQ ID NO: 1866019 - RNA, 19 nt, Artificial Sequence
  Description of Artificial Sequence: Synthetic oligonucleotide
  Sense strand starting at position 3761 of SEQ ID NO: 1564250
uggagauguauguggauug

SEQ ID NO: 1866020 - RNA, 19 nt, Artificial Sequence
  Description of Artificial Sequence: Synthetic oligonucleotide
  Antisense strand to SEQ ID NO: 1866019
caauccacauacaucucca

SEQ ID NO: 1866021 - RNA, 19 nt, Artificial Sequence
  Description of Artificial Sequence: Synthetic oligonucleotide
  Sense strand starting at position 3766 of SEQ ID NO: 1564250
auguauguggauugaagua

SEQ ID NO: 1866022 - RNA, 19 nt, Artificial Sequence
  Description of Artificial Sequence: Synthetic oligonucleotide
  Antisense strand to SEQ ID NO: 1866021
uacuucaauccacauacau

SEQ ID NO: 1866023 - RNA, 19 nt, Artificial Sequence
  Description of Artificial Sequence: Synthetic oligonucleotide
  Sense strand starting at position 3781 of SEQ ID NO: 1564250
aguaauaaauccgugauag

SEQ ID NO: 1866024 - RNA, 19 nt, Artificial Sequence
  Description of Artificial Sequence: Synthetic oligonucleotide
  Antisense strand to SEQ ID NO: 1866023
cuaucacggauuuauuacu

SEQ ID NO: 1866025 - RNA, 19 nt, Artificial Sequence
  Description of Artificial Sequence: Synthetic oligonucleotide
  Sense strand starting at position 3782 of SEQ ID NO: 1564250
guaauaaauccgugauagg

SEQ ID NO: 1866026 - RNA, 19 nt, Artificial Sequence
  Description of Artificial Sequence: Synthetic oligonucleotide
  Antisense strand to SEQ ID NO: 1866025
ccuaucacggauuuauuac

SEQ ID NO: 1866027 - RNA, 19 nt, Artificial Sequence
  Description of Artificial Sequence: Synthetic oligonucleotide
  Sense strand starting at position 3921 of SEQ ID NO: 1564250
agcgcuuuaagguaagaug

SEQ ID NO: 1866028 - RNA, 19 nt, Artificial Sequence
  Description of Artificial Sequence: Synthetic oligonucleotide
  Antisense strand to SEQ ID NO: 1866027
caucuuaccuuaaagcgcu

SEQ ID NO: 1866029 - RNA, 19 nt, Artificial Sequence
  Description of Artificial Sequence: Synthetic oligonucleotide
  Sense strand starting at position 3940 of SEQ ID NO: 1564250
gagguagaacuaugucuuu

SEQ ID NO: 1866030 - RNA, 19 nt, Artificial Sequence
  Description of Artificial Sequence: Synthetic oligonucleotide
  Antisense strand to SEQ ID NO: 1866029
aaagacauaguucuaccuc

SEQ ID NO: 1866031 - RNA, 19 nt, Artificial Sequence
  Description of Artificial Sequence: Synthetic oligonucleotide
  Sense strand starting at position 78 of SEQ ID NO: 1564251
uuccgacaagucugguuua

SEQ ID NO: 1866032 - RNA, 19 nt, Artificial Sequence
  Description of Artificial Sequence: Synthetic oligonucleotide
  Antisense strand to SEQ ID NO: 1866031
uaaaccagacuugucggaa

SEQ ID NO: 1866033 - RNA, 19 nt, Artificial Sequence
  Description of Artificial Sequence: Synthetic oligonucleotide
  Sense strand starting at position 81 of SEQ ID NO: 1564251
cgacaagucugguuuauca

SEQ ID NO: 1866034 - RNA, 19 nt, Artificial Sequence
  Description of Artificial Sequence: Synthetic oligonucleotide
  Antisense strand to SEQ ID NO: 1866033
ugauaaaccagacuugucg

SEQ ID NO: 1866035 - RNA, 19 nt, Artificial Sequence
  Description of Artificial Sequence: Synthetic oligonucleotide
  Sense strand starting at position 83 of SEQ ID NO: 1564251
acaagucugguuuaucacu

SEQ ID NO: 1866036 - RNA, 19 nt, Artificial Sequence
  Description of Artificial Sequence: Synthetic oligonucleotide
  Antisense strand to SEQ ID NO: 1866035
agugauaaaccagacuugu

SEQ ID NO: 1866037 - RNA, 19 nt, Artificial Sequence
  Description of Artificial Sequence: Synthetic oligonucleotide
  Sense strand starting at position 88 of SEQ ID NO: 1564251
ucugguuuaucacucaucu

SEQ ID NO: 1866038 - RNA, 19 nt, Artificial Sequence
  Description of Artificial Sequence: Synthetic oligonucleotide
  Antisense strand to SEQ ID NO: 1866037
agaugagugauaaaccaga

SEQ ID NO: 1866039 - RNA, 19 nt, Artificial Sequence
  Description of Artificial Sequence: Synthetic oligonucleotide
  Sense strand starting at position 92 of SEQ ID NO: 1564251
guuuaucacucaucuugac

SEQ ID NO: 1866040 - RNA, 19 nt, Artificial Sequence
  Description of Artificial Sequence: Synthetic oligonucleotide
  Antisense strand to SEQ ID NO: 1866039
gucaagaugagugauaaac

SEQ ID NO: 1866041 - RNA, 19 nt, Artificial Sequence
  Description of Artificial Sequence: Synthetic oligonucleotide
  Sense strand starting at position 465 of SEQ ID NO: 1564251
gcagaacuaucuucggacu

SEQ ID NO: 1866042 - RNA, 19 nt, Artificial Sequence
  Description of Artificial Sequence: Synthetic oligonucleotide
  Antisense strand to SEQ ID NO: 1866041
aguccgaagauaguucugc

SEQ ID NO: 1866043 - RNA, 19 nt, Artificial Sequence
  Description of Artificial Sequence: Synthetic oligonucleotide
  Sense strand starting at position 618 of SEQ ID NO: 1564251
cguuucugauaggcaguaa

SEQ ID NO: 1866044 - RNA, 19 nt, Artificial Sequence
  Description of Artificial Sequence: Synthetic oligonucleotide
  Antisense strand to SEQ ID NO: 1866043
uuacugccuaucagaaacg

SEQ ID NO: 1866045 - RNA, 19 nt, Artificial Sequence
  Description of Artificial Sequence: Synthetic oligonucleotide
  Sense strand starting at position 619 of SEQ ID NO: 1564251
guuucugauaggcaguaaa

SEQ ID NO: 1866046 - RNA, 19 nt, Artificial Sequence
  Description of Artificial Sequence: Synthetic oligonucleotide
  Antisense strand to SEQ ID NO: 1866045
uuuacugccuaucagaaac

SEQ ID NO: 1866047 - RNA, 19 nt, Artificial Sequence
  Description of Artificial Sequence: Synthetic oligonucleotide
  Sense strand starting at position 622 of SEQ ID NO: 1564251
ucugauaggcaguaaaugu

SEQ ID NO: 1866048 - RNA, 19 nt, Artificial Sequence
  Description of Artificial Sequence: Synthetic oligonucleotide
  Antisense strand to SEQ ID NO: 1866047
acauuuacugccuaucaga

SEQ ID NO: 1866049 - RNA, 19 nt, Artificial Sequence
  Description of Artificial Sequence: Synthetic oligonucleotide
  Sense strand starting at position 631 of SEQ ID NO: 1564251
caguaaaugucauuggauc

SEQ ID NO: 1866050 - RNA, 19 nt, Artificial Sequence
  Description of Artificial Sequence: Synthetic oligonucleotide
  Antisense strand to SEQ ID NO: 1866049
gauccaaugacauuuacug

SEQ ID NO: 1866051 - RNA, 19 nt, Artificial Sequence
  Description of Artificial Sequence: Synthetic oligonucleotide
  Sense strand starting at position 632 of SEQ ID NO: 1564251
aguaaaugucauuggauca

SEQ ID NO: 1866052 - RNA, 19 nt, Artificial Sequence
  Description of Artificial Sequence: Synthetic oligonucleotide
  Antisense strand to SEQ ID NO: 1866051
ugauccaaugacauuuacu

SEQ ID NO: 1866053 - RNA, 19 nt, Artificial Sequence
  Description of Artificial Sequence: Synthetic oligonucleotide
  Sense strand starting at position 686 of SEQ ID NO: 1564251
gagccauuugucugacucu

SEQ ID NO: 1866054 - RNA, 19 nt, Artificial Sequence
  Description of Artificial Sequence: Synthetic oligonucleotide
  Antisense strand to SEQ ID NO: 1866053
agagucagacaaauggcuc

SEQ ID NO: 1866055 - RNA, 19 nt, Artificial Sequence
  Description of Artificial Sequence: Synthetic oligonucleotide
  Sense strand starting at position 1140 of SEQ ID NO: 1564251
agcuguggaccugacgaaa

SEQ ID NO: 1866056 - RNA, 19 nt, Artificial Sequence
  Description of Artificial Sequence: Synthetic oligonucleotide
  Antisense strand to SEQ ID NO: 1866055
uuucgucagguccacagcu

SEQ ID NO: 1866057 - RNA, 19 nt, Artificial Sequence
  Description of Artificial Sequence: Synthetic oligonucleotide
  Sense strand starting at position 1171 of SEQ ID NO: 1564251
ugugaaagucucgaguuug

SEQ ID NO: 1866058 - RNA, 19 nt, Artificial Sequence
  Description of Artificial Sequence: Synthetic oligonucleotide
  Antisense strand to SEQ ID NO: 1866057
caaacucgagacuuucaca

SEQ ID NO: 1866059 - RNA, 19 nt, Artificial Sequence
  Description of Artificial Sequence: Synthetic oligonucleotide
  Sense strand starting at position 1177 of SEQ ID NO: 1564251
agucucgaguuuguucaga

SEQ ID NO: 1866060 - RNA, 19 nt, Artificial Sequence
  Description of Artificial Sequence: Synthetic oligonucleotide
  Antisense strand to SEQ ID NO: 1866059
ucugaacaaacucgagacu

SEQ ID NO: 1866061 - RNA, 19 nt, Artificial Sequence
  Description of Artificial Sequence: Synthetic oligonucleotide
  Sense strand starting at position 1179 of SEQ ID NO: 1564251
ucucgaguuuguucagaag

SEQ ID NO: 1866062 - RNA, 19 nt, Artificial Sequence
  Description of Artificial Sequence: Synthetic oligonucleotide
  Antisense strand to SEQ ID NO: 1866061
cuucugaacaaacucgaga

SEQ ID NO: 1866063 - RNA, 19 nt, Artificial Sequence
  Description of Artificial Sequence: Synthetic oligonucleotide
  Sense strand starting at position 1257 of SEQ ID NO: 1564251
guaagacacuucgucuagu

SEQ ID NO: 1866064 - RNA, 19 nt, Artificial Sequence
  Description of Artificial Sequence: Synthetic oligonucleotide
  Antisense strand to SEQ ID NO: 1866063
acuagacgaagugucuuac

SEQ ID NO: 1866065 - RNA, 19 nt, Artificial Sequence
  Description of Artificial Sequence: Synthetic oligonucleotide
  Sense strand starting at position 1303 of SEQ ID NO: 1564251
agcagucagaagugucgaa

SEQ ID NO: 1866066 - RNA, 19 nt, Artificial Sequence
  Description of Artificial Sequence: Synthetic oligonucleotide
  Antisense strand to SEQ ID NO: 1866065
uucgacacuucugacugcu

SEQ ID NO: 1866067 - RNA, 19 nt, Artificial Sequence
  Description of Artificial Sequence: Synthetic oligonucleotide
  Sense strand starting at position 1307 of SEQ ID NO: 1564251
gucagaagugucgaacaug

SEQ ID NO: 1866068 - RNA, 19 nt, Artificial Sequence
  Description of Artificial Sequence: Synthetic oligonucleotide
  Antisense strand to SEQ ID NO: 1866067
cauguucgacacuucugac

SEQ ID NO: 1866069 - RNA, 19 nt, Artificial Sequence
  Description of Artificial Sequence: Synthetic oligonucleotide
  Sense strand starting at position 1327 of SEQ ID NO: 1564251
cuccauucugucgagguua

SEQ ID NO: 1866070 - RNA, 19 nt, Artificial Sequence
  Description of Artificial Sequence: Synthetic oligonucleotide
  Antisense strand to SEQ ID NO: 1866069
uaaccucgacagaauggag

SEQ ID NO: 1866071 - RNA, 19 nt, Artificial Sequence
  Description of Artificial Sequence: Synthetic oligonucleotide
  Sense strand starting at position 1335 of SEQ ID NO: 1564251
ugucgagguuacccuaaga

SEQ ID NO: 1866072 - RNA, 19 nt, Artificial Sequence
  Description of Artificial Sequence: Synthetic oligonucleotide
  Antisense strand to SEQ ID NO: 1866071
ucuuaggguaaccucgaca

SEQ ID NO: 1866073 - RNA, 19 nt, Artificial Sequence
  Description of Artificial Sequence: Synthetic oligonucleotide
  Sense strand starting at position 1478 of SEQ ID NO: 1564251
aacuauuagcguuguuaga

SEQ ID NO: 1866074 - RNA, 19 nt, Artificial Sequence
  Description of Artificial Sequence: Synthetic oligonucleotide
  Antisense strand to SEQ ID NO: 1866073
ucuaacaacgcuaauaguu

SEQ ID NO: 1866075 - RNA, 19 nt, Artificial Sequence
  Description of Artificial Sequence: Synthetic oligonucleotide
  Sense strand starting at position 2031 of SEQ ID NO: 1564251
cucugauuggccgaggguu

SEQ ID NO: 1866076 - RNA, 19 nt, Artificial Sequence
  Description of Artificial Sequence: Synthetic oligonucleotide
  Antisense strand to SEQ ID NO: 1866075
aacccucggccaaucagag

SEQ ID NO: 1866077 - RNA, 19 nt, Artificial Sequence
  Description of Artificial Sequence: Synthetic oligonucleotide
  Sense strand starting at position 2121 of SEQ ID NO: 1564251
ggagcuuggugacuucaga

SEQ ID NO: 1866078 - RNA, 19 nt, Artificial Sequence
  Description of Artificial Sequence: Synthetic oligonucleotide
  Antisense strand to SEQ ID NO: 1866077
ucugaagucaccaagcucc

SEQ ID NO: 1866079 - RNA, 19 nt, Artificial Sequence
  Description of Artificial Sequence: Synthetic oligonucleotide
  Sense strand starting at position 2653 of SEQ ID NO: 1564251
cagaguucguaugcaugaa

SEQ ID NO: 1866080 - RNA, 19 nt, Artificial Sequence
  Description of Artificial Sequence: Synthetic oligonucleotide
  Antisense strand to SEQ ID NO: 1866079
uucaugcauacgaacucug

SEQ ID NO: 1866081 - RNA, 19 nt, Artificial Sequence
  Description of Artificial Sequence: Synthetic oligonucleotide
  Sense strand starting at position 2654 of SEQ ID NO: 1564251
agaguucguaugcaugaaa

SEQ ID NO: 1866082 - RNA, 19 nt, Artificial Sequence
  Description of Artificial Sequence: Synthetic oligonucleotide
  Antisense strand to SEQ ID NO: 1866081
uuucaugcauacgaacucu

SEQ ID NO: 1866083 - RNA, 19 nt, Artificial Sequence
  Description of Artificial Sequence: Synthetic oligonucleotide
  Sense strand starting at position 3338 of SEQ ID NO: 1564251
acagaagccucugcaauaa

SEQ ID NO: 1866084 - RNA, 19 nt, Artificial Sequence
  Description of Artificial Sequence: Synthetic oligonucleotide
  Antisense strand to SEQ ID NO: 1866083
uuauugcagaggcuucugu

SEQ ID NO: 1866085 - RNA, 19 nt, Artificial Sequence
  Description of Artificial Sequence: Synthetic oligonucleotide
  Sense strand starting at position 3408 of SEQ ID NO: 1564251
agcugaaugaccgguauau

SEQ ID NO: 1866086 - RNA, 19 nt, Artificial Sequence
  Description of Artificial Sequence: Synthetic oligonucleotide
  Antisense strand to SEQ ID NO: 1866085
auauaccggucauucagcu

SEQ ID NO: 1866087 - RNA, 19 nt, Artificial Sequence
  Description of Artificial Sequence: Synthetic oligonucleotide
  Sense strand starting at position 3554 of SEQ ID NO: 1564251
uggguaguucagggccauu

SEQ ID NO: 1866088 - RNA, 19 nt, Artificial Sequence
  Description of Artificial Sequence: Synthetic oligonucleotide
  Antisense strand to SEQ ID NO: 1866087
aauggcccugaacuaccca

SEQ ID NO: 1866089 - RNA, 19 nt, Artificial Sequence
  Description of Artificial Sequence: Synthetic oligonucleotide
  Sense strand starting at position 3604 of SEQ ID NO: 1564251
agugcucuccugugaaaug

SEQ ID NO: 1866090 - RNA, 19 nt, Artificial Sequence
  Description of Artificial Sequence: Synthetic oligonucleotide
  Antisense strand to SEQ ID NO: 1866089
cauuucacaggagagcacu

SEQ ID NO: 1866091 - RNA, 19 nt, Artificial Sequence
  Description of Artificial Sequence: Synthetic oligonucleotide
  Sense strand starting at position 3639 of SEQ ID NO: 1564251
agcuuucucggccacagaa

SEQ ID NO: 1866092 - RNA, 19 nt, Artificial Sequence
  Description of Artificial Sequence: Synthetic oligonucleotide
  Antisense strand to SEQ ID NO: 1866091
uucuguggccgagaaagcu

SEQ ID NO: 1866093 - RNA, 19 nt, Artificial Sequence
  Description of Artificial Sequence: Synthetic oligonucleotide
  Sense strand starting at position 3668 of SEQ ID NO: 1564251
gucaguuuauaaucacaga

SEQ ID NO: 1866094 - RNA, 19 nt, Artificial Sequence
  Description of Artificial Sequence: Synthetic oligonucleotide
  Antisense strand to SEQ ID NO: 1866093
ucugugauuauaaacugac

SEQ ID NO: 1866095 - RNA, 19 nt, Artificial Sequence
  Description of Artificial Sequence: Synthetic oligonucleotide
  Sense strand starting at position 3752 of SEQ ID NO: 1564251
auugguuguggagauguau

SEQ ID NO: 1866096 - RNA, 19 nt, Artificial Sequence
  Description of Artificial Sequence: Synthetic oligonucleotide
  Antisense strand to SEQ ID NO: 1866095
auacaucuccacaaccaau

SEQ ID NO: 1866097 - RNA, 19 nt, Artificial Sequence
  Description of Artificial Sequence: Synthetic oligonucleotide
  Sense strand starting at position 3758 of SEQ ID NO: 1564251
uguggagauguauguggau

SEQ ID NO: 1866098 - RNA, 19 nt, Artificial Sequence
  Description of Artificial Sequence: Synthetic oligonucleotide
  Antisense strand to SEQ ID NO: 1866097
auccacauacaucuccaca

SEQ ID NO: 1866099 - RNA, 19 nt, Artificial Sequence
  Description of Artificial Sequence: Synthetic oligonucleotide
  Sense strand starting at position 3760 of SEQ ID NO: 1564251
uggagauguauguggauug

SEQ ID NO: 1866100 - RNA, 19 nt, Artificial Sequence
  Description of Artificial Sequence: Synthetic oligonucleotide
  Antisense strand to SEQ ID NO: 1866099
caauccacauacaucucca

SEQ ID NO: 1866101 - RNA, 19 nt, Artificial Sequence
  Description of Artificial Sequence: Synthetic oligonucleotide
  Sense strand starting at position 3765 of SEQ ID NO: 1564251
auguauguggauugaagua

SEQ ID NO: 1866102 - RNA, 19 nt, Artificial Sequence
  Description of Artificial Sequence: Synthetic oligonucleotide
  Antisense strand to SEQ ID NO: 1866101
uacuucaauccacauacau

SEQ ID NO: 1866103 - RNA, 19 nt, Artificial Sequence
  Description of Artificial Sequence: Synthetic oligonucleotide
  Sense strand starting at position 3780 of SEQ ID NO: 1564251
aguaauaaauccgugauag

SEQ ID NO: 1866104 - RNA, 19 nt, Artificial Sequence
  Description of Artificial Sequence: Synthetic oligonucleotide
  Antisense strand to SEQ ID NO: 1866103
cuaucacggauuuauuacu

SEQ ID NO: 1866105 - RNA, 19 nt, Artificial Sequence
  Description of Artificial Sequence: Synthetic oligonucleotide
  Sense strand starting at position 3781 of SEQ ID NO: 1564251
guaauaaauccgugauagg

SEQ ID NO: 1866106 - RNA, 19 nt, Artificial Sequence
  Description of Artificial Sequence: Synthetic oligonucleotide
  Antisense strand to SEQ ID NO: 1866105
ccuaucacggauuuauuac

SEQ ID NO: 1866107 - RNA, 19 nt, Artificial Sequence
  Description of Artificial Sequence: Synthetic oligonucleotide
  Sense strand starting at position 3915 of SEQ ID NO: 1564251
accuuagcgcuuuaaggua

SEQ ID NO: 1866108 - RNA, 19 nt, Artificial Sequence
  Description of Artificial Sequence: Synthetic oligonucleotide
  Antisense strand to SEQ ID NO: 1866107
uaccuuaaagcgcuaaggu

SEQ ID NO: 1866109 - RNA, 19 nt, Artificial Sequence
  Description of Artificial Sequence: Synthetic oligonucleotide
  Sense strand starting at position 3920 of SEQ ID NO: 1564251
agcgcuuuaagguaagaug

SEQ ID NO: 1866110 - RNA, 19 nt, Artificial Sequence
  Description of Artificial Sequence: Synthetic oligonucleotide
  Antisense strand to SEQ ID NO: 1866109
caucuuaccuuaaagcgcu

SEQ ID NO: 1866111 - RNA, 19 nt, Artificial Sequence
  Description of Artificial Sequence: Synthetic oligonucleotide
  Sense strand starting at position 323 of SEQ ID NO: 1564252
guucaaucgcugugaccag

SEQ ID NO: 1866112 - RNA, 19 nt, Artificial Sequence
  Description of Artificial Sequence: Synthetic oligonucleotide
  Antisense strand to SEQ ID NO: 1866111
cuggucacagcgauugaac

SEQ ID NO: 1866113 - RNA, 19 nt, Artificial Sequence
  Description of Artificial Sequence: Synthetic oligonucleotide
  Sense strand starting at position 441 of SEQ ID NO: 1564252
cacgguauuccacaaugga

SEQ ID NO: 1866114 - RNA, 19 nt, Artificial Sequence
  Description of Artificial Sequence: Synthetic oligonucleotide
  Antisense strand to SEQ ID NO: 1866113
uccauuguggaauaccgug

SEQ ID NO: 1866115 - RNA, 19 nt, Artificial Sequence
  Description of Artificial Sequence: Synthetic oligonucleotide
  Sense strand starting at position 444 of SEQ ID NO: 1564252
gguauuccacaauggaaua

SEQ ID NO: 1866116 - RNA, 19 nt, Artificial Sequence
  Description of Artificial Sequence: Synthetic oligonucleotide
  Antisense strand to SEQ ID NO: 1866115
uauuccauuguggaauacc

SEQ ID NO: 1866117 - RNA, 19 nt, Artificial Sequence
  Description of Artificial Sequence: Synthetic oligonucleotide
  Sense strand starting at position 566 of SEQ ID NO: 1564252
ccguguuuguuggcugcaa

SEQ ID NO: 1866118 - RNA, 19 nt, Artificial Sequence
  Description of Artificial Sequence: Synthetic oligonucleotide
  Antisense strand to SEQ ID NO: 1866117
uugcagccaacaaacacgg

SEQ ID NO: 1866119 - RNA, 19 nt, Artificial Sequence
  Description of Artificial Sequence: Synthetic oligonucleotide
  Sense strand starting at position 1004 of SEQ ID NO: 1564252
cgagcuuccucuuucuaca

SEQ ID NO: 1866120 - RNA, 19 nt, Artificial Sequence
  Description of Artificial Sequence: Synthetic oligonucleotide
  Antisense strand to SEQ ID NO: 1866119
uguagaaagaggaagcucg

SEQ ID NO: 1866121 - RNA, 19 nt, Artificial Sequence
  Description of Artificial Sequence: Synthetic oligonucleotide
  Sense strand starting at position 1103 of SEQ ID NO: 1564252
agccgaaucuugcagaaua

SEQ ID NO: 1866122 - RNA, 19 nt, Artificial Sequence
  Description of Artificial Sequence: Synthetic oligonucleotide
  Antisense strand to SEQ ID NO: 1866121
uauucugcaagauucggcu

SEQ ID NO: 1866123 - RNA, 19 nt, Artificial Sequence
  Description of Artificial Sequence: Synthetic oligonucleotide
  Sense strand starting at position 1105 of SEQ ID NO: 1564252
ccgaaucuugcagaauaaa

SEQ ID NO: 1866124 - RNA, 19 nt, Artificial Sequence
  Description of Artificial Sequence: Synthetic oligonucleotide
  Antisense strand to SEQ ID NO: 1866123
uuuauucugcaagauucgg

SEQ ID NO: 1866125 - RNA, 19 nt, Artificial Sequence
  Description of Artificial Sequence: Synthetic oligonucleotide
  Sense strand starting at position 1125 of SEQ ID NO: 1564252
gaaauugaccacugcgaau

SEQ ID NO: 1866126 - RNA, 19 nt, Artificial Sequence
  Description of Artificial Sequence: Synthetic oligonucleotide
  Antisense strand to SEQ ID NO: 1866125
auucgcaguggucaauuuc

SEQ ID NO: 1866127 - RNA, 19 nt, Artificial Sequence
  Description of Artificial Sequence: Synthetic oligonucleotide
  Sense strand starting at position 1134 of SEQ ID NO: 1564252
cacugcgaauuguuaauua

SEQ ID NO: 1866128 - RNA, 19 nt, Artificial Sequence
  Description of Artificial Sequence: Synthetic oligonucleotide
  Antisense strand to SEQ ID NO: 1866127
uaauuaacaauucgcagug

SEQ ID NO: 1866129 - RNA, 19 nt, Artificial Sequence
  Description of Artificial Sequence: Synthetic oligonucleotide
  Sense strand starting at position 1284 of SEQ ID NO: 1564252
gcggccucuccgcaaggau

SEQ ID NO: 1866130 - RNA, 19 nt, Artificial Sequence
  Description of Artificial Sequence: Synthetic oligonucleotide
  Antisense strand to SEQ ID NO: 1866129
auccuugcggagaggccgc

SEQ ID NO: 1866131 - RNA, 19 nt, Artificial Sequence
  Description of Artificial Sequence: Synthetic oligonucleotide
  Sense strand starting at position 1317 of SEQ ID NO: 1564252
gcuuucuaguccucucaca

SEQ ID NO: 1866132 - RNA, 19 nt, Artificial Sequence
  Description of Artificial Sequence: Synthetic oligonucleotide
  Antisense strand to SEQ ID NO: 1866131
ugugagaggacuagaaagc

SEQ ID NO: 1866133 - RNA, 19 nt, Artificial Sequence
  Description of Artificial Sequence: Synthetic oligonucleotide
  Sense strand starting at position 1448 of SEQ ID NO: 1564252
gccugcucucccggcaauu

SEQ ID NO: 1866134 - RNA, 19 nt, Artificial Sequence
  Description of Artificial Sequence: Synthetic oligonucleotide
  Antisense strand to SEQ ID NO: 1866133
aauugccgggagagcaggc

SEQ ID NO: 1866135 - RNA, 19 nt, Artificial Sequence
  Description of Artificial Sequence: Synthetic oligonucleotide
  Sense strand starting at position 1502 of SEQ ID NO: 1564252
cuguaaagaugucauagca

SEQ ID NO: 1866136 - RNA, 19 nt, Artificial Sequence
  Description of Artificial Sequence: Synthetic oligonucleotide
  Antisense strand to SEQ ID NO: 1866135
ugcuaugacaucuuuacag

SEQ ID NO: 1866137 - RNA, 19 nt, Artificial Sequence
  Description of Artificial Sequence: Synthetic oligonucleotide
  Sense strand starting at position 1597 of SEQ ID NO: 1564252
agaugaaccucagaacaaa

SEQ ID NO: 1866138 - RNA, 19 nt, Artificial Sequence
  Description of Artificial Sequence: Synthetic oligonucleotide
  Antisense strand to SEQ ID NO: 1866137
uuuguucugagguucaucu

SEQ ID NO: 1866139 - RNA, 19 nt, Artificial Sequence
  Description of Artificial Sequence: Synthetic oligonucleotide
  Sense strand starting at position 1669 of SEQ ID NO: 1564252
gcgggcaaacacuaagaaa

SEQ ID NO: 1866140 - RNA, 19 nt, Artificial Sequence
  Description of Artificial Sequence: Synthetic oligonucleotide
  Antisense strand to SEQ ID NO: 1866139
uuucuuaguguuugcccgc

SEQ ID NO: 1866141 - RNA, 19 nt, Artificial Sequence
  Description of Artificial Sequence: Synthetic oligonucleotide
  Sense strand starting at position 1672 of SEQ ID NO: 1564252
ggcaaacacuaagaaauuu

SEQ ID NO: 1866142 - RNA, 19 nt, Artificial Sequence
  Description of Artificial Sequence: Synthetic oligonucleotide
  Antisense strand to SEQ ID NO: 1866141
aaauuucuuaguguuugcc

SEQ ID NO: 1866143 - RNA, 19 nt, Artificial Sequence
  Description of Artificial Sequence: Synthetic oligonucleotide
  Sense strand starting at position 2023 of SEQ ID NO: 1564252
gcuuuaugggcgcuccuau

SEQ ID NO: 1866144 - RNA, 19 nt, Artificial Sequence
  Description of Artificial Sequence: Synthetic oligonucleotide
  Antisense strand to SEQ ID NO: 1866143
auaggagcgcccauaaagc

SEQ ID NO: 1866145 - RNA, 19 nt, Artificial Sequence
  Description of Artificial Sequence: Synthetic oligonucleotide
  Sense strand starting at position 2030 of SEQ ID NO: 1564252
gggcgcuccuauguaaaug

SEQ ID NO: 1866146 - RNA, 19 nt, Artificial Sequence
  Description of Artificial Sequence: Synthetic oligonucleotide
  Antisense strand to SEQ ID NO: 1866145
cauuuacauaggagcgccc

SEQ ID NO: 1866147 - RNA, 19 nt, Artificial Sequence
  Description of Artificial Sequence: Synthetic oligonucleotide
  Sense strand starting at position 2031 of SEQ ID NO: 1564252
ggcgcuccuauguaaauga

SEQ ID NO: 1866148 - RNA, 19 nt, Artificial Sequence
  Description of Artificial Sequence: Synthetic oligonucleotide
  Antisense strand to SEQ ID NO: 1866147
ucauuuacauaggagcgcc

SEQ ID NO: 1866149 - RNA, 19 nt, Artificial Sequence
  Description of Artificial Sequence: Synthetic oligonucleotide
  Sense strand starting at position 2370 of SEQ ID NO: 1564252
cuuugucuacuguggacau

SEQ ID NO: 1866150 - RNA, 19 nt, Artificial Sequence
  Description of Artificial Sequence: Synthetic oligonucleotide
  Antisense strand to SEQ ID NO: 1866149
auguccacaguagacaaag

SEQ ID NO: 1866151 - RNA, 19 nt, Artificial Sequence
  Description of Artificial Sequence: Synthetic oligonucleotide
  Sense strand starting at position 2441 of SEQ ID NO: 1564252
guacgauuccugugacuca

SEQ ID NO: 1866152 - RNA, 19 nt, Artificial Sequence
  Description of Artificial Sequence: Synthetic oligonucleotide
  Antisense strand to SEQ ID NO: 1866151
ugagucacaggaaucguac

SEQ ID NO: 1866153 - RNA, 19 nt, Artificial Sequence
  Description of Artificial Sequence: Synthetic oligonucleotide
  Sense strand starting at position 2624 of SEQ ID NO: 1564252
agcacucaacaguaguauu

SEQ ID NO: 1866154 - RNA, 19 nt, Artificial Sequence
  Description of Artificial Sequence: Synthetic oligonucleotide
  Antisense strand to SEQ ID NO: 1866153
aauacuacuguugagugcu

SEQ ID NO: 1866155 - RNA, 19 nt, Artificial Sequence
  Description of Artificial Sequence: Synthetic oligonucleotide
  Sense strand starting at position 2635 of SEQ ID NO: 1564252
guaguauuugcugggugua

SEQ ID NO: 1866156 - RNA, 19 nt, Artificial Sequence
  Description of Artificial Sequence: Synthetic oligonucleotide
  Antisense strand to SEQ ID NO: 1866155
uacacccagcaaauacuac

SEQ ID NO: 1866157 - RNA, 19 nt, Artificial Sequence
  Description of Artificial Sequence: Synthetic oligonucleotide
  Sense strand starting at position 2636 of SEQ ID NO: 1564252
uaguauuugcuggguguaa

SEQ ID NO: 1866158 - RNA, 19 nt, Artificial Sequence
  Description of Artificial Sequence: Synthetic oligonucleotide
  Antisense strand to SEQ ID NO: 1866157
uuacacccagcaaauacua

SEQ ID NO: 1866159 - RNA, 19 nt, Artificial Sequence
  Description of Artificial Sequence: Synthetic oligonucleotide
  Sense strand starting at position 2652 of SEQ ID NO: 1564252
uaagguaauuuggaguuua

SEQ ID NO: 1866160 - RNA, 19 nt, Artificial Sequence
  Description of Artificial Sequence: Synthetic oligonucleotide
  Antisense strand to SEQ ID NO: 1866159
uaaacuccaaauuaccuua

SEQ ID NO: 1866161 - RNA, 19 nt, Artificial Sequence
  Description of Artificial Sequence: Synthetic oligonucleotide
  Sense strand starting at position 2725 of SEQ ID NO: 1564252
gacuuuacugccggacaau

SEQ ID NO: 1866162 - RNA, 19 nt, Artificial Sequence
  Description of Artificial Sequence: Synthetic oligonucleotide
  Antisense strand to SEQ ID NO: 1866161
auuguccggcaguaaaguc

SEQ ID NO: 1866163 - RNA, 19 nt, Artificial Sequence
  Description of Artificial Sequence: Synthetic oligonucleotide
  Sense strand starting at position 2743 of SEQ ID NO: 1564252
ugaggaaguucuuuaccuu

SEQ ID NO: 1866164 - RNA, 19 nt, Artificial Sequence
  Description of Artificial Sequence: Synthetic oligonucleotide
  Antisense strand to SEQ ID NO: 1866163
aagguaaagaacuuccuca

SEQ ID NO: 1866165 - RNA, 19 nt, Artificial Sequence
  Description of Artificial Sequence: Synthetic oligonucleotide
  Sense strand starting at position 2744 of SEQ ID NO: 1564252
gaggaaguucuuuaccuuc

SEQ ID NO: 1866166 - RNA, 19 nt, Artificial Sequence
  Description of Artificial Sequence: Synthetic oligonucleotide
  Antisense strand to SEQ ID NO: 1866165
gaagguaaagaacuuccuc

SEQ ID NO: 1866167 - RNA, 19 nt, Artificial Sequence
  Description of Artificial Sequence: Synthetic oligonucleotide
  Sense strand starting at position 2832 of SEQ ID NO: 1564252
guuacauuaucucuaaugu

SEQ ID NO: 1866168 - RNA, 19 nt, Artificial Sequence
  Description of Artificial Sequence: Synthetic oligonucleotide
  Antisense strand to SEQ ID NO: 1866167
acauuagagauaauguaac

SEQ ID NO: 1866169 - RNA, 19 nt, Artificial Sequence
  Description of Artificial Sequence: Synthetic oligonucleotide
  Sense strand starting at position 2841 of SEQ ID NO: 1564252
ucucuaaugucuuaagaug

SEQ ID NO: 1866170 - RNA, 19 nt, Artificial Sequence
  Description of Artificial Sequence: Synthetic oligonucleotide
  Antisense strand to SEQ ID NO: 1866169
caucuuaagacauuagaga

SEQ ID NO: 1866171 - RNA, 19 nt, Artificial Sequence
  Description of Artificial Sequence: Synthetic oligonucleotide
  Sense strand starting at position 2940 of SEQ ID NO: 1564252
auaagagauucggguagag

SEQ ID NO: 1866172 - RNA, 19 nt, Artificial Sequence
  Description of Artificial Sequence: Synthetic oligonucleotide
  Antisense strand to SEQ ID NO: 1866171
cucuacccgaaucucuuau

SEQ ID NO: 1866173 - RNA, 19 nt, Artificial Sequence
  Description of Artificial Sequence: Synthetic oligonucleotide
  Sense strand starting at position 2977 of SEQ ID NO: 1564252
ggcaccugacucugugaau

SEQ ID NO: 1866174 - RNA, 19 nt, Artificial Sequence
  Description of Artificial Sequence: Synthetic oligonucleotide
  Antisense strand to SEQ ID NO: 1866173
auucacagagucaggugcc

SEQ ID NO: 1866175 - RNA, 19 nt, Artificial Sequence
  Description of Artificial Sequence: Synthetic oligonucleotide
  Sense strand starting at position 2978 of SEQ ID NO: 1564252
gcaccugacucugugaaua

SEQ ID NO: 1866176 - RNA, 19 nt, Artificial Sequence
  Description of Artificial Sequence: Synthetic oligonucleotide
  Antisense strand to SEQ ID NO: 1866175
uauucacagagucaggugc

SEQ ID NO: 1866177 - RNA, 19 nt, Artificial Sequence
  Description of Artificial Sequence: Synthetic oligonucleotide
  Sense strand starting at position 2989 of SEQ ID NO: 1564252
ugugaauaccagugaccca

SEQ ID NO: 1866178 - RNA, 19 nt, Artificial Sequence
  Description of Artificial Sequence: Synthetic oligonucleotide
  Antisense strand to SEQ ID NO: 1866177
ugggucacugguauucaca

SEQ ID NO: 1866179 - RNA, 19 nt, Artificial Sequence
  Description of Artificial Sequence: Synthetic oligonucleotide
  Sense strand starting at position 3091 of SEQ ID NO: 1564252
gaggccuagcugugauuau

SEQ ID NO: 1866180 - RNA, 19 nt, Artificial Sequence
  Description of Artificial Sequence: Synthetic oligonucleotide
  Antisense strand to SEQ ID NO: 1866179
auaaucacagcuaggccuc

SEQ ID NO: 1866181 - RNA, 19 nt, Artificial Sequence
  Description of Artificial Sequence: Synthetic oligonucleotide
  Sense strand starting at position 3101 of SEQ ID NO: 1564252
ugugauuauuucuaagaga

SEQ ID NO: 1866182 - RNA, 19 nt, Artificial Sequence
  Description of Artificial Sequence: Synthetic oligonucleotide
  Antisense strand to SEQ ID NO: 1866181
ucucuuagaaauaaucaca

SEQ ID NO: 1866183 - RNA, 19 nt, Artificial Sequence
  Description of Artificial Sequence: Synthetic oligonucleotide
  Sense strand starting at position 3486 of SEQ ID NO: 1564252
gggagucuacuucaucguu

SEQ ID NO: 1866184 - RNA, 19 nt, Artificial Sequence
  Description of Artificial Sequence: Synthetic oligonucleotide
  Antisense strand to SEQ ID NO: 1866183
aacgaugaaguagacuccc

SEQ ID NO: 1866185 - RNA, 19 nt, Artificial Sequence
  Description of Artificial Sequence: Synthetic oligonucleotide
  Sense strand starting at position 3582 of SEQ ID NO: 1564252
cagguucugugauucuguu

SEQ ID NO: 1866186 - RNA, 19 nt, Artificial Sequence
  Description of Artificial Sequence: Synthetic oligonucleotide
  Antisense strand to SEQ ID NO: 1866185
aacagaaucacagaaccug

SEQ ID NO: 1866187 - RNA, 19 nt, Artificial Sequence
  Description of Artificial Sequence: Synthetic oligonucleotide
  Sense strand starting at position 3766 of SEQ ID NO: 1564252
uuggaaaugucuggagaag

SEQ ID NO: 1866188 - RNA, 19 nt, Artificial Sequence
  Description of Artificial Sequence: Synthetic oligonucleotide
  Antisense strand to SEQ ID NO: 1866187
cuucuccagacauuuccaa

SEQ ID NO: 1866189 - RNA, 19 nt, Artificial Sequence
  Description of Artificial Sequence: Synthetic oligonucleotide
  Sense strand starting at position 3863 of SEQ ID NO: 1564252
aagagagacgacugcuuaa

SEQ ID NO: 1866190 - RNA, 19 nt, Artificial Sequence
  Description of Artificial Sequence: Synthetic oligonucleotide
  Antisense strand to SEQ ID NO: 1866189
uuaagcagucgucucucuu

SEQ ID NO: 1866191 - RNA, 19 nt, Artificial Sequence
  Description of Artificial Sequence: Synthetic oligonucleotide
  Sense strand starting at position 17 of SEQ ID NO: 1564253
gcuucucuagaaggacauu

SEQ ID NO: 1866192 - RNA, 19 nt, Artificial Sequence
  Description of Artificial Sequence: Synthetic oligonucleotide
  Antisense strand to SEQ ID NO: 1866191
aauguccuucuagagaagc

SEQ ID NO: 1866193 - RNA, 19 nt, Artificial Sequence
  Description of Artificial Sequence: Synthetic oligonucleotide
  Sense strand starting at position 108 of SEQ ID NO: 1564253
uugggugaugccugaaauc

SEQ ID NO: 1866194 - RNA, 19 nt, Artificial Sequence
  Description of Artificial Sequence: Synthetic oligonucleotide
  Antisense strand to SEQ ID NO: 1866193
gauuucaggcaucacccaa

SEQ ID NO: 1866195 - RNA, 19 nt, Artificial Sequence
  Description of Artificial Sequence: Synthetic oligonucleotide
  Sense strand starting at position 216 of SEQ ID NO: 1564253
acuaaaugaaaguggguau

SEQ ID NO: 1866196 - RNA, 19 nt, Artificial Sequence
  Description of Artificial Sequence: Synthetic oligonucleotide
  Antisense strand to SEQ ID NO: 1866195
auacccacuuucauuuagu

SEQ ID NO: 1866197 - RNA, 19 nt, Artificial Sequence
  Description of Artificial Sequence: Synthetic oligonucleotide
  Sense strand starting at position 617 of SEQ ID NO: 1564253
uggaaauugugagcaugaa

SEQ ID NO: 1866198 - RNA, 19 nt, Artificial Sequence
  Description of Artificial Sequence: Synthetic oligonucleotide
  Antisense strand to SEQ ID NO: 1866197
uucaugcucacaauuucca

SEQ ID NO: 1866199 - RNA, 19 nt, Artificial Sequence
  Description of Artificial Sequence: Synthetic oligonucleotide
  Sense strand starting at position 629 of SEQ ID NO: 1564253
gcaugaagggacuaugguu

SEQ ID NO: 1866200 - RNA, 19 nt, Artificial Sequence
  Description of Artificial Sequence: Synthetic oligonucleotide
  Antisense strand to SEQ ID NO: 1866199
aaccauagucccuucaugc

SEQ ID NO: 1866201 - RNA, 19 nt, Artificial Sequence
  Description of Artificial Sequence: Synthetic oligonucleotide
  Sense strand starting at position 699 of SEQ ID NO: 1564253
ugccuaugagcccaggaau

SEQ ID NO: 1866202 - RNA, 19 nt, Artificial Sequence
  Description of Artificial Sequence: Synthetic oligonucleotide
  Antisense strand to SEQ ID NO: 1866201
auuccugggcucauaggca

SEQ ID NO: 1866203 - RNA, 19 nt, Artificial Sequence
  Description of Artificial Sequence: Synthetic oligonucleotide
  Sense strand starting at position 786 of SEQ ID NO: 1564253
aucagaagcuuucugaguu

SEQ ID NO: 1866204 - RNA, 19 nt, Artificial Sequence
  Description of Artificial Sequence: Synthetic oligonucleotide
  Antisense strand to SEQ ID NO: 1866203
aacucagaaagcuucugau

SEQ ID NO: 1866205 - RNA, 19 nt, Artificial Sequence
  Description of Artificial Sequence: Synthetic oligonucleotide
  Sense strand starting at position 790 of SEQ ID NO: 1564253
gaagcuuucugaguuaucu

SEQ ID NO: 1866206 - RNA, 19 nt, Artificial Sequence
  Description of Artificial Sequence: Synthetic oligonucleotide
  Antisense strand to SEQ ID NO: 1866205
agauaacucagaaagcuuc

SEQ ID NO: 1866207 - RNA, 19 nt, Artificial Sequence
  Description of Artificial Sequence: Synthetic oligonucleotide
  Sense strand starting at position 798 of SEQ ID NO: 1564253
cugaguuaucugugauuaa

SEQ ID NO: 1866208 - RNA, 19 nt, Artificial Sequence
  Description of Artificial Sequence: Synthetic oligonucleotide
  Antisense strand to SEQ ID NO: 1866207
uuaaucacagauaacucag

SEQ ID NO: 1866209 - RNA, 19 nt, Artificial Sequence
  Description of Artificial Sequence: Synthetic oligonucleotide
  Sense strand starting at position 801 of SEQ ID NO: 1564253
aguuaucugugauuaauga

SEQ ID NO: 1866210 - RNA, 19 nt, Artificial Sequence
  Description of Artificial Sequence: Synthetic oligonucleotide
  Antisense strand to SEQ ID NO: 1866209
ucauuaaucacagauaacu

SEQ ID NO: 1866211 - RNA, 19 nt, Artificial Sequence
  Description of Artificial Sequence: Synthetic oligonucleotide
  Sense strand starting at position 802 of SEQ ID NO: 1564253
guuaucugugauuaaugac

SEQ ID NO: 1866212 - RNA, 19 nt, Artificial Sequence
  Description of Artificial Sequence: Synthetic oligonucleotide
  Antisense strand to SEQ ID NO: 1866211
gucauuaaucacagauaac

SEQ ID NO: 1866213 - RNA, 19 nt, Artificial Sequence
  Description of Artificial Sequence: Synthetic oligonucleotide
  Sense strand starting at position 810 of SEQ ID NO: 1564253
ugauuaaugacuugguguc

SEQ ID NO: 1866214 - RNA, 19 nt, Artificial Sequence
  Description of Artificial Sequence: Synthetic oligonucleotide
  Antisense strand to SEQ ID NO: 1866213
gacaccaagucauuaauca

SEQ ID NO: 1866215 - RNA, 19 nt, Artificial Sequence
  Description of Artificial Sequence: Synthetic oligonucleotide
  Sense strand starting at position 850 of SEQ ID NO: 1564253
uugcuaucucagugggaca

SEQ ID NO: 1866216 - RNA, 19 nt, Artificial Sequence
  Description of Artificial Sequence: Synthetic oligonucleotide
  Antisense strand to SEQ ID NO: 1866215
ugucccacugagauagcaa

SEQ ID NO: 1866217 - RNA, 19 nt, Artificial Sequence
  Description of Artificial Sequence: Synthetic oligonucleotide
  Sense strand starting at position 931 of SEQ ID NO: 1564253
ugugaagucagguaugaga

SEQ ID NO: 1866218 - RNA, 19 nt, Artificial Sequence
  Description of Artificial Sequence: Synthetic oligonucleotide
  Antisense strand to SEQ ID NO: 1866217
ucucauaccugacuucaca

SEQ ID NO: 1866219 - RNA, 19 nt, Artificial Sequence
  Description of Artificial Sequence: Synthetic oligonucleotide
  Sense strand starting at position 933 of SEQ ID NO: 1564253
ugaagucagguaugagaau

SEQ ID NO: 1866220 - RNA, 19 nt, Artificial Sequence
  Description of Artificial Sequence: Synthetic oligonucleotide
  Antisense strand to SEQ ID NO: 1866219
auucucauaccugacuuca

SEQ ID NO: 1866221 - RNA, 19 nt, Artificial Sequence
  Description of Artificial Sequence: Synthetic oligonucleotide
  Sense strand starting at position 1082 of SEQ ID NO: 1564253
aucaguuucugcccagaua

SEQ ID NO: 1866222 - RNA, 19 nt, Artificial Sequence
  Description of Artificial Sequence: Synthetic oligonucleotide
  Antisense strand to SEQ ID NO: 1866221
uaucugggcagaaacugau

SEQ ID NO: 1866223 - RNA, 19 nt, Artificial Sequence
  Description of Artificial Sequence: Synthetic oligonucleotide
  Sense strand starting at position 1083 of SEQ ID NO: 1564253
ucaguuucugcccagauaa

SEQ ID NO: 1866224 - RNA, 19 nt, Artificial Sequence
  Description of Artificial Sequence: Synthetic oligonucleotide
  Antisense strand to SEQ ID NO: 1866223
uuaucugggcagaaacuga

SEQ ID NO: 1866225 - RNA, 19 nt, Artificial Sequence
  Description of Artificial Sequence: Synthetic oligonucleotide
  Sense strand starting at position 1085 of SEQ ID NO: 1564253
aguuucugcccagauaauu

SEQ ID NO: 1866226 - RNA, 19 nt, Artificial Sequence
  Description of Artificial Sequence: Synthetic oligonucleotide
  Antisense strand to SEQ ID NO: 1866225
aauuaucugggcagaaacu

SEQ ID NO: 1866227 - RNA, 19 nt, Artificial Sequence
  Description of Artificial Sequence: Synthetic oligonucleotide
  Sense strand starting at position 1194 of SEQ ID NO: 1564253
uggguaauucuacacccua

SEQ ID NO: 1866228 - RNA, 19 nt, Artificial Sequence
  Description of Artificial Sequence: Synthetic oligonucleotide
  Antisense strand to SEQ ID NO: 1866227
uaggguguagaauuaccca

SEQ ID NO: 1866229 - RNA, 19 nt, Artificial Sequence
  Description of Artificial Sequence: Synthetic oligonucleotide
  Sense strand starting at position 1556 of SEQ ID NO: 1564253
gcuucugccuaaccaaaga

SEQ ID NO: 1866230 - RNA, 19 nt, Artificial Sequence
  Description of Artificial Sequence: Synthetic oligonucleotide
  Antisense strand to SEQ ID NO: 1866229
ucuuugguuaggcagaagc

SEQ ID NO: 1866231 - RNA, 19 nt, Artificial Sequence
  Description of Artificial Sequence: Synthetic oligonucleotide
  Sense strand starting at position 2129 of SEQ ID NO: 1564253
ugcugcacacuccagaaau

SEQ ID NO: 1866232 - RNA, 19 nt, Artificial Sequence
  Description of Artificial Sequence: Synthetic oligonucleotide
  Antisense strand to SEQ ID NO: 1866231
auuucuggagugugcagca

SEQ ID NO: 1866233 - RNA, 19 nt, Artificial Sequence
  Description of Artificial Sequence: Synthetic oligonucleotide
  Sense strand starting at position 2292 of SEQ ID NO: 1564253
aguuaaagcucuuuaaaug

SEQ ID NO: 1866234 - RNA, 19 nt, Artificial Sequence
  Description of Artificial Sequence: Synthetic oligonucleotide
  Antisense strand to SEQ ID NO: 1866233
cauuuaaagagcuuuaacu

SEQ ID NO: 1866235 - RNA, 19 nt, Artificial Sequence
  Description of Artificial Sequence: Synthetic oligonucleotide
  Sense strand starting at position 2293 of SEQ ID NO: 1564253
guuaaagcucuuuaaaugg

SEQ ID NO: 1866236 - RNA, 19 nt, Artificial Sequence
  Description of Artificial Sequence: Synthetic oligonucleotide
  Antisense strand to SEQ ID NO: 1866235
ccauuuaaagagcuuuaac

SEQ ID NO: 1866237 - RNA, 19 nt, Artificial Sequence
  Description of Artificial Sequence: Synthetic oligonucleotide
  Sense strand starting at position 2309 of SEQ ID NO: 1564253
uggugcuaucaauauguac

SEQ ID NO: 1866238 - RNA, 19 nt, Artificial Sequence
  Description of Artificial Sequence: Synthetic oligonucleotide
  Antisense strand to SEQ ID NO: 1866237
guacauauugauagcacca

SEQ ID NO: 1866239 - RNA, 19 nt, Artificial Sequence
  Description of Artificial Sequence: Synthetic oligonucleotide
  Sense strand starting at position 2461 of SEQ ID NO: 1564253
gguucucuucuugaugauc

SEQ ID NO: 1866240 - RNA, 19 nt, Artificial Sequence
  Description of Artificial Sequence: Synthetic oligonucleotide
  Antisense strand to SEQ ID NO: 1866239
gaucaucaagaagagaacc

SEQ ID NO: 1866241 - RNA, 19 nt, Artificial Sequence
  Description of Artificial Sequence: Synthetic oligonucleotide
  Sense strand starting at position 2489 of SEQ ID NO: 1564253
uuacacagacuucguagau

SEQ ID NO: 1866242 - RNA, 19 nt, Artificial Sequence
  Description of Artificial Sequence: Synthetic oligonucleotide
  Antisense strand to SEQ ID NO: 1866241
aucuacgaagucuguguaa

SEQ ID NO: 1866243 - RNA, 19 nt, Artificial Sequence
  Description of Artificial Sequence: Synthetic oligonucleotide
  Sense strand starting at position 2495 of SEQ ID NO: 1564253
agacuucguagaugauauc

SEQ ID NO: 1866244 - RNA, 19 nt, Artificial Sequence
  Description of Artificial Sequence: Synthetic oligonucleotide
  Antisense strand to SEQ ID NO: 1866243
gauaucaucuacgaagucu

SEQ ID NO: 1866245 - RNA, 19 nt, Artificial Sequence
  Description of Artificial Sequence: Synthetic oligonucleotide
  Sense strand starting at position 2547 of SEQ ID NO: 1564253
aucagugauuuccacaucu

SEQ ID NO: 1866246 - RNA, 19 nt, Artificial Sequence
  Description of Artificial Sequence: Synthetic oligonucleotide
  Antisense strand to SEQ ID NO: 1866245
agauguggaaaucacugau

SEQ ID NO: 1866247 - RNA, 19 nt, Artificial Sequence
  Description of Artificial Sequence: Synthetic oligonucleotide
  Sense strand starting at position 2719 of SEQ ID NO: 1564253
uuaguugguggcuauauua

SEQ ID NO: 1866248 - RNA, 19 nt, Artificial Sequence
  Description of Artificial Sequence: Synthetic oligonucleotide
  Antisense strand to SEQ ID NO: 1866247
uaauauagccaccaacuaa

SEQ ID NO: 1866249 - RNA, 19 nt, Artificial Sequence
  Description of Artificial Sequence: Synthetic oligonucleotide
  Sense strand starting at position 2787 of SEQ ID NO: 1564253
ggcagaaauuuauauucuu

SEQ ID NO: 1866250 - RNA, 19 nt, Artificial Sequence
  Description of Artificial Sequence: Synthetic oligonucleotide
  Antisense strand to SEQ ID NO: 1866249
aagaauauaaauuucugcc

SEQ ID NO: 1866251 - RNA, 19 nt, Artificial Sequence
  Description of Artificial Sequence: Synthetic oligonucleotide
  Sense strand starting at position 3063 of SEQ ID NO: 1564253
gggcuagggcaucaacaua

SEQ ID NO: 1866252 - RNA, 19 nt, Artificial Sequence
  Description of Artificial Sequence: Synthetic oligonucleotide
  Antisense strand to SEQ ID NO: 1866251
uauguugaugcccuagccc

SEQ ID NO: 1866253 - RNA, 19 nt, Artificial Sequence
  Description of Artificial Sequence: Synthetic oligonucleotide
  Sense strand starting at position 3106 of SEQ ID NO: 1564253
gcuuauaauaguggaauug

SEQ ID NO: 1866254 - RNA, 19 nt, Artificial Sequence
  Description of Artificial Sequence: Synthetic oligonucleotide
  Antisense strand to SEQ ID NO: 1866253
caauuccacuauuauaagc

SEQ ID NO: 1866255 - RNA, 19 nt, Artificial Sequence
  Description of Artificial Sequence: Synthetic oligonucleotide
  Sense strand starting at position 3107 of SEQ ID NO: 1564253
cuuauaauaguggaauugu

SEQ ID NO: 1866256 - RNA, 19 nt, Artificial Sequence
  Description of Artificial Sequence: Synthetic oligonucleotide
  Antisense strand to SEQ ID NO: 1866255
acaauuccacuauuauaag

SEQ ID NO: 1866257 - RNA, 19 nt, Artificial Sequence
  Description of Artificial Sequence: Synthetic oligonucleotide
  Sense strand starting at position 3149 of SEQ ID NO: 1564253
aaaucugagguuugucuuu

SEQ ID NO: 1866258 - RNA, 19 nt, Artificial Sequence
  Description of Artificial Sequence: Synthetic oligonucleotide
  Antisense strand to SEQ ID NO: 1866257
aaagacaaaccucagauuu

SEQ ID NO: 1866259 - RNA, 19 nt, Artificial Sequence
  Description of Artificial Sequence: Synthetic oligonucleotide
  Sense strand starting at position 3541 of SEQ ID NO: 1564253
gguauuaccucucucacua

SEQ ID NO: 1866260 - RNA, 19 nt, Artificial Sequence
  Description of Artificial Sequence: Synthetic oligonucleotide
  Antisense strand to SEQ ID NO: 1866259
uagugagagagguaauacc

SEQ ID NO: 1866261 - RNA, 19 nt, Artificial Sequence
  Description of Artificial Sequence: Synthetic oligonucleotide
  Sense strand starting at position 3605 of SEQ ID NO: 1564253
cuugauuucuuccugucuu

SEQ ID NO: 1866262 - RNA, 19 nt, Artificial Sequence
  Description of Artificial Sequence: Synthetic oligonucleotide
  Antisense strand to SEQ ID NO: 1866261
aagacaggaagaaaucaag

SEQ ID NO: 1866263 - RNA, 19 nt, Artificial Sequence
  Description of Artificial Sequence: Synthetic oligonucleotide
  Sense strand starting at position 3657 of SEQ ID NO: 1564253
aguuaauucugccucugaa

SEQ ID NO: 1866264 - RNA, 19 nt, Artificial Sequence
  Description of Artificial Sequence: Synthetic oligonucleotide
  Antisense strand to SEQ ID NO: 1866263
uucagaggcagaauuaacu

SEQ ID NO: 1866265 - RNA, 19 nt, Artificial Sequence
  Description of Artificial Sequence: Synthetic oligonucleotide
  Sense strand starting at position 3704 of SEQ ID NO: 1564253
gucaaucaccacuguuuaa

SEQ ID NO: 1866266 - RNA, 19 nt, Artificial Sequence
  Description of Artificial Sequence: Synthetic oligonucleotide
  Antisense strand to SEQ ID NO: 1866265
uuaaacaguggugauugac

SEQ ID NO: 1866267 - RNA, 19 nt, Artificial Sequence
  Description of Artificial Sequence: Synthetic oligonucleotide
  Sense strand starting at position 3810 of SEQ ID NO: 1564253
acucaaauuugaggauaau

SEQ ID NO: 1866268 - RNA, 19 nt, Artificial Sequence
  Description of Artificial Sequence: Synthetic oligonucleotide
  Antisense strand to SEQ ID NO: 1866267
auuauccucaaauuugagu

SEQ ID NO: 1866269 - RNA, 19 nt, Artificial Sequence
  Description of Artificial Sequence: Synthetic oligonucleotide
  Sense strand starting at position 3911 of SEQ ID NO: 1564253
ugaucucgacuuuguccaa

SEQ ID NO: 1866270 - RNA, 19 nt, Artificial Sequence
  Description of Artificial Sequence: Synthetic oligonucleotide
  Antisense strand to SEQ ID NO: 1866269
uuggacaaagucgagauca

SEQ ID NO: 1866271 - RNA, 19 nt, Artificial Sequence
  Description of Artificial Sequence: Synthetic oligonucleotide
  Sense strand starting at position 94 of SEQ ID NO: 1564254
ggaggaugcucagugaacu

SEQ ID NO: 1866272 - RNA, 19 nt, Artificial Sequence
  Description of Artificial Sequence: Synthetic oligonucleotide
  Antisense strand to SEQ ID NO: 1866271
aguucacugagcauccucc

SEQ ID NO: 1866273 - RNA, 19 nt, Artificial Sequence
  Description of Artificial Sequence: Synthetic oligonucleotide
  Sense strand starting at position 95 of SEQ ID NO: 1564254
gaggaugcucagugaacuu

SEQ ID NO: 1866274 - RNA, 19 nt, Artificial Sequence
  Description of Artificial Sequence: Synthetic oligonucleotide
  Antisense strand to SEQ ID NO: 1866273
aaguucacugagcauccuc

SEQ ID NO: 1866275 - RNA, 19 nt, Artificial Sequence
  Description of Artificial Sequence: Synthetic oligonucleotide
  Sense strand starting at position 121 of SEQ ID NO: 1564254
ucuuaaguuguagacaaau

SEQ ID NO: 1866276 - RNA, 19 nt, Artificial Sequence
  Description of Artificial Sequence: Synthetic oligonucleotide
  Antisense strand to SEQ ID NO: 1866275
auuugucuacaacuuaaga

SEQ ID NO: 1866277 - RNA, 19 nt, Artificial Sequence
  Description of Artificial Sequence: Synthetic oligonucleotide
  Sense strand starting at position 127 of SEQ ID NO: 1564254
guuguagacaaaugcaaga

SEQ ID NO: 1866278 - RNA, 19 nt, Artificial Sequence
  Description of Artificial Sequence: Synthetic oligonucleotide
  Antisense strand to SEQ ID NO: 1866277
ucuugcauuugucuacaac

SEQ ID NO: 1866279 - RNA, 19 nt, Artificial Sequence
  Description of Artificial Sequence: Synthetic oligonucleotide
  Sense strand starting at position 258 of SEQ ID NO: 1564254
ucaguuguuccauaaaccu

SEQ ID NO: 1866280 - RNA, 19 nt, Artificial Sequence
  Description of Artificial Sequence: Synthetic oligonucleotide
  Antisense strand to SEQ ID NO: 1866279
agguuuauggaacaacuga

SEQ ID NO: 1866281 - RNA, 19 nt, Artificial Sequence
  Description of Artificial Sequence: Synthetic oligonucleotide
  Sense strand starting at position 312 of SEQ ID NO: 1564254
ugucuauuacaaugaggag

SEQ ID NO: 1866282 - RNA, 19 nt, Artificial Sequence
  Description of Artificial Sequence: Synthetic oligonucleotide
  Antisense strand to SEQ ID NO: 1866281
cuccucauuguaauagaca

SEQ ID NO: 1866283 - RNA, 19 nt, Artificial Sequence
  Description of Artificial Sequence: Synthetic oligonucleotide
  Sense strand starting at position 347 of SEQ ID NO: 1564254
acugauaggucuuuaaugu

SEQ ID NO: 1866284 - RNA, 19 nt, Artificial Sequence
  Description of Artificial Sequence: Synthetic oligonucleotide
  Antisense strand to SEQ ID NO: 1866283
acauuaaagaccuaucagu

SEQ ID NO: 1866285 - RNA, 19 nt, Artificial Sequence
  Description of Artificial Sequence: Synthetic oligonucleotide
  Sense strand starting at position 348 of SEQ ID NO: 1564254
cugauaggucuuuaaugug

SEQ ID NO: 1866286 - RNA, 19 nt, Artificial Sequence
  Description of Artificial Sequence: Synthetic oligonucleotide
  Antisense strand to SEQ ID NO: 1866285
cacauuaaagaccuaucag

SEQ ID NO: 1866287 - RNA, 19 nt, Artificial Sequence
  Description of Artificial Sequence: Synthetic oligonucleotide
  Sense strand starting at position 526 of SEQ ID NO: 1564254
guggacaagugauucuacu

SEQ ID NO: 1866288 - RNA, 19 nt, Artificial Sequence
  Description of Artificial Sequence: Synthetic oligonucleotide
  Antisense strand to SEQ ID NO: 1866287
aguagaaucacuuguccac

SEQ ID NO: 1866289 - RNA, 19 nt, Artificial Sequence
  Description of Artificial Sequence: Synthetic oligonucleotide
  Sense strand starting at position 702 of SEQ ID NO: 1564254
gcuagcguugacucguuua

SEQ ID NO: 1866290 - RNA, 19 nt, Artificial Sequence
  Description of Artificial Sequence: Synthetic oligonucleotide
  Antisense strand to SEQ ID NO: 1866289
uaaacgagucaacgcuagc

SEQ ID NO: 1866291 - RNA, 19 nt, Artificial Sequence
  Description of Artificial Sequence: Synthetic oligonucleotide
  Sense strand starting at position 704 of SEQ ID NO: 1564254
uagcguugacucguuuacu

SEQ ID NO: 1866292 - RNA, 19 nt, Artificial Sequence
  Description of Artificial Sequence: Synthetic oligonucleotide
  Antisense strand to SEQ ID NO: 1866291
aguaaacgagucaacgcua

SEQ ID NO: 1866293 - RNA, 19 nt, Artificial Sequence
  Description of Artificial Sequence: Synthetic oligonucleotide
  Sense strand starting at position 709 of SEQ ID NO: 1564254
uugacucguuuacuuauuu

SEQ ID NO: 1866294 - RNA, 19 nt, Artificial Sequence
  Description of Artificial Sequence: Synthetic oligonucleotide
  Antisense strand to SEQ ID NO: 1866293
aaauaaguaaacgagucaa

SEQ ID NO: 1866295 - RNA, 19 nt, Artificial Sequence
  Description of Artificial Sequence: Synthetic oligonucleotide
  Sense strand starting at position 1317 of SEQ ID NO: 1564254
auucucuggcuguaacauu

SEQ ID NO: 1866296 - RNA, 19 nt, Artificial Sequence
  Description of Artificial Sequence: Synthetic oligonucleotide
  Antisense strand to SEQ ID NO: 1866295
aauguuacagccagagaau

SEQ ID NO: 1866297 - RNA, 19 nt, Artificial Sequence
  Description of Artificial Sequence: Synthetic oligonucleotide
  Sense strand starting at position 1993 of SEQ ID NO: 1564254
ugggaugugcucucgcgau

SEQ ID NO: 1866298 - RNA, 19 nt, Artificial Sequence
  Description of Artificial Sequence: Synthetic oligonucleotide
  Antisense strand to SEQ ID NO: 1866297
aucgcgagagcacauccca

SEQ ID NO: 1866299 - RNA, 19 nt, Artificial Sequence
  Description of Artificial Sequence: Synthetic oligonucleotide
  Sense strand starting at position 1995 of SEQ ID NO: 1564254
ggaugugcucucgcgauac

SEQ ID NO: 1866300 - RNA, 19 nt, Artificial Sequence
  Description of Artificial Sequence: Synthetic oligonucleotide
  Antisense strand to SEQ ID NO: 1866299
guaucgcgagagcacaucc

SEQ ID NO: 1866301 - RNA, 19 nt, Artificial Sequence
  Description of Artificial Sequence: Synthetic oligonucleotide
  Sense strand starting at position 2464 of SEQ ID NO: 1564254
ccuucucgggcggaaauaa

SEQ ID NO: 1866302 - RNA, 19 nt, Artificial Sequence
  Description of Artificial Sequence: Synthetic oligonucleotide
  Antisense strand to SEQ ID NO: 1866301
uuauuuccgcccgagaagg

SEQ ID NO: 1866303 - RNA, 19 nt, Artificial Sequence
  Description of Artificial Sequence: Synthetic oligonucleotide
  Sense strand starting at position 2582 of SEQ ID NO: 1564254
gcagguaaccuauaaccau

SEQ ID NO: 1866304 - RNA, 19 nt, Artificial Sequence
  Description of Artificial Sequence: Synthetic oligonucleotide
  Antisense strand to SEQ ID NO: 1866303
augguuauagguuaccugc

SEQ ID NO: 1866305 - RNA, 19 nt, Artificial Sequence
  Description of Artificial Sequence: Synthetic oligonucleotide
  Sense strand starting at position 2714 of SEQ ID NO: 1564254
aucggauuuaggcguaucu

SEQ ID NO: 1866306 - RNA, 19 nt, Artificial Sequence
  Description of Artificial Sequence: Synthetic oligonucleotide
  Antisense strand to SEQ ID NO: 1866305
agauacgccuaaauccgau

SEQ ID NO: 1866307 - RNA, 19 nt, Artificial Sequence
  Description of Artificial Sequence: Synthetic oligonucleotide
  Sense strand starting at position 2716 of SEQ ID NO: 1564254
cggauuuaggcguaucugu

SEQ ID NO: 1866308 - RNA, 19 nt, Artificial Sequence
  Description of Artificial Sequence: Synthetic oligonucleotide
  Antisense strand to SEQ ID NO: 1866307
acagauacgccuaaauccg

SEQ ID NO: 1866309 - RNA, 19 nt, Artificial Sequence
  Description of Artificial Sequence: Synthetic oligonucleotide
  Sense strand starting at position 2724 of SEQ ID NO: 1564254
ggcguaucugugucagcuu

SEQ ID NO: 1866310 - RNA, 19 nt, Artificial Sequence
  Description of Artificial Sequence: Synthetic oligonucleotide
  Antisense strand to SEQ ID NO: 1866309
aagcugacacagauacgcc

SEQ ID NO: 1866311 - RNA, 19 nt, Artificial Sequence
  Description of Artificial Sequence: Synthetic oligonucleotide
  Sense strand starting at position 2743 of SEQ ID NO: 1564254
uuacaaguguaaccuguaa

SEQ ID NO: 1866312 - RNA, 19 nt, Artificial Sequence
  Description of Artificial Sequence: Synthetic oligonucleotide
  Antisense strand to SEQ ID NO: 1866311
uuacagguuacacuuguaa

SEQ ID NO: 1866313 - RNA, 19 nt, Artificial Sequence
  Description of Artificial Sequence: Synthetic oligonucleotide
  Sense strand starting at position 2801 of SEQ ID NO: 1564254
ucguaugauacauagauug

SEQ ID NO: 1866314 - RNA, 19 nt, Artificial Sequence
  Description of Artificial Sequence: Synthetic oligonucleotide
  Antisense strand to SEQ ID NO: 1866313
caaucuauguaucauacga

SEQ ID NO: 1866315 - RNA, 19 nt, Artificial Sequence
  Description of Artificial Sequence: Synthetic oligonucleotide
  Sense strand starting at position 2812 of SEQ ID NO: 1564254
auagauuguauuggugaau

SEQ ID NO: 1866316 - RNA, 19 nt, Artificial Sequence
  Description of Artificial Sequence: Synthetic oligonucleotide
  Antisense strand to SEQ ID NO: 1866315
auucaccaauacaaucuau

SEQ ID NO: 1866317 - RNA, 19 nt, Artificial Sequence
  Description of Artificial Sequence: Synthetic oligonucleotide
  Sense strand starting at position 2813 of SEQ ID NO: 1564254
uagauuguauuggugaauu

SEQ ID NO: 1866318 - RNA, 19 nt, Artificial Sequence
  Description of Artificial Sequence: Synthetic oligonucleotide
  Antisense strand to SEQ ID NO: 1866317
aauucaccaauacaaucua

SEQ ID NO: 1866319 - RNA, 19 nt, Artificial Sequence
  Description of Artificial Sequence: Synthetic oligonucleotide
  Sense strand starting at position 2815 of SEQ ID NO: 1564254
gauuguauuggugaauuac

SEQ ID NO: 1866320 - RNA, 19 nt, Artificial Sequence
  Description of Artificial Sequence: Synthetic oligonucleotide
  Antisense strand to SEQ ID NO: 1866319
guaauucaccaauacaauc

SEQ ID NO: 1866321 - RNA, 19 nt, Artificial Sequence
  Description of Artificial Sequence: Synthetic oligonucleotide
  Sense strand starting at position 2847 of SEQ ID NO: 1564254
cgaauaacucuguauccug

SEQ ID NO: 1866322 - RNA, 19 nt, Artificial Sequence
  Description of Artificial Sequence: Synthetic oligonucleotide
  Antisense strand to SEQ ID NO: 1866321
caggauacagaguuauucg

SEQ ID NO: 1866323 - RNA, 19 nt, Artificial Sequence
  Description of Artificial Sequence: Synthetic oligonucleotide
  Sense strand starting at position 2912 of SEQ ID NO: 1564254
gucgucuuaaaggagcaua

SEQ ID NO: 1866324 - RNA, 19 nt, Artificial Sequence
  Description of Artificial Sequence: Synthetic oligonucleotide
  Antisense strand to SEQ ID NO: 1866323
uaugcuccuuuaagacgac

SEQ ID NO: 1866325 - RNA, 19 nt, Artificial Sequence
  Description of Artificial Sequence: Synthetic oligonucleotide
  Sense strand starting at position 3012 of SEQ ID NO: 1564254
auaaauauggcuuauaggu

SEQ ID NO: 1866326 - RNA, 19 nt, Artificial Sequence
  Description of Artificial Sequence: Synthetic oligonucleotide
  Antisense strand to SEQ ID NO: 1866325
accuauaagccauauuuau

SEQ ID NO: 1866327 - RNA, 19 nt, Artificial Sequence
  Description of Artificial Sequence: Synthetic oligonucleotide
  Sense strand starting at position 3037 of SEQ ID NO: 1564254
auuaauaaguggguuugua

SEQ ID NO: 1866328 - RNA, 19 nt, Artificial Sequence
  Description of Artificial Sequence: Synthetic oligonucleotide
  Antisense strand to SEQ ID NO: 1866327
uacaaacccacuuauuaau

SEQ ID NO: 1866329 - RNA, 19 nt, Artificial Sequence
  Description of Artificial Sequence: Synthetic oligonucleotide
  Sense strand starting at position 3053 of SEQ ID NO: 1564254
guaauacauuuggaugaag

SEQ ID NO: 1866330 - RNA, 19 nt, Artificial Sequence
  Description of Artificial Sequence: Synthetic oligonucleotide
  Antisense strand to SEQ ID NO: 1866329
cuucauccaaauguauuac

SEQ ID NO: 1866331 - RNA, 19 nt, Artificial Sequence
  Description of Artificial Sequence: Synthetic oligonucleotide
  Sense strand starting at position 3106 of SEQ ID NO: 1564254
gcuuaauaauaguuuggga

SEQ ID NO: 1866332 - RNA, 19 nt, Artificial Sequence
  Description of Artificial Sequence: Synthetic oligonucleotide
  Antisense strand to SEQ ID NO: 1866331
ucccaaacuauuauuaagc

SEQ ID NO: 1866333 - RNA, 19 nt, Artificial Sequence
  Description of Artificial Sequence: Synthetic oligonucleotide
  Sense strand starting at position 3329 of SEQ ID NO: 1564254
aaauuauauggugagcauu

SEQ ID NO: 1866334 - RNA, 19 nt, Artificial Sequence
  Description of Artificial Sequence: Synthetic oligonucleotide
  Antisense strand to SEQ ID NO: 1866333
aaugcucaccauauaauuu

SEQ ID NO: 1866335 - RNA, 19 nt, Artificial Sequence
  Description of Artificial Sequence: Synthetic oligonucleotide
  Sense strand starting at position 3343 of SEQ ID NO: 1564254
gcauuucccuguuuccuua

SEQ ID NO: 1866336 - RNA, 19 nt, Artificial Sequence
  Description of Artificial Sequence: Synthetic oligonucleotide
  Antisense strand to SEQ ID NO: 1866335
uaaggaaacagggaaaugc

SEQ ID NO: 1866337 - RNA, 19 nt, Artificial Sequence
  Description of Artificial Sequence: Synthetic oligonucleotide
  Sense strand starting at position 3394 of SEQ ID NO: 1564254
acaggcuuaucuuuggaua

SEQ ID NO: 1866338 - RNA, 19 nt, Artificial Sequence
  Description of Artificial Sequence: Synthetic oligonucleotide
  Antisense strand to SEQ ID NO: 1866337
uauccaaagauaagccugu

SEQ ID NO: 1866339 - RNA, 19 nt, Artificial Sequence
  Description of Artificial Sequence: Synthetic oligonucleotide
  Sense strand starting at position 3395 of SEQ ID NO: 1564254
caggcuuaucuuuggauau

SEQ ID NO: 1866340 - RNA, 19 nt, Artificial Sequence
  Description of Artificial Sequence: Synthetic oligonucleotide
  Antisense strand to SEQ ID NO: 1866339
auauccaaagauaagccug

SEQ ID NO: 1866341 - RNA, 19 nt, Artificial Sequence
  Description of Artificial Sequence: Synthetic oligonucleotide
  Sense strand starting at position 3454 of SEQ ID NO: 1564254
ugguuauauucuccaacag

SEQ ID NO: 1866342 - RNA, 19 nt, Artificial Sequence
  Description of Artificial Sequence: Synthetic oligonucleotide
  Antisense strand to SEQ ID NO: 1866341
cuguuggagaauauaacca

SEQ ID NO: 1866343 - RNA, 19 nt, Artificial Sequence
  Description of Artificial Sequence: Synthetic oligonucleotide
  Sense strand starting at position 3455 of SEQ ID NO: 1564254
gguuauauucuccaacagu

SEQ ID NO: 1866344 - RNA, 19 nt, Artificial Sequence
  Description of Artificial Sequence: Synthetic oligonucleotide
  Antisense strand to SEQ ID NO: 1866343
acuguuggagaauauaacc

SEQ ID NO: 1866345 - RNA, 19 nt, Artificial Sequence
  Description of Artificial Sequence: Synthetic oligonucleotide
  Sense strand starting at position 3473 of SEQ ID NO: 1564254
uccacagaggugugaugaa

SEQ ID NO: 1866346 - RNA, 19 nt, Artificial Sequence
  Description of Artificial Sequence: Synthetic oligonucleotide
  Antisense strand to SEQ ID NO: 1866345
uucaucacaccucugugga

SEQ ID NO: 1866347 - RNA, 19 nt, Artificial Sequence
  Description of Artificial Sequence: Synthetic oligonucleotide
  Sense strand starting at position 3760 of SEQ ID NO: 1564254
uguguauaucucuaaugaa

SEQ ID NO: 1866348 - RNA, 19 nt, Artificial Sequence
  Description of Artificial Sequence: Synthetic oligonucleotide
  Antisense strand to SEQ ID NO: 1866347
uucauuagagauauacaca

SEQ ID NO: 1866349 - RNA, 19 nt, Artificial Sequence
  Description of Artificial Sequence: Synthetic oligonucleotide
  Sense strand starting at position 3793 of SEQ ID NO: 1564254
auuucuuucccuuguguuu

SEQ ID NO: 1866350 - RNA, 19 nt, Artificial Sequence
  Description of Artificial Sequence: Synthetic oligonucleotide
  Antisense strand to SEQ ID NO: 1866349
aaacacaagggaaagaaau

SEQ ID NO: 1866351 - RNA, 19 nt, Artificial Sequence
  Description of Artificial Sequence: Synthetic oligonucleotide
  Sense strand starting at position 76 of SEQ ID NO: 1564255
agaggaauccagggccgua

SEQ ID NO: 1866352 - RNA, 19 nt, Artificial Sequence
  Description of Artificial Sequence: Synthetic oligonucleotide
  Antisense strand to SEQ ID NO: 1866351
uacggcccuggauuccucu

SEQ ID NO: 1866353 - RNA, 19 nt, Artificial Sequence
  Description of Artificial Sequence: Synthetic oligonucleotide
  Sense strand starting at position 709 of SEQ ID NO: 1564255
cggugaucucgcuggccuu

SEQ ID NO: 1866354 - RNA, 19 nt, Artificial Sequence
  Description of Artificial Sequence: Synthetic oligonucleotide
  Antisense strand to SEQ ID NO: 1866353
aaggccagcgagaucaccg

SEQ ID NO: 1866355 - RNA, 19 nt, Artificial Sequence
  Description of Artificial Sequence: Synthetic oligonucleotide
  Sense strand starting at position 814 of SEQ ID NO: 1564255
ccggguucuccagggagga

SEQ ID NO: 1866356 - RNA, 19 nt, Artificial Sequence
  Description of Artificial Sequence: Synthetic oligonucleotide
  Antisense strand to SEQ ID NO: 1866355
uccucccuggagaacccgg

SEQ ID NO: 1866357 - RNA, 19 nt, Artificial Sequence
  Description of Artificial Sequence: Synthetic oligonucleotide
  Sense strand starting at position 1484 of SEQ ID NO: 1564255
gggagacuguccuugccaa

SEQ ID NO: 1866358 - RNA, 19 nt, Artificial Sequence
  Description of Artificial Sequence: Synthetic oligonucleotide
  Antisense strand to SEQ ID NO: 1866357
uuggcaaggacagucuccc

SEQ ID NO: 1866359 - RNA, 19 nt, Artificial Sequence
  Description of Artificial Sequence: Synthetic oligonucleotide
  Sense strand starting at position 1579 of SEQ ID NO: 1564255
gcucuaggcggccuuuaau

SEQ ID NO: 1866360 - RNA, 19 nt, Artificial Sequence
  Description of Artificial Sequence: Synthetic oligonucleotide
  Antisense strand to SEQ ID NO: 1866359
auuaaaggccgccuagagc

SEQ ID NO: 1866361 - RNA, 19 nt, Artificial Sequence
  Description of Artificial Sequence: Synthetic oligonucleotide
  Sense strand starting at position 1621 of SEQ ID NO: 1564255
cugccuguuggccaacaau

SEQ ID NO: 1866362 - RNA, 19 nt, Artificial Sequence
  Description of Artificial Sequence: Synthetic oligonucleotide
  Antisense strand to SEQ ID NO: 1866361
auuguuggccaacaggcag

SEQ ID NO: 1866363 - RNA, 19 nt, Artificial Sequence
  Description of Artificial Sequence: Synthetic oligonucleotide
  Sense strand starting at position 2072 of SEQ ID NO: 1564255
gggagaugcuaucugcuuu

SEQ ID NO: 1866364 - RNA, 19 nt, Artificial Sequence
  Description of Artificial Sequence: Synthetic oligonucleotide
  Antisense strand to SEQ ID NO: 1866363
aaagcagauagcaucuccc

SEQ ID NO: 1866365 - RNA, 19 nt, Artificial Sequence
  Description of Artificial Sequence: Synthetic oligonucleotide
  Sense strand starting at position 2073 of SEQ ID NO: 1564255
ggagaugcuaucugcuuua

SEQ ID NO: 1866366 - RNA, 19 nt, Artificial Sequence
  Description of Artificial Sequence: Synthetic oligonucleotide
  Antisense strand to SEQ ID NO: 1866365
uaaagcagauagcaucucc

SEQ ID NO: 1866367 - RNA, 19 nt, Artificial Sequence
  Description of Artificial Sequence: Synthetic oligonucleotide
  Sense strand starting at position 2456 of SEQ ID NO: 1564255
agaggagucccuuggccua

SEQ ID NO: 1866368 - RNA, 19 nt, Artificial Sequence
  Description of Artificial Sequence: Synthetic oligonucleotide
  Antisense strand to SEQ ID NO: 1866367
uaggccaagggacuccucu

SEQ ID NO: 1866369 - RNA, 19 nt, Artificial Sequence
  Description of Artificial Sequence: Synthetic oligonucleotide
  Sense strand starting at position 2458 of SEQ ID NO: 1564255
aggagucccuuggccuaua

SEQ ID NO: 1866370 - RNA, 19 nt, Artificial Sequence
  Description of Artificial Sequence: Synthetic oligonucleotide
  Antisense strand to SEQ ID NO: 1866369
uauaggccaagggacuccu

SEQ ID NO: 1866371 - RNA, 19 nt, Artificial Sequence
  Description of Artificial Sequence: Synthetic oligonucleotide
  Sense strand starting at position 2459 of SEQ ID NO: 1564255
ggagucccuuggccuauaa

SEQ ID NO: 1866372 - RNA, 19 nt, Artificial Sequence
  Description of Artificial Sequence: Synthetic oligonucleotide
  Antisense strand to SEQ ID NO: 1866371
uuauaggccaagggacucc

SEQ ID NO: 1866373 - RNA, 19 nt, Artificial Sequence
  Description of Artificial Sequence: Synthetic oligonucleotide
  Sense strand starting at position 2461 of SEQ ID NO: 1564255
agucccuuggccuauaaau

SEQ ID NO: 1866374 - RNA, 19 nt, Artificial Sequence
  Description of Artificial Sequence: Synthetic oligonucleotide
  Antisense strand to SEQ ID NO: 1866373
auuuauaggccaagggacu

SEQ ID NO: 1866375 - RNA, 19 nt, Artificial Sequence
  Description of Artificial Sequence: Synthetic oligonucleotide
  Sense strand starting at position 2472 of SEQ ID NO: 1564255
cuauaaaucagguggugca

SEQ ID NO: 1866376 - RNA, 19 nt, Artificial Sequence
  Description of Artificial Sequence: Synthetic oligonucleotide
  Antisense strand to SEQ ID NO: 1866375
ugcaccaccugauuuauag

SEQ ID NO: 1866377 - RNA, 19 nt, Artificial Sequence
  Description of Artificial Sequence: Synthetic oligonucleotide
  Sense strand starting at position 2769 of SEQ ID NO: 1564255
gcacacugcucagggagau

SEQ ID NO: 1866378 - RNA, 19 nt, Artificial Sequence
  Description of Artificial Sequence: Synthetic oligonucleotide
  Antisense strand to SEQ ID NO: 1866377
aucucccugagcagugugc

SEQ ID NO: 1866379 - RNA, 19 nt, Artificial Sequence
  Description of Artificial Sequence: Synthetic oligonucleotide
  Sense strand starting at position 2770 of SEQ ID NO: 1564255
cacacugcucagggagaua

SEQ ID NO: 1866380 - RNA, 19 nt, Artificial Sequence
  Description of Artificial Sequence: Synthetic oligonucleotide
  Antisense strand to SEQ ID NO: 1866379
uaucucccugagcagugug

SEQ ID NO: 1866381 - RNA, 19 nt, Artificial Sequence
  Description of Artificial Sequence: Synthetic oligonucleotide
  Sense strand starting at position 2812 of SEQ ID NO: 1564255
acagcaucuuccuggacaa

SEQ ID NO: 1866382 - RNA, 19 nt, Artificial Sequence
  Description of Artificial Sequence: Synthetic oligonucleotide
  Antisense strand to SEQ ID NO: 1866381
uuguccaggaagaugcugu

SEQ ID NO: 1866383 - RNA, 19 nt, Artificial Sequence
  Description of Artificial Sequence: Synthetic oligonucleotide
  Sense strand starting at position 3169 of SEQ ID NO: 1564255
ggaggcaacugcuuagaaa

SEQ ID NO: 1866384 - RNA, 19 nt, Artificial Sequence
  Description of Artificial Sequence: Synthetic oligonucleotide
  Antisense strand to SEQ ID NO: 1866383
uuucuaagcaguugccucc

SEQ ID NO: 1866385 - RNA, 19 nt, Artificial Sequence
  Description of Artificial Sequence: Synthetic oligonucleotide
  Sense strand starting at position 3170 of SEQ ID NO: 1564255
gaggcaacugcuuagaaac

SEQ ID NO: 1866386 - RNA, 19 nt, Artificial Sequence
  Description of Artificial Sequence: Synthetic oligonucleotide
  Antisense strand to SEQ ID NO: 1866385
guuucuaagcaguugccuc

SEQ ID NO: 1866387 - RNA, 19 nt, Artificial Sequence
  Description of Artificial Sequence: Synthetic oligonucleotide
  Sense strand starting at position 3191 of SEQ ID NO: 1564255
aggcuuucuuuguguccaa

SEQ ID NO: 1866388 - RNA, 19 nt, Artificial Sequence
  Description of Artificial Sequence: Synthetic oligonucleotide
  Antisense strand to SEQ ID NO: 1866387
uuggacacaaagaaagccu

SEQ ID NO: 1866389 - RNA, 19 nt, Artificial Sequence
  Description of Artificial Sequence: Synthetic oligonucleotide
  Sense strand starting at position 3195 of SEQ ID NO: 1564255
uuucuuuguguccaaguca

SEQ ID NO: 1866390 - RNA, 19 nt, Artificial Sequence
  Description of Artificial Sequence: Synthetic oligonucleotide
  Antisense strand to SEQ ID NO: 1866389
ugacuuggacacaaagaaa

SEQ ID NO: 1866391 - RNA, 19 nt, Artificial Sequence
  Description of Artificial Sequence: Synthetic oligonucleotide
  Sense strand starting at position 3285 of SEQ ID NO: 1564255
cggcuucugcugccacaau

SEQ ID NO: 1866392 - RNA, 19 nt, Artificial Sequence
  Description of Artificial Sequence: Synthetic oligonucleotide
  Antisense strand to SEQ ID NO: 1866391
auuguggcagcagaagccg

SEQ ID NO: 1866393 - RNA, 19 nt, Artificial Sequence
  Description of Artificial Sequence: Synthetic oligonucleotide
  Sense strand starting at position 3317 of SEQ ID NO: 1564255
ccaacucgaucuugggaga

SEQ ID NO: 1866394 - RNA, 19 nt, Artificial Sequence
  Description of Artificial Sequence: Synthetic oligonucleotide
  Antisense strand to SEQ ID NO: 1866393
ucucccaagaucgaguugg

SEQ ID NO: 1866395 - RNA, 19 nt, Artificial Sequence
  Description of Artificial Sequence: Synthetic oligonucleotide
  Sense strand starting at position 60 of SEQ ID NO: 1564256
gaggguccuuguccaucua

SEQ ID NO: 1866396 - RNA, 19 nt, Artificial Sequence
  Description of Artificial Sequence: Synthetic oligonucleotide
  Antisense strand to SEQ ID NO: 1866395
uagauggacaaggacccuc

SEQ ID NO: 1866397 - RNA, 19 nt, Artificial Sequence
  Description of Artificial Sequence: Synthetic oligonucleotide
  Sense strand starting at position 142 of SEQ ID NO: 1564256
gccaucauucuagguaaag

SEQ ID NO: 1866398 - RNA, 19 nt, Artificial Sequence
  Description of Artificial Sequence: Synthetic oligonucleotide
  Antisense strand to SEQ ID NO: 1866397
cuuuaccuagaaugauggc

SEQ ID NO: 1866399 - RNA, 19 nt, Artificial Sequence
  Description of Artificial Sequence: Synthetic oligonucleotide
  Sense strand starting at position 143 of SEQ ID NO: 1564256
ccaucauucuagguaaaga

SEQ ID NO: 1866400 - RNA, 19 nt, Artificial Sequence
  Description of Artificial Sequence: Synthetic oligonucleotide
  Antisense strand to SEQ ID NO: 1866399
ucuuuaccuagaaugaugg

SEQ ID NO: 1866401 - RNA, 19 nt, Artificial Sequence
  Description of Artificial Sequence: Synthetic oligonucleotide
  Sense strand starting at position 153 of SEQ ID NO: 1564256
agguaaagagccugucaua

SEQ ID NO: 1866402 - RNA, 19 nt, Artificial Sequence
  Description of Artificial Sequence: Synthetic oligonucleotide
  Antisense strand to SEQ ID NO: 1866401
uaugacaggcucuuuaccu

SEQ ID NO: 1866403 - RNA, 19 nt, Artificial Sequence
  Description of Artificial Sequence: Synthetic oligonucleotide
  Sense strand starting at position 173 of SEQ ID NO: 1564256
uuaguaacuucugugguga

SEQ ID NO: 1866404 - RNA, 19 nt, Artificial Sequence
  Description of Artificial Sequence: Synthetic oligonucleotide
  Antisense strand to SEQ ID NO: 1866403
ucaccacagaaguuacuaa

SEQ ID NO: 1866405 - RNA, 19 nt, Artificial Sequence
  Description of Artificial Sequence: Synthetic oligonucleotide
  Sense strand starting at position 174 of SEQ ID NO: 1564256
uaguaacuucuguggugaa

SEQ ID NO: 1866406 - RNA, 19 nt, Artificial Sequence
  Description of Artificial Sequence: Synthetic oligonucleotide
  Antisense strand to SEQ ID NO: 1866405
uucaccacagaaguuacua

SEQ ID NO: 1866407 - RNA, 19 nt, Artificial Sequence
  Description of Artificial Sequence: Synthetic oligonucleotide
  Sense strand starting at position 217 of SEQ ID NO: 1564256
cauacuagucaaggugagu

SEQ ID NO: 1866408 - RNA, 19 nt, Artificial Sequence
  Description of Artificial Sequence: Synthetic oligonucleotide
  Antisense strand to SEQ ID NO: 1866407
acucaccuugacuaguaug

SEQ ID NO: 1866409 - RNA, 19 nt, Artificial Sequence
  Description of Artificial Sequence: Synthetic oligonucleotide
  Sense strand starting at position 231 of SEQ ID NO: 1564256
ugaguucuguuucuuucuu

SEQ ID NO: 1866410 - RNA, 19 nt, Artificial Sequence
  Description of Artificial Sequence: Synthetic oligonucleotide
  Antisense strand to SEQ ID NO: 1866409
aagaaagaaacagaacuca

SEQ ID NO: 1866411 - RNA, 19 nt, Artificial Sequence
  Description of Artificial Sequence: Synthetic oligonucleotide
  Sense strand starting at position 995 of SEQ ID NO: 1564256
ucgugcucgacuguucuau

SEQ ID NO: 1866412 - RNA, 19 nt, Artificial Sequence
  Description of Artificial Sequence: Synthetic oligonucleotide
  Antisense strand to SEQ ID NO: 1866411
auagaacagucgagcacga

SEQ ID NO: 1866413 - RNA, 19 nt, Artificial Sequence
  Description of Artificial Sequence: Synthetic oligonucleotide
  Sense strand starting at position 996 of SEQ ID NO: 1564256
cgugcucgacuguucuaua

SEQ ID NO: 1866414 - RNA, 19 nt, Artificial Sequence
  Description of Artificial Sequence: Synthetic oligonucleotide
  Antisense strand to SEQ ID NO: 1866413
uauagaacagucgagcacg

SEQ ID NO: 1866415 - RNA, 19 nt, Artificial Sequence
  Description of Artificial Sequence: Synthetic oligonucleotide
  Sense strand starting at position 1023 of SEQ ID NO: 1564256
aggaauugaucaggaagag

SEQ ID NO: 1866416 - RNA, 19 nt, Artificial Sequence
  Description of Artificial Sequence: Synthetic oligonucleotide
  Antisense strand to SEQ ID NO: 1866415
cucuuccugaucaauuccu

SEQ ID NO: 1866417 - RNA, 19 nt, Artificial Sequence
  Description of Artificial Sequence: Synthetic oligonucleotide
  Sense strand starting at position 1278 of SEQ ID NO: 1564256
ugcugugucgugucccgaa

SEQ ID NO: 1866418 - RNA, 19 nt, Artificial Sequence
  Description of Artificial Sequence: Synthetic oligonucleotide
  Antisense strand to SEQ ID NO: 1866417
uucgggacacgacacagca

SEQ ID NO: 1866419 - RNA, 19 nt, Artificial Sequence
  Description of Artificial Sequence: Synthetic oligonucleotide
  Sense strand starting at position 1381 of SEQ ID NO: 1564256
cccacugugucuguaggaa

SEQ ID NO: 1866420 - RNA, 19 nt, Artificial Sequence
  Description of Artificial Sequence: Synthetic oligonucleotide
  Antisense strand to SEQ ID NO: 1866419
uuccuacagacacaguggg

SEQ ID NO: 1866421 - RNA, 19 nt, Artificial Sequence
  Description of Artificial Sequence: Synthetic oligonucleotide
  Sense strand starting at position 1617 of SEQ ID NO: 1564256
ucuguaaagcaaggguuaa

SEQ ID NO: 1866422 - RNA, 19 nt, Artificial Sequence
  Description of Artificial Sequence: Synthetic oligonucleotide
  Antisense strand to SEQ ID NO: 1866421
uuaacccuugcuuuacaga

SEQ ID NO: 1866423 - RNA, 19 nt, Artificial Sequence
  Description of Artificial Sequence: Synthetic oligonucleotide
  Sense strand starting at position 1618 of SEQ ID NO: 1564256
cuguaaagcaaggguuaaa

SEQ ID NO: 1866424 - RNA, 19 nt, Artificial Sequence
  Description of Artificial Sequence: Synthetic oligonucleotide
  Antisense strand to SEQ ID NO: 1866423
uuuaacccuugcuuuacag

SEQ ID NO: 1866425 - RNA, 19 nt, Artificial Sequence
  Description of Artificial Sequence: Synthetic oligonucleotide
  Sense strand starting at position 2088 of SEQ ID NO: 1564256
guguuaacugcguuagcca

SEQ ID NO: 1866426 - RNA, 19 nt, Artificial Sequence
  Description of Artificial Sequence: Synthetic oligonucleotide
  Antisense strand to SEQ ID NO: 1866425
uggcuaacgcaguuaacac

SEQ ID NO: 1866427 - RNA, 19 nt, Artificial Sequence
  Description of Artificial Sequence: Synthetic oligonucleotide
  Sense strand starting at position 2215 of SEQ ID NO: 1564256
cagggugguuccgugaaau

SEQ ID NO: 1866428 - RNA, 19 nt, Artificial Sequence
  Description of Artificial Sequence: Synthetic oligonucleotide
  Antisense strand to SEQ ID NO: 1866427
auuucacggaaccacccug

SEQ ID NO: 1866429 - RNA, 19 nt, Artificial Sequence
  Description of Artificial Sequence: Synthetic oligonucleotide
  Sense strand starting at position 2216 of SEQ ID NO: 1564256
agggugguuccgugaaaug

SEQ ID NO: 1866430 - RNA, 19 nt, Artificial Sequence
  Description of Artificial Sequence: Synthetic oligonucleotide
  Antisense strand to SEQ ID NO: 1866429
cauuucacggaaccacccu

SEQ ID NO: 1866431 - RNA, 19 nt, Artificial Sequence
  Description of Artificial Sequence: Synthetic oligonucleotide
  Sense strand starting at position 2217 of SEQ ID NO: 1564256
gggugguuccgugaaaugg

SEQ ID NO: 1866432 - RNA, 19 nt, Artificial Sequence
  Description of Artificial Sequence: Synthetic oligonucleotide
  Antisense strand to SEQ ID NO: 1866431
ccauuucacggaaccaccc

SEQ ID NO: 1866433 - RNA, 19 nt, Artificial Sequence
  Description of Artificial Sequence: Synthetic oligonucleotide
  Sense strand starting at position 2231 of SEQ ID NO: 1564256
aauggcauccuuugguaaa

SEQ ID NO: 1866434 - RNA, 19 nt, Artificial Sequence
  Description of Artificial Sequence: Synthetic oligonucleotide
  Antisense strand to SEQ ID NO: 1866433
uuuaccaaaggaugccauu

SEQ ID NO: 1866435 - RNA, 19 nt, Artificial Sequence
  Description of Artificial Sequence: Synthetic oligonucleotide
  Sense strand starting at position 2525 of SEQ ID NO: 1564256
acacaucugugugcuguaa

SEQ ID NO: 1866436 - RNA, 19 nt, Artificial Sequence
  Description of Artificial Sequence: Synthetic oligonucleotide
  Antisense strand to SEQ ID NO: 1866435
uuacagcacacagaugugu

SEQ ID NO: 1866437 - RNA, 19 nt, Artificial Sequence
  Description of Artificial Sequence: Synthetic oligonucleotide
  Sense strand starting at position 2927 of SEQ ID NO: 1564256
aauaguaauugugcucaag

SEQ ID NO: 1866438 - RNA, 19 nt, Artificial Sequence
  Description of Artificial Sequence: Synthetic oligonucleotide
  Antisense strand to SEQ ID NO: 1866437
cuugagcacaauuacuauu

SEQ ID NO: 1866439 - RNA, 19 nt, Artificial Sequence
  Description of Artificial Sequence: Synthetic oligonucleotide
  Sense strand starting at position 2929 of SEQ ID NO: 1564256
uaguaauugugcucaagug

SEQ ID NO: 1866440 - RNA, 19 nt, Artificial Sequence
  Description of Artificial Sequence: Synthetic oligonucleotide
  Antisense strand to SEQ ID NO: 1866439
cacuugagcacaauuacua

SEQ ID NO: 1866441 - RNA, 19 nt, Artificial Sequence
  Description of Artificial Sequence: Synthetic oligonucleotide
  Sense strand starting at position 2994 of SEQ ID NO: 1564256
gcauaacaugccuauuaug

SEQ ID NO: 1866442 - RNA, 19 nt, Artificial Sequence
  Description of Artificial Sequence: Synthetic oligonucleotide
  Antisense strand to SEQ ID NO: 1866441
cauaauaggcauguuaugc

SEQ ID NO: 1866443 - RNA, 19 nt, Artificial Sequence
  Description of Artificial Sequence: Synthetic oligonucleotide
  Sense strand starting at position 3022 of SEQ ID NO: 1564256
auguguuagccuuagugag

SEQ ID NO: 1866444 - RNA, 19 nt, Artificial Sequence
  Description of Artificial Sequence: Synthetic oligonucleotide
  Antisense strand to SEQ ID NO: 1866443
cucacuaaggcuaacacau

SEQ ID NO: 1866445 - RNA, 19 nt, Artificial Sequence
  Description of Artificial Sequence: Synthetic oligonucleotide
  Sense strand starting at position 3028 of SEQ ID NO: 1564256
uagccuuagugaguacagu

SEQ ID NO: 1866446 - RNA, 19 nt, Artificial Sequence
  Description of Artificial Sequence: Synthetic oligonucleotide
  Antisense strand to SEQ ID NO: 1866445
acuguacucacuaaggcua

SEQ ID NO: 1866447 - RNA, 19 nt, Artificial Sequence
  Description of Artificial Sequence: Synthetic oligonucleotide
  Sense strand starting at position 3029 of SEQ ID NO: 1564256
agccuuagugaguacagua

SEQ ID NO: 1866448 - RNA, 19 nt, Artificial Sequence
  Description of Artificial Sequence: Synthetic oligonucleotide
  Antisense strand to SEQ ID NO: 1866447
uacuguacucacuaaggcu

SEQ ID NO: 1866449 - RNA, 19 nt, Artificial Sequence
  Description of Artificial Sequence: Synthetic oligonucleotide
  Sense strand starting at position 3034 of SEQ ID NO: 1564256
uagugaguacaguaguaaa

SEQ ID NO: 1866450 - RNA, 19 nt, Artificial Sequence
  Description of Artificial Sequence: Synthetic oligonucleotide
  Antisense strand to SEQ ID NO: 1866449
uuuacuacuguacucacua

SEQ ID NO: 1866451 - RNA, 19 nt, Artificial Sequence
  Description of Artificial Sequence: Synthetic oligonucleotide
  Sense strand starting at position 3085 of SEQ ID NO: 1564256
aacauugagucagucagaa

SEQ ID NO: 1866452 - RNA, 19 nt, Artificial Sequence
  Description of Artificial Sequence: Synthetic oligonucleotide
  Antisense strand to SEQ ID NO: 1866451
uucugacugacucaauguu

SEQ ID NO: 1866453 - RNA, 19 nt, Artificial Sequence
  Description of Artificial Sequence: Synthetic oligonucleotide
  Sense strand starting at position 3446 of SEQ ID NO: 1564256
cugauaagcuguguccacu

SEQ ID NO: 1866454 - RNA, 19 nt, Artificial Sequence
  Description of Artificial Sequence: Synthetic oligonucleotide
  Antisense strand to SEQ ID NO: 1866453
aguggacacagcuuaucag

SEQ ID NO: 1866455 - RNA, 19 nt, Artificial Sequence
  Description of Artificial Sequence: Synthetic oligonucleotide
  Sense strand starting at position 3536 of SEQ ID NO: 1564256
accucauacgguugugaca

SEQ ID NO: 1866456 - RNA, 19 nt, Artificial Sequence
  Description of Artificial Sequence: Synthetic oligonucleotide
  Antisense strand to SEQ ID NO: 1866455
ugucacaaccguaugaggu

SEQ ID NO: 1866457 - RNA, 19 nt, Artificial Sequence
  Description of Artificial Sequence: Synthetic oligonucleotide
  Sense strand starting at position 3545 of SEQ ID NO: 1564256
gguugugacaacgauuaaa

SEQ ID NO: 1866458 - RNA, 19 nt, Artificial Sequence
  Description of Artificial Sequence: Synthetic oligonucleotide
  Antisense strand to SEQ ID NO: 1866457
uuuaaucguugucacaacc

SEQ ID NO: 1866459 - RNA, 19 nt, Artificial Sequence
  Description of Artificial Sequence: Synthetic oligonucleotide
  Sense strand starting at position 3580 of SEQ ID NO: 1564256
aagugcuuagaauacagua

SEQ ID NO: 1866460 - RNA, 19 nt, Artificial Sequence
  Description of Artificial Sequence: Synthetic oligonucleotide
  Antisense strand to SEQ ID NO: 1866459
uacuguauucuaagcacuu

SEQ ID NO: 1866461 - RNA, 19 nt, Artificial Sequence
  Description of Artificial Sequence: Synthetic oligonucleotide
  Sense strand starting at position 3698 of SEQ ID NO: 1564256
uuugccauauguuugaaau

SEQ ID NO: 1866462 - RNA, 19 nt, Artificial Sequence
  Description of Artificial Sequence: Synthetic oligonucleotide
  Antisense strand to SEQ ID NO: 1866461
auuucaaacauauggcaaa

SEQ ID NO: 1866463 - RNA, 19 nt, Artificial Sequence
  Description of Artificial Sequence: Synthetic oligonucleotide
  Sense strand starting at position 3699 of SEQ ID NO: 1564256
uugccauauguuugaaaug

SEQ ID NO: 1866464 - RNA, 19 nt, Artificial Sequence
  Description of Artificial Sequence: Synthetic oligonucleotide
  Antisense strand to SEQ ID NO: 1866463
cauuucaaacauauggcaa

SEQ ID NO: 1866465 - RNA, 19 nt, Artificial Sequence
  Description of Artificial Sequence: Synthetic oligonucleotide
  Sense strand starting at position 3708 of SEQ ID NO: 1564256
guuugaaauggcugccuca

SEQ ID NO: 1866466 - RNA, 19 nt, Artificial Sequence
  Description of Artificial Sequence: Synthetic oligonucleotide
  Antisense strand to SEQ ID NO: 1866465
ugaggcagccauuucaaac

SEQ ID NO: 1866467 - RNA, 19 nt, Artificial Sequence
  Description of Artificial Sequence: Synthetic oligonucleotide
  Sense strand starting at position 3858 of SEQ ID NO: 1564256
agaagcauuuaccagcuau

SEQ ID NO: 1866468 - RNA, 19 nt, Artificial Sequence
  Description of Artificial Sequence: Synthetic oligonucleotide
  Antisense strand to SEQ ID NO: 1866467
auagcugguaaaugcuucu

SEQ ID NO: 1866469 - RNA, 19 nt, Artificial Sequence
  Description of Artificial Sequence: Synthetic oligonucleotide
  Sense strand starting at position 3868 of SEQ ID NO: 1564256
accagcuauucuuucggaa

SEQ ID NO: 1866470 - RNA, 19 nt, Artificial Sequence
  Description of Artificial Sequence: Synthetic oligonucleotide
  Antisense strand to SEQ ID NO: 1866469
uuccgaaagaauagcuggu

SEQ ID NO: 1866471 - RNA, 19 nt, Artificial Sequence
  Description of Artificial Sequence: Synthetic oligonucleotide
  Sense strand starting at position 3884 of SEQ ID NO: 1564256
gaaggaggcuuccucuaca

SEQ ID NO: 1866472 - RNA, 19 nt, Artificial Sequence
  Description of Artificial Sequence: Synthetic oligonucleotide
  Antisense strand to SEQ ID NO: 1866471
uguagaggaagccuccuuc

SEQ ID NO: 1866473 - RNA, 19 nt, Artificial Sequence
  Description of Artificial Sequence: Synthetic oligonucleotide
  Sense strand starting at position 3974 of SEQ ID NO: 1564256
uuguauauacucugaguuc

SEQ ID NO: 1866474 - RNA, 19 nt, Artificial Sequence
  Description of Artificial Sequence: Synthetic oligonucleotide
  Antisense strand to SEQ ID NO: 1866473
gaacucagaguauauacaa

SEQ ID NO: 1866475 - RNA, 19 nt, Artificial Sequence
  Description of Artificial Sequence: Synthetic oligonucleotide
  Sense strand starting at position 15 of SEQ ID NO: 1564257
gccauuuggccucgcuaaa

SEQ ID NO: 1866476 - RNA, 19 nt, Artificial Sequence
  Description of Artificial Sequence: Synthetic oligonucleotide
  Antisense strand to SEQ ID NO: 1866475
uuuagcgaggccaaauggc

SEQ ID NO: 1866477 - RNA, 19 nt, Artificial Sequence
  Description of Artificial Sequence: Synthetic oligonucleotide
  Sense strand starting at position 63 of SEQ ID NO: 1564257
uccucugagcagugguuaa

SEQ ID NO: 1866478 - RNA, 19 nt, Artificial Sequence
  Description of Artificial Sequence: Synthetic oligonucleotide
  Antisense strand to SEQ ID NO: 1866477
uuaaccacugcucagagga

SEQ ID NO: 1866479 - RNA, 19 nt, Artificial Sequence
  Description of Artificial Sequence: Synthetic oligonucleotide
  Sense strand starting at position 67 of SEQ ID NO: 1564257
cugagcagugguuaauuaa

SEQ ID NO: 1866480 - RNA, 19 nt, Artificial Sequence
  Description of Artificial Sequence: Synthetic oligonucleotide
  Antisense strand to SEQ ID NO: 1866479
uuaauuaaccacugcucag

SEQ ID NO: 1866481 - RNA, 19 nt, Artificial Sequence
  Description of Artificial Sequence: Synthetic oligonucleotide
  Sense strand starting at position 109 of SEQ ID NO: 1564257
aauagagucaggcagguuu

SEQ ID NO: 1866482 - RNA, 19 nt, Artificial Sequence
  Description of Artificial Sequence: Synthetic oligonucleotide
  Antisense strand to SEQ ID NO: 1866481
aaaccugccugacucuauu

SEQ ID NO: 1866483 - RNA, 19 nt, Artificial Sequence
  Description of Artificial Sequence: Synthetic oligonucleotide
  Sense strand starting at position 154 of SEQ ID NO: 1564257
ggaggacugagacgaguua

SEQ ID NO: 1866484 - RNA, 19 nt, Artificial Sequence
  Description of Artificial Sequence: Synthetic oligonucleotide
  Antisense strand to SEQ ID NO: 1866483
uaacucgucucaguccucc

SEQ ID NO: 1866485 - RNA, 19 nt, Artificial Sequence
  Description of Artificial Sequence: Synthetic oligonucleotide
  Sense strand starting at position 165 of SEQ ID NO: 1564257
acgaguuaggcagggaauu

SEQ ID NO: 1866486 - RNA, 19 nt, Artificial Sequence
  Description of Artificial Sequence: Synthetic oligonucleotide
  Antisense strand to SEQ ID NO: 1866485
aauucccugccuaacucgu

SEQ ID NO: 1866487 - RNA, 19 nt, Artificial Sequence
  Description of Artificial Sequence: Synthetic oligonucleotide
  Sense strand starting at position 166 of SEQ ID NO: 1564257
cgaguuaggcagggaauua

SEQ ID NO: 1866488 - RNA, 19 nt, Artificial Sequence
  Description of Artificial Sequence: Synthetic oligonucleotide
  Antisense strand to SEQ ID NO: 1866487
uaauucccugccuaacucg

SEQ ID NO: 1866489 - RNA, 19 nt, Artificial Sequence
  Description of Artificial Sequence: Synthetic oligonucleotide
  Sense strand starting at position 423 of SEQ ID NO: 1564257
gggagucucauguaaccuu

SEQ ID NO: 1866490 - RNA, 19 nt, Artificial Sequence
  Description of Artificial Sequence: Synthetic oligonucleotide
  Antisense strand to SEQ ID NO: 1866489
aagguuacaugagacuccc

SEQ ID NO: 1866491 - RNA, 19 nt, Artificial Sequence
  Description of Artificial Sequence: Synthetic oligonucleotide
  Sense strand starting at position 487 of SEQ ID NO: 1564257
caggccaucugguuuccaa

SEQ ID NO: 1866492 - RNA, 19 nt, Artificial Sequence
  Description of Artificial Sequence: Synthetic oligonucleotide
  Antisense strand to SEQ ID NO: 1866491
uuggaaaccagauggccug

SEQ ID NO: 1866493 - RNA, 19 nt, Artificial Sequence
  Description of Artificial Sequence: Synthetic oligonucleotide
  Sense strand starting at position 525 of SEQ ID NO: 1564257
ccgagagagucaguucuac

SEQ ID NO: 1866494 - RNA, 19 nt, Artificial Sequence
  Description of Artificial Sequence: Synthetic oligonucleotide
  Antisense strand to SEQ ID NO: 1866493
guagaacugacucucucgg

SEQ ID NO: 1866495 - RNA, 19 nt, Artificial Sequence
  Description of Artificial Sequence: Synthetic oligonucleotide
  Sense strand starting at position 669 of SEQ ID NO: 1564257
cgcgcaugcgccuugguaa

SEQ ID NO: 1866496 - RNA, 19 nt, Artificial Sequence
  Description of Artificial Sequence: Synthetic oligonucleotide
  Antisense strand to SEQ ID NO: 1866495
uuaccaaggcgcaugcgcg

SEQ ID NO: 1866497 - RNA, 19 nt, Artificial Sequence
  Description of Artificial Sequence: Synthetic oligonucleotide
  Sense strand starting at position 670 of SEQ ID NO: 1564257
gcgcaugcgccuugguaaa

SEQ ID NO: 1866498 - RNA, 19 nt, Artificial Sequence
  Description of Artificial Sequence: Synthetic oligonucleotide
  Antisense strand to SEQ ID NO: 1866497
uuuaccaaggcgcaugcgc

SEQ ID NO: 1866499 - RNA, 19 nt, Artificial Sequence
  Description of Artificial Sequence: Synthetic oligonucleotide
  Sense strand starting at position 1110 of SEQ ID NO: 1564257
guaugaaccuucuguguau

SEQ ID NO: 1866500 - RNA, 19 nt, Artificial Sequence
  Description of Artificial Sequence: Synthetic oligonucleotide
  Antisense strand to SEQ ID NO: 1866499
auacacagaagguucauac

SEQ ID NO: 1866501 - RNA, 19 nt, Artificial Sequence
  Description of Artificial Sequence: Synthetic oligonucleotide
  Sense strand starting at position 1123 of SEQ ID NO: 1564257
guguauuccuguucucaaa

SEQ ID NO: 1866502 - RNA, 19 nt, Artificial Sequence
  Description of Artificial Sequence: Synthetic oligonucleotide
  Antisense strand to SEQ ID NO: 1866501
uuugagaacaggaauacac

SEQ ID NO: 1866503 - RNA, 19 nt, Artificial Sequence
  Description of Artificial Sequence: Synthetic oligonucleotide
  Sense strand starting at position 1196 of SEQ ID NO: 1564257
ccuccuuucuccugucuga

SEQ ID NO: 1866504 - RNA, 19 nt, Artificial Sequence
  Description of Artificial Sequence: Synthetic oligonucleotide
  Antisense strand to SEQ ID NO: 1866503
ucagacaggagaaaggagg

SEQ ID NO: 1866505 - RNA, 19 nt, Artificial Sequence
  Description of Artificial Sequence: Synthetic oligonucleotide
  Sense strand starting at position 1219 of SEQ ID NO: 1564257
gguccuuuccguugcucaa

SEQ ID NO: 1866506 - RNA, 19 nt, Artificial Sequence
  Description of Artificial Sequence: Synthetic oligonucleotide
  Antisense strand to SEQ ID NO: 1866505
uugagcaacggaaaggacc

SEQ ID NO: 1866507 - RNA, 19 nt, Artificial Sequence
  Description of Artificial Sequence: Synthetic oligonucleotide
  Sense strand starting at position 1380 of SEQ ID NO: 1564257
uugcuaccgucugaaggau

SEQ ID NO: 1866508 - RNA, 19 nt, Artificial Sequence
  Description of Artificial Sequence: Synthetic oligonucleotide
  Antisense strand to SEQ ID NO: 1866507
auccuucagacgguagcaa

SEQ ID NO: 1866509 - RNA, 19 nt, Artificial Sequence
  Description of Artificial Sequence: Synthetic oligonucleotide
  Sense strand starting at position 1463 of SEQ ID NO: 1564257
gaguccagaucguuacuuu

SEQ ID NO: 1866510 - RNA, 19 nt, Artificial Sequence
  Description of Artificial Sequence: Synthetic oligonucleotide
  Antisense strand to SEQ ID NO: 1866509
aaaguaacgaucuggacuc

SEQ ID NO: 1866511 - RNA, 19 nt, Artificial Sequence
  Description of Artificial Sequence: Synthetic oligonucleotide
  Sense strand starting at position 1474 of SEQ ID NO: 1564257
guuacuuucuguggcccaa

SEQ ID NO: 1866512 - RNA, 19 nt, Artificial Sequence
  Description of Artificial Sequence: Synthetic oligonucleotide
  Antisense strand to SEQ ID NO: 1866511
uugggccacagaaaguaac

SEQ ID NO: 1866513 - RNA, 19 nt, Artificial Sequence
  Description of Artificial Sequence: Synthetic oligonucleotide
  Sense strand starting at position 1560 of SEQ ID NO: 1564257
gcgguuaggucccaaaccu

SEQ ID NO: 1866514 - RNA, 19 nt, Artificial Sequence
  Description of Artificial Sequence: Synthetic oligonucleotide
  Antisense strand to SEQ ID NO: 1866513
agguuugggaccuaaccgc

SEQ ID NO: 1866515 - RNA, 19 nt, Artificial Sequence
  Description of Artificial Sequence: Synthetic oligonucleotide
  Sense strand starting at position 1984 of SEQ ID NO: 1564257
ggaggaauguaguucucug

SEQ ID NO: 1866516 - RNA, 19 nt, Artificial Sequence
  Description of Artificial Sequence: Synthetic oligonucleotide
  Antisense strand to SEQ ID NO: 1866515
cagagaacuacauuccucc

SEQ ID NO: 1866517 - RNA, 19 nt, Artificial Sequence
  Description of Artificial Sequence: Synthetic oligonucleotide
  Sense strand starting at position 1988 of SEQ ID NO: 1564257
gaauguaguucucugaacu

SEQ ID NO: 1866518 - RNA, 19 nt, Artificial Sequence
  Description of Artificial Sequence: Synthetic oligonucleotide
  Antisense strand to SEQ ID NO: 1866517
aguucagagaacuacauuc

SEQ ID NO: 1866519 - RNA, 19 nt, Artificial Sequence
  Description of Artificial Sequence: Synthetic oligonucleotide
  Sense strand starting at position 2058 of SEQ ID NO: 1564257
guuguuauaccuugugucu

SEQ ID NO: 1866520 - RNA, 19 nt, Artificial Sequence
  Description of Artificial Sequence: Synthetic oligonucleotide
  Antisense strand to SEQ ID NO: 1866519
agacacaagguauaacaac

SEQ ID NO: 1866521 - RNA, 19 nt, Artificial Sequence
  Description of Artificial Sequence: Synthetic oligonucleotide
  Sense strand starting at position 2060 of SEQ ID NO: 1564257
uguuauaccuugugucuau

SEQ ID NO: 1866522 - RNA, 19 nt, Artificial Sequence
  Description of Artificial Sequence: Synthetic oligonucleotide
  Antisense strand to SEQ ID NO: 1866521
auagacacaagguauaaca

SEQ ID NO: 1866523 - RNA, 19 nt, Artificial Sequence
  Description of Artificial Sequence: Synthetic oligonucleotide
  Sense strand starting at position 2192 of SEQ ID NO: 1564257
gcccguccaucuuaugcaa

SEQ ID NO: 1866524 - RNA, 19 nt, Artificial Sequence
  Description of Artificial Sequence: Synthetic oligonucleotide
  Antisense strand to SEQ ID NO: 1866523
uugcauaagauggacgggc

SEQ ID NO: 1866525 - RNA, 19 nt, Artificial Sequence
  Description of Artificial Sequence: Synthetic oligonucleotide
  Sense strand starting at position 2194 of SEQ ID NO: 1564257
ccguccaucuuaugcaauu

SEQ ID NO: 1866526 - RNA, 19 nt, Artificial Sequence
  Description of Artificial Sequence: Synthetic oligonucleotide
  Antisense strand to SEQ ID NO: 1866525
aauugcauaagauggacgg

SEQ ID NO: 1866527 - RNA, 19 nt, Artificial Sequence
  Description of Artificial Sequence: Synthetic oligonucleotide
  Sense strand starting at position 2288 of SEQ ID NO: 1564257
acaauaucaguuuguacuu

SEQ ID NO: 1866528 - RNA, 19 nt, Artificial Sequence
  Description of Artificial Sequence: Synthetic oligonucleotide
  Antisense strand to SEQ ID NO: 1866527
aaguacaaacugauauugu

SEQ ID NO: 1866529 - RNA, 19 nt, Artificial Sequence
  Description of Artificial Sequence: Synthetic oligonucleotide
  Sense strand starting at position 2304 of SEQ ID NO: 1564257
cuuagacugucucuuguga

SEQ ID NO: 1866530 - RNA, 19 nt, Artificial Sequence
  Description of Artificial Sequence: Synthetic oligonucleotide
  Antisense strand to SEQ ID NO: 1866529
ucacaagagacagucuaag

SEQ ID NO: 1866531 - RNA, 19 nt, Artificial Sequence
  Description of Artificial Sequence: Synthetic oligonucleotide
  Sense strand starting at position 2306 of SEQ ID NO: 1564257
uagacugucucuugugaca

SEQ ID NO: 1866532 - RNA, 19 nt, Artificial Sequence
  Description of Artificial Sequence: Synthetic oligonucleotide
  Antisense strand to SEQ ID NO: 1866531
ugucacaagagacagucua

SEQ ID NO: 1866533 - RNA, 19 nt, Artificial Sequence
  Description of Artificial Sequence: Synthetic oligonucleotide
  Sense strand starting at position 2308 of SEQ ID NO: 1564257
gacugucucuugugacaug

SEQ ID NO: 1866534 - RNA, 19 nt, Artificial Sequence
  Description of Artificial Sequence: Synthetic oligonucleotide
  Antisense strand to SEQ ID NO: 1866533
caugucacaagagacaguc

SEQ ID NO: 1866535 - RNA, 19 nt, Artificial Sequence
  Description of Artificial Sequence: Synthetic oligonucleotide
  Sense strand starting at position 2491 of SEQ ID NO: 1564257
caucgugaauaucgaauaa

SEQ ID NO: 1866536 - RNA, 19 nt, Artificial Sequence
  Description of Artificial Sequence: Synthetic oligonucleotide
  Antisense strand to SEQ ID NO: 1866535
uuauucgauauucacgaug

SEQ ID NO: 1866537 - RNA, 19 nt, Artificial Sequence
  Description of Artificial Sequence: Synthetic oligonucleotide
  Sense strand starting at position 2585 of SEQ ID NO: 1564257
ggagaaguagacugcaaua

SEQ ID NO: 1866538 - RNA, 19 nt, Artificial Sequence
  Description of Artificial Sequence: Synthetic oligonucleotide
  Antisense strand to SEQ ID NO: 1866537
uauugcagucuacuucucc

SEQ ID NO: 1866539 - RNA, 19 nt, Artificial Sequence
  Description of Artificial Sequence: Synthetic oligonucleotide
  Sense strand starting at position 2781 of SEQ ID NO: 1564257
gaucauaaguuaggccaaa

SEQ ID NO: 1866540 - RNA, 19 nt, Artificial Sequence
  Description of Artificial Sequence: Synthetic oligonucleotide
  Antisense strand to SEQ ID NO: 1866539
uuuggccuaacuuaugauc

SEQ ID NO: 1866541 - RNA, 19 nt, Artificial Sequence
  Description of Artificial Sequence: Synthetic oligonucleotide
  Sense strand starting at position 3711 of SEQ ID NO: 1564257
auguuagcccuuugucuga

SEQ ID NO: 1866542 - RNA, 19 nt, Artificial Sequence
  Description of Artificial Sequence: Synthetic oligonucleotide
  Antisense strand to SEQ ID NO: 1866541
ucagacaaagggcuaacau

SEQ ID NO: 1866543 - RNA, 19 nt, Artificial Sequence
  Description of Artificial Sequence: Synthetic oligonucleotide
  Sense strand starting at position 276 of SEQ ID NO: 1564258
gccauuuggccucgcuaaa

SEQ ID NO: 1866544 - RNA, 19 nt, Artificial Sequence
  Description of Artificial Sequence: Synthetic oligonucleotide
  Antisense strand to SEQ ID NO: 1866543
uuuagcgaggccaaauggc

SEQ ID NO: 1866545 - RNA, 19 nt, Artificial Sequence
  Description of Artificial Sequence: Synthetic oligonucleotide
  Sense strand starting at position 324 of SEQ ID NO: 1564258
uccucugagcagugguuaa

SEQ ID NO: 1866546 - RNA, 19 nt, Artificial Sequence
  Description of Artificial Sequence: Synthetic oligonucleotide
  Antisense strand to SEQ ID NO: 1866545
uuaaccacugcucagagga

SEQ ID NO: 1866547 - RNA, 19 nt, Artificial Sequence
  Description of Artificial Sequence: Synthetic oligonucleotide
  Sense strand starting at position 328 of SEQ ID NO: 1564258
cugagcagugguuaauuaa

SEQ ID NO: 1866548 - RNA, 19 nt, Artificial Sequence
  Description of Artificial Sequence: Synthetic oligonucleotide
  Antisense strand to SEQ ID NO: 1866547
uuaauuaaccacugcucag

SEQ ID NO: 1866549 - RNA, 19 nt, Artificial Sequence
  Description of Artificial Sequence: Synthetic oligonucleotide
  Sense strand starting at position 370 of SEQ ID NO: 1564258
aauagagucaggcagguuu

SEQ ID NO: 1866550 - RNA, 19 nt, Artificial Sequence
  Description of Artificial Sequence: Synthetic oligonucleotide
  Antisense strand to SEQ ID NO: 1866549
aaaccugccugacucuauu

SEQ ID NO: 1866551 - RNA, 19 nt, Artificial Sequence
  Description of Artificial Sequence: Synthetic oligonucleotide
  Sense strand starting at position 415 of SEQ ID NO: 1564258
ggaggacugagacgaguua

SEQ ID NO: 1866552 - RNA, 19 nt, Artificial Sequence
  Description of Artificial Sequence: Synthetic oligonucleotide
  Antisense strand to SEQ ID NO: 1866551
uaacucgucucaguccucc

SEQ ID NO: 1866553 - RNA, 19 nt, Artificial Sequence
  Description of Artificial Sequence: Synthetic oligonucleotide
  Sense strand starting at position 426 of SEQ ID NO: 1564258
acgaguuaggcagggaauu

SEQ ID NO: 1866554 - RNA, 19 nt, Artificial Sequence
  Description of Artificial Sequence: Synthetic oligonucleotide
  Antisense strand to SEQ ID NO: 1866553
aauucccugccuaacucgu

SEQ ID NO: 1866555 - RNA, 19 nt, Artificial Sequence
  Description of Artificial Sequence: Synthetic oligonucleotide
  Sense strand starting at position 427 of SEQ ID NO: 1564258
cgaguuaggcagggaauua

SEQ ID NO: 1866556 - RNA, 19 nt, Artificial Sequence
  Description of Artificial Sequence: Synthetic oligonucleotide
  Antisense strand to SEQ ID NO: 1866555
uaauucccugccuaacucg

SEQ ID NO: 1866557 - RNA, 19 nt, Artificial Sequence
  Description of Artificial Sequence: Synthetic oligonucleotide
  Sense strand starting at position 684 of SEQ ID NO: 1564258
gggagucucauguaaccuu

SEQ ID NO: 1866558 - RNA, 19 nt, Artificial Sequence
  Description of Artificial Sequence: Synthetic oligonucleotide
  Antisense strand to SEQ ID NO: 1866557
aagguuacaugagacuccc

SEQ ID NO: 1866559 - RNA, 19 nt, Artificial Sequence
  Description of Artificial Sequence: Synthetic oligonucleotide
  Sense strand starting at position 748 of SEQ ID NO: 1564258
caggccaucugguuuccaa

SEQ ID NO: 1866560 - RNA, 19 nt, Artificial Sequence
  Description of Artificial Sequence: Synthetic oligonucleotide
  Antisense strand to SEQ ID NO: 1866559
uuggaaaccagauggccug

SEQ ID NO: 1866561 - RNA, 19 nt, Artificial Sequence
  Description of Artificial Sequence: Synthetic oligonucleotide
  Sense strand starting at position 786 of SEQ ID NO: 1564258
ccgagagagucaguucuac

SEQ ID NO: 1866562 - RNA, 19 nt, Artificial Sequence
  Description of Artificial Sequence: Synthetic oligonucleotide
  Antisense strand to SEQ ID NO: 1866561
guagaacugacucucucgg

SEQ ID NO: 1866563 - RNA, 19 nt, Artificial Sequence
  Description of Artificial Sequence: Synthetic oligonucleotide
  Sense strand starting at position 930 of SEQ ID NO: 1564258
cgcgcaugcgccuugguaa

SEQ ID NO: 1866564 - RNA, 19 nt, Artificial Sequence
  Description of Artificial Sequence: Synthetic oligonucleotide
  Antisense strand to SEQ ID NO: 1866563
uuaccaaggcgcaugcgcg

SEQ ID NO: 1866565 - RNA, 19 nt, Artificial Sequence
  Description of Artificial Sequence: Synthetic oligonucleotide
  Sense strand starting at position 931 of SEQ ID NO: 1564258
gcgcaugcgccuugguaaa

SEQ ID NO: 1866566 - RNA, 19 nt, Artificial Sequence
  Description of Artificial Sequence: Synthetic oligonucleotide
  Antisense strand to SEQ ID NO: 1866565
uuuaccaaggcgcaugcgc

SEQ ID NO: 1866567 - RNA, 19 nt, Artificial Sequence
  Description of Artificial Sequence: Synthetic oligonucleotide
  Sense strand starting at position 1371 of SEQ ID NO: 1564258
guaugaaccuucuguguau

SEQ ID NO: 1866568 - RNA, 19 nt, Artificial Sequence
  Description of Artificial Sequence: Synthetic oligonucleotide
  Antisense strand to SEQ ID NO: 1866567
auacacagaagguucauac

SEQ ID NO: 1866569 - RNA, 19 nt, Artificial Sequence
  Description of Artificial Sequence: Synthetic oligonucleotide
  Sense strand starting at position 1384 of SEQ ID NO: 1564258
guguauuccuguucucaaa

SEQ ID NO: 1866570 - RNA, 19 nt, Artificial Sequence
  Description of Artificial Sequence: Synthetic oligonucleotide
  Antisense strand to SEQ ID NO: 1866569
uuugagaacaggaauacac

SEQ ID NO: 1866571 - RNA, 19 nt, Artificial Sequence
  Description of Artificial Sequence: Synthetic oligonucleotide
  Sense strand starting at position 1457 of SEQ ID NO: 1564258
ccuccuuucuccugucuga

SEQ ID NO: 1866572 - RNA, 19 nt, Artificial Sequence
  Description of Artificial Sequence: Synthetic oligonucleotide
  Antisense strand to SEQ ID NO: 1866571
ucagacaggagaaaggagg

SEQ ID NO: 1866573 - RNA, 19 nt, Artificial Sequence
  Description of Artificial Sequence: Synthetic oligonucleotide
  Sense strand starting at position 1480 of SEQ ID NO: 1564258
gguccuuuccguugcucaa

SEQ ID NO: 1866574 - RNA, 19 nt, Artificial Sequence
  Description of Artificial Sequence: Synthetic oligonucleotide
  Antisense strand to SEQ ID NO: 1866573
uugagcaacggaaaggacc

SEQ ID NO: 1866575 - RNA, 19 nt, Artificial Sequence
  Description of Artificial Sequence: Synthetic oligonucleotide
  Sense strand starting at position 1641 of SEQ ID NO: 1564258
uugcuaccgucugaaggau

SEQ ID NO: 1866576 - RNA, 19 nt, Artificial Sequence
  Description of Artificial Sequence: Synthetic oligonucleotide
  Antisense strand to SEQ ID NO: 1866575
auccuucagacgguagcaa

SEQ ID NO: 1866577 - RNA, 19 nt, Artificial Sequence
  Description of Artificial Sequence: Synthetic oligonucleotide
  Sense strand starting at position 1724 of SEQ ID NO: 1564258
gaguccagaucguuacuuu

SEQ ID NO: 1866578 - RNA, 19 nt, Artificial Sequence
  Description of Artificial Sequence: Synthetic oligonucleotide
  Antisense strand to SEQ ID NO: 1866577
aaaguaacgaucuggacuc

SEQ ID NO: 1866579 - RNA, 19 nt, Artificial Sequence
  Description of Artificial Sequence: Synthetic oligonucleotide
  Sense strand starting at position 1735 of SEQ ID NO: 1564258
guuacuuucuguggcccaa

SEQ ID NO: 1866580 - RNA, 19 nt, Artificial Sequence
  Description of Artificial Sequence: Synthetic oligonucleotide
  Antisense strand to SEQ ID NO: 1866579
uugggccacagaaaguaac

SEQ ID NO: 1866581 - RNA, 19 nt, Artificial Sequence
  Description of Artificial Sequence: Synthetic oligonucleotide
  Sense strand starting at position 1821 of SEQ ID NO: 1564258
gcgguuaggucccaaaccu

SEQ ID NO: 1866582 - RNA, 19 nt, Artificial Sequence
  Description of Artificial Sequence: Synthetic oligonucleotide
  Antisense strand to SEQ ID NO: 1866581
agguuugggaccuaaccgc

SEQ ID NO: 1866583 - RNA, 19 nt, Artificial Sequence
  Description of Artificial Sequence: Synthetic oligonucleotide
  Sense strand starting at position 2245 of SEQ ID NO: 1564258
ggaggaauguaguucucug

SEQ ID NO: 1866584 - RNA, 19 nt, Artificial Sequence
  Description of Artificial Sequence: Synthetic oligonucleotide
  Antisense strand to SEQ ID NO: 1866583
cagagaacuacauuccucc

SEQ ID NO: 1866585 - RNA, 19 nt, Artificial Sequence
  Description of Artificial Sequence: Synthetic oligonucleotide
  Sense strand starting at position 2249 of SEQ ID NO: 1564258
gaauguaguucucugaacu

SEQ ID NO: 1866586 - RNA, 19 nt, Artificial Sequence
  Description of Artificial Sequence: Synthetic oligonucleotide
  Antisense strand to SEQ ID NO: 1866585
aguucagagaacuacauuc

SEQ ID NO: 1866587 - RNA, 19 nt, Artificial Sequence
  Description of Artificial Sequence: Synthetic oligonucleotide
  Sense strand starting at position 2319 of SEQ ID NO: 1564258
guuguuauaccuugugucu

SEQ ID NO: 1866588 - RNA, 19 nt, Artificial Sequence
  Description of Artificial Sequence: Synthetic oligonucleotide
  Antisense strand to SEQ ID NO: 1866587
agacacaagguauaacaac

SEQ ID NO: 1866589 - RNA, 19 nt, Artificial Sequence
  Description of Artificial Sequence: Synthetic oligonucleotide
  Sense strand starting at position 2321 of SEQ ID NO: 1564258
uguuauaccuugugucuau

SEQ ID NO: 1866590 - RNA, 19 nt, Artificial Sequence
  Description of Artificial Sequence: Synthetic oligonucleotide
  Antisense strand to SEQ ID NO: 1866589
auagacacaagguauaaca

SEQ ID NO: 1866591 - RNA, 19 nt, Artificial Sequence
  Description of Artificial Sequence: Synthetic oligonucleotide
  Sense strand starting at position 2453 of SEQ ID NO: 1564258
gcccguccaucuuaugcaa

SEQ ID NO: 1866592 - RNA, 19 nt, Artificial Sequence
  Description of Artificial Sequence: Synthetic oligonucleotide
  Antisense strand to SEQ ID NO: 1866591
uugcauaagauggacgggc

SEQ ID NO: 1866593 - RNA, 19 nt, Artificial Sequence
  Description of Artificial Sequence: Synthetic oligonucleotide
  Sense strand starting at position 2455 of SEQ ID NO: 1564258
ccguccaucuuaugcaauu

SEQ ID NO: 1866594 - RNA, 19 nt, Artificial Sequence
  Description of Artificial Sequence: Synthetic oligonucleotide
  Antisense strand to SEQ ID NO: 1866593
aauugcauaagauggacgg

SEQ ID NO: 1866595 - RNA, 19 nt, Artificial Sequence
  Description of Artificial Sequence: Synthetic oligonucleotide
  Sense strand starting at position 2549 of SEQ ID NO: 1564258
acaauaucaguuuguacuu

SEQ ID NO: 1866596 - RNA, 19 nt, Artificial Sequence
  Description of Artificial Sequence: Synthetic oligonucleotide
  Antisense strand to SEQ ID NO: 1866595
aaguacaaacugauauugu

SEQ ID NO: 1866597 - RNA, 19 nt, Artificial Sequence
  Description of Artificial Sequence: Synthetic oligonucleotide
  Sense strand starting at position 2565 of SEQ ID NO: 1564258
cuuagacugucucuuguga

SEQ ID NO: 1866598 - RNA, 19 nt, Artificial Sequence
  Description of Artificial Sequence: Synthetic oligonucleotide
  Antisense strand to SEQ ID NO: 1866597
ucacaagagacagucuaag

SEQ ID NO: 1866599 - RNA, 19 nt, Artificial Sequence
  Description of Artificial Sequence: Synthetic oligonucleotide
  Sense strand starting at position 2567 of SEQ ID NO: 1564258
uagacugucucuugugaca

SEQ ID NO: 1866600 - RNA, 19 nt, Artificial Sequence
  Description of Artificial Sequence: Synthetic oligonucleotide
  Antisense strand to SEQ ID NO: 1866599
ugucacaagagacagucua

SEQ ID NO: 1866601 - RNA, 19 nt, Artificial Sequence
  Description of Artificial Sequence: Synthetic oligonucleotide
  Sense strand starting at position 2569 of SEQ ID NO: 1564258
gacugucucuugugacaug

SEQ ID NO: 1866602 - RNA, 19 nt, Artificial Sequence
  Description of Artificial Sequence: Synthetic oligonucleotide
  Antisense strand to SEQ ID NO: 1866601
caugucacaagagacaguc

SEQ ID NO: 1866603 - RNA, 19 nt, Artificial Sequence
  Description of Artificial Sequence: Synthetic oligonucleotide
  Sense strand starting at position 2752 of SEQ ID NO: 1564258
caucgugaauaucgaauaa

SEQ ID NO: 1866604 - RNA, 19 nt, Artificial Sequence
  Description of Artificial Sequence: Synthetic oligonucleotide
  Antisense strand to SEQ ID NO: 1866603
uuauucgauauucacgaug

SEQ ID NO: 1866605 - RNA, 19 nt, Artificial Sequence
  Description of Artificial Sequence: Synthetic oligonucleotide
  Sense strand starting at position 2846 of SEQ ID NO: 1564258
ggagaaguagacugcaaua

SEQ ID NO: 1866606 - RNA, 19 nt, Artificial Sequence
  Description of Artificial Sequence: Synthetic oligonucleotide
  Antisense strand to SEQ ID NO: 1866605
uauugcagucuacuucucc

SEQ ID NO: 1866607 - RNA, 19 nt, Artificial Sequence
  Description of Artificial Sequence: Synthetic oligonucleotide
  Sense strand starting at position 3042 of SEQ ID NO: 1564258
gaucauaaguuaggccaaa

SEQ ID NO: 1866608 - RNA, 19 nt, Artificial Sequence
  Description of Artificial Sequence: Synthetic oligonucleotide
  Antisense strand to SEQ ID NO: 1866607
uuuggccuaacuuaugauc

SEQ ID NO: 1866609 - RNA, 19 nt, Artificial Sequence
  Description of Artificial Sequence: Synthetic oligonucleotide
  Sense strand starting at position 3972 of SEQ ID NO: 1564258
auguuagcccuuugucuga

SEQ ID NO: 1866610 - RNA, 19 nt, Artificial Sequence
  Description of Artificial Sequence: Synthetic oligonucleotide
  Antisense strand to SEQ ID NO: 1866609
ucagacaaagggcuaacau

SEQ ID NO: 1866611 - RNA, 19 nt, Artificial Sequence
  Description of Artificial Sequence: Synthetic oligonucleotide
  Sense strand starting at position 43 of SEQ ID NO: 1564259
auaaaucugucauucuugu

SEQ ID NO: 1866612 - RNA, 19 nt, Artificial Sequence
  Description of Artificial Sequence: Synthetic oligonucleotide
  Antisense strand to SEQ ID NO: 1866611
acaagaaugacagauuuau

SEQ ID NO: 1866613 - RNA, 19 nt, Artificial Sequence
  Description of Artificial Sequence: Synthetic oligonucleotide
  Sense strand starting at position 49 of SEQ ID NO: 1564259
cugucauucuuguuaaaug

SEQ ID NO: 1866614 - RNA, 19 nt, Artificial Sequence
  Description of Artificial Sequence: Synthetic oligonucleotide
  Antisense strand to SEQ ID NO: 1866613
cauuuaacaagaaugacag

SEQ ID NO: 1866615 - RNA, 19 nt, Artificial Sequence
  Description of Artificial Sequence: Synthetic oligonucleotide
  Sense strand starting at position 59 of SEQ ID NO: 1564259
uguuaaaugccaugaagau

SEQ ID NO: 1866616 - RNA, 19 nt, Artificial Sequence
  Description of Artificial Sequence: Synthetic oligonucleotide
  Antisense strand to SEQ ID NO: 1866615
aucuucauggcauuuaaca

SEQ ID NO: 1866617 - RNA, 19 nt, Artificial Sequence
  Description of Artificial Sequence: Synthetic oligonucleotide
  Sense strand starting at position 104 of SEQ ID NO: 1564259
cugggugugccaugucaau

SEQ ID NO: 1866618 - RNA, 19 nt, Artificial Sequence
  Description of Artificial Sequence: Synthetic oligonucleotide
  Antisense strand to SEQ ID NO: 1866617
auugacauggcacacccag

SEQ ID NO: 1866619 - RNA, 19 nt, Artificial Sequence
  Description of Artificial Sequence: Synthetic oligonucleotide
  Sense strand starting at position 185 of SEQ ID NO: 1564259
ucaauuagucuaugucucu

SEQ ID NO: 1866620 - RNA, 19 nt, Artificial Sequence
  Description of Artificial Sequence: Synthetic oligonucleotide
  Antisense strand to SEQ ID NO: 1866619
agagacauagacuaauuga

SEQ ID NO: 1866621 - RNA, 19 nt, Artificial Sequence
  Description of Artificial Sequence: Synthetic oligonucleotide
  Sense strand starting at position 215 of SEQ ID NO: 1564259
aauaaacucggguaaaguu

SEQ ID NO: 1866622 - RNA, 19 nt, Artificial Sequence
  Description of Artificial Sequence: Synthetic oligonucleotide
  Antisense strand to SEQ ID NO: 1866621
aacuuuacccgaguuuauu

SEQ ID NO: 1866623 - RNA, 19 nt, Artificial Sequence
  Description of Artificial Sequence: Synthetic oligonucleotide
  Sense strand starting at position 339 of SEQ ID NO: 1564259
aagagcccagguuguaaua

SEQ ID NO: 1866624 - RNA, 19 nt, Artificial Sequence
  Description of Artificial Sequence: Synthetic oligonucleotide
  Antisense strand to SEQ ID NO: 1866623
uauuacaaccugggcucuu

SEQ ID NO: 1866625 - RNA, 19 nt, Artificial Sequence
  Description of Artificial Sequence: Synthetic oligonucleotide
  Sense strand starting at position 401 of SEQ ID NO: 1564259
agaucagcaucugugaauu

SEQ ID NO: 1866626 - RNA, 19 nt, Artificial Sequence
  Description of Artificial Sequence: Synthetic oligonucleotide
  Antisense strand to SEQ ID NO: 1866625
aauucacagaugcugaucu

SEQ ID NO: 1866627 - RNA, 19 nt, Artificial Sequence
  Description of Artificial Sequence: Synthetic oligonucleotide
  Sense strand starting at position 433 of SEQ ID NO: 1564259
gcauaugugggacaugauc

SEQ ID NO: 1866628 - RNA, 19 nt, Artificial Sequence
  Description of Artificial Sequence: Synthetic oligonucleotide
  Antisense strand to SEQ ID NO: 1866627
gaucaugucccacauaugc

SEQ ID NO: 1866629 - RNA, 19 nt, Artificial Sequence
  Description of Artificial Sequence: Synthetic oligonucleotide
  Sense strand starting at position 435 of SEQ ID NO: 1564259
auaugugggacaugaucau

SEQ ID NO: 1866630 - RNA, 19 nt, Artificial Sequence
  Description of Artificial Sequence: Synthetic oligonucleotide
  Antisense strand to SEQ ID NO: 1866629
augaucaugucccacauau

SEQ ID NO: 1866631 - RNA, 19 nt, Artificial Sequence
  Description of Artificial Sequence: Synthetic oligonucleotide
  Sense strand starting at position 468 of SEQ ID NO: 1564259
gucgaugugugucuaggga

SEQ ID NO: 1866632 - RNA, 19 nt, Artificial Sequence
  Description of Artificial Sequence: Synthetic oligonucleotide
  Antisense strand to SEQ ID NO: 1866631
ucccuagacacacaucgac

SEQ ID NO: 1866633 - RNA, 19 nt, Artificial Sequence
  Description of Artificial Sequence: Synthetic oligonucleotide
  Sense strand starting at position 697 of SEQ ID NO: 1564259
gcagguauccuugguccga

SEQ ID NO: 1866634 - RNA, 19 nt, Artificial Sequence
  Description of Artificial Sequence: Synthetic oligonucleotide
  Antisense strand to SEQ ID NO: 1866633
ucggaccaaggauaccugc

SEQ ID NO: 1866635 - RNA, 19 nt, Artificial Sequence
  Description of Artificial Sequence: Synthetic oligonucleotide
  Sense strand starting at position 790 of SEQ ID NO: 1564259
gcaaaucauuguccaggga

SEQ ID NO: 1866636 - RNA, 19 nt, Artificial Sequence
  Description of Artificial Sequence: Synthetic oligonucleotide
  Antisense strand to SEQ ID NO: 1866635
ucccuggacaaugauuugc

SEQ ID NO: 1866637 - RNA, 19 nt, Artificial Sequence
  Description of Artificial Sequence: Synthetic oligonucleotide
  Sense strand starting at position 793 of SEQ ID NO: 1564259
aaucauuguccagggauag

SEQ ID NO: 1866638 - RNA, 19 nt, Artificial Sequence
  Description of Artificial Sequence: Synthetic oligonucleotide
  Antisense strand to SEQ ID NO: 1866637
cuaucccuggacaaugauu

SEQ ID NO: 1866639 - RNA, 19 nt, Artificial Sequence
  Description of Artificial Sequence: Synthetic oligonucleotide
  Sense strand starting at position 810 of SEQ ID NO: 1564259
aggacaaagcugugguuca

SEQ ID NO: 1866640 - RNA, 19 nt, Artificial Sequence
  Description of Artificial Sequence: Synthetic oligonucleotide
  Antisense strand to SEQ ID NO: 1866639
ugaaccacagcuuuguccu

SEQ ID NO: 1866641 - RNA, 19 nt, Artificial Sequence
  Description of Artificial Sequence: Synthetic oligonucleotide
  Sense strand starting at position 1093 of SEQ ID NO: 1564259
guagacuuacccugagcca

SEQ ID NO: 1866642 - RNA, 19 nt, Artificial Sequence
  Description of Artificial Sequence: Synthetic oligonucleotide
  Antisense strand to SEQ ID NO: 1866641
uggcucaggguaagucuac

SEQ ID NO: 1866643 - RNA, 19 nt, Artificial Sequence
  Description of Artificial Sequence: Synthetic oligonucleotide
  Sense strand starting at position 1129 of SEQ ID NO: 1564259
aaaucugugucgucuggau

SEQ ID NO: 1866644 - RNA, 19 nt, Artificial Sequence
  Description of Artificial Sequence: Synthetic oligonucleotide
  Antisense strand to SEQ ID NO: 1866643
auccagacgacacagauuu

SEQ ID NO: 1866645 - RNA, 19 nt, Artificial Sequence
  Description of Artificial Sequence: Synthetic oligonucleotide
  Sense strand starting at position 1325 of SEQ ID NO: 1564259
cccuuuggaugcucaguua

SEQ ID NO: 1866646 - RNA, 19 nt, Artificial Sequence
  Description of Artificial Sequence: Synthetic oligonucleotide
  Antisense strand to SEQ ID NO: 1866645
uaacugagcauccaaaggg

SEQ ID NO: 1866647 - RNA, 19 nt, Artificial Sequence
  Description of Artificial Sequence: Synthetic oligonucleotide
  Sense strand starting at position 1328 of SEQ ID NO: 1564259
uuuggaugcucaguuauug

SEQ ID NO: 1866648 - RNA, 19 nt, Artificial Sequence
  Description of Artificial Sequence: Synthetic oligonucleotide
  Antisense strand to SEQ ID NO: 1866647
caauaacugagcauccaaa

SEQ ID NO: 1866649 - RNA, 19 nt, Artificial Sequence
  Description of Artificial Sequence: Synthetic oligonucleotide
  Sense strand starting at position 1332 of SEQ ID NO: 1564259
gaugcucaguuauugccaa

SEQ ID NO: 1866650 - RNA, 19 nt, Artificial Sequence
  Description of Artificial Sequence: Synthetic oligonucleotide
  Antisense strand to SEQ ID NO: 1866649
uuggcaauaacugagcauc

SEQ ID NO: 1866651 - RNA, 19 nt, Artificial Sequence
  Description of Artificial Sequence: Synthetic oligonucleotide
  Sense strand starting at position 1344 of SEQ ID NO: 1564259
uugccaaacuugccuguaa

SEQ ID NO: 1866652 - RNA, 19 nt, Artificial Sequence
  Description of Artificial Sequence: Synthetic oligonucleotide
  Antisense strand to SEQ ID NO: 1866651
uuacaggcaaguuuggcaa

SEQ ID NO: 1866653 - RNA, 19 nt, Artificial Sequence
  Description of Artificial Sequence: Synthetic oligonucleotide
  Sense strand starting at position 1346 of SEQ ID NO: 1564259
gccaaacuugccuguaaca

SEQ ID NO: 1866654 - RNA, 19 nt, Artificial Sequence
  Description of Artificial Sequence: Synthetic oligonucleotide
  Antisense strand to SEQ ID NO: 1866653
uguuacaggcaaguuuggc

SEQ ID NO: 1866655 - RNA, 19 nt, Artificial Sequence
  Description of Artificial Sequence: Synthetic oligonucleotide
  Sense strand starting at position 1557 of SEQ ID NO: 1564259
gacacuguagugugaagga

SEQ ID NO: 1866656 - RNA, 19 nt, Artificial Sequence
  Description of Artificial Sequence: Synthetic oligonucleotide
  Antisense strand to SEQ ID NO: 1866655
uccuucacacuacaguguc

SEQ ID NO: 1866657 - RNA, 19 nt, Artificial Sequence
  Description of Artificial Sequence: Synthetic oligonucleotide
  Sense strand starting at position 1763 of SEQ ID NO: 1564259
ccguuucuggaauaugcua

SEQ ID NO: 1866658 - RNA, 19 nt, Artificial Sequence
  Description of Artificial Sequence: Synthetic oligonucleotide
  Antisense strand to SEQ ID NO: 1866657
uagcauauuccagaaacgg

SEQ ID NO: 1866659 - RNA, 19 nt, Artificial Sequence
  Description of Artificial Sequence: Synthetic oligonucleotide
  Sense strand starting at position 2083 of SEQ ID NO: 1564259
gauugagacaaccguggua

SEQ ID NO: 1866660 - RNA, 19 nt, Artificial Sequence
  Description of Artificial Sequence: Synthetic oligonucleotide
  Antisense strand to SEQ ID NO: 1866659
uaccacgguugucucaauc

SEQ ID NO: 1866661 - RNA, 19 nt, Artificial Sequence
  Description of Artificial Sequence: Synthetic oligonucleotide
  Sense strand starting at position 2466 of SEQ ID NO: 1564259
ggagcauauggcuagcaga

SEQ ID NO: 1866662 - RNA, 19 nt, Artificial Sequence
  Description of Artificial Sequence: Synthetic oligonucleotide
  Antisense strand to SEQ ID NO: 1866661
ucugcuagccauaugcucc

SEQ ID NO: 1866663 - RNA, 19 nt, Artificial Sequence
  Description of Artificial Sequence: Synthetic oligonucleotide
  Sense strand starting at position 2737 of SEQ ID NO: 1564259
agauuaaucuaguuggagc

SEQ ID NO: 1866664 - RNA, 19 nt, Artificial Sequence
  Description of Artificial Sequence: Synthetic oligonucleotide
  Antisense strand to SEQ ID NO: 1866663
gcuccaacuagauuaaucu

SEQ ID NO: 1866665 - RNA, 19 nt, Artificial Sequence
  Description of Artificial Sequence: Synthetic oligonucleotide
  Sense strand starting at position 2739 of SEQ ID NO: 1564259
auuaaucuaguuggagcua

SEQ ID NO: 1866666 - RNA, 19 nt, Artificial Sequence
  Description of Artificial Sequence: Synthetic oligonucleotide
  Antisense strand to SEQ ID NO: 1866665
uagcuccaacuagauuaau

SEQ ID NO: 1866667 - RNA, 19 nt, Artificial Sequence
  Description of Artificial Sequence: Synthetic oligonucleotide
  Sense strand starting at position 2830 of SEQ ID NO: 1564259
gagggaaagugauauugua

SEQ ID NO: 1866668 - RNA, 19 nt, Artificial Sequence
  Description of Artificial Sequence: Synthetic oligonucleotide
  Antisense strand to SEQ ID NO: 1866667
uacaauaucacuuucccuc

SEQ ID NO: 1866669 - RNA, 19 nt, Artificial Sequence
  Description of Artificial Sequence: Synthetic oligonucleotide
  Sense strand starting at position 2865 of SEQ ID NO: 1564259
cuagguugcuuagugguau

SEQ ID NO: 1866670 - RNA, 19 nt, Artificial Sequence
  Description of Artificial Sequence: Synthetic oligonucleotide
  Antisense strand to SEQ ID NO: 1866669
auaccacuaagcaaccuag

SEQ ID NO: 1866671 - RNA, 19 nt, Artificial Sequence
  Description of Artificial Sequence: Synthetic oligonucleotide
  Sense strand starting at position 3062 of SEQ ID NO: 1564259
ugagacuucuaccugcaac

SEQ ID NO: 1866672 - RNA, 19 nt, Artificial Sequence
  Description of Artificial Sequence: Synthetic oligonucleotide
  Antisense strand to SEQ ID NO: 1866671
guugcagguagaagucuca

SEQ ID NO: 1866673 - RNA, 19 nt, Artificial Sequence
  Description of Artificial Sequence: Synthetic oligonucleotide
  Sense strand starting at position 3369 of SEQ ID NO: 1564259
gccuaaauggccgaguguu

SEQ ID NO: 1866674 - RNA, 19 nt, Artificial Sequence
  Description of Artificial Sequence: Synthetic oligonucleotide
  Antisense strand to SEQ ID NO: 1866673
aacacucggccauuuaggc

SEQ ID NO: 1866675 - RNA, 19 nt, Artificial Sequence
  Description of Artificial Sequence: Synthetic oligonucleotide
  Sense strand starting at position 3416 of SEQ ID NO: 1564259
uagcuauguuuaguggaag

SEQ ID NO: 1866676 - RNA, 19 nt, Artificial Sequence
  Description of Artificial Sequence: Synthetic oligonucleotide
  Antisense strand to SEQ ID NO: 1866675
cuuccacuaaacauagcua

SEQ ID NO: 1866677 - RNA, 19 nt, Artificial Sequence
  Description of Artificial Sequence: Synthetic oligonucleotide
  Sense strand starting at position 3561 of SEQ ID NO: 1564259
uuuguaugggagcaaggua

SEQ ID NO: 1866678 - RNA, 19 nt, Artificial Sequence
  Description of Artificial Sequence: Synthetic oligonucleotide
  Antisense strand to SEQ ID NO: 1866677
uaccuugcucccauacaaa

SEQ ID NO: 1866679 - RNA, 19 nt, Artificial Sequence
  Description of Artificial Sequence: Synthetic oligonucleotide
  Sense strand starting at position 3608 of SEQ ID NO: 1564259
ggaugaagaguuugugucu

SEQ ID NO: 1866680 - RNA, 19 nt, Artificial Sequence
  Description of Artificial Sequence: Synthetic oligonucleotide
  Antisense strand to SEQ ID NO: 1866679
agacacaaacucuucaucc

SEQ ID NO: 1866681 - RNA, 19 nt, Artificial Sequence
  Description of Artificial Sequence: Synthetic oligonucleotide
  Sense strand starting at position 3694 of SEQ ID NO: 1564259
caggaaguguuucuaaaga

SEQ ID NO: 1866682 - RNA, 19 nt, Artificial Sequence
  Description of Artificial Sequence: Synthetic oligonucleotide
  Antisense strand to SEQ ID NO: 1866681
ucuuuagaaacacuuccug

SEQ ID NO: 1866683 - RNA, 19 nt, Artificial Sequence
  Description of Artificial Sequence: Synthetic oligonucleotide
  Sense strand starting at position 3702 of SEQ ID NO: 1564259
guuucuaaagauuggccaa

SEQ ID NO: 1866684 - RNA, 19 nt, Artificial Sequence
  Description of Artificial Sequence: Synthetic oligonucleotide
  Antisense strand to SEQ ID NO: 1866683
uuggccaaucuuuagaaac

SEQ ID NO: 1866685 - RNA, 19 nt, Artificial Sequence
  Description of Artificial Sequence: Synthetic oligonucleotide
  Sense strand starting at position 3856 of SEQ ID NO: 1564259
gcaugagggugaguagaau

SEQ ID NO: 1866686 - RNA, 19 nt, Artificial Sequence
  Description of Artificial Sequence: Synthetic oligonucleotide
  Antisense strand to SEQ ID NO: 1866685
auucuacucacccucaugc

SEQ ID NO: 1866687 - RNA, 19 nt, Artificial Sequence
  Description of Artificial Sequence: Synthetic oligonucleotide
  Sense strand starting at position 3870 of SEQ ID NO: 1564259
agaauaugugaccguggau

SEQ ID NO: 1866688 - RNA, 19 nt, Artificial Sequence
  Description of Artificial Sequence: Synthetic oligonucleotide
  Antisense strand to SEQ ID NO: 1866687
auccacggucacauauucu

SEQ ID NO: 1866689 - RNA, 19 nt, Artificial Sequence
  Description of Artificial Sequence: Synthetic oligonucleotide
  Sense strand starting at position 3873 of SEQ ID NO: 1564259
auaugugaccguggauaaa

SEQ ID NO: 1866690 - RNA, 19 nt, Artificial Sequence
  Description of Artificial Sequence: Synthetic oligonucleotide
  Antisense strand to SEQ ID NO: 1866689
uuuauccacggucacauau

SEQ ID NO: 1866691 - RNA, 19 nt, Artificial Sequence
  Description of Artificial Sequence: Synthetic oligonucleotide
  Sense strand starting at position 563 of SEQ ID NO: 1564260
gagguuuacccaggaccua

SEQ ID NO: 1866692 - RNA, 19 nt, Artificial Sequence
  Description of Artificial Sequence: Synthetic oligonucleotide
  Antisense strand to SEQ ID NO: 1866691
uagguccuggguaaaccuc

SEQ ID NO: 1866693 - RNA, 19 nt, Artificial Sequence
  Description of Artificial Sequence: Synthetic oligonucleotide
  Sense strand starting at position 986 of SEQ ID NO: 1564260
ugcaaagauugaucauucu

SEQ ID NO: 1866694 - RNA, 19 nt, Artificial Sequence
  Description of Artificial Sequence: Synthetic oligonucleotide
  Antisense strand to SEQ ID NO: 1866693
agaaugaucaaucuuugca

SEQ ID NO: 1866695 - RNA, 19 nt, Artificial Sequence
  Description of Artificial Sequence: Synthetic oligonucleotide
  Sense strand starting at position 1071 of SEQ ID NO: 1564260
cuccgagaacagcauuaaa

SEQ ID NO: 1866696 - RNA, 19 nt, Artificial Sequence
  Description of Artificial Sequence: Synthetic oligonucleotide
  Antisense strand to SEQ ID NO: 1866695
uuuaaugcuguucucggag

SEQ ID NO: 1866697 - RNA, 19 nt, Artificial Sequence
  Description of Artificial Sequence: Synthetic oligonucleotide
  Sense strand starting at position 1144 of SEQ ID NO: 1564260
uguuguuaugaaugacuaa

SEQ ID NO: 1866698 - RNA, 19 nt, Artificial Sequence
  Description of Artificial Sequence: Synthetic oligonucleotide
  Antisense strand to SEQ ID NO: 1866697
uuagucauucauaacaaca

SEQ ID NO: 1866699 - RNA, 19 nt, Artificial Sequence
  Description of Artificial Sequence: Synthetic oligonucleotide
  Sense strand starting at position 1170 of SEQ ID NO: 1564260
ggaguauuaauaugagcuc

SEQ ID NO: 1866700 - RNA, 19 nt, Artificial Sequence
  Description of Artificial Sequence: Synthetic oligonucleotide
  Antisense strand to SEQ ID NO: 1866699
gagcucauauuaauacucc

SEQ ID NO: 1866701 - RNA, 19 nt, Artificial Sequence
  Description of Artificial Sequence: Synthetic oligonucleotide
  Sense strand starting at position 1173 of SEQ ID NO: 1564260
guauuaauaugagcucuaa

SEQ ID NO: 1866702 - RNA, 19 nt, Artificial Sequence
  Description of Artificial Sequence: Synthetic oligonucleotide
  Antisense strand to SEQ ID NO: 1866701
uuagagcucauauuaauac

SEQ ID NO: 1866703 - RNA, 19 nt, Artificial Sequence
  Description of Artificial Sequence: Synthetic oligonucleotide
  Sense strand starting at position 1177 of SEQ ID NO: 1564260
uaauaugagcucuaaguga

SEQ ID NO: 1866704 - RNA, 19 nt, Artificial Sequence
  Description of Artificial Sequence: Synthetic oligonucleotide
  Antisense strand to SEQ ID NO: 1866703
ucacuuagagcucauauua

SEQ ID NO: 1866705 - RNA, 19 nt, Artificial Sequence
  Description of Artificial Sequence: Synthetic oligonucleotide
  Sense strand starting at position 1225 of SEQ ID NO: 1564260
ccaccauacccuugagaag

SEQ ID NO: 1866706 - RNA, 19 nt, Artificial Sequence
  Description of Artificial Sequence: Synthetic oligonucleotide
  Antisense strand to SEQ ID NO: 1866705
cuucucaaggguauggugg

SEQ ID NO: 1866707 - RNA, 19 nt, Artificial Sequence
  Description of Artificial Sequence: Synthetic oligonucleotide
  Sense strand starting at position 1252 of SEQ ID NO: 1564260
ugaguuugucgguuccagu

SEQ ID NO: 1866708 - RNA, 19 nt, Artificial Sequence
  Description of Artificial Sequence: Synthetic oligonucleotide
  Antisense strand to SEQ ID NO: 1866707
acuggaaccgacaaacuca

SEQ ID NO: 1866709 - RNA, 19 nt, Artificial Sequence
  Description of Artificial Sequence: Synthetic oligonucleotide
  Sense strand starting at position 1253 of SEQ ID NO: 1564260
gaguuugucgguuccaguu

SEQ ID NO: 1866710 - RNA, 19 nt, Artificial Sequence
  Description of Artificial Sequence: Synthetic oligonucleotide
  Antisense strand to SEQ ID NO: 1866709
aacuggaaccgacaaacuc

SEQ ID NO: 1866711 - RNA, 19 nt, Artificial Sequence
  Description of Artificial Sequence: Synthetic oligonucleotide
  Sense strand starting at position 1297 of SEQ ID NO: 1564260
aguauaugauaaccacagu

SEQ ID NO: 1866712 - RNA, 19 nt, Artificial Sequence
  Description of Artificial Sequence: Synthetic oligonucleotide
  Antisense strand to SEQ ID NO: 1866711
acugugguuaucauauacu

SEQ ID NO: 1866713 - RNA, 19 nt, Artificial Sequence
  Description of Artificial Sequence: Synthetic oligonucleotide
  Sense strand starting at position 1322 of SEQ ID NO: 1564260
aaguaaauauugccaggga

SEQ ID NO: 1866714 - RNA, 19 nt, Artificial Sequence
  Description of Artificial Sequence: Synthetic oligonucleotide
  Antisense strand to SEQ ID NO: 1866713
ucccuggcaauauuuacuu

SEQ ID NO: 1866715 - RNA, 19 nt, Artificial Sequence
  Description of Artificial Sequence: Synthetic oligonucleotide
  Sense strand starting at position 1336 of SEQ ID NO: 1564260
agggaauucugggugguag

SEQ ID NO: 1866716 - RNA, 19 nt, Artificial Sequence
  Description of Artificial Sequence: Synthetic oligonucleotide
  Antisense strand to SEQ ID NO: 1866715
cuaccacccagaauucccu

SEQ ID NO: 1866717 - RNA, 19 nt, Artificial Sequence
  Description of Artificial Sequence: Synthetic oligonucleotide
  Sense strand starting at position 1337 of SEQ ID NO: 1564260
gggaauucugggugguaga

SEQ ID NO: 1866718 - RNA, 19 nt, Artificial Sequence
  Description of Artificial Sequence: Synthetic oligonucleotide
  Antisense strand to SEQ ID NO: 1866717
ucuaccacccagaauuccc

SEQ ID NO: 1866719 - RNA, 19 nt, Artificial Sequence
  Description of Artificial Sequence: Synthetic oligonucleotide
  Sense strand starting at position 1338 of SEQ ID NO: 1564260
ggaauucugggugguagag

SEQ ID NO: 1866720 - RNA, 19 nt, Artificial Sequence
  Description of Artificial Sequence: Synthetic oligonucleotide
  Antisense strand to SEQ ID NO: 1866719
cucuaccacccagaauucc

SEQ ID NO: 1866721 - RNA, 19 nt, Artificial Sequence
  Description of Artificial Sequence: Synthetic oligonucleotide
  Sense strand starting at position 1350 of SEQ ID NO: 1564260
gguagagacucauuaaagc

SEQ ID NO: 1866722 - RNA, 19 nt, Artificial Sequence
  Description of Artificial Sequence: Synthetic oligonucleotide
  Antisense strand to SEQ ID NO: 1866721
gcuuuaaugagucucuacc

SEQ ID NO: 1866723 - RNA, 19 nt, Artificial Sequence
  Description of Artificial Sequence: Synthetic oligonucleotide
  Sense strand starting at position 1562 of SEQ ID NO: 1564260
auguuuauaucagugacag

SEQ ID NO: 1866724 - RNA, 19 nt, Artificial Sequence
  Description of Artificial Sequence: Synthetic oligonucleotide
  Antisense strand to SEQ ID NO: 1866723
cugucacugauauaaacau

SEQ ID NO: 1866725 - RNA, 19 nt, Artificial Sequence
  Description of Artificial Sequence: Synthetic oligonucleotide
  Sense strand starting at position 1563 of SEQ ID NO: 1564260
uguuuauaucagugacagg

SEQ ID NO: 1866726 - RNA, 19 nt, Artificial Sequence
  Description of Artificial Sequence: Synthetic oligonucleotide
  Antisense strand to SEQ ID NO: 1866725
ccugucacugauauaaaca

SEQ ID NO: 1866727 - RNA, 19 nt, Artificial Sequence
  Description of Artificial Sequence: Synthetic oligonucleotide
  Sense strand starting at position 1580 of SEQ ID NO: 1564260
ggaaauauguaucccacuu

SEQ ID NO: 1866728 - RNA, 19 nt, Artificial Sequence
  Description of Artificial Sequence: Synthetic oligonucleotide
  Antisense strand to SEQ ID NO: 1866727
aagugggauacauauuucc

SEQ ID NO: 1866729 - RNA, 19 nt, Artificial Sequence
  Description of Artificial Sequence: Synthetic oligonucleotide
  Sense strand starting at position 1664 of SEQ ID NO: 1564260
aagugcuuucccuagagga

SEQ ID NO: 1866730 - RNA, 19 nt, Artificial Sequence
  Description of Artificial Sequence: Synthetic oligonucleotide
  Antisense strand to SEQ ID NO: 1866729
uccucuagggaaagcacuu

SEQ ID NO: 1866731 - RNA, 19 nt, Artificial Sequence
  Description of Artificial Sequence: Synthetic oligonucleotide
  Sense strand starting at position 1666 of SEQ ID NO: 1564260
gugcuuucccuagaggaga

SEQ ID NO: 1866732 - RNA, 19 nt, Artificial Sequence
  Description of Artificial Sequence: Synthetic oligonucleotide
  Antisense strand to SEQ ID NO: 1866731
ucuccucuagggaaagcac

SEQ ID NO: 1866733 - RNA, 19 nt, Artificial Sequence
  Description of Artificial Sequence: Synthetic oligonucleotide
  Sense strand starting at position 1835 of SEQ ID NO: 1564260
acaucagagcuguaaucca

SEQ ID NO: 1866734 - RNA, 19 nt, Artificial Sequence
  Description of Artificial Sequence: Synthetic oligonucleotide
  Antisense strand to SEQ ID NO: 1866733
uggauuacagcucugaugu

SEQ ID NO: 1866735 - RNA, 19 nt, Artificial Sequence
  Description of Artificial Sequence: Synthetic oligonucleotide
  Sense strand starting at position 2070 of SEQ ID NO: 1564260
agaccuugccucugaaauu

SEQ ID NO: 1866736 - RNA, 19 nt, Artificial Sequence
  Description of Artificial Sequence: Synthetic oligonucleotide
  Antisense strand to SEQ ID NO: 1866735
aauuucagaggcaaggucu

SEQ ID NO: 1866737 - RNA, 19 nt, Artificial Sequence
  Description of Artificial Sequence: Synthetic oligonucleotide
  Sense strand starting at position 2411 of SEQ ID NO: 1564260
aucagaguccauugaagug

SEQ ID NO: 1866738 - RNA, 19 nt, Artificial Sequence
  Description of Artificial Sequence: Synthetic oligonucleotide
  Antisense strand to SEQ ID NO: 1866737
cacuucaauggacucugau

SEQ ID NO: 1866739 - RNA, 19 nt, Artificial Sequence
  Description of Artificial Sequence: Synthetic oligonucleotide
  Sense strand starting at position 2583 of SEQ ID NO: 1564260
uggcuuauacuagagugaa

SEQ ID NO: 1866740 - RNA, 19 nt, Artificial Sequence
  Description of Artificial Sequence: Synthetic oligonucleotide
  Antisense strand to SEQ ID NO: 1866739
uucacucuaguauaagcca

SEQ ID NO: 1866741 - RNA, 19 nt, Artificial Sequence
  Description of Artificial Sequence: Synthetic oligonucleotide
  Sense strand starting at position 2934 of SEQ ID NO: 1564260
cuacccuaucagcaguauu

SEQ ID NO: 1866742 - RNA, 19 nt, Artificial Sequence
  Description of Artificial Sequence: Synthetic oligonucleotide
  Antisense strand to SEQ ID NO: 1866741
aauacugcugauaggguag

SEQ ID NO: 1866743 - RNA, 19 nt, Artificial Sequence
  Description of Artificial Sequence: Synthetic oligonucleotide
  Sense strand starting at position 2937 of SEQ ID NO: 1564260
cccuaucagcaguauuauu

SEQ ID NO: 1866744 - RNA, 19 nt, Artificial Sequence
  Description of Artificial Sequence: Synthetic oligonucleotide
  Antisense strand to SEQ ID NO: 1866743
aauaauacugcugauaggg

SEQ ID NO: 1866745 - RNA, 19 nt, Artificial Sequence
  Description of Artificial Sequence: Synthetic oligonucleotide
  Sense strand starting at position 3006 of SEQ ID NO: 1564260
uguccaaaggcauacuauu

SEQ ID NO: 1866746 - RNA, 19 nt, Artificial Sequence
  Description of Artificial Sequence: Synthetic oligonucleotide
  Antisense strand to SEQ ID NO: 1866745
aauaguaugccuuuggaca

SEQ ID NO: 1866747 - RNA, 19 nt, Artificial Sequence
  Description of Artificial Sequence: Synthetic oligonucleotide
  Sense strand starting at position 3081 of SEQ ID NO: 1564260
accagagacuauguaguau

SEQ ID NO: 1866748 - RNA, 19 nt, Artificial Sequence
  Description of Artificial Sequence: Synthetic oligonucleotide
  Antisense strand to SEQ ID NO: 1866747
auacuacauagucucuggu

SEQ ID NO: 1866749 - RNA, 19 nt, Artificial Sequence
  Description of Artificial Sequence: Synthetic oligonucleotide
  Sense strand starting at position 3094 of SEQ ID NO: 1564260
uaguauuaugguuacagca

SEQ ID NO: 1866750 - RNA, 19 nt, Artificial Sequence
  Description of Artificial Sequence: Synthetic oligonucleotide
  Antisense strand to SEQ ID NO: 1866749
ugcuguaaccauaauacua

SEQ ID NO: 1866751 - RNA, 19 nt, Artificial Sequence
  Description of Artificial Sequence: Synthetic oligonucleotide
  Sense strand starting at position 3305 of SEQ ID NO: 1564260
auaguuugaucaccucaag

SEQ ID NO: 1866752 - RNA, 19 nt, Artificial Sequence
  Description of Artificial Sequence: Synthetic oligonucleotide
  Antisense strand to SEQ ID NO: 1866751
cuugaggugaucaaacuau

SEQ ID NO: 1866753 - RNA, 19 nt, Artificial Sequence
  Description of Artificial Sequence: Synthetic oligonucleotide
  Sense strand starting at position 3308 of SEQ ID NO: 1564260
guuugaucaccucaaguua

SEQ ID NO: 1866754 - RNA, 19 nt, Artificial Sequence
  Description of Artificial Sequence: Synthetic oligonucleotide
  Antisense strand to SEQ ID NO: 1866753
uaacuugaggugaucaaac

SEQ ID NO: 1866755 - RNA, 19 nt, Artificial Sequence
  Description of Artificial Sequence: Synthetic oligonucleotide
  Sense strand starting at position 3337 of SEQ ID NO: 1564260
gguguacucagauagaccu

SEQ ID NO: 1866756 - RNA, 19 nt, Artificial Sequence
  Description of Artificial Sequence: Synthetic oligonucleotide
  Antisense strand to SEQ ID NO: 1866755
aggucuaucugaguacacc

SEQ ID NO: 1866757 - RNA, 19 nt, Artificial Sequence
  Description of Artificial Sequence: Synthetic oligonucleotide
  Sense strand starting at position 3450 of SEQ ID NO: 1564260
cucauagagucaucaugag

SEQ ID NO: 1866758 - RNA, 19 nt, Artificial Sequence
  Description of Artificial Sequence: Synthetic oligonucleotide
  Antisense strand to SEQ ID NO: 1866757
cucaugaugacucuaugag

SEQ ID NO: 1866759 - RNA, 19 nt, Artificial Sequence
  Description of Artificial Sequence: Synthetic oligonucleotide
  Sense strand starting at position 3715 of SEQ ID NO: 1564260
uuuaguuuccuguugcagu

SEQ ID NO: 1866760 - RNA, 19 nt, Artificial Sequence
  Description of Artificial Sequence: Synthetic oligonucleotide
  Antisense strand to SEQ ID NO: 1866759
acugcaacaggaaacuaaa

SEQ ID NO: 1866761 - RNA, 19 nt, Artificial Sequence
  Description of Artificial Sequence: Synthetic oligonucleotide
  Sense strand starting at position 3731 of SEQ ID NO: 1564260
agucauuagcaagaaaguc

SEQ ID NO: 1866762 - RNA, 19 nt, Artificial Sequence
  Description of Artificial Sequence: Synthetic oligonucleotide
  Antisense strand to SEQ ID NO: 1866761
gacuuucuugcuaaugacu

SEQ ID NO: 1866763 - RNA, 19 nt, Artificial Sequence
  Description of Artificial Sequence: Synthetic oligonucleotide
  Sense strand starting at position 3739 of SEQ ID NO: 1564260
gcaagaaagucucuugacu

SEQ ID NO: 1866764 - RNA, 19 nt, Artificial Sequence
  Description of Artificial Sequence: Synthetic oligonucleotide
  Antisense strand to SEQ ID NO: 1866763
agucaagagacuuucuugc

SEQ ID NO: 1866765 - RNA, 19 nt, Artificial Sequence
  Description of Artificial Sequence: Synthetic oligonucleotide
  Sense strand starting at position 3784 of SEQ ID NO: 1564260
gaacccuaucaugguagaa

SEQ ID NO: 1866766 - RNA, 19 nt, Artificial Sequence
  Description of Artificial Sequence: Synthetic oligonucleotide
  Antisense strand to SEQ ID NO: 1866765
uucuaccaugauaggguuc

SEQ ID NO: 1866767 - RNA, 19 nt, Artificial Sequence
  Description of Artificial Sequence: Synthetic oligonucleotide
  Sense strand starting at position 3961 of SEQ ID NO: 1564260
gguggucuuaccuggaaac

SEQ ID NO: 1866768 - RNA, 19 nt, Artificial Sequence
  Description of Artificial Sequence: Synthetic oligonucleotide
  Antisense strand to SEQ ID NO: 1866767
guuuccagguaagaccacc

SEQ ID NO: 1866769 - RNA, 19 nt, Artificial Sequence
  Description of Artificial Sequence: Synthetic oligonucleotide
  Sense strand starting at position 3962 of SEQ ID NO: 1564260
guggucuuaccuggaaaca

SEQ ID NO: 1866770 - RNA, 19 nt, Artificial Sequence
  Description of Artificial Sequence: Synthetic oligonucleotide
  Antisense strand to SEQ ID NO: 1866769
uguuuccagguaagaccac

SEQ ID NO: 1866771 - RNA, 19 nt, Artificial Sequence
  Description of Artificial Sequence: Synthetic oligonucleotide
  Sense strand starting at position 177 of SEQ ID NO: 1564261
ggcuucugacuagaccuaa

SEQ ID NO: 1866772 - RNA, 19 nt, Artificial Sequence
  Description of Artificial Sequence: Synthetic oligonucleotide
  Antisense strand to SEQ ID NO: 1866771
uuaggucuagucagaagcc

SEQ ID NO: 1866773 - RNA, 19 nt, Artificial Sequence
  Description of Artificial Sequence: Synthetic oligonucleotide
  Sense strand starting at position 210 of SEQ ID NO: 1564261
uugguuaugcuuuaacaau

SEQ ID NO: 1866774 - RNA, 19 nt, Artificial Sequence
  Description of Artificial Sequence: Synthetic oligonucleotide
  Antisense strand to SEQ ID NO: 1866773
auuguuaaagcauaaccaa

SEQ ID NO: 1866775 - RNA, 19 nt, Artificial Sequence
  Description of Artificial Sequence: Synthetic oligonucleotide
  Sense strand starting at position 236 of SEQ ID NO: 1564261
ugaggucuuaagcaagcua

SEQ ID NO: 1866776 - RNA, 19 nt, Artificial Sequence
  Description of Artificial Sequence: Synthetic oligonucleotide
  Antisense strand to SEQ ID NO: 1866775
uagcuugcuuaagaccuca

SEQ ID NO: 1866777 - RNA, 19 nt, Artificial Sequence
  Description of Artificial Sequence: Synthetic oligonucleotide
  Sense strand starting at position 275 of SEQ ID NO: 1564261
aguccuuggcuauacuuua

SEQ ID NO: 1866778 - RNA, 19 nt, Artificial Sequence
  Description of Artificial Sequence: Synthetic oligonucleotide
  Antisense strand to SEQ ID NO: 1866777
uaaaguauagccaaggacu

SEQ ID NO: 1866779 - RNA, 19 nt, Artificial Sequence
  Description of Artificial Sequence: Synthetic oligonucleotide
  Sense strand starting at position 433 of SEQ ID NO: 1564261
agucuuaacuaaguucuga

SEQ ID NO: 1866780 - RNA, 19 nt, Artificial Sequence
  Description of Artificial Sequence: Synthetic oligonucleotide
  Antisense strand to SEQ ID NO: 1866779
ucagaacuuaguuaagacu

SEQ ID NO: 1866781 - RNA, 19 nt, Artificial Sequence
  Description of Artificial Sequence: Synthetic oligonucleotide
  Sense strand starting at position 443 of SEQ ID NO: 1564261
aaguucugacuaggacuaa

SEQ ID NO: 1866782 - RNA, 19 nt, Artificial Sequence
  Description of Artificial Sequence: Synthetic oligonucleotide
  Antisense strand to SEQ ID NO: 1866781
uuaguccuagucagaacuu

SEQ ID NO: 1866783 - RNA, 19 nt, Artificial Sequence
  Description of Artificial Sequence: Synthetic oligonucleotide
  Sense strand starting at position 471 of SEQ ID NO: 1564261
augaucuugcuaggacuua

SEQ ID NO: 1866784 - RNA, 19 nt, Artificial Sequence
  Description of Artificial Sequence: Synthetic oligonucleotide
  Antisense strand to SEQ ID NO: 1866783
uaaguccuagcaagaucau

SEQ ID NO: 1866785 - RNA, 19 nt, Artificial Sequence
  Description of Artificial Sequence: Synthetic oligonucleotide
  Sense strand starting at position 505 of SEQ ID NO: 1564261
gaacuuaacuagguuuaga

SEQ ID NO: 1866786 - RNA, 19 nt, Artificial Sequence
  Description of Artificial Sequence: Synthetic oligonucleotide
  Antisense strand to SEQ ID NO: 1866785
ucuaaaccuaguuaaguuc

SEQ ID NO: 1866787 - RNA, 19 nt, Artificial Sequence
  Description of Artificial Sequence: Synthetic oligonucleotide
  Sense strand starting at position 614 of SEQ ID NO: 1564261
cucugacuagaccgaaauu

SEQ ID NO: 1866788 - RNA, 19 nt, Artificial Sequence
  Description of Artificial Sequence: Synthetic oligonucleotide
  Antisense strand to SEQ ID NO: 1866787
aauuucggucuagucagag

SEQ ID NO: 1866789 - RNA, 19 nt, Artificial Sequence
  Description of Artificial Sequence: Synthetic oligonucleotide
  Sense strand starting at position 653 of SEQ ID NO: 1564261
gcugaauuggguuauaacu

SEQ ID NO: 1866790 - RNA, 19 nt, Artificial Sequence
  Description of Artificial Sequence: Synthetic oligonucleotide
  Antisense strand to SEQ ID NO: 1866789
aguuauaacccaauucagc

SEQ ID NO: 1866791 - RNA, 19 nt, Artificial Sequence
  Description of Artificial Sequence: Synthetic oligonucleotide
  Sense strand starting at position 659 of SEQ ID NO: 1564261
uuggguuauaacuggacca

SEQ ID NO: 1866792 - RNA, 19 nt, Artificial Sequence
  Description of Artificial Sequence: Synthetic oligonucleotide
  Antisense strand to SEQ ID NO: 1866791
ugguccaguuauaacccaa

SEQ ID NO: 1866793 - RNA, 19 nt, Artificial Sequence
  Description of Artificial Sequence: Synthetic oligonucleotide
  Sense strand starting at position 660 of SEQ ID NO: 1564261
uggguuauaacuggaccaa

SEQ ID NO: 1866794 - RNA, 19 nt, Artificial Sequence
  Description of Artificial Sequence: Synthetic oligonucleotide
  Antisense strand to SEQ ID NO: 1866793
uugguccaguuauaaccca

SEQ ID NO: 1866795 - RNA, 19 nt, Artificial Sequence
  Description of Artificial Sequence: Synthetic oligonucleotide
  Sense strand starting at position 690 of SEQ ID NO: 1564261
ggcaacaacuaugcuuuaa

SEQ ID NO: 1866796 - RNA, 19 nt, Artificial Sequence
  Description of Artificial Sequence: Synthetic oligonucleotide
  Antisense strand to SEQ ID NO: 1866795
uuaaagcauaguuguugcc

SEQ ID NO: 1866797 - RNA, 19 nt, Artificial Sequence
  Description of Artificial Sequence: Synthetic oligonucleotide
  Sense strand starting at position 1161 of SEQ ID NO: 1564261
cugauaucugaguaggccu

SEQ ID NO: 1866798 - RNA, 19 nt, Artificial Sequence
  Description of Artificial Sequence: Synthetic oligonucleotide
  Antisense strand to SEQ ID NO: 1866797
aggccuacucagauaucag

SEQ ID NO: 1866799 - RNA, 19 nt, Artificial Sequence
  Description of Artificial Sequence: Synthetic oligonucleotide
  Sense strand starting at position 1225 of SEQ ID NO: 1564261
cauuaauugggcugagcaa

SEQ ID NO: 1866800 - RNA, 19 nt, Artificial Sequence
  Description of Artificial Sequence: Synthetic oligonucleotide
  Antisense strand to SEQ ID NO: 1866799
uugcucagcccaauuaaug

SEQ ID NO: 1866801 - RNA, 19 nt, Artificial Sequence
  Description of Artificial Sequence: Synthetic oligonucleotide
  Sense strand starting at position 1276 of SEQ ID NO: 1564261
auggcuagagcuuaacuau

SEQ ID NO: 1866802 - RNA, 19 nt, Artificial Sequence
  Description of Artificial Sequence: Synthetic oligonucleotide
  Antisense strand to SEQ ID NO: 1866801
auaguuaagcucuagccau

SEQ ID NO: 1866803 - RNA, 19 nt, Artificial Sequence
  Description of Artificial Sequence: Synthetic oligonucleotide
  Sense strand starting at position 1293 of SEQ ID NO: 1564261
augcuuaagccucagguaa

SEQ ID NO: 1866804 - RNA, 19 nt, Artificial Sequence
  Description of Artificial Sequence: Synthetic oligonucleotide
  Antisense strand to SEQ ID NO: 1866803
uuaccugaggcuuaagcau

SEQ ID NO: 1866805 - RNA, 19 nt, Artificial Sequence
  Description of Artificial Sequence: Synthetic oligonucleotide
  Sense strand starting at position 1304 of SEQ ID NO: 1564261
ucagguaagccuuaucuaa

SEQ ID NO: 1866806 - RNA, 19 nt, Artificial Sequence
  Description of Artificial Sequence: Synthetic oligonucleotide
  Antisense strand to SEQ ID NO: 1866805
uuagauaaggcuuaccuga

SEQ ID NO: 1866807 - RNA, 19 nt, Artificial Sequence
  Description of Artificial Sequence: Synthetic oligonucleotide
  Sense strand starting at position 1361 of SEQ ID NO: 1564261
uggccuugucuugauuaag

SEQ ID NO: 1866808 - RNA, 19 nt, Artificial Sequence
  Description of Artificial Sequence: Synthetic oligonucleotide
  Antisense strand to SEQ ID NO: 1866807
cuuaaucaagacaaggcca

SEQ ID NO: 1866809 - RNA, 19 nt, Artificial Sequence
  Description of Artificial Sequence: Synthetic oligonucleotide
  Sense strand starting at position 1383 of SEQ ID NO: 1564261
ucaucagaccuuggcuaaa

SEQ ID NO: 1866810 - RNA, 19 nt, Artificial Sequence
  Description of Artificial Sequence: Synthetic oligonucleotide
  Antisense strand to SEQ ID NO: 1866809
uuuagccaaggucugauga

SEQ ID NO: 1866811 - RNA, 19 nt, Artificial Sequence
  Description of Artificial Sequence: Synthetic oligonucleotide
  Sense strand starting at position 1385 of SEQ ID NO: 1564261
aucagaccuuggcuaaauu

SEQ ID NO: 1866812 - RNA, 19 nt, Artificial Sequence
  Description of Artificial Sequence: Synthetic oligonucleotide
  Antisense strand to SEQ ID NO: 1866811
aauuuagccaaggucugau

SEQ ID NO: 1866813 - RNA, 19 nt, Artificial Sequence
  Description of Artificial Sequence: Synthetic oligonucleotide
  Sense strand starting at position 1416 of SEQ ID NO: 1564261
ucguaaggaucaccucaau

SEQ ID NO: 1866814 - RNA, 19 nt, Artificial Sequence
  Description of Artificial Sequence: Synthetic oligonucleotide
  Antisense strand to SEQ ID NO: 1866813
auugaggugauccuuacga

SEQ ID NO: 1866815 - RNA, 19 nt, Artificial Sequence
  Description of Artificial Sequence: Synthetic oligonucleotide
  Sense strand starting at position 1508 of SEQ ID NO: 1564261
cguacucugggucauaaag

SEQ ID NO: 1866816 - RNA, 19 nt, Artificial Sequence
  Description of Artificial Sequence: Synthetic oligonucleotide
  Antisense strand to SEQ ID NO: 1866815
cuuuaugacccagaguacg

SEQ ID NO: 1866817 - RNA, 19 nt, Artificial Sequence
  Description of Artificial Sequence: Synthetic oligonucleotide
  Sense strand starting at position 1595 of SEQ ID NO: 1564261
gccagagguacuuacagua

SEQ ID NO: 1866818 - RNA, 19 nt, Artificial Sequence
  Description of Artificial Sequence: Synthetic oligonucleotide
  Antisense strand to SEQ ID NO: 1866817
uacuguaaguaccucuggc

SEQ ID NO: 1866819 - RNA, 19 nt, Artificial Sequence
  Description of Artificial Sequence: Synthetic oligonucleotide
  Sense strand starting at position 1710 of SEQ ID NO: 1564261
caaugagaauggucuguaa

SEQ ID NO: 1866820 - RNA, 19 nt, Artificial Sequence
  Description of Artificial Sequence: Synthetic oligonucleotide
  Antisense strand to SEQ ID NO: 1866819
uuacagaccauucucauug

SEQ ID NO: 1866821 - RNA, 19 nt, Artificial Sequence
  Description of Artificial Sequence: Synthetic oligonucleotide
  Sense strand starting at position 1789 of SEQ ID NO: 1564261
agcauuccugaguacagua

SEQ ID NO: 1866822 - RNA, 19 nt, Artificial Sequence
  Description of Artificial Sequence: Synthetic oligonucleotide
  Antisense strand to SEQ ID NO: 1866821
uacuguacucaggaaugcu

SEQ ID NO: 1866823 - RNA, 19 nt, Artificial Sequence
  Description of Artificial Sequence: Synthetic oligonucleotide
  Sense strand starting at position 2030 of SEQ ID NO: 1564261
uucuaucucggccaaucaa

SEQ ID NO: 1866824 - RNA, 19 nt, Artificial Sequence
  Description of Artificial Sequence: Synthetic oligonucleotide
  Antisense strand to SEQ ID NO: 1866823
uugauuggccgagauagaa

SEQ ID NO: 1866825 - RNA, 19 nt, Artificial Sequence
  Description of Artificial Sequence: Synthetic oligonucleotide
  Sense strand starting at position 2086 of SEQ ID NO: 1564261
uguaacaaguuuguaacaa

SEQ ID NO: 1866826 - RNA, 19 nt, Artificial Sequence
  Description of Artificial Sequence: Synthetic oligonucleotide
  Antisense strand to SEQ ID NO: 1866825
uuguuacaaacuuguuaca

SEQ ID NO: 1866827 - RNA, 19 nt, Artificial Sequence
  Description of Artificial Sequence: Synthetic oligonucleotide
  Sense strand starting at position 2203 of SEQ ID NO: 1564261
gaaacagacugcuuauagu

SEQ ID NO: 1866828 - RNA, 19 nt, Artificial Sequence
  Description of Artificial Sequence: Synthetic oligonucleotide
  Antisense strand to SEQ ID NO: 1866827
acuauaagcagucuguuuc

SEQ ID NO: 1866829 - RNA, 19 nt, Artificial Sequence
  Description of Artificial Sequence: Synthetic oligonucleotide
  Sense strand starting at position 2379 of SEQ ID NO: 1564261
accgacauuugguaacaaa

SEQ ID NO: 1866830 - RNA, 19 nt, Artificial Sequence
  Description of Artificial Sequence: Synthetic oligonucleotide
  Antisense strand to SEQ ID NO: 1866829
uuuguuaccaaaugucggu

SEQ ID NO: 1866831 - RNA, 19 nt, Artificial Sequence
  Description of Artificial Sequence: Synthetic oligonucleotide
  Sense strand starting at position 2865 of SEQ ID NO: 1564261
agagaucaccaaugcacua

SEQ ID NO: 1866832 - RNA, 19 nt, Artificial Sequence
  Description of Artificial Sequence: Synthetic oligonucleotide
  Antisense strand to SEQ ID NO: 1866831
uagugcauuggugaucucu

SEQ ID NO: 1866833 - RNA, 19 nt, Artificial Sequence
  Description of Artificial Sequence: Synthetic oligonucleotide
  Sense strand starting at position 3026 of SEQ ID NO: 1564261
acugaaauacuugguuaau

SEQ ID NO: 1866834 - RNA, 19 nt, Artificial Sequence
  Description of Artificial Sequence: Synthetic oligonucleotide
  Antisense strand to SEQ ID NO: 1866833
auuaaccaaguauuucagu

SEQ ID NO: 1866835 - RNA, 19 nt, Artificial Sequence
  Description of Artificial Sequence: Synthetic oligonucleotide
  Sense strand starting at position 3027 of SEQ ID NO: 1564261
cugaaauacuugguuaaug

SEQ ID NO: 1866836 - RNA, 19 nt, Artificial Sequence
  Description of Artificial Sequence: Synthetic oligonucleotide
  Antisense strand to SEQ ID NO: 1866835
cauuaaccaaguauuucag

SEQ ID NO: 1866837 - RNA, 19 nt, Artificial Sequence
  Description of Artificial Sequence: Synthetic oligonucleotide
  Sense strand starting at position 3028 of SEQ ID NO: 1564261
ugaaauacuugguuaauga

SEQ ID NO: 1866838 - RNA, 19 nt, Artificial Sequence
  Description of Artificial Sequence: Synthetic oligonucleotide
  Antisense strand to SEQ ID NO: 1866837
ucauuaaccaaguauuuca

SEQ ID NO: 1866839 - RNA, 19 nt, Artificial Sequence
  Description of Artificial Sequence: Synthetic oligonucleotide
  Sense strand starting at position 3163 of SEQ ID NO: 1564261
uuaguuugggagcauguau

SEQ ID NO: 1866840 - RNA, 19 nt, Artificial Sequence
  Description of Artificial Sequence: Synthetic oligonucleotide
  Antisense strand to SEQ ID NO: 1866839
auacaugcucccaaacuaa

SEQ ID NO: 1866841 - RNA, 19 nt, Artificial Sequence
  Description of Artificial Sequence: Synthetic oligonucleotide
  Sense strand starting at position 3324 of SEQ ID NO: 1564261
ucaaguacacagugacuua

SEQ ID NO: 1866842 - RNA, 19 nt, Artificial Sequence
  Description of Artificial Sequence: Synthetic oligonucleotide
  Antisense strand to SEQ ID NO: 1866841
uaagucacuguguacuuga

SEQ ID NO: 1866843 - RNA, 19 nt, Artificial Sequence
  Description of Artificial Sequence: Synthetic oligonucleotide
  Sense strand starting at position 3447 of SEQ ID NO: 1564261
gugggauguaaccagucuu

SEQ ID NO: 1866844 - RNA, 19 nt, Artificial Sequence
  Description of Artificial Sequence: Synthetic oligonucleotide
  Antisense strand to SEQ ID NO: 1866843
aagacugguuacaucccac

SEQ ID NO: 1866845 - RNA, 19 nt, Artificial Sequence
  Description of Artificial Sequence: Synthetic oligonucleotide
  Sense strand starting at position 3454 of SEQ ID NO: 1564261
guaaccagucuuuacauua

SEQ ID NO: 1866846 - RNA, 19 nt, Artificial Sequence
  Description of Artificial Sequence: Synthetic oligonucleotide
  Antisense strand to SEQ ID NO: 1866845
uaauguaaagacugguuac

SEQ ID NO: 1866847 - RNA, 19 nt, Artificial Sequence
  Description of Artificial Sequence: Synthetic oligonucleotide
  Sense strand starting at position 3579 of SEQ ID NO: 1564261
gccagauauuauccugaga

SEQ ID NO: 1866848 - RNA, 19 nt, Artificial Sequence
  Description of Artificial Sequence: Synthetic oligonucleotide
  Antisense strand to SEQ ID NO: 1866847
ucucaggauaauaucuggc

SEQ ID NO: 1866849 - RNA, 19 nt, Artificial Sequence
  Description of Artificial Sequence: Synthetic oligonucleotide
  Sense strand starting at position 3692 of SEQ ID NO: 1564261
ugaguugaagccuagauua

SEQ ID NO: 1866850 - RNA, 19 nt, Artificial Sequence
  Description of Artificial Sequence: Synthetic oligonucleotide
  Antisense strand to SEQ ID NO: 1866849
uaaucuaggcuucaacuca

SEQ ID NO: 1866851 - RNA, 19 nt, Artificial Sequence
  Description of Artificial Sequence: Synthetic oligonucleotide
  Sense strand starting at position 64 of SEQ ID NO: 1564262
ccaagaagaguuggaucuu

SEQ ID NO: 1866852 - RNA, 19 nt, Artificial Sequence
  Description of Artificial Sequence: Synthetic oligonucleotide
  Antisense strand to SEQ ID NO: 1866851
aagauccaacucuucuugg

SEQ ID NO: 1866853 - RNA, 19 nt, Artificial Sequence
  Description of Artificial Sequence: Synthetic oligonucleotide
  Sense strand starting at position 76 of SEQ ID NO: 1564262
ggaucuugagcugauguuu

SEQ ID NO: 1866854 - RNA, 19 nt, Artificial Sequence
  Description of Artificial Sequence: Synthetic oligonucleotide
  Antisense strand to SEQ ID NO: 1866853
aaacaucagcucaagaucc

SEQ ID NO: 1866855 - RNA, 19 nt, Artificial Sequence
  Description of Artificial Sequence: Synthetic oligonucleotide
  Sense strand starting at position 82 of SEQ ID NO: 1564262
ugagcugauguuugaagga

SEQ ID NO: 1866856 - RNA, 19 nt, Artificial Sequence
  Description of Artificial Sequence: Synthetic oligonucleotide
  Antisense strand to SEQ ID NO: 1866855
uccuucaaacaucagcuca

SEQ ID NO: 1866857 - RNA, 19 nt, Artificial Sequence
  Description of Artificial Sequence: Synthetic oligonucleotide
  Sense strand starting at position 712 of SEQ ID NO: 1564262
gagguuuacccaggaccua

SEQ ID NO: 1866858 - RNA, 19 nt, Artificial Sequence
  Description of Artificial Sequence: Synthetic oligonucleotide
  Antisense strand to SEQ ID NO: 1866857
uagguccuggguaaaccuc

SEQ ID NO: 1866859 - RNA, 19 nt, Artificial Sequence
  Description of Artificial Sequence: Synthetic oligonucleotide
  Sense strand starting at position 1135 of SEQ ID NO: 1564262
ugcaaagauugaucauucu

SEQ ID NO: 1866860 - RNA, 19 nt, Artificial Sequence
  Description of Artificial Sequence: Synthetic oligonucleotide
  Antisense strand to SEQ ID NO: 1866859
agaaugaucaaucuuugca

SEQ ID NO: 1866861 - RNA, 19 nt, Artificial Sequence
  Description of Artificial Sequence: Synthetic oligonucleotide
  Sense strand starting at position 1220 of SEQ ID NO: 1564262
cuccgagaacagcauuaaa

SEQ ID NO: 1866862 - RNA, 19 nt, Artificial Sequence
  Description of Artificial Sequence: Synthetic oligonucleotide
  Antisense strand to SEQ ID NO: 1866861
uuuaaugcuguucucggag

SEQ ID NO: 1866863 - RNA, 19 nt, Artificial Sequence
  Description of Artificial Sequence: Synthetic oligonucleotide
  Sense strand starting at position 1293 of SEQ ID NO: 1564262
uguuguuaugaaugacuaa

SEQ ID NO: 1866864 - RNA, 19 nt, Artificial Sequence
  Description of Artificial Sequence: Synthetic oligonucleotide
  Antisense strand to SEQ ID NO: 1866863
uuagucauucauaacaaca

SEQ ID NO: 1866865 - RNA, 19 nt, Artificial Sequence
  Description of Artificial Sequence: Synthetic oligonucleotide
  Sense strand starting at position 1319 of SEQ ID NO: 1564262
ggaguauuaauaugagcuc

SEQ ID NO: 1866866 - RNA, 19 nt, Artificial Sequence
  Description of Artificial Sequence: Synthetic oligonucleotide
  Antisense strand to SEQ ID NO: 1866865
gagcucauauuaauacucc

SEQ ID NO: 1866867 - RNA, 19 nt, Artificial Sequence
  Description of Artificial Sequence: Synthetic oligonucleotide
  Sense strand starting at position 1322 of SEQ ID NO: 1564262
guauuaauaugagcucuaa

SEQ ID NO: 1866868 - RNA, 19 nt, Artificial Sequence
  Description of Artificial Sequence: Synthetic oligonucleotide
  Antisense strand to SEQ ID NO: 1866867
uuagagcucauauuaauac

SEQ ID NO: 1866869 - RNA, 19 nt, Artificial Sequence
  Description of Artificial Sequence: Synthetic oligonucleotide
  Sense strand starting at position 1326 of SEQ ID NO: 1564262
uaauaugagcucuaaguga

SEQ ID NO: 1866870 - RNA, 19 nt, Artificial Sequence
  Description of Artificial Sequence: Synthetic oligonucleotide
  Antisense strand to SEQ ID NO: 1866869
ucacuuagagcucauauua

SEQ ID NO: 1866871 - RNA, 19 nt, Artificial Sequence
  Description of Artificial Sequence: Synthetic oligonucleotide
  Sense strand starting at position 1374 of SEQ ID NO: 1564262
ccaccauacccuugagaag

SEQ ID NO: 1866872 - RNA, 19 nt, Artificial Sequence
  Description of Artificial Sequence: Synthetic oligonucleotide
  Antisense strand to SEQ ID NO: 1866871
cuucucaaggguauggugg

SEQ ID NO: 1866873 - RNA, 19 nt, Artificial Sequence
  Description of Artificial Sequence: Synthetic oligonucleotide
  Sense strand starting at position 1401 of SEQ ID NO: 1564262
ugaguuugucgguuccagu

SEQ ID NO: 1866874 - RNA, 19 nt, Artificial Sequence
  Description of Artificial Sequence: Synthetic oligonucleotide
  Antisense strand to SEQ ID NO: 1866873
acuggaaccgacaaacuca

SEQ ID NO: 1866875 - RNA, 19 nt, Artificial Sequence
  Description of Artificial Sequence: Synthetic oligonucleotide
  Sense strand starting at position 1402 of SEQ ID NO: 1564262
gaguuugucgguuccaguu

SEQ ID NO: 1866876 - RNA, 19 nt, Artificial Sequence
  Description of Artificial Sequence: Synthetic oligonucleotide
  Antisense strand to SEQ ID NO: 1866875
aacuggaaccgacaaacuc

SEQ ID NO: 1866877 - RNA, 19 nt, Artificial Sequence
  Description of Artificial Sequence: Synthetic oligonucleotide
  Sense strand starting at position 1446 of SEQ ID NO: 1564262
aguauaugauaaccacagu

SEQ ID NO: 1866878 - RNA, 19 nt, Artificial Sequence
  Description of Artificial Sequence: Synthetic oligonucleotide
  Antisense strand to SEQ ID NO: 1866877
acugugguuaucauauacu

SEQ ID NO: 1866879 - RNA, 19 nt, Artificial Sequence
  Description of Artificial Sequence: Synthetic oligonucleotide
  Sense strand starting at position 1471 of SEQ ID NO: 1564262
aaguaaauauugccaggga

SEQ ID NO: 1866880 - RNA, 19 nt, Artificial Sequence
  Description of Artificial Sequence: Synthetic oligonucleotide
  Antisense strand to SEQ ID NO: 1866879
ucccuggcaauauuuacuu

SEQ ID NO: 1866881 - RNA, 19 nt, Artificial Sequence
  Description of Artificial Sequence: Synthetic oligonucleotide
  Sense strand starting at position 1485 of SEQ ID NO: 1564262
agggaauucugggugguag

SEQ ID NO: 1866882 - RNA, 19 nt, Artificial Sequence
  Description of Artificial Sequence: Synthetic oligonucleotide
  Antisense strand to SEQ ID NO: 1866881
cuaccacccagaauucccu

SEQ ID NO: 1866883 - RNA, 19 nt, Artificial Sequence
  Description of Artificial Sequence: Synthetic oligonucleotide
  Sense strand starting at position 1486 of SEQ ID NO: 1564262
gggaauucugggugguaga

SEQ ID NO: 1866884 - RNA, 19 nt, Artificial Sequence
  Description of Artificial Sequence: Synthetic oligonucleotide
  Antisense strand to SEQ ID NO: 1866883
ucuaccacccagaauuccc

SEQ ID NO: 1866885 - RNA, 19 nt, Artificial Sequence
  Description of Artificial Sequence: Synthetic oligonucleotide
  Sense strand starting at position 1487 of SEQ ID NO: 1564262
ggaauucugggugguagag

SEQ ID NO: 1866886 - RNA, 19 nt, Artificial Sequence
  Description of Artificial Sequence: Synthetic oligonucleotide
  Antisense strand to SEQ ID NO: 1866885
cucuaccacccagaauucc

SEQ ID NO: 1866887 - RNA, 19 nt, Artificial Sequence
  Description of Artificial Sequence: Synthetic oligonucleotide
  Sense strand starting at position 1499 of SEQ ID NO: 1564262
gguagagacucauuaaagc

SEQ ID NO: 1866888 - RNA, 19 nt, Artificial Sequence
  Description of Artificial Sequence: Synthetic oligonucleotide
  Antisense strand to SEQ ID NO: 1866887
gcuuuaaugagucucuacc

SEQ ID NO: 1866889 - RNA, 19 nt, Artificial Sequence
  Description of Artificial Sequence: Synthetic oligonucleotide
  Sense strand starting at position 1711 of SEQ ID NO: 1564262
auguuuauaucagugacag

SEQ ID NO: 1866890 - RNA, 19 nt, Artificial Sequence
  Description of Artificial Sequence: Synthetic oligonucleotide
  Antisense strand to SEQ ID NO: 1866889
cugucacugauauaaacau

SEQ ID NO: 1866891 - RNA, 19 nt, Artificial Sequence
  Description of Artificial Sequence: Synthetic oligonucleotide
  Sense strand starting at position 1712 of SEQ ID NO: 1564262
uguuuauaucagugacagg

SEQ ID NO: 1866892 - RNA, 19 nt, Artificial Sequence
  Description of Artificial Sequence: Synthetic oligonucleotide
  Antisense strand to SEQ ID NO: 1866891
ccugucacugauauaaaca

SEQ ID NO: 1866893 - RNA, 19 nt, Artificial Sequence
  Description of Artificial Sequence: Synthetic oligonucleotide
  Sense strand starting at position 1729 of SEQ ID NO: 1564262
ggaaauauguaucccacuu

SEQ ID NO: 1866894 - RNA, 19 nt, Artificial Sequence
  Description of Artificial Sequence: Synthetic oligonucleotide
  Antisense strand to SEQ ID NO: 1866893
aagugggauacauauuucc

SEQ ID NO: 1866895 - RNA, 19 nt, Artificial Sequence
  Description of Artificial Sequence: Synthetic oligonucleotide
  Sense strand starting at position 1813 of SEQ ID NO: 1564262
aagugcuuucccuagagga

SEQ ID NO: 1866896 - RNA, 19 nt, Artificial Sequence
  Description of Artificial Sequence: Synthetic oligonucleotide
  Antisense strand to SEQ ID NO: 1866895
uccucuagggaaagcacuu

SEQ ID NO: 1866897 - RNA, 19 nt, Artificial Sequence
  Description of Artificial Sequence: Synthetic oligonucleotide
  Sense strand starting at position 1815 of SEQ ID NO: 1564262
gugcuuucccuagaggaga

SEQ ID NO: 1866898 - RNA, 19 nt, Artificial Sequence
  Description of Artificial Sequence: Synthetic oligonucleotide
  Antisense strand to SEQ ID NO: 1866897
ucuccucuagggaaagcac

SEQ ID NO: 1866899 - RNA, 19 nt, Artificial Sequence
  Description of Artificial Sequence: Synthetic oligonucleotide
  Sense strand starting at position 1984 of SEQ ID NO: 1564262
acaucagagcuguaaucca

SEQ ID NO: 1866900 - RNA, 19 nt, Artificial Sequence
  Description of Artificial Sequence: Synthetic oligonucleotide
  Antisense strand to SEQ ID NO: 1866899
uggauuacagcucugaugu

SEQ ID NO: 1866901 - RNA, 19 nt, Artificial Sequence
  Description of Artificial Sequence: Synthetic oligonucleotide
  Sense strand starting at position 2560 of SEQ ID NO: 1564262
aucagaguccauugaagug

SEQ ID NO: 1866902 - RNA, 19 nt, Artificial Sequence
  Description of Artificial Sequence: Synthetic oligonucleotide
  Antisense strand to SEQ ID NO: 1866901
cacuucaauggacucugau

SEQ ID NO: 1866903 - RNA, 19 nt, Artificial Sequence
  Description of Artificial Sequence: Synthetic oligonucleotide
  Sense strand starting at position 2732 of SEQ ID NO: 1564262
uggcuuauacuagagugaa

SEQ ID NO: 1866904 - RNA, 19 nt, Artificial Sequence
  Description of Artificial Sequence: Synthetic oligonucleotide
  Antisense strand to SEQ ID NO: 1866903
uucacucuaguauaagcca

SEQ ID NO: 1866905 - RNA, 19 nt, Artificial Sequence
  Description of Artificial Sequence: Synthetic oligonucleotide
  Sense strand starting at position 3083 of SEQ ID NO: 1564262
cuacccuaucagcaguauu

SEQ ID NO: 1866906 - RNA, 19 nt, Artificial Sequence
  Description of Artificial Sequence: Synthetic oligonucleotide
  Antisense strand to SEQ ID NO: 1866905
aauacugcugauaggguag

SEQ ID NO: 1866907 - RNA, 19 nt, Artificial Sequence
  Description of Artificial Sequence: Synthetic oligonucleotide
  Sense strand starting at position 3086 of SEQ ID NO: 1564262
cccuaucagcaguauuauu

SEQ ID NO: 1866908 - RNA, 19 nt, Artificial Sequence
  Description of Artificial Sequence: Synthetic oligonucleotide
  Antisense strand to SEQ ID NO: 1866907
aauaauacugcugauaggg

SEQ ID NO: 1866909 - RNA, 19 nt, Artificial Sequence
  Description of Artificial Sequence: Synthetic oligonucleotide
  Sense strand starting at position 3155 of SEQ ID NO: 1564262
uguccaaaggcauacuauu

SEQ ID NO: 1866910 - RNA, 19 nt, Artificial Sequence
  Description of Artificial Sequence: Synthetic oligonucleotide
  Antisense strand to SEQ ID NO: 1866909
aauaguaugccuuuggaca

SEQ ID NO: 1866911 - RNA, 19 nt, Artificial Sequence
  Description of Artificial Sequence: Synthetic oligonucleotide
  Sense strand starting at position 3230 of SEQ ID NO: 1564262
accagagacuauguaguau

SEQ ID NO: 1866912 - RNA, 19 nt, Artificial Sequence
  Description of Artificial Sequence: Synthetic oligonucleotide
  Antisense strand to SEQ ID NO: 1866911
auacuacauagucucuggu

SEQ ID NO: 1866913 - RNA, 19 nt, Artificial Sequence
  Description of Artificial Sequence: Synthetic oligonucleotide
  Sense strand starting at position 3243 of SEQ ID NO: 1564262
uaguauuaugguuacagca

SEQ ID NO: 1866914 - RNA, 19 nt, Artificial Sequence
  Description of Artificial Sequence: Synthetic oligonucleotide
  Antisense strand to SEQ ID NO: 1866913
ugcuguaaccauaauacua

SEQ ID NO: 1866915 - RNA, 19 nt, Artificial Sequence
  Description of Artificial Sequence: Synthetic oligonucleotide
  Sense strand starting at position 3454 of SEQ ID NO: 1564262
auaguuugaucaccucaag

SEQ ID NO: 1866916 - RNA, 19 nt, Artificial Sequence
  Description of Artificial Sequence: Synthetic oligonucleotide
  Antisense strand to SEQ ID NO: 1866915
cuugaggugaucaaacuau

SEQ ID NO: 1866917 - RNA, 19 nt, Artificial Sequence
  Description of Artificial Sequence: Synthetic oligonucleotide
  Sense strand starting at position 3457 of SEQ ID NO: 1564262
guuugaucaccucaaguua

SEQ ID NO: 1866918 - RNA, 19 nt, Artificial Sequence
  Description of Artificial Sequence: Synthetic oligonucleotide
  Antisense strand to SEQ ID NO: 1866917
uaacuugaggugaucaaac

SEQ ID NO: 1866919 - RNA, 19 nt, Artificial Sequence
  Description of Artificial Sequence: Synthetic oligonucleotide
  Sense strand starting at position 3486 of SEQ ID NO: 1564262
gguguacucagauagaccu

SEQ ID NO: 1866920 - RNA, 19 nt, Artificial Sequence
  Description of Artificial Sequence: Synthetic oligonucleotide
  Antisense strand to SEQ ID NO: 1866919
aggucuaucugaguacacc

SEQ ID NO: 1866921 - RNA, 19 nt, Artificial Sequence
  Description of Artificial Sequence: Synthetic oligonucleotide
  Sense strand starting at position 3599 of SEQ ID NO: 1564262
cucauagagucaucaugag

SEQ ID NO: 1866922 - RNA, 19 nt, Artificial Sequence
  Description of Artificial Sequence: Synthetic oligonucleotide
  Antisense strand to SEQ ID NO: 1866921
cucaugaugacucuaugag

SEQ ID NO: 1866923 - RNA, 19 nt, Artificial Sequence
  Description of Artificial Sequence: Synthetic oligonucleotide
  Sense strand starting at position 3864 of SEQ ID NO: 1564262
uuuaguuuccuguugcagu

SEQ ID NO: 1866924 - RNA, 19 nt, Artificial Sequence
  Description of Artificial Sequence: Synthetic oligonucleotide
  Antisense strand to SEQ ID NO: 1866923
acugcaacaggaaacuaaa

SEQ ID NO: 1866925 - RNA, 19 nt, Artificial Sequence
  Description of Artificial Sequence: Synthetic oligonucleotide
  Sense strand starting at position 3880 of SEQ ID NO: 1564262
agucauuagcaagaaaguc

SEQ ID NO: 1866926 - RNA, 19 nt, Artificial Sequence
  Description of Artificial Sequence: Synthetic oligonucleotide
  Antisense strand to SEQ ID NO: 1866925
gacuuucuugcuaaugacu

SEQ ID NO: 1866927 - RNA, 19 nt, Artificial Sequence
  Description of Artificial Sequence: Synthetic oligonucleotide
  Sense strand starting at position 3888 of SEQ ID NO: 1564262
gcaagaaagucucuugacu

SEQ ID NO: 1866928 - RNA, 19 nt, Artificial Sequence
  Description of Artificial Sequence: Synthetic oligonucleotide
  Antisense strand to SEQ ID NO: 1866927
agucaagagacuuucuugc

SEQ ID NO: 1866929 - RNA, 19 nt, Artificial Sequence
  Description of Artificial Sequence: Synthetic oligonucleotide
  Sense strand starting at position 3933 of SEQ ID NO: 1564262
gaacccuaucaugguagaa

SEQ ID NO: 1866930 - RNA, 19 nt, Artificial Sequence
  Description of Artificial Sequence: Synthetic oligonucleotide
  Antisense strand to SEQ ID NO: 1866929
uucuaccaugauaggguuc

SEQ ID NO: 1866931 - RNA, 19 nt, Artificial Sequence
  Description of Artificial Sequence: Synthetic oligonucleotide
  Sense strand starting at position 347 of SEQ ID NO: 1564263
gugccugugcuguccuuaa

SEQ ID NO: 1866932 - RNA, 19 nt, Artificial Sequence
  Description of Artificial Sequence: Synthetic oligonucleotide
  Antisense strand to SEQ ID NO: 1866931
uuaaggacagcacaggcac

SEQ ID NO: 1866933 - RNA, 19 nt, Artificial Sequence
  Description of Artificial Sequence: Synthetic oligonucleotide
  Sense strand starting at position 349 of SEQ ID NO: 1564263
gccugugcuguccuuaaug

SEQ ID NO: 1866934 - RNA, 19 nt, Artificial Sequence
  Description of Artificial Sequence: Synthetic oligonucleotide
  Antisense strand to SEQ ID NO: 1866933
cauuaaggacagcacaggc

SEQ ID NO: 1866935 - RNA, 19 nt, Artificial Sequence
  Description of Artificial Sequence: Synthetic oligonucleotide
  Sense strand starting at position 378 of SEQ ID NO: 1564263
ccagccuucccucagugaa

SEQ ID NO: 1866936 - RNA, 19 nt, Artificial Sequence
  Description of Artificial Sequence: Synthetic oligonucleotide
  Antisense strand to SEQ ID NO: 1866935
uucacugagggaaggcugg

SEQ ID NO: 1866937 - RNA, 19 nt, Artificial Sequence
  Description of Artificial Sequence: Synthetic oligonucleotide
  Sense strand starting at position 380 of SEQ ID NO: 1564263
agccuucccucagugaacu

SEQ ID NO: 1866938 - RNA, 19 nt, Artificial Sequence
  Description of Artificial Sequence: Synthetic oligonucleotide
  Antisense strand to SEQ ID NO: 1866937
aguucacugagggaaggcu

SEQ ID NO: 1866939 - RNA, 19 nt, Artificial Sequence
  Description of Artificial Sequence: Synthetic oligonucleotide
  Sense strand starting at position 391 of SEQ ID NO: 1564263
agugaacuggucuggcaag

SEQ ID NO: 1866940 - RNA, 19 nt, Artificial Sequence
  Description of Artificial Sequence: Synthetic oligonucleotide
  Antisense strand to SEQ ID NO: 1866939
cuugccagaccaguucacu

SEQ ID NO: 1866941 - RNA, 19 nt, Artificial Sequence
  Description of Artificial Sequence: Synthetic oligonucleotide
  Sense strand starting at position 473 of SEQ ID NO: 1564263
uggcuuaugcuggaguuga

SEQ ID NO: 1866942 - RNA, 19 nt, Artificial Sequence
  Description of Artificial Sequence: Synthetic oligonucleotide
  Antisense strand to SEQ ID NO: 1866941
ucaacuccagcauaagcca

SEQ ID NO: 1866943 - RNA, 19 nt, Artificial Sequence
  Description of Artificial Sequence: Synthetic oligonucleotide
  Sense strand starting at position 521 of SEQ ID NO: 1564263
cccugcaaguuucuaauga

SEQ ID NO: 1866944 - RNA, 19 nt, Artificial Sequence
  Description of Artificial Sequence: Synthetic oligonucleotide
  Antisense strand to SEQ ID NO: 1866943
ucauuagaaacuugcaggg

SEQ ID NO: 1866945 - RNA, 19 nt, Artificial Sequence
  Description of Artificial Sequence: Synthetic oligonucleotide
  Sense strand starting at position 582 of SEQ ID NO: 1564263
ugcuguuugccagugguuu

SEQ ID NO: 1866946 - RNA, 19 nt, Artificial Sequence
  Description of Artificial Sequence: Synthetic oligonucleotide
  Antisense strand to SEQ ID NO: 1866945
aaaccacuggcaaacagca

SEQ ID NO: 1866947 - RNA, 19 nt, Artificial Sequence
  Description of Artificial Sequence: Synthetic oligonucleotide
  Sense strand starting at position 684 of SEQ ID NO: 1564263
guuugucugcuguacaaau

SEQ ID NO: 1866948 - RNA, 19 nt, Artificial Sequence
  Description of Artificial Sequence: Synthetic oligonucleotide
  Antisense strand to SEQ ID NO: 1866947
auuuguacagcagacaaac

SEQ ID NO: 1866949 - RNA, 19 nt, Artificial Sequence
  Description of Artificial Sequence: Synthetic oligonucleotide
  Sense strand starting at position 837 of SEQ ID NO: 1564263
ccgcauccucucugaauuu

SEQ ID NO: 1866950 - RNA, 19 nt, Artificial Sequence
  Description of Artificial Sequence: Synthetic oligonucleotide
  Antisense strand to SEQ ID NO: 1866949
aaauucagagaggaugcgg

SEQ ID NO: 1866951 - RNA, 19 nt, Artificial Sequence
  Description of Artificial Sequence: Synthetic oligonucleotide
  Sense strand starting at position 1253 of SEQ ID NO: 1564263
gugccacucuaaucagacu

SEQ ID NO: 1866952 - RNA, 19 nt, Artificial Sequence
  Description of Artificial Sequence: Synthetic oligonucleotide
  Antisense strand to SEQ ID NO: 1866951
agucugauuagaguggcac

SEQ ID NO: 1866953 - RNA, 19 nt, Artificial Sequence
  Description of Artificial Sequence: Synthetic oligonucleotide
  Sense strand starting at position 1346 of SEQ ID NO: 1564263
cucaauccugcccagaguu

SEQ ID NO: 1866954 - RNA, 19 nt, Artificial Sequence
  Description of Artificial Sequence: Synthetic oligonucleotide
  Antisense strand to SEQ ID NO: 1866953
aacucugggcaggauugag

SEQ ID NO: 1866955 - RNA, 19 nt, Artificial Sequence
  Description of Artificial Sequence: Synthetic oligonucleotide
  Sense strand starting at position 1390 of SEQ ID NO: 1564263
augagaaugacgcagugau

SEQ ID NO: 1866956 - RNA, 19 nt, Artificial Sequence
  Description of Artificial Sequence: Synthetic oligonucleotide
  Antisense strand to SEQ ID NO: 1866955
aucacugcgucauucucau

SEQ ID NO: 1866957 - RNA, 19 nt, Artificial Sequence
  Description of Artificial Sequence: Synthetic oligonucleotide
  Sense strand starting at position 1508 of SEQ ID NO: 1564263
gguucuacucuugaguaca

SEQ ID NO: 1866958 - RNA, 19 nt, Artificial Sequence
  Description of Artificial Sequence: Synthetic oligonucleotide
  Antisense strand to SEQ ID NO: 1866957
uguacucaagaguagaacc

SEQ ID NO: 1866959 - RNA, 19 nt, Artificial Sequence
  Description of Artificial Sequence: Synthetic oligonucleotide
  Sense strand starting at position 1595 of SEQ ID NO: 1564263
cccagaguuccggacaguu

SEQ ID NO: 1866960 - RNA, 19 nt, Artificial Sequence
  Description of Artificial Sequence: Synthetic oligonucleotide
  Antisense strand to SEQ ID NO: 1866959
aacuguccggaacucuggg

SEQ ID NO: 1866961 - RNA, 19 nt, Artificial Sequence
  Description of Artificial Sequence: Synthetic oligonucleotide
  Sense strand starting at position 2013 of SEQ ID NO: 1564263
ggacgcuucgaugacggau

SEQ ID NO: 1866962 - RNA, 19 nt, Artificial Sequence
  Description of Artificial Sequence: Synthetic oligonucleotide
  Antisense strand to SEQ ID NO: 1866961
auccgucaucgaagcgucc

SEQ ID NO: 1866963 - RNA, 19 nt, Artificial Sequence
  Description of Artificial Sequence: Synthetic oligonucleotide
  Sense strand starting at position 2205 of SEQ ID NO: 1564263
uuaccuguuguccagcuua

SEQ ID NO: 1866964 - RNA, 19 nt, Artificial Sequence
  Description of Artificial Sequence: Synthetic oligonucleotide
  Antisense strand to SEQ ID NO: 1866963
uaagcuggacaacagguaa

SEQ ID NO: 1866965 - RNA, 19 nt, Artificial Sequence
  Description of Artificial Sequence: Synthetic oligonucleotide
  Sense strand starting at position 2571 of SEQ ID NO: 1564263
aacccagacucggagauau

SEQ ID NO: 1866966 - RNA, 19 nt, Artificial Sequence
  Description of Artificial Sequence: Synthetic oligonucleotide
  Antisense strand to SEQ ID NO: 1866965
auaucuccgagucuggguu

SEQ ID NO: 1866967 - RNA, 19 nt, Artificial Sequence
  Description of Artificial Sequence: Synthetic oligonucleotide
  Sense strand starting at position 2669 of SEQ ID NO: 1564263
ggcuuuguggcccaguuaa

SEQ ID NO: 1866968 - RNA, 19 nt, Artificial Sequence
  Description of Artificial Sequence: Synthetic oligonucleotide
  Antisense strand to SEQ ID NO: 1866967
uuaacugggccacaaagcc

SEQ ID NO: 1866969 - RNA, 19 nt, Artificial Sequence
  Description of Artificial Sequence: Synthetic oligonucleotide
  Sense strand starting at position 2765 of SEQ ID NO: 1564263
gaaggcucuggagaucgau

SEQ ID NO: 1866970 - RNA, 19 nt, Artificial Sequence
  Description of Artificial Sequence: Synthetic oligonucleotide
  Antisense strand to SEQ ID NO: 1866969
aucgaucuccagagccuuc

SEQ ID NO: 1866971 - RNA, 19 nt, Artificial Sequence
  Description of Artificial Sequence: Synthetic oligonucleotide
  Sense strand starting at position 2768 of SEQ ID NO: 1564263
ggcucuggagaucgauaaa

SEQ ID NO: 1866972 - RNA, 19 nt, Artificial Sequence
  Description of Artificial Sequence: Synthetic oligonucleotide
  Antisense strand to SEQ ID NO: 1866971
uuuaucgaucuccagagcc

SEQ ID NO: 1866973 - RNA, 19 nt, Artificial Sequence
  Description of Artificial Sequence: Synthetic oligonucleotide
  Sense strand starting at position 2796 of SEQ ID NO: 1564263
ggagcugauuucuagagaa

SEQ ID NO: 1866974 - RNA, 19 nt, Artificial Sequence
  Description of Artificial Sequence: Synthetic oligonucleotide
  Antisense strand to SEQ ID NO: 1866973
uucucuagaaaucagcucc

SEQ ID NO: 1866975 - RNA, 19 nt, Artificial Sequence
  Description of Artificial Sequence: Synthetic oligonucleotide
  Sense strand starting at position 2934 of SEQ ID NO: 1564263
augucauacucccuggaca

SEQ ID NO: 1866976 - RNA, 19 nt, Artificial Sequence
  Description of Artificial Sequence: Synthetic oligonucleotide
  Antisense strand to SEQ ID NO: 1866975
uguccagggaguaugacau

SEQ ID NO: 1866977 - RNA, 19 nt, Artificial Sequence
  Description of Artificial Sequence: Synthetic oligonucleotide
  Sense strand starting at position 3147 of SEQ ID NO: 1564263
gggaguacuugucugugga

SEQ ID NO: 1866978 - RNA, 19 nt, Artificial Sequence
  Description of Artificial Sequence: Synthetic oligonucleotide
  Antisense strand to SEQ ID NO: 1866977
uccacagacaaguacuccc

SEQ ID NO: 1866979 - RNA, 19 nt, Artificial Sequence
  Description of Artificial Sequence: Synthetic oligonucleotide
  Sense strand starting at position 3148 of SEQ ID NO: 1564263
ggaguacuugucuguggac

SEQ ID NO: 1866980 - RNA, 19 nt, Artificial Sequence
  Description of Artificial Sequence: Synthetic oligonucleotide
  Antisense strand to SEQ ID NO: 1866979
guccacagacaaguacucc

SEQ ID NO: 1866981 - RNA, 19 nt, Artificial Sequence
  Description of Artificial Sequence: Synthetic oligonucleotide
  Sense strand starting at position 3179 of SEQ ID NO: 1564263
agaucugugacaugcaugu

SEQ ID NO: 1866982 - RNA, 19 nt, Artificial Sequence
  Description of Artificial Sequence: Synthetic oligonucleotide
  Antisense strand to SEQ ID NO: 1866981
acaugcaugucacagaucu

SEQ ID NO: 1866983 - RNA, 19 nt, Artificial Sequence
  Description of Artificial Sequence: Synthetic oligonucleotide
  Sense strand starting at position 3183 of SEQ ID NO: 1564263
cugugacaugcauguaaug

SEQ ID NO: 1866984 - RNA, 19 nt, Artificial Sequence
  Description of Artificial Sequence: Synthetic oligonucleotide
  Antisense strand to SEQ ID NO: 1866983
cauuacaugcaugucacag

SEQ ID NO: 1866985 - RNA, 19 nt, Artificial Sequence
  Description of Artificial Sequence: Synthetic oligonucleotide
  Sense strand starting at position 3185 of SEQ ID NO: 1564263
gugacaugcauguaaugca

SEQ ID NO: 1866986 - RNA, 19 nt, Artificial Sequence
  Description of Artificial Sequence: Synthetic oligonucleotide
  Antisense strand to SEQ ID NO: 1866985
ugcauuacaugcaugucac

SEQ ID NO: 1866987 - RNA, 19 nt, Artificial Sequence
  Description of Artificial Sequence: Synthetic oligonucleotide
  Sense strand starting at position 3204 of SEQ ID NO: 1564263
ugcacagguccaugcuaau

SEQ ID NO: 1866988 - RNA, 19 nt, Artificial Sequence
  Description of Artificial Sequence: Synthetic oligonucleotide
  Antisense strand to SEQ ID NO: 1866987
auuagcauggaccugugca

SEQ ID NO: 1866989 - RNA, 19 nt, Artificial Sequence
  Description of Artificial Sequence: Synthetic oligonucleotide
  Sense strand starting at position 3222 of SEQ ID NO: 1564263
ucuacagaugcauauguau

SEQ ID NO: 1866990 - RNA, 19 nt, Artificial Sequence
  Description of Artificial Sequence: Synthetic oligonucleotide
  Antisense strand to SEQ ID NO: 1866989
auacauaugcaucuguaga

SEQ ID NO: 1866991 - RNA, 19 nt, Artificial Sequence
  Description of Artificial Sequence: Synthetic oligonucleotide
  Sense strand starting at position 3228 of SEQ ID NO: 1564263
gaugcauauguauggagga

SEQ ID NO: 1866992 - RNA, 19 nt, Artificial Sequence
  Description of Artificial Sequence: Synthetic oligonucleotide
  Antisense strand to SEQ ID NO: 1866991
uccuccauacauaugcauc

SEQ ID NO: 1866993 - RNA, 19 nt, Artificial Sequence
  Description of Artificial Sequence: Synthetic oligonucleotide
  Sense strand starting at position 3274 of SEQ ID NO: 1564263
ggugaacauguaugggaga

SEQ ID NO: 1866994 - RNA, 19 nt, Artificial Sequence
  Description of Artificial Sequence: Synthetic oligonucleotide
  Antisense strand to SEQ ID NO: 1866993
ucucccauacauguucacc

SEQ ID NO: 1866995 - RNA, 19 nt, Artificial Sequence
  Description of Artificial Sequence: Synthetic oligonucleotide
  Sense strand starting at position 3331 of SEQ ID NO: 1564263
ggguauuggagugagcacu

SEQ ID NO: 1866996 - RNA, 19 nt, Artificial Sequence
  Description of Artificial Sequence: Synthetic oligonucleotide
  Antisense strand to SEQ ID NO: 1866995
agugcucacuccaauaccc

SEQ ID NO: 1866997 - RNA, 19 nt, Artificial Sequence
  Description of Artificial Sequence: Synthetic oligonucleotide
  Sense strand starting at position 3622 of SEQ ID NO: 1564263
agaugaggugauuguucca

SEQ ID NO: 1866998 - RNA, 19 nt, Artificial Sequence
  Description of Artificial Sequence: Synthetic oligonucleotide
  Antisense strand to SEQ ID NO: 1866997
uggaacaaucaccucaucu

SEQ ID NO: 1866999 - RNA, 19 nt, Artificial Sequence
  Description of Artificial Sequence: Synthetic oligonucleotide
  Sense strand starting at position 3625 of SEQ ID NO: 1564263
ugaggugauuguuccauaa

SEQ ID NO: 1867000 - RNA, 19 nt, Artificial Sequence
  Description of Artificial Sequence: Synthetic oligonucleotide
  Antisense strand to SEQ ID NO: 1866999
uuauggaacaaucaccuca

SEQ ID NO: 1867001 - RNA, 19 nt, Artificial Sequence
  Description of Artificial Sequence: Synthetic oligonucleotide
  Sense strand starting at position 3648 of SEQ ID NO: 1564263
aguuacacguuuccauuaa

SEQ ID NO: 1867002 - RNA, 19 nt, Artificial Sequence
  Description of Artificial Sequence: Synthetic oligonucleotide
  Antisense strand to SEQ ID NO: 1867001
uuaauggaaacguguaacu

SEQ ID NO: 1867003 - RNA, 19 nt, Artificial Sequence
  Description of Artificial Sequence: Synthetic oligonucleotide
  Sense strand starting at position 3818 of SEQ ID NO: 1564263
aggugaugcaaccgggaau

SEQ ID NO: 1867004 - RNA, 19 nt, Artificial Sequence
  Description of Artificial Sequence: Synthetic oligonucleotide
  Antisense strand to SEQ ID NO: 1867003
auucccgguugcaucaccu

SEQ ID NO: 1867005 - RNA, 19 nt, Artificial Sequence
  Description of Artificial Sequence: Synthetic oligonucleotide
  Sense strand starting at position 3819 of SEQ ID NO: 1564263
ggugaugcaaccgggaaua

SEQ ID NO: 1867006 - RNA, 19 nt, Artificial Sequence
  Description of Artificial Sequence: Synthetic oligonucleotide
  Antisense strand to SEQ ID NO: 1867005
uauucccgguugcaucacc

SEQ ID NO: 1867007 - RNA, 19 nt, Artificial Sequence
  Description of Artificial Sequence: Synthetic oligonucleotide
  Sense strand starting at position 3821 of SEQ ID NO: 1564263
ugaugcaaccgggaauauu

SEQ ID NO: 1867008 - RNA, 19 nt, Artificial Sequence
  Description of Artificial Sequence: Synthetic oligonucleotide
  Antisense strand to SEQ ID NO: 1867007
aauauucccgguugcauca

SEQ ID NO: 1867009 - RNA, 19 nt, Artificial Sequence
  Description of Artificial Sequence: Synthetic oligonucleotide
  Sense strand starting at position 3938 of SEQ ID NO: 1564263
caggcugugguccaaagaa

SEQ ID NO: 1867010 - RNA, 19 nt, Artificial Sequence
  Description of Artificial Sequence: Synthetic oligonucleotide
  Antisense strand to SEQ ID NO: 1867009
uucuuuggaccacagccug

SEQ ID NO: 1867011 - RNA, 19 nt, Artificial Sequence
  Description of Artificial Sequence: Synthetic oligonucleotide
  Sense strand starting at position 2 of SEQ ID NO: 1564264
ugcuguuugccagugguuu

SEQ ID NO: 1867012 - RNA, 19 nt, Artificial Sequence
  Description of Artificial Sequence: Synthetic oligonucleotide
  Antisense strand to SEQ ID NO: 1867011
aaaccacuggcaaacagca

SEQ ID NO: 1867013 - RNA, 19 nt, Artificial Sequence
  Description of Artificial Sequence: Synthetic oligonucleotide
  Sense strand starting at position 257 of SEQ ID NO: 1564264
ccgcauccucucugaauuu

SEQ ID NO: 1867014 - RNA, 19 nt, Artificial Sequence
  Description of Artificial Sequence: Synthetic oligonucleotide
  Antisense strand to SEQ ID NO: 1867013
aaauucagagaggaugcgg

SEQ ID NO: 1867015 - RNA, 19 nt, Artificial Sequence
  Description of Artificial Sequence: Synthetic oligonucleotide
  Sense strand starting at position 766 of SEQ ID NO: 1564264
cucaauccugcccagaguu

SEQ ID NO: 1867016 - RNA, 19 nt, Artificial Sequence
  Description of Artificial Sequence: Synthetic oligonucleotide
  Antisense strand to SEQ ID NO: 1867015
aacucugggcaggauugag

SEQ ID NO: 1867017 - RNA, 19 nt, Artificial Sequence
  Description of Artificial Sequence: Synthetic oligonucleotide
  Sense strand starting at position 810 of SEQ ID NO: 1564264
augagaaugacgcagugau

SEQ ID NO: 1867018 - RNA, 19 nt, Artificial Sequence
  Description of Artificial Sequence: Synthetic oligonucleotide
  Antisense strand to SEQ ID NO: 1867017
aucacugcgucauucucau

SEQ ID NO: 1867019 - RNA, 19 nt, Artificial Sequence
  Description of Artificial Sequence: Synthetic oligonucleotide
  Sense strand starting at position 928 of SEQ ID NO: 1564264
gguucuacucuugaguaca

SEQ ID NO: 1867020 - RNA, 19 nt, Artificial Sequence
  Description of Artificial Sequence: Synthetic oligonucleotide
  Antisense strand to SEQ ID NO: 1867019
uguacucaagaguagaacc

SEQ ID NO: 1867021 - RNA, 19 nt, Artificial Sequence
  Description of Artificial Sequence: Synthetic oligonucleotide
  Sense strand starting at position 1015 of SEQ ID NO: 1564264
cccagaguuccggacaguu

SEQ ID NO: 1867022 - RNA, 19 nt, Artificial Sequence
  Description of Artificial Sequence: Synthetic oligonucleotide
  Antisense strand to SEQ ID NO: 1867021
aacuguccggaacucuggg

SEQ ID NO: 1867023 - RNA, 19 nt, Artificial Sequence
  Description of Artificial Sequence: Synthetic oligonucleotide
  Sense strand starting at position 1433 of SEQ ID NO: 1564264
ggacgcuucgaugacggau

SEQ ID NO: 1867024 - RNA, 19 nt, Artificial Sequence
  Description of Artificial Sequence: Synthetic oligonucleotide
  Antisense strand to SEQ ID NO: 1867023
auccgucaucgaagcgucc

SEQ ID NO: 1867025 - RNA, 19 nt, Artificial Sequence
  Description of Artificial Sequence: Synthetic oligonucleotide
  Sense strand starting at position 2185 of SEQ ID NO: 1564264
gaaggcucuggagaucgau

SEQ ID NO: 1867026 - RNA, 19 nt, Artificial Sequence
  Description of Artificial Sequence: Synthetic oligonucleotide
  Antisense strand to SEQ ID NO: 1867025
aucgaucuccagagccuuc

SEQ ID NO: 1867027 - RNA, 19 nt, Artificial Sequence
  Description of Artificial Sequence: Synthetic oligonucleotide
  Sense strand starting at position 2188 of SEQ ID NO: 1564264
ggcucuggagaucgauaaa

SEQ ID NO: 1867028 - RNA, 19 nt, Artificial Sequence
  Description of Artificial Sequence: Synthetic oligonucleotide
  Antisense strand to SEQ ID NO: 1867027
uuuaucgaucuccagagcc

SEQ ID NO: 1867029 - RNA, 19 nt, Artificial Sequence
  Description of Artificial Sequence: Synthetic oligonucleotide
  Sense strand starting at position 2216 of SEQ ID NO: 1564264
ggagcugauuucuagagaa

SEQ ID NO: 1867030 - RNA, 19 nt, Artificial Sequence
  Description of Artificial Sequence: Synthetic oligonucleotide
  Antisense strand to SEQ ID NO: 1867029
uucucuagaaaucagcucc

SEQ ID NO: 1867031 - RNA, 19 nt, Artificial Sequence
  Description of Artificial Sequence: Synthetic oligonucleotide
  Sense strand starting at position 2354 of SEQ ID NO: 1564264
augucauacucccuggaca

SEQ ID NO: 1867032 - RNA, 19 nt, Artificial Sequence
  Description of Artificial Sequence: Synthetic oligonucleotide
  Antisense strand to SEQ ID NO: 1867031
uguccagggaguaugacau

SEQ ID NO: 1867033 - RNA, 19 nt, Artificial Sequence
  Description of Artificial Sequence: Synthetic oligonucleotide
  Sense strand starting at position 2567 of SEQ ID NO: 1564264
gggaguacuugucugugga

SEQ ID NO: 1867034 - RNA, 19 nt, Artificial Sequence
  Description of Artificial Sequence: Synthetic oligonucleotide
  Antisense strand to SEQ ID NO: 1867033
uccacagacaaguacuccc

SEQ ID NO: 1867035 - RNA, 19 nt, Artificial Sequence
  Description of Artificial Sequence: Synthetic oligonucleotide
  Sense strand starting at position 2642 of SEQ ID NO: 1564264
ucuacagaugcauauguau

SEQ ID NO: 1867036 - RNA, 19 nt, Artificial Sequence
  Description of Artificial Sequence: Synthetic oligonucleotide
  Antisense strand to SEQ ID NO: 1867035
auacauaugcaucuguaga

SEQ ID NO: 1867037 - RNA, 19 nt, Artificial Sequence
  Description of Artificial Sequence: Synthetic oligonucleotide
  Sense strand starting at position 2648 of SEQ ID NO: 1564264
gaugcauauguauggagga

SEQ ID NO: 1867038 - RNA, 19 nt, Artificial Sequence
  Description of Artificial Sequence: Synthetic oligonucleotide
  Antisense strand to SEQ ID NO: 1867037
uccuccauacauaugcauc

SEQ ID NO: 1867039 - RNA, 19 nt, Artificial Sequence
  Description of Artificial Sequence: Synthetic oligonucleotide
  Sense strand starting at position 2694 of SEQ ID NO: 1564264
ggugaacauguaugggaga

SEQ ID NO: 1867040 - RNA, 19 nt, Artificial Sequence
  Description of Artificial Sequence: Synthetic oligonucleotide
  Antisense strand to SEQ ID NO: 1867039
ucucccauacauguucacc

SEQ ID NO: 1867041 - RNA, 19 nt, Artificial Sequence
  Description of Artificial Sequence: Synthetic oligonucleotide
  Sense strand starting at position 2751 of SEQ ID NO: 1564264
ggguauuggagugagcacu

SEQ ID NO: 1867042 - RNA, 19 nt, Artificial Sequence
  Description of Artificial Sequence: Synthetic oligonucleotide
  Antisense strand to SEQ ID NO: 1867041
agugcucacuccaauaccc

SEQ ID NO: 1867043 - RNA, 19 nt, Artificial Sequence
  Description of Artificial Sequence: Synthetic oligonucleotide
  Sense strand starting at position 3042 of SEQ ID NO: 1564264
agaugaggugauuguucca

SEQ ID NO: 1867044 - RNA, 19 nt, Artificial Sequence
  Description of Artificial Sequence: Synthetic oligonucleotide
  Antisense strand to SEQ ID NO: 1867043
uggaacaaucaccucaucu

SEQ ID NO: 1867045 - RNA, 19 nt, Artificial Sequence
  Description of Artificial Sequence: Synthetic oligonucleotide
  Sense strand starting at position 3045 of SEQ ID NO: 1564264
ugaggugauuguuccauaa

SEQ ID NO: 1867046 - RNA, 19 nt, Artificial Sequence
  Description of Artificial Sequence: Synthetic oligonucleotide
  Antisense strand to SEQ ID NO: 1867045
uuauggaacaaucaccuca

SEQ ID NO: 1867047 - RNA, 19 nt, Artificial Sequence
  Description of Artificial Sequence: Synthetic oligonucleotide
  Sense strand starting at position 3238 of SEQ ID NO: 1564264
aggugaugcaaccgggaau

SEQ ID NO: 1867048 - RNA, 19 nt, Artificial Sequence
  Description of Artificial Sequence: Synthetic oligonucleotide
  Antisense strand to SEQ ID NO: 1867047
auucccgguugcaucaccu

SEQ ID NO: 1867049 - RNA, 19 nt, Artificial Sequence
  Description of Artificial Sequence: Synthetic oligonucleotide
  Sense strand starting at position 3239 of SEQ ID NO: 1564264
ggugaugcaaccgggaaua

SEQ ID NO: 1867050 - RNA, 19 nt, Artificial Sequence
  Description of Artificial Sequence: Synthetic oligonucleotide
  Antisense strand to SEQ ID NO: 1867049
uauucccgguugcaucacc

SEQ ID NO: 1867051 - RNA, 19 nt, Artificial Sequence
  Description of Artificial Sequence: Synthetic oligonucleotide
  Sense strand starting at position 3241 of SEQ ID NO: 1564264
ugaugcaaccgggaauauu

SEQ ID NO: 1867052 - RNA, 19 nt, Artificial Sequence
  Description of Artificial Sequence: Synthetic oligonucleotide
  Antisense strand to SEQ ID NO: 1867051
aauauucccgguugcauca

SEQ ID NO: 1867053 - RNA, 19 nt, Artificial Sequence
  Description of Artificial Sequence: Synthetic oligonucleotide
  Sense strand starting at position 3358 of SEQ ID NO: 1564264
caggcugugguccaaagaa

SEQ ID NO: 1867054 - RNA, 19 nt, Artificial Sequence
  Description of Artificial Sequence: Synthetic oligonucleotide
  Antisense strand to SEQ ID NO: 1867053
uucuuuggaccacagccug

SEQ ID NO: 1867055 - RNA, 19 nt, Artificial Sequence
  Description of Artificial Sequence: Synthetic oligonucleotide
  Sense strand starting at position 3414 of SEQ ID NO: 1564264
ggccucuuaucagcaaaga

SEQ ID NO: 1867056 - RNA, 19 nt, Artificial Sequence
  Description of Artificial Sequence: Synthetic oligonucleotide
  Antisense strand to SEQ ID NO: 1867055
ucuuugcugauaagaggcc

SEQ ID NO: 1867057 - RNA, 19 nt, Artificial Sequence
  Description of Artificial Sequence: Synthetic oligonucleotide
  Sense strand starting at position 3415 of SEQ ID NO: 1564264
gccucuuaucagcaaagaa

SEQ ID NO: 1867058 - RNA, 19 nt, Artificial Sequence
  Description of Artificial Sequence: Synthetic oligonucleotide
  Antisense strand to SEQ ID NO: 1867057
uucuuugcugauaagaggc

SEQ ID NO: 1867059 - RNA, 19 nt, Artificial Sequence
  Description of Artificial Sequence: Synthetic oligonucleotide
  Sense strand starting at position 3427 of SEQ ID NO: 1564264
caaagaagguaauuauugu

SEQ ID NO: 1867060 - RNA, 19 nt, Artificial Sequence
  Description of Artificial Sequence: Synthetic oligonucleotide
  Antisense strand to SEQ ID NO: 1867059
acaauaauuaccuucuuug

SEQ ID NO: 1867061 - RNA, 19 nt, Artificial Sequence
  Description of Artificial Sequence: Synthetic oligonucleotide
  Sense strand starting at position 3454 of SEQ ID NO: 1564264
ggacauuuaucuuaaccag

SEQ ID NO: 1867062 - RNA, 19 nt, Artificial Sequence
  Description of Artificial Sequence: Synthetic oligonucleotide
  Antisense strand to SEQ ID NO: 1867061
cugguuaagauaaaugucc

SEQ ID NO: 1867063 - RNA, 19 nt, Artificial Sequence
  Description of Artificial Sequence: Synthetic oligonucleotide
  Sense strand starting at position 3551 of SEQ ID NO: 1564264
caguuaugccacugaacag

SEQ ID NO: 1867064 - RNA, 19 nt, Artificial Sequence
  Description of Artificial Sequence: Synthetic oligonucleotide
  Antisense strand to SEQ ID NO: 1867063
cuguucaguggcauaacug

SEQ ID NO: 1867065 - RNA, 19 nt, Artificial Sequence
  Description of Artificial Sequence: Synthetic oligonucleotide
  Sense strand starting at position 3595 of SEQ ID NO: 1564264
gcucuauugguggauucca

SEQ ID NO: 1867066 - RNA, 19 nt, Artificial Sequence
  Description of Artificial Sequence: Synthetic oligonucleotide
  Antisense strand to SEQ ID NO: 1867065
uggaauccaccaauagagc

SEQ ID NO: 1867067 - RNA, 19 nt, Artificial Sequence
  Description of Artificial Sequence: Synthetic oligonucleotide
  Sense strand starting at position 3604 of SEQ ID NO: 1564264
guggauuccaguggugaua

SEQ ID NO: 1867068 - RNA, 19 nt, Artificial Sequence
  Description of Artificial Sequence: Synthetic oligonucleotide
  Antisense strand to SEQ ID NO: 1867067
uaucaccacuggaauccac

SEQ ID NO: 1867069 - RNA, 19 nt, Artificial Sequence
  Description of Artificial Sequence: Synthetic oligonucleotide
  Sense strand starting at position 3615 of SEQ ID NO: 1564264
uggugauaauauguguaca

SEQ ID NO: 1867070 - RNA, 19 nt, Artificial Sequence
  Description of Artificial Sequence: Synthetic oligonucleotide
  Antisense strand to SEQ ID NO: 1867069
uguacacauauuaucacca

SEQ ID NO: 1867071 - RNA, 19 nt, Artificial Sequence
  Description of Artificial Sequence: Synthetic oligonucleotide
  Sense strand starting at position 3616 of SEQ ID NO: 1564264
ggugauaauauguguacaa

SEQ ID NO: 1867072 - RNA, 19 nt, Artificial Sequence
  Description of Artificial Sequence: Synthetic oligonucleotide
  Antisense strand to SEQ ID NO: 1867071
uuguacacauauuaucacc

SEQ ID NO: 1867073 - RNA, 19 nt, Artificial Sequence
  Description of Artificial Sequence: Synthetic oligonucleotide
  Sense strand starting at position 3617 of SEQ ID NO: 1564264
gugauaauauguguacaag

SEQ ID NO: 1867074 - RNA, 19 nt, Artificial Sequence
  Description of Artificial Sequence: Synthetic oligonucleotide
  Antisense strand to SEQ ID NO: 1867073
cuuguacacauauuaucac

SEQ ID NO: 1867075 - RNA, 19 nt, Artificial Sequence
  Description of Artificial Sequence: Synthetic oligonucleotide
  Sense strand starting at position 3715 of SEQ ID NO: 1564264
ucacuuuaggugggagaca

SEQ ID NO: 1867076 - RNA, 19 nt, Artificial Sequence
  Description of Artificial Sequence: Synthetic oligonucleotide
  Antisense strand to SEQ ID NO: 1867075
ugucucccaccuaaaguga

SEQ ID NO: 1867077 - RNA, 19 nt, Artificial Sequence
  Description of Artificial Sequence: Synthetic oligonucleotide
  Sense strand starting at position 3743 of SEQ ID NO: 1564264
ucaggacauucuguuaacu

SEQ ID NO: 1867078 - RNA, 19 nt, Artificial Sequence
  Description of Artificial Sequence: Synthetic oligonucleotide
  Antisense strand to SEQ ID NO: 1867077
aguuaacagaauguccuga

SEQ ID NO: 1867079 - RNA, 19 nt, Artificial Sequence
  Description of Artificial Sequence: Synthetic oligonucleotide
  Sense strand starting at position 3796 of SEQ ID NO: 1564264
cuaagacauguguaguaga

SEQ ID NO: 1867080 - RNA, 19 nt, Artificial Sequence
  Description of Artificial Sequence: Synthetic oligonucleotide
  Antisense strand to SEQ ID NO: 1867079
ucuacuacacaugucuuag

SEQ ID NO: 1867081 - RNA, 19 nt, Artificial Sequence
  Description of Artificial Sequence: Synthetic oligonucleotide
  Sense strand starting at position 3831 of SEQ ID NO: 1564264
cuauacuuaugggucauca

SEQ ID NO: 1867082 - RNA, 19 nt, Artificial Sequence
  Description of Artificial Sequence: Synthetic oligonucleotide
  Antisense strand to SEQ ID NO: 1867081
ugaugacccauaaguauag

SEQ ID NO: 1867083 - RNA, 19 nt, Artificial Sequence
  Description of Artificial Sequence: Synthetic oligonucleotide
  Sense strand starting at position 3835 of SEQ ID NO: 1564264
acuuaugggucaucaagaa

SEQ ID NO: 1867084 - RNA, 19 nt, Artificial Sequence
  Description of Artificial Sequence: Synthetic oligonucleotide
  Antisense strand to SEQ ID NO: 1867083
uucuugaugacccauaagu

SEQ ID NO: 1867085 - RNA, 19 nt, Artificial Sequence
  Description of Artificial Sequence: Synthetic oligonucleotide
  Sense strand starting at position 3874 of SEQ ID NO: 1564264
cucuuaaaucaggagcuua

SEQ ID NO: 1867086 - RNA, 19 nt, Artificial Sequence
  Description of Artificial Sequence: Synthetic oligonucleotide
  Antisense strand to SEQ ID NO: 1867085
uaagcuccugauuuaagag

SEQ ID NO: 1867087 - RNA, 19 nt, Artificial Sequence
  Description of Artificial Sequence: Synthetic oligonucleotide
  Sense strand starting at position 3884 of SEQ ID NO: 1564264
aggagcuuaacugguauca

SEQ ID NO: 1867088 - RNA, 19 nt, Artificial Sequence
  Description of Artificial Sequence: Synthetic oligonucleotide
  Antisense strand to SEQ ID NO: 1867087
ugauaccaguuaagcuccu

SEQ ID NO: 1867089 - RNA, 19 nt, Artificial Sequence
  Description of Artificial Sequence: Synthetic oligonucleotide
  Sense strand starting at position 3897 of SEQ ID NO: 1564264
guaucagaauucccugaua

SEQ ID NO: 1867090 - RNA, 19 nt, Artificial Sequence
  Description of Artificial Sequence: Synthetic oligonucleotide
  Antisense strand to SEQ ID NO: 1867089
uaucagggaauucugauac

SEQ ID NO: 1867091 - RNA, 19 nt, Artificial Sequence
  Description of Artificial Sequence: Synthetic oligonucleotide
  Sense strand starting at position 64 of SEQ ID NO: 1564265
ugccuuucucgauugcuuu

SEQ ID NO: 1867092 - RNA, 19 nt, Artificial Sequence
  Description of Artificial Sequence: Synthetic oligonucleotide
  Antisense strand to SEQ ID NO: 1867091
aaagcaaucgagaaaggca

SEQ ID NO: 1867093 - RNA, 19 nt, Artificial Sequence
  Description of Artificial Sequence: Synthetic oligonucleotide
  Sense strand starting at position 94 of SEQ ID NO: 1564265
auuugagccugcuugcauu

SEQ ID NO: 1867094 - RNA, 19 nt, Artificial Sequence
  Description of Artificial Sequence: Synthetic oligonucleotide
  Antisense strand to SEQ ID NO: 1867093
aaugcaagcaggcucaaau

SEQ ID NO: 1867095 - RNA, 19 nt, Artificial Sequence
  Description of Artificial Sequence: Synthetic oligonucleotide
  Sense strand starting at position 121 of SEQ ID NO: 1564265
uuuguaggugcucagaauu

SEQ ID NO: 1867096 - RNA, 19 nt, Artificial Sequence
  Description of Artificial Sequence: Synthetic oligonucleotide
  Antisense strand to SEQ ID NO: 1867095
aauucugagcaccuacaaa

SEQ ID NO: 1867097 - RNA, 19 nt, Artificial Sequence
  Description of Artificial Sequence: Synthetic oligonucleotide
  Sense strand starting at position 145 of SEQ ID NO: 1564265
ucacuuugucugggcacau

SEQ ID NO: 1867098 - RNA, 19 nt, Artificial Sequence
  Description of Artificial Sequence: Synthetic oligonucleotide
  Antisense strand to SEQ ID NO: 1867097
augugcccagacaaaguga

SEQ ID NO: 1867099 - RNA, 19 nt, Artificial Sequence
  Description of Artificial Sequence: Synthetic oligonucleotide
  Sense strand starting at position 296 of SEQ ID NO: 1564265
cgaugucuuucucuuacau

SEQ ID NO: 1867100 - RNA, 19 nt, Artificial Sequence
  Description of Artificial Sequence: Synthetic oligonucleotide
  Antisense strand to SEQ ID NO: 1867099
auguaagagaaagacaucg

SEQ ID NO: 1867101 - RNA, 19 nt, Artificial Sequence
  Description of Artificial Sequence: Synthetic oligonucleotide
  Sense strand starting at position 309 of SEQ ID NO: 1564265
uuacauaaccuguguuguu

SEQ ID NO: 1867102 - RNA, 19 nt, Artificial Sequence
  Description of Artificial Sequence: Synthetic oligonucleotide
  Antisense strand to SEQ ID NO: 1867101
aacaacacagguuauguaa

SEQ ID NO: 1867103 - RNA, 19 nt, Artificial Sequence
  Description of Artificial Sequence: Synthetic oligonucleotide
  Sense strand starting at position 318 of SEQ ID NO: 1564265
cuguguuguugagcaagaa

SEQ ID NO: 1867104 - RNA, 19 nt, Artificial Sequence
  Description of Artificial Sequence: Synthetic oligonucleotide
  Antisense strand to SEQ ID NO: 1867103
uucuugcucaacaacacag

SEQ ID NO: 1867105 - RNA, 19 nt, Artificial Sequence
  Description of Artificial Sequence: Synthetic oligonucleotide
  Sense strand starting at position 319 of SEQ ID NO: 1564265
uguguuguugagcaagaau

SEQ ID NO: 1867106 - RNA, 19 nt, Artificial Sequence
  Description of Artificial Sequence: Synthetic oligonucleotide
  Antisense strand to SEQ ID NO: 1867105
auucuugcucaacaacaca

SEQ ID NO: 1867107 - RNA, 19 nt, Artificial Sequence
  Description of Artificial Sequence: Synthetic oligonucleotide
  Sense strand starting at position 322 of SEQ ID NO: 1564265
guuguugagcaagaauaaa

SEQ ID NO: 1867108 - RNA, 19 nt, Artificial Sequence
  Description of Artificial Sequence: Synthetic oligonucleotide
  Antisense strand to SEQ ID NO: 1867107
uuuauucuugcucaacaac

SEQ ID NO: 1867109 - RNA, 19 nt, Artificial Sequence
  Description of Artificial Sequence: Synthetic oligonucleotide
  Sense strand starting at position 333 of SEQ ID NO: 1564265
agaauaaauccucgcuuau

SEQ ID NO: 1867110 - RNA, 19 nt, Artificial Sequence
  Description of Artificial Sequence: Synthetic oligonucleotide
  Antisense strand to SEQ ID NO: 1867109
auaagcgaggauuuauucu

SEQ ID NO: 1867111 - RNA, 19 nt, Artificial Sequence
  Description of Artificial Sequence: Synthetic oligonucleotide
  Sense strand starting at position 441 of SEQ ID NO: 1564265
ucuaaauugccucaguugu

SEQ ID NO: 1867112 - RNA, 19 nt, Artificial Sequence
  Description of Artificial Sequence: Synthetic oligonucleotide
  Antisense strand to SEQ ID NO: 1867111
acaacugaggcaauuuaga

SEQ ID NO: 1867113 - RNA, 19 nt, Artificial Sequence
  Description of Artificial Sequence: Synthetic oligonucleotide
  Sense strand starting at position 709 of SEQ ID NO: 1564265
aauuuaacgcugugaucca

SEQ ID NO: 1867114 - RNA, 19 nt, Artificial Sequence
  Description of Artificial Sequence: Synthetic oligonucleotide
  Antisense strand to SEQ ID NO: 1867113
uggaucacagcguuaaauu

SEQ ID NO: 1867115 - RNA, 19 nt, Artificial Sequence
  Description of Artificial Sequence: Synthetic oligonucleotide
  Sense strand starting at position 716 of SEQ ID NO: 1564265
cgcugugauccauggagga

SEQ ID NO: 1867116 - RNA, 19 nt, Artificial Sequence
  Description of Artificial Sequence: Synthetic oligonucleotide
  Antisense strand to SEQ ID NO: 1867115
uccuccauggaucacagcg

SEQ ID NO: 1867117 - RNA, 19 nt, Artificial Sequence
  Description of Artificial Sequence: Synthetic oligonucleotide
  Sense strand starting at position 827 of SEQ ID NO: 1564265
gcaguuuaauuugucuuga

SEQ ID NO: 1867118 - RNA, 19 nt, Artificial Sequence
  Description of Artificial Sequence: Synthetic oligonucleotide
  Antisense strand to SEQ ID NO: 1867117
ucaagacaaauuaaacugc

SEQ ID NO: 1867119 - RNA, 19 nt, Artificial Sequence
  Description of Artificial Sequence: Synthetic oligonucleotide
  Sense strand starting at position 1349 of SEQ ID NO: 1564265
ucgauguugcgguugcaga

SEQ ID NO: 1867120 - RNA, 19 nt, Artificial Sequence
  Description of Artificial Sequence: Synthetic oligonucleotide
  Antisense strand to SEQ ID NO: 1867119
ucugcaaccgcaacaucga

SEQ ID NO: 1867121 - RNA, 19 nt, Artificial Sequence
  Description of Artificial Sequence: Synthetic oligonucleotide
  Sense strand starting at position 1411 of SEQ ID NO: 1564265
uagcgaauccugccgcauu

SEQ ID NO: 1867122 - RNA, 19 nt, Artificial Sequence
  Description of Artificial Sequence: Synthetic oligonucleotide
  Antisense strand to SEQ ID NO: 1867121
aaugcggcaggauucgcua

SEQ ID NO: 1867123 - RNA, 19 nt, Artificial Sequence
  Description of Artificial Sequence: Synthetic oligonucleotide
  Sense strand starting at position 1413 of SEQ ID NO: 1564265
gcgaauccugccgcauuau

SEQ ID NO: 1867124 - RNA, 19 nt, Artificial Sequence
  Description of Artificial Sequence: Synthetic oligonucleotide
  Antisense strand to SEQ ID NO: 1867123
auaaugcggcaggauucgc

SEQ ID NO: 1867125 - RNA, 19 nt, Artificial Sequence
  Description of Artificial Sequence: Synthetic oligonucleotide
  Sense strand starting at position 1424 of SEQ ID NO: 1564265
cgcauuaugcuguugagcu

SEQ ID NO: 1867126 - RNA, 19 nt, Artificial Sequence
  Description of Artificial Sequence: Synthetic oligonucleotide
  Antisense strand to SEQ ID NO: 1867125
agcucaacagcauaaugcg

SEQ ID NO: 1867127 - RNA, 19 nt, Artificial Sequence
  Description of Artificial Sequence: Synthetic oligonucleotide
  Sense strand starting at position 1437 of SEQ ID NO: 1564265
ugagcuugucgguauugag

SEQ ID NO: 1867128 - RNA, 19 nt, Artificial Sequence
  Description of Artificial Sequence: Synthetic oligonucleotide
  Antisense strand to SEQ ID NO: 1867127
cucaauaccgacaagcuca

SEQ ID NO: 1867129 - RNA, 19 nt, Artificial Sequence
  Description of Artificial Sequence: Synthetic oligonucleotide
  Sense strand starting at position 1486 of SEQ ID NO: 1564265
ccgaaaguugcucacugua

SEQ ID NO: 1867130 - RNA, 19 nt, Artificial Sequence
  Description of Artificial Sequence: Synthetic oligonucleotide
  Antisense strand to SEQ ID NO: 1867129
uacagugagcaacuuucgg

SEQ ID NO: 1867131 - RNA, 19 nt, Artificial Sequence
  Description of Artificial Sequence: Synthetic oligonucleotide
  Sense strand starting at position 2179 of SEQ ID NO: 1564265
gggagucagcacugggaua

SEQ ID NO: 1867132 - RNA, 19 nt, Artificial Sequence
  Description of Artificial Sequence: Synthetic oligonucleotide
  Antisense strand to SEQ ID NO: 1867131
uaucccagugcugacuccc

SEQ ID NO: 1867133 - RNA, 19 nt, Artificial Sequence
  Description of Artificial Sequence: Synthetic oligonucleotide
  Sense strand starting at position 2180 of SEQ ID NO: 1564265
ggagucagcacugggauau

SEQ ID NO: 1867134 - RNA, 19 nt, Artificial Sequence
  Description of Artificial Sequence: Synthetic oligonucleotide
  Antisense strand to SEQ ID NO: 1867133
auaucccagugcugacucc

SEQ ID NO: 1867135 - RNA, 19 nt, Artificial Sequence
  Description of Artificial Sequence: Synthetic oligonucleotide
  Sense strand starting at position 2203 of SEQ ID NO: 1564265
gcauguaaauuacccuaga

SEQ ID NO: 1867136 - RNA, 19 nt, Artificial Sequence
  Description of Artificial Sequence: Synthetic oligonucleotide
  Antisense strand to SEQ ID NO: 1867135
ucuaggguaauuuacaugc

SEQ ID NO: 1867137 - RNA, 19 nt, Artificial Sequence
  Description of Artificial Sequence: Synthetic oligonucleotide
  Sense strand starting at position 2444 of SEQ ID NO: 1564265
gcgcauccuccgccagaaa

SEQ ID NO: 1867138 - RNA, 19 nt, Artificial Sequence
  Description of Artificial Sequence: Synthetic oligonucleotide
  Antisense strand to SEQ ID NO: 1867137
uuucuggcggaggaugcgc

SEQ ID NO: 1867139 - RNA, 19 nt, Artificial Sequence
  Description of Artificial Sequence: Synthetic oligonucleotide
  Sense strand starting at position 2445 of SEQ ID NO: 1564265
cgcauccuccgccagaaau

SEQ ID NO: 1867140 - RNA, 19 nt, Artificial Sequence
  Description of Artificial Sequence: Synthetic oligonucleotide
  Antisense strand to SEQ ID NO: 1867139
auuucuggcggaggaugcg

SEQ ID NO: 1867141 - RNA, 19 nt, Artificial Sequence
  Description of Artificial Sequence: Synthetic oligonucleotide
  Sense strand starting at position 2535 of SEQ ID NO: 1564265
gggcaaaugucucuagucu

SEQ ID NO: 1867142 - RNA, 19 nt, Artificial Sequence
  Description of Artificial Sequence: Synthetic oligonucleotide
  Antisense strand to SEQ ID NO: 1867141
agacuagagacauuugccc

SEQ ID NO: 1867143 - RNA, 19 nt, Artificial Sequence
  Description of Artificial Sequence: Synthetic oligonucleotide
  Sense strand starting at position 2536 of SEQ ID NO: 1564265
ggcaaaugucucuagucuc

SEQ ID NO: 1867144 - RNA, 19 nt, Artificial Sequence
  Description of Artificial Sequence: Synthetic oligonucleotide
  Antisense strand to SEQ ID NO: 1867143
gagacuagagacauuugcc

SEQ ID NO: 1867145 - RNA, 19 nt, Artificial Sequence
  Description of Artificial Sequence: Synthetic oligonucleotide
  Sense strand starting at position 2544 of SEQ ID NO: 1564265
ucucuagucucaccucgaa

SEQ ID NO: 1867146 - RNA, 19 nt, Artificial Sequence
  Description of Artificial Sequence: Synthetic oligonucleotide
  Antisense strand to SEQ ID NO: 1867145
uucgaggugagacuagaga

SEQ ID NO: 1867147 - RNA, 19 nt, Artificial Sequence
  Description of Artificial Sequence: Synthetic oligonucleotide
  Sense strand starting at position 3335 of SEQ ID NO: 1564265
ggauguucugggugggcaa

SEQ ID NO: 1867148 - RNA, 19 nt, Artificial Sequence
  Description of Artificial Sequence: Synthetic oligonucleotide
  Antisense strand to SEQ ID NO: 1867147
uugcccacccagaacaucc

SEQ ID NO: 1867149 - RNA, 19 nt, Artificial Sequence
  Description of Artificial Sequence: Synthetic oligonucleotide
  Sense strand starting at position 3396 of SEQ ID NO: 1564265
uacuuuaaauguguaggau

SEQ ID NO: 1867150 - RNA, 19 nt, Artificial Sequence
  Description of Artificial Sequence: Synthetic oligonucleotide
  Antisense strand to SEQ ID NO: 1867149
auccuacacauuuaaagua

SEQ ID NO: 1867151 - RNA, 19 nt, Artificial Sequence
  Description of Artificial Sequence: Synthetic oligonucleotide
  Sense strand starting at position 3397 of SEQ ID NO: 1564265
acuuuaaauguguaggauu

SEQ ID NO: 1867152 - RNA, 19 nt, Artificial Sequence
  Description of Artificial Sequence: Synthetic oligonucleotide
  Antisense strand to SEQ ID NO: 1867151
aauccuacacauuuaaagu

SEQ ID NO: 1867153 - RNA, 19 nt, Artificial Sequence
  Description of Artificial Sequence: Synthetic oligonucleotide
  Sense strand starting at position 3530 of SEQ ID NO: 1564265
aagucuggccuuugaaaua

SEQ ID NO: 1867154 - RNA, 19 nt, Artificial Sequence
  Description of Artificial Sequence: Synthetic oligonucleotide
  Antisense strand to SEQ ID NO: 1867153
uauuucaaaggccagacuu

SEQ ID NO: 1867155 - RNA, 19 nt, Artificial Sequence
  Description of Artificial Sequence: Synthetic oligonucleotide
  Sense strand starting at position 3535 of SEQ ID NO: 1564265
uggccuuugaaauagagca

SEQ ID NO: 1867156 - RNA, 19 nt, Artificial Sequence
  Description of Artificial Sequence: Synthetic oligonucleotide
  Antisense strand to SEQ ID NO: 1867155
ugcucuauuucaaaggcca

SEQ ID NO: 1867157 - RNA, 19 nt, Artificial Sequence
  Description of Artificial Sequence: Synthetic oligonucleotide
  Sense strand starting at position 3540 of SEQ ID NO: 1564265
uuugaaauagagcagcaua

SEQ ID NO: 1867158 - RNA, 19 nt, Artificial Sequence
  Description of Artificial Sequence: Synthetic oligonucleotide
  Antisense strand to SEQ ID NO: 1867157
uaugcugcucuauuucaaa

SEQ ID NO: 1867159 - RNA, 19 nt, Artificial Sequence
  Description of Artificial Sequence: Synthetic oligonucleotide
  Sense strand starting at position 3627 of SEQ ID NO: 1564265
gagguaccuccugguggaa

SEQ ID NO: 1867160 - RNA, 19 nt, Artificial Sequence
  Description of Artificial Sequence: Synthetic oligonucleotide
  Antisense strand to SEQ ID NO: 1867159
uuccaccaggagguaccuc

SEQ ID NO: 1867161 - RNA, 19 nt, Artificial Sequence
  Description of Artificial Sequence: Synthetic oligonucleotide
  Sense strand starting at position 3708 of SEQ ID NO: 1564265
aagagaguucuguggccaa

SEQ ID NO: 1867162 - RNA, 19 nt, Artificial Sequence
  Description of Artificial Sequence: Synthetic oligonucleotide
  Antisense strand to SEQ ID NO: 1867161
uuggccacagaacucucuu

SEQ ID NO: 1867163 - RNA, 19 nt, Artificial Sequence
  Description of Artificial Sequence: Synthetic oligonucleotide
  Sense strand starting at position 3712 of SEQ ID NO: 1564265
gaguucuguggccaagcua

SEQ ID NO: 1867164 - RNA, 19 nt, Artificial Sequence
  Description of Artificial Sequence: Synthetic oligonucleotide
  Antisense strand to SEQ ID NO: 1867163
uagcuuggccacagaacuc

SEQ ID NO: 1867165 - RNA, 19 nt, Artificial Sequence
  Description of Artificial Sequence: Synthetic oligonucleotide
  Sense strand starting at position 3754 of SEQ ID NO: 1564265
cuaagagagcuccagcuaa

SEQ ID NO: 1867166 - RNA, 19 nt, Artificial Sequence
  Description of Artificial Sequence: Synthetic oligonucleotide
  Antisense strand to SEQ ID NO: 1867165
uuagcuggagcucucuuag

SEQ ID NO: 1867167 - RNA, 19 nt, Artificial Sequence
  Description of Artificial Sequence: Synthetic oligonucleotide
  Sense strand starting at position 3887 of SEQ ID NO: 1564265
aagcaucaggccugugauu

SEQ ID NO: 1867168 - RNA, 19 nt, Artificial Sequence
  Description of Artificial Sequence: Synthetic oligonucleotide
  Antisense strand to SEQ ID NO: 1867167
aaucacaggccugaugcuu

SEQ ID NO: 1867169 - RNA, 19 nt, Artificial Sequence
  Description of Artificial Sequence: Synthetic oligonucleotide
  Sense strand starting at position 3889 of SEQ ID NO: 1564265
gcaucaggccugugauuaa

SEQ ID NO: 1867170 - RNA, 19 nt, Artificial Sequence
  Description of Artificial Sequence: Synthetic oligonucleotide
  Antisense strand to SEQ ID NO: 1867169
uuaaucacaggccugaugc

SEQ ID NO: 1867171 - RNA, 19 nt, Artificial Sequence
  Description of Artificial Sequence: Synthetic oligonucleotide
  Sense strand starting at position 360 of SEQ ID NO: 1564266
aggucugacucuucuacuu

SEQ ID NO: 1867172 - RNA, 19 nt, Artificial Sequence
  Description of Artificial Sequence: Synthetic oligonucleotide
  Antisense strand to SEQ ID NO: 1867171
aaguagaagagucagaccu

SEQ ID NO: 1867173 - RNA, 19 nt, Artificial Sequence
  Description of Artificial Sequence: Synthetic oligonucleotide
  Sense strand starting at position 515 of SEQ ID NO: 1564266
ugcauacugcaggauaaga

SEQ ID NO: 1867174 - RNA, 19 nt, Artificial Sequence
  Description of Artificial Sequence: Synthetic oligonucleotide
  Antisense strand to SEQ ID NO: 1867173
ucuuauccugcaguaugca

SEQ ID NO: 1867175 - RNA, 19 nt, Artificial Sequence
  Description of Artificial Sequence: Synthetic oligonucleotide
  Sense strand starting at position 539 of SEQ ID NO: 1564266
aguccaagucagcauaaau

SEQ ID NO: 1867176 - RNA, 19 nt, Artificial Sequence
  Description of Artificial Sequence: Synthetic oligonucleotide
  Antisense strand to SEQ ID NO: 1867175
auuuaugcugacuuggacu

SEQ ID NO: 1867177 - RNA, 19 nt, Artificial Sequence
  Description of Artificial Sequence: Synthetic oligonucleotide
  Sense strand starting at position 687 of SEQ ID NO: 1564266
gcugaacuguuacuugaua

SEQ ID NO: 1867178 - RNA, 19 nt, Artificial Sequence
  Description of Artificial Sequence: Synthetic oligonucleotide
  Antisense strand to SEQ ID NO: 1867177
uaucaaguaacaguucagc

SEQ ID NO: 1867179 - RNA, 19 nt, Artificial Sequence
  Description of Artificial Sequence: Synthetic oligonucleotide
  Sense strand starting at position 688 of SEQ ID NO: 1564266
cugaacuguuacuugauaa

SEQ ID NO: 1867180 - RNA, 19 nt, Artificial Sequence
  Description of Artificial Sequence: Synthetic oligonucleotide
  Antisense strand to SEQ ID NO: 1867179
uuaucaaguaacaguucag

SEQ ID NO: 1867181 - RNA, 19 nt, Artificial Sequence
  Description of Artificial Sequence: Synthetic oligonucleotide
  Sense strand starting at position 699 of SEQ ID NO: 1564266
cuugauaaguuuccauaag

SEQ ID NO: 1867182 - RNA, 19 nt, Artificial Sequence
  Description of Artificial Sequence: Synthetic oligonucleotide
  Antisense strand to SEQ ID NO: 1867181
cuuauggaaacuuaucaag

SEQ ID NO: 1867183 - RNA, 19 nt, Artificial Sequence
  Description of Artificial Sequence: Synthetic oligonucleotide
  Sense strand starting at position 885 of SEQ ID NO: 1564266
gaauaaugacgguaccagu

SEQ ID NO: 1867184 - RNA, 19 nt, Artificial Sequence
  Description of Artificial Sequence: Synthetic oligonucleotide
  Antisense strand to SEQ ID NO: 1867183
acugguaccgucauuauuc

SEQ ID NO: 1867185 - RNA, 19 nt, Artificial Sequence
  Description of Artificial Sequence: Synthetic oligonucleotide
  Sense strand starting at position 996 of SEQ ID NO: 1564266
gaaggauaacgccagugau

SEQ ID NO: 1867186 - RNA, 19 nt, Artificial Sequence
  Description of Artificial Sequence: Synthetic oligonucleotide
  Antisense strand to SEQ ID NO: 1867185
aucacuggcguuauccuuc

SEQ ID NO: 1867187 - RNA, 19 nt, Artificial Sequence
  Description of Artificial Sequence: Synthetic oligonucleotide
  Sense strand starting at position 1008 of SEQ ID NO: 1564266
cagugaucuaugugggaau

SEQ ID NO: 1867188 - RNA, 19 nt, Artificial Sequence
  Description of Artificial Sequence: Synthetic oligonucleotide
  Antisense strand to SEQ ID NO: 1867187
auucccacauagaucacug

SEQ ID NO: 1867189 - RNA, 19 nt, Artificial Sequence
  Description of Artificial Sequence: Synthetic oligonucleotide
  Sense strand starting at position 1010 of SEQ ID NO: 1564266
gugaucuaugugggaauuc

SEQ ID NO: 1867190 - RNA, 19 nt, Artificial Sequence
  Description of Artificial Sequence: Synthetic oligonucleotide
  Antisense strand to SEQ ID NO: 1867189
gaauucccacauagaucac

SEQ ID NO: 1867191 - RNA, 19 nt, Artificial Sequence
  Description of Artificial Sequence: Synthetic oligonucleotide
  Sense strand starting at position 1095 of SEQ ID NO: 1564266
aggcacaauagguguaaua

SEQ ID NO: 1867192 - RNA, 19 nt, Artificial Sequence
  Description of Artificial Sequence: Synthetic oligonucleotide
  Antisense strand to SEQ ID NO: 1867191
uauuacaccuauugugccu

SEQ ID NO: 1867193 - RNA, 19 nt, Artificial Sequence
  Description of Artificial Sequence: Synthetic oligonucleotide
  Sense strand starting at position 1097 of SEQ ID NO: 1564266
gcacaauagguguaauaug

SEQ ID NO: 1867194 - RNA, 19 nt, Artificial Sequence
  Description of Artificial Sequence: Synthetic oligonucleotide
  Antisense strand to SEQ ID NO: 1867193
cauauuacaccuauugugc

SEQ ID NO: 1867195 - RNA, 19 nt, Artificial Sequence
  Description of Artificial Sequence: Synthetic oligonucleotide
  Sense strand starting at position 1361 of SEQ ID NO: 1564266
guccucuccagguagggau

SEQ ID NO: 1867196 - RNA, 19 nt, Artificial Sequence
  Description of Artificial Sequence: Synthetic oligonucleotide
  Antisense strand to SEQ ID NO: 1867195
aucccuaccuggagaggac

SEQ ID NO: 1867197 - RNA, 19 nt, Artificial Sequence
  Description of Artificial Sequence: Synthetic oligonucleotide
  Sense strand starting at position 1915 of SEQ ID NO: 1564266
acaaguaaugacugguuua

SEQ ID NO: 1867198 - RNA, 19 nt, Artificial Sequence
  Description of Artificial Sequence: Synthetic oligonucleotide
  Antisense strand to SEQ ID NO: 1867197
uaaaccagucauuacuugu

SEQ ID NO: 1867199 - RNA, 19 nt, Artificial Sequence
  Description of Artificial Sequence: Synthetic oligonucleotide
  Sense strand starting at position 2083 of SEQ ID NO: 1564266
ccggaaacacuguacaauu

SEQ ID NO: 1867200 - RNA, 19 nt, Artificial Sequence
  Description of Artificial Sequence: Synthetic oligonucleotide
  Antisense strand to SEQ ID NO: 1867199
aauuguacaguguuuccgg

SEQ ID NO: 1867201 - RNA, 19 nt, Artificial Sequence
  Description of Artificial Sequence: Synthetic oligonucleotide
  Sense strand starting at position 2311 of SEQ ID NO: 1564266
uguuucuaucaccagcaga

SEQ ID NO: 1867202 - RNA, 19 nt, Artificial Sequence
  Description of Artificial Sequence: Synthetic oligonucleotide
  Antisense strand to SEQ ID NO: 1867201
ucugcuggugauagaaaca

SEQ ID NO: 1867203 - RNA, 19 nt, Artificial Sequence
  Description of Artificial Sequence: Synthetic oligonucleotide
  Sense strand starting at position 2364 of SEQ ID NO: 1564266
ccuggugcccuagagagaa

SEQ ID NO: 1867204 - RNA, 19 nt, Artificial Sequence
  Description of Artificial Sequence: Synthetic oligonucleotide
  Antisense strand to SEQ ID NO: 1867203
uucucucuagggcaccagg

SEQ ID NO: 1867205 - RNA, 19 nt, Artificial Sequence
  Description of Artificial Sequence: Synthetic oligonucleotide
  Sense strand starting at position 2527 of SEQ ID NO: 1564266
uuuaccucugguggaauua

SEQ ID NO: 1867206 - RNA, 19 nt, Artificial Sequence
  Description of Artificial Sequence: Synthetic oligonucleotide
  Antisense strand to SEQ ID NO: 1867205
uaauuccaccagagguaaa

SEQ ID NO: 1867207 - RNA, 19 nt, Artificial Sequence
  Description of Artificial Sequence: Synthetic oligonucleotide
  Sense strand starting at position 2653 of SEQ ID NO: 1564266
uuucuaagcuagguauuaa

SEQ ID NO: 1867208 - RNA, 19 nt, Artificial Sequence
  Description of Artificial Sequence: Synthetic oligonucleotide
  Antisense strand to SEQ ID NO: 1867207
uuaauaccuagcuuagaaa

SEQ ID NO: 1867209 - RNA, 19 nt, Artificial Sequence
  Description of Artificial Sequence: Synthetic oligonucleotide
  Sense strand starting at position 2970 of SEQ ID NO: 1564266
gugaauauauuggucuaug

SEQ ID NO: 1867210 - RNA, 19 nt, Artificial Sequence
  Description of Artificial Sequence: Synthetic oligonucleotide
  Antisense strand to SEQ ID NO: 1867209
cauagaccaauauauucac

SEQ ID NO: 1867211 - RNA, 19 nt, Artificial Sequence
  Description of Artificial Sequence: Synthetic oligonucleotide
  Sense strand starting at position 2973 of SEQ ID NO: 1564266
aauauauuggucuauguug

SEQ ID NO: 1867212 - RNA, 19 nt, Artificial Sequence
  Description of Artificial Sequence: Synthetic oligonucleotide
  Antisense strand to SEQ ID NO: 1867211
caacauagaccaauauauu

SEQ ID NO: 1867213 - RNA, 19 nt, Artificial Sequence
  Description of Artificial Sequence: Synthetic oligonucleotide
  Sense strand starting at position 3007 of SEQ ID NO: 1564266
ugcguuaaggucugauuuc

SEQ ID NO: 1867214 - RNA, 19 nt, Artificial Sequence
  Description of Artificial Sequence: Synthetic oligonucleotide
  Antisense strand to SEQ ID NO: 1867213
gaaaucagaccuuaacgca

SEQ ID NO: 1867215 - RNA, 19 nt, Artificial Sequence
  Description of Artificial Sequence: Synthetic oligonucleotide
  Sense strand starting at position 3051 of SEQ ID NO: 1564266
ggcagagacugaguguuaa

SEQ ID NO: 1867216 - RNA, 19 nt, Artificial Sequence
  Description of Artificial Sequence: Synthetic oligonucleotide
  Antisense strand to SEQ ID NO: 1867215
uuaacacucagucucugcc

SEQ ID NO: 1867217 - RNA, 19 nt, Artificial Sequence
  Description of Artificial Sequence: Synthetic oligonucleotide
  Sense strand starting at position 3063 of SEQ ID NO: 1564266
guguuaagugaguuugugu

SEQ ID NO: 1867218 - RNA, 19 nt, Artificial Sequence
  Description of Artificial Sequence: Synthetic oligonucleotide
  Antisense strand to SEQ ID NO: 1867217
acacaaacucacuuaacac

SEQ ID NO: 1867219 - RNA, 19 nt, Artificial Sequence
  Description of Artificial Sequence: Synthetic oligonucleotide
  Sense strand starting at position 3078 of SEQ ID NO: 1564266
guguuaucucuagaggaac

SEQ ID NO: 1867220 - RNA, 19 nt, Artificial Sequence
  Description of Artificial Sequence: Synthetic oligonucleotide
  Antisense strand to SEQ ID NO: 1867219
guuccucuagagauaacac

SEQ ID NO: 1867221 - RNA, 19 nt, Artificial Sequence
  Description of Artificial Sequence: Synthetic oligonucleotide
  Sense strand starting at position 3098 of SEQ ID NO: 1564266
ggguuagaaggcuguauca

SEQ ID NO: 1867222 - RNA, 19 nt, Artificial Sequence
  Description of Artificial Sequence: Synthetic oligonucleotide
  Antisense strand to SEQ ID NO: 1867221
ugauacagccuucuaaccc

SEQ ID NO: 1867223 - RNA, 19 nt, Artificial Sequence
  Description of Artificial Sequence: Synthetic oligonucleotide
  Sense strand starting at position 3100 of SEQ ID NO: 1564266
guuagaaggcuguaucagu

SEQ ID NO: 1867224 - RNA, 19 nt, Artificial Sequence
  Description of Artificial Sequence: Synthetic oligonucleotide
  Antisense strand to SEQ ID NO: 1867223
acugauacagccuucuaac

SEQ ID NO: 1867225 - RNA, 19 nt, Artificial Sequence
  Description of Artificial Sequence: Synthetic oligonucleotide
  Sense strand starting at position 3202 of SEQ ID NO: 1564266
cugcauuuguggaggagag

SEQ ID NO: 1867226 - RNA, 19 nt, Artificial Sequence
  Description of Artificial Sequence: Synthetic oligonucleotide
  Antisense strand to SEQ ID NO: 1867225
cucuccuccacaaaugcag

SEQ ID NO: 1867227 - RNA, 19 nt, Artificial Sequence
  Description of Artificial Sequence: Synthetic oligonucleotide
  Sense strand starting at position 3291 of SEQ ID NO: 1564266
uuccauugacuuggucaca

SEQ ID NO: 1867228 - RNA, 19 nt, Artificial Sequence
  Description of Artificial Sequence: Synthetic oligonucleotide
  Antisense strand to SEQ ID NO: 1867227
ugugaccaagucaauggaa

SEQ ID NO: 1867229 - RNA, 19 nt, Artificial Sequence
  Description of Artificial Sequence: Synthetic oligonucleotide
  Sense strand starting at position 3326 of SEQ ID NO: 1564266
uucgaauauugaccuagga

SEQ ID NO: 1867230 - RNA, 19 nt, Artificial Sequence
  Description of Artificial Sequence: Synthetic oligonucleotide
  Antisense strand to SEQ ID NO: 1867229
uccuaggucaauauucgaa

SEQ ID NO: 1867231 - RNA, 19 nt, Artificial Sequence
  Description of Artificial Sequence: Synthetic oligonucleotide
  Sense strand starting at position 3414 of SEQ ID NO: 1564266
auugccaggcuuuauacua

SEQ ID NO: 1867232 - RNA, 19 nt, Artificial Sequence
  Description of Artificial Sequence: Synthetic oligonucleotide
  Antisense strand to SEQ ID NO: 1867231
uaguauaaagccuggcaau

SEQ ID NO: 1867233 - RNA, 19 nt, Artificial Sequence
  Description of Artificial Sequence: Synthetic oligonucleotide
  Sense strand starting at position 3522 of SEQ ID NO: 1564266
gagguaaagucguuaggaa

SEQ ID NO: 1867234 - RNA, 19 nt, Artificial Sequence
  Description of Artificial Sequence: Synthetic oligonucleotide
  Antisense strand to SEQ ID NO: 1867233
uuccuaacgacuuuaccuc

SEQ ID NO: 1867235 - RNA, 19 nt, Artificial Sequence
  Description of Artificial Sequence: Synthetic oligonucleotide
  Sense strand starting at position 3523 of SEQ ID NO: 1564266
agguaaagucguuaggaaa

SEQ ID NO: 1867236 - RNA, 19 nt, Artificial Sequence
  Description of Artificial Sequence: Synthetic oligonucleotide
  Antisense strand to SEQ ID NO: 1867235
uuuccuaacgacuuuaccu

SEQ ID NO: 1867237 - RNA, 19 nt, Artificial Sequence
  Description of Artificial Sequence: Synthetic oligonucleotide
  Sense strand starting at position 3530 of SEQ ID NO: 1564266
gucguuaggaaauaccaaa

SEQ ID NO: 1867238 - RNA, 19 nt, Artificial Sequence
  Description of Artificial Sequence: Synthetic oligonucleotide
  Antisense strand to SEQ ID NO: 1867237
uuugguauuuccuaacgac

SEQ ID NO: 1867239 - RNA, 19 nt, Artificial Sequence
  Description of Artificial Sequence: Synthetic oligonucleotide
  Sense strand starting at position 3569 of SEQ ID NO: 1564266
ggugucuaaguauaugcaa

SEQ ID NO: 1867240 - RNA, 19 nt, Artificial Sequence
  Description of Artificial Sequence: Synthetic oligonucleotide
  Antisense strand to SEQ ID NO: 1867239
uugcauauacuuagacacc

SEQ ID NO: 1867241 - RNA, 19 nt, Artificial Sequence
  Description of Artificial Sequence: Synthetic oligonucleotide
  Sense strand starting at position 3572 of SEQ ID NO: 1564266
gucuaaguauaugcaaaga

SEQ ID NO: 1867242 - RNA, 19 nt, Artificial Sequence
  Description of Artificial Sequence: Synthetic oligonucleotide
  Antisense strand to SEQ ID NO: 1867241
ucuuugcauauacuuagac

SEQ ID NO: 1867243 - RNA, 19 nt, Artificial Sequence
  Description of Artificial Sequence: Synthetic oligonucleotide
  Sense strand starting at position 3616 of SEQ ID NO: 1564266
acugaaggguucuuauacu

SEQ ID NO: 1867244 - RNA, 19 nt, Artificial Sequence
  Description of Artificial Sequence: Synthetic oligonucleotide
  Antisense strand to SEQ ID NO: 1867243
aguauaagaacccuucagu

SEQ ID NO: 1867245 - RNA, 19 nt, Artificial Sequence
  Description of Artificial Sequence: Synthetic oligonucleotide
  Sense strand starting at position 3681 of SEQ ID NO: 1564266
agagaaguuucucugaaac

SEQ ID NO: 1867246 - RNA, 19 nt, Artificial Sequence
  Description of Artificial Sequence: Synthetic oligonucleotide
  Antisense strand to SEQ ID NO: 1867245
guuucagagaaacuucucu

SEQ ID NO: 1867247 - RNA, 19 nt, Artificial Sequence
  Description of Artificial Sequence: Synthetic oligonucleotide
  Sense strand starting at position 3746 of SEQ ID NO: 1564266
gaaauaugucuguagcuga

SEQ ID NO: 1867248 - RNA, 19 nt, Artificial Sequence
  Description of Artificial Sequence: Synthetic oligonucleotide
  Antisense strand to SEQ ID NO: 1867247
ucagcuacagacauauuuc

SEQ ID NO: 1867249 - RNA, 19 nt, Artificial Sequence
  Description of Artificial Sequence: Synthetic oligonucleotide
  Sense strand starting at position 3751 of SEQ ID NO: 1564266
augucuguagcugaagaaa

SEQ ID NO: 1867250 - RNA, 19 nt, Artificial Sequence
  Description of Artificial Sequence: Synthetic oligonucleotide
  Antisense strand to SEQ ID NO: 1867249
uuucuucagcuacagacau

SEQ ID NO: 1867251 - RNA, 19 nt, Artificial Sequence
  Description of Artificial Sequence: Synthetic oligonucleotide
  Sense strand starting at position 143 of SEQ ID NO: 1564267
ugcauacugcaggauaaga

SEQ ID NO: 1867252 - RNA, 19 nt, Artificial Sequence
  Description of Artificial Sequence: Synthetic oligonucleotide
  Antisense strand to SEQ ID NO: 1867251
ucuuauccugcaguaugca

SEQ ID NO: 1867253 - RNA, 19 nt, Artificial Sequence
  Description of Artificial Sequence: Synthetic oligonucleotide
  Sense strand starting at position 167 of SEQ ID NO: 1564267
aguccaagucagcauaaau

SEQ ID NO: 1867254 - RNA, 19 nt, Artificial Sequence
  Description of Artificial Sequence: Synthetic oligonucleotide
  Antisense strand to SEQ ID NO: 1867253
auuuaugcugacuuggacu

SEQ ID NO: 1867255 - RNA, 19 nt, Artificial Sequence
  Description of Artificial Sequence: Synthetic oligonucleotide
  Sense strand starting at position 316 of SEQ ID NO: 1564267
cugaacuguuacuugauaa

SEQ ID NO: 1867256 - RNA, 19 nt, Artificial Sequence
  Description of Artificial Sequence: Synthetic oligonucleotide
  Antisense strand to SEQ ID NO: 1867255
uuaucaaguaacaguucag

SEQ ID NO: 1867257 - RNA, 19 nt, Artificial Sequence
  Description of Artificial Sequence: Synthetic oligonucleotide
  Sense strand starting at position 327 of SEQ ID NO: 1564267
cuugauaaguuuccauaag

SEQ ID NO: 1867258 - RNA, 19 nt, Artificial Sequence
  Description of Artificial Sequence: Synthetic oligonucleotide
  Antisense strand to SEQ ID NO: 1867257
cuuauggaaacuuaucaag

SEQ ID NO: 1867259 - RNA, 19 nt, Artificial Sequence
  Description of Artificial Sequence: Synthetic oligonucleotide
  Sense strand starting at position 513 of SEQ ID NO: 1564267
gaauaaugacgguaccagu

SEQ ID NO: 1867260 - RNA, 19 nt, Artificial Sequence
  Description of Artificial Sequence: Synthetic oligonucleotide
  Antisense strand to SEQ ID NO: 1867259
acugguaccgucauuauuc

SEQ ID NO: 1867261 - RNA, 19 nt, Artificial Sequence
  Description of Artificial Sequence: Synthetic oligonucleotide
  Sense strand starting at position 624 of SEQ ID NO: 1564267
gaaggauaacgccagugau

SEQ ID NO: 1867262 - RNA, 19 nt, Artificial Sequence
  Description of Artificial Sequence: Synthetic oligonucleotide
  Antisense strand to SEQ ID NO: 1867261
aucacuggcguuauccuuc

SEQ ID NO: 1867263 - RNA, 19 nt, Artificial Sequence
  Description of Artificial Sequence: Synthetic oligonucleotide
  Sense strand starting at position 636 of SEQ ID NO: 1564267
cagugaucuaugugggaau

SEQ ID NO: 1867264 - RNA, 19 nt, Artificial Sequence
  Description of Artificial Sequence: Synthetic oligonucleotide
  Antisense strand to SEQ ID NO: 1867263
auucccacauagaucacug

SEQ ID NO: 1867265 - RNA, 19 nt, Artificial Sequence
  Description of Artificial Sequence: Synthetic oligonucleotide
  Sense strand starting at position 638 of SEQ ID NO: 1564267
gugaucuaugugggaauuc

SEQ ID NO: 1867266 - RNA, 19 nt, Artificial Sequence
  Description of Artificial Sequence: Synthetic oligonucleotide
  Antisense strand to SEQ ID NO: 1867265
gaauucccacauagaucac

SEQ ID NO: 1867267 - RNA, 19 nt, Artificial Sequence
  Description of Artificial Sequence: Synthetic oligonucleotide
  Sense strand starting at position 723 of SEQ ID NO: 1564267
aggcacaauagguguaaua

SEQ ID NO: 1867268 - RNA, 19 nt, Artificial Sequence
  Description of Artificial Sequence: Synthetic oligonucleotide
  Antisense strand to SEQ ID NO: 1867267
uauuacaccuauugugccu

SEQ ID NO: 1867269 - RNA, 19 nt, Artificial Sequence
  Description of Artificial Sequence: Synthetic oligonucleotide
  Sense strand starting at position 725 of SEQ ID NO: 1564267
gcacaauagguguaauaug

SEQ ID NO: 1867270 - RNA, 19 nt, Artificial Sequence
  Description of Artificial Sequence: Synthetic oligonucleotide
  Antisense strand to SEQ ID NO: 1867269
cauauuacaccuauugugc

SEQ ID NO: 1867271 - RNA, 19 nt, Artificial Sequence
  Description of Artificial Sequence: Synthetic oligonucleotide
  Sense strand starting at position 989 of SEQ ID NO: 1564267
guccucuccagguagggau

SEQ ID NO: 1867272 - RNA, 19 nt, Artificial Sequence
  Description of Artificial Sequence: Synthetic oligonucleotide
  Antisense strand to SEQ ID NO: 1867271
aucccuaccuggagaggac

SEQ ID NO: 1867273 - RNA, 19 nt, Artificial Sequence
  Description of Artificial Sequence: Synthetic oligonucleotide
  Sense strand starting at position 1543 of SEQ ID NO: 1564267
acaaguaaugacugguuua

SEQ ID NO: 1867274 - RNA, 19 nt, Artificial Sequence
  Description of Artificial Sequence: Synthetic oligonucleotide
  Antisense strand to SEQ ID NO: 1867273
uaaaccagucauuacuugu

SEQ ID NO: 1867275 - RNA, 19 nt, Artificial Sequence
  Description of Artificial Sequence: Synthetic oligonucleotide
  Sense strand starting at position 1711 of SEQ ID NO: 1564267
ccggaaacacuguacaauu

SEQ ID NO: 1867276 - RNA, 19 nt, Artificial Sequence
  Description of Artificial Sequence: Synthetic oligonucleotide
  Antisense strand to SEQ ID NO: 1867275
aauuguacaguguuuccgg

SEQ ID NO: 1867277 - RNA, 19 nt, Artificial Sequence
  Description of Artificial Sequence: Synthetic oligonucleotide
  Sense strand starting at position 1939 of SEQ ID NO: 1564267
uguuucuaucaccagcaga

SEQ ID NO: 1867278 - RNA, 19 nt, Artificial Sequence
  Description of Artificial Sequence: Synthetic oligonucleotide
  Antisense strand to SEQ ID NO: 1867277
ucugcuggugauagaaaca

SEQ ID NO: 1867279 - RNA, 19 nt, Artificial Sequence
  Description of Artificial Sequence: Synthetic oligonucleotide
  Sense strand starting at position 1992 of SEQ ID NO: 1564267
ccuggugcccuagagagaa

SEQ ID NO: 1867280 - RNA, 19 nt, Artificial Sequence
  Description of Artificial Sequence: Synthetic oligonucleotide
  Antisense strand to SEQ ID NO: 1867279
uucucucuagggcaccagg

SEQ ID NO: 1867281 - RNA, 19 nt, Artificial Sequence
  Description of Artificial Sequence: Synthetic oligonucleotide
  Sense strand starting at position 2155 of SEQ ID NO: 1564267
uuuaccucugguggaauua

SEQ ID NO: 1867282 - RNA, 19 nt, Artificial Sequence
  Description of Artificial Sequence: Synthetic oligonucleotide
  Antisense strand to SEQ ID NO: 1867281
uaauuccaccagagguaaa

SEQ ID NO: 1867283 - RNA, 19 nt, Artificial Sequence
  Description of Artificial Sequence: Synthetic oligonucleotide
  Sense strand starting at position 2281 of SEQ ID NO: 1564267
uuucuaagcuagguauuaa

SEQ ID NO: 1867284 - RNA, 19 nt, Artificial Sequence
  Description of Artificial Sequence: Synthetic oligonucleotide
  Antisense strand to SEQ ID NO: 1867283
uuaauaccuagcuuagaaa

SEQ ID NO: 1867285 - RNA, 19 nt, Artificial Sequence
  Description of Artificial Sequence: Synthetic oligonucleotide
  Sense strand starting at position 2598 of SEQ ID NO: 1564267
gugaauauauuggucuaug

SEQ ID NO: 1867286 - RNA, 19 nt, Artificial Sequence
  Description of Artificial Sequence: Synthetic oligonucleotide
  Antisense strand to SEQ ID NO: 1867285
cauagaccaauauauucac

SEQ ID NO: 1867287 - RNA, 19 nt, Artificial Sequence
  Description of Artificial Sequence: Synthetic oligonucleotide
  Sense strand starting at position 2601 of SEQ ID NO: 1564267
aauauauuggucuauguug

SEQ ID NO: 1867288 - RNA, 19 nt, Artificial Sequence
  Description of Artificial Sequence: Synthetic oligonucleotide
  Antisense strand to SEQ ID NO: 1867287
caacauagaccaauauauu

SEQ ID NO: 1867289 - RNA, 19 nt, Artificial Sequence
  Description of Artificial Sequence: Synthetic oligonucleotide
  Sense strand starting at position 2635 of SEQ ID NO: 1564267
ugcguuaaggucugauuuc

SEQ ID NO: 1867290 - RNA, 19 nt, Artificial Sequence
  Description of Artificial Sequence: Synthetic oligonucleotide
  Antisense strand to SEQ ID NO: 1867289
gaaaucagaccuuaacgca

SEQ ID NO: 1867291 - RNA, 19 nt, Artificial Sequence
  Description of Artificial Sequence: Synthetic oligonucleotide
  Sense strand starting at position 2679 of SEQ ID NO: 1564267
ggcagagacugaguguuaa

SEQ ID NO: 1867292 - RNA, 19 nt, Artificial Sequence
  Description of Artificial Sequence: Synthetic oligonucleotide
  Antisense strand to SEQ ID NO: 1867291
uuaacacucagucucugcc

SEQ ID NO: 1867293 - RNA, 19 nt, Artificial Sequence
  Description of Artificial Sequence: Synthetic oligonucleotide
  Sense strand starting at position 2691 of SEQ ID NO: 1564267
guguuaagugaguuugugu

SEQ ID NO: 1867294 - RNA, 19 nt, Artificial Sequence
  Description of Artificial Sequence: Synthetic oligonucleotide
  Antisense strand to SEQ ID NO: 1867293
acacaaacucacuuaacac

SEQ ID NO: 1867295 - RNA, 19 nt, Artificial Sequence
  Description of Artificial Sequence: Synthetic oligonucleotide
  Sense strand starting at position 2706 of SEQ ID NO: 1564267
guguuaucucuagaggaac

SEQ ID NO: 1867296 - RNA, 19 nt, Artificial Sequence
  Description of Artificial Sequence: Synthetic oligonucleotide
  Antisense strand to SEQ ID NO: 1867295
guuccucuagagauaacac

SEQ ID NO: 1867297 - RNA, 19 nt, Artificial Sequence
  Description of Artificial Sequence: Synthetic oligonucleotide
  Sense strand starting at position 2830 of SEQ ID NO: 1564267
cugcauuuguggaggagag

SEQ ID NO: 1867298 - RNA, 19 nt, Artificial Sequence
  Description of Artificial Sequence: Synthetic oligonucleotide
  Antisense strand to SEQ ID NO: 1867297
cucuccuccacaaaugcag

SEQ ID NO: 1867299 - RNA, 19 nt, Artificial Sequence
  Description of Artificial Sequence: Synthetic oligonucleotide
  Sense strand starting at position 2919 of SEQ ID NO: 1564267
uuccauugacuuggucaca

SEQ ID NO: 1867300 - RNA, 19 nt, Artificial Sequence
  Description of Artificial Sequence: Synthetic oligonucleotide
  Antisense strand to SEQ ID NO: 1867299
ugugaccaagucaauggaa

SEQ ID NO: 1867301 - RNA, 19 nt, Artificial Sequence
  Description of Artificial Sequence: Synthetic oligonucleotide
  Sense strand starting at position 2954 of SEQ ID NO: 1564267
uucgaauauugaccuagga

SEQ ID NO: 1867302 - RNA, 19 nt, Artificial Sequence
  Description of Artificial Sequence: Synthetic oligonucleotide
  Antisense strand to SEQ ID NO: 1867301
uccuaggucaauauucgaa

SEQ ID NO: 1867303 - RNA, 19 nt, Artificial Sequence
  Description of Artificial Sequence: Synthetic oligonucleotide
  Sense strand starting at position 3042 of SEQ ID NO: 1564267
auugccaggcuuuauacua

SEQ ID NO: 1867304 - RNA, 19 nt, Artificial Sequence
  Description of Artificial Sequence: Synthetic oligonucleotide
  Antisense strand to SEQ ID NO: 1867303
uaguauaaagccuggcaau

SEQ ID NO: 1867305 - RNA, 19 nt, Artificial Sequence
  Description of Artificial Sequence: Synthetic oligonucleotide
  Sense strand starting at position 3150 of SEQ ID NO: 1564267
gagguaaagucguuaggaa

SEQ ID NO: 1867306 - RNA, 19 nt, Artificial Sequence
  Description of Artificial Sequence: Synthetic oligonucleotide
  Antisense strand to SEQ ID NO: 1867305
uuccuaacgacuuuaccuc

SEQ ID NO: 1867307 - RNA, 19 nt, Artificial Sequence
  Description of Artificial Sequence: Synthetic oligonucleotide
  Sense strand starting at position 3151 of SEQ ID NO: 1564267
agguaaagucguuaggaaa

SEQ ID NO: 1867308 - RNA, 19 nt, Artificial Sequence
  Description of Artificial Sequence: Synthetic oligonucleotide
  Antisense strand to SEQ ID NO: 1867307
uuuccuaacgacuuuaccu

SEQ ID NO: 1867309 - RNA, 19 nt, Artificial Sequence
  Description of Artificial Sequence: Synthetic oligonucleotide
  Sense strand starting at position 3158 of SEQ ID NO: 1564267
gucguuaggaaauaccaaa

SEQ ID NO: 1867310 - RNA, 19 nt, Artificial Sequence
  Description of Artificial Sequence: Synthetic oligonucleotide
  Antisense strand to SEQ ID NO: 1867309
uuugguauuuccuaacgac

SEQ ID NO: 1867311 - RNA, 19 nt, Artificial Sequence
  Description of Artificial Sequence: Synthetic oligonucleotide
  Sense strand starting at position 3200 of SEQ ID NO: 1564267
gucuaaguauaugcaaaga

SEQ ID NO: 1867312 - RNA, 19 nt, Artificial Sequence
  Description of Artificial Sequence: Synthetic oligonucleotide
  Antisense strand to SEQ ID NO: 1867311
ucuuugcauauacuuagac

SEQ ID NO: 1867313 - RNA, 19 nt, Artificial Sequence
  Description of Artificial Sequence: Synthetic oligonucleotide
  Sense strand starting at position 3244 of SEQ ID NO: 1564267
acugaaggguucuuauacu

SEQ ID NO: 1867314 - RNA, 19 nt, Artificial Sequence
  Description of Artificial Sequence: Synthetic oligonucleotide
  Antisense strand to SEQ ID NO: 1867313
aguauaagaacccuucagu

SEQ ID NO: 1867315 - RNA, 19 nt, Artificial Sequence
  Description of Artificial Sequence: Synthetic oligonucleotide
  Sense strand starting at position 3309 of SEQ ID NO: 1564267
agagaaguuucucugaaac

SEQ ID NO: 1867316 - RNA, 19 nt, Artificial Sequence
  Description of Artificial Sequence: Synthetic oligonucleotide
  Antisense strand to SEQ ID NO: 1867315
guuucagagaaacuucucu

SEQ ID NO: 1867317 - RNA, 19 nt, Artificial Sequence
  Description of Artificial Sequence: Synthetic oligonucleotide
  Sense strand starting at position 3374 of SEQ ID NO: 1564267
gaaauaugucuguagcuga

SEQ ID NO: 1867318 - RNA, 19 nt, Artificial Sequence
  Description of Artificial Sequence: Synthetic oligonucleotide
  Antisense strand to SEQ ID NO: 1867317
ucagcuacagacauauuuc

SEQ ID NO: 1867319 - RNA, 19 nt, Artificial Sequence
  Description of Artificial Sequence: Synthetic oligonucleotide
  Sense strand starting at position 3379 of SEQ ID NO: 1564267
augucuguagcugaagaaa

SEQ ID NO: 1867320 - RNA, 19 nt, Artificial Sequence
  Description of Artificial Sequence: Synthetic oligonucleotide
  Antisense strand to SEQ ID NO: 1867319
uuucuucagcuacagacau

SEQ ID NO: 1867321 - RNA, 19 nt, Artificial Sequence
  Description of Artificial Sequence: Synthetic oligonucleotide
  Sense strand starting at position 3726 of SEQ ID NO: 1564267
ucccuaggccacuagauaa

SEQ ID NO: 1867322 - RNA, 19 nt, Artificial Sequence
  Description of Artificial Sequence: Synthetic oligonucleotide
  Antisense strand to SEQ ID NO: 1867321
uuaucuaguggccuaggga

SEQ ID NO: 1867323 - RNA, 19 nt, Artificial Sequence
  Description of Artificial Sequence: Synthetic oligonucleotide
  Sense strand starting at position 3772 of SEQ ID NO: 1564267
cugugauaauaaguauuga

SEQ ID NO: 1867324 - RNA, 19 nt, Artificial Sequence
  Description of Artificial Sequence: Synthetic oligonucleotide
  Antisense strand to SEQ ID NO: 1867323
ucaauacuuauuaucacag

SEQ ID NO: 1867325 - RNA, 19 nt, Artificial Sequence
  Description of Artificial Sequence: Synthetic oligonucleotide
  Sense strand starting at position 3809 of SEQ ID NO: 1564267
ugcuaagagcuugauacac

SEQ ID NO: 1867326 - RNA, 19 nt, Artificial Sequence
  Description of Artificial Sequence: Synthetic oligonucleotide
  Antisense strand to SEQ ID NO: 1867325
guguaucaagcucuuagca

SEQ ID NO: 1867327 - RNA, 19 nt, Artificial Sequence
  Description of Artificial Sequence: Synthetic oligonucleotide
  Sense strand starting at position 3858 of SEQ ID NO: 1564267
cuauuaugagguugacaca

SEQ ID NO: 1867328 - RNA, 19 nt, Artificial Sequence
  Description of Artificial Sequence: Synthetic oligonucleotide
  Antisense strand to SEQ ID NO: 1867327
ugugucaaccucauaauag

SEQ ID NO: 1867329 - RNA, 19 nt, Artificial Sequence
  Description of Artificial Sequence: Synthetic oligonucleotide
  Sense strand starting at position 3937 of SEQ ID NO: 1564267
ggacuaaaccugggcaacu

SEQ ID NO: 1867330 - RNA, 19 nt, Artificial Sequence
  Description of Artificial Sequence: Synthetic oligonucleotide
  Antisense strand to SEQ ID NO: 1867329
aguugcccagguuuagucc

SEQ ID NO: 1867331 - RNA, 19 nt, Artificial Sequence
  Description of Artificial Sequence: Synthetic oligonucleotide
  Sense strand starting at position 235 of SEQ ID NO: 1564268
aggucugacucuucuacuu

SEQ ID NO: 1867332 - RNA, 19 nt, Artificial Sequence
  Description of Artificial Sequence: Synthetic oligonucleotide
  Antisense strand to SEQ ID NO: 1867331
aaguagaagagucagaccu

SEQ ID NO: 1867333 - RNA, 19 nt, Artificial Sequence
  Description of Artificial Sequence: Synthetic oligonucleotide
  Sense strand starting at position 390 of SEQ ID NO: 1564268
ugcauacugcaggauaaga

SEQ ID NO: 1867334 - RNA, 19 nt, Artificial Sequence
  Description of Artificial Sequence: Synthetic oligonucleotide
  Antisense strand to SEQ ID NO: 1867333
ucuuauccugcaguaugca

SEQ ID NO: 1867335 - RNA, 19 nt, Artificial Sequence
  Description of Artificial Sequence: Synthetic oligonucleotide
  Sense strand starting at position 414 of SEQ ID NO: 1564268
aguccaagucagcauaaau

SEQ ID NO: 1867336 - RNA, 19 nt, Artificial Sequence
  Description of Artificial Sequence: Synthetic oligonucleotide
  Antisense strand to SEQ ID NO: 1867335
auuuaugcugacuuggacu

SEQ ID NO: 1867337 - RNA, 19 nt, Artificial Sequence
  Description of Artificial Sequence: Synthetic oligonucleotide
  Sense strand starting at position 562 of SEQ ID NO: 1564268
gcugaacuguuacuugaua

SEQ ID NO: 1867338 - RNA, 19 nt, Artificial Sequence
  Description of Artificial Sequence: Synthetic oligonucleotide
  Antisense strand to SEQ ID NO: 1867337
uaucaaguaacaguucagc

SEQ ID NO: 1867339 - RNA, 19 nt, Artificial Sequence
  Description of Artificial Sequence: Synthetic oligonucleotide
  Sense strand starting at position 563 of SEQ ID NO: 1564268
cugaacuguuacuugauaa

SEQ ID NO: 1867340 - RNA, 19 nt, Artificial Sequence
  Description of Artificial Sequence: Synthetic oligonucleotide
  Antisense strand to SEQ ID NO: 1867339
uuaucaaguaacaguucag

SEQ ID NO: 1867341 - RNA, 19 nt, Artificial Sequence
  Description of Artificial Sequence: Synthetic oligonucleotide
  Sense strand starting at position 574 of SEQ ID NO: 1564268
cuugauaaguuuccauaag

SEQ ID NO: 1867342 - RNA, 19 nt, Artificial Sequence
  Description of Artificial Sequence: Synthetic oligonucleotide
  Antisense strand to SEQ ID NO: 1867341
cuuauggaaacuuaucaag

SEQ ID NO: 1867343 - RNA, 19 nt, Artificial Sequence
  Description of Artificial Sequence: Synthetic oligonucleotide
  Sense strand starting at position 760 of SEQ ID NO: 1564268
gaauaaugacgguaccagu

SEQ ID NO: 1867344 - RNA, 19 nt, Artificial Sequence
  Description of Artificial Sequence: Synthetic oligonucleotide
  Antisense strand to SEQ ID NO: 1867343
acugguaccgucauuauuc

SEQ ID NO: 1867345 - RNA, 19 nt, Artificial Sequence
  Description of Artificial Sequence: Synthetic oligonucleotide
  Sense strand starting at position 871 of SEQ ID NO: 1564268
gaaggauaacgccagugau

SEQ ID NO: 1867346 - RNA, 19 nt, Artificial Sequence
  Description of Artificial Sequence: Synthetic oligonucleotide
  Antisense strand to SEQ ID NO: 1867345
aucacuggcguuauccuuc

SEQ ID NO: 1867347 - RNA, 19 nt, Artificial Sequence
  Description of Artificial Sequence: Synthetic oligonucleotide
  Sense strand starting at position 883 of SEQ ID NO: 1564268
cagugaucuaugugggaau

SEQ ID NO: 1867348 - RNA, 19 nt, Artificial Sequence
  Description of Artificial Sequence: Synthetic oligonucleotide
  Antisense strand to SEQ ID NO: 1867347
auucccacauagaucacug

SEQ ID NO: 1867349 - RNA, 19 nt, Artificial Sequence
  Description of Artificial Sequence: Synthetic oligonucleotide
  Sense strand starting at position 885 of SEQ ID NO: 1564268
gugaucuaugugggaauuc

SEQ ID NO: 1867350 - RNA, 19 nt, Artificial Sequence
  Description of Artificial Sequence: Synthetic oligonucleotide
  Antisense strand to SEQ ID NO: 1867349
gaauucccacauagaucac

SEQ ID NO: 1867351 - RNA, 19 nt, Artificial Sequence
  Description of Artificial Sequence: Synthetic oligonucleotide
  Sense strand starting at position 970 of SEQ ID NO: 1564268
aggcacaauagguguaaua

SEQ ID NO: 1867352 - RNA, 19 nt, Artificial Sequence
  Description of Artificial Sequence: Synthetic oligonucleotide
  Antisense strand to SEQ ID NO: 1867351
uauuacaccuauugugccu

SEQ ID NO: 1867353 - RNA, 19 nt, Artificial Sequence
  Description of Artificial Sequence: Synthetic oligonucleotide
  Sense strand starting at position 972 of SEQ ID NO: 1564268
gcacaauagguguaauaug

SEQ ID NO: 1867354 - RNA, 19 nt, Artificial Sequence
  Description of Artificial Sequence: Synthetic oligonucleotide
  Antisense strand to SEQ ID NO: 1867353
cauauuacaccuauugugc

SEQ ID NO: 1867355 - RNA, 19 nt, Artificial Sequence
  Description of Artificial Sequence: Synthetic oligonucleotide
  Sense strand starting at position 1236 of SEQ ID NO: 1564268
guccucuccagguagggau

SEQ ID NO: 1867356 - RNA, 19 nt, Artificial Sequence
  Description of Artificial Sequence: Synthetic oligonucleotide
  Antisense strand to SEQ ID NO: 1867355
aucccuaccuggagaggac

SEQ ID NO: 1867357 - RNA, 19 nt, Artificial Sequence
  Description of Artificial Sequence: Synthetic oligonucleotide
  Sense strand starting at position 1790 of SEQ ID NO: 1564268
acaaguaaugacugguuua

SEQ ID NO: 1867358 - RNA, 19 nt, Artificial Sequence
  Description of Artificial Sequence: Synthetic oligonucleotide
  Antisense strand to SEQ ID NO: 1867357
uaaaccagucauuacuugu

SEQ ID NO: 1867359 - RNA, 19 nt, Artificial Sequence
  Description of Artificial Sequence: Synthetic oligonucleotide
  Sense strand starting at position 1958 of SEQ ID NO: 1564268
ccggaaacacuguacaauu

SEQ ID NO: 1867360 - RNA, 19 nt, Artificial Sequence
  Description of Artificial Sequence: Synthetic oligonucleotide
  Antisense strand to SEQ ID NO: 1867359
aauuguacaguguuuccgg

SEQ ID NO: 1867361 - RNA, 19 nt, Artificial Sequence
  Description of Artificial Sequence: Synthetic oligonucleotide
  Sense strand starting at position 2186 of SEQ ID NO: 1564268
uguuucuaucaccagcaga

SEQ ID NO: 1867362 - RNA, 19 nt, Artificial Sequence
  Description of Artificial Sequence: Synthetic oligonucleotide
  Antisense strand to SEQ ID NO: 1867361
ucugcuggugauagaaaca

SEQ ID NO: 1867363 - RNA, 19 nt, Artificial Sequence
  Description of Artificial Sequence: Synthetic oligonucleotide
  Sense strand starting at position 2239 of SEQ ID NO: 1564268
ccuggugcccuagagagaa

SEQ ID NO: 1867364 - RNA, 19 nt, Artificial Sequence
  Description of Artificial Sequence: Synthetic oligonucleotide
  Antisense strand to SEQ ID NO: 1867363
uucucucuagggcaccagg

SEQ ID NO: 1867365 - RNA, 19 nt, Artificial Sequence
  Description of Artificial Sequence: Synthetic oligonucleotide
  Sense strand starting at position 2402 of SEQ ID NO: 1564268
uuuaccucugguggaauua

SEQ ID NO: 1867366 - RNA, 19 nt, Artificial Sequence
  Description of Artificial Sequence: Synthetic oligonucleotide
  Antisense strand to SEQ ID NO: 1867365
uaauuccaccagagguaaa

SEQ ID NO: 1867367 - RNA, 19 nt, Artificial Sequence
  Description of Artificial Sequence: Synthetic oligonucleotide
  Sense strand starting at position 2528 of SEQ ID NO: 1564268
uuucuaagcuagguauuaa

SEQ ID NO: 1867368 - RNA, 19 nt, Artificial Sequence
  Description of Artificial Sequence: Synthetic oligonucleotide
  Antisense strand to SEQ ID NO: 1867367
uuaauaccuagcuuagaaa

SEQ ID NO: 1867369 - RNA, 19 nt, Artificial Sequence
  Description of Artificial Sequence: Synthetic oligonucleotide
  Sense strand starting at position 2845 of SEQ ID NO: 1564268
gugaauauauuggucuaug

SEQ ID NO: 1867370 - RNA, 19 nt, Artificial Sequence
  Description of Artificial Sequence: Synthetic oligonucleotide
  Antisense strand to SEQ ID NO: 1867369
cauagaccaauauauucac

SEQ ID NO: 1867371 - RNA, 19 nt, Artificial Sequence
  Description of Artificial Sequence: Synthetic oligonucleotide
  Sense strand starting at position 2848 of SEQ ID NO: 1564268
aauauauuggucuauguug

SEQ ID NO: 1867372 - RNA, 19 nt, Artificial Sequence
  Description of Artificial Sequence: Synthetic oligonucleotide
  Antisense strand to SEQ ID NO: 1867371
caacauagaccaauauauu

SEQ ID NO: 1867373 - RNA, 19 nt, Artificial Sequence
  Description of Artificial Sequence: Synthetic oligonucleotide
  Sense strand starting at position 2882 of SEQ ID NO: 1564268
ugcguuaaggucugauuuc

SEQ ID NO: 1867374 - RNA, 19 nt, Artificial Sequence
  Description of Artificial Sequence: Synthetic oligonucleotide
  Antisense strand to SEQ ID NO: 1867373
gaaaucagaccuuaacgca

SEQ ID NO: 1867375 - RNA, 19 nt, Artificial Sequence
  Description of Artificial Sequence: Synthetic oligonucleotide
  Sense strand starting at position 2926 of SEQ ID NO: 1564268
ggcagagacugaguguuaa

SEQ ID NO: 1867376 - RNA, 19 nt, Artificial Sequence
  Description of Artificial Sequence: Synthetic oligonucleotide
  Antisense strand to SEQ ID NO: 1867375
uuaacacucagucucugcc

SEQ ID NO: 1867377 - RNA, 19 nt, Artificial Sequence
  Description of Artificial Sequence: Synthetic oligonucleotide
  Sense strand starting at position 2938 of SEQ ID NO: 1564268
guguuaagugaguuugugu

SEQ ID NO: 1867378 - RNA, 19 nt, Artificial Sequence
  Description of Artificial Sequence: Synthetic oligonucleotide
  Antisense strand to SEQ ID NO: 1867377
acacaaacucacuuaacac

SEQ ID NO: 1867379 - RNA, 19 nt, Artificial Sequence
  Description of Artificial Sequence: Synthetic oligonucleotide
  Sense strand starting at position 2953 of SEQ ID NO: 1564268
guguuaucucuagaggaac

SEQ ID NO: 1867380 - RNA, 19 nt, Artificial Sequence
  Description of Artificial Sequence: Synthetic oligonucleotide
  Antisense strand to SEQ ID NO: 1867379
guuccucuagagauaacac

SEQ ID NO: 1867381 - RNA, 19 nt, Artificial Sequence
  Description of Artificial Sequence: Synthetic oligonucleotide
  Sense strand starting at position 2975 of SEQ ID NO: 1564268
guuagaaggcuguaucagu

SEQ ID NO: 1867382 - RNA, 19 nt, Artificial Sequence
  Description of Artificial Sequence: Synthetic oligonucleotide
  Antisense strand to SEQ ID NO: 1867381
acugauacagccuucuaac

SEQ ID NO: 1867383 - RNA, 19 nt, Artificial Sequence
  Description of Artificial Sequence: Synthetic oligonucleotide
  Sense strand starting at position 3077 of SEQ ID NO: 1564268
cugcauuuguggaggagag

SEQ ID NO: 1867384 - RNA, 19 nt, Artificial Sequence
  Description of Artificial Sequence: Synthetic oligonucleotide
  Antisense strand to SEQ ID NO: 1867383
cucuccuccacaaaugcag

SEQ ID NO: 1867385 - RNA, 19 nt, Artificial Sequence
  Description of Artificial Sequence: Synthetic oligonucleotide
  Sense strand starting at position 3166 of SEQ ID NO: 1564268
uuccauugacuuggucaca

SEQ ID NO: 1867386 - RNA, 19 nt, Artificial Sequence
  Description of Artificial Sequence: Synthetic oligonucleotide
  Antisense strand to SEQ ID NO: 1867385
ugugaccaagucaauggaa

SEQ ID NO: 1867387 - RNA, 19 nt, Artificial Sequence
  Description of Artificial Sequence: Synthetic oligonucleotide
  Sense strand starting at position 3201 of SEQ ID NO: 1564268
uucgaauauugaccuagga

SEQ ID NO: 1867388 - RNA, 19 nt, Artificial Sequence
  Description of Artificial Sequence: Synthetic oligonucleotide
  Antisense strand to SEQ ID NO: 1867387
uccuaggucaauauucgaa

SEQ ID NO: 1867389 - RNA, 19 nt, Artificial Sequence
  Description of Artificial Sequence: Synthetic oligonucleotide
  Sense strand starting at position 3289 of SEQ ID NO: 1564268
auugccaggcuuuauacua

SEQ ID NO: 1867390 - RNA, 19 nt, Artificial Sequence
  Description of Artificial Sequence: Synthetic oligonucleotide
  Antisense strand to SEQ ID NO: 1867389
uaguauaaagccuggcaau

SEQ ID NO: 1867391 - RNA, 19 nt, Artificial Sequence
  Description of Artificial Sequence: Synthetic oligonucleotide
  Sense strand starting at position 3397 of SEQ ID NO: 1564268
gagguaaagucguuaggaa

SEQ ID NO: 1867392 - RNA, 19 nt, Artificial Sequence
  Description of Artificial Sequence: Synthetic oligonucleotide
  Antisense strand to SEQ ID NO: 1867391
uuccuaacgacuuuaccuc

SEQ ID NO: 1867393 - RNA, 19 nt, Artificial Sequence
  Description of Artificial Sequence: Synthetic oligonucleotide
  Sense strand starting at position 3398 of SEQ ID NO: 1564268
agguaaagucguuaggaaa

SEQ ID NO: 1867394 - RNA, 19 nt, Artificial Sequence
  Description of Artificial Sequence: Synthetic oligonucleotide
  Antisense strand to SEQ ID NO: 1867393
uuuccuaacgacuuuaccu

SEQ ID NO: 1867395 - RNA, 19 nt, Artificial Sequence
  Description of Artificial Sequence: Synthetic oligonucleotide
  Sense strand starting at position 3405 of SEQ ID NO: 1564268
gucguuaggaaauaccaaa

SEQ ID NO: 1867396 - RNA, 19 nt, Artificial Sequence
  Description of Artificial Sequence: Synthetic oligonucleotide
  Antisense strand to SEQ ID NO: 1867395
uuugguauuuccuaacgac

SEQ ID NO: 1867397 - RNA, 19 nt, Artificial Sequence
  Description of Artificial Sequence: Synthetic oligonucleotide
  Sense strand starting at position 3444 of SEQ ID NO: 1564268
ggugucuaaguauaugcaa

SEQ ID NO: 1867398 - RNA, 19 nt, Artificial Sequence
  Description of Artificial Sequence: Synthetic oligonucleotide
  Antisense strand to SEQ ID NO: 1867397
uugcauauacuuagacacc

SEQ ID NO: 1867399 - RNA, 19 nt, Artificial Sequence
  Description of Artificial Sequence: Synthetic oligonucleotide
  Sense strand starting at position 3447 of SEQ ID NO: 1564268
gucuaaguauaugcaaaga

SEQ ID NO: 1867400 - RNA, 19 nt, Artificial Sequence
  Description of Artificial Sequence: Synthetic oligonucleotide
  Antisense strand to SEQ ID NO: 1867399
ucuuugcauauacuuagac

SEQ ID NO: 1867401 - RNA, 19 nt, Artificial Sequence
  Description of Artificial Sequence: Synthetic oligonucleotide
  Sense strand starting at position 3491 of SEQ ID NO: 1564268
acugaaggguucuuauacu

SEQ ID NO: 1867402 - RNA, 19 nt, Artificial Sequence
  Description of Artificial Sequence: Synthetic oligonucleotide
  Antisense strand to SEQ ID NO: 1867401
aguauaagaacccuucagu

SEQ ID NO: 1867403 - RNA, 19 nt, Artificial Sequence
  Description of Artificial Sequence: Synthetic oligonucleotide
  Sense strand starting at position 3556 of SEQ ID NO: 1564268
agagaaguuucucugaaac

SEQ ID NO: 1867404 - RNA, 19 nt, Artificial Sequence
  Description of Artificial Sequence: Synthetic oligonucleotide
  Antisense strand to SEQ ID NO: 1867403
guuucagagaaacuucucu

SEQ ID NO: 1867405 - RNA, 19 nt, Artificial Sequence
  Description of Artificial Sequence: Synthetic oligonucleotide
  Sense strand starting at position 3621 of SEQ ID NO: 1564268
gaaauaugucuguagcuga

SEQ ID NO: 1867406 - RNA, 19 nt, Artificial Sequence
  Description of Artificial Sequence: Synthetic oligonucleotide
  Antisense strand to SEQ ID NO: 1867405
ucagcuacagacauauuuc

SEQ ID NO: 1867407 - RNA, 19 nt, Artificial Sequence
  Description of Artificial Sequence: Synthetic oligonucleotide
  Sense strand starting at position 3626 of SEQ ID NO: 1564268
augucuguagcugaagaaa

SEQ ID NO: 1867408 - RNA, 19 nt, Artificial Sequence
  Description of Artificial Sequence: Synthetic oligonucleotide
  Antisense strand to SEQ ID NO: 1867407
uuucuucagcuacagacau

SEQ ID NO: 1867409 - RNA, 19 nt, Artificial Sequence
  Description of Artificial Sequence: Synthetic oligonucleotide
  Sense strand starting at position 3973 of SEQ ID NO: 1564268
ucccuaggccacuagauaa

SEQ ID NO: 1867410 - RNA, 19 nt, Artificial Sequence
  Description of Artificial Sequence: Synthetic oligonucleotide
  Antisense strand to SEQ ID NO: 1867409
uuaucuaguggccuaggga

SEQ ID NO: 1867411 - RNA, 19 nt, Artificial Sequence
  Description of Artificial Sequence: Synthetic oligonucleotide
  Sense strand starting at position 172 of SEQ ID NO: 1564269
augauaugaucugugcaua

SEQ ID NO: 1867412 - RNA, 19 nt, Artificial Sequence
  Description of Artificial Sequence: Synthetic oligonucleotide
  Antisense strand to SEQ ID NO: 1867411
uaugcacagaucauaucau

SEQ ID NO: 1867413 - RNA, 19 nt, Artificial Sequence
  Description of Artificial Sequence: Synthetic oligonucleotide
  Sense strand starting at position 173 of SEQ ID NO: 1564269
ugauaugaucugugcauag

SEQ ID NO: 1867414 - RNA, 19 nt, Artificial Sequence
  Description of Artificial Sequence: Synthetic oligonucleotide
  Antisense strand to SEQ ID NO: 1867413
cuaugcacagaucauauca

SEQ ID NO: 1867415 - RNA, 19 nt, Artificial Sequence
  Description of Artificial Sequence: Synthetic oligonucleotide
  Sense strand starting at position 175 of SEQ ID NO: 1564269
auaugaucugugcauagcu

SEQ ID NO: 1867416 - RNA, 19 nt, Artificial Sequence
  Description of Artificial Sequence: Synthetic oligonucleotide
  Antisense strand to SEQ ID NO: 1867415
agcuaugcacagaucauau

SEQ ID NO: 1867417 - RNA, 19 nt, Artificial Sequence
  Description of Artificial Sequence: Synthetic oligonucleotide
  Sense strand starting at position 712 of SEQ ID NO: 1564269
ugauuaugggcguaaggaa

SEQ ID NO: 1867418 - RNA, 19 nt, Artificial Sequence
  Description of Artificial Sequence: Synthetic oligonucleotide
  Antisense strand to SEQ ID NO: 1867417
uuccuuacgcccauaauca

SEQ ID NO: 1867419 - RNA, 19 nt, Artificial Sequence
  Description of Artificial Sequence: Synthetic oligonucleotide
  Sense strand starting at position 771 of SEQ ID NO: 1564269
agggaauggucuuuaagua

SEQ ID NO: 1867420 - RNA, 19 nt, Artificial Sequence
  Description of Artificial Sequence: Synthetic oligonucleotide
  Antisense strand to SEQ ID NO: 1867419
uacuuaaagaccauucccu

SEQ ID NO: 1867421 - RNA, 19 nt, Artificial Sequence
  Description of Artificial Sequence: Synthetic oligonucleotide
  Sense strand starting at position 772 of SEQ ID NO: 1564269
gggaauggucuuuaaguac

SEQ ID NO: 1867422 - RNA, 19 nt, Artificial Sequence
  Description of Artificial Sequence: Synthetic oligonucleotide
  Antisense strand to SEQ ID NO: 1867421
guacuuaaagaccauuccc

SEQ ID NO: 1867423 - RNA, 19 nt, Artificial Sequence
  Description of Artificial Sequence: Synthetic oligonucleotide
  Sense strand starting at position 1193 of SEQ ID NO: 1564269
ucucuugggucaccaagaa

SEQ ID NO: 1867424 - RNA, 19 nt, Artificial Sequence
  Description of Artificial Sequence: Synthetic oligonucleotide
  Antisense strand to SEQ ID NO: 1867423
uucuuggugacccaagaga

SEQ ID NO: 1867425 - RNA, 19 nt, Artificial Sequence
  Description of Artificial Sequence: Synthetic oligonucleotide
  Sense strand starting at position 1512 of SEQ ID NO: 1564269
cgaauaaacccgcaacuuu

SEQ ID NO: 1867426 - RNA, 19 nt, Artificial Sequence
  Description of Artificial Sequence: Synthetic oligonucleotide
  Antisense strand to SEQ ID NO: 1867425
aaaguugcggguuuauucg

SEQ ID NO: 1867427 - RNA, 19 nt, Artificial Sequence
  Description of Artificial Sequence: Synthetic oligonucleotide
  Sense strand starting at position 1542 of SEQ ID NO: 1564269
gacccuaucccgggagauu

SEQ ID NO: 1867428 - RNA, 19 nt, Artificial Sequence
  Description of Artificial Sequence: Synthetic oligonucleotide
  Antisense strand to SEQ ID NO: 1867427
aaucucccgggauaggguc

SEQ ID NO: 1867429 - RNA, 19 nt, Artificial Sequence
  Description of Artificial Sequence: Synthetic oligonucleotide
  Sense strand starting at position 2324 of SEQ ID NO: 1564269
uuagauuucugcuuuguac

SEQ ID NO: 1867430 - RNA, 19 nt, Artificial Sequence
  Description of Artificial Sequence: Synthetic oligonucleotide
  Antisense strand to SEQ ID NO: 1867429
guacaaagcagaaaucuaa

SEQ ID NO: 1867431 - RNA, 19 nt, Artificial Sequence
  Description of Artificial Sequence: Synthetic oligonucleotide
  Sense strand starting at position 2326 of SEQ ID NO: 1564269
agauuucugcuuuguacac

SEQ ID NO: 1867432 - RNA, 19 nt, Artificial Sequence
  Description of Artificial Sequence: Synthetic oligonucleotide
  Antisense strand to SEQ ID NO: 1867431
guguacaaagcagaaaucu

SEQ ID NO: 1867433 - RNA, 19 nt, Artificial Sequence
  Description of Artificial Sequence: Synthetic oligonucleotide
  Sense strand starting at position 2343 of SEQ ID NO: 1564269
acaguugggcguuacauuu

SEQ ID NO: 1867434 - RNA, 19 nt, Artificial Sequence
  Description of Artificial Sequence: Synthetic oligonucleotide
  Antisense strand to SEQ ID NO: 1867433
aaauguaacgcccaacugu

SEQ ID NO: 1867435 - RNA, 19 nt, Artificial Sequence
  Description of Artificial Sequence: Synthetic oligonucleotide
  Sense strand starting at position 2350 of SEQ ID NO: 1564269
ggcguuacauuugcaggua

SEQ ID NO: 1867436 - RNA, 19 nt, Artificial Sequence
  Description of Artificial Sequence: Synthetic oligonucleotide
  Antisense strand to SEQ ID NO: 1867435
uaccugcaaauguaacgcc

SEQ ID NO: 1867437 - RNA, 19 nt, Artificial Sequence
  Description of Artificial Sequence: Synthetic oligonucleotide
  Sense strand starting at position 2448 of SEQ ID NO: 1564269
gccuucucacauggaaaug

SEQ ID NO: 1867438 - RNA, 19 nt, Artificial Sequence
  Description of Artificial Sequence: Synthetic oligonucleotide
  Antisense strand to SEQ ID NO: 1867437
cauuuccaugugagaaggc

SEQ ID NO: 1867439 - RNA, 19 nt, Artificial Sequence
  Description of Artificial Sequence: Synthetic oligonucleotide
  Sense strand starting at position 2622 of SEQ ID NO: 1564269
ucagauuugucuuacauuu

SEQ ID NO: 1867440 - RNA, 19 nt, Artificial Sequence
  Description of Artificial Sequence: Synthetic oligonucleotide
  Antisense strand to SEQ ID NO: 1867439
aaauguaagacaaaucuga

SEQ ID NO: 1867441 - RNA, 19 nt, Artificial Sequence
  Description of Artificial Sequence: Synthetic oligonucleotide
  Sense strand starting at position 2661 of SEQ ID NO: 1564269
acaagaaaggucuguauga

SEQ ID NO: 1867442 - RNA, 19 nt, Artificial Sequence
  Description of Artificial Sequence: Synthetic oligonucleotide
  Antisense strand to SEQ ID NO: 1867441
ucauacagaccuuucuugu

SEQ ID NO: 1867443 - RNA, 19 nt, Artificial Sequence
  Description of Artificial Sequence: Synthetic oligonucleotide
  Sense strand starting at position 2662 of SEQ ID NO: 1564269
caagaaaggucuguaugag

SEQ ID NO: 1867444 - RNA, 19 nt, Artificial Sequence
  Description of Artificial Sequence: Synthetic oligonucleotide
  Antisense strand to SEQ ID NO: 1867443
cucauacagaccuuucuug

SEQ ID NO: 1867445 - RNA, 19 nt, Artificial Sequence
  Description of Artificial Sequence: Synthetic oligonucleotide
  Sense strand starting at position 2683 of SEQ ID NO: 1564269
gucauucuugcugcgcaua

SEQ ID NO: 1867446 - RNA, 19 nt, Artificial Sequence
  Description of Artificial Sequence: Synthetic oligonucleotide
  Antisense strand to SEQ ID NO: 1867445
uaugcgcagcaagaaugac

SEQ ID NO: 1867447 - RNA, 19 nt, Artificial Sequence
  Description of Artificial Sequence: Synthetic oligonucleotide
  Sense strand starting at position 2697 of SEQ ID NO: 1564269
gcauacaauguuuaacaga

SEQ ID NO: 1867448 - RNA, 19 nt, Artificial Sequence
  Description of Artificial Sequence: Synthetic oligonucleotide
  Antisense strand to SEQ ID NO: 1867447
ucuguuaaacauuguaugc

SEQ ID NO: 1867449 - RNA, 19 nt, Artificial Sequence
  Description of Artificial Sequence: Synthetic oligonucleotide
  Sense strand starting at position 2727 of SEQ ID NO: 1564269
uguuuaauaugccugagaa

SEQ ID NO: 1867450 - RNA, 19 nt, Artificial Sequence
  Description of Artificial Sequence: Synthetic oligonucleotide
  Antisense strand to SEQ ID NO: 1867449
uucucaggcauauuaaaca

SEQ ID NO: 1867451 - RNA, 19 nt, Artificial Sequence
  Description of Artificial Sequence: Synthetic oligonucleotide
  Sense strand starting at position 2728 of SEQ ID NO: 1564269
guuuaauaugccugagaau

SEQ ID NO: 1867452 - RNA, 19 nt, Artificial Sequence
  Description of Artificial Sequence: Synthetic oligonucleotide
  Antisense strand to SEQ ID NO: 1867451
auucucaggcauauuaaac

SEQ ID NO: 1867453 - RNA, 19 nt, Artificial Sequence
  Description of Artificial Sequence: Synthetic oligonucleotide
  Sense strand starting at position 2729 of SEQ ID NO: 1564269
uuuaauaugccugagaauc

SEQ ID NO: 1867454 - RNA, 19 nt, Artificial Sequence
  Description of Artificial Sequence: Synthetic oligonucleotide
  Antisense strand to SEQ ID NO: 1867453
gauucucaggcauauuaaa

SEQ ID NO: 1867455 - RNA, 19 nt, Artificial Sequence
  Description of Artificial Sequence: Synthetic oligonucleotide
  Sense strand starting at position 2852 of SEQ ID NO: 1564269
uugaacagaguuugcauau

SEQ ID NO: 1867456 - RNA, 19 nt, Artificial Sequence
  Description of Artificial Sequence: Synthetic oligonucleotide
  Antisense strand to SEQ ID NO: 1867455
auaugcaaacucuguucaa

SEQ ID NO: 1867457 - RNA, 19 nt, Artificial Sequence
  Description of Artificial Sequence: Synthetic oligonucleotide
  Sense strand starting at position 2992 of SEQ ID NO: 1564269
ucaaauauccgucagcuga

SEQ ID NO: 1867458 - RNA, 19 nt, Artificial Sequence
  Description of Artificial Sequence: Synthetic oligonucleotide
  Antisense strand to SEQ ID NO: 1867457
ucagcugacggauauuuga

SEQ ID NO: 1867459 - RNA, 19 nt, Artificial Sequence
  Description of Artificial Sequence: Synthetic oligonucleotide
  Sense strand starting at position 3240 of SEQ ID NO: 1564269
gcaggaaugaggugacuuu

SEQ ID NO: 1867460 - RNA, 19 nt, Artificial Sequence
  Description of Artificial Sequence: Synthetic oligonucleotide
  Antisense strand to SEQ ID NO: 1867459
aaagucaccucauuccugc

SEQ ID NO: 1867461 - RNA, 19 nt, Artificial Sequence
  Description of Artificial Sequence: Synthetic oligonucleotide
  Sense strand starting at position 3323 of SEQ ID NO: 1564269
ugcacaauacugugaauua

SEQ ID NO: 1867462 - RNA, 19 nt, Artificial Sequence
  Description of Artificial Sequence: Synthetic oligonucleotide
  Antisense strand to SEQ ID NO: 1867461
uaauucacaguauugugca

SEQ ID NO: 1867463 - RNA, 19 nt, Artificial Sequence
  Description of Artificial Sequence: Synthetic oligonucleotide
  Sense strand starting at position 3353 of SEQ ID NO: 1564269
ugaguuguauacuuuaaga

SEQ ID NO: 1867464 - RNA, 19 nt, Artificial Sequence
  Description of Artificial Sequence: Synthetic oligonucleotide
  Antisense strand to SEQ ID NO: 1867463
ucuuaaaguauacaacuca

SEQ ID NO: 1867465 - RNA, 19 nt, Artificial Sequence
  Description of Artificial Sequence: Synthetic oligonucleotide
  Sense strand starting at position 3424 of SEQ ID NO: 1564269
ccagauaugguuuguagag

SEQ ID NO: 1867466 - RNA, 19 nt, Artificial Sequence
  Description of Artificial Sequence: Synthetic oligonucleotide
  Antisense strand to SEQ ID NO: 1867465
cucuacaaaccauaucugg

SEQ ID NO: 1867467 - RNA, 19 nt, Artificial Sequence
  Description of Artificial Sequence: Synthetic oligonucleotide
  Sense strand starting at position 3476 of SEQ ID NO: 1564269
uugcuaagagacuagucaa

SEQ ID NO: 1867468 - RNA, 19 nt, Artificial Sequence
  Description of Artificial Sequence: Synthetic oligonucleotide
  Antisense strand to SEQ ID NO: 1867467
uugacuagucucuuagcaa

SEQ ID NO: 1867469 - RNA, 19 nt, Artificial Sequence
  Description of Artificial Sequence: Synthetic oligonucleotide
  Sense strand starting at position 3514 of SEQ ID NO: 1564269
gguuaacucaaucguggau

SEQ ID NO: 1867470 - RNA, 19 nt, Artificial Sequence
  Description of Artificial Sequence: Synthetic oligonucleotide
  Antisense strand to SEQ ID NO: 1867469
auccacgauugaguuaacc

SEQ ID NO: 1867471 - RNA, 19 nt, Artificial Sequence
  Description of Artificial Sequence: Synthetic oligonucleotide
  Sense strand starting at position 3517 of SEQ ID NO: 1564269
uaacucaaucguggaugau

SEQ ID NO: 1867472 - RNA, 19 nt, Artificial Sequence
  Description of Artificial Sequence: Synthetic oligonucleotide
  Antisense strand to SEQ ID NO: 1867471
aucauccacgauugaguua

SEQ ID NO: 1867473 - RNA, 19 nt, Artificial Sequence
  Description of Artificial Sequence: Synthetic oligonucleotide
  Sense strand starting at position 3520 of SEQ ID NO: 1564269
cucaaucguggaugaugau

SEQ ID NO: 1867474 - RNA, 19 nt, Artificial Sequence
  Description of Artificial Sequence: Synthetic oligonucleotide
  Antisense strand to SEQ ID NO: 1867473
aucaucauccacgauugag

SEQ ID NO: 1867475 - RNA, 19 nt, Artificial Sequence
  Description of Artificial Sequence: Synthetic oligonucleotide
  Sense strand starting at position 3545 of SEQ ID NO: 1564269
gauacauauuugugaaaga

SEQ ID NO: 1867476 - RNA, 19 nt, Artificial Sequence
  Description of Artificial Sequence: Synthetic oligonucleotide
  Antisense strand to SEQ ID NO: 1867475
ucuuucacaaauauguauc

SEQ ID NO: 1867477 - RNA, 19 nt, Artificial Sequence
  Description of Artificial Sequence: Synthetic oligonucleotide
  Sense strand starting at position 3546 of SEQ ID NO: 1564269
auacauauuugugaaagag

SEQ ID NO: 1867478 - RNA, 19 nt, Artificial Sequence
  Description of Artificial Sequence: Synthetic oligonucleotide
  Antisense strand to SEQ ID NO: 1867477
cucuuucacaaauauguau

SEQ ID NO: 1867479 - RNA, 19 nt, Artificial Sequence
  Description of Artificial Sequence: Synthetic oligonucleotide
  Sense strand starting at position 3576 of SEQ ID NO: 1564269
gucaauaaggcuugggaaa

SEQ ID NO: 1867480 - RNA, 19 nt, Artificial Sequence
  Description of Artificial Sequence: Synthetic oligonucleotide
  Antisense strand to SEQ ID NO: 1867479
uuucccaagccuuauugac

SEQ ID NO: 1867481 - RNA, 19 nt, Artificial Sequence
  Description of Artificial Sequence: Synthetic oligonucleotide
  Sense strand starting at position 3611 of SEQ ID NO: 1564269
uuguuacaggaguaauuau

SEQ ID NO: 1867482 - RNA, 19 nt, Artificial Sequence
  Description of Artificial Sequence: Synthetic oligonucleotide
  Antisense strand to SEQ ID NO: 1867481
auaauuacuccuguaacaa

SEQ ID NO: 1867483 - RNA, 19 nt, Artificial Sequence
  Description of Artificial Sequence: Synthetic oligonucleotide
  Sense strand starting at position 3652 of SEQ ID NO: 1564269
gucucaggucaauaaggua

SEQ ID NO: 1867484 - RNA, 19 nt, Artificial Sequence
  Description of Artificial Sequence: Synthetic oligonucleotide
  Antisense strand to SEQ ID NO: 1867483
uaccuuauugaccugagac

SEQ ID NO: 1867485 - RNA, 19 nt, Artificial Sequence
  Description of Artificial Sequence: Synthetic oligonucleotide
  Sense strand starting at position 3739 of SEQ ID NO: 1564269
aaagguaugugggcauaca

SEQ ID NO: 1867486 - RNA, 19 nt, Artificial Sequence
  Description of Artificial Sequence: Synthetic oligonucleotide
  Antisense strand to SEQ ID NO: 1867485
uguaugcccacauaccuuu

SEQ ID NO: 1867487 - RNA, 19 nt, Artificial Sequence
  Description of Artificial Sequence: Synthetic oligonucleotide
  Sense strand starting at position 3740 of SEQ ID NO: 1564269
aagguaugugggcauacaa

SEQ ID NO: 1867488 - RNA, 19 nt, Artificial Sequence
  Description of Artificial Sequence: Synthetic oligonucleotide
  Antisense strand to SEQ ID NO: 1867487
uuguaugcccacauaccuu

SEQ ID NO: 1867489 - RNA, 19 nt, Artificial Sequence
  Description of Artificial Sequence: Synthetic oligonucleotide
  Sense strand starting at position 3765 of SEQ ID NO: 1564269
aauauaggugcaggugaaa

SEQ ID NO: 1867490 - RNA, 19 nt, Artificial Sequence
  Description of Artificial Sequence: Synthetic oligonucleotide
  Antisense strand to SEQ ID NO: 1867489
uuucaccugcaccuauauu

SEQ ID NO: 1867491 - RNA, 19 nt, Artificial Sequence
  Description of Artificial Sequence: Synthetic oligonucleotide
  Sense strand starting at position 18 of SEQ ID NO: 1564270
gucgacaauccaugugcau

SEQ ID NO: 1867492 - RNA, 19 nt, Artificial Sequence
  Description of Artificial Sequence: Synthetic oligonucleotide
  Antisense strand to SEQ ID NO: 1867491
augcacauggauugucgac

SEQ ID NO: 1867493 - RNA, 19 nt, Artificial Sequence
  Description of Artificial Sequence: Synthetic oligonucleotide
  Sense strand starting at position 20 of SEQ ID NO: 1564270
cgacaauccaugugcaugu

SEQ ID NO: 1867494 - RNA, 19 nt, Artificial Sequence
  Description of Artificial Sequence: Synthetic oligonucleotide
  Antisense strand to SEQ ID NO: 1867493
acaugcacauggauugucg

SEQ ID NO: 1867495 - RNA, 19 nt, Artificial Sequence
  Description of Artificial Sequence: Synthetic oligonucleotide
  Sense strand starting at position 24 of SEQ ID NO: 1564270
aauccaugugcauguggua

SEQ ID NO: 1867496 - RNA, 19 nt, Artificial Sequence
  Description of Artificial Sequence: Synthetic oligonucleotide
  Antisense strand to SEQ ID NO: 1867495
uaccacaugcacauggauu

SEQ ID NO: 1867497 - RNA, 19 nt, Artificial Sequence
  Description of Artificial Sequence: Synthetic oligonucleotide
  Sense strand starting at position 27 of SEQ ID NO: 1564270
ccaugugcaugugguauau

SEQ ID NO: 1867498 - RNA, 19 nt, Artificial Sequence
  Description of Artificial Sequence: Synthetic oligonucleotide
  Antisense strand to SEQ ID NO: 1867497
auauaccacaugcacaugg

SEQ ID NO: 1867499 - RNA, 19 nt, Artificial Sequence
  Description of Artificial Sequence: Synthetic oligonucleotide
  Sense strand starting at position 33 of SEQ ID NO: 1564270
gcaugugguauaugucacu

SEQ ID NO: 1867500 - RNA, 19 nt, Artificial Sequence
  Description of Artificial Sequence: Synthetic oligonucleotide
  Antisense strand to SEQ ID NO: 1867499
agugacauauaccacaugc

SEQ ID NO: 1867501 - RNA, 19 nt, Artificial Sequence
  Description of Artificial Sequence: Synthetic oligonucleotide
  Sense strand starting at position 115 of SEQ ID NO: 1564270
ugcuguaacugauugcuga

SEQ ID NO: 1867502 - RNA, 19 nt, Artificial Sequence
  Description of Artificial Sequence: Synthetic oligonucleotide
  Antisense strand to SEQ ID NO: 1867501
ucagcaaucaguuacagca

SEQ ID NO: 1867503 - RNA, 19 nt, Artificial Sequence
  Description of Artificial Sequence: Synthetic oligonucleotide
  Sense strand starting at position 172 of SEQ ID NO: 1564270
gguccauguccacaugaug

SEQ ID NO: 1867504 - RNA, 19 nt, Artificial Sequence
  Description of Artificial Sequence: Synthetic oligonucleotide
  Antisense strand to SEQ ID NO: 1867503
caucauguggacauggacc

SEQ ID NO: 1867505 - RNA, 19 nt, Artificial Sequence
  Description of Artificial Sequence: Synthetic oligonucleotide
  Sense strand starting at position 179 of SEQ ID NO: 1564270
guccacaugaugugugaau

SEQ ID NO: 1867506 - RNA, 19 nt, Artificial Sequence
  Description of Artificial Sequence: Synthetic oligonucleotide
  Antisense strand to SEQ ID NO: 1867505
auucacacaucauguggac

SEQ ID NO: 1867507 - RNA, 19 nt, Artificial Sequence
  Description of Artificial Sequence: Synthetic oligonucleotide
  Sense strand starting at position 188 of SEQ ID NO: 1564270
augugugaauggcucugau

SEQ ID NO: 1867508 - RNA, 19 nt, Artificial Sequence
  Description of Artificial Sequence: Synthetic oligonucleotide
  Antisense strand to SEQ ID NO: 1867507
aucagagccauucacacau

SEQ ID NO: 1867509 - RNA, 19 nt, Artificial Sequence
  Description of Artificial Sequence: Synthetic oligonucleotide
  Sense strand starting at position 201 of SEQ ID NO: 1564270
ucugauggcuuguggucaa
